United States Patent Application Publication US 2011/0177960 A1 - sequence listing, part 5

SEQ ID NO: 49451 - DNA, 25 bp, Artificial
  probe
  misc_feature (1)..(25): SEQ ID NO: 4705; WAN024ABR_at; Start 7; Stop 31
atttatgagccttttaattgccttc

SEQ ID NO: 49452 - DNA, 25 bp, Artificial
  probe
  misc_feature (1)..(25): SEQ ID NO: 4705; WAN024ABR_at; Start 27; Stop 51
ccttctataatgatttaggatacaa

SEQ ID NO: 49453 - DNA, 25 bp, Artificial
  probe
  misc_feature (1)..(25): SEQ ID NO: 4705; WAN024ABR_at; Start 22; Stop 46
aattgccttctataatgatttagga

SEQ ID NO: 49454 - DNA, 25 bp, Artificial
  probe
  misc_feature (1)..(25): SEQ ID NO: 4705; WAN024ABR_at; Start 40; Stop 64
tttaggatacaatgaaacacgaaac

SEQ ID NO: 49455 - DNA, 25 bp, Artificial
  probe
  misc_feature (1)..(25): SEQ ID NO: 4705; WAN024ABR_at; Start 56; Stop 80
acacgaaacattgaaaggaaaacag

SEQ ID NO: 49456 - DNA, 25 bp, Artificial
  probe
  misc_feature (1)..(25): SEQ ID NO: 4705; WAN024ABR_at; Start 3; Stop 27
ctccatttatgagccttttaattgc

SEQ ID NO: 49457 - DNA, 25 bp, Artificial
  probe
  misc_feature (1)..(25): SEQ ID NO: 4705; WAN024ABR_at; Start 43; Stop 67
aggatacaatgaaacacgaaacatt

SEQ ID NO: 49458 - DNA, 25 bp, Artificial
  probe
  misc_feature (1)..(25): SEQ ID NO: 4705; WAN024ABR_at; Start 44; Stop 68
ggatacaatgaaacacgaaacattg

SEQ ID NO: 49459 - DNA, 25 bp, Artificial
  probe
  misc_feature (1)..(25): SEQ ID NO: 4705; WAN024ABR_at; Start 42; Stop 66
taggatacaatgaaacacgaaacat

SEQ ID NO: 49460 - DNA, 25 bp, Artificial
  probe
  misc_feature (1)..(25): SEQ ID NO: 4705; WAN024ABR_at; Start 10; Stop 34
tatgagccttttaattgccttctat

SEQ ID NO: 49461 - DNA, 25 bp, Artificial
  probe
  misc_feature (1)..(25): SEQ ID NO: 4705; WAN024ABR_at; Start 8; Stop 32
tttatgagccttttaattgccttct

SEQ ID NO: 49462 - DNA, 25 bp, Artificial
  probe
  misc_feature (1)..(25): SEQ ID NO: 4705; WAN024ABR_at; Start 36; Stop 60
atgatttaggatacaatgaaacacg

SEQ ID NO: 49463 - DNA, 25 bp, Artificial
  probe
  misc_feature (1)..(25): SEQ ID NO: 4705; WAN024ABR_at; Start 41; Stop 65
ttaggatacaatgaaacacgaaaca

SEQ ID NO: 49464 - DNA, 25 bp, Artificial
  probe
  misc_feature (1)..(25): SEQ ID NO: 4705; WAN024ABR_at; Start 50; Stop 74
aatgaaacacgaaacattgaaagga

SEQ ID NO: 49465 - DNA, 25 bp, Artificial
  probe
  misc_feature (1)..(25): SEQ ID NO: 4705; WAN024ABR_at; Start 13; Stop 37
gagccttttaattgccttctataat

SEQ ID NO: 49466 - DNA, 25 bp, Artificial
  probe
  misc_feature (1)..(25): SEQ ID NO: 4705; WAN024ABR_at; Start 21; Stop 45
taattgccttctataatgatttagg

SEQ ID NO: 49467 - DNA, 25 bp, Artificial
  probe
  misc_feature (1)..(25): SEQ ID NO: 4705; WAN024ABR_at; Start 30; Stop 54
tctataatgatttaggatacaatga

SEQ ID NO: 49468 - DNA, 25 bp, Artificial
  probe
  misc_feature (1)..(25): SEQ ID NO: 389; WAN024ABS_at; Start 57; Stop 81
aattaaaaggctcataaatggagca

SEQ ID NO: 49469 - DNA, 25 bp, Artificial
  probe
  misc_feature (1)..(25): SEQ ID NO: 389; WAN024ABS_at; Start 51; Stop 75
gaaggcaattaaaaggctcataaat

SEQ ID NO: 49470 - DNA, 25 bp, Artificial
  probe
  misc_feature (1)..(25): SEQ ID NO: 389; WAN024ABS_at; Start 29; Stop 53
cattgtatcctaaatcattatagaa

SEQ ID NO: 49471 - DNA, 25 bp, Artificial
  probe
  misc_feature (1)..(25): SEQ ID NO: 389; WAN024ABS_at; Start 14; Stop 38
caatgtttcgtgtttcattgtatcc

SEQ ID NO: 49472 - DNA, 25 bp, Artificial
  probe
  misc_feature (1)..(25): SEQ ID NO: 389; WAN024ABS_at; Start 6; Stop 30
tttcctttcaatgtttcgtgtttca

SEQ ID NO: 49473 - DNA, 25 bp, Artificial
  probe
  misc_feature (1)..(25): SEQ ID NO: 389; WAN024ABS_at; Start 44; Stop 68
cattatagaaggcaattaaaaggct

SEQ ID NO: 49474 - DNA, 25 bp, Artificial
  probe
  misc_feature (1)..(25): SEQ ID NO: 389; WAN024ABS_at; Start 47; Stop 71
tatagaaggcaattaaaaggctcat

SEQ ID NO: 49475 - DNA, 25 bp, Artificial
  probe
  misc_feature (1)..(25): SEQ ID NO: 389; WAN024ABS_at; Start 50; Stop 74
agaaggcaattaaaaggctcataaa

SEQ ID NO: 49476 - DNA, 25 bp, Artificial
  probe
  misc_feature (1)..(25): SEQ ID NO: 389; WAN024ABS_at; Start 56; Stop 80
caattaaaaggctcataaatggagc

SEQ ID NO: 49477 - DNA, 25 bp, Artificial
  probe
  misc_feature (1)..(25): SEQ ID NO: 389; WAN024ABS_at; Start 33; Stop 57
gtatcctaaatcattatagaaggca

SEQ ID NO: 49478 - DNA, 25 bp, Artificial
  probe
  misc_feature (1)..(25): SEQ ID NO: 389; WAN024ABS_at; Start 49; Stop 73
tagaaggcaattaaaaggctcataa

SEQ ID NO: 49479 - DNA, 25 bp, Artificial
  probe
  misc_feature (1)..(25): SEQ ID NO: 389; WAN024ABS_at; Start 18; Stop 42
gtttcgtgtttcattgtatcctaaa

SEQ ID NO: 49480 - DNA, 25 bp, Artificial
  probe
  misc_feature (1)..(25): SEQ ID NO: 389; WAN024ABS_at; Start 21; Stop 45
tcgtgtttcattgtatcctaaatca

SEQ ID NO: 49481 - DNA, 25 bp, Artificial
  probe
  misc_feature (1)..(25): SEQ ID NO: 389; WAN024ABS_at; Start 55; Stop 79
gcaattaaaaggctcataaatggag

SEQ ID NO: 49482 - DNA, 25 bp, Artificial
  probe
  misc_feature (1)..(25): SEQ ID NO: 389; WAN024ABS_at; Start 46; Stop 70
ttatagaaggcaattaaaaggctca

SEQ ID NO: 49483 - DNA, 25 bp, Artificial
  probe
  misc_feature (1)..(25): SEQ ID NO: 389; WAN024ABS_at; Start 34; Stop 58
tatcctaaatcattatagaaggcaa

SEQ ID NO: 49484 - DNA, 25 bp, Artificial
  probe
  misc_feature (1)..(25): SEQ ID NO: 389; WAN024ABS_at; Start 37; Stop 61
cctaaatcattatagaaggcaatta

SEQ ID NO: 49485 - DNA, 25 bp, Artificial
  probe
  misc_feature (1)..(25): SEQ ID NO: 389; WAN024ABS_at; Start 48; Stop 72
atagaaggcaattaaaaggctcata

SEQ ID NO: 49486 - DNA, 25 bp, Artificial
  probe
  misc_feature (1)..(25): SEQ ID NO: 389; WAN024ABS_at; Start 20; Stop 44
ttcgtgtttcattgtatcctaaatc

SEQ ID NO: 49487 - DNA, 25 bp, Artificial
  probe
  misc_feature (1)..(25): SEQ ID NO: 389; WAN024ABS_at; Start 24; Stop 48
tgtttcattgtatcctaaatcatta

SEQ ID NO: 49488 - DNA, 25 bp, Artificial
  probe
  misc_feature (1)..(25): SEQ ID NO: 389; WAN024ABS_at; Start 53; Stop 77
aggcaattaaaaggctcataaatgg

SEQ ID NO: 49489 - DNA, 25 bp, Artificial
  probe
  misc_feature (1)..(25): SEQ ID NO: 389; WAN024ABS_at; Start 7; Stop 31
ttcctttcaatgtttcgtgtttcat

SEQ ID NO: 49490 - DNA, 25 bp, Artificial
  probe
  misc_feature (1)..(25): SEQ ID NO: 389; WAN024ABS_at; Start 39; Stop 63
taaatcattatagaaggcaattaaa

SEQ ID NO: 49491 - DNA, 25 bp, Artificial
  probe
  misc_feature (1)..(25): SEQ ID NO: 389; WAN024ABS_at; Start 32; Stop 56
tgtatcctaaatcattatagaaggc

SEQ ID NO: 49492 - DNA, 25 bp, Artificial
  probe
  misc_feature (1)..(25): SEQ ID NO: 389; WAN024ABS_at; Start 17; Stop 41
tgtttcgtgtttcattgtatcctaa

SEQ ID NO: 49493 - DNA, 25 bp, Artificial
  probe
  misc_feature (1)..(25): SEQ ID NO: 389; WAN024ABS_at; Start 36; Stop 60
tcctaaatcattatagaaggcaatt

SEQ ID NO: 49494 - DNA, 25 bp, Artificial
  probe
  misc_feature (1)..(25): SEQ ID NO: 389; WAN024ABS_at; Start 38; Stop 62
ctaaatcattatagaaggcaattaa

SEQ ID NO: 49495 - DNA, 25 bp, Artificial
  probe
  misc_feature (1)..(25): SEQ ID NO: 389; WAN024ABS_at; Start 9; Stop 33
cctttcaatgtttcgtgtttcattg

SEQ ID NO: 49496 - DNA, 25 bp, Artificial
  probe
  misc_feature (1)..(25): SEQ ID NO: 389; WAN024ABS_at; Start 1; Stop 25
actgttttcctttcaatgtttcgtg

SEQ ID NO: 49497 - DNA, 25 bp, Artificial
  probe
  misc_feature (1)..(25): SEQ ID NO: 389; WAN024ABS_at; Start 45; Stop 69
attatagaaggcaattaaaaggctc

SEQ ID NO: 49498 - DNA, 25 bp, Artificial
  probe
  misc_feature (1)..(25): SEQ ID NO: 389; WAN024ABS_at; Start 2; Stop 26
ctgttttcctttcaatgtttcgtgt

SEQ ID NO: 49499 - DNA, 25 bp, Artificial
  probe
  misc_feature (1)..(25): SEQ ID NO: 389; WAN024ABS_at; Start 52; Stop 76
aaggcaattaaaaggctcataaatg

SEQ ID NO: 49500 - DNA, 25 bp, Artificial
  probe
  misc_feature (1)..(25): SEQ ID NO: 389; WAN024ABS_at; Start 15; Stop 39
aatgtttcgtgtttcattgtatcct

SEQ ID NO: 49501 - DNA, 25 bp, Artificial
  probe
  misc_feature (1)..(25): SEQ ID NO: 389; WAN024ABS_at; Start 22; Stop 46
cgtgtttcattgtatcctaaatcat

SEQ ID NO: 49502 - DNA, 25 bp, Artificial
  probe
  misc_feature (1)..(25): SEQ ID NO: 3587; WAN024ABT_at; Start 109; Stop 133
ctttctatgatacaatggaaaaaat

SEQ ID NO: 49503 - DNA, 25 bp, Artificial
  probe
  misc_feature (1)..(25): SEQ ID NO: 3587; WAN024ABT_at; Start 103; Stop 127
tctcttctttctatgatacaatgga

SEQ ID NO: 49504 - DNA, 25 bp, Artificial
  probe
  misc_feature (1)..(25): SEQ ID NO: 3587; WAN024ABT_at; Start 40; Stop 64
cattaattcatcgataagtaaacgc

SEQ ID NO: 49505 - DNA, 25 bp, Artificial
  probe
  misc_feature (1)..(25): SEQ ID NO: 3587; WAN024ABT_at; Start 116; Stop 140
tgatacaatggaaaaaataaattca

SEQ ID NO: 49506 - DNA, 25 bp, Artificial
  probe
  misc_feature (1)..(25): SEQ ID NO: 3587; WAN024ABT_at; Start 6; Stop 30
cttccttgtgatgtttttatcaagt

SEQ ID NO: 49507 - DNA, 25 bp, Artificial
  probe
  misc_feature (1)..(25): SEQ ID NO: 3587; WAN024ABT_at; Start 70; Stop 94
tagggacattctcaatcttctgtct

SEQ ID NO: 49508 - DNA, 25 bp, Artificial
  probe
  misc_feature (1)..(25): SEQ ID NO: 3587; WAN024ABT_at; Start 73; Stop 97
ggacattctcaatcttctgtctttt

SEQ ID NO: 49509 - DNA, 25 bp, Artificial
  probe
  misc_feature (1)..(25): SEQ ID NO: 3587; WAN024ABT_at; Start 41; Stop 65
attaattcatcgataagtaaacgct

SEQ ID NO: 49510 - DNA, 25 bp, Artificial
  probe
  misc_feature (1)..(25): SEQ ID NO: 3587; WAN024ABT_at; Start 74; Stop 98
gacattctcaatcttctgtcttttg

SEQ ID NO: 49511 - DNA, 25 bp, Artificial
  probe
  misc_feature (1)..(25): SEQ ID NO: 3587; WAN024ABT_at; Start 105; Stop 129
tcttctttctatgatacaatggaaa

SEQ ID NO: 49512 - DNA, 25 bp, Artificial
  probe
  misc_feature (1)..(25): SEQ ID NO: 3587; WAN024ABT_at; Start 111; Stop 135
ttctatgatacaatggaaaaaataa

SEQ ID NO: 49513 - DNA, 25 bp, Artificial
  probe
  misc_feature (1)..(25): SEQ ID NO: 3587; WAN024ABT_at; Start 3; Stop 27
ctgcttccttgtgatgtttttatca

SEQ ID NO: 49514 - DNA, 25 bp, Artificial
  probe
  misc_feature (1)..(25): SEQ ID NO: 3587; WAN024ABT_at; Start 85; Stop 109
tcttctgtcttttgtttttctcttc

SEQ ID NO: 49515 - DNA, 25 bp, Artificial
  probe
  misc_feature (1)..(25): SEQ ID NO: 3587; WAN024ABT_at; Start 68; Stop 92
catagggacattctcaatcttctgt

SEQ ID NO: 49516 - DNA, 25 bp, Artificial
  probe
  misc_feature (1)..(25): SEQ ID NO: 3587; WAN024ABT_at; Start 76; Stop 100
cattctcaatcttctgtcttttgtt

SEQ ID NO: 49517 - DNA, 25 bp, Artificial
  probe
  misc_feature (1)..(25): SEQ ID NO: 3587; WAN024ABT_at; Start 9; Stop 33
ccttgtgatgtttttatcaagttta

SEQ ID NO: 49518 - DNA, 25 bp, Artificial
  probe
  misc_feature (1)..(25): SEQ ID NO: 3587; WAN024ABT_at; Start 106; Stop 130
cttctttctatgatacaatggaaaa

SEQ ID NO: 49519 - DNA, 25 bp, Artificial
  probe
  misc_feature (1)..(25): SEQ ID NO: 3587; WAN024ABT_at; Start 5; Stop 29
gcttccttgtgatgtttttatcaag

SEQ ID NO: 49520 - DNA, 25 bp, Artificial
  probe
  misc_feature (1)..(25): SEQ ID NO: 3587; WAN024ABT_at; Start 117; Stop 141
gatacaatggaaaaaataaattcaa

SEQ ID NO: 49521 - DNA, 25 bp, Artificial
  probe
  misc_feature (1)..(25): SEQ ID NO: 3587; WAN024ABT_at; Start 72; Stop 96
gggacattctcaatcttctgtcttt

SEQ ID NO: 49522 - DNA, 25 bp, Artificial
  probe
  misc_feature (1)..(25): SEQ ID NO: 3587; WAN024ABT_at; Start 1; Stop 25
gactgcttccttgtgatgtttttat

SEQ ID NO: 49523 - DNA, 25 bp, Artificial
  probe
  misc_feature (1)..(25): SEQ ID NO: 3587; WAN024ABT_at; Start 104; Stop 128
ctcttctttctatgatacaatggaa

SEQ ID NO: 49524 - DNA, 25 bp, Artificial
  probe
  misc_feature (1)..(25): SEQ ID NO: 3587; WAN024ABT_at; Start 102; Stop 126
ttctcttctttctatgatacaatgg

SEQ ID NO: 49525 - DNA, 25 bp, Artificial
  probe
  misc_feature (1)..(25): SEQ ID NO: 3587; WAN024ABT_at; Start 39; Stop 63
tcattaattcatcgataagtaaacg

SEQ ID NO: 49526 - DNA, 25 bp, Artificial
  probe
  misc_feature (1)..(25): SEQ ID NO: 3587; WAN024ABT_at; Start 112; Stop 136
tctatgatacaatggaaaaaataaa

SEQ ID NO: 49527 - DNA, 25 bp, Artificial
  probe
  misc_feature (1)..(25): SEQ ID NO: 3587; WAN024ABT_at; Start 4; Stop 28
tgcttccttgtgatgtttttatcaa

SEQ ID NO: 49528 - DNA, 25 bp, Artificial
  probe
  misc_feature (1)..(25): SEQ ID NO: 3587; WAN024ABT_at; Start 71; Stop 95
agggacattctcaatcttctgtctt

SEQ ID NO: 49529 - DNA, 25 bp, Artificial
  probe
  misc_feature (1)..(25): SEQ ID NO: 3587; WAN024ABT_at; Start 82; Stop 106
caatcttctgtcttttgtttttctc

SEQ ID NO: 49530 - DNA, 25 bp, Artificial
  probe
  misc_feature (1)..(25): SEQ ID NO: 3587; WAN024ABT_at; Start 69; Stop 93
atagggacattctcaatcttctgtc

SEQ ID NO: 49531 - DNA, 25 bp, Artificial
  probe
  misc_feature (1)..(25): SEQ ID NO: 3587; WAN024ABT_at; Start 98; Stop 122
gtttttctcttctttctatgataca

SEQ ID NO: 49532 - DNA, 25 bp, Artificial
  probe
  misc_feature (1)..(25): SEQ ID NO: 3587; WAN024ABT_at; Start 42; Stop 66
ttaattcatcgataagtaaacgcta

SEQ ID NO: 49533 - DNA, 25 bp, Artificial
  probe
  misc_feature (1)..(25): SEQ ID NO: 3587; WAN024ABT_at; Start 2; Stop 26
actgcttccttgtgatgtttttatc

SEQ ID NO: 49534 - DNA, 25 bp, Artificial
  probe
  misc_feature (1)..(25): SEQ ID NO: 3587; WAN024ABT_at; Start 108; Stop 132
tctttctatgatacaatggaaaaaa

SEQ ID NO: 49535 - DNA, 25 bp, Artificial
  probe
  misc_feature (1)..(25): SEQ ID NO: 3587; WAN024ABT_at; Start 29; Stop 53
gtttattttatcattaattcatcga

SEQ ID NO: 49536 - DNA, 25 bp, Artificial
  probe
  misc_feature (1)..(25): SEQ ID NO: 56; WAN024ABU_at; Start 127; Stop 151
ttgataaaaacatcacaaggaagca

SEQ ID NO: 49537 - DNA, 25 bp, Artificial
  probe
  misc_feature (1)..(25): SEQ ID NO: 56; WAN024ABU_at; Start 129; Stop 153
gataaaaacatcacaaggaagcagt

SEQ ID NO: 49538 - DNA, 25 bp, Artificial
  probe
  misc_feature (1)..(25): SEQ ID NO: 56; WAN024ABU_at; Start 57; Stop 81
caaaagacagaagattgagaatgtc

SEQ ID NO: 49539 - DNA, 25 bp, Artificial
  probe
  misc_feature (1)..(25): SEQ ID NO: 56; WAN024ABU_at; Start 107; Stop 131
gaattaatgataaaataaacttgat

SEQ ID NO: 49540 - DNA, 25 bp, Artificial
  probe
  misc_feature (1)..(25): SEQ ID NO: 56; WAN024ABU_at; Start 96; Stop 120
tacttatcgatgaattaatgataaa

SEQ ID NO: 49541 - DNA, 25 bp, Artificial
  probe
  misc_feature (1)..(25): SEQ ID NO: 56; WAN024ABU_at; Start 91; Stop 115
gcgtttacttatcgatgaattaatg

SEQ ID NO: 49542 - DNA, 25 bp, Artificial
  probe
  misc_feature (1)..(25): SEQ ID NO: 56; WAN024ABU_at; Start 122; Stop 146
taaacttgataaaaacatcacaagg

SEQ ID NO: 49543 - DNA, 25 bp, Artificial
  probe
  misc_feature (1)..(25): SEQ ID NO: 56; WAN024ABU_at; Start 30; Stop 54
cattgtatcatagaaagaagagaaa

SEQ ID NO: 49544 - DNA, 25 bp, Artificial
  probe
  misc_feature (1)..(25): SEQ ID NO: 56; WAN024ABU_at; Start 89; Stop 113
tagcgtttacttatcgatgaattaa

SEQ ID NO: 49545 - DNA, 25 bp, Artificial
  probe
  misc_feature (1)..(25): SEQ ID NO: 56; WAN024ABU_at; Start 59; Stop 83
aaagacagaagattgagaatgtccc

SEQ ID NO: 49546 - DNA, 25 bp, Artificial
  probe
  misc_feature (1)..(25): SEQ ID NO: 56; WAN024ABU_at; Start 125; Stop 149
acttgataaaaacatcacaaggaag

SEQ ID NO: 49547 - DNA, 25 bp, Artificial
  probe
  misc_feature (1)..(25): SEQ ID NO: 56; WAN024ABU_at; Start 51; Stop 75
gaaaaacaaaagacagaagattgag

SEQ ID NO: 49548 - DNA, 25 bp, Artificial
  probe
  misc_feature (1)..(25): SEQ ID NO: 56; WAN024ABU_at; Start 46; Stop 70
gaagagaaaaacaaaagacagaaga

SEQ ID NO: 49549 - DNA, 25 bp, Artificial
  probe
  misc_feature (1)..(25): SEQ ID NO: 56; WAN024ABU_at; Start 38; Stop 62
catagaaagaagagaaaaacaaaag

SEQ ID NO: 49550 - DNA, 25 bp, Artificial
  probe
  misc_feature (1)..(25): SEQ ID NO: 56; WAN024ABU_at; Start 92; Stop 116
cgtttacttatcgatgaattaatga

SEQ ID NO: 49551 - DNA, 25 bp, Artificial
  probe
  misc_feature (1)..(25): SEQ ID NO: 56; WAN024ABU_at; Start 16; Stop 40
gaatttattttttccattgtatcat

SEQ ID NO: 49552 - DNA, 25 bp, Artificial
  probe
  misc_feature (1)..(25): SEQ ID NO: 56; WAN024ABU_at; Start 63; Stop 87
acagaagattgagaatgtccctatg

SEQ ID NO: 49553 - DNA, 25 bp, Artificial
  probe
  misc_feature (1)..(25): SEQ ID NO: 56; WAN024ABU_at; Start 33; Stop 57
tgtatcatagaaagaagagaaaaac

SEQ ID NO: 49554 - DNA, 25 bp, Artificial
  probe
  misc_feature (1)..(25): SEQ ID NO: 56; WAN024ABU_at; Start 53; Stop 77
aaaacaaaagacagaagattgagaa

SEQ ID NO: 49555 - DNA, 25 bp, Artificial
  probe
  misc_feature (1)..(25): SEQ ID NO: 56; WAN024ABU_at; Start 58; Stop 82
aaaagacagaagattgagaatgtcc

SEQ ID NO: 49556 - DNA, 25 bp, Artificial
  probe
  misc_feature (1)..(25): SEQ ID NO: 56; WAN024ABU_at; Start 49; Stop 73
gagaaaaacaaaagacagaagattg

SEQ ID NO: 49557 - DNA, 25 bp, Artificial
  probe
  misc_feature (1)..(25): SEQ ID NO: 56; WAN024ABU_at; Start 123; Stop 147
aaacttgataaaaacatcacaagga

SEQ ID NO: 49558 - DNA, 25 bp, Artificial
  probe
  misc_feature (1)..(25): SEQ ID NO: 56; WAN024ABU_at; Start 27; Stop 51
ttccattgtatcatagaaagaagag

SEQ ID NO: 49559 - DNA, 25 bp, Artificial
  probe
  misc_feature (1)..(25): SEQ ID NO: 56; WAN024ABU_at; Start 128; Stop 152
tgataaaaacatcacaaggaagcag

SEQ ID NO: 49560 - DNA, 25 bp, Artificial
  probe
  misc_feature (1)..(25): SEQ ID NO: 56; WAN024ABU_at; Start 61; Stop 85
agacagaagattgagaatgtcccta

SEQ ID NO: 49561 - DNA, 25 bp, Artificial
  probe
  misc_feature (1)..(25): SEQ ID NO: 56; WAN024ABU_at; Start 25; Stop 49
ttttccattgtatcatagaaagaag

SEQ ID NO: 49562 - DNA, 25 bp, Artificial
  probe
  misc_feature (1)..(25): SEQ ID NO: 56; WAN024ABU_at; Start 29; Stop 53
ccattgtatcatagaaagaagagaa

SEQ ID NO: 49563 - DNA, 25 bp, Artificial
  probe
  misc_feature (1)..(25): SEQ ID NO: 56; WAN024ABU_at; Start 60; Stop 84
aagacagaagattgagaatgtccct

SEQ ID NO: 49564 - DNA, 25 bp, Artificial
  probe
  misc_feature (1)..(25): SEQ ID NO: 56; WAN024ABU_at; Start 28; Stop 52
tccattgtatcatagaaagaagaga

SEQ ID NO: 49565 - DNA, 25 bp, Artificial
  probe
  misc_feature (1)..(25): SEQ ID NO: 56; WAN024ABU_at; Start 126; Stop 150
cttgataaaaacatcacaaggaagc

SEQ ID NO: 49566 - DNA, 25 bp, Artificial
  probe
  misc_feature (1)..(25): SEQ ID NO: 56; WAN024ABU_at; Start 130; Stop 154
ataaaaacatcacaaggaagcagtc

SEQ ID NO: 49567 - DNA, 25 bp, Artificial
  probe
  misc_feature (1)..(25): SEQ ID NO: 56; WAN024ABU_at; Start 35; Stop 59
tatcatagaaagaagagaaaaacaa

SEQ ID NO: 49568 - DNA, 25 bp, Artificial
  probe
  misc_feature (1)..(25): SEQ ID NO: 56; WAN024ABU_at; Start 62; Stop 86
gacagaagattgagaatgtccctat

SEQ ID NO: 49569 - DNA, 25 bp, Artificial
  probe
  misc_feature (1)..(25): SEQ ID NO: 56; WAN024ABU_at; Start 55; Stop 79
aacaaaagacagaagattgagaatg

SEQ ID NO: 49570 - DNA, 25 bp, Artificial
  probe
  misc_feature (1)..(25): SEQ ID NO: 3772; WAN024ABV_at; Start 21; Stop 45
tttctaaggataaggaactgcgcat

SEQ ID NO: 49571 - DNA, 25 bp, Artificial
  probe
  misc_feature (1)..(25): SEQ ID NO: 3772; WAN024ABV_at; Start 23; Stop 47
tctaaggataaggaactgcgcattg

SEQ ID NO: 49572 - DNA, 25 bp, Artificial
  probe
  misc_feature (1)..(25): SEQ ID NO: 3772; WAN024ABV_at; Start 26; Stop 50
aaggataaggaactgcgcattggtc

SEQ ID NO: 49573 - DNA, 25 bp, Artificial
  probe
  misc_feature (1)..(25): SEQ ID NO: 3772; WAN024ABV_at; Start 19; Stop 43
cctttctaaggataaggaactgcgc

SEQ ID NO: 49574 - DNA, 25 bp, Artificial
  probe
  misc_feature (1)..(25): SEQ ID NO: 3772; WAN024ABV_at; Start 35; Stop 59
gaactgcgcattggtcttgtttagt

SEQ ID NO: 49575 - DNA, 25 bp, Artificial
  probe
  misc_feature (1)..(25): SEQ ID NO: 3772; WAN024ABV_at; Start 40; Stop 64
gcgcattggtcttgtttagtcttga

SEQ ID NO: 49576 - DNA, 25 bp, Artificial
  probe
  misc_feature (1)..(25): SEQ ID NO: 3772; WAN024ABV_at; Start 31; Stop 55
taaggaactgcgcattggtcttgtt

SEQ ID NO: 49577 - DNA, 25 bp, Artificial
  probe
  misc_feature (1)..(25): SEQ ID NO: 3772; WAN024ABV_at; Start 25; Stop 49
taaggataaggaactgcgcattggt

SEQ ID NO: 49578 - DNA, 25 bp, Artificial
  probe
  misc_feature (1)..(25): SEQ ID NO: 3772; WAN024ABV_at; Start 41; Stop 65
cgcattggtcttgtttagtcttgag

SEQ ID NO: 49579 - DNA, 25 bp, Artificial
  probe
  misc_feature (1)..(25): SEQ ID NO: 3772; WAN024ABV_at; Start 22; Stop 46
ttctaaggataaggaactgcgcatt

SEQ ID NO: 49580 - DNA, 25 bp, Artificial
  probe
  misc_feature (1)..(25): SEQ ID NO: 3772; WAN024ABV_at; Start 39; Stop 63
tgcgcattggtcttgtttagtcttg

SEQ ID NO: 49581 - DNA, 25 bp, Artificial
  probe
  misc_feature (1)..(25): SEQ ID NO: 3772; WAN024ABV_at; Start 10; Stop 34
ggatcacctcctttctaaggataag

SEQ ID NO: 49582 - DNA, 25 bp, Artificial
  probe
  misc_feature (1)..(25): SEQ ID NO: 3772; WAN024ABV_at; Start 47; Stop 71
ggtcttgtttagtcttgagaggtct

SEQ ID NO: 49583 - DNA, 25 bp, Artificial
  probe
  misc_feature (1)..(25): SEQ ID NO: 3772; WAN024ABV_at; Start 11; Stop 35
gatcacctcctttctaaggataagg

SEQ ID NO: 49584 - DNA, 25 bp, Artificial
  probe
  misc_feature (1)..(25): SEQ ID NO: 3772; WAN024ABV_at; Start 37; Stop 61
actgcgcattggtcttgtttagtct

SEQ ID NO: 49585 - DNA, 25 bp, Artificial
  probe
  misc_feature (1)..(25): SEQ ID NO: 3772; WAN024ABV_at; Start 20; Stop 44
ctttctaaggataaggaactgcgca

SEQ ID NO: 49586 - DNA, 25 bp, Artificial
  probe
  misc_feature (1)..(25): SEQ ID NO: 3772; WAN024ABV_at; Start 24; Stop 48
ctaaggataaggaactgcgcattgg

SEQ ID NO: 49587 - DNA, 25 bp, Artificial
  probe
  misc_feature (1)..(25): SEQ ID NO: 3772; WAN024ABV_at; Start 3; Stop 27
tgcggctggatcacctcctttctaa

SEQ ID NO: 49588 - DNA, 25 bp, Artificial
  probe
  misc_feature (1)..(25): SEQ ID NO: 3772; WAN024ABV_at; Start 7; Stop 31
gctggatcacctcctttctaaggat

SEQ ID NO: 49589 - DNA, 25 bp, Artificial
  probe
  misc_feature (1)..(25): SEQ ID NO: 3772; WAN024ABV_at; Start 18; Stop 42
tcctttctaaggataaggaactgcg

SEQ ID NO: 49590 - DNA, 25 bp, Artificial
  probe
  misc_feature (1)..(25): SEQ ID NO: 3772; WAN024ABV_at; Start 32; Stop 56
aaggaactgcgcattggtcttgttt

SEQ ID NO: 49591 - DNA, 25 bp, Artificial
  probe
  misc_feature (1)..(25): SEQ ID NO: 3772; WAN024ABV_at; Start 4; Stop 28
gcggctggatcacctcctttctaag

SEQ ID NO: 49592 - DNA, 25 bp, Artificial
  probe
  misc_feature (1)..(25): SEQ ID NO: 3772; WAN024ABV_at; Start 28; Stop 52
ggataaggaactgcgcattggtctt

SEQ ID NO: 49593 - DNA, 25 bp, Artificial
  probe
  misc_feature (1)..(25): SEQ ID NO: 3772; WAN024ABV_at; Start 27; Stop 51
aggataaggaactgcgcattggtct

SEQ ID NO: 49594 - DNA, 25 bp, Artificial
  probe
  misc_feature (1)..(25): SEQ ID NO: 3772; WAN024ABV_at; Start 16; Stop 40
cctcctttctaaggataaggaactg

SEQ ID NO: 49595 - DNA, 25 bp, Artificial
  probe
  misc_feature (1)..(25): SEQ ID NO: 3772; WAN024ABV_at; Start 34; Stop 58
ggaactgcgcattggtcttgtttag

SEQ ID NO: 49596 - DNA, 25 bp, Artificial
  probe
  misc_feature (1)..(25): SEQ ID NO: 3772; WAN024ABV_at; Start 43; Stop 67
cattggtcttgtttagtcttgagag

SEQ ID NO: 49597 - DNA, 25 bp, Artificial
  probe
  misc_feature (1)..(25): SEQ ID NO: 3772; WAN024ABV_at; Start 49; Stop 73
tcttgtttagtcttgagaggtcttg

SEQ ID NO: 49598 - DNA, 25 bp, Artificial
  probe
  misc_feature (1)..(25): SEQ ID NO: 3772; WAN024ABV_at; Start 13; Stop 37
tcacctcctttctaaggataaggaa

SEQ ID NO: 49599 - DNA, 25 bp, Artificial
  probe
  misc_feature (1)..(25): SEQ ID NO: 3772; WAN024ABV_at; Start 50; Stop 74
cttgtttagtcttgagaggtcttgt

SEQ ID NO: 49600 - DNA, 25 bp, Artificial
  probe
  misc_feature (1)..(25): SEQ ID NO: 3772; WAN024ABV_at; Start 2; Stop 26
gtgcggctggatcacctcctttcta

SEQ ID NO: 49601 - DNA, 25 bp, Artificial
  probe
  misc_feature (1)..(25): SEQ ID NO: 3772; WAN024ABV_at; Start 46; Stop 70
tggtcttgtttagtcttgagaggtc

SEQ ID NO: 49602 - DNA, 25 bp, Artificial
  probe
  misc_feature (1)..(25): SEQ ID NO: 3772; WAN024ABV_at; Start 6; Stop 30
ggctggatcacctcctttctaagga

SEQ ID NO: 49603 - DNA, 25 bp, Artificial
  probe
  misc_feature (1)..(25): SEQ ID NO: 3772; WAN024ABV_at; Start 1; Stop 25
ggtgcggctggatcacctcctttct

SEQ ID NO: 49604 - DNA, 25 bp, Artificial
  probe
  misc_feature (1)..(25): SEQ ID NO: 319; WAN024ABW_at; Start 25; Stop 49
gaccaatgcgcagttccttatcctt

SEQ ID NO: 49605 - DNA, 25 bp, Artificial
  probe
  misc_feature (1)..(25): SEQ ID NO: 319; WAN024ABW_at; Start 3; Stop 27
aagacctctcaagactaaacaagac

SEQ ID NO: 49606 - DNA, 25 bp, Artificial
  probe
  misc_feature (1)..(25): SEQ ID NO: 319; WAN024ABW_at; Start 28; Stop 52
caatgcgcagttccttatccttaga

SEQ ID NO: 49607 - DNA, 25 bp, Artificial
  probe
  misc_feature (1)..(25): SEQ ID NO: 319; WAN024ABW_at; Start 50; Stop 74
agaaaggaggtgatccagccgcacc

SEQ ID NO: 49608 - DNA, 25 bp, Artificial
  probe
  misc_feature (1)..(25): SEQ ID NO: 319; WAN024ABW_at; Start 15; Stop 39
gactaaacaagaccaatgcgcagtt

SEQ ID NO: 49609 - DNA, 25 bp, Artificial
  probe
  misc_feature (1)..(25): SEQ ID NO: 319; WAN024ABW_at; Start 20; Stop 44
aacaagaccaatgcgcagttcctta

SEQ ID NO: 49610 - DNA, 25 bp, Artificial
  probe
  misc_feature (1)..(25): SEQ ID NO: 319; WAN024ABW_at; Start 11; Stop 35
tcaagactaaacaagaccaatgcgc

SEQ ID NO: 49611 - DNA, 25 bp, Artificial
  probe
  misc_feature (1)..(25): SEQ ID NO: 319; WAN024ABW_at; Start 16; Stop 40
actaaacaagaccaatgcgcagttc

SEQ ID NO: 49612 - DNA, 25 bp, Artificial
  probe
  misc_feature (1)..(25): SEQ ID NO: 319; WAN024ABW_at; Start 31; Stop 55
tgcgcagttccttatccttagaaag

SEQ ID NO: 49613 - DNA, 25 bp, Artificial
  probe
  misc_feature (1)..(25): SEQ ID NO: 319; WAN024ABW_at; Start 18; Stop 42
taaacaagaccaatgcgcagttcct

SEQ ID NO: 49614 - DNA, 25 bp, Artificial
  probe
  misc_feature (1)..(25): SEQ ID NO: 319; WAN024ABW_at; Start 49; Stop 73
tagaaaggaggtgatccagccgcac

SEQ ID NO: 49615 - DNA, 25 bp, Artificial
  probe
  misc_feature (1)..(25): SEQ ID NO: 319; WAN024ABW_at; Start 41; Stop 65
cttatccttagaaaggaggtgatcc

SEQ ID NO: 49616 - DNA, 25 bp, Artificial
  probe
  misc_feature (1)..(25): SEQ ID NO: 319; WAN024ABW_at; Start 2; Stop 26
caagacctctcaagactaaacaaga

SEQ ID NO: 49617 - DNA, 25 bp, Artificial
  probe
  misc_feature (1)..(25): SEQ ID NO: 319; WAN024ABW_at; Start 32; Stop 56
gcgcagttccttatccttagaaagg

SEQ ID NO: 49618 - DNA, 25 bp, Artificial
  probe
  misc_feature (1)..(25): SEQ ID NO: 319; WAN024ABW_at; Start 19; Stop 43
aaacaagaccaatgcgcagttcctt

SEQ ID NO: 49619 - DNA, 25 bp, Artificial
  probe
  misc_feature (1)..(25): SEQ ID NO: 319; WAN024ABW_at; Start 27; Stop 51
ccaatgcgcagttccttatccttag

SEQ ID NO: 49620 - DNA, 25 bp, Artificial
  probe
  misc_feature (1)..(25): SEQ ID NO: 319; WAN024ABW_at; Start 47; Stop 71
cttagaaaggaggtgatccagccgc

SEQ ID NO: 49621 - DNA, 25 bp, Artificial
  probe
  misc_feature (1)..(25): SEQ ID NO: 319; WAN024ABW_at; Start 43; Stop 67
tatccttagaaaggaggtgatccag

SEQ ID NO: 49622 - DNA, 25 bp, Artificial
  probe
  misc_feature (1)..(25): SEQ ID NO: 319; WAN024ABW_at; Start 45; Stop 69
tccttagaaaggaggtgatccagcc

SEQ ID NO: 49623 - DNA, 25 bp, Artificial
  probe
  misc_feature (1)..(25): SEQ ID NO: 319; WAN024ABW_at; Start 13; Stop 37
aagactaaacaagaccaatgcgcag

SEQ ID NO: 49624 - DNA, 25 bp, Artificial
  probe
  misc_feature (1)..(25): SEQ ID NO: 319; WAN024ABW_at; Start 40; Stop 64
ccttatccttagaaaggaggtgatc

SEQ ID NO: 49625 - DNA, 25 bp, Artificial
  probe
  misc_feature (1)..(25): SEQ ID NO: 319; WAN024ABW_at; Start 29; Stop 53
aatgcgcagttccttatccttagaa

SEQ ID NO: 49626 - DNA, 25 bp, Artificial
  probe
  misc_feature (1)..(25): SEQ ID NO: 319; WAN024ABW_at; Start 46; Stop 70
ccttagaaaggaggtgatccagccg

SEQ ID NO: 49627 - DNA, 25 bp, Artificial
  probe
  misc_feature (1)..(25): SEQ ID NO: 319; WAN024ABW_at; Start 35; Stop 59
cagttccttatccttagaaaggagg

SEQ ID NO: 49628 - DNA, 25 bp, Artificial
  probe
  misc_feature (1)..(25): SEQ ID NO: 319; WAN024ABW_at; Start 1; Stop 25
acaagacctctcaagactaaacaag

SEQ ID NO: 49629 - DNA, 25 bp, Artificial
  probe
  misc_feature (1)..(25): SEQ ID NO: 319; WAN024ABW_at; Start 23; Stop 47
aagaccaatgcgcagttccttatcc

SEQ ID NO: 49630 - DNA, 25 bp, Artificial
  probe
  misc_feature (1)..(25): SEQ ID NO: 319; WAN024ABW_at; Start 33; Stop 57
cgcagttccttatccttagaaagga

SEQ ID NO: 49631 - DNA, 25 bp, Artificial
  probe
  misc_feature (1)..(25): SEQ ID NO: 319; WAN024ABW_at; Start 12; Stop 36
caagactaaacaagaccaatgcgca

SEQ ID NO: 49632 - DNA, 25 bp, Artificial
  probe
  misc_feature (1)..(25): SEQ ID NO: 319; WAN024ABW_at; Start 5; Stop 29
gacctctcaagactaaacaagacca

SEQ ID NO: 49633 - DNA, 25 bp, Artificial
  probe
  misc_feature (1)..(25): SEQ ID NO: 319; WAN024ABW_at; Start 14; Stop 38
agactaaacaagaccaatgcgcagt

SEQ ID NO: 49634 - DNA, 25 bp, Artificial
  probe
  misc_feature (1)..(25): SEQ ID NO: 319; WAN024ABW_at; Start 38; Stop 62
ttccttatccttagaaaggaggtga

SEQ ID NO: 49635 - DNA, 25 bp, Artificial
  probe
  misc_feature (1)..(25): SEQ ID NO: 319; WAN024ABW_at; Start 9; Stop 33
tctcaagactaaacaagaccaatgc

SEQ ID NO: 49636 - DNA, 25 bp, Artificial
  probe
  misc_feature (1)..(25): SEQ ID NO: 319; WAN024ABW_at; Start 48; Stop 72
ttagaaaggaggtgatccagccgca

SEQ ID NO: 49637 - DNA, 25 bp, Artificial
  probe
  misc_feature (1)..(25): SEQ ID NO: 319; WAN024ABW_at; Start 7; Stop 31
cctctcaagactaaacaagaccaat

SEQ ID NO: 49638 - DNA, 25 bp, Artificial
  probe
  misc_feature (1)..(25): SEQ ID NO: 5927; WAN024ABX_at; Start 18; Stop 42
caagacctctttttagtgtgcccaa

SEQ ID NO: 49639 - DNA, 25 bp, Artificial
  probe
  misc_feature (1)..(25): SEQ ID NO: 5927; WAN024ABX_at; Start 33; Stop 57
gtgtgcccaaaatttagagaagtaa

SEQ ID NO: 49640 - DNA, 25 bp, Artificial
  probe
  misc_feature (1)..(25): SEQ ID NO: 5927; WAN024ABX_at; Start 13; Stop 37
ggtgtcaagacctctttttagtgtg

SEQ ID NO: 49641 - DNA, 25 bp, Artificial
  probe
  misc_feature (1)..(25): SEQ ID NO: 5927; WAN024ABX_at; Start 16; Stop 40
gtcaagacctctttttagtgtgccc

SEQ ID NO: 49642 - DNA, 25 bp, Artificial
  probe
  misc_feature (1)..(25): SEQ ID NO: 5927; WAN024ABX_at; Start 37; Stop 61
gcccaaaatttagagaagtaatcaa

SEQ ID NO: 49643 - DNA, 25 bp, Artificial
  probe
  misc_feature (1)..(25): SEQ ID NO: 5927; WAN024ABX_at; Start 30; Stop 54
ttagtgtgcccaaaatttagagaag

SEQ ID NO: 49644 - DNA, 25 bp, Artificial
  probe
  misc_feature (1)..(25): SEQ ID NO: 5927; WAN024ABX_at; Start 29; Stop 53
tttagtgtgcccaaaatttagagaa

SEQ ID NO: 49645 - DNA, 25 bp, Artificial
  probe
  misc_feature (1)..(25): SEQ ID NO: 5927; WAN024ABX_at; Start 11; Stop 35
taggtgtcaagacctctttttagtg

SEQ ID NO: 49646 - DNA, 25 bp, Artificial
  probe
  misc_feature (1)..(25): SEQ ID NO: 5927; WAN024ABX_at; Start 31; Stop 55
tagtgtgcccaaaatttagagaagt

SEQ ID NO: 49647 - DNA, 25 bp, Artificial
  probe
  misc_feature (1)..(25): SEQ ID NO: 5927; WAN024ABX_at; Start 15; Stop 39
tgtcaagacctctttttagtgtgcc

SEQ ID NO: 49648 - DNA, 25 bp, Artificial
  probe
  misc_feature (1)..(25): SEQ ID NO: 5927; WAN024ABX_at; Start 28; Stop 52
ttttagtgtgcccaaaatttagaga

SEQ ID NO: 49649 - DNA, 25 bp, Artificial
  probe
  misc_feature (1)..(25): SEQ ID NO: 5927; WAN024ABX_at; Start 12; Stop 36
aggtgtcaagacctctttttagtgt

SEQ ID NO: 49650 - DNA, 25 bp, Artificial
  probe
  misc_feature (1)..(25): SEQ ID NO: 5927; WAN024ABX_at; Start 34; Stop 58
tgtgcccaaaatttagagaagtaat

SEQ ID NO: 49651 - DNA, 25 bp, Artificial
  probe
  misc_feature (1)..(25): SEQ ID NO: 5927; WAN024ABX_at; Start 17; Stop 41
tcaagacctctttttagtgtgccca

SEQ ID NO: 49652 - DNA, 25 bp, Artificial
  probe
  misc_feature (1)..(25): SEQ ID NO: 5927; WAN024ABX_at; Start 36; Stop 60
tgcccaaaatttagagaagtaatca

SEQ ID NO: 49653 - DNA, 25 bp, Artificial
  probe
  misc_feature (1)..(25): SEQ ID NO: 5927; WAN024ABX_at; Start 14; Stop 38
gtgtcaagacctctttttagtgtgc

SEQ ID NO: 49654 - DNA, 25 bp, Artificial
  probe
  misc_feature (1)..(25): SEQ ID NO: 5927; WAN024ABX_at; Start 35; Stop 59
gtgcccaaaatttagagaagtaatc

SEQ ID NO: 49655 - DNA, 25 bp, Artificial
  probe
  misc_feature (1)..(25): SEQ ID NO: 5927; WAN024ABX_at; Start 32; Stop 56
agtgtgcccaaaatttagagaagta

SEQ ID NO: 49656 - DNA, 25 bp, Artificial
  probe
  misc_feature (1)..(25): SEQ ID NO: 5240; WAN024ABY_at; Start 9; Stop 33
ttctctaaattttgggcacactaaa

SEQ ID NO: 49657 - DNA, 25 bp, Artificial
  probe
  misc_feature (1)..(25): SEQ ID NO: 5240; WAN024ABY_at; Start 3; Stop 27
gattacttctctaaattttgggcac

SEQ ID NO: 49658 - DNA, 25 bp, Artificial
  probe
  misc_feature (1)..(25): SEQ ID NO: 5240; WAN024ABY_at; Start 24; Stop 48
gcacactaaaaagaggtcttgacac

SEQ ID NO: 49659 - DNA, 25 bp, Artificial
  probe
  misc_feature (1)..(25): SEQ ID NO: 5240; WAN024ABY_at; Start 22; Stop 46
gggcacactaaaaagaggtcttgac

SEQ ID NO: 49660 - DNA, 25 bp, Artificial
  probe
  misc_feature (1)..(25): SEQ ID NO: 5240; WAN024ABY_at; Start 1; Stop 25
ttgattacttctctaaattttgggc

SEQ ID NO: 49661 - DNA, 25 bp, Artificial
  probe
  misc_feature (1)..(25): SEQ ID NO: 5240; WAN024ABY_at; Start 10; Stop 34
tctctaaattttgggcacactaaaa

SEQ ID NO: 49662 - DNA, 25 bp, Artificial
  probe
  misc_feature (1)..(25): SEQ ID NO: 5240; WAN024ABY_at; Start 26; Stop 50
acactaaaaagaggtcttgacacct

SEQ ID NO: 49663 - DNA, 25 bp, Artificial
  probe
  misc_feature (1)..(25): SEQ ID NO: 5240; WAN024ABY_at; Start 8; Stop 32
cttctctaaattttgggcacactaa

SEQ ID NO: 49664 - DNA, 25 bp, Artificial
  probe
  misc_feature (1)..(25): SEQ ID NO: 5240; WAN024ABY_at; Start 27; Stop 51
cactaaaaagaggtcttgacaccta

SEQ ID NO: 49665 - DNA, 25 bp, Artificial
  probe
  misc_feature (1)..(25): SEQ ID NO: 5240; WAN024ABY_at; Start 6; Stop 30
tacttctctaaattttgggcacact

SEQ ID NO: 49666 - DNA, 25 bp, Artificial
  probe
  misc_feature (1)..(25): SEQ ID NO: 5240; WAN024ABY_at; Start 23; Stop 47
ggcacactaaaaagaggtcttgaca

SEQ ID NO: 49667 - DNA, 25 bp, Artificial
  probe
  misc_feature (1)..(25): SEQ ID NO: 5240; WAN024ABY_at; Start 4; Stop 28
attacttctctaaattttgggcaca

SEQ ID NO: 49668 - DNA, 25 bp, Artificial
  probe
  misc_feature (1)..(25): SEQ ID NO: 5240; WAN024ABY_at; Start 20; Stop 44
ttgggcacactaaaaagaggtcttg

SEQ ID NO: 49669 - DNA, 25 bp, Artificial
  probe
  misc_feature (1)..(25): SEQ ID NO: 5240; WAN024ABY_at; Start 7; Stop 31
acttctctaaattttgggcacacta

SEQ ID NO: 49670 - DNA, 25 bp, Artificial
  probe
  misc_feature (1)..(25): SEQ ID NO: 5240; WAN024ABY_at; Start 25; Stop 49
cacactaaaaagaggtcttgacacc

SEQ ID NO: 49671 - DNA, 25 bp, Artificial
  probe
  misc_feature (1)..(25): SEQ ID NO: 5240; WAN024ABY_at; Start 21; Stop 45
tgggcacactaaaaagaggtcttga

SEQ ID NO: 49672 - DNA, 25 bp, Artificial
  probe
  misc_feature (1)..(25): SEQ ID NO: 5240; WAN024ABY_at; Start 5; Stop 29
ttacttctctaaattttgggcacac

SEQ ID NO: 49673 - DNA, 25 bp, Artificial
  probe
  misc_feature (1)..(25): SEQ ID NO: 5240; WAN024ABY_at; Start 2; Stop 26
tgattacttctctaaattttgggca

SEQ ID NO: 49674 - DNA, 25 bp, Artificial
  probe
  misc_feature (1)..(25): SEQ ID NO: 3722; WAN024ABZ_at; Start 176; Stop 200
tcatttaataatgaagacatcatat

SEQ ID NO: 49675 - DNA, 25 bp, Artificial
  probe
  misc_feature (1)..(25): SEQ ID NO: 3722; WAN024ABZ_at; Start 56; Stop 80
ataaaactctgactttgggagaatt

SEQ ID NO: 49676 - DNA, 25 bp, Artificial
  probe
  misc_feature (1)..(25): SEQ ID NO: 3722; WAN024ABZ_at; Start 109; Stop 133
ttgacatacaacttaaaaagaggtg

SEQ ID NO: 49677 - DNA, 25 bp, Artificial
  probe
  misc_feature (1)..(25): SEQ ID NO: 3722; WAN024ABZ_at; Start 113; Stop 137
catacaacttaaaaagaggtggaat

SEQ ID NO: 49678 - DNA, 25 bp, Artificial
  probe
  misc_feature (1)..(25): SEQ ID NO: 3722; WAN024ABZ_at; Start 198; Stop 222
tataaataattatagaaatgaggta

SEQ ID NO: 49679 - DNA, 25 bp, Artificial
  probe
  misc_feature (1)..(25): SEQ ID NO: 3722; WAN024ABZ_at; Start 51; Stop 75
tagaaataaaactctgactttggga

SEQ ID NO: 49680 - DNA, 25 bp, Artificial
  probe
  misc_feature (1)..(25): SEQ ID NO: 3722; WAN024ABZ_at; Start 3; Stop 27
aatagcagtagaaaaagtctgaatc

SEQ ID NO: 49681 - DNA, 25 bp, Artificial
  probe
  misc_feature (1)..(25): SEQ ID NO: 3722; WAN024ABZ_at; Start 10; Stop 34
gtagaaaaagtctgaatcaaaaatg

SEQ ID NO: 49682 - DNA, 25 bp, Artificial
  probe
  misc_feature (1)..(25): SEQ ID NO: 3722; WAN024ABZ_at; Start 16; Stop 40
aaagtctgaatcaaaaatgaagttc

SEQ ID NO: 49683 - DNA, 25 bp, Artificial
  probe
  misc_feature (1)..(25): SEQ ID NO: 3722; WAN024ABZ_at; Start 31; Stop 55
aatgaagttctctcaaaagttagaa

SEQ ID NO: 49684 - DNA, 25 bp, Artificial
  probe
  misc_feature (1)..(25): SEQ ID NO: 3722; WAN024ABZ_at; Start 27; Stop 51
caaaaatgaagttctctcaaaagtt

SEQ ID NO: 49685 - DNA, 25 bp, Artificial
  probe
  misc_feature (1)..(25): SEQ ID NO: 3722; WAN024ABZ_at; Start 108; Stop 132
cttgacatacaacttaaaaagaggt

SEQ ID NO: 49686 - DNA, 25 bp, Artificial
  probe
  misc_feature (1)..(25): SEQ ID NO: 3722; WAN024ABZ_at; Start 13; Stop 37
gaaaaagtctgaatcaaaaatgaag

SEQ ID NO: 49687 - DNA, 25 bp, Artificial
  probe
  misc_feature (1)..(25): SEQ ID NO: 3722; WAN024ABZ_at; Start 173; Stop 197
taatcatttaataatgaagacatca

SEQ ID NO: 49688 - DNA, 25 bp, Artificial
  probe
  misc_feature (1)..(25): SEQ ID NO: 3722; WAN024ABZ_at; Start 53; Stop 77
gaaataaaactctgactttgggaga

SEQ ID NO: 49689 - DNA, 25 bp, Artificial
  probe
  misc_feature (1)..(25): SEQ ID NO: 3722; WAN024ABZ_at; Start 188; Stop 212
gaagacatcatataaataattatag

SEQ ID NO: 49690 - DNA, 25 bp, Artificial
  probe
  misc_feature (1)..(25): SEQ ID NO: 3722; WAN024ABZ_at; Start 29; Stop 53
aaaatgaagttctctcaaaagttag

SEQ ID NO: 49691 - DNA, 25 bp, Artificial
  probe
  misc_feature (1)..(25): SEQ ID NO: 3722; WAN024ABZ_at; Start 107; Stop 131
tcttgacatacaacttaaaaagagg

SEQ ID NO: 49692 - DNA, 25 bp, Artificial
  probe
  misc_feature (1)..(25): SEQ ID NO: 3722; WAN024ABZ_at; Start 1; Stop 25
ggaatagcagtagaaaaagtctgaa

SEQ ID NO: 49693 - DNA, 25 bp, Artificial
  probe
  misc_feature (1)..(25): SEQ ID NO: 3722; WAN024ABZ_at; Start 96; Stop 120
tatataaaatttcttgacatacaac

SEQ ID NO: 49694 - DNA, 25 bp, Artificial
  probe
  misc_feature (1)..(25): SEQ ID NO: 3722; WAN024ABZ_at; Start 42; Stop 66
ctcaaaagttagaaataaaactctg

SEQ ID NO: 49695 - DNA, 25 bp, Artificial
  probe
  misc_feature (1)..(25): SEQ ID NO: 3722; WAN024ABZ_at; Start 26; Stop 50
tcaaaaatgaagttctctcaaaagt

SEQ ID NO: 49696 - DNA, 25 bp, Artificial
  probe
  misc_feature (1)..(25): SEQ ID NO: 3722; WAN024ABZ_at; Start 34; Stop 58
gaagttctctcaaaagttagaaata

SEQ ID NO: 49697 - DNA, 25 bp, Artificial
  probe
  misc_feature (1)..(25): SEQ ID NO: 3722; WAN024ABZ_at; Start 5; Stop 29
tagcagtagaaaaagtctgaatcaa

SEQ ID NO: 49698 - DNA, 25 bp, Artificial
  probe
  misc_feature (1)..(25): SEQ ID NO: 3722; WAN024ABZ_at; Start 71; Stop 95
tgggagaatttcattttattattaa

SEQ ID NO: 49699 - DNA, 25 bp, Artificial
  probe
  misc_feature (1)..(25): SEQ ID NO: 3722; WAN024ABZ_at; Start 21; Stop 45
ctgaatcaaaaatgaagttctctca

SEQ ID NO: 49700 - DNA, 25 bp, Artificial
  probe
  misc_feature (1)..(25): SEQ ID NO: 3722; WAN024ABZ_at; Start 18; Stop 42
agtctgaatcaaaaatgaagttctc

SEQ ID NO: 49701 - DNA, 25 bp, Artificial
  probe
  misc_feature (1)..(25): SEQ ID NO: 3722; WAN024ABZ_at; Start 111; Stop 135
gacatacaacttaaaaagaggtgga

SEQ ID NO: 49702 - DNA, 25 bp, Artificial
  probe
  misc_feature (1)..(25): SEQ ID NO: 3722; WAN024ABZ_at; Start 52; Stop 76
agaaataaaactctgactttgggag

SEQ ID NO: 49703 - DNA, 25 bp, Artificial
  probe
  misc_feature (1)..(25): SEQ ID NO: 3722; WAN024ABZ_at; Start 55; Stop 79
aataaaactctgactttgggagaat

SEQ ID NO: 49704 - DNA, 25 bp, Artificial
  probe
  misc_feature (1)..(25): SEQ ID NO: 3722; WAN024ABZ_at; Start 23; Stop 47
gaatcaaaaatgaagttctctcaaa

SEQ ID NO: 49705 - DNA, 25 bp, Artificial
  probe
  misc_feature (1)..(25): SEQ ID NO: 3722; WAN024ABZ_at; Start 110; Stop 134
tgacatacaacttaaaaagaggtgg

SEQ ID NO: 49706 - DNA, 25 bp, Artificial
  probe
  misc_feature (1)..(25): SEQ ID NO: 3722; WAN024ABZ_at; Start 20; Stop 44
tctgaatcaaaaatgaagttctctc

SEQ ID NO: 49707 - DNA, 25 bp, Artificial
  probe
  misc_feature (1)..(25): SEQ ID NO: 3722; WAN024ABZ_at; Start 7; Stop 31
gcagtagaaaaagtctgaatcaaaa

SEQ ID NO: 49708 - DNA, 25 bp, Artificial
  probe
  misc_feature (1)..(25): SEQ ID NO: 4824; WAN024AC2_at; Start 202; Stop 226
ttgattcagactttttctactgcta

SEQ ID NO: 49709 - DNA, 25 bp, Artificial
  probe
  misc_feature (1)..(25): SEQ ID NO: 4824; WAN024AC2_at; Start 109; Stop 133
aagttgtatgtcaagaaattttata

SEQ ID NO: 49710 - DNA, 25 bp, Artificial
  probe
  misc_feature (1)..(25): SEQ ID NO: 4824; WAN024AC2_at; Start 151; Stop 175
aattctcccaaagtcagagttttat

SEQ ID NO: 49711 - DNA, 25 bp, Artificial
  probe
  misc_feature (1)..(25): SEQ ID NO: 4824; WAN024AC2_at; Start 100; Stop 124
cctctttttaagttgtatgtcaaga

SEQ ID NO: 49712 - DNA, 25 bp, Artificial
  probe
  misc_feature (1)..(25): SEQ ID NO: 4824; WAN024AC2_at; Start 159; Stop 183
caaagtcagagttttatttctaact

SEQ ID NO: 49713 - DNA, 25 bp, Artificial
  probe
  misc_feature (1)..(25): SEQ ID NO: 4824; WAN024AC2_at; Start 200; Stop 224
ttttgattcagactttttctactgc

SEQ ID NO: 49714 - DNA, 25 bp, Artificial
  probe
  misc_feature (1)..(25): SEQ ID NO: 4824; WAN024AC2_at; Start 154; Stop 178
tctcccaaagtcagagttttatttc

SEQ ID NO: 49715 - DNA, 25 bp, Artificial
  probe
  misc_feature (1)..(25): SEQ ID NO: 4824; WAN024AC2_at; Start 97; Stop 121
ccacctctttttaagttgtatgtca

SEQ ID NO: 49716 - DNA, 25 bp, Artificial
  probe
  misc_feature (1)..(25): SEQ ID NO: 4824; WAN024AC2_at; Start 147; Stop 171
atgaaattctcccaaagtcagagtt

SEQ ID NO: 49717 - DNA, 25 bp, Artificial
  probe
  misc_feature (1)..(25): SEQ ID NO: 4824; WAN024AC2_at; Start 136; Stop 160
ttaataataaaatgaaattctccca

SEQ ID NO: 49718 - DNA, 25 bp, Artificial
  probe
  misc_feature (1)..(25): SEQ ID NO: 4824; WAN024AC2_at; Start 148; Stop 172
tgaaattctcccaaagtcagagttt

SEQ ID NO: 49719 - DNA, 25 bp, Artificial
  probe
  misc_feature (1)..(25): SEQ ID NO: 4824; WAN024AC2_at; Start 143; Stop 167
taaaatgaaattctcccaaagtcag

SEQ ID NO: 49720 - DNA, 25 bp, Artificial
  probe
  misc_feature (1)..(25): SEQ ID NO: 4824; WAN024AC2_at; Start 186; Stop 210
tgagagaacttcatttttgattcag

SEQ ID NO: 49721 - DNA, 25 bp, Artificial
  probe
  misc_feature (1)..(25): SEQ ID NO: 4824; WAN024AC2_at; Start 2; Stop 26
tcataattacctcatttctataatt

SEQ ID NO: 49722 - DNA, 25 bp, Artificial
  probe
  misc_feature (1)..(25): SEQ ID NO: 4824; WAN024AC2_at; Start 144; Stop 168
aaaatgaaattctcccaaagtcaga

SEQ ID NO: 49723 - DNA, 25 bp, Artificial
  probe
  misc_feature (1)..(25): SEQ ID NO: 4824; WAN024AC2_at; Start 197; Stop 221
catttttgattcagactttttctac

SEQ ID NO: 49724 - DNA, 25 bp, Artificial
  probe
  misc_feature (1)..(25): SEQ ID NO: 4824; WAN024AC2_at; Start 206; Stop 230
ttcagactttttctactgctattcc

SEQ ID NO: 49725 - DNA, 25 bp, Artificial
  probe
  misc_feature (1)..(25): SEQ ID NO: 4824; WAN024AC2_at; Start 98; Stop 122
cacctctttttaagttgtatgtcaa

SEQ ID NO: 49726 - DNA, 25 bp, Artificial
  probe
  misc_feature (1)..(25): SEQ ID NO: 4824; WAN024AC2_at; Start 187; Stop 211
gagagaacttcatttttgattcaga

SEQ ID NO: 49727 - DNA, 25 bp, Artificial
  probe
  misc_feature (1)..(25): SEQ ID NO: 4824; WAN024AC2_at; Start 35; Stop 59
gatgtcttcattattaaatgattaa

SEQ ID NO: 49728 - DNA, 25 bp, Artificial
  probe
  misc_feature (1)..(25): SEQ ID NO: 4824; WAN024AC2_at; Start 189; Stop 213
gagaacttcatttttgattcagact

SEQ ID NO: 49729 - DNA, 25 bp, Artificial
  probe
  misc_feature (1)..(25): SEQ ID NO: 4824; WAN024AC2_at; Start 96; Stop 120
tccacctctttttaagttgtatgtc

SEQ ID NO: 49730 - DNA, 25 bp, Artificial
  probe
  misc_feature (1)..(25): SEQ ID NO: 4824; WAN024AC2_at; Start 30; Stop 54
tatatgatgtcttcattattaaatg

SEQ ID NO: 49731 - DNA, 25 bp, Artificial
  probe
  misc_feature (1)..(25): SEQ ID NO: 4824; WAN024AC2_at; Start 156; Stop 180
tcccaaagtcagagttttatttcta

SEQ ID NO: 49732 - DNA, 25 bp, Artificial
  probe
  misc_feature (1)..(25): SEQ ID NO: 4824; WAN024AC2_at; Start 181; Stop 205
acttttgagagaacttcatttttga

SEQ ID NO: 49733 - DNA, 25 bp, Artificial
  probe
  misc_feature (1)..(25): SEQ ID NO: 4824; WAN024AC2_at; Start 175; Stop 199
tttctaacttttgagagaacttcat

SEQ ID NO: 49734 - DNA, 25 bp, Artificial
  probe
  misc_feature (1)..(25): SEQ ID NO: 4824; WAN024AC2_at; Start 173; Stop 197
tatttctaacttttgagagaacttc

SEQ ID NO: 49735 - DNA, 25 bp, Artificial
  probe
  misc_feature (1)..(25): SEQ ID NO: 4824; WAN024AC2_at; Start 165; Stop 189
cagagttttatttctaacttttgag

SEQ ID NO: 49736 - DNA, 25 bp, Artificial
  probe
  misc_feature (1)..(25): SEQ ID NO: 4824; WAN024AC2_at; Start 204; Stop 228
gattcagactttttctactgctatt

SEQ ID NO: 49737 - DNA, 25 bp, Artificial
  probe
  misc_feature (1)..(25): SEQ ID NO: 4824; WAN024AC2_at; Start 191; Stop 215
gaacttcatttttgattcagacttt

SEQ ID NO: 49738 - DNA, 25 bp, Artificial
  probe
  misc_feature (1)..(25): SEQ ID NO: 4824; WAN024AC2_at; Start 99; Stop 123
acctctttttaagttgtatgtcaag

SEQ ID NO: 49739 - DNA, 25 bp, Artificial
  probe
  misc_feature (1)..(25): SEQ ID NO: 4824; WAN024AC2_at; Start 145; Stop 169
aaatgaaattctcccaaagtcagag

SEQ ID NO: 49740 - DNA, 25 bp, Artificial
  probe
  misc_feature (1)..(25): SEQ ID NO: 4824; WAN024AC2_at; Start 103; Stop 127
ctttttaagttgtatgtcaagaaat

SEQ ID NO: 49741 - DNA, 25 bp, Artificial
  probe
  misc_feature (1)..(25): SEQ ID NO: 4824; WAN024AC2_at; Start 177; Stop 201
tctaacttttgagagaacttcattt

SEQ ID NO: 49742 - DNA, 25 bp, Artificial
  probe
  misc_feature (1)..(25): SEQ ID NO: 155; WAN024AC3_at; Start 8; Stop 32
tcatttcaataaatgatgaagtttt

SEQ ID NO: 49743 - DNA, 25 bp, Artificial
  probe
  misc_feature (1)..(25): SEQ ID NO: 155; WAN024AC3_at; Start 16; Stop 40
ataaatgatgaagttttttctcaac

SEQ ID NO: 49744 - DNA, 25 bp, Artificial
  probe
  misc_feature (1)..(25): SEQ ID NO: 155; WAN024AC3_at; Start 2; Stop 26
aatccctcatttcaataaatgatga

SEQ ID NO: 49745 - DNA, 25 bp, Artificial
  probe
  misc_feature (1)..(25): SEQ ID NO: 155; WAN024AC3_at; Start 12; Stop 36
ttcaataaatgatgaagttttttct

SEQ ID NO: 49746 - DNA, 25 bp, Artificial
  probe
  misc_feature (1)..(25): SEQ ID NO: 155; WAN024AC3_at; Start 7; Stop 31
ctcatttcaataaatgatgaagttt

SEQ ID NO: 49747 - DNA, 25 bp, Artificial
  probe
  misc_feature (1)..(25): SEQ ID NO: 155; WAN024AC3_at; Start 6; Stop 30
cctcatttcaataaatgatgaagtt

SEQ ID NO: 49748 - DNA, 25 bp, Artificial
  probe
  misc_feature (1)..(25): SEQ ID NO: 155; WAN024AC3_at; Start 15; Stop 39
aataaatgatgaagttttttctcaa

SEQ ID NO: 49749 - DNA, 25 bp, Artificial
  probe
  misc_feature (1)..(25): SEQ ID NO: 155; WAN024AC3_at; Start 1; Stop 25
aaatccctcatttcaataaatgatg

SEQ ID NO: 49750 - DNA, 25 bp, Artificial
  probe
  misc_feature (1)..(25): SEQ ID NO: 155; WAN024AC3_at; Start 20; Stop 44
atgatgaagttttttctcaacttct

SEQ ID NO: 49751 - DNA, 25 bp, Artificial
  probe
  misc_feature (1)..(25): SEQ ID NO: 155; WAN024AC3_at; Start 11; Stop 35
tttcaataaatgatgaagttttttc

SEQ ID NO: 49752 - DNA, 25 bp, Artificial
  probe
  misc_feature (1)..(25): SEQ ID NO: 155; WAN024AC3_at; Start 13; Stop 37
tcaataaatgatgaagttttttctc

SEQ ID NO: 49753 - DNA, 25 bp, Artificial
  probe
  misc_feature (1)..(25): SEQ ID NO: 155; WAN024AC3_at; Start 18; Stop 42
aaatgatgaagttttttctcaactt

SEQ ID NO: 49754 - DNA, 25 bp, Artificial
  probe
  misc_feature (1)..(25): SEQ ID NO: 155; WAN024AC3_at; Start 14; Stop 38
caataaatgatgaagttttttctca

SEQ ID NO: 49755 - DNA, 25 bp, Artificial
  probe
  misc_feature (1)..(25): SEQ ID NO: 155; WAN024AC3_at; Start 19; Stop 43
aatgatgaagttttttctcaacttc

SEQ ID NO: 49756 - DNA, 25 bp, Artificial
  probe
  misc_feature (1)..(25): SEQ ID NO: 155; WAN024AC3_at; Start 21; Stop 45
tgatgaagttttttctcaacttctt

SEQ ID NO: 49757 - DNA, 25 bp, Artificial
  probe
  misc_feature (1)..(25): SEQ ID NO: 155; WAN024AC3_at; Start 17; Stop 41
taaatgatgaagttttttctcaact

SEQ ID NO: 49758 - DNA, 25 bp, Artificial
  probe
  misc_feature (1)..(25): SEQ ID NO: 155; WAN024AC3_at; Start 4; Stop 28
tccctcatttcaataaatgatgaag

SEQ ID NO: 49759 - DNA, 25 bp, Artificial
  probe
  misc_feature (1)..(25): SEQ ID NO: 155; WAN024AC3_at; Start 9; Stop 33
catttcaataaatgatgaagttttt

SEQ ID NO: 49760 - DNA, 25 bp, Artificial
  probe
  misc_feature (1)..(25): SEQ ID NO: 155; WAN024AC3_at; Start 3; Stop 27
atccctcatttcaataaatgatgaa

SEQ ID NO: 49761 - DNA, 25 bp, Artificial
  probe
  misc_feature (1)..(25): SEQ ID NO: 155; WAN024AC3_at; Start 5; Stop 29
ccctcatttcaataaatgatgaagt

SEQ ID NO: 49762 - DNA, 25 bp, Artificial
  probe
  misc_feature (1)..(25): SEQ ID NO: 205; WAN024AC4_at; Start 106; Stop 130
aacttcatcatttattgaaatgagg

SEQ ID NO: 49763 - DNA, 25 bp, Artificial
  probe
  misc_feature (1)..(25): SEQ ID NO: 205; WAN024AC4_at; Start 107; Stop 131
acttcatcatttattgaaatgaggg

SEQ ID NO: 49764 - DNA, 25 bp, Artificial
  probe
  misc_feature (1)..(25): SEQ ID NO: 205; WAN024AC4_at; Start 110; Stop 134
tcatcatttattgaaatgagggatt

SEQ ID NO: 49765 - DNA, 25 bp, Artificial
  probe
  misc_feature (1)..(25): SEQ ID NO: 205; WAN024AC4_at; Start 98; Stop 122
tgagaaaaaacttcatcatttattg

SEQ ID NO: 49766 - DNA, 25 bp, Artificial
  probe
  misc_feature (1)..(25): SEQ ID NO: 205; WAN024AC4_at; Start 97; Stop 121
ttgagaaaaaacttcatcatttatt

SEQ ID NO: 49767 - DNA, 25 bp, Artificial
  probe
  misc_feature (1)..(25): SEQ ID NO: 205; WAN024AC4_at; Start 108; Stop 132
cttcatcatttattgaaatgaggga

SEQ ID NO: 49768 - DNA, 25 bp, Artificial
  probe
  misc_feature (1)..(25): SEQ ID NO: 205; WAN024AC4_at; Start 103; Stop 127
aaaaacttcatcatttattgaaatg

SEQ ID NO: 49769 - DNA, 25 bp, Artificial
  probe
  misc_feature (1)..(25): SEQ ID NO: 205; WAN024AC4_at; Start 91; Stop 115
aagaagttgagaaaaaacttcatca

SEQ ID NO: 49770 - DNA, 25 bp, Artificial
  probe
  misc_feature (1)..(25): SEQ ID NO: 205; WAN024AC4_at; Start 109; Stop 133
ttcatcatttattgaaatgagggat

SEQ ID NO: 49771 - DNA, 25 bp, Artificial
  probe
  misc_feature (1)..(25): SEQ ID NO: 205; WAN024AC4_at; Start 102; Stop 126
aaaaaacttcatcatttattgaaat

SEQ ID NO: 49772 - DNA, 25 bp, Artificial
  probe
  misc_feature (1)..(25): SEQ ID NO: 205; WAN024AC4_at; Start 101; Stop 125
gaaaaaacttcatcatttattgaaa

SEQ ID NO: 49773 - DNA, 25 bp, Artificial
  probe
  misc_feature (1)..(25): SEQ ID NO: 205; WAN024AC4_at; Start 99; Stop 123
gagaaaaaacttcatcatttattga

SEQ ID NO: 49774 - DNA, 25 bp, Artificial
  probe
  misc_feature (1)..(25): SEQ ID NO: 205; WAN024AC4_at; Start 93; Stop 117
gaagttgagaaaaaacttcatcatt

SEQ ID NO: 49775 - DNA, 25 bp, Artificial
  probe
  misc_feature (1)..(25): SEQ ID NO: 205; WAN024AC4_at; Start 96; Stop 120
gttgagaaaaaacttcatcatttat

SEQ ID NO: 49776 - DNA, 25 bp, Artificial
  probe
  misc_feature (1)..(25): SEQ ID NO: 205; WAN024AC4_at; Start 100; Stop 124
agaaaaaacttcatcatttattgaa

SEQ ID NO: 49777 - DNA, 25 bp, Artificial
  probe
  misc_feature (1)..(25): SEQ ID NO: 205; WAN024AC4_at; Start 111; Stop 135
catcatttattgaaatgagggattt

SEQ ID NO: 49778 - DNA, 25 bp, Artificial
  probe
  misc_feature (1)..(25): SEQ ID NO: 205; WAN024AC4_at; Start 92; Stop 116
agaagttgagaaaaaacttcatcat

SEQ ID NO: 49779 - DNA, 25 bp, Artificial
  probe
  misc_feature (1)..(25): SEQ ID NO: 205; WAN024AC4_at; Start 95; Stop 119
agttgagaaaaaacttcatcattta

SEQ ID NO: 49780 - DNA, 25 bp, Artificial
  probe
  misc_feature (1)..(25): SEQ ID NO: 205; WAN024AC4_at; Start 105; Stop 129
aaacttcatcatttattgaaatgag

SEQ ID NO: 49781 - DNA, 25 bp, Artificial
  probe
  misc_feature (1)..(25): SEQ ID NO: 205; WAN024AC4_at; Start 104; Stop 128
aaaacttcatcatttattgaaatga

SEQ ID NO: 49782 - DNA, 25 bp, Artificial
  probe
  misc_feature (1)..(25): SEQ ID NO: 205; WAN024AC4_at; Start 94; Stop 118
aagttgagaaaaaacttcatcattt

SEQ ID NO: 49783 - DNA, 25 bp, Artificial
  probe
  misc_feature (1)..(25): SEQ ID NO: 3543; WAN024AC5_at; Start 28; Stop 52
tagtaaatattctactcctgaaaat

SEQ ID NO: 49784 - DNA, 25 bp, Artificial
  probe
  misc_feature (1)..(25): SEQ ID NO: 3543; WAN024AC5_at; Start 41; Stop 65
actcctgaaaatttaatctgtcaag

SEQ ID NO: 49785 - DNA, 25 bp, Artificial
  probe
  misc_feature (1)..(25): SEQ ID NO: 3543; WAN024AC5_at; Start 40; Stop 64
tactcctgaaaatttaatctgtcaa

SEQ ID NO: 49786 - DNA, 25 bp, Artificial
  probe
  misc_feature (1)..(25): SEQ ID NO: 3543; WAN024AC5_at; Start 44; Stop 68
cctgaaaatttaatctgtcaagata

SEQ ID NO: 49787 - DNA, 25 bp, Artificial
  probe
  misc_feature (1)..(25): SEQ ID NO: 3543; WAN024AC5_at; Start 29; Stop 53
agtaaatattctactcctgaaaatt

SEQ ID NO: 49788 - DNA, 25 bp, Artificial
  probe
  misc_feature (1)..(25): SEQ ID NO: 3543; WAN024AC5_at; Start 117; Stop 141
tgtcaacaactcaatagactttcac

SEQ ID NO: 49789 - DNA, 25 bp, Artificial
  probe
  misc_feature (1)..(25): SEQ ID NO: 3543; WAN024AC5_at; Start 42; Stop 66
ctcctgaaaatttaatctgtcaaga

SEQ ID NO: 49790 - DNA, 25 bp, Artificial
  probe
  misc_feature (1)..(25): SEQ ID NO: 3543; WAN024AC5_at; Start 54; Stop 78
taatctgtcaagatatttttagaaa

SEQ ID NO: 49791 - DNA, 25 bp, Artificial
  probe
  misc_feature (1)..(25): SEQ ID NO: 3543; WAN024AC5_at; Start 39; Stop 63
ctactcctgaaaatttaatctgtca

SEQ ID NO: 49792 - DNA, 25 bp, Artificial
  probe
  misc_feature (1)..(25): SEQ ID NO: 3543; WAN024AC5_at; Start 25; Stop 49
aactagtaaatattctactcctgaa

SEQ ID NO: 49793 - DNA, 25 bp, Artificial
  probe
  misc_feature (1)..(25): SEQ ID NO: 3543; WAN024AC5_at; Start 47; Stop 71
gaaaatttaatctgtcaagatattt

SEQ ID NO: 49794 - DNA, 25 bp, Artificial
  probe
  misc_feature (1)..(25): SEQ ID NO: 3543; WAN024AC5_at; Start 116; Stop 140
gtgtcaacaactcaatagactttca

SEQ ID NO: 49795 - DNA, 25 bp, Artificial
  probe
  misc_feature (1)..(25): SEQ ID NO: 3543; WAN024AC5_at; Start 23; Stop 47
ttaactagtaaatattctactcctg

SEQ ID NO: 49796 - DNA, 25 bp, Artificial
  probe
  misc_feature (1)..(25): SEQ ID NO: 3543; WAN024AC5_at; Start 118; Stop 142
gtcaacaactcaatagactttcact

SEQ ID NO: 49797 - DNA, 25 bp, Artificial
  probe
  misc_feature (1)..(25): SEQ ID NO: 3543; WAN024AC5_at; Start 115; Stop 139
agtgtcaacaactcaatagactttc

SEQ ID NO: 49798 - DNA, 25 bp, Artificial
  probe
  misc_feature (1)..(25): SEQ ID NO: 3543; WAN024AC5_at; Start 114; Stop 138
gagtgtcaacaactcaatagacttt

SEQ ID NO: 49799 - DNA, 25 bp, Artificial
  probe
  misc_feature (1)..(25): SEQ ID NO: 3543; WAN024AC5_at; Start 45; Stop 69
ctgaaaatttaatctgtcaagatat

SEQ ID NO: 49800 - DNA, 25 bp, Artificial
  probe
  misc_feature (1)..(25): SEQ ID NO: 3543; WAN024AC5_at; Start 58; Stop 82
ctgtcaagatatttttagaaaaaat

SEQ ID NO: 49801 - DNA, 25 bp, Artificial
  probe
  misc_feature (1)..(25): SEQ ID NO: 3543; WAN024AC5_at; Start 27; Stop 51
ctagtaaatattctactcctgaaaa

SEQ ID NO: 49802 - DNA, 25 bp, Artificial
  probe
  misc_feature (1)..(25): SEQ ID NO: 3543; WAN024AC5_at; Start 55; Stop 79
aatctgtcaagatatttttagaaaa

SEQ ID NO: 49803 - DNA, 25 bp, Artificial
  probe
  misc_feature (1)..(25): SEQ ID NO: 3543; WAN024AC5_at; Start 36; Stop 60
attctactcctgaaaatttaatctg

SEQ ID NO: 49804 - DNA, 25 bp, Artificial
  probe
  misc_feature (1)..(25): SEQ ID NO: 3543; WAN024AC5_at; Start 57; Stop 81
tctgtcaagatatttttagaaaaaa

SEQ ID NO: 49805 - DNA, 25 bp, Artificial
  probe
  misc_feature (1)..(25): SEQ ID NO: 3543; WAN024AC5_at; Start 31; Stop 55
taaatattctactcctgaaaattta

SEQ ID NO: 49806 - DNA, 25 bp, Artificial
  probe
  misc_feature (1)..(25): SEQ ID NO: 3543; WAN024AC5_at; Start 43; Stop 67
tcctgaaaatttaatctgtcaagat

SEQ ID NO: 49807 - DNA, 25 bp, Artificial
  probe
  misc_feature (1)..(25): SEQ ID NO: 3543; WAN024AC5_at; Start 113; Stop 137
tgagtgtcaacaactcaatagactt

SEQ ID NO: 49808 - DNA, 25 bp, Artificial
  probe
  misc_feature (1)..(25): SEQ ID NO: 3543; WAN024AC5_at; Start 35; Stop 59
tattctactcctgaaaatttaatct

SEQ ID NO: 49809 - DNA, 25 bp, Artificial
  probe
  misc_feature (1)..(25): SEQ ID NO: 3543; WAN024AC5_at; Start 85; Stop 109
gaaatttctttcacatataaaaatc

SEQ ID NO: 49810 - DNA, 25 bp, Artificial
  probe
  misc_feature (1)..(25): SEQ ID NO: 3543; WAN024AC5_at; Start 46; Stop 70
tgaaaatttaatctgtcaagatatt

SEQ ID NO: 49811 - DNA, 25 bp, Artificial
  probe
  misc_feature (1)..(25): SEQ ID NO: 3543; WAN024AC5_at; Start 26; Stop 50
actagtaaatattctactcctgaaa

SEQ ID NO: 49812 - DNA, 25 bp, Artificial
  probe
  misc_feature (1)..(25): SEQ ID NO: 3543; WAN024AC5_at; Start 37; Stop 61
ttctactcctgaaaatttaatctgt

SEQ ID NO: 49813 - DNA, 25 bp, Artificial
  probe
  misc_feature (1)..(25): SEQ ID NO: 3543; WAN024AC5_at; Start 38; Stop 62
tctactcctgaaaatttaatctgtc

SEQ ID NO: 49814 - DNA, 25 bp, Artificial
  probe
  misc_feature (1)..(25): SEQ ID NO: 3543; WAN024AC5_at; Start 24; Stop 48
taactagtaaatattctactcctga

SEQ ID NO: 49815 - DNA, 25 bp, Artificial
  probe
  misc_feature (1)..(25): SEQ ID NO: 3543; WAN024AC5_at; Start 112; Stop 136
ctgagtgtcaacaactcaatagact

SEQ ID NO: 49816 - DNA, 25 bp, Artificial
  probe
  misc_feature (1)..(25): SEQ ID NO: 3543; WAN024AC5_at; Start 20; Stop 44
taattaactagtaaatattctactc

SEQ ID NO: 49817 - DNA, 25 bp, Artificial
  probe
  misc_feature (1)..(25): SEQ ID NO: 492; WAN024AC6_at; Start 91; Stop 115
attttcaggagtagaatatttacta

SEQ ID NO: 49818 - DNA, 25 bp, Artificial
  probe
  misc_feature (1)..(25): SEQ ID NO: 492; WAN024AC6_at; Start 4; Stop 28
gaaagtctattgagttgttgacact

SEQ ID NO: 49819 - DNA, 25 bp, Artificial
  probe
  misc_feature (1)..(25): SEQ ID NO: 492; WAN024AC6_at; Start 2; Stop 26
gtgaaagtctattgagttgttgaca

SEQ ID NO: 49820 - DNA, 25 bp, Artificial
  probe
  misc_feature (1)..(25): SEQ ID NO: 492; WAN024AC6_at; Start 96; Stop 120
caggagtagaatatttactagttaa

SEQ ID NO: 49821 - DNA, 25 bp, Artificial
  probe
  misc_feature (1)..(25): SEQ ID NO: 492; WAN024AC6_at; Start 85; Stop 109
gattaaattttcaggagtagaatat

SEQ ID NO: 49822 - DNA, 25 bp, Artificial
  probe
  misc_feature (1)..(25): SEQ ID NO: 492; WAN024AC6_at; Start 90; Stop 114
aattttcaggagtagaatatttact

SEQ ID NO: 49823 - DNA, 25 bp, Artificial
  probe
  misc_feature (1)..(25): SEQ ID NO: 492; WAN024AC6_at; Start 67; Stop 91
tctaaaaatatcttgacagattaaa

SEQ ID NO: 49824 - DNA, 25 bp, Artificial
  probe
  misc_feature (1)..(25): SEQ ID NO: 492; WAN024AC6_at; Start 94; Stop 118
ttcaggagtagaatatttactagtt

SEQ ID NO: 49825 - DNA, 25 bp, Artificial
  probe
  misc_feature (1)..(25): SEQ ID NO: 492; WAN024AC6_at; Start 77; Stop 101
tcttgacagattaaattttcaggag

SEQ ID NO: 49826 - DNA, 25 bp, Artificial
  probe
  misc_feature (1)..(25): SEQ ID NO: 492; WAN024AC6_at; Start 7; Stop 31
agtctattgagttgttgacactcag

SEQ ID NO: 49827 - DNA, 25 bp, Artificial
  probe
  misc_feature (1)..(25): SEQ ID NO: 492; WAN024AC6_at; Start 66; Stop 90
ttctaaaaatatcttgacagattaa

SEQ ID NO: 49828 - DNA, 25 bp, Artificial
  probe
  misc_feature (1)..(25): SEQ ID NO: 492; WAN024AC6_at; Start 95; Stop 119
tcaggagtagaatatttactagtta

SEQ ID NO: 49829 - DNA, 25 bp, Artificial
  probe
  misc_feature (1)..(25): SEQ ID NO: 492; WAN024AC6_at; Start 82; Stop 106
acagattaaattttcaggagtagaa

SEQ ID NO: 49830 - DNA, 25 bp, Artificial
  probe
  misc_feature (1)..(25): SEQ ID NO: 492; WAN024AC6_at; Start 62; Stop 86
ttttttctaaaaatatcttgacaga

SEQ ID NO: 49831 - DNA, 25 bp, Artificial
  probe
  misc_feature (1)..(25): SEQ ID NO: 492; WAN024AC6_at; Start 65; Stop 89
tttctaaaaatatcttgacagatta

SEQ ID NO: 49832 - DNA, 25 bp, Artificial
  probe
  misc_feature (1)..(25): SEQ ID NO: 492; WAN024AC6_at; Start 81; Stop 105
gacagattaaattttcaggagtaga

SEQ ID NO: 49833 - DNA, 25 bp, Artificial
  probe
  misc_feature (1)..(25): SEQ ID NO: 492; WAN024AC6_at; Start 92; Stop 116
ttttcaggagtagaatatttactag

SEQ ID NO: 49834 - DNA, 25 bp, Artificial
  probe
  misc_feature (1)..(25): SEQ ID NO: 492; WAN024AC6_at; Start 37; Stop 61
ttttatatgtgaaagaaatttcaaa

SEQ ID NO: 49835 - DNA, 25 bp, Artificial
  probe
  misc_feature (1)..(25): SEQ ID NO: 492; WAN024AC6_at; Start 34; Stop 58
gatttttatatgtgaaagaaatttc

SEQ ID NO: 49836 - DNA, 25 bp, Artificial
  probe
  misc_feature (1)..(25): SEQ ID NO: 492; WAN024AC6_at; Start 84; Stop 108
agattaaattttcaggagtagaata

SEQ ID NO: 49837 - DNA, 25 bp, Artificial
  probe
  misc_feature (1)..(25): SEQ ID NO: 492; WAN024AC6_at; Start 40; Stop 64
tatatgtgaaagaaatttcaaattt

SEQ ID NO: 49838 - DNA, 25 bp, Artificial
  probe
  misc_feature (1)..(25): SEQ ID NO: 492; WAN024AC6_at; Start 99; Stop 123
gagtagaatatttactagttaatta

SEQ ID NO: 49839 - DNA, 25 bp, Artificial
  probe
  misc_feature (1)..(25): SEQ ID NO: 492; WAN024AC6_at; Start 68; Stop 92
ctaaaaatatcttgacagattaaat

SEQ ID NO: 49840 - DNA, 25 bp, Artificial
  probe
  misc_feature (1)..(25): SEQ ID NO: 492; WAN024AC6_at; Start 5; Stop 29
aaagtctattgagttgttgacactc

SEQ ID NO: 49841 - DNA, 25 bp, Artificial
  probe
  misc_feature (1)..(25): SEQ ID NO: 492; WAN024AC6_at; Start 78; Stop 102
cttgacagattaaattttcaggagt

SEQ ID NO: 49842 - DNA, 25 bp, Artificial
  probe
  misc_feature (1)..(25): SEQ ID NO: 492; WAN024AC6_at; Start 64; Stop 88
ttttctaaaaatatcttgacagatt

SEQ ID NO: 49843 - DNA, 25 bp, Artificial
  probe
  misc_feature (1)..(25): SEQ ID NO: 492; WAN024AC6_at; Start 79; Stop 103
ttgacagattaaattttcaggagta

SEQ ID NO: 49844 - DNA, 25 bp, Artificial
  probe
  misc_feature (1)..(25): SEQ ID NO: 492; WAN024AC6_at; Start 6; Stop 30
aagtctattgagttgttgacactca

SEQ ID NO: 49845 - DNA, 25 bp, Artificial
  probe
  misc_feature (1)..(25): SEQ ID NO: 492; WAN024AC6_at; Start 97; Stop 121
aggagtagaatatttactagttaat

SEQ ID NO: 49846 - DNA, 25 bp, Artificial
  probe
  misc_feature (1)..(25): SEQ ID NO: 492; WAN024AC6_at; Start 3; Stop 27
tgaaagtctattgagttgttgacac

SEQ ID NO: 49847 - DNA, 25 bp, Artificial
  probe
  misc_feature (1)..(25): SEQ ID NO: 492; WAN024AC6_at; Start 1; Stop 25
agtgaaagtctattgagttgttgac

SEQ ID NO: 49848 - DNA, 25 bp, Artificial
  probe
  misc_feature (1)..(25): SEQ ID NO: 492; WAN024AC6_at; Start 93; Stop 117
tttcaggagtagaatatttactagt

SEQ ID NO: 49849 - DNA, 25 bp, Artificial
  probe
  misc_feature (1)..(25): SEQ ID NO: 492; WAN024AC6_at; Start 80; Stop 104
tgacagattaaattttcaggagtag

SEQ ID NO: 49850 - DNA, 25 bp, Artificial
  probe
  misc_feature (1)..(25): SEQ ID NO: 492; WAN024AC6_at; Start 83; Stop 107
cagattaaattttcaggagtagaat

SEQ ID NO: 49851 - DNA, 25 bp, Artificial
  probe
  misc_feature (1)..(25): SEQ ID NO: 3506; WAN024AC7_at; Start 9; Stop 33
ccaaaataaactgataattctattt

SEQ ID NO: 49852 - DNA, 25 bp, Artificial
  probe
  misc_feature (1)..(25): SEQ ID NO: 3506; WAN024AC7_at; Start 1; Stop 25
ctttgactccaaaataaactgataa

SEQ ID NO: 49853 - DNA, 25 bp, Artificial
  probe
  misc_feature (1)..(25): SEQ ID NO: 3506; WAN024AC7_at; Start 26; Stop 50
ttctattttaccataaatataggag

SEQ ID NO: 49854 - DNA, 25 bp, Artificial
  probe
  misc_feature (1)..(25): SEQ ID NO: 3506; WAN024AC7_at; Start 30; Stop 54
attttaccataaatataggagatat

SEQ ID NO: 49855 - DNA, 25 bp, Artificial
  probe
  misc_feature (1)..(25): SEQ ID NO: 3506; WAN024AC7_at; Start 17; Stop 41
aactgataattctattttaccataa

SEQ ID NO: 49856 - DNA, 25 bp, Artificial
  probe
  misc_feature (1)..(25): SEQ ID NO: 3506; WAN024AC7_at; Start 33; Stop 57
ttaccataaatataggagatatgtg

SEQ ID NO: 49857 - DNA, 25 bp, Artificial
  probe
  misc_feature (1)..(25): SEQ ID NO: 3506; WAN024AC7_at; Start 36; Stop 60
ccataaatataggagatatgtgaat

SEQ ID NO: 49858 - DNA, 25 bp, Artificial
  probe
  misc_feature (1)..(25): SEQ ID NO: 3506; WAN024AC7_at; Start 15; Stop 39
taaactgataattctattttaccat

SEQ ID NO: 49859 - DNA, 25 bp, Artificial
  probe
  misc_feature (1)..(25): SEQ ID NO: 3506; WAN024AC7_at; Start 4; Stop 28
tgactccaaaataaactgataattc

SEQ ID NO: 49860 - DNA, 25 bp, Artificial
  probe
  misc_feature (1)..(25): SEQ ID NO: 3506; WAN024AC7_at; Start 32; Stop 56
tttaccataaatataggagatatgt

SEQ ID NO: 49861 - DNA, 25 bp, Artificial
  probe
  misc_feature (1)..(25): SEQ ID NO: 3506; WAN024AC7_at; Start 8; Stop 32
tccaaaataaactgataattctatt

SEQ ID NO: 49862 - DNA, 25 bp, Artificial
  probe
  misc_feature (1)..(25): SEQ ID NO: 3506; WAN024AC7_at; Start 39; Stop 63
taaatataggagatatgtgaatatt

SEQ ID NO: 49863 - DNA, 25 bp, Artificial
  probe
  misc_feature (1)..(25): SEQ ID NO: 3506; WAN024AC7_at; Start 24; Stop 48
aattctattttaccataaatatagg

SEQ ID NO: 49864 - DNA, 25 bp, Artificial
  probe
  misc_feature (1)..(25): SEQ ID NO: 3506; WAN024AC7_at; Start 37; Stop 61
cataaatataggagatatgtgaata

SEQ ID NO: 49865 - DNA, 25 bp, Artificial
  probe
  misc_feature (1)..(25): SEQ ID NO: 3506; WAN024AC7_at; Start 28; Stop 52
ctattttaccataaatataggagat

SEQ ID NO: 49866 - DNA, 25 bp, Artificial
  probe
  misc_feature (1)..(25): SEQ ID NO: 3506; WAN024AC7_at; Start 50; Stop 74
gatatgtgaatatttataaaatgtt

SEQ ID NO: 49867 - DNA, 25 bp, Artificial
  probe
  misc_feature (1)..(25): SEQ ID NO: 3506; WAN024AC7_at; Start 19; Stop 43
ctgataattctattttaccataaat

SEQ ID NO: 49868 - DNA, 25 bp, Artificial
  probe
  misc_feature (1)..(25): SEQ ID NO: 3506; WAN024AC7_at; Start 20; Stop 44
tgataattctattttaccataaata

SEQ ID NO: 49869 - DNA, 25 bp, Artificial
  probe
  misc_feature (1)..(25): SEQ ID NO: 3506; WAN024AC7_at; Start 45; Stop 69
taggagatatgtgaatatttataaa

SEQ ID NO: 49870 - DNA, 25 bp, Artificial
  probe
  misc_feature (1)..(25): SEQ ID NO: 3506; WAN024AC7_at; Start 41; Stop 65
aatataggagatatgtgaatattta

SEQ ID NO: 49871 - DNA, 25 bp, Artificial
  probe
  misc_feature (1)..(25): SEQ ID NO: 3506; WAN024AC7_at; Start 48; Stop 72
gagatatgtgaatatttataaaatg

SEQ ID NO: 49872 - DNA, 25 bp, Artificial
  probe
  misc_feature (1)..(25): SEQ ID NO: 3506; WAN024AC7_at; Start 35; Stop 59
accataaatataggagatatgtgaa

SEQ ID NO: 49873 - DNA, 25 bp, Artificial
  probe
  misc_feature (1)..(25): SEQ ID NO: 3506; WAN024AC7_at; Start 2; Stop 26
tttgactccaaaataaactgataat

SEQ ID NO: 49874 - DNA, 25 bp, Artificial
  probe
  misc_feature (1)..(25): SEQ ID NO: 3506; WAN024AC7_at; Start 18; Stop 42
actgataattctattttaccataaa

SEQ ID NO: 49875 - DNA, 25 bp, Artificial
  probe
  misc_feature (1)..(25): SEQ ID NO: 3506; WAN024AC7_at; Start 5; Stop 29
gactccaaaataaactgataattct

SEQ ID NO: 49876 - DNA, 25 bp, Artificial
  probe
  misc_feature (1)..(25): SEQ ID NO: 3506; WAN024AC7_at; Start 29; Stop 53
tattttaccataaatataggagata

SEQ ID NO: 49877 - DNA, 25 bp, Artificial
  probe
  misc_feature (1)..(25): SEQ ID NO: 3506; WAN024AC7_at; Start 47; Stop 71
ggagatatgtgaatatttataaaat

SEQ ID NO: 49878 - DNA, 25 bp, Artificial
  probe
  misc_feature (1)..(25): SEQ ID NO: 3506; WAN024AC7_at; Start 27; Stop 51
tctattttaccataaatataggaga

SEQ ID NO: 49879 - DNA, 25 bp, Artificial
  probe
  misc_feature (1)..(25): SEQ ID NO: 3506; WAN024AC7_at; Start 7; Stop 31
ctccaaaataaactgataattctat

SEQ ID NO: 49880 - DNA, 25 bp, Artificial
  probe
  misc_feature (1)..(25): SEQ ID NO: 3506; WAN024AC7_at; Start 31; Stop 55
ttttaccataaatataggagatatg

SEQ ID NO: 49881 - DNA, 25 bp, Artificial
  probe
  misc_feature (1)..(25): SEQ ID NO: 3506; WAN024AC7_at; Start 16; Stop 40
aaactgataattctattttaccata

SEQ ID NO: 49882 - DNA, 25 bp, Artificial
  probe
  misc_feature (1)..(25): SEQ ID NO: 3506; WAN024AC7_at; Start 14; Stop 38
ataaactgataattctattttacca

SEQ ID NO: 49883 - DNA, 25 bp, Artificial
  probe
  misc_feature (1)..(25): SEQ ID NO: 3506; WAN024AC7_at; Start 6; Stop 30
actccaaaataaactgataattcta

SEQ ID NO: 49884 - DNA, 25 bp, Artificial
  probe
  misc_feature (1)..(25): SEQ ID NO: 3506; WAN024AC7_at; Start 34; Stop 58
taccataaatataggagatatgtga

SEQ ID NO: 49885 - DNA, 25 bp, Artificial
  probe
  misc_feature (1)..(25): SEQ ID NO: 109; WAN024AC8_at; Start 47; Stop 71
agaattatcagtttattttggagtc

SEQ ID NO: 49886 - DNA, 25 bp, Artificial
  probe
  misc_feature (1)..(25): SEQ ID NO: 109; WAN024AC8_at; Start 18; Stop 42
tcacatatctcctatatttatggta

SEQ ID NO: 49887 - DNA, 25 bp, Artificial
  probe
  misc_feature (1)..(25): SEQ ID NO: 109; WAN024AC8_at; Start 50; Stop 74
attatcagtttattttggagtcaaa

SEQ ID NO: 49888 - DNA, 25 bp, Artificial
  probe
  misc_feature (1)..(25): SEQ ID NO: 109; WAN024AC8_at; Start 19; Stop 43
cacatatctcctatatttatggtaa

SEQ ID NO: 49889 - DNA, 25 bp, Artificial
  probe
  misc_feature (1)..(25): SEQ ID NO: 109; WAN024AC8_at; Start 14; Stop 38
atattcacatatctcctatatttat

SEQ ID NO: 49890 - DNA, 25 bp, Artificial
  probe
  misc_feature (1)..(25): SEQ ID NO: 109; WAN024AC8_at; Start 46; Stop 70
tagaattatcagtttattttggagt

SEQ ID NO: 49891 - DNA, 25 bp, Artificial
  probe
  misc_feature (1)..(25): SEQ ID NO: 109; WAN024AC8_at; Start 37; Stop 61
atggtaaaatagaattatcagttta

SEQ ID NO: 49892 - DNA, 25 bp, Artificial
  probe
  misc_feature (1)..(25): SEQ ID NO: 109; WAN024AC8_at; Start 15; Stop 39
tattcacatatctcctatatttatg

SEQ ID NO: 49893 - DNA, 25 bp, Artificial
  probe
  misc_feature (1)..(25): SEQ ID NO: 109; WAN024AC8_at; Start 44; Stop 68
aatagaattatcagtttattttgga

SEQ ID NO: 49894 - DNA, 25 bp, Artificial
  probe
  misc_feature (1)..(25): SEQ ID NO: 109; WAN024AC8_at; Start 45; Stop 69
atagaattatcagtttattttggag

SEQ ID NO: 49895 - DNA, 25 bp, Artificial
  probe
  misc_feature (1)..(25): SEQ ID NO: 109; WAN024AC8_at; Start 36; Stop 60
tatggtaaaatagaattatcagttt

SEQ ID NO: 49896 - DNA, 25 bp, Artificial
  probe
  misc_feature (1)..(25): SEQ ID NO: 109; WAN024AC8_at; Start 48; Stop 72
gaattatcagtttattttggagtca

SEQ ID NO: 49897 - DNA, 25 bp, Artificial
  probe
  misc_feature (1)..(25): SEQ ID NO: 109; WAN024AC8_at; Start 20; Stop 44
acatatctcctatatttatggtaaa

SEQ ID NO: 49898 - DNA, 25 bp, Artificial
  probe
  misc_feature (1)..(25): SEQ ID NO: 109; WAN024AC8_at; Start 51; Stop 75
ttatcagtttattttggagtcaaag

SEQ ID NO: 49899 - DNA, 25 bp, Artificial
  probe
  misc_feature (1)..(25): SEQ ID NO: 109; WAN024AC8_at; Start 22; Stop 46
atatctcctatatttatggtaaaat

SEQ ID NO: 49900 - DNA, 25 bp, Artificial
  probe
  misc_feature (1)..(25): SEQ ID NO: 109; WAN024AC8_at; Start 21; Stop 45
catatctcctatatttatggtaaaa

SEQ ID NO: 49901 - DNA, 25 bp, Artificial
  probe
  misc_feature (1)..(25): SEQ ID NO: 109; WAN024AC8_at; Start 16; Stop 40
attcacatatctcctatatttatgg

SEQ ID NO: 49902 - DNA, 25 bp, Artificial
  probe
  misc_feature (1)..(25): SEQ ID NO: 109; WAN024AC8_at; Start 17; Stop 41
ttcacatatctcctatatttatggt

SEQ ID NO: 49903 - DNA, 25 bp, Artificial
  probe
  misc_feature (1)..(25): SEQ ID NO: 109; WAN024AC8_at; Start 24; Stop 48
atctcctatatttatggtaaaatag

SEQ ID NO: 49904 - DNA, 25 bp, Artificial
  probe
  misc_feature (1)..(25): SEQ ID NO: 109; WAN024AC8_at; Start 49; Stop 73
aattatcagtttattttggagtcaa

SEQ ID NO: 49905 - DNA, 25 bp, Artificial
  probe
  misc_feature (1)..(25): SEQ ID NO: 109; WAN024AC8_at; Start 23; Stop 47
tatctcctatatttatggtaaaata

SEQ ID NO: 49906 - DNA, 25 bp, Artificial
  probe
  misc_feature (1)..(25): SEQ ID NO: 109; WAN024AC8_at; Start 38; Stop 62
tggtaaaatagaattatcagtttat

SEQ ID NO: 49907 - DNA, 25 bp, Artificial
  probe
  misc_feature (1)..(25): SEQ ID NO: 109; WAN024AC8_at; Start 43; Stop 67
aaatagaattatcagtttattttgg

SEQ ID NO: 49908 - DNA, 25 bp, Artificial
  probe
  misc_feature (1)..(25): SEQ ID NO: 501; WAN024AC9_at; Start 192; Stop 216
tacatccataagtgacataggagtt

SEQ ID NO: 49909 - DNA, 25 bp, Artificial
  probe
  misc_feature (1)..(25): SEQ ID NO: 501; WAN024AC9_at; Start 197; Stop 221
ccataagtgacataggagtttaggc

SEQ ID NO: 49910 - DNA, 25 bp, Artificial
  probe
  misc_feature (1)..(25): SEQ ID NO: 501; WAN024AC9_at; Start 184; Stop 208
agaactcctacatccataagtgaca

SEQ ID NO: 49911 - DNA, 25 bp, Artificial
  probe
  misc_feature (1)..(25): SEQ ID NO: 501; WAN024AC9_at; Start 183; Stop 207
aagaactcctacatccataagtgac

SEQ ID NO: 49912 - DNA, 25 bp, Artificial
  probe
  misc_feature (1)..(25): SEQ ID NO: 501; WAN024AC9_at; Start 187; Stop 211
actcctacatccataagtgacatag

SEQ ID NO: 49913 - DNA, 25 bp, Artificial
  probe
  misc_feature (1)..(25): SEQ ID NO: 501; WAN024AC9_at; Start 133; Stop 157
agttgctattttttcttagtacctg

SEQ ID NO: 49914 - DNA, 25 bp, Artificial
  probe
  misc_feature (1)..(25): SEQ ID NO: 501; WAN024AC9_at; Start 19; Stop 43
gtatcttatcctttattatatcaca

SEQ ID NO: 49915 - DNA, 25 bp, Artificial
  probe
  misc_feature (1)..(25): SEQ ID NO: 501; WAN024AC9_at; Start 203; Stop 227
gtgacataggagtttaggcttatct

SEQ ID NO: 49916 - DNA, 25 bp, Artificial
  probe
  misc_feature (1)..(25): SEQ ID NO: 501; WAN024AC9_at; Start 196; Stop 220
tccataagtgacataggagtttagg

SEQ ID NO: 49917 - DNA, 25 bp, Artificial
  probe
  misc_feature (1)..(25): SEQ ID NO: 501; WAN024AC9_at; Start 185; Stop 209
gaactcctacatccataagtgacat

SEQ ID NO: 49918 - DNA, 25 bp, Artificial
  probe
  misc_feature (1)..(25): SEQ ID NO: 501; WAN024AC9_at; Start 175; Stop 199
ctagtaaaaagaactcctacatcca

SEQ ID NO: 49919 - DNA, 25 bp, Artificial
  probe
  misc_feature (1)..(25): SEQ ID NO: 501; WAN024AC9_at; Start 200; Stop 224
taagtgacataggagtttaggctta

SEQ ID NO: 49920 - DNA, 25 bp, Artificial
  probe
  misc_feature (1)..(25): SEQ ID NO: 501; WAN024AC9_at; Start 129; Stop 153
tagaagttgctattttttcttagta

SEQ ID NO: 49921 - DNA, 25 bp, Artificial
  probe
  misc_feature (1)..(25): SEQ ID NO: 501; WAN024AC9_at; Start 37; Stop 61
tatcacaaaatttaatccaatacat

SEQ ID NO: 49922 - DNA, 25 bp, Artificial
  probe
  misc_feature (1)..(25): SEQ ID NO: 501; WAN024AC9_at; Start 202; Stop 226
agtgacataggagtttaggcttatc

SEQ ID NO: 49923 - DNA, 25 bp, Artificial
  probe
  misc_feature (1)..(25): SEQ ID NO: 501; WAN024AC9_at; Start 198; Stop 222
cataagtgacataggagtttaggct

SEQ ID NO: 49924 - DNA, 25 bp, Artificial
  probe
  misc_feature (1)..(25): SEQ ID NO: 501; WAN024AC9_at; Start 177; Stop 201
agtaaaaagaactcctacatccata

SEQ ID NO: 49925 - DNA, 25 bp, Artificial
  probe
  misc_feature (1)..(25): SEQ ID NO: 501; WAN024AC9_at; Start 194; Stop 218
catccataagtgacataggagttta

SEQ ID NO: 49926 - DNA, 25 bp, Artificial
  probe
  misc_feature (1)..(25): SEQ ID NO: 501; WAN024AC9_at; Start 181; Stop 205
aaaagaactcctacatccataagtg

SEQ ID NO: 49927 - DNA, 25 bp, Artificial
  probe
  misc_feature (1)..(25): SEQ ID NO: 501; WAN024AC9_at; Start 182; Stop 206
aaagaactcctacatccataagtga

SEQ ID NO: 49928 - DNA, 25 bp, Artificial
  probe
  misc_feature (1)..(25): SEQ ID NO: 501; WAN024AC9_at; Start 186; Stop 210
aactcctacatccataagtgacata

SEQ ID NO: 49929 - DNA, 25 bp, Artificial
  probe
  misc_feature (1)..(25): SEQ ID NO: 501; WAN024AC9_at; Start 191; Stop 215
ctacatccataagtgacataggagt

SEQ ID NO: 49930 - DNA, 25 bp, Artificial
  probe
  misc_feature (1)..(25): SEQ ID NO: 501; WAN024AC9_at; Start 204; Stop 228
tgacataggagtttaggcttatctt

SEQ ID NO: 49931 - DNA, 25 bp, Artificial
  probe
  misc_feature (1)..(25): SEQ ID NO: 501; WAN024AC9_at; Start 188; Stop 212
ctcctacatccataagtgacatagg

SEQ ID NO: 49932 - DNA, 25 bp, Artificial
  probe
  misc_feature (1)..(25): SEQ ID NO: 501; WAN024AC9_at; Start 7; Stop 31
tctcctaaaatagtatcttatcctt

SEQ ID NO: 49933 - DNA, 25 bp, Artificial
  probe
  misc_feature (1)..(25): SEQ ID NO: 501; WAN024AC9_at; Start 179; Stop 203
taaaaagaactcctacatccataag

SEQ ID NO: 49934 - DNA, 25 bp, Artificial
  probe
  misc_feature (1)..(25): SEQ ID NO: 501; WAN024AC9_at; Start 2; Stop 26
gttcttctcctaaaatagtatctta

SEQ ID NO: 49935 - DNA, 25 bp, Artificial
  probe
  misc_feature (1)..(25): SEQ ID NO: 501; WAN024AC9_at; Start 54; Stop 78
caatacatattattttttcttaccg

SEQ ID NO: 49936 - DNA, 25 bp, Artificial
  probe
  misc_feature (1)..(25): SEQ ID NO: 501; WAN024AC9_at; Start 4; Stop 28
tcttctcctaaaatagtatcttatc

SEQ ID NO: 49937 - DNA, 25 bp, Artificial
  probe
  misc_feature (1)..(25): SEQ ID NO: 501; WAN024AC9_at; Start 39; Stop 63
tcacaaaatttaatccaatacatat

SEQ ID NO: 49938 - DNA, 25 bp, Artificial
  probe
  misc_feature (1)..(25): SEQ ID NO: 501; WAN024AC9_at; Start 176; Stop 200
tagtaaaaagaactcctacatccat

SEQ ID NO: 49939 - DNA, 25 bp, Artificial
  probe
  misc_feature (1)..(25): SEQ ID NO: 501; WAN024AC9_at; Start 136; Stop 160
tgctattttttcttagtacctgttc

SEQ ID NO: 49940 - DNA, 25 bp, Artificial
  probe
  misc_feature (1)..(25): SEQ ID NO: 501; WAN024AC9_at; Start 190; Stop 214
cctacatccataagtgacataggag

SEQ ID NO: 49941 - DNA, 25 bp, Artificial
  probe
  misc_feature (1)..(25): SEQ ID NO: 501; WAN024AC9_at; Start 22; Stop 46
tcttatcctttattatatcacaaaa

SEQ ID NO: 49942 - DNA, 25 bp, Artificial
  probe
  misc_feature (1)..(25): SEQ ID NO: 454; WAN024ACA_at; Start 85; Stop 109
ttatacaatgttgtcacatagaaaa

SEQ ID NO: 49943 - DNA, 25 bp, Artificial
  probe
  misc_feature (1)..(25): SEQ ID NO: 454; WAN024ACA_at; Start 72; Stop 96
aaaatgcaagcaattatacaatgtt

SEQ ID NO: 49944 - DNA, 25 bp, Artificial
  probe
  misc_feature (1)..(25): SEQ ID NO: 454; WAN024ACA_at; Start 171; Stop 195
tagaagttacctaaaaatcaggtca

SEQ ID NO: 49945 - DNA, 25 bp, Artificial
  probe
  misc_feature (1)..(25): SEQ ID NO: 454; WAN024ACA_at; Start 79; Stop 103
aagcaattatacaatgttgtcacat

SEQ ID NO: 49946 - DNA, 25 bp, Artificial
  probe
  misc_feature (1)..(25): SEQ ID NO: 454; WAN024ACA_at; Start 75; Stop 99
atgcaagcaattatacaatgttgtc

SEQ ID NO: 49947 - DNA, 25 bp, Artificial
  probe
  misc_feature (1)..(25): SEQ ID NO: 454; WAN024ACA_at; Start 78; Stop 102
caagcaattatacaatgttgtcaca

SEQ ID NO: 49948 - DNA, 25 bp, Artificial
  probe
  misc_feature (1)..(25): SEQ ID NO: 454; WAN024ACA_at; Start 99; Stop 123
cacatagaaaataatgtttccgtaa

SEQ ID NO: 49949 - DNA, 25 bp, Artificial
  probe
  misc_feature (1)..(25): SEQ ID NO: 454; WAN024ACA_at; Start 89; Stop 113
acaatgttgtcacatagaaaataat

SEQ ID NO: 49950 - DNA, 25 bp, Artificial
  probe
  misc_feature (1)..(25): SEQ ID NO: 454; WAN024ACA_at; Start 71; Stop 95
taaaatgcaagcaattatacaatgt

SEQ ID NO: 49951 - DNA, 25 bp, Artificial
  probe
  misc_feature (1)..(25): SEQ ID NO: 454; WAN024ACA_at; Start 77; Stop 101
gcaagcaattatacaatgttgtcac

SEQ ID NO: 49952 - DNA, 25 bp, Artificial
  probe
  misc_feature (1)..(25): SEQ ID NO: 454; WAN024ACA_at; Start 84; Stop 108
attatacaatgttgtcacatagaaa

SEQ ID NO: 49953 - DNA, 25 bp, Artificial
  probe
  misc_feature (1)..(25): SEQ ID NO: 454; WAN024ACA_at; Start 91; Stop 115
aatgttgtcacatagaaaataatgt

SEQ ID NO: 49954 - DNA, 25 bp, Artificial
  probe
  misc_feature (1)..(25): SEQ ID NO: 454; WAN024ACA_at; Start 81; Stop 105
gcaattatacaatgttgtcacatag

SEQ ID NO: 49955 - DNA, 25 bp, Artificial
  probe
  misc_feature (1)..(25): SEQ ID NO: 454; WAN024ACA_at; Start 80; Stop 104
agcaattatacaatgttgtcacata

SEQ ID NO: 49956 - DNA, 25 bp, Artificial
  probe
  misc_feature (1)..(25): SEQ ID NO: 454; WAN024ACA_at; Start 74; Stop 98
aatgcaagcaattatacaatgttgt

SEQ ID NO: 49957 - DNA, 25 bp, Artificial
  probe
  misc_feature (1)..(25): SEQ ID NO: 454; WAN024ACA_at; Start 92; Stop 116
atgttgtcacatagaaaataatgtt

SEQ ID NO: 49958 - DNA, 25 bp, Artificial
  probe
  misc_feature (1)..(25): SEQ ID NO: 454; WAN024ACA_at; Start 97; Stop 121
gtcacatagaaaataatgtttccgt

SEQ ID NO: 49959 - DNA, 25 bp, Artificial
  probe
  misc_feature (1)..(25): SEQ ID NO: 454; WAN024ACA_at; Start 87; Stop 111
atacaatgttgtcacatagaaaata

SEQ ID NO: 49960 - DNA, 25 bp, Artificial
  probe
  misc_feature (1)..(25): SEQ ID NO: 454; WAN024ACA_at; Start 95; Stop 119
ttgtcacatagaaaataatgtttcc

SEQ ID NO: 49961 - DNA, 25 bp, Artificial
  probe
  misc_feature (1)..(25): SEQ ID NO: 454; WAN024ACA_at; Start 73; Stop 97
aaatgcaagcaattatacaatgttg

SEQ ID NO: 49962 - DNA, 25 bp, Artificial
  probe
  misc_feature (1)..(25): SEQ ID NO: 454; WAN024ACA_at; Start 96; Stop 120
tgtcacatagaaaataatgtttccg

SEQ ID NO: 49963 - DNA, 25 bp, Artificial
  probe
  misc_feature (1)..(25): SEQ ID NO: 454; WAN024ACA_at; Start 94; Stop 118
gttgtcacatagaaaataatgtttc

SEQ ID NO: 49964 - DNA, 25 bp, Artificial
  probe
  misc_feature (1)..(25): SEQ ID NO: 454; WAN024ACA_at; Start 90; Stop 114
caatgttgtcacatagaaaataatg

SEQ ID NO: 49965 - DNA, 25 bp, Artificial
  probe
  misc_feature (1)..(25): SEQ ID NO: 454; WAN024ACA_at; Start 93; Stop 117
tgttgtcacatagaaaataatgttt

SEQ ID NO: 49966 - DNA, 25 bp, Artificial
  probe
  misc_feature (1)..(25): SEQ ID NO: 454; WAN024ACA_at; Start 101; Stop 125
catagaaaataatgtttccgtaact

SEQ ID NO: 49967 - DNA, 25 bp, Artificial
  probe
  misc_feature (1)..(25): SEQ ID NO: 454; WAN024ACA_at; Start 83; Stop 107
aattatacaatgttgtcacatagaa

SEQ ID NO: 49968 - DNA, 25 bp, Artificial
  probe
  misc_feature (1)..(25): SEQ ID NO: 454; WAN024ACA_at; Start 88; Stop 112
tacaatgttgtcacatagaaaataa

SEQ ID NO: 49969 - DNA, 25 bp, Artificial
  probe
  misc_feature (1)..(25): SEQ ID NO: 454; WAN024ACA_at; Start 98; Stop 122
tcacatagaaaataatgtttccgta

SEQ ID NO: 49970 - DNA, 25 bp, Artificial
  probe
  misc_feature (1)..(25): SEQ ID NO: 454; WAN024ACA_at; Start 82; Stop 106
caattatacaatgttgtcacataga

SEQ ID NO: 49971 - DNA, 25 bp, Artificial
  probe
  misc_feature (1)..(25): SEQ ID NO: 454; WAN024ACA_at; Start 76; Stop 100
tgcaagcaattatacaatgttgtca

SEQ ID NO: 49972 - DNA, 25 bp, Artificial
  probe
  misc_feature (1)..(25): SEQ ID NO: 454; WAN024ACA_at; Start 86; Stop 110
tatacaatgttgtcacatagaaaat

SEQ ID NO: 49973 - DNA, 25 bp, Artificial
  probe
  misc_feature (1)..(25): SEQ ID NO: 179; WAN024ACB_at; Start 32; Stop 56
taaatctattttgtatcattgcttg

SEQ ID NO: 49974 - DNA, 25 bp, Artificial
  probe
  misc_feature (1)..(25): SEQ ID NO: 179; WAN024ACB_at; Start 14; Stop 38
ttcgctatataaaatagttaaatct

SEQ ID NO: 49975 - DNA, 25 bp, Artificial
  probe
  misc_feature (1)..(25): SEQ ID NO: 179; WAN024ACB_at; Start 38; Stop 62
tattttgtatcattgcttgcatttt

SEQ ID NO: 49976 - DNA, 25 bp, Artificial
  probe
  misc_feature (1)..(25): SEQ ID NO: 179; WAN024ACB_at; Start 31; Stop 55
ttaaatctattttgtatcattgctt

SEQ ID NO: 49977 - DNA, 25 bp, Artificial
  probe
  misc_feature (1)..(25): SEQ ID NO: 179; WAN024ACB_at; Start 37; Stop 61
ctattttgtatcattgcttgcattt

SEQ ID NO: 49978 - DNA, 25 bp, Artificial
  probe
  misc_feature (1)..(25): SEQ ID NO: 179; WAN024ACB_at; Start 29; Stop 53
agttaaatctattttgtatcattgc

SEQ ID NO: 49979 - DNA, 25 bp, Artificial
  probe
  misc_feature (1)..(25): SEQ ID NO: 179; WAN024ACB_at; Start 6; Stop 30
tgtaagttttcgctatataaaatag

SEQ ID NO: 49980 - DNA, 25 bp, Artificial
  probe
  misc_feature (1)..(25): SEQ ID NO: 179; WAN024ACB_at; Start 16; Stop 40
cgctatataaaatagttaaatctat

SEQ ID NO: 49981 - DNA, 25 bp, Artificial
  probe
  misc_feature (1)..(25): SEQ ID NO: 179; WAN024ACB_at; Start 28; Stop 52
tagttaaatctattttgtatcattg

SEQ ID NO: 49982 - DNA, 25 bp, Artificial
  probe
  misc_feature (1)..(25): SEQ ID NO: 179; WAN024ACB_at; Start 5; Stop 29
ttgtaagttttcgctatataaaata

SEQ ID NO: 49983 - DNA, 25 bp, Artificial
  probe
  misc_feature (1)..(25): SEQ ID NO: 179; WAN024ACB_at; Start 35; Stop 59
atctattttgtatcattgcttgcat

SEQ ID NO: 49984 - DNA, 25 bp, Artificial
  probe
  misc_feature (1)..(25): SEQ ID NO: 179; WAN024ACB_at; Start 17; Stop 41
gctatataaaatagttaaatctatt

SEQ ID NO: 49985 - DNA, 25 bp, Artificial
  probe
  misc_feature (1)..(25): SEQ ID NO: 179; WAN024ACB_at; Start 34; Stop 58
aatctattttgtatcattgcttgca

SEQ ID NO: 49986 - DNA, 25 bp, Artificial
  probe
  misc_feature (1)..(25): SEQ ID NO: 179; WAN024ACB_at; Start 36; Stop 60
tctattttgtatcattgcttgcatt

SEQ ID NO: 49987 - DNA, 25 bp, Artificial
  probe
  misc_feature (1)..(25): SEQ ID NO: 179; WAN024ACB_at; Start 30; Stop 54
gttaaatctattttgtatcattgct

SEQ ID NO: 49988 - DNA, 25 bp, Artificial
  probe
  misc_feature (1)..(25): SEQ ID NO: 179; WAN024ACB_at; Start 25; Stop 49
aaatagttaaatctattttgtatca

SEQ ID NO: 49989 - DNA, 25 bp, Artificial
  probe
  misc_feature (1)..(25): SEQ ID NO: 179; WAN024ACB_at; Start 13; Stop 37
tttcgctatataaaatagttaaatc

SEQ ID NO: 49990 - DNA, 25 bp, Artificial
  probe
  misc_feature (1)..(25): SEQ ID NO: 179; WAN024ACB_at; Start 15; Stop 39
tcgctatataaaatagttaaatcta

SEQ ID NO: 49991 - DNA, 25 bp, Artificial
  probe
  misc_feature (1)..(25): SEQ ID NO: 179; WAN024ACB_at; Start 39; Stop 63
attttgtatcattgcttgcatttta

SEQ ID NO: 49992 - DNA, 25 bp, Artificial
  probe
  misc_feature (1)..(25): SEQ ID NO: 179; WAN024ACB_at; Start 33; Stop 57
aaatctattttgtatcattgcttgc

SEQ ID NO: 49993 - DNA, 25 bp, Artificial
  probe
  misc_feature (1)..(25): SEQ ID NO: 3788; WAN024ACC_at; Start 237; Stop 261
tacatcttgtaatcagattttatcg

SEQ ID NO: 49994 - DNA, 25 bp, Artificial
  probe
  misc_feature (1)..(25): SEQ ID NO: 3788; WAN024ACC_at; Start 126; Stop 150
cagtggaagttagtctaagacggat

SEQ ID NO: 49995 - DNA, 25 bp, Artificial
  probe
  misc_feature (1)..(25): SEQ ID NO: 3788; WAN024ACC_at; Start 221; Stop 245
gttaccaaaatctgactacatcttg

SEQ ID NO: 49996 - DNA, 25 bp, Artificial
  probe
  misc_feature (1)..(25): SEQ ID NO: 3788; WAN024ACC_at; Start 158; Stop 182
gatgtcacgcgtttttctcatacta

SEQ ID NO: 49997 - DNA, 25 bp, Artificial
  probe
  misc_feature (1)..(25): SEQ ID NO: 3788; WAN024ACC_at; Start 68; Stop 92
gtgcactttttctgagtcttttcgc

SEQ ID NO: 49998 - DNA, 25 bp, Artificial
  probe
  misc_feature (1)..(25): SEQ ID NO: 3788; WAN024ACC_at; Start 20; Stop 44
caaaactggaagttactctaagacg

SEQ ID NO: 49999 - DNA, 25 bp, Artificial
  probe
  misc_feature (1)..(25): SEQ ID NO: 3788; WAN024ACC_at; Start 228; Stop 252
aaatctgactacatcttgtaatcag

SEQ ID NO: 50000 - DNA, 25 bp, Artificial
  probe
  misc_feature (1)..(25): SEQ ID NO: 3788; WAN024ACC_at; Start 144; Stop 168
gacggatttccactgatgtcacgcg

SEQ ID NO: 50001 - DNA, 25 bp, Artificial
  probe
  misc_feature (1)..(25): SEQ ID NO: 3788; WAN024ACC_at; Start 131; Stop 155
gaagttagtctaagacggatttcca

SEQ ID NO: 50002 - DNA, 25 bp, Artificial
  probe
  misc_feature (1)..(25): SEQ ID NO: 3788; WAN024ACC_at; Start 28; Stop 52
gaagttactctaagacgactctgtt

SEQ ID NO: 50003 - DNA, 25 bp, Artificial
  probe
  misc_feature (1)..(25): SEQ ID NO: 3788; WAN024ACC_at; Start 167; Stop 191
cgtttttctcatactaaaagctagg

SEQ ID NO: 50004 - DNA, 25 bp, Artificial
  probe
  misc_feature (1)..(25): SEQ ID NO: 3788; WAN024ACC_at; Start 180; Stop 204
ctaaaagctaggttgtgggaaactg

SEQ ID NO: 50005 - DNA, 25 bp, Artificial
  probe
  misc_feature (1)..(25): SEQ ID NO: 3788; WAN024ACC_at; Start 173; Stop 197
tctcatactaaaagctaggttgtgg

SEQ ID NO: 50006 - DNA, 25 bp, Artificial
  probe
  misc_feature (1)..(25): SEQ ID NO: 3788; WAN024ACC_at; Start 153; Stop 177
ccactgatgtcacgcgtttttctca

SEQ ID NO: 50007 - DNA, 25 bp, Artificial
  probe
  misc_feature (1)..(25): SEQ ID NO: 3788; WAN024ACC_at; Start 58; Stop 82
gctatttgtcgtgcactttttctga

SEQ ID NO: 50008 - DNA, 25 bp, Artificial
  probe
  misc_feature (1)..(25): SEQ ID NO: 3788; WAN024ACC_at; Start 41; Stop 65
gacgactctgttttagggctatttg

SEQ ID NO: 50009 - DNA, 25 bp, Artificial
  probe
  misc_feature (1)..(25): SEQ ID NO: 3788; WAN024ACC_at; Start 90; Stop 114
cgcttttgaacccttatatatcaag

SEQ ID NO: 50010 - DNA, 25 bp, Artificial
  probe
  misc_feature (1)..(25): SEQ ID NO: 3788; WAN024ACC_at; Start 96; Stop 120
tgaacccttatatatcaagaaaaag

SEQ ID NO: 50011 - DNA, 25 bp, Artificial
  probe
  misc_feature (1)..(25): SEQ ID NO: 3788; WAN024ACC_at; Start 150; Stop 174
tttccactgatgtcacgcgtttttc

SEQ ID NO: 50012 - DNA, 25 bp, Artificial
  probe
  misc_feature (1)..(25): SEQ ID NO: 3788; WAN024ACC_at; Start 162; Stop 186
tcacgcgtttttctcatactaaaag

SEQ ID NO: 50013 - DNA, 25 bp, Artificial
  probe
  misc_feature (1)..(25): SEQ ID NO: 3788; WAN024ACC_at; Start 26; Stop 50
tggaagttactctaagacgactctg

SEQ ID NO: 50014 - DNA, 25 bp, Artificial
  probe
  misc_feature (1)..(25): SEQ ID NO: 3788; WAN024ACC_at; Start 123; Stop 147
aaccagtggaagttagtctaagacg

SEQ ID NO: 50015 - DNA, 25 bp, Artificial
  probe
  misc_feature (1)..(25): SEQ ID NO: 3788; WAN024ACC_at; Start 38; Stop 62
taagacgactctgttttagggctat

SEQ ID NO: 50016 - DNA, 25 bp, Artificial
  probe
  misc_feature (1)..(25): SEQ ID NO: 3788; WAN024ACC_at; Start 49; Stop 73
tgttttagggctatttgtcgtgcac

SEQ ID NO: 50017 - DNA, 25 bp, Artificial
  probe
  misc_feature (1)..(25): SEQ ID NO: 3788; WAN024ACC_at; Start 139; Stop 163
tctaagacggatttccactgatgtc

SEQ ID NO: 50018 - DNA, 25 bp, Artificial
  probe
  misc_feature (1)..(25): SEQ ID NO: 3788; WAN024ACC_at; Start 142; Stop 166
aagacggatttccactgatgtcacg

SEQ ID NO: 50019 - DNA, 25 bp, Artificial
  probe
  misc_feature (1)..(25): SEQ ID NO: 3788; WAN024ACC_at; Start 23; Stop 47
aactggaagttactctaagacgact

SEQ ID NO: 50020 - DNA, 25 bp, Artificial
  probe
  misc_feature (1)..(25): SEQ ID NO: 3788; WAN024ACC_at; Start 78; Stop 102
tctgagtcttttcgcttttgaaccc

SEQ ID NO: 50021 - DNA, 25 bp, Artificial
  probe
  misc_feature (1)..(25): SEQ ID NO: 3788; WAN024ACC_at; Start 44; Stop 68
gactctgttttagggctatttgtcg

SEQ ID NO: 50022 - DNA, 25 bp, Artificial
  probe
  misc_feature (1)..(25): SEQ ID NO: 3788; WAN024ACC_at; Start 215; Stop 239
ttagaagttaccaaaatctgactac

SEQ ID NO: 50023 - DNA, 25 bp, Artificial
  probe
  misc_feature (1)..(25): SEQ ID NO: 3788; WAN024ACC_at; Start 62; Stop 86
tttgtcgtgcactttttctgagtct

SEQ ID NO: 50024 - DNA, 25 bp, Artificial
  probe
  misc_feature (1)..(25): SEQ ID NO: 3788; WAN024ACC_at; Start 176; Stop 200
catactaaaagctaggttgtgggaa

SEQ ID NO: 50025 - DNA, 25 bp, Artificial
  probe
  misc_feature (1)..(25): SEQ ID NO: 3788; WAN024ACC_at; Start 134; Stop 158
gttagtctaagacggatttccactg

SEQ ID NO: 50026 - DNA, 25 bp, Artificial
  probe
  misc_feature (1)..(25): SEQ ID NO: 3788; WAN024ACC_at; Start 147; Stop 171
ggatttccactgatgtcacgcgttt

SEQ ID NO: 50027 - DNA, 25 bp, Artificial
  probe
  misc_feature (1)..(25): SEQ ID NO: 264; WAN024ACD_at; Start 80; Stop 104
tacggaaacattattttctatgtga

SEQ ID NO: 50028 - DNA, 25 bp, Artificial
  probe
  misc_feature (1)..(25): SEQ ID NO: 264; WAN024ACD_at; Start 107; Stop 131
acattgtataattgcttgcatttta

SEQ ID NO: 50029 - DNA, 25 bp, Artificial
  probe
  misc_feature (1)..(25): SEQ ID NO: 264; WAN024ACD_at; Start 106; Stop 130
aacattgtataattgcttgcatttt

SEQ ID NO: 50030 - DNA, 25 bp, Artificial
  probe
  misc_feature (1)..(25): SEQ ID NO: 264; WAN024ACD_at; Start 94; Stop 118
tttctatgtgacaacattgtataat

SEQ ID NO: 50031 - DNA, 25 bp, Artificial
  probe
  misc_feature (1)..(25): SEQ ID NO: 264; WAN024ACD_at; Start 88; Stop 112
cattattttctatgtgacaacattg

SEQ ID NO: 50032 - DNA, 25 bp, Artificial
  probe
  misc_feature (1)..(25): SEQ ID NO: 264; WAN024ACD_at; Start 97; Stop 121
ctatgtgacaacattgtataattgc

SEQ ID NO: 50033 - DNA, 25 bp, Artificial
  probe
  misc_feature (1)..(25): SEQ ID NO: 264; WAN024ACD_at; Start 101; Stop 125
gtgacaacattgtataattgcttgc

SEQ ID NO: 50034 - DNA, 25 bp, Artificial
  probe
  misc_feature (1)..(25): SEQ ID NO: 264; WAN024ACD_at; Start 86; Stop 110
aacattattttctatgtgacaacat

SEQ ID NO: 50035 - DNA, 25 bp, Artificial
  probe
  misc_feature (1)..(25): SEQ ID NO: 264; WAN024ACD_at; Start 105; Stop 129
caacattgtataattgcttgcattt

SEQ ID NO: 50036 - DNA, 25 bp, Artificial
  probe
  misc_feature (1)..(25): SEQ ID NO: 264; WAN024ACD_at; Start 95; Stop 119
ttctatgtgacaacattgtataatt

SEQ ID NO: 50037 - DNA, 25 bp, Artificial
  probe
  misc_feature (1)..(25): SEQ ID NO: 264; WAN024ACD_at; Start 79; Stop 103
ttacggaaacattattttctatgtg

SEQ ID NO: 50038 - DNA, 25 bp, Artificial
  probe
  misc_feature (1)..(25): SEQ ID NO: 264; WAN024ACD_at; Start 93; Stop 117
ttttctatgtgacaacattgtataa

SEQ ID NO: 50039 - DNA, 25 bp, Artificial
  probe
  misc_feature (1)..(25): SEQ ID NO: 264; WAN024ACD_at; Start 96; Stop 120
tctatgtgacaacattgtataattg

SEQ ID NO: 50040 - DNA, 25 bp, Artificial
  probe
  misc_feature (1)..(25): SEQ ID NO: 264; WAN024ACD_at; Start 99; Stop 123
atgtgacaacattgtataattgctt

SEQ ID NO: 50041 - DNA, 25 bp, Artificial
  probe
  misc_feature (1)..(25): SEQ ID NO: 264; WAN024ACD_at; Start 100; Stop 124
tgtgacaacattgtataattgcttg

SEQ ID NO: 50042 - DNA, 25 bp, Artificial
  probe
  misc_feature (1)..(25): SEQ ID NO: 264; WAN024ACD_at; Start 91; Stop 115
tattttctatgtgacaacattgtat

SEQ ID NO: 50043 - DNA, 25 bp, Artificial
  probe
  misc_feature (1)..(25): SEQ ID NO: 264; WAN024ACD_at; Start 81; Stop 105
acggaaacattattttctatgtgac

SEQ ID NO: 50044 - DNA, 25 bp, Artificial
  probe
  misc_feature (1)..(25): SEQ ID NO: 264; WAN024ACD_at; Start 98; Stop 122
tatgtgacaacattgtataattgct

SEQ ID NO: 50045 - DNA, 25 bp, Artificial
  probe
  misc_feature (1)..(25): SEQ ID NO: 264; WAN024ACD_at; Start 87; Stop 111
acattattttctatgtgacaacatt

SEQ ID NO: 50046 - DNA, 25 bp, Artificial
  probe
  misc_feature (1)..(25): SEQ ID NO: 264; WAN024ACD_at; Start 7; Stop 31
tgacctgatttttaggtaacttcta

SEQ ID NO: 50047 - DNA, 25 bp, Artificial
  probe
  misc_feature (1)..(25): SEQ ID NO: 264; WAN024ACD_at; Start 104; Stop 128
acaacattgtataattgcttgcatt

SEQ ID NO: 50048 - DNA, 25 bp, Artificial
  probe
  misc_feature (1)..(25): SEQ ID NO: 264; WAN024ACD_at; Start 92; Stop 116
attttctatgtgacaacattgtata

SEQ ID NO: 50049 - DNA, 25 bp, Artificial
  probe
  misc_feature (1)..(25): SEQ ID NO: 264; WAN024ACD_at; Start 89; Stop 113
attattttctatgtgacaacattgt

SEQ ID NO: 50050 - DNA, 25 bp, Artificial
  probe
  misc_feature (1)..(25): SEQ ID NO: 264; WAN024ACD_at; Start 103; Stop 127
gacaacattgtataattgcttgcat

SEQ ID NO: 50051 - DNA, 25 bp, Artificial
  probe
  misc_feature (1)..(25): SEQ ID NO: 264; WAN024ACD_at; Start 85; Stop 109
aaacattattttctatgtgacaaca

SEQ ID NO: 50052 - DNA, 25 bp, Artificial
  probe
  misc_feature (1)..(25): SEQ ID NO: 264; WAN024ACD_at; Start 77; Stop 101
agttacggaaacattattttctatg

SEQ ID NO: 50053 - DNA, 25 bp, Artificial
  probe
  misc_feature (1)..(25): SEQ ID NO: 264; WAN024ACD_at; Start 90; Stop 114
ttattttctatgtgacaacattgta

SEQ ID NO: 50054 - DNA, 25 bp, Artificial
  probe
  misc_feature (1)..(25): SEQ ID NO: 264; WAN024ACD_at; Start 83; Stop 107
ggaaacattattttctatgtgacaa

SEQ ID NO: 50055 - DNA, 25 bp, Artificial
  probe
  misc_feature (1)..(25): SEQ ID NO: 264; WAN024ACD_at; Start 84; Stop 108
gaaacattattttctatgtgacaac

SEQ ID NO: 50056 - DNA, 25 bp, Artificial
  probe
  misc_feature (1)..(25): SEQ ID NO: 264; WAN024ACD_at; Start 82; Stop 106
cggaaacattattttctatgtgaca

SEQ ID NO: 50057 - DNA, 25 bp, Artificial
  probe
  misc_feature (1)..(25): SEQ ID NO: 264; WAN024ACD_at; Start 102; Stop 126
tgacaacattgtataattgcttgca

SEQ ID NO: 50058 - DNA, 25 bp, Artificial
  probe
  misc_feature (1)..(25): SEQ ID NO: 453; WAN024ACE_at; Start 71; Stop 95
aaaatgcaagcaatgatacaaaata

SEQ ID NO: 50059 - DNA, 25 bp, Artificial
  probe
  misc_feature (1)..(25): SEQ ID NO: 453; WAN024ACE_at; Start 95; Stop 119
agatttaactattttatatagcgaa

SEQ ID NO: 50060 - DNA, 25 bp, Artificial
  probe
  misc_feature (1)..(25): SEQ ID NO: 453; WAN024ACE_at; Start 82; Stop 106
aatgatacaaaatagatttaactat

SEQ ID NO: 50061 - DNA, 25 bp, Artificial
  probe
  misc_feature (1)..(25): SEQ ID NO: 453; WAN024ACE_at; Start 80; Stop 104
gcaatgatacaaaatagatttaact

SEQ ID NO: 50062 - DNA, 25 bp, Artificial
  probe
  misc_feature (1)..(25): SEQ ID NO: 453; WAN024ACE_at; Start 75; Stop 99
tgcaagcaatgatacaaaatagatt

SEQ ID NO: 50063 - DNA, 25 bp, Artificial
  probe
  misc_feature (1)..(25): SEQ ID NO: 453; WAN024ACE_at; Start 70; Stop 94
taaaatgcaagcaatgatacaaaat

SEQ ID NO: 50064 - DNA, 25 bp, Artificial
  probe
  misc_feature (1)..(25): SEQ ID NO: 453; WAN024ACE_at; Start 104; Stop 128
tattttatatagcgaaaacttacaa

SEQ ID NO: 50065 - DNA, 25 bp, Artificial
  probe
  misc_feature (1)..(25): SEQ ID NO: 453; WAN024ACE_at; Start 94; Stop 118
tagatttaactattttatatagcga

SEQ ID NO: 50066 - DNA, 25 bp, Artificial
  probe
  misc_feature (1)..(25): SEQ ID NO: 453; WAN024ACE_at; Start 77; Stop 101
caagcaatgatacaaaatagattta

SEQ ID NO: 50067 - DNA, 25 bp, Artificial
  probe
  misc_feature (1)..(25): SEQ ID NO: 453; WAN024ACE_at; Start 93; Stop 117
atagatttaactattttatatagcg

SEQ ID NO: 50068 - DNA, 25 bp, Artificial
  probe
  misc_feature (1)..(25): SEQ ID NO: 453; WAN024ACE_at; Start 84; Stop 108
tgatacaaaatagatttaactattt

SEQ ID NO: 50069 - DNA, 25 bp, Artificial
  probe
  misc_feature (1)..(25): SEQ ID NO: 453; WAN024ACE_at; Start 92; Stop 116
aatagatttaactattttatatagc

SEQ ID NO: 50070 - DNA, 25 bp, Artificial
  probe
  misc_feature (1)..(25): SEQ ID NO: 453; WAN024ACE_at; Start 73; Stop 97
aatgcaagcaatgatacaaaataga

SEQ ID NO: 50071 - DNA, 25 bp, Artificial
  probe
  misc_feature (1)..(25): SEQ ID NO: 453; WAN024ACE_at; Start 76; Stop 100
gcaagcaatgatacaaaatagattt

SEQ ID NO: 50072 - DNA, 25 bp, Artificial
  probe
  misc_feature (1)..(25): SEQ ID NO: 453; WAN024ACE_at; Start 72; Stop 96
aaatgcaagcaatgatacaaaatag

SEQ ID NO: 50073 - DNA, 25 bp, Artificial
  probe
  misc_feature (1)..(25): SEQ ID NO: 453; WAN024ACE_at; Start 96; Stop 120
gatttaactattttatatagcgaaa

SEQ ID NO: 50074 - DNA, 25 bp, Artificial
  probe
  misc_feature (1)..(25): SEQ ID NO: 453; WAN024ACE_at; Start 74; Stop 98
atgcaagcaatgatacaaaatagat

SEQ ID NO: 50075 - DNA, 25 bp, Artificial
  probe
  misc_feature (1)..(25): SEQ ID NO: 453; WAN024ACE_at; Start 79; Stop 103
agcaatgatacaaaatagatttaac

SEQ ID NO: 50076 - DNA, 25 bp, Artificial
  probe
  misc_feature (1)..(25): SEQ ID NO: 453; WAN024ACE_at; Start 81; Stop 105
caatgatacaaaatagatttaacta

SEQ ID NO: 50077 - DNA, 25 bp, Artificial
  probe
  misc_feature (1)..(25): SEQ ID NO: 453; WAN024ACE_at; Start 78; Stop 102
aagcaatgatacaaaatagatttaa

SEQ ID NO: 50078 - DNA, 25 bp, Artificial
  probe
  misc_feature (1)..(25): SEQ ID NO: 453; WAN024ACE_at; Start 103; Stop 127
ctattttatatagcgaaaacttaca

SEQ ID NO: 50079 - DNA, 25 bp, Artificial
  probe
  misc_feature (1)..(25): SEQ ID NO: 225; WAN024ACF_at; Start 24; Stop 48
cacttatggatgtaggagttctttt

SEQ ID NO: 50080 - DNA, 25 bp, Artificial
  probe
  misc_feature (1)..(25): SEQ ID NO: 225; WAN024ACF_at; Start 4; Stop 28
ataagcctaaactcctatgtcactt

SEQ ID NO: 50081 - DNA, 25 bp, Artificial
  probe
  misc_feature (1)..(25): SEQ ID NO: 225; WAN024ACF_at; Start 30; Stop 54
tggatgtaggagttctttttactag

SEQ ID NO: 50082 - DNA, 25 bp, Artificial
  probe
  misc_feature (1)..(25): SEQ ID NO: 225; WAN024ACF_at; Start 13; Stop 37
aactcctatgtcacttatggatgta

SEQ ID NO: 50083 - DNA, 25 bp, Artificial
  probe
  misc_feature (1)..(25): SEQ ID NO: 225; WAN024ACF_at; Start 2; Stop 26
agataagcctaaactcctatgtcac

SEQ ID NO: 50084 - DNA, 25 bp, Artificial
  probe
  misc_feature (1)..(25): SEQ ID NO: 225; WAN024ACF_at; Start 15; Stop 39
ctcctatgtcacttatggatgtagg

SEQ ID NO: 50085 - DNA, 25 bp, Artificial
  probe
  misc_feature (1)..(25): SEQ ID NO: 225; WAN024ACF_at; Start 20; Stop 44
atgtcacttatggatgtaggagttc

SEQ ID NO: 50086 - DNA, 25 bp, Artificial
  probe
  misc_feature (1)..(25): SEQ ID NO: 225; WAN024ACF_at; Start 3; Stop 27
gataagcctaaactcctatgtcact

SEQ ID NO: 50087 - DNA, 25 bp, Artificial
  probe
  misc_feature (1)..(25): SEQ ID NO: 225; WAN024ACF_at; Start 9; Stop 33
cctaaactcctatgtcacttatgga

SEQ ID NO: 50088 - DNA, 25 bp, Artificial
  probe
  misc_feature (1)..(25): SEQ ID NO: 225; WAN024ACF_at; Start 200; Stop 224
ggataagatactattttaggagaag

SEQ ID NO: 50089 - DNA, 25 bp, Artificial
  probe
  misc_feature (1)..(25): SEQ ID NO: 225; WAN024ACF_at; Start 17; Stop 41
cctatgtcacttatggatgtaggag

SEQ ID NO: 50090 - DNA, 25 bp, Artificial
  probe
  misc_feature (1)..(25): SEQ ID NO: 225; WAN024ACF_at; Start 6; Stop 30
aagcctaaactcctatgtcacttat

SEQ ID NO: 50091 - DNA, 25 bp, Artificial
  probe
  misc_feature (1)..(25): SEQ ID NO: 225; WAN024ACF_at; Start 18; Stop 42
ctatgtcacttatggatgtaggagt

SEQ ID NO: 50092 - DNA, 25 bp, Artificial
  probe
  misc_feature (1)..(25): SEQ ID NO: 225; WAN024ACF_at; Start 203; Stop 227
taagatactattttaggagaagaac

SEQ ID NO: 50093 - DNA, 25 bp, Artificial
  probe
  misc_feature (1)..(25): SEQ ID NO: 225; WAN024ACF_at; Start 198; Stop 222
aaggataagatactattttaggaga

SEQ ID NO: 50094 - DNA, 25 bp, Artificial
  probe
  misc_feature (1)..(25): SEQ ID NO: 225; WAN024ACF_at; Start 14; Stop 38
actcctatgtcacttatggatgtag

SEQ ID NO: 50095 - DNA, 25 bp, Artificial
  probe
  misc_feature (1)..(25): SEQ ID NO: 225; WAN024ACF_at; Start 204; Stop 228
aagatactattttaggagaagaact

SEQ ID NO: 50096 - DNA, 25 bp, Artificial
  probe
  misc_feature (1)..(25): SEQ ID NO: 225; WAN024ACF_at; Start 11; Stop 35
taaactcctatgtcacttatggatg

SEQ ID NO: 50097 - DNA, 25 bp, Artificial
  probe
  misc_feature (1)..(25): SEQ ID NO: 225; WAN024ACF_at; Start 5; Stop 29
taagcctaaactcctatgtcactta

SEQ ID NO: 50098 - DNA, 25 bp, Artificial
  probe
  misc_feature (1)..(25): SEQ ID NO: 225; WAN024ACF_at; Start 167; Stop 191
tatgtattggattaaattttgtgat

SEQ ID NO: 50099 - DNA, 25 bp, Artificial
  probe
  misc_feature (1)..(25): SEQ ID NO: 225; WAN024ACF_at; Start 28; Stop 52
tatggatgtaggagttctttttact

SEQ ID NO: 50100 - DNA, 25 bp, Artificial
  probe
  misc_feature (1)..(25): SEQ ID NO: 225; WAN024ACF_at; Start 1; Stop 25
aagataagcctaaactcctatgtca

SEQ ID NO: 50101 - DNA, 25 bp, Artificial
  probe
  misc_feature (1)..(25): SEQ ID NO: 225; WAN024ACF_at; Start 22; Stop 46
gtcacttatggatgtaggagttctt

SEQ ID NO: 50102 - DNA, 25 bp, Artificial
  probe
  misc_feature (1)..(25): SEQ ID NO: 225; WAN024ACF_at; Start 12; Stop 36
aaactcctatgtcacttatggatgt

SEQ ID NO: 50103 - DNA, 25 bp, Artificial
  probe
  misc_feature (1)..(25): SEQ ID NO: 225; WAN024ACF_at; Start 8; Stop 32
gcctaaactcctatgtcacttatgg

SEQ ID NO: 50104 - DNA, 25 bp, Artificial
  probe
  misc_feature (1)..(25): SEQ ID NO: 225; WAN024ACF_at; Start 151; Stop 175
cggtaagaaaaaataatatgtattg

SEQ ID NO: 50105 - DNA, 25 bp, Artificial
  probe
  misc_feature (1)..(25): SEQ ID NO: 225; WAN024ACF_at; Start 19; Stop 43
tatgtcacttatggatgtaggagtt

SEQ ID NO: 50106 - DNA, 25 bp, Artificial
  probe
  misc_feature (1)..(25): SEQ ID NO: 225; WAN024ACF_at; Start 189; Stop 213
gatataataaaggataagatactat

SEQ ID NO: 50107 - DNA, 25 bp, Artificial
  probe
  misc_feature (1)..(25): SEQ ID NO: 225; WAN024ACF_at; Start 26; Stop 50
cttatggatgtaggagttcttttta

SEQ ID NO: 50108 - DNA, 25 bp, Artificial
  probe
  misc_feature (1)..(25): SEQ ID NO: 225; WAN024ACF_at; Start 23; Stop 47
tcacttatggatgtaggagttcttt

SEQ ID NO: 50109 - DNA, 25 bp, Artificial
  probe
  misc_feature (1)..(25): SEQ ID NO: 225; WAN024ACF_at; Start 7; Stop 31
agcctaaactcctatgtcacttatg

SEQ ID NO: 50110 - DNA, 25 bp, Artificial
  probe
  misc_feature (1)..(25): SEQ ID NO: 225; WAN024ACF_at; Start 186; Stop 210
tgtgatataataaaggataagatac

SEQ ID NO: 50111 - DNA, 25 bp, Artificial
  probe
  misc_feature (1)..(25): SEQ ID NO: 225; WAN024ACF_at; Start 21; Stop 45
tgtcacttatggatgtaggagttct

SEQ ID NO: 50112 - DNA, 25 bp, Artificial
  probe
  misc_feature (1)..(25): SEQ ID NO: 225; WAN024ACF_at; Start 201; Stop 225
gataagatactattttaggagaaga

SEQ ID NO: 50113 - DNA, 25 bp, Artificial
  probe
  misc_feature (1)..(25): SEQ ID NO: 277; WAN024ACG_at; Start 210; Stop 234
taaaacagagtcgtcttagagtaac

SEQ ID NO: 50114 - DNA, 25 bp, Artificial
  probe
  misc_feature (1)..(25): SEQ ID NO: 277; WAN024ACG_at; Start 145; Stop 169
ctttttcttgatatataagggttca

SEQ ID NO: 50115 - DNA, 25 bp, Artificial
  probe
  misc_feature (1)..(25): SEQ ID NO: 277; WAN024ACG_at; Start 88; Stop 112
tgagaaaaacgcgtgacatcagtgg

SEQ ID NO: 50116 - DNA, 25 bp, Artificial
  probe
  misc_feature (1)..(25): SEQ ID NO: 277; WAN024ACG_at; Start 107; Stop 131
cagtggaaatccgtcttagactaac

SEQ ID NO: 50117 - DNA, 25 bp, Artificial
  probe
  misc_feature (1)..(25): SEQ ID NO: 277; WAN024ACG_at; Start 217; Stop 241
gagtcgtcttagagtaacttccagt

SEQ ID NO: 50118 - DNA, 25 bp, Artificial
  probe
  misc_feature (1)..(25): SEQ ID NO: 277; WAN024ACG_at; Start 97; Stop 121
cgcgtgacatcagtggaaatccgtc

SEQ ID NO: 50119 - DNA, 25 bp, Artificial
  probe
  misc_feature (1)..(25): SEQ ID NO: 277; WAN024ACG_at; Start 163; Stop 187
gggttcaaaagcgaaaagactcaga

SEQ ID NO: 50120 - DNA, 25 bp, Artificial
  probe
  misc_feature (1)..(25): SEQ ID NO: 277; WAN024ACG_at; Start 99; Stop 123
cgtgacatcagtggaaatccgtctt

SEQ ID NO: 50121 - DNA, 25 bp, Artificial
  probe
  misc_feature (1)..(25): SEQ ID NO: 277; WAN024ACG_at; Start 112; Stop 136
gaaatccgtcttagactaacttcca

SEQ ID NO: 50122 - DNA, 25 bp, Artificial
  probe
  misc_feature (1)..(25): SEQ ID NO: 277; WAN024ACG_at; Start 215; Stop 239
cagagtcgtcttagagtaacttcca

SEQ ID NO: 50123 - DNA, 25 bp, Artificial
  probe
  misc_feature (1)..(25): SEQ ID NO: 277; WAN024ACG_at; Start 186; Stop 210
gaaaaagtgcacgacaaatagccct

SEQ ID NO: 50124 - DNA, 25 bp, Artificial
  probe
  misc_feature (1)..(25): SEQ ID NO: 277; WAN024ACG_at; Start 176; Stop 200
aaaagactcagaaaaagtgcacgac

SEQ ID NO: 50125 - DNA, 25 bp, Artificial
  probe
  misc_feature (1)..(25): SEQ ID NO: 277; WAN024ACG_at; Start 27; Stop 51
tagtcagattttggtaacttctaaa

SEQ ID NO: 50126 - DNA, 25 bp, Artificial
  probe
  misc_feature (1)..(25): SEQ ID NO: 277; WAN024ACG_at; Start 204; Stop 228
tagccctaaaacagagtcgtcttag

SEQ ID NO: 50127 - DNA, 25 bp, Artificial
  probe
  misc_feature (1)..(25): SEQ ID NO: 277; WAN024ACG_at; Start 83; Stop 107
tagtatgagaaaaacgcgtgacatc

SEQ ID NO: 50128 - DNA, 25 bp, Artificial
  probe
  misc_feature (1)..(25): SEQ ID NO: 277; WAN024ACG_at; Start 102; Stop 126
gacatcagtggaaatccgtcttaga

SEQ ID NO: 50129 - DNA, 25 bp, Artificial
  probe
  misc_feature (1)..(25): SEQ ID NO: 277; WAN024ACG_at; Start 183; Stop 207
tcagaaaaagtgcacgacaaatagc

SEQ ID NO: 50130 - DNA, 25 bp, Artificial
  probe
  misc_feature (1)..(25): SEQ ID NO: 277; WAN024ACG_at; Start 154; Stop 178
gatatataagggttcaaaagcgaaa

SEQ ID NO: 50131 - DNA, 25 bp, Artificial
  probe
  misc_feature (1)..(25): SEQ ID NO: 277; WAN024ACG_at; Start 67; Stop 91
cccacaacctagcttttagtatgag

SEQ ID NO: 50132 - DNA, 25 bp, Artificial
  probe
  misc_feature (1)..(25): SEQ ID NO: 277; WAN024ACG_at; Start 61; Stop 85
cagtttcccacaacctagcttttag

SEQ ID NO: 50133 - DNA, 25 bp, Artificial
  probe
  misc_feature (1)..(25): SEQ ID NO: 277; WAN024ACG_at; Start 20; Stop 44
caagatgtagtcagattttggtaac

SEQ ID NO: 50134 - DNA, 25 bp, Artificial
  probe
  misc_feature (1)..(25): SEQ ID NO: 277; WAN024ACG_at; Start 200; Stop 224
caaatagccctaaaacagagtcgtc

SEQ ID NO: 50135 - DNA, 25 bp, Artificial
  probe
  misc_feature (1)..(25): SEQ ID NO: 277; WAN024ACG_at; Start 180; Stop 204
gactcagaaaaagtgcacgacaaat

SEQ ID NO: 50136 - DNA, 25 bp, Artificial
  probe
  misc_feature (1)..(25): SEQ ID NO: 277; WAN024ACG_at; Start 189; Stop 213
aaagtgcacgacaaatagccctaaa

SEQ ID NO: 50137 - DNA, 25 bp, Artificial
  probe
  misc_feature (1)..(25): SEQ ID NO: 277; WAN024ACG_at; Start 81; Stop 105
tttagtatgagaaaaacgcgtgaca

SEQ ID NO: 50138 - DNA, 25 bp, Artificial
  probe
  misc_feature (1)..(25): SEQ ID NO: 277; WAN024ACG_at; Start 173; Stop 197
gcgaaaagactcagaaaaagtgcac

SEQ ID NO: 50139 - DNA, 25 bp, Artificial
  probe
  misc_feature (1)..(25): SEQ ID NO: 277; WAN024ACG_at; Start 71; Stop 95
caacctagcttttagtatgagaaaa

SEQ ID NO: 50140 - DNA, 25 bp, Artificial
  probe
  misc_feature (1)..(25): SEQ ID NO: 277; WAN024ACG_at; Start 193; Stop 217
tgcacgacaaatagccctaaaacag

SEQ ID NO: 50141 - DNA, 25 bp, Artificial
  probe
  misc_feature (1)..(25): SEQ ID NO: 277; WAN024ACG_at; Start 91; Stop 115
gaaaaacgcgtgacatcagtggaaa

SEQ ID NO: 50142 - DNA, 25 bp, Artificial
  probe
  misc_feature (1)..(25): SEQ ID NO: 277; WAN024ACG_at; Start 76; Stop 100
tagcttttagtatgagaaaaacgcg

SEQ ID NO: 50143 - DNA, 25 bp, Artificial
  probe
  misc_feature (1)..(25): SEQ ID NO: 277; WAN024ACG_at; Start 118; Stop 142
cgtcttagactaacttccactggtt

SEQ ID NO: 50144 - DNA, 25 bp, Artificial
  probe
  misc_feature (1)..(25): SEQ ID NO: 277; WAN024ACG_at; Start 221; Stop 245
cgtcttagagtaacttccagttttg

SEQ ID NO: 50145 - DNA, 25 bp, Artificial
  probe
  misc_feature (1)..(25): SEQ ID NO: 277; WAN024ACG_at; Start 9; Stop 33
aaatctgattacaagatgtagtcag

SEQ ID NO: 50146 - DNA, 25 bp, Artificial
  probe
  misc_feature (1)..(25): SEQ ID NO: 277; WAN024ACG_at; Start 94; Stop 118
aaacgcgtgacatcagtggaaatcc

SEQ ID NO: 50147 - DNA, 25 bp, Artificial
  probe
  misc_feature (1)..(25): SEQ ID NO: 4413; WAN024ACH_at; Start 62; Stop 86
gctttctgctacgcaaaatcgtatc

SEQ ID NO: 50148 - DNA, 25 bp, Artificial
  probe
  misc_feature (1)..(25): SEQ ID NO: 4413; WAN024ACH_at; Start 64; Stop 88
tttctgctacgcaaaatcgtatcgg

SEQ ID NO: 50149 - DNA, 25 bp, Artificial
  probe
  misc_feature (1)..(25): SEQ ID NO: 4413; WAN024ACH_at; Start 68; Stop 92
tgctacgcaaaatcgtatcgggcac

SEQ ID NO: 50150 - DNA, 25 bp, Artificial
  probe
  misc_feature (1)..(25): SEQ ID NO: 4413; WAN024ACH_at; Start 57; Stop 81
tgtaagctttctgctacgcaaaatc

SEQ ID NO: 50151 - DNA, 25 bp, Artificial
  probe
  misc_feature (1)..(25): SEQ ID NO: 4413; WAN024ACH_at; Start 69; Stop 93
gctacgcaaaatcgtatcgggcact

SEQ ID NO: 50152 - DNA, 25 bp, Artificial
  probe
  misc_feature (1)..(25): SEQ ID NO: 4413; WAN024ACH_at; Start 12; Stop 36
ctttcttaataattctaatcctatt

SEQ ID NO: 50153 - DNA, 25 bp, Artificial
  probe
  misc_feature (1)..(25): SEQ ID NO: 4413; WAN024ACH_at; Start 50; Stop 74
ttttatttgtaagctttctgctacg

SEQ ID NO: 50154 - DNA, 25 bp, Artificial
  probe
  misc_feature (1)..(25): SEQ ID NO: 4413; WAN024ACH_at; Start 46; Stop 70
tcaattttatttgtaagctttctgc

SEQ ID NO: 50155 - DNA, 25 bp, Artificial
  probe
  misc_feature (1)..(25): SEQ ID NO: 4413; WAN024ACH_at; Start 49; Stop 73
attttatttgtaagctttctgctac

SEQ ID NO: 50156 - DNA, 25 bp, Artificial
  probe
  misc_feature (1)..(25): SEQ ID NO: 4413; WAN024ACH_at; Start 27; Stop 51
taatcctattttactatattcaatt

SEQ ID NO: 50157 - DNA, 25 bp, Artificial
  probe
  misc_feature (1)..(25): SEQ ID NO: 4413; WAN024ACH_at; Start 48; Stop 72
aattttatttgtaagctttctgcta

SEQ ID NO: 50158 - DNA, 25 bp, Artificial
  probe
  misc_feature (1)..(25): SEQ ID NO: 4413; WAN024ACH_at; Start 61; Stop 85
agctttctgctacgcaaaatcgtat

SEQ ID NO: 50159 - DNA, 25 bp, Artificial
  probe
  misc_feature (1)..(25): SEQ ID NO: 4413; WAN024ACH_at; Start 67; Stop 91
ctgctacgcaaaatcgtatcgggca

SEQ ID NO: 50160 - DNA, 25 bp, Artificial
  probe
  misc_feature (1)..(25): SEQ ID NO: 4413; WAN024ACH_at; Start 63; Stop 87
ctttctgctacgcaaaatcgtatcg

SEQ ID NO: 50161 - DNA, 25 bp, Artificial
  probe
  misc_feature (1)..(25): SEQ ID NO: 4413; WAN024ACH_at; Start 26; Stop 50
ctaatcctattttactatattcaat

SEQ ID NO: 50162 - DNA, 25 bp, Artificial
  probe
  misc_feature (1)..(25): SEQ ID NO: 4413; WAN024ACH_at; Start 55; Stop 79
tttgtaagctttctgctacgcaaaa

SEQ ID NO: 50163 - DNA, 25 bp, Artificial
  probe
  misc_feature (1)..(25): SEQ ID NO: 4413; WAN024ACH_at; Start 53; Stop 77
tatttgtaagctttctgctacgcaa

SEQ ID NO: 50164 - DNA, 25 bp, Artificial
  probe
  misc_feature (1)..(25): SEQ ID NO: 4413; WAN024ACH_at; Start 24; Stop 48
ttctaatcctattttactatattca

SEQ ID NO: 50165 - DNA, 25 bp, Artificial
  probe
  misc_feature (1)..(25): SEQ ID NO: 4413; WAN024ACH_at; Start 59; Stop 83
taagctttctgctacgcaaaatcgt

SEQ ID NO: 50166 - DNA, 25 bp, Artificial
  probe
  misc_feature (1)..(25): SEQ ID NO: 4413; WAN024ACH_at; Start 60; Stop 84
aagctttctgctacgcaaaatcgta

SEQ ID NO: 50167 - DNA, 25 bp, Artificial
  probe
  misc_feature (1)..(25): SEQ ID NO: 4413; WAN024ACH_at; Start 51; Stop 75
tttatttgtaagctttctgctacgc

SEQ ID NO: 50168 - DNA, 25 bp, Artificial
  probe
  misc_feature (1)..(25): SEQ ID NO: 4413; WAN024ACH_at; Start 56; Stop 80
ttgtaagctttctgctacgcaaaat

SEQ ID NO: 50169 - DNA, 25 bp, Artificial
  probe
  misc_feature (1)..(25): SEQ ID NO: 4413; WAN024ACH_at; Start 52; Stop 76
ttatttgtaagctttctgctacgca

SEQ ID NO: 50170 - DNA, 25 bp, Artificial
  probe
  misc_feature (1)..(25): SEQ ID NO: 4413; WAN024ACH_at; Start 70; Stop 94
ctacgcaaaatcgtatcgggcacta

SEQ ID NO: 50171 - DNA, 25 bp, Artificial
  probe
  misc_feature (1)..(25): SEQ ID NO: 4413; WAN024ACH_at; Start 18; Stop 42
taataattctaatcctattttacta

SEQ ID NO: 50172 - DNA, 25 bp, Artificial
  probe
  misc_feature (1)..(25): SEQ ID NO: 4413; WAN024ACH_at; Start 25; Stop 49
tctaatcctattttactatattcaa

SEQ ID NO: 50173 - DNA, 25 bp, Artificial
  probe
  misc_feature (1)..(25): SEQ ID NO: 4413; WAN024ACH_at; Start 66; Stop 90
tctgctacgcaaaatcgtatcgggc

SEQ ID NO: 50174 - DNA, 25 bp, Artificial
  probe
  misc_feature (1)..(25): SEQ ID NO: 4413; WAN024ACH_at; Start 11; Stop 35
actttcttaataattctaatcctat

SEQ ID NO: 50175 - DNA, 25 bp, Artificial
  probe
  misc_feature (1)..(25): SEQ ID NO: 4413; WAN024ACH_at; Start 47; Stop 71
caattttatttgtaagctttctgct

SEQ ID NO: 50176 - DNA, 25 bp, Artificial
  probe
  misc_feature (1)..(25): SEQ ID NO: 4413; WAN024ACH_at; Start 21; Stop 45
taattctaatcctattttactatat

SEQ ID NO: 50177 - DNA, 25 bp, Artificial
  probe
  misc_feature (1)..(25): SEQ ID NO: 4413; WAN024ACH_at; Start 9; Stop 33
caactttcttaataattctaatcct

SEQ ID NO: 50178 - DNA, 25 bp, Artificial
  probe
  misc_feature (1)..(25): SEQ ID NO: 4413; WAN024ACH_at; Start 54; Stop 78
atttgtaagctttctgctacgcaaa

SEQ ID NO: 50179 - DNA, 25 bp, Artificial
  probe
  misc_feature (1)..(25): SEQ ID NO: 4413; WAN024ACH_at; Start 65; Stop 89
ttctgctacgcaaaatcgtatcggg

SEQ ID NO: 50180 - DNA, 25 bp, Artificial
  probe
  misc_feature (1)..(25): SEQ ID NO: 4413; WAN024ACH_at; Start 58; Stop 82
gtaagctttctgctacgcaaaatcg

SEQ ID NO: 50181 - DNA, 25 bp, Artificial
  probe
  misc_feature (1)..(25): SEQ ID NO: 4527; WAN024ACI_at; Start 19; Stop 43
tgcgtagcagaaagcttacaaataa

SEQ ID NO: 50182 - DNA, 25 bp, Artificial
  probe
  misc_feature (1)..(25): SEQ ID NO: 4527; WAN024ACI_at; Start 14; Stop 38
gattttgcgtagcagaaagcttaca

SEQ ID NO: 50183 - DNA, 25 bp, Artificial
  probe
  misc_feature (1)..(25): SEQ ID NO: 4527; WAN024ACI_at; Start 27; Stop 51
agaaagcttacaaataaaattgaat

SEQ ID NO: 50184 - DNA, 25 bp, Artificial
  probe
  misc_feature (1)..(25): SEQ ID NO: 4527; WAN024ACI_at; Start 17; Stop 41
tttgcgtagcagaaagcttacaaat

SEQ ID NO: 50185 - DNA, 25 bp, Artificial
  probe
  misc_feature (1)..(25): SEQ ID NO: 4527; WAN024ACI_at; Start 18; Stop 42
ttgcgtagcagaaagcttacaaata

SEQ ID NO: 50186 - DNA, 25 bp, Artificial
  probe
  misc_feature (1)..(25): SEQ ID NO: 4527; WAN024ACI_at; Start 9; Stop 33
gatacgattttgcgtagcagaaagc

SEQ ID NO: 50187 - DNA, 25 bp, Artificial
  probe
  misc_feature (1)..(25): SEQ ID NO: 4527; WAN024ACI_at; Start 2; Stop 26
agtgcccgatacgattttgcgtagc

SEQ ID NO: 50188 - DNA, 25 bp, Artificial
  probe
  misc_feature (1)..(25): SEQ ID NO: 4527; WAN024ACI_at; Start 51; Stop 75
tatagtaaaataggattagaattat

SEQ ID NO: 50189 - DNA, 25 bp, Artificial
  probe
  misc_feature (1)..(25): SEQ ID NO: 4527; WAN024ACI_at; Start 5; Stop 29
gcccgatacgattttgcgtagcaga

SEQ ID NO: 50190 - DNA, 25 bp, Artificial
  probe
  misc_feature (1)..(25): SEQ ID NO: 4527; WAN024ACI_at; Start 24; Stop 48
agcagaaagcttacaaataaaattg

SEQ ID NO: 50191 - DNA, 25 bp, Artificial
  probe
  misc_feature (1)..(25): SEQ ID NO: 4527; WAN024ACI_at; Start 25; Stop 49
gcagaaagcttacaaataaaattga

SEQ ID NO: 50192 - DNA, 25 bp, Artificial
  probe
  misc_feature (1)..(25): SEQ ID NO: 4527; WAN024ACI_at; Start 26; Stop 50
cagaaagcttacaaataaaattgaa

SEQ ID NO: 50193 - DNA, 25 bp, Artificial
  probe
  misc_feature (1)..(25): SEQ ID NO: 4527; WAN024ACI_at; Start 1; Stop 25
tagtgcccgatacgattttgcgtag

SEQ ID NO: 50194 - DNA, 25 bp, Artificial
  probe
  misc_feature (1)..(25): SEQ ID NO: 4527; WAN024ACI_at; Start 10; Stop 34
atacgattttgcgtagcagaaagct

SEQ ID NO: 50195 - DNA, 25 bp, Artificial
  probe
  misc_feature (1)..(25): SEQ ID NO: 4527; WAN024ACI_at; Start 6; Stop 30
cccgatacgattttgcgtagcagaa

SEQ ID NO: 50196 - DNA, 25 bp, Artificial
  probe
  misc_feature (1)..(25): SEQ ID NO: 4527; WAN024ACI_at; Start 56; Stop 80
taaaataggattagaattattaaga

SEQ ID NO: 50197 - DNA, 25 bp, Artificial
  probe
  misc_feature (1)..(25): SEQ ID NO: 4527; WAN024ACI_at; Start 20; Stop 44
gcgtagcagaaagcttacaaataaa

SEQ ID NO: 50198 - DNA, 25 bp, Artificial
  probe
  misc_feature (1)..(25): SEQ ID NO: 4527; WAN024ACI_at; Start 62; Stop 86
aggattagaattattaagaaagttg

SEQ ID NO: 50199 - DNA, 25 bp, Artificial
  probe
  misc_feature (1)..(25): SEQ ID NO: 4527; WAN024ACI_at; Start 28; Stop 52
gaaagcttacaaataaaattgaata

SEQ ID NO: 50200 - DNA, 25 bp, Artificial
  probe
  misc_feature (1)..(25): SEQ ID NO: 4527; WAN024ACI_at; Start 23; Stop 47
tagcagaaagcttacaaataaaatt

SEQ ID NO: 50201 - DNA, 25 bp, Artificial
  probe
  misc_feature (1)..(25): SEQ ID NO: 4527; WAN024ACI_at; Start 11; Stop 35
tacgattttgcgtagcagaaagctt

SEQ ID NO: 50202 - DNA, 25 bp, Artificial
  probe
  misc_feature (1)..(25): SEQ ID NO: 4527; WAN024ACI_at; Start 29; Stop 53
aaagcttacaaataaaattgaatat

SEQ ID NO: 50203 - DNA, 25 bp, Artificial
  probe
  misc_feature (1)..(25): SEQ ID NO: 4527; WAN024ACI_at; Start 59; Stop 83
aataggattagaattattaagaaag

SEQ ID NO: 50204 - DNA, 25 bp, Artificial
  probe
  misc_feature (1)..(25): SEQ ID NO: 4527; WAN024ACI_at; Start 16; Stop 40
ttttgcgtagcagaaagcttacaaa

SEQ ID NO: 50205 - DNA, 25 bp, Artificial
  probe
  misc_feature (1)..(25): SEQ ID NO: 4527; WAN024ACI_at; Start 21; Stop 45
cgtagcagaaagcttacaaataaaa

SEQ ID NO: 50206 - DNA, 25 bp, Artificial
  probe
  misc_feature (1)..(25): SEQ ID NO: 4527; WAN024ACI_at; Start 7; Stop 31
ccgatacgattttgcgtagcagaaa

SEQ ID NO: 50207 - DNA, 25 bp, Artificial
  probe
  misc_feature (1)..(25): SEQ ID NO: 4527; WAN024ACI_at; Start 60; Stop 84
ataggattagaattattaagaaagt

SEQ ID NO: 50208 - DNA, 25 bp, Artificial
  probe
  misc_feature (1)..(25): SEQ ID NO: 4527; WAN024ACI_at; Start 15; Stop 39
attttgcgtagcagaaagcttacaa

SEQ ID NO: 50209 - DNA, 25 bp, Artificial
  probe
  misc_feature (1)..(25): SEQ ID NO: 4527; WAN024ACI_at; Start 8; Stop 32
cgatacgattttgcgtagcagaaag

SEQ ID NO: 50210 - DNA, 25 bp, Artificial
  probe
  misc_feature (1)..(25): SEQ ID NO: 4527; WAN024ACI_at; Start 4; Stop 28
tgcccgatacgattttgcgtagcag

SEQ ID NO: 50211 - DNA, 25 bp, Artificial
  probe
  misc_feature (1)..(25): SEQ ID NO: 4527; WAN024ACI_at; Start 3; Stop 27
gtgcccgatacgattttgcgtagca

SEQ ID NO: 50212 - DNA, 25 bp, Artificial
  probe
  misc_feature (1)..(25): SEQ ID NO: 4527; WAN024ACI_at; Start 12; Stop 36
acgattttgcgtagcagaaagctta

SEQ ID NO: 50213 - DNA, 25 bp, Artificial
  probe
  misc_feature (1)..(25): SEQ ID NO: 4527; WAN024ACI_at; Start 13; Stop 37
cgattttgcgtagcagaaagcttac

SEQ ID NO: 50214 - DNA, 25 bp, Artificial
  probe
  misc_feature (1)..(25): SEQ ID NO: 4527; WAN024ACI_at; Start 22; Stop 46
gtagcagaaagcttacaaataaaat

SEQ ID NO: 50215 - DNA, 25 bp, Artificial
  probe
  misc_feature (1)..(25): SEQ ID NO: 3512; WAN024ACJ_at; Start 17; Stop 41
tgtcttttaggtctgacatttcata

SEQ ID NO: 50216 - DNA, 25 bp, Artificial
  probe
  misc_feature (1)..(25): SEQ ID NO: 3512; WAN024ACJ_at; Start 8; Stop 32
gaacgaaaatgtcttttaggtctga

SEQ ID NO: 50217 - DNA, 25 bp, Artificial
  probe
  misc_feature (1)..(25): SEQ ID NO: 3512; WAN024ACJ_at; Start 18; Stop 42
gtcttttaggtctgacatttcataa

SEQ ID NO: 50218 - DNA, 25 bp, Artificial
  probe
  misc_feature (1)..(25): SEQ ID NO: 3512; WAN024ACJ_at; Start 23; Stop 47
ttaggtctgacatttcataaatcat

SEQ ID NO: 50219 - DNA, 25 bp, Artificial
  probe
  misc_feature (1)..(25): SEQ ID NO: 3512; WAN024ACJ_at; Start 21; Stop 45
ttttaggtctgacatttcataaatc

SEQ ID NO: 50220 - DNA, 25 bp, Artificial
  probe
  misc_feature (1)..(25): SEQ ID NO: 3512; WAN024ACJ_at; Start 15; Stop 39
aatgtcttttaggtctgacatttca

SEQ ID NO: 50221 - DNA, 25 bp, Artificial
  probe
  misc_feature (1)..(25): SEQ ID NO: 3512; WAN024ACJ_at; Start 19; Stop 43
tcttttaggtctgacatttcataaa

SEQ ID NO: 50222 - DNA, 25 bp, Artificial
  probe
  misc_feature (1)..(25): SEQ ID NO: 3512; WAN024ACJ_at; Start 10; Stop 34
acgaaaatgtcttttaggtctgaca

SEQ ID NO: 50223 - DNA, 25 bp, Artificial
  probe
  misc_feature (1)..(25): SEQ ID NO: 3512; WAN024ACJ_at; Start 24; Stop 48
taggtctgacatttcataaatcatg

SEQ ID NO: 50224 - DNA, 25 bp, Artificial
  probe
  misc_feature (1)..(25): SEQ ID NO: 3512; WAN024ACJ_at; Start 26; Stop 50
ggtctgacatttcataaatcatgtt

SEQ ID NO: 50225 - DNA, 25 bp, Artificial
  probe
  misc_feature (1)..(25): SEQ ID NO: 3512; WAN024ACJ_at; Start 14; Stop 38
aaatgtcttttaggtctgacatttc

SEQ ID NO: 50226 - DNA, 25 bp, Artificial
  probe
  misc_feature (1)..(25): SEQ ID NO: 3512; WAN024ACJ_at; Start 25; Stop 49
aggtctgacatttcataaatcatgt

SEQ ID NO: 50227 - DNA, 25 bp, Artificial
  probe
  misc_feature (1)..(25): SEQ ID NO: 3512; WAN024ACJ_at; Start 13; Stop 37
aaaatgtcttttaggtctgacattt

SEQ ID NO: 50228 - DNA, 25 bp, Artificial
  probe
  misc_feature (1)..(25): SEQ ID NO: 3512; WAN024ACJ_at; Start 11; Stop 35
cgaaaatgtcttttaggtctgacat

SEQ ID NO: 50229 - DNA, 25 bp, Artificial
  probe
  misc_feature (1)..(25): SEQ ID NO: 3512; WAN024ACJ_at; Start 22; Stop 46
tttaggtctgacatttcataaatca

SEQ ID NO: 50230 - DNA, 25 bp, Artificial
  probe
  misc_feature (1)..(25): SEQ ID NO: 3512; WAN024ACJ_at; Start 20; Stop 44
cttttaggtctgacatttcataaat

SEQ ID NO: 50231 - DNA, 25 bp, Artificial
  probe
  misc_feature (1)..(25): SEQ ID NO: 3512; WAN024ACJ_at; Start 5; Stop 29
tgtgaacgaaaatgtcttttaggtc

SEQ ID NO: 50232 - DNA, 25 bp, Artificial
  probe
  misc_feature (1)..(25): SEQ ID NO: 3512; WAN024ACJ_at; Start 16; Stop 40
atgtcttttaggtctgacatttcat

SEQ ID NO: 50233 - DNA, 25 bp, Artificial
  probe
  misc_feature (1)..(25): SEQ ID NO: 3512; WAN024ACJ_at; Start 12; Stop 36
gaaaatgtcttttaggtctgacatt

SEQ ID NO: 50234 - DNA, 25 bp, Artificial
  probe
  misc_feature (1)..(25): SEQ ID NO: 3512; WAN024ACJ_at; Start 7; Stop 31
tgaacgaaaatgtcttttaggtctg

SEQ ID NO: 50235 - DNA, 25 bp, Artificial
  probe
  misc_feature (1)..(25): SEQ ID NO: 190; WAN024ACK_at; Start 8; Stop 32
tttatgaaatgtcagacctaaaaga

SEQ ID NO: 50236 - DNA, 25 bp, Artificial
  probe
  misc_feature (1)..(25): SEQ ID NO: 190; WAN024ACK_at; Start 15; Stop 39
aatgtcagacctaaaagacattttc

SEQ ID NO: 50237 - DNA, 25 bp, Artificial
  probe
  misc_feature (1)..(25): SEQ ID NO: 190; WAN024ACK_at; Start 11; Stop 35
atgaaatgtcagacctaaaagacat

SEQ ID NO: 50238 - DNA, 25 bp, Artificial
  probe
  misc_feature (1)..(25): SEQ ID NO: 190; WAN024ACK_at; Start 10; Stop 34
tatgaaatgtcagacctaaaagaca

SEQ ID NO: 50239 - DNA, 25 bp, Artificial
  probe
  misc_feature (1)..(25): SEQ ID NO: 190; WAN024ACK_at; Start 7; Stop 31
atttatgaaatgtcagacctaaaag

SEQ ID NO: 50240 - DNA, 25 bp, Artificial
  probe
  misc_feature (1)..(25): SEQ ID NO: 190; WAN024ACK_at; Start 13; Stop 37
gaaatgtcagacctaaaagacattt

SEQ ID NO: 50241 - DNA, 25 bp, Artificial
  probe
  misc_feature (1)..(25): SEQ ID NO: 190; WAN024ACK_at; Start 14; Stop 38
aaatgtcagacctaaaagacatttt

SEQ ID NO: 50242 - DNA, 25 bp, Artificial
  probe
  misc_feature (1)..(25): SEQ ID NO: 190; WAN024ACK_at; Start 20; Stop 44
cagacctaaaagacattttcgttca

SEQ ID NO: 50243 - DNA, 25 bp, Artificial
  probe
  misc_feature (1)..(25): SEQ ID NO: 190; WAN024ACK_at; Start 9; Stop 33
ttatgaaatgtcagacctaaaagac

SEQ ID NO: 50244 - DNA, 25 bp, Artificial
  probe
  misc_feature (1)..(25): SEQ ID NO: 190; WAN024ACK_at; Start 16; Stop 40
atgtcagacctaaaagacattttcg

SEQ ID NO: 50245 - DNA, 25 bp, Artificial
  probe
  misc_feature (1)..(25): SEQ ID NO: 190; WAN024ACK_at; Start 17; Stop 41
tgtcagacctaaaagacattttcgt

SEQ ID NO: 50246 - DNA, 25 bp, Artificial
  probe
  misc_feature (1)..(25): SEQ ID NO: 190; WAN024ACK_at; Start 22; Stop 46
gacctaaaagacattttcgttcaca

SEQ ID NO: 50247 - DNA, 25 bp, Artificial
  probe
  misc_feature (1)..(25): SEQ ID NO: 190; WAN024ACK_at; Start 12; Stop 36
tgaaatgtcagacctaaaagacatt

SEQ ID NO: 50248 - DNA, 25 bp, Artificial
  probe
  misc_feature (1)..(25): SEQ ID NO: 190; WAN024ACK_at; Start 19; Stop 43
tcagacctaaaagacattttcgttc

SEQ ID NO: 50249 - DNA, 25 bp, Artificial
  probe
  misc_feature (1)..(25): SEQ ID NO: 190; WAN024ACK_at; Start 6; Stop 30
gatttatgaaatgtcagacctaaaa

SEQ ID NO: 50250 - DNA, 25 bp, Artificial
  probe
  misc_feature (1)..(25): SEQ ID NO: 4646; WAN024ACL_at; Start 34; Stop 58
tgggacagggcttgcaggttgacta

SEQ ID NO: 50251 - DNA, 25 bp, Artificial
  probe
  misc_feature (1)..(25): SEQ ID NO: 4646; WAN024ACL_at; Start 10; Stop 34
ttgagtcggagctgagcttggagct

SEQ ID NO: 50252 - DNA, 25 bp, Artificial
  probe
  misc_feature (1)..(25): SEQ ID NO: 4646; WAN024ACL_at; Start 25; Stop 49
gcttggagctgggacagggcttgca

SEQ ID NO: 50253 - DNA, 25 bp, Artificial
  probe
  misc_feature (1)..(25): SEQ ID NO: 4646; WAN024ACL_at; Start 9; Stop 33
cttgagtcggagctgagcttggagc

SEQ ID NO: 50254 - DNA, 25 bp, Artificial
  probe
  misc_feature (1)..(25): SEQ ID NO: 4646; WAN024ACL_at; Start 4; Stop 28
aggatcttgagtcggagctgagctt

SEQ ID NO: 50255 - DNA, 25 bp, Artificial
  probe
  misc_feature (1)..(25): SEQ ID NO: 4646; WAN024ACL_at; Start 19; Stop 43
agctgagcttggagctgggacaggg

SEQ ID NO: 50256 - DNA, 25 bp, Artificial
  probe
  misc_feature (1)..(25): SEQ ID NO: 4646; WAN024ACL_at; Start 13; Stop 37
agtcggagctgagcttggagctggg

SEQ ID NO: 50257 - DNA, 25 bp, Artificial
  probe
  misc_feature (1)..(25): SEQ ID NO: 4646; WAN024ACL_at; Start 20; Stop 44
gctgagcttggagctgggacagggc

SEQ ID NO: 50258 - DNA, 25 bp, Artificial
  probe
  misc_feature (1)..(25): SEQ ID NO: 4646; WAN024ACL_at; Start 15; Stop 39
tcggagctgagcttggagctgggac

SEQ ID NO: 50259 - DNA, 25 bp, Artificial
  probe
  misc_feature (1)..(25): SEQ ID NO: 4646; WAN024ACL_at; Start 28; Stop 52
tggagctgggacagggcttgcaggt

SEQ ID NO: 50260 - DNA, 25 bp, Artificial
  probe
  misc_feature (1)..(25): SEQ ID NO: 4646; WAN024ACL_at; Start 8; Stop 32
tcttgagtcggagctgagcttggag

SEQ ID NO: 50261 - DNA, 25 bp, Artificial
  probe
  misc_feature (1)..(25): SEQ ID NO: 4646; WAN024ACL_at; Start 33; Stop 57
ctgggacagggcttgcaggttgact

SEQ ID NO: 50262 - DNA, 25 bp, Artificial
  probe
  misc_feature (1)..(25): SEQ ID NO: 4646; WAN024ACL_at; Start 16; Stop 40
cggagctgagcttggagctgggaca

SEQ ID NO: 50263 - DNA, 25 bp, Artificial
  probe
  misc_feature (1)..(25): SEQ ID NO: 4646; WAN024ACL_at; Start 2; Stop 26
ctaggatcttgagtcggagctgagc

SEQ ID NO: 50264 - DNA, 25 bp, Artificial
  probe
  misc_feature (1)..(25): SEQ ID NO: 4646; WAN024ACL_at; Start 26; Stop 50
cttggagctgggacagggcttgcag

SEQ ID NO: 50265 - DNA, 25 bp, Artificial
  probe
  misc_feature (1)..(25): SEQ ID NO: 4646; WAN024ACL_at; Start 23; Stop 47
gagcttggagctgggacagggcttg

SEQ ID NO: 50266 - DNA, 25 bp, Artificial
  probe
  misc_feature (1)..(25): SEQ ID NO: 4646; WAN024ACL_at; Start 22; Stop 46
tgagcttggagctgggacagggctt

SEQ ID NO: 50267 - DNA, 25 bp, Artificial
  probe
  misc_feature (1)..(25): SEQ ID NO: 4646; WAN024ACL_at; Start 29; Stop 53
ggagctgggacagggcttgcaggtt

SEQ ID NO: 50268 - DNA, 25 bp, Artificial
  probe
  misc_feature (1)..(25): SEQ ID NO: 4646; WAN024ACL_at; Start 36; Stop 60
ggacagggcttgcaggttgactagg

SEQ ID NO: 50269 - DNA, 25 bp, Artificial
  probe
  misc_feature (1)..(25): SEQ ID NO: 4646; WAN024ACL_at; Start 38; Stop 62
acagggcttgcaggttgactaggaa

SEQ ID NO: 50270 - DNA, 25 bp, Artificial
  probe
  misc_feature (1)..(25): SEQ ID NO: 4646; WAN024ACL_at; Start 40; Stop 64
agggcttgcaggttgactaggaaca

SEQ ID NO: 50271 - DNA, 25 bp, Artificial
  probe
  misc_feature (1)..(25): SEQ ID NO: 4646; WAN024ACL_at; Start 7; Stop 31
atcttgagtcggagctgagcttgga

SEQ ID NO: 50272 - DNA, 25 bp, Artificial
  probe
  misc_feature (1)..(25): SEQ ID NO: 4646; WAN024ACL_at; Start 35; Stop 59
gggacagggcttgcaggttgactag

SEQ ID NO: 50273 - DNA, 25 bp, Artificial
  probe
  misc_feature (1)..(25): SEQ ID NO: 4646; WAN024ACL_at; Start 39; Stop 63
cagggcttgcaggttgactaggaac

SEQ ID NO: 50274 - DNA, 25 bp, Artificial
  probe
  misc_feature (1)..(25): SEQ ID NO: 4646; WAN024ACL_at; Start 18; Stop 42
gagctgagcttggagctgggacagg

SEQ ID NO: 50275 - DNA, 25 bp, Artificial
  probe
  misc_feature (1)..(25): SEQ ID NO: 4646; WAN024ACL_at; Start 14; Stop 38
gtcggagctgagcttggagctggga

SEQ ID NO: 50276 - DNA, 25 bp, Artificial
  probe
  misc_feature (1)..(25): SEQ ID NO: 4646; WAN024ACL_at; Start 27; Stop 51
ttggagctgggacagggcttgcagg

SEQ ID NO: 50277 - DNA, 25 bp, Artificial
  probe
  misc_feature (1)..(25): SEQ ID NO: 4646; WAN024ACL_at; Start 12; Stop 36
gagtcggagctgagcttggagctgg

SEQ ID NO: 50278 - DNA, 25 bp, Artificial
  probe
  misc_feature (1)..(25): SEQ ID NO: 4646; WAN024ACL_at; Start 3; Stop 27
taggatcttgagtcggagctgagct

SEQ ID NO: 50279 - DNA, 25 bp, Artificial
  probe
  misc_feature (1)..(25): SEQ ID NO: 4646; WAN024ACL_at; Start 17; Stop 41
ggagctgagcttggagctgggacag

SEQ ID NO: 50280 - DNA, 25 bp, Artificial
  probe
  misc_feature (1)..(25): SEQ ID NO: 4646; WAN024ACL_at; Start 41; Stop 65
gggcttgcaggttgactaggaacag

SEQ ID NO: 50281 - DNA, 25 bp, Artificial
  probe
  misc_feature (1)..(25): SEQ ID NO: 4646; WAN024ACL_at; Start 1; Stop 25
tctaggatcttgagtcggagctgag

SEQ ID NO: 50282 - DNA, 25 bp, Artificial
  probe
  misc_feature (1)..(25): SEQ ID NO: 4646; WAN024ACL_at; Start 21; Stop 45
ctgagcttggagctgggacagggct

SEQ ID NO: 50283 - DNA, 25 bp, Artificial
  probe
  misc_feature (1)..(25): SEQ ID NO: 4646; WAN024ACL_at; Start 11; Stop 35
tgagtcggagctgagcttggagctg

SEQ ID NO: 50284 - DNA, 25 bp, Artificial
  probe
  misc_feature (1)..(25): SEQ ID NO: 3462; WAN024ACM_at; Start 8; Stop 32
tagtcaacctgcaagccctgtccca

SEQ ID NO: 50285 - DNA, 25 bp, Artificial
  probe
  misc_feature (1)..(25): SEQ ID NO: 3462; WAN024ACM_at; Start 26; Stop 50
tgtcccagctccaagctcagctccg

SEQ ID NO: 50286 - DNA, 25 bp, Artificial
  probe
  misc_feature (1)..(25): SEQ ID NO: 3462; WAN024ACM_at; Start 20; Stop 44
aagccctgtcccagctccaagctca

SEQ ID NO: 50287 - DNA, 25 bp, Artificial
  probe
  misc_feature (1)..(25): SEQ ID NO: 3462; WAN024ACM_at; Start 23; Stop 47
ccctgtcccagctccaagctcagct

SEQ ID NO: 50288 - DNA, 25 bp, Artificial
  probe
  misc_feature (1)..(25): SEQ ID NO: 3462; WAN024ACM_at; Start 10; Stop 34
gtcaacctgcaagccctgtcccagc

SEQ ID NO: 50289 - DNA, 25 bp, Artificial
  probe
  misc_feature (1)..(25): SEQ ID NO: 3462; WAN024ACM_at; Start 30; Stop 54
ccagctccaagctcagctccgactc

SEQ ID NO: 50290 - DNA, 25 bp, Artificial
  probe
  misc_feature (1)..(25): SEQ ID NO: 3462; WAN024ACM_at; Start 6; Stop 30
cctagtcaacctgcaagccctgtcc

SEQ ID NO: 50291 - DNA, 25 bp, Artificial
  probe
  misc_feature (1)..(25): SEQ ID NO: 3462; WAN024ACM_at; Start 17; Stop 41
tgcaagccctgtcccagctccaagc

SEQ ID NO: 50292 - DNA, 25 bp, Artificial
  probe
  misc_feature (1)..(25): SEQ ID NO: 3462; WAN024ACM_at; Start 25; Stop 49
ctgtcccagctccaagctcagctcc

SEQ ID NO: 50293 - DNA, 25 bp, Artificial
  probe
  misc_feature (1)..(25): SEQ ID NO: 3462; WAN024ACM_at; Start 21; Stop 45
agccctgtcccagctccaagctcag

SEQ ID NO: 50294 - DNA, 25 bp, Artificial
  probe
  misc_feature (1)..(25): SEQ ID NO: 3462; WAN024ACM_at; Start 5; Stop 29
tcctagtcaacctgcaagccctgtc

SEQ ID NO: 50295 - DNA, 25 bp, Artificial
  probe
  misc_feature (1)..(25): SEQ ID NO: 3462; WAN024ACM_at; Start 24; Stop 48
cctgtcccagctccaagctcagctc

SEQ ID NO: 50296 - DNA, 25 bp, Artificial
  probe
  misc_feature (1)..(25): SEQ ID NO: 3462; WAN024ACM_at; Start 27; Stop 51
gtcccagctccaagctcagctccga

SEQ ID NO: 50297 - DNA, 25 bp, Artificial
  probe
  misc_feature (1)..(25): SEQ ID NO: 3462; WAN024ACM_at; Start 29; Stop 53
cccagctccaagctcagctccgact

SEQ ID NO: 50298 - DNA, 25 bp, Artificial
  probe
  misc_feature (1)..(25): SEQ ID NO: 3462; WAN024ACM_at; Start 33; Stop 57
gctccaagctcagctccgactcaag

SEQ ID NO: 50299 - DNA, 25 bp, Artificial
  probe
  misc_feature (1)..(25): SEQ ID NO: 3462; WAN024ACM_at; Start 36; Stop 60
ccaagctcagctccgactcaagatc

SEQ ID NO: 50300 - DNA, 25 bp, Artificial
  probe
  misc_feature (1)..(25): SEQ ID NO: 3462; WAN024ACM_at; Start 3; Stop 27
gttcctagtcaacctgcaagccctg

SEQ ID NO: 50301 - DNA, 25 bp, Artificial
  probe
  misc_feature (1)..(25): SEQ ID NO: 3462; WAN024ACM_at; Start 19; Stop 43
caagccctgtcccagctccaagctc

SEQ ID NO: 50302 - DNA, 25 bp, Artificial
  probe
  misc_feature (1)..(25): SEQ ID NO: 3462; WAN024ACM_at; Start 28; Stop 52
tcccagctccaagctcagctccgac

SEQ ID NO: 50303 - DNA, 25 bp, Artificial
  probe
  misc_feature (1)..(25): SEQ ID NO: 3462; WAN024ACM_at; Start 35; Stop 59
tccaagctcagctccgactcaagat

SEQ ID NO: 50304 - DNA, 25 bp, Artificial
  probe
  misc_feature (1)..(25): SEQ ID NO: 3462; WAN024ACM_at; Start 2; Stop 26
tgttcctagtcaacctgcaagccct

SEQ ID NO: 50305 - DNA, 25 bp, Artificial
  probe
  misc_feature (1)..(25): SEQ ID NO: 3462; WAN024ACM_at; Start 4; Stop 28
ttcctagtcaacctgcaagccctgt

SEQ ID NO: 50306 - DNA, 25 bp, Artificial
  probe
  misc_feature (1)..(25): SEQ ID NO: 3462; WAN024ACM_at; Start 15; Stop 39
cctgcaagccctgtcccagctccaa

SEQ ID NO: 50307 - DNA, 25 bp, Artificial
  probe
  misc_feature (1)..(25): SEQ ID NO: 3462; WAN024ACM_at; Start 32; Stop 56
agctccaagctcagctccgactcaa

SEQ ID NO: 50308 - DNA, 25 bp, Artificial
  probe
  misc_feature (1)..(25): SEQ ID NO: 3462; WAN024ACM_at; Start 39; Stop 63
agctcagctccgactcaagatccta

SEQ ID NO: 50309 - DNA, 25 bp, Artificial
  probe
  misc_feature (1)..(25): SEQ ID NO: 3462; WAN024ACM_at; Start 9; Stop 33
agtcaacctgcaagccctgtcccag

SEQ ID NO: 50310 - DNA, 25 bp, Artificial
  probe
  misc_feature (1)..(25): SEQ ID NO: 3462; WAN024ACM_at; Start 13; Stop 37
aacctgcaagccctgtcccagctcc

SEQ ID NO: 50311 - DNA, 25 bp, Artificial
  probe
  misc_feature (1)..(25): SEQ ID NO: 3462; WAN024ACM_at; Start 41; Stop 65
ctcagctccgactcaagatcctaga

SEQ ID NO: 50312 - DNA, 25 bp, Artificial
  probe
  misc_feature (1)..(25): SEQ ID NO: 3462; WAN024ACM_at; Start 7; Stop 31
ctagtcaacctgcaagccctgtccc

SEQ ID NO: 50313 - DNA, 25 bp, Artificial
  probe
  misc_feature (1)..(25): SEQ ID NO: 3462; WAN024ACM_at; Start 14; Stop 38
acctgcaagccctgtcccagctcca

SEQ ID NO: 50314 - DNA, 25 bp, Artificial
  probe
  misc_feature (1)..(25): SEQ ID NO: 3462; WAN024ACM_at; Start 31; Stop 55
cagctccaagctcagctccgactca

SEQ ID NO: 50315 - DNA, 25 bp, Artificial
  probe
  misc_feature (1)..(25): SEQ ID NO: 3462; WAN024ACM_at; Start 16; Stop 40
ctgcaagccctgtcccagctccaag

SEQ ID NO: 50316 - DNA, 25 bp, Artificial
  probe
  misc_feature (1)..(25): SEQ ID NO: 3462; WAN024ACM_at; Start 22; Stop 46
gccctgtcccagctccaagctcagc

SEQ ID NO: 50317 - DNA, 25 bp, Artificial
  probe
  misc_feature (1)..(25): SEQ ID NO: 3462; WAN024ACM_at; Start 40; Stop 64
gctcagctccgactcaagatcctag

SEQ ID NO: 50318 - DNA, 25 bp, Artificial
  probe
  misc_feature (1)..(25): SEQ ID NO: 4415; WAN024ACN_at; Start 171; Stop 195
tctcttctgtatcaggtctttgaac

SEQ ID NO: 50319 - DNA, 25 bp, Artificial
  probe
  misc_feature (1)..(25): SEQ ID NO: 4415; WAN024ACN_at; Start 243; Stop 267
ccaataaacaatatggatagcgctt

SEQ ID NO: 50320 - DNA, 25 bp, Artificial
  probe
  misc_feature (1)..(25): SEQ ID NO: 4415; WAN024ACN_at; Start 164; Stop 188
gaatagttctcttctgtatcaggtc

SEQ ID NO: 50321 - DNA, 25 bp, Artificial
  probe
  misc_feature (1)..(25): SEQ ID NO: 4415; WAN024ACN_at; Start 398; Stop 422
gccgctagggcaatcgtctatcaga

SEQ ID NO: 50322 - DNA, 25 bp, Artificial
  probe
  misc_feature (1)..(25): SEQ ID NO: 4415; WAN024ACN_at; Start 232; Stop 256
caagaatcagcccaataaacaatat

SEQ ID NO: 50323 - DNA, 25 bp, Artificial
  probe
  misc_feature (1)..(25): SEQ ID NO: 4415; WAN024ACN_at; Start 400; Stop 424
cgctagggcaatcgtctatcagaat

SEQ ID NO: 50324 - DNA, 25 bp, Artificial
  probe
  misc_feature (1)..(25): SEQ ID NO: 4415; WAN024ACN_at; Start 309; Stop 333
taagcataagcgaaaatataataac

SEQ ID NO: 50325 - DNA, 25 bp, Artificial
  probe
  misc_feature (1)..(25): SEQ ID NO: 4415; WAN024ACN_at; Start 386; Stop 410
agtttacactaagccgctagggcaa

SEQ ID NO: 50326 - DNA, 25 bp, Artificial
  probe
  misc_feature (1)..(25): SEQ ID NO: 4415; WAN024ACN_at; Start 428; Stop 452
cgtttatttgtcaataatccgagaa

SEQ ID NO: 50327 - DNA, 25 bp, Artificial
  probe
  misc_feature (1)..(25): SEQ ID NO: 4415; WAN024ACN_at; Start 228; Stop 252
tactcaagaatcagcccaataaaca

SEQ ID NO: 50328 - DNA, 25 bp, Artificial
  probe
  misc_feature (1)..(25): SEQ ID NO: 4415; WAN024ACN_at; Start 241; Stop 265
gcccaataaacaatatggatagcgc

SEQ ID NO: 50329 - DNA, 25 bp, Artificial
  probe
  misc_feature (1)..(25): SEQ ID NO: 4415; WAN024ACN_at; Start 392; Stop 416
cactaagccgctagggcaatcgtct

SEQ ID NO: 50330 - DNA, 25 bp, Artificial
  probe
  misc_feature (1)..(25): SEQ ID NO: 4415; WAN024ACN_at; Start 390; Stop 414
tacactaagccgctagggcaatcgt

SEQ ID NO: 50331 - DNA, 25 bp, Artificial
  probe
  misc_feature (1)..(25): SEQ ID NO: 4415; WAN024ACN_at; Start 432; Stop 456
tatttgtcaataatccgagaaaatc

SEQ ID NO: 50332 - DNA, 25 bp, Artificial
  probe
  misc_feature (1)..(25): SEQ ID NO: 4415; WAN024ACN_at; Start 393; Stop 417
actaagccgctagggcaatcgtcta

SEQ ID NO: 50333 - DNA, 25 bp, Artificial
  probe
  misc_feature (1)..(25): SEQ ID NO: 4415; WAN024ACN_at; Start 235; Stop 259
gaatcagcccaataaacaatatgga

SEQ ID NO: 50334 - DNA, 25 bp, Artificial
  probe
  misc_feature (1)..(25): SEQ ID NO: 4415; WAN024ACN_at; Start 426; Stop 450
tccgtttatttgtcaataatccgag

SEQ ID NO: 50335 - DNA, 25 bp, Artificial
  probe
  misc_feature (1)..(25): SEQ ID NO: 4415; WAN024ACN_at; Start 5; Stop 29
gatgcaacaccaattttctcatgat

SEQ ID NO: 50336 - DNA, 25 bp, Artificial
  probe
  misc_feature (1)..(25): SEQ ID NO: 4415; WAN024ACN_at; Start 313; Stop 337
cataagcgaaaatataataactgtc

SEQ ID NO: 50337 - DNA, 25 bp, Artificial
  probe
  misc_feature (1)..(25): SEQ ID NO: 4415; WAN024ACN_at; Start 247; Stop 271
taaacaatatggatagcgctttcaa

SEQ ID NO: 50338 - DNA, 25 bp, Artificial
  probe
  misc_feature (1)..(25): SEQ ID NO: 4415; WAN024ACN_at; Start 256; Stop 280
tggatagcgctttcaaatttttaaa

SEQ ID NO: 50339 - DNA, 25 bp, Artificial
  probe
  misc_feature (1)..(25): SEQ ID NO: 4415; WAN024ACN_at; Start 238; Stop 262
tcagcccaataaacaatatggatag

SEQ ID NO: 50340 - DNA, 25 bp, Artificial
  probe
  misc_feature (1)..(25): SEQ ID NO: 4415; WAN024ACN_at; Start 318; Stop 342
gcgaaaatataataactgtcaagta

SEQ ID NO: 50341 - DNA, 25 bp, Artificial
  probe
  misc_feature (1)..(25): SEQ ID NO: 4415; WAN024ACN_at; Start 381; Stop 405
tgtaaagtttacactaagccgctag

SEQ ID NO: 50342 - DNA, 25 bp, Artificial
  probe
  misc_feature (1)..(25): SEQ ID NO: 4415; WAN024ACN_at; Start 15; Stop 39
caattttctcatgatttatttctcc

SEQ ID NO: 50343 - DNA, 25 bp, Artificial
  probe
  misc_feature (1)..(25): SEQ ID NO: 4415; WAN024ACN_at; Start 144; Stop 168
gaacttactcttaactagaagaata

SEQ ID NO: 50344 - DNA, 25 bp, Artificial
  probe
  misc_feature (1)..(25): SEQ ID NO: 4415; WAN024ACN_at; Start 397; Stop 421
agccgctagggcaatcgtctatcag

SEQ ID NO: 50345 - DNA, 25 bp, Artificial
  probe
  misc_feature (1)..(25): SEQ ID NO: 4415; WAN024ACN_at; Start 1; Stop 25
taaagatgcaacaccaattttctca

SEQ ID NO: 50346 - DNA, 25 bp, Artificial
  probe
  misc_feature (1)..(25): SEQ ID NO: 4415; WAN024ACN_at; Start 245; Stop 269
aataaacaatatggatagcgctttc

SEQ ID NO: 50347 - DNA, 25 bp, Artificial
  probe
  misc_feature (1)..(25): SEQ ID NO: 4415; WAN024ACN_at; Start 249; Stop 273
aacaatatggatagcgctttcaaat

SEQ ID NO: 50348 - DNA, 25 bp, Artificial
  probe
  misc_feature (1)..(25): SEQ ID NO: 4415; WAN024ACN_at; Start 8; Stop 32
gcaacaccaattttctcatgattta

SEQ ID NO: 50349 - DNA, 25 bp, Artificial
  probe
  misc_feature (1)..(25): SEQ ID NO: 4415; WAN024ACN_at; Start 151; Stop 175
ctcttaactagaagaatagttctct

SEQ ID NO: 50350 - DNA, 25 bp, Artificial
  probe
  misc_feature (1)..(25): SEQ ID NO: 4415; WAN024ACN_at; Start 385; Stop 409
aagtttacactaagccgctagggca

SEQ ID NO: 50351 - DNA, 25 bp, Artificial
  probe
  misc_feature (1)..(25): SEQ ID NO: 4415; WAN024ACN_at; Start 399; Stop 423
ccgctagggcaatcgtctatcagaa

SEQ ID NO: 50352 - DNA, 25 bp, Artificial
  probe
  misc_feature (1)..(25): SEQ ID NO: 3665; WAN024ACO_at; Start 205; Stop 229
tgtttattgggctgattcttgagta

SEQ ID NO: 50353 - DNA, 25 bp, Artificial
  probe
  misc_feature (1)..(25): SEQ ID NO: 3665; WAN024ACO_at; Start 376; Stop 400
caaattactatagctgtttctacgg

SEQ ID NO: 50354 - DNA, 25 bp, Artificial
  probe
  misc_feature (1)..(25): SEQ ID NO: 3665; WAN024ACO_at; Start 282; Stop 306
agagaactattcttctagttaagag

SEQ ID NO: 50355 - DNA, 25 bp, Artificial
  probe
  misc_feature (1)..(25): SEQ ID NO: 3665; WAN024ACO_at; Start 192; Stop 216
gcgctatccatattgtttattgggc

SEQ ID NO: 50356 - DNA, 25 bp, Artificial
  probe
  misc_feature (1)..(25): SEQ ID NO: 3665; WAN024ACO_at; Start 183; Stop 207
aatttgaaagcgctatccatattgt

SEQ ID NO: 50357 - DNA, 25 bp, Artificial
  probe
  misc_feature (1)..(25): SEQ ID NO: 3665; WAN024ACO_at; Start 348; Stop 372
gagtccaatggactacgatacttgt

SEQ ID NO: 50358 - DNA, 25 bp, Artificial
  probe
  misc_feature (1)..(25): SEQ ID NO: 3665; WAN024ACO_at; Start 425; Stop 449
taaatcatgagaaaattggtgttgc

SEQ ID NO: 50359 - DNA, 25 bp, Artificial
  probe
  misc_feature (1)..(25): SEQ ID NO: 3665; WAN024ACO_at; Start 396; Stop 420
tacggaatagctctcgataatagga

SEQ ID NO: 50360 - DNA, 25 bp, Artificial
  probe
  misc_feature (1)..(25): SEQ ID NO: 3665; WAN024ACO_at; Start 293; Stop 317
cttctagttaagagtaagttcgttg

SEQ ID NO: 50361 - DNA, 25 bp, Artificial
  probe
  misc_feature (1)..(25): SEQ ID NO: 3665; WAN024ACO_at; Start 336; Stop 360
tagaaggaaggtgagtccaatggac

SEQ ID NO: 50362 - DNA, 25 bp, Artificial
  probe
  misc_feature (1)..(25): SEQ ID NO: 3665; WAN024ACO_at; Start 40; Stop 64
tagacgattgccctagcggcttagt

SEQ ID NO: 50363 - DNA, 25 bp, Artificial
  probe
  misc_feature (1)..(25): SEQ ID NO: 3665; WAN024ACO_at; Start 53; Stop 77
tagcggcttagtgtaaactttacaa

SEQ ID NO: 50364 - DNA, 25 bp, Artificial
  probe
  misc_feature (1)..(25): SEQ ID NO: 3665; WAN024ACO_at; Start 235; Stop 259
tagagtgtgattaatactactctgg

SEQ ID NO: 50365 - DNA, 25 bp, Artificial
  probe
  misc_feature (1)..(25): SEQ ID NO: 3665; WAN024ACO_at; Start 177; Stop 201
tttaaaaatttgaaagcgctatcca

SEQ ID NO: 50366 - DNA, 25 bp, Artificial
  probe
  misc_feature (1)..(25): SEQ ID NO: 3665; WAN024ACO_at; Start 247; Stop 271
aatactactctggttgttcaaagac

SEQ ID NO: 50367 - DNA, 25 bp, Artificial
  probe
  misc_feature (1)..(25): SEQ ID NO: 3665; WAN024ACO_at; Start 115; Stop 139
tacttgacagttattatattttcgc

SEQ ID NO: 50368 - DNA, 25 bp, Artificial
  probe
  misc_feature (1)..(25): SEQ ID NO: 3665; WAN024ACO_at; Start 432; Stop 456
tgagaaaattggtgttgcatcttta

SEQ ID NO: 50369 - DNA, 25 bp, Artificial
  probe
  misc_feature (1)..(25): SEQ ID NO: 3665; WAN024ACO_at; Start 221; Stop 245
tcttgagtaatagttagagtgtgat

SEQ ID NO: 50370 - DNA, 25 bp, Artificial
  probe
  misc_feature (1)..(25): SEQ ID NO: 3665; WAN024ACO_at; Start 1; Stop 25
gattttctcggattattgacaaata

SEQ ID NO: 50371 - DNA, 25 bp, Artificial
  probe
  misc_feature (1)..(25): SEQ ID NO: 3665; WAN024ACO_at; Start 255; Stop 279
tctggttgttcaaagacctgataca

SEQ ID NO: 50372 - DNA, 25 bp, Artificial
  probe
  misc_feature (1)..(25): SEQ ID NO: 3665; WAN024ACO_at; Start 48; Stop 72
tgccctagcggcttagtgtaaactt

SEQ ID NO: 50373 - DNA, 25 bp, Artificial
  probe
  misc_feature (1)..(25): SEQ ID NO: 3665; WAN024ACO_at; Start 35; Stop 59
tctgatagacgattgccctagcggc

SEQ ID NO: 50374 - DNA, 25 bp, Artificial
  probe
  misc_feature (1)..(25): SEQ ID NO: 3665; WAN024ACO_at; Start 353; Stop 377
caatggactacgatacttgttgaca

SEQ ID NO: 50375 - DNA, 25 bp, Artificial
  probe
  misc_feature (1)..(25): SEQ ID NO: 3665; WAN024ACO_at; Start 7; Stop 31
ctcggattattgacaaataaacgga

SEQ ID NO: 50376 - DNA, 25 bp, Artificial
  probe
  misc_feature (1)..(25): SEQ ID NO: 3665; WAN024ACO_at; Start 357; Stop 381
ggactacgatacttgttgacaaatt

SEQ ID NO: 50377 - DNA, 25 bp, Artificial
  probe
  misc_feature (1)..(25): SEQ ID NO: 3665; WAN024ACO_at; Start 408; Stop 432
ctcgataataggagaaataaatcat

SEQ ID NO: 50378 - DNA, 25 bp, Artificial
  probe
  misc_feature (1)..(25): SEQ ID NO: 3665; WAN024ACO_at; Start 261; Stop 285
tgttcaaagacctgatacagaagag

SEQ ID NO: 50379 - DNA, 25 bp, Artificial
  probe
  misc_feature (1)..(25): SEQ ID NO: 3665; WAN024ACO_at; Start 326; Stop 350
tgaaatgaaatagaaggaaggtgag

SEQ ID NO: 50380 - DNA, 25 bp, Artificial
  probe
  misc_feature (1)..(25): SEQ ID NO: 3665; WAN024ACO_at; Start 388; Stop 412
gctgtttctacggaatagctctcga

SEQ ID NO: 50381 - DNA, 25 bp, Artificial
  probe
  misc_feature (1)..(25): SEQ ID NO: 3665; WAN024ACO_at; Start 367; Stop 391
acttgttgacaaattactatagctg

SEQ ID NO: 50382 - DNA, 25 bp, Artificial
  probe
  misc_feature (1)..(25): SEQ ID NO: 3665; WAN024ACO_at; Start 269; Stop 293
gacctgatacagaagagaactattc

SEQ ID NO: 50383 - DNA, 25 bp, Artificial
  probe
  misc_feature (1)..(25): SEQ ID NO: 3665; WAN024ACO_at; Start 199; Stop 223
ccatattgtttattgggctgattct

SEQ ID NO: 50384 - DNA, 25 bp, Artificial
  probe
  misc_feature (1)..(25): SEQ ID NO: 3665; WAN024ACO_at; Start 215; Stop 239
gctgattcttgagtaatagttagag

SEQ ID NO: 50385 - DNA, 25 bp, Artificial
  probe
  misc_feature (1)..(25): SEQ ID NO: 3665; WAN024ACO_at; Start 400; Stop 424
gaatagctctcgataataggagaaa

SEQ ID NO: 50386 - DNA, 25 bp, Artificial
  probe
  misc_feature (1)..(25): SEQ ID NO: 372; WAN024ACP_at; Start 18; Stop 42
caaaagaagccatcaggttagcatt

SEQ ID NO: 50387 - DNA, 25 bp, Artificial
  probe
  misc_feature (1)..(25): SEQ ID NO: 372; WAN024ACP_at; Start 28; Stop 52
catcaggttagcatttaacctaaac

SEQ ID NO: 50388 - DNA, 25 bp, Artificial
  probe
  misc_feature (1)..(25): SEQ ID NO: 372; WAN024ACP_at; Start 23; Stop 47
gaagccatcaggttagcatttaacc

SEQ ID NO: 50389 - DNA, 25 bp, Artificial
  probe
  misc_feature (1)..(25): SEQ ID NO: 372; WAN024ACP_at; Start 36; Stop 60
tagcatttaacctaaacagctcctt

SEQ ID NO: 50390 - DNA, 25 bp, Artificial
  probe
  misc_feature (1)..(25): SEQ ID NO: 372; WAN024ACP_at; Start 17; Stop 41
acaaaagaagccatcaggttagcat

SEQ ID NO: 50391 - DNA, 25 bp, Artificial
  probe
  misc_feature (1)..(25): SEQ ID NO: 372; WAN024ACP_at; Start 13; Stop 37
acaaacaaaagaagccatcaggtta

SEQ ID NO: 50392 - DNA, 25 bp, Artificial
  probe
  misc_feature (1)..(25): SEQ ID NO: 372; WAN024ACP_at; Start 27; Stop 51
ccatcaggttagcatttaacctaaa

SEQ ID NO: 50393 - DNA, 25 bp, Artificial
  probe
  misc_feature (1)..(25): SEQ ID NO: 372; WAN024ACP_at; Start 16; Stop 40
aacaaaagaagccatcaggttagca

SEQ ID NO: 50394 - DNA, 25 bp, Artificial
  probe
  misc_feature (1)..(25): SEQ ID NO: 372; WAN024ACP_at; Start 12; Stop 36
cacaaacaaaagaagccatcaggtt

SEQ ID NO: 50395 - DNA, 25 bp, Artificial
  probe
  misc_feature (1)..(25): SEQ ID NO: 372; WAN024ACP_at; Start 14; Stop 38
caaacaaaagaagccatcaggttag

SEQ ID NO: 50396 - DNA, 25 bp, Artificial
  probe
  misc_feature (1)..(25): SEQ ID NO: 372; WAN024ACP_at; Start 21; Stop 45
aagaagccatcaggttagcatttaa

SEQ ID NO: 50397 - DNA, 25 bp, Artificial
  probe
  misc_feature (1)..(25): SEQ ID NO: 372; WAN024ACP_at; Start 22; Stop 46
agaagccatcaggttagcatttaac

SEQ ID NO: 50398 - DNA, 25 bp, Artificial
  probe
  misc_feature (1)..(25): SEQ ID NO: 372; WAN024ACP_at; Start 25; Stop 49
agccatcaggttagcatttaaccta

SEQ ID NO: 50399 - DNA, 25 bp, Artificial
  probe
  misc_feature (1)..(25): SEQ ID NO: 372; WAN024ACP_at; Start 35; Stop 59
ttagcatttaacctaaacagctcct

SEQ ID NO: 50400 - DNA, 25 bp, Artificial
  probe
  misc_feature (1)..(25): SEQ ID NO: 372; WAN024ACP_at; Start 11; Stop 35
tcacaaacaaaagaagccatcaggt

SEQ ID NO: 50401 - DNA, 25 bp, Artificial
  probe
  misc_feature (1)..(25): SEQ ID NO: 372; WAN024ACP_at; Start 19; Stop 43
aaaagaagccatcaggttagcattt

SEQ ID NO: 50402 - DNA, 25 bp, Artificial
  probe
  misc_feature (1)..(25): SEQ ID NO: 372; WAN024ACP_at; Start 32; Stop 56
aggttagcatttaacctaaacagct

SEQ ID NO: 50403 - DNA, 25 bp, Artificial
  probe
  misc_feature (1)..(25): SEQ ID NO: 372; WAN024ACP_at; Start 33; Stop 57
ggttagcatttaacctaaacagctc

SEQ ID NO: 50404 - DNA, 25 bp, Artificial
  probe
  misc_feature (1)..(25): SEQ ID NO: 372; WAN024ACP_at; Start 37; Stop 61
agcatttaacctaaacagctccttg

SEQ ID NO: 50405 - DNA, 25 bp, Artificial
  probe
  misc_feature (1)..(25): SEQ ID NO: 372; WAN024ACP_at; Start 38; Stop 62
gcatttaacctaaacagctccttga

SEQ ID NO: 50406 - DNA, 25 bp, Artificial
  probe
  misc_feature (1)..(25): SEQ ID NO: 372; WAN024ACP_at; Start 20; Stop 44
aaagaagccatcaggttagcattta

SEQ ID NO: 50407 - DNA, 25 bp, Artificial
  probe
  misc_feature (1)..(25): SEQ ID NO: 372; WAN024ACP_at; Start 31; Stop 55
caggttagcatttaacctaaacagc

SEQ ID NO: 50408 - DNA, 25 bp, Artificial
  probe
  misc_feature (1)..(25): SEQ ID NO: 372; WAN024ACP_at; Start 26; Stop 50
gccatcaggttagcatttaacctaa

SEQ ID NO: 50409 - DNA, 25 bp, Artificial
  probe
  misc_feature (1)..(25): SEQ ID NO: 372; WAN024ACP_at; Start 24; Stop 48
aagccatcaggttagcatttaacct

SEQ ID NO: 50410 - DNA, 25 bp, Artificial
  probe
  misc_feature (1)..(25): SEQ ID NO: 372; WAN024ACP_at; Start 34; Stop 58
gttagcatttaacctaaacagctcc

SEQ ID NO: 50411 - DNA, 25 bp, Artificial
  probe
  misc_feature (1)..(25): SEQ ID NO: 372; WAN024ACP_at; Start 30; Stop 54
tcaggttagcatttaacctaaacag

SEQ ID NO: 50412 - DNA, 25 bp, Artificial
  probe
  misc_feature (1)..(25): SEQ ID NO: 372; WAN024ACP_at; Start 29; Stop 53
atcaggttagcatttaacctaaaca

SEQ ID NO: 50413 - DNA, 25 bp, Artificial
  probe
  misc_feature (1)..(25): SEQ ID NO: 372; WAN024ACP_at; Start 15; Stop 39
aaacaaaagaagccatcaggttagc

SEQ ID NO: 50414 - DNA, 25 bp, Artificial
  probe
  misc_feature (1)..(25): SEQ ID NO: 4583; WAN024ACQ_at; Start 36; Stop 60
gcttcttttgtttgtgaatagtata

SEQ ID NO: 50415 - DNA, 25 bp, Artificial
  probe
  misc_feature (1)..(25): SEQ ID NO: 4583; WAN024ACQ_at; Start 11; Stop 35
gtttaggttaaatgctaacctgatg

SEQ ID NO: 50416 - DNA, 25 bp, Artificial
  probe
  misc_feature (1)..(25): SEQ ID NO: 4583; WAN024ACQ_at; Start 34; Stop 58
tggcttcttttgtttgtgaatagta

SEQ ID NO: 50417 - DNA, 25 bp, Artificial
  probe
  misc_feature (1)..(25): SEQ ID NO: 4583; WAN024ACQ_at; Start 32; Stop 56
gatggcttcttttgtttgtgaatag

SEQ ID NO: 50418 - DNA, 25 bp, Artificial
  probe
  misc_feature (1)..(25): SEQ ID NO: 4583; WAN024ACQ_at; Start 25; Stop 49
ctaacctgatggcttcttttgtttg

SEQ ID NO: 50419 - DNA, 25 bp, Artificial
  probe
  misc_feature (1)..(25): SEQ ID NO: 4583; WAN024ACQ_at; Start 18; Stop 42
ttaaatgctaacctgatggcttctt

SEQ ID NO: 50420 - DNA, 25 bp, Artificial
  probe
  misc_feature (1)..(25): SEQ ID NO: 4583; WAN024ACQ_at; Start 28; Stop 52
acctgatggcttcttttgtttgtga

SEQ ID NO: 50421 - DNA, 25 bp, Artificial
  probe
  misc_feature (1)..(25): SEQ ID NO: 4583; WAN024ACQ_at; Start 16; Stop 40
ggttaaatgctaacctgatggcttc

SEQ ID NO: 50422 - DNA, 25 bp, Artificial
  probe
  misc_feature (1)..(25): SEQ ID NO: 4583; WAN024ACQ_at; Start 2; Stop 26
caaggagctgtttaggttaaatgct

SEQ ID NO: 50423 - DNA, 25 bp, Artificial
  probe
  misc_feature (1)..(25): SEQ ID NO: 4583; WAN024ACQ_at; Start 8; Stop 32
gctgtttaggttaaatgctaacctg

SEQ ID NO: 50424 - DNA, 25 bp, Artificial
  probe
  misc_feature (1)..(25): SEQ ID NO: 4583; WAN024ACQ_at; Start 29; Stop 53
cctgatggcttcttttgtttgtgaa

SEQ ID NO: 50425 - DNA, 25 bp, Artificial
  probe
  misc_feature (1)..(25): SEQ ID NO: 4583; WAN024ACQ_at; Start 21; Stop 45
aatgctaacctgatggcttcttttg

SEQ ID NO: 50426 - DNA, 25 bp, Artificial
  probe
  misc_feature (1)..(25): SEQ ID NO: 4583; WAN024ACQ_at; Start 22; Stop 46
atgctaacctgatggcttcttttgt

SEQ ID NO: 50427 - DNA, 25 bp, Artificial
  probe
  misc_feature (1)..(25): SEQ ID NO: 4583; WAN024ACQ_at; Start 9; Stop 33
ctgtttaggttaaatgctaacctga

SEQ ID NO: 50428 - DNA, 25 bp, Artificial
  probe
  misc_feature (1)..(25): SEQ ID NO: 4583; WAN024ACQ_at; Start 31; Stop 55
tgatggcttcttttgtttgtgaata

SEQ ID NO: 50429 - DNA, 25 bp, Artificial
  probe
  misc_feature (1)..(25): SEQ ID NO: 4583; WAN024ACQ_at; Start 37; Stop 61
cttcttttgtttgtgaatagtatag

SEQ ID NO: 50430 - DNA, 25 bp, Artificial
  probe
  misc_feature (1)..(25): SEQ ID NO: 4583; WAN024ACQ_at; Start 19; Stop 43
taaatgctaacctgatggcttcttt

SEQ ID NO: 50431 - DNA, 25 bp, Artificial
  probe
  misc_feature (1)..(25): SEQ ID NO: 4583; WAN024ACQ_at; Start 26; Stop 50
taacctgatggcttcttttgtttgt

SEQ ID NO: 50432 - DNA, 25 bp, Artificial
  probe
  misc_feature (1)..(25): SEQ ID NO: 4583; WAN024ACQ_at; Start 15; Stop 39
aggttaaatgctaacctgatggctt

SEQ ID NO: 50433 - DNA, 25 bp, Artificial
  probe
  misc_feature (1)..(25): SEQ ID NO: 4583; WAN024ACQ_at; Start 17; Stop 41
gttaaatgctaacctgatggcttct

SEQ ID NO: 50434 - DNA, 25 bp, Artificial
  probe
  misc_feature (1)..(25): SEQ ID NO: 4583; WAN024ACQ_at; Start 35; Stop 59
ggcttcttttgtttgtgaatagtat

SEQ ID NO: 50435 - DNA, 25 bp, Artificial
  probe
  misc_feature (1)..(25): SEQ ID NO: 4583; WAN024ACQ_at; Start 30; Stop 54
ctgatggcttcttttgtttgtgaat

SEQ ID NO: 50436 - DNA, 25 bp, Artificial
  probe
  misc_feature (1)..(25): SEQ ID NO: 4583; WAN024ACQ_at; Start 10; Stop 34
tgtttaggttaaatgctaacctgat

SEQ ID NO: 50437 - DNA, 25 bp, Artificial
  probe
  misc_feature (1)..(25): SEQ ID NO: 4583; WAN024ACQ_at; Start 1; Stop 25
tcaaggagctgtttaggttaaatgc

SEQ ID NO: 50438 - DNA, 25 bp, Artificial
  probe
  misc_feature (1)..(25): SEQ ID NO: 4583; WAN024ACQ_at; Start 13; Stop 37
ttaggttaaatgctaacctgatggc

SEQ ID NO: 50439 - DNA, 25 bp, Artificial
  probe
  misc_feature (1)..(25): SEQ ID NO: 4583; WAN024ACQ_at; Start 12; Stop 36
tttaggttaaatgctaacctgatgg

SEQ ID NO: 50440 - DNA, 25 bp, Artificial
  probe
  misc_feature (1)..(25): SEQ ID NO: 4583; WAN024ACQ_at; Start 14; Stop 38
taggttaaatgctaacctgatggct

SEQ ID NO: 50441 - DNA, 25 bp, Artificial
  probe
  misc_feature (1)..(25): SEQ ID NO: 4583; WAN024ACQ_at; Start 4; Stop 28
aggagctgtttaggttaaatgctaa

SEQ ID NO: 50442 - DNA, 25 bp, Artificial
  probe
  misc_feature (1)..(25): SEQ ID NO: 4583; WAN024ACQ_at; Start 20; Stop 44
aaatgctaacctgatggcttctttt

SEQ ID NO: 50443 - DNA, 25 bp, Artificial
  probe
  misc_feature (1)..(25): SEQ ID NO: 4583; WAN024ACQ_at; Start 27; Stop 51
aacctgatggcttcttttgtttgtg

SEQ ID NO: 50444 - DNA, 25 bp, Artificial
  probe
  misc_feature (1)..(25): SEQ ID NO: 4583; WAN024ACQ_at; Start 6; Stop 30
gagctgtttaggttaaatgctaacc

SEQ ID NO: 50445 - DNA, 25 bp, Artificial
  probe
  misc_feature (1)..(25): SEQ ID NO: 4583; WAN024ACQ_at; Start 5; Stop 29
ggagctgtttaggttaaatgctaac

SEQ ID NO: 50446 - DNA, 25 bp, Artificial
  probe
  misc_feature (1)..(25): SEQ ID NO: 4583; WAN024ACQ_at; Start 23; Stop 47
tgctaacctgatggcttcttttgtt

SEQ ID NO: 50447 - DNA, 25 bp, Artificial
  probe
  misc_feature (1)..(25): SEQ ID NO: 4583; WAN024ACQ_at; Start 3; Stop 27
aaggagctgtttaggttaaatgcta

SEQ ID NO: 50448 - DNA, 25 bp, Artificial
  probe
  misc_feature (1)..(25): SEQ ID NO: 269; WAN024ACR_at; Start 48; Stop 72
ataagctagaaaaactgtcaaattt

SEQ ID NO: 50449 - DNA, 25 bp, Artificial
  probe
  misc_feature (1)..(25): SEQ ID NO: 269; WAN024ACR_at; Start 52; Stop 76
gctagaaaaactgtcaaatttccgc

SEQ ID NO: 50450 - DNA, 25 bp, Artificial
  probe
  misc_feature (1)..(25): SEQ ID NO: 269; WAN024ACR_at; Start 31; Stop 55
tttacttaaatcttatcataagcta

SEQ ID NO: 50451 - DNA, 25 bp, Artificial
  probe
  misc_feature (1)..(25): SEQ ID NO: 269; WAN024ACR_at; Start 34; Stop 58
acttaaatcttatcataagctagaa

SEQ ID NO: 50452 - DNA, 25 bp, Artificial
  probe
  misc_feature (1)..(25): SEQ ID NO: 269; WAN024ACR_at; Start 40; Stop 64
atcttatcataagctagaaaaactg

SEQ ID NO: 50453 - DNA, 25 bp, Artificial
  probe
  misc_feature (1)..(25): SEQ ID NO: 269; WAN024ACR_at; Start 38; Stop 62
aaatcttatcataagctagaaaaac

SEQ ID NO: 50454 - DNA, 25 bp, Artificial
  probe
  misc_feature (1)..(25): SEQ ID NO: 269; WAN024ACR_at; Start 32; Stop 56
ttacttaaatcttatcataagctag

SEQ ID NO: 50455 - DNA, 25 bp, Artificial
  probe
  misc_feature (1)..(25): SEQ ID NO: 269; WAN024ACR_at; Start 29; Stop 53
tctttacttaaatcttatcataagc

SEQ ID NO: 50456 - DNA, 25 bp, Artificial
  probe
  misc_feature (1)..(25): SEQ ID NO: 269; WAN024ACR_at; Start 42; Stop 66
cttatcataagctagaaaaactgtc

SEQ ID NO: 50457 - DNA, 25 bp, Artificial
  probe
  misc_feature (1)..(25): SEQ ID NO: 269; WAN024ACR_at; Start 44; Stop 68
tatcataagctagaaaaactgtcaa

SEQ ID NO: 50458 - DNA, 25 bp, Artificial
  probe
  misc_feature (1)..(25): SEQ ID NO: 269; WAN024ACR_at; Start 49; Stop 73
taagctagaaaaactgtcaaatttc

SEQ ID NO: 50459 - DNA, 25 bp, Artificial
  probe
  misc_feature (1)..(25): SEQ ID NO: 269; WAN024ACR_at; Start 36; Stop 60
ttaaatcttatcataagctagaaaa

SEQ ID NO: 50460 - DNA, 25 bp, Artificial
  probe
  misc_feature (1)..(25): SEQ ID NO: 269; WAN024ACR_at; Start 33; Stop 57
tacttaaatcttatcataagctaga

SEQ ID NO: 50461 - DNA, 25 bp, Artificial
  probe
  misc_feature (1)..(25): SEQ ID NO: 269; WAN024ACR_at; Start 41; Stop 65
tcttatcataagctagaaaaactgt

SEQ ID NO: 50462 - DNA, 25 bp, Artificial
  probe
  misc_feature (1)..(25): SEQ ID NO: 269; WAN024ACR_at; Start 46; Stop 70
tcataagctagaaaaactgtcaaat

SEQ ID NO: 50463 - DNA, 25 bp, Artificial
  probe
  misc_feature (1)..(25): SEQ ID NO: 269; WAN024ACR_at; Start 47; Stop 71
cataagctagaaaaactgtcaaatt

SEQ ID NO: 50464 - DNA, 25 bp, Artificial
  probe
  misc_feature (1)..(25): SEQ ID NO: 269; WAN024ACR_at; Start 30; Stop 54
ctttacttaaatcttatcataagct

SEQ ID NO: 50465 - DNA, 25 bp, Artificial
  probe
  misc_feature (1)..(25): SEQ ID NO: 269; WAN024ACR_at; Start 24; Stop 48
gcttttctttacttaaatcttatca

SEQ ID NO: 50466 - DNA, 25 bp, Artificial
  probe
  misc_feature (1)..(25): SEQ ID NO: 269; WAN024ACR_at; Start 37; Stop 61
taaatcttatcataagctagaaaaa

SEQ ID NO: 50467 - DNA, 25 bp, Artificial
  probe
  misc_feature (1)..(25): SEQ ID NO: 269; WAN024ACR_at; Start 28; Stop 52
ttctttacttaaatcttatcataag

SEQ ID NO: 50468 - DNA, 25 bp, Artificial
  probe
  misc_feature (1)..(25): SEQ ID NO: 269; WAN024ACR_at; Start 35; Stop 59
cttaaatcttatcataagctagaaa

SEQ ID NO: 50469 - DNA, 25 bp, Artificial
  probe
  misc_feature (1)..(25): SEQ ID NO: 269; WAN024ACR_at; Start 25; Stop 49
cttttctttacttaaatcttatcat

SEQ ID NO: 50470 - DNA, 25 bp, Artificial
  probe
  misc_feature (1)..(25): SEQ ID NO: 269; WAN024ACR_at; Start 45; Stop 69
atcataagctagaaaaactgtcaaa

SEQ ID NO: 50471 - DNA, 25 bp, Artificial
  probe
  misc_feature (1)..(25): SEQ ID NO: 269; WAN024ACR_at; Start 43; Stop 67
ttatcataagctagaaaaactgtca

SEQ ID NO: 50472 - DNA, 25 bp, Artificial
  probe
  misc_feature (1)..(25): SEQ ID NO: 269; WAN024ACR_at; Start 39; Stop 63
aatcttatcataagctagaaaaact

SEQ ID NO: 50473 - DNA, 25 bp, Artificial
  probe
  misc_feature (1)..(25): SEQ ID NO: 269; WAN024ACR_at; Start 51; Stop 75
agctagaaaaactgtcaaatttccg

SEQ ID NO: 50474 - DNA, 25 bp, Artificial
  probe
  misc_feature (1)..(25): SEQ ID NO: 269; WAN024ACR_at; Start 27; Stop 51
tttctttacttaaatcttatcataa

SEQ ID NO: 50475 - DNA, 25 bp, Artificial
  probe
  misc_feature (1)..(25): SEQ ID NO: 3691; WAN024ACS_at; Start 24; Stop 48
gcttatgataagatttaagtaaaga

SEQ ID NO: 50476 - DNA, 25 bp, Artificial
  probe
  misc_feature (1)..(25): SEQ ID NO: 3691; WAN024ACS_at; Start 22; Stop 46
tagcttatgataagatttaagtaaa

SEQ ID NO: 50477 - DNA, 25 bp, Artificial
  probe
  misc_feature (1)..(25): SEQ ID NO: 3691; WAN024ACS_at; Start 20; Stop 44
tctagcttatgataagatttaagta

SEQ ID NO: 50478 - DNA, 25 bp, Artificial
  probe
  misc_feature (1)..(25): SEQ ID NO: 3691; WAN024ACS_at; Start 10; Stop 34
tgacagtttttctagcttatgataa

SEQ ID NO: 50479 - DNA, 25 bp, Artificial
  probe
  misc_feature (1)..(25): SEQ ID NO: 3691; WAN024ACS_at; Start 7; Stop 31
atttgacagtttttctagcttatga

SEQ ID NO: 50480 - DNA, 25 bp, Artificial
  probe
  misc_feature (1)..(25): SEQ ID NO: 3691; WAN024ACS_at; Start 17; Stop 41
ttttctagcttatgataagatttaa

SEQ ID NO: 50481 - DNA, 25 bp, Artificial
  probe
  misc_feature (1)..(25): SEQ ID NO: 3691; WAN024ACS_at; Start 28; Stop 52
atgataagatttaagtaaagaaaag

SEQ ID NO: 50482 - DNA, 25 bp, Artificial
  probe
  misc_feature (1)..(25): SEQ ID NO: 3691; WAN024ACS_at; Start 11; Stop 35
gacagtttttctagcttatgataag

SEQ ID NO: 50483 - DNA, 25 bp, Artificial
  probe
  misc_feature (1)..(25): SEQ ID NO: 3691; WAN024ACS_at; Start 26; Stop 50
ttatgataagatttaagtaaagaaa

SEQ ID NO: 50484 - DNA, 25 bp, Artificial
  probe
  misc_feature (1)..(25): SEQ ID NO: 3691; WAN024ACS_at; Start 21; Stop 45
ctagcttatgataagatttaagtaa

SEQ ID NO: 50485 - DNA, 25 bp, Artificial
  probe
  misc_feature (1)..(25): SEQ ID NO: 3691; WAN024ACS_at; Start 6; Stop 30
aatttgacagtttttctagcttatg

SEQ ID NO: 50486 - DNA, 25 bp, Artificial
  probe
  misc_feature (1)..(25): SEQ ID NO: 3691; WAN024ACS_at; Start 12; Stop 36
acagtttttctagcttatgataaga

SEQ ID NO: 50487 - DNA, 25 bp, Artificial
  probe
  misc_feature (1)..(25): SEQ ID NO: 3691; WAN024ACS_at; Start 18; Stop 42
tttctagcttatgataagatttaag

SEQ ID NO: 50488 - DNA, 25 bp, Artificial
  probe
  misc_feature (1)..(25): SEQ ID NO: 3691; WAN024ACS_at; Start 16; Stop 40
tttttctagcttatgataagattta

SEQ ID NO: 50489 - DNA, 25 bp, Artificial
  probe
  misc_feature (1)..(25): SEQ ID NO: 3691; WAN024ACS_at; Start 25; Stop 49
cttatgataagatttaagtaaagaa

SEQ ID NO: 50490 - DNA, 25 bp, Artificial
  probe
  misc_feature (1)..(25): SEQ ID NO: 3691; WAN024ACS_at; Start 8; Stop 32
tttgacagtttttctagcttatgat

SEQ ID NO: 50491 - DNA, 25 bp, Artificial
  probe
  misc_feature (1)..(25): SEQ ID NO: 3691; WAN024ACS_at; Start 23; Stop 47
agcttatgataagatttaagtaaag

SEQ ID NO: 50492 - DNA, 25 bp, Artificial
  probe
  misc_feature (1)..(25): SEQ ID NO: 3691; WAN024ACS_at; Start 1; Stop 25
gcggaaatttgacagtttttctagc

SEQ ID NO: 50493 - DNA, 25 bp, Artificial
  probe
  misc_feature (1)..(25): SEQ ID NO: 3691; WAN024ACS_at; Start 9; Stop 33
ttgacagtttttctagcttatgata

SEQ ID NO: 50494 - DNA, 25 bp, Artificial
  probe
  misc_feature (1)..(25): SEQ ID NO: 3691; WAN024ACS_at; Start 27; Stop 51
tatgataagatttaagtaaagaaaa

SEQ ID NO: 50495 - DNA, 25 bp, Artificial
  probe
  misc_feature (1)..(25): SEQ ID NO: 3691; WAN024ACS_at; Start 15; Stop 39
gtttttctagcttatgataagattt

SEQ ID NO: 50496 - DNA, 25 bp, Artificial
  probe
  misc_feature (1)..(25): SEQ ID NO: 3691; WAN024ACS_at; Start 13; Stop 37
cagtttttctagcttatgataagat

SEQ ID NO: 50497 - DNA, 25 bp, Artificial
  probe
  misc_feature (1)..(25): SEQ ID NO: 3691; WAN024ACS_at; Start 19; Stop 43
ttctagcttatgataagatttaagt

SEQ ID NO: 50498 - DNA, 25 bp, Artificial
  probe
  misc_feature (1)..(25): SEQ ID NO: 3691; WAN024ACS_at; Start 4; Stop 28
gaaatttgacagtttttctagctta

SEQ ID NO: 50499 - DNA, 25 bp, Artificial
  probe
  misc_feature (1)..(25): SEQ ID NO: 3691; WAN024ACS_at; Start 5; Stop 29
aaatttgacagtttttctagcttat

SEQ ID NO: 50500 - DNA, 25 bp, Artificial
  probe
  misc_feature (1)..(25): SEQ ID NO: 3691; WAN024ACS_at; Start 29; Stop 53
tgataagatttaagtaaagaaaagc

SEQ ID NO: 50501 - DNA, 25 bp, Artificial
  probe
  misc_feature (1)..(25): SEQ ID NO: 3691; WAN024ACS_at; Start 2; Stop 26
cggaaatttgacagtttttctagct

SEQ ID NO: 50502 - DNA, 25 bp, Artificial
  probe
  misc_feature (1)..(25): SEQ ID NO: 3691; WAN024ACS_at; Start 14; Stop 38
agtttttctagcttatgataagatt

SEQ ID NO: 50503 - DNA, 25 bp, Artificial
  probe
  misc_feature (1)..(25): SEQ ID NO: 3317; WAN024ACT_at; Start 9; Stop 33
tgaaaaaatgctctaaagtctcttc

SEQ ID NO: 50504 - DNA, 25 bp, Artificial
  probe
  misc_feature (1)..(25): SEQ ID NO: 3317; WAN024ACT_at; Start 18; Stop 42
gctctaaagtctcttccttaaccca

SEQ ID NO: 50505 - DNA, 25 bp, Artificial
  probe
  misc_feature (1)..(25): SEQ ID NO: 3317; WAN024ACT_at; Start 6; Stop 30
gaatgaaaaaatgctctaaagtctc

SEQ ID NO: 50506 - DNA, 25 bp, Artificial
  probe
  misc_feature (1)..(25): SEQ ID NO: 3317; WAN024ACT_at; Start 59; Stop 83
tgatttttagggtagaattataaga

SEQ ID NO: 50507 - DNA, 25 bp, Artificial
  probe
  misc_feature (1)..(25): SEQ ID NO: 3317; WAN024ACT_at; Start 4; Stop 28
ttgaatgaaaaaatgctctaaagtc

SEQ ID NO: 50508 - DNA, 25 bp, Artificial
  probe
  misc_feature (1)..(25): SEQ ID NO: 3317; WAN024ACT_at; Start 19; Stop 43
ctctaaagtctcttccttaacccat

SEQ ID NO: 50509 - DNA, 25 bp, Artificial
  probe
  misc_feature (1)..(25): SEQ ID NO: 3317; WAN024ACT_at; Start 10; Stop 34
gaaaaaatgctctaaagtctcttcc

SEQ ID NO: 50510 - DNA, 25 bp, Artificial
  probe
  misc_feature (1)..(25): SEQ ID NO: 3317; WAN024ACT_at; Start 16; Stop 40
atgctctaaagtctcttccttaacc

SEQ ID NO: 50511 - DNA, 25 bp, Artificial
  probe
  misc_feature (1)..(25): SEQ ID NO: 3317; WAN024ACT_at; Start 3; Stop 27
cttgaatgaaaaaatgctctaaagt

SEQ ID NO: 50512 - DNA, 25 bp, Artificial
  probe
  misc_feature (1)..(25): SEQ ID NO: 3317; WAN024ACT_at; Start 5; Stop 29
tgaatgaaaaaatgctctaaagtct

SEQ ID NO: 50513 - DNA, 25 bp, Artificial
  probe
  misc_feature (1)..(25): SEQ ID NO: 3317; WAN024ACT_at; Start 1; Stop 25
ctcttgaatgaaaaaatgctctaaa

SEQ ID NO: 50514 - DNA, 25 bp, Artificial
  probe
  misc_feature (1)..(25): SEQ ID NO: 3317; WAN024ACT_at; Start 11; Stop 35
aaaaaatgctctaaagtctcttcct

SEQ ID NO: 50515 - DNA, 25 bp, Artificial
  probe
  misc_feature (1)..(25): SEQ ID NO: 3317; WAN024ACT_at; Start 14; Stop 38
aaatgctctaaagtctcttccttaa

SEQ ID NO: 50516 - DNA, 25 bp, Artificial
  probe
  misc_feature (1)..(25): SEQ ID NO: 3317; WAN024ACT_at; Start 2; Stop 26
tcttgaatgaaaaaatgctctaaag

SEQ ID NO: 50517 - DNA, 25 bp, Artificial
  probe
  misc_feature (1)..(25): SEQ ID NO: 3317; WAN024ACT_at; Start 12; Stop 36
aaaaatgctctaaagtctcttcctt

SEQ ID NO: 50518 - DNA, 25 bp, Artificial
  probe
  misc_feature (1)..(25): SEQ ID NO: 3317; WAN024ACT_at; Start 17; Stop 41
tgctctaaagtctcttccttaaccc

SEQ ID NO: 50519 - DNA, 25 bp, Artificial
  probe
  misc_feature (1)..(25): SEQ ID NO: 3317; WAN024ACT_at; Start 13; Stop 37
aaaatgctctaaagtctcttcctta

SEQ ID NO: 50520 - DNA, 25 bp, Artificial
  probe
  misc_feature (1)..(25): SEQ ID NO: 3317; WAN024ACT_at; Start 7; Stop 31
aatgaaaaaatgctctaaagtctct

SEQ ID NO: 50521 - DNA, 25 bp, Artificial
  probe
  misc_feature (1)..(25): SEQ ID NO: 3317; WAN024ACT_at; Start 8; Stop 32
atgaaaaaatgctctaaagtctctt

SEQ ID NO: 50522 - DNA, 25 bp, Artificial
  probe
  misc_feature (1)..(25): SEQ ID NO: 3317; WAN024ACT_at; Start 15; Stop 39
aatgctctaaagtctcttccttaac

SEQ ID NO: 50523 - DNA, 25 bp, Artificial
  probe
  misc_feature (1)..(25): SEQ ID NO: 596; WAN024ACU_at; Start 59; Stop 83
ctttagagcattttttcattcaaga

SEQ ID NO: 50524 - DNA, 25 bp, Artificial
  probe
  misc_feature (1)..(25): SEQ ID NO: 596; WAN024ACU_at; Start 52; Stop 76
gaagagactttagagcattttttca

SEQ ID NO: 50525 - DNA, 25 bp, Artificial
  probe
  misc_feature (1)..(25): SEQ ID NO: 596; WAN024ACU_at; Start 43; Stop 67
tgggttaaggaagagactttagagc

SEQ ID NO: 50526 - DNA, 25 bp, Artificial
  probe
  misc_feature (1)..(25): SEQ ID NO: 596; WAN024ACU_at; Start 53; Stop 77
aagagactttagagcattttttcat

SEQ ID NO: 50527 - DNA, 25 bp, Artificial
  probe
  misc_feature (1)..(25): SEQ ID NO: 596; WAN024ACU_at; Start 51; Stop 75
ggaagagactttagagcattttttc

SEQ ID NO: 50528 - DNA, 25 bp, Artificial
  probe
  misc_feature (1)..(25): SEQ ID NO: 596; WAN024ACU_at; Start 49; Stop 73
aaggaagagactttagagcattttt

SEQ ID NO: 50529 - DNA, 25 bp, Artificial
  probe
  misc_feature (1)..(25): SEQ ID NO: 596; WAN024ACU_at; Start 55; Stop 79
gagactttagagcattttttcattc

SEQ ID NO: 50530 - DNA, 25 bp, Artificial
  probe
  misc_feature (1)..(25): SEQ ID NO: 596; WAN024ACU_at; Start 57; Stop 81
gactttagagcattttttcattcaa

SEQ ID NO: 50531 - DNA, 25 bp, Artificial
  probe
  misc_feature (1)..(25): SEQ ID NO: 596; WAN024ACU_at; Start 44; Stop 68
gggttaaggaagagactttagagca

SEQ ID NO: 50532 - DNA, 25 bp, Artificial
  probe
  misc_feature (1)..(25): SEQ ID NO: 596; WAN024ACU_at; Start 46; Stop 70
gttaaggaagagactttagagcatt

SEQ ID NO: 50533 - DNA, 25 bp, Artificial
  probe
  misc_feature (1)..(25): SEQ ID NO: 596; WAN024ACU_at; Start 45; Stop 69
ggttaaggaagagactttagagcat

SEQ ID NO: 50534 - DNA, 25 bp, Artificial
  probe
  misc_feature (1)..(25): SEQ ID NO: 596; WAN024ACU_at; Start 56; Stop 80
agactttagagcattttttcattca

SEQ ID NO: 50535 - DNA, 25 bp, Artificial
  probe
  misc_feature (1)..(25): SEQ ID NO: 596; WAN024ACU_at; Start 42; Stop 66
atgggttaaggaagagactttagag

SEQ ID NO: 50536 - DNA, 25 bp, Artificial
  probe
  misc_feature (1)..(25): SEQ ID NO: 596; WAN024ACU_at; Start 50; Stop 74
aggaagagactttagagcatttttt

SEQ ID NO: 50537 - DNA, 25 bp, Artificial
  probe
  misc_feature (1)..(25): SEQ ID NO: 596; WAN024ACU_at; Start 2; Stop 26
tcttataattctaccctaaaaatca

SEQ ID NO: 50538 - DNA, 25 bp, Artificial
  probe
  misc_feature (1)..(25): SEQ ID NO: 596; WAN024ACU_at; Start 48; Stop 72
taaggaagagactttagagcatttt

SEQ ID NO: 50539 - DNA, 25 bp, Artificial
  probe
  misc_feature (1)..(25): SEQ ID NO: 596; WAN024ACU_at; Start 47; Stop 71
ttaaggaagagactttagagcattt

SEQ ID NO: 50540 - DNA, 25 bp, Artificial
  probe
  misc_feature (1)..(25): SEQ ID NO: 596; WAN024ACU_at; Start 58; Stop 82
actttagagcattttttcattcaag

SEQ ID NO: 50541 - DNA, 25 bp, Artificial
  probe
  misc_feature (1)..(25): SEQ ID NO: 596; WAN024ACU_at; Start 54; Stop 78
agagactttagagcattttttcatt

SEQ ID NO: 50542 - DNA, 25 bp, Artificial
  probe
  misc_feature (1)..(25): SEQ ID NO: 596; WAN024ACU_at; Start 60; Stop 84
tttagagcattttttcattcaagag

SEQ ID NO: 50543 - DNA, 25 bp, Artificial
  probe
  misc_feature (1)..(25): SEQ ID NO: 232; WAN024ACV_at; Start 21; Stop 45
ctttttctttttgtgtctgattgtg

SEQ ID NO: 50544 - DNA, 25 bp, Artificial
  probe
  misc_feature (1)..(25): SEQ ID NO: 232; WAN024ACV_at; Start 3; Stop 27
gcatttgtttatcatttgctttttc

SEQ ID NO: 50545 - DNA, 25 bp, Artificial
  probe
  misc_feature (1)..(25): SEQ ID NO: 232; WAN024ACV_at; Start 33; Stop 57
gtgtctgattgtgatacaatatagt

SEQ ID NO: 50546 - DNA, 25 bp, Artificial
  probe
  misc_feature (1)..(25): SEQ ID NO: 232; WAN024ACV_at; Start 29; Stop 53
ttttgtgtctgattgtgatacaata

SEQ ID NO: 50547 - DNA, 25 bp, Artificial
  probe
  misc_feature (1)..(25): SEQ ID NO: 232; WAN024ACV_at; Start 65; Stop 89
ttttgaaatagaaatagttggagga

SEQ ID NO: 50548 - DNA, 25 bp, Artificial
  probe
  misc_feature (1)..(25): SEQ ID NO: 232; WAN024ACV_at; Start 43; Stop 67
gtgatacaatatagtaaggattttt

SEQ ID NO: 50549 - DNA, 25 bp, Artificial
  probe
  misc_feature (1)..(25): SEQ ID NO: 232; WAN024ACV_at; Start 34; Stop 58
tgtctgattgtgatacaatatagta

SEQ ID NO: 50550 - DNA, 25 bp, Artificial
  probe
  misc_feature (1)..(25): SEQ ID NO: 232; WAN024ACV_at; Start 31; Stop 55
ttgtgtctgattgtgatacaatata

SEQ ID NO: 50551 - DNA, 25 bp, Artificial
  probe
  misc_feature (1)..(25): SEQ ID NO: 232; WAN024ACV_at; Start 16; Stop 40
atttgctttttctttttgtgtctga

SEQ ID NO: 50552 - DNA, 25 bp, Artificial
  probe
  misc_feature (1)..(25): SEQ ID NO: 232; WAN024ACV_at; Start 49; Stop 73
caatatagtaaggattttttgaaat

SEQ ID NO: 50553 - DNA, 25 bp, Artificial
  probe
  misc_feature (1)..(25): SEQ ID NO: 232; WAN024ACV_at; Start 15; Stop 39
catttgctttttctttttgtgtctg

SEQ ID NO: 50554 - DNA, 25 bp, Artificial
  probe
  misc_feature (1)..(25): SEQ ID NO: 232; WAN024ACV_at; Start 20; Stop 44
gctttttctttttgtgtctgattgt

SEQ ID NO: 50555 - DNA, 25 bp, Artificial
  probe
  misc_feature (1)..(25): SEQ ID NO: 232; WAN024ACV_at; Start 42; Stop 66
tgtgatacaatatagtaaggatttt

SEQ ID NO: 50556 - DNA, 25 bp, Artificial
  probe
  misc_feature (1)..(25): SEQ ID NO: 232; WAN024ACV_at; Start 52; Stop 76
tatagtaaggattttttgaaataga

SEQ ID NO: 50557 - DNA, 25 bp, Artificial
  probe
  misc_feature (1)..(25): SEQ ID NO: 232; WAN024ACV_at; Start 32; Stop 56
tgtgtctgattgtgatacaatatag

SEQ ID NO: 50558 - DNA, 25 bp, Artificial
  probe
  misc_feature (1)..(25): SEQ ID NO: 232; WAN024ACV_at; Start 66; Stop 90
tttgaaatagaaatagttggaggaa

SEQ ID NO: 50559 - DNA, 25 bp, Artificial
  probe
  misc_feature (1)..(25): SEQ ID NO: 232; WAN024ACV_at; Start 67; Stop 91
ttgaaatagaaatagttggaggaaa

SEQ ID NO: 50560 - DNA, 25 bp, Artificial
  probe
  misc_feature (1)..(25): SEQ ID NO: 232; WAN024ACV_at; Start 36; Stop 60
tctgattgtgatacaatatagtaag

SEQ ID NO: 50561 - DNA, 25 bp, Artificial
  probe
  misc_feature (1)..(25): SEQ ID NO: 232; WAN024ACV_at; Start 19; Stop 43
tgctttttctttttgtgtctgattg

SEQ ID NO: 50562 - DNA, 25 bp, Artificial
  probe
  misc_feature (1)..(25): SEQ ID NO: 232; WAN024ACV_at; Start 69; Stop 93
gaaatagaaatagttggaggaaata

SEQ ID NO: 50563 - DNA, 25 bp, Artificial
  probe
  misc_feature (1)..(25): SEQ ID NO: 232; WAN024ACV_at; Start 47; Stop 71
tacaatatagtaaggattttttgaa

SEQ ID NO: 50564 - DNA, 25 bp, Artificial
  probe
  misc_feature (1)..(25): SEQ ID NO: 232; WAN024ACV_at; Start 68; Stop 92
tgaaatagaaatagttggaggaaat

SEQ ID NO: 50565 - DNA, 25 bp, Artificial
  probe
  misc_feature (1)..(25): SEQ ID NO: 232; WAN024ACV_at; Start 26; Stop 50
tctttttgtgtctgattgtgataca

SEQ ID NO: 50566 - DNA, 25 bp, Artificial
  probe
  misc_feature (1)..(25): SEQ ID NO: 232; WAN024ACV_at; Start 70; Stop 94
aaatagaaatagttggaggaaatat

SEQ ID NO: 50567 - DNA, 25 bp, Artificial
  probe
  misc_feature (1)..(25): SEQ ID NO: 232; WAN024ACV_at; Start 35; Stop 59
gtctgattgtgatacaatatagtaa

SEQ ID NO: 50568 - DNA, 25 bp, Artificial
  probe
  misc_feature (1)..(25): SEQ ID NO: 232; WAN024ACV_at; Start 27; Stop 51
ctttttgtgtctgattgtgatacaa

SEQ ID NO: 50569 - DNA, 25 bp, Artificial
  probe
  misc_feature (1)..(25): SEQ ID NO: 232; WAN024ACV_at; Start 45; Stop 69
gatacaatatagtaaggattttttg

SEQ ID NO: 50570 - DNA, 25 bp, Artificial
  probe
  misc_feature (1)..(25): SEQ ID NO: 232; WAN024ACV_at; Start 41; Stop 65
ttgtgatacaatatagtaaggattt

SEQ ID NO: 50571 - DNA, 25 bp, Artificial
  probe
  misc_feature (1)..(25): SEQ ID NO: 232; WAN024ACV_at; Start 25; Stop 49
ttctttttgtgtctgattgtgatac

SEQ ID NO: 50572 - DNA, 25 bp, Artificial
  probe
  misc_feature (1)..(25): SEQ ID NO: 232; WAN024ACV_at; Start 38; Stop 62
tgattgtgatacaatatagtaagga

SEQ ID NO: 50573 - DNA, 25 bp, Artificial
  probe
  misc_feature (1)..(25): SEQ ID NO: 232; WAN024ACV_at; Start 37; Stop 61
ctgattgtgatacaatatagtaagg

SEQ ID NO: 50574 - DNA, 25 bp, Artificial
  probe
  misc_feature (1)..(25): SEQ ID NO: 232; WAN024ACV_at; Start 39; Stop 63
gattgtgatacaatatagtaaggat

SEQ ID NO: 50575 - DNA, 25 bp, Artificial
  probe
  misc_feature (1)..(25): SEQ ID NO: 232; WAN024ACV_at; Start 40; Stop 64
attgtgatacaatatagtaaggatt

SEQ ID NO: 50576 - DNA, 25 bp, Artificial
  probe
  misc_feature (1)..(25): SEQ ID NO: 232; WAN024ACV_at; Start 28; Stop 52
tttttgtgtctgattgtgatacaat

SEQ ID NO: 50577 - DNA, 25 bp, Artificial
  probe
  misc_feature (1)..(25): SEQ ID NO: 571; WAN024ACW_at; Start 30; Stop 54
aaatccttactatattgtatcacaa

SEQ ID NO: 50578 - DNA, 25 bp, Artificial
  probe
  misc_feature (1)..(25): SEQ ID NO: 571; WAN024ACW_at; Start 53; Stop 77
aatcagacacaaaaagaaaaagcaa

SEQ ID NO: 50579 - DNA, 25 bp, Artificial
  probe
  misc_feature (1)..(25): SEQ ID NO: 571; WAN024ACW_at; Start 58; Stop 82
gacacaaaaagaaaaagcaaatgat

SEQ ID NO: 50580 - DNA, 25 bp, Artificial
  probe
  misc_feature (1)..(25): SEQ ID NO: 571; WAN024ACW_at; Start 37; Stop 61
tactatattgtatcacaatcagaca

SEQ ID NO: 50581 - DNA, 25 bp, Artificial
  probe
  misc_feature (1)..(25): SEQ ID NO: 571; WAN024ACW_at; Start 52; Stop 76
caatcagacacaaaaagaaaaagca

SEQ ID NO: 50582 - DNA, 25 bp, Artificial
  probe
  misc_feature (1)..(25): SEQ ID NO: 571; WAN024ACW_at; Start 45; Stop 69
tgtatcacaatcagacacaaaaaga

SEQ ID NO: 50583 - DNA, 25 bp, Artificial
  probe
  misc_feature (1)..(25): SEQ ID NO: 571; WAN024ACW_at; Start 38; Stop 62
actatattgtatcacaatcagacac

SEQ ID NO: 50584 - DNA, 25 bp, Artificial
  probe
  misc_feature (1)..(25): SEQ ID NO: 571; WAN024ACW_at; Start 40; Stop 64
tatattgtatcacaatcagacacaa

SEQ ID NO: 50585 - DNA, 25 bp, Artificial
  probe
  misc_feature (1)..(25): SEQ ID NO: 571; WAN024ACW_at; Start 70; Stop 94
aaaagcaaatgataaacaaatgctt

SEQ ID NO: 50586 - DNA, 25 bp, Artificial
  probe
  misc_feature (1)..(25): SEQ ID NO: 571; WAN024ACW_at; Start 56; Stop 80
cagacacaaaaagaaaaagcaaatg

SEQ ID NO: 50587 - DNA, 25 bp, Artificial
  probe
  misc_feature (1)..(25): SEQ ID NO: 571; WAN024ACW_at; Start 49; Stop 73
tcacaatcagacacaaaaagaaaaa

SEQ ID NO: 50588 - DNA, 25 bp, Artificial
  probe
  misc_feature (1)..(25): SEQ ID NO: 571; WAN024ACW_at; Start 47; Stop 71
tatcacaatcagacacaaaaagaaa

SEQ ID NO: 50589 - DNA, 25 bp, Artificial
  probe
  misc_feature (1)..(25): SEQ ID NO: 571; WAN024ACW_at; Start 46; Stop 70
gtatcacaatcagacacaaaaagaa

SEQ ID NO: 50590 - DNA, 25 bp, Artificial
  probe
  misc_feature (1)..(25): SEQ ID NO: 571; WAN024ACW_at; Start 60; Stop 84
cacaaaaagaaaaagcaaatgataa

SEQ ID NO: 50591 - DNA, 25 bp, Artificial
  probe
  misc_feature (1)..(25): SEQ ID NO: 571; WAN024ACW_at; Start 36; Stop 60
ttactatattgtatcacaatcagac

SEQ ID NO: 50592 - DNA, 25 bp, Artificial
  probe
  misc_feature (1)..(25): SEQ ID NO: 571; WAN024ACW_at; Start 34; Stop 58
ccttactatattgtatcacaatcag

SEQ ID NO: 50593 - DNA, 25 bp, Artificial
  probe
  misc_feature (1)..(25): SEQ ID NO: 571; WAN024ACW_at; Start 50; Stop 74
cacaatcagacacaaaaagaaaaag

SEQ ID NO: 50594 - DNA, 25 bp, Artificial
  probe
  misc_feature (1)..(25): SEQ ID NO: 571; WAN024ACW_at; Start 51; Stop 75
acaatcagacacaaaaagaaaaagc

SEQ ID NO: 50595 - DNA, 25 bp, Artificial
  probe
  misc_feature (1)..(25): SEQ ID NO: 571; WAN024ACW_at; Start 68; Stop 92
gaaaaagcaaatgataaacaaatgc

SEQ ID NO: 50596 - DNA, 25 bp, Artificial
  probe
  misc_feature (1)..(25): SEQ ID NO: 571; WAN024ACW_at; Start 26; Stop 50
caaaaaatccttactatattgtatc

SEQ ID NO: 50597 - DNA, 25 bp, Artificial
  probe
  misc_feature (1)..(25): SEQ ID NO: 571; WAN024ACW_at; Start 5; Stop 29
ttcctccaactatttctatttcaaa

SEQ ID NO: 50598 - DNA, 25 bp, Artificial
  probe
  misc_feature (1)..(25): SEQ ID NO: 571; WAN024ACW_at; Start 42; Stop 66
tattgtatcacaatcagacacaaaa

SEQ ID NO: 50599 - DNA, 25 bp, Artificial
  probe
  misc_feature (1)..(25): SEQ ID NO: 571; WAN024ACW_at; Start 19; Stop 43
tctatttcaaaaaatccttactata

SEQ ID NO: 50600 - DNA, 25 bp, Artificial
  probe
  misc_feature (1)..(25): SEQ ID NO: 571; WAN024ACW_at; Start 2; Stop 26
tatttcctccaactatttctatttc

SEQ ID NO: 50601 - DNA, 25 bp, Artificial
  probe
  misc_feature (1)..(25): SEQ ID NO: 571; WAN024ACW_at; Start 55; Stop 79
tcagacacaaaaagaaaaagcaaat

SEQ ID NO: 50602 - DNA, 25 bp, Artificial
  probe
  misc_feature (1)..(25): SEQ ID NO: 571; WAN024ACW_at; Start 29; Stop 53
aaaatccttactatattgtatcaca

SEQ ID NO: 50603 - DNA, 25 bp, Artificial
  probe
  misc_feature (1)..(25): SEQ ID NO: 571; WAN024ACW_at; Start 43; Stop 67
attgtatcacaatcagacacaaaaa

SEQ ID NO: 50604 - DNA, 25 bp, Artificial
  probe
  misc_feature (1)..(25): SEQ ID NO: 571; WAN024ACW_at; Start 48; Stop 72
atcacaatcagacacaaaaagaaaa

SEQ ID NO: 50605 - DNA, 25 bp, Artificial
  probe
  misc_feature (1)..(25): SEQ ID NO: 571; WAN024ACW_at; Start 39; Stop 63
ctatattgtatcacaatcagacaca

SEQ ID NO: 50606 - DNA, 25 bp, Artificial
  probe
  misc_feature (1)..(25): SEQ ID NO: 571; WAN024ACW_at; Start 44; Stop 68
ttgtatcacaatcagacacaaaaag

SEQ ID NO: 50607 - DNA, 25 bp, Artificial
  probe
  misc_feature (1)..(25): SEQ ID NO: 571; WAN024ACW_at; Start 35; Stop 59
cttactatattgtatcacaatcaga

SEQ ID NO: 50608 - DNA, 25 bp, Artificial
  probe
  misc_feature (1)..(25): SEQ ID NO: 571; WAN024ACW_at; Start 31; Stop 55
aatccttactatattgtatcacaat

SEQ ID NO: 50609 - DNA, 25 bp, Artificial
  probe
  misc_feature (1)..(25): SEQ ID NO: 571; WAN024ACW_at; Start 4; Stop 28
tttcctccaactatttctatttcaa

SEQ ID NO: 50610 - DNA, 25 bp, Artificial
  probe
  misc_feature (1)..(25): SEQ ID NO: 571; WAN024ACW_at; Start 28; Stop 52
aaaaatccttactatattgtatcac

SEQ ID NO: 50611 - DNA, 25 bp, Artificial
  probe
  misc_feature (1)..(25): SEQ ID NO: 3178; WAN024ACX_at; Start 68; Stop 92
aagaggcaaagacctagtcctgccc

SEQ ID NO: 50612 - DNA, 25 bp, Artificial
  probe
  misc_feature (1)..(25): SEQ ID NO: 3178; WAN024ACX_at; Start 76; Stop 100
aagacctagtcctgcccattatttt

SEQ ID NO: 50613 - DNA, 25 bp, Artificial
  probe
  misc_feature (1)..(25): SEQ ID NO: 3178; WAN024ACX_at; Start 74; Stop 98
caaagacctagtcctgcccattatt

SEQ ID NO: 50614 - DNA, 25 bp, Artificial
  probe
  misc_feature (1)..(25): SEQ ID NO: 3178; WAN024ACX_at; Start 70; Stop 94
gaggcaaagacctagtcctgcccat

SEQ ID NO: 50615 - DNA, 25 bp, Artificial
  probe
  misc_feature (1)..(25): SEQ ID NO: 3178; WAN024ACX_at; Start 75; Stop 99
aaagacctagtcctgcccattattt

SEQ ID NO: 50616 - DNA, 25 bp, Artificial
  probe
  misc_feature (1)..(25): SEQ ID NO: 3178; WAN024ACX_at; Start 33; Stop 57
ctgtaaaaccttctcaaacatcctt

SEQ ID NO: 50617 - DNA, 25 bp, Artificial
  probe
  misc_feature (1)..(25): SEQ ID NO: 3178; WAN024ACX_at; Start 77; Stop 101
agacctagtcctgcccattattttc

SEQ ID NO: 50618 - DNA, 25 bp, Artificial
  probe
  misc_feature (1)..(25): SEQ ID NO: 3178; WAN024ACX_at; Start 32; Stop 56
actgtaaaaccttctcaaacatcct

SEQ ID NO: 50619 - DNA, 25 bp, Artificial
  probe
  misc_feature (1)..(25): SEQ ID NO: 3178; WAN024ACX_at; Start 30; Stop 54
ttactgtaaaaccttctcaaacatc

SEQ ID NO: 50620 - DNA, 25 bp, Artificial
  probe
  misc_feature (1)..(25): SEQ ID NO: 3178; WAN024ACX_at; Start 65; Stop 89
aaaaagaggcaaagacctagtcctg

SEQ ID NO: 50621 - DNA, 25 bp, Artificial
  probe
  misc_feature (1)..(25): SEQ ID NO: 3178; WAN024ACX_at; Start 66; Stop 90
aaaagaggcaaagacctagtcctgc

SEQ ID NO: 50622 - DNA, 25 bp, Artificial
  probe
  misc_feature (1)..(25): SEQ ID NO: 3178; WAN024ACX_at; Start 73; Stop 97
gcaaagacctagtcctgcccattat

SEQ ID NO: 50623 - DNA, 25 bp, Artificial
  probe
  misc_feature (1)..(25): SEQ ID NO: 3178; WAN024ACX_at; Start 71; Stop 95
aggcaaagacctagtcctgcccatt

SEQ ID NO: 50624 - DNA, 25 bp, Artificial
  probe
  misc_feature (1)..(25): SEQ ID NO: 3178; WAN024ACX_at; Start 67; Stop 91
aaagaggcaaagacctagtcctgcc

SEQ ID NO: 50625 - DNA, 25 bp, Artificial
  probe
  misc_feature (1)..(25): SEQ ID NO: 3178; WAN024ACX_at; Start 69; Stop 93
agaggcaaagacctagtcctgccca

SEQ ID NO: 50626 - DNA, 25 bp, Artificial
  probe
  misc_feature (1)..(25): SEQ ID NO: 3178; WAN024ACX_at; Start 31; Stop 55
tactgtaaaaccttctcaaacatcc

SEQ ID NO: 50627 - DNA, 25 bp, Artificial
  probe
  misc_feature (1)..(25): SEQ ID NO: 3178; WAN024ACX_at; Start 72; Stop 96
ggcaaagacctagtcctgcccatta

SEQ ID NO: 50628 - DNA, 25 bp, Artificial
  probe
  misc_feature (1)..(25): SEQ ID NO: 3526; WAN024ACY_at; Start 8; Stop 32
atgggcaggactaggtctttgcctc

SEQ ID NO: 50629 - DNA, 25 bp, Artificial
  probe
  misc_feature (1)..(25): SEQ ID NO: 3526; WAN024ACY_at; Start 45; Stop 69
aaggatgtttgagaaggttttacag

SEQ ID NO: 50630 - DNA, 25 bp, Artificial
  probe
  misc_feature (1)..(25): SEQ ID NO: 3526; WAN024ACY_at; Start 47; Stop 71
ggatgtttgagaaggttttacagta

SEQ ID NO: 50631 - DNA, 25 bp, Artificial
  probe
  misc_feature (1)..(25): SEQ ID NO: 3526; WAN024ACY_at; Start 2; Stop 26
aaaataatgggcaggactaggtctt

SEQ ID NO: 50632 - DNA, 25 bp, Artificial
  probe
  misc_feature (1)..(25): SEQ ID NO: 3526; WAN024ACY_at; Start 3; Stop 27
aaataatgggcaggactaggtcttt

SEQ ID NO: 50633 - DNA, 25 bp, Artificial
  probe
  misc_feature (1)..(25): SEQ ID NO: 3526; WAN024ACY_at; Start 10; Stop 34
gggcaggactaggtctttgcctctt

SEQ ID NO: 50634 - DNA, 25 bp, Artificial
  probe
  misc_feature (1)..(25): SEQ ID NO: 3526; WAN024ACY_at; Start 5; Stop 29
ataatgggcaggactaggtctttgc

SEQ ID NO: 50635 - DNA, 25 bp, Artificial
  probe
  misc_feature (1)..(25): SEQ ID NO: 3526; WAN024ACY_at; Start 11; Stop 35
ggcaggactaggtctttgcctcttt

SEQ ID NO: 50636 - DNA, 25 bp, Artificial
  probe
  misc_feature (1)..(25): SEQ ID NO: 3526; WAN024ACY_at; Start 46; Stop 70
aggatgtttgagaaggttttacagt

SEQ ID NO: 50637 - DNA, 25 bp, Artificial
  probe
  misc_feature (1)..(25): SEQ ID NO: 3526; WAN024ACY_at; Start 7; Stop 31
aatgggcaggactaggtctttgcct

SEQ ID NO: 50638 - DNA, 25 bp, Artificial
  probe
  misc_feature (1)..(25): SEQ ID NO: 3526; WAN024ACY_at; Start 12; Stop 36
gcaggactaggtctttgcctctttt

SEQ ID NO: 50639 - DNA, 25 bp, Artificial
  probe
  misc_feature (1)..(25): SEQ ID NO: 3526; WAN024ACY_at; Start 6; Stop 30
taatgggcaggactaggtctttgcc

SEQ ID NO: 50640 - DNA, 25 bp, Artificial
  probe
  misc_feature (1)..(25): SEQ ID NO: 3526; WAN024ACY_at; Start 4; Stop 28
aataatgggcaggactaggtctttg

SEQ ID NO: 50641 - DNA, 25 bp, Artificial
  probe
  misc_feature (1)..(25): SEQ ID NO: 3526; WAN024ACY_at; Start 9; Stop 33
tgggcaggactaggtctttgcctct

SEQ ID NO: 50642 - DNA, 25 bp, Artificial
  probe
  misc_feature (1)..(25): SEQ ID NO: 3526; WAN024ACY_at; Start 1; Stop 25
gaaaataatgggcaggactaggtct

SEQ ID NO: 50643 - DNA, 25 bp, Artificial
  probe
  misc_feature (1)..(25): SEQ ID NO: 3526; WAN024ACY_at; Start 48; Stop 72
gatgtttgagaaggttttacagtaa

SEQ ID NO: 50644 - DNA, 25 bp, Artificial
  probe
  misc_feature (1)..(25): SEQ ID NO: 3526; WAN024ACY_at; Start 13; Stop 37
caggactaggtctttgcctcttttt

SEQ ID NO: 50645 - DNA, 25 bp, Artificial
  probe
  misc_feature (1)..(25): SEQ ID NO: 4100; WAN024ACZ_at; Start 31; Stop 55
ttataccacatttccatgattttat

SEQ ID NO: 50646 - DNA, 25 bp, Artificial
  probe
  misc_feature (1)..(25): SEQ ID NO: 4100; WAN024ACZ_at; Start 17; Stop 41
tttacttggctttattataccacat

SEQ ID NO: 50647 - DNA, 25 bp, Artificial
  probe
  misc_feature (1)..(25): SEQ ID NO: 4100; WAN024ACZ_at; Start 32; Stop 56
tataccacatttccatgattttatt

SEQ ID NO: 50648 - DNA, 25 bp, Artificial
  probe
  misc_feature (1)..(25): SEQ ID NO: 4100; WAN024ACZ_at; Start 34; Stop 58
taccacatttccatgattttattct

SEQ ID NO: 50649 - DNA, 25 bp, Artificial
  probe
  misc_feature (1)..(25): SEQ ID NO: 4100; WAN024ACZ_at; Start 37; Stop 61
cacatttccatgattttattctacc

SEQ ID NO: 50650 - DNA, 25 bp, Artificial
  probe
  misc_feature (1)..(25): SEQ ID NO: 4100; WAN024ACZ_at; Start 1; Stop 25
gtgcttctcgtttctctttacttgg

SEQ ID NO: 50651 - DNA, 25 bp, Artificial
  probe
  misc_feature (1)..(25): SEQ ID NO: 4100; WAN024ACZ_at; Start 4; Stop 28
cttctcgtttctctttacttggctt

SEQ ID NO: 50652 - DNA, 25 bp, Artificial
  probe
  misc_feature (1)..(25): SEQ ID NO: 4100; WAN024ACZ_at; Start 14; Stop 38
ctctttacttggctttattatacca

SEQ ID NO: 50653 - DNA, 25 bp, Artificial
  probe
  misc_feature (1)..(25): SEQ ID NO: 4100; WAN024ACZ_at; Start 38; Stop 62
acatttccatgattttattctacct

SEQ ID NO: 50654 - DNA, 25 bp, Artificial
  probe
  misc_feature (1)..(25): SEQ ID NO: 4100; WAN024ACZ_at; Start 44; Stop 68
ccatgattttattctacctttttga

SEQ ID NO: 50655 - DNA, 25 bp, Artificial
  probe
  misc_feature (1)..(25): SEQ ID NO: 4100; WAN024ACZ_at; Start 45; Stop 69
catgattttattctacctttttgat

SEQ ID NO: 50656 - DNA, 25 bp, Artificial
  probe
  misc_feature (1)..(25): SEQ ID NO: 4100; WAN024ACZ_at; Start 33; Stop 57
ataccacatttccatgattttattc

SEQ ID NO: 50657 - DNA, 25 bp, Artificial
  probe
  misc_feature (1)..(25): SEQ ID NO: 4100; WAN024ACZ_at; Start 36; Stop 60
ccacatttccatgattttattctac

SEQ ID NO: 50658 - DNA, 25 bp, Artificial
  probe
  misc_feature (1)..(25): SEQ ID NO: 4100; WAN024ACZ_at; Start 35; Stop 59
accacatttccatgattttattcta

SEQ ID NO: 50659 - DNA, 25 bp, Artificial
  probe
  misc_feature (1)..(25): SEQ ID NO: 4100; WAN024ACZ_at; Start 13; Stop 37
tctctttacttggctttattatacc

SEQ ID NO: 50660 - DNA, 25 bp, Artificial
  probe
  misc_feature (1)..(25): SEQ ID NO: 4100; WAN024ACZ_at; Start 43; Stop 67
tccatgattttattctacctttttg

SEQ ID NO: 50661 - DNA, 25 bp, Artificial
  probe
  misc_feature (1)..(25): SEQ ID NO: 4100; WAN024ACZ_at; Start 7; Stop 31
ctcgtttctctttacttggctttat

SEQ ID NO: 50662 - DNA, 25 bp, Artificial
  probe
  misc_feature (1)..(25): SEQ ID NO: 4100; WAN024ACZ_at; Start 48; Stop 72
gattttattctacctttttgatata

SEQ ID NO: 50663 - DNA, 25 bp, Artificial
  probe
  misc_feature (1)..(25): SEQ ID NO: 4100; WAN024ACZ_at; Start 11; Stop 35
tttctctttacttggctttattata

SEQ ID NO: 50664 - DNA, 25 bp, Artificial
  probe
  misc_feature (1)..(25): SEQ ID NO: 4100; WAN024ACZ_at; Start 30; Stop 54
attataccacatttccatgatttta

SEQ ID NO: 50665 - DNA, 25 bp, Artificial
  probe
  misc_feature (1)..(25): SEQ ID NO: 4100; WAN024ACZ_at; Start 16; Stop 40
ctttacttggctttattataccaca

SEQ ID NO: 50666 - DNA, 25 bp, Artificial
  probe
  misc_feature (1)..(25): SEQ ID NO: 4100; WAN024ACZ_at; Start 6; Stop 30
tctcgtttctctttacttggcttta

SEQ ID NO: 50667 - DNA, 25 bp, Artificial
  probe
  misc_feature (1)..(25): SEQ ID NO: 4100; WAN024ACZ_at; Start 18; Stop 42
ttacttggctttattataccacatt

SEQ ID NO: 50668 - DNA, 25 bp, Artificial
  probe
  misc_feature (1)..(25): SEQ ID NO: 4100; WAN024ACZ_at; Start 3; Stop 27
gcttctcgtttctctttacttggct

SEQ ID NO: 50669 - DNA, 25 bp, Artificial
  probe
  misc_feature (1)..(25): SEQ ID NO: 4100; WAN024ACZ_at; Start 12; Stop 36
ttctctttacttggctttattatac

SEQ ID NO: 50670 - DNA, 25 bp, Artificial
  probe
  misc_feature (1)..(25): SEQ ID NO: 4100; WAN024ACZ_at; Start 39; Stop 63
catttccatgattttattctacctt

SEQ ID NO: 50671 - DNA, 25 bp, Artificial
  probe
  misc_feature (1)..(25): SEQ ID NO: 4100; WAN024ACZ_at; Start 47; Stop 71
tgattttattctacctttttgatat

SEQ ID NO: 50672 - DNA, 25 bp, Artificial
  probe
  misc_feature (1)..(25): SEQ ID NO: 4100; WAN024ACZ_at; Start 15; Stop 39
tctttacttggctttattataccac

SEQ ID NO: 50673 - DNA, 25 bp, Artificial
  probe
  misc_feature (1)..(25): SEQ ID NO: 4100; WAN024ACZ_at; Start 40; Stop 64
atttccatgattttattctaccttt

SEQ ID NO: 50674 - DNA, 25 bp, Artificial
  probe
  misc_feature (1)..(25): SEQ ID NO: 4100; WAN024ACZ_at; Start 46; Stop 70
atgattttattctacctttttgata

SEQ ID NO: 50675 - DNA, 25 bp, Artificial
  probe
  misc_feature (1)..(25): SEQ ID NO: 4100; WAN024ACZ_at; Start 2; Stop 26
tgcttctcgtttctctttacttggc

SEQ ID NO: 50676 - DNA, 25 bp, Artificial
  probe
  misc_feature (1)..(25): SEQ ID NO: 487; WAN024AD2_at; Start 21; Stop 45
gaataaaatcatggaaatgtggtat

SEQ ID NO: 50677 - DNA, 25 bp, Artificial
  probe
  misc_feature (1)..(25): SEQ ID NO: 487; WAN024AD2_at; Start 50; Stop 74
aagccaagtaaagagaaacgagaag

SEQ ID NO: 50678 - DNA, 25 bp, Artificial
  probe
  misc_feature (1)..(25): SEQ ID NO: 487; WAN024AD2_at; Start 26; Stop 50
aaatcatggaaatgtggtataataa

SEQ ID NO: 50679 - DNA, 25 bp, Artificial
  probe
  misc_feature (1)..(25): SEQ ID NO: 487; WAN024AD2_at; Start 52; Stop 76
gccaagtaaagagaaacgagaagca

SEQ ID NO: 50680 - DNA, 25 bp, Artificial
  probe
  misc_feature (1)..(25): SEQ ID NO: 487; WAN024AD2_at; Start 53; Stop 77
ccaagtaaagagaaacgagaagcac

SEQ ID NO: 50681 - DNA, 25 bp, Artificial
  probe
  misc_feature (1)..(25): SEQ ID NO: 487; WAN024AD2_at; Start 51; Stop 75
agccaagtaaagagaaacgagaagc

SEQ ID NO: 50682 - DNA, 25 bp, Artificial
  probe
  misc_feature (1)..(25): SEQ ID NO: 487; WAN024AD2_at; Start 43; Stop 67
tataataaagccaagtaaagagaaa

SEQ ID NO: 50683 - DNA, 25 bp, Artificial
  probe
  misc_feature (1)..(25): SEQ ID NO: 487; WAN024AD2_at; Start 38; Stop 62
tgtggtataataaagccaagtaaag

SEQ ID NO: 50684 - DNA, 25 bp, Artificial
  probe
  misc_feature (1)..(25): SEQ ID NO: 487; WAN024AD2_at; Start 30; Stop 54
catggaaatgtggtataataaagcc

SEQ ID NO: 50685 - DNA, 25 bp, Artificial
  probe
  misc_feature (1)..(25): SEQ ID NO: 487; WAN024AD2_at; Start 14; Stop 38
aaaggtagaataaaatcatggaaat

SEQ ID NO: 50686 - DNA, 25 bp, Artificial
  probe
  misc_feature (1)..(25): SEQ ID NO: 487; WAN024AD2_at; Start 10; Stop 34
tcaaaaaggtagaataaaatcatgg

SEQ ID NO: 50687 - DNA, 25 bp, Artificial
  probe
  misc_feature (1)..(25): SEQ ID NO: 487; WAN024AD2_at; Start 34; Stop 58
gaaatgtggtataataaagccaagt

SEQ ID NO: 50688 - DNA, 25 bp, Artificial
  probe
  misc_feature (1)..(25): SEQ ID NO: 487; WAN024AD2_at; Start 15; Stop 39
aaggtagaataaaatcatggaaatg

SEQ ID NO: 50689 - DNA, 25 bp, Artificial
  probe
  misc_feature (1)..(25): SEQ ID NO: 487; WAN024AD2_at; Start 6; Stop 30
tatatcaaaaaggtagaataaaatc

SEQ ID NO: 50690 - DNA, 25 bp, Artificial
  probe
  misc_feature (1)..(25): SEQ ID NO: 487; WAN024AD2_at; Start 18; Stop 42
gtagaataaaatcatggaaatgtgg

SEQ ID NO: 50691 - DNA, 25 bp, Artificial
  probe
  misc_feature (1)..(25): SEQ ID NO: 487; WAN024AD2_at; Start 19; Stop 43
tagaataaaatcatggaaatgtggt

SEQ ID NO: 50692 - DNA, 25 bp, Artificial
  probe
  misc_feature (1)..(25): SEQ ID NO: 487; WAN024AD2_at; Start 8; Stop 32
tatcaaaaaggtagaataaaatcat

SEQ ID NO: 50693 - DNA, 25 bp, Artificial
  probe
  misc_feature (1)..(25): SEQ ID NO: 487; WAN024AD2_at; Start 32; Stop 56
tggaaatgtggtataataaagccaa

SEQ ID NO: 50694 - DNA, 25 bp, Artificial
  probe
  misc_feature (1)..(25): SEQ ID NO: 487; WAN024AD2_at; Start 48; Stop 72
taaagccaagtaaagagaaacgaga

SEQ ID NO: 50695 - DNA, 25 bp, Artificial
  probe
  misc_feature (1)..(25): SEQ ID NO: 487; WAN024AD2_at; Start 11; Stop 35
caaaaaggtagaataaaatcatgga

SEQ ID NO: 50696 - DNA, 25 bp, Artificial
  probe
  misc_feature (1)..(25): SEQ ID NO: 487; WAN024AD2_at; Start 22; Stop 46
aataaaatcatggaaatgtggtata

SEQ ID NO: 50697 - DNA, 25 bp, Artificial
  probe
  misc_feature (1)..(25): SEQ ID NO: 487; WAN024AD2_at; Start 31; Stop 55
atggaaatgtggtataataaagcca

SEQ ID NO: 50698 - DNA, 25 bp, Artificial
  probe
  misc_feature (1)..(25): SEQ ID NO: 487; WAN024AD2_at; Start 33; Stop 57
ggaaatgtggtataataaagccaag

SEQ ID NO: 50699 - DNA, 25 bp, Artificial
  probe
  misc_feature (1)..(25): SEQ ID NO: 487; WAN024AD2_at; Start 35; Stop 59
aaatgtggtataataaagccaagta

SEQ ID NO: 50700 - DNA, 25 bp, Artificial
  probe
  misc_feature (1)..(25): SEQ ID NO: 487; WAN024AD2_at; Start 17; Stop 41
ggtagaataaaatcatggaaatgtg

SEQ ID NO: 50701 - DNA, 25 bp, Artificial
  probe
  misc_feature (1)..(25): SEQ ID NO: 487; WAN024AD2_at; Start 36; Stop 60
aatgtggtataataaagccaagtaa

SEQ ID NO: 50702 - DNA, 25 bp, Artificial
  probe
  misc_feature (1)..(25): SEQ ID NO: 487; WAN024AD2_at; Start 20; Stop 44
agaataaaatcatggaaatgtggta

SEQ ID NO: 50703 - DNA, 25 bp, Artificial
  probe
  misc_feature (1)..(25): SEQ ID NO: 487; WAN024AD2_at; Start 40; Stop 64
tggtataataaagccaagtaaagag

SEQ ID NO: 50704 - DNA, 25 bp, Artificial
  probe
  misc_feature (1)..(25): SEQ ID NO: 487; WAN024AD2_at; Start 47; Stop 71
ataaagccaagtaaagagaaacgag

SEQ ID NO: 50705 - DNA, 25 bp, Artificial
  probe
  misc_feature (1)..(25): SEQ ID NO: 487; WAN024AD2_at; Start 24; Stop 48
taaaatcatggaaatgtggtataat

SEQ ID NO: 50706 - DNA, 25 bp, Artificial
  probe
  misc_feature (1)..(25): SEQ ID NO: 487; WAN024AD2_at; Start 39; Stop 63
gtggtataataaagccaagtaaaga

SEQ ID NO: 50707 - DNA, 25 bp, Artificial
  probe
  misc_feature (1)..(25): SEQ ID NO: 487; WAN024AD2_at; Start 29; Stop 53
tcatggaaatgtggtataataaagc

SEQ ID NO: 50708 - DNA, 25 bp, Artificial
  probe
  misc_feature (1)..(25): SEQ ID NO: 487; WAN024AD2_at; Start 42; Stop 66
gtataataaagccaagtaaagagaa

SEQ ID NO: 50709 - DNA, 25 bp, Artificial
  probe
  misc_feature (1)..(25): SEQ ID NO: 487; WAN024AD2_at; Start 25; Stop 49
aaaatcatggaaatgtggtataata

SEQ ID NO: 50710 - DNA, 25 bp, Artificial
  probe
  misc_feature (1)..(25): SEQ ID NO: 5931; WAN024AD3_at; Start 13; Stop 37
tcaggatttttaacttactattcac

SEQ ID NO: 50711 - DNA, 25 bp, Artificial
  probe
  misc_feature (1)..(25): SEQ ID NO: 5931; WAN024AD3_at; Start 30; Stop 54
ctattcactcaaatcatattcactt

SEQ ID NO: 50712 - DNA, 25 bp, Artificial
  probe
  misc_feature (1)..(25): SEQ ID NO: 5931; WAN024AD3_at; Start 24; Stop 48
aacttactattcactcaaatcatat

SEQ ID NO: 50713 - DNA, 25 bp, Artificial
  probe
  misc_feature (1)..(25): SEQ ID NO: 5931; WAN024AD3_at; Start 16; Stop 40
ggatttttaacttactattcactca

SEQ ID NO: 50714 - DNA, 25 bp, Artificial
  probe
  misc_feature (1)..(25): SEQ ID NO: 5931; WAN024AD3_at; Start 35; Stop 59
cactcaaatcatattcacttatagt

SEQ ID NO: 50715 - DNA, 25 bp, Artificial
  probe
  misc_feature (1)..(25): SEQ ID NO: 5931; WAN024AD3_at; Start 29; Stop 53
actattcactcaaatcatattcact

SEQ ID NO: 50716 - DNA, 25 bp, Artificial
  probe
  misc_feature (1)..(25): SEQ ID NO: 5931; WAN024AD3_at; Start 14; Stop 38
caggatttttaacttactattcact

SEQ ID NO: 50717 - DNA, 25 bp, Artificial
  probe
  misc_feature (1)..(25): SEQ ID NO: 5931; WAN024AD3_at; Start 12; Stop 36
atcaggatttttaacttactattca

SEQ ID NO: 50718 - DNA, 25 bp, Artificial
  probe
  misc_feature (1)..(25): SEQ ID NO: 5931; WAN024AD3_at; Start 23; Stop 47
taacttactattcactcaaatcata

SEQ ID NO: 50719 - DNA, 25 bp, Artificial
  probe
  misc_feature (1)..(25): SEQ ID NO: 5931; WAN024AD3_at; Start 34; Stop 58
tcactcaaatcatattcacttatag

SEQ ID NO: 50720 - DNA, 25 bp, Artificial
  probe
  misc_feature (1)..(25): SEQ ID NO: 5931; WAN024AD3_at; Start 27; Stop 51
ttactattcactcaaatcatattca

SEQ ID NO: 50721 - DNA, 25 bp, Artificial
  probe
  misc_feature (1)..(25): SEQ ID NO: 5931; WAN024AD3_at; Start 22; Stop 46
ttaacttactattcactcaaatcat

SEQ ID NO: 50722 - DNA, 25 bp, Artificial
  probe
  misc_feature (1)..(25): SEQ ID NO: 5931; WAN024AD3_at; Start 36; Stop 60
actcaaatcatattcacttatagta

SEQ ID NO: 50723 - DNA, 25 bp, Artificial
  probe
  misc_feature (1)..(25): SEQ ID NO: 5931; WAN024AD3_at; Start 32; Stop 56
attcactcaaatcatattcacttat

SEQ ID NO: 50724 - DNA, 25 bp, Artificial
  probe
  misc_feature (1)..(25): SEQ ID NO: 5931; WAN024AD3_at; Start 25; Stop 49
acttactattcactcaaatcatatt

SEQ ID NO: 50725 - DNA, 25 bp, Artificial
  probe
  misc_feature (1)..(25): SEQ ID NO: 5931; WAN024AD3_at; Start 21; Stop 45
tttaacttactattcactcaaatca

SEQ ID NO: 50726 - DNA, 25 bp, Artificial
  probe
  misc_feature (1)..(25): SEQ ID NO: 5931; WAN024AD3_at; Start 33; Stop 57
ttcactcaaatcatattcacttata

SEQ ID NO: 50727 - DNA, 25 bp, Artificial
  probe
  misc_feature (1)..(25): SEQ ID NO: 5931; WAN024AD3_at; Start 20; Stop 44
ttttaacttactattcactcaaatc

SEQ ID NO: 50728 - DNA, 25 bp, Artificial
  probe
  misc_feature (1)..(25): SEQ ID NO: 5931; WAN024AD3_at; Start 26; Stop 50
cttactattcactcaaatcatattc

SEQ ID NO: 50729 - DNA, 25 bp, Artificial
  probe
  misc_feature (1)..(25): SEQ ID NO: 5931; WAN024AD3_at; Start 8; Stop 32
tgaaatcaggatttttaacttacta

SEQ ID NO: 50730 - DNA, 25 bp, Artificial
  probe
  misc_feature (1)..(25): SEQ ID NO: 5931; WAN024AD3_at; Start 17; Stop 41
gatttttaacttactattcactcaa

SEQ ID NO: 50731 - DNA, 25 bp, Artificial
  probe
  misc_feature (1)..(25): SEQ ID NO: 5931; WAN024AD3_at; Start 28; Stop 52
tactattcactcaaatcatattcac

SEQ ID NO: 50732 - DNA, 25 bp, Artificial
  probe
  misc_feature (1)..(25): SEQ ID NO: 5931; WAN024AD3_at; Start 31; Stop 55
tattcactcaaatcatattcactta

SEQ ID NO: 50733 - DNA, 25 bp, Artificial
  probe
  misc_feature (1)..(25): SEQ ID NO: 4468; WAN024AD4_at; Start 2; Stop 26
actataagtgaatatgatttgagtg

SEQ ID NO: 50734 - DNA, 25 bp, Artificial
  probe
  misc_feature (1)..(25): SEQ ID NO: 4468; WAN024AD4_at; Start 5; Stop 29
ataagtgaatatgatttgagtgaat

SEQ ID NO: 50735 - DNA, 25 bp, Artificial
  probe
  misc_feature (1)..(25): SEQ ID NO: 4468; WAN024AD4_at; Start 7; Stop 31
aagtgaatatgatttgagtgaatag

SEQ ID NO: 50736 - DNA, 25 bp, Artificial
  probe
  misc_feature (1)..(25): SEQ ID NO: 4468; WAN024AD4_at; Start 15; Stop 39
atgatttgagtgaatagtaagttaa

SEQ ID NO: 50737 - DNA, 25 bp, Artificial
  probe
  misc_feature (1)..(25): SEQ ID NO: 4468; WAN024AD4_at; Start 14; Stop 38
tatgatttgagtgaatagtaagtta

SEQ ID NO: 50738 - DNA, 25 bp, Artificial
  probe
  misc_feature (1)..(25): SEQ ID NO: 4468; WAN024AD4_at; Start 21; Stop 45
tgagtgaatagtaagttaaaaatcc

SEQ ID NO: 50739 - DNA, 25 bp, Artificial
  probe
  misc_feature (1)..(25): SEQ ID NO: 4468; WAN024AD4_at; Start 8; Stop 32
agtgaatatgatttgagtgaatagt

SEQ ID NO: 50740 - DNA, 25 bp, Artificial
  probe
  misc_feature (1)..(25): SEQ ID NO: 4468; WAN024AD4_at; Start 23; Stop 47
agtgaatagtaagttaaaaatcctg

SEQ ID NO: 50741 - DNA, 25 bp, Artificial
  probe
  misc_feature (1)..(25): SEQ ID NO: 4468; WAN024AD4_at; Start 17; Stop 41
gatttgagtgaatagtaagttaaaa

SEQ ID NO: 50742 - DNA, 25 bp, Artificial
  probe
  misc_feature (1)..(25): SEQ ID NO: 4468; WAN024AD4_at; Start 10; Stop 34
tgaatatgatttgagtgaatagtaa

SEQ ID NO: 50743 - DNA, 25 bp, Artificial
  probe
  misc_feature (1)..(25): SEQ ID NO: 4468; WAN024AD4_at; Start 29; Stop 53
tagtaagttaaaaatcctgatttca

SEQ ID NO: 50744 - DNA, 25 bp, Artificial
  probe
  misc_feature (1)..(25): SEQ ID NO: 4468; WAN024AD4_at; Start 25; Stop 49
tgaatagtaagttaaaaatcctgat

SEQ ID NO: 50745 - DNA, 25 bp, Artificial
  probe
  misc_feature (1)..(25): SEQ ID NO: 4468; WAN024AD4_at; Start 1; Stop 25
tactataagtgaatatgatttgagt

SEQ ID NO: 50746 - DNA, 25 bp, Artificial
  probe
  misc_feature (1)..(25): SEQ ID NO: 4468; WAN024AD4_at; Start 16; Stop 40
tgatttgagtgaatagtaagttaaa

SEQ ID NO: 50747 - DNA, 25 bp, Artificial
  probe
  misc_feature (1)..(25): SEQ ID NO: 4468; WAN024AD4_at; Start 4; Stop 28
tataagtgaatatgatttgagtgaa

SEQ ID NO: 50748 - DNA, 25 bp, Artificial
  probe
  misc_feature (1)..(25): SEQ ID NO: 4468; WAN024AD4_at; Start 20; Stop 44
ttgagtgaatagtaagttaaaaatc

SEQ ID NO: 50749 - DNA, 25 bp, Artificial
  probe
  misc_feature (1)..(25): SEQ ID NO: 4468; WAN024AD4_at; Start 6; Stop 30
taagtgaatatgatttgagtgaata

SEQ ID NO: 50750 - DNA, 25 bp, Artificial
  probe
  misc_feature (1)..(25): SEQ ID NO: 4468; WAN024AD4_at; Start 24; Stop 48
gtgaatagtaagttaaaaatcctga

SEQ ID NO: 50751 - DNA, 25 bp, Artificial
  probe
  misc_feature (1)..(25): SEQ ID NO: 4468; WAN024AD4_at; Start 12; Stop 36
aatatgatttgagtgaatagtaagt

SEQ ID NO: 50752 - DNA, 25 bp, Artificial
  probe
  misc_feature (1)..(25): SEQ ID NO: 4468; WAN024AD4_at; Start 9; Stop 33
gtgaatatgatttgagtgaatagta

SEQ ID NO: 50753 - DNA, 25 bp, Artificial
  probe
  misc_feature (1)..(25): SEQ ID NO: 4468; WAN024AD4_at; Start 13; Stop 37
atatgatttgagtgaatagtaagtt

SEQ ID NO: 50754 - DNA, 25 bp, Artificial
  probe
  misc_feature (1)..(25): SEQ ID NO: 4468; WAN024AD4_at; Start 11; Stop 35
gaatatgatttgagtgaatagtaag

SEQ ID NO: 50755 - DNA, 25 bp, Artificial
  probe
  misc_feature (1)..(25): SEQ ID NO: 4468; WAN024AD4_at; Start 3; Stop 27
ctataagtgaatatgatttgagtga

SEQ ID NO: 50756 - DNA, 25 bp, Artificial
  probe
  misc_feature (1)..(25): SEQ ID NO: 4437; WAN024AD5_at; Start 130; Stop 154
ttttatctgacaccttgtgagtctc

SEQ ID NO: 50757 - DNA, 25 bp, Artificial
  probe
  misc_feature (1)..(25): SEQ ID NO: 4437; WAN024AD5_at; Start 98; Stop 122
caaaaagtctcctctagaaaattgc

SEQ ID NO: 50758 - DNA, 25 bp, Artificial
  probe
  misc_feature (1)..(25): SEQ ID NO: 4437; WAN024AD5_at; Start 100; Stop 124
aaaagtctcctctagaaaattgcac

SEQ ID NO: 50759 - DNA, 25 bp, Artificial
  probe
  misc_feature (1)..(25): SEQ ID NO: 4437; WAN024AD5_at; Start 77; Stop 101
tacaacacaagagagcacactcaaa

SEQ ID NO: 50760 - DNA, 25 bp, Artificial
  probe
  misc_feature (1)..(25): SEQ ID NO: 4437; WAN024AD5_at; Start 135; Stop 159
tctgacaccttgtgagtctctctgg

SEQ ID NO: 50761 - DNA, 25 bp, Artificial
  probe
  misc_feature (1)..(25): SEQ ID NO: 4437; WAN024AD5_at; Start 153; Stop 177
tctctggactccccttaaaggttga

SEQ ID NO: 50762 - DNA, 25 bp, Artificial
  probe
  misc_feature (1)..(25): SEQ ID NO: 4437; WAN024AD5_at; Start 149; Stop 173
agtctctctggactccccttaaagg

SEQ ID NO: 50763 - DNA, 25 bp, Artificial
  probe
  misc_feature (1)..(25): SEQ ID NO: 4437; WAN024AD5_at; Start 140; Stop 164
caccttgtgagtctctctggactcc

SEQ ID NO: 50764 - DNA, 25 bp, Artificial
  probe
  misc_feature (1)..(25): SEQ ID NO: 4437; WAN024AD5_at; Start 145; Stop 169
tgtgagtctctctggactcccctta

SEQ ID NO: 50765 - DNA, 25 bp, Artificial
  probe
  misc_feature (1)..(25): SEQ ID NO: 4437; WAN024AD5_at; Start 223; Stop 247
acgaatattctacttaacttgcacg

SEQ ID NO: 50766 - DNA, 25 bp, Artificial
  probe
  misc_feature (1)..(25): SEQ ID NO: 4437; WAN024AD5_at; Start 71; Stop 95
aaatcgtacaacacaagagagcaca

SEQ ID NO: 50767 - DNA, 25 bp, Artificial
  probe
  misc_feature (1)..(25): SEQ ID NO: 4437; WAN024AD5_at; Start 33; Stop 57
gataaagaaaagaccttgctagtgc

SEQ ID NO: 50768 - DNA, 25 bp, Artificial
  probe
  misc_feature (1)..(25): SEQ ID NO: 4437; WAN024AD5_at; Start 209; Stop 233
aagtcaagtagaaaacgaatattct

SEQ ID NO: 50769 - DNA, 25 bp, Artificial
  probe
  misc_feature (1)..(25): SEQ ID NO: 4437; WAN024AD5_at; Start 48; Stop 72
ttgctagtgcaaggcctcagttaaa

SEQ ID NO: 50770 - DNA, 25 bp, Artificial
  probe
  misc_feature (1)..(25): SEQ ID NO: 4437; WAN024AD5_at; Start 39; Stop 63
gaaaagaccttgctagtgcaaggcc

SEQ ID NO: 50771 - DNA, 25 bp, Artificial
  probe
  misc_feature (1)..(25): SEQ ID NO: 4437; WAN024AD5_at; Start 87; Stop 111
gagagcacactcaaaaagtctcctc

SEQ ID NO: 50772 - DNA, 25 bp, Artificial
  probe
  misc_feature (1)..(25): SEQ ID NO: 4437; WAN024AD5_at; Start 30; Stop 54
ccagataaagaaaagaccttgctag

SEQ ID NO: 50773 - DNA, 25 bp, Artificial
  probe
  misc_feature (1)..(25): SEQ ID NO: 4437; WAN024AD5_at; Start 225; Stop 249
gaatattctacttaacttgcacgaa

SEQ ID NO: 50774 - DNA, 25 bp, Artificial
  probe
  misc_feature (1)..(25): SEQ ID NO: 4437; WAN024AD5_at; Start 74; Stop 98
tcgtacaacacaagagagcacactc

SEQ ID NO: 50775 - DNA, 25 bp, Artificial
  probe
  misc_feature (1)..(25): SEQ ID NO: 4437; WAN024AD5_at; Start 183; Stop 207
tattagtatactctttcagctaaaa

SEQ ID NO: 50776 - DNA, 25 bp, Artificial
  probe
  misc_feature (1)..(25): SEQ ID NO: 4437; WAN024AD5_at; Start 195; Stop 219
ctttcagctaaaaaaagtcaagtag

SEQ ID NO: 50777 - DNA, 25 bp, Artificial
  probe
  misc_feature (1)..(25): SEQ ID NO: 4437; WAN024AD5_at; Start 65; Stop 89
cagttaaaatcgtacaacacaagag

SEQ ID NO: 50778 - DNA, 25 bp, Artificial
  probe
  misc_feature (1)..(25): SEQ ID NO: 4437; WAN024AD5_at; Start 35; Stop 59
taaagaaaagaccttgctagtgcaa

SEQ ID NO: 50779 - DNA, 25 bp, Artificial
  probe
  misc_feature (1)..(25): SEQ ID NO: 4437; WAN024AD5_at; Start 52; Stop 76
tagtgcaaggcctcagttaaaatcg

SEQ ID NO: 50780 - DNA, 25 bp, Artificial
  probe
  misc_feature (1)..(25): SEQ ID NO: 4437; WAN024AD5_at; Start 126; Stop 150
attcttttatctgacaccttgtgag

SEQ ID NO: 50781 - DNA, 25 bp, Artificial
  probe
  misc_feature (1)..(25): SEQ ID NO: 4437; WAN024AD5_at; Start 69; Stop 93
taaaatcgtacaacacaagagagca

SEQ ID NO: 50782 - DNA, 25 bp, Artificial
  probe
  misc_feature (1)..(25): SEQ ID NO: 4437; WAN024AD5_at; Start 84; Stop 108
caagagagcacactcaaaaagtctc

SEQ ID NO: 50783 - DNA, 25 bp, Artificial
  probe
  misc_feature (1)..(25): SEQ ID NO: 4437; WAN024AD5_at; Start 91; Stop 115
gcacactcaaaaagtctcctctaga

SEQ ID NO: 50784 - DNA, 25 bp, Artificial
  probe
  misc_feature (1)..(25): SEQ ID NO: 4437; WAN024AD5_at; Start 60; Stop 84
ggcctcagttaaaatcgtacaacac

SEQ ID NO: 50785 - DNA, 25 bp, Artificial
  probe
  misc_feature (1)..(25): SEQ ID NO: 4437; WAN024AD5_at; Start 137; Stop 161
tgacaccttgtgagtctctctggac

SEQ ID NO: 50786 - DNA, 25 bp, Artificial
  probe
  misc_feature (1)..(25): SEQ ID NO: 4437; WAN024AD5_at; Start 55; Stop 79
tgcaaggcctcagttaaaatcgtac

SEQ ID NO: 50787 - DNA, 25 bp, Artificial
  probe
  misc_feature (1)..(25): SEQ ID NO: 4437; WAN024AD5_at; Start 42; Stop 66
aagaccttgctagtgcaaggcctca

SEQ ID NO: 50788 - DNA, 25 bp, Artificial
  probe
  misc_feature (1)..(25): SEQ ID NO: 4437; WAN024AD5_at; Start 27; Stop 51
ggaccagataaagaaaagaccttgc

SEQ ID NO: 50789 - DNA, 25 bp, Artificial
  probe
  misc_feature (1)..(25): SEQ ID NO: 4437; WAN024AD5_at; Start 57; Stop 81
caaggcctcagttaaaatcgtacaa

SEQ ID NO: 50790 - DNA, 25 bp, Artificial
  probe
  misc_feature (1)..(25): SEQ ID NO: 5907; WAN024AD6_at; Start 136; Stop 160
tctagaggagactttttgagtgtgc

SEQ ID NO: 50791 - DNA, 25 bp, Artificial
  probe
  misc_feature (1)..(25): SEQ ID NO: 5907; WAN024AD6_at; Start 130; Stop 154
caattttctagaggagactttttga

SEQ ID NO: 50792 - DNA, 25 bp, Artificial
  probe
  misc_feature (1)..(25): SEQ ID NO: 5907; WAN024AD6_at; Start 175; Stop 199
cgattttaactgaggccttgcacta

SEQ ID NO: 50793 - DNA, 25 bp, Artificial
  probe
  misc_feature (1)..(25): SEQ ID NO: 5907; WAN024AD6_at; Start 185; Stop 209
tgaggccttgcactagcaaggtctt

SEQ ID NO: 50794 - DNA, 25 bp, Artificial
  probe
  misc_feature (1)..(25): SEQ ID NO: 5907; WAN024AD6_at; Start 173; Stop 197
tacgattttaactgaggccttgcac

SEQ ID NO: 50795 - DNA, 25 bp, Artificial
  probe
  misc_feature (1)..(25): SEQ ID NO: 5907; WAN024AD6_at; Start 31; Stop 55
tctacttgactttttttagctgaaa

SEQ ID NO: 50796 - DNA, 25 bp, Artificial
  probe
  misc_feature (1)..(25): SEQ ID NO: 5907; WAN024AD6_at; Start 99; Stop 123
gactcacaaggtgtcagataaaaga

SEQ ID NO: 50797 - DNA, 25 bp, Artificial
  probe
  misc_feature (1)..(25): SEQ ID NO: 5907; WAN024AD6_at; Start 6; Stop 30
tgcaagttaagtagaatattcgttt

SEQ ID NO: 50798 - DNA, 25 bp, Artificial
  probe
  misc_feature (1)..(25): SEQ ID NO: 5907; WAN024AD6_at; Start 89; Stop 113
agtccagagagactcacaaggtgtc

SEQ ID NO: 50799 - DNA, 25 bp, Artificial
  probe
  misc_feature (1)..(25): SEQ ID NO: 5907; WAN024AD6_at; Start 91; Stop 115
tccagagagactcacaaggtgtcag

SEQ ID NO: 50800 - DNA, 25 bp, Artificial
  probe
  misc_feature (1)..(25): SEQ ID NO: 5907; WAN024AD6_at; Start 17; Stop 41
tagaatattcgttttctacttgact

SEQ ID NO: 50801 - DNA, 25 bp, Artificial
  probe
  misc_feature (1)..(25): SEQ ID NO: 5907; WAN024AD6_at; Start 171; Stop 195
tgtacgattttaactgaggccttgc

SEQ ID NO: 50802 - DNA, 25 bp, Artificial
  probe
  misc_feature (1)..(25): SEQ ID NO: 5907; WAN024AD6_at; Start 97; Stop 121
gagactcacaaggtgtcagataaaa

SEQ ID NO: 50803 - DNA, 25 bp, Artificial
  probe
  misc_feature (1)..(25): SEQ ID NO: 5907; WAN024AD6_at; Start 167; Stop 191
gtgttgtacgattttaactgaggcc

SEQ ID NO: 50804 - DNA, 25 bp, Artificial
  probe
  misc_feature (1)..(25): SEQ ID NO: 5907; WAN024AD6_at; Start 179; Stop 203
tttaactgaggccttgcactagcaa

SEQ ID NO: 50805 - DNA, 25 bp, Artificial
  probe
  misc_feature (1)..(25): SEQ ID NO: 5907; WAN024AD6_at; Start 176; Stop 200
gattttaactgaggccttgcactag

SEQ ID NO: 50806 - DNA, 25 bp, Artificial
  probe
  misc_feature (1)..(25): SEQ ID NO: 5907; WAN024AD6_at; Start 200; Stop 224
gcaaggtcttttctttatctggtcc

SEQ ID NO: 50807 - DNA, 25 bp, Artificial
  probe
  misc_feature (1)..(25): SEQ ID NO: 5907; WAN024AD6_at; Start 143; Stop 167
gagactttttgagtgtgctctcttg

SEQ ID NO: 50808 - DNA, 25 bp, Artificial
  probe
  misc_feature (1)..(25): SEQ ID NO: 5907; WAN024AD6_at; Start 138; Stop 162
tagaggagactttttgagtgtgctc

SEQ ID NO: 50809 - DNA, 25 bp, Artificial
  probe
  misc_feature (1)..(25): SEQ ID NO: 5907; WAN024AD6_at; Start 101; Stop 125
ctcacaaggtgtcagataaaagaat

SEQ ID NO: 50810 - DNA, 25 bp, Artificial
  probe
  misc_feature (1)..(25): SEQ ID NO: 5907; WAN024AD6_at; Start 140; Stop 164
gaggagactttttgagtgtgctctc

SEQ ID NO: 50811 - DNA, 25 bp, Artificial
  probe
  misc_feature (1)..(25): SEQ ID NO: 5907; WAN024AD6_at; Start 145; Stop 169
gactttttgagtgtgctctcttgtg

SEQ ID NO: 50812 - DNA, 25 bp, Artificial
  probe
  misc_feature (1)..(25): SEQ ID NO: 5907; WAN024AD6_at; Start 86; Stop 110
gggagtccagagagactcacaaggt

SEQ ID NO: 50813 - DNA, 25 bp, Artificial
  probe
  misc_feature (1)..(25): SEQ ID NO: 5907; WAN024AD6_at; Start 42; Stop 66
ttttttagctgaaagagtatactaa

SEQ ID NO: 50814 - DNA, 25 bp, Artificial
  probe
  misc_feature (1)..(25): SEQ ID NO: 5907; WAN024AD6_at; Start 159; Stop 183
gctctcttgtgttgtacgattttaa

SEQ ID NO: 50815 - DNA, 25 bp, Artificial
  probe
  misc_feature (1)..(25): SEQ ID NO: 5907; WAN024AD6_at; Start 153; Stop 177
gagtgtgctctcttgtgttgtacga

SEQ ID NO: 50816 - DNA, 25 bp, Artificial
  probe
  misc_feature (1)..(25): SEQ ID NO: 5907; WAN024AD6_at; Start 127; Stop 151
gtgcaattttctagaggagactttt

SEQ ID NO: 50817 - DNA, 25 bp, Artificial
  probe
  misc_feature (1)..(25): SEQ ID NO: 5907; WAN024AD6_at; Start 193; Stop 217
tgcactagcaaggtcttttctttat

SEQ ID NO: 50818 - DNA, 25 bp, Artificial
  probe
  misc_feature (1)..(25): SEQ ID NO: 5907; WAN024AD6_at; Start 3; Stop 27
tcgtgcaagttaagtagaatattcg

SEQ ID NO: 50819 - DNA, 25 bp, Artificial
  probe
  misc_feature (1)..(25): SEQ ID NO: 5907; WAN024AD6_at; Start 95; Stop 119
gagagactcacaaggtgtcagataa

SEQ ID NO: 50820 - DNA, 25 bp, Artificial
  probe
  misc_feature (1)..(25): SEQ ID NO: 5907; WAN024AD6_at; Start 93; Stop 117
cagagagactcacaaggtgtcagat

SEQ ID NO: 50821 - DNA, 25 bp, Artificial
  probe
  misc_feature (1)..(25): SEQ ID NO: 5907; WAN024AD6_at; Start 181; Stop 205
taactgaggccttgcactagcaagg

SEQ ID NO: 50822 - DNA, 25 bp, Artificial
  probe
  misc_feature (1)..(25): SEQ ID NO: 5907; WAN024AD6_at; Start 49; Stop 73
gctgaaagagtatactaataaaaat

SEQ ID NO: 50823 - DNA, 25 bp, Artificial
  probe
  misc_feature (1)..(25): SEQ ID NO: 5907; WAN024AD6_at; Start 189; Stop 213
gccttgcactagcaaggtcttttct

SEQ ID NO: 50824 - DNA, 25 bp, Artificial
  probe
  misc_feature (1)..(25): SEQ ID NO: 67; WAN024AD7_at; Start 8; Stop 32
cgagggatttcctcgactctttaca

SEQ ID NO: 50825 - DNA, 25 bp, Artificial
  probe
  misc_feature (1)..(25): SEQ ID NO: 67; WAN024AD7_at; Start 21; Stop 45
cgactctttacatattatttgttcg

SEQ ID NO: 50826 - DNA, 25 bp, Artificial
  probe
  misc_feature (1)..(25): SEQ ID NO: 67; WAN024AD7_at; Start 3; Stop 27
aaagccgagggatttcctcgactct

SEQ ID NO: 50827 - DNA, 25 bp, Artificial
  probe
  misc_feature (1)..(25): SEQ ID NO: 67; WAN024AD7_at; Start 25; Stop 49
tctttacatattatttgttcgttag

SEQ ID NO: 50828 - DNA, 25 bp, Artificial
  probe
  misc_feature (1)..(25): SEQ ID NO: 67; WAN024AD7_at; Start 17; Stop 41
tcctcgactctttacatattatttg

SEQ ID NO: 50829 - DNA, 25 bp, Artificial
  probe
  misc_feature (1)..(25): SEQ ID NO: 67; WAN024AD7_at; Start 6; Stop 30
gccgagggatttcctcgactcttta

SEQ ID NO: 50830 - DNA, 25 bp, Artificial
  probe
  misc_feature (1)..(25): SEQ ID NO: 67; WAN024AD7_at; Start 19; Stop 43
ctcgactctttacatattatttgtt

SEQ ID NO: 50831 - DNA, 25 bp, Artificial
  probe
  misc_feature (1)..(25): SEQ ID NO: 67; WAN024AD7_at; Start 9; Stop 33
gagggatttcctcgactctttacat

SEQ ID NO: 50832 - DNA, 25 bp, Artificial
  probe
  misc_feature (1)..(25): SEQ ID NO: 67; WAN024AD7_at; Start 18; Stop 42
cctcgactctttacatattatttgt

SEQ ID NO: 50833 - DNA, 25 bp, Artificial
  probe
  misc_feature (1)..(25): SEQ ID NO: 67; WAN024AD7_at; Start 5; Stop 29
agccgagggatttcctcgactcttt

SEQ ID NO: 50834 - DNA, 25 bp, Artificial
  probe
  misc_feature (1)..(25): SEQ ID NO: 67; WAN024AD7_at; Start 12; Stop 36
ggatttcctcgactctttacatatt

SEQ ID NO: 50835 - DNA, 25 bp, Artificial
  probe
  misc_feature (1)..(25): SEQ ID NO: 67; WAN024AD7_at; Start 4; Stop 28
aagccgagggatttcctcgactctt

SEQ ID NO: 50836 - DNA, 25 bp, Artificial
  probe
  misc_feature (1)..(25): SEQ ID NO: 67; WAN024AD7_at; Start 13; Stop 37
gatttcctcgactctttacatatta

SEQ ID NO: 50837 - DNA, 25 bp, Artificial
  probe
  misc_feature (1)..(25): SEQ ID NO: 67; WAN024AD7_at; Start 20; Stop 44
tcgactctttacatattatttgttc

SEQ ID NO: 50838 - DNA, 25 bp, Artificial
  probe
  misc_feature (1)..(25): SEQ ID NO: 67; WAN024AD7_at; Start 14; Stop 38
atttcctcgactctttacatattat

SEQ ID NO: 50839 - DNA, 25 bp, Artificial
  probe
  misc_feature (1)..(25): SEQ ID NO: 67; WAN024AD7_at; Start 16; Stop 40
ttcctcgactctttacatattattt

SEQ ID NO: 50840 - DNA, 25 bp, Artificial
  probe
  misc_feature (1)..(25): SEQ ID NO: 67; WAN024AD7_at; Start 24; Stop 48
ctctttacatattatttgttcgtta

SEQ ID NO: 50841 - DNA, 25 bp, Artificial
  probe
  misc_feature (1)..(25): SEQ ID NO: 67; WAN024AD7_at; Start 26; Stop 50
ctttacatattatttgttcgttagt

SEQ ID NO: 50842 - DNA, 25 bp, Artificial
  probe
  misc_feature (1)..(25): SEQ ID NO: 67; WAN024AD7_at; Start 23; Stop 47
actctttacatattatttgttcgtt

SEQ ID NO: 50843 - DNA, 25 bp, Artificial
  probe
  misc_feature (1)..(25): SEQ ID NO: 67; WAN024AD7_at; Start 11; Stop 35
gggatttcctcgactctttacatat

SEQ ID NO: 50844 - DNA, 25 bp, Artificial
  probe
  misc_feature (1)..(25): SEQ ID NO: 67; WAN024AD7_at; Start 22; Stop 46
gactctttacatattatttgttcgt

SEQ ID NO: 50845 - DNA, 25 bp, Artificial
  probe
  misc_feature (1)..(25): SEQ ID NO: 67; WAN024AD7_at; Start 28; Stop 52
ttacatattatttgttcgttagttc

SEQ ID NO: 50846 - DNA, 25 bp, Artificial
  probe
  misc_feature (1)..(25): SEQ ID NO: 67; WAN024AD7_at; Start 15; Stop 39
tttcctcgactctttacatattatt

SEQ ID NO: 50847 - DNA, 25 bp, Artificial
  probe
  misc_feature (1)..(25): SEQ ID NO: 67; WAN024AD7_at; Start 10; Stop 34
agggatttcctcgactctttacata

SEQ ID NO: 50848 - DNA, 25 bp, Artificial
  probe
  misc_feature (1)..(25): SEQ ID NO: 3550; WAN024AD8_at; Start 9; Stop 33
gaacaaataatatgtaaagagtcga

SEQ ID NO: 50849 - DNA, 25 bp, Artificial
  probe
  misc_feature (1)..(25): SEQ ID NO: 3550; WAN024AD8_at; Start 19; Stop 43
tatgtaaagagtcgaggaaatccct

SEQ ID NO: 50850 - DNA, 25 bp, Artificial
  probe
  misc_feature (1)..(25): SEQ ID NO: 3550; WAN024AD8_at; Start 20; Stop 44
atgtaaagagtcgaggaaatccctc

SEQ ID NO: 50851 - DNA, 25 bp, Artificial
  probe
  misc_feature (1)..(25): SEQ ID NO: 3550; WAN024AD8_at; Start 4; Stop 28
ctaacgaacaaataatatgtaaaga

SEQ ID NO: 50852 - DNA, 25 bp, Artificial
  probe
  misc_feature (1)..(25): SEQ ID NO: 3550; WAN024AD8_at; Start 8; Stop 32
cgaacaaataatatgtaaagagtcg

SEQ ID NO: 50853 - DNA, 25 bp, Artificial
  probe
  misc_feature (1)..(25): SEQ ID NO: 3550; WAN024AD8_at; Start 25; Stop 49
aagagtcgaggaaatccctcggctt

SEQ ID NO: 50854 - DNA, 25 bp, Artificial
  probe
  misc_feature (1)..(25): SEQ ID NO: 3550; WAN024AD8_at; Start 14; Stop 38
aataatatgtaaagagtcgaggaaa

SEQ ID NO: 50855 - DNA, 25 bp, Artificial
  probe
  misc_feature (1)..(25): SEQ ID NO: 3550; WAN024AD8_at; Start 18; Stop 42
atatgtaaagagtcgaggaaatccc

SEQ ID NO: 50856 - DNA, 25 bp, Artificial
  probe
  misc_feature (1)..(25): SEQ ID NO: 3550; WAN024AD8_at; Start 10; Stop 34
aacaaataatatgtaaagagtcgag

SEQ ID NO: 50857 - DNA, 25 bp, Artificial
  probe
  misc_feature (1)..(25): SEQ ID NO: 3550; WAN024AD8_at; Start 16; Stop 40
taatatgtaaagagtcgaggaaatc

SEQ ID NO: 50858 - DNA, 25 bp, Artificial
  probe
  misc_feature (1)..(25): SEQ ID NO: 3550; WAN024AD8_at; Start 13; Stop 37
aaataatatgtaaagagtcgaggaa

SEQ ID NO: 50859 - DNA, 25 bp, Artificial
  probe
  misc_feature (1)..(25): SEQ ID NO: 3550; WAN024AD8_at; Start 11; Stop 35
acaaataatatgtaaagagtcgagg

SEQ ID NO: 50860 - DNA, 25 bp, Artificial
  probe
  misc_feature (1)..(25): SEQ ID NO: 3550; WAN024AD8_at; Start 1; Stop 25
gaactaacgaacaaataatatgtaa

SEQ ID NO: 50861 - DNA, 25 bp, Artificial
  probe
  misc_feature (1)..(25): SEQ ID NO: 3550; WAN024AD8_at; Start 17; Stop 41
aatatgtaaagagtcgaggaaatcc

SEQ ID NO: 50862 - DNA, 25 bp, Artificial
  probe
  misc_feature (1)..(25): SEQ ID NO: 3550; WAN024AD8_at; Start 7; Stop 31
acgaacaaataatatgtaaagagtc

SEQ ID NO: 50863 - DNA, 25 bp, Artificial
  probe
  misc_feature (1)..(25): SEQ ID NO: 3550; WAN024AD8_at; Start 3; Stop 27
actaacgaacaaataatatgtaaag

SEQ ID NO: 50864 - DNA, 25 bp, Artificial
  probe
  misc_feature (1)..(25): SEQ ID NO: 3550; WAN024AD8_at; Start 26; Stop 50
agagtcgaggaaatccctcggcttt

SEQ ID NO: 50865 - DNA, 25 bp, Artificial
  probe
  misc_feature (1)..(25): SEQ ID NO: 3550; WAN024AD8_at; Start 15; Stop 39
ataatatgtaaagagtcgaggaaat

SEQ ID NO: 50866 - DNA, 25 bp, Artificial
  probe
  misc_feature (1)..(25): SEQ ID NO: 3550; WAN024AD8_at; Start 24; Stop 48
aaagagtcgaggaaatccctcggct

SEQ ID NO: 50867 - DNA, 25 bp, Artificial
  probe
  misc_feature (1)..(25): SEQ ID NO: 3550; WAN024AD8_at; Start 23; Stop 47
taaagagtcgaggaaatccctcggc

SEQ ID NO: 50868 - DNA, 25 bp, Artificial
  probe
  misc_feature (1)..(25): SEQ ID NO: 3550; WAN024AD8_at; Start 5; Stop 29
taacgaacaaataatatgtaaagag

SEQ ID NO: 50869 - DNA, 25 bp, Artificial
  probe
  misc_feature (1)..(25): SEQ ID NO: 3550; WAN024AD8_at; Start 12; Stop 36
caaataatatgtaaagagtcgagga

SEQ ID NO: 50870 - DNA, 25 bp, Artificial
  probe
  misc_feature (1)..(25): SEQ ID NO: 3550; WAN024AD8_at; Start 6; Stop 30
aacgaacaaataatatgtaaagagt

SEQ ID NO: 50871 - DNA, 25 bp, Artificial
  probe
  misc_feature (1)..(25): SEQ ID NO: 3550; WAN024AD8_at; Start 21; Stop 45
tgtaaagagtcgaggaaatccctcg

SEQ ID NO: 50872 - DNA, 25 bp, Artificial
  probe
  misc_feature (1)..(25): SEQ ID NO: 4362; WAN024AD9_at; Start 6; Stop 30
atttcctccaaatatttcctagaat

SEQ ID NO: 50873 - DNA, 25 bp, Artificial
  probe
  misc_feature (1)..(25): SEQ ID NO: 4362; WAN024AD9_at; Start 19; Stop 43
atttcctagaattgtttacttacag

SEQ ID NO: 50874 - DNA, 25 bp, Artificial
  probe
  misc_feature (1)..(25): SEQ ID NO: 4362; WAN024AD9_at; Start 12; Stop 36
tccaaatatttcctagaattgttta

SEQ ID NO: 50875 - DNA, 25 bp, Artificial
  probe
  misc_feature (1)..(25): SEQ ID NO: 4362; WAN024AD9_at; Start 24; Stop 48
ctagaattgtttacttacagtcaag

SEQ ID NO: 50876 - DNA, 25 bp, Artificial
  probe
  misc_feature (1)..(25): SEQ ID NO: 4362; WAN024AD9_at; Start 25; Stop 49
tagaattgtttacttacagtcaagc

SEQ ID NO: 50877 - DNA, 25 bp, Artificial
  probe
  misc_feature (1)..(25): SEQ ID NO: 4362; WAN024AD9_at; Start 8; Stop 32
ttcctccaaatatttcctagaattg

SEQ ID NO: 50878 - DNA, 25 bp, Artificial
  probe
  misc_feature (1)..(25): SEQ ID NO: 4362; WAN024AD9_at; Start 21; Stop 45
ttcctagaattgtttacttacagtc

SEQ ID NO: 50879 - DNA, 25 bp, Artificial
  probe
  misc_feature (1)..(25): SEQ ID NO: 4362; WAN024AD9_at; Start 27; Stop 51
gaattgtttacttacagtcaagcta

SEQ ID NO: 50880 - DNA, 25 bp, Artificial
  probe
  misc_feature (1)..(25): SEQ ID NO: 4362; WAN024AD9_at; Start 9; Stop 33
tcctccaaatatttcctagaattgt

SEQ ID NO: 50881 - DNA, 25 bp, Artificial
  probe
  misc_feature (1)..(25): SEQ ID NO: 4362; WAN024AD9_at; Start 5; Stop 29
tatttcctccaaatatttcctagaa

SEQ ID NO: 50882 - DNA, 25 bp, Artificial
  probe
  misc_feature (1)..(25): SEQ ID NO: 4362; WAN024AD9_at; Start 18; Stop 42
tatttcctagaattgtttacttaca

SEQ ID NO: 50883 - DNA, 25 bp, Artificial
  probe
  misc_feature (1)..(25): SEQ ID NO: 4362; WAN024AD9_at; Start 23; Stop 47
cctagaattgtttacttacagtcaa

SEQ ID NO: 50884 - DNA, 25 bp, Artificial
  probe
  misc_feature (1)..(25): SEQ ID NO: 4362; WAN024AD9_at; Start 10; Stop 34
cctccaaatatttcctagaattgtt

SEQ ID NO: 50885 - DNA, 25 bp, Artificial
  probe
  misc_feature (1)..(25): SEQ ID NO: 4362; WAN024AD9_at; Start 11; Stop 35
ctccaaatatttcctagaattgttt

SEQ ID NO: 50886 - DNA, 25 bp, Artificial
  probe
  misc_feature (1)..(25): SEQ ID NO: 4362; WAN024AD9_at; Start 26; Stop 50
agaattgtttacttacagtcaagct

SEQ ID NO: 50887 - DNA, 25 bp, Artificial
  probe
  misc_feature (1)..(25): SEQ ID NO: 4362; WAN024AD9_at; Start 14; Stop 38
caaatatttcctagaattgtttact

SEQ ID NO: 50888 - DNA, 25 bp, Artificial
  probe
  misc_feature (1)..(25): SEQ ID NO: 4362; WAN024AD9_at; Start 22; Stop 46
tcctagaattgtttacttacagtca

SEQ ID NO: 50889 - DNA, 25 bp, Artificial
  probe
  misc_feature (1)..(25): SEQ ID NO: 4513; WAN024ADA_at; Start 19; Stop 43
acaattctaggaaatatttggagga

SEQ ID NO: 50890 - DNA, 25 bp, Artificial
  probe
  misc_feature (1)..(25): SEQ ID NO: 4513; WAN024ADA_at; Start 4; Stop 28
cttgactgtaagtaaacaattctag

SEQ ID NO: 50891 - DNA, 25 bp, Artificial
  probe
  misc_feature (1)..(25): SEQ ID NO: 4513; WAN024ADA_at; Start 7; Stop 31
gactgtaagtaaacaattctaggaa

SEQ ID NO: 50892 - DNA, 25 bp, Artificial
  probe
  misc_feature (1)..(25): SEQ ID NO: 4513; WAN024ADA_at; Start 18; Stop 42
aacaattctaggaaatatttggagg

SEQ ID NO: 50893 - DNA, 25 bp, Artificial
  probe
  misc_feature (1)..(25): SEQ ID NO: 4513; WAN024ADA_at; Start 14; Stop 38
agtaaacaattctaggaaatatttg

SEQ ID NO: 50894 - DNA, 25 bp, Artificial
  probe
  misc_feature (1)..(25): SEQ ID NO: 4513; WAN024ADA_at; Start 17; Stop 41
aaacaattctaggaaatatttggag

SEQ ID NO: 50895 - DNA, 25 bp, Artificial
  probe
  misc_feature (1)..(25): SEQ ID NO: 4513; WAN024ADA_at; Start 23; Stop 47
ttctaggaaatatttggaggaaata

SEQ ID NO: 50896 - DNA, 25 bp, Artificial
  probe
  misc_feature (1)..(25): SEQ ID NO: 4513; WAN024ADA_at; Start 22; Stop 46
attctaggaaatatttggaggaaat

SEQ ID NO: 50897 - DNA, 25 bp, Artificial
  probe
  misc_feature (1)..(25): SEQ ID NO: 4513; WAN024ADA_at; Start 10; Stop 34
tgtaagtaaacaattctaggaaata

SEQ ID NO: 50898 - DNA, 25 bp, Artificial
  probe
  misc_feature (1)..(25): SEQ ID NO: 4513; WAN024ADA_at; Start 6; Stop 30
tgactgtaagtaaacaattctagga

SEQ ID NO: 50899 - DNA, 25 bp, Artificial
  probe
  misc_feature (1)..(25): SEQ ID NO: 4513; WAN024ADA_at; Start 2; Stop 26
agcttgactgtaagtaaacaattct

SEQ ID NO: 50900 - DNA, 25 bp, Artificial
  probe
  misc_feature (1)..(25): SEQ ID NO: 4513; WAN024ADA_at; Start 20; Stop 44
caattctaggaaatatttggaggaa

SEQ ID NO: 50901 - DNA, 25 bp, Artificial
  probe
  misc_feature (1)..(25): SEQ ID NO: 4513; WAN024ADA_at; Start 16; Stop 40
taaacaattctaggaaatatttgga

SEQ ID NO: 50902 - DNA, 25 bp, Artificial
  probe
  misc_feature (1)..(25): SEQ ID NO: 4513; WAN024ADA_at; Start 5; Stop 29
ttgactgtaagtaaacaattctagg

SEQ ID NO: 50903 - DNA, 25 bp, Artificial
  probe
  misc_feature (1)..(25): SEQ ID NO: 4513; WAN024ADA_at; Start 9; Stop 33
ctgtaagtaaacaattctaggaaat

SEQ ID NO: 50904 - DNA, 25 bp, Artificial
  probe
  misc_feature (1)..(25): SEQ ID NO: 4513; WAN024ADA_at; Start 3; Stop 27
gcttgactgtaagtaaacaattcta

SEQ ID NO: 50905 - DNA, 25 bp, Artificial
  probe
  misc_feature (1)..(25): SEQ ID NO: 4513; WAN024ADA_at; Start 1; Stop 25
tagcttgactgtaagtaaacaattc

SEQ ID NO: 50906 - DNA, 25 bp, Artificial
  probe
  misc_feature (1)..(25): SEQ ID NO: 3265; WAN024ADB_at; Start 37; Stop 61
agggccaggcaacttaatgtcacaa

SEQ ID NO: 50907 - DNA, 25 bp, Artificial
  probe
  misc_feature (1)..(25): SEQ ID NO: 3265; WAN024ADB_at; Start 23; Stop 47
aacttttcatccgtagggccaggca

SEQ ID NO: 50908 - DNA, 25 bp, Artificial
  probe
  misc_feature (1)..(25): SEQ ID NO: 3265; WAN024ADB_at; Start 26; Stop 50
ttttcatccgtagggccaggcaact

SEQ ID NO: 50909 - DNA, 25 bp, Artificial
  probe
  misc_feature (1)..(25): SEQ ID NO: 3265; WAN024ADB_at; Start 59; Stop 83
caaggcgagaagctctcacttctgc

SEQ ID NO: 50910 - DNA, 25 bp, Artificial
  probe
  misc_feature (1)..(25): SEQ ID NO: 3265; WAN024ADB_at; Start 38; Stop 62
gggccaggcaacttaatgtcacaag

SEQ ID NO: 50911 - DNA, 25 bp, Artificial
  probe
  misc_feature (1)..(25): SEQ ID NO: 3265; WAN024ADB_at; Start 36; Stop 60
tagggccaggcaacttaatgtcaca

SEQ ID NO: 50912 - DNA, 25 bp, Artificial
  probe
  misc_feature (1)..(25): SEQ ID NO: 3265; WAN024ADB_at; Start 25; Stop 49
cttttcatccgtagggccaggcaac

SEQ ID NO: 50913 - DNA, 25 bp, Artificial
  probe
  misc_feature (1)..(25): SEQ ID NO: 3265; WAN024ADB_at; Start 32; Stop 56
tccgtagggccaggcaacttaatgt

SEQ ID NO: 50914 - DNA, 25 bp, Artificial
  probe
  misc_feature (1)..(25): SEQ ID NO: 3265; WAN024ADB_at; Start 75; Stop 99
cacttctgcttttctcaacttttat

SEQ ID NO: 50915 - DNA, 25 bp, Artificial
  probe
  misc_feature (1)..(25): SEQ ID NO: 3265; WAN024ADB_at; Start 44; Stop 68
ggcaacttaatgtcacaaggcgaga

SEQ ID NO: 50916 - DNA, 25 bp, Artificial
  probe
  misc_feature (1)..(25): SEQ ID NO: 3265; WAN024ADB_at; Start 41; Stop 65
ccaggcaacttaatgtcacaaggcg

SEQ ID NO: 50917 - DNA, 25 bp, Artificial
  probe
  misc_feature (1)..(25): SEQ ID NO: 3265; WAN024ADB_at; Start 69; Stop 93
agctctcacttctgcttttctcaac

SEQ ID NO: 50918 - DNA, 25 bp, Artificial
  probe
  misc_feature (1)..(25): SEQ ID NO: 3265; WAN024ADB_at; Start 46; Stop 70
caacttaatgtcacaaggcgagaag

SEQ ID NO: 50919 - DNA, 25 bp, Artificial
  probe
  misc_feature (1)..(25): SEQ ID NO: 3265; WAN024ADB_at; Start 39; Stop 63
ggccaggcaacttaatgtcacaagg

SEQ ID NO: 50920 - DNA, 25 bp, Artificial
  probe
  misc_feature (1)..(25): SEQ ID NO: 3265; WAN024ADB_at; Start 53; Stop 77
atgtcacaaggcgagaagctctcac

SEQ ID NO: 50921 - DNA, 25 bp, Artificial
  probe
  misc_feature (1)..(25): SEQ ID NO: 3265; WAN024ADB_at; Start 62; Stop 86
ggcgagaagctctcacttctgcttt

SEQ ID NO: 50922 - DNA, 25 bp, Artificial
  probe
  misc_feature (1)..(25): SEQ ID NO: 3265; WAN024ADB_at; Start 7; Stop 31
gatagcgtttcttcgaaacttttca

SEQ ID NO: 50923 - DNA, 25 bp, Artificial
  probe
  misc_feature (1)..(25): SEQ ID NO: 3265; WAN024ADB_at; Start 1; Stop 25
cgttatgatagcgtttcttcgaaac

SEQ ID NO: 50924 - DNA, 25 bp, Artificial
  probe
  misc_feature (1)..(25): SEQ ID NO: 3265; WAN024ADB_at; Start 49; Stop 73
cttaatgtcacaaggcgagaagctc

SEQ ID NO: 50925 - DNA, 25 bp, Artificial
  probe
  misc_feature (1)..(25): SEQ ID NO: 3265; WAN024ADB_at; Start 24; Stop 48
acttttcatccgtagggccaggcaa

SEQ ID NO: 50926 - DNA, 25 bp, Artificial
  probe
  misc_feature (1)..(25): SEQ ID NO: 3265; WAN024ADB_at; Start 50; Stop 74
ttaatgtcacaaggcgagaagctct

SEQ ID NO: 50927 - DNA, 25 bp, Artificial
  probe
  misc_feature (1)..(25): SEQ ID NO: 3265; WAN024ADB_at; Start 67; Stop 91
gaagctctcacttctgcttttctca

SEQ ID NO: 50928 - DNA, 25 bp, Artificial
  probe
  misc_feature (1)..(25): SEQ ID NO: 3265; WAN024ADB_at; Start 54; Stop 78
tgtcacaaggcgagaagctctcact

SEQ ID NO: 50929 - DNA, 25 bp, Artificial
  probe
  misc_feature (1)..(25): SEQ ID NO: 3265; WAN024ADB_at; Start 60; Stop 84
aaggcgagaagctctcacttctgct

SEQ ID NO: 50930 - DNA, 25 bp, Artificial
  probe
  misc_feature (1)..(25): SEQ ID NO: 3265; WAN024ADB_at; Start 19; Stop 43
tcgaaacttttcatccgtagggcca

SEQ ID NO: 50931 - DNA, 25 bp, Artificial
  probe
  misc_feature (1)..(25): SEQ ID NO: 3265; WAN024ADB_at; Start 20; Stop 44
cgaaacttttcatccgtagggccag

SEQ ID NO: 50932 - DNA, 25 bp, Artificial
  probe
  misc_feature (1)..(25): SEQ ID NO: 3265; WAN024ADB_at; Start 30; Stop 54
catccgtagggccaggcaacttaat

SEQ ID NO: 50933 - DNA, 25 bp, Artificial
  probe
  misc_feature (1)..(25): SEQ ID NO: 3265; WAN024ADB_at; Start 47; Stop 71
aacttaatgtcacaaggcgagaagc

SEQ ID NO: 50934 - DNA, 25 bp, Artificial
  probe
  misc_feature (1)..(25): SEQ ID NO: 3265; WAN024ADB_at; Start 45; Stop 69
gcaacttaatgtcacaaggcgagaa

SEQ ID NO: 50935 - DNA, 25 bp, Artificial
  probe
  misc_feature (1)..(25): SEQ ID NO: 3265; WAN024ADB_at; Start 56; Stop 80
tcacaaggcgagaagctctcacttc

SEQ ID NO: 50936 - DNA, 25 bp, Artificial
  probe
  misc_feature (1)..(25): SEQ ID NO: 3265; WAN024ADB_at; Start 64; Stop 88
cgagaagctctcacttctgcttttc

SEQ ID NO: 50937 - DNA, 25 bp, Artificial
  probe
  misc_feature (1)..(25): SEQ ID NO: 3265; WAN024ADB_at; Start 42; Stop 66
caggcaacttaatgtcacaaggcga

SEQ ID NO: 50938 - DNA, 25 bp, Artificial
  probe
  misc_feature (1)..(25): SEQ ID NO: 3265; WAN024ADB_at; Start 35; Stop 59
gtagggccaggcaacttaatgtcac

SEQ ID NO: 50939 - DNA, 25 bp, Artificial
  probe
  misc_feature (1)..(25): SEQ ID NO: 3265; WAN024ADB_at; Start 34; Stop 58
cgtagggccaggcaacttaatgtca

SEQ ID NO: 50940 - DNA, 25 bp, Artificial
  probe
  misc_feature (1)..(25): SEQ ID NO: 524; WAN024ADC_at; Start 56; Stop 80
ctggccctacggatgaaaagtttcg

SEQ ID NO: 50941 - DNA, 25 bp, Artificial
  probe
  misc_feature (1)..(25): SEQ ID NO: 524; WAN024ADC_at; Start 34; Stop 58
tcgccttgtgacattaagttgcctg

SEQ ID NO: 50942 - DNA, 25 bp, Artificial
  probe
  misc_feature (1)..(25): SEQ ID NO: 524; WAN024ADC_at; Start 37; Stop 61
ccttgtgacattaagttgcctggcc

SEQ ID NO: 50943 - DNA, 25 bp, Artificial
  probe
  misc_feature (1)..(25): SEQ ID NO: 524; WAN024ADC_at; Start 52; Stop 76
ttgcctggccctacggatgaaaagt

SEQ ID NO: 50944 - DNA, 25 bp, Artificial
  probe
  misc_feature (1)..(25): SEQ ID NO: 524; WAN024ADC_at; Start 67; Stop 91
gatgaaaagtttcgaagaaacgcta

SEQ ID NO: 50945 - DNA, 25 bp, Artificial
  probe
  misc_feature (1)..(25): SEQ ID NO: 524; WAN024ADC_at; Start 50; Stop 74
agttgcctggccctacggatgaaaa

SEQ ID NO: 50946 - DNA, 25 bp, Artificial
  probe
  misc_feature (1)..(25): SEQ ID NO: 524; WAN024ADC_at; Start 32; Stop 56
tctcgccttgtgacattaagttgcc

SEQ ID NO: 50947 - DNA, 25 bp, Artificial
  probe
  misc_feature (1)..(25): SEQ ID NO: 524; WAN024ADC_at; Start 57; Stop 81
tggccctacggatgaaaagtttcga

SEQ ID NO: 50948 - DNA, 25 bp, Artificial
  probe
  misc_feature (1)..(25): SEQ ID NO: 524; WAN024ADC_at; Start 12; Stop 36
gaaaagcagaagtgagagcttctcg

SEQ ID NO: 50949 - DNA, 25 bp, Artificial
  probe
  misc_feature (1)..(25): SEQ ID NO: 524; WAN024ADC_at; Start 38; Stop 62
cttgtgacattaagttgcctggccc

SEQ ID NO: 50950 - DNA, 25 bp, Artificial
  probe
  misc_feature (1)..(25): SEQ ID NO: 524; WAN024ADC_at; Start 46; Stop 70
attaagttgcctggccctacggatg

SEQ ID NO: 50951 - DNA, 25 bp, Artificial
  probe
  misc_feature (1)..(25): SEQ ID NO: 524; WAN024ADC_at; Start 75; Stop 99
gtttcgaagaaacgctatcataacg

SEQ ID NO: 50952 - DNA, 25 bp, Artificial
  probe
  misc_feature (1)..(25): SEQ ID NO: 524; WAN024ADC_at; Start 14; Stop 38
aaagcagaagtgagagcttctcgcc

SEQ ID NO: 50953 - DNA, 25 bp, Artificial
  probe
  misc_feature (1)..(25): SEQ ID NO: 524; WAN024ADC_at; Start 44; Stop 68
acattaagttgcctggccctacgga

SEQ ID NO: 50954 - DNA, 25 bp, Artificial
  probe
  misc_feature (1)..(25): SEQ ID NO: 524; WAN024ADC_at; Start 42; Stop 66
tgacattaagttgcctggccctacg

SEQ ID NO: 50955 - DNA, 25 bp, Artificial
  probe
  misc_feature (1)..(25): SEQ ID NO: 524; WAN024ADC_at; Start 7; Stop 31
gttgagaaaagcagaagtgagagct

SEQ ID NO: 50956 - DNA, 25 bp, Artificial
  probe
  misc_feature (1)..(25): SEQ ID NO: 524; WAN024ADC_at; Start 40; Stop 64
tgtgacattaagttgcctggcccta

SEQ ID NO: 50957 - DNA, 25 bp, Artificial
  probe
  misc_feature (1)..(25): SEQ ID NO: 524; WAN024ADC_at; Start 27; Stop 51
gagcttctcgccttgtgacattaag

SEQ ID NO: 50958 - DNA, 25 bp, Artificial
  probe
  misc_feature (1)..(25): SEQ ID NO: 524; WAN024ADC_at; Start 41; Stop 65
gtgacattaagttgcctggccctac

SEQ ID NO: 50959 - DNA, 25 bp, Artificial
  probe
  misc_feature (1)..(25): SEQ ID NO: 524; WAN024ADC_at; Start 70; Stop 94
gaaaagtttcgaagaaacgctatca

SEQ ID NO: 50960 - DNA, 25 bp, Artificial
  probe
  misc_feature (1)..(25): SEQ ID NO: 524; WAN024ADC_at; Start 45; Stop 69
cattaagttgcctggccctacggat

SEQ ID NO: 50961 - DNA, 25 bp, Artificial
  probe
  misc_feature (1)..(25): SEQ ID NO: 524; WAN024ADC_at; Start 18; Stop 42
cagaagtgagagcttctcgccttgt

SEQ ID NO: 50962 - DNA, 25 bp, Artificial
  probe
  misc_feature (1)..(25): SEQ ID NO: 524; WAN024ADC_at; Start 26; Stop 50
agagcttctcgccttgtgacattaa

SEQ ID NO: 50963 - DNA, 25 bp, Artificial
  probe
  misc_feature (1)..(25): SEQ ID NO: 524; WAN024ADC_at; Start 17; Stop 41
gcagaagtgagagcttctcgccttg

SEQ ID NO: 50964 - DNA, 25 bp, Artificial
  probe
  misc_feature (1)..(25): SEQ ID NO: 524; WAN024ADC_at; Start 23; Stop 47
gtgagagcttctcgccttgtgacat

SEQ ID NO: 50965 - DNA, 25 bp, Artificial
  probe
  misc_feature (1)..(25): SEQ ID NO: 524; WAN024ADC_at; Start 22; Stop 46
agtgagagcttctcgccttgtgaca

SEQ ID NO: 50966 - DNA, 25 bp, Artificial
  probe
  misc_feature (1)..(25): SEQ ID NO: 524; WAN024ADC_at; Start 20; Stop 44
gaagtgagagcttctcgccttgtga

SEQ ID NO: 50967 - DNA, 25 bp, Artificial
  probe
  misc_feature (1)..(25): SEQ ID NO: 524; WAN024ADC_at; Start 9; Stop 33
tgagaaaagcagaagtgagagcttc

SEQ ID NO: 50968 - DNA, 25 bp, Artificial
  probe
  misc_feature (1)..(25): SEQ ID NO: 524; WAN024ADC_at; Start 15; Stop 39
aagcagaagtgagagcttctcgcct

SEQ ID NO: 50969 - DNA, 25 bp, Artificial
  probe
  misc_feature (1)..(25): SEQ ID NO: 524; WAN024ADC_at; Start 39; Stop 63
ttgtgacattaagttgcctggccct

SEQ ID NO: 50970 - DNA, 25 bp, Artificial
  probe
  misc_feature (1)..(25): SEQ ID NO: 524; WAN024ADC_at; Start 35; Stop 59
cgccttgtgacattaagttgcctgg

SEQ ID NO: 50971 - DNA, 25 bp, Artificial
  probe
  misc_feature (1)..(25): SEQ ID NO: 524; WAN024ADC_at; Start 51; Stop 75
gttgcctggccctacggatgaaaag

SEQ ID NO: 50972 - DNA, 25 bp, Artificial
  probe
  misc_feature (1)..(25): SEQ ID NO: 524; WAN024ADC_at; Start 53; Stop 77
tgcctggccctacggatgaaaagtt

SEQ ID NO: 50973 - DNA, 25 bp, Artificial
  probe
  misc_feature (1)..(25): SEQ ID NO: 524; WAN024ADC_at; Start 29; Stop 53
gcttctcgccttgtgacattaagtt

SEQ ID NO: 50974 - DNA, 25 bp, Artificial
  probe
  misc_feature (1)..(25): SEQ ID NO: 444; WAN024ADD_at; Start 11; Stop 35
ctggactgaagaagaccaatagatt

SEQ ID NO: 50975 - DNA, 25 bp, Artificial
  probe
  misc_feature (1)..(25): SEQ ID NO: 444; WAN024ADD_at; Start 41; Stop 65
ctaactaataaaacaacttttgctg

SEQ ID NO: 50976 - DNA, 25 bp, Artificial
  probe
  misc_feature (1)..(25): SEQ ID NO: 444; WAN024ADD_at; Start 113; Stop 137
ccatttttatcattattatgcaaca

SEQ ID NO: 50977 - DNA, 25 bp, Artificial
  probe
  misc_feature (1)..(25): SEQ ID NO: 444; WAN024ADD_at; Start 43; Stop 67
aactaataaaacaacttttgctgat

SEQ ID NO: 50978 - DNA, 25 bp, Artificial
  probe
  misc_feature (1)..(25): SEQ ID NO: 444; WAN024ADD_at; Start 3; Stop 27
cagatacactggactgaagaagacc

SEQ ID NO: 50979 - DNA, 25 bp, Artificial
  probe
  misc_feature (1)..(25): SEQ ID NO: 444; WAN024ADD_at; Start 21; Stop 45
gaagaccaatagattataaactaac

SEQ ID NO: 50980 - DNA, 25 bp, Artificial
  probe
  misc_feature (1)..(25): SEQ ID NO: 444; WAN024ADD_at; Start 154; Stop 178
cactaatctacaacatttatccttc

SEQ ID NO: 50981 - DNA, 25 bp, Artificial
  probe
  misc_feature (1)..(25): SEQ ID NO: 444; WAN024ADD_at; Start 10; Stop 34
actggactgaagaagaccaatagat

SEQ ID NO: 50982 - DNA, 25 bp, Artificial
  probe
  misc_feature (1)..(25): SEQ ID NO: 444; WAN024ADD_at; Start 52; Stop 76
aacaacttttgctgatttttaatga

SEQ ID NO: 50983 - DNA, 25 bp, Artificial
  probe
  misc_feature (1)..(25): SEQ ID NO: 444; WAN024ADD_at; Start 5; Stop 29
gatacactggactgaagaagaccaa

SEQ ID NO: 50984 - DNA, 25 bp, Artificial
  probe
  misc_feature (1)..(25): SEQ ID NO: 444; WAN024ADD_at; Start 71; Stop 95
taatgattttatatcctcaatattg

SEQ ID NO: 50985 - DNA, 25 bp, Artificial
  probe
  misc_feature (1)..(25): SEQ ID NO: 444; WAN024ADD_at; Start 18; Stop 42
gaagaagaccaatagattataaact

SEQ ID NO: 50986 - DNA, 25 bp, Artificial
  probe
  misc_feature (1)..(25): SEQ ID NO: 444; WAN024ADD_at; Start 122; Stop 146
tcattattatgcaacaaatttttag

SEQ ID NO: 50987 - DNA, 25 bp, Artificial
  probe
  misc_feature (1)..(25): SEQ ID NO: 444; WAN024ADD_at; Start 4; Stop 28
agatacactggactgaagaagacca

SEQ ID NO: 50988 - DNA, 25 bp, Artificial
  probe
  misc_feature (1)..(25): SEQ ID NO: 444; WAN024ADD_at; Start 80; Stop 104
tatatcctcaatattgaatacgttt

SEQ ID NO: 50989 - DNA, 25 bp, Artificial
  probe
  misc_feature (1)..(25): SEQ ID NO: 444; WAN024ADD_at; Start 12; Stop 36
tggactgaagaagaccaatagatta

SEQ ID NO: 50990 - DNA, 25 bp, Artificial
  probe
  misc_feature (1)..(25): SEQ ID NO: 444; WAN024ADD_at; Start 151; Stop 175
tttcactaatctacaacatttatcc

SEQ ID NO: 50991 - DNA, 25 bp, Artificial
  probe
  misc_feature (1)..(25): SEQ ID NO: 444; WAN024ADD_at; Start 77; Stop 101
ttttatatcctcaatattgaatacg

SEQ ID NO: 50992 - DNA, 25 bp, Artificial
  probe
  misc_feature (1)..(25): SEQ ID NO: 444; WAN024ADD_at; Start 6; Stop 30
atacactggactgaagaagaccaat

SEQ ID NO: 50993 - DNA, 25 bp, Artificial
  probe
  misc_feature (1)..(25): SEQ ID NO: 444; WAN024ADD_at; Start 42; Stop 66
taactaataaaacaacttttgctga

SEQ ID NO: 50994 - DNA, 25 bp, Artificial
  probe
  misc_feature (1)..(25): SEQ ID NO: 444; WAN024ADD_at; Start 2; Stop 26
gcagatacactggactgaagaagac

SEQ ID NO: 50995 - DNA, 25 bp, Artificial
  probe
  misc_feature (1)..(25): SEQ ID NO: 444; WAN024ADD_at; Start 24; Stop 48
gaccaatagattataaactaactaa

SEQ ID NO: 50996 - DNA, 25 bp, Artificial
  probe
  misc_feature (1)..(25): SEQ ID NO: 444; WAN024ADD_at; Start 8; Stop 32
acactggactgaagaagaccaatag

SEQ ID NO: 50997 - DNA, 25 bp, Artificial
  probe
  misc_feature (1)..(25): SEQ ID NO: 444; WAN024ADD_at; Start 17; Stop 41
tgaagaagaccaatagattataaac

SEQ ID NO: 50998 - DNA, 25 bp, Artificial
  probe
  misc_feature (1)..(25): SEQ ID NO: 444; WAN024ADD_at; Start 7; Stop 31
tacactggactgaagaagaccaata

SEQ ID NO: 50999 - DNA, 25 bp, Artificial
  probe
  misc_feature (1)..(25): SEQ ID NO: 444; WAN024ADD_at; Start 13; Stop 37
ggactgaagaagaccaatagattat

SEQ ID NO: 51000 - DNA, 25 bp, Artificial
  probe
  misc_feature (1)..(25): SEQ ID NO: 444; WAN024ADD_at; Start 9; Stop 33
cactggactgaagaagaccaataga

SEQ ID NO: 51001 - DNA, 25 bp, Artificial
  probe
  misc_feature (1)..(25): SEQ ID NO: 444; WAN024ADD_at; Start 54; Stop 78
caacttttgctgatttttaatgatt

SEQ ID NO: 51002 - DNA, 25 bp, Artificial
  probe
  misc_feature (1)..(25): SEQ ID NO: 444; WAN024ADD_at; Start 131; Stop 155
tgcaacaaatttttagtttatttca

SEQ ID NO: 51003 - DNA, 25 bp, Artificial
  probe
  misc_feature (1)..(25): SEQ ID NO: 444; WAN024ADD_at; Start 144; Stop 168
tagtttatttcactaatctacaaca

SEQ ID NO: 51004 - DNA, 25 bp, Artificial
  probe
  misc_feature (1)..(25): SEQ ID NO: 444; WAN024ADD_at; Start 1; Stop 25
agcagatacactggactgaagaaga

SEQ ID NO: 51005 - DNA, 25 bp, Artificial
  probe
  misc_feature (1)..(25): SEQ ID NO: 444; WAN024ADD_at; Start 14; Stop 38
gactgaagaagaccaatagattata

SEQ ID NO: 51006 - DNA, 25 bp, Artificial
  probe
  misc_feature (1)..(25): SEQ ID NO: 444; WAN024ADD_at; Start 65; Stop 89
gatttttaatgattttatatcctca

SEQ ID NO: 51007 - DNA, 25 bp, Artificial
  probe
  misc_feature (1)..(25): SEQ ID NO: 444; WAN024ADD_at; Start 15; Stop 39
actgaagaagaccaatagattataa

SEQ ID NO: 51008 - DNA, 25 bp, Artificial
  probe
  misc_feature (1)..(25): SEQ ID NO: 3558; WAN024ADE_at; Start 153; Stop 177
gtcttcttcagtccagtgtatctgc

SEQ ID NO: 51009 - DNA, 25 bp, Artificial
  probe
  misc_feature (1)..(25): SEQ ID NO: 3558; WAN024ADE_at; Start 151; Stop 175
tggtcttcttcagtccagtgtatct

SEQ ID NO: 51010 - DNA, 25 bp, Artificial
  probe
  misc_feature (1)..(25): SEQ ID NO: 3558; WAN024ADE_at; Start 4; Stop 28
ggataaatgttgtagattagtgaaa

SEQ ID NO: 51011 - DNA, 25 bp, Artificial
  probe
  misc_feature (1)..(25): SEQ ID NO: 3558; WAN024ADE_at; Start 80; Stop 104
tattcaatattgaggatataaaatc

SEQ ID NO: 51012 - DNA, 25 bp, Artificial
  probe
  misc_feature (1)..(25): SEQ ID NO: 3558; WAN024ADE_at; Start 78; Stop 102
cgtattcaatattgaggatataaaa

SEQ ID NO: 51013 - DNA, 25 bp, Artificial
  probe
  misc_feature (1)..(25): SEQ ID NO: 3558; WAN024ADE_at; Start 143; Stop 167
taatctattggtcttcttcagtcca

SEQ ID NO: 51014 - DNA, 25 bp, Artificial
  probe
  misc_feature (1)..(25): SEQ ID NO: 3558; WAN024ADE_at; Start 11; Stop 35
tgttgtagattagtgaaataaacta

SEQ ID NO: 51015 - DNA, 25 bp, Artificial
  probe
  misc_feature (1)..(25): SEQ ID NO: 3558; WAN024ADE_at; Start 141; Stop 165
tataatctattggtcttcttcagtc

SEQ ID NO: 51016 - DNA, 25 bp, Artificial
  probe
  misc_feature (1)..(25): SEQ ID NO: 3558; WAN024ADE_at; Start 24; Stop 48
tgaaataaactaaaaatttgttgca

SEQ ID NO: 51017 - DNA, 25 bp, Artificial
  probe
  misc_feature (1)..(25): SEQ ID NO: 3558; WAN024ADE_at; Start 132; Stop 156
tagttagtttataatctattggtct

SEQ ID NO: 51018 - DNA, 25 bp, Artificial
  probe
  misc_feature (1)..(25): SEQ ID NO: 3558; WAN024ADE_at; Start 84; Stop 108
caatattgaggatataaaatcatta

SEQ ID NO: 51019 - DNA, 25 bp, Artificial
  probe
  misc_feature (1)..(25): SEQ ID NO: 3558; WAN024ADE_at; Start 104; Stop 128
cattaaaaatcagcaaaagttgttt

SEQ ID NO: 51020 - DNA, 25 bp, Artificial
  probe
  misc_feature (1)..(25): SEQ ID NO: 3558; WAN024ADE_at; Start 74; Stop 98
aaaacgtattcaatattgaggatat

SEQ ID NO: 51021 - DNA, 25 bp, Artificial
  probe
  misc_feature (1)..(25): SEQ ID NO: 3558; WAN024ADE_at; Start 152; Stop 176
ggtcttcttcagtccagtgtatctg

SEQ ID NO: 51022 - DNA, 25 bp, Artificial
  probe
  misc_feature (1)..(25): SEQ ID NO: 3558; WAN024ADE_at; Start 45; Stop 69
tgcataataatgataaaaatggtat

SEQ ID NO: 51023 - DNA, 25 bp, Artificial
  probe
  misc_feature (1)..(25): SEQ ID NO: 3558; WAN024ADE_at; Start 147; Stop 171
ctattggtcttcttcagtccagtgt

SEQ ID NO: 51024 - DNA, 25 bp, Artificial
  probe
  misc_feature (1)..(25): SEQ ID NO: 3558; WAN024ADE_at; Start 9; Stop 33
aatgttgtagattagtgaaataaac

SEQ ID NO: 51025 - DNA, 25 bp, Artificial
  probe
  misc_feature (1)..(25): SEQ ID NO: 3558; WAN024ADE_at; Start 1; Stop 25
gaaggataaatgttgtagattagtg

SEQ ID NO: 51026 - DNA, 25 bp, Artificial
  probe
  misc_feature (1)..(25): SEQ ID NO: 3558; WAN024ADE_at; Start 114; Stop 138
cagcaaaagttgttttattagttag

SEQ ID NO: 51027 - DNA, 25 bp, Artificial
  probe
  misc_feature (1)..(25): SEQ ID NO: 3558; WAN024ADE_at; Start 145; Stop 169
atctattggtcttcttcagtccagt

SEQ ID NO: 51028 - DNA, 25 bp, Artificial
  probe
  misc_feature (1)..(25): SEQ ID NO: 3558; WAN024ADE_at; Start 150; Stop 174
ttggtcttcttcagtccagtgtatc

SEQ ID NO: 51029 - DNA, 25 bp, Artificial
  probe
  misc_feature (1)..(25): SEQ ID NO: 3558; WAN024ADE_at; Start 148; Stop 172
tattggtcttcttcagtccagtgta

SEQ ID NO: 51030 - DNA, 25 bp, Artificial
  probe
  misc_feature (1)..(25): SEQ ID NO: 3558; WAN024ADE_at; Start 154; Stop 178
tcttcttcagtccagtgtatctgct

SEQ ID NO: 51031 - DNA, 25 bp, Artificial
  probe
  misc_feature (1)..(25): SEQ ID NO: 3558; WAN024ADE_at; Start 42; Stop 66
tgttgcataataatgataaaaatgg

SEQ ID NO: 51032 - DNA, 25 bp, Artificial
  probe
  misc_feature (1)..(25): SEQ ID NO: 3558; WAN024ADE_at; Start 144; Stop 168
aatctattggtcttcttcagtccag

SEQ ID NO: 51033 - DNA, 25 bp, Artificial
  probe
  misc_feature (1)..(25): SEQ ID NO: 3558; WAN024ADE_at; Start 47; Stop 71
cataataatgataaaaatggtataa

SEQ ID NO: 51034 - DNA, 25 bp, Artificial
  probe
  misc_feature (1)..(25): SEQ ID NO: 3558; WAN024ADE_at; Start 103; Stop 127
tcattaaaaatcagcaaaagttgtt

SEQ ID NO: 51035 - DNA, 25 bp, Artificial
  probe
  misc_feature (1)..(25): SEQ ID NO: 3558; WAN024ADE_at; Start 33; Stop 57
ctaaaaatttgttgcataataatga

SEQ ID NO: 51036 - DNA, 25 bp, Artificial
  probe
  misc_feature (1)..(25): SEQ ID NO: 3558; WAN024ADE_at; Start 98; Stop 122
taaaatcattaaaaatcagcaaaag

SEQ ID NO: 51037 - DNA, 25 bp, Artificial
  probe
  misc_feature (1)..(25): SEQ ID NO: 3558; WAN024ADE_at; Start 101; Stop 125
aatcattaaaaatcagcaaaagttg

SEQ ID NO: 51038 - DNA, 25 bp, Artificial
  probe
  misc_feature (1)..(25): SEQ ID NO: 3558; WAN024ADE_at; Start 142; Stop 166
ataatctattggtcttcttcagtcc

SEQ ID NO: 51039 - DNA, 25 bp, Artificial
  probe
  misc_feature (1)..(25): SEQ ID NO: 3558; WAN024ADE_at; Start 93; Stop 117
ggatataaaatcattaaaaatcagc

SEQ ID NO: 51040 - DNA, 25 bp, Artificial
  probe
  misc_feature (1)..(25): SEQ ID NO: 3558; WAN024ADE_at; Start 149; Stop 173
attggtcttcttcagtccagtgtat

SEQ ID NO: 51041 - DNA, 25 bp, Artificial
  probe
  misc_feature (1)..(25): SEQ ID NO: 3558; WAN024ADE_at; Start 146; Stop 170
tctattggtcttcttcagtccagtg

SEQ ID NO: 51042 - DNA, 25 bp, Artificial
  probe
  misc_feature (1)..(25): SEQ ID NO: 368; WAN024ADF_at; Start 98; Stop 122
gaaaccgtcacatttttgatttatg

SEQ ID NO: 51043 - DNA, 25 bp, Artificial
  probe
  misc_feature (1)..(25): SEQ ID NO: 368; WAN024ADF_at; Start 112; Stop 136
tttgatttatgaactggaatgtgac

SEQ ID NO: 51044 - DNA, 25 bp, Artificial
  probe
  misc_feature (1)..(25): SEQ ID NO: 368; WAN024ADF_at; Start 143; Stop 167
aacaagaccgtcaattgaaaggtag

SEQ ID NO: 51045 - DNA, 25 bp, Artificial
  probe
  misc_feature (1)..(25): SEQ ID NO: 368; WAN024ADF_at; Start 121; Stop 145
tgaactggaatgtgacaaccaaaac

SEQ ID NO: 51046 - DNA, 25 bp, Artificial
  probe
  misc_feature (1)..(25): SEQ ID NO: 368; WAN024ADF_at; Start 101; Stop 125
accgtcacatttttgatttatgaac

SEQ ID NO: 51047 - DNA, 25 bp, Artificial
  probe
  misc_feature (1)..(25): SEQ ID NO: 368; WAN024ADF_at; Start 122; Stop 146
gaactggaatgtgacaaccaaaaca

SEQ ID NO: 51048 - DNA, 25 bp, Artificial
  probe
  misc_feature (1)..(25): SEQ ID NO: 368; WAN024ADF_at; Start 133; Stop 157
tgacaaccaaaacaagaccgtcaat

SEQ ID NO: 51049 - DNA, 25 bp, Artificial
  probe
  misc_feature (1)..(25): SEQ ID NO: 368; WAN024ADF_at; Start 136; Stop 160
caaccaaaacaagaccgtcaattga

SEQ ID NO: 51050 - DNA, 25 bp, Artificial
  probe
  misc_feature (1)..(25): SEQ ID NO: 368; WAN024ADF_at; Start 119; Stop 143
tatgaactggaatgtgacaaccaaa

SEQ ID NO: 51051 - DNA, 25 bp, Artificial
  probe
  misc_feature (1)..(25): SEQ ID NO: 368; WAN024ADF_at; Start 151; Stop 175
cgtcaattgaaaggtaggttatctc

SEQ ID NO: 51052 - DNA, 25 bp, Artificial
  probe
  misc_feature (1)..(25): SEQ ID NO: 368; WAN024ADF_at; Start 8; Stop 32
cctccattagagcttgattttcact

SEQ ID NO: 51053 - DNA, 25 bp, Artificial
  probe
  misc_feature (1)..(25): SEQ ID NO: 368; WAN024ADF_at; Start 65; Stop 89
tttcttgatttttgaagcggtttca

SEQ ID NO: 51054 - DNA, 25 bp, Artificial
  probe
  misc_feature (1)..(25): SEQ ID NO: 368; WAN024ADF_at; Start 17; Stop 41
gagcttgattttcactagtctagca

SEQ ID NO: 51055 - DNA, 25 bp, Artificial
  probe
  misc_feature (1)..(25): SEQ ID NO: 368; WAN024ADF_at; Start 129; Stop 153
aatgtgacaaccaaaacaagaccgt

SEQ ID NO: 51056 - DNA, 25 bp, Artificial
  probe
  misc_feature (1)..(25): SEQ ID NO: 368; WAN024ADF_at; Start 67; Stop 91
tcttgatttttgaagcggtttcata

SEQ ID NO: 51057 - DNA, 25 bp, Artificial
  probe
  misc_feature (1)..(25): SEQ ID NO: 368; WAN024ADF_at; Start 77; Stop 101
tgaagcggtttcatatacaatgaaa

SEQ ID NO: 51058 - DNA, 25 bp, Artificial
  probe
  misc_feature (1)..(25): SEQ ID NO: 368; WAN024ADF_at; Start 23; Stop 47
gattttcactagtctagcataaaaa

SEQ ID NO: 51059 - DNA, 25 bp, Artificial
  probe
  misc_feature (1)..(25): SEQ ID NO: 368; WAN024ADF_at; Start 10; Stop 34
tccattagagcttgattttcactag

SEQ ID NO: 51060 - DNA, 25 bp, Artificial
  probe
  misc_feature (1)..(25): SEQ ID NO: 368; WAN024ADF_at; Start 128; Stop 152
gaatgtgacaaccaaaacaagaccg

SEQ ID NO: 51061 - DNA, 25 bp, Artificial
  probe
  misc_feature (1)..(25): SEQ ID NO: 368; WAN024ADF_at; Start 131; Stop 155
tgtgacaaccaaaacaagaccgtca

SEQ ID NO: 51062 - DNA, 25 bp, Artificial
  probe
  misc_feature (1)..(25): SEQ ID NO: 368; WAN024ADF_at; Start 106; Stop 130
cacatttttgatttatgaactggaa

SEQ ID NO: 51063 - DNA, 25 bp, Artificial
  probe
  misc_feature (1)..(25): SEQ ID NO: 368; WAN024ADF_at; Start 75; Stop 99
tttgaagcggtttcatatacaatga

SEQ ID NO: 51064 - DNA, 25 bp, Artificial
  probe
  misc_feature (1)..(25): SEQ ID NO: 368; WAN024ADF_at; Start 145; Stop 169
caagaccgtcaattgaaaggtaggt

SEQ ID NO: 51065 - DNA, 25 bp, Artificial
  probe
  misc_feature (1)..(25): SEQ ID NO: 368; WAN024ADF_at; Start 126; Stop 150
tggaatgtgacaaccaaaacaagac

SEQ ID NO: 51066 - DNA, 25 bp, Artificial
  probe
  misc_feature (1)..(25): SEQ ID NO: 368; WAN024ADF_at; Start 117; Stop 141
tttatgaactggaatgtgacaacca

SEQ ID NO: 51067 - DNA, 25 bp, Artificial
  probe
  misc_feature (1)..(25): SEQ ID NO: 368; WAN024ADF_at; Start 150; Stop 174
ccgtcaattgaaaggtaggttatct

SEQ ID NO: 51068 - DNA, 25 bp, Artificial
  probe
  misc_feature (1)..(25): SEQ ID NO: 368; WAN024ADF_at; Start 140; Stop 164
caaaacaagaccgtcaattgaaagg

SEQ ID NO: 51069 - DNA, 25 bp, Artificial
  probe
  misc_feature (1)..(25): SEQ ID NO: 368; WAN024ADF_at; Start 59; Stop 83
caagtttttcttgatttttgaagcg

SEQ ID NO: 51070 - DNA, 25 bp, Artificial
  probe
  misc_feature (1)..(25): SEQ ID NO: 368; WAN024ADF_at; Start 92; Stop 116
tacaatgaaaccgtcacatttttga

SEQ ID NO: 51071 - DNA, 25 bp, Artificial
  probe
  misc_feature (1)..(25): SEQ ID NO: 368; WAN024ADF_at; Start 152; Stop 176
gtcaattgaaaggtaggttatctca

SEQ ID NO: 51072 - DNA, 25 bp, Artificial
  probe
  misc_feature (1)..(25): SEQ ID NO: 368; WAN024ADF_at; Start 12; Stop 36
cattagagcttgattttcactagtc

SEQ ID NO: 51073 - DNA, 25 bp, Artificial
  probe
  misc_feature (1)..(25): SEQ ID NO: 368; WAN024ADF_at; Start 115; Stop 139
gatttatgaactggaatgtgacaac

SEQ ID NO: 51074 - DNA, 25 bp, Artificial
  probe
  misc_feature (1)..(25): SEQ ID NO: 368; WAN024ADF_at; Start 6; Stop 30
tccctccattagagcttgattttca

SEQ ID NO: 51075 - DNA, 25 bp, Artificial
  probe
  misc_feature (1)..(25): SEQ ID NO: 368; WAN024ADF_at; Start 19; Stop 43
gcttgattttcactagtctagcata

SEQ ID NO: 51076 - DNA, 25 bp, Artificial
  probe
  misc_feature (1)..(25): SEQ ID NO: 4684; WAN024ADG_at; Start 148; Stop 172
gaaaatcaagctctaatggagggaa

SEQ ID NO: 51077 - DNA, 25 bp, Artificial
  probe
  misc_feature (1)..(25): SEQ ID NO: 4684; WAN024ADG_at; Start 28; Stop 52
tcttgttttggttgtcacattccag

SEQ ID NO: 51078 - DNA, 25 bp, Artificial
  probe
  misc_feature (1)..(25): SEQ ID NO: 4684; WAN024ADG_at; Start 13; Stop 37
cctttcaattgacggtcttgttttg

SEQ ID NO: 51079 - DNA, 25 bp, Artificial
  probe
  misc_feature (1)..(25): SEQ ID NO: 4684; WAN024ADG_at; Start 55; Stop 79
cataaatcaaaaatgtgacggtttc

SEQ ID NO: 51080 - DNA, 25 bp, Artificial
  probe
  misc_feature (1)..(25): SEQ ID NO: 4684; WAN024ADG_at; Start 78; Stop 102
tcattgtatatgaaaccgcttcaaa

SEQ ID NO: 51081 - DNA, 25 bp, Artificial
  probe
  misc_feature (1)..(25): SEQ ID NO: 4684; WAN024ADG_at; Start 88; Stop 112
tgaaaccgcttcaaaaatcaagaaa

SEQ ID NO: 51082 - DNA, 25 bp, Artificial
  probe
  misc_feature (1)..(25): SEQ ID NO: 4684; WAN024ADG_at; Start 32; Stop 56
gttttggttgtcacattccagttca

SEQ ID NO: 51083 - DNA, 25 bp, Artificial
  probe
  misc_feature (1)..(25): SEQ ID NO: 4684; WAN024ADG_at; Start 2; Stop 26
gagataacctacctttcaattgacg

SEQ ID NO: 51084 - DNA, 25 bp, Artificial
  probe
  misc_feature (1)..(25): SEQ ID NO: 4684; WAN024ADG_at; Start 137; Stop 161
gctagactagtgaaaatcaagctct

SEQ ID NO: 51085 - DNA, 25 bp, Artificial
  probe
  misc_feature (1)..(25): SEQ ID NO: 4684; WAN024ADG_at; Start 10; Stop 34
ctacctttcaattgacggtcttgtt

SEQ ID NO: 51086 - DNA, 25 bp, Artificial
  probe
  misc_feature (1)..(25): SEQ ID NO: 4684; WAN024ADG_at; Start 3; Stop 27
agataacctacctttcaattgacgg

SEQ ID NO: 51087 - DNA, 25 bp, Artificial
  probe
  misc_feature (1)..(25): SEQ ID NO: 4684; WAN024ADG_at; Start 52; Stop 76
gttcataaatcaaaaatgtgacggt

SEQ ID NO: 51088 - DNA, 25 bp, Artificial
  probe
  misc_feature (1)..(25): SEQ ID NO: 4684; WAN024ADG_at; Start 22; Stop 46
tgacggtcttgttttggttgtcaca

SEQ ID NO: 51089 - DNA, 25 bp, Artificial
  probe
  misc_feature (1)..(25): SEQ ID NO: 4684; WAN024ADG_at; Start 94; Stop 118
cgcttcaaaaatcaagaaaaacttg

SEQ ID NO: 51090 - DNA, 25 bp, Artificial
  probe
  misc_feature (1)..(25): SEQ ID NO: 4684; WAN024ADG_at; Start 134; Stop 158
tatgctagactagtgaaaatcaagc

SEQ ID NO: 51091 - DNA, 25 bp, Artificial
  probe
  misc_feature (1)..(25): SEQ ID NO: 4684; WAN024ADG_at; Start 8; Stop 32
acctacctttcaattgacggtcttg

SEQ ID NO: 51092 - DNA, 25 bp, Artificial
  probe
  misc_feature (1)..(25): SEQ ID NO: 4684; WAN024ADG_at; Start 86; Stop 110
tatgaaaccgcttcaaaaatcaaga

SEQ ID NO: 51093 - DNA, 25 bp, Artificial
  probe
  misc_feature (1)..(25): SEQ ID NO: 4684; WAN024ADG_at; Start 145; Stop 169
agtgaaaatcaagctctaatggagg

SEQ ID NO: 51094 - DNA, 25 bp, Artificial
  probe
  misc_feature (1)..(25): SEQ ID NO: 4684; WAN024ADG_at; Start 57; Stop 81
taaatcaaaaatgtgacggtttcat

SEQ ID NO: 51095 - DNA, 25 bp, Artificial
  probe
  misc_feature (1)..(25): SEQ ID NO: 4684; WAN024ADG_at; Start 147; Stop 171
tgaaaatcaagctctaatggaggga

SEQ ID NO: 51096 - DNA, 25 bp, Artificial
  probe
  misc_feature (1)..(25): SEQ ID NO: 4684; WAN024ADG_at; Start 50; Stop 74
cagttcataaatcaaaaatgtgacg

SEQ ID NO: 51097 - DNA, 25 bp, Artificial
  probe
  misc_feature (1)..(25): SEQ ID NO: 4684; WAN024ADG_at; Start 18; Stop 42
caattgacggtcttgttttggttgt

SEQ ID NO: 51098 - DNA, 25 bp, Artificial
  probe
  misc_feature (1)..(25): SEQ ID NO: 4684; WAN024ADG_at; Start 23; Stop 47
gacggtcttgttttggttgtcacat

SEQ ID NO: 51099 - DNA, 25 bp, Artificial
  probe
  misc_feature (1)..(25): SEQ ID NO: 4684; WAN024ADG_at; Start 149; Stop 173
aaaatcaagctctaatggagggaaa

SEQ ID NO: 51100 - DNA, 25 bp, Artificial
  probe
  misc_feature (1)..(25): SEQ ID NO: 4684; WAN024ADG_at; Start 35; Stop 59
ttggttgtcacattccagttcataa

SEQ ID NO: 51101 - DNA, 25 bp, Artificial
  probe
  misc_feature (1)..(25): SEQ ID NO: 4684; WAN024ADG_at; Start 141; Stop 165
gactagtgaaaatcaagctctaatg

SEQ ID NO: 51102 - DNA, 25 bp, Artificial
  probe
  misc_feature (1)..(25): SEQ ID NO: 4684; WAN024ADG_at; Start 41; Stop 65
gtcacattccagttcataaatcaaa

SEQ ID NO: 51103 - DNA, 25 bp, Artificial
  probe
  misc_feature (1)..(25): SEQ ID NO: 4684; WAN024ADG_at; Start 61; Stop 85
tcaaaaatgtgacggtttcattgta

SEQ ID NO: 51104 - DNA, 25 bp, Artificial
  probe
  misc_feature (1)..(25): SEQ ID NO: 4684; WAN024ADG_at; Start 37; Stop 61
ggttgtcacattccagttcataaat

SEQ ID NO: 51105 - DNA, 25 bp, Artificial
  probe
  misc_feature (1)..(25): SEQ ID NO: 4684; WAN024ADG_at; Start 43; Stop 67
cacattccagttcataaatcaaaaa

SEQ ID NO: 51106 - DNA, 25 bp, Artificial
  probe
  misc_feature (1)..(25): SEQ ID NO: 4684; WAN024ADG_at; Start 25; Stop 49
cggtcttgttttggttgtcacattc

SEQ ID NO: 51107 - DNA, 25 bp, Artificial
  probe
  misc_feature (1)..(25): SEQ ID NO: 4684; WAN024ADG_at; Start 144; Stop 168
tagtgaaaatcaagctctaatggag

SEQ ID NO: 51108 - DNA, 25 bp, Artificial
  probe
  misc_feature (1)..(25): SEQ ID NO: 4684; WAN024ADG_at; Start 76; Stop 100
tttcattgtatatgaaaccgcttca

SEQ ID NO: 51109 - DNA, 25 bp, Artificial
  probe
  misc_feature (1)..(25): SEQ ID NO: 4684; WAN024ADG_at; Start 99; Stop 123
caaaaatcaagaaaaacttgtcatc

SEQ ID NO: 51110 - DNA, 25 bp, Artificial
  probe
  misc_feature (1)..(25): SEQ ID NO: 309; WAN024ADH_at; Start 209; Stop 233
aggaagctgagctctttagtcccag

SEQ ID NO: 51111 - DNA, 25 bp, Artificial
  probe
  misc_feature (1)..(25): SEQ ID NO: 309; WAN024ADH_at; Start 214; Stop 238
gctgagctctttagtcccagcttct

SEQ ID NO: 51112 - DNA, 25 bp, Artificial
  probe
  misc_feature (1)..(25): SEQ ID NO: 309; WAN024ADH_at; Start 117; Stop 141
gactcaattgtgcataagaaactct

SEQ ID NO: 51113 - DNA, 25 bp, Artificial
  probe
  misc_feature (1)..(25): SEQ ID NO: 309; WAN024ADH_at; Start 121; Stop 145
caattgtgcataagaaactctaaat

SEQ ID NO: 51114 - DNA, 25 bp, Artificial
  probe
  misc_feature (1)..(25): SEQ ID NO: 309; WAN024ADH_at; Start 155; Stop 179
tcaacagagtttcgcccaaccactt

SEQ ID NO: 51115 - DNA, 25 bp, Artificial
  probe
  misc_feature (1)..(25): SEQ ID NO: 309; WAN024ADH_at; Start 21; Stop 45
gacttcgcaagtcctacccactgtg

SEQ ID NO: 51116 - DNA, 25 bp, Artificial
  probe
  misc_feature (1)..(25): SEQ ID NO: 309; WAN024ADH_at; Start 28; Stop 52
caagtcctacccactgtgctttgtg

SEQ ID NO: 51117 - DNA, 25 bp, Artificial
  probe
  misc_feature (1)..(25): SEQ ID NO: 309; WAN024ADH_at; Start 54; Stop 78
catcagctattacatcgttggttta

SEQ ID NO: 51118 - DNA, 25 bp, Artificial
  probe
  misc_feature (1)..(25): SEQ ID NO: 309; WAN024ADH_at; Start 87; Stop 111
tatactttgcaactggagactttcg

SEQ ID NO: 51119 - DNA, 25 bp, Artificial
  probe
  misc_feature (1)..(25): SEQ ID NO: 309; WAN024ADH_at; Start 82; Stop 106
tactgtatactttgcaactggagac

SEQ ID NO: 51120 - DNA, 25 bp, Artificial
  probe
  misc_feature (1)..(25): SEQ ID NO: 309; WAN024ADH_at; Start 5; Stop 29
ttgaaaagaaaagggtgacttcgca

SEQ ID NO: 51121 - DNA, 25 bp, Artificial
  probe
  misc_feature (1)..(25): SEQ ID NO: 309; WAN024ADH_at; Start 38; Stop 62
ccactgtgctttgtgtcatcagcta

SEQ ID NO: 51122 - DNA, 25 bp, Artificial
  probe
  misc_feature (1)..(25): SEQ ID NO: 309; WAN024ADH_at; Start 80; Stop 104
tgtactgtatactttgcaactggag

SEQ ID NO: 51123 - DNA, 25 bp, Artificial
  probe
  misc_feature (1)..(25): SEQ ID NO: 309; WAN024ADH_at; Start 114; Stop 138
ccagactcaattgtgcataagaaac

SEQ ID NO: 51124 - DNA, 25 bp, Artificial
  probe
  misc_feature (1)..(25): SEQ ID NO: 309; WAN024ADH_at; Start 35; Stop 59
tacccactgtgctttgtgtcatcag

SEQ ID NO: 51125 - DNA, 25 bp, Artificial
  probe
  misc_feature (1)..(25): SEQ ID NO: 309; WAN024ADH_at; Start 201; Stop 225
taaaccaaaggaagctgagctcttt

SEQ ID NO: 51126 - DNA, 25 bp, Artificial
  probe
  misc_feature (1)..(25): SEQ ID NO: 309; WAN024ADH_at; Start 24; Stop 48
ttcgcaagtcctacccactgtgctt

SEQ ID NO: 51127 - DNA, 25 bp, Artificial
  probe
  misc_feature (1)..(25): SEQ ID NO: 309; WAN024ADH_at; Start 104; Stop 128
gactttcgttccagactcaattgtg

SEQ ID NO: 51128 - DNA, 25 bp, Artificial
  probe
  misc_feature (1)..(25): SEQ ID NO: 309; WAN024ADH_at; Start 150; Stop 174
taaagtcaacagagtttcgcccaac

SEQ ID NO: 51129 - DNA, 25 bp, Artificial
  probe
  misc_feature (1)..(25): SEQ ID NO: 309; WAN024ADH_at; Start 171; Stop 195
caaccacttcgtcttgtaatgacaa

SEQ ID NO: 51130 - DNA, 25 bp, Artificial
  probe
  misc_feature (1)..(25): SEQ ID NO: 309; WAN024ADH_at; Start 94; Stop 118
tgcaactggagactttcgttccaga

SEQ ID NO: 51131 - DNA, 25 bp, Artificial
  probe
  misc_feature (1)..(25): SEQ ID NO: 309; WAN024ADH_at; Start 12; Stop 36
gaaaagggtgacttcgcaagtccta

SEQ ID NO: 51132 - DNA, 25 bp, Artificial
  probe
  misc_feature (1)..(25): SEQ ID NO: 309; WAN024ADH_at; Start 50; Stop 74
gtgtcatcagctattacatcgttgg

SEQ ID NO: 51133 - DNA, 25 bp, Artificial
  probe
  misc_feature (1)..(25): SEQ ID NO: 309; WAN024ADH_at; Start 100; Stop 124
tggagactttcgttccagactcaat

SEQ ID NO: 51134 - DNA, 25 bp, Artificial
  probe
  misc_feature (1)..(25): SEQ ID NO: 309; WAN024ADH_at; Start 146; Stop 170
tgaataaagtcaacagagtttcgcc

SEQ ID NO: 51135 - DNA, 25 bp, Artificial
  probe
  misc_feature (1)..(25): SEQ ID NO: 309; WAN024ADH_at; Start 187; Stop 211
taatgacaattatataaaccaaagg

SEQ ID NO: 51136 - DNA, 25 bp, Artificial
  probe
  misc_feature (1)..(25): SEQ ID NO: 309; WAN024ADH_at; Start 162; Stop 186
agtttcgcccaaccacttcgtcttg

SEQ ID NO: 51137 - DNA, 25 bp, Artificial
  probe
  misc_feature (1)..(25): SEQ ID NO: 309; WAN024ADH_at; Start 226; Stop 250
agtcccagcttctttttatatataa

SEQ ID NO: 51138 - DNA, 25 bp, Artificial
  probe
  misc_feature (1)..(25): SEQ ID NO: 309; WAN024ADH_at; Start 110; Stop 134
cgttccagactcaattgtgcataag

SEQ ID NO: 51139 - DNA, 25 bp, Artificial
  probe
  misc_feature (1)..(25): SEQ ID NO: 309; WAN024ADH_at; Start 219; Stop 243
gctctttagtcccagcttcttttta

SEQ ID NO: 51140 - DNA, 25 bp, Artificial
  probe
  misc_feature (1)..(25): SEQ ID NO: 309; WAN024ADH_at; Start 168; Stop 192
gcccaaccacttcgtcttgtaatga

SEQ ID NO: 51141 - DNA, 25 bp, Artificial
  probe
  misc_feature (1)..(25): SEQ ID NO: 309; WAN024ADH_at; Start 66; Stop 90
catcgttggtttattgtactgtata

SEQ ID NO: 51142 - DNA, 25 bp, Artificial
  probe
  misc_feature (1)..(25): SEQ ID NO: 309; WAN024ADH_at; Start 199; Stop 223
tataaaccaaaggaagctgagctct

SEQ ID NO: 51143 - DNA, 25 bp, Artificial
  probe
  misc_feature (1)..(25): SEQ ID NO: 309; WAN024ADH_at; Start 128; Stop 152
gcataagaaactctaaattgaataa

SEQ ID NO: 51144 - DNA, 25 bp, Artificial
  probe
  misc_feature (1)..(25): SEQ ID NO: 3758; WAN024ADI_at; Start 158; Stop 182
tccagttgcaaagtatacagtacaa

SEQ ID NO: 51145 - DNA, 25 bp, Artificial
  probe
  misc_feature (1)..(25): SEQ ID NO: 3758; WAN024ADI_at; Start 146; Stop 170
ggaacgaaagtctccagttgcaaag

SEQ ID NO: 51146 - DNA, 25 bp, Artificial
  probe
  misc_feature (1)..(25): SEQ ID NO: 3758; WAN024ADI_at; Start 83; Stop 107
agtggttgggcgaaactctgttgac

SEQ ID NO: 51147 - DNA, 25 bp, Artificial
  probe
  misc_feature (1)..(25): SEQ ID NO: 3758; WAN024ADI_at; Start 69; Stop 93
tcattacaagacgaagtggttgggc

SEQ ID NO: 51148 - DNA, 25 bp, Artificial
  probe
  misc_feature (1)..(25): SEQ ID NO: 3758; WAN024ADI_at; Start 129; Stop 153
tatgcacaattgagtctggaacgaa

SEQ ID NO: 51149 - DNA, 25 bp, Artificial
  probe
  misc_feature (1)..(25): SEQ ID NO: 3758; WAN024ADI_at; Start 133; Stop 157
cacaattgagtctggaacgaaagtc

SEQ ID NO: 51150 - DNA, 25 bp, Artificial
  probe
  misc_feature (1)..(25): SEQ ID NO: 3758; WAN024ADI_at; Start 32; Stop 56
gactaaagagctcagcttcctttgg

SEQ ID NO: 51151 - DNA, 25 bp, Artificial
  probe
  misc_feature (1)..(25): SEQ ID NO: 3758; WAN024ADI_at; Start 75; Stop 99
caagacgaagtggttgggcgaaact

SEQ ID NO: 51152 - DNA, 25 bp, Artificial
  probe
  misc_feature (1)..(25): SEQ ID NO: 3758; WAN024ADI_at; Start 28; Stop 52
ctgggactaaagagctcagcttcct

SEQ ID NO: 51153 - DNA, 25 bp, Artificial
  probe
  misc_feature (1)..(25): SEQ ID NO: 3758; WAN024ADI_at; Start 221; Stop 245
tgggtaggacttgcgaagtcaccct

SEQ ID NO: 51154 - DNA, 25 bp, Artificial
  probe
  misc_feature (1)..(25): SEQ ID NO: 3758; WAN024ADI_at; Start 183; Stop 207
taaaccaacgatgtaatagctgatg

SEQ ID NO: 51155 - DNA, 25 bp, Artificial
  probe
  misc_feature (1)..(25): SEQ ID NO: 3758; WAN024ADI_at; Start 153; Stop 177
aagtctccagttgcaaagtatacag

SEQ ID NO: 51156 - DNA, 25 bp, Artificial
  probe
  misc_feature (1)..(25): SEQ ID NO: 3758; WAN024ADI_at; Start 212; Stop 236
aaagcacagtgggtaggacttgcga

SEQ ID NO: 51157 - DNA, 25 bp, Artificial
  probe
  misc_feature (1)..(25): SEQ ID NO: 3758; WAN024ADI_at; Start 46; Stop 70
gcttcctttggtttatataattgtc

SEQ ID NO: 51158 - DNA, 25 bp, Artificial
  probe
  misc_feature (1)..(25): SEQ ID NO: 3758; WAN024ADI_at; Start 232; Stop 256
tgcgaagtcacccttttcttttcaa

SEQ ID NO: 51159 - DNA, 25 bp, Artificial
  probe
  misc_feature (1)..(25): SEQ ID NO: 3758; WAN024ADI_at; Start 199; Stop 223
tagctgatgacacaaagcacagtgg

SEQ ID NO: 51160 - DNA, 25 bp, Artificial
  probe
  misc_feature (1)..(25): SEQ ID NO: 3758; WAN024ADI_at; Start 91; Stop 115
ggcgaaactctgttgactttattca

SEQ ID NO: 51161 - DNA, 25 bp, Artificial
  probe
  misc_feature (1)..(25): SEQ ID NO: 3758; WAN024ADI_at; Start 87; Stop 111
gttgggcgaaactctgttgacttta

SEQ ID NO: 51162 - DNA, 25 bp, Artificial
  probe
  misc_feature (1)..(25): SEQ ID NO: 3758; WAN024ADI_at; Start 18; Stop 42
taaaaagaagctgggactaaagagc

SEQ ID NO: 51163 - DNA, 25 bp, Artificial
  probe
  misc_feature (1)..(25): SEQ ID NO: 3758; WAN024ADI_at; Start 225; Stop 249
taggacttgcgaagtcacccttttc

SEQ ID NO: 51164 - DNA, 25 bp, Artificial
  probe
  misc_feature (1)..(25): SEQ ID NO: 3758; WAN024ADI_at; Start 171; Stop 195
tatacagtacaataaaccaacgatg

SEQ ID NO: 51165 - DNA, 25 bp, Artificial
  probe
  misc_feature (1)..(25): SEQ ID NO: 3758; WAN024ADI_at; Start 113; Stop 137
tcaatttagagtttcttatgcacaa

SEQ ID NO: 51166 - DNA, 25 bp, Artificial
  probe
  misc_feature (1)..(25): SEQ ID NO: 3758; WAN024ADI_at; Start 136; Stop 160
aattgagtctggaacgaaagtctcc

SEQ ID NO: 51167 - DNA, 25 bp, Artificial
  probe
  misc_feature (1)..(25): SEQ ID NO: 3758; WAN024ADI_at; Start 216; Stop 240
cacagtgggtaggacttgcgaagtc

SEQ ID NO: 51168 - DNA, 25 bp, Artificial
  probe
  misc_feature (1)..(25): SEQ ID NO: 3758; WAN024ADI_at; Start 194; Stop 218
tgtaatagctgatgacacaaagcac

SEQ ID NO: 51169 - DNA, 25 bp, Artificial
  probe
  misc_feature (1)..(25): SEQ ID NO: 3758; WAN024ADI_at; Start 150; Stop 174
cgaaagtctccagttgcaaagtata

SEQ ID NO: 51170 - DNA, 25 bp, Artificial
  probe
  misc_feature (1)..(25): SEQ ID NO: 3758; WAN024ADI_at; Start 38; Stop 62
agagctcagcttcctttggtttata

SEQ ID NO: 51171 - DNA, 25 bp, Artificial
  probe
  misc_feature (1)..(25): SEQ ID NO: 3758; WAN024ADI_at; Start 126; Stop 150
tcttatgcacaattgagtctggaac

SEQ ID NO: 51172 - DNA, 25 bp, Artificial
  probe
  misc_feature (1)..(25): SEQ ID NO: 3758; WAN024ADI_at; Start 63; Stop 87
taattgtcattacaagacgaagtgg

SEQ ID NO: 51173 - DNA, 25 bp, Artificial
  probe
  misc_feature (1)..(25): SEQ ID NO: 3758; WAN024ADI_at; Start 207; Stop 231
gacacaaagcacagtgggtaggact

SEQ ID NO: 51174 - DNA, 25 bp, Artificial
  probe
  misc_feature (1)..(25): SEQ ID NO: 3758; WAN024ADI_at; Start 203; Stop 227
tgatgacacaaagcacagtgggtag

SEQ ID NO: 51175 - DNA, 25 bp, Artificial
  probe
  misc_feature (1)..(25): SEQ ID NO: 3758; WAN024ADI_at; Start 23; Stop 47
agaagctgggactaaagagctcagc

SEQ ID NO: 51176 - DNA, 25 bp, Artificial
  probe
  misc_feature (1)..(25): SEQ ID NO: 3758; WAN024ADI_at; Start 188; Stop 212
caacgatgtaatagctgatgacaca

SEQ ID NO: 51177 - DNA, 25 bp, Artificial
  probe
  misc_feature (1)..(25): SEQ ID NO: 3758; WAN024ADI_at; Start 11; Stop 35
ttatatataaaaagaagctgggact

SEQ ID NO: 51178 - DNA, 25 bp, Artificial
  probe
  misc_feature (1)..(25): SEQ ID NO: 5738; WAN024ADJ_at; Start 25; Stop 49
ctttagcctatacaactggattttc

SEQ ID NO: 51179 - DNA, 25 bp, Artificial
  probe
  misc_feature (1)..(25): SEQ ID NO: 5738; WAN024ADJ_at; Start 24; Stop 48
cctttagcctatacaactggatttt

SEQ ID NO: 51180 - DNA, 25 bp, Artificial
  probe
  misc_feature (1)..(25): SEQ ID NO: 5738; WAN024ADJ_at; Start 42; Stop 66
ggattttcctctctcaaaagtatat

SEQ ID NO: 51181 - DNA, 25 bp, Artificial
  probe
  misc_feature (1)..(25): SEQ ID NO: 5738; WAN024ADJ_at; Start 26; Stop 50
tttagcctatacaactggattttcc

SEQ ID NO: 51182 - DNA, 25 bp, Artificial
  probe
  misc_feature (1)..(25): SEQ ID NO: 5738; WAN024ADJ_at; Start 53; Stop 77
tctcaaaagtatattagacttgttc

SEQ ID NO: 51183 - DNA, 25 bp, Artificial
  probe
  misc_feature (1)..(25): SEQ ID NO: 5738; WAN024ADJ_at; Start 33; Stop 57
tatacaactggattttcctctctca

SEQ ID NO: 51184 - DNA, 25 bp, Artificial
  probe
  misc_feature (1)..(25): SEQ ID NO: 5738; WAN024ADJ_at; Start 14; Stop 38
ttggataaaacctttagcctataca

SEQ ID NO: 51185 - DNA, 25 bp, Artificial
  probe
  misc_feature (1)..(25): SEQ ID NO: 5738; WAN024ADJ_at; Start 58; Stop 82
aaagtatattagacttgttcggaat

SEQ ID NO: 51186 - DNA, 25 bp, Artificial
  probe
  misc_feature (1)..(25): SEQ ID NO: 5738; WAN024ADJ_at; Start 39; Stop 63
actggattttcctctctcaaaagta

SEQ ID NO: 51187 - DNA, 25 bp, Artificial
  probe
  misc_feature (1)..(25): SEQ ID NO: 5738; WAN024ADJ_at; Start 30; Stop 54
gcctatacaactggattttcctctc

SEQ ID NO: 51188 - DNA, 25 bp, Artificial
  probe
  misc_feature (1)..(25): SEQ ID NO: 5738; WAN024ADJ_at; Start 41; Stop 65
tggattttcctctctcaaaagtata

SEQ ID NO: 51189 - DNA, 25 bp, Artificial
  probe
  misc_feature (1)..(25): SEQ ID NO: 5738; WAN024ADJ_at; Start 31; Stop 55
cctatacaactggattttcctctct

SEQ ID NO: 51190 - DNA, 25 bp, Artificial
  probe
  misc_feature (1)..(25): SEQ ID NO: 5738; WAN024ADJ_at; Start 55; Stop 79
tcaaaagtatattagacttgttcgg

SEQ ID NO: 51191 - DNA, 25 bp, Artificial
  probe
  misc_feature (1)..(25): SEQ ID NO: 5738; WAN024ADJ_at; Start 48; Stop 72
tcctctctcaaaagtatattagact

SEQ ID NO: 51192 - DNA, 25 bp, Artificial
  probe
  misc_feature (1)..(25): SEQ ID NO: 5738; WAN024ADJ_at; Start 38; Stop 62
aactggattttcctctctcaaaagt

SEQ ID NO: 51193 - DNA, 25 bp, Artificial
  probe
  misc_feature (1)..(25): SEQ ID NO: 5738; WAN024ADJ_at; Start 47; Stop 71
ttcctctctcaaaagtatattagac

SEQ ID NO: 51194 - DNA, 25 bp, Artificial
  probe
  misc_feature (1)..(25): SEQ ID NO: 5738; WAN024ADJ_at; Start 18; Stop 42
ataaaacctttagcctatacaactg

SEQ ID NO: 51195 - DNA, 25 bp, Artificial
  probe
  misc_feature (1)..(25): SEQ ID NO: 5738; WAN024ADJ_at; Start 23; Stop 47
acctttagcctatacaactggattt

SEQ ID NO: 51196 - DNA, 25 bp, Artificial
  probe
  misc_feature (1)..(25): SEQ ID NO: 5738; WAN024ADJ_at; Start 36; Stop 60
acaactggattttcctctctcaaaa

SEQ ID NO: 51197 - DNA, 25 bp, Artificial
  probe
  misc_feature (1)..(25): SEQ ID NO: 5738; WAN024ADJ_at; Start 29; Stop 53
agcctatacaactggattttcctct

SEQ ID NO: 51198 - DNA, 25 bp, Artificial
  probe
  misc_feature (1)..(25): SEQ ID NO: 5738; WAN024ADJ_at; Start 40; Stop 64
ctggattttcctctctcaaaagtat

SEQ ID NO: 51199 - DNA, 25 bp, Artificial
  probe
  misc_feature (1)..(25): SEQ ID NO: 5738; WAN024ADJ_at; Start 46; Stop 70
tttcctctctcaaaagtatattaga

SEQ ID NO: 51200 - DNA, 25 bp, Artificial
  probe
  misc_feature (1)..(25): SEQ ID NO: 5738; WAN024ADJ_at; Start 15; Stop 39
tggataaaacctttagcctatacaa

SEQ ID NO: 51201 - DNA, 25 bp, Artificial
  probe
  misc_feature (1)..(25): SEQ ID NO: 5738; WAN024ADJ_at; Start 50; Stop 74
ctctctcaaaagtatattagacttg

SEQ ID NO: 51202 - DNA, 25 bp, Artificial
  probe
  misc_feature (1)..(25): SEQ ID NO: 5738; WAN024ADJ_at; Start 1; Stop 25
ttgtctcagacctttggataaaacc

SEQ ID NO: 51203 - DNA, 25 bp, Artificial
  probe
  misc_feature (1)..(25): SEQ ID NO: 5738; WAN024ADJ_at; Start 35; Stop 59
tacaactggattttcctctctcaaa

SEQ ID NO: 51204 - DNA, 25 bp, Artificial
  probe
  misc_feature (1)..(25): SEQ ID NO: 5738; WAN024ADJ_at; Start 37; Stop 61
caactggattttcctctctcaaaag

SEQ ID NO: 51205 - DNA, 25 bp, Artificial
  probe
  misc_feature (1)..(25): SEQ ID NO: 5738; WAN024ADJ_at; Start 43; Stop 67
gattttcctctctcaaaagtatatt

SEQ ID NO: 51206 - DNA, 25 bp, Artificial
  probe
  misc_feature (1)..(25): SEQ ID NO: 5738; WAN024ADJ_at; Start 56; Stop 80
caaaagtatattagacttgttcgga

SEQ ID NO: 51207 - DNA, 25 bp, Artificial
  probe
  misc_feature (1)..(25): SEQ ID NO: 5738; WAN024ADJ_at; Start 21; Stop 45
aaacctttagcctatacaactggat

SEQ ID NO: 51208 - DNA, 25 bp, Artificial
  probe
  misc_feature (1)..(25): SEQ ID NO: 5738; WAN024ADJ_at; Start 2; Stop 26
tgtctcagacctttggataaaacct

SEQ ID NO: 51209 - DNA, 25 bp, Artificial
  probe
  misc_feature (1)..(25): SEQ ID NO: 5738; WAN024ADJ_at; Start 28; Stop 52
tagcctatacaactggattttcctc

SEQ ID NO: 51210 - DNA, 25 bp, Artificial
  probe
  misc_feature (1)..(25): SEQ ID NO: 5738; WAN024ADJ_at; Start 27; Stop 51
ttagcctatacaactggattttcct

SEQ ID NO: 51211 - DNA, 25 bp, Artificial
  probe
  misc_feature (1)..(25): SEQ ID NO: 5738; WAN024ADJ_at; Start 22; Stop 46
aacctttagcctatacaactggatt

SEQ ID NO: 51212 - DNA, 25 bp, Artificial
  probe
  misc_feature (1)..(25): SEQ ID NO: 3148; WAN024ADK_at; Start 57; Stop 81
aggttttatccaaaggtctgagaca

SEQ ID NO: 51213 - DNA, 25 bp, Artificial
  probe
  misc_feature (1)..(25): SEQ ID NO: 3148; WAN024ADK_at; Start 31; Stop 55
gaggaaaatccagttgtataggcta

SEQ ID NO: 51214 - DNA, 25 bp, Artificial
  probe
  misc_feature (1)..(25): SEQ ID NO: 3148; WAN024ADK_at; Start 45; Stop 69
tgtataggctaaaggttttatccaa

SEQ ID NO: 51215 - DNA, 25 bp, Artificial
  probe
  misc_feature (1)..(25): SEQ ID NO: 3148; WAN024ADK_at; Start 32; Stop 56
aggaaaatccagttgtataggctaa

SEQ ID NO: 51216 - DNA, 25 bp, Artificial
  probe
  misc_feature (1)..(25): SEQ ID NO: 3148; WAN024ADK_at; Start 36; Stop 60
aaatccagttgtataggctaaaggt

SEQ ID NO: 51217 - DNA, 25 bp, Artificial
  probe
  misc_feature (1)..(25): SEQ ID NO: 3148; WAN024ADK_at; Start 25; Stop 49
ttgagagaggaaaatccagttgtat

SEQ ID NO: 51218 - DNA, 25 bp, Artificial
  probe
  misc_feature (1)..(25): SEQ ID NO: 3148; WAN024ADK_at; Start 58; Stop 82
ggttttatccaaaggtctgagacaa

SEQ ID NO: 51219 - DNA, 25 bp, Artificial
  probe
  misc_feature (1)..(25): SEQ ID NO: 3148; WAN024ADK_at; Start 35; Stop 59
aaaatccagttgtataggctaaagg

SEQ ID NO: 51220 - DNA, 25 bp, Artificial
  probe
  misc_feature (1)..(25): SEQ ID NO: 3148; WAN024ADK_at; Start 27; Stop 51
gagagaggaaaatccagttgtatag

SEQ ID NO: 51221 - DNA, 25 bp, Artificial
  probe
  misc_feature (1)..(25): SEQ ID NO: 3148; WAN024ADK_at; Start 14; Stop 38
ctaatatacttttgagagaggaaaa

SEQ ID NO: 51222 - DNA, 25 bp, Artificial
  probe
  misc_feature (1)..(25): SEQ ID NO: 3148; WAN024ADK_at; Start 20; Stop 44
tacttttgagagaggaaaatccagt

SEQ ID NO: 51223 - DNA, 25 bp, Artificial
  probe
  misc_feature (1)..(25): SEQ ID NO: 3148; WAN024ADK_at; Start 12; Stop 36
gtctaatatacttttgagagaggaa

SEQ ID NO: 51224 - DNA, 25 bp, Artificial
  probe
  misc_feature (1)..(25): SEQ ID NO: 3148; WAN024ADK_at; Start 3; Stop 27
tccgaacaagtctaatatacttttg

SEQ ID NO: 51225 - DNA, 25 bp, Artificial
  probe
  misc_feature (1)..(25): SEQ ID NO: 3148; WAN024ADK_at; Start 9; Stop 33
caagtctaatatacttttgagagag

SEQ ID NO: 51226 - DNA, 25 bp, Artificial
  probe
  misc_feature (1)..(25): SEQ ID NO: 3148; WAN024ADK_at; Start 21; Stop 45
acttttgagagaggaaaatccagtt

SEQ ID NO: 51227 - DNA, 25 bp, Artificial
  probe
  misc_feature (1)..(25): SEQ ID NO: 3148; WAN024ADK_at; Start 44; Stop 68
ttgtataggctaaaggttttatcca

SEQ ID NO: 51228 - DNA, 25 bp, Artificial
  probe
  misc_feature (1)..(25): SEQ ID NO: 3148; WAN024ADK_at; Start 37; Stop 61
aatccagttgtataggctaaaggtt

SEQ ID NO: 51229 - DNA, 25 bp, Artificial
  probe
  misc_feature (1)..(25): SEQ ID NO: 3148; WAN024ADK_at; Start 34; Stop 58
gaaaatccagttgtataggctaaag

SEQ ID NO: 51230 - DNA, 25 bp, Artificial
  probe
  misc_feature (1)..(25): SEQ ID NO: 3148; WAN024ADK_at; Start 23; Stop 47
ttttgagagaggaaaatccagttgt

SEQ ID NO: 51231 - DNA, 25 bp, Artificial
  probe
  misc_feature (1)..(25): SEQ ID NO: 3148; WAN024ADK_at; Start 22; Stop 46
cttttgagagaggaaaatccagttg

SEQ ID NO: 51232 - DNA, 25 bp, Artificial
  probe
  misc_feature (1)..(25): SEQ ID NO: 3148; WAN024ADK_at; Start 29; Stop 53
gagaggaaaatccagttgtataggc

SEQ ID NO: 51233 - DNA, 25 bp, Artificial
  probe
  misc_feature (1)..(25): SEQ ID NO: 3148; WAN024ADK_at; Start 24; Stop 48
tttgagagaggaaaatccagttgta

SEQ ID NO: 51234 - DNA, 25 bp, Artificial
  probe
  misc_feature (1)..(25): SEQ ID NO: 3148; WAN024ADK_at; Start 30; Stop 54
agaggaaaatccagttgtataggct

SEQ ID NO: 51235 - DNA, 25 bp, Artificial
  probe
  misc_feature (1)..(25): SEQ ID NO: 3148; WAN024ADK_at; Start 18; Stop 42
tatacttttgagagaggaaaatcca

SEQ ID NO: 51236 - DNA, 25 bp, Artificial
  probe
  misc_feature (1)..(25): SEQ ID NO: 3148; WAN024ADK_at; Start 6; Stop 30
gaacaagtctaatatacttttgaga

SEQ ID NO: 51237 - DNA, 25 bp, Artificial
  probe
  misc_feature (1)..(25): SEQ ID NO: 3148; WAN024ADK_at; Start 41; Stop 65
cagttgtataggctaaaggttttat

SEQ ID NO: 51238 - DNA, 25 bp, Artificial
  probe
  misc_feature (1)..(25): SEQ ID NO: 3148; WAN024ADK_at; Start 26; Stop 50
tgagagaggaaaatccagttgtata

SEQ ID NO: 51239 - DNA, 25 bp, Artificial
  probe
  misc_feature (1)..(25): SEQ ID NO: 3148; WAN024ADK_at; Start 19; Stop 43
atacttttgagagaggaaaatccag

SEQ ID NO: 51240 - DNA, 25 bp, Artificial
  probe
  misc_feature (1)..(25): SEQ ID NO: 3148; WAN024ADK_at; Start 38; Stop 62
atccagttgtataggctaaaggttt

SEQ ID NO: 51241 - DNA, 25 bp, Artificial
  probe
  misc_feature (1)..(25): SEQ ID NO: 3148; WAN024ADK_at; Start 5; Stop 29
cgaacaagtctaatatacttttgag

SEQ ID NO: 51242 - DNA, 25 bp, Artificial
  probe
  misc_feature (1)..(25): SEQ ID NO: 3148; WAN024ADK_at; Start 11; Stop 35
agtctaatatacttttgagagagga

SEQ ID NO: 51243 - DNA, 25 bp, Artificial
  probe
  misc_feature (1)..(25): SEQ ID NO: 3148; WAN024ADK_at; Start 13; Stop 37
tctaatatacttttgagagaggaaa

SEQ ID NO: 51244 - DNA, 25 bp, Artificial
  probe
  misc_feature (1)..(25): SEQ ID NO: 3148; WAN024ADK_at; Start 1; Stop 25
attccgaacaagtctaatatacttt

SEQ ID NO: 51245 - DNA, 25 bp, Artificial
  probe
  misc_feature (1)..(25): SEQ ID NO: 3148; WAN024ADK_at; Start 33; Stop 57
ggaaaatccagttgtataggctaaa

SEQ ID NO: 51246 - DNA, 25 bp, Artificial
  probe
  misc_feature (1)..(25): SEQ ID NO: 4649; WAN024ADL_at; Start 44; Stop 68
ttttatagtatcatgagcaattctt

SEQ ID NO: 51247 - DNA, 25 bp, Artificial
  probe
  misc_feature (1)..(25): SEQ ID NO: 4649; WAN024ADL_at; Start 40; Stop 64
agatttttatagtatcatgagcaat

SEQ ID NO: 51248 - DNA, 25 bp, Artificial
  probe
  misc_feature (1)..(25): SEQ ID NO: 4649; WAN024ADL_at; Start 28; Stop 52
tcacaatttctaagatttttatagt

SEQ ID NO: 51249 - DNA, 25 bp, Artificial
  probe
  misc_feature (1)..(25): SEQ ID NO: 4649; WAN024ADL_at; Start 3; Stop 27
tccttctttcatcctacctatttta

SEQ ID NO: 51250 - DNA, 25 bp, Artificial
  probe
  misc_feature (1)..(25): SEQ ID NO: 4649; WAN024ADL_at; Start 35; Stop 59
ttctaagatttttatagtatcatga

SEQ ID NO: 51251 - DNA, 25 bp, Artificial
  probe
  misc_feature (1)..(25): SEQ ID NO: 4649; WAN024ADL_at; Start 32; Stop 56
aatttctaagatttttatagtatca

SEQ ID NO: 51252 - DNA, 25 bp, Artificial
  probe
  misc_feature (1)..(25): SEQ ID NO: 4649; WAN024ADL_at; Start 53; Stop 77
atcatgagcaattctttcaaaaaaa

SEQ ID NO: 51253 - DNA, 25 bp, Artificial
  probe
  misc_feature (1)..(25): SEQ ID NO: 4649; WAN024ADL_at; Start 42; Stop 66
atttttatagtatcatgagcaattc

SEQ ID NO: 51254 - DNA, 25 bp, Artificial
  probe
  misc_feature (1)..(25): SEQ ID NO: 4649; WAN024ADL_at; Start 45; Stop 69
tttatagtatcatgagcaattcttt

SEQ ID NO: 51255 - DNA, 25 bp, Artificial
  probe
  misc_feature (1)..(25): SEQ ID NO: 4649; WAN024ADL_at; Start 39; Stop 63
aagatttttatagtatcatgagcaa

SEQ ID NO: 51256 - DNA, 25 bp, Artificial
  probe
  misc_feature (1)..(25): SEQ ID NO: 4649; WAN024ADL_at; Start 27; Stop 51
atcacaatttctaagatttttatag

SEQ ID NO: 51257 - DNA, 25 bp, Artificial
  probe
  misc_feature (1)..(25): SEQ ID NO: 4649; WAN024ADL_at; Start 5; Stop 29
cttctttcatcctacctattttatc

SEQ ID NO: 51258 - DNA, 25 bp, Artificial
  probe
  misc_feature (1)..(25): SEQ ID NO: 4649; WAN024ADL_at; Start 47; Stop 71
tatagtatcatgagcaattctttca

SEQ ID NO: 51259 - DNA, 25 bp, Artificial
  probe
  misc_feature (1)..(25): SEQ ID NO: 4649; WAN024ADL_at; Start 38; Stop 62
taagatttttatagtatcatgagca

SEQ ID NO: 51260 - DNA, 25 bp, Artificial
  probe
  misc_feature (1)..(25): SEQ ID NO: 4649; WAN024ADL_at; Start 34; Stop 58
tttctaagatttttatagtatcatg

SEQ ID NO: 51261 - DNA, 25 bp, Artificial
  probe
  misc_feature (1)..(25): SEQ ID NO: 4649; WAN024ADL_at; Start 51; Stop 75
gtatcatgagcaattctttcaaaaa

SEQ ID NO: 51262 - DNA, 25 bp, Artificial
  probe
  misc_feature (1)..(25): SEQ ID NO: 4649; WAN024ADL_at; Start 26; Stop 50
tatcacaatttctaagatttttata

SEQ ID NO: 51263 - DNA, 25 bp, Artificial
  probe
  misc_feature (1)..(25): SEQ ID NO: 4649; WAN024ADL_at; Start 49; Stop 73
tagtatcatgagcaattctttcaaa

SEQ ID NO: 51264 - DNA, 25 bp, Artificial
  probe
  misc_feature (1)..(25): SEQ ID NO: 4649; WAN024ADL_at; Start 29; Stop 53
cacaatttctaagatttttatagta

SEQ ID NO: 51265 - DNA, 25 bp, Artificial
  probe
  misc_feature (1)..(25): SEQ ID NO: 4649; WAN024ADL_at; Start 1; Stop 25
tctccttctttcatcctacctattt

SEQ ID NO: 51266 - DNA, 25 bp, Artificial
  probe
  misc_feature (1)..(25): SEQ ID NO: 4649; WAN024ADL_at; Start 36; Stop 60
tctaagatttttatagtatcatgag

SEQ ID NO: 51267 - DNA, 25 bp, Artificial
  probe
  misc_feature (1)..(25): SEQ ID NO: 4649; WAN024ADL_at; Start 25; Stop 49
ttatcacaatttctaagatttttat

SEQ ID NO: 51268 - DNA, 25 bp, Artificial
  probe
  misc_feature (1)..(25): SEQ ID NO: 4649; WAN024ADL_at; Start 31; Stop 55
caatttctaagatttttatagtatc

SEQ ID NO: 51269 - DNA, 25 bp, Artificial
  probe
  misc_feature (1)..(25): SEQ ID NO: 4649; WAN024ADL_at; Start 46; Stop 70
ttatagtatcatgagcaattctttc

SEQ ID NO: 51270 - DNA, 25 bp, Artificial
  probe
  misc_feature (1)..(25): SEQ ID NO: 4649; WAN024ADL_at; Start 6; Stop 30
ttctttcatcctacctattttatca

SEQ ID NO: 51271 - DNA, 25 bp, Artificial
  probe
  misc_feature (1)..(25): SEQ ID NO: 4649; WAN024ADL_at; Start 43; Stop 67
tttttatagtatcatgagcaattct

SEQ ID NO: 51272 - DNA, 25 bp, Artificial
  probe
  misc_feature (1)..(25): SEQ ID NO: 4649; WAN024ADL_at; Start 37; Stop 61
ctaagatttttatagtatcatgagc

SEQ ID NO: 51273 - DNA, 25 bp, Artificial
  probe
  misc_feature (1)..(25): SEQ ID NO: 4649; WAN024ADL_at; Start 41; Stop 65
gatttttatagtatcatgagcaatt

SEQ ID NO: 51274 - DNA, 25 bp, Artificial
  probe
  misc_feature (1)..(25): SEQ ID NO: 4649; WAN024ADL_at; Start 50; Stop 74
agtatcatgagcaattctttcaaaa

SEQ ID NO: 51275 - DNA, 25 bp, Artificial
  probe
  misc_feature (1)..(25): SEQ ID NO: 4649; WAN024ADL_at; Start 24; Stop 48
tttatcacaatttctaagattttta

SEQ ID NO: 51276 - DNA, 25 bp, Artificial
  probe
  misc_feature (1)..(25): SEQ ID NO: 4649; WAN024ADL_at; Start 4; Stop 28
ccttctttcatcctacctattttat

SEQ ID NO: 51277 - DNA, 25 bp, Artificial
  probe
  misc_feature (1)..(25): SEQ ID NO: 4649; WAN024ADL_at; Start 52; Stop 76
tatcatgagcaattctttcaaaaaa

SEQ ID NO: 51278 - DNA, 25 bp, Artificial
  probe
  misc_feature (1)..(25): SEQ ID NO: 4649; WAN024ADL_at; Start 2; Stop 26
ctccttctttcatcctacctatttt

SEQ ID NO: 51279 - DNA, 25 bp, Artificial
  probe
  misc_feature (1)..(25): SEQ ID NO: 4649; WAN024ADL_at; Start 48; Stop 72
atagtatcatgagcaattctttcaa

SEQ ID NO: 51280 - DNA, 25 bp, Artificial
  probe
  misc_feature (1)..(25): SEQ ID NO: 5962; WAN024ADM_at; Start 30; Stop 54
taaaaatcttagaaattgtgataaa

SEQ ID NO: 51281 - DNA, 25 bp, Artificial
  probe
  misc_feature (1)..(25): SEQ ID NO: 5962; WAN024ADM_at; Start 6; Stop 30
ttgaaagaattgctcatgatactat

SEQ ID NO: 51282 - DNA, 25 bp, Artificial
  probe
  misc_feature (1)..(25): SEQ ID NO: 5962; WAN024ADM_at; Start 1; Stop 25
tttttttgaaagaattgctcatgat

SEQ ID NO: 51283 - DNA, 25 bp, Artificial
  probe
  misc_feature (1)..(25): SEQ ID NO: 5962; WAN024ADM_at; Start 10; Stop 34
aagaattgctcatgatactataaaa

SEQ ID NO: 51284 - DNA, 25 bp, Artificial
  probe
  misc_feature (1)..(25): SEQ ID NO: 5962; WAN024ADM_at; Start 9; Stop 33
aaagaattgctcatgatactataaa

SEQ ID NO: 51285 - DNA, 25 bp, Artificial
  probe
  misc_feature (1)..(25): SEQ ID NO: 5962; WAN024ADM_at; Start 32; Stop 56
aaaatcttagaaattgtgataaaat

SEQ ID NO: 51286 - DNA, 25 bp, Artificial
  probe
  misc_feature (1)..(25): SEQ ID NO: 5962; WAN024ADM_at; Start 8; Stop 32
gaaagaattgctcatgatactataa

SEQ ID NO: 51287 - DNA, 25 bp, Artificial
  probe
  misc_feature (1)..(25): SEQ ID NO: 5962; WAN024ADM_at; Start 4; Stop 28
ttttgaaagaattgctcatgatact

SEQ ID NO: 51288 - DNA, 25 bp, Artificial
  probe
  misc_feature (1)..(25): SEQ ID NO: 5962; WAN024ADM_at; Start 49; Stop 73
gataaaataggtaggatgaaagaag

SEQ ID NO: 51289 - DNA, 25 bp, Artificial
  probe
  misc_feature (1)..(25): SEQ ID NO: 5962; WAN024ADM_at; Start 26; Stop 50
actataaaaatcttagaaattgtga

SEQ ID NO: 51290 - DNA, 25 bp, Artificial
  probe
  misc_feature (1)..(25): SEQ ID NO: 5962; WAN024ADM_at; Start 53; Stop 77
aaataggtaggatgaaagaaggaga

SEQ ID NO: 51291 - DNA, 25 bp, Artificial
  probe
  misc_feature (1)..(25): SEQ ID NO: 5962; WAN024ADM_at; Start 25; Stop 49
tactataaaaatcttagaaattgtg

SEQ ID NO: 51292 - DNA, 25 bp, Artificial
  probe
  misc_feature (1)..(25): SEQ ID NO: 5962; WAN024ADM_at; Start 51; Stop 75
taaaataggtaggatgaaagaagga

SEQ ID NO: 51293 - DNA, 25 bp, Artificial
  probe
  misc_feature (1)..(25): SEQ ID NO: 5962; WAN024ADM_at; Start 11; Stop 35
agaattgctcatgatactataaaaa

SEQ ID NO: 51294 - DNA, 25 bp, Artificial
  probe
  misc_feature (1)..(25): SEQ ID NO: 5962; WAN024ADM_at; Start 5; Stop 29
tttgaaagaattgctcatgatacta

SEQ ID NO: 51295 - DNA, 25 bp, Artificial
  probe
  misc_feature (1)..(25): SEQ ID NO: 5962; WAN024ADM_at; Start 3; Stop 27
tttttgaaagaattgctcatgatac

SEQ ID NO: 51296 - DNA, 25 bp, Artificial
  probe
  misc_feature (1)..(25): SEQ ID NO: 5962; WAN024ADM_at; Start 2; Stop 26
ttttttgaaagaattgctcatgata

SEQ ID NO: 51297 - DNA, 25 bp, Artificial
  probe
  misc_feature (1)..(25): SEQ ID NO: 5962; WAN024ADM_at; Start 48; Stop 72
tgataaaataggtaggatgaaagaa

SEQ ID NO: 51298 - DNA, 25 bp, Artificial
  probe
  misc_feature (1)..(25): SEQ ID NO: 5962; WAN024ADM_at; Start 50; Stop 74
ataaaataggtaggatgaaagaagg

SEQ ID NO: 51299 - DNA, 25 bp, Artificial
  probe
  misc_feature (1)..(25): SEQ ID NO: 5962; WAN024ADM_at; Start 13; Stop 37
aattgctcatgatactataaaaatc

SEQ ID NO: 51300 - DNA, 25 bp, Artificial
  probe
  misc_feature (1)..(25): SEQ ID NO: 5962; WAN024ADM_at; Start 24; Stop 48
atactataaaaatcttagaaattgt

SEQ ID NO: 51301 - DNA, 25 bp, Artificial
  probe
  misc_feature (1)..(25): SEQ ID NO: 5962; WAN024ADM_at; Start 28; Stop 52
tataaaaatcttagaaattgtgata

SEQ ID NO: 51302 - DNA, 25 bp, Artificial
  probe
  misc_feature (1)..(25): SEQ ID NO: 5962; WAN024ADM_at; Start 52; Stop 76
aaaataggtaggatgaaagaaggag

SEQ ID NO: 51303 - DNA, 25 bp, Artificial
  probe
  misc_feature (1)..(25): SEQ ID NO: 5962; WAN024ADM_at; Start 7; Stop 31
tgaaagaattgctcatgatactata

SEQ ID NO: 51304 - DNA, 25 bp, Artificial
  probe
  misc_feature (1)..(25): SEQ ID NO: 5962; WAN024ADM_at; Start 12; Stop 36
gaattgctcatgatactataaaaat

SEQ ID NO: 51305 - DNA, 25 bp, Artificial
  probe
  misc_feature (1)..(25): SEQ ID NO: 5962; WAN024ADM_at; Start 27; Stop 51
ctataaaaatcttagaaattgtgat

SEQ ID NO: 51306 - DNA, 25 bp, Artificial
  probe
  misc_feature (1)..(25): SEQ ID NO: 5962; WAN024ADM_at; Start 29; Stop 53
ataaaaatcttagaaattgtgataa

SEQ ID NO: 51307 - DNA, 25 bp, Artificial
  probe
  misc_feature (1)..(25): SEQ ID NO: 3574; WAN024ADN_at; Start 11; Stop 35
cctctttgggagtatgaagttaaga

SEQ ID NO: 51308 - DNA, 25 bp, Artificial
  probe
  misc_feature (1)..(25): SEQ ID NO: 3574; WAN024ADN_at; Start 9; Stop 33
tacctctttgggagtatgaagttaa

SEQ ID NO: 51309 - DNA, 25 bp, Artificial
  probe
  misc_feature (1)..(25): SEQ ID NO: 3574; WAN024ADN_at; Start 203; Stop 227
gtaaagagatagtgagtattccagt

SEQ ID NO: 51310 - DNA, 25 bp, Artificial
  probe
  misc_feature (1)..(25): SEQ ID NO: 3574; WAN024ADN_at; Start 20; Stop 44
gagtatgaagttaagattcacattg

SEQ ID NO: 51311 - DNA, 25 bp, Artificial
  probe
  misc_feature (1)..(25): SEQ ID NO: 3574; WAN024ADN_at; Start 37; Stop 61
tcacattgaaaaagccaatcagact

SEQ ID NO: 51312 - DNA, 25 bp, Artificial
  probe
  misc_feature (1)..(25): SEQ ID NO: 3574; WAN024ADN_at; Start 220; Stop 244
attccagttaagaatcaattatatg

SEQ ID NO: 51313 - DNA, 25 bp, Artificial
  probe
  misc_feature (1)..(25): SEQ ID NO: 3574; WAN024ADN_at; Start 55; Stop 79
tcagacttacgagctttcgagtttc

SEQ ID NO: 51314 - DNA, 25 bp, Artificial
  probe
  misc_feature (1)..(25): SEQ ID NO: 3574; WAN024ADN_at; Start 132; Stop 156
tattttttcttctactagtataaca

SEQ ID NO: 51315 - DNA, 25 bp, Artificial
  probe
  misc_feature (1)..(25): SEQ ID NO: 3574; WAN024ADN_at; Start 58; Stop 82
gacttacgagctttcgagtttcttg

SEQ ID NO: 51316 - DNA, 25 bp, Artificial
  probe
  misc_feature (1)..(25): SEQ ID NO: 3574; WAN024ADN_at; Start 176; Stop 200
acttccctgtttagtcattttcttg

SEQ ID NO: 51317 - DNA, 25 bp, Artificial
  probe
  misc_feature (1)..(25): SEQ ID NO: 3574; WAN024ADN_at; Start 168; Stop 192
gaaggcaaacttccctgtttagtca

SEQ ID NO: 51318 - DNA, 25 bp, Artificial
  probe
  misc_feature (1)..(25): SEQ ID NO: 3574; WAN024ADN_at; Start 1; Stop 25
gacactaatacctctttgggagtat

SEQ ID NO: 51319 - DNA, 25 bp, Artificial
  probe
  misc_feature (1)..(25): SEQ ID NO: 3574; WAN024ADN_at; Start 3; Stop 27
cactaatacctctttgggagtatga

SEQ ID NO: 51320 - DNA, 25 bp, Artificial
  probe
  misc_feature (1)..(25): SEQ ID NO: 3574; WAN024ADN_at; Start 17; Stop 41
tgggagtatgaagttaagattcaca

SEQ ID NO: 51321 - DNA, 25 bp, Artificial
  probe
  misc_feature (1)..(25): SEQ ID NO: 3574; WAN024ADN_at; Start 200; Stop 224
gatgtaaagagatagtgagtattcc

SEQ ID NO: 51322 - DNA, 25 bp, Artificial
  probe
  misc_feature (1)..(25): SEQ ID NO: 3574; WAN024ADN_at; Start 216; Stop 240
gagtattccagttaagaatcaatta

SEQ ID NO: 51323 - DNA, 25 bp, Artificial
  probe
  misc_feature (1)..(25): SEQ ID NO: 3574; WAN024ADN_at; Start 60; Stop 84
cttacgagctttcgagtttcttggc

SEQ ID NO: 51324 - DNA, 25 bp, Artificial
  probe
  misc_feature (1)..(25): SEQ ID NO: 3574; WAN024ADN_at; Start 65; Stop 89
gagctttcgagtttcttggctcagg

SEQ ID NO: 51325 - DNA, 25 bp, Artificial
  probe
  misc_feature (1)..(25): SEQ ID NO: 3574; WAN024ADN_at; Start 34; Stop 58
gattcacattgaaaaagccaatcag

SEQ ID NO: 51326 - DNA, 25 bp, Artificial
  probe
  misc_feature (1)..(25): SEQ ID NO: 3574; WAN024ADN_at; Start 40; Stop 64
cattgaaaaagccaatcagacttac

SEQ ID NO: 51327 - DNA, 25 bp, Artificial
  probe
  misc_feature (1)..(25): SEQ ID NO: 3574; WAN024ADN_at; Start 181; Stop 205
cctgtttagtcattttcttgatgta

SEQ ID NO: 51328 - DNA, 25 bp, Artificial
  probe
  misc_feature (1)..(25): SEQ ID NO: 3574; WAN024ADN_at; Start 50; Stop 74
gccaatcagacttacgagctttcga

SEQ ID NO: 51329 - DNA, 25 bp, Artificial
  probe
  misc_feature (1)..(25): SEQ ID NO: 3574; WAN024ADN_at; Start 43; Stop 67
tgaaaaagccaatcagacttacgag

SEQ ID NO: 51330 - DNA, 25 bp, Artificial
  probe
  misc_feature (1)..(25): SEQ ID NO: 3574; WAN024ADN_at; Start 187; Stop 211
tagtcattttcttgatgtaaagaga

SEQ ID NO: 51331 - DNA, 25 bp, Artificial
  probe
  misc_feature (1)..(25): SEQ ID NO: 3574; WAN024ADN_at; Start 170; Stop 194
aggcaaacttccctgtttagtcatt

SEQ ID NO: 51332 - DNA, 25 bp, Artificial
  probe
  misc_feature (1)..(25): SEQ ID NO: 3574; WAN024ADN_at; Start 62; Stop 86
tacgagctttcgagtttcttggctc

SEQ ID NO: 51333 - DNA, 25 bp, Artificial
  probe
  misc_feature (1)..(25): SEQ ID NO: 3574; WAN024ADN_at; Start 208; Stop 232
gagatagtgagtattccagttaaga

SEQ ID NO: 51334 - DNA, 25 bp, Artificial
  probe
  misc_feature (1)..(25): SEQ ID NO: 3574; WAN024ADN_at; Start 14; Stop 38
ctttgggagtatgaagttaagattc

SEQ ID NO: 51335 - DNA, 25 bp, Artificial
  probe
  misc_feature (1)..(25): SEQ ID NO: 3574; WAN024ADN_at; Start 44; Stop 68
gaaaaagccaatcagacttacgagc

SEQ ID NO: 51336 - DNA, 25 bp, Artificial
  probe
  misc_feature (1)..(25): SEQ ID NO: 3574; WAN024ADN_at; Start 52; Stop 76
caatcagacttacgagctttcgagt

SEQ ID NO: 51337 - DNA, 25 bp, Artificial
  probe
  misc_feature (1)..(25): SEQ ID NO: 3574; WAN024ADN_at; Start 31; Stop 55
taagattcacattgaaaaagccaat

SEQ ID NO: 51338 - DNA, 25 bp, Artificial
  probe
  misc_feature (1)..(25): SEQ ID NO: 3574; WAN024ADN_at; Start 6; Stop 30
taatacctctttgggagtatgaagt

SEQ ID NO: 51339 - DNA, 25 bp, Artificial
  probe
  misc_feature (1)..(25): SEQ ID NO: 3574; WAN024ADN_at; Start 212; Stop 236
tagtgagtattccagttaagaatca

SEQ ID NO: 51340 - DNA, 25 bp, Artificial
  probe
  misc_feature (1)..(25): SEQ ID NO: 3574; WAN024ADN_at; Start 29; Stop 53
gttaagattcacattgaaaaagcca

SEQ ID NO: 51341 - DNA, 25 bp, Artificial
  probe
  misc_feature (1)..(25): SEQ ID NO: 3220; WAN024ADO_at; Start 51; Stop 75
aatgactaaacagggaagtttgcct

SEQ ID NO: 51342 - DNA, 25 bp, Artificial
  probe
  misc_feature (1)..(25): SEQ ID NO: 3220; WAN024ADO_at; Start 169; Stop 193
actcgaaagctcgtaagtctgattg

SEQ ID NO: 51343 - DNA, 25 bp, Artificial
  probe
  misc_feature (1)..(25): SEQ ID NO: 3220; WAN024ADO_at; Start 187; Stop 211
ctgattggctttttcaatgtgaatc

SEQ ID NO: 51344 - DNA, 25 bp, Artificial
  probe
  misc_feature (1)..(25): SEQ ID NO: 3220; WAN024ADO_at; Start 16; Stop 40
taactggaatactcactatctcttt

SEQ ID NO: 51345 - DNA, 25 bp, Artificial
  probe
  misc_feature (1)..(25): SEQ ID NO: 3220; WAN024ADO_at; Start 9; Stop 33
tgattcttaactggaatactcacta

SEQ ID NO: 51346 - DNA, 25 bp, Artificial
  probe
  misc_feature (1)..(25): SEQ ID NO: 3220; WAN024ADO_at; Start 40; Stop 64
tacatcaagaaaatgactaaacagg

SEQ ID NO: 51347 - DNA, 25 bp, Artificial
  probe
  misc_feature (1)..(25): SEQ ID NO: 3220; WAN024ADO_at; Start 89; Stop 113
tgttatactagtagaagaaaaaata

SEQ ID NO: 51348 - DNA, 25 bp, Artificial
  probe
  misc_feature (1)..(25): SEQ ID NO: 3220; WAN024ADO_at; Start 177; Stop 201
gctcgtaagtctgattggctttttc

SEQ ID NO: 51349 - DNA, 25 bp, Artificial
  probe
  misc_feature (1)..(25): SEQ ID NO: 3220; WAN024ADO_at; Start 45; Stop 69
caagaaaatgactaaacagggaagt

SEQ ID NO: 51350 - DNA, 25 bp, Artificial
  probe
  misc_feature (1)..(25): SEQ ID NO: 3220; WAN024ADO_at; Start 25; Stop 49
tactcactatctctttacatcaaga

SEQ ID NO: 51351 - DNA, 25 bp, Artificial
  probe
  misc_feature (1)..(25): SEQ ID NO: 3220; WAN024ADO_at; Start 13; Stop 37
tcttaactggaatactcactatctc

SEQ ID NO: 51352 - DNA, 25 bp, Artificial
  probe
  misc_feature (1)..(25): SEQ ID NO: 3220; WAN024ADO_at; Start 163; Stop 187
caagaaactcgaaagctcgtaagtc

SEQ ID NO: 51353 - DNA, 25 bp, Artificial
  probe
  misc_feature (1)..(25): SEQ ID NO: 3220; WAN024ADO_at; Start 192; Stop 216
tggctttttcaatgtgaatcttaac

SEQ ID NO: 51354 - DNA, 25 bp, Artificial
  probe
  misc_feature (1)..(25): SEQ ID NO: 3220; WAN024ADO_at; Start 213; Stop 237
taacttcatactcccaaagaggtat

SEQ ID NO: 51355 - DNA, 25 bp, Artificial
  probe
  misc_feature (1)..(25): SEQ ID NO: 3220; WAN024ADO_at; Start 44; Stop 68
tcaagaaaatgactaaacagggaag

SEQ ID NO: 51356 - DNA, 25 bp, Artificial
  probe
  misc_feature (1)..(25): SEQ ID NO: 3220; WAN024ADO_at; Start 173; Stop 197
gaaagctcgtaagtctgattggctt

SEQ ID NO: 51357 - DNA, 25 bp, Artificial
  probe
  misc_feature (1)..(25): SEQ ID NO: 3220; WAN024ADO_at; Start 21; Stop 45
ggaatactcactatctctttacatc

SEQ ID NO: 51358 - DNA, 25 bp, Artificial
  probe
  misc_feature (1)..(25): SEQ ID NO: 3220; WAN024ADO_at; Start 210; Stop 234
tcttaacttcatactcccaaagagg

SEQ ID NO: 51359 - DNA, 25 bp, Artificial
  probe
  misc_feature (1)..(25): SEQ ID NO: 3220; WAN024ADO_at; Start 207; Stop 231
gaatcttaacttcatactcccaaag

SEQ ID NO: 51360 - DNA, 25 bp, Artificial
  probe
  misc_feature (1)..(25): SEQ ID NO: 3220; WAN024ADO_at; Start 159; Stop 183
gagccaagaaactcgaaagctcgta

SEQ ID NO: 51361 - DNA, 25 bp, Artificial
  probe
  misc_feature (1)..(25): SEQ ID NO: 3220; WAN024ADO_at; Start 180; Stop 204
cgtaagtctgattggctttttcaat

SEQ ID NO: 51362 - DNA, 25 bp, Artificial
  probe
  misc_feature (1)..(25): SEQ ID NO: 3220; WAN024ADO_at; Start 32; Stop 56
tatctctttacatcaagaaaatgac

SEQ ID NO: 51363 - DNA, 25 bp, Artificial
  probe
  misc_feature (1)..(25): SEQ ID NO: 3220; WAN024ADO_at; Start 156; Stop 180
cctgagccaagaaactcgaaagctc

SEQ ID NO: 51364 - DNA, 25 bp, Artificial
  probe
  misc_feature (1)..(25): SEQ ID NO: 3220; WAN024ADO_at; Start 5; Stop 29
taattgattcttaactggaatactc

SEQ ID NO: 51365 - DNA, 25 bp, Artificial
  probe
  misc_feature (1)..(25): SEQ ID NO: 3220; WAN024ADO_at; Start 158; Stop 182
tgagccaagaaactcgaaagctcgt

SEQ ID NO: 51366 - DNA, 25 bp, Artificial
  probe
  misc_feature (1)..(25): SEQ ID NO: 3220; WAN024ADO_at; Start 53; Stop 77
tgactaaacagggaagtttgccttc

SEQ ID NO: 51367 - DNA, 25 bp, Artificial
  probe
  misc_feature (1)..(25): SEQ ID NO: 3220; WAN024ADO_at; Start 161; Stop 185
gccaagaaactcgaaagctcgtaag

SEQ ID NO: 51368 - DNA, 25 bp, Artificial
  probe
  misc_feature (1)..(25): SEQ ID NO: 3220; WAN024ADO_at; Start 172; Stop 196
cgaaagctcgtaagtctgattggct

SEQ ID NO: 51369 - DNA, 25 bp, Artificial
  probe
  misc_feature (1)..(25): SEQ ID NO: 3220; WAN024ADO_at; Start 171; Stop 195
tcgaaagctcgtaagtctgattggc

SEQ ID NO: 51370 - DNA, 25 bp, Artificial
  probe
  misc_feature (1)..(25): SEQ ID NO: 3220; WAN024ADO_at; Start 96; Stop 120
ctagtagaagaaaaaatagaaagat

SEQ ID NO: 51371 - DNA, 25 bp, Artificial
  probe
  misc_feature (1)..(25): SEQ ID NO: 3220; WAN024ADO_at; Start 166; Stop 190
gaaactcgaaagctcgtaagtctga

SEQ ID NO: 51372 - DNA, 25 bp, Artificial
  probe
  misc_feature (1)..(25): SEQ ID NO: 3220; WAN024ADO_at; Start 185; Stop 209
gtctgattggctttttcaatgtgaa

SEQ ID NO: 51373 - DNA, 25 bp, Artificial
  probe
  misc_feature (1)..(25): SEQ ID NO: 3220; WAN024ADO_at; Start 215; Stop 239
acttcatactcccaaagaggtatta

SEQ ID NO: 51374 - DNA, 25 bp, Artificial
  probe
  misc_feature (1)..(25): SEQ ID NO: 3220; WAN024ADO_at; Start 42; Stop 66
catcaagaaaatgactaaacaggga

SEQ ID NO: 51375 - DNA, 25 bp, Artificial
  probe
  misc_feature (1)..(25): SEQ ID NO: 583; WAN024ADP_at; Start 40; Stop 64
cttctaagaacgctataactgctgc

SEQ ID NO: 51376 - DNA, 25 bp, Artificial
  probe
  misc_feature (1)..(25): SEQ ID NO: 583; WAN024ADP_at; Start 129; Stop 153
gatacatctttatattatcatcact

SEQ ID NO: 51377 - DNA, 25 bp, Artificial
  probe
  misc_feature (1)..(25): SEQ ID NO: 583; WAN024ADP_at; Start 1; Stop 25
atcctttgatttaaaatgaccttat

SEQ ID NO: 51378 - DNA, 25 bp, Artificial
  probe
  misc_feature (1)..(25): SEQ ID NO: 583; WAN024ADP_at; Start 71; Stop 95
catcggtattccgtatgggcttaat

SEQ ID NO: 51379 - DNA, 25 bp, Artificial
  probe
  misc_feature (1)..(25): SEQ ID NO: 583; WAN024ADP_at; Start 45; Stop 69
aagaacgctataactgctgctccaa

SEQ ID NO: 51380 - DNA, 25 bp, Artificial
  probe
  misc_feature (1)..(25): SEQ ID NO: 583; WAN024ADP_at; Start 60; Stop 84
gctgctccaaccatcggtattccgt

SEQ ID NO: 51381 - DNA, 25 bp, Artificial
  probe
  misc_feature (1)..(25): SEQ ID NO: 583; WAN024ADP_at; Start 112; Stop 136
aagcttctataccaagtgatacatc

SEQ ID NO: 51382 - DNA, 25 bp, Artificial
  probe
  misc_feature (1)..(25): SEQ ID NO: 583; WAN024ADP_at; Start 114; Stop 138
gcttctataccaagtgatacatctt

SEQ ID NO: 51383 - DNA, 25 bp, Artificial
  probe
  misc_feature (1)..(25): SEQ ID NO: 583; WAN024ADP_at; Start 62; Stop 86
tgctccaaccatcggtattccgtat

SEQ ID NO: 51384 - DNA, 25 bp, Artificial
  probe
  misc_feature (1)..(25): SEQ ID NO: 583; WAN024ADP_at; Start 107; Stop 131
taccaaagcttctataccaagtgat

SEQ ID NO: 51385 - DNA, 25 bp, Artificial
  probe
  misc_feature (1)..(25): SEQ ID NO: 583; WAN024ADP_at; Start 65; Stop 89
tccaaccatcggtattccgtatggg

SEQ ID NO: 51386 - DNA, 25 bp, Artificial
  probe
  misc_feature (1)..(25): SEQ ID NO: 583; WAN024ADP_at; Start 59; Stop 83
tgctgctccaaccatcggtattccg

SEQ ID NO: 51387 - DNA, 25 bp, Artificial
  probe
  misc_feature (1)..(25): SEQ ID NO: 583; WAN024ADP_at; Start 157; Stop 181
taagttaaacagaaacagacagaat

SEQ ID NO: 51388 - DNA, 25 bp, Artificial
  probe
  misc_feature (1)..(25): SEQ ID NO: 583; WAN024ADP_at; Start 144; Stop 168
tatcatcactaattaagttaaacag

SEQ ID NO: 51389 - DNA, 25 bp, Artificial
  probe
  misc_feature (1)..(25): SEQ ID NO: 583; WAN024ADP_at; Start 44; Stop 68
taagaacgctataactgctgctcca

SEQ ID NO: 51390 - DNA, 25 bp, Artificial
  probe
  misc_feature (1)..(25): SEQ ID NO: 583; WAN024ADP_at; Start 42; Stop 66
tctaagaacgctataactgctgctc

SEQ ID NO: 51391 - DNA, 25 bp, Artificial
  probe
  misc_feature (1)..(25): SEQ ID NO: 583; WAN024ADP_at; Start 47; Stop 71
gaacgctataactgctgctccaacc

SEQ ID NO: 51392 - DNA, 25 bp, Artificial
  probe
  misc_feature (1)..(25): SEQ ID NO: 583; WAN024ADP_at; Start 117; Stop 141
tctataccaagtgatacatctttat

SEQ ID NO: 51393 - DNA, 25 bp, Artificial
  probe
  misc_feature (1)..(25): SEQ ID NO: 583; WAN024ADP_at; Start 176; Stop 200
cagaattattacatcctgtctccct

SEQ ID NO: 51394 - DNA, 25 bp, Artificial
  probe
  misc_feature (1)..(25): SEQ ID NO: 583; WAN024ADP_at; Start 110; Stop 134
caaagcttctataccaagtgataca

SEQ ID NO: 51395 - DNA, 25 bp, Artificial
  probe
  misc_feature (1)..(25): SEQ ID NO: 583; WAN024ADP_at; Start 150; Stop 174
cactaattaagttaaacagaaacag

SEQ ID NO: 51396 - DNA, 25 bp, Artificial
  probe
  misc_feature (1)..(25): SEQ ID NO: 583; WAN024ADP_at; Start 52; Stop 76
ctataactgctgctccaaccatcgg

SEQ ID NO: 51397 - DNA, 25 bp, Artificial
  probe
  misc_feature (1)..(25): SEQ ID NO: 583; WAN024ADP_at; Start 37; Stop 61
taccttctaagaacgctataactgc

SEQ ID NO: 51398 - DNA, 25 bp, Artificial
  probe
  misc_feature (1)..(25): SEQ ID NO: 583; WAN024ADP_at; Start 67; Stop 91
caaccatcggtattccgtatgggct

SEQ ID NO: 51399 - DNA, 25 bp, Artificial
  probe
  misc_feature (1)..(25): SEQ ID NO: 583; WAN024ADP_at; Start 166; Stop 190
cagaaacagacagaattattacatc

SEQ ID NO: 51400 - DNA, 25 bp, Artificial
  probe
  misc_feature (1)..(25): SEQ ID NO: 583; WAN024ADP_at; Start 160; Stop 184
gttaaacagaaacagacagaattat

SEQ ID NO: 51401 - DNA, 25 bp, Artificial
  probe
  misc_feature (1)..(25): SEQ ID NO: 583; WAN024ADP_at; Start 123; Stop 147
ccaagtgatacatctttatattatc

SEQ ID NO: 51402 - DNA, 25 bp, Artificial
  probe
  misc_feature (1)..(25): SEQ ID NO: 583; WAN024ADP_at; Start 53; Stop 77
tataactgctgctccaaccatcggt

SEQ ID NO: 51403 - DNA, 25 bp, Artificial
  probe
  misc_feature (1)..(25): SEQ ID NO: 583; WAN024ADP_at; Start 55; Stop 79
taactgctgctccaaccatcggtat

SEQ ID NO: 51404 - DNA, 25 bp, Artificial
  probe
  misc_feature (1)..(25): SEQ ID NO: 583; WAN024ADP_at; Start 56; Stop 80
aactgctgctccaaccatcggtatt

SEQ ID NO: 51405 - DNA, 25 bp, Artificial
  probe
  misc_feature (1)..(25): SEQ ID NO: 583; WAN024ADP_at; Start 168; Stop 192
gaaacagacagaattattacatcct

SEQ ID NO: 51406 - DNA, 25 bp, Artificial
  probe
  misc_feature (1)..(25): SEQ ID NO: 583; WAN024ADP_at; Start 73; Stop 97
tcggtattccgtatgggcttaataa

SEQ ID NO: 51407 - DNA, 25 bp, Artificial
  probe
  misc_feature (1)..(25): SEQ ID NO: 583; WAN024ADP_at; Start 104; Stop 128
taataccaaagcttctataccaagt

SEQ ID NO: 51408 - DNA, 25 bp, Artificial
  probe
  misc_feature (1)..(25): SEQ ID NO: 583; WAN024ADP_at; Start 29; Stop 53
tctatttataccttctaagaacgct

SEQ ID NO: 51409 - DNA, 25 bp, Artificial
  probe
  misc_feature (1)..(25): SEQ ID NO: 465; WAN024ADQ_at; Start 104; Stop 128
ttattaagcccatacggaataccga

SEQ ID NO: 51410 - DNA, 25 bp, Artificial
  probe
  misc_feature (1)..(25): SEQ ID NO: 465; WAN024ADQ_at; Start 120; Stop 144
gaataccgatggttggagcagcagt

SEQ ID NO: 51411 - DNA, 25 bp, Artificial
  probe
  misc_feature (1)..(25): SEQ ID NO: 465; WAN024ADQ_at; Start 111; Stop 135
gcccatacggaataccgatggttgg

SEQ ID NO: 51412 - DNA, 25 bp, Artificial
  probe
  misc_feature (1)..(25): SEQ ID NO: 465; WAN024ADQ_at; Start 135; Stop 159
gagcagcagttatagcgttcttaga

SEQ ID NO: 51413 - DNA, 25 bp, Artificial
  probe
  misc_feature (1)..(25): SEQ ID NO: 465; WAN024ADQ_at; Start 18; Stop 42
taattctgtctgtttctgtttaact

SEQ ID NO: 51414 - DNA, 25 bp, Artificial
  probe
  misc_feature (1)..(25): SEQ ID NO: 465; WAN024ADQ_at; Start 67; Stop 91
tgtatcacttggtatagaagctttg

SEQ ID NO: 51415 - DNA, 25 bp, Artificial
  probe
  misc_feature (1)..(25): SEQ ID NO: 465; WAN024ADQ_at; Start 106; Stop 130
attaagcccatacggaataccgatg

SEQ ID NO: 51416 - DNA, 25 bp, Artificial
  probe
  misc_feature (1)..(25): SEQ ID NO: 465; WAN024ADQ_at; Start 140; Stop 164
gcagttatagcgttcttagaaggta

SEQ ID NO: 51417 - DNA, 25 bp, Artificial
  probe
  misc_feature (1)..(25): SEQ ID NO: 465; WAN024ADQ_at; Start 124; Stop 148
accgatggttggagcagcagttata

SEQ ID NO: 51418 - DNA, 25 bp, Artificial
  probe
  misc_feature (1)..(25): SEQ ID NO: 465; WAN024ADQ_at; Start 116; Stop 140
tacggaataccgatggttggagcag

SEQ ID NO: 51419 - DNA, 25 bp, Artificial
  probe
  misc_feature (1)..(25): SEQ ID NO: 465; WAN024ADQ_at; Start 149; Stop 173
gcgttcttagaaggtataaatagaa

SEQ ID NO: 51420 - DNA, 25 bp, Artificial
  probe
  misc_feature (1)..(25): SEQ ID NO: 465; WAN024ADQ_at; Start 105; Stop 129
tattaagcccatacggaataccgat

SEQ ID NO: 51421 - DNA, 25 bp, Artificial
  probe
  misc_feature (1)..(25): SEQ ID NO: 465; WAN024ADQ_at; Start 131; Stop 155
gttggagcagcagttatagcgttct

SEQ ID NO: 51422 - DNA, 25 bp, Artificial
  probe
  misc_feature (1)..(25): SEQ ID NO: 465; WAN024ADQ_at; Start 33; Stop 57
ctgtttaacttaattagtgatgata

SEQ ID NO: 51423 - DNA, 25 bp, Artificial
  probe
  misc_feature (1)..(25): SEQ ID NO: 465; WAN024ADQ_at; Start 123; Stop 147
taccgatggttggagcagcagttat

SEQ ID NO: 51424 - DNA, 25 bp, Artificial
  probe
  misc_feature (1)..(25): SEQ ID NO: 465; WAN024ADQ_at; Start 69; Stop 93
tatcacttggtatagaagctttggt

SEQ ID NO: 51425 - DNA, 25 bp, Artificial
  probe
  misc_feature (1)..(25): SEQ ID NO: 465; WAN024ADQ_at; Start 63; Stop 87
aagatgtatcacttggtatagaagc

SEQ ID NO: 51426 - DNA, 25 bp, Artificial
  probe
  misc_feature (1)..(25): SEQ ID NO: 465; WAN024ADQ_at; Start 130; Stop 154
ggttggagcagcagttatagcgttc

SEQ ID NO: 51427 - DNA, 25 bp, Artificial
  probe
  misc_feature (1)..(25): SEQ ID NO: 465; WAN024ADQ_at; Start 108; Stop 132
taagcccatacggaataccgatggt

SEQ ID NO: 51428 - DNA, 25 bp, Artificial
  probe
  misc_feature (1)..(25): SEQ ID NO: 465; WAN024ADQ_at; Start 121; Stop 145
aataccgatggttggagcagcagtt

SEQ ID NO: 51429 - DNA, 25 bp, Artificial
  probe
  misc_feature (1)..(25): SEQ ID NO: 465; WAN024ADQ_at; Start 133; Stop 157
tggagcagcagttatagcgttctta

SEQ ID NO: 51430 - DNA, 25 bp, Artificial
  probe
  misc_feature (1)..(25): SEQ ID NO: 465; WAN024ADQ_at; Start 128; Stop 152
atggttggagcagcagttatagcgt

SEQ ID NO: 51431 - DNA, 25 bp, Artificial
  probe
  misc_feature (1)..(25): SEQ ID NO: 465; WAN024ADQ_at; Start 113; Stop 137
ccatacggaataccgatggttggag

SEQ ID NO: 51432 - DNA, 25 bp, Artificial
  probe
  misc_feature (1)..(25): SEQ ID NO: 465; WAN024ADQ_at; Start 118; Stop 142
cggaataccgatggttggagcagca

SEQ ID NO: 51433 - DNA, 25 bp, Artificial
  probe
  misc_feature (1)..(25): SEQ ID NO: 465; WAN024ADQ_at; Start 125; Stop 149
ccgatggttggagcagcagttatag

SEQ ID NO: 51434 - DNA, 25 bp, Artificial
  probe
  misc_feature (1)..(25): SEQ ID NO: 465; WAN024ADQ_at; Start 65; Stop 89
gatgtatcacttggtatagaagctt

SEQ ID NO: 51435 - DNA, 25 bp, Artificial
  probe
  misc_feature (1)..(25): SEQ ID NO: 465; WAN024ADQ_at; Start 72; Stop 96
cacttggtatagaagctttggtatt

SEQ ID NO: 51436 - DNA, 25 bp, Artificial
  probe
  misc_feature (1)..(25): SEQ ID NO: 465; WAN024ADQ_at; Start 54; Stop 78
gataatataaagatgtatcacttgg

SEQ ID NO: 51437 - DNA, 25 bp, Artificial
  probe
  misc_feature (1)..(25): SEQ ID NO: 465; WAN024ADQ_at; Start 176; Stop 200
ataaggtcattttaaatcaaaggat

SEQ ID NO: 51438 - DNA, 25 bp, Artificial
  probe
  misc_feature (1)..(25): SEQ ID NO: 465; WAN024ADQ_at; Start 1; Stop 25
agggagacaggatgtaataattctg

SEQ ID NO: 51439 - DNA, 25 bp, Artificial
  probe
  misc_feature (1)..(25): SEQ ID NO: 465; WAN024ADQ_at; Start 76; Stop 100
tggtatagaagctttggtattaagt

SEQ ID NO: 51440 - DNA, 25 bp, Artificial
  probe
  misc_feature (1)..(25): SEQ ID NO: 465; WAN024ADQ_at; Start 137; Stop 161
gcagcagttatagcgttcttagaag

SEQ ID NO: 51441 - DNA, 25 bp, Artificial
  probe
  misc_feature (1)..(25): SEQ ID NO: 465; WAN024ADQ_at; Start 11; Stop 35
gatgtaataattctgtctgtttctg

SEQ ID NO: 51442 - DNA, 25 bp, Artificial
  probe
  misc_feature (1)..(25): SEQ ID NO: 465; WAN024ADQ_at; Start 147; Stop 171
tagcgttcttagaaggtataaatag

SEQ ID NO: 51443 - DNA, 25 bp, Artificial
  probe
  misc_feature (1)..(25): SEQ ID NO: 489; WAN024ADR_at; Start 4; Stop 28
ctcactccgattattcatatttatc

SEQ ID NO: 51444 - DNA, 25 bp, Artificial
  probe
  misc_feature (1)..(25): SEQ ID NO: 489; WAN024ADR_at; Start 33; Stop 57
ataacatgaataacaggaaatagaa

SEQ ID NO: 51445 - DNA, 25 bp, Artificial
  probe
  misc_feature (1)..(25): SEQ ID NO: 489; WAN024ADR_at; Start 1; Stop 25
agtctcactccgattattcatattt

SEQ ID NO: 51446 - DNA, 25 bp, Artificial
  probe
  misc_feature (1)..(25): SEQ ID NO: 489; WAN024ADR_at; Start 52; Stop 76
atagaaaagagttgataggaaaaag

SEQ ID NO: 51447 - DNA, 25 bp, Artificial
  probe
  misc_feature (1)..(25): SEQ ID NO: 489; WAN024ADR_at; Start 41; Stop 65
aataacaggaaatagaaaagagttg

SEQ ID NO: 51448 - DNA, 25 bp, Artificial
  probe
  misc_feature (1)..(25): SEQ ID NO: 489; WAN024ADR_at; Start 26; Stop 50
atccattataacatgaataacagga

SEQ ID NO: 51449 - DNA, 25 bp, Artificial
  probe
  misc_feature (1)..(25): SEQ ID NO: 489; WAN024ADR_at; Start 3; Stop 27
tctcactccgattattcatatttat

SEQ ID NO: 51450 - DNA, 25 bp, Artificial
  probe
  misc_feature (1)..(25): SEQ ID NO: 489; WAN024ADR_at; Start 7; Stop 31
actccgattattcatatttatccat

SEQ ID NO: 51451 - DNA, 25 bp, Artificial
  probe
  misc_feature (1)..(25): SEQ ID NO: 489; WAN024ADR_at; Start 39; Stop 63
tgaataacaggaaatagaaaagagt

SEQ ID NO: 51452 - DNA, 25 bp, Artificial
  probe
  misc_feature (1)..(25): SEQ ID NO: 489; WAN024ADR_at; Start 6; Stop 30
cactccgattattcatatttatcca

SEQ ID NO: 51453 - DNA, 25 bp, Artificial
  probe
  misc_feature (1)..(25): SEQ ID NO: 489; WAN024ADR_at; Start 46; Stop 70
caggaaatagaaaagagttgatagg

SEQ ID NO: 51454 - DNA, 25 bp, Artificial
  probe
  misc_feature (1)..(25): SEQ ID NO: 489; WAN024ADR_at; Start 28; Stop 52
ccattataacatgaataacaggaaa

SEQ ID NO: 51455 - DNA, 25 bp, Artificial
  probe
  misc_feature (1)..(25): SEQ ID NO: 489; WAN024ADR_at; Start 36; Stop 60
acatgaataacaggaaatagaaaag

SEQ ID NO: 51456 - DNA, 25 bp, Artificial
  probe
  misc_feature (1)..(25): SEQ ID NO: 489; WAN024ADR_at; Start 31; Stop 55
ttataacatgaataacaggaaatag

SEQ ID NO: 51457 - DNA, 25 bp, Artificial
  probe
  misc_feature (1)..(25): SEQ ID NO: 489; WAN024ADR_at; Start 5; Stop 29
tcactccgattattcatatttatcc

SEQ ID NO: 51458 - DNA, 25 bp, Artificial
  probe
  misc_feature (1)..(25): SEQ ID NO: 489; WAN024ADR_at; Start 9; Stop 33
tccgattattcatatttatccatta

SEQ ID NO: 51459 - DNA, 25 bp, Artificial
  probe
  misc_feature (1)..(25): SEQ ID NO: 489; WAN024ADR_at; Start 11; Stop 35
cgattattcatatttatccattata

SEQ ID NO: 51460 - DNA, 25 bp, Artificial
  probe
  misc_feature (1)..(25): SEQ ID NO: 489; WAN024ADR_at; Start 44; Stop 68
aacaggaaatagaaaagagttgata

SEQ ID NO: 51461 - DNA, 25 bp, Artificial
  probe
  misc_feature (1)..(25): SEQ ID NO: 489; WAN024ADR_at; Start 49; Stop 73
gaaatagaaaagagttgataggaaa

SEQ ID NO: 51462 - DNA, 25 bp, Artificial
  probe
  misc_feature (1)..(25): SEQ ID NO: 489; WAN024ADR_at; Start 2; Stop 26
gtctcactccgattattcatattta

SEQ ID NO: 51463 - DNA, 25 bp, Artificial
  probe
  misc_feature (1)..(25): SEQ ID NO: 489; WAN024ADR_at; Start 43; Stop 67
taacaggaaatagaaaagagttgat

SEQ ID NO: 51464 - DNA, 25 bp, Artificial
  probe
  misc_feature (1)..(25): SEQ ID NO: 489; WAN024ADR_at; Start 25; Stop 49
tatccattataacatgaataacagg

SEQ ID NO: 51465 - DNA, 25 bp, Artificial
  probe
  misc_feature (1)..(25): SEQ ID NO: 489; WAN024ADR_at; Start 29; Stop 53
cattataacatgaataacaggaaat

SEQ ID NO: 51466 - DNA, 25 bp, Artificial
  probe
  misc_feature (1)..(25): SEQ ID NO: 489; WAN024ADR_at; Start 47; Stop 71
aggaaatagaaaagagttgatagga

SEQ ID NO: 51467 - DNA, 25 bp, Artificial
  probe
  misc_feature (1)..(25): SEQ ID NO: 489; WAN024ADR_at; Start 45; Stop 69
acaggaaatagaaaagagttgatag

SEQ ID NO: 51468 - DNA, 25 bp, Artificial
  probe
  misc_feature (1)..(25): SEQ ID NO: 489; WAN024ADR_at; Start 37; Stop 61
catgaataacaggaaatagaaaaga

SEQ ID NO: 51469 - DNA, 25 bp, Artificial
  probe
  misc_feature (1)..(25): SEQ ID NO: 489; WAN024ADR_at; Start 48; Stop 72
ggaaatagaaaagagttgataggaa

SEQ ID NO: 51470 - DNA, 25 bp, Artificial
  probe
  misc_feature (1)..(25): SEQ ID NO: 489; WAN024ADR_at; Start 32; Stop 56
tataacatgaataacaggaaataga

SEQ ID NO: 51471 - DNA, 25 bp, Artificial
  probe
  misc_feature (1)..(25): SEQ ID NO: 489; WAN024ADR_at; Start 38; Stop 62
atgaataacaggaaatagaaaagag

SEQ ID NO: 51472 - DNA, 25 bp, Artificial
  probe
  misc_feature (1)..(25): SEQ ID NO: 489; WAN024ADR_at; Start 53; Stop 77
tagaaaagagttgataggaaaaaga

SEQ ID NO: 51473 - DNA, 25 bp, Artificial
  probe
  misc_feature (1)..(25): SEQ ID NO: 489; WAN024ADR_at; Start 27; Stop 51
tccattataacatgaataacaggaa

SEQ ID NO: 51474 - DNA, 25 bp, Artificial
  probe
  misc_feature (1)..(25): SEQ ID NO: 489; WAN024ADR_at; Start 35; Stop 59
aacatgaataacaggaaatagaaaa

SEQ ID NO: 51475 - DNA, 25 bp, Artificial
  probe
  misc_feature (1)..(25): SEQ ID NO: 489; WAN024ADR_at; Start 34; Stop 58
taacatgaataacaggaaatagaaa

SEQ ID NO: 51476 - DNA, 25 bp, Artificial
  probe
  misc_feature (1)..(25): SEQ ID NO: 489; WAN024ADR_at; Start 42; Stop 66
ataacaggaaatagaaaagagttga

SEQ ID NO: 51477 - DNA, 25 bp, Artificial
  probe
  misc_feature (1)..(25): SEQ ID NO: 4479; WAN024ADS_at; Start 53; Stop 77
ctgttattcatgttataatggataa

SEQ ID NO: 51478 - DNA, 25 bp, Artificial
  probe
  misc_feature (1)..(25): SEQ ID NO: 4479; WAN024ADS_at; Start 51; Stop 75
tcctgttattcatgttataatggat

SEQ ID NO: 51479 - DNA, 25 bp, Artificial
  probe
  misc_feature (1)..(25): SEQ ID NO: 4479; WAN024ADS_at; Start 69; Stop 93
aatggataaatatgaataatcggag

SEQ ID NO: 51480 - DNA, 25 bp, Artificial
  probe
  misc_feature (1)..(25): SEQ ID NO: 4479; WAN024ADS_at; Start 70; Stop 94
atggataaatatgaataatcggagt

SEQ ID NO: 51481 - DNA, 25 bp, Artificial
  probe
  misc_feature (1)..(25): SEQ ID NO: 4479; WAN024ADS_at; Start 45; Stop 69
tctatttcctgttattcatgttata

SEQ ID NO: 51482 - DNA, 25 bp, Artificial
  probe
  misc_feature (1)..(25): SEQ ID NO: 4479; WAN024ADS_at; Start 34; Stop 58
atcaactcttttctatttcctgtta

SEQ ID NO: 51483 - DNA, 25 bp, Artificial
  probe
  misc_feature (1)..(25): SEQ ID NO: 4479; WAN024ADS_at; Start 40; Stop 64
tcttttctatttcctgttattcatg

SEQ ID NO: 51484 - DNA, 25 bp, Artificial
  probe
  misc_feature (1)..(25): SEQ ID NO: 4479; WAN024ADS_at; Start 35; Stop 59
tcaactcttttctatttcctgttat

SEQ ID NO: 51485 - DNA, 25 bp, Artificial
  probe
  misc_feature (1)..(25): SEQ ID NO: 4479; WAN024ADS_at; Start 67; Stop 91
ataatggataaatatgaataatcgg

SEQ ID NO: 51486 - DNA, 25 bp, Artificial
  probe
  misc_feature (1)..(25): SEQ ID NO: 4479; WAN024ADS_at; Start 33; Stop 57
tatcaactcttttctatttcctgtt

SEQ ID NO: 51487 - DNA, 25 bp, Artificial
  probe
  misc_feature (1)..(25): SEQ ID NO: 4479; WAN024ADS_at; Start 43; Stop 67
tttctatttcctgttattcatgtta

SEQ ID NO: 51488 - DNA, 25 bp, Artificial
  probe
  misc_feature (1)..(25): SEQ ID NO: 4479; WAN024ADS_at; Start 32; Stop 56
ctatcaactcttttctatttcctgt

SEQ ID NO: 51489 - DNA, 25 bp, Artificial
  probe
  misc_feature (1)..(25): SEQ ID NO: 4479; WAN024ADS_at; Start 25; Stop 49
ctttttcctatcaactcttttctat

SEQ ID NO: 51490 - DNA, 25 bp, Artificial
  probe
  misc_feature (1)..(25): SEQ ID NO: 4479; WAN024ADS_at; Start 42; Stop 66
ttttctatttcctgttattcatgtt

SEQ ID NO: 51491 - DNA, 25 bp, Artificial
  probe
  misc_feature (1)..(25): SEQ ID NO: 4479; WAN024ADS_at; Start 28; Stop 52
tttcctatcaactcttttctatttc

SEQ ID NO: 51492 - DNA, 25 bp, Artificial
  probe
  misc_feature (1)..(25): SEQ ID NO: 4479; WAN024ADS_at; Start 66; Stop 90
tataatggataaatatgaataatcg

SEQ ID NO: 51493 - DNA, 25 bp, Artificial
  probe
  misc_feature (1)..(25): SEQ ID NO: 4479; WAN024ADS_at; Start 55; Stop 79
gttattcatgttataatggataaat

SEQ ID NO: 51494 - DNA, 25 bp, Artificial
  probe
  misc_feature (1)..(25): SEQ ID NO: 4479; WAN024ADS_at; Start 39; Stop 63
ctcttttctatttcctgttattcat

SEQ ID NO: 51495 - DNA, 25 bp, Artificial
  probe
  misc_feature (1)..(25): SEQ ID NO: 4479; WAN024ADS_at; Start 46; Stop 70
ctatttcctgttattcatgttataa

SEQ ID NO: 51496 - DNA, 25 bp, Artificial
  probe
  misc_feature (1)..(25): SEQ ID NO: 4479; WAN024ADS_at; Start 38; Stop 62
actcttttctatttcctgttattca

SEQ ID NO: 51497 - DNA, 25 bp, Artificial
  probe
  misc_feature (1)..(25): SEQ ID NO: 4479; WAN024ADS_at; Start 49; Stop 73
tttcctgttattcatgttataatgg

SEQ ID NO: 51498 - DNA, 25 bp, Artificial
  probe
  misc_feature (1)..(25): SEQ ID NO: 4479; WAN024ADS_at; Start 44; Stop 68
ttctatttcctgttattcatgttat

SEQ ID NO: 51499 - DNA, 25 bp, Artificial
  probe
  misc_feature (1)..(25): SEQ ID NO: 4479; WAN024ADS_at; Start 29; Stop 53
ttcctatcaactcttttctatttcc

SEQ ID NO: 51500 - DNA, 25 bp, Artificial
  probe
  misc_feature (1)..(25): SEQ ID NO: 4479; WAN024ADS_at; Start 60; Stop 84
tcatgttataatggataaatatgaa

SEQ ID NO: 51501 - DNA, 25 bp, Artificial
  probe
  misc_feature (1)..(25): SEQ ID NO: 4479; WAN024ADS_at; Start 31; Stop 55
cctatcaactcttttctatttcctg

SEQ ID NO: 51502 - DNA, 25 bp, Artificial
  probe
  misc_feature (1)..(25): SEQ ID NO: 4479; WAN024ADS_at; Start 50; Stop 74
ttcctgttattcatgttataatgga

SEQ ID NO: 51503 - DNA, 25 bp, Artificial
  probe
  misc_feature (1)..(25): SEQ ID NO: 4479; WAN024ADS_at; Start 30; Stop 54
tcctatcaactcttttctatttcct

SEQ ID NO: 51504 - DNA, 25 bp, Artificial
  probe
  misc_feature (1)..(25): SEQ ID NO: 4479; WAN024ADS_at; Start 41; Stop 65
cttttctatttcctgttattcatgt

SEQ ID NO: 51505 - DNA, 25 bp, Artificial
  probe
  misc_feature (1)..(25): SEQ ID NO: 4479; WAN024ADS_at; Start 24; Stop 48
tctttttcctatcaactcttttcta

SEQ ID NO: 51506 - DNA, 25 bp, Artificial
  probe
  misc_feature (1)..(25): SEQ ID NO: 4479; WAN024ADS_at; Start 68; Stop 92
taatggataaatatgaataatcgga

SEQ ID NO: 51507 - DNA, 25 bp, Artificial
  probe
  misc_feature (1)..(25): SEQ ID NO: 4479; WAN024ADS_at; Start 52; Stop 76
cctgttattcatgttataatggata

SEQ ID NO: 51508 - DNA, 25 bp, Artificial
  probe
  misc_feature (1)..(25): SEQ ID NO: 4479; WAN024ADS_at; Start 54; Stop 78
tgttattcatgttataatggataaa

SEQ ID NO: 51509 - DNA, 25 bp, Artificial
  probe
  misc_feature (1)..(25): SEQ ID NO: 4479; WAN024ADS_at; Start 36; Stop 60
caactcttttctatttcctgttatt

SEQ ID NO: 51510 - DNA, 25 bp, Artificial
  probe
  misc_feature (1)..(25): SEQ ID NO: 4479; WAN024ADS_at; Start 56; Stop 80
ttattcatgttataatggataaata

SEQ ID NO: 51511 - DNA, 25 bp, Artificial
  probe
  misc_feature (1)..(25): SEQ ID NO: 3150; WAN024ADT_at; Start 30; Stop 54
ctatcataccctttaaatattaccg

SEQ ID NO: 51512 - DNA, 25 bp, Artificial
  probe
  misc_feature (1)..(25): SEQ ID NO: 3150; WAN024ADT_at; Start 21; Stop 45
tctatagttctatcataccctttaa

SEQ ID NO: 51513 - DNA, 25 bp, Artificial
  probe
  misc_feature (1)..(25): SEQ ID NO: 3150; WAN024ADT_at; Start 25; Stop 49
tagttctatcataccctttaaatat

SEQ ID NO: 51514 - DNA, 25 bp, Artificial
  probe
  misc_feature (1)..(25): SEQ ID NO: 3150; WAN024ADT_at; Start 13; Stop 37
tccttctttctatagttctatcata

SEQ ID NO: 51515 - DNA, 25 bp, Artificial
  probe
  misc_feature (1)..(25): SEQ ID NO: 3150; WAN024ADT_at; Start 2; Stop 26
ttcgaaaattctccttctttctata

SEQ ID NO: 51516 - DNA, 25 bp, Artificial
  probe
  misc_feature (1)..(25): SEQ ID NO: 3150; WAN024ADT_at; Start 8; Stop 32
aattctccttctttctatagttcta

SEQ ID NO: 51517 - DNA, 25 bp, Artificial
  probe
  misc_feature (1)..(25): SEQ ID NO: 3150; WAN024ADT_at; Start 20; Stop 44
ttctatagttctatcatacccttta

SEQ ID NO: 51518 - DNA, 25 bp, Artificial
  probe
  misc_feature (1)..(25): SEQ ID NO: 3150; WAN024ADT_at; Start 27; Stop 51
gttctatcataccctttaaatatta

SEQ ID NO: 51519 - DNA, 25 bp, Artificial
  probe
  misc_feature (1)..(25): SEQ ID NO: 3150; WAN024ADT_at; Start 17; Stop 41
tctttctatagttctatcataccct

SEQ ID NO: 51520 - DNA, 25 bp, Artificial
  probe
  misc_feature (1)..(25): SEQ ID NO: 3150; WAN024ADT_at; Start 3; Stop 27
tcgaaaattctccttctttctatag

SEQ ID NO: 51521 - DNA, 25 bp, Artificial
  probe
  misc_feature (1)..(25): SEQ ID NO: 3150; WAN024ADT_at; Start 19; Stop 43
tttctatagttctatcatacccttt

SEQ ID NO: 51522 - DNA, 25 bp, Artificial
  probe
  misc_feature (1)..(25): SEQ ID NO: 3150; WAN024ADT_at; Start 10; Stop 34
ttctccttctttctatagttctatc

SEQ ID NO: 51523 - DNA, 25 bp, Artificial
  probe
  misc_feature (1)..(25): SEQ ID NO: 3150; WAN024ADT_at; Start 9; Stop 33
attctccttctttctatagttctat

SEQ ID NO: 51524 - DNA, 25 bp, Artificial
  probe
  misc_feature (1)..(25): SEQ ID NO: 3150; WAN024ADT_at; Start 7; Stop 31
aaattctccttctttctatagttct

SEQ ID NO: 51525 - DNA, 25 bp, Artificial
  probe
  misc_feature (1)..(25): SEQ ID NO: 3150; WAN024ADT_at; Start 15; Stop 39
cttctttctatagttctatcatacc

SEQ ID NO: 51526 - DNA, 25 bp, Artificial
  probe
  misc_feature (1)..(25): SEQ ID NO: 3150; WAN024ADT_at; Start 1; Stop 25
attcgaaaattctccttctttctat

SEQ ID NO: 51527 - DNA, 25 bp, Artificial
  probe
  misc_feature (1)..(25): SEQ ID NO: 3150; WAN024ADT_at; Start 24; Stop 48
atagttctatcataccctttaaata

SEQ ID NO: 51528 - DNA, 25 bp, Artificial
  probe
  misc_feature (1)..(25): SEQ ID NO: 3150; WAN024ADT_at; Start 12; Stop 36
ctccttctttctatagttctatcat

SEQ ID NO: 51529 - DNA, 25 bp, Artificial
  probe
  misc_feature (1)..(25): SEQ ID NO: 3150; WAN024ADT_at; Start 18; Stop 42
ctttctatagttctatcataccctt

SEQ ID NO: 51530 - DNA, 25 bp, Artificial
  probe
  misc_feature (1)..(25): SEQ ID NO: 3150; WAN024ADT_at; Start 16; Stop 40
ttctttctatagttctatcataccc

SEQ ID NO: 51531 - DNA, 25 bp, Artificial
  probe
  misc_feature (1)..(25): SEQ ID NO: 3150; WAN024ADT_at; Start 23; Stop 47
tatagttctatcataccctttaaat

SEQ ID NO: 51532 - DNA, 25 bp, Artificial
  probe
  misc_feature (1)..(25): SEQ ID NO: 3150; WAN024ADT_at; Start 11; Stop 35
tctccttctttctatagttctatca

SEQ ID NO: 51533 - DNA, 25 bp, Artificial
  probe
  misc_feature (1)..(25): SEQ ID NO: 3150; WAN024ADT_at; Start 4; Stop 28
cgaaaattctccttctttctatagt

SEQ ID NO: 51534 - DNA, 25 bp, Artificial
  probe
  misc_feature (1)..(25): SEQ ID NO: 3150; WAN024ADT_at; Start 22; Stop 46
ctatagttctatcataccctttaaa

SEQ ID NO: 51535 - DNA, 25 bp, Artificial
  probe
  misc_feature (1)..(25): SEQ ID NO: 3150; WAN024ADT_at; Start 14; Stop 38
ccttctttctatagttctatcatac

SEQ ID NO: 51536 - DNA, 25 bp, Artificial
  probe
  misc_feature (1)..(25): SEQ ID NO: 3150; WAN024ADT_at; Start 26; Stop 50
agttctatcataccctttaaatatt

SEQ ID NO: 51537 - DNA, 25 bp, Artificial
  probe
  misc_feature (1)..(25): SEQ ID NO: 3150; WAN024ADT_at; Start 28; Stop 52
ttctatcataccctttaaatattac

SEQ ID NO: 51538 - DNA, 25 bp, Artificial
  probe
  misc_feature (1)..(25): SEQ ID NO: 3150; WAN024ADT_at; Start 29; Stop 53
tctatcataccctttaaatattacc

SEQ ID NO: 51539 - DNA, 25 bp, Artificial
  probe
  misc_feature (1)..(25): SEQ ID NO: 3530; WAN024ADU_at; Start 34; Stop 58
atagaaagaaggagaattttcgaat

SEQ ID NO: 51540 - DNA, 25 bp, Artificial
  probe
  misc_feature (1)..(25): SEQ ID NO: 3530; WAN024ADU_at; Start 27; Stop 51
tagaactatagaaagaaggagaatt

SEQ ID NO: 51541 - DNA, 25 bp, Artificial
  probe
  misc_feature (1)..(25): SEQ ID NO: 3530; WAN024ADU_at; Start 25; Stop 49
gatagaactatagaaagaaggagaa

SEQ ID NO: 51542 - DNA, 25 bp, Artificial
  probe
  misc_feature (1)..(25): SEQ ID NO: 3530; WAN024ADU_at; Start 19; Stop 43
gggtatgatagaactatagaaagaa

SEQ ID NO: 51543 - DNA, 25 bp, Artificial
  probe
  misc_feature (1)..(25): SEQ ID NO: 3530; WAN024ADU_at; Start 12; Stop 36
atttaaagggtatgatagaactata

SEQ ID NO: 51544 - DNA, 25 bp, Artificial
  probe
  misc_feature (1)..(25): SEQ ID NO: 3530; WAN024ADU_at; Start 22; Stop 46
tatgatagaactatagaaagaagga

SEQ ID NO: 51545 - DNA, 25 bp, Artificial
  probe
  misc_feature (1)..(25): SEQ ID NO: 3530; WAN024ADU_at; Start 24; Stop 48
tgatagaactatagaaagaaggaga

SEQ ID NO: 51546 - DNA, 25 bp, Artificial
  probe
  misc_feature (1)..(25): SEQ ID NO: 3530; WAN024ADU_at; Start 26; Stop 50
atagaactatagaaagaaggagaat

SEQ ID NO: 51547 - DNA, 25 bp, Artificial
  probe
  misc_feature (1)..(25): SEQ ID NO: 3530; WAN024ADU_at; Start 18; Stop 42
agggtatgatagaactatagaaaga

SEQ ID NO: 51548 - DNA, 25 bp, Artificial
  probe
  misc_feature (1)..(25): SEQ ID NO: 3530; WAN024ADU_at; Start 33; Stop 57
tatagaaagaaggagaattttcgaa

SEQ ID NO: 51549 - DNA, 25 bp, Artificial
  probe
  misc_feature (1)..(25): SEQ ID NO: 3530; WAN024ADU_at; Start 8; Stop 32
taatatttaaagggtatgatagaac

SEQ ID NO: 51550 - DNA, 25 bp, Artificial
  probe
  misc_feature (1)..(25): SEQ ID NO: 3530; WAN024ADU_at; Start 20; Stop 44
ggtatgatagaactatagaaagaag

SEQ ID NO: 51551 - DNA, 25 bp, Artificial
  probe
  misc_feature (1)..(25): SEQ ID NO: 3530; WAN024ADU_at; Start 6; Stop 30
ggtaatatttaaagggtatgataga

SEQ ID NO: 51552 - DNA, 25 bp, Artificial
  probe
  misc_feature (1)..(25): SEQ ID NO: 3530; WAN024ADU_at; Start 23; Stop 47
atgatagaactatagaaagaaggag

SEQ ID NO: 51553 - DNA, 25 bp, Artificial
  probe
  misc_feature (1)..(25): SEQ ID NO: 3530; WAN024ADU_at; Start 17; Stop 41
aagggtatgatagaactatagaaag

SEQ ID NO: 51554 - DNA, 25 bp, Artificial
  probe
  misc_feature (1)..(25): SEQ ID NO: 3530; WAN024ADU_at; Start 16; Stop 40
aaagggtatgatagaactatagaaa

SEQ ID NO: 51555 - DNA, 25 bp, Artificial
  probe
  misc_feature (1)..(25): SEQ ID NO: 3530; WAN024ADU_at; Start 28; Stop 52
agaactatagaaagaaggagaattt

SEQ ID NO: 51556 - DNA, 25 bp, Artificial
  probe
  misc_feature (1)..(25): SEQ ID NO: 3530; WAN024ADU_at; Start 5; Stop 29
cggtaatatttaaagggtatgatag

SEQ ID NO: 51557 - DNA, 25 bp, Artificial
  probe
  misc_feature (1)..(25): SEQ ID NO: 3530; WAN024ADU_at; Start 15; Stop 39
taaagggtatgatagaactatagaa

SEQ ID NO: 51558 - DNA, 25 bp, Artificial
  probe
  misc_feature (1)..(25): SEQ ID NO: 3530; WAN024ADU_at; Start 21; Stop 45
gtatgatagaactatagaaagaagg

SEQ ID NO: 51559 - DNA, 25 bp, Artificial
  probe
  misc_feature (1)..(25): SEQ ID NO: 3530; WAN024ADU_at; Start 32; Stop 56
ctatagaaagaaggagaattttcga

SEQ ID NO: 51560 - DNA, 25 bp, Artificial
  probe
  misc_feature (1)..(25): SEQ ID NO: 3530; WAN024ADU_at; Start 14; Stop 38
ttaaagggtatgatagaactataga

SEQ ID NO: 51561 - DNA, 25 bp, Artificial
  probe
  misc_feature (1)..(25): SEQ ID NO: 3530; WAN024ADU_at; Start 9; Stop 33
aatatttaaagggtatgatagaact

SEQ ID NO: 51562 - DNA, 25 bp, Artificial
  probe
  misc_feature (1)..(25): SEQ ID NO: 3530; WAN024ADU_at; Start 31; Stop 55
actatagaaagaaggagaattttcg

SEQ ID NO: 51563 - DNA, 25 bp, Artificial
  probe
  misc_feature (1)..(25): SEQ ID NO: 3530; WAN024ADU_at; Start 7; Stop 31
gtaatatttaaagggtatgatagaa

SEQ ID NO: 51564 - DNA, 25 bp, Artificial
  probe
  misc_feature (1)..(25): SEQ ID NO: 3530; WAN024ADU_at; Start 11; Stop 35
tatttaaagggtatgatagaactat

SEQ ID NO: 51565 - DNA, 25 bp, Artificial
  probe
  misc_feature (1)..(25): SEQ ID NO: 3530; WAN024ADU_at; Start 10; Stop 34
atatttaaagggtatgatagaacta

SEQ ID NO: 51566 - DNA, 25 bp, Artificial
  probe
  misc_feature (1)..(25): SEQ ID NO: 3530; WAN024ADU_at; Start 13; Stop 37
tttaaagggtatgatagaactatag

SEQ ID NO: 51567 - DNA, 25 bp, Artificial
  probe
  misc_feature (1)..(25): SEQ ID NO: 3629; WAN024ADZ_at; Start 100; Stop 124
tagttgcaacattgacaaacatagt

SEQ ID NO: 51568 - DNA, 25 bp, Artificial
  probe
  misc_feature (1)..(25): SEQ ID NO: 3629; WAN024ADZ_at; Start 131; Stop 155
tatctttgcgaaatatcctcttcaa

SEQ ID NO: 51569 - DNA, 25 bp, Artificial
  probe
  misc_feature (1)..(25): SEQ ID NO: 3629; WAN024ADZ_at; Start 198; Stop 222
tagtctcaagctttctatcaatttc

SEQ ID NO: 51570 - DNA, 25 bp, Artificial
  probe
  misc_feature (1)..(25): SEQ ID NO: 3629; WAN024ADZ_at; Start 213; Stop 237
tatcaatttcttctccaaaatatgc

SEQ ID NO: 51571 - DNA, 25 bp, Artificial
  probe
  misc_feature (1)..(25): SEQ ID NO: 3629; WAN024ADZ_at; Start 117; Stop 141
aacatagtatagcatatctttgcga

SEQ ID NO: 51572 - DNA, 25 bp, Artificial
  probe
  misc_feature (1)..(25): SEQ ID NO: 3629; WAN024ADZ_at; Start 124; Stop 148
tatagcatatctttgcgaaatatcc

SEQ ID NO: 51573 - DNA, 25 bp, Artificial
  probe
  misc_feature (1)..(25): SEQ ID NO: 3629; WAN024ADZ_at; Start 126; Stop 150
tagcatatctttgcgaaatatcctc

SEQ ID NO: 51574 - DNA, 25 bp, Artificial
  probe
  misc_feature (1)..(25): SEQ ID NO: 3629; WAN024ADZ_at; Start 240; Stop 264
taataatagcaaaagataaagaagg

SEQ ID NO: 51575 - DNA, 25 bp, Artificial
  probe
  misc_feature (1)..(25): SEQ ID NO: 3629; WAN024ADZ_at; Start 216; Stop 240
caatttcttctccaaaatatgctat

SEQ ID NO: 51576 - DNA, 25 bp, Artificial
  probe
  misc_feature (1)..(25): SEQ ID NO: 3629; WAN024ADZ_at; Start 83; Stop 107
tggttttttaatttgtctagttgca

SEQ ID NO: 51577 - DNA, 25 bp, Artificial
  probe
  misc_feature (1)..(25): SEQ ID NO: 3629; WAN024ADZ_at; Start 17; Stop 41
tattcttcagattagttgagtaatc

SEQ ID NO: 51578 - DNA, 25 bp, Artificial
  probe
  misc_feature (1)..(25): SEQ ID NO: 3629; WAN024ADZ_at; Start 144; Stop 168
tatcctcttcaaatcatgaattgtc

SEQ ID NO: 51579 - DNA, 25 bp, Artificial
  probe
  misc_feature (1)..(25): SEQ ID NO: 3629; WAN024ADZ_at; Start 97; Stop 121
gtctagttgcaacattgacaaacat

SEQ ID NO: 51580 - DNA, 25 bp, Artificial
  probe
  misc_feature (1)..(25): SEQ ID NO: 3629; WAN024ADZ_at; Start 167; Stop 191
tcatcaaaacatcttaaactataaa

SEQ ID NO: 51581 - DNA, 25 bp, Artificial
  probe
  misc_feature (1)..(25): SEQ ID NO: 3629; WAN024ADZ_at; Start 12; Stop 36
tccattattcttcagattagttgag

SEQ ID NO: 51582 - DNA, 25 bp, Artificial
  probe
  misc_feature (1)..(25): SEQ ID NO: 3629; WAN024ADZ_at; Start 219; Stop 243
tttcttctccaaaatatgctataat

SEQ ID NO: 51583 - DNA, 25 bp, Artificial
  probe
  misc_feature (1)..(25): SEQ ID NO: 3629; WAN024ADZ_at; Start 128; Stop 152
gcatatctttgcgaaatatcctctt

SEQ ID NO: 51584 - DNA, 25 bp, Artificial
  probe
  misc_feature (1)..(25): SEQ ID NO: 3629; WAN024ADZ_at; Start 148; Stop 172
ctcttcaaatcatgaattgtcatca

SEQ ID NO: 51585 - DNA, 25 bp, Artificial
  probe
  misc_feature (1)..(25): SEQ ID NO: 3629; WAN024ADZ_at; Start 91; Stop 115
taatttgtctagttgcaacattgac

SEQ ID NO: 51586 - DNA, 25 bp, Artificial
  probe
  misc_feature (1)..(25): SEQ ID NO: 3629; WAN024ADZ_at; Start 171; Stop 195
caaaacatcttaaactataaaatca

SEQ ID NO: 51587 - DNA, 25 bp, Artificial
  probe
  misc_feature (1)..(25): SEQ ID NO: 3629; WAN024ADZ_at; Start 188; Stop 212
taaaatcaattagtctcaagctttc

SEQ ID NO: 51588 - DNA, 25 bp, Artificial
  probe
  misc_feature (1)..(25): SEQ ID NO: 3629; WAN024ADZ_at; Start 3; Stop 27
tatatttcctccattattcttcaga

SEQ ID NO: 51589 - DNA, 25 bp, Artificial
  probe
  misc_feature (1)..(25): SEQ ID NO: 3629; WAN024ADZ_at; Start 102; Stop 126
gttgcaacattgacaaacatagtat

SEQ ID NO: 51590 - DNA, 25 bp, Artificial
  probe
  misc_feature (1)..(25): SEQ ID NO: 3629; WAN024ADZ_at; Start 119; Stop 143
catagtatagcatatctttgcgaaa

SEQ ID NO: 51591 - DNA, 25 bp, Artificial
  probe
  misc_feature (1)..(25): SEQ ID NO: 3629; WAN024ADZ_at; Start 194; Stop 218
caattagtctcaagctttctatcaa

SEQ ID NO: 51592 - DNA, 25 bp, Artificial
  probe
  misc_feature (1)..(25): SEQ ID NO: 3629; WAN024ADZ_at; Start 186; Stop 210
tataaaatcaattagtctcaagctt

SEQ ID NO: 51593 - DNA, 25 bp, Artificial
  probe
  misc_feature (1)..(25): SEQ ID NO: 3629; WAN024ADZ_at; Start 139; Stop 163
cgaaatatcctcttcaaatcatgaa

SEQ ID NO: 51594 - DNA, 25 bp, Artificial
  probe
  misc_feature (1)..(25): SEQ ID NO: 3629; WAN024ADZ_at; Start 111; Stop 135
ttgacaaacatagtatagcatatct

SEQ ID NO: 51595 - DNA, 25 bp, Artificial
  probe
  misc_feature (1)..(25): SEQ ID NO: 3629; WAN024ADZ_at; Start 106; Stop 130
caacattgacaaacatagtatagca

SEQ ID NO: 51596 - DNA, 25 bp, Artificial
  probe
  misc_feature (1)..(25): SEQ ID NO: 3629; WAN024ADZ_at; Start 246; Stop 270
tagcaaaagataaagaaggaagacc

SEQ ID NO: 51597 - DNA, 25 bp, Artificial
  probe
  misc_feature (1)..(25): SEQ ID NO: 3629; WAN024ADZ_at; Start 247; Stop 271
agcaaaagataaagaaggaagacct

SEQ ID NO: 51598 - DNA, 25 bp, Artificial
  probe
  misc_feature (1)..(25): SEQ ID NO: 3629; WAN024ADZ_at; Start 137; Stop 161
tgcgaaatatcctcttcaaatcatg

SEQ ID NO: 51599 - DNA, 25 bp, Artificial
  probe
  misc_feature (1)..(25): SEQ ID NO: 3629; WAN024ADZ_at; Start 206; Stop 230
agctttctatcaatttcttctccaa

SEQ ID NO: 51600 - DNA, 25 bp, Artificial
  probe
  misc_feature (1)..(25): SEQ ID NO: 3629; WAN024ADZ_at; Start 7; Stop 31
tttcctccattattcttcagattag

SEQ ID NO: 51601 - DNA, 25 bp, Artificial
  probe
  misc_feature (1)..(25): SEQ ID NO: 470; WAN024AE2_at; Start 129; Stop 153
tttcgcaaagatatgctatactatg

SEQ ID NO: 51602 - DNA, 25 bp, Artificial
  probe
  misc_feature (1)..(25): SEQ ID NO: 470; WAN024AE2_at; Start 120; Stop 144
aagaggatatttcgcaaagatatgc

SEQ ID NO: 51603 - DNA, 25 bp, Artificial
  probe
  misc_feature (1)..(25): SEQ ID NO: 470; WAN024AE2_at; Start 229; Stop 253
cagattactcaactaatctgaagaa

SEQ ID NO: 51604 - DNA, 25 bp, Artificial
  probe
  misc_feature (1)..(25): SEQ ID NO: 470; WAN024AE2_at; Start 104; Stop 128
gacaattcatgatttgaagaggata

SEQ ID NO: 51605 - DNA, 25 bp, Artificial
  probe
  misc_feature (1)..(25): SEQ ID NO: 470; WAN024AE2_at; Start 142; Stop 166
tgctatactatgtttgtcaatgttg

SEQ ID NO: 51606 - DNA, 25 bp, Artificial
  probe
  misc_feature (1)..(25): SEQ ID NO: 470; WAN024AE2_at; Start 55; Stop 79
tgatagaaagcttgagactaattga

SEQ ID NO: 51607 - DNA, 25 bp, Artificial
  probe
  misc_feature (1)..(25): SEQ ID NO: 470; WAN024AE2_at; Start 125; Stop 149
gatatttcgcaaagatatgctatac

SEQ ID NO: 51608 - DNA, 25 bp, Artificial
  probe
  misc_feature (1)..(25): SEQ ID NO: 470; WAN024AE2_at; Start 137; Stop 161
agatatgctatactatgtttgtcaa

SEQ ID NO: 51609 - DNA, 25 bp, Artificial
  probe
  misc_feature (1)..(25): SEQ ID NO: 470; WAN024AE2_at; Start 117; Stop 141
ttgaagaggatatttcgcaaagata

SEQ ID NO: 51610 - DNA, 25 bp, Artificial
  probe
  misc_feature (1)..(25): SEQ ID NO: 470; WAN024AE2_at; Start 156; Stop 180
tgtcaatgttgcaactagacaaatt

SEQ ID NO: 51611 - DNA, 25 bp, Artificial
  probe
  misc_feature (1)..(25): SEQ ID NO: 470; WAN024AE2_at; Start 78; Stop 102
gattttatagtttaagatgttttga

SEQ ID NO: 51612 - DNA, 25 bp, Artificial
  probe
  misc_feature (1)..(25): SEQ ID NO: 470; WAN024AE2_at; Start 35; Stop 59
gcatattttggagaagaaattgata

SEQ ID NO: 51613 - DNA, 25 bp, Artificial
  probe
  misc_feature (1)..(25): SEQ ID NO: 470; WAN024AE2_at; Start 245; Stop 269
tctgaagaataatggaggaaatata

SEQ ID NO: 51614 - DNA, 25 bp, Artificial
  probe
  misc_feature (1)..(25): SEQ ID NO: 470; WAN024AE2_at; Start 147; Stop 171
tactatgtttgtcaatgttgcaact

SEQ ID NO: 51615 - DNA, 25 bp, Artificial
  probe
  misc_feature (1)..(25): SEQ ID NO: 470; WAN024AE2_at; Start 241; Stop 265
ctaatctgaagaataatggaggaaa

SEQ ID NO: 51616 - DNA, 25 bp, Artificial
  probe
  misc_feature (1)..(25): SEQ ID NO: 470; WAN024AE2_at; Start 132; Stop 156
cgcaaagatatgctatactatgttt

SEQ ID NO: 51617 - DNA, 25 bp, Artificial
  probe
  misc_feature (1)..(25): SEQ ID NO: 470; WAN024AE2_at; Start 101; Stop 125
gatgacaattcatgatttgaagagg

SEQ ID NO: 51618 - DNA, 25 bp, Artificial
  probe
  misc_feature (1)..(25): SEQ ID NO: 470; WAN024AE2_at; Start 122; Stop 146
gaggatatttcgcaaagatatgcta

SEQ ID NO: 51619 - DNA, 25 bp, Artificial
  probe
  misc_feature (1)..(25): SEQ ID NO: 470; WAN024AE2_at; Start 165; Stop 189
tgcaactagacaaattaaaaaacca

SEQ ID NO: 51620 - DNA, 25 bp, Artificial
  probe
  misc_feature (1)..(25): SEQ ID NO: 470; WAN024AE2_at; Start 159; Stop 183
caatgttgcaactagacaaattaaa

SEQ ID NO: 51621 - DNA, 25 bp, Artificial
  probe
  misc_feature (1)..(25): SEQ ID NO: 470; WAN024AE2_at; Start 63; Stop 87
agcttgagactaattgattttatag

SEQ ID NO: 51622 - DNA, 25 bp, Artificial
  probe
  misc_feature (1)..(25): SEQ ID NO: 470; WAN024AE2_at; Start 111; Stop 135
catgatttgaagaggatatttcgca

SEQ ID NO: 51623 - DNA, 25 bp, Artificial
  probe
  misc_feature (1)..(25): SEQ ID NO: 470; WAN024AE2_at; Start 150; Stop 174
tatgtttgtcaatgttgcaactaga

SEQ ID NO: 51624 - DNA, 25 bp, Artificial
  probe
  misc_feature (1)..(25): SEQ ID NO: 470; WAN024AE2_at; Start 29; Stop 53
attatagcatattttggagaagaaa

SEQ ID NO: 51625 - DNA, 25 bp, Artificial
  probe
  misc_feature (1)..(25): SEQ ID NO: 470; WAN024AE2_at; Start 152; Stop 176
tgtttgtcaatgttgcaactagaca

SEQ ID NO: 51626 - DNA, 25 bp, Artificial
  probe
  misc_feature (1)..(25): SEQ ID NO: 470; WAN024AE2_at; Start 60; Stop 84
gaaagcttgagactaattgatttta

SEQ ID NO: 51627 - DNA, 25 bp, Artificial
  probe
  misc_feature (1)..(25): SEQ ID NO: 470; WAN024AE2_at; Start 42; Stop 66
ttggagaagaaattgatagaaagct

SEQ ID NO: 51628 - DNA, 25 bp, Artificial
  probe
  misc_feature (1)..(25): SEQ ID NO: 470; WAN024AE2_at; Start 114; Stop 138
gatttgaagaggatatttcgcaaag

SEQ ID NO: 51629 - DNA, 25 bp, Artificial
  probe
  misc_feature (1)..(25): SEQ ID NO: 470; WAN024AE2_at; Start 2; Stop 26
ggtcttccttctttatcttttgcta

SEQ ID NO: 51630 - DNA, 25 bp, Artificial
  probe
  misc_feature (1)..(25): SEQ ID NO: 470; WAN024AE2_at; Start 234; Stop 258
tactcaactaatctgaagaataatg

SEQ ID NO: 51631 - DNA, 25 bp, Artificial
  probe
  misc_feature (1)..(25): SEQ ID NO: 470; WAN024AE2_at; Start 48; Stop 72
aagaaattgatagaaagcttgagac

SEQ ID NO: 51632 - DNA, 25 bp, Artificial
  probe
  misc_feature (1)..(25): SEQ ID NO: 470; WAN024AE2_at; Start 247; Stop 271
tgaagaataatggaggaaatatatc

SEQ ID NO: 51633 - DNA, 25 bp, Artificial
  probe
  misc_feature (1)..(25): SEQ ID NO: 470; WAN024AE2_at; Start 238; Stop 262
caactaatctgaagaataatggagg

SEQ ID NO: 51634 - DNA, 25 bp, Artificial
  probe
  misc_feature (1)..(25): SEQ ID NO: 470; WAN024AE2_at; Start 50; Stop 74
gaaattgatagaaagcttgagacta

SEQ ID NO: 51635 - DNA, 25 bp, Artificial
  probe
  misc_feature (1)..(25): SEQ ID NO: 4525; WAN024AE3_at; Start 32; Stop 56
tctagcagaatgaatctctcatttc

SEQ ID NO: 51636 - DNA, 25 bp, Artificial
  probe
  misc_feature (1)..(25): SEQ ID NO: 4525; WAN024AE3_at; Start 17; Stop 41
ctaataagaagttagtctagcagaa

SEQ ID NO: 51637 - DNA, 25 bp, Artificial
  probe
  misc_feature (1)..(25): SEQ ID NO: 4525; WAN024AE3_at; Start 34; Stop 58
tagcagaatgaatctctcatttctc

SEQ ID NO: 51638 - DNA, 25 bp, Artificial
  probe
  misc_feature (1)..(25): SEQ ID NO: 4525; WAN024AE3_at; Start 29; Stop 53
tagtctagcagaatgaatctctcat

SEQ ID NO: 51639 - DNA, 25 bp, Artificial
  probe
  misc_feature (1)..(25): SEQ ID NO: 4525; WAN024AE3_at; Start 21; Stop 45
taagaagttagtctagcagaatgaa

SEQ ID NO: 51640 - DNA, 25 bp, Artificial
  probe
  misc_feature (1)..(25): SEQ ID NO: 4525; WAN024AE3_at; Start 20; Stop 44
ataagaagttagtctagcagaatga

SEQ ID NO: 51641 - DNA, 25 bp, Artificial
  probe
  misc_feature (1)..(25): SEQ ID NO: 4525; WAN024AE3_at; Start 33; Stop 57
ctagcagaatgaatctctcatttct

SEQ ID NO: 51642 - DNA, 25 bp, Artificial
  probe
  misc_feature (1)..(25): SEQ ID NO: 4525; WAN024AE3_at; Start 26; Stop 50
agttagtctagcagaatgaatctct

SEQ ID NO: 51643 - DNA, 25 bp, Artificial
  probe
  misc_feature (1)..(25): SEQ ID NO: 4525; WAN024AE3_at; Start 35; Stop 59
agcagaatgaatctctcatttctcc

SEQ ID NO: 51644 - DNA, 25 bp, Artificial
  probe
  misc_feature (1)..(25): SEQ ID NO: 4525; WAN024AE3_at; Start 24; Stop 48
gaagttagtctagcagaatgaatct

SEQ ID NO: 51645 - DNA, 25 bp, Artificial
  probe
  misc_feature (1)..(25): SEQ ID NO: 4525; WAN024AE3_at; Start 31; Stop 55
gtctagcagaatgaatctctcattt

SEQ ID NO: 51646 - DNA, 25 bp, Artificial
  probe
  misc_feature (1)..(25): SEQ ID NO: 4525; WAN024AE3_at; Start 37; Stop 61
cagaatgaatctctcatttctccca

SEQ ID NO: 51647 - DNA, 25 bp, Artificial
  probe
  misc_feature (1)..(25): SEQ ID NO: 4525; WAN024AE3_at; Start 39; Stop 63
gaatgaatctctcatttctcccaca

SEQ ID NO: 51648 - DNA, 25 bp, Artificial
  probe
  misc_feature (1)..(25): SEQ ID NO: 4525; WAN024AE3_at; Start 22; Stop 46
aagaagttagtctagcagaatgaat

SEQ ID NO: 51649 - DNA, 25 bp, Artificial
  probe
  misc_feature (1)..(25): SEQ ID NO: 4525; WAN024AE3_at; Start 28; Stop 52
ttagtctagcagaatgaatctctca

SEQ ID NO: 51650 - DNA, 25 bp, Artificial
  probe
  misc_feature (1)..(25): SEQ ID NO: 4525; WAN024AE3_at; Start 25; Stop 49
aagttagtctagcagaatgaatctc

SEQ ID NO: 51651 - DNA, 25 bp, Artificial
  probe
  misc_feature (1)..(25): SEQ ID NO: 4525; WAN024AE3_at; Start 23; Stop 47
agaagttagtctagcagaatgaatc

SEQ ID NO: 51652 - DNA, 25 bp, Artificial
  probe
  misc_feature (1)..(25): SEQ ID NO: 4525; WAN024AE3_at; Start 19; Stop 43
aataagaagttagtctagcagaatg

SEQ ID NO: 51653 - DNA, 25 bp, Artificial
  probe
  misc_feature (1)..(25): SEQ ID NO: 4525; WAN024AE3_at; Start 27; Stop 51
gttagtctagcagaatgaatctctc

SEQ ID NO: 51654 - DNA, 25 bp, Artificial
  probe
  misc_feature (1)..(25): SEQ ID NO: 4525; WAN024AE3_at; Start 38; Stop 62
agaatgaatctctcatttctcccac

SEQ ID NO: 51655 - DNA, 25 bp, Artificial
  probe
  misc_feature (1)..(25): SEQ ID NO: 4525; WAN024AE3_at; Start 36; Stop 60
gcagaatgaatctctcatttctccc

SEQ ID NO: 51656 - DNA, 25 bp, Artificial
  probe
  misc_feature (1)..(25): SEQ ID NO: 4525; WAN024AE3_at; Start 30; Stop 54
agtctagcagaatgaatctctcatt

SEQ ID NO: 51657 - DNA, 25 bp, Artificial
  probe
  misc_feature (1)..(25): SEQ ID NO: 4525; WAN024AE3_at; Start 18; Stop 42
taataagaagttagtctagcagaat

SEQ ID NO: 51658 - DNA, 25 bp, Artificial
  probe
  misc_feature (1)..(25): SEQ ID NO: 4726; WAN024AE4_at; Start 3; Stop 27
tgggagaaatgagagattcattctg

SEQ ID NO: 51659 - DNA, 25 bp, Artificial
  probe
  misc_feature (1)..(25): SEQ ID NO: 4726; WAN024AE4_at; Start 12; Stop 36
tgagagattcattctgctagactaa

SEQ ID NO: 51660 - DNA, 25 bp, Artificial
  probe
  misc_feature (1)..(25): SEQ ID NO: 4726; WAN024AE4_at; Start 5; Stop 29
ggagaaatgagagattcattctgct

SEQ ID NO: 51661 - DNA, 25 bp, Artificial
  probe
  misc_feature (1)..(25): SEQ ID NO: 4726; WAN024AE4_at; Start 13; Stop 37
gagagattcattctgctagactaac

SEQ ID NO: 51662 - DNA, 25 bp, Artificial
  probe
  misc_feature (1)..(25): SEQ ID NO: 4726; WAN024AE4_at; Start 11; Stop 35
atgagagattcattctgctagacta

SEQ ID NO: 51663 - DNA, 25 bp, Artificial
  probe
  misc_feature (1)..(25): SEQ ID NO: 4726; WAN024AE4_at; Start 21; Stop 45
cattctgctagactaacttcttatt

SEQ ID NO: 51664 - DNA, 25 bp, Artificial
  probe
  misc_feature (1)..(25): SEQ ID NO: 4726; WAN024AE4_at; Start 23; Stop 47
ttctgctagactaacttcttattag

SEQ ID NO: 51665 - DNA, 25 bp, Artificial
  probe
  misc_feature (1)..(25): SEQ ID NO: 4726; WAN024AE4_at; Start 10; Stop 34
aatgagagattcattctgctagact

SEQ ID NO: 51666 - DNA, 25 bp, Artificial
  probe
  misc_feature (1)..(25): SEQ ID NO: 4726; WAN024AE4_at; Start 8; Stop 32
gaaatgagagattcattctgctaga

SEQ ID NO: 51667 - DNA, 25 bp, Artificial
  probe
  misc_feature (1)..(25): SEQ ID NO: 4726; WAN024AE4_at; Start 18; Stop 42
attcattctgctagactaacttctt

SEQ ID NO: 51668 - DNA, 25 bp, Artificial
  probe
  misc_feature (1)..(25): SEQ ID NO: 4726; WAN024AE4_at; Start 6; Stop 30
gagaaatgagagattcattctgcta

SEQ ID NO: 51669 - DNA, 25 bp, Artificial
  probe
  misc_feature (1)..(25): SEQ ID NO: 4726; WAN024AE4_at; Start 4; Stop 28
gggagaaatgagagattcattctgc

SEQ ID NO: 51670 - DNA, 25 bp, Artificial
  probe
  misc_feature (1)..(25): SEQ ID NO: 4726; WAN024AE4_at; Start 17; Stop 41
gattcattctgctagactaacttct

SEQ ID NO: 51671 - DNA, 25 bp, Artificial
  probe
  misc_feature (1)..(25): SEQ ID NO: 4726; WAN024AE4_at; Start 2; Stop 26
gtgggagaaatgagagattcattct

SEQ ID NO: 51672 - DNA, 25 bp, Artificial
  probe
  misc_feature (1)..(25): SEQ ID NO: 4726; WAN024AE4_at; Start 1; Stop 25
tgtgggagaaatgagagattcattc

SEQ ID NO: 51673 - DNA, 25 bp, Artificial
  probe
  misc_feature (1)..(25): SEQ ID NO: 4726; WAN024AE4_at; Start 19; Stop 43
ttcattctgctagactaacttctta

SEQ ID NO: 51674 - DNA, 25 bp, Artificial
  probe
  misc_feature (1)..(25): SEQ ID NO: 4726; WAN024AE4_at; Start 22; Stop 46
attctgctagactaacttcttatta

SEQ ID NO: 51675 - DNA, 25 bp, Artificial
  probe
  misc_feature (1)..(25): SEQ ID NO: 4726; WAN024AE4_at; Start 9; Stop 33
aaatgagagattcattctgctagac

SEQ ID NO: 51676 - DNA, 25 bp, Artificial
  probe
  misc_feature (1)..(25): SEQ ID NO: 4726; WAN024AE4_at; Start 20; Stop 44
tcattctgctagactaacttcttat

SEQ ID NO: 51677 - DNA, 25 bp, Artificial
  probe
  misc_feature (1)..(25): SEQ ID NO: 4726; WAN024AE4_at; Start 15; Stop 39
gagattcattctgctagactaactt

SEQ ID NO: 51678 - DNA, 25 bp, Artificial
  probe
  misc_feature (1)..(25): SEQ ID NO: 4726; WAN024AE4_at; Start 14; Stop 38
agagattcattctgctagactaact

SEQ ID NO: 51679 - DNA, 25 bp, Artificial
  probe
  misc_feature (1)..(25): SEQ ID NO: 4726; WAN024AE4_at; Start 16; Stop 40
agattcattctgctagactaacttc

SEQ ID NO: 51680 - DNA, 25 bp, Artificial
  probe
  misc_feature (1)..(25): SEQ ID NO: 4726; WAN024AE4_at; Start 7; Stop 31
agaaatgagagattcattctgctag

SEQ ID NO: 51681 - DNA, 25 bp, Artificial
  probe
  misc_feature (1)..(25): SEQ ID NO: 4616; WAN024AE5_at; Start 20; Stop 44
atttctttgtgacttggttttctag

SEQ ID NO: 51682 - DNA, 25 bp, Artificial
  probe
  misc_feature (1)..(25): SEQ ID NO: 4616; WAN024AE5_at; Start 70; Stop 94
gatgttactcctttgttctttatga

SEQ ID NO: 51683 - DNA, 25 bp, Artificial
  probe
  misc_feature (1)..(25): SEQ ID NO: 4616; WAN024AE5_at; Start 347; Stop 371
ctataaggaaagaaggtgcgcttta

SEQ ID NO: 51684 - DNA, 25 bp, Artificial
  probe
  misc_feature (1)..(25): SEQ ID NO: 4616; WAN024AE5_at; Start 13; Stop 37
gcgctcaatttctttgtgacttggt

SEQ ID NO: 51685 - DNA, 25 bp, Artificial
  probe
  misc_feature (1)..(25): SEQ ID NO: 4616; WAN024AE5_at; Start 101; Stop 125
tttacatcaaaaaaagaccgcttgc

SEQ ID NO: 51686 - DNA, 25 bp, Artificial
  probe
  misc_feature (1)..(25): SEQ ID NO: 4616; WAN024AE5_at; Start 328; Stop 352
cacttgcaagtcgttcaacctataa

SEQ ID NO: 51687 - DNA, 25 bp, Artificial
  probe
  misc_feature (1)..(25): SEQ ID NO: 4616; WAN024AE5_at; Start 123; Stop 147
tgccataacctaaccttacaaaaga

SEQ ID NO: 51688 - DNA, 25 bp, Artificial
  probe
  misc_feature (1)..(25): SEQ ID NO: 4616; WAN024AE5_at; Start 300; Stop 324
tacctagataacataccattcaatt

SEQ ID NO: 51689 - DNA, 25 bp, Artificial
  probe
  misc_feature (1)..(25): SEQ ID NO: 4616; WAN024AE5_at; Start 186; Stop 210
taagcaaaattacttagaaaatgat

SEQ ID NO: 51690 - DNA, 25 bp, Artificial
  probe
  misc_feature (1)..(25): SEQ ID NO: 4616; WAN024AE5_at; Start 116; Stop 140
gaccgcttgccataacctaacctta

SEQ ID NO: 51691 - DNA, 25 bp, Artificial
  probe
  misc_feature (1)..(25): SEQ ID NO: 4616; WAN024AE5_at; Start 334; Stop 358
caagtcgttcaacctataaggaaag

SEQ ID NO: 51692 - DNA, 25 bp, Artificial
  probe
  misc_feature (1)..(25): SEQ ID NO: 4616; WAN024AE5_at; Start 196; Stop 220
tacttagaaaatgatttgatttcct

SEQ ID NO: 51693 - DNA, 25 bp, Artificial
  probe
  misc_feature (1)..(25): SEQ ID NO: 4616; WAN024AE5_at; Start 90; Stop 114
tatgagtctagtttacatcaaaaaa

SEQ ID NO: 51694 - DNA, 25 bp, Artificial
  probe
  misc_feature (1)..(25): SEQ ID NO: 4616; WAN024AE5_at; Start 313; Stop 337
taccattcaatttaacacttgcaag

SEQ ID NO: 51695 - DNA, 25 bp, Artificial
  probe
  misc_feature (1)..(25): SEQ ID NO: 4616; WAN024AE5_at; Start 9; Stop 33
gaacgcgctcaatttctttgtgact

SEQ ID NO: 51696 - DNA, 25 bp, Artificial
  probe
  misc_feature (1)..(25): SEQ ID NO: 4616; WAN024AE5_at; Start 76; Stop 100
actcctttgttctttatgagtctag

SEQ ID NO: 51697 - DNA, 25 bp, Artificial
  probe
  misc_feature (1)..(25): SEQ ID NO: 4616; WAN024AE5_at; Start 6; Stop 30
gctgaacgcgctcaatttctttgtg

SEQ ID NO: 51698 - DNA, 25 bp, Artificial
  probe
  misc_feature (1)..(25): SEQ ID NO: 4616; WAN024AE5_at; Start 332; Stop 356
tgcaagtcgttcaacctataaggaa

SEQ ID NO: 51699 - DNA, 25 bp, Artificial
  probe
  misc_feature (1)..(25): SEQ ID NO: 4616; WAN024AE5_at; Start 159; Stop 183
tacatttttgtaagattgggtgaaa

SEQ ID NO: 51700 - DNA, 25 bp, Artificial
  probe
  misc_feature (1)..(25): SEQ ID NO: 4616; WAN024AE5_at; Start 4; Stop 28
cagctgaacgcgctcaatttctttg

SEQ ID NO: 51701 - DNA, 25 bp, Artificial
  probe
  misc_feature (1)..(25): SEQ ID NO: 4616; WAN024AE5_at; Start 146; Stop 170
gagactttaatcttacatttttgta

SEQ ID NO: 51702 - DNA, 25 bp, Artificial
  probe
  misc_feature (1)..(25): SEQ ID NO: 4616; WAN024AE5_at; Start 346; Stop 370
cctataaggaaagaaggtgcgcttt

SEQ ID NO: 51703 - DNA, 25 bp, Artificial
  probe
  misc_feature (1)..(25): SEQ ID NO: 4616; WAN024AE5_at; Start 241; Stop 265
taagtgtgaaaaggcttactttgaa

SEQ ID NO: 51704 - DNA, 25 bp, Artificial
  probe
  misc_feature (1)..(25): SEQ ID NO: 4616; WAN024AE5_at; Start 341; Stop 365
ttcaacctataaggaaagaaggtgc

SEQ ID NO: 51705 - DNA, 25 bp, Artificial
  probe
  misc_feature (1)..(25): SEQ ID NO: 4616; WAN024AE5_at; Start 316; Stop 340
cattcaatttaacacttgcaagtcg

SEQ ID NO: 51706 - DNA, 25 bp, Artificial
  probe
  misc_feature (1)..(25): SEQ ID NO: 4616; WAN024AE5_at; Start 343; Stop 367
caacctataaggaaagaaggtgcgc

SEQ ID NO: 51707 - DNA, 25 bp, Artificial
  probe
  misc_feature (1)..(25): SEQ ID NO: 4616; WAN024AE5_at; Start 325; Stop 349
taacacttgcaagtcgttcaaccta

SEQ ID NO: 51708 - DNA, 25 bp, Artificial
  probe
  misc_feature (1)..(25): SEQ ID NO: 4616; WAN024AE5_at; Start 167; Stop 191
tgtaagattgggtgaaatataagca

SEQ ID NO: 51709 - DNA, 25 bp, Artificial
  probe
  misc_feature (1)..(25): SEQ ID NO: 4616; WAN024AE5_at; Start 320; Stop 344
caatttaacacttgcaagtcgttca

SEQ ID NO: 51710 - DNA, 25 bp, Artificial
  probe
  misc_feature (1)..(25): SEQ ID NO: 4616; WAN024AE5_at; Start 232; Stop 256
tgtaaaatataagtgtgaaaaggct

SEQ ID NO: 51711 - DNA, 25 bp, Artificial
  probe
  misc_feature (1)..(25): SEQ ID NO: 4616; WAN024AE5_at; Start 139; Stop 163
tacaaaagagactttaatcttacat

SEQ ID NO: 51712 - DNA, 25 bp, Artificial
  probe
  misc_feature (1)..(25): SEQ ID NO: 4616; WAN024AE5_at; Start 56; Stop 80
aagatttgtttcatgatgttactcc

SEQ ID NO: 51713 - DNA, 25 bp, Artificial
  probe
  misc_feature (1)..(25): SEQ ID NO: 4616; WAN024AE5_at; Start 175; Stop 199
tgggtgaaatataagcaaaattact

SEQ ID NO: 51714 - DNA, 25 bp, Artificial
  probe
  misc_feature (1)..(25): SEQ ID NO: 4616; WAN024AE5_at; Start 86; Stop 110
tctttatgagtctagtttacatcaa

SEQ ID NO: 51715 - DNA, 25 bp, Artificial
  probe
  misc_feature (1)..(25): SEQ ID NO: 4416; WAN024AE6_at; Start 33; Stop 57
gacttgcaagtgttaaattgaatgg

SEQ ID NO: 51716 - DNA, 25 bp, Artificial
  probe
  misc_feature (1)..(25): SEQ ID NO: 4416; WAN024AE6_at; Start 337; Stop 361
caagtcacaaagaaattgagcgcgt

SEQ ID NO: 51717 - DNA, 25 bp, Artificial
  probe
  misc_feature (1)..(25): SEQ ID NO: 4416; WAN024AE6_at; Start 17; Stop 41
tccttataggttgaacgacttgcaa

SEQ ID NO: 51718 - DNA, 25 bp, Artificial
  probe
  misc_feature (1)..(25): SEQ ID NO: 4416; WAN024AE6_at; Start 153; Stop 177
ggaaatcaaatcattttctaagtaa

SEQ ID NO: 51719 - DNA, 25 bp, Artificial
  probe
  misc_feature (1)..(25): SEQ ID NO: 4416; WAN024AE6_at; Start 272; Stop 296
ctagactcataaagaacaaaggagt

SEQ ID NO: 51720 - DNA, 25 bp, Artificial
  probe
  misc_feature (1)..(25): SEQ ID NO: 4416; WAN024AE6_at; Start 261; Stop 285
tttgatgtaaactagactcataaag

SEQ ID NO: 51721 - DNA, 25 bp, Artificial
  probe
  misc_feature (1)..(25): SEQ ID NO: 4416; WAN024AE6_at; Start 340; Stop 364
gtcacaaagaaattgagcgcgttca

SEQ ID NO: 51722 - DNA, 25 bp, Artificial
  probe
  misc_feature (1)..(25): SEQ ID NO: 4416; WAN024AE6_at; Start 109; Stop 133
caaagtaagccttttcacacttata

SEQ ID NO: 51723 - DNA, 25 bp, Artificial
  probe
  misc_feature (1)..(25): SEQ ID NO: 4416; WAN024AE6_at; Start 117; Stop 141
gccttttcacacttatattttacaa

SEQ ID NO: 51724 - DNA, 25 bp, Artificial
  probe
  misc_feature (1)..(25): SEQ ID NO: 4416; WAN024AE6_at; Start 173; Stop 197
agtaattttgcttatatttcaccca

SEQ ID NO: 51725 - DNA, 25 bp, Artificial
  probe
  misc_feature (1)..(25): SEQ ID NO: 4416; WAN024AE6_at; Start 21; Stop 45
tataggttgaacgacttgcaagtgt

SEQ ID NO: 51726 - DNA, 25 bp, Artificial
  probe
  misc_feature (1)..(25): SEQ ID NO: 4416; WAN024AE6_at; Start 299; Stop 323
catcatgaaacaaatcttacataag

SEQ ID NO: 51727 - DNA, 25 bp, Artificial
  probe
  misc_feature (1)..(25): SEQ ID NO: 4416; WAN024AE6_at; Start 23; Stop 47
taggttgaacgacttgcaagtgtta

SEQ ID NO: 51728 - DNA, 25 bp, Artificial
  probe
  misc_feature (1)..(25): SEQ ID NO: 4416; WAN024AE6_at; Start 246; Stop 270
ggcaagcggtctttttttgatgtaa

SEQ ID NO: 51729 - DNA, 25 bp, Artificial
  probe
  misc_feature (1)..(25): SEQ ID NO: 4416; WAN024AE6_at; Start 48; Stop 72
aattgaatggtatgttatctaggta

SEQ ID NO: 51730 - DNA, 25 bp, Artificial
  probe
  misc_feature (1)..(25): SEQ ID NO: 4416; WAN024AE6_at; Start 234; Stop 258
aggttaggttatggcaagcggtctt

SEQ ID NO: 51731 - DNA, 25 bp, Artificial
  probe
  misc_feature (1)..(25): SEQ ID NO: 4416; WAN024AE6_at; Start 268; Stop 292
taaactagactcataaagaacaaag

SEQ ID NO: 51732 - DNA, 25 bp, Artificial
  probe
  misc_feature (1)..(25): SEQ ID NO: 4416; WAN024AE6_at; Start 142; Stop 166
ctttaaaaataggaaatcaaatcat

SEQ ID NO: 51733 - DNA, 25 bp, Artificial
  probe
  misc_feature (1)..(25): SEQ ID NO: 4416; WAN024AE6_at; Start 202; Stop 226
tacaaaaatgtaagattaaagtctc

SEQ ID NO: 51734 - DNA, 25 bp, Artificial
  probe
  misc_feature (1)..(25): SEQ ID NO: 4416; WAN024AE6_at; Start 7; Stop 31
gcaccttctttccttataggttgaa

SEQ ID NO: 51735 - DNA, 25 bp, Artificial
  probe
  misc_feature (1)..(25): SEQ ID NO: 4416; WAN024AE6_at; Start 225; Stop 249
tcttttgtaaggttaggttatggca

SEQ ID NO: 51736 - DNA, 25 bp, Artificial
  probe
  misc_feature (1)..(25): SEQ ID NO: 4416; WAN024AE6_at; Start 278; Stop 302
tcataaagaacaaaggagtaacatc

SEQ ID NO: 51737 - DNA, 25 bp, Artificial
  probe
  misc_feature (1)..(25): SEQ ID NO: 4416; WAN024AE6_at; Start 187; Stop 211
tatttcacccaatcttacaaaaatg

SEQ ID NO: 51738 - DNA, 25 bp, Artificial
  probe
  misc_feature (1)..(25): SEQ ID NO: 4416; WAN024AE6_at; Start 182; Stop 206
gcttatatttcacccaatcttacaa

SEQ ID NO: 51739 - DNA, 25 bp, Artificial
  probe
  misc_feature (1)..(25): SEQ ID NO: 4416; WAN024AE6_at; Start 285; Stop 309
gaacaaaggagtaacatcatgaaac

SEQ ID NO: 51740 - DNA, 25 bp, Artificial
  probe
  misc_feature (1)..(25): SEQ ID NO: 4416; WAN024AE6_at; Start 2; Stop 26
aaagcgcaccttctttccttatagg

SEQ ID NO: 51741 - DNA, 25 bp, Artificial
  probe
  misc_feature (1)..(25): SEQ ID NO: 4416; WAN024AE6_at; Start 344; Stop 368
caaagaaattgagcgcgttcagctg

SEQ ID NO: 51742 - DNA, 25 bp, Artificial
  probe
  misc_feature (1)..(25): SEQ ID NO: 4416; WAN024AE6_at; Start 29; Stop 53
gaacgacttgcaagtgttaaattga

SEQ ID NO: 51743 - DNA, 25 bp, Artificial
  probe
  misc_feature (1)..(25): SEQ ID NO: 4416; WAN024AE6_at; Start 342; Stop 366
cacaaagaaattgagcgcgttcagc

SEQ ID NO: 51744 - DNA, 25 bp, Artificial
  probe
  misc_feature (1)..(25): SEQ ID NO: 4416; WAN024AE6_at; Start 281; Stop 305
taaagaacaaaggagtaacatcatg

SEQ ID NO: 51745 - DNA, 25 bp, Artificial
  probe
  misc_feature (1)..(25): SEQ ID NO: 4416; WAN024AE6_at; Start 292; Stop 316
ggagtaacatcatgaaacaaatctt

SEQ ID NO: 51746 - DNA, 25 bp, Artificial
  probe
  misc_feature (1)..(25): SEQ ID NO: 4416; WAN024AE6_at; Start 232; Stop 256
taaggttaggttatggcaagcggtc

SEQ ID NO: 51747 - DNA, 25 bp, Artificial
  probe
  misc_feature (1)..(25): SEQ ID NO: 4416; WAN024AE6_at; Start 309; Stop 333
caaatcttacataagaaaactagaa

SEQ ID NO: 51748 - DNA, 25 bp, Artificial
  probe
  misc_feature (1)..(25): SEQ ID NO: 4416; WAN024AE6_at; Start 328; Stop 352
ctagaaaaccaagtcacaaagaaat

SEQ ID NO: 51749 - DNA, 25 bp, Artificial
  probe
  misc_feature (1)..(25): SEQ ID NO: 159; WAN024AE9_at; Start 62; Stop 86
taggaaatagatttatatgctacag

SEQ ID NO: 51750 - DNA, 25 bp, Artificial
  probe
  misc_feature (1)..(25): SEQ ID NO: 159; WAN024AE9_at; Start 67; Stop 91
aatagatttatatgctacagcgcaa

SEQ ID NO: 51751 - DNA, 25 bp, Artificial
  probe
  misc_feature (1)..(25): SEQ ID NO: 159; WAN024AE9_at; Start 61; Stop 85
gtaggaaatagatttatatgctaca

SEQ ID NO: 51752 - DNA, 25 bp, Artificial
  probe
  misc_feature (1)..(25): SEQ ID NO: 159; WAN024AE9_at; Start 75; Stop 99
tatatgctacagcgcaataacttgc

SEQ ID NO: 51753 - DNA, 25 bp, Artificial
  probe
  misc_feature (1)..(25): SEQ ID NO: 159; WAN024AE9_at; Start 55; Stop 79
aaatatgtaggaaatagatttatat

SEQ ID NO: 51754 - DNA, 25 bp, Artificial
  probe
  misc_feature (1)..(25): SEQ ID NO: 159; WAN024AE9_at; Start 5; Stop 29
ctattataccacaagctaaacgttt

SEQ ID NO: 51755 - DNA, 25 bp, Artificial
  probe
  misc_feature (1)..(25): SEQ ID NO: 159; WAN024AE9_at; Start 4; Stop 28
tctattataccacaagctaaacgtt

SEQ ID NO: 51756 - DNA, 25 bp, Artificial
  probe
  misc_feature (1)..(25): SEQ ID NO: 159; WAN024AE9_at; Start 68; Stop 92
atagatttatatgctacagcgcaat

SEQ ID NO: 51757 - DNA, 25 bp, Artificial
  probe
  misc_feature (1)..(25): SEQ ID NO: 159; WAN024AE9_at; Start 8; Stop 32
ttataccacaagctaaacgtttcaa

SEQ ID NO: 51758 - DNA, 25 bp, Artificial
  probe
  misc_feature (1)..(25): SEQ ID NO: 159; WAN024AE9_at; Start 73; Stop 97
tttatatgctacagcgcaataactt

SEQ ID NO: 51759 - DNA, 25 bp, Artificial
  probe
  misc_feature (1)..(25): SEQ ID NO: 159; WAN024AE9_at; Start 54; Stop 78
aaaatatgtaggaaatagatttata

SEQ ID NO: 51760 - DNA, 25 bp, Artificial
  probe
  misc_feature (1)..(25): SEQ ID NO: 159; WAN024AE9_at; Start 64; Stop 88
ggaaatagatttatatgctacagcg

SEQ ID NO: 51761 - DNA, 25 bp, Artificial
  probe
  misc_feature (1)..(25): SEQ ID NO: 159; WAN024AE9_at; Start 71; Stop 95
gatttatatgctacagcgcaataac

SEQ ID NO: 51762 - DNA, 25 bp, Artificial
  probe
  misc_feature (1)..(25): SEQ ID NO: 159; WAN024AE9_at; Start 57; Stop 81
atatgtaggaaatagatttatatgc

SEQ ID NO: 51763 - DNA, 25 bp, Artificial
  probe
  misc_feature (1)..(25): SEQ ID NO: 159; WAN024AE9_at; Start 72; Stop 96
atttatatgctacagcgcaataact

SEQ ID NO: 51764 - DNA, 25 bp, Artificial
  probe
  misc_feature (1)..(25): SEQ ID NO: 159; WAN024AE9_at; Start 59; Stop 83
atgtaggaaatagatttatatgcta

SEQ ID NO: 51765 - DNA, 25 bp, Artificial
  probe
  misc_feature (1)..(25): SEQ ID NO: 159; WAN024AE9_at; Start 56; Stop 80
aatatgtaggaaatagatttatatg

SEQ ID NO: 51766 - DNA, 25 bp, Artificial
  probe
  misc_feature (1)..(25): SEQ ID NO: 159; WAN024AE9_at; Start 58; Stop 82
tatgtaggaaatagatttatatgct

SEQ ID NO: 51767 - DNA, 25 bp, Artificial
  probe
  misc_feature (1)..(25): SEQ ID NO: 159; WAN024AE9_at; Start 66; Stop 90
aaatagatttatatgctacagcgca

SEQ ID NO: 51768 - DNA, 25 bp, Artificial
  probe
  misc_feature (1)..(25): SEQ ID NO: 159; WAN024AE9_at; Start 7; Stop 31
attataccacaagctaaacgtttca

SEQ ID NO: 51769 - DNA, 25 bp, Artificial
  probe
  misc_feature (1)..(25): SEQ ID NO: 159; WAN024AE9_at; Start 74; Stop 98
ttatatgctacagcgcaataacttg

SEQ ID NO: 51770 - DNA, 25 bp, Artificial
  probe
  misc_feature (1)..(25): SEQ ID NO: 159; WAN024AE9_at; Start 60; Stop 84
tgtaggaaatagatttatatgctac

SEQ ID NO: 51771 - DNA, 25 bp, Artificial
  probe
  misc_feature (1)..(25): SEQ ID NO: 159; WAN024AE9_at; Start 53; Stop 77
aaaaatatgtaggaaatagatttat

SEQ ID NO: 51772 - DNA, 25 bp, Artificial
  probe
  misc_feature (1)..(25): SEQ ID NO: 159; WAN024AE9_at; Start 6; Stop 30
tattataccacaagctaaacgtttc

SEQ ID NO: 51773 - DNA, 25 bp, Artificial
  probe
  misc_feature (1)..(25): SEQ ID NO: 159; WAN024AE9_at; Start 63; Stop 87
aggaaatagatttatatgctacagc

SEQ ID NO: 51774 - DNA, 25 bp, Artificial
  probe
  misc_feature (1)..(25): SEQ ID NO: 159; WAN024AE9_at; Start 77; Stop 101
tatgctacagcgcaataacttgcac

SEQ ID NO: 51775 - DNA, 25 bp, Artificial
  probe
  misc_feature (1)..(25): SEQ ID NO: 159; WAN024AE9_at; Start 65; Stop 89
gaaatagatttatatgctacagcgc

SEQ ID NO: 51776 - DNA, 25 bp, Artificial
  probe
  misc_feature (1)..(25): SEQ ID NO: 159; WAN024AE9_at; Start 69; Stop 93
tagatttatatgctacagcgcaata

SEQ ID NO: 51777 - DNA, 25 bp, Artificial
  probe
  misc_feature (1)..(25): SEQ ID NO: 159; WAN024AE9_at; Start 76; Stop 100
atatgctacagcgcaataacttgca

SEQ ID NO: 51778 - DNA, 25 bp, Artificial
  probe
  misc_feature (1)..(25): SEQ ID NO: 159; WAN024AE9_at; Start 70; Stop 94
agatttatatgctacagcgcaataa

SEQ ID NO: 51779 - DNA, 25 bp, Artificial
  probe
  misc_feature (1)..(25): SEQ ID NO: 4051; WAN024AEA_at; Start 72; Stop 96
gaaacgtttagcttgtggtataata

SEQ ID NO: 51780 - DNA, 25 bp, Artificial
  probe
  misc_feature (1)..(25): SEQ ID NO: 4051; WAN024AEA_at; Start 2; Stop 26
tgcaagttattgcgctgtagcatat

SEQ ID NO: 51781 - DNA, 25 bp, Artificial
  probe
  misc_feature (1)..(25): SEQ ID NO: 4051; WAN024AEA_at; Start 68; Stop 92
atttgaaacgtttagcttgtggtat

SEQ ID NO: 51782 - DNA, 25 bp, Artificial
  probe
  misc_feature (1)..(25): SEQ ID NO: 4051; WAN024AEA_at; Start 9; Stop 33
tattgcgctgtagcatataaatcta

SEQ ID NO: 51783 - DNA, 25 bp, Artificial
  probe
  misc_feature (1)..(25): SEQ ID NO: 4051; WAN024AEA_at; Start 18; Stop 42
gtagcatataaatctatttcctaca

SEQ ID NO: 51784 - DNA, 25 bp, Artificial
  probe
  misc_feature (1)..(25): SEQ ID NO: 4051; WAN024AEA_at; Start 3; Stop 27
gcaagttattgcgctgtagcatata

SEQ ID NO: 51785 - DNA, 25 bp, Artificial
  probe
  misc_feature (1)..(25): SEQ ID NO: 4051; WAN024AEA_at; Start 16; Stop 40
ctgtagcatataaatctatttccta

SEQ ID NO: 51786 - DNA, 25 bp, Artificial
  probe
  misc_feature (1)..(25): SEQ ID NO: 4051; WAN024AEA_at; Start 20; Stop 44
agcatataaatctatttcctacata

SEQ ID NO: 51787 - DNA, 25 bp, Artificial
  probe
  misc_feature (1)..(25): SEQ ID NO: 4051; WAN024AEA_at; Start 6; Stop 30
agttattgcgctgtagcatataaat

SEQ ID NO: 51788 - DNA, 25 bp, Artificial
  probe
  misc_feature (1)..(25): SEQ ID NO: 4051; WAN024AEA_at; Start 10; Stop 34
attgcgctgtagcatataaatctat

SEQ ID NO: 51789 - DNA, 25 bp, Artificial
  probe
  misc_feature (1)..(25): SEQ ID NO: 4051; WAN024AEA_at; Start 17; Stop 41
tgtagcatataaatctatttcctac

SEQ ID NO: 51790 - DNA, 25 bp, Artificial
  probe
  misc_feature (1)..(25): SEQ ID NO: 4051; WAN024AEA_at; Start 5; Stop 29
aagttattgcgctgtagcatataaa

SEQ ID NO: 51791 - DNA, 25 bp, Artificial
  probe
  misc_feature (1)..(25): SEQ ID NO: 4051; WAN024AEA_at; Start 7; Stop 31
gttattgcgctgtagcatataaatc

SEQ ID NO: 51792 - DNA, 25 bp, Artificial
  probe
  misc_feature (1)..(25): SEQ ID NO: 4051; WAN024AEA_at; Start 70; Stop 94
ttgaaacgtttagcttgtggtataa

SEQ ID NO: 51793 - DNA, 25 bp, Artificial
  probe
  misc_feature (1)..(25): SEQ ID NO: 4051; WAN024AEA_at; Start 74; Stop 98
aacgtttagcttgtggtataataga

SEQ ID NO: 51794 - DNA, 25 bp, Artificial
  probe
  misc_feature (1)..(25): SEQ ID NO: 4051; WAN024AEA_at; Start 15; Stop 39
gctgtagcatataaatctatttcct

SEQ ID NO: 51795 - DNA, 25 bp, Artificial
  probe
  misc_feature (1)..(25): SEQ ID NO: 4051; WAN024AEA_at; Start 14; Stop 38
cgctgtagcatataaatctatttcc

SEQ ID NO: 51796 - DNA, 25 bp, Artificial
  probe
  misc_feature (1)..(25): SEQ ID NO: 4051; WAN024AEA_at; Start 73; Stop 97
aaacgtttagcttgtggtataatag

SEQ ID NO: 51797 - DNA, 25 bp, Artificial
  probe
  misc_feature (1)..(25): SEQ ID NO: 4051; WAN024AEA_at; Start 12; Stop 36
tgcgctgtagcatataaatctattt

SEQ ID NO: 51798 - DNA, 25 bp, Artificial
  probe
  misc_feature (1)..(25): SEQ ID NO: 4051; WAN024AEA_at; Start 71; Stop 95
tgaaacgtttagcttgtggtataat

SEQ ID NO: 51799 - DNA, 25 bp, Artificial
  probe
  misc_feature (1)..(25): SEQ ID NO: 4051; WAN024AEA_at; Start 22; Stop 46
catataaatctatttcctacatatt

SEQ ID NO: 51800 - DNA, 25 bp, Artificial
  probe
  misc_feature (1)..(25): SEQ ID NO: 4051; WAN024AEA_at; Start 1; Stop 25
gtgcaagttattgcgctgtagcata

SEQ ID NO: 51801 - DNA, 25 bp, Artificial
  probe
  misc_feature (1)..(25): SEQ ID NO: 4051; WAN024AEA_at; Start 11; Stop 35
ttgcgctgtagcatataaatctatt

SEQ ID NO: 51802 - DNA, 25 bp, Artificial
  probe
  misc_feature (1)..(25): SEQ ID NO: 4051; WAN024AEA_at; Start 69; Stop 93
tttgaaacgtttagcttgtggtata

SEQ ID NO: 51803 - DNA, 25 bp, Artificial
  probe
  misc_feature (1)..(25): SEQ ID NO: 4051; WAN024AEA_at; Start 21; Stop 45
gcatataaatctatttcctacatat

SEQ ID NO: 51804 - DNA, 25 bp, Artificial
  probe
  misc_feature (1)..(25): SEQ ID NO: 4051; WAN024AEA_at; Start 19; Stop 43
tagcatataaatctatttcctacat

SEQ ID NO: 51805 - DNA, 25 bp, Artificial
  probe
  misc_feature (1)..(25): SEQ ID NO: 4051; WAN024AEA_at; Start 4; Stop 28
caagttattgcgctgtagcatataa

SEQ ID NO: 51806 - DNA, 25 bp, Artificial
  probe
  misc_feature (1)..(25): SEQ ID NO: 4051; WAN024AEA_at; Start 8; Stop 32
ttattgcgctgtagcatataaatct

SEQ ID NO: 51807 - DNA, 25 bp, Artificial
  probe
  misc_feature (1)..(25): SEQ ID NO: 4051; WAN024AEA_at; Start 24; Stop 48
tataaatctatttcctacatatttt

SEQ ID NO: 51808 - DNA, 25 bp, Artificial
  probe
  misc_feature (1)..(25): SEQ ID NO: 4051; WAN024AEA_at; Start 13; Stop 37
gcgctgtagcatataaatctatttc

SEQ ID NO: 51809 - DNA, 25 bp, Artificial
  probe
  misc_feature (1)..(25): SEQ ID NO: 4798; WAN024AEB_at; Start 27; Stop 51
ctgttattaaaatcagctagaagag

SEQ ID NO: 51810 - DNA, 25 bp, Artificial
  probe
  misc_feature (1)..(25): SEQ ID NO: 4798; WAN024AEB_at; Start 26; Stop 50
gctgttattaaaatcagctagaaga

SEQ ID NO: 51811 - DNA, 25 bp, Artificial
  probe
  misc_feature (1)..(25): SEQ ID NO: 4798; WAN024AEB_at; Start 5; Stop 29
agtgaaaaagccttaaaataagctg

SEQ ID NO: 51812 - DNA, 25 bp, Artificial
  probe
  misc_feature (1)..(25): SEQ ID NO: 4798; WAN024AEB_at; Start 29; Stop 53
gttattaaaatcagctagaagaggt

SEQ ID NO: 51813 - DNA, 25 bp, Artificial
  probe
  misc_feature (1)..(25): SEQ ID NO: 4798; WAN024AEB_at; Start 24; Stop 48
aagctgttattaaaatcagctagaa

SEQ ID NO: 51814 - DNA, 25 bp, Artificial
  probe
  misc_feature (1)..(25): SEQ ID NO: 4798; WAN024AEB_at; Start 28; Stop 52
tgttattaaaatcagctagaagagg

SEQ ID NO: 51815 - DNA, 25 bp, Artificial
  probe
  misc_feature (1)..(25): SEQ ID NO: 4798; WAN024AEB_at; Start 33; Stop 57
ttaaaatcagctagaagaggtatta

SEQ ID NO: 51816 - DNA, 25 bp, Artificial
  probe
  misc_feature (1)..(25): SEQ ID NO: 4798; WAN024AEB_at; Start 22; Stop 46
ataagctgttattaaaatcagctag

SEQ ID NO: 51817 - DNA, 25 bp, Artificial
  probe
  misc_feature (1)..(25): SEQ ID NO: 4798; WAN024AEB_at; Start 32; Stop 56
attaaaatcagctagaagaggtatt

SEQ ID NO: 51818 - DNA, 25 bp, Artificial
  probe
  misc_feature (1)..(25): SEQ ID NO: 4798; WAN024AEB_at; Start 25; Stop 49
agctgttattaaaatcagctagaag

SEQ ID NO: 51819 - DNA, 25 bp, Artificial
  probe
  misc_feature (1)..(25): SEQ ID NO: 4798; WAN024AEB_at; Start 30; Stop 54
ttattaaaatcagctagaagaggta

SEQ ID NO: 51820 - DNA, 25 bp, Artificial
  probe
  misc_feature (1)..(25): SEQ ID NO: 4798; WAN024AEB_at; Start 21; Stop 45
aataagctgttattaaaatcagcta

SEQ ID NO: 51821 - DNA, 25 bp, Artificial
  probe
  misc_feature (1)..(25): SEQ ID NO: 4798; WAN024AEB_at; Start 23; Stop 47
taagctgttattaaaatcagctaga

SEQ ID NO: 51822 - DNA, 25 bp, Artificial
  probe
  misc_feature (1)..(25): SEQ ID NO: 4798; WAN024AEB_at; Start 31; Stop 55
tattaaaatcagctagaagaggtat

SEQ ID NO: 51823 - DNA, 25 bp, Artificial
  probe
  misc_feature (1)..(25): SEQ ID NO: 4798; WAN024AEB_at; Start 34; Stop 58
taaaatcagctagaagaggtattat

SEQ ID NO: 51824 - DNA, 25 bp, Artificial
  probe
  misc_feature (1)..(25): SEQ ID NO: 4798; WAN024AEB_at; Start 18; Stop 42
taaaataagctgttattaaaatcag

SEQ ID NO: 51825 - DNA, 25 bp, Artificial
  probe
  misc_feature (1)..(25): SEQ ID NO: 4798; WAN024AEB_at; Start 17; Stop 41
ttaaaataagctgttattaaaatca

SEQ ID NO: 51826 - DNA, 25 bp, Artificial
  probe
  misc_feature (1)..(25): SEQ ID NO: 4798; WAN024AEB_at; Start 20; Stop 44
aaataagctgttattaaaatcagct

SEQ ID NO: 51827 - DNA, 25 bp, Artificial
  probe
  misc_feature (1)..(25): SEQ ID NO: 4798; WAN024AEB_at; Start 19; Stop 43
aaaataagctgttattaaaatcagc

SEQ ID NO: 51828 - DNA, 25 bp, Artificial
  probe
  misc_feature (1)..(25): SEQ ID NO: 536; WAN024AEC_at; Start 17; Stop 41
ctgattttaataacagcttatttta

SEQ ID NO: 51829 - DNA, 25 bp, Artificial
  probe
  misc_feature (1)..(25): SEQ ID NO: 536; WAN024AEC_at; Start 16; Stop 40
gctgattttaataacagcttatttt

SEQ ID NO: 51830 - DNA, 25 bp, Artificial
  probe
  misc_feature (1)..(25): SEQ ID NO: 536; WAN024AEC_at; Start 18; Stop 42
tgattttaataacagcttattttaa

SEQ ID NO: 51831 - DNA, 25 bp, Artificial
  probe
  misc_feature (1)..(25): SEQ ID NO: 536; WAN024AEC_at; Start 10; Stop 34
cttctagctgattttaataacagct

SEQ ID NO: 51832 - DNA, 25 bp, Artificial
  probe
  misc_feature (1)..(25): SEQ ID NO: 536; WAN024AEC_at; Start 14; Stop 38
tagctgattttaataacagcttatt

SEQ ID NO: 51833 - DNA, 25 bp, Artificial
  probe
  misc_feature (1)..(25): SEQ ID NO: 536; WAN024AEC_at; Start 6; Stop 30
acctcttctagctgattttaataac

SEQ ID NO: 51834 - DNA, 25 bp, Artificial
  probe
  misc_feature (1)..(25): SEQ ID NO: 536; WAN024AEC_at; Start 3; Stop 27
aatacctcttctagctgattttaat

SEQ ID NO: 51835 - DNA, 25 bp, Artificial
  probe
  misc_feature (1)..(25): SEQ ID NO: 536; WAN024AEC_at; Start 11; Stop 35
ttctagctgattttaataacagctt

SEQ ID NO: 51836 - DNA, 25 bp, Artificial
  probe
  misc_feature (1)..(25): SEQ ID NO: 536; WAN024AEC_at; Start 1; Stop 25
ataatacctcttctagctgatttta

SEQ ID NO: 51837 - DNA, 25 bp, Artificial
  probe
  misc_feature (1)..(25): SEQ ID NO: 536; WAN024AEC_at; Start 8; Stop 32
ctcttctagctgattttaataacag

SEQ ID NO: 51838 - DNA, 25 bp, Artificial
  probe
  misc_feature (1)..(25): SEQ ID NO: 536; WAN024AEC_at; Start 4; Stop 28
atacctcttctagctgattttaata

SEQ ID NO: 51839 - DNA, 25 bp, Artificial
  probe
  misc_feature (1)..(25): SEQ ID NO: 536; WAN024AEC_at; Start 5; Stop 29
tacctcttctagctgattttaataa

SEQ ID NO: 51840 - DNA, 25 bp, Artificial
  probe
  misc_feature (1)..(25): SEQ ID NO: 536; WAN024AEC_at; Start 7; Stop 31
cctcttctagctgattttaataaca

SEQ ID NO: 51841 - DNA, 25 bp, Artificial
  probe
  misc_feature (1)..(25): SEQ ID NO: 536; WAN024AEC_at; Start 30; Stop 54
cagcttattttaaggctttttcact

SEQ ID NO: 51842 - DNA, 25 bp, Artificial
  probe
  misc_feature (1)..(25): SEQ ID NO: 536; WAN024AEC_at; Start 9; Stop 33
tcttctagctgattttaataacagc

SEQ ID NO: 51843 - DNA, 25 bp, Artificial
  probe
  misc_feature (1)..(25): SEQ ID NO: 536; WAN024AEC_at; Start 2; Stop 26
taatacctcttctagctgattttaa

SEQ ID NO: 51844 - DNA, 25 bp, Artificial
  probe
  misc_feature (1)..(25): SEQ ID NO: 536; WAN024AEC_at; Start 13; Stop 37
ctagctgattttaataacagcttat

SEQ ID NO: 51845 - DNA, 25 bp, Artificial
  probe
  misc_feature (1)..(25): SEQ ID NO: 536; WAN024AEC_at; Start 12; Stop 36
tctagctgattttaataacagctta

SEQ ID NO: 51846 - DNA, 25 bp, Artificial
  probe
  misc_feature (1)..(25): SEQ ID NO: 536; WAN024AEC_at; Start 15; Stop 39
agctgattttaataacagcttattt

SEQ ID NO: 51847 - DNA, 25 bp, Artificial
  probe
  misc_feature (1)..(25): SEQ ID NO: 306; WAN024AED_at; Start 45; Stop 69
ctgatatatatcataattgtgctat

SEQ ID NO: 51848 - DNA, 25 bp, Artificial
  probe
  misc_feature (1)..(25): SEQ ID NO: 306; WAN024AED_at; Start 90; Stop 114
attatcagaaaattatgggaggtag

SEQ ID NO: 51849 - DNA, 25 bp, Artificial
  probe
  misc_feature (1)..(25): SEQ ID NO: 306; WAN024AED_at; Start 92; Stop 116
tatcagaaaattatgggaggtagtc

SEQ ID NO: 51850 - DNA, 25 bp, Artificial
  probe
  misc_feature (1)..(25): SEQ ID NO: 306; WAN024AED_at; Start 11; Stop 35
tgagtagctaagagataatatagct

SEQ ID NO: 51851 - DNA, 25 bp, Artificial
  probe
  misc_feature (1)..(25): SEQ ID NO: 306; WAN024AED_at; Start 73; Stop 97
taaataaaaagaaaatcattatcag

SEQ ID NO: 51852 - DNA, 25 bp, Artificial
  probe
  misc_feature (1)..(25): SEQ ID NO: 306; WAN024AED_at; Start 87; Stop 111
atcattatcagaaaattatgggagg

SEQ ID NO: 51853 - DNA, 25 bp, Artificial
  probe
  misc_feature (1)..(25): SEQ ID NO: 306; WAN024AED_at; Start 5; Stop 29
tcaaattgagtagctaagagataat

SEQ ID NO: 51854 - DNA, 25 bp, Artificial
  probe
  misc_feature (1)..(25): SEQ ID NO: 306; WAN024AED_at; Start 10; Stop 34
ttgagtagctaagagataatatagc

SEQ ID NO: 51855 - DNA, 25 bp, Artificial
  probe
  misc_feature (1)..(25): SEQ ID NO: 306; WAN024AED_at; Start 2; Stop 26
atttcaaattgagtagctaagagat

SEQ ID NO: 51856 - DNA, 25 bp, Artificial
  probe
  misc_feature (1)..(25): SEQ ID NO: 306; WAN024AED_at; Start 1; Stop 25
aatttcaaattgagtagctaagaga

SEQ ID NO: 51857 - DNA, 25 bp, Artificial
  probe
  misc_feature (1)..(25): SEQ ID NO: 306; WAN024AED_at; Start 17; Stop 41
gctaagagataatatagcttgatat

SEQ ID NO: 51858 - DNA, 25 bp, Artificial
  probe
  misc_feature (1)..(25): SEQ ID NO: 306; WAN024AED_at; Start 86; Stop 110
aatcattatcagaaaattatgggag

SEQ ID NO: 51859 - DNA, 25 bp, Artificial
  probe
  misc_feature (1)..(25): SEQ ID NO: 306; WAN024AED_at; Start 42; Stop 66
tacctgatatatatcataattgtgc

SEQ ID NO: 51860 - DNA, 25 bp, Artificial
  probe
  misc_feature (1)..(25): SEQ ID NO: 306; WAN024AED_at; Start 95; Stop 119
cagaaaattatgggaggtagtcaaa

SEQ ID NO: 51861 - DNA, 25 bp, Artificial
  probe
  misc_feature (1)..(25): SEQ ID NO: 306; WAN024AED_at; Start 4; Stop 28
ttcaaattgagtagctaagagataa

SEQ ID NO: 51862 - DNA, 25 bp, Artificial
  probe
  misc_feature (1)..(25): SEQ ID NO: 306; WAN024AED_at; Start 83; Stop 107
gaaaatcattatcagaaaattatgg

SEQ ID NO: 51863 - DNA, 25 bp, Artificial
  probe
  misc_feature (1)..(25): SEQ ID NO: 306; WAN024AED_at; Start 84; Stop 108
aaaatcattatcagaaaattatggg

SEQ ID NO: 51864 - DNA, 25 bp, Artificial
  probe
  misc_feature (1)..(25): SEQ ID NO: 306; WAN024AED_at; Start 6; Stop 30
caaattgagtagctaagagataata

SEQ ID NO: 51865 - DNA, 25 bp, Artificial
  probe
  misc_feature (1)..(25): SEQ ID NO: 306; WAN024AED_at; Start 53; Stop 77
tatcataattgtgctataattaaat

SEQ ID NO: 51866 - DNA, 25 bp, Artificial
  probe
  misc_feature (1)..(25): SEQ ID NO: 306; WAN024AED_at; Start 26; Stop 50
taatatagcttgatattacctgata

SEQ ID NO: 51867 - DNA, 25 bp, Artificial
  probe
  misc_feature (1)..(25): SEQ ID NO: 306; WAN024AED_at; Start 47; Stop 71
gatatatatcataattgtgctataa

SEQ ID NO: 51868 - DNA, 25 bp, Artificial
  probe
  misc_feature (1)..(25): SEQ ID NO: 306; WAN024AED_at; Start 3; Stop 27
tttcaaattgagtagctaagagata

SEQ ID NO: 51869 - DNA, 25 bp, Artificial
  probe
  misc_feature (1)..(25): SEQ ID NO: 306; WAN024AED_at; Start 24; Stop 48
gataatatagcttgatattacctga

SEQ ID NO: 51870 - DNA, 25 bp, Artificial
  probe
  misc_feature (1)..(25): SEQ ID NO: 306; WAN024AED_at; Start 14; Stop 38
gtagctaagagataatatagcttga

SEQ ID NO: 51871 - DNA, 25 bp, Artificial
  probe
  misc_feature (1)..(25): SEQ ID NO: 306; WAN024AED_at; Start 12; Stop 36
gagtagctaagagataatatagctt

SEQ ID NO: 51872 - DNA, 25 bp, Artificial
  probe
  misc_feature (1)..(25): SEQ ID NO: 306; WAN024AED_at; Start 15; Stop 39
tagctaagagataatatagcttgat

SEQ ID NO: 51873 - DNA, 25 bp, Artificial
  probe
  misc_feature (1)..(25): SEQ ID NO: 306; WAN024AED_at; Start 89; Stop 113
cattatcagaaaattatgggaggta

SEQ ID NO: 51874 - DNA, 25 bp, Artificial
  probe
  misc_feature (1)..(25): SEQ ID NO: 306; WAN024AED_at; Start 44; Stop 68
cctgatatatatcataattgtgcta

SEQ ID NO: 51875 - DNA, 25 bp, Artificial
  probe
  misc_feature (1)..(25): SEQ ID NO: 306; WAN024AED_at; Start 94; Stop 118
tcagaaaattatgggaggtagtcaa

SEQ ID NO: 51876 - DNA, 25 bp, Artificial
  probe
  misc_feature (1)..(25): SEQ ID NO: 306; WAN024AED_at; Start 29; Stop 53
tatagcttgatattacctgatatat

SEQ ID NO: 51877 - DNA, 25 bp, Artificial
  probe
  misc_feature (1)..(25): SEQ ID NO: 306; WAN024AED_at; Start 93; Stop 117
atcagaaaattatgggaggtagtca

SEQ ID NO: 51878 - DNA, 25 bp, Artificial
  probe
  misc_feature (1)..(25): SEQ ID NO: 306; WAN024AED_at; Start 88; Stop 112
tcattatcagaaaattatgggaggt

SEQ ID NO: 51879 - DNA, 25 bp, Artificial
  probe
  misc_feature (1)..(25): SEQ ID NO: 306; WAN024AED_at; Start 33; Stop 57
gcttgatattacctgatatatatca

SEQ ID NO: 51880 - DNA, 25 bp, Artificial
  probe
  misc_feature (1)..(25): SEQ ID NO: 306; WAN024AED_at; Start 31; Stop 55
tagcttgatattacctgatatatat

SEQ ID NO: 51881 - DNA, 25 bp, Artificial
  probe
  misc_feature (1)..(25): SEQ ID NO: 4358; WAN024AEE_at; Start 76; Stop 100
ggtaatatcaagctatattatctct

SEQ ID NO: 51882 - DNA, 25 bp, Artificial
  probe
  misc_feature (1)..(25): SEQ ID NO: 4358; WAN024AEE_at; Start 6; Stop 30
actacctcccataattttctgataa

SEQ ID NO: 51883 - DNA, 25 bp, Artificial
  probe
  misc_feature (1)..(25): SEQ ID NO: 4358; WAN024AEE_at; Start 9; Stop 33
acctcccataattttctgataatga

SEQ ID NO: 51884 - DNA, 25 bp, Artificial
  probe
  misc_feature (1)..(25): SEQ ID NO: 4358; WAN024AEE_at; Start 95; Stop 119
atctcttagctactcaatttgaaat

SEQ ID NO: 51885 - DNA, 25 bp, Artificial
  probe
  misc_feature (1)..(25): SEQ ID NO: 4358; WAN024AEE_at; Start 4; Stop 28
tgactacctcccataattttctgat

SEQ ID NO: 51886 - DNA, 25 bp, Artificial
  probe
  misc_feature (1)..(25): SEQ ID NO: 4358; WAN024AEE_at; Start 14; Stop 38
ccataattttctgataatgattttc

SEQ ID NO: 51887 - DNA, 25 bp, Artificial
  probe
  misc_feature (1)..(25): SEQ ID NO: 4358; WAN024AEE_at; Start 55; Stop 79
gcacaattatgatatatatcaggta

SEQ ID NO: 51888 - DNA, 25 bp, Artificial
  probe
  misc_feature (1)..(25): SEQ ID NO: 4358; WAN024AEE_at; Start 93; Stop 117
ttatctcttagctactcaatttgaa

SEQ ID NO: 51889 - DNA, 25 bp, Artificial
  probe
  misc_feature (1)..(25): SEQ ID NO: 4358; WAN024AEE_at; Start 15; Stop 39
cataattttctgataatgattttct

SEQ ID NO: 51890 - DNA, 25 bp, Artificial
  probe
  misc_feature (1)..(25): SEQ ID NO: 4358; WAN024AEE_at; Start 69; Stop 93
tatatcaggtaatatcaagctatat

SEQ ID NO: 51891 - DNA, 25 bp, Artificial
  probe
  misc_feature (1)..(25): SEQ ID NO: 4358; WAN024AEE_at; Start 91; Stop 115
tattatctcttagctactcaatttg

SEQ ID NO: 51892 - DNA, 25 bp, Artificial
  probe
  misc_feature (1)..(25): SEQ ID NO: 4358; WAN024AEE_at; Start 3; Stop 27
ttgactacctcccataattttctga

SEQ ID NO: 51893 - DNA, 25 bp, Artificial
  probe
  misc_feature (1)..(25): SEQ ID NO: 4358; WAN024AEE_at; Start 88; Stop 112
ctatattatctcttagctactcaat

SEQ ID NO: 51894 - DNA, 25 bp, Artificial
  probe
  misc_feature (1)..(25): SEQ ID NO: 4358; WAN024AEE_at; Start 73; Stop 97
tcaggtaatatcaagctatattatc

SEQ ID NO: 51895 - DNA, 25 bp, Artificial
  probe
  misc_feature (1)..(25): SEQ ID NO: 4358; WAN024AEE_at; Start 92; Stop 116
attatctcttagctactcaatttga

SEQ ID NO: 51896 - DNA, 25 bp, Artificial
  probe
  misc_feature (1)..(25): SEQ ID NO: 4358; WAN024AEE_at; Start 81; Stop 105
tatcaagctatattatctcttagct

SEQ ID NO: 51897 - DNA, 25 bp, Artificial
  probe
  misc_feature (1)..(25): SEQ ID NO: 4358; WAN024AEE_at; Start 79; Stop 103
aatatcaagctatattatctcttag

SEQ ID NO: 51898 - DNA, 25 bp, Artificial
  probe
  misc_feature (1)..(25): SEQ ID NO: 4358; WAN024AEE_at; Start 11; Stop 35
ctcccataattttctgataatgatt

SEQ ID NO: 51899 - DNA, 25 bp, Artificial
  probe
  misc_feature (1)..(25): SEQ ID NO: 4358; WAN024AEE_at; Start 71; Stop 95
tatcaggtaatatcaagctatatta

SEQ ID NO: 51900 - DNA, 25 bp, Artificial
  probe
  misc_feature (1)..(25): SEQ ID NO: 4358; WAN024AEE_at; Start 96; Stop 120
tctcttagctactcaatttgaaatt

SEQ ID NO: 51901 - DNA, 25 bp, Artificial
  probe
  misc_feature (1)..(25): SEQ ID NO: 4358; WAN024AEE_at; Start 56; Stop 80
cacaattatgatatatatcaggtaa

SEQ ID NO: 51902 - DNA, 25 bp, Artificial
  probe
  misc_feature (1)..(25): SEQ ID NO: 4358; WAN024AEE_at; Start 8; Stop 32
tacctcccataattttctgataatg

SEQ ID NO: 51903 - DNA, 25 bp, Artificial
  probe
  misc_feature (1)..(25): SEQ ID NO: 4358; WAN024AEE_at; Start 87; Stop 111
gctatattatctcttagctactcaa

SEQ ID NO: 51904 - DNA, 25 bp, Artificial
  probe
  misc_feature (1)..(25): SEQ ID NO: 4358; WAN024AEE_at; Start 83; Stop 107
tcaagctatattatctcttagctac

SEQ ID NO: 51905 - DNA, 25 bp, Artificial
  probe
  misc_feature (1)..(25): SEQ ID NO: 4358; WAN024AEE_at; Start 94; Stop 118
tatctcttagctactcaatttgaaa

SEQ ID NO: 51906 - DNA, 25 bp, Artificial
  probe
  misc_feature (1)..(25): SEQ ID NO: 4358; WAN024AEE_at; Start 5; Stop 29
gactacctcccataattttctgata

SEQ ID NO: 51907 - DNA, 25 bp, Artificial
  probe
  misc_feature (1)..(25): SEQ ID NO: 4358; WAN024AEE_at; Start 53; Stop 77
tagcacaattatgatatatatcagg

SEQ ID NO: 51908 - DNA, 25 bp, Artificial
  probe
  misc_feature (1)..(25): SEQ ID NO: 4358; WAN024AEE_at; Start 65; Stop 89
gatatatatcaggtaatatcaagct

SEQ ID NO: 51909 - DNA, 25 bp, Artificial
  probe
  misc_feature (1)..(25): SEQ ID NO: 4358; WAN024AEE_at; Start 86; Stop 110
agctatattatctcttagctactca

SEQ ID NO: 51910 - DNA, 25 bp, Artificial
  probe
  misc_feature (1)..(25): SEQ ID NO: 4358; WAN024AEE_at; Start 84; Stop 108
caagctatattatctcttagctact

SEQ ID NO: 51911 - DNA, 25 bp, Artificial
  probe
  misc_feature (1)..(25): SEQ ID NO: 4358; WAN024AEE_at; Start 43; Stop 67
tatttaattatagcacaattatgat

SEQ ID NO: 51912 - DNA, 25 bp, Artificial
  probe
  misc_feature (1)..(25): SEQ ID NO: 4358; WAN024AEE_at; Start 74; Stop 98
caggtaatatcaagctatattatct

SEQ ID NO: 51913 - DNA, 25 bp, Artificial
  probe
  misc_feature (1)..(25): SEQ ID NO: 4358; WAN024AEE_at; Start 10; Stop 34
cctcccataattttctgataatgat

SEQ ID NO: 51914 - DNA, 25 bp, Artificial
  probe
  misc_feature (1)..(25): SEQ ID NO: 4358; WAN024AEE_at; Start 67; Stop 91
tatatatcaggtaatatcaagctat

SEQ ID NO: 51915 - DNA, 25 bp, Artificial
  probe
  misc_feature (1)..(25): SEQ ID NO: 500; WAN024AEF_at; Start 58; Stop 82
agtgacttgtagattttcatcttat

SEQ ID NO: 51916 - DNA, 25 bp, Artificial
  probe
  misc_feature (1)..(25): SEQ ID NO: 500; WAN024AEF_at; Start 63; Stop 87
cttgtagattttcatcttataccat

SEQ ID NO: 51917 - DNA, 25 bp, Artificial
  probe
  misc_feature (1)..(25): SEQ ID NO: 500; WAN024AEF_at; Start 43; Stop 67
tgttatatgaaaattagtgacttgt

SEQ ID NO: 51918 - DNA, 25 bp, Artificial
  probe
  misc_feature (1)..(25): SEQ ID NO: 500; WAN024AEF_at; Start 7; Stop 31
cttctgaataacagaaaaagagcct

SEQ ID NO: 51919 - DNA, 25 bp, Artificial
  probe
  misc_feature (1)..(25): SEQ ID NO: 500; WAN024AEF_at; Start 55; Stop 79
attagtgacttgtagattttcatct

SEQ ID NO: 51920 - DNA, 25 bp, Artificial
  probe
  misc_feature (1)..(25): SEQ ID NO: 500; WAN024AEF_at; Start 56; Stop 80
ttagtgacttgtagattttcatctt

SEQ ID NO: 51921 - DNA, 25 bp, Artificial
  probe
  misc_feature (1)..(25): SEQ ID NO: 500; WAN024AEF_at; Start 2; Stop 26
gttctcttctgaataacagaaaaag

SEQ ID NO: 51922 - DNA, 25 bp, Artificial
  probe
  misc_feature (1)..(25): SEQ ID NO: 500; WAN024AEF_at; Start 45; Stop 69
ttatatgaaaattagtgacttgtag

SEQ ID NO: 51923 - DNA, 25 bp, Artificial
  probe
  misc_feature (1)..(25): SEQ ID NO: 500; WAN024AEF_at; Start 48; Stop 72
tatgaaaattagtgacttgtagatt

SEQ ID NO: 51924 - DNA, 25 bp, Artificial
  probe
  misc_feature (1)..(25): SEQ ID NO: 500; WAN024AEF_at; Start 57; Stop 81
tagtgacttgtagattttcatctta

SEQ ID NO: 51925 - DNA, 25 bp, Artificial
  probe
  misc_feature (1)..(25): SEQ ID NO: 500; WAN024AEF_at; Start 54; Stop 78
aattagtgacttgtagattttcatc

SEQ ID NO: 51926 - DNA, 25 bp, Artificial
  probe
  misc_feature (1)..(25): SEQ ID NO: 500; WAN024AEF_at; Start 8; Stop 32
ttctgaataacagaaaaagagcctg

SEQ ID NO: 51927 - DNA, 25 bp, Artificial
  probe
  misc_feature (1)..(25): SEQ ID NO: 500; WAN024AEF_at; Start 3; Stop 27
ttctcttctgaataacagaaaaaga

SEQ ID NO: 51928 - DNA, 25 bp, Artificial
  probe
  misc_feature (1)..(25): SEQ ID NO: 500; WAN024AEF_at; Start 42; Stop 66
ttgttatatgaaaattagtgacttg

SEQ ID NO: 51929 - DNA, 25 bp, Artificial
  probe
  misc_feature (1)..(25): SEQ ID NO: 500; WAN024AEF_at; Start 10; Stop 34
ctgaataacagaaaaagagcctgtt

SEQ ID NO: 51930 - DNA, 25 bp, Artificial
  probe
  misc_feature (1)..(25): SEQ ID NO: 500; WAN024AEF_at; Start 5; Stop 29
ctcttctgaataacagaaaaagagc

SEQ ID NO: 51931 - DNA, 25 bp, Artificial
  probe
  misc_feature (1)..(25): SEQ ID NO: 500; WAN024AEF_at; Start 64; Stop 88
ttgtagattttcatcttataccatt

SEQ ID NO: 51932 - DNA, 25 bp, Artificial
  probe
  misc_feature (1)..(25): SEQ ID NO: 500; WAN024AEF_at; Start 44; Stop 68
gttatatgaaaattagtgacttgta

SEQ ID NO: 51933 - DNA, 25 bp, Artificial
  probe
  misc_feature (1)..(25): SEQ ID NO: 500; WAN024AEF_at; Start 9; Stop 33
tctgaataacagaaaaagagcctgt

SEQ ID NO: 51934 - DNA, 25 bp, Artificial
  probe
  misc_feature (1)..(25): SEQ ID NO: 500; WAN024AEF_at; Start 12; Stop 36
gaataacagaaaaagagcctgttcg

SEQ ID NO: 51935 - DNA, 25 bp, Artificial
  probe
  misc_feature (1)..(25): SEQ ID NO: 500; WAN024AEF_at; Start 1; Stop 25
agttctcttctgaataacagaaaaa

SEQ ID NO: 51936 - DNA, 25 bp, Artificial
  probe
  misc_feature (1)..(25): SEQ ID NO: 500; WAN024AEF_at; Start 47; Stop 71
atatgaaaattagtgacttgtagat

SEQ ID NO: 51937 - DNA, 25 bp, Artificial
  probe
  misc_feature (1)..(25): SEQ ID NO: 500; WAN024AEF_at; Start 46; Stop 70
tatatgaaaattagtgacttgtaga

SEQ ID NO: 51938 - DNA, 25 bp, Artificial
  probe
  misc_feature (1)..(25): SEQ ID NO: 500; WAN024AEF_at; Start 62; Stop 86
acttgtagattttcatcttatacca

SEQ ID NO: 51939 - DNA, 25 bp, Artificial
  probe
  misc_feature (1)..(25): SEQ ID NO: 500; WAN024AEF_at; Start 11; Stop 35
tgaataacagaaaaagagcctgttc

SEQ ID NO: 51940 - DNA, 25 bp, Artificial
  probe
  misc_feature (1)..(25): SEQ ID NO: 500; WAN024AEF_at; Start 4; Stop 28
tctcttctgaataacagaaaaagag

SEQ ID NO: 51941 - DNA, 25 bp, Artificial
  probe
  misc_feature (1)..(25): SEQ ID NO: 500; WAN024AEF_at; Start 27; Stop 51
agcctgttcgtttttttgttatatg

SEQ ID NO: 51942 - DNA, 25 bp, Artificial
  probe
  misc_feature (1)..(25): SEQ ID NO: 500; WAN024AEF_at; Start 13; Stop 37
aataacagaaaaagagcctgttcgt

SEQ ID NO: 51943 - DNA, 25 bp, Artificial
  probe
  misc_feature (1)..(25): SEQ ID NO: 500; WAN024AEF_at; Start 60; Stop 84
tgacttgtagattttcatcttatac

SEQ ID NO: 51944 - DNA, 25 bp, Artificial
  probe
  misc_feature (1)..(25): SEQ ID NO: 500; WAN024AEF_at; Start 59; Stop 83
gtgacttgtagattttcatcttata

SEQ ID NO: 51945 - DNA, 25 bp, Artificial
  probe
  misc_feature (1)..(25): SEQ ID NO: 500; WAN024AEF_at; Start 6; Stop 30
tcttctgaataacagaaaaagagcc

SEQ ID NO: 51946 - DNA, 25 bp, Artificial
  probe
  misc_feature (1)..(25): SEQ ID NO: 500; WAN024AEF_at; Start 14; Stop 38
ataacagaaaaagagcctgttcgtt

SEQ ID NO: 51947 - DNA, 25 bp, Artificial
  probe
  misc_feature (1)..(25): SEQ ID NO: 500; WAN024AEF_at; Start 61; Stop 85
gacttgtagattttcatcttatacc

SEQ ID NO: 51948 - DNA, 25 bp, Artificial
  probe
  misc_feature (1)..(25): SEQ ID NO: 500; WAN024AEF_at; Start 28; Stop 52
gcctgttcgtttttttgttatatga

SEQ ID NO: 51949 - DNA, 25 bp, Artificial
  probe
  misc_feature (1)..(25): SEQ ID NO: 3702; WAN024AEG_at; Start 19; Stop 43
aatggtataagatgaaaatctacaa

SEQ ID NO: 51950 - DNA, 25 bp, Artificial
  probe
  misc_feature (1)..(25): SEQ ID NO: 3702; WAN024AEG_at; Start 20; Stop 44
atggtataagatgaaaatctacaag

SEQ ID NO: 51951 - DNA, 25 bp, Artificial
  probe
  misc_feature (1)..(25): SEQ ID NO: 3702; WAN024AEG_at; Start 37; Stop 61
tctacaagtcactaattttcatata

SEQ ID NO: 51952 - DNA, 25 bp, Artificial
  probe
  misc_feature (1)..(25): SEQ ID NO: 3702; WAN024AEG_at; Start 23; Stop 47
gtataagatgaaaatctacaagtca

SEQ ID NO: 51953 - DNA, 25 bp, Artificial
  probe
  misc_feature (1)..(25): SEQ ID NO: 3702; WAN024AEG_at; Start 40; Stop 64
acaagtcactaattttcatataaca

SEQ ID NO: 51954 - DNA, 25 bp, Artificial
  probe
  misc_feature (1)..(25): SEQ ID NO: 3702; WAN024AEG_at; Start 78; Stop 102
gctctttttctgttattcagaagag

SEQ ID NO: 51955 - DNA, 25 bp, Artificial
  probe
  misc_feature (1)..(25): SEQ ID NO: 3702; WAN024AEG_at; Start 76; Stop 100
aggctctttttctgttattcagaag

SEQ ID NO: 51956 - DNA, 25 bp, Artificial
  probe
  misc_feature (1)..(25): SEQ ID NO: 3702; WAN024AEG_at; Start 28; Stop 52
agatgaaaatctacaagtcactaat

SEQ ID NO: 51957 - DNA, 25 bp, Artificial
  probe
  misc_feature (1)..(25): SEQ ID NO: 3702; WAN024AEG_at; Start 32; Stop 56
gaaaatctacaagtcactaattttc

SEQ ID NO: 51958 - DNA, 25 bp, Artificial
  probe
  misc_feature (1)..(25): SEQ ID NO: 3702; WAN024AEG_at; Start 80; Stop 104
tctttttctgttattcagaagagaa

SEQ ID NO: 51959 - DNA, 25 bp, Artificial
  probe
  misc_feature (1)..(25): SEQ ID NO: 3702; WAN024AEG_at; Start 24; Stop 48
tataagatgaaaatctacaagtcac

SEQ ID NO: 51960 - DNA, 25 bp, Artificial
  probe
  misc_feature (1)..(25): SEQ ID NO: 3702; WAN024AEG_at; Start 21; Stop 45
tggtataagatgaaaatctacaagt

SEQ ID NO: 51961 - DNA, 25 bp, Artificial
  probe
  misc_feature (1)..(25): SEQ ID NO: 3702; WAN024AEG_at; Start 72; Stop 96
gaacaggctctttttctgttattca

SEQ ID NO: 51962 - DNA, 25 bp, Artificial
  probe
  misc_feature (1)..(25): SEQ ID NO: 3702; WAN024AEG_at; Start 44; Stop 68
gtcactaattttcatataacaaaaa

SEQ ID NO: 51963 - DNA, 25 bp, Artificial
  probe
  misc_feature (1)..(25): SEQ ID NO: 3702; WAN024AEG_at; Start 41; Stop 65
caagtcactaattttcatataacaa

SEQ ID NO: 51964 - DNA, 25 bp, Artificial
  probe
  misc_feature (1)..(25): SEQ ID NO: 3702; WAN024AEG_at; Start 29; Stop 53
gatgaaaatctacaagtcactaatt

SEQ ID NO: 51965 - DNA, 25 bp, Artificial
  probe
  misc_feature (1)..(25): SEQ ID NO: 3702; WAN024AEG_at; Start 55; Stop 79
tcatataacaaaaaaacgaacaggc

SEQ ID NO: 51966 - DNA, 25 bp, Artificial
  probe
  misc_feature (1)..(25): SEQ ID NO: 3702; WAN024AEG_at; Start 42; Stop 66
aagtcactaattttcatataacaaa

SEQ ID NO: 51967 - DNA, 25 bp, Artificial
  probe
  misc_feature (1)..(25): SEQ ID NO: 3702; WAN024AEG_at; Start 26; Stop 50
taagatgaaaatctacaagtcacta

SEQ ID NO: 51968 - DNA, 25 bp, Artificial
  probe
  misc_feature (1)..(25): SEQ ID NO: 3702; WAN024AEG_at; Start 79; Stop 103
ctctttttctgttattcagaagaga

SEQ ID NO: 51969 - DNA, 25 bp, Artificial
  probe
  misc_feature (1)..(25): SEQ ID NO: 3702; WAN024AEG_at; Start 71; Stop 95
cgaacaggctctttttctgttattc

SEQ ID NO: 51970 - DNA, 25 bp, Artificial
  probe
  misc_feature (1)..(25): SEQ ID NO: 3702; WAN024AEG_at; Start 70; Stop 94
acgaacaggctctttttctgttatt

SEQ ID NO: 51971 - DNA, 25 bp, Artificial
  probe
  misc_feature (1)..(25): SEQ ID NO: 3702; WAN024AEG_at; Start 30; Stop 54
atgaaaatctacaagtcactaattt

SEQ ID NO: 51972 - DNA, 25 bp, Artificial
  probe
  misc_feature (1)..(25): SEQ ID NO: 3702; WAN024AEG_at; Start 77; Stop 101
ggctctttttctgttattcagaaga

SEQ ID NO: 51973 - DNA, 25 bp, Artificial
  probe
  misc_feature (1)..(25): SEQ ID NO: 3702; WAN024AEG_at; Start 27; Stop 51
aagatgaaaatctacaagtcactaa

SEQ ID NO: 51974 - DNA, 25 bp, Artificial
  probe
  misc_feature (1)..(25): SEQ ID NO: 3702; WAN024AEG_at; Start 56; Stop 80
catataacaaaaaaacgaacaggct

SEQ ID NO: 51975 - DNA, 25 bp, Artificial
  probe
  misc_feature (1)..(25): SEQ ID NO: 3702; WAN024AEG_at; Start 69; Stop 93
aacgaacaggctctttttctgttat

SEQ ID NO: 51976 - DNA, 25 bp, Artificial
  probe
  misc_feature (1)..(25): SEQ ID NO: 3702; WAN024AEG_at; Start 75; Stop 99
caggctctttttctgttattcagaa

SEQ ID NO: 51977 - DNA, 25 bp, Artificial
  probe
  misc_feature (1)..(25): SEQ ID NO: 3702; WAN024AEG_at; Start 73; Stop 97
aacaggctctttttctgttattcag

SEQ ID NO: 51978 - DNA, 25 bp, Artificial
  probe
  misc_feature (1)..(25): SEQ ID NO: 3702; WAN024AEG_at; Start 39; Stop 63
tacaagtcactaattttcatataac

SEQ ID NO: 51979 - DNA, 25 bp, Artificial
  probe
  misc_feature (1)..(25): SEQ ID NO: 3702; WAN024AEG_at; Start 35; Stop 59
aatctacaagtcactaattttcata

SEQ ID NO: 51980 - DNA, 25 bp, Artificial
  probe
  misc_feature (1)..(25): SEQ ID NO: 3702; WAN024AEG_at; Start 74; Stop 98
acaggctctttttctgttattcaga

SEQ ID NO: 51981 - DNA, 25 bp, Artificial
  probe
  misc_feature (1)..(25): SEQ ID NO: 3702; WAN024AEG_at; Start 25; Stop 49
ataagatgaaaatctacaagtcact

SEQ ID NO: 51982 - DNA, 25 bp, Artificial
  probe
  misc_feature (1)..(25): SEQ ID NO: 3702; WAN024AEG_at; Start 22; Stop 46
ggtataagatgaaaatctacaagtc

SEQ ID NO: 51983 - DNA, 25 bp, Artificial
  probe
  misc_feature (1)..(25): SEQ ID NO: 4632; WAN024AEH_at; Start 86; Stop 110
actgataagattttagcattagact

SEQ ID NO: 51984 - DNA, 25 bp, Artificial
  probe
  misc_feature (1)..(25): SEQ ID NO: 4632; WAN024AEH_at; Start 2; Stop 26
cgattagtcctcctattttctctaa

SEQ ID NO: 51985 - DNA, 25 bp, Artificial
  probe
  misc_feature (1)..(25): SEQ ID NO: 4632; WAN024AEH_at; Start 67; Stop 91
aactttaagaaatcttctcactgat

SEQ ID NO: 51986 - DNA, 25 bp, Artificial
  probe
  misc_feature (1)..(25): SEQ ID NO: 4632; WAN024AEH_at; Start 40; Stop 64
ctaatacagatgaaactacaaagaa

SEQ ID NO: 51987 - DNA, 25 bp, Artificial
  probe
  misc_feature (1)..(25): SEQ ID NO: 4632; WAN024AEH_at; Start 6; Stop 30
tagtcctcctattttctctaagtta

SEQ ID NO: 51988 - DNA, 25 bp, Artificial
  probe
  misc_feature (1)..(25): SEQ ID NO: 4632; WAN024AEH_at; Start 27; Stop 51
gttaaattatgtactaatacagatg

SEQ ID NO: 51989 - DNA, 25 bp, Artificial
  probe
  misc_feature (1)..(25): SEQ ID NO: 4632; WAN024AEH_at; Start 85; Stop 109
cactgataagattttagcattagac

SEQ ID NO: 51990 - DNA, 25 bp, Artificial
  probe
  misc_feature (1)..(25): SEQ ID NO: 4632; WAN024AEH_at; Start 81; Stop 105
ttctcactgataagattttagcatt

SEQ ID NO: 51991 - DNA, 25 bp, Artificial
  probe
  misc_feature (1)..(25): SEQ ID NO: 4632; WAN024AEH_at; Start 44; Stop 68
tacagatgaaactacaaagaataaa

SEQ ID NO: 51992 - DNA, 25 bp, Artificial
  probe
  misc_feature (1)..(25): SEQ ID NO: 4632; WAN024AEH_at; Start 79; Stop 103
tcttctcactgataagattttagca

SEQ ID NO: 51993 - DNA, 25 bp, Artificial
  probe
  misc_feature (1)..(25): SEQ ID NO: 4632; WAN024AEH_at; Start 3; Stop 27
gattagtcctcctattttctctaag

SEQ ID NO: 51994 - DNA, 25 bp, Artificial
  probe
  misc_feature (1)..(25): SEQ ID NO: 4632; WAN024AEH_at; Start 41; Stop 65
taatacagatgaaactacaaagaat

SEQ ID NO: 51995 - DNA, 25 bp, Artificial
  probe
  misc_feature (1)..(25): SEQ ID NO: 4632; WAN024AEH_at; Start 68; Stop 92
actttaagaaatcttctcactgata

SEQ ID NO: 51996 - DNA, 25 bp, Artificial
  probe
  misc_feature (1)..(25): SEQ ID NO: 4632; WAN024AEH_at; Start 39; Stop 63
actaatacagatgaaactacaaaga

SEQ ID NO: 51997 - DNA, 25 bp, Artificial
  probe
  misc_feature (1)..(25): SEQ ID NO: 4632; WAN024AEH_at; Start 80; Stop 104
cttctcactgataagattttagcat

SEQ ID NO: 51998 - DNA, 25 bp, Artificial
  probe
  misc_feature (1)..(25): SEQ ID NO: 4632; WAN024AEH_at; Start 47; Stop 71
agatgaaactacaaagaataaactt

SEQ ID NO: 51999 - DNA, 25 bp, Artificial
  probe
  misc_feature (1)..(25): SEQ ID NO: 4632; WAN024AEH_at; Start 72; Stop 96
taagaaatcttctcactgataagat

SEQ ID NO: 52000 - DNA, 25 bp, Artificial
  probe
  misc_feature (1)..(25): SEQ ID NO: 4632; WAN024AEH_at; Start 83; Stop 107
ctcactgataagattttagcattag

SEQ ID NO: 52001 - DNA, 25 bp, Artificial
  probe
  misc_feature (1)..(25): SEQ ID NO: 4632; WAN024AEH_at; Start 70; Stop 94
tttaagaaatcttctcactgataag

SEQ ID NO: 52002 - DNA, 25 bp, Artificial
  probe
  misc_feature (1)..(25): SEQ ID NO: 4632; WAN024AEH_at; Start 82; Stop 106
tctcactgataagattttagcatta

SEQ ID NO: 52003 - DNA, 25 bp, Artificial
  probe
  misc_feature (1)..(25): SEQ ID NO: 4632; WAN024AEH_at; Start 34; Stop 58
tatgtactaatacagatgaaactac

SEQ ID NO: 52004 - DNA, 25 bp, Artificial
  probe
  misc_feature (1)..(25): SEQ ID NO: 4632; WAN024AEH_at; Start 71; Stop 95
ttaagaaatcttctcactgataaga

SEQ ID NO: 52005 - DNA, 25 bp, Artificial
  probe
  misc_feature (1)..(25): SEQ ID NO: 4632; WAN024AEH_at; Start 46; Stop 70
cagatgaaactacaaagaataaact

SEQ ID NO: 52006 - DNA, 25 bp, Artificial
  probe
  misc_feature (1)..(25): SEQ ID NO: 4632; WAN024AEH_at; Start 38; Stop 62
tactaatacagatgaaactacaaag

SEQ ID NO: 52007 - DNA, 25 bp, Artificial
  probe
  misc_feature (1)..(25): SEQ ID NO: 4632; WAN024AEH_at; Start 24; Stop 48
taagttaaattatgtactaatacag

SEQ ID NO: 52008 - DNA, 25 bp, Artificial
  probe
  misc_feature (1)..(25): SEQ ID NO: 4632; WAN024AEH_at; Start 66; Stop 90
aaactttaagaaatcttctcactga

SEQ ID NO: 52009 - DNA, 25 bp, Artificial
  probe
  misc_feature (1)..(25): SEQ ID NO: 4632; WAN024AEH_at; Start 88; Stop 112
tgataagattttagcattagacttc

SEQ ID NO: 52010 - DNA, 25 bp, Artificial
  probe
  misc_feature (1)..(25): SEQ ID NO: 4632; WAN024AEH_at; Start 1; Stop 25
tcgattagtcctcctattttctcta

SEQ ID NO: 52011 - DNA, 25 bp, Artificial
  probe
  misc_feature (1)..(25): SEQ ID NO: 4632; WAN024AEH_at; Start 13; Stop 37
cctattttctctaagttaaattatg

SEQ ID NO: 52012 - DNA, 25 bp, Artificial
  probe
  misc_feature (1)..(25): SEQ ID NO: 4632; WAN024AEH_at; Start 42; Stop 66
aatacagatgaaactacaaagaata

SEQ ID NO: 52013 - DNA, 25 bp, Artificial
  probe
  misc_feature (1)..(25): SEQ ID NO: 4632; WAN024AEH_at; Start 65; Stop 89
taaactttaagaaatcttctcactg

SEQ ID NO: 52014 - DNA, 25 bp, Artificial
  probe
  misc_feature (1)..(25): SEQ ID NO: 4632; WAN024AEH_at; Start 36; Stop 60
tgtactaatacagatgaaactacaa

SEQ ID NO: 52015 - DNA, 25 bp, Artificial
  probe
  misc_feature (1)..(25): SEQ ID NO: 4632; WAN024AEH_at; Start 29; Stop 53
taaattatgtactaatacagatgaa

SEQ ID NO: 52016 - DNA, 25 bp, Artificial
  probe
  misc_feature (1)..(25): SEQ ID NO: 4632; WAN024AEH_at; Start 31; Stop 55
aattatgtactaatacagatgaaac

SEQ ID NO: 52017 - DNA, 25 bp, Artificial
  probe
  misc_feature (1)..(25): SEQ ID NO: 3561; WAN024AEI_at; Start 23; Stop 47
tcagtgagaagatttcttaaagttt

SEQ ID NO: 52018 - DNA, 25 bp, Artificial
  probe
  misc_feature (1)..(25): SEQ ID NO: 3561; WAN024AEI_at; Start 43; Stop 67
agtttattctttgtagtttcatctg

SEQ ID NO: 52019 - DNA, 25 bp, Artificial
  probe
  misc_feature (1)..(25): SEQ ID NO: 3561; WAN024AEI_at; Start 2; Stop 26
aagtctaatgctaaaatcttatcag

SEQ ID NO: 52020 - DNA, 25 bp, Artificial
  probe
  misc_feature (1)..(25): SEQ ID NO: 3561; WAN024AEI_at; Start 12; Stop 36
ctaaaatcttatcagtgagaagatt

SEQ ID NO: 52021 - DNA, 25 bp, Artificial
  probe
  misc_feature (1)..(25): SEQ ID NO: 3561; WAN024AEI_at; Start 3; Stop 27
agtctaatgctaaaatcttatcagt

SEQ ID NO: 52022 - DNA, 25 bp, Artificial
  probe
  misc_feature (1)..(25): SEQ ID NO: 3561; WAN024AEI_at; Start 85; Stop 109
acttagagaaaataggaggactaat

SEQ ID NO: 52023 - DNA, 25 bp, Artificial
  probe
  misc_feature (1)..(25): SEQ ID NO: 3561; WAN024AEI_at; Start 5; Stop 29
tctaatgctaaaatcttatcagtga

SEQ ID NO: 52024 - DNA, 25 bp, Artificial
  probe
  misc_feature (1)..(25): SEQ ID NO: 3561; WAN024AEI_at; Start 49; Stop 73
ttctttgtagtttcatctgtattag

SEQ ID NO: 52025 - DNA, 25 bp, Artificial
  probe
  misc_feature (1)..(25): SEQ ID NO: 3561; WAN024AEI_at; Start 11; Stop 35
gctaaaatcttatcagtgagaagat

SEQ ID NO: 52026 - DNA, 25 bp, Artificial
  probe
  misc_feature (1)..(25): SEQ ID NO: 3561; WAN024AEI_at; Start 68; Stop 92
tattagtacataatttaacttagag

SEQ ID NO: 52027 - DNA, 25 bp, Artificial
  probe
  misc_feature (1)..(25): SEQ ID NO: 3561; WAN024AEI_at; Start 10; Stop 34
tgctaaaatcttatcagtgagaaga

SEQ ID NO: 52028 - DNA, 25 bp, Artificial
  probe
  misc_feature (1)..(25): SEQ ID NO: 3561; WAN024AEI_at; Start 6; Stop 30
ctaatgctaaaatcttatcagtgag

SEQ ID NO: 52029 - DNA, 25 bp, Artificial
  probe
  misc_feature (1)..(25): SEQ ID NO: 3561; WAN024AEI_at; Start 54; Stop 78
tgtagtttcatctgtattagtacat

SEQ ID NO: 52030 - DNA, 25 bp, Artificial
  probe
  misc_feature (1)..(25): SEQ ID NO: 3561; WAN024AEI_at; Start 9; Stop 33
atgctaaaatcttatcagtgagaag

SEQ ID NO: 52031 - DNA, 25 bp, Artificial
  probe
  misc_feature (1)..(25): SEQ ID NO: 3561; WAN024AEI_at; Start 8; Stop 32
aatgctaaaatcttatcagtgagaa

SEQ ID NO: 52032 - DNA, 25 bp, Artificial
  probe
  misc_feature (1)..(25): SEQ ID NO: 3561; WAN024AEI_at; Start 56; Stop 80
tagtttcatctgtattagtacataa

SEQ ID NO: 52033 - DNA, 25 bp, Artificial
  probe
  misc_feature (1)..(25): SEQ ID NO: 3561; WAN024AEI_at; Start 19; Stop 43
cttatcagtgagaagatttcttaaa

SEQ ID NO: 52034 - DNA, 25 bp, Artificial
  probe
  misc_feature (1)..(25): SEQ ID NO: 3561; WAN024AEI_at; Start 52; Stop 76
tttgtagtttcatctgtattagtac

SEQ ID NO: 52035 - DNA, 25 bp, Artificial
  probe
  misc_feature (1)..(25): SEQ ID NO: 3561; WAN024AEI_at; Start 87; Stop 111
ttagagaaaataggaggactaatcg

SEQ ID NO: 52036 - DNA, 25 bp, Artificial
  probe
  misc_feature (1)..(25): SEQ ID NO: 3561; WAN024AEI_at; Start 83; Stop 107
taacttagagaaaataggaggacta

SEQ ID NO: 52037 - DNA, 25 bp, Artificial
  probe
  misc_feature (1)..(25): SEQ ID NO: 3561; WAN024AEI_at; Start 44; Stop 68
gtttattctttgtagtttcatctgt

SEQ ID NO: 52038 - DNA, 25 bp, Artificial
  probe
  misc_feature (1)..(25): SEQ ID NO: 3561; WAN024AEI_at; Start 18; Stop 42
tcttatcagtgagaagatttcttaa

SEQ ID NO: 52039 - DNA, 25 bp, Artificial
  probe
  misc_feature (1)..(25): SEQ ID NO: 3561; WAN024AEI_at; Start 86; Stop 110
cttagagaaaataggaggactaatc

SEQ ID NO: 52040 - DNA, 25 bp, Artificial
  probe
  misc_feature (1)..(25): SEQ ID NO: 3561; WAN024AEI_at; Start 21; Stop 45
tatcagtgagaagatttcttaaagt

SEQ ID NO: 52041 - DNA, 25 bp, Artificial
  probe
  misc_feature (1)..(25): SEQ ID NO: 3561; WAN024AEI_at; Start 51; Stop 75
ctttgtagtttcatctgtattagta

SEQ ID NO: 52042 - DNA, 25 bp, Artificial
  probe
  misc_feature (1)..(25): SEQ ID NO: 3561; WAN024AEI_at; Start 24; Stop 48
cagtgagaagatttcttaaagttta

SEQ ID NO: 52043 - DNA, 25 bp, Artificial
  probe
  misc_feature (1)..(25): SEQ ID NO: 3561; WAN024AEI_at; Start 7; Stop 31
taatgctaaaatcttatcagtgaga

SEQ ID NO: 52044 - DNA, 25 bp, Artificial
  probe
  misc_feature (1)..(25): SEQ ID NO: 3561; WAN024AEI_at; Start 55; Stop 79
gtagtttcatctgtattagtacata

SEQ ID NO: 52045 - DNA, 25 bp, Artificial
  probe
  misc_feature (1)..(25): SEQ ID NO: 3561; WAN024AEI_at; Start 88; Stop 112
tagagaaaataggaggactaatcga

SEQ ID NO: 52046 - DNA, 25 bp, Artificial
  probe
  misc_feature (1)..(25): SEQ ID NO: 3561; WAN024AEI_at; Start 71; Stop 95
tagtacataatttaacttagagaaa

SEQ ID NO: 52047 - DNA, 25 bp, Artificial
  probe
  misc_feature (1)..(25): SEQ ID NO: 3561; WAN024AEI_at; Start 4; Stop 28
gtctaatgctaaaatcttatcagtg

SEQ ID NO: 52048 - DNA, 25 bp, Artificial
  probe
  misc_feature (1)..(25): SEQ ID NO: 3561; WAN024AEI_at; Start 1; Stop 25
gaagtctaatgctaaaatcttatca

SEQ ID NO: 52049 - DNA, 25 bp, Artificial
  probe
  misc_feature (1)..(25): SEQ ID NO: 3561; WAN024AEI_at; Start 20; Stop 44
ttatcagtgagaagatttcttaaag

SEQ ID NO: 52050 - DNA, 25 bp, Artificial
  probe
  misc_feature (1)..(25): SEQ ID NO: 3561; WAN024AEI_at; Start 62; Stop 86
catctgtattagtacataatttaac

SEQ ID NO: 52051 - DNA, 25 bp, Artificial
  probe
  misc_feature (1)..(25): SEQ ID NO: 153; WAN024AEJ_at; Start 137; Stop 161
gcttatgtcgtcagcaagtccatgg

SEQ ID NO: 52052 - DNA, 25 bp, Artificial
  probe
  misc_feature (1)..(25): SEQ ID NO: 153; WAN024AEJ_at; Start 129; Stop 153
acccaatcgcttatgtcgtcagcaa

SEQ ID NO: 52053 - DNA, 25 bp, Artificial
  probe
  misc_feature (1)..(25): SEQ ID NO: 153; WAN024AEJ_at; Start 165; Stop 189
caaagataagaaacagcgactacct

SEQ ID NO: 52054 - DNA, 25 bp, Artificial
  probe
  misc_feature (1)..(25): SEQ ID NO: 153; WAN024AEJ_at; Start 127; Stop 151
cgacccaatcgcttatgtcgtcagc

SEQ ID NO: 52055 - DNA, 25 bp, Artificial
  probe
  misc_feature (1)..(25): SEQ ID NO: 153; WAN024AEJ_at; Start 148; Stop 172
cagcaagtccatggagccaaagata

SEQ ID NO: 52056 - DNA, 25 bp, Artificial
  probe
  misc_feature (1)..(25): SEQ ID NO: 153; WAN024AEJ_at; Start 126; Stop 150
acgacccaatcgcttatgtcgtcag

SEQ ID NO: 52057 - DNA, 25 bp, Artificial
  probe
  misc_feature (1)..(25): SEQ ID NO: 153; WAN024AEJ_at; Start 100; Stop 124
tggagtttccattatcccagacgac

SEQ ID NO: 52058 - DNA, 25 bp, Artificial
  probe
  misc_feature (1)..(25): SEQ ID NO: 153; WAN024AEJ_at; Start 103; Stop 127
agtttccattatcccagacgactac

SEQ ID NO: 52059 - DNA, 25 bp, Artificial
  probe
  misc_feature (1)..(25): SEQ ID NO: 153; WAN024AEJ_at; Start 101; Stop 125
ggagtttccattatcccagacgact

SEQ ID NO: 52060 - DNA, 25 bp, Artificial
  probe
  misc_feature (1)..(25): SEQ ID NO: 153; WAN024AEJ_at; Start 163; Stop 187
gccaaagataagaaacagcgactac

SEQ ID NO: 52061 - DNA, 25 bp, Artificial
  probe
  misc_feature (1)..(25): SEQ ID NO: 153; WAN024AEJ_at; Start 133; Stop 157
aatcgcttatgtcgtcagcaagtcc

SEQ ID NO: 52062 - DNA, 25 bp, Artificial
  probe
  misc_feature (1)..(25): SEQ ID NO: 153; WAN024AEJ_at; Start 130; Stop 154
cccaatcgcttatgtcgtcagcaag

SEQ ID NO: 52063 - DNA, 25 bp, Artificial
  probe
  misc_feature (1)..(25): SEQ ID NO: 153; WAN024AEJ_at; Start 128; Stop 152
gacccaatcgcttatgtcgtcagca

SEQ ID NO: 52064 - DNA, 25 bp, Artificial
  probe
  misc_feature (1)..(25): SEQ ID NO: 153; WAN024AEJ_at; Start 125; Stop 149
tacgacccaatcgcttatgtcgtca

SEQ ID NO: 52065 - DNA, 25 bp, Artificial
  probe
  misc_feature (1)..(25): SEQ ID NO: 153; WAN024AEJ_at; Start 144; Stop 168
tcgtcagcaagtccatggagccaaa

SEQ ID NO: 52066 - DNA, 25 bp, Artificial
  probe
  misc_feature (1)..(25): SEQ ID NO: 153; WAN024AEJ_at; Start 102; Stop 126
gagtttccattatcccagacgacta

SEQ ID NO: 52067 - DNA, 25 bp, Artificial
  probe
  misc_feature (1)..(25): SEQ ID NO: 153; WAN024AEJ_at; Start 146; Stop 170
gtcagcaagtccatggagccaaaga

SEQ ID NO: 52068 - DNA, 25 bp, Artificial
  probe
  misc_feature (1)..(25): SEQ ID NO: 153; WAN024AEJ_at; Start 164; Stop 188
ccaaagataagaaacagcgactacc

SEQ ID NO: 52069 - DNA, 25 bp, Artificial
  probe
  misc_feature (1)..(25): SEQ ID NO: 153; WAN024AEJ_at; Start 166; Stop 190
aaagataagaaacagcgactaccta

SEQ ID NO: 52070 - DNA, 25 bp, Artificial
  probe
  misc_feature (1)..(25): SEQ ID NO: 153; WAN024AEJ_at; Start 138; Stop 162
cttatgtcgtcagcaagtccatgga

SEQ ID NO: 52071 - DNA, 25 bp, Artificial
  probe
  misc_feature (1)..(25): SEQ ID NO: 153; WAN024AEJ_at; Start 143; Stop 167
gtcgtcagcaagtccatggagccaa

SEQ ID NO: 52072 - DNA, 25 bp, Artificial
  probe
  misc_feature (1)..(25): SEQ ID NO: 153; WAN024AEJ_at; Start 140; Stop 164
tatgtcgtcagcaagtccatggagc

SEQ ID NO: 52073 - DNA, 25 bp, Artificial
  probe
  misc_feature (1)..(25): SEQ ID NO: 153; WAN024AEJ_at; Start 145; Stop 169
cgtcagcaagtccatggagccaaag

SEQ ID NO: 52074 - DNA, 25 bp, Artificial
  probe
  misc_feature (1)..(25): SEQ ID NO: 153; WAN024AEJ_at; Start 147; Stop 171
tcagcaagtccatggagccaaagat

SEQ ID NO: 52075 - DNA, 25 bp, Artificial
  probe
  misc_feature (1)..(25): SEQ ID NO: 153; WAN024AEJ_at; Start 136; Stop 160
cgcttatgtcgtcagcaagtccatg

SEQ ID NO: 52076 - DNA, 25 bp, Artificial
  probe
  misc_feature (1)..(25): SEQ ID NO: 153; WAN024AEJ_at; Start 98; Stop 122
tatggagtttccattatcccagacg

SEQ ID NO: 52077 - DNA, 25 bp, Artificial
  probe
  misc_feature (1)..(25): SEQ ID NO: 153; WAN024AEJ_at; Start 132; Stop 156
caatcgcttatgtcgtcagcaagtc

SEQ ID NO: 52078 - DNA, 25 bp, Artificial
  probe
  misc_feature (1)..(25): SEQ ID NO: 153; WAN024AEJ_at; Start 135; Stop 159
tcgcttatgtcgtcagcaagtccat

SEQ ID NO: 52079 - DNA, 25 bp, Artificial
  probe
  misc_feature (1)..(25): SEQ ID NO: 153; WAN024AEJ_at; Start 131; Stop 155
ccaatcgcttatgtcgtcagcaagt

SEQ ID NO: 52080 - DNA, 25 bp, Artificial
  probe
  misc_feature (1)..(25): SEQ ID NO: 153; WAN024AEJ_at; Start 99; Stop 123
atggagtttccattatcccagacga

SEQ ID NO: 52081 - DNA, 25 bp, Artificial
  probe
  misc_feature (1)..(25): SEQ ID NO: 153; WAN024AEJ_at; Start 134; Stop 158
atcgcttatgtcgtcagcaagtcca

SEQ ID NO: 52082 - DNA, 25 bp, Artificial
  probe
  misc_feature (1)..(25): SEQ ID NO: 153; WAN024AEJ_at; Start 139; Stop 163
ttatgtcgtcagcaagtccatggag

SEQ ID NO: 52083 - DNA, 25 bp, Artificial
  probe
  misc_feature (1)..(25): SEQ ID NO: 153; WAN024AEJ_at; Start 141; Stop 165
atgtcgtcagcaagtccatggagcc

SEQ ID NO: 52084 - DNA, 25 bp, Artificial
  probe
  misc_feature (1)..(25): SEQ ID NO: 153; WAN024AEJ_at; Start 142; Stop 166
tgtcgtcagcaagtccatggagcca

SEQ ID NO: 52085 - DNA, 25 bp, Artificial
  probe
  misc_feature (1)..(25): SEQ ID NO: 4519; WAN024AEK_at; Start 8; Stop 32
tcgctgtttcttatctttggctcca

SEQ ID NO: 52086 - DNA, 25 bp, Artificial
  probe
  misc_feature (1)..(25): SEQ ID NO: 4519; WAN024AEK_at; Start 119; Stop 143
ggctacctgcagagataaactacct

SEQ ID NO: 52087 - DNA, 25 bp, Artificial
  probe
  misc_feature (1)..(25): SEQ ID NO: 4519; WAN024AEK_at; Start 46; Stop 70
gacataagcgattgggtcgtagtcg

SEQ ID NO: 52088 - DNA, 25 bp, Artificial
  probe
  misc_feature (1)..(25): SEQ ID NO: 4519; WAN024AEK_at; Start 50; Stop 74
taagcgattgggtcgtagtcgtctg

SEQ ID NO: 52089 - DNA, 25 bp, Artificial
  probe
  misc_feature (1)..(25): SEQ ID NO: 4519; WAN024AEK_at; Start 62; Stop 86
tcgtagtcgtctgggataatggaaa

SEQ ID NO: 52090 - DNA, 25 bp, Artificial
  probe
  misc_feature (1)..(25): SEQ ID NO: 4519; WAN024AEK_at; Start 37; Stop 61
cttgctgacgacataagcgattggg

SEQ ID NO: 52091 - DNA, 25 bp, Artificial
  probe
  misc_feature (1)..(25): SEQ ID NO: 4519; WAN024AEK_at; Start 142; Stop 166
ctaacacgagagtaagtagtctgtc

SEQ ID NO: 52092 - DNA, 25 bp, Artificial
  probe
  misc_feature (1)..(25): SEQ ID NO: 4519; WAN024AEK_at; Start 154; Stop 178
taagtagtctgtctgtagtcgtcca

SEQ ID NO: 52093 - DNA, 25 bp, Artificial
  probe
  misc_feature (1)..(25): SEQ ID NO: 4519; WAN024AEK_at; Start 56; Stop 80
attgggtcgtagtcgtctgggataa

SEQ ID NO: 52094 - DNA, 25 bp, Artificial
  probe
  misc_feature (1)..(25): SEQ ID NO: 4519; WAN024AEK_at; Start 29; Stop 53
tccatggacttgctgacgacataag

SEQ ID NO: 52095 - DNA, 25 bp, Artificial
  probe
  misc_feature (1)..(25): SEQ ID NO: 4519; WAN024AEK_at; Start 132; Stop 156
gataaactacctaacacgagagtaa

SEQ ID NO: 52096 - DNA, 25 bp, Artificial
  probe
  misc_feature (1)..(25): SEQ ID NO: 4519; WAN024AEK_at; Start 31; Stop 55
catggacttgctgacgacataagcg

SEQ ID NO: 52097 - DNA, 25 bp, Artificial
  probe
  misc_feature (1)..(25): SEQ ID NO: 4519; WAN024AEK_at; Start 25; Stop 49
tggctccatggacttgctgacgaca

SEQ ID NO: 52098 - DNA, 25 bp, Artificial
  probe
  misc_feature (1)..(25): SEQ ID NO: 4519; WAN024AEK_at; Start 19; Stop 43
tatctttggctccatggacttgctg

SEQ ID NO: 52099 - DNA, 25 bp, Artificial
  probe
  misc_feature (1)..(25): SEQ ID NO: 4519; WAN024AEK_at; Start 22; Stop 46
ctttggctccatggacttgctgacg

SEQ ID NO: 52100 - DNA, 25 bp, Artificial
  probe
  misc_feature (1)..(25): SEQ ID NO: 4519; WAN024AEK_at; Start 35; Stop 59
gacttgctgacgacataagcgattg

SEQ ID NO: 52101 - DNA, 25 bp, Artificial
  probe
  misc_feature (1)..(25): SEQ ID NO: 4519; WAN024AEK_at; Start 139; Stop 163
tacctaacacgagagtaagtagtct

SEQ ID NO: 52102 - DNA, 25 bp, Artificial
  probe
  misc_feature (1)..(25): SEQ ID NO: 4519; WAN024AEK_at; Start 160; Stop 184
gtctgtctgtagtcgtccagtctga

SEQ ID NO: 52103 - DNA, 25 bp, Artificial
  probe
  misc_feature (1)..(25): SEQ ID NO: 4519; WAN024AEK_at; Start 12; Stop 36
tgtttcttatctttggctccatgga

SEQ ID NO: 52104 - DNA, 25 bp, Artificial
  probe
  misc_feature (1)..(25): SEQ ID NO: 4519; WAN024AEK_at; Start 156; Stop 180
agtagtctgtctgtagtcgtccagt

SEQ ID NO: 52105 - DNA, 25 bp, Artificial
  probe
  misc_feature (1)..(25): SEQ ID NO: 4519; WAN024AEK_at; Start 163; Stop 187
tgtctgtagtcgtccagtctgatga

SEQ ID NO: 52106 - DNA, 25 bp, Artificial
  probe
  misc_feature (1)..(25): SEQ ID NO: 4519; WAN024AEK_at; Start 122; Stop 146
tacctgcagagataaactacctaac

SEQ ID NO: 52107 - DNA, 25 bp, Artificial
  probe
  misc_feature (1)..(25): SEQ ID NO: 4519; WAN024AEK_at; Start 43; Stop 67
gacgacataagcgattgggtcgtag

SEQ ID NO: 52108 - DNA, 25 bp, Artificial
  probe
  misc_feature (1)..(25): SEQ ID NO: 4519; WAN024AEK_at; Start 3; Stop 27
ggtagtcgctgtttcttatctttgg

SEQ ID NO: 52109 - DNA, 25 bp, Artificial
  probe
  misc_feature (1)..(25): SEQ ID NO: 4519; WAN024AEK_at; Start 27; Stop 51
gctccatggacttgctgacgacata

SEQ ID NO: 52110 - DNA, 25 bp, Artificial
  probe
  misc_feature (1)..(25): SEQ ID NO: 4519; WAN024AEK_at; Start 116; Stop 140
agcggctacctgcagagataaacta

SEQ ID NO: 52111 - DNA, 25 bp, Artificial
  probe
  misc_feature (1)..(25): SEQ ID NO: 4519; WAN024AEK_at; Start 69; Stop 93
cgtctgggataatggaaactccata

SEQ ID NO: 52112 - DNA, 25 bp, Artificial
  probe
  misc_feature (1)..(25): SEQ ID NO: 4519; WAN024AEK_at; Start 146; Stop 170
cacgagagtaagtagtctgtctgta

SEQ ID NO: 52113 - DNA, 25 bp, Artificial
  probe
  misc_feature (1)..(25): SEQ ID NO: 4519; WAN024AEK_at; Start 65; Stop 89
tagtcgtctgggataatggaaactc

SEQ ID NO: 52114 - DNA, 25 bp, Artificial
  probe
  misc_feature (1)..(25): SEQ ID NO: 4519; WAN024AEK_at; Start 67; Stop 91
gtcgtctgggataatggaaactcca

SEQ ID NO: 52115 - DNA, 25 bp, Artificial
  probe
  misc_feature (1)..(25): SEQ ID NO: 4519; WAN024AEK_at; Start 127; Stop 151
gcagagataaactacctaacacgag

SEQ ID NO: 52116 - DNA, 25 bp, Artificial
  probe
  misc_feature (1)..(25): SEQ ID NO: 4519; WAN024AEK_at; Start 166; Stop 190
ctgtagtcgtccagtctgatgattt

SEQ ID NO: 52117 - DNA, 25 bp, Artificial
  probe
  misc_feature (1)..(25): SEQ ID NO: 4519; WAN024AEK_at; Start 39; Stop 63
tgctgacgacataagcgattgggtc

SEQ ID NO: 52118 - DNA, 25 bp, Artificial
  probe
  misc_feature (1)..(25): SEQ ID NO: 4519; WAN024AEK_at; Start 130; Stop 154
gagataaactacctaacacgagagt

SEQ ID NO: 52119 - DNA, 25 bp, Artificial
  probe
  misc_feature (1)..(25): SEQ ID NO: 4613; WAN024AEL_at; Start 183; Stop 207
tttgttaaacaatagtgatatgtaa

SEQ ID NO: 52120 - DNA, 25 bp, Artificial
  probe
  misc_feature (1)..(25): SEQ ID NO: 4613; WAN024AEL_at; Start 11; Stop 35
cgaaagcaaccatattcgtaccatc

SEQ ID NO: 52121 - DNA, 25 bp, Artificial
  probe
  misc_feature (1)..(25): SEQ ID NO: 4613; WAN024AEL_at; Start 10; Stop 34
acgaaagcaaccatattcgtaccat

SEQ ID NO: 52122 - DNA, 25 bp, Artificial
  probe
  misc_feature (1)..(25): SEQ ID NO: 4613; WAN024AEL_at; Start 188; Stop 212
taaacaatagtgatatgtaaattta

SEQ ID NO: 52123 - DNA, 25 bp, Artificial
  probe
  misc_feature (1)..(25): SEQ ID NO: 4613; WAN024AEL_at; Start 127; Stop 151
gaaaaagttcattctacatttcaaa

SEQ ID NO: 52124 - DNA, 25 bp, Artificial
  probe
  misc_feature (1)..(25): SEQ ID NO: 4613; WAN024AEL_at; Start 8; Stop 32
agacgaaagcaaccatattcgtacc

SEQ ID NO: 52125 - DNA, 25 bp, Artificial
  probe
  misc_feature (1)..(25): SEQ ID NO: 4613; WAN024AEL_at; Start 140; Stop 164
ctacatttcaaaaaaagaataagtg

SEQ ID NO: 52126 - DNA, 25 bp, Artificial
  probe
  misc_feature (1)..(25): SEQ ID NO: 4613; WAN024AEL_at; Start 12; Stop 36
gaaagcaaccatattcgtaccatcg

SEQ ID NO: 52127 - DNA, 25 bp, Artificial
  probe
  misc_feature (1)..(25): SEQ ID NO: 4613; WAN024AEL_at; Start 173; Stop 197
tagattagattttgttaaacaatag

SEQ ID NO: 52128 - DNA, 25 bp, Artificial
  probe
  misc_feature (1)..(25): SEQ ID NO: 4613; WAN024AEL_at; Start 6; Stop 30
ctagacgaaagcaaccatattcgta

SEQ ID NO: 52129 - DNA, 25 bp, Artificial
  probe
  misc_feature (1)..(25): SEQ ID NO: 4613; WAN024AEL_at; Start 182; Stop 206
ttttgttaaacaatagtgatatgta

SEQ ID NO: 52130 - DNA, 25 bp, Artificial
  probe
  misc_feature (1)..(25): SEQ ID NO: 4613; WAN024AEL_at; Start 15; Stop 39
agcaaccatattcgtaccatcggga

SEQ ID NO: 52131 - DNA, 25 bp, Artificial
  probe
  misc_feature (1)..(25): SEQ ID NO: 4613; WAN024AEL_at; Start 133; Stop 157
gttcattctacatttcaaaaaaaga

SEQ ID NO: 52132 - DNA, 25 bp, Artificial
  probe
  misc_feature (1)..(25): SEQ ID NO: 4613; WAN024AEL_at; Start 124; Stop 148
tttgaaaaagttcattctacatttc

SEQ ID NO: 52133 - DNA, 25 bp, Artificial
  probe
  misc_feature (1)..(25): SEQ ID NO: 4613; WAN024AEL_at; Start 7; Stop 31
tagacgaaagcaaccatattcgtac

SEQ ID NO: 52134 - DNA, 25 bp, Artificial
  probe
  misc_feature (1)..(25): SEQ ID NO: 4613; WAN024AEL_at; Start 123; Stop 147
ctttgaaaaagttcattctacattt

SEQ ID NO: 52135 - DNA, 25 bp, Artificial
  probe
  misc_feature (1)..(25): SEQ ID NO: 4613; WAN024AEL_at; Start 18; Stop 42
aaccatattcgtaccatcgggaaag

SEQ ID NO: 52136 - DNA, 25 bp, Artificial
  probe
  misc_feature (1)..(25): SEQ ID NO: 4613; WAN024AEL_at; Start 175; Stop 199
gattagattttgttaaacaatagtg

SEQ ID NO: 52137 - DNA, 25 bp, Artificial
  probe
  misc_feature (1)..(25): SEQ ID NO: 4613; WAN024AEL_at; Start 46; Stop 70
tcaggctatatagggagaattaaaa

SEQ ID NO: 52138 - DNA, 25 bp, Artificial
  probe
  misc_feature (1)..(25): SEQ ID NO: 4613; WAN024AEL_at; Start 132; Stop 156
agttcattctacatttcaaaaaaag

SEQ ID NO: 52139 - DNA, 25 bp, Artificial
  probe
  misc_feature (1)..(25): SEQ ID NO: 4613; WAN024AEL_at; Start 141; Stop 165
tacatttcaaaaaaagaataagtga

SEQ ID NO: 52140 - DNA, 25 bp, Artificial
  probe
  misc_feature (1)..(25): SEQ ID NO: 4613; WAN024AEL_at; Start 17; Stop 41
caaccatattcgtaccatcgggaaa

SEQ ID NO: 52141 - DNA, 25 bp, Artificial
  probe
  misc_feature (1)..(25): SEQ ID NO: 4613; WAN024AEL_at; Start 185; Stop 209
tgttaaacaatagtgatatgtaaat

SEQ ID NO: 52142 - DNA, 25 bp, Artificial
  probe
  misc_feature (1)..(25): SEQ ID NO: 4613; WAN024AEL_at; Start 126; Stop 150
tgaaaaagttcattctacatttcaa

SEQ ID NO: 52143 - DNA, 25 bp, Artificial
  probe
  misc_feature (1)..(25): SEQ ID NO: 4613; WAN024AEL_at; Start 16; Stop 40
gcaaccatattcgtaccatcgggaa

SEQ ID NO: 52144 - DNA, 25 bp, Artificial
  probe
  misc_feature (1)..(25): SEQ ID NO: 4613; WAN024AEL_at; Start 44; Stop 68
tgtcaggctatatagggagaattaa

SEQ ID NO: 52145 - DNA, 25 bp, Artificial
  probe
  misc_feature (1)..(25): SEQ ID NO: 4613; WAN024AEL_at; Start 13; Stop 37
aaagcaaccatattcgtaccatcgg

SEQ ID NO: 52146 - DNA, 25 bp, Artificial
  probe
  misc_feature (1)..(25): SEQ ID NO: 4613; WAN024AEL_at; Start 14; Stop 38
aagcaaccatattcgtaccatcggg

SEQ ID NO: 52147 - DNA, 25 bp, Artificial
  probe
  misc_feature (1)..(25): SEQ ID NO: 4613; WAN024AEL_at; Start 122; Stop 146
actttgaaaaagttcattctacatt

SEQ ID NO: 52148 - DNA, 25 bp, Artificial
  probe
  misc_feature (1)..(25): SEQ ID NO: 4613; WAN024AEL_at; Start 121; Stop 145
aactttgaaaaagttcattctacat

SEQ ID NO: 52149 - DNA, 25 bp, Artificial
  probe
  misc_feature (1)..(25): SEQ ID NO: 4613; WAN024AEL_at; Start 180; Stop 204
gattttgttaaacaatagtgatatg

SEQ ID NO: 52150 - DNA, 25 bp, Artificial
  probe
  misc_feature (1)..(25): SEQ ID NO: 4613; WAN024AEL_at; Start 47; Stop 71
caggctatatagggagaattaaaaa

SEQ ID NO: 52151 - DNA, 25 bp, Artificial
  probe
  misc_feature (1)..(25): SEQ ID NO: 4613; WAN024AEL_at; Start 9; Stop 33
gacgaaagcaaccatattcgtacca

SEQ ID NO: 52152 - DNA, 25 bp, Artificial
  probe
  misc_feature (1)..(25): SEQ ID NO: 4613; WAN024AEL_at; Start 45; Stop 69
gtcaggctatatagggagaattaaa

SEQ ID NO: 52153 - DNA, 25 bp, Artificial
  probe
  misc_feature (1)..(25): SEQ ID NO: 4423; WAN024AEM_at; Start 9; Stop 33
catatcactattgtttaacaaaatc

SEQ ID NO: 52154 - DNA, 25 bp, Artificial
  probe
  misc_feature (1)..(25): SEQ ID NO: 4423; WAN024AEM_at; Start 177; Stop 201
cgatggtacgaatatggttgctttc

SEQ ID NO: 52155 - DNA, 25 bp, Artificial
  probe
  misc_feature (1)..(25): SEQ ID NO: 4423; WAN024AEM_at; Start 188; Stop 212
atatggttgctttcgtctaggtgga

SEQ ID NO: 52156 - DNA, 25 bp, Artificial
  probe
  misc_feature (1)..(25): SEQ ID NO: 4423; WAN024AEM_at; Start 180; Stop 204
tggtacgaatatggttgctttcgtc

SEQ ID NO: 52157 - DNA, 25 bp, Artificial
  probe
  misc_feature (1)..(25): SEQ ID NO: 4423; WAN024AEM_at; Start 7; Stop 31
tacatatcactattgtttaacaaaa

SEQ ID NO: 52158 - DNA, 25 bp, Artificial
  probe
  misc_feature (1)..(25): SEQ ID NO: 4423; WAN024AEM_at; Start 185; Stop 209
cgaatatggttgctttcgtctaggt

SEQ ID NO: 52159 - DNA, 25 bp, Artificial
  probe
  misc_feature (1)..(25): SEQ ID NO: 4423; WAN024AEM_at; Start 64; Stop 88
tgaaatgtagaatgaactttttcaa

SEQ ID NO: 52160 - DNA, 25 bp, Artificial
  probe
  misc_feature (1)..(25): SEQ ID NO: 4423; WAN024AEM_at; Start 145; Stop 169
ttaattctccctatatagcctgaca

SEQ ID NO: 52161 - DNA, 25 bp, Artificial
  probe
  misc_feature (1)..(25): SEQ ID NO: 4423; WAN024AEM_at; Start 183; Stop 207
tacgaatatggttgctttcgtctag

SEQ ID NO: 52162 - DNA, 25 bp, Artificial
  probe
  misc_feature (1)..(25): SEQ ID NO: 4423; WAN024AEM_at; Start 16; Stop 40
ctattgtttaacaaaatctaatcta

SEQ ID NO: 52163 - DNA, 25 bp, Artificial
  probe
  misc_feature (1)..(25): SEQ ID NO: 4423; WAN024AEM_at; Start 173; Stop 197
ttcccgatggtacgaatatggttgc

SEQ ID NO: 52164 - DNA, 25 bp, Artificial
  probe
  misc_feature (1)..(25): SEQ ID NO: 4423; WAN024AEM_at; Start 175; Stop 199
cccgatggtacgaatatggttgctt

SEQ ID NO: 52165 - DNA, 25 bp, Artificial
  probe
  misc_feature (1)..(25): SEQ ID NO: 4423; WAN024AEM_at; Start 171; Stop 195
ctttcccgatggtacgaatatggtt

SEQ ID NO: 52166 - DNA, 25 bp, Artificial
  probe
  misc_feature (1)..(25): SEQ ID NO: 4423; WAN024AEM_at; Start 68; Stop 92
atgtagaatgaactttttcaaagtt

SEQ ID NO: 52167 - DNA, 25 bp, Artificial
  probe
  misc_feature (1)..(25): SEQ ID NO: 4423; WAN024AEM_at; Start 3; Stop 27
aatttacatatcactattgtttaac

SEQ ID NO: 52168 - DNA, 25 bp, Artificial
  probe
  misc_feature (1)..(25): SEQ ID NO: 4423; WAN024AEM_at; Start 187; Stop 211
aatatggttgctttcgtctaggtgg

SEQ ID NO: 52169 - DNA, 25 bp, Artificial
  probe
  misc_feature (1)..(25): SEQ ID NO: 4423; WAN024AEM_at; Start 186; Stop 210
gaatatggttgctttcgtctaggtg

SEQ ID NO: 52170 - DNA, 25 bp, Artificial
  probe
  misc_feature (1)..(25): SEQ ID NO: 4423; WAN024AEM_at; Start 62; Stop 86
tttgaaatgtagaatgaactttttc

SEQ ID NO: 52171 - DNA, 25 bp, Artificial
  probe
  misc_feature (1)..(25): SEQ ID NO: 4423; WAN024AEM_at; Start 63; Stop 87
ttgaaatgtagaatgaactttttca

SEQ ID NO: 52172 - DNA, 25 bp, Artificial
  probe
  misc_feature (1)..(25): SEQ ID NO: 4423; WAN024AEM_at; Start 178; Stop 202
gatggtacgaatatggttgctttcg

SEQ ID NO: 52173 - DNA, 25 bp, Artificial
  probe
  misc_feature (1)..(25): SEQ ID NO: 4423; WAN024AEM_at; Start 182; Stop 206
gtacgaatatggttgctttcgtcta

SEQ ID NO: 52174 - DNA, 25 bp, Artificial
  probe
  misc_feature (1)..(25): SEQ ID NO: 4423; WAN024AEM_at; Start 176; Stop 200
ccgatggtacgaatatggttgcttt

SEQ ID NO: 52175 - DNA, 25 bp, Artificial
  probe
  misc_feature (1)..(25): SEQ ID NO: 4423; WAN024AEM_at; Start 143; Stop 167
ttttaattctccctatatagcctga

SEQ ID NO: 52176 - DNA, 25 bp, Artificial
  probe
  misc_feature (1)..(25): SEQ ID NO: 4423; WAN024AEM_at; Start 144; Stop 168
tttaattctccctatatagcctgac

SEQ ID NO: 52177 - DNA, 25 bp, Artificial
  probe
  misc_feature (1)..(25): SEQ ID NO: 4423; WAN024AEM_at; Start 174; Stop 198
tcccgatggtacgaatatggttgct

SEQ ID NO: 52178 - DNA, 25 bp, Artificial
  probe
  misc_feature (1)..(25): SEQ ID NO: 4423; WAN024AEM_at; Start 179; Stop 203
atggtacgaatatggttgctttcgt

SEQ ID NO: 52179 - DNA, 25 bp, Artificial
  probe
  misc_feature (1)..(25): SEQ ID NO: 4423; WAN024AEM_at; Start 65; Stop 89
gaaatgtagaatgaactttttcaaa

SEQ ID NO: 52180 - DNA, 25 bp, Artificial
  probe
  misc_feature (1)..(25): SEQ ID NO: 4423; WAN024AEM_at; Start 181; Stop 205
ggtacgaatatggttgctttcgtct

SEQ ID NO: 52181 - DNA, 25 bp, Artificial
  probe
  misc_feature (1)..(25): SEQ ID NO: 4423; WAN024AEM_at; Start 184; Stop 208
acgaatatggttgctttcgtctagg

SEQ ID NO: 52182 - DNA, 25 bp, Artificial
  probe
  misc_feature (1)..(25): SEQ ID NO: 4423; WAN024AEM_at; Start 172; Stop 196
tttcccgatggtacgaatatggttg

SEQ ID NO: 52183 - DNA, 25 bp, Artificial
  probe
  misc_feature (1)..(25): SEQ ID NO: 4423; WAN024AEM_at; Start 66; Stop 90
aaatgtagaatgaactttttcaaag

SEQ ID NO: 52184 - DNA, 25 bp, Artificial
  probe
  misc_feature (1)..(25): SEQ ID NO: 4423; WAN024AEM_at; Start 67; Stop 91
aatgtagaatgaactttttcaaagt

SEQ ID NO: 52185 - DNA, 25 bp, Artificial
  probe
  misc_feature (1)..(25): SEQ ID NO: 4423; WAN024AEM_at; Start 14; Stop 38
cactattgtttaacaaaatctaatc

SEQ ID NO: 52186 - DNA, 25 bp, Artificial
  probe
  misc_feature (1)..(25): SEQ ID NO: 4423; WAN024AEM_at; Start 56; Stop 80
tctttttttgaaatgtagaatgaac

SEQ ID NO: 52187 - DNA, 25 bp, Artificial
  probe
  misc_feature (1)..(25): SEQ ID NO: 3205; WAN024AEN_at; Start 64; Stop 88
taaaacagtaaataacatctacact

SEQ ID NO: 52188 - DNA, 25 bp, Artificial
  probe
  misc_feature (1)..(25): SEQ ID NO: 3205; WAN024AEN_at; Start 10; Stop 34
tagtacactagctgagaagaatgct

SEQ ID NO: 52189 - DNA, 25 bp, Artificial
  probe
  misc_feature (1)..(25): SEQ ID NO: 3205; WAN024AEN_at; Start 59; Stop 83
aacgctaaaacagtaaataacatct

SEQ ID NO: 52190 - DNA, 25 bp, Artificial
  probe
  misc_feature (1)..(25): SEQ ID NO: 3205; WAN024AEN_at; Start 74; Stop 98
aataacatctacactcacgtaagta

SEQ ID NO: 52191 - DNA, 25 bp, Artificial
  probe
  misc_feature (1)..(25): SEQ ID NO: 3205; WAN024AEN_at; Start 18; Stop 42
tagctgagaagaatgctataatggt

SEQ ID NO: 52192 - DNA, 25 bp, Artificial
  probe
  misc_feature (1)..(25): SEQ ID NO: 3205; WAN024AEN_at; Start 2; Stop 26
acactccttagtacactagctgaga

SEQ ID NO: 52193 - DNA, 25 bp, Artificial
  probe
  misc_feature (1)..(25): SEQ ID NO: 3205; WAN024AEN_at; Start 3; Stop 27
cactccttagtacactagctgagaa

SEQ ID NO: 52194 - DNA, 25 bp, Artificial
  probe
  misc_feature (1)..(25): SEQ ID NO: 3205; WAN024AEN_at; Start 61; Stop 85
cgctaaaacagtaaataacatctac

SEQ ID NO: 52195 - DNA, 25 bp, Artificial
  probe
  misc_feature (1)..(25): SEQ ID NO: 3205; WAN024AEN_at; Start 68; Stop 92
acagtaaataacatctacactcacg

SEQ ID NO: 52196 - DNA, 25 bp, Artificial
  probe
  misc_feature (1)..(25): SEQ ID NO: 3205; WAN024AEN_at; Start 24; Stop 48
agaagaatgctataatggttagagt

SEQ ID NO: 52197 - DNA, 25 bp, Artificial
  probe
  misc_feature (1)..(25): SEQ ID NO: 3205; WAN024AEN_at; Start 11; Stop 35
agtacactagctgagaagaatgcta

SEQ ID NO: 52198 - DNA, 25 bp, Artificial
  probe
  misc_feature (1)..(25): SEQ ID NO: 3205; WAN024AEN_at; Start 14; Stop 38
acactagctgagaagaatgctataa

SEQ ID NO: 52199 - DNA, 25 bp, Artificial
  probe
  misc_feature (1)..(25): SEQ ID NO: 3205; WAN024AEN_at; Start 79; Stop 103
catctacactcacgtaagtaaaaga

SEQ ID NO: 52200 - DNA, 25 bp, Artificial
  probe
  misc_feature (1)..(25): SEQ ID NO: 3205; WAN024AEN_at; Start 72; Stop 96
taaataacatctacactcacgtaag

SEQ ID NO: 52201 - DNA, 25 bp, Artificial
  probe
  misc_feature (1)..(25): SEQ ID NO: 3205; WAN024AEN_at; Start 78; Stop 102
acatctacactcacgtaagtaaaag

SEQ ID NO: 52202 - DNA, 25 bp, Artificial
  probe
  misc_feature (1)..(25): SEQ ID NO: 3205; WAN024AEN_at; Start 20; Stop 44
gctgagaagaatgctataatggtta

SEQ ID NO: 52203 - DNA, 25 bp, Artificial
  probe
  misc_feature (1)..(25): SEQ ID NO: 3205; WAN024AEN_at; Start 9; Stop 33
ttagtacactagctgagaagaatgc

SEQ ID NO: 52204 - DNA, 25 bp, Artificial
  probe
  misc_feature (1)..(25): SEQ ID NO: 3205; WAN024AEN_at; Start 7; Stop 31
ccttagtacactagctgagaagaat

SEQ ID NO: 52205 - DNA, 25 bp, Artificial
  probe
  misc_feature (1)..(25): SEQ ID NO: 3205; WAN024AEN_at; Start 8; Stop 32
cttagtacactagctgagaagaatg

SEQ ID NO: 52206 - DNA, 25 bp, Artificial
  probe
  misc_feature (1)..(25): SEQ ID NO: 3205; WAN024AEN_at; Start 4; Stop 28
actccttagtacactagctgagaag

SEQ ID NO: 52207 - DNA, 25 bp, Artificial
  probe
  misc_feature (1)..(25): SEQ ID NO: 3205; WAN024AEN_at; Start 17; Stop 41
ctagctgagaagaatgctataatgg

SEQ ID NO: 52208 - DNA, 25 bp, Artificial
  probe
  misc_feature (1)..(25): SEQ ID NO: 3205; WAN024AEN_at; Start 5; Stop 29
ctccttagtacactagctgagaaga

SEQ ID NO: 52209 - DNA, 25 bp, Artificial
  probe
  misc_feature (1)..(25): SEQ ID NO: 3205; WAN024AEN_at; Start 76; Stop 100
taacatctacactcacgtaagtaaa

SEQ ID NO: 52210 - DNA, 25 bp, Artificial
  probe
  misc_feature (1)..(25): SEQ ID NO: 3205; WAN024AEN_at; Start 73; Stop 97
aaataacatctacactcacgtaagt

SEQ ID NO: 52211 - DNA, 25 bp, Artificial
  probe
  misc_feature (1)..(25): SEQ ID NO: 3205; WAN024AEN_at; Start 6; Stop 30
tccttagtacactagctgagaagaa

SEQ ID NO: 52212 - DNA, 25 bp, Artificial
  probe
  misc_feature (1)..(25): SEQ ID NO: 3205; WAN024AEN_at; Start 62; Stop 86
gctaaaacagtaaataacatctaca

SEQ ID NO: 52213 - DNA, 25 bp, Artificial
  probe
  misc_feature (1)..(25): SEQ ID NO: 3205; WAN024AEN_at; Start 13; Stop 37
tacactagctgagaagaatgctata

SEQ ID NO: 52214 - DNA, 25 bp, Artificial
  probe
  misc_feature (1)..(25): SEQ ID NO: 3205; WAN024AEN_at; Start 15; Stop 39
cactagctgagaagaatgctataat

SEQ ID NO: 52215 - DNA, 25 bp, Artificial
  probe
  misc_feature (1)..(25): SEQ ID NO: 3205; WAN024AEN_at; Start 71; Stop 95
gtaaataacatctacactcacgtaa

SEQ ID NO: 52216 - DNA, 25 bp, Artificial
  probe
  misc_feature (1)..(25): SEQ ID NO: 3205; WAN024AEN_at; Start 12; Stop 36
gtacactagctgagaagaatgctat

SEQ ID NO: 52217 - DNA, 25 bp, Artificial
  probe
  misc_feature (1)..(25): SEQ ID NO: 3205; WAN024AEN_at; Start 21; Stop 45
ctgagaagaatgctataatggttag

SEQ ID NO: 52218 - DNA, 25 bp, Artificial
  probe
  misc_feature (1)..(25): SEQ ID NO: 3205; WAN024AEN_at; Start 1; Stop 25
cacactccttagtacactagctgag

SEQ ID NO: 52219 - DNA, 25 bp, Artificial
  probe
  misc_feature (1)..(25): SEQ ID NO: 3205; WAN024AEN_at; Start 69; Stop 93
cagtaaataacatctacactcacgt

SEQ ID NO: 52220 - DNA, 25 bp, Artificial
  probe
  misc_feature (1)..(25): SEQ ID NO: 3205; WAN024AEN_at; Start 23; Stop 47
gagaagaatgctataatggttagag

SEQ ID NO: 52221 - DNA, 25 bp, Artificial
  probe
  misc_feature (1)..(25): SEQ ID NO: 4667; WAN024AEO_at; Start 11; Stop 35
acgtgagtgtagatgttatttactg

SEQ ID NO: 52222 - DNA, 25 bp, Artificial
  probe
  misc_feature (1)..(25): SEQ ID NO: 4667; WAN024AEO_at; Start 6; Stop 30
tacttacgtgagtgtagatgttatt

SEQ ID NO: 52223 - DNA, 25 bp, Artificial
  probe
  misc_feature (1)..(25): SEQ ID NO: 4667; WAN024AEO_at; Start 58; Stop 82
tctaaccattatagcattcttctca

SEQ ID NO: 52224 - DNA, 25 bp, Artificial
  probe
  misc_feature (1)..(25): SEQ ID NO: 4667; WAN024AEO_at; Start 72; Stop 96
cattcttctcagctagtgtactaag

SEQ ID NO: 52225 - DNA, 25 bp, Artificial
  probe
  misc_feature (1)..(25): SEQ ID NO: 4667; WAN024AEO_at; Start 67; Stop 91
tatagcattcttctcagctagtgta

SEQ ID NO: 52226 - DNA, 25 bp, Artificial
  probe
  misc_feature (1)..(25): SEQ ID NO: 4667; WAN024AEO_at; Start 69; Stop 93
tagcattcttctcagctagtgtact

SEQ ID NO: 52227 - DNA, 25 bp, Artificial
  probe
  misc_feature (1)..(25): SEQ ID NO: 4667; WAN024AEO_at; Start 2; Stop 26
cttttacttacgtgagtgtagatgt

SEQ ID NO: 52228 - DNA, 25 bp, Artificial
  probe
  misc_feature (1)..(25): SEQ ID NO: 4667; WAN024AEO_at; Start 66; Stop 90
ttatagcattcttctcagctagtgt

SEQ ID NO: 52229 - DNA, 25 bp, Artificial
  probe
  misc_feature (1)..(25): SEQ ID NO: 4667; WAN024AEO_at; Start 10; Stop 34
tacgtgagtgtagatgttatttact

SEQ ID NO: 52230 - DNA, 25 bp, Artificial
  probe
  misc_feature (1)..(25): SEQ ID NO: 4667; WAN024AEO_at; Start 70; Stop 94
agcattcttctcagctagtgtacta

SEQ ID NO: 52231 - DNA, 25 bp, Artificial
  probe
  misc_feature (1)..(25): SEQ ID NO: 4667; WAN024AEO_at; Start 76; Stop 100
cttctcagctagtgtactaaggagt

SEQ ID NO: 52232 - DNA, 25 bp, Artificial
  probe
  misc_feature (1)..(25): SEQ ID NO: 4667; WAN024AEO_at; Start 60; Stop 84
taaccattatagcattcttctcagc

SEQ ID NO: 52233 - DNA, 25 bp, Artificial
  probe
  misc_feature (1)..(25): SEQ ID NO: 4667; WAN024AEO_at; Start 71; Stop 95
gcattcttctcagctagtgtactaa

SEQ ID NO: 52234 - DNA, 25 bp, Artificial
  probe
  misc_feature (1)..(25): SEQ ID NO: 4667; WAN024AEO_at; Start 68; Stop 92
atagcattcttctcagctagtgtac

SEQ ID NO: 52235 - DNA, 25 bp, Artificial
  probe
  misc_feature (1)..(25): SEQ ID NO: 4667; WAN024AEO_at; Start 59; Stop 83
ctaaccattatagcattcttctcag

SEQ ID NO: 52236 - DNA, 25 bp, Artificial
  probe
  misc_feature (1)..(25): SEQ ID NO: 4667; WAN024AEO_at; Start 12; Stop 36
cgtgagtgtagatgttatttactgt

SEQ ID NO: 52237 - DNA, 25 bp, Artificial
  probe
  misc_feature (1)..(25): SEQ ID NO: 4667; WAN024AEO_at; Start 74; Stop 98
ttcttctcagctagtgtactaagga

SEQ ID NO: 52238 - DNA, 25 bp, Artificial
  probe
  misc_feature (1)..(25): SEQ ID NO: 4667; WAN024AEO_at; Start 78; Stop 102
tctcagctagtgtactaaggagtgt

SEQ ID NO: 52239 - DNA, 25 bp, Artificial
  probe
  misc_feature (1)..(25): SEQ ID NO: 4667; WAN024AEO_at; Start 56; Stop 80
actctaaccattatagcattcttct

SEQ ID NO: 52240 - DNA, 25 bp, Artificial
  probe
  misc_feature (1)..(25): SEQ ID NO: 4667; WAN024AEO_at; Start 64; Stop 88
cattatagcattcttctcagctagt

SEQ ID NO: 52241 - DNA, 25 bp, Artificial
  probe
  misc_feature (1)..(25): SEQ ID NO: 4667; WAN024AEO_at; Start 57; Stop 81
ctctaaccattatagcattcttctc

SEQ ID NO: 52242 - DNA, 25 bp, Artificial
  probe
  misc_feature (1)..(25): SEQ ID NO: 4667; WAN024AEO_at; Start 4; Stop 28
tttacttacgtgagtgtagatgtta

SEQ ID NO: 52243 - DNA, 25 bp, Artificial
  probe
  misc_feature (1)..(25): SEQ ID NO: 4667; WAN024AEO_at; Start 20; Stop 44
tagatgttatttactgttttagcgt

SEQ ID NO: 52244 - DNA, 25 bp, Artificial
  probe
  misc_feature (1)..(25): SEQ ID NO: 4667; WAN024AEO_at; Start 1; Stop 25
tcttttacttacgtgagtgtagatg

SEQ ID NO: 52245 - DNA, 25 bp, Artificial
  probe
  misc_feature (1)..(25): SEQ ID NO: 4667; WAN024AEO_at; Start 65; Stop 89
attatagcattcttctcagctagtg

SEQ ID NO: 52246 - DNA, 25 bp, Artificial
  probe
  misc_feature (1)..(25): SEQ ID NO: 4667; WAN024AEO_at; Start 63; Stop 87
ccattatagcattcttctcagctag

SEQ ID NO: 52247 - DNA, 25 bp, Artificial
  probe
  misc_feature (1)..(25): SEQ ID NO: 4667; WAN024AEO_at; Start 61; Stop 85
aaccattatagcattcttctcagct

SEQ ID NO: 52248 - DNA, 25 bp, Artificial
  probe
  misc_feature (1)..(25): SEQ ID NO: 4667; WAN024AEO_at; Start 21; Stop 45
agatgttatttactgttttagcgtt

SEQ ID NO: 52249 - DNA, 25 bp, Artificial
  probe
  misc_feature (1)..(25): SEQ ID NO: 4667; WAN024AEO_at; Start 8; Stop 32
cttacgtgagtgtagatgttattta

SEQ ID NO: 52250 - DNA, 25 bp, Artificial
  probe
  misc_feature (1)..(25): SEQ ID NO: 4667; WAN024AEO_at; Start 73; Stop 97
attcttctcagctagtgtactaagg

SEQ ID NO: 52251 - DNA, 25 bp, Artificial
  probe
  misc_feature (1)..(25): SEQ ID NO: 4667; WAN024AEO_at; Start 77; Stop 101
ttctcagctagtgtactaaggagtg

SEQ ID NO: 52252 - DNA, 25 bp, Artificial
  probe
  misc_feature (1)..(25): SEQ ID NO: 4667; WAN024AEO_at; Start 79; Stop 103
ctcagctagtgtactaaggagtgtg

SEQ ID NO: 52253 - DNA, 25 bp, Artificial
  probe
  misc_feature (1)..(25): SEQ ID NO: 4667; WAN024AEO_at; Start 9; Stop 33
ttacgtgagtgtagatgttatttac

SEQ ID NO: 52254 - DNA, 25 bp, Artificial
  probe
  misc_feature (1)..(25): SEQ ID NO: 4667; WAN024AEO_at; Start 75; Stop 99
tcttctcagctagtgtactaaggag

SEQ ID NO: 52255 - DNA, 25 bp, Artificial
  probe
  misc_feature (1)..(25): SEQ ID NO: 4553; WAN024AEP_at; Start 20; Stop 44
ctataaatggcttctcttgagaaaa

SEQ ID NO: 52256 - DNA, 25 bp, Artificial
  probe
  misc_feature (1)..(25): SEQ ID NO: 4553; WAN024AEP_at; Start 135; Stop 159
catataatataaatctcctagaact

SEQ ID NO: 52257 - DNA, 25 bp, Artificial
  probe
  misc_feature (1)..(25): SEQ ID NO: 4553; WAN024AEP_at; Start 148; Stop 172
tctcctagaacttttataccctatc

SEQ ID NO: 52258 - DNA, 25 bp, Artificial
  probe
  misc_feature (1)..(25): SEQ ID NO: 4553; WAN024AEP_at; Start 14; Stop 38
tttcacctataaatggcttctcttg

SEQ ID NO: 52259 - DNA, 25 bp, Artificial
  probe
  misc_feature (1)..(25): SEQ ID NO: 4553; WAN024AEP_at; Start 31; Stop 55
ttctcttgagaaaaatttcatcagc

SEQ ID NO: 52260 - DNA, 25 bp, Artificial
  probe
  misc_feature (1)..(25): SEQ ID NO: 4553; WAN024AEP_at; Start 25; Stop 49
aatggcttctcttgagaaaaatttc

SEQ ID NO: 52261 - DNA, 25 bp, Artificial
  probe
  misc_feature (1)..(25): SEQ ID NO: 4553; WAN024AEP_at; Start 28; Stop 52
ggcttctcttgagaaaaatttcatc

SEQ ID NO: 52262 - DNA, 25 bp, Artificial
  probe
  misc_feature (1)..(25): SEQ ID NO: 4553; WAN024AEP_at; Start 35; Stop 59
cttgagaaaaatttcatcagcttac

SEQ ID NO: 52263 - DNA, 25 bp, Artificial
  probe
  misc_feature (1)..(25): SEQ ID NO: 4553; WAN024AEP_at; Start 38; Stop 62
gagaaaaatttcatcagcttactaa

SEQ ID NO: 52264 - DNA, 25 bp, Artificial
  probe
  misc_feature (1)..(25): SEQ ID NO: 4553; WAN024AEP_at; Start 70; Stop 94
tctattcatttgtatttttgtcatc

SEQ ID NO: 52265 - DNA, 25 bp, Artificial
  probe
  misc_feature (1)..(25): SEQ ID NO: 4553; WAN024AEP_at; Start 18; Stop 42
acctataaatggcttctcttgagaa

SEQ ID NO: 52266 - DNA, 25 bp, Artificial
  probe
  misc_feature (1)..(25): SEQ ID NO: 4553; WAN024AEP_at; Start 16; Stop 40
tcacctataaatggcttctcttgag

SEQ ID NO: 52267 - DNA, 25 bp, Artificial
  probe
  misc_feature (1)..(25): SEQ ID NO: 4553; WAN024AEP_at; Start 52; Stop 76
cagcttactaatttattttctattc

SEQ ID NO: 52268 - DNA, 25 bp, Artificial
  probe
  misc_feature (1)..(25): SEQ ID NO: 4553; WAN024AEP_at; Start 151; Stop 175
cctagaacttttataccctatctat

SEQ ID NO: 52269 - DNA, 25 bp, Artificial
  probe
  misc_feature (1)..(25): SEQ ID NO: 4553; WAN024AEP_at; Start 29; Stop 53
gcttctcttgagaaaaatttcatca

SEQ ID NO: 52270 - DNA, 25 bp, Artificial
  probe
  misc_feature (1)..(25): SEQ ID NO: 4553; WAN024AEP_at; Start 40; Stop 64
gaaaaatttcatcagcttactaatt

SEQ ID NO: 52271 - DNA, 25 bp, Artificial
  probe
  misc_feature (1)..(25): SEQ ID NO: 4553; WAN024AEP_at; Start 19; Stop 43
cctataaatggcttctcttgagaaa

SEQ ID NO: 52272 - DNA, 25 bp, Artificial
  probe
  misc_feature (1)..(25): SEQ ID NO: 4553; WAN024AEP_at; Start 137; Stop 161
tataatataaatctcctagaacttt

SEQ ID NO: 52273 - DNA, 25 bp, Artificial
  probe
  misc_feature (1)..(25): SEQ ID NO: 4553; WAN024AEP_at; Start 33; Stop 57
ctcttgagaaaaatttcatcagctt

SEQ ID NO: 52274 - DNA, 25 bp, Artificial
  probe
  misc_feature (1)..(25): SEQ ID NO: 4553; WAN024AEP_at; Start 134; Stop 158
gcatataatataaatctcctagaac

SEQ ID NO: 52275 - DNA, 25 bp, Artificial
  probe
  misc_feature (1)..(25): SEQ ID NO: 4553; WAN024AEP_at; Start 130; Stop 154
gaaagcatataatataaatctccta

SEQ ID NO: 52276 - DNA, 25 bp, Artificial
  probe
  misc_feature (1)..(25): SEQ ID NO: 4553; WAN024AEP_at; Start 23; Stop 47
taaatggcttctcttgagaaaaatt

SEQ ID NO: 52277 - DNA, 25 bp, Artificial
  probe
  misc_feature (1)..(25): SEQ ID NO: 4553; WAN024AEP_at; Start 164; Stop 188
taccctatctatttattcttattgt

SEQ ID NO: 52278 - DNA, 25 bp, Artificial
  probe
  misc_feature (1)..(25): SEQ ID NO: 4553; WAN024AEP_at; Start 180; Stop 204
tcttattgttactctgttctctata

SEQ ID NO: 52279 - DNA, 25 bp, Artificial
  probe
  misc_feature (1)..(25): SEQ ID NO: 4553; WAN024AEP_at; Start 6; Stop 30
tataccattttcacctataaatggc

SEQ ID NO: 52280 - DNA, 25 bp, Artificial
  probe
  misc_feature (1)..(25): SEQ ID NO: 4553; WAN024AEP_at; Start 150; Stop 174
tcctagaacttttataccctatcta

SEQ ID NO: 52281 - DNA, 25 bp, Artificial
  probe
  misc_feature (1)..(25): SEQ ID NO: 4553; WAN024AEP_at; Start 13; Stop 37
ttttcacctataaatggcttctctt

SEQ ID NO: 52282 - DNA, 25 bp, Artificial
  probe
  misc_feature (1)..(25): SEQ ID NO: 4553; WAN024AEP_at; Start 32; Stop 56
tctcttgagaaaaatttcatcagct

SEQ ID NO: 52283 - DNA, 25 bp, Artificial
  probe
  misc_feature (1)..(25): SEQ ID NO: 4553; WAN024AEP_at; Start 113; Stop 137
tattgtatataaaaatagaaagcat

SEQ ID NO: 52284 - DNA, 25 bp, Artificial
  probe
  misc_feature (1)..(25): SEQ ID NO: 4553; WAN024AEP_at; Start 21; Stop 45
tataaatggcttctcttgagaaaaa

SEQ ID NO: 52285 - DNA, 25 bp, Artificial
  probe
  misc_feature (1)..(25): SEQ ID NO: 4553; WAN024AEP_at; Start 11; Stop 35
cattttcacctataaatggcttctc

SEQ ID NO: 52286 - DNA, 25 bp, Artificial
  probe
  misc_feature (1)..(25): SEQ ID NO: 4553; WAN024AEP_at; Start 49; Stop 73
catcagcttactaatttattttcta

SEQ ID NO: 52287 - DNA, 25 bp, Artificial
  probe
  misc_feature (1)..(25): SEQ ID NO: 4553; WAN024AEP_at; Start 177; Stop 201
tattcttattgttactctgttctct

SEQ ID NO: 52288 - DNA, 25 bp, Artificial
  probe
  misc_feature (1)..(25): SEQ ID NO: 4553; WAN024AEP_at; Start 128; Stop 152
tagaaagcatataatataaatctcc

SEQ ID NO: 52289 - DNA, 25 bp, Artificial
  probe
  misc_feature (1)..(25): SEQ ID NO: 4547; WAN024AEQ_at; Start 18; Stop 42
caataagaataaatagatagggtat

SEQ ID NO: 52290 - DNA, 25 bp, Artificial
  probe
  misc_feature (1)..(25): SEQ ID NO: 4547; WAN024AEQ_at; Start 144; Stop 168
tagtaagctgatgaaatttttctca

SEQ ID NO: 52291 - DNA, 25 bp, Artificial
  probe
  misc_feature (1)..(25): SEQ ID NO: 4547; WAN024AEQ_at; Start 5; Stop 29
gagaacagagtaacaataagaataa

SEQ ID NO: 52292 - DNA, 25 bp, Artificial
  probe
  misc_feature (1)..(25): SEQ ID NO: 4547; WAN024AEQ_at; Start 177; Stop 201
catttataggtgaaaatggtataat

SEQ ID NO: 52293 - DNA, 25 bp, Artificial
  probe
  misc_feature (1)..(25): SEQ ID NO: 4547; WAN024AEQ_at; Start 172; Stop 196
gaagccatttataggtgaaaatggt

SEQ ID NO: 52294 - DNA, 25 bp, Artificial
  probe
  misc_feature (1)..(25): SEQ ID NO: 4547; WAN024AEQ_at; Start 146; Stop 170
gtaagctgatgaaatttttctcaag

SEQ ID NO: 52295 - DNA, 25 bp, Artificial
  probe
  misc_feature (1)..(25): SEQ ID NO: 4547; WAN024AEQ_at; Start 10; Stop 34
cagagtaacaataagaataaataga

SEQ ID NO: 52296 - DNA, 25 bp, Artificial
  probe
  misc_feature (1)..(25): SEQ ID NO: 4547; WAN024AEQ_at; Start 143; Stop 167
ttagtaagctgatgaaatttttctc

SEQ ID NO: 52297 - DNA, 25 bp, Artificial
  probe
  misc_feature (1)..(25): SEQ ID NO: 4547; WAN024AEQ_at; Start 156; Stop 180
gaaatttttctcaagagaagccatt

SEQ ID NO: 52298 - DNA, 25 bp, Artificial
  probe
  misc_feature (1)..(25): SEQ ID NO: 4547; WAN024AEQ_at; Start 33; Stop 57
gatagggtataaaagttctaggaga

SEQ ID NO: 52299 - DNA, 25 bp, Artificial
  probe
  misc_feature (1)..(25): SEQ ID NO: 4547; WAN024AEQ_at; Start 47; Stop 71
gttctaggagatttatattatatgc

SEQ ID NO: 52300 - DNA, 25 bp, Artificial
  probe
  misc_feature (1)..(25): SEQ ID NO: 4547; WAN024AEQ_at; Start 155; Stop 179
tgaaatttttctcaagagaagccat

SEQ ID NO: 52301 - DNA, 25 bp, Artificial
  probe
  misc_feature (1)..(25): SEQ ID NO: 4547; WAN024AEQ_at; Start 170; Stop 194
gagaagccatttataggtgaaaatg

SEQ ID NO: 52302 - DNA, 25 bp, Artificial
  probe
  misc_feature (1)..(25): SEQ ID NO: 4547; WAN024AEQ_at; Start 15; Stop 39
taacaataagaataaatagataggg

SEQ ID NO: 52303 - DNA, 25 bp, Artificial
  probe
  misc_feature (1)..(25): SEQ ID NO: 4547; WAN024AEQ_at; Start 102; Stop 126
tataaaaatgatgacaaaaatacaa

SEQ ID NO: 52304 - DNA, 25 bp, Artificial
  probe
  misc_feature (1)..(25): SEQ ID NO: 4547; WAN024AEQ_at; Start 152; Stop 176
tgatgaaatttttctcaagagaagc

SEQ ID NO: 52305 - DNA, 25 bp, Artificial
  probe
  misc_feature (1)..(25): SEQ ID NO: 4547; WAN024AEQ_at; Start 134; Stop 158
gaaaataaattagtaagctgatgaa

SEQ ID NO: 52306 - DNA, 25 bp, Artificial
  probe
  misc_feature (1)..(25): SEQ ID NO: 4547; WAN024AEQ_at; Start 153; Stop 177
gatgaaatttttctcaagagaagcc

SEQ ID NO: 52307 - DNA, 25 bp, Artificial
  probe
  misc_feature (1)..(25): SEQ ID NO: 4547; WAN024AEQ_at; Start 31; Stop 55
tagatagggtataaaagttctagga

SEQ ID NO: 52308 - DNA, 25 bp, Artificial
  probe
  misc_feature (1)..(25): SEQ ID NO: 4547; WAN024AEQ_at; Start 162; Stop 186
tttctcaagagaagccatttatagg

SEQ ID NO: 52309 - DNA, 25 bp, Artificial
  probe
  misc_feature (1)..(25): SEQ ID NO: 4547; WAN024AEQ_at; Start 148; Stop 172
aagctgatgaaatttttctcaagag

SEQ ID NO: 52310 - DNA, 25 bp, Artificial
  probe
  misc_feature (1)..(25): SEQ ID NO: 4547; WAN024AEQ_at; Start 168; Stop 192
aagagaagccatttataggtgaaaa

SEQ ID NO: 52311 - DNA, 25 bp, Artificial
  probe
  misc_feature (1)..(25): SEQ ID NO: 4547; WAN024AEQ_at; Start 111; Stop 135
gatgacaaaaatacaaatgaataga

SEQ ID NO: 52312 - DNA, 25 bp, Artificial
  probe
  misc_feature (1)..(25): SEQ ID NO: 4547; WAN024AEQ_at; Start 3; Stop 27
tagagaacagagtaacaataagaat

SEQ ID NO: 52313 - DNA, 25 bp, Artificial
  probe
  misc_feature (1)..(25): SEQ ID NO: 4547; WAN024AEQ_at; Start 163; Stop 187
ttctcaagagaagccatttataggt

SEQ ID NO: 52314 - DNA, 25 bp, Artificial
  probe
  misc_feature (1)..(25): SEQ ID NO: 4547; WAN024AEQ_at; Start 167; Stop 191
caagagaagccatttataggtgaaa

SEQ ID NO: 52315 - DNA, 25 bp, Artificial
  probe
  misc_feature (1)..(25): SEQ ID NO: 4547; WAN024AEQ_at; Start 129; Stop 153
gaatagaaaataaattagtaagctg

SEQ ID NO: 52316 - DNA, 25 bp, Artificial
  probe
  misc_feature (1)..(25): SEQ ID NO: 4547; WAN024AEQ_at; Start 150; Stop 174
gctgatgaaatttttctcaagagaa

SEQ ID NO: 52317 - DNA, 25 bp, Artificial
  probe
  misc_feature (1)..(25): SEQ ID NO: 4547; WAN024AEQ_at; Start 1; Stop 25
tatagagaacagagtaacaataaga

SEQ ID NO: 52318 - DNA, 25 bp, Artificial
  probe
  misc_feature (1)..(25): SEQ ID NO: 4547; WAN024AEQ_at; Start 165; Stop 189
ctcaagagaagccatttataggtga

SEQ ID NO: 52319 - DNA, 25 bp, Artificial
  probe
  misc_feature (1)..(25): SEQ ID NO: 4547; WAN024AEQ_at; Start 166; Stop 190
tcaagagaagccatttataggtgaa

SEQ ID NO: 52320 - DNA, 25 bp, Artificial
  probe
  misc_feature (1)..(25): SEQ ID NO: 4547; WAN024AEQ_at; Start 53; Stop 77
ggagatttatattatatgctttcta

SEQ ID NO: 52321 - DNA, 25 bp, Artificial
  probe
  misc_feature (1)..(25): SEQ ID NO: 4547; WAN024AEQ_at; Start 34; Stop 58
atagggtataaaagttctaggagat

SEQ ID NO: 52322 - DNA, 25 bp, Artificial
  probe
  misc_feature (1)..(25): SEQ ID NO: 4547; WAN024AEQ_at; Start 175; Stop 199
gccatttataggtgaaaatggtata

SEQ ID NO: 52323 - DNA, 25 bp, Artificial
  probe
  misc_feature (1)..(25): SEQ ID NO: 5150; WAN024AER_at; Start 5; Stop 29
gtattatttcattttctcctgcaat

SEQ ID NO: 52324 - DNA, 25 bp, Artificial
  probe
  misc_feature (1)..(25): SEQ ID NO: 5150; WAN024AER_at; Start 23; Stop 47
ctgcaattgaattcttgctcggctt

SEQ ID NO: 52325 - DNA, 25 bp, Artificial
  probe
  misc_feature (1)..(25): SEQ ID NO: 5150; WAN024AER_at; Start 18; Stop 42
ttctcctgcaattgaattcttgctc

SEQ ID NO: 52326 - DNA, 25 bp, Artificial
  probe
  misc_feature (1)..(25): SEQ ID NO: 5150; WAN024AER_at; Start 15; Stop 39
attttctcctgcaattgaattcttg

SEQ ID NO: 52327 - DNA, 25 bp, Artificial
  probe
  misc_feature (1)..(25): SEQ ID NO: 5150; WAN024AER_at; Start 29; Stop 53
ttgaattcttgctcggctttttgtt

SEQ ID NO: 52328 - DNA, 25 bp, Artificial
  probe
  misc_feature (1)..(25): SEQ ID NO: 5150; WAN024AER_at; Start 24; Stop 48
tgcaattgaattcttgctcggcttt

SEQ ID NO: 52329 - DNA, 25 bp, Artificial
  probe
  misc_feature (1)..(25): SEQ ID NO: 5150; WAN024AER_at; Start 33; Stop 57
attcttgctcggctttttgttttct

SEQ ID NO: 52330 - DNA, 25 bp, Artificial
  probe
  misc_feature (1)..(25): SEQ ID NO: 5150; WAN024AER_at; Start 13; Stop 37
tcattttctcctgcaattgaattct

SEQ ID NO: 52331 - DNA, 25 bp, Artificial
  probe
  misc_feature (1)..(25): SEQ ID NO: 5150; WAN024AER_at; Start 22; Stop 46
cctgcaattgaattcttgctcggct

SEQ ID NO: 52332 - DNA, 25 bp, Artificial
  probe
  misc_feature (1)..(25): SEQ ID NO: 5150; WAN024AER_at; Start 17; Stop 41
tttctcctgcaattgaattcttgct

SEQ ID NO: 52333 - DNA, 25 bp, Artificial
  probe
  misc_feature (1)..(25): SEQ ID NO: 5150; WAN024AER_at; Start 21; Stop 45
tcctgcaattgaattcttgctcggc

SEQ ID NO: 52334 - DNA, 25 bp, Artificial
  probe
  misc_feature (1)..(25): SEQ ID NO: 5150; WAN024AER_at; Start 19; Stop 43
tctcctgcaattgaattcttgctcg

SEQ ID NO: 52335 - DNA, 25 bp, Artificial
  probe
  misc_feature (1)..(25): SEQ ID NO: 5150; WAN024AER_at; Start 1; Stop 25
ttgagtattatttcattttctcctg

SEQ ID NO: 52336 - DNA, 25 bp, Artificial
  probe
  misc_feature (1)..(25): SEQ ID NO: 5150; WAN024AER_at; Start 14; Stop 38
cattttctcctgcaattgaattctt

SEQ ID NO: 52337 - DNA, 25 bp, Artificial
  probe
  misc_feature (1)..(25): SEQ ID NO: 5150; WAN024AER_at; Start 10; Stop 34
atttcattttctcctgcaattgaat

SEQ ID NO: 52338 - DNA, 25 bp, Artificial
  probe
  misc_feature (1)..(25): SEQ ID NO: 5150; WAN024AER_at; Start 26; Stop 50
caattgaattcttgctcggcttttt

SEQ ID NO: 52339 - DNA, 25 bp, Artificial
  probe
  misc_feature (1)..(25): SEQ ID NO: 5150; WAN024AER_at; Start 25; Stop 49
gcaattgaattcttgctcggctttt

SEQ ID NO: 52340 - DNA, 25 bp, Artificial
  probe
  misc_feature (1)..(25): SEQ ID NO: 5150; WAN024AER_at; Start 11; Stop 35
tttcattttctcctgcaattgaatt

SEQ ID NO: 52341 - DNA, 25 bp, Artificial
  probe
  misc_feature (1)..(25): SEQ ID NO: 5150; WAN024AER_at; Start 30; Stop 54
tgaattcttgctcggctttttgttt

SEQ ID NO: 52342 - DNA, 25 bp, Artificial
  probe
  misc_feature (1)..(25): SEQ ID NO: 5150; WAN024AER_at; Start 12; Stop 36
ttcattttctcctgcaattgaattc

SEQ ID NO: 52343 - DNA, 25 bp, Artificial
  probe
  misc_feature (1)..(25): SEQ ID NO: 5150; WAN024AER_at; Start 3; Stop 27
gagtattatttcattttctcctgca

SEQ ID NO: 52344 - DNA, 25 bp, Artificial
  probe
  misc_feature (1)..(25): SEQ ID NO: 5150; WAN024AER_at; Start 9; Stop 33
tatttcattttctcctgcaattgaa

SEQ ID NO: 52345 - DNA, 25 bp, Artificial
  probe
  misc_feature (1)..(25): SEQ ID NO: 5150; WAN024AER_at; Start 34; Stop 58
ttcttgctcggctttttgttttcta

SEQ ID NO: 52346 - DNA, 25 bp, Artificial
  probe
  misc_feature (1)..(25): SEQ ID NO: 5150; WAN024AER_at; Start 7; Stop 31
attatttcattttctcctgcaattg

SEQ ID NO: 52347 - DNA, 25 bp, Artificial
  probe
  misc_feature (1)..(25): SEQ ID NO: 5150; WAN024AER_at; Start 16; Stop 40
ttttctcctgcaattgaattcttgc

SEQ ID NO: 52348 - DNA, 25 bp, Artificial
  probe
  misc_feature (1)..(25): SEQ ID NO: 5150; WAN024AER_at; Start 2; Stop 26
tgagtattatttcattttctcctgc

SEQ ID NO: 52349 - DNA, 25 bp, Artificial
  probe
  misc_feature (1)..(25): SEQ ID NO: 5150; WAN024AER_at; Start 6; Stop 30
tattatttcattttctcctgcaatt

SEQ ID NO: 52350 - DNA, 25 bp, Artificial
  probe
  misc_feature (1)..(25): SEQ ID NO: 5150; WAN024AER_at; Start 27; Stop 51
aattgaattcttgctcggctttttg

SEQ ID NO: 52351 - DNA, 25 bp, Artificial
  probe
  misc_feature (1)..(25): SEQ ID NO: 5150; WAN024AER_at; Start 8; Stop 32
ttatttcattttctcctgcaattga

SEQ ID NO: 52352 - DNA, 25 bp, Artificial
  probe
  misc_feature (1)..(25): SEQ ID NO: 5150; WAN024AER_at; Start 4; Stop 28
agtattatttcattttctcctgcaa

SEQ ID NO: 52353 - DNA, 25 bp, Artificial
  probe
  misc_feature (1)..(25): SEQ ID NO: 5150; WAN024AER_at; Start 28; Stop 52
attgaattcttgctcggctttttgt

SEQ ID NO: 52354 - DNA, 25 bp, Artificial
  probe
  misc_feature (1)..(25): SEQ ID NO: 5150; WAN024AER_at; Start 20; Stop 44
ctcctgcaattgaattcttgctcgg

SEQ ID NO: 52355 - DNA, 25 bp, Artificial
  probe
  misc_feature (1)..(25): SEQ ID NO: 4477; WAN024AES_at; Start 21; Stop 45
aagaattcaattgcaggagaaaatg

SEQ ID NO: 52356 - DNA, 25 bp, Artificial
  probe
  misc_feature (1)..(25): SEQ ID NO: 4477; WAN024AES_at; Start 24; Stop 48
aattcaattgcaggagaaaatgaaa

SEQ ID NO: 52357 - DNA, 25 bp, Artificial
  probe
  misc_feature (1)..(25): SEQ ID NO: 4477; WAN024AES_at; Start 30; Stop 54
attgcaggagaaaatgaaataatac

SEQ ID NO: 52358 - DNA, 25 bp, Artificial
  probe
  misc_feature (1)..(25): SEQ ID NO: 4477; WAN024AES_at; Start 11; Stop 35
aaagccgagcaagaattcaattgca

SEQ ID NO: 52359 - DNA, 25 bp, Artificial
  probe
  misc_feature (1)..(25): SEQ ID NO: 4477; WAN024AES_at; Start 32; Stop 56
tgcaggagaaaatgaaataatactc

SEQ ID NO: 52360 - DNA, 25 bp, Artificial
  probe
  misc_feature (1)..(25): SEQ ID NO: 4477; WAN024AES_at; Start 2; Stop 26
agaaaacaaaaagccgagcaagaat

SEQ ID NO: 52361 - DNA, 25 bp, Artificial
  probe
  misc_feature (1)..(25): SEQ ID NO: 4477; WAN024AES_at; Start 10; Stop 34
aaaagccgagcaagaattcaattgc

SEQ ID NO: 52362 - DNA, 25 bp, Artificial
  probe
  misc_feature (1)..(25): SEQ ID NO: 4477; WAN024AES_at; Start 12; Stop 36
aagccgagcaagaattcaattgcag

SEQ ID NO: 52363 - DNA, 25 bp, Artificial
  probe
  misc_feature (1)..(25): SEQ ID NO: 4477; WAN024AES_at; Start 14; Stop 38
gccgagcaagaattcaattgcagga

SEQ ID NO: 52364 - DNA, 25 bp, Artificial
  probe
  misc_feature (1)..(25): SEQ ID NO: 4477; WAN024AES_at; Start 20; Stop 44
caagaattcaattgcaggagaaaat

SEQ ID NO: 52365 - DNA, 25 bp, Artificial
  probe
  misc_feature (1)..(25): SEQ ID NO: 4477; WAN024AES_at; Start 8; Stop 32
caaaaagccgagcaagaattcaatt

SEQ ID NO: 52366 - DNA, 25 bp, Artificial
  probe
  misc_feature (1)..(25): SEQ ID NO: 4477; WAN024AES_at; Start 13; Stop 37
agccgagcaagaattcaattgcagg

SEQ ID NO: 52367 - DNA, 25 bp, Artificial
  probe
  misc_feature (1)..(25): SEQ ID NO: 4477; WAN024AES_at; Start 25; Stop 49
attcaattgcaggagaaaatgaaat

SEQ ID NO: 52368 - DNA, 25 bp, Artificial
  probe
  misc_feature (1)..(25): SEQ ID NO: 4477; WAN024AES_at; Start 9; Stop 33
aaaaagccgagcaagaattcaattg

SEQ ID NO: 52369 - DNA, 25 bp, Artificial
  probe
  misc_feature (1)..(25): SEQ ID NO: 4477; WAN024AES_at; Start 28; Stop 52
caattgcaggagaaaatgaaataat

SEQ ID NO: 52370 - DNA, 25 bp, Artificial
  probe
  misc_feature (1)..(25): SEQ ID NO: 4477; WAN024AES_at; Start 17; Stop 41
gagcaagaattcaattgcaggagaa

SEQ ID NO: 52371 - DNA, 25 bp, Artificial
  probe
  misc_feature (1)..(25): SEQ ID NO: 4477; WAN024AES_at; Start 1; Stop 25
tagaaaacaaaaagccgagcaagaa

SEQ ID NO: 52372 - DNA, 25 bp, Artificial
  probe
  misc_feature (1)..(25): SEQ ID NO: 4477; WAN024AES_at; Start 22; Stop 46
agaattcaattgcaggagaaaatga

SEQ ID NO: 52373 - DNA, 25 bp, Artificial
  probe
  misc_feature (1)..(25): SEQ ID NO: 4477; WAN024AES_at; Start 5; Stop 29
aaacaaaaagccgagcaagaattca

SEQ ID NO: 52374 - DNA, 25 bp, Artificial
  probe
  misc_feature (1)..(25): SEQ ID NO: 4477; WAN024AES_at; Start 31; Stop 55
ttgcaggagaaaatgaaataatact

SEQ ID NO: 52375 - DNA, 25 bp, Artificial
  probe
  misc_feature (1)..(25): SEQ ID NO: 4477; WAN024AES_at; Start 26; Stop 50
ttcaattgcaggagaaaatgaaata

SEQ ID NO: 52376 - DNA, 25 bp, Artificial
  probe
  misc_feature (1)..(25): SEQ ID NO: 4477; WAN024AES_at; Start 7; Stop 31
acaaaaagccgagcaagaattcaat

SEQ ID NO: 52377 - DNA, 25 bp, Artificial
  probe
  misc_feature (1)..(25): SEQ ID NO: 4477; WAN024AES_at; Start 34; Stop 58
caggagaaaatgaaataatactcaa

SEQ ID NO: 52378 - DNA, 25 bp, Artificial
  probe
  misc_feature (1)..(25): SEQ ID NO: 4477; WAN024AES_at; Start 33; Stop 57
gcaggagaaaatgaaataatactca

SEQ ID NO: 52379 - DNA, 25 bp, Artificial
  probe
  misc_feature (1)..(25): SEQ ID NO: 4477; WAN024AES_at; Start 27; Stop 51
tcaattgcaggagaaaatgaaataa

SEQ ID NO: 52380 - DNA, 25 bp, Artificial
  probe
  misc_feature (1)..(25): SEQ ID NO: 4477; WAN024AES_at; Start 6; Stop 30
aacaaaaagccgagcaagaattcaa

SEQ ID NO: 52381 - DNA, 25 bp, Artificial
  probe
  misc_feature (1)..(25): SEQ ID NO: 4477; WAN024AES_at; Start 19; Stop 43
gcaagaattcaattgcaggagaaaa

SEQ ID NO: 52382 - DNA, 25 bp, Artificial
  probe
  misc_feature (1)..(25): SEQ ID NO: 4477; WAN024AES_at; Start 15; Stop 39
ccgagcaagaattcaattgcaggag

SEQ ID NO: 52383 - DNA, 25 bp, Artificial
  probe
  misc_feature (1)..(25): SEQ ID NO: 4477; WAN024AES_at; Start 29; Stop 53
aattgcaggagaaaatgaaataata

SEQ ID NO: 52384 - DNA, 25 bp, Artificial
  probe
  misc_feature (1)..(25): SEQ ID NO: 4477; WAN024AES_at; Start 23; Stop 47
gaattcaattgcaggagaaaatgaa

SEQ ID NO: 52385 - DNA, 25 bp, Artificial
  probe
  misc_feature (1)..(25): SEQ ID NO: 4477; WAN024AES_at; Start 18; Stop 42
agcaagaattcaattgcaggagaaa

SEQ ID NO: 52386 - DNA, 25 bp, Artificial
  probe
  misc_feature (1)..(25): SEQ ID NO: 4477; WAN024AES_at; Start 16; Stop 40
cgagcaagaattcaattgcaggaga

SEQ ID NO: 52387 - DNA, 25 bp, Artificial
  probe
  misc_feature (1)..(25): SEQ ID NO: 211; WAN024AET_at; Start 1; Stop 25
aagaaagccctgtcaagagaaatgt

SEQ ID NO: 52388 - DNA, 25 bp, Artificial
  probe
  misc_feature (1)..(25): SEQ ID NO: 211; WAN024AET_at; Start 7; Stop 31
gccctgtcaagagaaatgtgtaaaa

SEQ ID NO: 52389 - DNA, 25 bp, Artificial
  probe
  misc_feature (1)..(25): SEQ ID NO: 211; WAN024AET_at; Start 35; Stop 59
ttatatataaaaaacttctagctaa

SEQ ID NO: 52390 - DNA, 25 bp, Artificial
  probe
  misc_feature (1)..(25): SEQ ID NO: 211; WAN024AET_at; Start 8; Stop 32
ccctgtcaagagaaatgtgtaaaat

SEQ ID NO: 52391 - DNA, 25 bp, Artificial
  probe
  misc_feature (1)..(25): SEQ ID NO: 211; WAN024AET_at; Start 5; Stop 29
aagccctgtcaagagaaatgtgtaa

SEQ ID NO: 52392 - DNA, 25 bp, Artificial
  probe
  misc_feature (1)..(25): SEQ ID NO: 211; WAN024AET_at; Start 11; Stop 35
tgtcaagagaaatgtgtaaaatttt

SEQ ID NO: 52393 - DNA, 25 bp, Artificial
  probe
  misc_feature (1)..(25): SEQ ID NO: 211; WAN024AET_at; Start 10; Stop 34
ctgtcaagagaaatgtgtaaaattt

SEQ ID NO: 52394 - DNA, 25 bp, Artificial
  probe
  misc_feature (1)..(25): SEQ ID NO: 211; WAN024AET_at; Start 34; Stop 58
tttatatataaaaaacttctagcta

SEQ ID NO: 52395 - DNA, 25 bp, Artificial
  probe
  misc_feature (1)..(25): SEQ ID NO: 211; WAN024AET_at; Start 2; Stop 26
agaaagccctgtcaagagaaatgtg

SEQ ID NO: 52396 - DNA, 25 bp, Artificial
  probe
  misc_feature (1)..(25): SEQ ID NO: 211; WAN024AET_at; Start 36; Stop 60
tatatataaaaaacttctagctaaa

SEQ ID NO: 52397 - DNA, 25 bp, Artificial
  probe
  misc_feature (1)..(25): SEQ ID NO: 211; WAN024AET_at; Start 4; Stop 28
aaagccctgtcaagagaaatgtgta

SEQ ID NO: 52398 - DNA, 25 bp, Artificial
  probe
  misc_feature (1)..(25): SEQ ID NO: 211; WAN024AET_at; Start 9; Stop 33
cctgtcaagagaaatgtgtaaaatt

SEQ ID NO: 52399 - DNA, 25 bp, Artificial
  probe
  misc_feature (1)..(25): SEQ ID NO: 211; WAN024AET_at; Start 3; Stop 27
gaaagccctgtcaagagaaatgtgt

SEQ ID NO: 52400 - DNA, 25 bp, Artificial
  probe
  misc_feature (1)..(25): SEQ ID NO: 211; WAN024AET_at; Start 6; Stop 30
agccctgtcaagagaaatgtgtaaa

SEQ ID NO: 52401 - DNA, 25 bp, Artificial
  probe
  misc_feature (1)..(25): SEQ ID NO: 396; WAN024AEU_at; Start 38; Stop 62
attttacacatttctcttgacaggg

SEQ ID NO: 52402 - DNA, 25 bp, Artificial
  probe
  misc_feature (1)..(25): SEQ ID NO: 396; WAN024AEU_at; Start 41; Stop 65
ttacacatttctcttgacagggctt

SEQ ID NO: 52403 - DNA, 25 bp, Artificial
  probe
  misc_feature (1)..(25): SEQ ID NO: 396; WAN024AEU_at; Start 11; Stop 35
ttagctagaagttttttatatataa

SEQ ID NO: 52404 - DNA, 25 bp, Artificial
  probe
  misc_feature (1)..(25): SEQ ID NO: 396; WAN024AEU_at; Start 43; Stop 67
acacatttctcttgacagggctttc

SEQ ID NO: 52405 - DNA, 25 bp, Artificial
  probe
  misc_feature (1)..(25): SEQ ID NO: 396; WAN024AEU_at; Start 39; Stop 63
ttttacacatttctcttgacagggc

SEQ ID NO: 52406 - DNA, 25 bp, Artificial
  probe
  misc_feature (1)..(25): SEQ ID NO: 396; WAN024AEU_at; Start 10; Stop 34
tttagctagaagttttttatatata

SEQ ID NO: 52407 - DNA, 25 bp, Artificial
  probe
  misc_feature (1)..(25): SEQ ID NO: 396; WAN024AEU_at; Start 45; Stop 69
acatttctcttgacagggctttctt

SEQ ID NO: 52408 - DNA, 25 bp, Artificial
  probe
  misc_feature (1)..(25): SEQ ID NO: 396; WAN024AEU_at; Start 35; Stop 59
aaaattttacacatttctcttgaca

SEQ ID NO: 52409 - DNA, 25 bp, Artificial
  probe
  misc_feature (1)..(25): SEQ ID NO: 396; WAN024AEU_at; Start 37; Stop 61
aattttacacatttctcttgacagg

SEQ ID NO: 52410 - DNA, 25 bp, Artificial
  probe
  misc_feature (1)..(25): SEQ ID NO: 396; WAN024AEU_at; Start 12; Stop 36
tagctagaagttttttatatataaa

SEQ ID NO: 52411 - DNA, 25 bp, Artificial
  probe
  misc_feature (1)..(25): SEQ ID NO: 396; WAN024AEU_at; Start 40; Stop 64
tttacacatttctcttgacagggct

SEQ ID NO: 52412 - DNA, 25 bp, Artificial
  probe
  misc_feature (1)..(25): SEQ ID NO: 396; WAN024AEU_at; Start 42; Stop 66
tacacatttctcttgacagggcttt

SEQ ID NO: 52413 - DNA, 25 bp, Artificial
  probe
  misc_feature (1)..(25): SEQ ID NO: 396; WAN024AEU_at; Start 44; Stop 68
cacatttctcttgacagggctttct

SEQ ID NO: 52414 - DNA, 25 bp, Artificial
  probe
  misc_feature (1)..(25): SEQ ID NO: 396; WAN024AEU_at; Start 36; Stop 60
aaattttacacatttctcttgacag

SEQ ID NO: 52415 - DNA, 25 bp, Artificial
  probe
  misc_feature (1)..(25): SEQ ID NO: 345; WAN024AEV_at; Start 91; Stop 115
taattttaaatgagtctcagcatgg

SEQ ID NO: 52416 - DNA, 25 bp, Artificial
  probe
  misc_feature (1)..(25): SEQ ID NO: 345; WAN024AEV_at; Start 12; Stop 36
actgatactgtattctaggaaaacg

SEQ ID NO: 52417 - DNA, 25 bp, Artificial
  probe
  misc_feature (1)..(25): SEQ ID NO: 345; WAN024AEV_at; Start 2; Stop 26
ccacttaacaactgatactgtattc

SEQ ID NO: 52418 - DNA, 25 bp, Artificial
  probe
  misc_feature (1)..(25): SEQ ID NO: 345; WAN024AEV_at; Start 19; Stop 43
ctgtattctaggaaaacgatgacat

SEQ ID NO: 52419 - DNA, 25 bp, Artificial
  probe
  misc_feature (1)..(25): SEQ ID NO: 345; WAN024AEV_at; Start 17; Stop 41
tactgtattctaggaaaacgatgac

SEQ ID NO: 52420 - DNA, 25 bp, Artificial
  probe
  misc_feature (1)..(25): SEQ ID NO: 345; WAN024AEV_at; Start 15; Stop 39
gatactgtattctaggaaaacgatg

SEQ ID NO: 52421 - DNA, 25 bp, Artificial
  probe
  misc_feature (1)..(25): SEQ ID NO: 345; WAN024AEV_at; Start 50; Stop 74
taataaaacttctcatatatagcat

SEQ ID NO: 52422 - DNA, 25 bp, Artificial
  probe
  misc_feature (1)..(25): SEQ ID NO: 345; WAN024AEV_at; Start 10; Stop 34
caactgatactgtattctaggaaaa

SEQ ID NO: 52423 - DNA, 25 bp, Artificial
  probe
  misc_feature (1)..(25): SEQ ID NO: 345; WAN024AEV_at; Start 101; Stop 125
tgagtctcagcatggcaatcacttt

SEQ ID NO: 52424 - DNA, 25 bp, Artificial
  probe
  misc_feature (1)..(25): SEQ ID NO: 345; WAN024AEV_at; Start 99; Stop 123
aatgagtctcagcatggcaatcact

SEQ ID NO: 52425 - DNA, 25 bp, Artificial
  probe
  misc_feature (1)..(25): SEQ ID NO: 345; WAN024AEV_at; Start 53; Stop 77
taaaacttctcatatatagcataaa

SEQ ID NO: 52426 - DNA, 25 bp, Artificial
  probe
  misc_feature (1)..(25): SEQ ID NO: 345; WAN024AEV_at; Start 24; Stop 48
ttctaggaaaacgatgacattcttc

SEQ ID NO: 52427 - DNA, 25 bp, Artificial
  probe
  misc_feature (1)..(25): SEQ ID NO: 345; WAN024AEV_at; Start 94; Stop 118
ttttaaatgagtctcagcatggcaa

SEQ ID NO: 52428 - DNA, 25 bp, Artificial
  probe
  misc_feature (1)..(25): SEQ ID NO: 345; WAN024AEV_at; Start 39; Stop 63
gacattcttcctaataaaacttctc

SEQ ID NO: 52429 - DNA, 25 bp, Artificial
  probe
  misc_feature (1)..(25): SEQ ID NO: 345; WAN024AEV_at; Start 7; Stop 31
taacaactgatactgtattctagga

SEQ ID NO: 52430 - DNA, 25 bp, Artificial
  probe
  misc_feature (1)..(25): SEQ ID NO: 345; WAN024AEV_at; Start 29; Stop 53
ggaaaacgatgacattcttcctaat

SEQ ID NO: 52431 - DNA, 25 bp, Artificial
  probe
  misc_feature (1)..(25): SEQ ID NO: 345; WAN024AEV_at; Start 96; Stop 120
ttaaatgagtctcagcatggcaatc

SEQ ID NO: 52432 - DNA, 25 bp, Artificial
  probe
  misc_feature (1)..(25): SEQ ID NO: 345; WAN024AEV_at; Start 30; Stop 54
gaaaacgatgacattcttcctaata

SEQ ID NO: 52433 - DNA, 25 bp, Artificial
  probe
  misc_feature (1)..(25): SEQ ID NO: 345; WAN024AEV_at; Start 98; Stop 122
aaatgagtctcagcatggcaatcac

SEQ ID NO: 52434 - DNA, 25 bp, Artificial
  probe
  misc_feature (1)..(25): SEQ ID NO: 345; WAN024AEV_at; Start 105; Stop 129
tctcagcatggcaatcactttagaa

SEQ ID NO: 52435 - DNA, 25 bp, Artificial
  probe
  misc_feature (1)..(25): SEQ ID NO: 345; WAN024AEV_at; Start 104; Stop 128
gtctcagcatggcaatcactttaga

SEQ ID NO: 52436 - DNA, 25 bp, Artificial
  probe
  misc_feature (1)..(25): SEQ ID NO: 345; WAN024AEV_at; Start 22; Stop 46
tattctaggaaaacgatgacattct

SEQ ID NO: 52437 - DNA, 25 bp, Artificial
  probe
  misc_feature (1)..(25): SEQ ID NO: 345; WAN024AEV_at; Start 92; Stop 116
aattttaaatgagtctcagcatggc

SEQ ID NO: 52438 - DNA, 25 bp, Artificial
  probe
  misc_feature (1)..(25): SEQ ID NO: 345; WAN024AEV_at; Start 32; Stop 56
aaacgatgacattcttcctaataaa

SEQ ID NO: 52439 - DNA, 25 bp, Artificial
  probe
  misc_feature (1)..(25): SEQ ID NO: 345; WAN024AEV_at; Start 13; Stop 37
ctgatactgtattctaggaaaacga

SEQ ID NO: 52440 - DNA, 25 bp, Artificial
  probe
  misc_feature (1)..(25): SEQ ID NO: 345; WAN024AEV_at; Start 18; Stop 42
actgtattctaggaaaacgatgaca

SEQ ID NO: 52441 - DNA, 25 bp, Artificial
  probe
  misc_feature (1)..(25): SEQ ID NO: 345; WAN024AEV_at; Start 63; Stop 87
catatatagcataaatttctactct

SEQ ID NO: 52442 - DNA, 25 bp, Artificial
  probe
  misc_feature (1)..(25): SEQ ID NO: 345; WAN024AEV_at; Start 97; Stop 121
taaatgagtctcagcatggcaatca

SEQ ID NO: 52443 - DNA, 25 bp, Artificial
  probe
  misc_feature (1)..(25): SEQ ID NO: 345; WAN024AEV_at; Start 35; Stop 59
cgatgacattcttcctaataaaact

SEQ ID NO: 52444 - DNA, 25 bp, Artificial
  probe
  misc_feature (1)..(25): SEQ ID NO: 345; WAN024AEV_at; Start 106; Stop 130
ctcagcatggcaatcactttagaat

SEQ ID NO: 52445 - DNA, 25 bp, Artificial
  probe
  misc_feature (1)..(25): SEQ ID NO: 345; WAN024AEV_at; Start 21; Stop 45
gtattctaggaaaacgatgacattc

SEQ ID NO: 52446 - DNA, 25 bp, Artificial
  probe
  misc_feature (1)..(25): SEQ ID NO: 345; WAN024AEV_at; Start 25; Stop 49
tctaggaaaacgatgacattcttcc

SEQ ID NO: 52447 - DNA, 25 bp, Artificial
  probe
  misc_feature (1)..(25): SEQ ID NO: 345; WAN024AEV_at; Start 60; Stop 84
tctcatatatagcataaatttctac

SEQ ID NO: 52448 - DNA, 25 bp, Artificial
  probe
  misc_feature (1)..(25): SEQ ID NO: 345; WAN024AEV_at; Start 102; Stop 126
gagtctcagcatggcaatcacttta

SEQ ID NO: 52449 - DNA, 25 bp, Artificial
  probe
  misc_feature (1)..(25): SEQ ID NO: 3151; WAN024AEW_at; Start 97; Stop 121
ttttcctagaatacagtatcagttg

SEQ ID NO: 52450 - DNA, 25 bp, Artificial
  probe
  misc_feature (1)..(25): SEQ ID NO: 3151; WAN024AEW_at; Start 92; Stop 116
catcgttttcctagaatacagtatc

SEQ ID NO: 52451 - DNA, 25 bp, Artificial
  probe
  misc_feature (1)..(25): SEQ ID NO: 3151; WAN024AEW_at; Start 105; Stop 129
gaatacagtatcagttgttaagtgg

SEQ ID NO: 52452 - DNA, 25 bp, Artificial
  probe
  misc_feature (1)..(25): SEQ ID NO: 3151; WAN024AEW_at; Start 13; Stop 37
ttgccatgctgagactcatttaaaa

SEQ ID NO: 52453 - DNA, 25 bp, Artificial
  probe
  misc_feature (1)..(25): SEQ ID NO: 3151; WAN024AEW_at; Start 10; Stop 34
tgattgccatgctgagactcattta

SEQ ID NO: 52454 - DNA, 25 bp, Artificial
  probe
  misc_feature (1)..(25): SEQ ID NO: 3151; WAN024AEW_at; Start 77; Stop 101
tattaggaagaatgtcatcgttttc

SEQ ID NO: 52455 - DNA, 25 bp, Artificial
  probe
  misc_feature (1)..(25): SEQ ID NO: 3151; WAN024AEW_at; Start 2; Stop 26
ttctaaagtgattgccatgctgaga

SEQ ID NO: 52456 - DNA, 25 bp, Artificial
  probe
  misc_feature (1)..(25): SEQ ID NO: 3151; WAN024AEW_at; Start 17; Stop 41
catgctgagactcatttaaaattaa

SEQ ID NO: 52457 - DNA, 25 bp, Artificial
  probe
  misc_feature (1)..(25): SEQ ID NO: 3151; WAN024AEW_at; Start 72; Stop 96
agttttattaggaagaatgtcatcg

SEQ ID NO: 52458 - DNA, 25 bp, Artificial
  probe
  misc_feature (1)..(25): SEQ ID NO: 3151; WAN024AEW_at; Start 89; Stop 113
tgtcatcgttttcctagaatacagt

SEQ ID NO: 52459 - DNA, 25 bp, Artificial
  probe
  misc_feature (1)..(25): SEQ ID NO: 3151; WAN024AEW_at; Start 6; Stop 30
aaagtgattgccatgctgagactca

SEQ ID NO: 52460 - DNA, 25 bp, Artificial
  probe
  misc_feature (1)..(25): SEQ ID NO: 3151; WAN024AEW_at; Start 84; Stop 108
aagaatgtcatcgttttcctagaat

SEQ ID NO: 52461 - DNA, 25 bp, Artificial
  probe
  misc_feature (1)..(25): SEQ ID NO: 3151; WAN024AEW_at; Start 15; Stop 39
gccatgctgagactcatttaaaatt

SEQ ID NO: 52462 - DNA, 25 bp, Artificial
  probe
  misc_feature (1)..(25): SEQ ID NO: 3151; WAN024AEW_at; Start 63; Stop 87
tatatgagaagttttattaggaaga

SEQ ID NO: 52463 - DNA, 25 bp, Artificial
  probe
  misc_feature (1)..(25): SEQ ID NO: 3151; WAN024AEW_at; Start 45; Stop 69
gagtagaaatttatgctatatatga

SEQ ID NO: 52464 - DNA, 25 bp, Artificial
  probe
  misc_feature (1)..(25): SEQ ID NO: 3151; WAN024AEW_at; Start 101; Stop 125
cctagaatacagtatcagttgttaa

SEQ ID NO: 52465 - DNA, 25 bp, Artificial
  probe
  misc_feature (1)..(25): SEQ ID NO: 3151; WAN024AEW_at; Start 90; Stop 114
gtcatcgttttcctagaatacagta

SEQ ID NO: 52466 - DNA, 25 bp, Artificial
  probe
  misc_feature (1)..(25): SEQ ID NO: 3151; WAN024AEW_at; Start 8; Stop 32
agtgattgccatgctgagactcatt

SEQ ID NO: 52467 - DNA, 25 bp, Artificial
  probe
  misc_feature (1)..(25): SEQ ID NO: 3151; WAN024AEW_at; Start 95; Stop 119
cgttttcctagaatacagtatcagt

SEQ ID NO: 52468 - DNA, 25 bp, Artificial
  probe
  misc_feature (1)..(25): SEQ ID NO: 3151; WAN024AEW_at; Start 9; Stop 33
gtgattgccatgctgagactcattt

SEQ ID NO: 52469 - DNA, 25 bp, Artificial
  probe
  misc_feature (1)..(25): SEQ ID NO: 3151; WAN024AEW_at; Start 87; Stop 111
aatgtcatcgttttcctagaataca

SEQ ID NO: 52470 - DNA, 25 bp, Artificial
  probe
  misc_feature (1)..(25): SEQ ID NO: 3151; WAN024AEW_at; Start 3; Stop 27
tctaaagtgattgccatgctgagac

SEQ ID NO: 52471 - DNA, 25 bp, Artificial
  probe
  misc_feature (1)..(25): SEQ ID NO: 3151; WAN024AEW_at; Start 7; Stop 31
aagtgattgccatgctgagactcat

SEQ ID NO: 52472 - DNA, 25 bp, Artificial
  probe
  misc_feature (1)..(25): SEQ ID NO: 3151; WAN024AEW_at; Start 11; Stop 35
gattgccatgctgagactcatttaa

SEQ ID NO: 52473 - DNA, 25 bp, Artificial
  probe
  misc_feature (1)..(25): SEQ ID NO: 3151; WAN024AEW_at; Start 106; Stop 130
aatacagtatcagttgttaagtggt

SEQ ID NO: 52474 - DNA, 25 bp, Artificial
  probe
  misc_feature (1)..(25): SEQ ID NO: 3151; WAN024AEW_at; Start 5; Stop 29
taaagtgattgccatgctgagactc

SEQ ID NO: 52475 - DNA, 25 bp, Artificial
  probe
  misc_feature (1)..(25): SEQ ID NO: 3151; WAN024AEW_at; Start 94; Stop 118
tcgttttcctagaatacagtatcag

SEQ ID NO: 52476 - DNA, 25 bp, Artificial
  probe
  misc_feature (1)..(25): SEQ ID NO: 3151; WAN024AEW_at; Start 86; Stop 110
gaatgtcatcgttttcctagaatac

SEQ ID NO: 52477 - DNA, 25 bp, Artificial
  probe
  misc_feature (1)..(25): SEQ ID NO: 3151; WAN024AEW_at; Start 74; Stop 98
ttttattaggaagaatgtcatcgtt

SEQ ID NO: 52478 - DNA, 25 bp, Artificial
  probe
  misc_feature (1)..(25): SEQ ID NO: 3151; WAN024AEW_at; Start 50; Stop 74
gaaatttatgctatatatgagaagt

SEQ ID NO: 52479 - DNA, 25 bp, Artificial
  probe
  misc_feature (1)..(25): SEQ ID NO: 3151; WAN024AEW_at; Start 68; Stop 92
gagaagttttattaggaagaatgtc

SEQ ID NO: 52480 - DNA, 25 bp, Artificial
  probe
  misc_feature (1)..(25): SEQ ID NO: 3151; WAN024AEW_at; Start 1; Stop 25
attctaaagtgattgccatgctgag

SEQ ID NO: 52481 - DNA, 25 bp, Artificial
  probe
  misc_feature (1)..(25): SEQ ID NO: 3151; WAN024AEW_at; Start 83; Stop 107
gaagaatgtcatcgttttcctagaa

SEQ ID NO: 52482 - DNA, 25 bp, Artificial
  probe
  misc_feature (1)..(25): SEQ ID NO: 3151; WAN024AEW_at; Start 20; Stop 44
gctgagactcatttaaaattaaaaa

SEQ ID NO: 52483 - DNA, 25 bp, Artificial
  probe
  misc_feature (1)..(25): SEQ ID NO: 597; WAN024AEX_at; Start 61; Stop 85
caaagcttcaattaactatatctat

SEQ ID NO: 52484 - DNA, 25 bp, Artificial
  probe
  misc_feature (1)..(25): SEQ ID NO: 597; WAN024AEX_at; Start 53; Stop 77
atttcaaacaaagcttcaattaact

SEQ ID NO: 52485 - DNA, 25 bp, Artificial
  probe
  misc_feature (1)..(25): SEQ ID NO: 597; WAN024AEX_at; Start 65; Stop 89
gcttcaattaactatatctatgcgt

SEQ ID NO: 52486 - DNA, 25 bp, Artificial
  probe
  misc_feature (1)..(25): SEQ ID NO: 597; WAN024AEX_at; Start 49; Stop 73
tcagatttcaaacaaagcttcaatt

SEQ ID NO: 52487 - DNA, 25 bp, Artificial
  probe
  misc_feature (1)..(25): SEQ ID NO: 597; WAN024AEX_at; Start 47; Stop 71
tatcagatttcaaacaaagcttcaa

SEQ ID NO: 52488 - DNA, 25 bp, Artificial
  probe
  misc_feature (1)..(25): SEQ ID NO: 597; WAN024AEX_at; Start 46; Stop 70
ttatcagatttcaaacaaagcttca

SEQ ID NO: 52489 - DNA, 25 bp, Artificial
  probe
  misc_feature (1)..(25): SEQ ID NO: 597; WAN024AEX_at; Start 59; Stop 83
aacaaagcttcaattaactatatct

SEQ ID NO: 52490 - DNA, 25 bp, Artificial
  probe
  misc_feature (1)..(25): SEQ ID NO: 597; WAN024AEX_at; Start 67; Stop 91
ttcaattaactatatctatgcgtca

SEQ ID NO: 52491 - DNA, 25 bp, Artificial
  probe
  misc_feature (1)..(25): SEQ ID NO: 597; WAN024AEX_at; Start 30; Stop 54
tagtaatatcattattttatcagat

SEQ ID NO: 52492 - DNA, 25 bp, Artificial
  probe
  misc_feature (1)..(25): SEQ ID NO: 597; WAN024AEX_at; Start 48; Stop 72
atcagatttcaaacaaagcttcaat

SEQ ID NO: 52493 - DNA, 25 bp, Artificial
  probe
  misc_feature (1)..(25): SEQ ID NO: 597; WAN024AEX_at; Start 52; Stop 76
gatttcaaacaaagcttcaattaac

SEQ ID NO: 52494 - DNA, 25 bp, Artificial
  probe
  misc_feature (1)..(25): SEQ ID NO: 597; WAN024AEX_at; Start 58; Stop 82
aaacaaagcttcaattaactatatc

SEQ ID NO: 52495 - DNA, 25 bp, Artificial
  probe
  misc_feature (1)..(25): SEQ ID NO: 597; WAN024AEX_at; Start 44; Stop 68
ttttatcagatttcaaacaaagctt

SEQ ID NO: 52496 - DNA, 25 bp, Artificial
  probe
  misc_feature (1)..(25): SEQ ID NO: 597; WAN024AEX_at; Start 45; Stop 69
tttatcagatttcaaacaaagcttc

SEQ ID NO: 52497 - DNA, 25 bp, Artificial
  probe
  misc_feature (1)..(25): SEQ ID NO: 597; WAN024AEX_at; Start 42; Stop 66
tattttatcagatttcaaacaaagc

SEQ ID NO: 52498 - DNA, 25 bp, Artificial
  probe
  misc_feature (1)..(25): SEQ ID NO: 597; WAN024AEX_at; Start 60; Stop 84
acaaagcttcaattaactatatcta

SEQ ID NO: 52499 - DNA, 25 bp, Artificial
  probe
  misc_feature (1)..(25): SEQ ID NO: 597; WAN024AEX_at; Start 62; Stop 86
aaagcttcaattaactatatctatg

SEQ ID NO: 52500 - DNA, 25 bp, Artificial
  probe
  misc_feature (1)..(25): SEQ ID NO: 597; WAN024AEX_at; Start 55; Stop 79
ttcaaacaaagcttcaattaactat

SEQ ID NO: 52501 - DNA, 25 bp, Artificial
  probe
  misc_feature (1)..(25): SEQ ID NO: 597; WAN024AEX_at; Start 54; Stop 78
tttcaaacaaagcttcaattaacta

SEQ ID NO: 52502 - DNA, 25 bp, Artificial
  probe
  misc_feature (1)..(25): SEQ ID NO: 597; WAN024AEX_at; Start 56; Stop 80
tcaaacaaagcttcaattaactata

SEQ ID NO: 52503 - DNA, 25 bp, Artificial
  probe
  misc_feature (1)..(25): SEQ ID NO: 597; WAN024AEX_at; Start 29; Stop 53
ttagtaatatcattattttatcaga

SEQ ID NO: 52504 - DNA, 25 bp, Artificial
  probe
  misc_feature (1)..(25): SEQ ID NO: 597; WAN024AEX_at; Start 28; Stop 52
cttagtaatatcattattttatcag

SEQ ID NO: 52505 - DNA, 25 bp, Artificial
  probe
  misc_feature (1)..(25): SEQ ID NO: 597; WAN024AEX_at; Start 27; Stop 51
acttagtaatatcattattttatca

SEQ ID NO: 52506 - DNA, 25 bp, Artificial
  probe
  misc_feature (1)..(25): SEQ ID NO: 597; WAN024AEX_at; Start 66; Stop 90
cttcaattaactatatctatgcgtc

SEQ ID NO: 52507 - DNA, 25 bp, Artificial
  probe
  misc_feature (1)..(25): SEQ ID NO: 597; WAN024AEX_at; Start 63; Stop 87
aagcttcaattaactatatctatgc

SEQ ID NO: 52508 - DNA, 25 bp, Artificial
  probe
  misc_feature (1)..(25): SEQ ID NO: 597; WAN024AEX_at; Start 26; Stop 50
aacttagtaatatcattattttatc

SEQ ID NO: 52509 - DNA, 25 bp, Artificial
  probe
  misc_feature (1)..(25): SEQ ID NO: 597; WAN024AEX_at; Start 41; Stop 65
ttattttatcagatttcaaacaaag

SEQ ID NO: 52510 - DNA, 25 bp, Artificial
  probe
  misc_feature (1)..(25): SEQ ID NO: 597; WAN024AEX_at; Start 51; Stop 75
agatttcaaacaaagcttcaattaa

SEQ ID NO: 52511 - DNA, 25 bp, Artificial
  probe
  misc_feature (1)..(25): SEQ ID NO: 597; WAN024AEX_at; Start 57; Stop 81
caaacaaagcttcaattaactatat

SEQ ID NO: 52512 - DNA, 25 bp, Artificial
  probe
  misc_feature (1)..(25): SEQ ID NO: 597; WAN024AEX_at; Start 50; Stop 74
cagatttcaaacaaagcttcaatta

SEQ ID NO: 52513 - DNA, 25 bp, Artificial
  probe
  misc_feature (1)..(25): SEQ ID NO: 597; WAN024AEX_at; Start 43; Stop 67
attttatcagatttcaaacaaagct

SEQ ID NO: 52514 - DNA, 25 bp, Artificial
  probe
  misc_feature (1)..(25): SEQ ID NO: 597; WAN024AEX_at; Start 64; Stop 88
agcttcaattaactatatctatgcg

SEQ ID NO: 52515 - DNA, 25 bp, Artificial
  probe
  misc_feature (1)..(25): SEQ ID NO: 4680; WAN024AEY_at; Start 17; Stop 41
ttaattgaagctttgtttgaaatct

SEQ ID NO: 52516 - DNA, 25 bp, Artificial
  probe
  misc_feature (1)..(25): SEQ ID NO: 4680; WAN024AEY_at; Start 10; Stop 34
gatatagttaattgaagctttgttt

SEQ ID NO: 52517 - DNA, 25 bp, Artificial
  probe
  misc_feature (1)..(25): SEQ ID NO: 4680; WAN024AEY_at; Start 5; Stop 29
gcatagatatagttaattgaagctt

SEQ ID NO: 52518 - DNA, 25 bp, Artificial
  probe
  misc_feature (1)..(25): SEQ ID NO: 4680; WAN024AEY_at; Start 1; Stop 25
tgacgcatagatatagttaattgaa

SEQ ID NO: 52519 - DNA, 25 bp, Artificial
  probe
  misc_feature (1)..(25): SEQ ID NO: 4680; WAN024AEY_at; Start 18; Stop 42
taattgaagctttgtttgaaatctg

SEQ ID NO: 52520 - DNA, 25 bp, Artificial
  probe
  misc_feature (1)..(25): SEQ ID NO: 4680; WAN024AEY_at; Start 7; Stop 31
atagatatagttaattgaagctttg

SEQ ID NO: 52521 - DNA, 25 bp, Artificial
  probe
  misc_feature (1)..(25): SEQ ID NO: 4680; WAN024AEY_at; Start 8; Stop 32
tagatatagttaattgaagctttgt

SEQ ID NO: 52522 - DNA, 25 bp, Artificial
  probe
  misc_feature (1)..(25): SEQ ID NO: 4680; WAN024AEY_at; Start 20; Stop 44
attgaagctttgtttgaaatctgat

SEQ ID NO: 52523 - DNA, 25 bp, Artificial
  probe
  misc_feature (1)..(25): SEQ ID NO: 4680; WAN024AEY_at; Start 9; Stop 33
agatatagttaattgaagctttgtt

SEQ ID NO: 52524 - DNA, 25 bp, Artificial
  probe
  misc_feature (1)..(25): SEQ ID NO: 4680; WAN024AEY_at; Start 2; Stop 26
gacgcatagatatagttaattgaag

SEQ ID NO: 52525 - DNA, 25 bp, Artificial
  probe
  misc_feature (1)..(25): SEQ ID NO: 4680; WAN024AEY_at; Start 14; Stop 38
tagttaattgaagctttgtttgaaa

SEQ ID NO: 52526 - DNA, 25 bp, Artificial
  probe
  misc_feature (1)..(25): SEQ ID NO: 4680; WAN024AEY_at; Start 22; Stop 46
tgaagctttgtttgaaatctgataa

SEQ ID NO: 52527 - DNA, 25 bp, Artificial
  probe
  misc_feature (1)..(25): SEQ ID NO: 4680; WAN024AEY_at; Start 4; Stop 28
cgcatagatatagttaattgaagct

SEQ ID NO: 52528 - DNA, 25 bp, Artificial
  probe
  misc_feature (1)..(25): SEQ ID NO: 4680; WAN024AEY_at; Start 27; Stop 51
ctttgtttgaaatctgataaaataa

SEQ ID NO: 52529 - DNA, 25 bp, Artificial
  probe
  misc_feature (1)..(25): SEQ ID NO: 4680; WAN024AEY_at; Start 21; Stop 45
ttgaagctttgtttgaaatctgata

SEQ ID NO: 52530 - DNA, 25 bp, Artificial
  probe
  misc_feature (1)..(25): SEQ ID NO: 4680; WAN024AEY_at; Start 3; Stop 27
acgcatagatatagttaattgaagc

SEQ ID NO: 52531 - DNA, 25 bp, Artificial
  probe
  misc_feature (1)..(25): SEQ ID NO: 4680; WAN024AEY_at; Start 15; Stop 39
agttaattgaagctttgtttgaaat

SEQ ID NO: 52532 - DNA, 25 bp, Artificial
  probe
  misc_feature (1)..(25): SEQ ID NO: 4680; WAN024AEY_at; Start 23; Stop 47
gaagctttgtttgaaatctgataaa

SEQ ID NO: 52533 - DNA, 25 bp, Artificial
  probe
  misc_feature (1)..(25): SEQ ID NO: 4680; WAN024AEY_at; Start 16; Stop 40
gttaattgaagctttgtttgaaatc

SEQ ID NO: 52534 - DNA, 25 bp, Artificial
  probe
  misc_feature (1)..(25): SEQ ID NO: 4680; WAN024AEY_at; Start 24; Stop 48
aagctttgtttgaaatctgataaaa

SEQ ID NO: 52535 - DNA, 25 bp, Artificial
  probe
  misc_feature (1)..(25): SEQ ID NO: 4680; WAN024AEY_at; Start 13; Stop 37
atagttaattgaagctttgtttgaa

SEQ ID NO: 52536 - DNA, 25 bp, Artificial
  probe
  misc_feature (1)..(25): SEQ ID NO: 4680; WAN024AEY_at; Start 19; Stop 43
aattgaagctttgtttgaaatctga

SEQ ID NO: 52537 - DNA, 25 bp, Artificial
  probe
  misc_feature (1)..(25): SEQ ID NO: 4680; WAN024AEY_at; Start 12; Stop 36
tatagttaattgaagctttgtttga

SEQ ID NO: 52538 - DNA, 25 bp, Artificial
  probe
  misc_feature (1)..(25): SEQ ID NO: 4680; WAN024AEY_at; Start 11; Stop 35
atatagttaattgaagctttgtttg

SEQ ID NO: 52539 - DNA, 25 bp, Artificial
  probe
  misc_feature (1)..(25): SEQ ID NO: 4680; WAN024AEY_at; Start 26; Stop 50
gctttgtttgaaatctgataaaata

SEQ ID NO: 52540 - DNA, 25 bp, Artificial
  probe
  misc_feature (1)..(25): SEQ ID NO: 4680; WAN024AEY_at; Start 25; Stop 49
agctttgtttgaaatctgataaaat

SEQ ID NO: 52541 - DNA, 25 bp, Artificial
  probe
  misc_feature (1)..(25): SEQ ID NO: 4680; WAN024AEY_at; Start 6; Stop 30
catagatatagttaattgaagcttt

SEQ ID NO: 52542 - DNA, 25 bp, Artificial
  probe
  misc_feature (1)..(25): SEQ ID NO: 4988; WAN024AEZ_at; Start 30; Stop 54
tgaaaactatatcgtataggtgtcg

SEQ ID NO: 52543 - DNA, 25 bp, Artificial
  probe
  misc_feature (1)..(25): SEQ ID NO: 4988; WAN024AEZ_at; Start 169; Stop 193
gttttatgatagctaccttgttggg

SEQ ID NO: 52544 - DNA, 25 bp, Artificial
  probe
  misc_feature (1)..(25): SEQ ID NO: 4988; WAN024AEZ_at; Start 91; Stop 115
cacaatactatgactcaattgaaat

SEQ ID NO: 52545 - DNA, 25 bp, Artificial
  probe
  misc_feature (1)..(25): SEQ ID NO: 4988; WAN024AEZ_at; Start 44; Stop 68
tataggtgtcgtcatggatcctttt

SEQ ID NO: 52546 - DNA, 25 bp, Artificial
  probe
  misc_feature (1)..(25): SEQ ID NO: 4988; WAN024AEZ_at; Start 143; Stop 167
tcctgcttcaaatagttatcgaaca

SEQ ID NO: 52547 - DNA, 25 bp, Artificial
  probe
  misc_feature (1)..(25): SEQ ID NO: 4988; WAN024AEZ_at; Start 147; Stop 171
gcttcaaatagttatcgaacaagtt

SEQ ID NO: 52548 - DNA, 25 bp, Artificial
  probe
  misc_feature (1)..(25): SEQ ID NO: 4988; WAN024AEZ_at; Start 22; Stop 46
tggtatcttgaaaactatatcgtat

SEQ ID NO: 52549 - DNA, 25 bp, Artificial
  probe
  misc_feature (1)..(25): SEQ ID NO: 4988; WAN024AEZ_at; Start 73; Stop 97
gatttaaggatacgcaaacacaata

SEQ ID NO: 52550 - DNA, 25 bp, Artificial
  probe
  misc_feature (1)..(25): SEQ ID NO: 4988; WAN024AEZ_at; Start 163; Stop 187
gaacaagttttatgatagctacctt

SEQ ID NO: 52551 - DNA, 25 bp, Artificial
  probe
  misc_feature (1)..(25): SEQ ID NO: 4988; WAN024AEZ_at; Start 140; Stop 164
taatcctgcttcaaatagttatcga

SEQ ID NO: 52552 - DNA, 25 bp, Artificial
  probe
  misc_feature (1)..(25): SEQ ID NO: 4988; WAN024AEZ_at; Start 86; Stop 110
gcaaacacaatactatgactcaatt

SEQ ID NO: 52553 - DNA, 25 bp, Artificial
  probe
  misc_feature (1)..(25): SEQ ID NO: 4988; WAN024AEZ_at; Start 83; Stop 107
tacgcaaacacaatactatgactca

SEQ ID NO: 52554 - DNA, 25 bp, Artificial
  probe
  misc_feature (1)..(25): SEQ ID NO: 4988; WAN024AEZ_at; Start 98; Stop 122
ctatgactcaattgaaatattaaaa

SEQ ID NO: 52555 - DNA, 25 bp, Artificial
  probe
  misc_feature (1)..(25): SEQ ID NO: 4988; WAN024AEZ_at; Start 56; Stop 80
catggatccttttagctgatttaag

SEQ ID NO: 52556 - DNA, 25 bp, Artificial
  probe
  misc_feature (1)..(25): SEQ ID NO: 4988; WAN024AEZ_at; Start 70; Stop 94
gctgatttaaggatacgcaaacaca

SEQ ID NO: 52557 - DNA, 25 bp, Artificial
  probe
  misc_feature (1)..(25): SEQ ID NO: 4988; WAN024AEZ_at; Start 41; Stop 65
tcgtataggtgtcgtcatggatcct

SEQ ID NO: 52558 - DNA, 25 bp, Artificial
  probe
  misc_feature (1)..(25): SEQ ID NO: 4988; WAN024AEZ_at; Start 161; Stop 185
tcgaacaagttttatgatagctacc

SEQ ID NO: 52559 - DNA, 25 bp, Artificial
  probe
  misc_feature (1)..(25): SEQ ID NO: 4988; WAN024AEZ_at; Start 68; Stop 92
tagctgatttaaggatacgcaaaca

SEQ ID NO: 52560 - DNA, 25 bp, Artificial
  probe
  misc_feature (1)..(25): SEQ ID NO: 4988; WAN024AEZ_at; Start 133; Stop 157
gaccacctaatcctgcttcaaatag

SEQ ID NO: 52561 - DNA, 25 bp, Artificial
  probe
  misc_feature (1)..(25): SEQ ID NO: 4988; WAN024AEZ_at; Start 80; Stop 104
ggatacgcaaacacaatactatgac

SEQ ID NO: 52562 - DNA, 25 bp, Artificial
  probe
  misc_feature (1)..(25): SEQ ID NO: 4988; WAN024AEZ_at; Start 125; Stop 149
taatttctgaccacctaatcctgct

SEQ ID NO: 52563 - DNA, 25 bp, Artificial
  probe
  misc_feature (1)..(25): SEQ ID NO: 4988; WAN024AEZ_at; Start 36; Stop 60
ctatatcgtataggtgtcgtcatgg

SEQ ID NO: 52564 - DNA, 25 bp, Artificial
  probe
  misc_feature (1)..(25): SEQ ID NO: 4988; WAN024AEZ_at; Start 178; Stop 202
tagctaccttgttgggatgctctta

SEQ ID NO: 52565 - DNA, 25 bp, Artificial
  probe
  misc_feature (1)..(25): SEQ ID NO: 4988; WAN024AEZ_at; Start 14; Stop 38
gacttgtttggtatcttgaaaacta

SEQ ID NO: 52566 - DNA, 25 bp, Artificial
  probe
  misc_feature (1)..(25): SEQ ID NO: 4988; WAN024AEZ_at; Start 123; Stop 147
tttaatttctgaccacctaatcctg

SEQ ID NO: 52567 - DNA, 25 bp, Artificial
  probe
  misc_feature (1)..(25): SEQ ID NO: 4988; WAN024AEZ_at; Start 173; Stop 197
tatgatagctaccttgttgggatgc

SEQ ID NO: 52568 - DNA, 25 bp, Artificial
  probe
  misc_feature (1)..(25): SEQ ID NO: 4988; WAN024AEZ_at; Start 76; Stop 100
ttaaggatacgcaaacacaatacta

SEQ ID NO: 52569 - DNA, 25 bp, Artificial
  probe
  misc_feature (1)..(25): SEQ ID NO: 4988; WAN024AEZ_at; Start 128; Stop 152
tttctgaccacctaatcctgcttca

SEQ ID NO: 52570 - DNA, 25 bp, Artificial
  probe
  misc_feature (1)..(25): SEQ ID NO: 4988; WAN024AEZ_at; Start 64; Stop 88
cttttagctgatttaaggatacgca

SEQ ID NO: 52571 - DNA, 25 bp, Artificial
  probe
  misc_feature (1)..(25): SEQ ID NO: 4988; WAN024AEZ_at; Start 50; Stop 74
tgtcgtcatggatccttttagctga

SEQ ID NO: 52572 - DNA, 25 bp, Artificial
  probe
  misc_feature (1)..(25): SEQ ID NO: 4988; WAN024AEZ_at; Start 176; Stop 200
gatagctaccttgttgggatgctct

SEQ ID NO: 52573 - DNA, 25 bp, Artificial
  probe
  misc_feature (1)..(25): SEQ ID NO: 4988; WAN024AEZ_at; Start 39; Stop 63
tatcgtataggtgtcgtcatggatc

SEQ ID NO: 52574 - DNA, 25 bp, Artificial
  probe
  misc_feature (1)..(25): SEQ ID NO: 4988; WAN024AEZ_at; Start 48; Stop 72
ggtgtcgtcatggatccttttagct

SEQ ID NO: 52575 - DNA, 25 bp, Artificial
  probe
  misc_feature (1)..(25): SEQ ID NO: 4988; WAN024AEZ_at; Start 10; Stop 34
aatagacttgtttggtatcttgaaa

SEQ ID NO: 52576 - DNA, 25 bp, Artificial
  probe
  misc_feature (1)..(25): SEQ ID NO: 4439; WAN024AF2_at; Start 109; Stop 133
tgtgtttgcgtatccttaaatcagc

SEQ ID NO: 52577 - DNA, 25 bp, Artificial
  probe
  misc_feature (1)..(25): SEQ ID NO: 4439; WAN024AF2_at; Start 1; Stop 25
taagagcatcccaacaaggtagcta

SEQ ID NO: 52578 - DNA, 25 bp, Artificial
  probe
  misc_feature (1)..(25): SEQ ID NO: 4439; WAN024AF2_at; Start 111; Stop 135
tgtttgcgtatccttaaatcagcta

SEQ ID NO: 52579 - DNA, 25 bp, Artificial
  probe
  misc_feature (1)..(25): SEQ ID NO: 4439; WAN024AF2_at; Start 165; Stop 189
tagttttcaagataccaaacaagtc

SEQ ID NO: 52580 - DNA, 25 bp, Artificial
  probe
  misc_feature (1)..(25): SEQ ID NO: 4439; WAN024AF2_at; Start 132; Stop 156
gctaaaaggatccatgacgacacct

SEQ ID NO: 52581 - DNA, 25 bp, Artificial
  probe
  misc_feature (1)..(25): SEQ ID NO: 4439; WAN024AF2_at; Start 52; Stop 76
gaagcaggattaggtggtcagaaat

SEQ ID NO: 52582 - DNA, 25 bp, Artificial
  probe
  misc_feature (1)..(25): SEQ ID NO: 4439; WAN024AF2_at; Start 43; Stop 67
taactatttgaagcaggattaggtg

SEQ ID NO: 52583 - DNA, 25 bp, Artificial
  probe
  misc_feature (1)..(25): SEQ ID NO: 4439; WAN024AF2_at; Start 6; Stop 30
gcatcccaacaaggtagctatcata

SEQ ID NO: 52584 - DNA, 25 bp, Artificial
  probe
  misc_feature (1)..(25): SEQ ID NO: 4439; WAN024AF2_at; Start 32; Stop 56
aacttgttcgataactatttgaagc

SEQ ID NO: 52585 - DNA, 25 bp, Artificial
  probe
  misc_feature (1)..(25): SEQ ID NO: 4439; WAN024AF2_at; Start 4; Stop 28
gagcatcccaacaaggtagctatca

SEQ ID NO: 52586 - DNA, 25 bp, Artificial
  probe
  misc_feature (1)..(25): SEQ ID NO: 4439; WAN024AF2_at; Start 18; Stop 42
ggtagctatcataaaacttgttcga

SEQ ID NO: 52587 - DNA, 25 bp, Artificial
  probe
  misc_feature (1)..(25): SEQ ID NO: 4439; WAN024AF2_at; Start 11; Stop 35
ccaacaaggtagctatcataaaact

SEQ ID NO: 52588 - DNA, 25 bp, Artificial
  probe
  misc_feature (1)..(25): SEQ ID NO: 4439; WAN024AF2_at; Start 123; Stop 147
cttaaatcagctaaaaggatccatg

SEQ ID NO: 52589 - DNA, 25 bp, Artificial
  probe
  misc_feature (1)..(25): SEQ ID NO: 4439; WAN024AF2_at; Start 168; Stop 192
ttttcaagataccaaacaagtctat

SEQ ID NO: 52590 - DNA, 25 bp, Artificial
  probe
  misc_feature (1)..(25): SEQ ID NO: 4439; WAN024AF2_at; Start 103; Stop 127
tagtattgtgtttgcgtatccttaa

SEQ ID NO: 52591 - DNA, 25 bp, Artificial
  probe
  misc_feature (1)..(25): SEQ ID NO: 4439; WAN024AF2_at; Start 158; Stop 182
tacgatatagttttcaagataccaa

SEQ ID NO: 52592 - DNA, 25 bp, Artificial
  probe
  misc_feature (1)..(25): SEQ ID NO: 4439; WAN024AF2_at; Start 84; Stop 108
taatatttcaattgagtcatagtat

SEQ ID NO: 52593 - DNA, 25 bp, Artificial
  probe
  misc_feature (1)..(25): SEQ ID NO: 4439; WAN024AF2_at; Start 134; Stop 158
taaaaggatccatgacgacacctat

SEQ ID NO: 52594 - DNA, 25 bp, Artificial
  probe
  misc_feature (1)..(25): SEQ ID NO: 4439; WAN024AF2_at; Start 143; Stop 167
ccatgacgacacctatacgatatag

SEQ ID NO: 52595 - DNA, 25 bp, Artificial
  probe
  misc_feature (1)..(25): SEQ ID NO: 4439; WAN024AF2_at; Start 99; Stop 123
gtcatagtattgtgtttgcgtatcc

SEQ ID NO: 52596 - DNA, 25 bp, Artificial
  probe
  misc_feature (1)..(25): SEQ ID NO: 4439; WAN024AF2_at; Start 129; Stop 153
tcagctaaaaggatccatgacgaca

SEQ ID NO: 52597 - DNA, 25 bp, Artificial
  probe
  misc_feature (1)..(25): SEQ ID NO: 4439; WAN024AF2_at; Start 47; Stop 71
tatttgaagcaggattaggtggtca

SEQ ID NO: 52598 - DNA, 25 bp, Artificial
  probe
  misc_feature (1)..(25): SEQ ID NO: 4439; WAN024AF2_at; Start 139; Stop 163
ggatccatgacgacacctatacgat

SEQ ID NO: 52599 - DNA, 25 bp, Artificial
  probe
  misc_feature (1)..(25): SEQ ID NO: 4439; WAN024AF2_at; Start 36; Stop 60
tgttcgataactatttgaagcagga

SEQ ID NO: 52600 - DNA, 25 bp, Artificial
  probe
  misc_feature (1)..(25): SEQ ID NO: 4439; WAN024AF2_at; Start 9; Stop 33
tcccaacaaggtagctatcataaaa

SEQ ID NO: 52601 - DNA, 25 bp, Artificial
  probe
  misc_feature (1)..(25): SEQ ID NO: 4439; WAN024AF2_at; Start 147; Stop 171
gacgacacctatacgatatagtttt

SEQ ID NO: 52602 - DNA, 25 bp, Artificial
  probe
  misc_feature (1)..(25): SEQ ID NO: 4439; WAN024AF2_at; Start 56; Stop 80
caggattaggtggtcagaaattaaa

SEQ ID NO: 52603 - DNA, 25 bp, Artificial
  probe
  misc_feature (1)..(25): SEQ ID NO: 4439; WAN024AF2_at; Start 39; Stop 63
tcgataactatttgaagcaggatta

SEQ ID NO: 52604 - DNA, 25 bp, Artificial
  probe
  misc_feature (1)..(25): SEQ ID NO: 4439; WAN024AF2_at; Start 115; Stop 139
tgcgtatccttaaatcagctaaaag

SEQ ID NO: 52605 - DNA, 25 bp, Artificial
  probe
  misc_feature (1)..(25): SEQ ID NO: 4439; WAN024AF2_at; Start 177; Stop 201
taccaaacaagtctattaatattca

SEQ ID NO: 52606 - DNA, 25 bp, Artificial
  probe
  misc_feature (1)..(25): SEQ ID NO: 4439; WAN024AF2_at; Start 137; Stop 161
aaggatccatgacgacacctatacg

SEQ ID NO: 52607 - DNA, 25 bp, Artificial
  probe
  misc_feature (1)..(25): SEQ ID NO: 4439; WAN024AF2_at; Start 171; Stop 195
tcaagataccaaacaagtctattaa

SEQ ID NO: 52608 - DNA, 25 bp, Artificial
  probe
  misc_feature (1)..(25): SEQ ID NO: 4439; WAN024AF2_at; Start 140; Stop 164
gatccatgacgacacctatacgata

SEQ ID NO: 52609 - DNA, 25 bp, Artificial
  probe
  misc_feature (1)..(25): SEQ ID NO: 4439; WAN024AF2_at; Start 126; Stop 150
aaatcagctaaaaggatccatgacg

SEQ ID NO: 52610 - DNA, 25 bp, Artificial
  probe
  misc_feature (1)..(25): SEQ ID NO: 181; WAN024AF3_at; Start 76; Stop 100
tttactgattttcgctattcttttg

SEQ ID NO: 52611 - DNA, 25 bp, Artificial
  probe
  misc_feature (1)..(25): SEQ ID NO: 181; WAN024AF3_at; Start 80; Stop 104
ctgattttcgctattcttttggatt

SEQ ID NO: 52612 - DNA, 25 bp, Artificial
  probe
  misc_feature (1)..(25): SEQ ID NO: 181; WAN024AF3_at; Start 81; Stop 105
tgattttcgctattcttttggattt

SEQ ID NO: 52613 - DNA, 25 bp, Artificial
  probe
  misc_feature (1)..(25): SEQ ID NO: 181; WAN024AF3_at; Start 78; Stop 102
tactgattttcgctattcttttgga

SEQ ID NO: 52614 - DNA, 25 bp, Artificial
  probe
  misc_feature (1)..(25): SEQ ID NO: 181; WAN024AF3_at; Start 77; Stop 101
ttactgattttcgctattcttttgg

SEQ ID NO: 52615 - DNA, 25 bp, Artificial
  probe
  misc_feature (1)..(25): SEQ ID NO: 181; WAN024AF3_at; Start 86; Stop 110
ttcgctattcttttggattttctga

SEQ ID NO: 52616 - DNA, 25 bp, Artificial
  probe
  misc_feature (1)..(25): SEQ ID NO: 181; WAN024AF3_at; Start 79; Stop 103
actgattttcgctattcttttggat

SEQ ID NO: 52617 - DNA, 25 bp, Artificial
  probe
  misc_feature (1)..(25): SEQ ID NO: 181; WAN024AF3_at; Start 85; Stop 109
tttcgctattcttttggattttctg

SEQ ID NO: 52618 - DNA, 25 bp, Artificial
  probe
  misc_feature (1)..(25): SEQ ID NO: 181; WAN024AF3_at; Start 87; Stop 111
tcgctattcttttggattttctgaa

SEQ ID NO: 52619 - DNA, 25 bp, Artificial
  probe
  misc_feature (1)..(25): SEQ ID NO: 4821; WAN024AF4_at; Start 7; Stop 31
aaatccaaaagaatagcgaaaatca

SEQ ID NO: 52620 - DNA, 25 bp, Artificial
  probe
  misc_feature (1)..(25): SEQ ID NO: 4821; WAN024AF4_at; Start 2; Stop 26
tcagaaaatccaaaagaatagcgaa

SEQ ID NO: 52621 - DNA, 25 bp, Artificial
  probe
  misc_feature (1)..(25): SEQ ID NO: 4821; WAN024AF4_at; Start 9; Stop 33
atccaaaagaatagcgaaaatcagt

SEQ ID NO: 52622 - DNA, 25 bp, Artificial
  probe
  misc_feature (1)..(25): SEQ ID NO: 4821; WAN024AF4_at; Start 10; Stop 34
tccaaaagaatagcgaaaatcagta

SEQ ID NO: 52623 - DNA, 25 bp, Artificial
  probe
  misc_feature (1)..(25): SEQ ID NO: 4821; WAN024AF4_at; Start 8; Stop 32
aatccaaaagaatagcgaaaatcag

SEQ ID NO: 52624 - DNA, 25 bp, Artificial
  probe
  misc_feature (1)..(25): SEQ ID NO: 4821; WAN024AF4_at; Start 1; Stop 25
ttcagaaaatccaaaagaatagcga

SEQ ID NO: 52625 - DNA, 25 bp, Artificial
  probe
  misc_feature (1)..(25): SEQ ID NO: 4821; WAN024AF4_at; Start 11; Stop 35
ccaaaagaatagcgaaaatcagtaa

SEQ ID NO: 52626 - DNA, 25 bp, Artificial
  probe
  misc_feature (1)..(25): SEQ ID NO: 4821; WAN024AF4_at; Start 3; Stop 27
cagaaaatccaaaagaatagcgaaa

SEQ ID NO: 52627 - DNA, 25 bp, Artificial
  probe
  misc_feature (1)..(25): SEQ ID NO: 4821; WAN024AF4_at; Start 12; Stop 36
caaaagaatagcgaaaatcagtaaa

SEQ ID NO: 52628 - DNA, 25 bp, Artificial
  probe
  misc_feature (1)..(25): SEQ ID NO: 5970; WAN024AF5_at; Start 27; Stop 51
ctattcattctatcatactttcttt

SEQ ID NO: 52629 - DNA, 25 bp, Artificial
  probe
  misc_feature (1)..(25): SEQ ID NO: 5970; WAN024AF5_at; Start 11; Stop 35
cctgttatcgtttacactattcatt

SEQ ID NO: 52630 - DNA, 25 bp, Artificial
  probe
  misc_feature (1)..(25): SEQ ID NO: 5970; WAN024AF5_at; Start 20; Stop 44
gtttacactattcattctatcatac

SEQ ID NO: 52631 - DNA, 25 bp, Artificial
  probe
  misc_feature (1)..(25): SEQ ID NO: 5970; WAN024AF5_at; Start 14; Stop 38
gttatcgtttacactattcattcta

SEQ ID NO: 52632 - DNA, 25 bp, Artificial
  probe
  misc_feature (1)..(25): SEQ ID NO: 5970; WAN024AF5_at; Start 2; Stop 26
gaatcacctcctgttatcgtttaca

SEQ ID NO: 52633 - DNA, 25 bp, Artificial
  probe
  misc_feature (1)..(25): SEQ ID NO: 5970; WAN024AF5_at; Start 7; Stop 31
acctcctgttatcgtttacactatt

SEQ ID NO: 52634 - DNA, 25 bp, Artificial
  probe
  misc_feature (1)..(25): SEQ ID NO: 5970; WAN024AF5_at; Start 5; Stop 29
tcacctcctgttatcgtttacacta

SEQ ID NO: 52635 - DNA, 25 bp, Artificial
  probe
  misc_feature (1)..(25): SEQ ID NO: 5970; WAN024AF5_at; Start 6; Stop 30
cacctcctgttatcgtttacactat

SEQ ID NO: 52636 - DNA, 25 bp, Artificial
  probe
  misc_feature (1)..(25): SEQ ID NO: 5970; WAN024AF5_at; Start 16; Stop 40
tatcgtttacactattcattctatc

SEQ ID NO: 52637 - DNA, 25 bp, Artificial
  probe
  misc_feature (1)..(25): SEQ ID NO: 5970; WAN024AF5_at; Start 10; Stop 34
tcctgttatcgtttacactattcat

SEQ ID NO: 52638 - DNA, 25 bp, Artificial
  probe
  misc_feature (1)..(25): SEQ ID NO: 5970; WAN024AF5_at; Start 12; Stop 36
ctgttatcgtttacactattcattc

SEQ ID NO: 52639 - DNA, 25 bp, Artificial
  probe
  misc_feature (1)..(25): SEQ ID NO: 5970; WAN024AF5_at; Start 22; Stop 46
ttacactattcattctatcatactt

SEQ ID NO: 52640 - DNA, 25 bp, Artificial
  probe
  misc_feature (1)..(25): SEQ ID NO: 5970; WAN024AF5_at; Start 25; Stop 49
cactattcattctatcatactttct

SEQ ID NO: 52641 - DNA, 25 bp, Artificial
  probe
  misc_feature (1)..(25): SEQ ID NO: 5970; WAN024AF5_at; Start 4; Stop 28
atcacctcctgttatcgtttacact

SEQ ID NO: 52642 - DNA, 25 bp, Artificial
  probe
  misc_feature (1)..(25): SEQ ID NO: 5970; WAN024AF5_at; Start 18; Stop 42
tcgtttacactattcattctatcat

SEQ ID NO: 52643 - DNA, 25 bp, Artificial
  probe
  misc_feature (1)..(25): SEQ ID NO: 5970; WAN024AF5_at; Start 19; Stop 43
cgtttacactattcattctatcata

SEQ ID NO: 52644 - DNA, 25 bp, Artificial
  probe
  misc_feature (1)..(25): SEQ ID NO: 5970; WAN024AF5_at; Start 9; Stop 33
ctcctgttatcgtttacactattca

SEQ ID NO: 52645 - DNA, 25 bp, Artificial
  probe
  misc_feature (1)..(25): SEQ ID NO: 5970; WAN024AF5_at; Start 26; Stop 50
actattcattctatcatactttctt

SEQ ID NO: 52646 - DNA, 25 bp, Artificial
  probe
  misc_feature (1)..(25): SEQ ID NO: 5970; WAN024AF5_at; Start 3; Stop 27
aatcacctcctgttatcgtttacac

SEQ ID NO: 52647 - DNA, 25 bp, Artificial
  probe
  misc_feature (1)..(25): SEQ ID NO: 5970; WAN024AF5_at; Start 8; Stop 32
cctcctgttatcgtttacactattc

SEQ ID NO: 52648 - DNA, 25 bp, Artificial
  probe
  misc_feature (1)..(25): SEQ ID NO: 5970; WAN024AF5_at; Start 24; Stop 48
acactattcattctatcatactttc

SEQ ID NO: 52649 - DNA, 25 bp, Artificial
  probe
  misc_feature (1)..(25): SEQ ID NO: 5970; WAN024AF5_at; Start 15; Stop 39
ttatcgtttacactattcattctat

SEQ ID NO: 52650 - DNA, 25 bp, Artificial
  probe
  misc_feature (1)..(25): SEQ ID NO: 5970; WAN024AF5_at; Start 13; Stop 37
tgttatcgtttacactattcattct

SEQ ID NO: 52651 - DNA, 25 bp, Artificial
  probe
  misc_feature (1)..(25): SEQ ID NO: 5970; WAN024AF5_at; Start 17; Stop 41
atcgtttacactattcattctatca

SEQ ID NO: 52652 - DNA, 25 bp, Artificial
  probe
  misc_feature (1)..(25): SEQ ID NO: 5970; WAN024AF5_at; Start 23; Stop 47
tacactattcattctatcatacttt

SEQ ID NO: 52653 - DNA, 25 bp, Artificial
  probe
  misc_feature (1)..(25): SEQ ID NO: 5970; WAN024AF5_at; Start 21; Stop 45
tttacactattcattctatcatact

SEQ ID NO: 52654 - DNA, 25 bp, Artificial
  probe
  misc_feature (1)..(25): SEQ ID NO: 4395; WAN024AF6_at; Start 25; Stop 49
aagtatgatagaatgaatagtgtaa

SEQ ID NO: 52655 - DNA, 25 bp, Artificial
  probe
  misc_feature (1)..(25): SEQ ID NO: 4395; WAN024AF6_at; Start 32; Stop 56
atagaatgaatagtgtaaacgataa

SEQ ID NO: 52656 - DNA, 25 bp, Artificial
  probe
  misc_feature (1)..(25): SEQ ID NO: 4395; WAN024AF6_at; Start 40; Stop 64
aatagtgtaaacgataacaggaggt

SEQ ID NO: 52657 - DNA, 25 bp, Artificial
  probe
  misc_feature (1)..(25): SEQ ID NO: 4395; WAN024AF6_at; Start 35; Stop 59
gaatgaatagtgtaaacgataacag

SEQ ID NO: 52658 - DNA, 25 bp, Artificial
  probe
  misc_feature (1)..(25): SEQ ID NO: 4395; WAN024AF6_at; Start 23; Stop 47
gaaagtatgatagaatgaatagtgt

SEQ ID NO: 52659 - DNA, 25 bp, Artificial
  probe
  misc_feature (1)..(25): SEQ ID NO: 4395; WAN024AF6_at; Start 30; Stop 54
tgatagaatgaatagtgtaaacgat

SEQ ID NO: 52660 - DNA, 25 bp, Artificial
  probe
  misc_feature (1)..(25): SEQ ID NO: 4395; WAN024AF6_at; Start 20; Stop 44
aaagaaagtatgatagaatgaatag

SEQ ID NO: 52661 - DNA, 25 bp, Artificial
  probe
  misc_feature (1)..(25): SEQ ID NO: 4395; WAN024AF6_at; Start 42; Stop 66
tagtgtaaacgataacaggaggtga

SEQ ID NO: 52662 - DNA, 25 bp, Artificial
  probe
  misc_feature (1)..(25): SEQ ID NO: 4395; WAN024AF6_at; Start 36; Stop 60
aatgaatagtgtaaacgataacagg

SEQ ID NO: 52663 - DNA, 25 bp, Artificial
  probe
  misc_feature (1)..(25): SEQ ID NO: 4395; WAN024AF6_at; Start 27; Stop 51
gtatgatagaatgaatagtgtaaac

SEQ ID NO: 52664 - DNA, 25 bp, Artificial
  probe
  misc_feature (1)..(25): SEQ ID NO: 4395; WAN024AF6_at; Start 34; Stop 58
agaatgaatagtgtaaacgataaca

SEQ ID NO: 52665 - DNA, 25 bp, Artificial
  probe
  misc_feature (1)..(25): SEQ ID NO: 4395; WAN024AF6_at; Start 41; Stop 65
atagtgtaaacgataacaggaggtg

SEQ ID NO: 52666 - DNA, 25 bp, Artificial
  probe
  misc_feature (1)..(25): SEQ ID NO: 4395; WAN024AF6_at; Start 39; Stop 63
gaatagtgtaaacgataacaggagg

SEQ ID NO: 52667 - DNA, 25 bp, Artificial
  probe
  misc_feature (1)..(25): SEQ ID NO: 4395; WAN024AF6_at; Start 43; Stop 67
agtgtaaacgataacaggaggtgat

SEQ ID NO: 52668 - DNA, 25 bp, Artificial
  probe
  misc_feature (1)..(25): SEQ ID NO: 4395; WAN024AF6_at; Start 29; Stop 53
atgatagaatgaatagtgtaaacga

SEQ ID NO: 52669 - DNA, 25 bp, Artificial
  probe
  misc_feature (1)..(25): SEQ ID NO: 4395; WAN024AF6_at; Start 26; Stop 50
agtatgatagaatgaatagtgtaaa

SEQ ID NO: 52670 - DNA, 25 bp, Artificial
  probe
  misc_feature (1)..(25): SEQ ID NO: 4395; WAN024AF6_at; Start 33; Stop 57
tagaatgaatagtgtaaacgataac

SEQ ID NO: 52671 - DNA, 25 bp, Artificial
  probe
  misc_feature (1)..(25): SEQ ID NO: 4395; WAN024AF6_at; Start 24; Stop 48
aaagtatgatagaatgaatagtgta

SEQ ID NO: 52672 - DNA, 25 bp, Artificial
  probe
  misc_feature (1)..(25): SEQ ID NO: 4395; WAN024AF6_at; Start 45; Stop 69
tgtaaacgataacaggaggtgattc

SEQ ID NO: 52673 - DNA, 25 bp, Artificial
  probe
  misc_feature (1)..(25): SEQ ID NO: 4395; WAN024AF6_at; Start 38; Stop 62
tgaatagtgtaaacgataacaggag

SEQ ID NO: 52674 - DNA, 25 bp, Artificial
  probe
  misc_feature (1)..(25): SEQ ID NO: 4395; WAN024AF6_at; Start 44; Stop 68
gtgtaaacgataacaggaggtgatt

SEQ ID NO: 52675 - DNA, 25 bp, Artificial
  probe
  misc_feature (1)..(25): SEQ ID NO: 4395; WAN024AF6_at; Start 21; Stop 45
aagaaagtatgatagaatgaatagt

SEQ ID NO: 52676 - DNA, 25 bp, Artificial
  probe
  misc_feature (1)..(25): SEQ ID NO: 4395; WAN024AF6_at; Start 28; Stop 52
tatgatagaatgaatagtgtaaacg

SEQ ID NO: 52677 - DNA, 25 bp, Artificial
  probe
  misc_feature (1)..(25): SEQ ID NO: 4395; WAN024AF6_at; Start 31; Stop 55
gatagaatgaatagtgtaaacgata

SEQ ID NO: 52678 - DNA, 25 bp, Artificial
  probe
  misc_feature (1)..(25): SEQ ID NO: 4395; WAN024AF6_at; Start 22; Stop 46
agaaagtatgatagaatgaatagtg

SEQ ID NO: 52679 - DNA, 25 bp, Artificial
  probe
  misc_feature (1)..(25): SEQ ID NO: 4395; WAN024AF6_at; Start 37; Stop 61
atgaatagtgtaaacgataacagga

SEQ ID NO: 52680 - DNA, 25 bp, Artificial
  probe
  misc_feature (1)..(25): SEQ ID NO: 6251; WAN024AF7_at; Start 61; Stop 85
ctaaaaaagatactattcgagaaat

SEQ ID NO: 52681 - DNA, 25 bp, Artificial
  probe
  misc_feature (1)..(25): SEQ ID NO: 6251; WAN024AF7_at; Start 83; Stop 107
aatttagcaaactggaagactaact

SEQ ID NO: 52682 - DNA, 25 bp, Artificial
  probe
  misc_feature (1)..(25): SEQ ID NO: 6251; WAN024AF7_at; Start 100; Stop 124
gactaactacaactttttcagtgca

SEQ ID NO: 52683 - DNA, 25 bp, Artificial
  probe
  misc_feature (1)..(25): SEQ ID NO: 6251; WAN024AF7_at; Start 145; Stop 169
gagcttacgaaatccaattaacaca

SEQ ID NO: 52684 - DNA, 25 bp, Artificial
  probe
  misc_feature (1)..(25): SEQ ID NO: 6251; WAN024AF7_at; Start 56; Stop 80
catacctaaaaaagatactattcga

SEQ ID NO: 52685 - DNA, 25 bp, Artificial
  probe
  misc_feature (1)..(25): SEQ ID NO: 6251; WAN024AF7_at; Start 89; Stop 113
gcaaactggaagactaactacaact

SEQ ID NO: 52686 - DNA, 25 bp, Artificial
  probe
  misc_feature (1)..(25): SEQ ID NO: 6251; WAN024AF7_at; Start 58; Stop 82
tacctaaaaaagatactattcgaga

SEQ ID NO: 52687 - DNA, 25 bp, Artificial
  probe
  misc_feature (1)..(25): SEQ ID NO: 6251; WAN024AF7_at; Start 114; Stop 138
ttttcagtgcataactttacgattg

SEQ ID NO: 52688 - DNA, 25 bp, Artificial
  probe
  misc_feature (1)..(25): SEQ ID NO: 6251; WAN024AF7_at; Start 110; Stop 134
aactttttcagtgcataactttacg

SEQ ID NO: 52689 - DNA, 25 bp, Artificial
  probe
  misc_feature (1)..(25): SEQ ID NO: 6251; WAN024AF7_at; Start 73; Stop 97
ctattcgagaaatttagcaaactgg

SEQ ID NO: 52690 - DNA, 25 bp, Artificial
  probe
  misc_feature (1)..(25): SEQ ID NO: 6251; WAN024AF7_at; Start 129; Stop 153
tttacgattgtaaatagagcttacg

SEQ ID NO: 52691 - DNA, 25 bp, Artificial
  probe
  misc_feature (1)..(25): SEQ ID NO: 6251; WAN024AF7_at; Start 79; Stop 103
gagaaatttagcaaactggaagact

SEQ ID NO: 52692 - DNA, 25 bp, Artificial
  probe
  misc_feature (1)..(25): SEQ ID NO: 6251; WAN024AF7_at; Start 76; Stop 100
ttcgagaaatttagcaaactggaag

SEQ ID NO: 52693 - DNA, 25 bp, Artificial
  probe
  misc_feature (1)..(25): SEQ ID NO: 6251; WAN024AF7_at; Start 143; Stop 167
tagagcttacgaaatccaattaaca

SEQ ID NO: 52694 - DNA, 25 bp, Artificial
  probe
  misc_feature (1)..(25): SEQ ID NO: 6251; WAN024AF7_at; Start 153; Stop 177
gaaatccaattaacacatacctaag

SEQ ID NO: 52695 - DNA, 25 bp, Artificial
  probe
  misc_feature (1)..(25): SEQ ID NO: 6251; WAN024AF7_at; Start 53; Stop 77
tcacatacctaaaaaagatactatt

SEQ ID NO: 52696 - DNA, 25 bp, Artificial
  probe
  misc_feature (1)..(25): SEQ ID NO: 6251; WAN024AF7_at; Start 66; Stop 90
aaagatactattcgagaaatttagc

SEQ ID NO: 52697 - DNA, 25 bp, Artificial
  probe
  misc_feature (1)..(25): SEQ ID NO: 6251; WAN024AF7_at; Start 95; Stop 119
tggaagactaactacaactttttca

SEQ ID NO: 52698 - DNA, 25 bp, Artificial
  probe
  misc_feature (1)..(25): SEQ ID NO: 6251; WAN024AF7_at; Start 150; Stop 174
tacgaaatccaattaacacatacct

SEQ ID NO: 52699 - DNA, 25 bp, Artificial
  probe
  misc_feature (1)..(25): SEQ ID NO: 6251; WAN024AF7_at; Start 137; Stop 161
tgtaaatagagcttacgaaatccaa

SEQ ID NO: 52700 - DNA, 25 bp, Artificial
  probe
  misc_feature (1)..(25): SEQ ID NO: 6251; WAN024AF7_at; Start 78; Stop 102
cgagaaatttagcaaactggaagac

SEQ ID NO: 52701 - DNA, 25 bp, Artificial
  probe
  misc_feature (1)..(25): SEQ ID NO: 6251; WAN024AF7_at; Start 81; Stop 105
gaaatttagcaaactggaagactaa

SEQ ID NO: 52702 - DNA, 25 bp, Artificial
  probe
  misc_feature (1)..(25): SEQ ID NO: 6251; WAN024AF7_at; Start 90; Stop 114
caaactggaagactaactacaactt

SEQ ID NO: 52703 - DNA, 25 bp, Artificial
  probe
  misc_feature (1)..(25): SEQ ID NO: 6251; WAN024AF7_at; Start 85; Stop 109
tttagcaaactggaagactaactac

SEQ ID NO: 52704 - DNA, 25 bp, Artificial
  probe
  misc_feature (1)..(25): SEQ ID NO: 6251; WAN024AF7_at; Start 69; Stop 93
gatactattcgagaaatttagcaaa

SEQ ID NO: 52705 - DNA, 25 bp, Artificial
  probe
  misc_feature (1)..(25): SEQ ID NO: 6251; WAN024AF7_at; Start 74; Stop 98
tattcgagaaatttagcaaactgga

SEQ ID NO: 52706 - DNA, 25 bp, Artificial
  probe
  misc_feature (1)..(25): SEQ ID NO: 6251; WAN024AF7_at; Start 87; Stop 111
tagcaaactggaagactaactacaa

SEQ ID NO: 52707 - DNA, 25 bp, Artificial
  probe
  misc_feature (1)..(25): SEQ ID NO: 6251; WAN024AF7_at; Start 112; Stop 136
ctttttcagtgcataactttacgat

SEQ ID NO: 52708 - DNA, 25 bp, Artificial
  probe
  misc_feature (1)..(25): SEQ ID NO: 6251; WAN024AF7_at; Start 104; Stop 128
aactacaactttttcagtgcataac

SEQ ID NO: 52709 - DNA, 25 bp, Artificial
  probe
  misc_feature (1)..(25): SEQ ID NO: 6251; WAN024AF7_at; Start 118; Stop 142
cagtgcataactttacgattgtaaa

SEQ ID NO: 52710 - DNA, 25 bp, Artificial
  probe
  misc_feature (1)..(25): SEQ ID NO: 6251; WAN024AF7_at; Start 131; Stop 155
tacgattgtaaatagagcttacgaa

SEQ ID NO: 52711 - DNA, 25 bp, Artificial
  probe
  misc_feature (1)..(25): SEQ ID NO: 6251; WAN024AF7_at; Start 156; Stop 180
atccaattaacacatacctaagatg

SEQ ID NO: 52712 - DNA, 25 bp, Artificial
  probe
  misc_feature (1)..(25): SEQ ID NO: 6251; WAN024AF7_at; Start 147; Stop 171
gcttacgaaatccaattaacacata

SEQ ID NO: 52713 - DNA, 25 bp, Artificial
  probe
  misc_feature (1)..(25): SEQ ID NO: 6251; WAN024AF7_at; Start 139; Stop 163
taaatagagcttacgaaatccaatt

SEQ ID NO: 52714 - DNA, 25 bp, Artificial
  probe
  misc_feature (1)..(25): SEQ ID NO: 7059; WAN024AF8_s_at; Start 188; Stop 212
tatattattcggactacttttcact

SEQ ID NO: 52715 - DNA, 25 bp, Artificial
  probe
  misc_feature (1)..(25): SEQ ID NO: 7059; WAN024AF8_s_at; Start 72; Stop 96
gctatctgttttgaagaaattcacg

SEQ ID NO: 52716 - DNA, 25 bp, Artificial
  probe
  misc_feature (1)..(25): SEQ ID NO: 7059; WAN024AF8_s_at; Start 57; Stop 81
catacctaagatgaagctatctgtt

SEQ ID NO: 52717 - DNA, 25 bp, Artificial
  probe
  misc_feature (1)..(25): SEQ ID NO: 7059; WAN024AF8_s_at; Start 123; Stop 147
gatgagaattttcgtactctcttta

SEQ ID NO: 52718 - DNA, 25 bp, Artificial
  probe
  misc_feature (1)..(25): SEQ ID NO: 7059; WAN024AF8_s_at; Start 108; Stop 132
tctaaaatactttcagatgagaatt

SEQ ID NO: 52719 - DNA, 25 bp, Artificial
  probe
  misc_feature (1)..(25): SEQ ID NO: 7059; WAN024AF8_s_at; Start 117; Stop 141
ctttcagatgagaattttcgtactc

SEQ ID NO: 52720 - DNA, 25 bp, Artificial
  probe
  misc_feature (1)..(25): SEQ ID NO: 7059; WAN024AF8_s_at; Start 55; Stop 79
cacatacctaagatgaagctatctg

SEQ ID NO: 52721 - DNA, 25 bp, Artificial
  probe
  misc_feature (1)..(25): SEQ ID NO: 7059; WAN024AF8_s_at; Start 40; Stop 64
aatgcaaaaagaaatcacataccta

SEQ ID NO: 52722 - DNA, 25 bp, Artificial
  probe
  misc_feature (1)..(25): SEQ ID NO: 7059; WAN024AF8_s_at; Start 59; Stop 83
tacctaagatgaagctatctgtttt

SEQ ID NO: 52723 - DNA, 25 bp, Artificial
  probe
  misc_feature (1)..(25): SEQ ID NO: 7059; WAN024AF8_s_at; Start 196; Stop 220
tcggactacttttcacttattgcac

SEQ ID NO: 52724 - DNA, 25 bp, Artificial
  probe
  misc_feature (1)..(25): SEQ ID NO: 7059; WAN024AF8_s_at; Start 115; Stop 139
tactttcagatgagaattttcgtac

SEQ ID NO: 52725 - DNA, 25 bp, Artificial
  probe
  misc_feature (1)..(25): SEQ ID NO: 7059; WAN024AF8_s_at; Start 201; Stop 225
ctacttttcacttattgcaccaaaa

SEQ ID NO: 52726 - DNA, 25 bp, Artificial
  probe
  misc_feature (1)..(25): SEQ ID NO: 7059; WAN024AF8_s_at; Start 93; Stop 117
cacgaagagaattattctaaaatac

SEQ ID NO: 52727 - DNA, 25 bp, Artificial
  probe
  misc_feature (1)..(25): SEQ ID NO: 7059; WAN024AF8_s_at; Start 105; Stop 129
tattctaaaatactttcagatgaga

SEQ ID NO: 52728 - DNA, 25 bp, Artificial
  probe
  misc_feature (1)..(25): SEQ ID NO: 7059; WAN024AF8_s_at; Start 195; Stop 219
ttcggactacttttcacttattgca

SEQ ID NO: 52729 - DNA, 25 bp, Artificial
  probe
  misc_feature (1)..(25): SEQ ID NO: 7059; WAN024AF8_s_at; Start 177; Stop 201
aaatcaatccttatattattcggac

SEQ ID NO: 52730 - DNA, 25 bp, Artificial
  probe
  misc_feature (1)..(25): SEQ ID NO: 7059; WAN024AF8_s_at; Start 69; Stop 93
gaagctatctgttttgaagaaattc

SEQ ID NO: 52731 - DNA, 25 bp, Artificial
  probe
  misc_feature (1)..(25): SEQ ID NO: 7059; WAN024AF8_s_at; Start 175; Stop 199
taaaatcaatccttatattattcgg

SEQ ID NO: 52732 - DNA, 25 bp, Artificial
  probe
  misc_feature (1)..(25): SEQ ID NO: 7059; WAN024AF8_s_at; Start 63; Stop 87
taagatgaagctatctgttttgaag

SEQ ID NO: 52733 - DNA, 25 bp, Artificial
  probe
  misc_feature (1)..(25): SEQ ID NO: 7059; WAN024AF8_s_at; Start 76; Stop 100
tctgttttgaagaaattcacgaaga

SEQ ID NO: 52734 - DNA, 25 bp, Artificial
  probe
  misc_feature (1)..(25): SEQ ID NO: 7059; WAN024AF8_s_at; Start 61; Stop 85
cctaagatgaagctatctgttttga

SEQ ID NO: 52735 - DNA, 25 bp, Artificial
  probe
  misc_feature (1)..(25): SEQ ID NO: 7059; WAN024AF8_s_at; Start 66; Stop 90
gatgaagctatctgttttgaagaaa

SEQ ID NO: 52736 - DNA, 25 bp, Artificial
  probe
  misc_feature (1)..(25): SEQ ID NO: 7059; WAN024AF8_s_at; Start 83; Stop 107
tgaagaaattcacgaagagaattat

SEQ ID NO: 52737 - DNA, 25 bp, Artificial
  probe
  misc_feature (1)..(25): SEQ ID NO: 7059; WAN024AF8_s_at; Start 181; Stop 205
caatccttatattattcggactact

SEQ ID NO: 52738 - DNA, 25 bp, Artificial
  probe
  misc_feature (1)..(25): SEQ ID NO: 7059; WAN024AF8_s_at; Start 87; Stop 111
gaaattcacgaagagaattattcta

SEQ ID NO: 52739 - DNA, 25 bp, Artificial
  probe
  misc_feature (1)..(25): SEQ ID NO: 7059; WAN024AF8_s_at; Start 20; Stop 44
tataccttatctaactcaaaaatgc

SEQ ID NO: 52740 - DNA, 25 bp, Artificial
  probe
  misc_feature (1)..(25): SEQ ID NO: 7059; WAN024AF8_s_at; Start 120; Stop 144
tcagatgagaattttcgtactctct

SEQ ID NO: 52741 - DNA, 25 bp, Artificial
  probe
  misc_feature (1)..(25): SEQ ID NO: 7059; WAN024AF8_s_at; Start 34; Stop 58
ctcaaaaatgcaaaaagaaatcaca

SEQ ID NO: 52742 - DNA, 25 bp, Artificial
  probe
  misc_feature (1)..(25): SEQ ID NO: 7059; WAN024AF8_s_at; Start 78; Stop 102
tgttttgaagaaattcacgaagaga

SEQ ID NO: 52743 - DNA, 25 bp, Artificial
  probe
  misc_feature (1)..(25): SEQ ID NO: 7059; WAN024AF8_s_at; Start 125; Stop 149
tgagaattttcgtactctctttatt

SEQ ID NO: 52744 - DNA, 25 bp, Artificial
  probe
  misc_feature (1)..(25): SEQ ID NO: 7059; WAN024AF8_s_at; Start 193; Stop 217
tattcggactacttttcacttattg

SEQ ID NO: 52745 - DNA, 25 bp, Artificial
  probe
  misc_feature (1)..(25): SEQ ID NO: 7059; WAN024AF8_s_at; Start 199; Stop 223
gactacttttcacttattgcaccaa

SEQ ID NO: 52746 - DNA, 25 bp, Artificial
  probe
  misc_feature (1)..(25): SEQ ID NO: 7059; WAN024AF8_s_at; Start 22; Stop 46
taccttatctaactcaaaaatgcaa

SEQ ID NO: 52747 - DNA, 25 bp, Artificial
  probe
  misc_feature (1)..(25): SEQ ID NO: 7059; WAN024AF8_s_at; Start 198; Stop 222
ggactacttttcacttattgcacca

SEQ ID NO: 52748 - DNA, 25 bp, Artificial
  probe
  misc_feature (1)..(25): SEQ ID NO: 7736; WAN024AF9_at; Start 236; Stop 260
tcttccagtttgctaaatttctcga

SEQ ID NO: 52749 - DNA, 25 bp, Artificial
  probe
  misc_feature (1)..(25): SEQ ID NO: 7736; WAN024AF9_at; Start 218; Stop 242
tgaaaaagttgtagttagtcttcca

SEQ ID NO: 52750 - DNA, 25 bp, Artificial
  probe
  misc_feature (1)..(25): SEQ ID NO: 7736; WAN024AF9_at; Start 199; Stop 223
caatcgtaaagttatgcactgaaaa

SEQ ID NO: 52751 - DNA, 25 bp, Artificial
  probe
  misc_feature (1)..(25): SEQ ID NO: 7736; WAN024AF9_at; Start 229; Stop 253
tagttagtcttccagtttgctaaat

SEQ ID NO: 52752 - DNA, 25 bp, Artificial
  probe
  misc_feature (1)..(25): SEQ ID NO: 7736; WAN024AF9_at; Start 185; Stop 209
gtaagctctatttacaatcgtaaag

SEQ ID NO: 52753 - DNA, 25 bp, Artificial
  probe
  misc_feature (1)..(25): SEQ ID NO: 7736; WAN024AF9_at; Start 204; Stop 228
gtaaagttatgcactgaaaaagttg

SEQ ID NO: 52754 - DNA, 25 bp, Artificial
  probe
  misc_feature (1)..(25): SEQ ID NO: 7736; WAN024AF9_at; Start 244; Stop 268
tttgctaaatttctcgaatagtatc

SEQ ID NO: 52755 - DNA, 25 bp, Artificial
  probe
  misc_feature (1)..(25): SEQ ID NO: 7736; WAN024AF9_at; Start 209; Stop 233
gttatgcactgaaaaagttgtagtt

SEQ ID NO: 52756 - DNA, 25 bp, Artificial
  probe
  misc_feature (1)..(25): SEQ ID NO: 7736; WAN024AF9_at; Start 166; Stop 190
tatgtgttaattggatttcgtaagc

SEQ ID NO: 52757 - DNA, 25 bp, Artificial
  probe
  misc_feature (1)..(25): SEQ ID NO: 7736; WAN024AF9_at; Start 255; Stop 279
tctcgaatagtatcttttttaggta

SEQ ID NO: 52758 - DNA, 25 bp, Artificial
  probe
  misc_feature (1)..(25): SEQ ID NO: 7736; WAN024AF9_at; Start 260; Stop 284
aatagtatcttttttaggtatgtga

SEQ ID NO: 52759 - DNA, 25 bp, Artificial
  probe
  misc_feature (1)..(25): SEQ ID NO: 7736; WAN024AF9_at; Start 247; Stop 271
gctaaatttctcgaatagtatcttt

SEQ ID NO: 52760 - DNA, 25 bp, Artificial
  probe
  misc_feature (1)..(25): SEQ ID NO: 7736; WAN024AF9_at; Start 197; Stop 221
tacaatcgtaaagttatgcactgaa

SEQ ID NO: 52761 - DNA, 25 bp, Artificial
  probe
  misc_feature (1)..(25): SEQ ID NO: 7736; WAN024AF9_at; Start 215; Stop 239
cactgaaaaagttgtagttagtctt

SEQ ID NO: 52762 - DNA, 25 bp, Artificial
  probe
  misc_feature (1)..(25): SEQ ID NO: 7736; WAN024AF9_at; Start 195; Stop 219
tttacaatcgtaaagttatgcactg

SEQ ID NO: 52763 - DNA, 25 bp, Artificial
  probe
  misc_feature (1)..(25): SEQ ID NO: 7736; WAN024AF9_at; Start 170; Stop 194
tgttaattggatttcgtaagctcta

SEQ ID NO: 52764 - DNA, 25 bp, Artificial
  probe
  misc_feature (1)..(25): SEQ ID NO: 7736; WAN024AF9_at; Start 225; Stop 249
gttgtagttagtcttccagtttgct

SEQ ID NO: 52765 - DNA, 25 bp, Artificial
  probe
  misc_feature (1)..(25): SEQ ID NO: 7736; WAN024AF9_at; Start 240; Stop 264
ccagtttgctaaatttctcgaatag

SEQ ID NO: 52766 - DNA, 25 bp, Artificial
  probe
  misc_feature (1)..(25): SEQ ID NO: 7736; WAN024AF9_at; Start 184; Stop 208
cgtaagctctatttacaatcgtaaa

SEQ ID NO: 52767 - DNA, 25 bp, Artificial
  probe
  misc_feature (1)..(25): SEQ ID NO: 7736; WAN024AF9_at; Start 241; Stop 265
cagtttgctaaatttctcgaatagt

SEQ ID NO: 52768 - DNA, 25 bp, Artificial
  probe
  misc_feature (1)..(25): SEQ ID NO: 7736; WAN024AF9_at; Start 157; Stop 181
catcttaggtatgtgttaattggat

SEQ ID NO: 52769 - DNA, 25 bp, Artificial
  probe
  misc_feature (1)..(25): SEQ ID NO: 7736; WAN024AF9_at; Start 207; Stop 231
aagttatgcactgaaaaagttgtag

SEQ ID NO: 52770 - DNA, 25 bp, Artificial
  probe
  misc_feature (1)..(25): SEQ ID NO: 7736; WAN024AF9_at; Start 173; Stop 197
taattggatttcgtaagctctattt

SEQ ID NO: 52771 - DNA, 25 bp, Artificial
  probe
  misc_feature (1)..(25): SEQ ID NO: 7736; WAN024AF9_at; Start 213; Stop 237
tgcactgaaaaagttgtagttagtc

SEQ ID NO: 52772 - DNA, 25 bp, Artificial
  probe
  misc_feature (1)..(25): SEQ ID NO: 7736; WAN024AF9_at; Start 227; Stop 251
tgtagttagtcttccagtttgctaa

SEQ ID NO: 52773 - DNA, 25 bp, Artificial
  probe
  misc_feature (1)..(25): SEQ ID NO: 7736; WAN024AF9_at; Start 168; Stop 192
tgtgttaattggatttcgtaagctc

SEQ ID NO: 52774 - DNA, 25 bp, Artificial
  probe
  misc_feature (1)..(25): SEQ ID NO: 7736; WAN024AF9_at; Start 177; Stop 201
tggatttcgtaagctctatttacaa

SEQ ID NO: 52775 - DNA, 25 bp, Artificial
  probe
  misc_feature (1)..(25): SEQ ID NO: 7736; WAN024AF9_at; Start 211; Stop 235
tatgcactgaaaaagttgtagttag

SEQ ID NO: 52776 - DNA, 25 bp, Artificial
  probe
  misc_feature (1)..(25): SEQ ID NO: 7736; WAN024AF9_at; Start 182; Stop 206
ttcgtaagctctatttacaatcgta

SEQ ID NO: 52777 - DNA, 25 bp, Artificial
  probe
  misc_feature (1)..(25): SEQ ID NO: 7736; WAN024AF9_at; Start 224; Stop 248
agttgtagttagtcttccagtttgc

SEQ ID NO: 52778 - DNA, 25 bp, Artificial
  probe
  misc_feature (1)..(25): SEQ ID NO: 7736; WAN024AF9_at; Start 160; Stop 184
cttaggtatgtgttaattggatttc

SEQ ID NO: 52779 - DNA, 25 bp, Artificial
  probe
  misc_feature (1)..(25): SEQ ID NO: 7736; WAN024AF9_at; Start 258; Stop 282
cgaatagtatcttttttaggtatgt

SEQ ID NO: 52780 - DNA, 25 bp, Artificial
  probe
  misc_feature (1)..(25): SEQ ID NO: 7736; WAN024AF9_at; Start 235; Stop 259
gtcttccagtttgctaaatttctcg

SEQ ID NO: 52781 - DNA, 25 bp, Artificial
  probe
  misc_feature (1)..(25): SEQ ID NO: 7736; WAN024AF9_at; Start 202; Stop 226
tcgtaaagttatgcactgaaaaagt

SEQ ID NO: 52782 - DNA, 25 bp, Artificial
  probe
  misc_feature (1)..(25): SEQ ID NO: 7737; WAN024AFA_s_at; Start 12; Stop 36
taagtgaaaagtagtccgaataata

SEQ ID NO: 52783 - DNA, 25 bp, Artificial
  probe
  misc_feature (1)..(25): SEQ ID NO: 7737; WAN024AFA_s_at; Start 83; Stop 107
gagagtacgaaaattctcatctgaa

SEQ ID NO: 52784 - DNA, 25 bp, Artificial
  probe
  misc_feature (1)..(25): SEQ ID NO: 7737; WAN024AFA_s_at; Start 86; Stop 110
agtacgaaaattctcatctgaaagt

SEQ ID NO: 52785 - DNA, 25 bp, Artificial
  probe
  misc_feature (1)..(25): SEQ ID NO: 7737; WAN024AFA_s_at; Start 15; Stop 39
gtgaaaagtagtccgaataatataa

SEQ ID NO: 52786 - DNA, 25 bp, Artificial
  probe
  misc_feature (1)..(25): SEQ ID NO: 7737; WAN024AFA_s_at; Start 183; Stop 207
catttttgagttagataaggtataa

SEQ ID NO: 52787 - DNA, 25 bp, Artificial
  probe
  misc_feature (1)..(25): SEQ ID NO: 7737; WAN024AFA_s_at; Start 120; Stop 144
taattctcttcgtgaatttcttcaa

SEQ ID NO: 52788 - DNA, 25 bp, Artificial
  probe
  misc_feature (1)..(25): SEQ ID NO: 7737; WAN024AFA_s_at; Start 97; Stop 121
tctcatctgaaagtattttagaata

SEQ ID NO: 52789 - DNA, 25 bp, Artificial
  probe
  misc_feature (1)..(25): SEQ ID NO: 7737; WAN024AFA_s_at; Start 147; Stop 171
cagatagcttcatcttaggtatgtg

SEQ ID NO: 52790 - DNA, 25 bp, Artificial
  probe
  misc_feature (1)..(25): SEQ ID NO: 7737; WAN024AFA_s_at; Start 161; Stop 185
ttaggtatgtgatttctttttgcat

SEQ ID NO: 52791 - DNA, 25 bp, Artificial
  probe
  misc_feature (1)..(25): SEQ ID NO: 7737; WAN024AFA_s_at; Start 126; Stop 150
tcttcgtgaatttcttcaaaacaga

SEQ ID NO: 52792 - DNA, 25 bp, Artificial
  probe
  misc_feature (1)..(25): SEQ ID NO: 7737; WAN024AFA_s_at; Start 88; Stop 112
tacgaaaattctcatctgaaagtat

SEQ ID NO: 52793 - DNA, 25 bp, Artificial
  probe
  misc_feature (1)..(25): SEQ ID NO: 7737; WAN024AFA_s_at; Start 8; Stop 32
gcaataagtgaaaagtagtccgaat

SEQ ID NO: 52794 - DNA, 25 bp, Artificial
  probe
  misc_feature (1)..(25): SEQ ID NO: 7737; WAN024AFA_s_at; Start 110; Stop 134
tattttagaataattctcttcgtga

SEQ ID NO: 52795 - DNA, 25 bp, Artificial
  probe
  misc_feature (1)..(25): SEQ ID NO: 7737; WAN024AFA_s_at; Start 138; Stop 162
tcttcaaaacagatagcttcatctt

SEQ ID NO: 52796 - DNA, 25 bp, Artificial
  probe
  misc_feature (1)..(25): SEQ ID NO: 7737; WAN024AFA_s_at; Start 77; Stop 101
aataaagagagtacgaaaattctca

SEQ ID NO: 52797 - DNA, 25 bp, Artificial
  probe
  misc_feature (1)..(25): SEQ ID NO: 7737; WAN024AFA_s_at; Start 19; Stop 43
aaagtagtccgaataatataaggat

SEQ ID NO: 52798 - DNA, 25 bp, Artificial
  probe
  misc_feature (1)..(25): SEQ ID NO: 7737; WAN024AFA_s_at; Start 178; Stop 202
ttttgcatttttgagttagataagg

SEQ ID NO: 52799 - DNA, 25 bp, Artificial
  probe
  misc_feature (1)..(25): SEQ ID NO: 7737; WAN024AFA_s_at; Start 115; Stop 139
tagaataattctcttcgtgaatttc

SEQ ID NO: 52800 - DNA, 25 bp, Artificial
  probe
  misc_feature (1)..(25): SEQ ID NO: 7737; WAN024AFA_s_at; Start 81; Stop 105
aagagagtacgaaaattctcatctg

SEQ ID NO: 52801 - DNA, 25 bp, Artificial
  probe
  misc_feature (1)..(25): SEQ ID NO: 7737; WAN024AFA_s_at; Start 145; Stop 169
aacagatagcttcatcttaggtatg

SEQ ID NO: 52802 - DNA, 25 bp, Artificial
  probe
  misc_feature (1)..(25): SEQ ID NO: 7737; WAN024AFA_s_at; Start 142; Stop 166
caaaacagatagcttcatcttaggt

SEQ ID NO: 52803 - DNA, 25 bp, Artificial
  probe
  misc_feature (1)..(25): SEQ ID NO: 7737; WAN024AFA_s_at; Start 130; Stop 154
cgtgaatttcttcaaaacagatagc

SEQ ID NO: 52804 - DNA, 25 bp, Artificial
  probe
  misc_feature (1)..(25): SEQ ID NO: 7737; WAN024AFA_s_at; Start 141; Stop 165
tcaaaacagatagcttcatcttagg

SEQ ID NO: 52805 - DNA, 25 bp, Artificial
  probe
  misc_feature (1)..(25): SEQ ID NO: 7737; WAN024AFA_s_at; Start 94; Stop 118
aattctcatctgaaagtattttaga

SEQ ID NO: 52806 - DNA, 25 bp, Artificial
  probe
  misc_feature (1)..(25): SEQ ID NO: 7737; WAN024AFA_s_at; Start 168; Stop 192
tgtgatttctttttgcatttttgag

SEQ ID NO: 52807 - DNA, 25 bp, Artificial
  probe
  misc_feature (1)..(25): SEQ ID NO: 7737; WAN024AFA_s_at; Start 90; Stop 114
cgaaaattctcatctgaaagtattt

SEQ ID NO: 52808 - DNA, 25 bp, Artificial
  probe
  misc_feature (1)..(25): SEQ ID NO: 7737; WAN024AFA_s_at; Start 143; Stop 167
aaaacagatagcttcatcttaggta

SEQ ID NO: 52809 - DNA, 25 bp, Artificial
  probe
  misc_feature (1)..(25): SEQ ID NO: 7737; WAN024AFA_s_at; Start 22; Stop 46
gtagtccgaataatataaggattga

SEQ ID NO: 52810 - DNA, 25 bp, Artificial
  probe
  misc_feature (1)..(25): SEQ ID NO: 7737; WAN024AFA_s_at; Start 79; Stop 103
taaagagagtacgaaaattctcatc

SEQ ID NO: 52811 - DNA, 25 bp, Artificial
  probe
  misc_feature (1)..(25): SEQ ID NO: 7737; WAN024AFA_s_at; Start 85; Stop 109
gagtacgaaaattctcatctgaaag

SEQ ID NO: 52812 - DNA, 25 bp, Artificial
  probe
  misc_feature (1)..(25): SEQ ID NO: 7737; WAN024AFA_s_at; Start 9; Stop 33
caataagtgaaaagtagtccgaata

SEQ ID NO: 52813 - DNA, 25 bp, Artificial
  probe
  misc_feature (1)..(25): SEQ ID NO: 7737; WAN024AFA_s_at; Start 27; Stop 51
ccgaataatataaggattgatttta

SEQ ID NO: 52814 - DNA, 25 bp, Artificial
  probe
  misc_feature (1)..(25): SEQ ID NO: 7737; WAN024AFA_s_at; Start 24; Stop 48
agtccgaataatataaggattgatt

SEQ ID NO: 52815 - DNA, 25 bp, Artificial
  probe
  misc_feature (1)..(25): SEQ ID NO: 7737; WAN024AFA_s_at; Start 131; Stop 155
gtgaatttcttcaaaacagatagct

SEQ ID NO: 52816 - DNA, 25 bp, Artificial
  probe
  misc_feature (1)..(25): SEQ ID NO: 147; WAN024AFB_at; Start 79; Stop 103
cgatttttatcagattaacttctac

SEQ ID NO: 52817 - DNA, 25 bp, Artificial
  probe
  misc_feature (1)..(25): SEQ ID NO: 147; WAN024AFB_at; Start 176; Stop 200
taaagaaaaatcagggttctcctga

SEQ ID NO: 52818 - DNA, 25 bp, Artificial
  probe
  misc_feature (1)..(25): SEQ ID NO: 147; WAN024AFB_at; Start 111; Stop 135
agctgtgaaaattagtttaagactt

SEQ ID NO: 52819 - DNA, 25 bp, Artificial
  probe
  misc_feature (1)..(25): SEQ ID NO: 147; WAN024AFB_at; Start 164; Stop 188
ggccacttccagtaaagaaaaatca

SEQ ID NO: 52820 - DNA, 25 bp, Artificial
  probe
  misc_feature (1)..(25): SEQ ID NO: 147; WAN024AFB_at; Start 97; Stop 121
cttctactattcttagctgtgaaaa

SEQ ID NO: 52821 - DNA, 25 bp, Artificial
  probe
  misc_feature (1)..(25): SEQ ID NO: 147; WAN024AFB_at; Start 25; Stop 49
tagactatgaaaaccagtggaactt

SEQ ID NO: 52822 - DNA, 25 bp, Artificial
  probe
  misc_feature (1)..(25): SEQ ID NO: 147; WAN024AFB_at; Start 7; Stop 31
gtttcattcgaactttaatagacta

SEQ ID NO: 52823 - DNA, 25 bp, Artificial
  probe
  misc_feature (1)..(25): SEQ ID NO: 147; WAN024AFB_at; Start 150; Stop 174
tcttctaatctaaaggccacttcca

SEQ ID NO: 52824 - DNA, 25 bp, Artificial
  probe
  misc_feature (1)..(25): SEQ ID NO: 147; WAN024AFB_at; Start 4; Stop 28
taggtttcattcgaactttaataga

SEQ ID NO: 52825 - DNA, 25 bp, Artificial
  probe
  misc_feature (1)..(25): SEQ ID NO: 147; WAN024AFB_at; Start 155; Stop 179
taatctaaaggccacttccagtaaa

SEQ ID NO: 52826 - DNA, 25 bp, Artificial
  probe
  misc_feature (1)..(25): SEQ ID NO: 147; WAN024AFB_at; Start 158; Stop 182
tctaaaggccacttccagtaaagaa

SEQ ID NO: 52827 - DNA, 25 bp, Artificial
  probe
  misc_feature (1)..(25): SEQ ID NO: 147; WAN024AFB_at; Start 152; Stop 176
ttctaatctaaaggccacttccagt

SEQ ID NO: 52828 - DNA, 25 bp, Artificial
  probe
  misc_feature (1)..(25): SEQ ID NO: 147; WAN024AFB_at; Start 143; Stop 167
ttttcagtcttctaatctaaaggcc

SEQ ID NO: 52829 - DNA, 25 bp, Artificial
  probe
  misc_feature (1)..(25): SEQ ID NO: 147; WAN024AFB_at; Start 109; Stop 133
ttagctgtgaaaattagtttaagac

SEQ ID NO: 52830 - DNA, 25 bp, Artificial
  probe
  misc_feature (1)..(25): SEQ ID NO: 147; WAN024AFB_at; Start 11; Stop 35
cattcgaactttaatagactatgaa

SEQ ID NO: 52831 - DNA, 25 bp, Artificial
  probe
  misc_feature (1)..(25): SEQ ID NO: 147; WAN024AFB_at; Start 94; Stop 118
taacttctactattcttagctgtga

SEQ ID NO: 52832 - DNA, 25 bp, Artificial
  probe
  misc_feature (1)..(25): SEQ ID NO: 147; WAN024AFB_at; Start 179; Stop 203
agaaaaatcagggttctcctgactt

SEQ ID NO: 52833 - DNA, 25 bp, Artificial
  probe
  misc_feature (1)..(25): SEQ ID NO: 147; WAN024AFB_at; Start 91; Stop 115
gattaacttctactattcttagctg

SEQ ID NO: 52834 - DNA, 25 bp, Artificial
  probe
  misc_feature (1)..(25): SEQ ID NO: 147; WAN024AFB_at; Start 146; Stop 170
tcagtcttctaatctaaaggccact

SEQ ID NO: 52835 - DNA, 25 bp, Artificial
  probe
  misc_feature (1)..(25): SEQ ID NO: 147; WAN024AFB_at; Start 22; Stop 46
taatagactatgaaaaccagtggaa

SEQ ID NO: 52836 - DNA, 25 bp, Artificial
  probe
  misc_feature (1)..(25): SEQ ID NO: 147; WAN024AFB_at; Start 147; Stop 171
cagtcttctaatctaaaggccactt

SEQ ID NO: 52837 - DNA, 25 bp, Artificial
  probe
  misc_feature (1)..(25): SEQ ID NO: 147; WAN024AFB_at; Start 167; Stop 191
cacttccagtaaagaaaaatcaggg

SEQ ID NO: 52838 - DNA, 25 bp, Artificial
  probe
  misc_feature (1)..(25): SEQ ID NO: 147; WAN024AFB_at; Start 101; Stop 125
tactattcttagctgtgaaaattag

SEQ ID NO: 52839 - DNA, 25 bp, Artificial
  probe
  misc_feature (1)..(25): SEQ ID NO: 147; WAN024AFB_at; Start 32; Stop 56
tgaaaaccagtggaacttaccctga

SEQ ID NO: 52840 - DNA, 25 bp, Artificial
  probe
  misc_feature (1)..(25): SEQ ID NO: 147; WAN024AFB_at; Start 20; Stop 44
tttaatagactatgaaaaccagtgg

SEQ ID NO: 52841 - DNA, 25 bp, Artificial
  probe
  misc_feature (1)..(25): SEQ ID NO: 147; WAN024AFB_at; Start 27; Stop 51
gactatgaaaaccagtggaacttac

SEQ ID NO: 52842 - DNA, 25 bp, Artificial
  probe
  misc_feature (1)..(25): SEQ ID NO: 147; WAN024AFB_at; Start 31; Stop 55
atgaaaaccagtggaacttaccctg

SEQ ID NO: 52843 - DNA, 25 bp, Artificial
  probe
  misc_feature (1)..(25): SEQ ID NO: 147; WAN024AFB_at; Start 156; Stop 180
aatctaaaggccacttccagtaaag

SEQ ID NO: 52844 - DNA, 25 bp, Artificial
  probe
  misc_feature (1)..(25): SEQ ID NO: 147; WAN024AFB_at; Start 141; Stop 165
tattttcagtcttctaatctaaagg

SEQ ID NO: 52845 - DNA, 25 bp, Artificial
  probe
  misc_feature (1)..(25): SEQ ID NO: 147; WAN024AFB_at; Start 145; Stop 169
ttcagtcttctaatctaaaggccac

SEQ ID NO: 52846 - DNA, 25 bp, Artificial
  probe
  misc_feature (1)..(25): SEQ ID NO: 147; WAN024AFB_at; Start 67; Stop 91
cactggttttttcgatttttatcag

SEQ ID NO: 52847 - DNA, 25 bp, Artificial
  probe
  misc_feature (1)..(25): SEQ ID NO: 147; WAN024AFB_at; Start 149; Stop 173
gtcttctaatctaaaggccacttcc

SEQ ID NO: 52848 - DNA, 25 bp, Artificial
  probe
  misc_feature (1)..(25): SEQ ID NO: 147; WAN024AFB_at; Start 165; Stop 189
gccacttccagtaaagaaaaatcag

SEQ ID NO: 52849 - DNA, 25 bp, Artificial
  probe
  misc_feature (1)..(25): SEQ ID NO: 147; WAN024AFB_at; Start 23; Stop 47
aatagactatgaaaaccagtggaac

SEQ ID NO: 52850 - DNA, 25 bp, Artificial
  probe
  misc_feature (1)..(25): SEQ ID NO: 246; WAN024AFC_at; Start 155; Stop 179
aagttccactggttttcatagtcta

SEQ ID NO: 52851 - DNA, 25 bp, Artificial
  probe
  misc_feature (1)..(25): SEQ ID NO: 246; WAN024AFC_at; Start 16; Stop 40
tgatttttctttactggaagtggcc

SEQ ID NO: 52852 - DNA, 25 bp, Artificial
  probe
  misc_feature (1)..(25): SEQ ID NO: 246; WAN024AFC_at; Start 101; Stop 125
gtagaagttaatctgataaaaatcg

SEQ ID NO: 52853 - DNA, 25 bp, Artificial
  probe
  misc_feature (1)..(25): SEQ ID NO: 246; WAN024AFC_at; Start 148; Stop 172
tcagggtaagttccactggttttca

SEQ ID NO: 52854 - DNA, 25 bp, Artificial
  probe
  misc_feature (1)..(25): SEQ ID NO: 246; WAN024AFC_at; Start 13; Stop 37
ccctgatttttctttactggaagtg

SEQ ID NO: 52855 - DNA, 25 bp, Artificial
  probe
  misc_feature (1)..(25): SEQ ID NO: 246; WAN024AFC_at; Start 176; Stop 200
tctattaaagttcgaatgaaaccta

SEQ ID NO: 52856 - DNA, 25 bp, Artificial
  probe
  misc_feature (1)..(25): SEQ ID NO: 246; WAN024AFC_at; Start 31; Stop 55
ggaagtggcctttagattagaagac

SEQ ID NO: 52857 - DNA, 25 bp, Artificial
  probe
  misc_feature (1)..(25): SEQ ID NO: 246; WAN024AFC_at; Start 75; Stop 99
taaactaattttcacagctaagaat

SEQ ID NO: 52858 - DNA, 25 bp, Artificial
  probe
  misc_feature (1)..(25): SEQ ID NO: 246; WAN024AFC_at; Start 153; Stop 177
gtaagttccactggttttcatagtc

SEQ ID NO: 52859 - DNA, 25 bp, Artificial
  probe
  misc_feature (1)..(25): SEQ ID NO: 246; WAN024AFC_at; Start 37; Stop 61
ggcctttagattagaagactgaaaa

SEQ ID NO: 52860 - DNA, 25 bp, Artificial
  probe
  misc_feature (1)..(25): SEQ ID NO: 246; WAN024AFC_at; Start 36; Stop 60
tggcctttagattagaagactgaaa

SEQ ID NO: 52861 - DNA, 25 bp, Artificial
  probe
  misc_feature (1)..(25): SEQ ID NO: 246; WAN024AFC_at; Start 24; Stop 48
ctttactggaagtggcctttagatt

SEQ ID NO: 52862 - DNA, 25 bp, Artificial
  probe
  misc_feature (1)..(25): SEQ ID NO: 246; WAN024AFC_at; Start 39; Stop 63
cctttagattagaagactgaaaata

SEQ ID NO: 52863 - DNA, 25 bp, Artificial
  probe
  misc_feature (1)..(25): SEQ ID NO: 246; WAN024AFC_at; Start 149; Stop 173
cagggtaagttccactggttttcat

SEQ ID NO: 52864 - DNA, 25 bp, Artificial
  probe
  misc_feature (1)..(25): SEQ ID NO: 246; WAN024AFC_at; Start 173; Stop 197
tagtctattaaagttcgaatgaaac

SEQ ID NO: 52865 - DNA, 25 bp, Artificial
  probe
  misc_feature (1)..(25): SEQ ID NO: 246; WAN024AFC_at; Start 87; Stop 111
cacagctaagaatagtagaagttaa

SEQ ID NO: 52866 - DNA, 25 bp, Artificial
  probe
  misc_feature (1)..(25): SEQ ID NO: 246; WAN024AFC_at; Start 83; Stop 107
ttttcacagctaagaatagtagaag

SEQ ID NO: 52867 - DNA, 25 bp, Artificial
  probe
  misc_feature (1)..(25): SEQ ID NO: 246; WAN024AFC_at; Start 28; Stop 52
actggaagtggcctttagattagaa

SEQ ID NO: 52868 - DNA, 25 bp, Artificial
  probe
  misc_feature (1)..(25): SEQ ID NO: 246; WAN024AFC_at; Start 72; Stop 96
tcttaaactaattttcacagctaag

SEQ ID NO: 52869 - DNA, 25 bp, Artificial
  probe
  misc_feature (1)..(25): SEQ ID NO: 246; WAN024AFC_at; Start 69; Stop 93
aagtcttaaactaattttcacagct

SEQ ID NO: 52870 - DNA, 25 bp, Artificial
  probe
  misc_feature (1)..(25): SEQ ID NO: 246; WAN024AFC_at; Start 171; Stop 195
catagtctattaaagttcgaatgaa

SEQ ID NO: 52871 - DNA, 25 bp, Artificial
  probe
  misc_feature (1)..(25): SEQ ID NO: 246; WAN024AFC_at; Start 160; Stop 184
ccactggttttcatagtctattaaa

SEQ ID NO: 52872 - DNA, 25 bp, Artificial
  probe
  misc_feature (1)..(25): SEQ ID NO: 246; WAN024AFC_at; Start 104; Stop 128
gaagttaatctgataaaaatcgaaa

SEQ ID NO: 52873 - DNA, 25 bp, Artificial
  probe
  misc_feature (1)..(25): SEQ ID NO: 246; WAN024AFC_at; Start 80; Stop 104
taattttcacagctaagaatagtag

SEQ ID NO: 52874 - DNA, 25 bp, Artificial
  probe
  misc_feature (1)..(25): SEQ ID NO: 246; WAN024AFC_at; Start 45; Stop 69
gattagaagactgaaaataagttaa

SEQ ID NO: 52875 - DNA, 25 bp, Artificial
  probe
  misc_feature (1)..(25): SEQ ID NO: 246; WAN024AFC_at; Start 113; Stop 137
ctgataaaaatcgaaaaaaccagtg

SEQ ID NO: 52876 - DNA, 25 bp, Artificial
  probe
  misc_feature (1)..(25): SEQ ID NO: 246; WAN024AFC_at; Start 157; Stop 181
gttccactggttttcatagtctatt

SEQ ID NO: 52877 - DNA, 25 bp, Artificial
  probe
  misc_feature (1)..(25): SEQ ID NO: 246; WAN024AFC_at; Start 34; Stop 58
agtggcctttagattagaagactga

SEQ ID NO: 52878 - DNA, 25 bp, Artificial
  probe
  misc_feature (1)..(25): SEQ ID NO: 246; WAN024AFC_at; Start 89; Stop 113
cagctaagaatagtagaagttaatc

SEQ ID NO: 52879 - DNA, 25 bp, Artificial
  probe
  misc_feature (1)..(25): SEQ ID NO: 246; WAN024AFC_at; Start 22; Stop 46
ttctttactggaagtggcctttaga

SEQ ID NO: 52880 - DNA, 25 bp, Artificial
  probe
  misc_feature (1)..(25): SEQ ID NO: 246; WAN024AFC_at; Start 91; Stop 115
gctaagaatagtagaagttaatctg

SEQ ID NO: 52881 - DNA, 25 bp, Artificial
  probe
  misc_feature (1)..(25): SEQ ID NO: 246; WAN024AFC_at; Start 29; Stop 53
ctggaagtggcctttagattagaag

SEQ ID NO: 52882 - DNA, 25 bp, Artificial
  probe
  misc_feature (1)..(25): SEQ ID NO: 246; WAN024AFC_at; Start 32; Stop 56
gaagtggcctttagattagaagact

SEQ ID NO: 52883 - DNA, 25 bp, Artificial
  probe
  misc_feature (1)..(25): SEQ ID NO: 246; WAN024AFC_at; Start 177; Stop 201
ctattaaagttcgaatgaaacctat

SEQ ID NO: 52884 - DNA, 25 bp, Artificial
  probe
  misc_feature (1)..(25): SEQ ID NO: 4755; WAN024AFD_at; Start 4; Stop 28
acagatgaattattaaagcaagaat

SEQ ID NO: 52885 - DNA, 25 bp, Artificial
  probe
  misc_feature (1)..(25): SEQ ID NO: 4755; WAN024AFD_at; Start 3; Stop 27
aacagatgaattattaaagcaagaa

SEQ ID NO: 52886 - DNA, 25 bp, Artificial
  probe
  misc_feature (1)..(25): SEQ ID NO: 4755; WAN024AFD_at; Start 2; Stop 26
taacagatgaattattaaagcaaga

SEQ ID NO: 52887 - DNA, 25 bp, Artificial
  probe
  misc_feature (1)..(25): SEQ ID NO: 4755; WAN024AFD_at; Start 9; Stop 33
tgaattattaaagcaagaatatttt

SEQ ID NO: 52888 - DNA, 25 bp, Artificial
  probe
  misc_feature (1)..(25): SEQ ID NO: 4755; WAN024AFD_at; Start 1; Stop 25
ttaacagatgaattattaaagcaag

SEQ ID NO: 52889 - DNA, 25 bp, Artificial
  probe
  misc_feature (1)..(25): SEQ ID NO: 4755; WAN024AFD_at; Start 6; Stop 30
agatgaattattaaagcaagaatat

SEQ ID NO: 52890 - DNA, 25 bp, Artificial
  probe
  misc_feature (1)..(25): SEQ ID NO: 4755; WAN024AFD_at; Start 7; Stop 31
gatgaattattaaagcaagaatatt

SEQ ID NO: 52891 - DNA, 25 bp, Artificial
  probe
  misc_feature (1)..(25): SEQ ID NO: 4755; WAN024AFD_at; Start 5; Stop 29
cagatgaattattaaagcaagaata

SEQ ID NO: 52892 - DNA, 25 bp, Artificial
  probe
  misc_feature (1)..(25): SEQ ID NO: 4755; WAN024AFD_at; Start 8; Stop 32
atgaattattaaagcaagaatattt

SEQ ID NO: 52893 - DNA, 25 bp, Artificial
  probe
  misc_feature (1)..(25): SEQ ID NO: 4755; WAN024AFD_at; Start 25; Stop 49
gaatattttttttctttatgataga

SEQ ID NO: 52894 - DNA, 25 bp, Artificial
  probe
  misc_feature (1)..(25): SEQ ID NO: 481; WAN024AFE_at; Start 30; Stop 54
aatattcttgctttaataattcatc

SEQ ID NO: 52895 - DNA, 25 bp, Artificial
  probe
  misc_feature (1)..(25): SEQ ID NO: 481; WAN024AFE_at; Start 13; Stop 37
ctatcataaagaaaaaaaatattct

SEQ ID NO: 52896 - DNA, 25 bp, Artificial
  probe
  misc_feature (1)..(25): SEQ ID NO: 481; WAN024AFE_at; Start 35; Stop 59
tcttgctttaataattcatctgtta

SEQ ID NO: 52897 - DNA, 25 bp, Artificial
  probe
  misc_feature (1)..(25): SEQ ID NO: 481; WAN024AFE_at; Start 17; Stop 41
cataaagaaaaaaaatattcttgct

SEQ ID NO: 52898 - DNA, 25 bp, Artificial
  probe
  misc_feature (1)..(25): SEQ ID NO: 481; WAN024AFE_at; Start 29; Stop 53
aaatattcttgctttaataattcat

SEQ ID NO: 52899 - DNA, 25 bp, Artificial
  probe
  misc_feature (1)..(25): SEQ ID NO: 481; WAN024AFE_at; Start 32; Stop 56
tattcttgctttaataattcatctg

SEQ ID NO: 52900 - DNA, 25 bp, Artificial
  probe
  misc_feature (1)..(25): SEQ ID NO: 481; WAN024AFE_at; Start 28; Stop 52
aaaatattcttgctttaataattca

SEQ ID NO: 52901 - DNA, 25 bp, Artificial
  probe
  misc_feature (1)..(25): SEQ ID NO: 481; WAN024AFE_at; Start 16; Stop 40
tcataaagaaaaaaaatattcttgc

SEQ ID NO: 52902 - DNA, 25 bp, Artificial
  probe
  misc_feature (1)..(25): SEQ ID NO: 481; WAN024AFE_at; Start 31; Stop 55
atattcttgctttaataattcatct

SEQ ID NO: 52903 - DNA, 25 bp, Artificial
  probe
  misc_feature (1)..(25): SEQ ID NO: 481; WAN024AFE_at; Start 34; Stop 58
ttcttgctttaataattcatctgtt

SEQ ID NO: 52904 - DNA, 25 bp, Artificial
  probe
  misc_feature (1)..(25): SEQ ID NO: 481; WAN024AFE_at; Start 12; Stop 36
tctatcataaagaaaaaaaatattc

SEQ ID NO: 52905 - DNA, 25 bp, Artificial
  probe
  misc_feature (1)..(25): SEQ ID NO: 481; WAN024AFE_at; Start 36; Stop 60
cttgctttaataattcatctgttaa

SEQ ID NO: 52906 - DNA, 25 bp, Artificial
  probe
  misc_feature (1)..(25): SEQ ID NO: 481; WAN024AFE_at; Start 33; Stop 57
attcttgctttaataattcatctgt

SEQ ID NO: 52907 - DNA, 25 bp, Artificial
  probe
  misc_feature (1)..(25): SEQ ID NO: 515; WAN024AFF_at; Start 17; Stop 41
tcatttctaataattcataagacaa

SEQ ID NO: 52908 - DNA, 25 bp, Artificial
  probe
  misc_feature (1)..(25): SEQ ID NO: 515; WAN024AFF_at; Start 4; Stop 28
atcctttctttcttcatttctaata

SEQ ID NO: 52909 - DNA, 25 bp, Artificial
  probe
  misc_feature (1)..(25): SEQ ID NO: 515; WAN024AFF_at; Start 3; Stop 27
tatcctttctttcttcatttctaat

SEQ ID NO: 52910 - DNA, 25 bp, Artificial
  probe
  misc_feature (1)..(25): SEQ ID NO: 515; WAN024AFF_at; Start 26; Stop 50
ataattcataagacaaaagaaactt

SEQ ID NO: 52911 - DNA, 25 bp, Artificial
  probe
  misc_feature (1)..(25): SEQ ID NO: 515; WAN024AFF_at; Start 24; Stop 48
taataattcataagacaaaagaaac

SEQ ID NO: 52912 - DNA, 25 bp, Artificial
  probe
  misc_feature (1)..(25): SEQ ID NO: 515; WAN024AFF_at; Start 12; Stop 36
tttcttcatttctaataattcataa

SEQ ID NO: 52913 - DNA, 25 bp, Artificial
  probe
  misc_feature (1)..(25): SEQ ID NO: 515; WAN024AFF_at; Start 10; Stop 34
tctttcttcatttctaataattcat

SEQ ID NO: 52914 - DNA, 25 bp, Artificial
  probe
  misc_feature (1)..(25): SEQ ID NO: 515; WAN024AFF_at; Start 21; Stop 45
ttctaataattcataagacaaaaga

SEQ ID NO: 52915 - DNA, 25 bp, Artificial
  probe
  misc_feature (1)..(25): SEQ ID NO: 515; WAN024AFF_at; Start 28; Stop 52
aattcataagacaaaagaaacttgt

SEQ ID NO: 52916 - DNA, 25 bp, Artificial
  probe
  misc_feature (1)..(25): SEQ ID NO: 515; WAN024AFF_at; Start 5; Stop 29
tcctttctttcttcatttctaataa

SEQ ID NO: 52917 - DNA, 25 bp, Artificial
  probe
  misc_feature (1)..(25): SEQ ID NO: 515; WAN024AFF_at; Start 7; Stop 31
ctttctttcttcatttctaataatt

SEQ ID NO: 52918 - DNA, 25 bp, Artificial
  probe
  misc_feature (1)..(25): SEQ ID NO: 515; WAN024AFF_at; Start 15; Stop 39
cttcatttctaataattcataagac

SEQ ID NO: 52919 - DNA, 25 bp, Artificial
  probe
  misc_feature (1)..(25): SEQ ID NO: 515; WAN024AFF_at; Start 23; Stop 47
ctaataattcataagacaaaagaaa

SEQ ID NO: 52920 - DNA, 25 bp, Artificial
  probe
  misc_feature (1)..(25): SEQ ID NO: 515; WAN024AFF_at; Start 16; Stop 40
ttcatttctaataattcataagaca

SEQ ID NO: 52921 - DNA, 25 bp, Artificial
  probe
  misc_feature (1)..(25): SEQ ID NO: 515; WAN024AFF_at; Start 25; Stop 49
aataattcataagacaaaagaaact

SEQ ID NO: 52922 - DNA, 25 bp, Artificial
  probe
  misc_feature (1)..(25): SEQ ID NO: 515; WAN024AFF_at; Start 29; Stop 53
attcataagacaaaagaaacttgtc

SEQ ID NO: 52923 - DNA, 25 bp, Artificial
  probe
  misc_feature (1)..(25): SEQ ID NO: 515; WAN024AFF_at; Start 22; Stop 46
tctaataattcataagacaaaagaa

SEQ ID NO: 52924 - DNA, 25 bp, Artificial
  probe
  misc_feature (1)..(25): SEQ ID NO: 515; WAN024AFF_at; Start 13; Stop 37
ttcttcatttctaataattcataag

SEQ ID NO: 52925 - DNA, 25 bp, Artificial
  probe
  misc_feature (1)..(25): SEQ ID NO: 515; WAN024AFF_at; Start 8; Stop 32
tttctttcttcatttctaataattc

SEQ ID NO: 52926 - DNA, 25 bp, Artificial
  probe
  misc_feature (1)..(25): SEQ ID NO: 515; WAN024AFF_at; Start 11; Stop 35
ctttcttcatttctaataattcata

SEQ ID NO: 52927 - DNA, 25 bp, Artificial
  probe
  misc_feature (1)..(25): SEQ ID NO: 515; WAN024AFF_at; Start 14; Stop 38
tcttcatttctaataattcataaga

SEQ ID NO: 52928 - DNA, 25 bp, Artificial
  probe
  misc_feature (1)..(25): SEQ ID NO: 515; WAN024AFF_at; Start 6; Stop 30
cctttctttcttcatttctaataat

SEQ ID NO: 52929 - DNA, 25 bp, Artificial
  probe
  misc_feature (1)..(25): SEQ ID NO: 515; WAN024AFF_at; Start 19; Stop 43
atttctaataattcataagacaaaa

SEQ ID NO: 52930 - DNA, 25 bp, Artificial
  probe
  misc_feature (1)..(25): SEQ ID NO: 515; WAN024AFF_at; Start 18; Stop 42
catttctaataattcataagacaaa

SEQ ID NO: 52931 - DNA, 25 bp, Artificial
  probe
  misc_feature (1)..(25): SEQ ID NO: 515; WAN024AFF_at; Start 27; Stop 51
taattcataagacaaaagaaacttg

SEQ ID NO: 52932 - DNA, 25 bp, Artificial
  probe
  misc_feature (1)..(25): SEQ ID NO: 515; WAN024AFF_at; Start 9; Stop 33
ttctttcttcatttctaataattca

SEQ ID NO: 52933 - DNA, 25 bp, Artificial
  probe
  misc_feature (1)..(25): SEQ ID NO: 515; WAN024AFF_at; Start 20; Stop 44
tttctaataattcataagacaaaag

SEQ ID NO: 52934 - DNA, 25 bp, Artificial
  probe
  misc_feature (1)..(25): SEQ ID NO: 3571; WAN024AFG_at; Start 25; Stop 49
ttattagaaatgaagaaagaaagga

SEQ ID NO: 52935 - DNA, 25 bp, Artificial
  probe
  misc_feature (1)..(25): SEQ ID NO: 3571; WAN024AFG_at; Start 18; Stop 42
ttatgaattattagaaatgaagaaa

SEQ ID NO: 52936 - DNA, 25 bp, Artificial
  probe
  misc_feature (1)..(25): SEQ ID NO: 3571; WAN024AFG_at; Start 22; Stop 46
gaattattagaaatgaagaaagaaa

SEQ ID NO: 52937 - DNA, 25 bp, Artificial
  probe
  misc_feature (1)..(25): SEQ ID NO: 3571; WAN024AFG_at; Start 4; Stop 28
aagtttcttttgtcttatgaattat

SEQ ID NO: 52938 - DNA, 25 bp, Artificial
  probe
  misc_feature (1)..(25): SEQ ID NO: 3571; WAN024AFG_at; Start 15; Stop 39
gtcttatgaattattagaaatgaag

SEQ ID NO: 52939 - DNA, 25 bp, Artificial
  probe
  misc_feature (1)..(25): SEQ ID NO: 3571; WAN024AFG_at; Start 11; Stop 35
ttttgtcttatgaattattagaaat

SEQ ID NO: 52940 - DNA, 25 bp, Artificial
  probe
  misc_feature (1)..(25): SEQ ID NO: 3571; WAN024AFG_at; Start 27; Stop 51
attagaaatgaagaaagaaaggata

SEQ ID NO: 52941 - DNA, 25 bp, Artificial
  probe
  misc_feature (1)..(25): SEQ ID NO: 3571; WAN024AFG_at; Start 17; Stop 41
cttatgaattattagaaatgaagaa

SEQ ID NO: 52942 - DNA, 25 bp, Artificial
  probe
  misc_feature (1)..(25): SEQ ID NO: 3571; WAN024AFG_at; Start 2; Stop 26
acaagtttcttttgtcttatgaatt

SEQ ID NO: 52943 - DNA, 25 bp, Artificial
  probe
  misc_feature (1)..(25): SEQ ID NO: 3571; WAN024AFG_at; Start 26; Stop 50
tattagaaatgaagaaagaaaggat

SEQ ID NO: 52944 - DNA, 25 bp, Artificial
  probe
  misc_feature (1)..(25): SEQ ID NO: 3571; WAN024AFG_at; Start 7; Stop 31
tttcttttgtcttatgaattattag

SEQ ID NO: 52945 - DNA, 25 bp, Artificial
  probe
  misc_feature (1)..(25): SEQ ID NO: 3571; WAN024AFG_at; Start 6; Stop 30
gtttcttttgtcttatgaattatta

SEQ ID NO: 52946 - DNA, 25 bp, Artificial
  probe
  misc_feature (1)..(25): SEQ ID NO: 3571; WAN024AFG_at; Start 19; Stop 43
tatgaattattagaaatgaagaaag

SEQ ID NO: 52947 - DNA, 25 bp, Artificial
  probe
  misc_feature (1)..(25): SEQ ID NO: 3571; WAN024AFG_at; Start 13; Stop 37
ttgtcttatgaattattagaaatga

SEQ ID NO: 52948 - DNA, 25 bp, Artificial
  probe
  misc_feature (1)..(25): SEQ ID NO: 3571; WAN024AFG_at; Start 16; Stop 40
tcttatgaattattagaaatgaaga

SEQ ID NO: 52949 - DNA, 25 bp, Artificial
  probe
  misc_feature (1)..(25): SEQ ID NO: 3571; WAN024AFG_at; Start 10; Stop 34
cttttgtcttatgaattattagaaa

SEQ ID NO: 52950 - DNA, 25 bp, Artificial
  probe
  misc_feature (1)..(25): SEQ ID NO: 3571; WAN024AFG_at; Start 8; Stop 32
ttcttttgtcttatgaattattaga

SEQ ID NO: 52951 - DNA, 25 bp, Artificial
  probe
  misc_feature (1)..(25): SEQ ID NO: 3571; WAN024AFG_at; Start 14; Stop 38
tgtcttatgaattattagaaatgaa

SEQ ID NO: 52952 - DNA, 25 bp, Artificial
  probe
  misc_feature (1)..(25): SEQ ID NO: 3571; WAN024AFG_at; Start 1; Stop 25
gacaagtttcttttgtcttatgaat

SEQ ID NO: 52953 - DNA, 25 bp, Artificial
  probe
  misc_feature (1)..(25): SEQ ID NO: 3571; WAN024AFG_at; Start 9; Stop 33
tcttttgtcttatgaattattagaa

SEQ ID NO: 52954 - DNA, 25 bp, Artificial
  probe
  misc_feature (1)..(25): SEQ ID NO: 3571; WAN024AFG_at; Start 3; Stop 27
caagtttcttttgtcttatgaatta

SEQ ID NO: 52955 - DNA, 25 bp, Artificial
  probe
  misc_feature (1)..(25): SEQ ID NO: 3571; WAN024AFG_at; Start 24; Stop 48
attattagaaatgaagaaagaaagg

SEQ ID NO: 52956 - DNA, 25 bp, Artificial
  probe
  misc_feature (1)..(25): SEQ ID NO: 3571; WAN024AFG_at; Start 20; Stop 44
atgaattattagaaatgaagaaaga

SEQ ID NO: 52957 - DNA, 25 bp, Artificial
  probe
  misc_feature (1)..(25): SEQ ID NO: 3571; WAN024AFG_at; Start 21; Stop 45
tgaattattagaaatgaagaaagaa

SEQ ID NO: 52958 - DNA, 25 bp, Artificial
  probe
  misc_feature (1)..(25): SEQ ID NO: 3571; WAN024AFG_at; Start 23; Stop 47
aattattagaaatgaagaaagaaag

SEQ ID NO: 52959 - DNA, 25 bp, Artificial
  probe
  misc_feature (1)..(25): SEQ ID NO: 3571; WAN024AFG_at; Start 12; Stop 36
tttgtcttatgaattattagaaatg

SEQ ID NO: 52960 - DNA, 25 bp, Artificial
  probe
  misc_feature (1)..(25): SEQ ID NO: 3536; WAN024AFH_at; Start 63; Stop 87
tttgattttgtctggaagctgaggg

SEQ ID NO: 52961 - DNA, 25 bp, Artificial
  probe
  misc_feature (1)..(25): SEQ ID NO: 3536; WAN024AFH_at; Start 53; Stop 77
cctaaaaggctttgattttgtctgg

SEQ ID NO: 52962 - DNA, 25 bp, Artificial
  probe
  misc_feature (1)..(25): SEQ ID NO: 3536; WAN024AFH_at; Start 20; Stop 44
ataaatatacttttctagtataaca

SEQ ID NO: 52963 - DNA, 25 bp, Artificial
  probe
  misc_feature (1)..(25): SEQ ID NO: 3536; WAN024AFH_at; Start 14; Stop 38
aattctataaatatacttttctagt

SEQ ID NO: 52964 - DNA, 25 bp, Artificial
  probe
  misc_feature (1)..(25): SEQ ID NO: 3536; WAN024AFH_at; Start 59; Stop 83
aggctttgattttgtctggaagctg

SEQ ID NO: 52965 - DNA, 25 bp, Artificial
  probe
  misc_feature (1)..(25): SEQ ID NO: 3536; WAN024AFH_at; Start 56; Stop 80
aaaaggctttgattttgtctggaag

SEQ ID NO: 52966 - DNA, 25 bp, Artificial
  probe
  misc_feature (1)..(25): SEQ ID NO: 3536; WAN024AFH_at; Start 57; Stop 81
aaaggctttgattttgtctggaagc

SEQ ID NO: 52967 - DNA, 25 bp, Artificial
  probe
  misc_feature (1)..(25): SEQ ID NO: 3536; WAN024AFH_at; Start 54; Stop 78
ctaaaaggctttgattttgtctgga

SEQ ID NO: 52968 - DNA, 25 bp, Artificial
  probe
  misc_feature (1)..(25): SEQ ID NO: 3536; WAN024AFH_at; Start 19; Stop 43
tataaatatacttttctagtataac

SEQ ID NO: 52969 - DNA, 25 bp, Artificial
  probe
  misc_feature (1)..(25): SEQ ID NO: 3536; WAN024AFH_at; Start 52; Stop 76
gcctaaaaggctttgattttgtctg

SEQ ID NO: 52970 - DNA, 25 bp, Artificial
  probe
  misc_feature (1)..(25): SEQ ID NO: 3536; WAN024AFH_at; Start 62; Stop 86
ctttgattttgtctggaagctgagg

SEQ ID NO: 52971 - DNA, 25 bp, Artificial
  probe
  misc_feature (1)..(25): SEQ ID NO: 3536; WAN024AFH_at; Start 21; Stop 45
taaatatacttttctagtataacaa

SEQ ID NO: 52972 - DNA, 25 bp, Artificial
  probe
  misc_feature (1)..(25): SEQ ID NO: 3536; WAN024AFH_at; Start 60; Stop 84
ggctttgattttgtctggaagctga

SEQ ID NO: 52973 - DNA, 25 bp, Artificial
  probe
  misc_feature (1)..(25): SEQ ID NO: 3536; WAN024AFH_at; Start 58; Stop 82
aaggctttgattttgtctggaagct

SEQ ID NO: 52974 - DNA, 25 bp, Artificial
  probe
  misc_feature (1)..(25): SEQ ID NO: 3536; WAN024AFH_at; Start 1; Stop 25
gaaatagagcaaaaattctataaat

SEQ ID NO: 52975 - DNA, 25 bp, Artificial
  probe
  misc_feature (1)..(25): SEQ ID NO: 3536; WAN024AFH_at; Start 61; Stop 85
gctttgattttgtctggaagctgag

SEQ ID NO: 52976 - DNA, 25 bp, Artificial
  probe
  misc_feature (1)..(25): SEQ ID NO: 3536; WAN024AFH_at; Start 51; Stop 75
agcctaaaaggctttgattttgtct

SEQ ID NO: 52977 - DNA, 25 bp, Artificial
  probe
  misc_feature (1)..(25): SEQ ID NO: 3536; WAN024AFH_at; Start 55; Stop 79
taaaaggctttgattttgtctggaa

SEQ ID NO: 52978 - DNA, 25 bp, Artificial
  probe
  misc_feature (1)..(25): SEQ ID NO: 3238; WAN024AFI_at; Start 56; Stop 80
aaagtatatttatagaatttttgct

SEQ ID NO: 52979 - DNA, 25 bp, Artificial
  probe
  misc_feature (1)..(25): SEQ ID NO: 3238; WAN024AFI_at; Start 51; Stop 75
ctagaaaagtatatttatagaattt

SEQ ID NO: 52980 - DNA, 25 bp, Artificial
  probe
  misc_feature (1)..(25): SEQ ID NO: 3238; WAN024AFI_at; Start 7; Stop 31
gcttccagacaaaatcaaagccttt

SEQ ID NO: 52981 - DNA, 25 bp, Artificial
  probe
  misc_feature (1)..(25): SEQ ID NO: 3238; WAN024AFI_at; Start 59; Stop 83
gtatatttatagaatttttgctcta

SEQ ID NO: 52982 - DNA, 25 bp, Artificial
  probe
  misc_feature (1)..(25): SEQ ID NO: 3238; WAN024AFI_at; Start 2; Stop 26
cctcagcttccagacaaaatcaaag

SEQ ID NO: 52983 - DNA, 25 bp, Artificial
  probe
  misc_feature (1)..(25): SEQ ID NO: 3238; WAN024AFI_at; Start 44; Stop 68
tgttatactagaaaagtatatttat

SEQ ID NO: 52984 - DNA, 25 bp, Artificial
  probe
  misc_feature (1)..(25): SEQ ID NO: 3238; WAN024AFI_at; Start 10; Stop 34
tccagacaaaatcaaagccttttag

SEQ ID NO: 52985 - DNA, 25 bp, Artificial
  probe
  misc_feature (1)..(25): SEQ ID NO: 3238; WAN024AFI_at; Start 3; Stop 27
ctcagcttccagacaaaatcaaagc

SEQ ID NO: 52986 - DNA, 25 bp, Artificial
  probe
  misc_feature (1)..(25): SEQ ID NO: 3238; WAN024AFI_at; Start 13; Stop 37
agacaaaatcaaagccttttaggct

SEQ ID NO: 52987 - DNA, 25 bp, Artificial
  probe
  misc_feature (1)..(25): SEQ ID NO: 3238; WAN024AFI_at; Start 43; Stop 67
ttgttatactagaaaagtatattta

SEQ ID NO: 52988 - DNA, 25 bp, Artificial
  probe
  misc_feature (1)..(25): SEQ ID NO: 3238; WAN024AFI_at; Start 60; Stop 84
tatatttatagaatttttgctctat

SEQ ID NO: 52989 - DNA, 25 bp, Artificial
  probe
  misc_feature (1)..(25): SEQ ID NO: 3238; WAN024AFI_at; Start 11; Stop 35
ccagacaaaatcaaagccttttagg

SEQ ID NO: 52990 - DNA, 25 bp, Artificial
  probe
  misc_feature (1)..(25): SEQ ID NO: 3238; WAN024AFI_at; Start 57; Stop 81
aagtatatttatagaatttttgctc

SEQ ID NO: 52991 - DNA, 25 bp, Artificial
  probe
  misc_feature (1)..(25): SEQ ID NO: 3238; WAN024AFI_at; Start 4; Stop 28
tcagcttccagacaaaatcaaagcc

SEQ ID NO: 52992 - DNA, 25 bp, Artificial
  probe
  misc_feature (1)..(25): SEQ ID NO: 3238; WAN024AFI_at; Start 8; Stop 32
cttccagacaaaatcaaagcctttt

SEQ ID NO: 52993 - DNA, 25 bp, Artificial
  probe
  misc_feature (1)..(25): SEQ ID NO: 3238; WAN024AFI_at; Start 12; Stop 36
cagacaaaatcaaagccttttaggc

SEQ ID NO: 52994 - DNA, 25 bp, Artificial
  probe
  misc_feature (1)..(25): SEQ ID NO: 3238; WAN024AFI_at; Start 6; Stop 30
agcttccagacaaaatcaaagcctt

SEQ ID NO: 52995 - DNA, 25 bp, Artificial
  probe
  misc_feature (1)..(25): SEQ ID NO: 3238; WAN024AFI_at; Start 5; Stop 29
cagcttccagacaaaatcaaagcct

SEQ ID NO: 52996 - DNA, 25 bp, Artificial
  probe
  misc_feature (1)..(25): SEQ ID NO: 3238; WAN024AFI_at; Start 9; Stop 33
ttccagacaaaatcaaagcctttta

SEQ ID NO: 52997 - DNA, 25 bp, Artificial
  probe
  misc_feature (1)..(25): SEQ ID NO: 3238; WAN024AFI_at; Start 58; Stop 82
agtatatttatagaatttttgctct

SEQ ID NO: 52998 - DNA, 25 bp, Artificial
  probe
  misc_feature (1)..(25): SEQ ID NO: 3238; WAN024AFI_at; Start 49; Stop 73
tactagaaaagtatatttatagaat

SEQ ID NO: 52999 - DNA, 25 bp, Artificial
  probe
  misc_feature (1)..(25): SEQ ID NO: 3238; WAN024AFI_at; Start 50; Stop 74
actagaaaagtatatttatagaatt

SEQ ID NO: 53000 - DNA, 25 bp, Artificial
  probe
  misc_feature (1)..(25): SEQ ID NO: 3238; WAN024AFI_at; Start 1; Stop 25
ccctcagcttccagacaaaatcaaa

SEQ ID NO: 53001 - DNA, 25 bp, Artificial
  probe
  misc_feature (1)..(25): SEQ ID NO: 229; WAN024AFJ_at; Start 1; Stop 25
aagatttgttctcttttctattctt

SEQ ID NO: 53002 - DNA, 25 bp, Artificial
  probe
  misc_feature (1)..(25): SEQ ID NO: 229; WAN024AFJ_at; Start 3; Stop 27
gatttgttctcttttctattcttaa

SEQ ID NO: 53003 - DNA, 25 bp, Artificial
  probe
  misc_feature (1)..(25): SEQ ID NO: 229; WAN024AFJ_at; Start 2; Stop 26
agatttgttctcttttctattctta

SEQ ID NO: 53004 - DNA, 25 bp, Artificial
  probe
  misc_feature (1)..(25): SEQ ID NO: 4498; WAN024AFK_at; Start 27; Stop 51
taagaatagaaaagagaacaaatct

SEQ ID NO: 53005 - DNA, 25 bp, Artificial
  probe
  misc_feature (1)..(25): SEQ ID NO: 4498; WAN024AFK_at; Start 28; Stop 52
aagaatagaaaagagaacaaatctt

SEQ ID NO: 53006 - DNA, 25 bp, Artificial
  probe
  misc_feature (1)..(25): SEQ ID NO: 4498; WAN024AFK_at; Start 26; Stop 50
ttaagaatagaaaagagaacaaatc

SEQ ID NO: 53007 - DNA, 25 bp, Artificial
  probe
  misc_feature (1)..(25): SEQ ID NO: 3267; WAN024AFL_at; Start 82; Stop 106
tcatatcattcacgtctttcaatta

SEQ ID NO: 53008 - DNA, 25 bp, Artificial
  probe
  misc_feature (1)..(25): SEQ ID NO: 3267; WAN024AFL_at; Start 30; Stop 54
cttaaacttgacatacttataattt

SEQ ID NO: 53009 - DNA, 25 bp, Artificial
  probe
  misc_feature (1)..(25): SEQ ID NO: 3267; WAN024AFL_at; Start 88; Stop 112
cattcacgtctttcaattataaaaa

SEQ ID NO: 53010 - DNA, 25 bp, Artificial
  probe
  misc_feature (1)..(25): SEQ ID NO: 3267; WAN024AFL_at; Start 76; Stop 100
acatgttcatatcattcacgtcttt

SEQ ID NO: 53011 - DNA, 25 bp, Artificial
  probe
  misc_feature (1)..(25): SEQ ID NO: 3267; WAN024AFL_at; Start 81; Stop 105
ttcatatcattcacgtctttcaatt

SEQ ID NO: 53012 - DNA, 25 bp, Artificial
  probe
  misc_feature (1)..(25): SEQ ID NO: 3267; WAN024AFL_at; Start 78; Stop 102
atgttcatatcattcacgtctttca

SEQ ID NO: 53013 - DNA, 25 bp, Artificial
  probe
  misc_feature (1)..(25): SEQ ID NO: 3267; WAN024AFL_at; Start 75; Stop 99
gacatgttcatatcattcacgtctt

SEQ ID NO: 53014 - DNA, 25 bp, Artificial
  probe
  misc_feature (1)..(25): SEQ ID NO: 3267; WAN024AFL_at; Start 74; Stop 98
ggacatgttcatatcattcacgtct

SEQ ID NO: 53015 - DNA, 25 bp, Artificial
  probe
  misc_feature (1)..(25): SEQ ID NO: 3267; WAN024AFL_at; Start 86; Stop 110
atcattcacgtctttcaattataaa

SEQ ID NO: 53016 - DNA, 25 bp, Artificial
  probe
  misc_feature (1)..(25): SEQ ID NO: 3267; WAN024AFL_at; Start 77; Stop 101
catgttcatatcattcacgtctttc

SEQ ID NO: 53017 - DNA, 25 bp, Artificial
  probe
  misc_feature (1)..(25): SEQ ID NO: 3267; WAN024AFL_at; Start 20; Stop 44
tcaagtttttcttaaacttgacata

SEQ ID NO: 53018 - DNA, 25 bp, Artificial
  probe
  misc_feature (1)..(25): SEQ ID NO: 3267; WAN024AFL_at; Start 112; Stop 136
ataaaataccctaagatattttgct

SEQ ID NO: 53019 - DNA, 25 bp, Artificial
  probe
  misc_feature (1)..(25): SEQ ID NO: 3267; WAN024AFL_at; Start 8; Stop 32
atcctccaacaatcaagtttttctt

SEQ ID NO: 53020 - DNA, 25 bp, Artificial
  probe
  misc_feature (1)..(25): SEQ ID NO: 3267; WAN024AFL_at; Start 71; Stop 95
caaggacatgttcatatcattcacg

SEQ ID NO: 53021 - DNA, 25 bp, Artificial
  probe
  misc_feature (1)..(25): SEQ ID NO: 3267; WAN024AFL_at; Start 87; Stop 111
tcattcacgtctttcaattataaaa

SEQ ID NO: 53022 - DNA, 25 bp, Artificial
  probe
  misc_feature (1)..(25): SEQ ID NO: 3267; WAN024AFL_at; Start 26; Stop 50
ttttcttaaacttgacatacttata

SEQ ID NO: 53023 - DNA, 25 bp, Artificial
  probe
  misc_feature (1)..(25): SEQ ID NO: 3267; WAN024AFL_at; Start 79; Stop 103
tgttcatatcattcacgtctttcaa

SEQ ID NO: 53024 - DNA, 25 bp, Artificial
  probe
  misc_feature (1)..(25): SEQ ID NO: 3267; WAN024AFL_at; Start 80; Stop 104
gttcatatcattcacgtctttcaat

SEQ ID NO: 53025 - DNA, 25 bp, Artificial
  probe
  misc_feature (1)..(25): SEQ ID NO: 3267; WAN024AFL_at; Start 90; Stop 114
ttcacgtctttcaattataaaaata

SEQ ID NO: 53026 - DNA, 25 bp, Artificial
  probe
  misc_feature (1)..(25): SEQ ID NO: 3267; WAN024AFL_at; Start 28; Stop 52
ttcttaaacttgacatacttataat

SEQ ID NO: 53027 - DNA, 25 bp, Artificial
  probe
  misc_feature (1)..(25): SEQ ID NO: 3267; WAN024AFL_at; Start 38; Stop 62
tgacatacttataatttttttccta

SEQ ID NO: 53028 - DNA, 25 bp, Artificial
  probe
  misc_feature (1)..(25): SEQ ID NO: 3267; WAN024AFL_at; Start 91; Stop 115
tcacgtctttcaattataaaaataa

SEQ ID NO: 53029 - DNA, 25 bp, Artificial
  probe
  misc_feature (1)..(25): SEQ ID NO: 3267; WAN024AFL_at; Start 1; Stop 25
ctaaaaaatcctccaacaatcaagt

SEQ ID NO: 53030 - DNA, 25 bp, Artificial
  probe
  misc_feature (1)..(25): SEQ ID NO: 3267; WAN024AFL_at; Start 7; Stop 31
aatcctccaacaatcaagtttttct

SEQ ID NO: 53031 - DNA, 25 bp, Artificial
  probe
  misc_feature (1)..(25): SEQ ID NO: 3267; WAN024AFL_at; Start 89; Stop 113
attcacgtctttcaattataaaaat

SEQ ID NO: 53032 - DNA, 25 bp, Artificial
  probe
  misc_feature (1)..(25): SEQ ID NO: 3267; WAN024AFL_at; Start 85; Stop 109
tatcattcacgtctttcaattataa

SEQ ID NO: 53033 - DNA, 25 bp, Artificial
  probe
  misc_feature (1)..(25): SEQ ID NO: 3267; WAN024AFL_at; Start 83; Stop 107
catatcattcacgtctttcaattat

SEQ ID NO: 53034 - DNA, 25 bp, Artificial
  probe
  misc_feature (1)..(25): SEQ ID NO: 3267; WAN024AFL_at; Start 70; Stop 94
gcaaggacatgttcatatcattcac

SEQ ID NO: 53035 - DNA, 25 bp, Artificial
  probe
  misc_feature (1)..(25): SEQ ID NO: 3267; WAN024AFL_at; Start 72; Stop 96
aaggacatgttcatatcattcacgt

SEQ ID NO: 53036 - DNA, 25 bp, Artificial
  probe
  misc_feature (1)..(25): SEQ ID NO: 3267; WAN024AFL_at; Start 27; Stop 51
tttcttaaacttgacatacttataa

SEQ ID NO: 53037 - DNA, 25 bp, Artificial
  probe
  misc_feature (1)..(25): SEQ ID NO: 3267; WAN024AFL_at; Start 9; Stop 33
tcctccaacaatcaagtttttctta

SEQ ID NO: 53038 - DNA, 25 bp, Artificial
  probe
  misc_feature (1)..(25): SEQ ID NO: 3267; WAN024AFL_at; Start 73; Stop 97
aggacatgttcatatcattcacgtc

SEQ ID NO: 53039 - DNA, 25 bp, Artificial
  probe
  misc_feature (1)..(25): SEQ ID NO: 3267; WAN024AFL_at; Start 29; Stop 53
tcttaaacttgacatacttataatt

SEQ ID NO: 53040 - DNA, 25 bp, Artificial
  probe
  misc_feature (1)..(25): SEQ ID NO: 3267; WAN024AFL_at; Start 84; Stop 108
atatcattcacgtctttcaattata

SEQ ID NO: 53041 - DNA, 25 bp, Artificial
  probe
  misc_feature (1)..(25): SEQ ID NO: 4854; WAN024AFM_at; Start 56; Stop 80
taattgaaagacgtgaatgatatga

SEQ ID NO: 53042 - DNA, 25 bp, Artificial
  probe
  misc_feature (1)..(25): SEQ ID NO: 4854; WAN024AFM_at; Start 54; Stop 78
tataattgaaagacgtgaatgatat

SEQ ID NO: 53043 - DNA, 25 bp, Artificial
  probe
  misc_feature (1)..(25): SEQ ID NO: 4854; WAN024AFM_at; Start 131; Stop 155
agaaaaacttgattgttggaggatt

SEQ ID NO: 53044 - DNA, 25 bp, Artificial
  probe
  misc_feature (1)..(25): SEQ ID NO: 4854; WAN024AFM_at; Start 52; Stop 76
tttataattgaaagacgtgaatgat

SEQ ID NO: 53045 - DNA, 25 bp, Artificial
  probe
  misc_feature (1)..(25): SEQ ID NO: 4854; WAN024AFM_at; Start 67; Stop 91
cgtgaatgatatgaacatgtccttg

SEQ ID NO: 53046 - DNA, 25 bp, Artificial
  probe
  misc_feature (1)..(25): SEQ ID NO: 4854; WAN024AFM_at; Start 49; Stop 73
atttttataattgaaagacgtgaat

SEQ ID NO: 53047 - DNA, 25 bp, Artificial
  probe
  misc_feature (1)..(25): SEQ ID NO: 4854; WAN024AFM_at; Start 55; Stop 79
ataattgaaagacgtgaatgatatg

SEQ ID NO: 53048 - DNA, 25 bp, Artificial
  probe
  misc_feature (1)..(25): SEQ ID NO: 4854; WAN024AFM_at; Start 58; Stop 82
attgaaagacgtgaatgatatgaac

SEQ ID NO: 53049 - DNA, 25 bp, Artificial
  probe
  misc_feature (1)..(25): SEQ ID NO: 4854; WAN024AFM_at; Start 62; Stop 86
aaagacgtgaatgatatgaacatgt

SEQ ID NO: 53050 - DNA, 25 bp, Artificial
  probe
  misc_feature (1)..(25): SEQ ID NO: 4854; WAN024AFM_at; Start 118; Stop 142
tatgtcaagtttaagaaaaacttga

SEQ ID NO: 53051 - DNA, 25 bp, Artificial
  probe
  misc_feature (1)..(25): SEQ ID NO: 4854; WAN024AFM_at; Start 65; Stop 89
gacgtgaatgatatgaacatgtcct

SEQ ID NO: 53052 - DNA, 25 bp, Artificial
  probe
  misc_feature (1)..(25): SEQ ID NO: 4854; WAN024AFM_at; Start 110; Stop 134
attataagtatgtcaagtttaagaa

SEQ ID NO: 53053 - DNA, 25 bp, Artificial
  probe
  misc_feature (1)..(25): SEQ ID NO: 4854; WAN024AFM_at; Start 119; Stop 143
atgtcaagtttaagaaaaacttgat

SEQ ID NO: 53054 - DNA, 25 bp, Artificial
  probe
  misc_feature (1)..(25): SEQ ID NO: 4854; WAN024AFM_at; Start 48; Stop 72
tatttttataattgaaagacgtgaa

SEQ ID NO: 53055 - DNA, 25 bp, Artificial
  probe
  misc_feature (1)..(25): SEQ ID NO: 4854; WAN024AFM_at; Start 111; Stop 135
ttataagtatgtcaagtttaagaaa

SEQ ID NO: 53056 - DNA, 25 bp, Artificial
  probe
  misc_feature (1)..(25): SEQ ID NO: 4854; WAN024AFM_at; Start 53; Stop 77
ttataattgaaagacgtgaatgata

SEQ ID NO: 53057 - DNA, 25 bp, Artificial
  probe
  misc_feature (1)..(25): SEQ ID NO: 4854; WAN024AFM_at; Start 108; Stop 132
aaattataagtatgtcaagtttaag

SEQ ID NO: 53058 - DNA, 25 bp, Artificial
  probe
  misc_feature (1)..(25): SEQ ID NO: 4854; WAN024AFM_at; Start 130; Stop 154
aagaaaaacttgattgttggaggat

SEQ ID NO: 53059 - DNA, 25 bp, Artificial
  probe
  misc_feature (1)..(25): SEQ ID NO: 4854; WAN024AFM_at; Start 60; Stop 84
tgaaagacgtgaatgatatgaacat

SEQ ID NO: 53060 - DNA, 25 bp, Artificial
  probe
  misc_feature (1)..(25): SEQ ID NO: 4854; WAN024AFM_at; Start 66; Stop 90
acgtgaatgatatgaacatgtcctt

SEQ ID NO: 53061 - DNA, 25 bp, Artificial
  probe
  misc_feature (1)..(25): SEQ ID NO: 4854; WAN024AFM_at; Start 63; Stop 87
aagacgtgaatgatatgaacatgtc

SEQ ID NO: 53062 - DNA, 25 bp, Artificial
  probe
  misc_feature (1)..(25): SEQ ID NO: 4854; WAN024AFM_at; Start 59; Stop 83
ttgaaagacgtgaatgatatgaaca

SEQ ID NO: 53063 - DNA, 25 bp, Artificial
  probe
  misc_feature (1)..(25): SEQ ID NO: 4854; WAN024AFM_at; Start 51; Stop 75
ttttataattgaaagacgtgaatga

SEQ ID NO: 53064 - DNA, 25 bp, Artificial
  probe
  misc_feature (1)..(25): SEQ ID NO: 4854; WAN024AFM_at; Start 47; Stop 71
ttatttttataattgaaagacgtga

SEQ ID NO: 53065 - DNA, 25 bp, Artificial
  probe
  misc_feature (1)..(25): SEQ ID NO: 4854; WAN024AFM_at; Start 50; Stop 74
tttttataattgaaagacgtgaatg

SEQ ID NO: 53066 - DNA, 25 bp, Artificial
  probe
  misc_feature (1)..(25): SEQ ID NO: 4854; WAN024AFM_at; Start 112; Stop 136
tataagtatgtcaagtttaagaaaa

SEQ ID NO: 53067 - DNA, 25 bp, Artificial
  probe
  misc_feature (1)..(25): SEQ ID NO: 4854; WAN024AFM_at; Start 57; Stop 81
aattgaaagacgtgaatgatatgaa

SEQ ID NO: 53068 - DNA, 25 bp, Artificial
  probe
  misc_feature (1)..(25): SEQ ID NO: 4854; WAN024AFM_at; Start 64; Stop 88
agacgtgaatgatatgaacatgtcc

SEQ ID NO: 53069 - DNA, 25 bp, Artificial
  probe
  misc_feature (1)..(25): SEQ ID NO: 4854; WAN024AFM_at; Start 61; Stop 85
gaaagacgtgaatgatatgaacatg

SEQ ID NO: 53070 - DNA, 25 bp, Artificial
  probe
  misc_feature (1)..(25): SEQ ID NO: 4854; WAN024AFM_at; Start 137; Stop 161
acttgattgttggaggattttttag

SEQ ID NO: 53071 - DNA, 25 bp, Artificial
  probe
  misc_feature (1)..(25): SEQ ID NO: 4854; WAN024AFM_at; Start 26; Stop 50
agcaaaatatcttagggtattttat

SEQ ID NO: 53072 - DNA, 25 bp, Artificial
  probe
  misc_feature (1)..(25): SEQ ID NO: 4854; WAN024AFM_at; Start 68; Stop 92
gtgaatgatatgaacatgtccttgc

SEQ ID NO: 53073 - DNA, 25 bp, Artificial
  probe
  misc_feature (1)..(25): SEQ ID NO: 4854; WAN024AFM_at; Start 109; Stop 133
aattataagtatgtcaagtttaaga

SEQ ID NO: 53074 - DNA, 25 bp, Artificial
  probe
  misc_feature (1)..(25): SEQ ID NO: 4854; WAN024AFM_at; Start 129; Stop 153
taagaaaaacttgattgttggagga

SEQ ID NO: 53075 - DNA, 25 bp, Artificial
  probe
  misc_feature (1)..(25): SEQ ID NO: 4461; WAN024AFN_at; Start 3; Stop 27
caatcaacatggactattatatcat

SEQ ID NO: 53076 - DNA, 25 bp, Artificial
  probe
  misc_feature (1)..(25): SEQ ID NO: 4461; WAN024AFN_at; Start 7; Stop 31
caacatggactattatatcatgaaa

SEQ ID NO: 53077 - DNA, 25 bp, Artificial
  probe
  misc_feature (1)..(25): SEQ ID NO: 4461; WAN024AFN_at; Start 9; Stop 33
acatggactattatatcatgaaaat

SEQ ID NO: 53078 - DNA, 25 bp, Artificial
  probe
  misc_feature (1)..(25): SEQ ID NO: 4461; WAN024AFN_at; Start 23; Stop 47
atcatgaaaatttcaaaaaaacaag

SEQ ID NO: 53079 - DNA, 25 bp, Artificial
  probe
  misc_feature (1)..(25): SEQ ID NO: 4461; WAN024AFN_at; Start 8; Stop 32
aacatggactattatatcatgaaaa

SEQ ID NO: 53080 - DNA, 25 bp, Artificial
  probe
  misc_feature (1)..(25): SEQ ID NO: 4461; WAN024AFN_at; Start 10; Stop 34
catggactattatatcatgaaaatt

SEQ ID NO: 53081 - DNA, 25 bp, Artificial
  probe
  misc_feature (1)..(25): SEQ ID NO: 4461; WAN024AFN_at; Start 5; Stop 29
atcaacatggactattatatcatga

SEQ ID NO: 53082 - DNA, 25 bp, Artificial
  probe
  misc_feature (1)..(25): SEQ ID NO: 4461; WAN024AFN_at; Start 2; Stop 26
acaatcaacatggactattatatca

SEQ ID NO: 53083 - DNA, 25 bp, Artificial
  probe
  misc_feature (1)..(25): SEQ ID NO: 4461; WAN024AFN_at; Start 12; Stop 36
tggactattatatcatgaaaatttc

SEQ ID NO: 53084 - DNA, 25 bp, Artificial
  probe
  misc_feature (1)..(25): SEQ ID NO: 4461; WAN024AFN_at; Start 24; Stop 48
tcatgaaaatttcaaaaaaacaaga

SEQ ID NO: 53085 - DNA, 25 bp, Artificial
  probe
  misc_feature (1)..(25): SEQ ID NO: 4461; WAN024AFN_at; Start 6; Stop 30
tcaacatggactattatatcatgaa

SEQ ID NO: 53086 - DNA, 25 bp, Artificial
  probe
  misc_feature (1)..(25): SEQ ID NO: 4461; WAN024AFN_at; Start 1; Stop 25
tacaatcaacatggactattatatc

SEQ ID NO: 53087 - DNA, 25 bp, Artificial
  probe
  misc_feature (1)..(25): SEQ ID NO: 4461; WAN024AFN_at; Start 4; Stop 28
aatcaacatggactattatatcatg

SEQ ID NO: 53088 - DNA, 25 bp, Artificial
  probe
  misc_feature (1)..(25): SEQ ID NO: 4461; WAN024AFN_at; Start 11; Stop 35
atggactattatatcatgaaaattt

SEQ ID NO: 53089 - DNA, 25 bp, Artificial
  probe
  misc_feature (1)..(25): SEQ ID NO: 3830; WAN024AFO_at; Start 21; Stop 45
tcatgatataatagtccatgttgat

SEQ ID NO: 53090 - DNA, 25 bp, Artificial
  probe
  misc_feature (1)..(25): SEQ ID NO: 3830; WAN024AFO_at; Start 24; Stop 48
tgatataatagtccatgttgattgt

SEQ ID NO: 53091 - DNA, 25 bp, Artificial
  probe
  misc_feature (1)..(25): SEQ ID NO: 3830; WAN024AFO_at; Start 23; Stop 47
atgatataatagtccatgttgattg

SEQ ID NO: 53092 - DNA, 25 bp, Artificial
  probe
  misc_feature (1)..(25): SEQ ID NO: 3830; WAN024AFO_at; Start 20; Stop 44
ttcatgatataatagtccatgttga

SEQ ID NO: 53093 - DNA, 25 bp, Artificial
  probe
  misc_feature (1)..(25): SEQ ID NO: 3830; WAN024AFO_at; Start 17; Stop 41
attttcatgatataatagtccatgt

SEQ ID NO: 53094 - DNA, 25 bp, Artificial
  probe
  misc_feature (1)..(25): SEQ ID NO: 3830; WAN024AFO_at; Start 2; Stop 26
tcttgtttttttgaaattttcatga

SEQ ID NO: 53095 - DNA, 25 bp, Artificial
  probe
  misc_feature (1)..(25): SEQ ID NO: 3830; WAN024AFO_at; Start 25; Stop 49
gatataatagtccatgttgattgta

SEQ ID NO: 53096 - DNA, 25 bp, Artificial
  probe
  misc_feature (1)..(25): SEQ ID NO: 3830; WAN024AFO_at; Start 15; Stop 39
aaattttcatgatataatagtccat

SEQ ID NO: 53097 - DNA, 25 bp, Artificial
  probe
  misc_feature (1)..(25): SEQ ID NO: 3830; WAN024AFO_at; Start 18; Stop 42
ttttcatgatataatagtccatgtt

SEQ ID NO: 53098 - DNA, 25 bp, Artificial
  probe
  misc_feature (1)..(25): SEQ ID NO: 3830; WAN024AFO_at; Start 19; Stop 43
tttcatgatataatagtccatgttg

SEQ ID NO: 53099 - DNA, 25 bp, Artificial
  probe
  misc_feature (1)..(25): SEQ ID NO: 3830; WAN024AFO_at; Start 16; Stop 40
aattttcatgatataatagtccatg

SEQ ID NO: 53100 - DNA, 25 bp, Artificial
  probe
  misc_feature (1)..(25): SEQ ID NO: 3830; WAN024AFO_at; Start 22; Stop 46
catgatataatagtccatgttgatt

SEQ ID NO: 53101 - DNA, 25 bp, Artificial
  probe
  misc_feature (1)..(25): SEQ ID NO: 3830; WAN024AFO_at; Start 14; Stop 38
gaaattttcatgatataatagtcca

SEQ ID NO: 53102 - DNA, 25 bp, Artificial
  probe
  misc_feature (1)..(25): SEQ ID NO: 4429; WAN024AFP_at; Start 75; Stop 99
taaaactctatatcagagaagcctg

SEQ ID NO: 53103 - DNA, 25 bp, Artificial
  probe
  misc_feature (1)..(25): SEQ ID NO: 4429; WAN024AFP_at; Start 87; Stop 111
tcagagaagcctgatatagagtttt

SEQ ID NO: 53104 - DNA, 25 bp, Artificial
  probe
  misc_feature (1)..(25): SEQ ID NO: 4429; WAN024AFP_at; Start 94; Stop 118
agcctgatatagagttttttcttgc

SEQ ID NO: 53105 - DNA, 25 bp, Artificial
  probe
  misc_feature (1)..(25): SEQ ID NO: 4429; WAN024AFP_at; Start 60; Stop 84
ttgaggttgtttacataaaactcta

SEQ ID NO: 53106 - DNA, 25 bp, Artificial
  probe
  misc_feature (1)..(25): SEQ ID NO: 4429; WAN024AFP_at; Start 141; Stop 165
aatagaaaaagtgaagagaggtatg

SEQ ID NO: 53107 - DNA, 25 bp, Artificial
  probe
  misc_feature (1)..(25): SEQ ID NO: 4429; WAN024AFP_at; Start 76; Stop 100
aaaactctatatcagagaagcctga

SEQ ID NO: 53108 - DNA, 25 bp, Artificial
  probe
  misc_feature (1)..(25): SEQ ID NO: 4429; WAN024AFP_at; Start 68; Stop 92
gtttacataaaactctatatcagag

SEQ ID NO: 53109 - DNA, 25 bp, Artificial
  probe
  misc_feature (1)..(25): SEQ ID NO: 4429; WAN024AFP_at; Start 90; Stop 114
gagaagcctgatatagagttttttc

SEQ ID NO: 53110 - DNA, 25 bp, Artificial
  probe
  misc_feature (1)..(25): SEQ ID NO: 4429; WAN024AFP_at; Start 6; Stop 30
taaaaaggatagtcaattatgcttg

SEQ ID NO: 53111 - DNA, 25 bp, Artificial
  probe
  misc_feature (1)..(25): SEQ ID NO: 4429; WAN024AFP_at; Start 33; Stop 57
tactaactattaactatgctaaatc

SEQ ID NO: 53112 - DNA, 25 bp, Artificial
  probe
  misc_feature (1)..(25): SEQ ID NO: 4429; WAN024AFP_at; Start 30; Stop 54
gtttactaactattaactatgctaa

SEQ ID NO: 53113 - DNA, 25 bp, Artificial
  probe
  misc_feature (1)..(25): SEQ ID NO: 4429; WAN024AFP_at; Start 12; Stop 36
ggatagtcaattatgcttgtttact

SEQ ID NO: 53114 - DNA, 25 bp, Artificial
  probe
  misc_feature (1)..(25): SEQ ID NO: 4429; WAN024AFP_at; Start 92; Stop 116
gaagcctgatatagagttttttctt

SEQ ID NO: 53115 - DNA, 25 bp, Artificial
  probe
  misc_feature (1)..(25): SEQ ID NO: 4429; WAN024AFP_at; Start 78; Stop 102
aactctatatcagagaagcctgata

SEQ ID NO: 53116 - DNA, 25 bp, Artificial
  probe
  misc_feature (1)..(25): SEQ ID NO: 4429; WAN024AFP_at; Start 77; Stop 101
aaactctatatcagagaagcctgat

SEQ ID NO: 53117 - DNA, 25 bp, Artificial
  probe
  misc_feature (1)..(25): SEQ ID NO: 4429; WAN024AFP_at; Start 143; Stop 167
tagaaaaagtgaagagaggtatgaa

SEQ ID NO: 53118 - DNA, 25 bp, Artificial
  probe
  misc_feature (1)..(25): SEQ ID NO: 4429; WAN024AFP_at; Start 79; Stop 103
actctatatcagagaagcctgatat

SEQ ID NO: 53119 - DNA, 25 bp, Artificial
  probe
  misc_feature (1)..(25): SEQ ID NO: 4429; WAN024AFP_at; Start 26; Stop 50
gcttgtttactaactattaactatg

SEQ ID NO: 53120 - DNA, 25 bp, Artificial
  probe
  misc_feature (1)..(25): SEQ ID NO: 4429; WAN024AFP_at; Start 88; Stop 112
cagagaagcctgatatagagttttt

SEQ ID NO: 53121 - DNA, 25 bp, Artificial
  probe
  misc_feature (1)..(25): SEQ ID NO: 4429; WAN024AFP_at; Start 11; Stop 35
aggatagtcaattatgcttgtttac

SEQ ID NO: 53122 - DNA, 25 bp, Artificial
  probe
  misc_feature (1)..(25): SEQ ID NO: 4429; WAN024AFP_at; Start 71; Stop 95
tacataaaactctatatcagagaag

SEQ ID NO: 53123 - DNA, 25 bp, Artificial
  probe
  misc_feature (1)..(25): SEQ ID NO: 4429; WAN024AFP_at; Start 15; Stop 39
tagtcaattatgcttgtttactaac

SEQ ID NO: 53124 - DNA, 25 bp, Artificial
  probe
  misc_feature (1)..(25): SEQ ID NO: 4429; WAN024AFP_at; Start 96; Stop 120
cctgatatagagttttttcttgcta

SEQ ID NO: 53125 - DNA, 25 bp, Artificial
  probe
  misc_feature (1)..(25): SEQ ID NO: 4429; WAN024AFP_at; Start 64; Stop 88
ggttgtttacataaaactctatatc

SEQ ID NO: 53126 - DNA, 25 bp, Artificial
  probe
  misc_feature (1)..(25): SEQ ID NO: 4429; WAN024AFP_at; Start 97; Stop 121
ctgatatagagttttttcttgctag

SEQ ID NO: 53127 - DNA, 25 bp, Artificial
  probe
  misc_feature (1)..(25): SEQ ID NO: 4429; WAN024AFP_at; Start 99; Stop 123
gatatagagttttttcttgctagtt

SEQ ID NO: 53128 - DNA, 25 bp, Artificial
  probe
  misc_feature (1)..(25): SEQ ID NO: 4429; WAN024AFP_at; Start 85; Stop 109
tatcagagaagcctgatatagagtt

SEQ ID NO: 53129 - DNA, 25 bp, Artificial
  probe
  misc_feature (1)..(25): SEQ ID NO: 4429; WAN024AFP_at; Start 7; Stop 31
aaaaaggatagtcaattatgcttgt

SEQ ID NO: 53130 - DNA, 25 bp, Artificial
  probe
  misc_feature (1)..(25): SEQ ID NO: 4429; WAN024AFP_at; Start 27; Stop 51
cttgtttactaactattaactatgc

SEQ ID NO: 53131 - DNA, 25 bp, Artificial
  probe
  misc_feature (1)..(25): SEQ ID NO: 4429; WAN024AFP_at; Start 73; Stop 97
cataaaactctatatcagagaagcc

SEQ ID NO: 53132 - DNA, 25 bp, Artificial
  probe
  misc_feature (1)..(25): SEQ ID NO: 4429; WAN024AFP_at; Start 4; Stop 28
cctaaaaaggatagtcaattatgct

SEQ ID NO: 53133 - DNA, 25 bp, Artificial
  probe
  misc_feature (1)..(25): SEQ ID NO: 4429; WAN024AFP_at; Start 62; Stop 86
gaggttgtttacataaaactctata

SEQ ID NO: 53134 - DNA, 25 bp, Artificial
  probe
  misc_feature (1)..(25): SEQ ID NO: 4429; WAN024AFP_at; Start 17; Stop 41
gtcaattatgcttgtttactaacta

SEQ ID NO: 53135 - DNA, 25 bp, Artificial
  probe
  misc_feature (1)..(25): SEQ ID NO: 4429; WAN024AFP_at; Start 3; Stop 27
acctaaaaaggatagtcaattatgc

SEQ ID NO: 53136 - DNA, 25 bp, Artificial
  probe
  misc_feature (1)..(25): SEQ ID NO: 4825; WAN024AFQ_at; Start 54; Stop 78
gaaaaaactctatatcaggcttctc

SEQ ID NO: 53137 - DNA, 25 bp, Artificial
  probe
  misc_feature (1)..(25): SEQ ID NO: 4825; WAN024AFQ_at; Start 127; Stop 151
tagttagtaaacaagcataattgac

SEQ ID NO: 53138 - DNA, 25 bp, Artificial
  probe
  misc_feature (1)..(25): SEQ ID NO: 4825; WAN024AFQ_at; Start 51; Stop 75
caagaaaaaactctatatcaggctt

SEQ ID NO: 53139 - DNA, 25 bp, Artificial
  probe
  misc_feature (1)..(25): SEQ ID NO: 4825; WAN024AFQ_at; Start 84; Stop 108
tagagttttatgtaaacaacctcaa

SEQ ID NO: 53140 - DNA, 25 bp, Artificial
  probe
  misc_feature (1)..(25): SEQ ID NO: 4825; WAN024AFQ_at; Start 1; Stop 25
ttcatacctctcttcactttttcta

SEQ ID NO: 53141 - DNA, 25 bp, Artificial
  probe
  misc_feature (1)..(25): SEQ ID NO: 4825; WAN024AFQ_at; Start 76; Stop 100
ctctgatatagagttttatgtaaac

SEQ ID NO: 53142 - DNA, 25 bp, Artificial
  probe
  misc_feature (1)..(25): SEQ ID NO: 4825; WAN024AFQ_at; Start 57; Stop 81
aaaactctatatcaggcttctctga

SEQ ID NO: 53143 - DNA, 25 bp, Artificial
  probe
  misc_feature (1)..(25): SEQ ID NO: 4825; WAN024AFQ_at; Start 111; Stop 135
gatttagcatagttaatagttagta

SEQ ID NO: 53144 - DNA, 25 bp, Artificial
  probe
  misc_feature (1)..(25): SEQ ID NO: 4825; WAN024AFQ_at; Start 82; Stop 106
tatagagttttatgtaaacaacctc

SEQ ID NO: 53145 - DNA, 25 bp, Artificial
  probe
  misc_feature (1)..(25): SEQ ID NO: 4825; WAN024AFQ_at; Start 140; Stop 164
agcataattgactatcctttttagg

SEQ ID NO: 53146 - DNA, 25 bp, Artificial
  probe
  misc_feature (1)..(25): SEQ ID NO: 4825; WAN024AFQ_at; Start 132; Stop 156
agtaaacaagcataattgactatcc

SEQ ID NO: 53147 - DNA, 25 bp, Artificial
  probe
  misc_feature (1)..(25): SEQ ID NO: 4825; WAN024AFQ_at; Start 128; Stop 152
agttagtaaacaagcataattgact

SEQ ID NO: 53148 - DNA, 25 bp, Artificial
  probe
  misc_feature (1)..(25): SEQ ID NO: 4825; WAN024AFQ_at; Start 118; Stop 142
catagttaatagttagtaaacaagc

SEQ ID NO: 53149 - DNA, 25 bp, Artificial
  probe
  misc_feature (1)..(25): SEQ ID NO: 4825; WAN024AFQ_at; Start 133; Stop 157
gtaaacaagcataattgactatcct

SEQ ID NO: 53150 - DNA, 25 bp, Artificial
  probe
  misc_feature (1)..(25): SEQ ID NO: 4825; WAN024AFQ_at; Start 134; Stop 158
taaacaagcataattgactatcctt

SEQ ID NO: 53151 - DNA, 25 bp, Artificial
  probe
  misc_feature (1)..(25): SEQ ID NO: 4825; WAN024AFQ_at; Start 141; Stop 165
gcataattgactatcctttttaggt

SEQ ID NO: 53152 - DNA, 25 bp, Artificial
  probe
  misc_feature (1)..(25): SEQ ID NO: 4825; WAN024AFQ_at; Start 58; Stop 82
aaactctatatcaggcttctctgat

SEQ ID NO: 53153 - DNA, 25 bp, Artificial
  probe
  misc_feature (1)..(25): SEQ ID NO: 4825; WAN024AFQ_at; Start 115; Stop 139
tagcatagttaatagttagtaaaca

SEQ ID NO: 53154 - DNA, 25 bp, Artificial
  probe
  misc_feature (1)..(25): SEQ ID NO: 4825; WAN024AFQ_at; Start 52; Stop 76
aagaaaaaactctatatcaggcttc

SEQ ID NO: 53155 - DNA, 25 bp, Artificial
  probe
  misc_feature (1)..(25): SEQ ID NO: 4825; WAN024AFQ_at; Start 66; Stop 90
tatcaggcttctctgatatagagtt

SEQ ID NO: 53156 - DNA, 25 bp, Artificial
  probe
  misc_feature (1)..(25): SEQ ID NO: 4825; WAN024AFQ_at; Start 138; Stop 162
caagcataattgactatccttttta

SEQ ID NO: 53157 - DNA, 25 bp, Artificial
  probe
  misc_feature (1)..(25): SEQ ID NO: 4825; WAN024AFQ_at; Start 50; Stop 74
gcaagaaaaaactctatatcaggct

SEQ ID NO: 53158 - DNA, 25 bp, Artificial
  probe
  misc_feature (1)..(25): SEQ ID NO: 4825; WAN024AFQ_at; Start 85; Stop 109
agagttttatgtaaacaacctcaat

SEQ ID NO: 53159 - DNA, 25 bp, Artificial
  probe
  misc_feature (1)..(25): SEQ ID NO: 4825; WAN024AFQ_at; Start 48; Stop 72
tagcaagaaaaaactctatatcagg

SEQ ID NO: 53160 - DNA, 25 bp, Artificial
  probe
  misc_feature (1)..(25): SEQ ID NO: 4825; WAN024AFQ_at; Start 59; Stop 83
aactctatatcaggcttctctgata

SEQ ID NO: 53161 - DNA, 25 bp, Artificial
  probe
  misc_feature (1)..(25): SEQ ID NO: 4825; WAN024AFQ_at; Start 71; Stop 95
ggcttctctgatatagagttttatg

SEQ ID NO: 53162 - DNA, 25 bp, Artificial
  probe
  misc_feature (1)..(25): SEQ ID NO: 4825; WAN024AFQ_at; Start 64; Stop 88
tatatcaggcttctctgatatagag

SEQ ID NO: 53163 - DNA, 25 bp, Artificial
  probe
  misc_feature (1)..(25): SEQ ID NO: 4825; WAN024AFQ_at; Start 8; Stop 32
ctctcttcactttttctattttaca

SEQ ID NO: 53164 - DNA, 25 bp, Artificial
  probe
  misc_feature (1)..(25): SEQ ID NO: 4825; WAN024AFQ_at; Start 120; Stop 144
tagttaatagttagtaaacaagcat

SEQ ID NO: 53165 - DNA, 25 bp, Artificial
  probe
  misc_feature (1)..(25): SEQ ID NO: 4825; WAN024AFQ_at; Start 80; Stop 104
gatatagagttttatgtaaacaacc

SEQ ID NO: 53166 - DNA, 25 bp, Artificial
  probe
  misc_feature (1)..(25): SEQ ID NO: 4825; WAN024AFQ_at; Start 68; Stop 92
tcaggcttctctgatatagagtttt

SEQ ID NO: 53167 - DNA, 25 bp, Artificial
  probe
  misc_feature (1)..(25): SEQ ID NO: 4825; WAN024AFQ_at; Start 56; Stop 80
aaaaactctatatcaggcttctctg

SEQ ID NO: 53168 - DNA, 25 bp, Artificial
  probe
  misc_feature (1)..(25): SEQ ID NO: 4825; WAN024AFQ_at; Start 69; Stop 93
caggcttctctgatatagagtttta

SEQ ID NO: 53169 - DNA, 25 bp, Artificial
  probe
  misc_feature (1)..(25): SEQ ID NO: 4825; WAN024AFQ_at; Start 142; Stop 166
cataattgactatcctttttaggtt

SEQ ID NO: 53170 - DNA, 25 bp, Artificial
  probe
  misc_feature (1)..(25): SEQ ID NO: 3309; WAN024AFR_at; Start 13; Stop 37
agagccactttttctatttcataaa

SEQ ID NO: 53171 - DNA, 25 bp, Artificial
  probe
  misc_feature (1)..(25): SEQ ID NO: 3309; WAN024AFR_at; Start 4; Stop 28
ctgctgttaagagccactttttcta

SEQ ID NO: 53172 - DNA, 25 bp, Artificial
  probe
  misc_feature (1)..(25): SEQ ID NO: 3309; WAN024AFR_at; Start 12; Stop 36
aagagccactttttctatttcataa

SEQ ID NO: 53173 - DNA, 25 bp, Artificial
  probe
  misc_feature (1)..(25): SEQ ID NO: 3309; WAN024AFR_at; Start 1; Stop 25
ctcctgctgttaagagccacttttt

SEQ ID NO: 53174 - DNA, 25 bp, Artificial
  probe
  misc_feature (1)..(25): SEQ ID NO: 3309; WAN024AFR_at; Start 3; Stop 27
cctgctgttaagagccactttttct

SEQ ID NO: 53175 - DNA, 25 bp, Artificial
  probe
  misc_feature (1)..(25): SEQ ID NO: 3309; WAN024AFR_at; Start 6; Stop 30
gctgttaagagccactttttctatt

SEQ ID NO: 53176 - DNA, 25 bp, Artificial
  probe
  misc_feature (1)..(25): SEQ ID NO: 3309; WAN024AFR_at; Start 2; Stop 26
tcctgctgttaagagccactttttc

SEQ ID NO: 53177 - DNA, 25 bp, Artificial
  probe
  misc_feature (1)..(25): SEQ ID NO: 3309; WAN024AFR_at; Start 11; Stop 35
taagagccactttttctatttcata

SEQ ID NO: 53178 - DNA, 25 bp, Artificial
  probe
  misc_feature (1)..(25): SEQ ID NO: 3309; WAN024AFR_at; Start 7; Stop 31
ctgttaagagccactttttctattt

SEQ ID NO: 53179 - DNA, 25 bp, Artificial
  probe
  misc_feature (1)..(25): SEQ ID NO: 3309; WAN024AFR_at; Start 5; Stop 29
tgctgttaagagccactttttctat

SEQ ID NO: 53180 - DNA, 25 bp, Artificial
  probe
  misc_feature (1)..(25): SEQ ID NO: 3309; WAN024AFR_at; Start 10; Stop 34
ttaagagccactttttctatttcat

SEQ ID NO: 53181 - DNA, 25 bp, Artificial
  probe
  misc_feature (1)..(25): SEQ ID NO: 3309; WAN024AFR_at; Start 8; Stop 32
tgttaagagccactttttctatttc

SEQ ID NO: 53182 - DNA, 25 bp, Artificial
  probe
  misc_feature (1)..(25): SEQ ID NO: 3309; WAN024AFR_at; Start 9; Stop 33
gttaagagccactttttctatttca

SEQ ID NO: 53183 - DNA, 25 bp, Artificial
  probe
  misc_feature (1)..(25): SEQ ID NO: 252; WAN024AFS_at; Start 23; Stop 47
atgaaatagaaaaagtggctcttaa

SEQ ID NO: 53184 - DNA, 25 bp, Artificial
  probe
  misc_feature (1)..(25): SEQ ID NO: 252; WAN024AFS_at; Start 28; Stop 52
atagaaaaagtggctcttaacagca

SEQ ID NO: 53185 - DNA, 25 bp, Artificial
  probe
  misc_feature (1)..(25): SEQ ID NO: 252; WAN024AFS_at; Start 25; Stop 49
gaaatagaaaaagtggctcttaaca

SEQ ID NO: 53186 - DNA, 25 bp, Artificial
  probe
  misc_feature (1)..(25): SEQ ID NO: 252; WAN024AFS_at; Start 32; Stop 56
aaaaagtggctcttaacagcaggag

SEQ ID NO: 53187 - DNA, 25 bp, Artificial
  probe
  misc_feature (1)..(25): SEQ ID NO: 252; WAN024AFS_at; Start 31; Stop 55
gaaaaagtggctcttaacagcagga

SEQ ID NO: 53188 - DNA, 25 bp, Artificial
  probe
  misc_feature (1)..(25): SEQ ID NO: 252; WAN024AFS_at; Start 27; Stop 51
aatagaaaaagtggctcttaacagc

SEQ ID NO: 53189 - DNA, 25 bp, Artificial
  probe
  misc_feature (1)..(25): SEQ ID NO: 252; WAN024AFS_at; Start 26; Stop 50
aaatagaaaaagtggctcttaacag

SEQ ID NO: 53190 - DNA, 25 bp, Artificial
  probe
  misc_feature (1)..(25): SEQ ID NO: 252; WAN024AFS_at; Start 30; Stop 54
agaaaaagtggctcttaacagcagg

SEQ ID NO: 53191 - DNA, 25 bp, Artificial
  probe
  misc_feature (1)..(25): SEQ ID NO: 252; WAN024AFS_at; Start 22; Stop 46
tatgaaatagaaaaagtggctctta

SEQ ID NO: 53192 - DNA, 25 bp, Artificial
  probe
  misc_feature (1)..(25): SEQ ID NO: 252; WAN024AFS_at; Start 24; Stop 48
tgaaatagaaaaagtggctcttaac

SEQ ID NO: 53193 - DNA, 25 bp, Artificial
  probe
  misc_feature (1)..(25): SEQ ID NO: 252; WAN024AFS_at; Start 20; Stop 44
tttatgaaatagaaaaagtggctct

SEQ ID NO: 53194 - DNA, 25 bp, Artificial
  probe
  misc_feature (1)..(25): SEQ ID NO: 252; WAN024AFS_at; Start 29; Stop 53
tagaaaaagtggctcttaacagcag

SEQ ID NO: 53195 - DNA, 25 bp, Artificial
  probe
  misc_feature (1)..(25): SEQ ID NO: 252; WAN024AFS_at; Start 21; Stop 45
ttatgaaatagaaaaagtggctctt

SEQ ID NO: 53196 - DNA, 25 bp, Artificial
  probe
  misc_feature (1)..(25): SEQ ID NO: 3147; WAN024AFT_at; Start 51; Stop 75
ctaaaatagcaagtatattttgtaa

SEQ ID NO: 53197 - DNA, 25 bp, Artificial
  probe
  misc_feature (1)..(25): SEQ ID NO: 3147; WAN024AFT_at; Start 107; Stop 131
tcttagaactgattcttcatttcac

SEQ ID NO: 53198 - DNA, 25 bp, Artificial
  probe
  misc_feature (1)..(25): SEQ ID NO: 3147; WAN024AFT_at; Start 101; Stop 125
accaactcttagaactgattcttca

SEQ ID NO: 53199 - DNA, 25 bp, Artificial
  probe
  misc_feature (1)..(25): SEQ ID NO: 3147; WAN024AFT_at; Start 32; Stop 56
tatattctacactatttttctaaaa

SEQ ID NO: 53200 - DNA, 25 bp, Artificial
  probe
  misc_feature (1)..(25): SEQ ID NO: 3147; WAN024AFT_at; Start 95; Stop 119
ataaaaaccaactcttagaactgat

SEQ ID NO: 53201 - DNA, 25 bp, Artificial
  probe
  misc_feature (1)..(25): SEQ ID NO: 3147; WAN024AFT_at; Start 57; Stop 81
tagcaagtatattttgtaattttca

SEQ ID NO: 53202 - DNA, 25 bp, Artificial
  probe
  misc_feature (1)..(25): SEQ ID NO: 3147; WAN024AFT_at; Start 104; Stop 128
aactcttagaactgattcttcattt

SEQ ID NO: 53203 - DNA, 25 bp, Artificial
  probe
  misc_feature (1)..(25): SEQ ID NO: 3147; WAN024AFT_at; Start 40; Stop 64
acactatttttctaaaatagcaagt

SEQ ID NO: 53204 - DNA, 25 bp, Artificial
  probe
  misc_feature (1)..(25): SEQ ID NO: 3147; WAN024AFT_at; Start 50; Stop 74
tctaaaatagcaagtatattttgta

SEQ ID NO: 53205 - DNA, 25 bp, Artificial
  probe
  misc_feature (1)..(25): SEQ ID NO: 3147; WAN024AFT_at; Start 43; Stop 67
ctatttttctaaaatagcaagtata

SEQ ID NO: 53206 - DNA, 25 bp, Artificial
  probe
  misc_feature (1)..(25): SEQ ID NO: 3147; WAN024AFT_at; Start 100; Stop 124
aaccaactcttagaactgattcttc

SEQ ID NO: 53207 - DNA, 25 bp, Artificial
  probe
  misc_feature (1)..(25): SEQ ID NO: 3147; WAN024AFT_at; Start 93; Stop 117
caataaaaaccaactcttagaactg

SEQ ID NO: 53208 - DNA, 25 bp, Artificial
  probe
  misc_feature (1)..(25): SEQ ID NO: 3147; WAN024AFT_at; Start 36; Stop 60
ttctacactatttttctaaaatagc

SEQ ID NO: 53209 - DNA, 25 bp, Artificial
  probe
  misc_feature (1)..(25): SEQ ID NO: 3147; WAN024AFT_at; Start 48; Stop 72
tttctaaaatagcaagtatattttg

SEQ ID NO: 53210 - DNA, 25 bp, Artificial
  probe
  misc_feature (1)..(25): SEQ ID NO: 3147; WAN024AFT_at; Start 23; Stop 47
cctatttcttatattctacactatt

SEQ ID NO: 53211 - DNA, 25 bp, Artificial
  probe
  misc_feature (1)..(25): SEQ ID NO: 3147; WAN024AFT_at; Start 99; Stop 123
aaaccaactcttagaactgattctt

SEQ ID NO: 53212 - DNA, 25 bp, Artificial
  probe
  misc_feature (1)..(25): SEQ ID NO: 3147; WAN024AFT_at; Start 102; Stop 126
ccaactcttagaactgattcttcat

SEQ ID NO: 53213 - DNA, 25 bp, Artificial
  probe
  misc_feature (1)..(25): SEQ ID NO: 3147; WAN024AFT_at; Start 44; Stop 68
tatttttctaaaatagcaagtatat

SEQ ID NO: 53214 - DNA, 25 bp, Artificial
  probe
  misc_feature (1)..(25): SEQ ID NO: 3147; WAN024AFT_at; Start 37; Stop 61
tctacactatttttctaaaatagca

SEQ ID NO: 53215 - DNA, 25 bp, Artificial
  probe
  misc_feature (1)..(25): SEQ ID NO: 3147; WAN024AFT_at; Start 105; Stop 129
actcttagaactgattcttcatttc

SEQ ID NO: 53216 - DNA, 25 bp, Artificial
  probe
  misc_feature (1)..(25): SEQ ID NO: 3147; WAN024AFT_at; Start 103; Stop 127
caactcttagaactgattcttcatt

SEQ ID NO: 53217 - DNA, 25 bp, Artificial
  probe
  misc_feature (1)..(25): SEQ ID NO: 3147; WAN024AFT_at; Start 106; Stop 130
ctcttagaactgattcttcatttca

SEQ ID NO: 53218 - DNA, 25 bp, Artificial
  probe
  misc_feature (1)..(25): SEQ ID NO: 3147; WAN024AFT_at; Start 59; Stop 83
gcaagtatattttgtaattttcaga

SEQ ID NO: 53219 - DNA, 25 bp, Artificial
  probe
  misc_feature (1)..(25): SEQ ID NO: 3147; WAN024AFT_at; Start 29; Stop 53
tcttatattctacactatttttcta

SEQ ID NO: 53220 - DNA, 25 bp, Artificial
  probe
  misc_feature (1)..(25): SEQ ID NO: 3147; WAN024AFT_at; Start 60; Stop 84
caagtatattttgtaattttcagaa

SEQ ID NO: 53221 - DNA, 25 bp, Artificial
  probe
  misc_feature (1)..(25): SEQ ID NO: 3147; WAN024AFT_at; Start 58; Stop 82
agcaagtatattttgtaattttcag

SEQ ID NO: 53222 - DNA, 25 bp, Artificial
  probe
  misc_feature (1)..(25): SEQ ID NO: 3147; WAN024AFT_at; Start 98; Stop 122
aaaaccaactcttagaactgattct

SEQ ID NO: 53223 - DNA, 25 bp, Artificial
  probe
  misc_feature (1)..(25): SEQ ID NO: 3147; WAN024AFT_at; Start 24; Stop 48
ctatttcttatattctacactattt

SEQ ID NO: 53224 - DNA, 25 bp, Artificial
  probe
  misc_feature (1)..(25): SEQ ID NO: 3147; WAN024AFT_at; Start 41; Stop 65
cactatttttctaaaatagcaagta

SEQ ID NO: 53225 - DNA, 25 bp, Artificial
  probe
  misc_feature (1)..(25): SEQ ID NO: 3147; WAN024AFT_at; Start 30; Stop 54
cttatattctacactatttttctaa

SEQ ID NO: 53226 - DNA, 25 bp, Artificial
  probe
  misc_feature (1)..(25): SEQ ID NO: 3147; WAN024AFT_at; Start 38; Stop 62
ctacactatttttctaaaatagcaa

SEQ ID NO: 53227 - DNA, 25 bp, Artificial
  probe
  misc_feature (1)..(25): SEQ ID NO: 3147; WAN024AFT_at; Start 39; Stop 63
tacactatttttctaaaatagcaag

SEQ ID NO: 53228 - DNA, 25 bp, Artificial
  probe
  misc_feature (1)..(25): SEQ ID NO: 3147; WAN024AFT_at; Start 45; Stop 69
atttttctaaaatagcaagtatatt

SEQ ID NO: 53229 - DNA, 25 bp, Artificial
  probe
  misc_feature (1)..(25): SEQ ID NO: 3147; WAN024AFT_at; Start 49; Stop 73
ttctaaaatagcaagtatattttgt

SEQ ID NO: 53230 - DNA, 25 bp, Artificial
  probe
  misc_feature (1)..(25): SEQ ID NO: 3872; WAN024AFU_at; Start 87; Stop 111
tagtgtagaatataagaaataggtt

SEQ ID NO: 53231 - DNA, 25 bp, Artificial
  probe
  misc_feature (1)..(25): SEQ ID NO: 3872; WAN024AFU_at; Start 13; Stop 37
atcagttctaagagttggtttttat

SEQ ID NO: 53232 - DNA, 25 bp, Artificial
  probe
  misc_feature (1)..(25): SEQ ID NO: 3872; WAN024AFU_at; Start 88; Stop 112
agtgtagaatataagaaataggttt

SEQ ID NO: 53233 - DNA, 25 bp, Artificial
  probe
  misc_feature (1)..(25): SEQ ID NO: 3872; WAN024AFU_at; Start 4; Stop 28
aaatgaagaatcagttctaagagtt

SEQ ID NO: 53234 - DNA, 25 bp, Artificial
  probe
  misc_feature (1)..(25): SEQ ID NO: 3872; WAN024AFU_at; Start 8; Stop 32
gaagaatcagttctaagagttggtt

SEQ ID NO: 53235 - DNA, 25 bp, Artificial
  probe
  misc_feature (1)..(25): SEQ ID NO: 3872; WAN024AFU_at; Start 69; Stop 93
cttgctattttagaaaaatagtgta

SEQ ID NO: 53236 - DNA, 25 bp, Artificial
  probe
  misc_feature (1)..(25): SEQ ID NO: 3872; WAN024AFU_at; Start 58; Stop 82
tacaaaatatacttgctattttaga

SEQ ID NO: 53237 - DNA, 25 bp, Artificial
  probe
  misc_feature (1)..(25): SEQ ID NO: 3872; WAN024AFU_at; Start 68; Stop 92
acttgctattttagaaaaatagtgt

SEQ ID NO: 53238 - DNA, 25 bp, Artificial
  probe
  misc_feature (1)..(25): SEQ ID NO: 3872; WAN024AFU_at; Start 52; Stop 76
gaaaattacaaaatatacttgctat

SEQ ID NO: 53239 - DNA, 25 bp, Artificial
  probe
  misc_feature (1)..(25): SEQ ID NO: 3872; WAN024AFU_at; Start 9; Stop 33
aagaatcagttctaagagttggttt

SEQ ID NO: 53240 - DNA, 25 bp, Artificial
  probe
  misc_feature (1)..(25): SEQ ID NO: 3872; WAN024AFU_at; Start 5; Stop 29
aatgaagaatcagttctaagagttg

SEQ ID NO: 53241 - DNA, 25 bp, Artificial
  probe
  misc_feature (1)..(25): SEQ ID NO: 3872; WAN024AFU_at; Start 60; Stop 84
caaaatatacttgctattttagaaa

SEQ ID NO: 53242 - DNA, 25 bp, Artificial
  probe
  misc_feature (1)..(25): SEQ ID NO: 3872; WAN024AFU_at; Start 74; Stop 98
tattttagaaaaatagtgtagaata

SEQ ID NO: 53243 - DNA, 25 bp, Artificial
  probe
  misc_feature (1)..(25): SEQ ID NO: 3872; WAN024AFU_at; Start 1; Stop 25
gtgaaatgaagaatcagttctaaga

SEQ ID NO: 53244 - DNA, 25 bp, Artificial
  probe
  misc_feature (1)..(25): SEQ ID NO: 3872; WAN024AFU_at; Start 59; Stop 83
acaaaatatacttgctattttagaa

SEQ ID NO: 53245 - DNA, 25 bp, Artificial
  probe
  misc_feature (1)..(25): SEQ ID NO: 3872; WAN024AFU_at; Start 15; Stop 39
cagttctaagagttggtttttattg

SEQ ID NO: 53246 - DNA, 25 bp, Artificial
  probe
  misc_feature (1)..(25): SEQ ID NO: 3872; WAN024AFU_at; Start 57; Stop 81
ttacaaaatatacttgctattttag

SEQ ID NO: 53247 - DNA, 25 bp, Artificial
  probe
  misc_feature (1)..(25): SEQ ID NO: 3872; WAN024AFU_at; Start 65; Stop 89
tatacttgctattttagaaaaatag

SEQ ID NO: 53248 - DNA, 25 bp, Artificial
  probe
  misc_feature (1)..(25): SEQ ID NO: 3872; WAN024AFU_at; Start 63; Stop 87
aatatacttgctattttagaaaaat

SEQ ID NO: 53249 - DNA, 25 bp, Artificial
  probe
  misc_feature (1)..(25): SEQ ID NO: 3872; WAN024AFU_at; Start 70; Stop 94
ttgctattttagaaaaatagtgtag

SEQ ID NO: 53250 - DNA, 25 bp, Artificial
  probe
  misc_feature (1)..(25): SEQ ID NO: 3872; WAN024AFU_at; Start 71; Stop 95
tgctattttagaaaaatagtgtaga

SEQ ID NO: 53251 - DNA, 25 bp, Artificial
  probe
  misc_feature (1)..(25): SEQ ID NO: 3872; WAN024AFU_at; Start 73; Stop 97
ctattttagaaaaatagtgtagaat

SEQ ID NO: 53252 - DNA, 25 bp, Artificial
  probe
  misc_feature (1)..(25): SEQ ID NO: 3872; WAN024AFU_at; Start 2; Stop 26
tgaaatgaagaatcagttctaagag

SEQ ID NO: 53253 - DNA, 25 bp, Artificial
  probe
  misc_feature (1)..(25): SEQ ID NO: 3872; WAN024AFU_at; Start 53; Stop 77
aaaattacaaaatatacttgctatt

SEQ ID NO: 53254 - DNA, 25 bp, Artificial
  probe
  misc_feature (1)..(25): SEQ ID NO: 3872; WAN024AFU_at; Start 7; Stop 31
tgaagaatcagttctaagagttggt

SEQ ID NO: 53255 - DNA, 25 bp, Artificial
  probe
  misc_feature (1)..(25): SEQ ID NO: 3872; WAN024AFU_at; Start 51; Stop 75
tgaaaattacaaaatatacttgcta

SEQ ID NO: 53256 - DNA, 25 bp, Artificial
  probe
  misc_feature (1)..(25): SEQ ID NO: 3872; WAN024AFU_at; Start 54; Stop 78
aaattacaaaatatacttgctattt

SEQ ID NO: 53257 - DNA, 25 bp, Artificial
  probe
  misc_feature (1)..(25): SEQ ID NO: 3872; WAN024AFU_at; Start 67; Stop 91
tacttgctattttagaaaaatagtg

SEQ ID NO: 53258 - DNA, 25 bp, Artificial
  probe
  misc_feature (1)..(25): SEQ ID NO: 3872; WAN024AFU_at; Start 6; Stop 30
atgaagaatcagttctaagagttgg

SEQ ID NO: 53259 - DNA, 25 bp, Artificial
  probe
  misc_feature (1)..(25): SEQ ID NO: 3872; WAN024AFU_at; Start 72; Stop 96
gctattttagaaaaatagtgtagaa

SEQ ID NO: 53260 - DNA, 25 bp, Artificial
  probe
  misc_feature (1)..(25): SEQ ID NO: 3872; WAN024AFU_at; Start 3; Stop 27
gaaatgaagaatcagttctaagagt

SEQ ID NO: 53261 - DNA, 25 bp, Artificial
  probe
  misc_feature (1)..(25): SEQ ID NO: 3872; WAN024AFU_at; Start 50; Stop 74
ctgaaaattacaaaatatacttgct

SEQ ID NO: 53262 - DNA, 25 bp, Artificial
  probe
  misc_feature (1)..(25): SEQ ID NO: 3872; WAN024AFU_at; Start 10; Stop 34
agaatcagttctaagagttggtttt

SEQ ID NO: 53263 - DNA, 25 bp, Artificial
  probe
  misc_feature (1)..(25): SEQ ID NO: 3872; WAN024AFU_at; Start 49; Stop 73
tctgaaaattacaaaatatacttgc

SEQ ID NO: 53264 - DNA, 25 bp, Artificial
  probe
  misc_feature (1)..(25): SEQ ID NO: 3802; WAN024AFV_at; Start 11; Stop 35
cgtgttcaactcctttcaaagaatg

SEQ ID NO: 53265 - DNA, 25 bp, Artificial
  probe
  misc_feature (1)..(25): SEQ ID NO: 3802; WAN024AFV_at; Start 4; Stop 28
tctagggcgtgttcaactcctttca

SEQ ID NO: 53266 - DNA, 25 bp, Artificial
  probe
  misc_feature (1)..(25): SEQ ID NO: 3802; WAN024AFV_at; Start 37; Stop 61
agagtaggtttttatgcagtaaaag

SEQ ID NO: 53267 - DNA, 25 bp, Artificial
  probe
  misc_feature (1)..(25): SEQ ID NO: 3802; WAN024AFV_at; Start 23; Stop 47
ctttcaaagaatgtagagtaggttt

SEQ ID NO: 53268 - DNA, 25 bp, Artificial
  probe
  misc_feature (1)..(25): SEQ ID NO: 3802; WAN024AFV_at; Start 20; Stop 44
ctcctttcaaagaatgtagagtagg

SEQ ID NO: 53269 - DNA, 25 bp, Artificial
  probe
  misc_feature (1)..(25): SEQ ID NO: 3802; WAN024AFV_at; Start 1; Stop 25
gtatctagggcgtgttcaactcctt

SEQ ID NO: 53270 - DNA, 25 bp, Artificial
  probe
  misc_feature (1)..(25): SEQ ID NO: 3802; WAN024AFV_at; Start 49; Stop 73
tatgcagtaaaagatattttacggg

SEQ ID NO: 53271 - DNA, 25 bp, Artificial
  probe
  misc_feature (1)..(25): SEQ ID NO: 3802; WAN024AFV_at; Start 8; Stop 32
gggcgtgttcaactcctttcaaaga

SEQ ID NO: 53272 - DNA, 25 bp, Artificial
  probe
  misc_feature (1)..(25): SEQ ID NO: 3802; WAN024AFV_at; Start 30; Stop 54
agaatgtagagtaggtttttatgca

SEQ ID NO: 53273 - DNA, 25 bp, Artificial
  probe
  misc_feature (1)..(25): SEQ ID NO: 3802; WAN024AFV_at; Start 3; Stop 27
atctagggcgtgttcaactcctttc

SEQ ID NO: 53274 - DNA, 25 bp, Artificial
  probe
  misc_feature (1)..(25): SEQ ID NO: 3802; WAN024AFV_at; Start 7; Stop 31
agggcgtgttcaactcctttcaaag

SEQ ID NO: 53275 - DNA, 25 bp, Artificial
  probe
  misc_feature (1)..(25): SEQ ID NO: 3802; WAN024AFV_at; Start 12; Stop 36
gtgttcaactcctttcaaagaatgt

SEQ ID NO: 53276 - DNA, 25 bp, Artificial
  probe
  misc_feature (1)..(25): SEQ ID NO: 3802; WAN024AFV_at; Start 22; Stop 46
cctttcaaagaatgtagagtaggtt

SEQ ID NO: 53277 - DNA, 25 bp, Artificial
  probe
  misc_feature (1)..(25): SEQ ID NO: 3802; WAN024AFV_at; Start 19; Stop 43
actcctttcaaagaatgtagagtag

SEQ ID NO: 53278 - DNA, 25 bp, Artificial
  probe
  misc_feature (1)..(25): SEQ ID NO: 3802; WAN024AFV_at; Start 36; Stop 60
tagagtaggtttttatgcagtaaaa

SEQ ID NO: 53279 - DNA, 25 bp, Artificial
  probe
  misc_feature (1)..(25): SEQ ID NO: 3802; WAN024AFV_at; Start 21; Stop 45
tcctttcaaagaatgtagagtaggt

SEQ ID NO: 53280 - DNA, 25 bp, Artificial
  probe
  misc_feature (1)..(25): SEQ ID NO: 3802; WAN024AFV_at; Start 10; Stop 34
gcgtgttcaactcctttcaaagaat

SEQ ID NO: 53281 - DNA, 25 bp, Artificial
  probe
  misc_feature (1)..(25): SEQ ID NO: 3802; WAN024AFV_at; Start 34; Stop 58
tgtagagtaggtttttatgcagtaa

SEQ ID NO: 53282 - DNA, 25 bp, Artificial
  probe
  misc_feature (1)..(25): SEQ ID NO: 3802; WAN024AFV_at; Start 32; Stop 56
aatgtagagtaggtttttatgcagt

SEQ ID NO: 53283 - DNA, 25 bp, Artificial
  probe
  misc_feature (1)..(25): SEQ ID NO: 3802; WAN024AFV_at; Start 6; Stop 30
tagggcgtgttcaactcctttcaaa

SEQ ID NO: 53284 - DNA, 25 bp, Artificial
  probe
  misc_feature (1)..(25): SEQ ID NO: 3802; WAN024AFV_at; Start 39; Stop 63
agtaggtttttatgcagtaaaagat

SEQ ID NO: 53285 - DNA, 25 bp, Artificial
  probe
  misc_feature (1)..(25): SEQ ID NO: 3802; WAN024AFV_at; Start 14; Stop 38
gttcaactcctttcaaagaatgtag

SEQ ID NO: 53286 - DNA, 25 bp, Artificial
  probe
  misc_feature (1)..(25): SEQ ID NO: 3802; WAN024AFV_at; Start 13; Stop 37
tgttcaactcctttcaaagaatgta

SEQ ID NO: 53287 - DNA, 25 bp, Artificial
  probe
  misc_feature (1)..(25): SEQ ID NO: 3802; WAN024AFV_at; Start 27; Stop 51
caaagaatgtagagtaggtttttat

SEQ ID NO: 53288 - DNA, 25 bp, Artificial
  probe
  misc_feature (1)..(25): SEQ ID NO: 3802; WAN024AFV_at; Start 29; Stop 53
aagaatgtagagtaggtttttatgc

SEQ ID NO: 53289 - DNA, 25 bp, Artificial
  probe
  misc_feature (1)..(25): SEQ ID NO: 3802; WAN024AFV_at; Start 31; Stop 55
gaatgtagagtaggtttttatgcag

SEQ ID NO: 53290 - DNA, 25 bp, Artificial
  probe
  misc_feature (1)..(25): SEQ ID NO: 3802; WAN024AFV_at; Start 9; Stop 33
ggcgtgttcaactcctttcaaagaa

SEQ ID NO: 53291 - DNA, 25 bp, Artificial
  probe
  misc_feature (1)..(25): SEQ ID NO: 3802; WAN024AFV_at; Start 35; Stop 59
gtagagtaggtttttatgcagtaaa

SEQ ID NO: 53292 - DNA, 25 bp, Artificial
  probe
  misc_feature (1)..(25): SEQ ID NO: 3802; WAN024AFV_at; Start 40; Stop 64
gtaggtttttatgcagtaaaagata

SEQ ID NO: 53293 - DNA, 25 bp, Artificial
  probe
  misc_feature (1)..(25): SEQ ID NO: 3802; WAN024AFV_at; Start 5; Stop 29
ctagggcgtgttcaactcctttcaa

SEQ ID NO: 53294 - DNA, 25 bp, Artificial
  probe
  misc_feature (1)..(25): SEQ ID NO: 3802; WAN024AFV_at; Start 2; Stop 26
tatctagggcgtgttcaactccttt

SEQ ID NO: 53295 - DNA, 25 bp, Artificial
  probe
  misc_feature (1)..(25): SEQ ID NO: 3802; WAN024AFV_at; Start 26; Stop 50
tcaaagaatgtagagtaggttttta

SEQ ID NO: 53296 - DNA, 25 bp, Artificial
  probe
  misc_feature (1)..(25): SEQ ID NO: 3802; WAN024AFV_at; Start 51; Stop 75
tgcagtaaaagatattttacgggaa

SEQ ID NO: 53297 - DNA, 25 bp, Artificial
  probe
  misc_feature (1)..(25): SEQ ID NO: 3802; WAN024AFV_at; Start 33; Stop 57
atgtagagtaggtttttatgcagta

SEQ ID NO: 53298 - DNA, 25 bp, Artificial
  probe
  misc_feature (1)..(25): SEQ ID NO: 327; WAN024AFW_at; Start 57; Stop 81
ctttgaaaggagttgaacacgccct

SEQ ID NO: 53299 - DNA, 25 bp, Artificial
  probe
  misc_feature (1)..(25): SEQ ID NO: 327; WAN024AFW_at; Start 14; Stop 38
tcccgtaaaatatcttttactgcat

SEQ ID NO: 53300 - DNA, 25 bp, Artificial
  probe
  misc_feature (1)..(25): SEQ ID NO: 327; WAN024AFW_at; Start 15; Stop 39
cccgtaaaatatcttttactgcata

SEQ ID NO: 53301 - DNA, 25 bp, Artificial
  probe
  misc_feature (1)..(25): SEQ ID NO: 327; WAN024AFW_at; Start 30; Stop 54
ttactgcataaaaacctactctaca

SEQ ID NO: 53302 - DNA, 25 bp, Artificial
  probe
  misc_feature (1)..(25): SEQ ID NO: 327; WAN024AFW_at; Start 43; Stop 67
acctactctacattctttgaaagga

SEQ ID NO: 53303 - DNA, 25 bp, Artificial
  probe
  misc_feature (1)..(25): SEQ ID NO: 327; WAN024AFW_at; Start 36; Stop 60
cataaaaacctactctacattcttt

SEQ ID NO: 53304 - DNA, 25 bp, Artificial
  probe
  misc_feature (1)..(25): SEQ ID NO: 327; WAN024AFW_at; Start 34; Stop 58
tgcataaaaacctactctacattct

SEQ ID NO: 53305 - DNA, 25 bp, Artificial
  probe
  misc_feature (1)..(25): SEQ ID NO: 327; WAN024AFW_at; Start 13; Stop 37
ttcccgtaaaatatcttttactgca

SEQ ID NO: 53306 - DNA, 25 bp, Artificial
  probe
  misc_feature (1)..(25): SEQ ID NO: 327; WAN024AFW_at; Start 62; Stop 86
aaaggagttgaacacgccctagata

SEQ ID NO: 53307 - DNA, 25 bp, Artificial
  probe
  misc_feature (1)..(25): SEQ ID NO: 327; WAN024AFW_at; Start 38; Stop 62
taaaaacctactctacattctttga

SEQ ID NO: 53308 - DNA, 25 bp, Artificial
  probe
  misc_feature (1)..(25): SEQ ID NO: 327; WAN024AFW_at; Start 29; Stop 53
tttactgcataaaaacctactctac

SEQ ID NO: 53309 - DNA, 25 bp, Artificial
  probe
  misc_feature (1)..(25): SEQ ID NO: 327; WAN024AFW_at; Start 61; Stop 85
gaaaggagttgaacacgccctagat

SEQ ID NO: 53310 - DNA, 25 bp, Artificial
  probe
  misc_feature (1)..(25): SEQ ID NO: 327; WAN024AFW_at; Start 41; Stop 65
aaacctactctacattctttgaaag

SEQ ID NO: 53311 - DNA, 25 bp, Artificial
  probe
  misc_feature (1)..(25): SEQ ID NO: 327; WAN024AFW_at; Start 31; Stop 55
tactgcataaaaacctactctacat

SEQ ID NO: 53312 - DNA, 25 bp, Artificial
  probe
  misc_feature (1)..(25): SEQ ID NO: 327; WAN024AFW_at; Start 27; Stop 51
cttttactgcataaaaacctactct

SEQ ID NO: 53313 - DNA, 25 bp, Artificial
  probe
  misc_feature (1)..(25): SEQ ID NO: 327; WAN024AFW_at; Start 33; Stop 57
ctgcataaaaacctactctacattc

SEQ ID NO: 53314 - DNA, 25 bp, Artificial
  probe
  misc_feature (1)..(25): SEQ ID NO: 327; WAN024AFW_at; Start 60; Stop 84
tgaaaggagttgaacacgccctaga

SEQ ID NO: 53315 - DNA, 25 bp, Artificial
  probe
  misc_feature (1)..(25): SEQ ID NO: 327; WAN024AFW_at; Start 35; Stop 59
gcataaaaacctactctacattctt

SEQ ID NO: 53316 - DNA, 25 bp, Artificial
  probe
  misc_feature (1)..(25): SEQ ID NO: 327; WAN024AFW_at; Start 63; Stop 87
aaggagttgaacacgccctagatac

SEQ ID NO: 53317 - DNA, 25 bp, Artificial
  probe
  misc_feature (1)..(25): SEQ ID NO: 327; WAN024AFW_at; Start 25; Stop 49
atcttttactgcataaaaacctact

SEQ ID NO: 53318 - DNA, 25 bp, Artificial
  probe
  misc_feature (1)..(25): SEQ ID NO: 327; WAN024AFW_at; Start 24; Stop 48
tatcttttactgcataaaaacctac

SEQ ID NO: 53319 - DNA, 25 bp, Artificial
  probe
  misc_feature (1)..(25): SEQ ID NO: 327; WAN024AFW_at; Start 42; Stop 66
aacctactctacattctttgaaagg

SEQ ID NO: 53320 - DNA, 25 bp, Artificial
  probe
  misc_feature (1)..(25): SEQ ID NO: 327; WAN024AFW_at; Start 32; Stop 56
actgcataaaaacctactctacatt

SEQ ID NO: 53321 - DNA, 25 bp, Artificial
  probe
  misc_feature (1)..(25): SEQ ID NO: 327; WAN024AFW_at; Start 55; Stop 79
ttctttgaaaggagttgaacacgcc

SEQ ID NO: 53322 - DNA, 25 bp, Artificial
  probe
  misc_feature (1)..(25): SEQ ID NO: 327; WAN024AFW_at; Start 59; Stop 83
ttgaaaggagttgaacacgccctag

SEQ ID NO: 53323 - DNA, 25 bp, Artificial
  probe
  misc_feature (1)..(25): SEQ ID NO: 327; WAN024AFW_at; Start 37; Stop 61
ataaaaacctactctacattctttg

SEQ ID NO: 53324 - DNA, 25 bp, Artificial
  probe
  misc_feature (1)..(25): SEQ ID NO: 327; WAN024AFW_at; Start 56; Stop 80
tctttgaaaggagttgaacacgccc

SEQ ID NO: 53325 - DNA, 25 bp, Artificial
  probe
  misc_feature (1)..(25): SEQ ID NO: 327; WAN024AFW_at; Start 44; Stop 68
cctactctacattctttgaaaggag

SEQ ID NO: 53326 - DNA, 25 bp, Artificial
  probe
  misc_feature (1)..(25): SEQ ID NO: 327; WAN024AFW_at; Start 16; Stop 40
ccgtaaaatatcttttactgcataa

SEQ ID NO: 53327 - DNA, 25 bp, Artificial
  probe
  misc_feature (1)..(25): SEQ ID NO: 327; WAN024AFW_at; Start 22; Stop 46
aatatcttttactgcataaaaacct

SEQ ID NO: 53328 - DNA, 25 bp, Artificial
  probe
  misc_feature (1)..(25): SEQ ID NO: 327; WAN024AFW_at; Start 28; Stop 52
ttttactgcataaaaacctactcta

SEQ ID NO: 53329 - DNA, 25 bp, Artificial
  probe
  misc_feature (1)..(25): SEQ ID NO: 327; WAN024AFW_at; Start 58; Stop 82
tttgaaaggagttgaacacgcccta

SEQ ID NO: 53330 - DNA, 25 bp, Artificial
  probe
  misc_feature (1)..(25): SEQ ID NO: 327; WAN024AFW_at; Start 17; Stop 41
cgtaaaatatcttttactgcataaa

SEQ ID NO: 53331 - DNA, 25 bp, Artificial
  probe
  misc_feature (1)..(25): SEQ ID NO: 327; WAN024AFW_at; Start 18; Stop 42
gtaaaatatcttttactgcataaaa

SEQ ID NO: 53332 - DNA, 25 bp, Artificial
  probe
  misc_feature (1)..(25): SEQ ID NO: 379; WAN024AFX_at; Start 109; Stop 133
taaagatgaacgaataggaggttcc

SEQ ID NO: 53333 - DNA, 25 bp, Artificial
  probe
  misc_feature (1)..(25): SEQ ID NO: 379; WAN024AFX_at; Start 44; Stop 68
ctgctgaaattgtcacatcggagaa

SEQ ID NO: 53334 - DNA, 25 bp, Artificial
  probe
  misc_feature (1)..(25): SEQ ID NO: 379; WAN024AFX_at; Start 36; Stop 60
gagaatctctgctgaaattgtcaca

SEQ ID NO: 53335 - DNA, 25 bp, Artificial
  probe
  misc_feature (1)..(25): SEQ ID NO: 379; WAN024AFX_at; Start 106; Stop 130
tagtaaagatgaacgaataggaggt

SEQ ID NO: 53336 - DNA, 25 bp, Artificial
  probe
  misc_feature (1)..(25): SEQ ID NO: 379; WAN024AFX_at; Start 103; Stop 127
gaatagtaaagatgaacgaatagga

SEQ ID NO: 53337 - DNA, 25 bp, Artificial
  probe
  misc_feature (1)..(25): SEQ ID NO: 379; WAN024AFX_at; Start 49; Stop 73
gaaattgtcacatcggagaaagaaa

SEQ ID NO: 53338 - DNA, 25 bp, Artificial
  probe
  misc_feature (1)..(25): SEQ ID NO: 379; WAN024AFX_at; Start 57; Stop 81
cacatcggagaaagaaaaattttgc

SEQ ID NO: 53339 - DNA, 25 bp, Artificial
  probe
  misc_feature (1)..(25): SEQ ID NO: 379; WAN024AFX_at; Start 1; Stop 25
actcctattatatcatgaattggga

SEQ ID NO: 53340 - DNA, 25 bp, Artificial
  probe
  misc_feature (1)..(25): SEQ ID NO: 379; WAN024AFX_at; Start 23; Stop 47
ggaaagaaaagcagagaatctctgc

SEQ ID NO: 53341 - DNA, 25 bp, Artificial
  probe
  misc_feature (1)..(25): SEQ ID NO: 379; WAN024AFX_at; Start 21; Stop 45
tgggaaagaaaagcagagaatctct

SEQ ID NO: 53342 - DNA, 25 bp, Artificial
  probe
  misc_feature (1)..(25): SEQ ID NO: 379; WAN024AFX_at; Start 38; Stop 62
gaatctctgctgaaattgtcacatc

SEQ ID NO: 53343 - DNA, 25 bp, Artificial
  probe
  misc_feature (1)..(25): SEQ ID NO: 379; WAN024AFX_at; Start 13; Stop 37
tcatgaattgggaaagaaaagcaga

SEQ ID NO: 53344 - DNA, 25 bp, Artificial
  probe
  misc_feature (1)..(25): SEQ ID NO: 379; WAN024AFX_at; Start 95; Stop 119
aacctgtagaatagtaaagatgaac

SEQ ID NO: 53345 - DNA, 25 bp, Artificial
  probe
  misc_feature (1)..(25): SEQ ID NO: 379; WAN024AFX_at; Start 90; Stop 114
tggaaaacctgtagaatagtaaaga

SEQ ID NO: 53346 - DNA, 25 bp, Artificial
  probe
  misc_feature (1)..(25): SEQ ID NO: 379; WAN024AFX_at; Start 43; Stop 67
tctgctgaaattgtcacatcggaga

SEQ ID NO: 53347 - DNA, 25 bp, Artificial
  probe
  misc_feature (1)..(25): SEQ ID NO: 379; WAN024AFX_at; Start 34; Stop 58
cagagaatctctgctgaaattgtca

SEQ ID NO: 53348 - DNA, 25 bp, Artificial
  probe
  misc_feature (1)..(25): SEQ ID NO: 379; WAN024AFX_at; Start 10; Stop 34
atatcatgaattgggaaagaaaagc

SEQ ID NO: 53349 - DNA, 25 bp, Artificial
  probe
  misc_feature (1)..(25): SEQ ID NO: 379; WAN024AFX_at; Start 46; Stop 70
gctgaaattgtcacatcggagaaag

SEQ ID NO: 53350 - DNA, 25 bp, Artificial
  probe
  misc_feature (1)..(25): SEQ ID NO: 379; WAN024AFX_at; Start 20; Stop 44
ttgggaaagaaaagcagagaatctc

SEQ ID NO: 53351 - DNA, 25 bp, Artificial
  probe
  misc_feature (1)..(25): SEQ ID NO: 379; WAN024AFX_at; Start 86; Stop 110
tccttggaaaacctgtagaatagta

SEQ ID NO: 53352 - DNA, 25 bp, Artificial
  probe
  misc_feature (1)..(25): SEQ ID NO: 379; WAN024AFX_at; Start 111; Stop 135
aagatgaacgaataggaggttcctt

SEQ ID NO: 53353 - DNA, 25 bp, Artificial
  probe
  misc_feature (1)..(25): SEQ ID NO: 379; WAN024AFX_at; Start 16; Stop 40
tgaattgggaaagaaaagcagagaa

SEQ ID NO: 53354 - DNA, 25 bp, Artificial
  probe
  misc_feature (1)..(25): SEQ ID NO: 379; WAN024AFX_at; Start 14; Stop 38
catgaattgggaaagaaaagcagag

SEQ ID NO: 53355 - DNA, 25 bp, Artificial
  probe
  misc_feature (1)..(25): SEQ ID NO: 379; WAN024AFX_at; Start 47; Stop 71
ctgaaattgtcacatcggagaaaga

SEQ ID NO: 53356 - DNA, 25 bp, Artificial
  probe
  misc_feature (1)..(25): SEQ ID NO: 379; WAN024AFX_at; Start 79; Stop 103
tgcaaaatccttggaaaacctgtag

SEQ ID NO: 53357 - DNA, 25 bp, Artificial
  probe
  misc_feature (1)..(25): SEQ ID NO: 379; WAN024AFX_at; Start 41; Stop 65
tctctgctgaaattgtcacatcgga

SEQ ID NO: 53358 - DNA, 25 bp, Artificial
  probe
  misc_feature (1)..(25): SEQ ID NO: 379; WAN024AFX_at; Start 80; Stop 104
gcaaaatccttggaaaacctgtaga

SEQ ID NO: 53359 - DNA, 25 bp, Artificial
  probe
  misc_feature (1)..(25): SEQ ID NO: 379; WAN024AFX_at; Start 92; Stop 116
gaaaacctgtagaatagtaaagatg

SEQ ID NO: 53360 - DNA, 25 bp, Artificial
  probe
  misc_feature (1)..(25): SEQ ID NO: 379; WAN024AFX_at; Start 4; Stop 28
cctattatatcatgaattgggaaag

SEQ ID NO: 53361 - DNA, 25 bp, Artificial
  probe
  misc_feature (1)..(25): SEQ ID NO: 379; WAN024AFX_at; Start 59; Stop 83
catcggagaaagaaaaattttgcaa

SEQ ID NO: 53362 - DNA, 25 bp, Artificial
  probe
  misc_feature (1)..(25): SEQ ID NO: 379; WAN024AFX_at; Start 39; Stop 63
aatctctgctgaaattgtcacatcg

SEQ ID NO: 53363 - DNA, 25 bp, Artificial
  probe
  misc_feature (1)..(25): SEQ ID NO: 379; WAN024AFX_at; Start 97; Stop 121
cctgtagaatagtaaagatgaacga

SEQ ID NO: 53364 - DNA, 25 bp, Artificial
  probe
  misc_feature (1)..(25): SEQ ID NO: 379; WAN024AFX_at; Start 84; Stop 108
aatccttggaaaacctgtagaatag

SEQ ID NO: 53365 - DNA, 25 bp, Artificial
  probe
  misc_feature (1)..(25): SEQ ID NO: 379; WAN024AFX_at; Start 54; Stop 78
tgtcacatcggagaaagaaaaattt

SEQ ID NO: 53366 - DNA, 25 bp, Artificial
  probe
  misc_feature (1)..(25): SEQ ID NO: 237; WAN024AFY_at; Start 77; Stop 101
gtgacaatttcagcagagattctct

SEQ ID NO: 53367 - DNA, 25 bp, Artificial
  probe
  misc_feature (1)..(25): SEQ ID NO: 237; WAN024AFY_at; Start 76; Stop 100
tgtgacaatttcagcagagattctc

SEQ ID NO: 53368 - DNA, 25 bp, Artificial
  probe
  misc_feature (1)..(25): SEQ ID NO: 237; WAN024AFY_at; Start 65; Stop 89
tctttctccgatgtgacaatttcag

SEQ ID NO: 53369 - DNA, 25 bp, Artificial
  probe
  misc_feature (1)..(25): SEQ ID NO: 237; WAN024AFY_at; Start 72; Stop 96
ccgatgtgacaatttcagcagagat

SEQ ID NO: 53370 - DNA, 25 bp, Artificial
  probe
  misc_feature (1)..(25): SEQ ID NO: 237; WAN024AFY_at; Start 6; Stop 30
acctcctattcgttcatctttacta

SEQ ID NO: 53371 - DNA, 25 bp, Artificial
  probe
  misc_feature (1)..(25): SEQ ID NO: 237; WAN024AFY_at; Start 106; Stop 130
ttctttcccaattcatgatataata

SEQ ID NO: 53372 - DNA, 25 bp, Artificial
  probe
  misc_feature (1)..(25): SEQ ID NO: 237; WAN024AFY_at; Start 26; Stop 50
tactattctacaggttttccaagga

SEQ ID NO: 53373 - DNA, 25 bp, Artificial
  probe
  misc_feature (1)..(25): SEQ ID NO: 237; WAN024AFY_at; Start 34; Stop 58
tacaggttttccaaggattttgcaa

SEQ ID NO: 53374 - DNA, 25 bp, Artificial
  probe
  misc_feature (1)..(25): SEQ ID NO: 237; WAN024AFY_at; Start 69; Stop 93
tctccgatgtgacaatttcagcaga

SEQ ID NO: 53375 - DNA, 25 bp, Artificial
  probe
  misc_feature (1)..(25): SEQ ID NO: 237; WAN024AFY_at; Start 1; Stop 25
aaggaacctcctattcgttcatctt

SEQ ID NO: 53376 - DNA, 25 bp, Artificial
  probe
  misc_feature (1)..(25): SEQ ID NO: 237; WAN024AFY_at; Start 71; Stop 95
tccgatgtgacaatttcagcagaga

SEQ ID NO: 53377 - DNA, 25 bp, Artificial
  probe
  misc_feature (1)..(25): SEQ ID NO: 237; WAN024AFY_at; Start 27; Stop 51
actattctacaggttttccaaggat

SEQ ID NO: 53378 - DNA, 25 bp, Artificial
  probe
  misc_feature (1)..(25): SEQ ID NO: 237; WAN024AFY_at; Start 99; Stop 123
tctgcttttctttcccaattcatga

SEQ ID NO: 53379 - DNA, 25 bp, Artificial
  probe
  misc_feature (1)..(25): SEQ ID NO: 237; WAN024AFY_at; Start 22; Stop 46
tctttactattctacaggttttcca

SEQ ID NO: 53380 - DNA, 25 bp, Artificial
  probe
  misc_feature (1)..(25): SEQ ID NO: 237; WAN024AFY_at; Start 59; Stop 83
aatttttctttctccgatgtgacaa

SEQ ID NO: 53381 - DNA, 25 bp, Artificial
  probe
  misc_feature (1)..(25): SEQ ID NO: 237; WAN024AFY_at; Start 32; Stop 56
tctacaggttttccaaggattttgc

SEQ ID NO: 53382 - DNA, 25 bp, Artificial
  probe
  misc_feature (1)..(25): SEQ ID NO: 237; WAN024AFY_at; Start 102; Stop 126
gcttttctttcccaattcatgatat

SEQ ID NO: 53383 - DNA, 25 bp, Artificial
  probe
  misc_feature (1)..(25): SEQ ID NO: 237; WAN024AFY_at; Start 20; Stop 44
catctttactattctacaggttttc

SEQ ID NO: 53384 - DNA, 25 bp, Artificial
  probe
  misc_feature (1)..(25): SEQ ID NO: 237; WAN024AFY_at; Start 55; Stop 79
gcaaaatttttctttctccgatgtg

SEQ ID NO: 53385 - DNA, 25 bp, Artificial
  probe
  misc_feature (1)..(25): SEQ ID NO: 237; WAN024AFY_at; Start 15; Stop 39
tcgttcatctttactattctacagg

SEQ ID NO: 53386 - DNA, 25 bp, Artificial
  probe
  misc_feature (1)..(25): SEQ ID NO: 237; WAN024AFY_at; Start 74; Stop 98
gatgtgacaatttcagcagagattc

SEQ ID NO: 53387 - DNA, 25 bp, Artificial
  probe
  misc_feature (1)..(25): SEQ ID NO: 237; WAN024AFY_at; Start 28; Stop 52
ctattctacaggttttccaaggatt

SEQ ID NO: 53388 - DNA, 25 bp, Artificial
  probe
  misc_feature (1)..(25): SEQ ID NO: 237; WAN024AFY_at; Start 94; Stop 118
gattctctgcttttctttcccaatt

SEQ ID NO: 53389 - DNA, 25 bp, Artificial
  probe
  misc_feature (1)..(25): SEQ ID NO: 237; WAN024AFY_at; Start 68; Stop 92
ttctccgatgtgacaatttcagcag

SEQ ID NO: 53390 - DNA, 25 bp, Artificial
  probe
  misc_feature (1)..(25): SEQ ID NO: 237; WAN024AFY_at; Start 79; Stop 103
gacaatttcagcagagattctctgc

SEQ ID NO: 53391 - DNA, 25 bp, Artificial
  probe
  misc_feature (1)..(25): SEQ ID NO: 237; WAN024AFY_at; Start 58; Stop 82
aaatttttctttctccgatgtgaca

SEQ ID NO: 53392 - DNA, 25 bp, Artificial
  probe
  misc_feature (1)..(25): SEQ ID NO: 237; WAN024AFY_at; Start 56; Stop 80
caaaatttttctttctccgatgtga

SEQ ID NO: 53393 - DNA, 25 bp, Artificial
  probe
  misc_feature (1)..(25): SEQ ID NO: 237; WAN024AFY_at; Start 66; Stop 90
ctttctccgatgtgacaatttcagc

SEQ ID NO: 53394 - DNA, 25 bp, Artificial
  probe
  misc_feature (1)..(25): SEQ ID NO: 237; WAN024AFY_at; Start 92; Stop 116
gagattctctgcttttctttcccaa

SEQ ID NO: 53395 - DNA, 25 bp, Artificial
  probe
  misc_feature (1)..(25): SEQ ID NO: 237; WAN024AFY_at; Start 73; Stop 97
cgatgtgacaatttcagcagagatt

SEQ ID NO: 53396 - DNA, 25 bp, Artificial
  probe
  misc_feature (1)..(25): SEQ ID NO: 237; WAN024AFY_at; Start 3; Stop 27
ggaacctcctattcgttcatcttta

SEQ ID NO: 53397 - DNA, 25 bp, Artificial
  probe
  misc_feature (1)..(25): SEQ ID NO: 237; WAN024AFY_at; Start 78; Stop 102
tgacaatttcagcagagattctctg

SEQ ID NO: 53398 - DNA, 25 bp, Artificial
  probe
  misc_feature (1)..(25): SEQ ID NO: 237; WAN024AFY_at; Start 90; Stop 114
cagagattctctgcttttctttccc

SEQ ID NO: 53399 - DNA, 25 bp, Artificial
  probe
  misc_feature (1)..(25): SEQ ID NO: 237; WAN024AFY_at; Start 16; Stop 40
cgttcatctttactattctacaggt

SEQ ID NO: 53400 - DNA, 25 bp, Artificial
  probe
  misc_feature (1)..(25): SEQ ID NO: 4094; WAN024AFZ_at; Start 116; Stop 140
ccgcttcctaagaaatgacttccat

SEQ ID NO: 53401 - DNA, 25 bp, Artificial
  probe
  misc_feature (1)..(25): SEQ ID NO: 4094; WAN024AFZ_at; Start 14; Stop 38
cagagtcttattttatttcaataaa

SEQ ID NO: 53402 - DNA, 25 bp, Artificial
  probe
  misc_feature (1)..(25): SEQ ID NO: 4094; WAN024AFZ_at; Start 86; Stop 110
tgtctcaactcttaaaaaagcggcc

SEQ ID NO: 53403 - DNA, 25 bp, Artificial
  probe
  misc_feature (1)..(25): SEQ ID NO: 4094; WAN024AFZ_at; Start 76; Stop 100
aaaatgactttgtctcaactcttaa

SEQ ID NO: 53404 - DNA, 25 bp, Artificial
  probe
  misc_feature (1)..(25): SEQ ID NO: 4094; WAN024AFZ_at; Start 115; Stop 139
gccgcttcctaagaaatgacttcca

SEQ ID NO: 53405 - DNA, 25 bp, Artificial
  probe
  misc_feature (1)..(25): SEQ ID NO: 4094; WAN024AFZ_at; Start 1; Stop 25
gtgctcttcctttcagagtcttatt

SEQ ID NO: 53406 - DNA, 25 bp, Artificial
  probe
  misc_feature (1)..(25): SEQ ID NO: 4094; WAN024AFZ_at; Start 118; Stop 142
gcttcctaagaaatgacttccatcc

SEQ ID NO: 53407 - DNA, 25 bp, Artificial
  probe
  misc_feature (1)..(25): SEQ ID NO: 4094; WAN024AFZ_at; Start 45; Stop 69
tagtttgtctagtagcaagctttac

SEQ ID NO: 53408 - DNA, 25 bp, Artificial
  probe
  misc_feature (1)..(25): SEQ ID NO: 4094; WAN024AFZ_at; Start 110; Stop 134
ccttggccgcttcctaagaaatgac

SEQ ID NO: 53409 - DNA, 25 bp, Artificial
  probe
  misc_feature (1)..(25): SEQ ID NO: 4094; WAN024AFZ_at; Start 73; Stop 97
gacaaaatgactttgtctcaactct

SEQ ID NO: 53410 - DNA, 25 bp, Artificial
  probe
  misc_feature (1)..(25): SEQ ID NO: 4094; WAN024AFZ_at; Start 80; Stop 104
tgactttgtctcaactcttaaaaaa

SEQ ID NO: 53411 - DNA, 25 bp, Artificial
  probe
  misc_feature (1)..(25): SEQ ID NO: 4094; WAN024AFZ_at; Start 108; Stop 132
gcccttggccgcttcctaagaaatg

SEQ ID NO: 53412 - DNA, 25 bp, Artificial
  probe
  misc_feature (1)..(25): SEQ ID NO: 4094; WAN024AFZ_at; Start 32; Stop 56
caataaaacttgctagtttgtctag

SEQ ID NO: 53413 - DNA, 25 bp, Artificial
  probe
  misc_feature (1)..(25): SEQ ID NO: 4094; WAN024AFZ_at; Start 119; Stop 143
cttcctaagaaatgacttccatcca

SEQ ID NO: 53414 - DNA, 25 bp, Artificial
  probe
  misc_feature (1)..(25): SEQ ID NO: 4094; WAN024AFZ_at; Start 117; Stop 141
cgcttcctaagaaatgacttccatc

SEQ ID NO: 53415 - DNA, 25 bp, Artificial
  probe
  misc_feature (1)..(25): SEQ ID NO: 4094; WAN024AFZ_at; Start 3; Stop 27
gctcttcctttcagagtcttatttt

SEQ ID NO: 53416 - DNA, 25 bp, Artificial
  probe
  misc_feature (1)..(25): SEQ ID NO: 4094; WAN024AFZ_at; Start 109; Stop 133
cccttggccgcttcctaagaaatga

SEQ ID NO: 53417 - DNA, 25 bp, Artificial
  probe
  misc_feature (1)..(25): SEQ ID NO: 4094; WAN024AFZ_at; Start 37; Stop 61
aaacttgctagtttgtctagtagca

SEQ ID NO: 53418 - DNA, 25 bp, Artificial
  probe
  misc_feature (1)..(25): SEQ ID NO: 4094; WAN024AFZ_at; Start 111; Stop 135
cttggccgcttcctaagaaatgact

SEQ ID NO: 53419 - DNA, 25 bp, Artificial
  probe
  misc_feature (1)..(25): SEQ ID NO: 4094; WAN024AFZ_at; Start 40; Stop 64
cttgctagtttgtctagtagcaagc

SEQ ID NO: 53420 - DNA, 25 bp, Artificial
  probe
  misc_feature (1)..(25): SEQ ID NO: 4094; WAN024AFZ_at; Start 43; Stop 67
gctagtttgtctagtagcaagcttt

SEQ ID NO: 53421 - DNA, 25 bp, Artificial
  probe
  misc_feature (1)..(25): SEQ ID NO: 4094; WAN024AFZ_at; Start 75; Stop 99
caaaatgactttgtctcaactctta

SEQ ID NO: 53422 - DNA, 25 bp, Artificial
  probe
  misc_feature (1)..(25): SEQ ID NO: 4094; WAN024AFZ_at; Start 46; Stop 70
agtttgtctagtagcaagctttact

SEQ ID NO: 53423 - DNA, 25 bp, Artificial
  probe
  misc_feature (1)..(25): SEQ ID NO: 4094; WAN024AFZ_at; Start 9; Stop 33
cctttcagagtcttattttatttca

SEQ ID NO: 53424 - DNA, 25 bp, Artificial
  probe
  misc_feature (1)..(25): SEQ ID NO: 4094; WAN024AFZ_at; Start 78; Stop 102
aatgactttgtctcaactcttaaaa

SEQ ID NO: 53425 - DNA, 25 bp, Artificial
  probe
  misc_feature (1)..(25): SEQ ID NO: 4094; WAN024AFZ_at; Start 35; Stop 59
taaaacttgctagtttgtctagtag

SEQ ID NO: 53426 - DNA, 25 bp, Artificial
  probe
  misc_feature (1)..(25): SEQ ID NO: 4094; WAN024AFZ_at; Start 112; Stop 136
ttggccgcttcctaagaaatgactt

SEQ ID NO: 53427 - DNA, 25 bp, Artificial
  probe
  misc_feature (1)..(25): SEQ ID NO: 4094; WAN024AFZ_at; Start 114; Stop 138
ggccgcttcctaagaaatgacttcc

SEQ ID NO: 53428 - DNA, 25 bp, Artificial
  probe
  misc_feature (1)..(25): SEQ ID NO: 4094; WAN024AFZ_at; Start 113; Stop 137
tggccgcttcctaagaaatgacttc

SEQ ID NO: 53429 - DNA, 25 bp, Artificial
  probe
  misc_feature (1)..(25): SEQ ID NO: 4094; WAN024AFZ_at; Start 42; Stop 66
tgctagtttgtctagtagcaagctt

SEQ ID NO: 53430 - DNA, 25 bp, Artificial
  probe
  misc_feature (1)..(25): SEQ ID NO: 4094; WAN024AFZ_at; Start 36; Stop 60
aaaacttgctagtttgtctagtagc

SEQ ID NO: 53431 - DNA, 25 bp, Artificial
  probe
  misc_feature (1)..(25): SEQ ID NO: 4094; WAN024AFZ_at; Start 83; Stop 107
ctttgtctcaactcttaaaaaagcg

SEQ ID NO: 53432 - DNA, 25 bp, Artificial
  probe
  misc_feature (1)..(25): SEQ ID NO: 4094; WAN024AFZ_at; Start 38; Stop 62
aacttgctagtttgtctagtagcaa

SEQ ID NO: 53433 - DNA, 25 bp, Artificial
  probe
  misc_feature (1)..(25): SEQ ID NO: 4094; WAN024AFZ_at; Start 85; Stop 109
ttgtctcaactcttaaaaaagcggc

SEQ ID NO: 53434 - DNA, 25 bp, Artificial
  probe
  misc_feature (1)..(25): SEQ ID NO: 4710; WAN024AG2_at; Start 116; Stop 140
taaaataagactctgaaaggaagag

SEQ ID NO: 53435 - DNA, 25 bp, Artificial
  probe
  misc_feature (1)..(25): SEQ ID NO: 4710; WAN024AG2_at; Start 40; Stop 64
ttttttaagagttgagacaaagtca

SEQ ID NO: 53436 - DNA, 25 bp, Artificial
  probe
  misc_feature (1)..(25): SEQ ID NO: 4710; WAN024AG2_at; Start 9; Stop 33
agtcatttcttaggaagcggccaag

SEQ ID NO: 53437 - DNA, 25 bp, Artificial
  probe
  misc_feature (1)..(25): SEQ ID NO: 4710; WAN024AG2_at; Start 88; Stop 112
ctagacaaactagcaagttttattg

SEQ ID NO: 53438 - DNA, 25 bp, Artificial
  probe
  misc_feature (1)..(25): SEQ ID NO: 4710; WAN024AG2_at; Start 7; Stop 31
gaagtcatttcttaggaagcggcca

SEQ ID NO: 53439 - DNA, 25 bp, Artificial
  probe
  misc_feature (1)..(25): SEQ ID NO: 4710; WAN024AG2_at; Start 35; Stop 59
gccgcttttttaagagttgagacaa

SEQ ID NO: 53440 - DNA, 25 bp, Artificial
  probe
  misc_feature (1)..(25): SEQ ID NO: 4710; WAN024AG2_at; Start 112; Stop 136
gaaataaaataagactctgaaagga

SEQ ID NO: 53441 - DNA, 25 bp, Artificial
  probe
  misc_feature (1)..(25): SEQ ID NO: 4710; WAN024AG2_at; Start 42; Stop 66
ttttaagagttgagacaaagtcatt

SEQ ID NO: 53442 - DNA, 25 bp, Artificial
  probe
  misc_feature (1)..(25): SEQ ID NO: 4710; WAN024AG2_at; Start 12; Stop 36
catttcttaggaagcggccaagggc

SEQ ID NO: 53443 - DNA, 25 bp, Artificial
  probe
  misc_feature (1)..(25): SEQ ID NO: 4710; WAN024AG2_at; Start 108; Stop 132
tattgaaataaaataagactctgaa

SEQ ID NO: 53444 - DNA, 25 bp, Artificial
  probe
  misc_feature (1)..(25): SEQ ID NO: 4710; WAN024AG2_at; Start 3; Stop 27
gatggaagtcatttcttaggaagcg

SEQ ID NO: 53445 - DNA, 25 bp, Artificial
  probe
  misc_feature (1)..(25): SEQ ID NO: 4710; WAN024AG2_at; Start 4; Stop 28
atggaagtcatttcttaggaagcgg

SEQ ID NO: 53446 - DNA, 25 bp, Artificial
  probe
  misc_feature (1)..(25): SEQ ID NO: 4710; WAN024AG2_at; Start 10; Stop 34
gtcatttcttaggaagcggccaagg

SEQ ID NO: 53447 - DNA, 25 bp, Artificial
  probe
  misc_feature (1)..(25): SEQ ID NO: 4710; WAN024AG2_at; Start 15; Stop 39
ttcttaggaagcggccaagggccgc

SEQ ID NO: 53448 - DNA, 25 bp, Artificial
  probe
  misc_feature (1)..(25): SEQ ID NO: 4710; WAN024AG2_at; Start 117; Stop 141
aaaataagactctgaaaggaagagc

SEQ ID NO: 53449 - DNA, 25 bp, Artificial
  probe
  misc_feature (1)..(25): SEQ ID NO: 4710; WAN024AG2_at; Start 83; Stop 107
tgctactagacaaactagcaagttt

SEQ ID NO: 53450 - DNA, 25 bp, Artificial
  probe
  misc_feature (1)..(25): SEQ ID NO: 4710; WAN024AG2_at; Start 86; Stop 110
tactagacaaactagcaagttttat

SEQ ID NO: 53451 - DNA, 25 bp, Artificial
  probe
  misc_feature (1)..(25): SEQ ID NO: 4710; WAN024AG2_at; Start 74; Stop 98
agtaaagcttgctactagacaaact

SEQ ID NO: 53452 - DNA, 25 bp, Artificial
  probe
  misc_feature (1)..(25): SEQ ID NO: 4710; WAN024AG2_at; Start 77; Stop 101
aaagcttgctactagacaaactagc

SEQ ID NO: 53453 - DNA, 25 bp, Artificial
  probe
  misc_feature (1)..(25): SEQ ID NO: 4710; WAN024AG2_at; Start 84; Stop 108
gctactagacaaactagcaagtttt

SEQ ID NO: 53454 - DNA, 25 bp, Artificial
  probe
  misc_feature (1)..(25): SEQ ID NO: 4710; WAN024AG2_at; Start 111; Stop 135
tgaaataaaataagactctgaaagg

SEQ ID NO: 53455 - DNA, 25 bp, Artificial
  probe
  misc_feature (1)..(25): SEQ ID NO: 4710; WAN024AG2_at; Start 37; Stop 61
cgcttttttaagagttgagacaaag

SEQ ID NO: 53456 - DNA, 25 bp, Artificial
  probe
  misc_feature (1)..(25): SEQ ID NO: 4710; WAN024AG2_at; Start 11; Stop 35
tcatttcttaggaagcggccaaggg

SEQ ID NO: 53457 - DNA, 25 bp, Artificial
  probe
  misc_feature (1)..(25): SEQ ID NO: 4710; WAN024AG2_at; Start 119; Stop 143
aataagactctgaaaggaagagcac

SEQ ID NO: 53458 - DNA, 25 bp, Artificial
  probe
  misc_feature (1)..(25): SEQ ID NO: 4710; WAN024AG2_at; Start 8; Stop 32
aagtcatttcttaggaagcggccaa

SEQ ID NO: 53459 - DNA, 25 bp, Artificial
  probe
  misc_feature (1)..(25): SEQ ID NO: 4710; WAN024AG2_at; Start 78; Stop 102
aagcttgctactagacaaactagca

SEQ ID NO: 53460 - DNA, 25 bp, Artificial
  probe
  misc_feature (1)..(25): SEQ ID NO: 4710; WAN024AG2_at; Start 5; Stop 29
tggaagtcatttcttaggaagcggc

SEQ ID NO: 53461 - DNA, 25 bp, Artificial
  probe
  misc_feature (1)..(25): SEQ ID NO: 4710; WAN024AG2_at; Start 6; Stop 30
ggaagtcatttcttaggaagcggcc

SEQ ID NO: 53462 - DNA, 25 bp, Artificial
  probe
  misc_feature (1)..(25): SEQ ID NO: 4710; WAN024AG2_at; Start 2; Stop 26
ggatggaagtcatttcttaggaagc

SEQ ID NO: 53463 - DNA, 25 bp, Artificial
  probe
  misc_feature (1)..(25): SEQ ID NO: 4710; WAN024AG2_at; Start 80; Stop 104
gcttgctactagacaaactagcaag

SEQ ID NO: 53464 - DNA, 25 bp, Artificial
  probe
  misc_feature (1)..(25): SEQ ID NO: 4710; WAN024AG2_at; Start 48; Stop 72
gagttgagacaaagtcattttgtct

SEQ ID NO: 53465 - DNA, 25 bp, Artificial
  probe
  misc_feature (1)..(25): SEQ ID NO: 4710; WAN024AG2_at; Start 45; Stop 69
taagagttgagacaaagtcattttg

SEQ ID NO: 53466 - DNA, 25 bp, Artificial
  probe
  misc_feature (1)..(25): SEQ ID NO: 4710; WAN024AG2_at; Start 16; Stop 40
tcttaggaagcggccaagggccgct

SEQ ID NO: 53467 - DNA, 25 bp, Artificial
  probe
  misc_feature (1)..(25): SEQ ID NO: 4710; WAN024AG2_at; Start 76; Stop 100
taaagcttgctactagacaaactag

SEQ ID NO: 53468 - DNA, 25 bp, Artificial
  probe
  misc_feature (1)..(25): SEQ ID NO: 478; WAN024AG3_at; Start 58; Stop 82
taaatcagtagaatctatctcctat

SEQ ID NO: 53469 - DNA, 25 bp, Artificial
  probe
  misc_feature (1)..(25): SEQ ID NO: 478; WAN024AG3_at; Start 106; Stop 130
tactatataccattgacttaccaca

SEQ ID NO: 53470 - DNA, 25 bp, Artificial
  probe
  misc_feature (1)..(25): SEQ ID NO: 478; WAN024AG3_at; Start 65; Stop 89
gtagaatctatctcctatttcatca

SEQ ID NO: 53471 - DNA, 25 bp, Artificial
  probe
  misc_feature (1)..(25): SEQ ID NO: 478; WAN024AG3_at; Start 109; Stop 133
tatataccattgacttaccacattc

SEQ ID NO: 53472 - DNA, 25 bp, Artificial
  probe
  misc_feature (1)..(25): SEQ ID NO: 478; WAN024AG3_at; Start 52; Stop 76
aacttataaatcagtagaatctatc

SEQ ID NO: 53473 - DNA, 25 bp, Artificial
  probe
  misc_feature (1)..(25): SEQ ID NO: 478; WAN024AG3_at; Start 120; Stop 144
gacttaccacattcaagaaaccgct

SEQ ID NO: 53474 - DNA, 25 bp, Artificial
  probe
  misc_feature (1)..(25): SEQ ID NO: 478; WAN024AG3_at; Start 97; Stop 121
gatcacttatactatataccattga

SEQ ID NO: 53475 - DNA, 25 bp, Artificial
  probe
  misc_feature (1)..(25): SEQ ID NO: 478; WAN024AG3_at; Start 122; Stop 146
cttaccacattcaagaaaccgcttt

SEQ ID NO: 53476 - DNA, 25 bp, Artificial
  probe
  misc_feature (1)..(25): SEQ ID NO: 478; WAN024AG3_at; Start 119; Stop 143
tgacttaccacattcaagaaaccgc

SEQ ID NO: 53477 - DNA, 25 bp, Artificial
  probe
  misc_feature (1)..(25): SEQ ID NO: 478; WAN024AG3_at; Start 45; Stop 69
gcttataaacttataaatcagtaga

SEQ ID NO: 53478 - DNA, 25 bp, Artificial
  probe
  misc_feature (1)..(25): SEQ ID NO: 478; WAN024AG3_at; Start 104; Stop 128
tatactatataccattgacttacca

SEQ ID NO: 53479 - DNA, 25 bp, Artificial
  probe
  misc_feature (1)..(25): SEQ ID NO: 478; WAN024AG3_at; Start 115; Stop 139
ccattgacttaccacattcaagaaa

SEQ ID NO: 53480 - DNA, 25 bp, Artificial
  probe
  misc_feature (1)..(25): SEQ ID NO: 478; WAN024AG3_at; Start 121; Stop 145
acttaccacattcaagaaaccgctt

SEQ ID NO: 53481 - DNA, 25 bp, Artificial
  probe
  misc_feature (1)..(25): SEQ ID NO: 478; WAN024AG3_at; Start 125; Stop 149
accacattcaagaaaccgctttatt

SEQ ID NO: 53482 - DNA, 25 bp, Artificial
  probe
  misc_feature (1)..(25): SEQ ID NO: 478; WAN024AG3_at; Start 1; Stop 25
agtacacctcctataagttgtgaac

SEQ ID NO: 53483 - DNA, 25 bp, Artificial
  probe
  misc_feature (1)..(25): SEQ ID NO: 478; WAN024AG3_at; Start 78; Stop 102
cctatttcatcaataaattgatcac

SEQ ID NO: 53484 - DNA, 25 bp, Artificial
  probe
  misc_feature (1)..(25): SEQ ID NO: 478; WAN024AG3_at; Start 68; Stop 92
gaatctatctcctatttcatcaata

SEQ ID NO: 53485 - DNA, 25 bp, Artificial
  probe
  misc_feature (1)..(25): SEQ ID NO: 478; WAN024AG3_at; Start 2; Stop 26
gtacacctcctataagttgtgaact

SEQ ID NO: 53486 - DNA, 25 bp, Artificial
  probe
  misc_feature (1)..(25): SEQ ID NO: 478; WAN024AG3_at; Start 113; Stop 137
taccattgacttaccacattcaaga

SEQ ID NO: 53487 - DNA, 25 bp, Artificial
  probe
  misc_feature (1)..(25): SEQ ID NO: 478; WAN024AG3_at; Start 4; Stop 28
acacctcctataagttgtgaactaa

SEQ ID NO: 53488 - DNA, 25 bp, Artificial
  probe
  misc_feature (1)..(25): SEQ ID NO: 478; WAN024AG3_at; Start 116; Stop 140
cattgacttaccacattcaagaaac

SEQ ID NO: 53489 - DNA, 25 bp, Artificial
  probe
  misc_feature (1)..(25): SEQ ID NO: 478; WAN024AG3_at; Start 5; Stop 29
cacctcctataagttgtgaactaaa

SEQ ID NO: 53490 - DNA, 25 bp, Artificial
  probe
  misc_feature (1)..(25): SEQ ID NO: 478; WAN024AG3_at; Start 92; Stop 116
aaattgatcacttatactatatacc

SEQ ID NO: 53491 - DNA, 25 bp, Artificial
  probe
  misc_feature (1)..(25): SEQ ID NO: 478; WAN024AG3_at; Start 73; Stop 97
tatctcctatttcatcaataaattg

SEQ ID NO: 53492 - DNA, 25 bp, Artificial
  probe
  misc_feature (1)..(25): SEQ ID NO: 478; WAN024AG3_at; Start 56; Stop 80
tataaatcagtagaatctatctcct

SEQ ID NO: 53493 - DNA, 25 bp, Artificial
  probe
  misc_feature (1)..(25): SEQ ID NO: 478; WAN024AG3_at; Start 127; Stop 151
cacattcaagaaaccgctttatttt

SEQ ID NO: 53494 - DNA, 25 bp, Artificial
  probe
  misc_feature (1)..(25): SEQ ID NO: 478; WAN024AG3_at; Start 124; Stop 148
taccacattcaagaaaccgctttat

SEQ ID NO: 53495 - DNA, 25 bp, Artificial
  probe
  misc_feature (1)..(25): SEQ ID NO: 478; WAN024AG3_at; Start 3; Stop 27
tacacctcctataagttgtgaacta

SEQ ID NO: 53496 - DNA, 25 bp, Artificial
  probe
  misc_feature (1)..(25): SEQ ID NO: 478; WAN024AG3_at; Start 62; Stop 86
tcagtagaatctatctcctatttca

SEQ ID NO: 53497 - DNA, 25 bp, Artificial
  probe
  misc_feature (1)..(25): SEQ ID NO: 478; WAN024AG3_at; Start 9; Stop 33
tcctataagttgtgaactaaaaagc

SEQ ID NO: 53498 - DNA, 25 bp, Artificial
  probe
  misc_feature (1)..(25): SEQ ID NO: 478; WAN024AG3_at; Start 118; Stop 142
ttgacttaccacattcaagaaaccg

SEQ ID NO: 53499 - DNA, 25 bp, Artificial
  probe
  misc_feature (1)..(25): SEQ ID NO: 478; WAN024AG3_at; Start 111; Stop 135
tataccattgacttaccacattcaa

SEQ ID NO: 53500 - DNA, 25 bp, Artificial
  probe
  misc_feature (1)..(25): SEQ ID NO: 478; WAN024AG3_at; Start 123; Stop 147
ttaccacattcaagaaaccgcttta

SEQ ID NO: 53501 - DNA, 25 bp, Artificial
  probe
  misc_feature (1)..(25): SEQ ID NO: 478; WAN024AG3_at; Start 48; Stop 72
tataaacttataaatcagtagaatc

SEQ ID NO: 53502 - DNA, 25 bp, Artificial
  probe
  misc_feature (1)..(25): SEQ ID NO: 347; WAN024AG4_at; Start 90; Stop 114
gagatagattctactgatttataag

SEQ ID NO: 53503 - DNA, 25 bp, Artificial
  probe
  misc_feature (1)..(25): SEQ ID NO: 347; WAN024AG4_at; Start 44; Stop 68
aagtcaatggtatatagtataagtg

SEQ ID NO: 53504 - DNA, 25 bp, Artificial
  probe
  misc_feature (1)..(25): SEQ ID NO: 347; WAN024AG4_at; Start 52; Stop 76
ggtatatagtataagtgatcaattt

SEQ ID NO: 53505 - DNA, 25 bp, Artificial
  probe
  misc_feature (1)..(25): SEQ ID NO: 347; WAN024AG4_at; Start 41; Stop 65
ggtaagtcaatggtatatagtataa

SEQ ID NO: 53506 - DNA, 25 bp, Artificial
  probe
  misc_feature (1)..(25): SEQ ID NO: 347; WAN024AG4_at; Start 143; Stop 167
gttcacaacttataggaggtgtact

SEQ ID NO: 53507 - DNA, 25 bp, Artificial
  probe
  misc_feature (1)..(25): SEQ ID NO: 347; WAN024AG4_at; Start 139; Stop 163
tttagttcacaacttataggaggtg

SEQ ID NO: 53508 - DNA, 25 bp, Artificial
  probe
  misc_feature (1)..(25): SEQ ID NO: 347; WAN024AG4_at; Start 99; Stop 123
tctactgatttataagtttataagc

SEQ ID NO: 53509 - DNA, 25 bp, Artificial
  probe
  misc_feature (1)..(25): SEQ ID NO: 347; WAN024AG4_at; Start 19; Stop 43
aataaagcggtttcttgaatgtggt

SEQ ID NO: 53510 - DNA, 25 bp, Artificial
  probe
  misc_feature (1)..(25): SEQ ID NO: 347; WAN024AG4_at; Start 79; Stop 103
tgatgaaataggagatagattctac

SEQ ID NO: 53511 - DNA, 25 bp, Artificial
  probe
  misc_feature (1)..(25): SEQ ID NO: 347; WAN024AG4_at; Start 21; Stop 45
taaagcggtttcttgaatgtggtaa

SEQ ID NO: 53512 - DNA, 25 bp, Artificial
  probe
  misc_feature (1)..(25): SEQ ID NO: 347; WAN024AG4_at; Start 38; Stop 62
tgtggtaagtcaatggtatatagta

SEQ ID NO: 53513 - DNA, 25 bp, Artificial
  probe
  misc_feature (1)..(25): SEQ ID NO: 347; WAN024AG4_at; Start 31; Stop 55
tcttgaatgtggtaagtcaatggta

SEQ ID NO: 53514 - DNA, 25 bp, Artificial
  probe
  misc_feature (1)..(25): SEQ ID NO: 347; WAN024AG4_at; Start 140; Stop 164
ttagttcacaacttataggaggtgt

SEQ ID NO: 53515 - DNA, 25 bp, Artificial
  probe
  misc_feature (1)..(25): SEQ ID NO: 347; WAN024AG4_at; Start 80; Stop 104
gatgaaataggagatagattctact

SEQ ID NO: 53516 - DNA, 25 bp, Artificial
  probe
  misc_feature (1)..(25): SEQ ID NO: 347; WAN024AG4_at; Start 142; Stop 166
agttcacaacttataggaggtgtac

SEQ ID NO: 53517 - DNA, 25 bp, Artificial
  probe
  misc_feature (1)..(25): SEQ ID NO: 347; WAN024AG4_at; Start 27; Stop 51
ggtttcttgaatgtggtaagtcaat

SEQ ID NO: 53518 - DNA, 25 bp, Artificial
  probe
  misc_feature (1)..(25): SEQ ID NO: 347; WAN024AG4_at; Start 32; Stop 56
cttgaatgtggtaagtcaatggtat

SEQ ID NO: 53519 - DNA, 25 bp, Artificial
  probe
  misc_feature (1)..(25): SEQ ID NO: 347; WAN024AG4_at; Start 36; Stop 60
aatgtggtaagtcaatggtatatag

SEQ ID NO: 53520 - DNA, 25 bp, Artificial
  probe
  misc_feature (1)..(25): SEQ ID NO: 347; WAN024AG4_at; Start 61; Stop 85
tataagtgatcaatttattgatgaa

SEQ ID NO: 53521 - DNA, 25 bp, Artificial
  probe
  misc_feature (1)..(25): SEQ ID NO: 347; WAN024AG4_at; Start 25; Stop 49
gcggtttcttgaatgtggtaagtca

SEQ ID NO: 53522 - DNA, 25 bp, Artificial
  probe
  misc_feature (1)..(25): SEQ ID NO: 347; WAN024AG4_at; Start 35; Stop 59
gaatgtggtaagtcaatggtatata

SEQ ID NO: 53523 - DNA, 25 bp, Artificial
  probe
  misc_feature (1)..(25): SEQ ID NO: 347; WAN024AG4_at; Start 24; Stop 48
agcggtttcttgaatgtggtaagtc

SEQ ID NO: 53524 - DNA, 25 bp, Artificial
  probe
  misc_feature (1)..(25): SEQ ID NO: 347; WAN024AG4_at; Start 29; Stop 53
tttcttgaatgtggtaagtcaatgg

SEQ ID NO: 53525 - DNA, 25 bp, Artificial
  probe
  misc_feature (1)..(25): SEQ ID NO: 347; WAN024AG4_at; Start 18; Stop 42
aaataaagcggtttcttgaatgtgg

SEQ ID NO: 53526 - DNA, 25 bp, Artificial
  probe
  misc_feature (1)..(25): SEQ ID NO: 347; WAN024AG4_at; Start 141; Stop 165
tagttcacaacttataggaggtgta

SEQ ID NO: 53527 - DNA, 25 bp, Artificial
  probe
  misc_feature (1)..(25): SEQ ID NO: 347; WAN024AG4_at; Start 82; Stop 106
tgaaataggagatagattctactga

SEQ ID NO: 53528 - DNA, 25 bp, Artificial
  probe
  misc_feature (1)..(25): SEQ ID NO: 347; WAN024AG4_at; Start 135; Stop 159
gctttttagttcacaacttatagga

SEQ ID NO: 53529 - DNA, 25 bp, Artificial
  probe
  misc_feature (1)..(25): SEQ ID NO: 347; WAN024AG4_at; Start 26; Stop 50
cggtttcttgaatgtggtaagtcaa

SEQ ID NO: 53530 - DNA, 25 bp, Artificial
  probe
  misc_feature (1)..(25): SEQ ID NO: 347; WAN024AG4_at; Start 92; Stop 116
gatagattctactgatttataagtt

SEQ ID NO: 53531 - DNA, 25 bp, Artificial
  probe
  misc_feature (1)..(25): SEQ ID NO: 347; WAN024AG4_at; Start 76; Stop 100
tattgatgaaataggagatagattc

SEQ ID NO: 53532 - DNA, 25 bp, Artificial
  probe
  misc_feature (1)..(25): SEQ ID NO: 347; WAN024AG4_at; Start 83; Stop 107
gaaataggagatagattctactgat

SEQ ID NO: 53533 - DNA, 25 bp, Artificial
  probe
  misc_feature (1)..(25): SEQ ID NO: 347; WAN024AG4_at; Start 87; Stop 111
taggagatagattctactgatttat

SEQ ID NO: 53534 - DNA, 25 bp, Artificial
  probe
  misc_feature (1)..(25): SEQ ID NO: 347; WAN024AG4_at; Start 48; Stop 72
caatggtatatagtataagtgatca

SEQ ID NO: 53535 - DNA, 25 bp, Artificial
  probe
  misc_feature (1)..(25): SEQ ID NO: 347; WAN024AG4_at; Start 22; Stop 46
aaagcggtttcttgaatgtggtaag

SEQ ID NO: 53536 - DNA, 25 bp, Artificial
  probe
  misc_feature (1)..(25): SEQ ID NO: 304; WAN024AG5_at; Start 150; Stop 174
tatattgagaaagataccaaaccca

SEQ ID NO: 53537 - DNA, 25 bp, Artificial
  probe
  misc_feature (1)..(25): SEQ ID NO: 304; WAN024AG5_at; Start 41; Stop 65
taggaacctgacgagaaatcctgat

SEQ ID NO: 53538 - DNA, 25 bp, Artificial
  probe
  misc_feature (1)..(25): SEQ ID NO: 304; WAN024AG5_at; Start 121; Stop 145
cacgctctacctttctttattttat

SEQ ID NO: 53539 - DNA, 25 bp, Artificial
  probe
  misc_feature (1)..(25): SEQ ID NO: 304; WAN024AG5_at; Start 117; Stop 141
aacacacgctctacctttctttatt

SEQ ID NO: 53540 - DNA, 25 bp, Artificial
  probe
  misc_feature (1)..(25): SEQ ID NO: 304; WAN024AG5_at; Start 53; Stop 77
gagaaatcctgatttttcagtcaga

SEQ ID NO: 53541 - DNA, 25 bp, Artificial
  probe
  misc_feature (1)..(25): SEQ ID NO: 304; WAN024AG5_at; Start 19; Stop 43
cgagaagaaaacgactgaaaattag

SEQ ID NO: 53542 - DNA, 25 bp, Artificial
  probe
  misc_feature (1)..(25): SEQ ID NO: 304; WAN024AG5_at; Start 79; Stop 103
tatctattttccgagttttccgctc

SEQ ID NO: 53543 - DNA, 25 bp, Artificial
  probe
  misc_feature (1)..(25): SEQ ID NO: 304; WAN024AG5_at; Start 10; Stop 34
tacaaagagcgagaagaaaacgact

SEQ ID NO: 53544 - DNA, 25 bp, Artificial
  probe
  misc_feature (1)..(25): SEQ ID NO: 304; WAN024AG5_at; Start 190; Stop 214
aaaataggagttgggcgcagtgagc

SEQ ID NO: 53545 - DNA, 25 bp, Artificial
  probe
  misc_feature (1)..(25): SEQ ID NO: 304; WAN024AG5_at; Start 96; Stop 120
ttccgctcgtgttcaaatcaaaaca

SEQ ID NO: 53546 - DNA, 25 bp, Artificial
  probe
  misc_feature (1)..(25): SEQ ID NO: 304; WAN024AG5_at; Start 173; Stop 197
catcaaaaagcgaagggaaaatagg

SEQ ID NO: 53547 - DNA, 25 bp, Artificial
  probe
  misc_feature (1)..(25): SEQ ID NO: 304; WAN024AG5_at; Start 44; Stop 68
gaacctgacgagaaatcctgatttt

SEQ ID NO: 53548 - DNA, 25 bp, Artificial
  probe
  misc_feature (1)..(25): SEQ ID NO: 304; WAN024AG5_at; Start 5; Stop 29
tatgatacaaagagcgagaagaaaa

SEQ ID NO: 53549 - DNA, 25 bp, Artificial
  probe
  misc_feature (1)..(25): SEQ ID NO: 304; WAN024AG5_at; Start 172; Stop 196
ccatcaaaaagcgaagggaaaatag

SEQ ID NO: 53550 - DNA, 25 bp, Artificial
  probe
  misc_feature (1)..(25): SEQ ID NO: 304; WAN024AG5_at; Start 155; Stop 179
tgagaaagataccaaacccatcaaa

SEQ ID NO: 53551 - DNA, 25 bp, Artificial
  probe
  misc_feature (1)..(25): SEQ ID NO: 304; WAN024AG5_at; Start 29; Stop 53
acgactgaaaattaggaacctgacg

SEQ ID NO: 53552 - DNA, 25 bp, Artificial
  probe
  misc_feature (1)..(25): SEQ ID NO: 304; WAN024AG5_at; Start 1; Stop 25
aatttatgatacaaagagcgagaag

SEQ ID NO: 53553 - DNA, 25 bp, Artificial
  probe
  misc_feature (1)..(25): SEQ ID NO: 304; WAN024AG5_at; Start 16; Stop 40
gagcgagaagaaaacgactgaaaat

SEQ ID NO: 53554 - DNA, 25 bp, Artificial
  probe
  misc_feature (1)..(25): SEQ ID NO: 304; WAN024AG5_at; Start 152; Stop 176
tattgagaaagataccaaacccatc

SEQ ID NO: 53555 - DNA, 25 bp, Artificial
  probe
  misc_feature (1)..(25): SEQ ID NO: 304; WAN024AG5_at; Start 59; Stop 83
tcctgatttttcagtcagattatct

SEQ ID NO: 53556 - DNA, 25 bp, Artificial
  probe
  misc_feature (1)..(25): SEQ ID NO: 304; WAN024AG5_at; Start 82; Stop 106
ctattttccgagttttccgctcgtg

SEQ ID NO: 53557 - DNA, 25 bp, Artificial
  probe
  misc_feature (1)..(25): SEQ ID NO: 304; WAN024AG5_at; Start 34; Stop 58
tgaaaattaggaacctgacgagaaa

SEQ ID NO: 53558 - DNA, 25 bp, Artificial
  probe
  misc_feature (1)..(25): SEQ ID NO: 304; WAN024AG5_at; Start 93; Stop 117
gttttccgctcgtgttcaaatcaaa

SEQ ID NO: 53559 - DNA, 25 bp, Artificial
  probe
  misc_feature (1)..(25): SEQ ID NO: 304; WAN024AG5_at; Start 162; Stop 186
gataccaaacccatcaaaaagcgaa

SEQ ID NO: 53560 - DNA, 25 bp, Artificial
  probe
  misc_feature (1)..(25): SEQ ID NO: 304; WAN024AG5_at; Start 12; Stop 36
caaagagcgagaagaaaacgactga

SEQ ID NO: 53561 - DNA, 25 bp, Artificial
  probe
  misc_feature (1)..(25): SEQ ID NO: 304; WAN024AG5_at; Start 38; Stop 62
aattaggaacctgacgagaaatcct

SEQ ID NO: 53562 - DNA, 25 bp, Artificial
  probe
  misc_feature (1)..(25): SEQ ID NO: 304; WAN024AG5_at; Start 108; Stop 132
tcaaatcaaaacacacgctctacct

SEQ ID NO: 53563 - DNA, 25 bp, Artificial
  probe
  misc_feature (1)..(25): SEQ ID NO: 304; WAN024AG5_at; Start 70; Stop 94
cagtcagattatctattttccgagt

SEQ ID NO: 53564 - DNA, 25 bp, Artificial
  probe
  misc_feature (1)..(25): SEQ ID NO: 304; WAN024AG5_at; Start 105; Stop 129
tgttcaaatcaaaacacacgctcta

SEQ ID NO: 53565 - DNA, 25 bp, Artificial
  probe
  misc_feature (1)..(25): SEQ ID NO: 304; WAN024AG5_at; Start 184; Stop 208
gaagggaaaataggagttgggcgca

SEQ ID NO: 53566 - DNA, 25 bp, Artificial
  probe
  misc_feature (1)..(25): SEQ ID NO: 304; WAN024AG5_at; Start 100; Stop 124
gctcgtgttcaaatcaaaacacacg

SEQ ID NO: 53567 - DNA, 25 bp, Artificial
  probe
  misc_feature (1)..(25): SEQ ID NO: 304; WAN024AG5_at; Start 31; Stop 55
gactgaaaattaggaacctgacgag

SEQ ID NO: 53568 - DNA, 25 bp, Artificial
  probe
  misc_feature (1)..(25): SEQ ID NO: 304; WAN024AG5_at; Start 91; Stop 115
gagttttccgctcgtgttcaaatca

SEQ ID NO: 53569 - DNA, 25 bp, Artificial
  probe
  misc_feature (1)..(25): SEQ ID NO: 304; WAN024AG5_at; Start 113; Stop 137
tcaaaacacacgctctacctttctt

SEQ ID NO: 53570 - DNA, 25 bp, Artificial
  probe
  misc_feature (1)..(25): SEQ ID NO: 3257; WAN024AG6_at; Start 148; Stop 172
aaaatcaggatttctcgtcaggttc

SEQ ID NO: 53571 - DNA, 25 bp, Artificial
  probe
  misc_feature (1)..(25): SEQ ID NO: 3257; WAN024AG6_at; Start 150; Stop 174
aatcaggatttctcgtcaggttcct

SEQ ID NO: 53572 - DNA, 25 bp, Artificial
  probe
  misc_feature (1)..(25): SEQ ID NO: 3257; WAN024AG6_at; Start 163; Stop 187
cgtcaggttcctaattttcagtcgt

SEQ ID NO: 53573 - DNA, 25 bp, Artificial
  probe
  misc_feature (1)..(25): SEQ ID NO: 3257; WAN024AG6_at; Start 42; Stop 66
tgggtttggtatctttctcaatata

SEQ ID NO: 53574 - DNA, 25 bp, Artificial
  probe
  misc_feature (1)..(25): SEQ ID NO: 3257; WAN024AG6_at; Start 2; Stop 26
gctcactgcgcccaactcctatttt

SEQ ID NO: 53575 - DNA, 25 bp, Artificial
  probe
  misc_feature (1)..(25): SEQ ID NO: 3257; WAN024AG6_at; Start 153; Stop 177
caggatttctcgtcaggttcctaat

SEQ ID NO: 53576 - DNA, 25 bp, Artificial
  probe
  misc_feature (1)..(25): SEQ ID NO: 3257; WAN024AG6_at; Start 87; Stop 111
tagagcgtgtgttttgatttgaaca

SEQ ID NO: 53577 - DNA, 25 bp, Artificial
  probe
  misc_feature (1)..(25): SEQ ID NO: 3257; WAN024AG6_at; Start 182; Stop 206
agtcgttttcttctcgctctttgta

SEQ ID NO: 53578 - DNA, 25 bp, Artificial
  probe
  misc_feature (1)..(25): SEQ ID NO: 3257; WAN024AG6_at; Start 81; Stop 105
gaaaggtagagcgtgtgttttgatt

SEQ ID NO: 53579 - DNA, 25 bp, Artificial
  probe
  misc_feature (1)..(25): SEQ ID NO: 3257; WAN024AG6_at; Start 132; Stop 156
tagataatctgactgaaaaatcagg

SEQ ID NO: 53580 - DNA, 25 bp, Artificial
  probe
  misc_feature (1)..(25): SEQ ID NO: 3257; WAN024AG6_at; Start 123; Stop 147
ctcggaaaatagataatctgactga

SEQ ID NO: 53581 - DNA, 25 bp, Artificial
  probe
  misc_feature (1)..(25): SEQ ID NO: 3257; WAN024AG6_at; Start 134; Stop 158
gataatctgactgaaaaatcaggat

SEQ ID NO: 53582 - DNA, 25 bp, Artificial
  probe
  misc_feature (1)..(25): SEQ ID NO: 3257; WAN024AG6_at; Start 174; Stop 198
taattttcagtcgttttcttctcgc

SEQ ID NO: 53583 - DNA, 25 bp, Artificial
  probe
  misc_feature (1)..(25): SEQ ID NO: 3257; WAN024AG6_at; Start 92; Stop 116
cgtgtgttttgatttgaacacgagc

SEQ ID NO: 53584 - DNA, 25 bp, Artificial
  probe
  misc_feature (1)..(25): SEQ ID NO: 3257; WAN024AG6_at; Start 120; Stop 144
aaactcggaaaatagataatctgac

SEQ ID NO: 53585 - DNA, 25 bp, Artificial
  probe
  misc_feature (1)..(25): SEQ ID NO: 3257; WAN024AG6_at; Start 29; Stop 53
cttcgctttttgatgggtttggtat

SEQ ID NO: 53586 - DNA, 25 bp, Artificial
  probe
  misc_feature (1)..(25): SEQ ID NO: 3257; WAN024AG6_at; Start 96; Stop 120
tgttttgatttgaacacgagcggaa

SEQ ID NO: 53587 - DNA, 25 bp, Artificial
  probe
  misc_feature (1)..(25): SEQ ID NO: 3257; WAN024AG6_at; Start 180; Stop 204
tcagtcgttttcttctcgctctttg

SEQ ID NO: 53588 - DNA, 25 bp, Artificial
  probe
  misc_feature (1)..(25): SEQ ID NO: 3257; WAN024AG6_at; Start 159; Stop 183
ttctcgtcaggttcctaattttcag

SEQ ID NO: 53589 - DNA, 25 bp, Artificial
  probe
  misc_feature (1)..(25): SEQ ID NO: 3257; WAN024AG6_at; Start 20; Stop 44
ctattttcccttcgctttttgatgg

SEQ ID NO: 53590 - DNA, 25 bp, Artificial
  probe
  misc_feature (1)..(25): SEQ ID NO: 3257; WAN024AG6_at; Start 113; Stop 137
gagcggaaaactcggaaaatagata

SEQ ID NO: 53591 - DNA, 25 bp, Artificial
  probe
  misc_feature (1)..(25): SEQ ID NO: 3257; WAN024AG6_at; Start 110; Stop 134
cacgagcggaaaactcggaaaatag

SEQ ID NO: 53592 - DNA, 25 bp, Artificial
  probe
  misc_feature (1)..(25): SEQ ID NO: 3257; WAN024AG6_at; Start 191; Stop 215
cttctcgctctttgtatcataaatt

SEQ ID NO: 53593 - DNA, 25 bp, Artificial
  probe
  misc_feature (1)..(25): SEQ ID NO: 3257; WAN024AG6_at; Start 145; Stop 169
tgaaaaatcaggatttctcgtcagg

SEQ ID NO: 53594 - DNA, 25 bp, Artificial
  probe
  misc_feature (1)..(25): SEQ ID NO: 3257; WAN024AG6_at; Start 118; Stop 142
gaaaactcggaaaatagataatctg

SEQ ID NO: 53595 - DNA, 25 bp, Artificial
  probe
  misc_feature (1)..(25): SEQ ID NO: 3257; WAN024AG6_at; Start 99; Stop 123
tttgatttgaacacgagcggaaaac

SEQ ID NO: 53596 - DNA, 25 bp, Artificial
  probe
  misc_feature (1)..(25): SEQ ID NO: 3257; WAN024AG6_at; Start 106; Stop 130
tgaacacgagcggaaaactcggaaa

SEQ ID NO: 53597 - DNA, 25 bp, Artificial
  probe
  misc_feature (1)..(25): SEQ ID NO: 3257; WAN024AG6_at; Start 75; Stop 99
aataaagaaaggtagagcgtgtgtt

SEQ ID NO: 53598 - DNA, 25 bp, Artificial
  probe
  misc_feature (1)..(25): SEQ ID NO: 3257; WAN024AG6_at; Start 40; Stop 64
gatgggtttggtatctttctcaata

SEQ ID NO: 53599 - DNA, 25 bp, Artificial
  probe
  misc_feature (1)..(25): SEQ ID NO: 3257; WAN024AG6_at; Start 186; Stop 210
gttttcttctcgctctttgtatcat

SEQ ID NO: 53600 - DNA, 25 bp, Artificial
  probe
  misc_feature (1)..(25): SEQ ID NO: 3257; WAN024AG6_at; Start 101; Stop 125
tgatttgaacacgagcggaaaactc

SEQ ID NO: 53601 - DNA, 25 bp, Artificial
  probe
  misc_feature (1)..(25): SEQ ID NO: 3257; WAN024AG6_at; Start 103; Stop 127
atttgaacacgagcggaaaactcgg

SEQ ID NO: 53602 - DNA, 25 bp, Artificial
  probe
  misc_feature (1)..(25): SEQ ID NO: 3257; WAN024AG6_at; Start 139; Stop 163
tctgactgaaaaatcaggatttctc

SEQ ID NO: 53603 - DNA, 25 bp, Artificial
  probe
  misc_feature (1)..(25): SEQ ID NO: 3257; WAN024AG6_at; Start 73; Stop 97
aaaataaagaaaggtagagcgtgtg

SEQ ID NO: 53604 - DNA, 25 bp, Artificial
  probe
  misc_feature (1)..(25): SEQ ID NO: 4428; WAN024AG7_at; Start 131; Stop 155
caattgatttaggacatttgtttga

SEQ ID NO: 53605 - DNA, 25 bp, Artificial
  probe
  misc_feature (1)..(25): SEQ ID NO: 4428; WAN024AG7_at; Start 173; Stop 197
taaatctgctacataatttgtggag

SEQ ID NO: 53606 - DNA, 25 bp, Artificial
  probe
  misc_feature (1)..(25): SEQ ID NO: 4428; WAN024AG7_at; Start 218; Stop 242
ttaacctaacctgcaaataggagta

SEQ ID NO: 53607 - DNA, 25 bp, Artificial
  probe
  misc_feature (1)..(25): SEQ ID NO: 4428; WAN024AG7_at; Start 79; Stop 103
ggatgcttataacagagtgacgcca

SEQ ID NO: 53608 - DNA, 25 bp, Artificial
  probe
  misc_feature (1)..(25): SEQ ID NO: 4428; WAN024AG7_at; Start 62; Stop 86
cagtataccccgttgttggatgctt

SEQ ID NO: 53609 - DNA, 25 bp, Artificial
  probe
  misc_feature (1)..(25): SEQ ID NO: 4428; WAN024AG7_at; Start 110; Stop 134
ggctaatagagataaaataaacaat

SEQ ID NO: 53610 - DNA, 25 bp, Artificial
  probe
  misc_feature (1)..(25): SEQ ID NO: 4428; WAN024AG7_at; Start 191; Stop 215
tgtggagttttttctataattagga

SEQ ID NO: 53611 - DNA, 25 bp, Artificial
  probe
  misc_feature (1)..(25): SEQ ID NO: 4428; WAN024AG7_at; Start 227; Stop 251
cctgcaaataggagtatactaataa

SEQ ID NO: 53612 - DNA, 25 bp, Artificial
  probe
  misc_feature (1)..(25): SEQ ID NO: 4428; WAN024AG7_at; Start 140; Stop 164
taggacatttgtttgatagtggtga

SEQ ID NO: 53613 - DNA, 25 bp, Artificial
  probe
  misc_feature (1)..(25): SEQ ID NO: 4428; WAN024AG7_at; Start 101; Stop 125
ccatcactgggctaatagagataaa

SEQ ID NO: 53614 - DNA, 25 bp, Artificial
  probe
  misc_feature (1)..(25): SEQ ID NO: 4428; WAN024AG7_at; Start 249; Stop 273
taatgtaatcgttatcaaaagtcta

SEQ ID NO: 53615 - DNA, 25 bp, Artificial
  probe
  misc_feature (1)..(25): SEQ ID NO: 4428; WAN024AG7_at; Start 145; Stop 169
catttgtttgatagtggtgataaag

SEQ ID NO: 53616 - DNA, 25 bp, Artificial
  probe
  misc_feature (1)..(25): SEQ ID NO: 4428; WAN024AG7_at; Start 180; Stop 204
gctacataatttgtggagttttttc

SEQ ID NO: 53617 - DNA, 25 bp, Artificial
  probe
  misc_feature (1)..(25): SEQ ID NO: 4428; WAN024AG7_at; Start 2; Stop 26
aacatattaaaaatctccagattag

SEQ ID NO: 53618 - DNA, 25 bp, Artificial
  probe
  misc_feature (1)..(25): SEQ ID NO: 4428; WAN024AG7_at; Start 86; Stop 110
tataacagagtgacgccatcactgg

SEQ ID NO: 53619 - DNA, 25 bp, Artificial
  probe
  misc_feature (1)..(25): SEQ ID NO: 4428; WAN024AG7_at; Start 160; Stop 184
ggtgataaagttttaaatctgctac

SEQ ID NO: 53620 - DNA, 25 bp, Artificial
  probe
  misc_feature (1)..(25): SEQ ID NO: 4428; WAN024AG7_at; Start 93; Stop 117
gagtgacgccatcactgggctaata

SEQ ID NO: 53621 - DNA, 25 bp, Artificial
  probe
  misc_feature (1)..(25): SEQ ID NO: 4428; WAN024AG7_at; Start 95; Stop 119
gtgacgccatcactgggctaataga

SEQ ID NO: 53622 - DNA, 25 bp, Artificial
  probe
  misc_feature (1)..(25): SEQ ID NO: 4428; WAN024AG7_at; Start 70; Stop 94
cccgttgttggatgcttataacaga

SEQ ID NO: 53623 - DNA, 25 bp, Artificial
  probe
  misc_feature (1)..(25): SEQ ID NO: 4428; WAN024AG7_at; Start 82; Stop 106
tgcttataacagagtgacgccatca

SEQ ID NO: 53624 - DNA, 25 bp, Artificial
  probe
  misc_feature (1)..(25): SEQ ID NO: 4428; WAN024AG7_at; Start 107; Stop 131
ctgggctaatagagataaaataaac

SEQ ID NO: 53625 - DNA, 25 bp, Artificial
  probe
  misc_feature (1)..(25): SEQ ID NO: 4428; WAN024AG7_at; Start 222; Stop 246
cctaacctgcaaataggagtatact

SEQ ID NO: 53626 - DNA, 25 bp, Artificial
  probe
  misc_feature (1)..(25): SEQ ID NO: 4428; WAN024AG7_at; Start 143; Stop 167
gacatttgtttgatagtggtgataa

SEQ ID NO: 53627 - DNA, 25 bp, Artificial
  probe
  misc_feature (1)..(25): SEQ ID NO: 4428; WAN024AG7_at; Start 122; Stop 146
taaaataaacaattgatttaggaca

SEQ ID NO: 53628 - DNA, 25 bp, Artificial
  probe
  misc_feature (1)..(25): SEQ ID NO: 4428; WAN024AG7_at; Start 252; Stop 276
tgtaatcgttatcaaaagtctaaaa

SEQ ID NO: 53629 - DNA, 25 bp, Artificial
  probe
  misc_feature (1)..(25): SEQ ID NO: 4428; WAN024AG7_at; Start 83; Stop 107
gcttataacagagtgacgccatcac

SEQ ID NO: 53630 - DNA, 25 bp, Artificial
  probe
  misc_feature (1)..(25): SEQ ID NO: 4428; WAN024AG7_at; Start 78; Stop 102
tggatgcttataacagagtgacgcc

SEQ ID NO: 53631 - DNA, 25 bp, Artificial
  probe
  misc_feature (1)..(25): SEQ ID NO: 4428; WAN024AG7_at; Start 235; Stop 259
taggagtatactaataatgtaatcg

SEQ ID NO: 53632 - DNA, 25 bp, Artificial
  probe
  misc_feature (1)..(25): SEQ ID NO: 4428; WAN024AG7_at; Start 67; Stop 91
taccccgttgttggatgcttataac

SEQ ID NO: 53633 - DNA, 25 bp, Artificial
  probe
  misc_feature (1)..(25): SEQ ID NO: 4428; WAN024AG7_at; Start 64; Stop 88
gtataccccgttgttggatgcttat

SEQ ID NO: 53634 - DNA, 25 bp, Artificial
  probe
  misc_feature (1)..(25): SEQ ID NO: 4428; WAN024AG7_at; Start 49; Stop 73
tctggagatttttcagtataccccg

SEQ ID NO: 53635 - DNA, 25 bp, Artificial
  probe
  misc_feature (1)..(25): SEQ ID NO: 4428; WAN024AG7_at; Start 97; Stop 121
gacgccatcactgggctaatagaga

SEQ ID NO: 53636 - DNA, 25 bp, Artificial
  probe
  misc_feature (1)..(25): SEQ ID NO: 4428; WAN024AG7_at; Start 50; Stop 74
ctggagatttttcagtataccccgt

SEQ ID NO: 53637 - DNA, 25 bp, Artificial
  probe
  misc_feature (1)..(25): SEQ ID NO: 4428; WAN024AG7_at; Start 91; Stop 115
cagagtgacgccatcactgggctaa

SEQ ID NO: 53638 - DNA, 25 bp, Artificial
  probe
  misc_feature (1)..(25): SEQ ID NO: 3268; WAN024AG8_at; Start 180; Stop 204
cagtgatggcgtcactctgttataa

SEQ ID NO: 53639 - DNA, 25 bp, Artificial
  probe
  misc_feature (1)..(25): SEQ ID NO: 3268; WAN024AG8_at; Start 105; Stop 129
gtagcagatttaaaactttatcacc

SEQ ID NO: 53640 - DNA, 25 bp, Artificial
  probe
  misc_feature (1)..(25): SEQ ID NO: 3268; WAN024AG8_at; Start 47; Stop 71
tactcctatttgcaggttaggttaa

SEQ ID NO: 53641 - DNA, 25 bp, Artificial
  probe
  misc_feature (1)..(25): SEQ ID NO: 3268; WAN024AG8_at; Start 183; Stop 207
tgatggcgtcactctgttataagca

SEQ ID NO: 53642 - DNA, 25 bp, Artificial
  probe
  misc_feature (1)..(25): SEQ ID NO: 3268; WAN024AG8_at; Start 108; Stop 132
gcagatttaaaactttatcaccact

SEQ ID NO: 53643 - DNA, 25 bp, Artificial
  probe
  misc_feature (1)..(25): SEQ ID NO: 3268; WAN024AG8_at; Start 125; Stop 149
tcaccactatcaaacaaatgtccta

SEQ ID NO: 53644 - DNA, 25 bp, Artificial
  probe
  misc_feature (1)..(25): SEQ ID NO: 3268; WAN024AG8_at; Start 123; Stop 147
tatcaccactatcaaacaaatgtcc

SEQ ID NO: 53645 - DNA, 25 bp, Artificial
  probe
  misc_feature (1)..(25): SEQ ID NO: 3268; WAN024AG8_at; Start 172; Stop 196
tattagcccagtgatggcgtcactc

SEQ ID NO: 53646 - DNA, 25 bp, Artificial
  probe
  misc_feature (1)..(25): SEQ ID NO: 3268; WAN024AG8_at; Start 42; Stop 66
tagtatactcctatttgcaggttag

SEQ ID NO: 53647 - DNA, 25 bp, Artificial
  probe
  misc_feature (1)..(25): SEQ ID NO: 3268; WAN024AG8_at; Start 170; Stop 194
tctattagcccagtgatggcgtcac

SEQ ID NO: 53648 - DNA, 25 bp, Artificial
  probe
  misc_feature (1)..(25): SEQ ID NO: 3268; WAN024AG8_at; Start 165; Stop 189
ttatctctattagcccagtgatggc

SEQ ID NO: 53649 - DNA, 25 bp, Artificial
  probe
  misc_feature (1)..(25): SEQ ID NO: 3268; WAN024AG8_at; Start 85; Stop 109
gaaaaaactccacaaattatgtagc

SEQ ID NO: 53650 - DNA, 25 bp, Artificial
  probe
  misc_feature (1)..(25): SEQ ID NO: 3268; WAN024AG8_at; Start 229; Stop 253
aaaatctccagactagggaactcag

SEQ ID NO: 53651 - DNA, 25 bp, Artificial
  probe
  misc_feature (1)..(25): SEQ ID NO: 3268; WAN024AG8_at; Start 195; Stop 219
tctgttataagcatccaacaacggg

SEQ ID NO: 53652 - DNA, 25 bp, Artificial
  probe
  misc_feature (1)..(25): SEQ ID NO: 3268; WAN024AG8_at; Start 190; Stop 214
gtcactctgttataagcatccaaca

SEQ ID NO: 53653 - DNA, 25 bp, Artificial
  probe
  misc_feature (1)..(25): SEQ ID NO: 3268; WAN024AG8_at; Start 81; Stop 105
tatagaaaaaactccacaaattatg

SEQ ID NO: 53654 - DNA, 25 bp, Artificial
  probe
  misc_feature (1)..(25): SEQ ID NO: 3268; WAN024AG8_at; Start 175; Stop 199
tagcccagtgatggcgtcactctgt

SEQ ID NO: 53655 - DNA, 25 bp, Artificial
  probe
  misc_feature (1)..(25): SEQ ID NO: 3268; WAN024AG8_at; Start 202; Stop 226
taagcatccaacaacggggtatact

SEQ ID NO: 53656 - DNA, 25 bp, Artificial
  probe
  misc_feature (1)..(25): SEQ ID NO: 3268; WAN024AG8_at; Start 13; Stop 37
ttttagacttttgataacgattaca

SEQ ID NO: 53657 - DNA, 25 bp, Artificial
  probe
  misc_feature (1)..(25): SEQ ID NO: 3268; WAN024AG8_at; Start 38; Stop 62
ttattagtatactcctatttgcagg

SEQ ID NO: 53658 - DNA, 25 bp, Artificial
  probe
  misc_feature (1)..(25): SEQ ID NO: 3268; WAN024AG8_at; Start 139; Stop 163
caaatgtcctaaatcaattgtttat

SEQ ID NO: 53659 - DNA, 25 bp, Artificial
  probe
  misc_feature (1)..(25): SEQ ID NO: 3268; WAN024AG8_at; Start 74; Stop 98
tcctaattatagaaaaaactccaca

SEQ ID NO: 53660 - DNA, 25 bp, Artificial
  probe
  misc_feature (1)..(25): SEQ ID NO: 3268; WAN024AG8_at; Start 134; Stop 158
tcaaacaaatgtcctaaatcaattg

SEQ ID NO: 53661 - DNA, 25 bp, Artificial
  probe
  misc_feature (1)..(25): SEQ ID NO: 3268; WAN024AG8_at; Start 94; Stop 118
ccacaaattatgtagcagatttaaa

SEQ ID NO: 53662 - DNA, 25 bp, Artificial
  probe
  misc_feature (1)..(25): SEQ ID NO: 3268; WAN024AG8_at; Start 178; Stop 202
cccagtgatggcgtcactctgttat

SEQ ID NO: 53663 - DNA, 25 bp, Artificial
  probe
  misc_feature (1)..(25): SEQ ID NO: 3268; WAN024AG8_at; Start 188; Stop 212
gcgtcactctgttataagcatccaa

SEQ ID NO: 53664 - DNA, 25 bp, Artificial
  probe
  misc_feature (1)..(25): SEQ ID NO: 3268; WAN024AG8_at; Start 186; Stop 210
tggcgtcactctgttataagcatcc

SEQ ID NO: 53665 - DNA, 25 bp, Artificial
  probe
  misc_feature (1)..(25): SEQ ID NO: 3268; WAN024AG8_at; Start 264; Stop 288
taatctggagatttttaatatgtta

SEQ ID NO: 53666 - DNA, 25 bp, Artificial
  probe
  misc_feature (1)..(25): SEQ ID NO: 3268; WAN024AG8_at; Start 161; Stop 185
tattttatctctattagcccagtga

SEQ ID NO: 53667 - DNA, 25 bp, Artificial
  probe
  misc_feature (1)..(25): SEQ ID NO: 3268; WAN024AG8_at; Start 168; Stop 192
tctctattagcccagtgatggcgtc

SEQ ID NO: 53668 - DNA, 25 bp, Artificial
  probe
  misc_feature (1)..(25): SEQ ID NO: 3268; WAN024AG8_at; Start 28; Stop 52
aacgattacattattagtatactcc

SEQ ID NO: 53669 - DNA, 25 bp, Artificial
  probe
  misc_feature (1)..(25): SEQ ID NO: 3268; WAN024AG8_at; Start 158; Stop 182
gtttattttatctctattagcccag

SEQ ID NO: 53670 - DNA, 25 bp, Artificial
  probe
  misc_feature (1)..(25): SEQ ID NO: 3268; WAN024AG8_at; Start 88; Stop 112
aaaactccacaaattatgtagcaga

SEQ ID NO: 53671 - DNA, 25 bp, Artificial
  probe
  misc_feature (1)..(25): SEQ ID NO: 3268; WAN024AG8_at; Start 215; Stop 239
acggggtatactgaaaaatctccag

SEQ ID NO: 53672 - DNA, 25 bp, Artificial
  probe
  misc_feature (1)..(25): SEQ ID NO: 4460; WAN024AG9_at; Start 12; Stop 36
tagaggagagtcgcccgtattcagt

SEQ ID NO: 53673 - DNA, 25 bp, Artificial
  probe
  misc_feature (1)..(25): SEQ ID NO: 4460; WAN024AG9_at; Start 35; Stop 59
gttcagcgaatacagtttacccatc

SEQ ID NO: 53674 - DNA, 25 bp, Artificial
  probe
  misc_feature (1)..(25): SEQ ID NO: 4460; WAN024AG9_at; Start 5; Stop 29
tttgatttagaggagagtcgcccgt

SEQ ID NO: 53675 - DNA, 25 bp, Artificial
  probe
  misc_feature (1)..(25): SEQ ID NO: 4460; WAN024AG9_at; Start 9; Stop 33
atttagaggagagtcgcccgtattc

SEQ ID NO: 53676 - DNA, 25 bp, Artificial
  probe
  misc_feature (1)..(25): SEQ ID NO: 4460; WAN024AG9_at; Start 4; Stop 28
ttttgatttagaggagagtcgcccg

SEQ ID NO: 53677 - DNA, 25 bp, Artificial
  probe
  misc_feature (1)..(25): SEQ ID NO: 4460; WAN024AG9_at; Start 41; Stop 65
cgaatacagtttacccatcctttcg

SEQ ID NO: 53678 - DNA, 25 bp, Artificial
  probe
  misc_feature (1)..(25): SEQ ID NO: 4460; WAN024AG9_at; Start 13; Stop 37
agaggagagtcgcccgtattcagtt

SEQ ID NO: 53679 - DNA, 25 bp, Artificial
  probe
  misc_feature (1)..(25): SEQ ID NO: 4460; WAN024AG9_at; Start 38; Stop 62
cagcgaatacagtttacccatcctt

SEQ ID NO: 53680 - DNA, 25 bp, Artificial
  probe
  misc_feature (1)..(25): SEQ ID NO: 4460; WAN024AG9_at; Start 1; Stop 25
taattttgatttagaggagagtcgc

SEQ ID NO: 53681 - DNA, 25 bp, Artificial
  probe
  misc_feature (1)..(25): SEQ ID NO: 4460; WAN024AG9_at; Start 37; Stop 61
tcagcgaatacagtttacccatcct

SEQ ID NO: 53682 - DNA, 25 bp, Artificial
  probe
  misc_feature (1)..(25): SEQ ID NO: 4460; WAN024AG9_at; Start 29; Stop 53
tattcagttcagcgaatacagttta

SEQ ID NO: 53683 - DNA, 25 bp, Artificial
  probe
  misc_feature (1)..(25): SEQ ID NO: 4460; WAN024AG9_at; Start 34; Stop 58
agttcagcgaatacagtttacccat

SEQ ID NO: 53684 - DNA, 25 bp, Artificial
  probe
  misc_feature (1)..(25): SEQ ID NO: 4460; WAN024AG9_at; Start 2; Stop 26
aattttgatttagaggagagtcgcc

SEQ ID NO: 53685 - DNA, 25 bp, Artificial
  probe
  misc_feature (1)..(25): SEQ ID NO: 4460; WAN024AG9_at; Start 40; Stop 64
gcgaatacagtttacccatcctttc

SEQ ID NO: 53686 - DNA, 25 bp, Artificial
  probe
  misc_feature (1)..(25): SEQ ID NO: 4460; WAN024AG9_at; Start 11; Stop 35
ttagaggagagtcgcccgtattcag

SEQ ID NO: 53687 - DNA, 25 bp, Artificial
  probe
  misc_feature (1)..(25): SEQ ID NO: 4460; WAN024AG9_at; Start 28; Stop 52
gtattcagttcagcgaatacagttt

SEQ ID NO: 53688 - DNA, 25 bp, Artificial
  probe
  misc_feature (1)..(25): SEQ ID NO: 4460; WAN024AG9_at; Start 14; Stop 38
gaggagagtcgcccgtattcagttc

SEQ ID NO: 53689 - DNA, 25 bp, Artificial
  probe
  misc_feature (1)..(25): SEQ ID NO: 4460; WAN024AG9_at; Start 6; Stop 30
ttgatttagaggagagtcgcccgta

SEQ ID NO: 53690 - DNA, 25 bp, Artificial
  probe
  misc_feature (1)..(25): SEQ ID NO: 4460; WAN024AG9_at; Start 8; Stop 32
gatttagaggagagtcgcccgtatt

SEQ ID NO: 53691 - DNA, 25 bp, Artificial
  probe
  misc_feature (1)..(25): SEQ ID NO: 4460; WAN024AG9_at; Start 10; Stop 34
tttagaggagagtcgcccgtattca

SEQ ID NO: 53692 - DNA, 25 bp, Artificial
  probe
  misc_feature (1)..(25): SEQ ID NO: 4460; WAN024AG9_at; Start 33; Stop 57
cagttcagcgaatacagtttaccca

SEQ ID NO: 53693 - DNA, 25 bp, Artificial
  probe
  misc_feature (1)..(25): SEQ ID NO: 4460; WAN024AG9_at; Start 31; Stop 55
ttcagttcagcgaatacagtttacc

SEQ ID NO: 53694 - DNA, 25 bp, Artificial
  probe
  misc_feature (1)..(25): SEQ ID NO: 4460; WAN024AG9_at; Start 7; Stop 31
tgatttagaggagagtcgcccgtat

SEQ ID NO: 53695 - DNA, 25 bp, Artificial
  probe
  misc_feature (1)..(25): SEQ ID NO: 4460; WAN024AG9_at; Start 36; Stop 60
ttcagcgaatacagtttacccatcc

SEQ ID NO: 53696 - DNA, 25 bp, Artificial
  probe
  misc_feature (1)..(25): SEQ ID NO: 4460; WAN024AG9_at; Start 32; Stop 56
tcagttcagcgaatacagtttaccc

SEQ ID NO: 53697 - DNA, 25 bp, Artificial
  probe
  misc_feature (1)..(25): SEQ ID NO: 4460; WAN024AG9_at; Start 30; Stop 54
attcagttcagcgaatacagtttac

SEQ ID NO: 53698 - DNA, 25 bp, Artificial
  probe
  misc_feature (1)..(25): SEQ ID NO: 4460; WAN024AG9_at; Start 27; Stop 51
cgtattcagttcagcgaatacagtt

SEQ ID NO: 53699 - DNA, 25 bp, Artificial
  probe
  misc_feature (1)..(25): SEQ ID NO: 4460; WAN024AG9_at; Start 39; Stop 63
agcgaatacagtttacccatccttt

SEQ ID NO: 53700 - DNA, 25 bp, Artificial
  probe
  misc_feature (1)..(25): SEQ ID NO: 4460; WAN024AG9_at; Start 3; Stop 27
attttgatttagaggagagtcgccc

SEQ ID NO: 53701 - DNA, 25 bp, Artificial
  probe
  misc_feature (1)..(25): SEQ ID NO: 3610; WAN024AGA_at; Start 31; Stop 55
aaaggatgggtaaactgtattcgct

SEQ ID NO: 53702 - DNA, 25 bp, Artificial
  probe
  misc_feature (1)..(25): SEQ ID NO: 3610; WAN024AGA_at; Start 61; Stop 85
gaatacgggcgactctcctctaaat

SEQ ID NO: 53703 - DNA, 25 bp, Artificial
  probe
  misc_feature (1)..(25): SEQ ID NO: 3610; WAN024AGA_at; Start 33; Stop 57
aggatgggtaaactgtattcgctga

SEQ ID NO: 53704 - DNA, 25 bp, Artificial
  probe
  misc_feature (1)..(25): SEQ ID NO: 3610; WAN024AGA_at; Start 34; Stop 58
ggatgggtaaactgtattcgctgaa

SEQ ID NO: 53705 - DNA, 25 bp, Artificial
  probe
  misc_feature (1)..(25): SEQ ID NO: 3610; WAN024AGA_at; Start 68; Stop 92
ggcgactctcctctaaatcaaaatt

SEQ ID NO: 53706 - DNA, 25 bp, Artificial
  probe
  misc_feature (1)..(25): SEQ ID NO: 3610; WAN024AGA_at; Start 69; Stop 93
gcgactctcctctaaatcaaaatta

SEQ ID NO: 53707 - DNA, 25 bp, Artificial
  probe
  misc_feature (1)..(25): SEQ ID NO: 3610; WAN024AGA_at; Start 57; Stop 81
aactgaatacgggcgactctcctct

SEQ ID NO: 53708 - DNA, 25 bp, Artificial
  probe
  misc_feature (1)..(25): SEQ ID NO: 3610; WAN024AGA_at; Start 30; Stop 54
gaaaggatgggtaaactgtattcgc

SEQ ID NO: 53709 - DNA, 25 bp, Artificial
  probe
  misc_feature (1)..(25): SEQ ID NO: 3610; WAN024AGA_at; Start 41; Stop 65
taaactgtattcgctgaactgaata

SEQ ID NO: 53710 - DNA, 25 bp, Artificial
  probe
  misc_feature (1)..(25): SEQ ID NO: 3610; WAN024AGA_at; Start 64; Stop 88
tacgggcgactctcctctaaatcaa

SEQ ID NO: 53711 - DNA, 25 bp, Artificial
  probe
  misc_feature (1)..(25): SEQ ID NO: 3610; WAN024AGA_at; Start 29; Stop 53
cgaaaggatgggtaaactgtattcg

SEQ ID NO: 53712 - DNA, 25 bp, Artificial
  probe
  misc_feature (1)..(25): SEQ ID NO: 3610; WAN024AGA_at; Start 59; Stop 83
ctgaatacgggcgactctcctctaa

SEQ ID NO: 53713 - DNA, 25 bp, Artificial
  probe
  misc_feature (1)..(25): SEQ ID NO: 3610; WAN024AGA_at; Start 42; Stop 66
aaactgtattcgctgaactgaatac

SEQ ID NO: 53714 - DNA, 25 bp, Artificial
  probe
  misc_feature (1)..(25): SEQ ID NO: 3610; WAN024AGA_at; Start 37; Stop 61
tgggtaaactgtattcgctgaactg

SEQ ID NO: 53715 - DNA, 25 bp, Artificial
  probe
  misc_feature (1)..(25): SEQ ID NO: 3610; WAN024AGA_at; Start 66; Stop 90
cgggcgactctcctctaaatcaaaa

SEQ ID NO: 53716 - DNA, 25 bp, Artificial
  probe
  misc_feature (1)..(25): SEQ ID NO: 3610; WAN024AGA_at; Start 32; Stop 56
aaggatgggtaaactgtattcgctg

SEQ ID NO: 53717 - DNA, 25 bp, Artificial
  probe
  misc_feature (1)..(25): SEQ ID NO: 3610; WAN024AGA_at; Start 63; Stop 87
atacgggcgactctcctctaaatca

SEQ ID NO: 53718 - DNA, 25 bp, Artificial
  probe
  misc_feature (1)..(25): SEQ ID NO: 3610; WAN024AGA_at; Start 65; Stop 89
acgggcgactctcctctaaatcaaa

SEQ ID NO: 53719 - DNA, 25 bp, Artificial
  probe
  misc_feature (1)..(25): SEQ ID NO: 3610; WAN024AGA_at; Start 43; Stop 67
aactgtattcgctgaactgaatacg

SEQ ID NO: 53720 - DNA, 25 bp, Artificial
  probe
  misc_feature (1)..(25): SEQ ID NO: 3610; WAN024AGA_at; Start 38; Stop 62
gggtaaactgtattcgctgaactga

SEQ ID NO: 53721 - DNA, 25 bp, Artificial
  probe
  misc_feature (1)..(25): SEQ ID NO: 3610; WAN024AGA_at; Start 58; Stop 82
actgaatacgggcgactctcctcta

SEQ ID NO: 53722 - DNA, 25 bp, Artificial
  probe
  misc_feature (1)..(25): SEQ ID NO: 3610; WAN024AGA_at; Start 39; Stop 63
ggtaaactgtattcgctgaactgaa

SEQ ID NO: 53723 - DNA, 25 bp, Artificial
  probe
  misc_feature (1)..(25): SEQ ID NO: 3610; WAN024AGA_at; Start 56; Stop 80
gaactgaatacgggcgactctcctc

SEQ ID NO: 53724 - DNA, 25 bp, Artificial
  probe
  misc_feature (1)..(25): SEQ ID NO: 3610; WAN024AGA_at; Start 40; Stop 64
gtaaactgtattcgctgaactgaat

SEQ ID NO: 53725 - DNA, 25 bp, Artificial
  probe
  misc_feature (1)..(25): SEQ ID NO: 3610; WAN024AGA_at; Start 67; Stop 91
gggcgactctcctctaaatcaaaat

SEQ ID NO: 53726 - DNA, 25 bp, Artificial
  probe
  misc_feature (1)..(25): SEQ ID NO: 3610; WAN024AGA_at; Start 36; Stop 60
atgggtaaactgtattcgctgaact

SEQ ID NO: 53727 - DNA, 25 bp, Artificial
  probe
  misc_feature (1)..(25): SEQ ID NO: 3610; WAN024AGA_at; Start 35; Stop 59
gatgggtaaactgtattcgctgaac

SEQ ID NO: 53728 - DNA, 25 bp, Artificial
  probe
  misc_feature (1)..(25): SEQ ID NO: 3610; WAN024AGA_at; Start 62; Stop 86
aatacgggcgactctcctctaaatc

SEQ ID NO: 53729 - DNA, 25 bp, Artificial
  probe
  misc_feature (1)..(25): SEQ ID NO: 3610; WAN024AGA_at; Start 60; Stop 84
tgaatacgggcgactctcctctaaa

SEQ ID NO: 53730 - DNA, 25 bp, Artificial
  probe
  misc_feature (1)..(25): SEQ ID NO: 312; WAN024AGB_at; Start 28; Stop 52
tgagtcctattcaagctcaggtagt

SEQ ID NO: 53731 - DNA, 25 bp, Artificial
  probe
  misc_feature (1)..(25): SEQ ID NO: 312; WAN024AGB_at; Start 27; Stop 51
ctgagtcctattcaagctcaggtag

SEQ ID NO: 53732 - DNA, 25 bp, Artificial
  probe
  misc_feature (1)..(25): SEQ ID NO: 312; WAN024AGB_at; Start 38; Stop 62
tcaagctcaggtagtactttcttat

SEQ ID NO: 53733 - DNA, 25 bp, Artificial
  probe
  misc_feature (1)..(25): SEQ ID NO: 312; WAN024AGB_at; Start 43; Stop 67
ctcaggtagtactttcttataaact

SEQ ID NO: 53734 - DNA, 25 bp, Artificial
  probe
  misc_feature (1)..(25): SEQ ID NO: 312; WAN024AGB_at; Start 40; Stop 64
aagctcaggtagtactttcttataa

SEQ ID NO: 53735 - DNA, 25 bp, Artificial
  probe
  misc_feature (1)..(25): SEQ ID NO: 312; WAN024AGB_at; Start 37; Stop 61
ttcaagctcaggtagtactttctta

SEQ ID NO: 53736 - DNA, 25 bp, Artificial
  probe
  misc_feature (1)..(25): SEQ ID NO: 312; WAN024AGB_at; Start 29; Stop 53
gagtcctattcaagctcaggtagta

SEQ ID NO: 53737 - DNA, 25 bp, Artificial
  probe
  misc_feature (1)..(25): SEQ ID NO: 312; WAN024AGB_at; Start 30; Stop 54
agtcctattcaagctcaggtagtac

SEQ ID NO: 53738 - DNA, 25 bp, Artificial
  probe
  misc_feature (1)..(25): SEQ ID NO: 312; WAN024AGB_at; Start 42; Stop 66
gctcaggtagtactttcttataaac

SEQ ID NO: 53739 - DNA, 25 bp, Artificial
  probe
  misc_feature (1)..(25): SEQ ID NO: 312; WAN024AGB_at; Start 26; Stop 50
cctgagtcctattcaagctcaggta

SEQ ID NO: 53740 - DNA, 25 bp, Artificial
  probe
  misc_feature (1)..(25): SEQ ID NO: 312; WAN024AGB_at; Start 31; Stop 55
gtcctattcaagctcaggtagtact

SEQ ID NO: 53741 - DNA, 25 bp, Artificial
  probe
  misc_feature (1)..(25): SEQ ID NO: 312; WAN024AGB_at; Start 32; Stop 56
tcctattcaagctcaggtagtactt

SEQ ID NO: 53742 - DNA, 25 bp, Artificial
  probe
  misc_feature (1)..(25): SEQ ID NO: 312; WAN024AGB_at; Start 44; Stop 68
tcaggtagtactttcttataaacta

SEQ ID NO: 53743 - DNA, 25 bp, Artificial
  probe
  misc_feature (1)..(25): SEQ ID NO: 312; WAN024AGB_at; Start 35; Stop 59
tattcaagctcaggtagtactttct

SEQ ID NO: 53744 - DNA, 25 bp, Artificial
  probe
  misc_feature (1)..(25): SEQ ID NO: 312; WAN024AGB_at; Start 33; Stop 57
cctattcaagctcaggtagtacttt

SEQ ID NO: 53745 - DNA, 25 bp, Artificial
  probe
  misc_feature (1)..(25): SEQ ID NO: 312; WAN024AGB_at; Start 17; Stop 41
agagagctacctgagtcctattcaa

SEQ ID NO: 53746 - DNA, 25 bp, Artificial
  probe
  misc_feature (1)..(25): SEQ ID NO: 312; WAN024AGB_at; Start 34; Stop 58
ctattcaagctcaggtagtactttc

SEQ ID NO: 53747 - DNA, 25 bp, Artificial
  probe
  misc_feature (1)..(25): SEQ ID NO: 312; WAN024AGB_at; Start 39; Stop 63
caagctcaggtagtactttcttata

SEQ ID NO: 53748 - DNA, 25 bp, Artificial
  probe
  misc_feature (1)..(25): SEQ ID NO: 312; WAN024AGB_at; Start 24; Stop 48
tacctgagtcctattcaagctcagg

SEQ ID NO: 53749 - DNA, 25 bp, Artificial
  probe
  misc_feature (1)..(25): SEQ ID NO: 312; WAN024AGB_at; Start 23; Stop 47
ctacctgagtcctattcaagctcag

SEQ ID NO: 53750 - DNA, 25 bp, Artificial
  probe
  misc_feature (1)..(25): SEQ ID NO: 312; WAN024AGB_at; Start 48; Stop 72
gtagtactttcttataaactagaca

SEQ ID NO: 53751 - DNA, 25 bp, Artificial
  probe
  misc_feature (1)..(25): SEQ ID NO: 312; WAN024AGB_at; Start 20; Stop 44
gagctacctgagtcctattcaagct

SEQ ID NO: 53752 - DNA, 25 bp, Artificial
  probe
  misc_feature (1)..(25): SEQ ID NO: 312; WAN024AGB_at; Start 49; Stop 73
tagtactttcttataaactagacaa

SEQ ID NO: 53753 - DNA, 25 bp, Artificial
  probe
  misc_feature (1)..(25): SEQ ID NO: 312; WAN024AGB_at; Start 41; Stop 65
agctcaggtagtactttcttataaa

SEQ ID NO: 53754 - DNA, 25 bp, Artificial
  probe
  misc_feature (1)..(25): SEQ ID NO: 312; WAN024AGB_at; Start 22; Stop 46
gctacctgagtcctattcaagctca

SEQ ID NO: 53755 - DNA, 25 bp, Artificial
  probe
  misc_feature (1)..(25): SEQ ID NO: 312; WAN024AGB_at; Start 25; Stop 49
acctgagtcctattcaagctcaggt

SEQ ID NO: 53756 - DNA, 25 bp, Artificial
  probe
  misc_feature (1)..(25): SEQ ID NO: 312; WAN024AGB_at; Start 18; Stop 42
gagagctacctgagtcctattcaag

SEQ ID NO: 53757 - DNA, 25 bp, Artificial
  probe
  misc_feature (1)..(25): SEQ ID NO: 312; WAN024AGB_at; Start 36; Stop 60
attcaagctcaggtagtactttctt

SEQ ID NO: 53758 - DNA, 25 bp, Artificial
  probe
  misc_feature (1)..(25): SEQ ID NO: 312; WAN024AGB_at; Start 21; Stop 45
agctacctgagtcctattcaagctc

SEQ ID NO: 53759 - DNA, 25 bp, Artificial
  probe
  misc_feature (1)..(25): SEQ ID NO: 312; WAN024AGB_at; Start 45; Stop 69
caggtagtactttcttataaactag

SEQ ID NO: 53760 - DNA, 25 bp, Artificial
  probe
  misc_feature (1)..(25): SEQ ID NO: 312; WAN024AGB_at; Start 19; Stop 43
agagctacctgagtcctattcaagc

SEQ ID NO: 53761 - DNA, 25 bp, Artificial
  probe
  misc_feature (1)..(25): SEQ ID NO: 4653; WAN024AGC_at; Start 50; Stop 74
cctgagcttgaataggactcaggta

SEQ ID NO: 53762 - DNA, 25 bp, Artificial
  probe
  misc_feature (1)..(25): SEQ ID NO: 4653; WAN024AGC_at; Start 55; Stop 79
gcttgaataggactcaggtagctct

SEQ ID NO: 53763 - DNA, 25 bp, Artificial
  probe
  misc_feature (1)..(25): SEQ ID NO: 4653; WAN024AGC_at; Start 25; Stop 49
ttgtctagtttataagaaagtacta

SEQ ID NO: 53764 - DNA, 25 bp, Artificial
  probe
  misc_feature (1)..(25): SEQ ID NO: 4653; WAN024AGC_at; Start 35; Stop 59
tataagaaagtactacctgagcttg

SEQ ID NO: 53765 - DNA, 25 bp, Artificial
  probe
  misc_feature (1)..(25): SEQ ID NO: 4653; WAN024AGC_at; Start 36; Stop 60
ataagaaagtactacctgagcttga

SEQ ID NO: 53766 - DNA, 25 bp, Artificial
  probe
  misc_feature (1)..(25): SEQ ID NO: 4653; WAN024AGC_at; Start 44; Stop 68
gtactacctgagcttgaataggact

SEQ ID NO: 53767 - DNA, 25 bp, Artificial
  probe
  misc_feature (1)..(25): SEQ ID NO: 4653; WAN024AGC_at; Start 34; Stop 58
ttataagaaagtactacctgagctt

SEQ ID NO: 53768 - DNA, 25 bp, Artificial
  probe
  misc_feature (1)..(25): SEQ ID NO: 4653; WAN024AGC_at; Start 48; Stop 72
tacctgagcttgaataggactcagg

SEQ ID NO: 53769 - DNA, 25 bp, Artificial
  probe
  misc_feature (1)..(25): SEQ ID NO: 4653; WAN024AGC_at; Start 57; Stop 81
ttgaataggactcaggtagctctct

SEQ ID NO: 53770 - DNA, 25 bp, Artificial
  probe
  misc_feature (1)..(25): SEQ ID NO: 4653; WAN024AGC_at; Start 33; Stop 57
tttataagaaagtactacctgagct

SEQ ID NO: 53771 - DNA, 25 bp, Artificial
  probe
  misc_feature (1)..(25): SEQ ID NO: 4653; WAN024AGC_at; Start 54; Stop 78
agcttgaataggactcaggtagctc

SEQ ID NO: 53772 - DNA, 25 bp, Artificial
  probe
  misc_feature (1)..(25): SEQ ID NO: 4653; WAN024AGC_at; Start 30; Stop 54
tagtttataagaaagtactacctga

SEQ ID NO: 53773 - DNA, 25 bp, Artificial
  probe
  misc_feature (1)..(25): SEQ ID NO: 4653; WAN024AGC_at; Start 56; Stop 80
cttgaataggactcaggtagctctc

SEQ ID NO: 53774 - DNA, 25 bp, Artificial
  probe
  misc_feature (1)..(25): SEQ ID NO: 4653; WAN024AGC_at; Start 40; Stop 64
gaaagtactacctgagcttgaatag

SEQ ID NO: 53775 - DNA, 25 bp, Artificial
  probe
  misc_feature (1)..(25): SEQ ID NO: 4653; WAN024AGC_at; Start 41; Stop 65
aaagtactacctgagcttgaatagg

SEQ ID NO: 53776 - DNA, 25 bp, Artificial
  probe
  misc_feature (1)..(25): SEQ ID NO: 4653; WAN024AGC_at; Start 42; Stop 66
aagtactacctgagcttgaatagga

SEQ ID NO: 53777 - DNA, 25 bp, Artificial
  probe
  misc_feature (1)..(25): SEQ ID NO: 4653; WAN024AGC_at; Start 32; Stop 56
gtttataagaaagtactacctgagc

SEQ ID NO: 53778 - DNA, 25 bp, Artificial
  probe
  misc_feature (1)..(25): SEQ ID NO: 4653; WAN024AGC_at; Start 38; Stop 62
aagaaagtactacctgagcttgaat

SEQ ID NO: 53779 - DNA, 25 bp, Artificial
  probe
  misc_feature (1)..(25): SEQ ID NO: 4653; WAN024AGC_at; Start 26; Stop 50
tgtctagtttataagaaagtactac

SEQ ID NO: 53780 - DNA, 25 bp, Artificial
  probe
  misc_feature (1)..(25): SEQ ID NO: 4653; WAN024AGC_at; Start 37; Stop 61
taagaaagtactacctgagcttgaa

SEQ ID NO: 53781 - DNA, 25 bp, Artificial
  probe
  misc_feature (1)..(25): SEQ ID NO: 4653; WAN024AGC_at; Start 29; Stop 53
ctagtttataagaaagtactacctg

SEQ ID NO: 53782 - DNA, 25 bp, Artificial
  probe
  misc_feature (1)..(25): SEQ ID NO: 4653; WAN024AGC_at; Start 39; Stop 63
agaaagtactacctgagcttgaata

SEQ ID NO: 53783 - DNA, 25 bp, Artificial
  probe
  misc_feature (1)..(25): SEQ ID NO: 4653; WAN024AGC_at; Start 43; Stop 67
agtactacctgagcttgaataggac

SEQ ID NO: 53784 - DNA, 25 bp, Artificial
  probe
  misc_feature (1)..(25): SEQ ID NO: 4653; WAN024AGC_at; Start 46; Stop 70
actacctgagcttgaataggactca

SEQ ID NO: 53785 - DNA, 25 bp, Artificial
  probe
  misc_feature (1)..(25): SEQ ID NO: 4653; WAN024AGC_at; Start 31; Stop 55
agtttataagaaagtactacctgag

SEQ ID NO: 53786 - DNA, 25 bp, Artificial
  probe
  misc_feature (1)..(25): SEQ ID NO: 4653; WAN024AGC_at; Start 49; Stop 73
acctgagcttgaataggactcaggt

SEQ ID NO: 53787 - DNA, 25 bp, Artificial
  probe
  misc_feature (1)..(25): SEQ ID NO: 4653; WAN024AGC_at; Start 45; Stop 69
tactacctgagcttgaataggactc

SEQ ID NO: 53788 - DNA, 25 bp, Artificial
  probe
  misc_feature (1)..(25): SEQ ID NO: 4653; WAN024AGC_at; Start 47; Stop 71
ctacctgagcttgaataggactcag

SEQ ID NO: 53789 - DNA, 25 bp, Artificial
  probe
  misc_feature (1)..(25): SEQ ID NO: 4653; WAN024AGC_at; Start 52; Stop 76
tgagcttgaataggactcaggtagc

SEQ ID NO: 53790 - DNA, 25 bp, Artificial
  probe
  misc_feature (1)..(25): SEQ ID NO: 4653; WAN024AGC_at; Start 51; Stop 75
ctgagcttgaataggactcaggtag

SEQ ID NO: 53791 - DNA, 25 bp, Artificial
  probe
  misc_feature (1)..(25): SEQ ID NO: 4653; WAN024AGC_at; Start 53; Stop 77
gagcttgaataggactcaggtagct

SEQ ID NO: 53792 - DNA, 25 bp, Artificial
  probe
  misc_feature (1)..(25): SEQ ID NO: 3251; WAN024AGD_at; Start 92; Stop 116
cattttagatatagctatagaaaat

SEQ ID NO: 53793 - DNA, 25 bp, Artificial
  probe
  misc_feature (1)..(25): SEQ ID NO: 3251; WAN024AGD_at; Start 94; Stop 118
ttttagatatagctatagaaaatac

SEQ ID NO: 53794 - DNA, 25 bp, Artificial
  probe
  misc_feature (1)..(25): SEQ ID NO: 3251; WAN024AGD_at; Start 96; Stop 120
ttagatatagctatagaaaatacac

SEQ ID NO: 53795 - DNA, 25 bp, Artificial
  probe
  misc_feature (1)..(25): SEQ ID NO: 3251; WAN024AGD_at; Start 97; Stop 121
tagatatagctatagaaaatacact

SEQ ID NO: 53796 - DNA, 25 bp, Artificial
  probe
  misc_feature (1)..(25): SEQ ID NO: 3251; WAN024AGD_at; Start 95; Stop 119
tttagatatagctatagaaaataca

SEQ ID NO: 53797 - DNA, 25 bp, Artificial
  probe
  misc_feature (1)..(25): SEQ ID NO: 3615; WAN024AGE_at; Start 23; Stop 47
tgtattttctatagctatatctaaa

SEQ ID NO: 53798 - DNA, 25 bp, Artificial
  probe
  misc_feature (1)..(25): SEQ ID NO: 3615; WAN024AGE_at; Start 25; Stop 49
tattttctatagctatatctaaaat

SEQ ID NO: 53799 - DNA, 25 bp, Artificial
  probe
  misc_feature (1)..(25): SEQ ID NO: 3615; WAN024AGE_at; Start 21; Stop 45
agtgtattttctatagctatatcta

SEQ ID NO: 53800 - DNA, 25 bp, Artificial
  probe
  misc_feature (1)..(25): SEQ ID NO: 3615; WAN024AGE_at; Start 24; Stop 48
gtattttctatagctatatctaaaa

SEQ ID NO: 53801 - DNA, 25 bp, Artificial
  probe
  misc_feature (1)..(25): SEQ ID NO: 3615; WAN024AGE_at; Start 22; Stop 46
gtgtattttctatagctatatctaa

SEQ ID NO: 53802 - DNA, 25 bp, Artificial
  probe
  misc_feature (1)..(25): SEQ ID NO: 3615; WAN024AGE_at; Start 26; Stop 50
attttctatagctatatctaaaatg

SEQ ID NO: 53803 - DNA, 25 bp, Artificial
  probe
  misc_feature (1)..(25): SEQ ID NO: 577; WAN024AGF_at; Start 32; Stop 56
ttataccaaaaaatacaatgtagct

SEQ ID NO: 53804 - DNA, 25 bp, Artificial
  probe
  misc_feature (1)..(25): SEQ ID NO: 577; WAN024AGF_at; Start 51; Stop 75
gtagctctaacacttctttcctagg

SEQ ID NO: 53805 - DNA, 25 bp, Artificial
  probe
  misc_feature (1)..(25): SEQ ID NO: 577; WAN024AGF_at; Start 49; Stop 73
atgtagctctaacacttctttccta

SEQ ID NO: 53806 - DNA, 25 bp, Artificial
  probe
  misc_feature (1)..(25): SEQ ID NO: 577; WAN024AGF_at; Start 5; Stop 29
cttctcttttcttacaaatatcttt

SEQ ID NO: 53807 - DNA, 25 bp, Artificial
  probe
  misc_feature (1)..(25): SEQ ID NO: 577; WAN024AGF_at; Start 4; Stop 28
acttctcttttcttacaaatatctt

SEQ ID NO: 53808 - DNA, 25 bp, Artificial
  probe
  misc_feature (1)..(25): SEQ ID NO: 577; WAN024AGF_at; Start 35; Stop 59
taccaaaaaatacaatgtagctcta

SEQ ID NO: 53809 - DNA, 25 bp, Artificial
  probe
  misc_feature (1)..(25): SEQ ID NO: 577; WAN024AGF_at; Start 34; Stop 58
ataccaaaaaatacaatgtagctct

SEQ ID NO: 53810 - DNA, 25 bp, Artificial
  probe
  misc_feature (1)..(25): SEQ ID NO: 577; WAN024AGF_at; Start 7; Stop 31
tctcttttcttacaaatatctttaa

SEQ ID NO: 53811 - DNA, 25 bp, Artificial
  probe
  misc_feature (1)..(25): SEQ ID NO: 577; WAN024AGF_at; Start 3; Stop 27
cacttctcttttcttacaaatatct

SEQ ID NO: 53812 - DNA, 25 bp, Artificial
  probe
  misc_feature (1)..(25): SEQ ID NO: 577; WAN024AGF_at; Start 41; Stop 65
aaaatacaatgtagctctaacactt

SEQ ID NO: 53813 - DNA, 25 bp, Artificial
  probe
  misc_feature (1)..(25): SEQ ID NO: 577; WAN024AGF_at; Start 17; Stop 41
tacaaatatctttaattataccaaa

SEQ ID NO: 53814 - DNA, 25 bp, Artificial
  probe
  misc_feature (1)..(25): SEQ ID NO: 577; WAN024AGF_at; Start 39; Stop 63
aaaaaatacaatgtagctctaacac

SEQ ID NO: 53815 - DNA, 25 bp, Artificial
  probe
  misc_feature (1)..(25): SEQ ID NO: 577; WAN024AGF_at; Start 47; Stop 71
caatgtagctctaacacttctttcc

SEQ ID NO: 53816 - DNA, 25 bp, Artificial
  probe
  misc_feature (1)..(25): SEQ ID NO: 577; WAN024AGF_at; Start 40; Stop 64
aaaaatacaatgtagctctaacact

SEQ ID NO: 53817 - DNA, 25 bp, Artificial
  probe
  misc_feature (1)..(25): SEQ ID NO: 577; WAN024AGF_at; Start 154; Stop 178
ctacaaatagctaaacaaagctaac

SEQ ID NO: 53818 - DNA, 25 bp, Artificial
  probe
  misc_feature (1)..(25): SEQ ID NO: 577; WAN024AGF_at; Start 2; Stop 26
tcacttctcttttcttacaaatatc

SEQ ID NO: 53819 - DNA, 25 bp, Artificial
  probe
  misc_feature (1)..(25): SEQ ID NO: 577; WAN024AGF_at; Start 45; Stop 69
tacaatgtagctctaacacttcttt

SEQ ID NO: 53820 - DNA, 25 bp, Artificial
  probe
  misc_feature (1)..(25): SEQ ID NO: 577; WAN024AGF_at; Start 50; Stop 74
tgtagctctaacacttctttcctag

SEQ ID NO: 53821 - DNA, 25 bp, Artificial
  probe
  misc_feature (1)..(25): SEQ ID NO: 577; WAN024AGF_at; Start 31; Stop 55
attataccaaaaaatacaatgtagc

SEQ ID NO: 53822 - DNA, 25 bp, Artificial
  probe
  misc_feature (1)..(25): SEQ ID NO: 577; WAN024AGF_at; Start 43; Stop 67
aatacaatgtagctctaacacttct

SEQ ID NO: 53823 - DNA, 25 bp, Artificial
  probe
  misc_feature (1)..(25): SEQ ID NO: 577; WAN024AGF_at; Start 48; Stop 72
aatgtagctctaacacttctttcct

SEQ ID NO: 53824 - DNA, 25 bp, Artificial
  probe
  misc_feature (1)..(25): SEQ ID NO: 577; WAN024AGF_at; Start 46; Stop 70
acaatgtagctctaacacttctttc

SEQ ID NO: 53825 - DNA, 25 bp, Artificial
  probe
  misc_feature (1)..(25): SEQ ID NO: 577; WAN024AGF_at; Start 15; Stop 39
cttacaaatatctttaattatacca

SEQ ID NO: 53826 - DNA, 25 bp, Artificial
  probe
  misc_feature (1)..(25): SEQ ID NO: 577; WAN024AGF_at; Start 37; Stop 61
ccaaaaaatacaatgtagctctaac

SEQ ID NO: 53827 - DNA, 25 bp, Artificial
  probe
  misc_feature (1)..(25): SEQ ID NO: 577; WAN024AGF_at; Start 92; Stop 116
aactataagaaaaagctctggttga

SEQ ID NO: 53828 - DNA, 25 bp, Artificial
  probe
  misc_feature (1)..(25): SEQ ID NO: 577; WAN024AGF_at; Start 42; Stop 66
aaatacaatgtagctctaacacttc

SEQ ID NO: 53829 - DNA, 25 bp, Artificial
  probe
  misc_feature (1)..(25): SEQ ID NO: 577; WAN024AGF_at; Start 44; Stop 68
atacaatgtagctctaacacttctt

SEQ ID NO: 53830 - DNA, 25 bp, Artificial
  probe
  misc_feature (1)..(25): SEQ ID NO: 577; WAN024AGF_at; Start 33; Stop 57
tataccaaaaaatacaatgtagctc

SEQ ID NO: 53831 - DNA, 25 bp, Artificial
  probe
  misc_feature (1)..(25): SEQ ID NO: 577; WAN024AGF_at; Start 36; Stop 60
accaaaaaatacaatgtagctctaa

SEQ ID NO: 53832 - DNA, 25 bp, Artificial
  probe
  misc_feature (1)..(25): SEQ ID NO: 577; WAN024AGF_at; Start 14; Stop 38
tcttacaaatatctttaattatacc

SEQ ID NO: 53833 - DNA, 25 bp, Artificial
  probe
  misc_feature (1)..(25): SEQ ID NO: 577; WAN024AGF_at; Start 8; Stop 32
ctcttttcttacaaatatctttaat

SEQ ID NO: 53834 - DNA, 25 bp, Artificial
  probe
  misc_feature (1)..(25): SEQ ID NO: 577; WAN024AGF_at; Start 91; Stop 115
aaactataagaaaaagctctggttg

SEQ ID NO: 53835 - DNA, 25 bp, Artificial
  probe
  misc_feature (1)..(25): SEQ ID NO: 577; WAN024AGF_at; Start 38; Stop 62
caaaaaatacaatgtagctctaaca

SEQ ID NO: 53836 - DNA, 25 bp, Artificial
  probe
  misc_feature (1)..(25): SEQ ID NO: 577; WAN024AGF_at; Start 16; Stop 40
ttacaaatatctttaattataccaa

SEQ ID NO: 53837 - DNA, 25 bp, Artificial
  probe
  misc_feature (1)..(25): SEQ ID NO: 4340; WAN024AGG_at; Start 122; Stop 146
gagctacattgtattttttggtata

SEQ ID NO: 53838 - DNA, 25 bp, Artificial
  probe
  misc_feature (1)..(25): SEQ ID NO: 4340; WAN024AGG_at; Start 114; Stop 138
aagtgttagagctacattgtatttt

SEQ ID NO: 53839 - DNA, 25 bp, Artificial
  probe
  misc_feature (1)..(25): SEQ ID NO: 4340; WAN024AGG_at; Start 143; Stop 167
tataattaaagatatttgtaagaaa

SEQ ID NO: 53840 - DNA, 25 bp, Artificial
  probe
  misc_feature (1)..(25): SEQ ID NO: 4340; WAN024AGG_at; Start 123; Stop 147
agctacattgtattttttggtataa

SEQ ID NO: 53841 - DNA, 25 bp, Artificial
  probe
  misc_feature (1)..(25): SEQ ID NO: 4340; WAN024AGG_at; Start 140; Stop 164
tggtataattaaagatatttgtaag

SEQ ID NO: 53842 - DNA, 25 bp, Artificial
  probe
  misc_feature (1)..(25): SEQ ID NO: 4340; WAN024AGG_at; Start 147; Stop 171
attaaagatatttgtaagaaaagag

SEQ ID NO: 53843 - DNA, 25 bp, Artificial
  probe
  misc_feature (1)..(25): SEQ ID NO: 4340; WAN024AGG_at; Start 141; Stop 165
ggtataattaaagatatttgtaaga

SEQ ID NO: 53844 - DNA, 25 bp, Artificial
  probe
  misc_feature (1)..(25): SEQ ID NO: 4340; WAN024AGG_at; Start 107; Stop 131
aggaaagaagtgttagagctacatt

SEQ ID NO: 53845 - DNA, 25 bp, Artificial
  probe
  misc_feature (1)..(25): SEQ ID NO: 4340; WAN024AGG_at; Start 110; Stop 134
aaagaagtgttagagctacattgta

SEQ ID NO: 53846 - DNA, 25 bp, Artificial
  probe
  misc_feature (1)..(25): SEQ ID NO: 4340; WAN024AGG_at; Start 139; Stop 163
ttggtataattaaagatatttgtaa

SEQ ID NO: 53847 - DNA, 25 bp, Artificial
  probe
  misc_feature (1)..(25): SEQ ID NO: 4340; WAN024AGG_at; Start 116; Stop 140
gtgttagagctacattgtatttttt

SEQ ID NO: 53848 - DNA, 25 bp, Artificial
  probe
  misc_feature (1)..(25): SEQ ID NO: 4340; WAN024AGG_at; Start 111; Stop 135
aagaagtgttagagctacattgtat

SEQ ID NO: 53849 - DNA, 25 bp, Artificial
  probe
  misc_feature (1)..(25): SEQ ID NO: 4340; WAN024AGG_at; Start 142; Stop 166
gtataattaaagatatttgtaagaa

SEQ ID NO: 53850 - DNA, 25 bp, Artificial
  probe
  misc_feature (1)..(25): SEQ ID NO: 4340; WAN024AGG_at; Start 108; Stop 132
ggaaagaagtgttagagctacattg

SEQ ID NO: 53851 - DNA, 25 bp, Artificial
  probe
  misc_feature (1)..(25): SEQ ID NO: 4340; WAN024AGG_at; Start 119; Stop 143
ttagagctacattgtattttttggt

SEQ ID NO: 53852 - DNA, 25 bp, Artificial
  probe
  misc_feature (1)..(25): SEQ ID NO: 4340; WAN024AGG_at; Start 105; Stop 129
ctaggaaagaagtgttagagctaca

SEQ ID NO: 53853 - DNA, 25 bp, Artificial
  probe
  misc_feature (1)..(25): SEQ ID NO: 4340; WAN024AGG_at; Start 64; Stop 88
caaccagagctttttcttatagttt

SEQ ID NO: 53854 - DNA, 25 bp, Artificial
  probe
  misc_feature (1)..(25): SEQ ID NO: 4340; WAN024AGG_at; Start 120; Stop 144
tagagctacattgtattttttggta

SEQ ID NO: 53855 - DNA, 25 bp, Artificial
  probe
  misc_feature (1)..(25): SEQ ID NO: 4340; WAN024AGG_at; Start 148; Stop 172
ttaaagatatttgtaagaaaagaga

SEQ ID NO: 53856 - DNA, 25 bp, Artificial
  probe
  misc_feature (1)..(25): SEQ ID NO: 4340; WAN024AGG_at; Start 113; Stop 137
gaagtgttagagctacattgtattt

SEQ ID NO: 53857 - DNA, 25 bp, Artificial
  probe
  misc_feature (1)..(25): SEQ ID NO: 4340; WAN024AGG_at; Start 124; Stop 148
gctacattgtattttttggtataat

SEQ ID NO: 53858 - DNA, 25 bp, Artificial
  probe
  misc_feature (1)..(25): SEQ ID NO: 4340; WAN024AGG_at; Start 125; Stop 149
ctacattgtattttttggtataatt

SEQ ID NO: 53859 - DNA, 25 bp, Artificial
  probe
  misc_feature (1)..(25): SEQ ID NO: 4340; WAN024AGG_at; Start 104; Stop 128
cctaggaaagaagtgttagagctac

SEQ ID NO: 53860 - DNA, 25 bp, Artificial
  probe
  misc_feature (1)..(25): SEQ ID NO: 4340; WAN024AGG_at; Start 121; Stop 145
agagctacattgtattttttggtat

SEQ ID NO: 53861 - DNA, 25 bp, Artificial
  probe
  misc_feature (1)..(25): SEQ ID NO: 4340; WAN024AGG_at; Start 106; Stop 130
taggaaagaagtgttagagctacat

SEQ ID NO: 53862 - DNA, 25 bp, Artificial
  probe
  misc_feature (1)..(25): SEQ ID NO: 4340; WAN024AGG_at; Start 1; Stop 25
gttagctttgtttagctatttgtag

SEQ ID NO: 53863 - DNA, 25 bp, Artificial
  probe
  misc_feature (1)..(25): SEQ ID NO: 4340; WAN024AGG_at; Start 112; Stop 136
agaagtgttagagctacattgtatt

SEQ ID NO: 53864 - DNA, 25 bp, Artificial
  probe
  misc_feature (1)..(25): SEQ ID NO: 4340; WAN024AGG_at; Start 126; Stop 150
tacattgtattttttggtataatta

SEQ ID NO: 53865 - DNA, 25 bp, Artificial
  probe
  misc_feature (1)..(25): SEQ ID NO: 4340; WAN024AGG_at; Start 109; Stop 133
gaaagaagtgttagagctacattgt

SEQ ID NO: 53866 - DNA, 25 bp, Artificial
  probe
  misc_feature (1)..(25): SEQ ID NO: 4340; WAN024AGG_at; Start 118; Stop 142
gttagagctacattgtattttttgg

SEQ ID NO: 53867 - DNA, 25 bp, Artificial
  probe
  misc_feature (1)..(25): SEQ ID NO: 4340; WAN024AGG_at; Start 138; Stop 162
tttggtataattaaagatatttgta

SEQ ID NO: 53868 - DNA, 25 bp, Artificial
  probe
  misc_feature (1)..(25): SEQ ID NO: 4340; WAN024AGG_at; Start 117; Stop 141
tgttagagctacattgtattttttg

SEQ ID NO: 53869 - DNA, 25 bp, Artificial
  probe
  misc_feature (1)..(25): SEQ ID NO: 4340; WAN024AGG_at; Start 115; Stop 139
agtgttagagctacattgtattttt

SEQ ID NO: 53870 - DNA, 25 bp, Artificial
  probe
  misc_feature (1)..(25): SEQ ID NO: 4340; WAN024AGG_at; Start 63; Stop 87
tcaaccagagctttttcttatagtt

SEQ ID NO: 53871 - DNA, 25 bp, Artificial
  probe
  misc_feature (1)..(25): SEQ ID NO: 57; WAN024AGH_at; Start 87; Stop 111
gttataatcatacagtattctattt

SEQ ID NO: 53872 - DNA, 25 bp, Artificial
  probe
  misc_feature (1)..(25): SEQ ID NO: 57; WAN024AGH_at; Start 93; Stop 117
atcatacagtattctattttagaaa

SEQ ID NO: 53873 - DNA, 25 bp, Artificial
  probe
  misc_feature (1)..(25): SEQ ID NO: 57; WAN024AGH_at; Start 73; Stop 97
ttaattcaaaacatgttataatcat

SEQ ID NO: 53874 - DNA, 25 bp, Artificial
  probe
  misc_feature (1)..(25): SEQ ID NO: 57; WAN024AGH_at; Start 76; Stop 100
attcaaaacatgttataatcataca

SEQ ID NO: 53875 - DNA, 25 bp, Artificial
  probe
  misc_feature (1)..(25): SEQ ID NO: 57; WAN024AGH_at; Start 12; Stop 36
atttctcgctaattctgctagttta

SEQ ID NO: 53876 - DNA, 25 bp, Artificial
  probe
  misc_feature (1)..(25): SEQ ID NO: 57; WAN024AGH_at; Start 9; Stop 33
aagatttctcgctaattctgctagt

SEQ ID NO: 53877 - DNA, 25 bp, Artificial
  probe
  misc_feature (1)..(25): SEQ ID NO: 57; WAN024AGH_at; Start 98; Stop 122
acagtattctattttagaaagcagt

SEQ ID NO: 53878 - DNA, 25 bp, Artificial
  probe
  misc_feature (1)..(25): SEQ ID NO: 57; WAN024AGH_at; Start 86; Stop 110
tgttataatcatacagtattctatt

SEQ ID NO: 53879 - DNA, 25 bp, Artificial
  probe
  misc_feature (1)..(25): SEQ ID NO: 57; WAN024AGH_at; Start 79; Stop 103
caaaacatgttataatcatacagta

SEQ ID NO: 53880 - DNA, 25 bp, Artificial
  probe
  misc_feature (1)..(25): SEQ ID NO: 57; WAN024AGH_at; Start 5; Stop 29
aactaagatttctcgctaattctgc

SEQ ID NO: 53881 - DNA, 25 bp, Artificial
  probe
  misc_feature (1)..(25): SEQ ID NO: 57; WAN024AGH_at; Start 72; Stop 96
tttaattcaaaacatgttataatca

SEQ ID NO: 53882 - DNA, 25 bp, Artificial
  probe
  misc_feature (1)..(25): SEQ ID NO: 57; WAN024AGH_at; Start 75; Stop 99
aattcaaaacatgttataatcatac

SEQ ID NO: 53883 - DNA, 25 bp, Artificial
  probe
  misc_feature (1)..(25): SEQ ID NO: 57; WAN024AGH_at; Start 80; Stop 104
aaaacatgttataatcatacagtat

SEQ ID NO: 53884 - DNA, 25 bp, Artificial
  probe
  misc_feature (1)..(25): SEQ ID NO: 57; WAN024AGH_at; Start 8; Stop 32
taagatttctcgctaattctgctag

SEQ ID NO: 53885 - DNA, 25 bp, Artificial
  probe
  misc_feature (1)..(25): SEQ ID NO: 57; WAN024AGH_at; Start 71; Stop 95
ttttaattcaaaacatgttataatc

SEQ ID NO: 53886 - DNA, 25 bp, Artificial
  probe
  misc_feature (1)..(25): SEQ ID NO: 57; WAN024AGH_at; Start 77; Stop 101
ttcaaaacatgttataatcatacag

SEQ ID NO: 53887 - DNA, 25 bp, Artificial
  probe
  misc_feature (1)..(25): SEQ ID NO: 57; WAN024AGH_at; Start 85; Stop 109
atgttataatcatacagtattctat

SEQ ID NO: 53888 - DNA, 25 bp, Artificial
  probe
  misc_feature (1)..(25): SEQ ID NO: 57; WAN024AGH_at; Start 94; Stop 118
tcatacagtattctattttagaaag

SEQ ID NO: 53889 - DNA, 25 bp, Artificial
  probe
  misc_feature (1)..(25): SEQ ID NO: 57; WAN024AGH_at; Start 97; Stop 121
tacagtattctattttagaaagcag

SEQ ID NO: 53890 - DNA, 25 bp, Artificial
  probe
  misc_feature (1)..(25): SEQ ID NO: 57; WAN024AGH_at; Start 14; Stop 38
ttctcgctaattctgctagtttaaa

SEQ ID NO: 53891 - DNA, 25 bp, Artificial
  probe
  misc_feature (1)..(25): SEQ ID NO: 57; WAN024AGH_at; Start 96; Stop 120
atacagtattctattttagaaagca

SEQ ID NO: 53892 - DNA, 25 bp, Artificial
  probe
  misc_feature (1)..(25): SEQ ID NO: 57; WAN024AGH_at; Start 95; Stop 119
catacagtattctattttagaaagc

SEQ ID NO: 53893 - DNA, 25 bp, Artificial
  probe
  misc_feature (1)..(25): SEQ ID NO: 57; WAN024AGH_at; Start 84; Stop 108
catgttataatcatacagtattcta

SEQ ID NO: 53894 - DNA, 25 bp, Artificial
  probe
  misc_feature (1)..(25): SEQ ID NO: 57; WAN024AGH_at; Start 4; Stop 28
aaactaagatttctcgctaattctg

SEQ ID NO: 53895 - DNA, 25 bp, Artificial
  probe
  misc_feature (1)..(25): SEQ ID NO: 57; WAN024AGH_at; Start 78; Stop 102
tcaaaacatgttataatcatacagt

SEQ ID NO: 53896 - DNA, 25 bp, Artificial
  probe
  misc_feature (1)..(25): SEQ ID NO: 57; WAN024AGH_at; Start 6; Stop 30
actaagatttctcgctaattctgct

SEQ ID NO: 53897 - DNA, 25 bp, Artificial
  probe
  misc_feature (1)..(25): SEQ ID NO: 57; WAN024AGH_at; Start 13; Stop 37
tttctcgctaattctgctagtttaa

SEQ ID NO: 53898 - DNA, 25 bp, Artificial
  probe
  misc_feature (1)..(25): SEQ ID NO: 57; WAN024AGH_at; Start 83; Stop 107
acatgttataatcatacagtattct

SEQ ID NO: 53899 - DNA, 25 bp, Artificial
  probe
  misc_feature (1)..(25): SEQ ID NO: 57; WAN024AGH_at; Start 3; Stop 27
aaaactaagatttctcgctaattct

SEQ ID NO: 53900 - DNA, 25 bp, Artificial
  probe
  misc_feature (1)..(25): SEQ ID NO: 57; WAN024AGH_at; Start 11; Stop 35
gatttctcgctaattctgctagttt

SEQ ID NO: 53901 - DNA, 25 bp, Artificial
  probe
  misc_feature (1)..(25): SEQ ID NO: 57; WAN024AGH_at; Start 92; Stop 116
aatcatacagtattctattttagaa

SEQ ID NO: 53902 - DNA, 25 bp, Artificial
  probe
  misc_feature (1)..(25): SEQ ID NO: 57; WAN024AGH_at; Start 10; Stop 34
agatttctcgctaattctgctagtt

SEQ ID NO: 53903 - DNA, 25 bp, Artificial
  probe
  misc_feature (1)..(25): SEQ ID NO: 57; WAN024AGH_at; Start 82; Stop 106
aacatgttataatcatacagtattc

SEQ ID NO: 53904 - DNA, 25 bp, Artificial
  probe
  misc_feature (1)..(25): SEQ ID NO: 57; WAN024AGH_at; Start 91; Stop 115
taatcatacagtattctattttaga

SEQ ID NO: 53905 - DNA, 25 bp, Artificial
  probe
  misc_feature (1)..(25): SEQ ID NO: 385; WAN024AGI_at; Start 28; Stop 52
gattataacatgttttgaattaaaa

SEQ ID NO: 53906 - DNA, 25 bp, Artificial
  probe
  misc_feature (1)..(25): SEQ ID NO: 385; WAN024AGI_at; Start 9; Stop 33
ctaaaatagaatactgtatgattat

SEQ ID NO: 53907 - DNA, 25 bp, Artificial
  probe
  misc_feature (1)..(25): SEQ ID NO: 385; WAN024AGI_at; Start 17; Stop 41
gaatactgtatgattataacatgtt

SEQ ID NO: 53908 - DNA, 25 bp, Artificial
  probe
  misc_feature (1)..(25): SEQ ID NO: 385; WAN024AGI_at; Start 4; Stop 28
gctttctaaaatagaatactgtatg

SEQ ID NO: 53909 - DNA, 25 bp, Artificial
  probe
  misc_feature (1)..(25): SEQ ID NO: 385; WAN024AGI_at; Start 96; Stop 120
agaattagcgagaaatcttagtttt

SEQ ID NO: 53910 - DNA, 25 bp, Artificial
  probe
  misc_feature (1)..(25): SEQ ID NO: 385; WAN024AGI_at; Start 8; Stop 32
tctaaaatagaatactgtatgatta

SEQ ID NO: 53911 - DNA, 25 bp, Artificial
  probe
  misc_feature (1)..(25): SEQ ID NO: 385; WAN024AGI_at; Start 90; Stop 114
actagcagaattagcgagaaatctt

SEQ ID NO: 53912 - DNA, 25 bp, Artificial
  probe
  misc_feature (1)..(25): SEQ ID NO: 385; WAN024AGI_at; Start 91; Stop 115
ctagcagaattagcgagaaatctta

SEQ ID NO: 53913 - DNA, 25 bp, Artificial
  probe
  misc_feature (1)..(25): SEQ ID NO: 385; WAN024AGI_at; Start 7; Stop 31
ttctaaaatagaatactgtatgatt

SEQ ID NO: 53914 - DNA, 25 bp, Artificial
  probe
  misc_feature (1)..(25): SEQ ID NO: 385; WAN024AGI_at; Start 13; Stop 37
aatagaatactgtatgattataaca

SEQ ID NO: 53915 - DNA, 25 bp, Artificial
  probe
  misc_feature (1)..(25): SEQ ID NO: 385; WAN024AGI_at; Start 86; Stop 110
ttaaactagcagaattagcgagaaa

SEQ ID NO: 53916 - DNA, 25 bp, Artificial
  probe
  misc_feature (1)..(25): SEQ ID NO: 385; WAN024AGI_at; Start 24; Stop 48
gtatgattataacatgttttgaatt

SEQ ID NO: 53917 - DNA, 25 bp, Artificial
  probe
  misc_feature (1)..(25): SEQ ID NO: 385; WAN024AGI_at; Start 2; Stop 26
ctgctttctaaaatagaatactgta

SEQ ID NO: 53918 - DNA, 25 bp, Artificial
  probe
  misc_feature (1)..(25): SEQ ID NO: 385; WAN024AGI_at; Start 92; Stop 116
tagcagaattagcgagaaatcttag

SEQ ID NO: 53919 - DNA, 25 bp, Artificial
  probe
  misc_feature (1)..(25): SEQ ID NO: 385; WAN024AGI_at; Start 3; Stop 27
tgctttctaaaatagaatactgtat

SEQ ID NO: 53920 - DNA, 25 bp, Artificial
  probe
  misc_feature (1)..(25): SEQ ID NO: 385; WAN024AGI_at; Start 18; Stop 42
aatactgtatgattataacatgttt

SEQ ID NO: 53921 - DNA, 25 bp, Artificial
  probe
  misc_feature (1)..(25): SEQ ID NO: 385; WAN024AGI_at; Start 6; Stop 30
tttctaaaatagaatactgtatgat

SEQ ID NO: 53922 - DNA, 25 bp, Artificial
  probe
  misc_feature (1)..(25): SEQ ID NO: 385; WAN024AGI_at; Start 22; Stop 46
ctgtatgattataacatgttttgaa

SEQ ID NO: 53923 - DNA, 25 bp, Artificial
  probe
  misc_feature (1)..(25): SEQ ID NO: 385; WAN024AGI_at; Start 16; Stop 40
agaatactgtatgattataacatgt

SEQ ID NO: 53924 - DNA, 25 bp, Artificial
  probe
  misc_feature (1)..(25): SEQ ID NO: 385; WAN024AGI_at; Start 95; Stop 119
cagaattagcgagaaatcttagttt

SEQ ID NO: 53925 - DNA, 25 bp, Artificial
  probe
  misc_feature (1)..(25): SEQ ID NO: 385; WAN024AGI_at; Start 23; Stop 47
tgtatgattataacatgttttgaat

SEQ ID NO: 53926 - DNA, 25 bp, Artificial
  probe
  misc_feature (1)..(25): SEQ ID NO: 385; WAN024AGI_at; Start 94; Stop 118
gcagaattagcgagaaatcttagtt

SEQ ID NO: 53927 - DNA, 25 bp, Artificial
  probe
  misc_feature (1)..(25): SEQ ID NO: 385; WAN024AGI_at; Start 5; Stop 29
ctttctaaaatagaatactgtatga

SEQ ID NO: 53928 - DNA, 25 bp, Artificial
  probe
  misc_feature (1)..(25): SEQ ID NO: 385; WAN024AGI_at; Start 12; Stop 36
aaatagaatactgtatgattataac

SEQ ID NO: 53929 - DNA, 25 bp, Artificial
  probe
  misc_feature (1)..(25): SEQ ID NO: 385; WAN024AGI_at; Start 85; Stop 109
tttaaactagcagaattagcgagaa

SEQ ID NO: 53930 - DNA, 25 bp, Artificial
  probe
  misc_feature (1)..(25): SEQ ID NO: 385; WAN024AGI_at; Start 1; Stop 25
actgctttctaaaatagaatactgt

SEQ ID NO: 53931 - DNA, 25 bp, Artificial
  probe
  misc_feature (1)..(25): SEQ ID NO: 385; WAN024AGI_at; Start 21; Stop 45
actgtatgattataacatgttttga

SEQ ID NO: 53932 - DNA, 25 bp, Artificial
  probe
  misc_feature (1)..(25): SEQ ID NO: 385; WAN024AGI_at; Start 88; Stop 112
aaactagcagaattagcgagaaatc

SEQ ID NO: 53933 - DNA, 25 bp, Artificial
  probe
  misc_feature (1)..(25): SEQ ID NO: 385; WAN024AGI_at; Start 15; Stop 39
tagaatactgtatgattataacatg

SEQ ID NO: 53934 - DNA, 25 bp, Artificial
  probe
  misc_feature (1)..(25): SEQ ID NO: 385; WAN024AGI_at; Start 89; Stop 113
aactagcagaattagcgagaaatct

SEQ ID NO: 53935 - DNA, 25 bp, Artificial
  probe
  misc_feature (1)..(25): SEQ ID NO: 385; WAN024AGI_at; Start 87; Stop 111
taaactagcagaattagcgagaaat

SEQ ID NO: 53936 - DNA, 25 bp, Artificial
  probe
  misc_feature (1)..(25): SEQ ID NO: 385; WAN024AGI_at; Start 10; Stop 34
taaaatagaatactgtatgattata

SEQ ID NO: 53937 - DNA, 25 bp, Artificial
  probe
  misc_feature (1)..(25): SEQ ID NO: 385; WAN024AGI_at; Start 20; Stop 44
tactgtatgattataacatgttttg

SEQ ID NO: 53938 - DNA, 25 bp, Artificial
  probe
  misc_feature (1)..(25): SEQ ID NO: 385; WAN024AGI_at; Start 93; Stop 117
agcagaattagcgagaaatcttagt

SEQ ID NO: 53939 - DNA, 25 bp, Artificial
  probe
  misc_feature (1)..(25): SEQ ID NO: 5669; WAN024AGJ_at; Start 93; Stop 117
ttaaacaagtcaggctaaagaaaga

SEQ ID NO: 53940 - DNA, 25 bp, Artificial
  probe
  misc_feature (1)..(25): SEQ ID NO: 5669; WAN024AGJ_at; Start 15; Stop 39
caaagcttcaatctttttacttgct

SEQ ID NO: 53941 - DNA, 25 bp, Artificial
  probe
  misc_feature (1)..(25): SEQ ID NO: 5669; WAN024AGJ_at; Start 37; Stop 61
gctttacaccccaatcctgttataa

SEQ ID NO: 53942 - DNA, 25 bp, Artificial
  probe
  misc_feature (1)..(25): SEQ ID NO: 5669; WAN024AGJ_at; Start 102; Stop 126
tcaggctaaagaaagaaatgaggta

SEQ ID NO: 53943 - DNA, 25 bp, Artificial
  probe
  misc_feature (1)..(25): SEQ ID NO: 5669; WAN024AGJ_at; Start 41; Stop 65
tacaccccaatcctgttataatgag

SEQ ID NO: 53944 - DNA, 25 bp, Artificial
  probe
  misc_feature (1)..(25): SEQ ID NO: 5669; WAN024AGJ_at; Start 46; Stop 70
cccaatcctgttataatgagagtat

SEQ ID NO: 53945 - DNA, 25 bp, Artificial
  probe
  misc_feature (1)..(25): SEQ ID NO: 5669; WAN024AGJ_at; Start 22; Stop 46
tcaatctttttacttgctttacacc

SEQ ID NO: 53946 - DNA, 25 bp, Artificial
  probe
  misc_feature (1)..(25): SEQ ID NO: 5669; WAN024AGJ_at; Start 97; Stop 121
acaagtcaggctaaagaaagaaatg

SEQ ID NO: 53947 - DNA, 25 bp, Artificial
  probe
  misc_feature (1)..(25): SEQ ID NO: 5669; WAN024AGJ_at; Start 68; Stop 92
tatagaatttgactatttttgacct

SEQ ID NO: 53948 - DNA, 25 bp, Artificial
  probe
  misc_feature (1)..(25): SEQ ID NO: 5669; WAN024AGJ_at; Start 36; Stop 60
tgctttacaccccaatcctgttata

SEQ ID NO: 53949 - DNA, 25 bp, Artificial
  probe
  misc_feature (1)..(25): SEQ ID NO: 5669; WAN024AGJ_at; Start 57; Stop 81
tataatgagagtatagaatttgact

SEQ ID NO: 53950 - DNA, 25 bp, Artificial
  probe
  misc_feature (1)..(25): SEQ ID NO: 5669; WAN024AGJ_at; Start 39; Stop 63
tttacaccccaatcctgttataatg

SEQ ID NO: 53951 - DNA, 25 bp, Artificial
  probe
  misc_feature (1)..(25): SEQ ID NO: 5669; WAN024AGJ_at; Start 85; Stop 109
tttgacctttaaacaagtcaggcta

SEQ ID NO: 53952 - DNA, 25 bp, Artificial
  probe
  misc_feature (1)..(25): SEQ ID NO: 5669; WAN024AGJ_at; Start 2; Stop 26
tgtaacaacttctcaaagcttcaat

SEQ ID NO: 53953 - DNA, 25 bp, Artificial
  probe
  misc_feature (1)..(25): SEQ ID NO: 5669; WAN024AGJ_at; Start 43; Stop 67
caccccaatcctgttataatgagag

SEQ ID NO: 53954 - DNA, 25 bp, Artificial
  probe
  misc_feature (1)..(25): SEQ ID NO: 5669; WAN024AGJ_at; Start 99; Stop 123
aagtcaggctaaagaaagaaatgag

SEQ ID NO: 53955 - DNA, 25 bp, Artificial
  probe
  misc_feature (1)..(25): SEQ ID NO: 5669; WAN024AGJ_at; Start 32; Stop 56
tacttgctttacaccccaatcctgt

SEQ ID NO: 53956 - DNA, 25 bp, Artificial
  probe
  misc_feature (1)..(25): SEQ ID NO: 5669; WAN024AGJ_at; Start 103; Stop 127
caggctaaagaaagaaatgaggtag

SEQ ID NO: 53957 - DNA, 25 bp, Artificial
  probe
  misc_feature (1)..(25): SEQ ID NO: 5669; WAN024AGJ_at; Start 7; Stop 31
caacttctcaaagcttcaatctttt

SEQ ID NO: 53958 - DNA, 25 bp, Artificial
  probe
  misc_feature (1)..(25): SEQ ID NO: 5669; WAN024AGJ_at; Start 48; Stop 72
caatcctgttataatgagagtatag

SEQ ID NO: 53959 - DNA, 25 bp, Artificial
  probe
  misc_feature (1)..(25): SEQ ID NO: 5669; WAN024AGJ_at; Start 105; Stop 129
ggctaaagaaagaaatgaggtagat

SEQ ID NO: 53960 - DNA, 25 bp, Artificial
  probe
  misc_feature (1)..(25): SEQ ID NO: 5669; WAN024AGJ_at; Start 33; Stop 57
acttgctttacaccccaatcctgtt

SEQ ID NO: 53961 - DNA, 25 bp, Artificial
  probe
  misc_feature (1)..(25): SEQ ID NO: 5669; WAN024AGJ_at; Start 14; Stop 38
tcaaagcttcaatctttttacttgc

SEQ ID NO: 53962 - DNA, 25 bp, Artificial
  probe
  misc_feature (1)..(25): SEQ ID NO: 5669; WAN024AGJ_at; Start 1; Stop 25
ttgtaacaacttctcaaagcttcaa

SEQ ID NO: 53963 - DNA, 25 bp, Artificial
  probe
  misc_feature (1)..(25): SEQ ID NO: 5669; WAN024AGJ_at; Start 51; Stop 75
tcctgttataatgagagtatagaat

SEQ ID NO: 53964 - DNA, 25 bp, Artificial
  probe
  misc_feature (1)..(25): SEQ ID NO: 5669; WAN024AGJ_at; Start 101; Stop 125
gtcaggctaaagaaagaaatgaggt

SEQ ID NO: 53965 - DNA, 25 bp, Artificial
  probe
  misc_feature (1)..(25): SEQ ID NO: 5669; WAN024AGJ_at; Start 87; Stop 111
tgacctttaaacaagtcaggctaaa

SEQ ID NO: 53966 - DNA, 25 bp, Artificial
  probe
  misc_feature (1)..(25): SEQ ID NO: 5669; WAN024AGJ_at; Start 47; Stop 71
ccaatcctgttataatgagagtata

SEQ ID NO: 53967 - DNA, 25 bp, Artificial
  probe
  misc_feature (1)..(25): SEQ ID NO: 5669; WAN024AGJ_at; Start 4; Stop 28
taacaacttctcaaagcttcaatct

SEQ ID NO: 53968 - DNA, 25 bp, Artificial
  probe
  misc_feature (1)..(25): SEQ ID NO: 5669; WAN024AGJ_at; Start 31; Stop 55
ttacttgctttacaccccaatcctg

SEQ ID NO: 53969 - DNA, 25 bp, Artificial
  probe
  misc_feature (1)..(25): SEQ ID NO: 5669; WAN024AGJ_at; Start 98; Stop 122
caagtcaggctaaagaaagaaatga

SEQ ID NO: 53970 - DNA, 25 bp, Artificial
  probe
  misc_feature (1)..(25): SEQ ID NO: 5669; WAN024AGJ_at; Start 107; Stop 131
ctaaagaaagaaatgaggtagatgt

SEQ ID NO: 53971 - DNA, 25 bp, Artificial
  probe
  misc_feature (1)..(25): SEQ ID NO: 5669; WAN024AGJ_at; Start 44; Stop 68
accccaatcctgttataatgagagt

SEQ ID NO: 53972 - DNA, 25 bp, Artificial
  probe
  misc_feature (1)..(25): SEQ ID NO: 5669; WAN024AGJ_at; Start 45; Stop 69
ccccaatcctgttataatgagagta

SEQ ID NO: 53973 - DNA, 25 bp, Artificial
  probe
  misc_feature (1)..(25): SEQ ID NO: 338; WAN024AGK_at; Start 94; Stop 118
gcaagtaaaaagattgaagctttga

SEQ ID NO: 53974 - DNA, 25 bp, Artificial
  probe
  misc_feature (1)..(25): SEQ ID NO: 338; WAN024AGK_at; Start 22; Stop 46
ttagcctgacttgtttaaaggtcaa

SEQ ID NO: 53975 - DNA, 25 bp, Artificial
  probe
  misc_feature (1)..(25): SEQ ID NO: 338; WAN024AGK_at; Start 95; Stop 119
caagtaaaaagattgaagctttgag

SEQ ID NO: 53976 - DNA, 25 bp, Artificial
  probe
  misc_feature (1)..(25): SEQ ID NO: 338; WAN024AGK_at; Start 8; Stop 32
cctcatttctttctttagcctgact

SEQ ID NO: 53977 - DNA, 25 bp, Artificial
  probe
  misc_feature (1)..(25): SEQ ID NO: 338; WAN024AGK_at; Start 72; Stop 96
tataacaggattggggtgtaaagca

SEQ ID NO: 53978 - DNA, 25 bp, Artificial
  probe
  misc_feature (1)..(25): SEQ ID NO: 338; WAN024AGK_at; Start 11; Stop 35
catttctttctttagcctgacttgt

SEQ ID NO: 53979 - DNA, 25 bp, Artificial
  probe
  misc_feature (1)..(25): SEQ ID NO: 338; WAN024AGK_at; Start 41; Stop 65
ggtcaaaaatagtcaaattctatac

SEQ ID NO: 53980 - DNA, 25 bp, Artificial
  probe
  misc_feature (1)..(25): SEQ ID NO: 338; WAN024AGK_at; Start 50; Stop 74
tagtcaaattctatactctcattat

SEQ ID NO: 53981 - DNA, 25 bp, Artificial
  probe
  misc_feature (1)..(25): SEQ ID NO: 338; WAN024AGK_at; Start 62; Stop 86
atactctcattataacaggattggg

SEQ ID NO: 53982 - DNA, 25 bp, Artificial
  probe
  misc_feature (1)..(25): SEQ ID NO: 338; WAN024AGK_at; Start 89; Stop 113
gtaaagcaagtaaaaagattgaagc

SEQ ID NO: 53983 - DNA, 25 bp, Artificial
  probe
  misc_feature (1)..(25): SEQ ID NO: 338; WAN024AGK_at; Start 2; Stop 26
catctacctcatttctttctttagc

SEQ ID NO: 53984 - DNA, 25 bp, Artificial
  probe
  misc_feature (1)..(25): SEQ ID NO: 338; WAN024AGK_at; Start 56; Stop 80
aattctatactctcattataacagg

SEQ ID NO: 53985 - DNA, 25 bp, Artificial
  probe
  misc_feature (1)..(25): SEQ ID NO: 338; WAN024AGK_at; Start 46; Stop 70
aaaatagtcaaattctatactctca

SEQ ID NO: 53986 - DNA, 25 bp, Artificial
  probe
  misc_feature (1)..(25): SEQ ID NO: 338; WAN024AGK_at; Start 107; Stop 131
ttgaagctttgagaagttgttacaa

SEQ ID NO: 53987 - DNA, 25 bp, Artificial
  probe
  misc_feature (1)..(25): SEQ ID NO: 338; WAN024AGK_at; Start 61; Stop 85
tatactctcattataacaggattgg

SEQ ID NO: 53988 - DNA, 25 bp, Artificial
  probe
  misc_feature (1)..(25): SEQ ID NO: 338; WAN024AGK_at; Start 21; Stop 45
tttagcctgacttgtttaaaggtca

SEQ ID NO: 53989 - DNA, 25 bp, Artificial
  probe
  misc_feature (1)..(25): SEQ ID NO: 338; WAN024AGK_at; Start 58; Stop 82
ttctatactctcattataacaggat

SEQ ID NO: 53990 - DNA, 25 bp, Artificial
  probe
  misc_feature (1)..(25): SEQ ID NO: 338; WAN024AGK_at; Start 6; Stop 30
tacctcatttctttctttagcctga

SEQ ID NO: 53991 - DNA, 25 bp, Artificial
  probe
  misc_feature (1)..(25): SEQ ID NO: 338; WAN024AGK_at; Start 39; Stop 63
aaggtcaaaaatagtcaaattctat

SEQ ID NO: 53992 - DNA, 25 bp, Artificial
  probe
  misc_feature (1)..(25): SEQ ID NO: 338; WAN024AGK_at; Start 43; Stop 67
tcaaaaatagtcaaattctatactc

SEQ ID NO: 53993 - DNA, 25 bp, Artificial
  probe
  misc_feature (1)..(25): SEQ ID NO: 338; WAN024AGK_at; Start 86; Stop 110
ggtgtaaagcaagtaaaaagattga

SEQ ID NO: 53994 - DNA, 25 bp, Artificial
  probe
  misc_feature (1)..(25): SEQ ID NO: 338; WAN024AGK_at; Start 101; Stop 125
aaaagattgaagctttgagaagttg

SEQ ID NO: 53995 - DNA, 25 bp, Artificial
  probe
  misc_feature (1)..(25): SEQ ID NO: 338; WAN024AGK_at; Start 7; Stop 31
acctcatttctttctttagcctgac

SEQ ID NO: 53996 - DNA, 25 bp, Artificial
  probe
  misc_feature (1)..(25): SEQ ID NO: 338; WAN024AGK_at; Start 99; Stop 123
taaaaagattgaagctttgagaagt

SEQ ID NO: 53997 - DNA, 25 bp, Artificial
  probe
  misc_feature (1)..(25): SEQ ID NO: 338; WAN024AGK_at; Start 15; Stop 39
tctttctttagcctgacttgtttaa

SEQ ID NO: 53998 - DNA, 25 bp, Artificial
  probe
  misc_feature (1)..(25): SEQ ID NO: 338; WAN024AGK_at; Start 105; Stop 129
gattgaagctttgagaagttgttac

SEQ ID NO: 53999 - DNA, 25 bp, Artificial
  probe
  misc_feature (1)..(25): SEQ ID NO: 338; WAN024AGK_at; Start 1; Stop 25
acatctacctcatttctttctttag

SEQ ID NO: 54000 - DNA, 25 bp, Artificial
  probe
  misc_feature (1)..(25): SEQ ID NO: 338; WAN024AGK_at; Start 90; Stop 114
taaagcaagtaaaaagattgaagct

SEQ ID NO: 54001 - DNA, 25 bp, Artificial
  probe
  misc_feature (1)..(25): SEQ ID NO: 338; WAN024AGK_at; Start 59; Stop 83
tctatactctcattataacaggatt

SEQ ID NO: 54002 - DNA, 25 bp, Artificial
  probe
  misc_feature (1)..(25): SEQ ID NO: 338; WAN024AGK_at; Start 10; Stop 34
tcatttctttctttagcctgacttg

SEQ ID NO: 54003 - DNA, 25 bp, Artificial
  probe
  misc_feature (1)..(25): SEQ ID NO: 338; WAN024AGK_at; Start 23; Stop 47
tagcctgacttgtttaaaggtcaaa

SEQ ID NO: 54004 - DNA, 25 bp, Artificial
  probe
  misc_feature (1)..(25): SEQ ID NO: 338; WAN024AGK_at; Start 65; Stop 89
ctctcattataacaggattggggtg

SEQ ID NO: 54005 - DNA, 25 bp, Artificial
  probe
  misc_feature (1)..(25): SEQ ID NO: 338; WAN024AGK_at; Start 106; Stop 130
attgaagctttgagaagttgttaca

SEQ ID NO: 54006 - DNA, 25 bp, Artificial
  probe
  misc_feature (1)..(25): SEQ ID NO: 338; WAN024AGK_at; Start 102; Stop 126
aaagattgaagctttgagaagttgt

SEQ ID NO: 54007 - DNA, 25 bp, Artificial
  probe
  misc_feature (1)..(25): SEQ ID NO: 3241; WAN024AGL_at; Start 39; Stop 63
attatcggaggaaaggtattgtact

SEQ ID NO: 54008 - DNA, 25 bp, Artificial
  probe
  misc_feature (1)..(25): SEQ ID NO: 3241; WAN024AGL_at; Start 35; Stop 59
aataattatcggaggaaaggtattg

SEQ ID NO: 54009 - DNA, 25 bp, Artificial
  probe
  misc_feature (1)..(25): SEQ ID NO: 3241; WAN024AGL_at; Start 37; Stop 61
taattatcggaggaaaggtattgta

SEQ ID NO: 54010 - DNA, 25 bp, Artificial
  probe
  misc_feature (1)..(25): SEQ ID NO: 3241; WAN024AGL_at; Start 36; Stop 60
ataattatcggaggaaaggtattgt

SEQ ID NO: 54011 - DNA, 25 bp, Artificial
  probe
  misc_feature (1)..(25): SEQ ID NO: 477; WAN024AGM_at; Start 4; Stop 28
acaatacctttcctccgataattat

SEQ ID NO: 54012 - DNA, 25 bp, Artificial
  probe
  misc_feature (1)..(25): SEQ ID NO: 477; WAN024AGM_at; Start 1; Stop 25
agtacaatacctttcctccgataat

SEQ ID NO: 54013 - DNA, 25 bp, Artificial
  probe
  misc_feature (1)..(25): SEQ ID NO: 477; WAN024AGM_at; Start 5; Stop 29
caatacctttcctccgataattatt

SEQ ID NO: 54014 - DNA, 25 bp, Artificial
  probe
  misc_feature (1)..(25): SEQ ID NO: 477; WAN024AGM_at; Start 3; Stop 27
tacaatacctttcctccgataatta

SEQ ID NO: 54015 - DNA, 25 bp, Artificial
  probe
  misc_feature (1)..(25): SEQ ID NO: 3234; WAN024AGN_at; Start 10; Stop 34
tcaaagtacagatttgaagctgcag

SEQ ID NO: 54016 - DNA, 25 bp, Artificial
  probe
  misc_feature (1)..(25): SEQ ID NO: 3234; WAN024AGN_at; Start 17; Stop 41
acagatttgaagctgcagataagac

SEQ ID NO: 54017 - DNA, 25 bp, Artificial
  probe
  misc_feature (1)..(25): SEQ ID NO: 3234; WAN024AGN_at; Start 15; Stop 39
gtacagatttgaagctgcagataag

SEQ ID NO: 54018 - DNA, 25 bp, Artificial
  probe
  misc_feature (1)..(25): SEQ ID NO: 3234; WAN024AGN_at; Start 6; Stop 30
ttactcaaagtacagatttgaagct

SEQ ID NO: 54019 - DNA, 25 bp, Artificial
  probe
  misc_feature (1)..(25): SEQ ID NO: 3234; WAN024AGN_at; Start 14; Stop 38
agtacagatttgaagctgcagataa

SEQ ID NO: 54020 - DNA, 25 bp, Artificial
  probe
  misc_feature (1)..(25): SEQ ID NO: 3234; WAN024AGN_at; Start 4; Stop 28
agttactcaaagtacagatttgaag

SEQ ID NO: 54021 - DNA, 25 bp, Artificial
  probe
  misc_feature (1)..(25): SEQ ID NO: 3234; WAN024AGN_at; Start 8; Stop 32
actcaaagtacagatttgaagctgc

SEQ ID NO: 54022 - DNA, 25 bp, Artificial
  probe
  misc_feature (1)..(25): SEQ ID NO: 3234; WAN024AGN_at; Start 13; Stop 37
aagtacagatttgaagctgcagata

SEQ ID NO: 54023 - DNA, 25 bp, Artificial
  probe
  misc_feature (1)..(25): SEQ ID NO: 3234; WAN024AGN_at; Start 9; Stop 33
ctcaaagtacagatttgaagctgca

SEQ ID NO: 54024 - DNA, 25 bp, Artificial
  probe
  misc_feature (1)..(25): SEQ ID NO: 3234; WAN024AGN_at; Start 16; Stop 40
tacagatttgaagctgcagataaga

SEQ ID NO: 54025 - DNA, 25 bp, Artificial
  probe
  misc_feature (1)..(25): SEQ ID NO: 3234; WAN024AGN_at; Start 12; Stop 36
aaagtacagatttgaagctgcagat

SEQ ID NO: 54026 - DNA, 25 bp, Artificial
  probe
  misc_feature (1)..(25): SEQ ID NO: 3234; WAN024AGN_at; Start 2; Stop 26
caagttactcaaagtacagatttga

SEQ ID NO: 54027 - DNA, 25 bp, Artificial
  probe
  misc_feature (1)..(25): SEQ ID NO: 3234; WAN024AGN_at; Start 19; Stop 43
agatttgaagctgcagataagactg

SEQ ID NO: 54028 - DNA, 25 bp, Artificial
  probe
  misc_feature (1)..(25): SEQ ID NO: 3234; WAN024AGN_at; Start 1; Stop 25
ccaagttactcaaagtacagatttg

SEQ ID NO: 54029 - DNA, 25 bp, Artificial
  probe
  misc_feature (1)..(25): SEQ ID NO: 3234; WAN024AGN_at; Start 3; Stop 27
aagttactcaaagtacagatttgaa

SEQ ID NO: 54030 - DNA, 25 bp, Artificial
  probe
  misc_feature (1)..(25): SEQ ID NO: 3234; WAN024AGN_at; Start 7; Stop 31
tactcaaagtacagatttgaagctg

SEQ ID NO: 54031 - DNA, 25 bp, Artificial
  probe
  misc_feature (1)..(25): SEQ ID NO: 3234; WAN024AGN_at; Start 5; Stop 29
gttactcaaagtacagatttgaagc

SEQ ID NO: 54032 - DNA, 25 bp, Artificial
  probe
  misc_feature (1)..(25): SEQ ID NO: 3234; WAN024AGN_at; Start 11; Stop 35
caaagtacagatttgaagctgcaga

SEQ ID NO: 54033 - DNA, 25 bp, Artificial
  probe
  misc_feature (1)..(25): SEQ ID NO: 3234; WAN024AGN_at; Start 18; Stop 42
cagatttgaagctgcagataagact

SEQ ID NO: 54034 - DNA, 25 bp, Artificial
  probe
  misc_feature (1)..(25): SEQ ID NO: 4565; WAN024AGO_at; Start 24; Stop 48
tatctgcagcttcaaatctgtactt

SEQ ID NO: 54035 - DNA, 25 bp, Artificial
  probe
  misc_feature (1)..(25): SEQ ID NO: 4565; WAN024AGO_at; Start 20; Stop 44
gtcttatctgcagcttcaaatctgt

SEQ ID NO: 54036 - DNA, 25 bp, Artificial
  probe
  misc_feature (1)..(25): SEQ ID NO: 4565; WAN024AGO_at; Start 18; Stop 42
cagtcttatctgcagcttcaaatct

SEQ ID NO: 54037 - DNA, 25 bp, Artificial
  probe
  misc_feature (1)..(25): SEQ ID NO: 4565; WAN024AGO_at; Start 22; Stop 46
cttatctgcagcttcaaatctgtac

SEQ ID NO: 54038 - DNA, 25 bp, Artificial
  probe
  misc_feature (1)..(25): SEQ ID NO: 4565; WAN024AGO_at; Start 19; Stop 43
agtcttatctgcagcttcaaatctg

SEQ ID NO: 54039 - DNA, 25 bp, Artificial
  probe
  misc_feature (1)..(25): SEQ ID NO: 4565; WAN024AGO_at; Start 21; Stop 45
tcttatctgcagcttcaaatctgta

SEQ ID NO: 54040 - DNA, 25 bp, Artificial
  probe
  misc_feature (1)..(25): SEQ ID NO: 4565; WAN024AGO_at; Start 23; Stop 47
ttatctgcagcttcaaatctgtact

SEQ ID NO: 54041 - DNA, 25 bp, Artificial
  probe
  misc_feature (1)..(25): SEQ ID NO: 588; WAN024AGP_at; Start 1; Stop 25
atcgtaacgattatatcatattttt

SEQ ID NO: 54042 - DNA, 25 bp, Artificial
  probe
  misc_feature (1)..(25): SEQ ID NO: 588; WAN024AGP_at; Start 14; Stop 38
tatcatattttttagaccaagggaa

SEQ ID NO: 54043 - DNA, 25 bp, Artificial
  probe
  misc_feature (1)..(25): SEQ ID NO: 588; WAN024AGP_at; Start 3; Stop 27
cgtaacgattatatcatatttttta

SEQ ID NO: 54044 - DNA, 25 bp, Artificial
  probe
  misc_feature (1)..(25): SEQ ID NO: 588; WAN024AGP_at; Start 11; Stop 35
ttatatcatattttttagaccaagg

SEQ ID NO: 54045 - DNA, 25 bp, Artificial
  probe
  misc_feature (1)..(25): SEQ ID NO: 588; WAN024AGP_at; Start 9; Stop 33
gattatatcatattttttagaccaa

SEQ ID NO: 54046 - DNA, 25 bp, Artificial
  probe
  misc_feature (1)..(25): SEQ ID NO: 588; WAN024AGP_at; Start 2; Stop 26
tcgtaacgattatatcatatttttt

SEQ ID NO: 54047 - DNA, 25 bp, Artificial
  probe
  misc_feature (1)..(25): SEQ ID NO: 588; WAN024AGP_at; Start 8; Stop 32
cgattatatcatattttttagacca

SEQ ID NO: 54048 - DNA, 25 bp, Artificial
  probe
  misc_feature (1)..(25): SEQ ID NO: 588; WAN024AGP_at; Start 13; Stop 37
atatcatattttttagaccaaggga

SEQ ID NO: 54049 - DNA, 25 bp, Artificial
  probe
  misc_feature (1)..(25): SEQ ID NO: 588; WAN024AGP_at; Start 7; Stop 31
acgattatatcatattttttagacc

SEQ ID NO: 54050 - DNA, 25 bp, Artificial
  probe
  misc_feature (1)..(25): SEQ ID NO: 588; WAN024AGP_at; Start 10; Stop 34
attatatcatattttttagaccaag

SEQ ID NO: 54051 - DNA, 25 bp, Artificial
  probe
  misc_feature (1)..(25): SEQ ID NO: 588; WAN024AGP_at; Start 12; Stop 36
tatatcatattttttagaccaaggg

SEQ ID NO: 54052 - DNA, 25 bp, Artificial
  probe
  misc_feature (1)..(25): SEQ ID NO: 588; WAN024AGP_at; Start 4; Stop 28
gtaacgattatatcatattttttag

SEQ ID NO: 54053 - DNA, 25 bp, Artificial
  probe
  misc_feature (1)..(25): SEQ ID NO: 588; WAN024AGP_at; Start 6; Stop 30
aacgattatatcatattttttagac

SEQ ID NO: 54054 - DNA, 25 bp, Artificial
  probe
  misc_feature (1)..(25): SEQ ID NO: 588; WAN024AGP_at; Start 5; Stop 29
taacgattatatcatattttttaga

SEQ ID NO: 54055 - DNA, 25 bp, Artificial
  probe
  misc_feature (1)..(25): SEQ ID NO: 85; WAN024AGQ_x_at; Start 19; Stop 43
tcccttggtctaaaaaatatgatat

SEQ ID NO: 54056 - DNA, 25 bp, Artificial
  probe
  misc_feature (1)..(25): SEQ ID NO: 85; WAN024AGQ_x_at; Start 24; Stop 48
tggtctaaaaaatatgatataatcg

SEQ ID NO: 54057 - DNA, 25 bp, Artificial
  probe
  misc_feature (1)..(25): SEQ ID NO: 85; WAN024AGQ_x_at; Start 26; Stop 50
gtctaaaaaatatgatataatcgtt

SEQ ID NO: 54058 - DNA, 25 bp, Artificial
  probe
  misc_feature (1)..(25): SEQ ID NO: 85; WAN024AGQ_x_at; Start 20; Stop 44
cccttggtctaaaaaatatgatata

SEQ ID NO: 54059 - DNA, 25 bp, Artificial
  probe
  misc_feature (1)..(25): SEQ ID NO: 85; WAN024AGQ_x_at; Start 27; Stop 51
tctaaaaaatatgatataatcgtta

SEQ ID NO: 54060 - DNA, 25 bp, Artificial
  probe
  misc_feature (1)..(25): SEQ ID NO: 85; WAN024AGQ_x_at; Start 18; Stop 42
ttcccttggtctaaaaaatatgata

SEQ ID NO: 54061 - DNA, 25 bp, Artificial
  probe
  misc_feature (1)..(25): SEQ ID NO: 85; WAN024AGQ_x_at; Start 28; Stop 52
ctaaaaaatatgatataatcgttac

SEQ ID NO: 54062 - DNA, 25 bp, Artificial
  probe
  misc_feature (1)..(25): SEQ ID NO: 85; WAN024AGQ_x_at; Start 21; Stop 45
ccttggtctaaaaaatatgatataa

SEQ ID NO: 54063 - DNA, 25 bp, Artificial
  probe
  misc_feature (1)..(25): SEQ ID NO: 85; WAN024AGQ_x_at; Start 25; Stop 49
ggtctaaaaaatatgatataatcgt

SEQ ID NO: 54064 - DNA, 25 bp, Artificial
  probe
  misc_feature (1)..(25): SEQ ID NO: 85; WAN024AGQ_x_at; Start 22; Stop 46
cttggtctaaaaaatatgatataat

SEQ ID NO: 54065 - DNA, 25 bp, Artificial
  probe
  misc_feature (1)..(25): SEQ ID NO: 85; WAN024AGQ_x_at; Start 31; Stop 55
aaaaatatgatataatcgttacgat

SEQ ID NO: 54066 - DNA, 25 bp, Artificial
  probe
  misc_feature (1)..(25): SEQ ID NO: 85; WAN024AGQ_x_at; Start 23; Stop 47
ttggtctaaaaaatatgatataatc

SEQ ID NO: 54067 - DNA, 25 bp, Artificial
  probe
  misc_feature (1)..(25): SEQ ID NO: 85; WAN024AGQ_x_at; Start 29; Stop 53
taaaaaatatgatataatcgttacg

SEQ ID NO: 54068 - DNA, 25 bp, Artificial
  probe
  misc_feature (1)..(25): SEQ ID NO: 85; WAN024AGQ_x_at; Start 30; Stop 54
aaaaaatatgatataatcgttacga

SEQ ID NO: 54069 - DNA, 25 bp, Artificial
  probe
  misc_feature (1)..(25): SEQ ID NO: 4548; WAN024AGR_at; Start 19; Stop 43
aaaaagcgatgatttccctgagttt

SEQ ID NO: 54070 - DNA, 25 bp, Artificial
  probe
  misc_feature (1)..(25): SEQ ID NO: 4548; WAN024AGR_at; Start 21; Stop 45
aaagcgatgatttccctgagttttc

SEQ ID NO: 54071 - DNA, 25 bp, Artificial
  probe
  misc_feature (1)..(25): SEQ ID NO: 4548; WAN024AGR_at; Start 12; Stop 36
tttatgaaaaaagcgatgatttccc

SEQ ID NO: 54072 - DNA, 25 bp, Artificial
  probe
  misc_feature (1)..(25): SEQ ID NO: 4548; WAN024AGR_at; Start 13; Stop 37
ttatgaaaaaagcgatgatttccct

SEQ ID NO: 54073 - DNA, 25 bp, Artificial
  probe
  misc_feature (1)..(25): SEQ ID NO: 4548; WAN024AGR_at; Start 20; Stop 44
aaaagcgatgatttccctgagtttt

SEQ ID NO: 54074 - DNA, 25 bp, Artificial
  probe
  misc_feature (1)..(25): SEQ ID NO: 4548; WAN024AGR_at; Start 7; Stop 31
atttttttatgaaaaaagcgatgat

SEQ ID NO: 54075 - DNA, 25 bp, Artificial
  probe
  misc_feature (1)..(25): SEQ ID NO: 4548; WAN024AGR_at; Start 24; Stop 48
gcgatgatttccctgagttttccac

SEQ ID NO: 54076 - DNA, 25 bp, Artificial
  probe
  misc_feature (1)..(25): SEQ ID NO: 4548; WAN024AGR_at; Start 37; Stop 61
tgagttttccacataaaaaacgaga

SEQ ID NO: 54077 - DNA, 25 bp, Artificial
  probe
  misc_feature (1)..(25): SEQ ID NO: 4548; WAN024AGR_at; Start 6; Stop 30
catttttttatgaaaaaagcgatga

SEQ ID NO: 54078 - DNA, 25 bp, Artificial
  probe
  misc_feature (1)..(25): SEQ ID NO: 4548; WAN024AGR_at; Start 11; Stop 35
ttttatgaaaaaagcgatgatttcc

SEQ ID NO: 54079 - DNA, 25 bp, Artificial
  probe
  misc_feature (1)..(25): SEQ ID NO: 4548; WAN024AGR_at; Start 14; Stop 38
tatgaaaaaagcgatgatttccctg

SEQ ID NO: 54080 - DNA, 25 bp, Artificial
  probe
  misc_feature (1)..(25): SEQ ID NO: 4548; WAN024AGR_at; Start 45; Stop 69
ccacataaaaaacgagagaataact

SEQ ID NO: 54081 - DNA, 25 bp, Artificial
  probe
  misc_feature (1)..(25): SEQ ID NO: 4548; WAN024AGR_at; Start 17; Stop 41
gaaaaaagcgatgatttccctgagt

SEQ ID NO: 54082 - DNA, 25 bp, Artificial
  probe
  misc_feature (1)..(25): SEQ ID NO: 4548; WAN024AGR_at; Start 2; Stop 26
atagcatttttttatgaaaaaagcg

SEQ ID NO: 54083 - DNA, 25 bp, Artificial
  probe
  misc_feature (1)..(25): SEQ ID NO: 4548; WAN024AGR_at; Start 43; Stop 67
ttccacataaaaaacgagagaataa

SEQ ID NO: 54084 - DNA, 25 bp, Artificial
  probe
  misc_feature (1)..(25): SEQ ID NO: 4548; WAN024AGR_at; Start 16; Stop 40
tgaaaaaagcgatgatttccctgag

SEQ ID NO: 54085 - DNA, 25 bp, Artificial
  probe
  misc_feature (1)..(25): SEQ ID NO: 4548; WAN024AGR_at; Start 44; Stop 68
tccacataaaaaacgagagaataac

SEQ ID NO: 54086 - DNA, 25 bp, Artificial
  probe
  misc_feature (1)..(25): SEQ ID NO: 4548; WAN024AGR_at; Start 28; Stop 52
tgatttccctgagttttccacataa

SEQ ID NO: 54087 - DNA, 25 bp, Artificial
  probe
  misc_feature (1)..(25): SEQ ID NO: 4548; WAN024AGR_at; Start 22; Stop 46
aagcgatgatttccctgagttttcc

SEQ ID NO: 54088 - DNA, 25 bp, Artificial
  probe
  misc_feature (1)..(25): SEQ ID NO: 4548; WAN024AGR_at; Start 15; Stop 39
atgaaaaaagcgatgatttccctga

SEQ ID NO: 54089 - DNA, 25 bp, Artificial
  probe
  misc_feature (1)..(25): SEQ ID NO: 4548; WAN024AGR_at; Start 46; Stop 70
cacataaaaaacgagagaataactc

SEQ ID NO: 54090 - DNA, 25 bp, Artificial
  probe
  misc_feature (1)..(25): SEQ ID NO: 4548; WAN024AGR_at; Start 18; Stop 42
aaaaaagcgatgatttccctgagtt

SEQ ID NO: 54091 - DNA, 25 bp, Artificial
  probe
  misc_feature (1)..(25): SEQ ID NO: 4548; WAN024AGR_at; Start 25; Stop 49
cgatgatttccctgagttttccaca

SEQ ID NO: 54092 - DNA, 25 bp, Artificial
  probe
  misc_feature (1)..(25): SEQ ID NO: 4548; WAN024AGR_at; Start 29; Stop 53
gatttccctgagttttccacataaa

SEQ ID NO: 54093 - DNA, 25 bp, Artificial
  probe
  misc_feature (1)..(25): SEQ ID NO: 4548; WAN024AGR_at; Start 36; Stop 60
ctgagttttccacataaaaaacgag

SEQ ID NO: 54094 - DNA, 25 bp, Artificial
  probe
  misc_feature (1)..(25): SEQ ID NO: 4548; WAN024AGR_at; Start 26; Stop 50
gatgatttccctgagttttccacat

SEQ ID NO: 54095 - DNA, 25 bp, Artificial
  probe
  misc_feature (1)..(25): SEQ ID NO: 4548; WAN024AGR_at; Start 1; Stop 25
tatagcatttttttatgaaaaaagc

SEQ ID NO: 54096 - DNA, 25 bp, Artificial
  probe
  misc_feature (1)..(25): SEQ ID NO: 4548; WAN024AGR_at; Start 10; Stop 34
tttttatgaaaaaagcgatgatttc

SEQ ID NO: 54097 - DNA, 25 bp, Artificial
  probe
  misc_feature (1)..(25): SEQ ID NO: 4548; WAN024AGR_at; Start 42; Stop 66
tttccacataaaaaacgagagaata

SEQ ID NO: 54098 - DNA, 25 bp, Artificial
  probe
  misc_feature (1)..(25): SEQ ID NO: 4548; WAN024AGR_at; Start 4; Stop 28
agcatttttttatgaaaaaagcgat

SEQ ID NO: 54099 - DNA, 25 bp, Artificial
  probe
  misc_feature (1)..(25): SEQ ID NO: 4548; WAN024AGR_at; Start 23; Stop 47
agcgatgatttccctgagttttcca

SEQ ID NO: 54100 - DNA, 25 bp, Artificial
  probe
  misc_feature (1)..(25): SEQ ID NO: 4548; WAN024AGR_at; Start 3; Stop 27
tagcatttttttatgaaaaaagcga

SEQ ID NO: 54101 - DNA, 25 bp, Artificial
  probe
  misc_feature (1)..(25): SEQ ID NO: 4548; WAN024AGR_at; Start 5; Stop 29
gcatttttttatgaaaaaagcgatg

SEQ ID NO: 54102 - DNA, 25 bp, Artificial
  probe
  misc_feature (1)..(25): SEQ ID NO: 4548; WAN024AGR_at; Start 27; Stop 51
atgatttccctgagttttccacata

SEQ ID NO: 54103 - DNA, 25 bp, Artificial
  probe
  misc_feature (1)..(25): SEQ ID NO: 201; WAN024AGS_at; Start 8; Stop 32
gttattctctcgttttttatgtgga

SEQ ID NO: 54104 - DNA, 25 bp, Artificial
  probe
  misc_feature (1)..(25): SEQ ID NO: 201; WAN024AGS_at; Start 15; Stop 39
tctcgttttttatgtggaaaactca

SEQ ID NO: 54105 - DNA, 25 bp, Artificial
  probe
  misc_feature (1)..(25): SEQ ID NO: 201; WAN024AGS_at; Start 6; Stop 30
gagttattctctcgttttttatgtg

SEQ ID NO: 54106 - DNA, 25 bp, Artificial
  probe
  misc_feature (1)..(25): SEQ ID NO: 201; WAN024AGS_at; Start 27; Stop 51
tgtggaaaactcagggaaatcatcg

SEQ ID NO: 54107 - DNA, 25 bp, Artificial
  probe
  misc_feature (1)..(25): SEQ ID NO: 201; WAN024AGS_at; Start 16; Stop 40
ctcgttttttatgtggaaaactcag

SEQ ID NO: 54108 - DNA, 25 bp, Artificial
  probe
  misc_feature (1)..(25): SEQ ID NO: 201; WAN024AGS_at; Start 7; Stop 31
agttattctctcgttttttatgtgg

SEQ ID NO: 54109 - DNA, 25 bp, Artificial
  probe
  misc_feature (1)..(25): SEQ ID NO: 201; WAN024AGS_at; Start 29; Stop 53
tggaaaactcagggaaatcatcgct

SEQ ID NO: 54110 - DNA, 25 bp, Artificial
  probe
  misc_feature (1)..(25): SEQ ID NO: 201; WAN024AGS_at; Start 42; Stop 66
gaaatcatcgcttttttcataaaaa

SEQ ID NO: 54111 - DNA, 25 bp, Artificial
  probe
  misc_feature (1)..(25): SEQ ID NO: 201; WAN024AGS_at; Start 23; Stop 47
tttatgtggaaaactcagggaaatc

SEQ ID NO: 54112 - DNA, 25 bp, Artificial
  probe
  misc_feature (1)..(25): SEQ ID NO: 201; WAN024AGS_at; Start 33; Stop 57
aaactcagggaaatcatcgcttttt

SEQ ID NO: 54113 - DNA, 25 bp, Artificial
  probe
  misc_feature (1)..(25): SEQ ID NO: 201; WAN024AGS_at; Start 9; Stop 33
ttattctctcgttttttatgtggaa

SEQ ID NO: 54114 - DNA, 25 bp, Artificial
  probe
  misc_feature (1)..(25): SEQ ID NO: 201; WAN024AGS_at; Start 30; Stop 54
ggaaaactcagggaaatcatcgctt

SEQ ID NO: 54115 - DNA, 25 bp, Artificial
  probe
  misc_feature (1)..(25): SEQ ID NO: 201; WAN024AGS_at; Start 40; Stop 64
gggaaatcatcgcttttttcataaa

SEQ ID NO: 54116 - DNA, 25 bp, Artificial
  probe
  misc_feature (1)..(25): SEQ ID NO: 201; WAN024AGS_at; Start 39; Stop 63
agggaaatcatcgcttttttcataa

SEQ ID NO: 54117 - DNA, 25 bp, Artificial
  probe
  misc_feature (1)..(25): SEQ ID NO: 201; WAN024AGS_at; Start 38; Stop 62
cagggaaatcatcgcttttttcata

SEQ ID NO: 54118 - DNA, 25 bp, Artificial
  probe
  misc_feature (1)..(25): SEQ ID NO: 201; WAN024AGS_at; Start 10; Stop 34
tattctctcgttttttatgtggaaa

SEQ ID NO: 54119 - DNA, 25 bp, Artificial
  probe
  misc_feature (1)..(25): SEQ ID NO: 201; WAN024AGS_at; Start 25; Stop 49
tatgtggaaaactcagggaaatcat

SEQ ID NO: 54120 - DNA, 25 bp, Artificial
  probe
  misc_feature (1)..(25): SEQ ID NO: 201; WAN024AGS_at; Start 31; Stop 55
gaaaactcagggaaatcatcgcttt

SEQ ID NO: 54121 - DNA, 25 bp, Artificial
  probe
  misc_feature (1)..(25): SEQ ID NO: 201; WAN024AGS_at; Start 41; Stop 65
ggaaatcatcgcttttttcataaaa

SEQ ID NO: 54122 - DNA, 25 bp, Artificial
  probe
  misc_feature (1)..(25): SEQ ID NO: 201; WAN024AGS_at; Start 28; Stop 52
gtggaaaactcagggaaatcatcgc

SEQ ID NO: 54123 - DNA, 25 bp, Artificial
  probe
  misc_feature (1)..(25): SEQ ID NO: 201; WAN024AGS_at; Start 35; Stop 59
actcagggaaatcatcgcttttttc

SEQ ID NO: 54124 - DNA, 25 bp, Artificial
  probe
  misc_feature (1)..(25): SEQ ID NO: 201; WAN024AGS_at; Start 32; Stop 56
aaaactcagggaaatcatcgctttt

SEQ ID NO: 54125 - DNA, 25 bp, Artificial
  probe
  misc_feature (1)..(25): SEQ ID NO: 201; WAN024AGS_at; Start 36; Stop 60
ctcagggaaatcatcgcttttttca

SEQ ID NO: 54126 - DNA, 25 bp, Artificial
  probe
  misc_feature (1)..(25): SEQ ID NO: 201; WAN024AGS_at; Start 34; Stop 58
aactcagggaaatcatcgctttttt

SEQ ID NO: 54127 - DNA, 25 bp, Artificial
  probe
  misc_feature (1)..(25): SEQ ID NO: 201; WAN024AGS_at; Start 24; Stop 48
ttatgtggaaaactcagggaaatca

SEQ ID NO: 54128 - DNA, 25 bp, Artificial
  probe
  misc_feature (1)..(25): SEQ ID NO: 201; WAN024AGS_at; Start 26; Stop 50
atgtggaaaactcagggaaatcatc

SEQ ID NO: 54129 - DNA, 25 bp, Artificial
  probe
  misc_feature (1)..(25): SEQ ID NO: 201; WAN024AGS_at; Start 37; Stop 61
tcagggaaatcatcgcttttttcat

SEQ ID NO: 54130 - DNA, 25 bp, Artificial
  probe
  misc_feature (1)..(25): SEQ ID NO: 4843; WAN024AGT_at; Start 37; Stop 61
tacgaaaaattgagagaagaaatgt

SEQ ID NO: 54131 - DNA, 25 bp, Artificial
  probe
  misc_feature (1)..(25): SEQ ID NO: 4843; WAN024AGT_at; Start 35; Stop 59
aatacgaaaaattgagagaagaaat

SEQ ID NO: 54132 - DNA, 25 bp, Artificial
  probe
  misc_feature (1)..(25): SEQ ID NO: 4843; WAN024AGT_at; Start 27; Stop 51
agtgaagaaatacgaaaaattgaga

SEQ ID NO: 54133 - DNA, 25 bp, Artificial
  probe
  misc_feature (1)..(25): SEQ ID NO: 4843; WAN024AGT_at; Start 26; Stop 50
tagtgaagaaatacgaaaaattgag

SEQ ID NO: 54134 - DNA, 25 bp, Artificial
  probe
  misc_feature (1)..(25): SEQ ID NO: 4843; WAN024AGT_at; Start 31; Stop 55
aagaaatacgaaaaattgagagaag

SEQ ID NO: 54135 - DNA, 25 bp, Artificial
  probe
  misc_feature (1)..(25): SEQ ID NO: 4843; WAN024AGT_at; Start 25; Stop 49
atagtgaagaaatacgaaaaattga

SEQ ID NO: 54136 - DNA, 25 bp, Artificial
  probe
  misc_feature (1)..(25): SEQ ID NO: 4843; WAN024AGT_at; Start 29; Stop 53
tgaagaaatacgaaaaattgagaga

SEQ ID NO: 54137 - DNA, 25 bp, Artificial
  probe
  misc_feature (1)..(25): SEQ ID NO: 4843; WAN024AGT_at; Start 30; Stop 54
gaagaaatacgaaaaattgagagaa

SEQ ID NO: 54138 - DNA, 25 bp, Artificial
  probe
  misc_feature (1)..(25): SEQ ID NO: 4843; WAN024AGT_at; Start 24; Stop 48
aatagtgaagaaatacgaaaaattg

SEQ ID NO: 54139 - DNA, 25 bp, Artificial
  probe
  misc_feature (1)..(25): SEQ ID NO: 4843; WAN024AGT_at; Start 28; Stop 52
gtgaagaaatacgaaaaattgagag

SEQ ID NO: 54140 - DNA, 25 bp, Artificial
  probe
  misc_feature (1)..(25): SEQ ID NO: 4843; WAN024AGT_at; Start 33; Stop 57
gaaatacgaaaaattgagagaagaa

SEQ ID NO: 54141 - DNA, 25 bp, Artificial
  probe
  misc_feature (1)..(25): SEQ ID NO: 4843; WAN024AGT_at; Start 36; Stop 60
atacgaaaaattgagagaagaaatg

SEQ ID NO: 54142 - DNA, 25 bp, Artificial
  probe
  misc_feature (1)..(25): SEQ ID NO: 4843; WAN024AGT_at; Start 32; Stop 56
agaaatacgaaaaattgagagaaga

SEQ ID NO: 54143 - DNA, 25 bp, Artificial
  probe
  misc_feature (1)..(25): SEQ ID NO: 341; WAN024AGU_at; Start 7; Stop 31
cttctctcaatttttcgtatttctt

SEQ ID NO: 54144 - DNA, 25 bp, Artificial
  probe
  misc_feature (1)..(25): SEQ ID NO: 341; WAN024AGU_at; Start 8; Stop 32
ttctctcaatttttcgtatttcttc

SEQ ID NO: 54145 - DNA, 25 bp, Artificial
  probe
  misc_feature (1)..(25): SEQ ID NO: 341; WAN024AGU_at; Start 13; Stop 37
tcaatttttcgtatttcttcactat

SEQ ID NO: 54146 - DNA, 25 bp, Artificial
  probe
  misc_feature (1)..(25): SEQ ID NO: 341; WAN024AGU_at; Start 11; Stop 35
tctcaatttttcgtatttcttcact

SEQ ID NO: 54147 - DNA, 25 bp, Artificial
  probe
  misc_feature (1)..(25): SEQ ID NO: 341; WAN024AGU_at; Start 14; Stop 38
caatttttcgtatttcttcactatt

SEQ ID NO: 54148 - DNA, 25 bp, Artificial
  probe
  misc_feature (1)..(25): SEQ ID NO: 341; WAN024AGU_at; Start 10; Stop 34
ctctcaatttttcgtatttcttcac

SEQ ID NO: 54149 - DNA, 25 bp, Artificial
  probe
  misc_feature (1)..(25): SEQ ID NO: 341; WAN024AGU_at; Start 9; Stop 33
tctctcaatttttcgtatttcttca

SEQ ID NO: 54150 - DNA, 25 bp, Artificial
  probe
  misc_feature (1)..(25): SEQ ID NO: 341; WAN024AGU_at; Start 1; Stop 25
acatttcttctctcaatttttcgta

SEQ ID NO: 54151 - DNA, 25 bp, Artificial
  probe
  misc_feature (1)..(25): SEQ ID NO: 341; WAN024AGU_at; Start 12; Stop 36
ctcaatttttcgtatttcttcacta

SEQ ID NO: 54152 - DNA, 25 bp, Artificial
  probe
  misc_feature (1)..(25): SEQ ID NO: 341; WAN024AGU_at; Start 2; Stop 26
catttcttctctcaatttttcgtat

SEQ ID NO: 54153 - DNA, 25 bp, Artificial
  probe
  misc_feature (1)..(25): SEQ ID NO: 511; WAN024AGV_at; Start 19; Stop 43
gtttaagagctgctgctcttcttca

SEQ ID NO: 54154 - DNA, 25 bp, Artificial
  probe
  misc_feature (1)..(25): SEQ ID NO: 511; WAN024AGV_at; Start 11; Stop 35
tattctaagtttaagagctgctgct

SEQ ID NO: 54155 - DNA, 25 bp, Artificial
  probe
  misc_feature (1)..(25): SEQ ID NO: 511; WAN024AGV_at; Start 31; Stop 55
ctgctcttcttcaaacaaacttatt

SEQ ID NO: 54156 - DNA, 25 bp, Artificial
  probe
  misc_feature (1)..(25): SEQ ID NO: 511; WAN024AGV_at; Start 17; Stop 41
aagtttaagagctgctgctcttctt

SEQ ID NO: 54157 - DNA, 25 bp, Artificial
  probe
  misc_feature (1)..(25): SEQ ID NO: 511; WAN024AGV_at; Start 32; Stop 56
tgctcttcttcaaacaaacttatta

SEQ ID NO: 54158 - DNA, 25 bp, Artificial
  probe
  misc_feature (1)..(25): SEQ ID NO: 511; WAN024AGV_at; Start 18; Stop 42
agtttaagagctgctgctcttcttc

SEQ ID NO: 54159 - DNA, 25 bp, Artificial
  probe
  misc_feature (1)..(25): SEQ ID NO: 511; WAN024AGV_at; Start 25; Stop 49
gagctgctgctcttcttcaaacaaa

SEQ ID NO: 54160 - DNA, 25 bp, Artificial
  probe
  misc_feature (1)..(25): SEQ ID NO: 511; WAN024AGV_at; Start 20; Stop 44
tttaagagctgctgctcttcttcaa

SEQ ID NO: 54161 - DNA, 25 bp, Artificial
  probe
  misc_feature (1)..(25): SEQ ID NO: 511; WAN024AGV_at; Start 36; Stop 60
cttcttcaaacaaacttattatatc

SEQ ID NO: 54162 - DNA, 25 bp, Artificial
  probe
  misc_feature (1)..(25): SEQ ID NO: 511; WAN024AGV_at; Start 4; Stop 28
tttctcctattctaagtttaagagc

SEQ ID NO: 54163 - DNA, 25 bp, Artificial
  probe
  misc_feature (1)..(25): SEQ ID NO: 511; WAN024AGV_at; Start 9; Stop 33
cctattctaagtttaagagctgctg

SEQ ID NO: 54164 - DNA, 25 bp, Artificial
  probe
  misc_feature (1)..(25): SEQ ID NO: 511; WAN024AGV_at; Start 12; Stop 36
attctaagtttaagagctgctgctc

SEQ ID NO: 54165 - DNA, 25 bp, Artificial
  probe
  misc_feature (1)..(25): SEQ ID NO: 511; WAN024AGV_at; Start 22; Stop 46
taagagctgctgctcttcttcaaac

SEQ ID NO: 54166 - DNA, 25 bp, Artificial
  probe
  misc_feature (1)..(25): SEQ ID NO: 511; WAN024AGV_at; Start 21; Stop 45
ttaagagctgctgctcttcttcaaa

SEQ ID NO: 54167 - DNA, 25 bp, Artificial
  probe
  misc_feature (1)..(25): SEQ ID NO: 511; WAN024AGV_at; Start 14; Stop 38
tctaagtttaagagctgctgctctt

SEQ ID NO: 54168 - DNA, 25 bp, Artificial
  probe
  misc_feature (1)..(25): SEQ ID NO: 511; WAN024AGV_at; Start 30; Stop 54
gctgctcttcttcaaacaaacttat

SEQ ID NO: 54169 - DNA, 25 bp, Artificial
  probe
  misc_feature (1)..(25): SEQ ID NO: 511; WAN024AGV_at; Start 7; Stop 31
ctcctattctaagtttaagagctgc

SEQ ID NO: 54170 - DNA, 25 bp, Artificial
  probe
  misc_feature (1)..(25): SEQ ID NO: 511; WAN024AGV_at; Start 5; Stop 29
ttctcctattctaagtttaagagct

SEQ ID NO: 54171 - DNA, 25 bp, Artificial
  probe
  misc_feature (1)..(25): SEQ ID NO: 511; WAN024AGV_at; Start 6; Stop 30
tctcctattctaagtttaagagctg

SEQ ID NO: 54172 - DNA, 25 bp, Artificial
  probe
  misc_feature (1)..(25): SEQ ID NO: 511; WAN024AGV_at; Start 41; Stop 65
tcaaacaaacttattatatcatatt

SEQ ID NO: 54173 - DNA, 25 bp, Artificial
  probe
  misc_feature (1)..(25): SEQ ID NO: 511; WAN024AGV_at; Start 28; Stop 52
ctgctgctcttcttcaaacaaactt

SEQ ID NO: 54174 - DNA, 25 bp, Artificial
  probe
  misc_feature (1)..(25): SEQ ID NO: 511; WAN024AGV_at; Start 38; Stop 62
tcttcaaacaaacttattatatcat

SEQ ID NO: 54175 - DNA, 25 bp, Artificial
  probe
  misc_feature (1)..(25): SEQ ID NO: 511; WAN024AGV_at; Start 16; Stop 40
taagtttaagagctgctgctcttct

SEQ ID NO: 54176 - DNA, 25 bp, Artificial
  probe
  misc_feature (1)..(25): SEQ ID NO: 511; WAN024AGV_at; Start 26; Stop 50
agctgctgctcttcttcaaacaaac

SEQ ID NO: 54177 - DNA, 25 bp, Artificial
  probe
  misc_feature (1)..(25): SEQ ID NO: 511; WAN024AGV_at; Start 29; Stop 53
tgctgctcttcttcaaacaaactta

SEQ ID NO: 54178 - DNA, 25 bp, Artificial
  probe
  misc_feature (1)..(25): SEQ ID NO: 511; WAN024AGV_at; Start 33; Stop 57
gctcttcttcaaacaaacttattat

SEQ ID NO: 54179 - DNA, 25 bp, Artificial
  probe
  misc_feature (1)..(25): SEQ ID NO: 511; WAN024AGV_at; Start 27; Stop 51
gctgctgctcttcttcaaacaaact

SEQ ID NO: 54180 - DNA, 25 bp, Artificial
  probe
  misc_feature (1)..(25): SEQ ID NO: 511; WAN024AGV_at; Start 23; Stop 47
aagagctgctgctcttcttcaaaca

SEQ ID NO: 54181 - DNA, 25 bp, Artificial
  probe
  misc_feature (1)..(25): SEQ ID NO: 511; WAN024AGV_at; Start 8; Stop 32
tcctattctaagtttaagagctgct

SEQ ID NO: 54182 - DNA, 25 bp, Artificial
  probe
  misc_feature (1)..(25): SEQ ID NO: 511; WAN024AGV_at; Start 10; Stop 34
ctattctaagtttaagagctgctgc

SEQ ID NO: 54183 - DNA, 25 bp, Artificial
  probe
  misc_feature (1)..(25): SEQ ID NO: 511; WAN024AGV_at; Start 34; Stop 58
ctcttcttcaaacaaacttattata

SEQ ID NO: 54184 - DNA, 25 bp, Artificial
  probe
  misc_feature (1)..(25): SEQ ID NO: 511; WAN024AGV_at; Start 13; Stop 37
ttctaagtttaagagctgctgctct

SEQ ID NO: 54185 - DNA, 25 bp, Artificial
  probe
  misc_feature (1)..(25): SEQ ID NO: 511; WAN024AGV_at; Start 24; Stop 48
agagctgctgctcttcttcaaacaa

SEQ ID NO: 54186 - DNA, 25 bp, Artificial
  probe
  misc_feature (1)..(25): SEQ ID NO: 511; WAN024AGV_at; Start 15; Stop 39
ctaagtttaagagctgctgctcttc

SEQ ID NO: 54187 - DNA, 25 bp, Artificial
  probe
  misc_feature (1)..(25): SEQ ID NO: 271; WAN024AGW_at; Start 32; Stop 56
gcagcagctcttaaacttagaatag

SEQ ID NO: 54188 - DNA, 25 bp, Artificial
  probe
  misc_feature (1)..(25): SEQ ID NO: 271; WAN024AGW_at; Start 15; Stop 39
agtttgtttgaagaagagcagcagc

SEQ ID NO: 54189 - DNA, 25 bp, Artificial
  probe
  misc_feature (1)..(25): SEQ ID NO: 271; WAN024AGW_at; Start 37; Stop 61
agctcttaaacttagaataggagaa

SEQ ID NO: 54190 - DNA, 25 bp, Artificial
  probe
  misc_feature (1)..(25): SEQ ID NO: 271; WAN024AGW_at; Start 21; Stop 45
tttgaagaagagcagcagctcttaa

SEQ ID NO: 54191 - DNA, 25 bp, Artificial
  probe
  misc_feature (1)..(25): SEQ ID NO: 271; WAN024AGW_at; Start 14; Stop 38
aagtttgtttgaagaagagcagcag

SEQ ID NO: 54192 - DNA, 25 bp, Artificial
  probe
  misc_feature (1)..(25): SEQ ID NO: 271; WAN024AGW_at; Start 26; Stop 50
agaagagcagcagctcttaaactta

SEQ ID NO: 54193 - DNA, 25 bp, Artificial
  probe
  misc_feature (1)..(25): SEQ ID NO: 271; WAN024AGW_at; Start 20; Stop 44
gtttgaagaagagcagcagctctta

SEQ ID NO: 54194 - DNA, 25 bp, Artificial
  probe
  misc_feature (1)..(25): SEQ ID NO: 271; WAN024AGW_at; Start 3; Stop 27
tatgatataataagtttgtttgaag

SEQ ID NO: 54195 - DNA, 25 bp, Artificial
  probe
  misc_feature (1)..(25): SEQ ID NO: 271; WAN024AGW_at; Start 36; Stop 60
cagctcttaaacttagaataggaga

SEQ ID NO: 54196 - DNA, 25 bp, Artificial
  probe
  misc_feature (1)..(25): SEQ ID NO: 271; WAN024AGW_at; Start 31; Stop 55
agcagcagctcttaaacttagaata

SEQ ID NO: 54197 - DNA, 25 bp, Artificial
  probe
  misc_feature (1)..(25): SEQ ID NO: 271; WAN024AGW_at; Start 27; Stop 51
gaagagcagcagctcttaaacttag

SEQ ID NO: 54198 - DNA, 25 bp, Artificial
  probe
  misc_feature (1)..(25): SEQ ID NO: 271; WAN024AGW_at; Start 18; Stop 42
ttgtttgaagaagagcagcagctct

SEQ ID NO: 54199 - DNA, 25 bp, Artificial
  probe
  misc_feature (1)..(25): SEQ ID NO: 271; WAN024AGW_at; Start 29; Stop 53
agagcagcagctcttaaacttagaa

SEQ ID NO: 54200 - DNA, 25 bp, Artificial
  probe
  misc_feature (1)..(25): SEQ ID NO: 271; WAN024AGW_at; Start 19; Stop 43
tgtttgaagaagagcagcagctctt

SEQ ID NO: 54201 - DNA, 25 bp, Artificial
  probe
  misc_feature (1)..(25): SEQ ID NO: 271; WAN024AGW_at; Start 34; Stop 58
agcagctcttaaacttagaatagga

SEQ ID NO: 54202 - DNA, 25 bp, Artificial
  probe
  misc_feature (1)..(25): SEQ ID NO: 271; WAN024AGW_at; Start 23; Stop 47
tgaagaagagcagcagctcttaaac

SEQ ID NO: 54203 - DNA, 25 bp, Artificial
  probe
  misc_feature (1)..(25): SEQ ID NO: 271; WAN024AGW_at; Start 22; Stop 46
ttgaagaagagcagcagctcttaaa

SEQ ID NO: 54204 - DNA, 25 bp, Artificial
  probe
  misc_feature (1)..(25): SEQ ID NO: 271; WAN024AGW_at; Start 17; Stop 41
tttgtttgaagaagagcagcagctc

SEQ ID NO: 54205 - DNA, 25 bp, Artificial
  probe
  misc_feature (1)..(25): SEQ ID NO: 271; WAN024AGW_at; Start 16; Stop 40
gtttgtttgaagaagagcagcagct

SEQ ID NO: 54206 - DNA, 25 bp, Artificial
  probe
  misc_feature (1)..(25): SEQ ID NO: 271; WAN024AGW_at; Start 11; Stop 35
aataagtttgtttgaagaagagcag

SEQ ID NO: 54207 - DNA, 25 bp, Artificial
  probe
  misc_feature (1)..(25): SEQ ID NO: 271; WAN024AGW_at; Start 5; Stop 29
tgatataataagtttgtttgaagaa

SEQ ID NO: 54208 - DNA, 25 bp, Artificial
  probe
  misc_feature (1)..(25): SEQ ID NO: 271; WAN024AGW_at; Start 10; Stop 34
taataagtttgtttgaagaagagca

SEQ ID NO: 54209 - DNA, 25 bp, Artificial
  probe
  misc_feature (1)..(25): SEQ ID NO: 271; WAN024AGW_at; Start 12; Stop 36
ataagtttgtttgaagaagagcagc

SEQ ID NO: 54210 - DNA, 25 bp, Artificial
  probe
  misc_feature (1)..(25): SEQ ID NO: 271; WAN024AGW_at; Start 28; Stop 52
aagagcagcagctcttaaacttaga

SEQ ID NO: 54211 - DNA, 25 bp, Artificial
  probe
  misc_feature (1)..(25): SEQ ID NO: 271; WAN024AGW_at; Start 13; Stop 37
taagtttgtttgaagaagagcagca

SEQ ID NO: 54212 - DNA, 25 bp, Artificial
  probe
  misc_feature (1)..(25): SEQ ID NO: 271; WAN024AGW_at; Start 38; Stop 62
gctcttaaacttagaataggagaaa

SEQ ID NO: 54213 - DNA, 25 bp, Artificial
  probe
  misc_feature (1)..(25): SEQ ID NO: 271; WAN024AGW_at; Start 35; Stop 59
gcagctcttaaacttagaataggag

SEQ ID NO: 54214 - DNA, 25 bp, Artificial
  probe
  misc_feature (1)..(25): SEQ ID NO: 271; WAN024AGW_at; Start 9; Stop 33
ataataagtttgtttgaagaagagc

SEQ ID NO: 54215 - DNA, 25 bp, Artificial
  probe
  misc_feature (1)..(25): SEQ ID NO: 271; WAN024AGW_at; Start 33; Stop 57
cagcagctcttaaacttagaatagg

SEQ ID NO: 54216 - DNA, 25 bp, Artificial
  probe
  misc_feature (1)..(25): SEQ ID NO: 271; WAN024AGW_at; Start 30; Stop 54
gagcagcagctcttaaacttagaat

SEQ ID NO: 54217 - DNA, 25 bp, Artificial
  probe
  misc_feature (1)..(25): SEQ ID NO: 271; WAN024AGW_at; Start 24; Stop 48
gaagaagagcagcagctcttaaact

SEQ ID NO: 54218 - DNA, 25 bp, Artificial
  probe
  misc_feature (1)..(25): SEQ ID NO: 271; WAN024AGW_at; Start 25; Stop 49
aagaagagcagcagctcttaaactt

SEQ ID NO: 54219 - DNA, 25 bp, Artificial
  probe
  misc_feature (1)..(25): SEQ ID NO: 271; WAN024AGW_at; Start 6; Stop 30
gatataataagtttgtttgaagaag

SEQ ID NO: 54220 - DNA, 25 bp, Artificial
  probe
  misc_feature (1)..(25): SEQ ID NO: 271; WAN024AGW_at; Start 8; Stop 32
tataataagtttgtttgaagaagag

SEQ ID NO: 54221 - DNA, 25 bp, Artificial
  probe
  misc_feature (1)..(25): SEQ ID NO: 3209; WAN024AGX_at; Start 59; Stop 83
cacttctacactagtttgtaaagca

SEQ ID NO: 54222 - DNA, 25 bp, Artificial
  probe
  misc_feature (1)..(25): SEQ ID NO: 3209; WAN024AGX_at; Start 42; Stop 66
cttcacctatagtatatcacttcta

SEQ ID NO: 54223 - DNA, 25 bp, Artificial
  probe
  misc_feature (1)..(25): SEQ ID NO: 3209; WAN024AGX_at; Start 41; Stop 65
acttcacctatagtatatcacttct

SEQ ID NO: 54224 - DNA, 25 bp, Artificial
  probe
  misc_feature (1)..(25): SEQ ID NO: 3209; WAN024AGX_at; Start 45; Stop 69
cacctatagtatatcacttctacac

SEQ ID NO: 54225 - DNA, 25 bp, Artificial
  probe
  misc_feature (1)..(25): SEQ ID NO: 3209; WAN024AGX_at; Start 58; Stop 82
tcacttctacactagtttgtaaagc

SEQ ID NO: 54226 - DNA, 25 bp, Artificial
  probe
  misc_feature (1)..(25): SEQ ID NO: 3209; WAN024AGX_at; Start 68; Stop 92
actagtttgtaaagcataatagtta

SEQ ID NO: 54227 - DNA, 25 bp, Artificial
  probe
  misc_feature (1)..(25): SEQ ID NO: 3209; WAN024AGX_at; Start 53; Stop 77
gtatatcacttctacactagtttgt

SEQ ID NO: 54228 - DNA, 25 bp, Artificial
  probe
  misc_feature (1)..(25): SEQ ID NO: 3209; WAN024AGX_at; Start 63; Stop 87
tctacactagtttgtaaagcataat

SEQ ID NO: 54229 - DNA, 25 bp, Artificial
  probe
  misc_feature (1)..(25): SEQ ID NO: 3209; WAN024AGX_at; Start 62; Stop 86
ttctacactagtttgtaaagcataa

SEQ ID NO: 54230 - DNA, 25 bp, Artificial
  probe
  misc_feature (1)..(25): SEQ ID NO: 3209; WAN024AGX_at; Start 56; Stop 80
tatcacttctacactagtttgtaaa

SEQ ID NO: 54231 - DNA, 25 bp, Artificial
  probe
  misc_feature (1)..(25): SEQ ID NO: 3209; WAN024AGX_at; Start 61; Stop 85
cttctacactagtttgtaaagcata

SEQ ID NO: 54232 - DNA, 25 bp, Artificial
  probe
  misc_feature (1)..(25): SEQ ID NO: 3209; WAN024AGX_at; Start 14; Stop 38
taatctattttgtaatacctactag

SEQ ID NO: 54233 - DNA, 25 bp, Artificial
  probe
  misc_feature (1)..(25): SEQ ID NO: 3209; WAN024AGX_at; Start 43; Stop 67
ttcacctatagtatatcacttctac

SEQ ID NO: 54234 - DNA, 25 bp, Artificial
  probe
  misc_feature (1)..(25): SEQ ID NO: 3209; WAN024AGX_at; Start 51; Stop 75
tagtatatcacttctacactagttt

SEQ ID NO: 54235 - DNA, 25 bp, Artificial
  probe
  misc_feature (1)..(25): SEQ ID NO: 3209; WAN024AGX_at; Start 15; Stop 39
aatctattttgtaatacctactagt

SEQ ID NO: 54236 - DNA, 25 bp, Artificial
  probe
  misc_feature (1)..(25): SEQ ID NO: 3209; WAN024AGX_at; Start 47; Stop 71
cctatagtatatcacttctacacta

SEQ ID NO: 54237 - DNA, 25 bp, Artificial
  probe
  misc_feature (1)..(25): SEQ ID NO: 3209; WAN024AGX_at; Start 55; Stop 79
atatcacttctacactagtttgtaa

SEQ ID NO: 54238 - DNA, 25 bp, Artificial
  probe
  misc_feature (1)..(25): SEQ ID NO: 3209; WAN024AGX_at; Start 48; Stop 72
ctatagtatatcacttctacactag

SEQ ID NO: 54239 - DNA, 25 bp, Artificial
  probe
  misc_feature (1)..(25): SEQ ID NO: 3209; WAN024AGX_at; Start 67; Stop 91
cactagtttgtaaagcataatagtt

SEQ ID NO: 54240 - DNA, 25 bp, Artificial
  probe
  misc_feature (1)..(25): SEQ ID NO: 3209; WAN024AGX_at; Start 54; Stop 78
tatatcacttctacactagtttgta

SEQ ID NO: 54241 - DNA, 25 bp, Artificial
  probe
  misc_feature (1)..(25): SEQ ID NO: 3209; WAN024AGX_at; Start 9; Stop 33
ccttctaatctattttgtaatacct

SEQ ID NO: 54242 - DNA, 25 bp, Artificial
  probe
  misc_feature (1)..(25): SEQ ID NO: 3209; WAN024AGX_at; Start 4; Stop 28
ttctcccttctaatctattttgtaa

SEQ ID NO: 54243 - DNA, 25 bp, Artificial
  probe
  misc_feature (1)..(25): SEQ ID NO: 3209; WAN024AGX_at; Start 65; Stop 89
tacactagtttgtaaagcataatag

SEQ ID NO: 54244 - DNA, 25 bp, Artificial
  probe
  misc_feature (1)..(25): SEQ ID NO: 3209; WAN024AGX_at; Start 46; Stop 70
acctatagtatatcacttctacact

SEQ ID NO: 54245 - DNA, 25 bp, Artificial
  probe
  misc_feature (1)..(25): SEQ ID NO: 3209; WAN024AGX_at; Start 57; Stop 81
atcacttctacactagtttgtaaag

SEQ ID NO: 54246 - DNA, 25 bp, Artificial
  probe
  misc_feature (1)..(25): SEQ ID NO: 3209; WAN024AGX_at; Start 12; Stop 36
tctaatctattttgtaatacctact

SEQ ID NO: 54247 - DNA, 25 bp, Artificial
  probe
  misc_feature (1)..(25): SEQ ID NO: 3209; WAN024AGX_at; Start 52; Stop 76
agtatatcacttctacactagtttg

SEQ ID NO: 54248 - DNA, 25 bp, Artificial
  probe
  misc_feature (1)..(25): SEQ ID NO: 3209; WAN024AGX_at; Start 7; Stop 31
tcccttctaatctattttgtaatac

SEQ ID NO: 54249 - DNA, 25 bp, Artificial
  probe
  misc_feature (1)..(25): SEQ ID NO: 3209; WAN024AGX_at; Start 1; Stop 25
cacttctcccttctaatctattttg

SEQ ID NO: 54250 - DNA, 25 bp, Artificial
  probe
  misc_feature (1)..(25): SEQ ID NO: 3209; WAN024AGX_at; Start 2; Stop 26
acttctcccttctaatctattttgt

SEQ ID NO: 54251 - DNA, 25 bp, Artificial
  probe
  misc_feature (1)..(25): SEQ ID NO: 3209; WAN024AGX_at; Start 64; Stop 88
ctacactagtttgtaaagcataata

SEQ ID NO: 54252 - DNA, 25 bp, Artificial
  probe
  misc_feature (1)..(25): SEQ ID NO: 3209; WAN024AGX_at; Start 60; Stop 84
acttctacactagtttgtaaagcat

SEQ ID NO: 54253 - DNA, 25 bp, Artificial
  probe
  misc_feature (1)..(25): SEQ ID NO: 3209; WAN024AGX_at; Start 44; Stop 68
tcacctatagtatatcacttctaca

SEQ ID NO: 54254 - DNA, 25 bp, Artificial
  probe
  misc_feature (1)..(25): SEQ ID NO: 3209; WAN024AGX_at; Start 49; Stop 73
tatagtatatcacttctacactagt

SEQ ID NO: 54255 - DNA, 25 bp, Artificial
  probe
  misc_feature (1)..(25): SEQ ID NO: 4433; WAN024AGY_at; Start 64; Stop 88
attacaaaatagattagaagggaga

SEQ ID NO: 54256 - DNA, 25 bp, Artificial
  probe
  misc_feature (1)..(25): SEQ ID NO: 4433; WAN024AGY_at; Start 18; Stop 42
aaactagtgtagaagtgatatacta

SEQ ID NO: 54257 - DNA, 25 bp, Artificial
  probe
  misc_feature (1)..(25): SEQ ID NO: 4433; WAN024AGY_at; Start 4; Stop 28
ctattatgctttacaaactagtgta

SEQ ID NO: 54258 - DNA, 25 bp, Artificial
  probe
  misc_feature (1)..(25): SEQ ID NO: 4433; WAN024AGY_at; Start 17; Stop 41
caaactagtgtagaagtgatatact

SEQ ID NO: 54259 - DNA, 25 bp, Artificial
  probe
  misc_feature (1)..(25): SEQ ID NO: 4433; WAN024AGY_at; Start 60; Stop 84
aggtattacaaaatagattagaagg

SEQ ID NO: 54260 - DNA, 25 bp, Artificial
  probe
  misc_feature (1)..(25): SEQ ID NO: 4433; WAN024AGY_at; Start 21; Stop 45
ctagtgtagaagtgatatactatag

SEQ ID NO: 54261 - DNA, 25 bp, Artificial
  probe
  misc_feature (1)..(25): SEQ ID NO: 4433; WAN024AGY_at; Start 2; Stop 26
aactattatgctttacaaactagtg

SEQ ID NO: 54262 - DNA, 25 bp, Artificial
  probe
  misc_feature (1)..(25): SEQ ID NO: 4433; WAN024AGY_at; Start 11; Stop 35
gctttacaaactagtgtagaagtga

SEQ ID NO: 54263 - DNA, 25 bp, Artificial
  probe
  misc_feature (1)..(25): SEQ ID NO: 4433; WAN024AGY_at; Start 28; Stop 52
agaagtgatatactataggtgaagt

SEQ ID NO: 54264 - DNA, 25 bp, Artificial
  probe
  misc_feature (1)..(25): SEQ ID NO: 4433; WAN024AGY_at; Start 10; Stop 34
tgctttacaaactagtgtagaagtg

SEQ ID NO: 54265 - DNA, 25 bp, Artificial
  probe
  misc_feature (1)..(25): SEQ ID NO: 4433; WAN024AGY_at; Start 6; Stop 30
attatgctttacaaactagtgtaga

SEQ ID NO: 54266 - DNA, 25 bp, Artificial
  probe
  misc_feature (1)..(25): SEQ ID NO: 4433; WAN024AGY_at; Start 66; Stop 90
tacaaaatagattagaagggagaag

SEQ ID NO: 54267 - DNA, 25 bp, Artificial
  probe
  misc_feature (1)..(25): SEQ ID NO: 4433; WAN024AGY_at; Start 22; Stop 46
tagtgtagaagtgatatactatagg

SEQ ID NO: 54268 - DNA, 25 bp, Artificial
  probe
  misc_feature (1)..(25): SEQ ID NO: 4433; WAN024AGY_at; Start 65; Stop 89
ttacaaaatagattagaagggagaa

SEQ ID NO: 54269 - DNA, 25 bp, Artificial
  probe
  misc_feature (1)..(25): SEQ ID NO: 4433; WAN024AGY_at; Start 68; Stop 92
caaaatagattagaagggagaagtg

SEQ ID NO: 54270 - DNA, 25 bp, Artificial
  probe
  misc_feature (1)..(25): SEQ ID NO: 4433; WAN024AGY_at; Start 14; Stop 38
ttacaaactagtgtagaagtgatat

SEQ ID NO: 54271 - DNA, 25 bp, Artificial
  probe
  misc_feature (1)..(25): SEQ ID NO: 4433; WAN024AGY_at; Start 67; Stop 91
acaaaatagattagaagggagaagt

SEQ ID NO: 54272 - DNA, 25 bp, Artificial
  probe
  misc_feature (1)..(25): SEQ ID NO: 4433; WAN024AGY_at; Start 19; Stop 43
aactagtgtagaagtgatatactat

SEQ ID NO: 54273 - DNA, 25 bp, Artificial
  probe
  misc_feature (1)..(25): SEQ ID NO: 4433; WAN024AGY_at; Start 12; Stop 36
ctttacaaactagtgtagaagtgat

SEQ ID NO: 54274 - DNA, 25 bp, Artificial
  probe
  misc_feature (1)..(25): SEQ ID NO: 4433; WAN024AGY_at; Start 25; Stop 49
tgtagaagtgatatactataggtga

SEQ ID NO: 54275 - DNA, 25 bp, Artificial
  probe
  misc_feature (1)..(25): SEQ ID NO: 4433; WAN024AGY_at; Start 63; Stop 87
tattacaaaatagattagaagggag

SEQ ID NO: 54276 - DNA, 25 bp, Artificial
  probe
  misc_feature (1)..(25): SEQ ID NO: 4433; WAN024AGY_at; Start 62; Stop 86
gtattacaaaatagattagaaggga

SEQ ID NO: 54277 - DNA, 25 bp, Artificial
  probe
  misc_feature (1)..(25): SEQ ID NO: 4433; WAN024AGY_at; Start 15; Stop 39
tacaaactagtgtagaagtgatata

SEQ ID NO: 54278 - DNA, 25 bp, Artificial
  probe
  misc_feature (1)..(25): SEQ ID NO: 4433; WAN024AGY_at; Start 13; Stop 37
tttacaaactagtgtagaagtgata

SEQ ID NO: 54279 - DNA, 25 bp, Artificial
  probe
  misc_feature (1)..(25): SEQ ID NO: 4433; WAN024AGY_at; Start 16; Stop 40
acaaactagtgtagaagtgatatac

SEQ ID NO: 54280 - DNA, 25 bp, Artificial
  probe
  misc_feature (1)..(25): SEQ ID NO: 4433; WAN024AGY_at; Start 26; Stop 50
gtagaagtgatatactataggtgaa

SEQ ID NO: 54281 - DNA, 25 bp, Artificial
  probe
  misc_feature (1)..(25): SEQ ID NO: 4433; WAN024AGY_at; Start 59; Stop 83
taggtattacaaaatagattagaag

SEQ ID NO: 54282 - DNA, 25 bp, Artificial
  probe
  misc_feature (1)..(25): SEQ ID NO: 4433; WAN024AGY_at; Start 55; Stop 79
ctagtaggtattacaaaatagatta

SEQ ID NO: 54283 - DNA, 25 bp, Artificial
  probe
  misc_feature (1)..(25): SEQ ID NO: 4433; WAN024AGY_at; Start 7; Stop 31
ttatgctttacaaactagtgtagaa

SEQ ID NO: 54284 - DNA, 25 bp, Artificial
  probe
  misc_feature (1)..(25): SEQ ID NO: 4433; WAN024AGY_at; Start 24; Stop 48
gtgtagaagtgatatactataggtg

SEQ ID NO: 54285 - DNA, 25 bp, Artificial
  probe
  misc_feature (1)..(25): SEQ ID NO: 4433; WAN024AGY_at; Start 5; Stop 29
tattatgctttacaaactagtgtag

SEQ ID NO: 54286 - DNA, 25 bp, Artificial
  probe
  misc_feature (1)..(25): SEQ ID NO: 4433; WAN024AGY_at; Start 27; Stop 51
tagaagtgatatactataggtgaag

SEQ ID NO: 54287 - DNA, 25 bp, Artificial
  probe
  misc_feature (1)..(25): SEQ ID NO: 4433; WAN024AGY_at; Start 56; Stop 80
tagtaggtattacaaaatagattag

SEQ ID NO: 54288 - DNA, 25 bp, Artificial
  probe
  misc_feature (1)..(25): SEQ ID NO: 4433; WAN024AGY_at; Start 8; Stop 32
tatgctttacaaactagtgtagaag

SEQ ID NO: 54289 - DNA, 25 bp, Artificial
  probe
  misc_feature (1)..(25): SEQ ID NO: 62; WAN024AGZ_at; Start 73; Stop 97
gttgacatcgactcctatatgagta

SEQ ID NO: 54290 - DNA, 25 bp, Artificial
  probe
  misc_feature (1)..(25): SEQ ID NO: 62; WAN024AGZ_at; Start 74; Stop 98
ttgacatcgactcctatatgagtat

SEQ ID NO: 54291 - DNA, 25 bp, Artificial
  probe
  misc_feature (1)..(25): SEQ ID NO: 62; WAN024AGZ_at; Start 25; Stop 49
cacgaaaatcggctgttacagtttt

SEQ ID NO: 54292 - DNA, 25 bp, Artificial
  probe
  misc_feature (1)..(25): SEQ ID NO: 62; WAN024AGZ_at; Start 62; Stop 86
tttaaaaaatggttgacatcgactc

SEQ ID NO: 54293 - DNA, 25 bp, Artificial
  probe
  misc_feature (1)..(25): SEQ ID NO: 62; WAN024AGZ_at; Start 12; Stop 36
caacttgactagtcacgaaaatcgg

SEQ ID NO: 54294 - DNA, 25 bp, Artificial
  probe
  misc_feature (1)..(25): SEQ ID NO: 62; WAN024AGZ_at; Start 76; Stop 100
gacatcgactcctatatgagtataa

SEQ ID NO: 54295 - DNA, 25 bp, Artificial
  probe
  misc_feature (1)..(25): SEQ ID NO: 62; WAN024AGZ_at; Start 80; Stop 104
tcgactcctatatgagtataatagt

SEQ ID NO: 54296 - DNA, 25 bp, Artificial
  probe
  misc_feature (1)..(25): SEQ ID NO: 62; WAN024AGZ_at; Start 69; Stop 93
aatggttgacatcgactcctatatg

SEQ ID NO: 54297 - DNA, 25 bp, Artificial
  probe
  misc_feature (1)..(25): SEQ ID NO: 62; WAN024AGZ_at; Start 72; Stop 96
ggttgacatcgactcctatatgagt

SEQ ID NO: 54298 - DNA, 25 bp, Artificial
  probe
  misc_feature (1)..(25): SEQ ID NO: 62; WAN024AGZ_at; Start 11; Stop 35
ccaacttgactagtcacgaaaatcg

SEQ ID NO: 54299 - DNA, 25 bp, Artificial
  probe
  misc_feature (1)..(25): SEQ ID NO: 62; WAN024AGZ_at; Start 63; Stop 87
ttaaaaaatggttgacatcgactcc

SEQ ID NO: 54300 - DNA, 25 bp, Artificial
  probe
  misc_feature (1)..(25): SEQ ID NO: 62; WAN024AGZ_at; Start 18; Stop 42
gactagtcacgaaaatcggctgtta

SEQ ID NO: 54301 - DNA, 25 bp, Artificial
  probe
  misc_feature (1)..(25): SEQ ID NO: 62; WAN024AGZ_at; Start 15; Stop 39
cttgactagtcacgaaaatcggctg

SEQ ID NO: 54302 - DNA, 25 bp, Artificial
  probe
  misc_feature (1)..(25): SEQ ID NO: 62; WAN024AGZ_at; Start 27; Stop 51
cgaaaatcggctgttacagtttttg

SEQ ID NO: 54303 - DNA, 25 bp, Artificial
  probe
  misc_feature (1)..(25): SEQ ID NO: 62; WAN024AGZ_at; Start 22; Stop 46
agtcacgaaaatcggctgttacagt

SEQ ID NO: 54304 - DNA, 25 bp, Artificial
  probe
  misc_feature (1)..(25): SEQ ID NO: 62; WAN024AGZ_at; Start 14; Stop 38
acttgactagtcacgaaaatcggct

SEQ ID NO: 54305 - DNA, 25 bp, Artificial
  probe
  misc_feature (1)..(25): SEQ ID NO: 62; WAN024AGZ_at; Start 8; Stop 32
tatccaacttgactagtcacgaaaa

SEQ ID NO: 54306 - DNA, 25 bp, Artificial
  probe
  misc_feature (1)..(25): SEQ ID NO: 62; WAN024AGZ_at; Start 17; Stop 41
tgactagtcacgaaaatcggctgtt

SEQ ID NO: 54307 - DNA, 25 bp, Artificial
  probe
  misc_feature (1)..(25): SEQ ID NO: 62; WAN024AGZ_at; Start 4; Stop 28
aaattatccaacttgactagtcacg

SEQ ID NO: 54308 - DNA, 25 bp, Artificial
  probe
  misc_feature (1)..(25): SEQ ID NO: 62; WAN024AGZ_at; Start 10; Stop 34
tccaacttgactagtcacgaaaatc

SEQ ID NO: 54309 - DNA, 25 bp, Artificial
  probe
  misc_feature (1)..(25): SEQ ID NO: 62; WAN024AGZ_at; Start 5; Stop 29
aattatccaacttgactagtcacga

SEQ ID NO: 54310 - DNA, 25 bp, Artificial
  probe
  misc_feature (1)..(25): SEQ ID NO: 62; WAN024AGZ_at; Start 66; Stop 90
aaaaatggttgacatcgactcctat

SEQ ID NO: 54311 - DNA, 25 bp, Artificial
  probe
  misc_feature (1)..(25): SEQ ID NO: 62; WAN024AGZ_at; Start 6; Stop 30
attatccaacttgactagtcacgaa

SEQ ID NO: 54312 - DNA, 25 bp, Artificial
  probe
  misc_feature (1)..(25): SEQ ID NO: 62; WAN024AGZ_at; Start 82; Stop 106
gactcctatatgagtataatagtta

SEQ ID NO: 54313 - DNA, 25 bp, Artificial
  probe
  misc_feature (1)..(25): SEQ ID NO: 62; WAN024AGZ_at; Start 20; Stop 44
ctagtcacgaaaatcggctgttaca

SEQ ID NO: 54314 - DNA, 25 bp, Artificial
  probe
  misc_feature (1)..(25): SEQ ID NO: 62; WAN024AGZ_at; Start 78; Stop 102
catcgactcctatatgagtataata

SEQ ID NO: 54315 - DNA, 25 bp, Artificial
  probe
  misc_feature (1)..(25): SEQ ID NO: 62; WAN024AGZ_at; Start 65; Stop 89
aaaaaatggttgacatcgactccta

SEQ ID NO: 54316 - DNA, 25 bp, Artificial
  probe
  misc_feature (1)..(25): SEQ ID NO: 62; WAN024AGZ_at; Start 67; Stop 91
aaaatggttgacatcgactcctata

SEQ ID NO: 54317 - DNA, 25 bp, Artificial
  probe
  misc_feature (1)..(25): SEQ ID NO: 62; WAN024AGZ_at; Start 21; Stop 45
tagtcacgaaaatcggctgttacag

SEQ ID NO: 54318 - DNA, 25 bp, Artificial
  probe
  misc_feature (1)..(25): SEQ ID NO: 62; WAN024AGZ_at; Start 16; Stop 40
ttgactagtcacgaaaatcggctgt

SEQ ID NO: 54319 - DNA, 25 bp, Artificial
  probe
  misc_feature (1)..(25): SEQ ID NO: 62; WAN024AGZ_at; Start 13; Stop 37
aacttgactagtcacgaaaatcggc

SEQ ID NO: 54320 - DNA, 25 bp, Artificial
  probe
  misc_feature (1)..(25): SEQ ID NO: 62; WAN024AGZ_at; Start 64; Stop 88
taaaaaatggttgacatcgactcct

SEQ ID NO: 54321 - DNA, 25 bp, Artificial
  probe
  misc_feature (1)..(25): SEQ ID NO: 62; WAN024AGZ_at; Start 71; Stop 95
tggttgacatcgactcctatatgag

SEQ ID NO: 54322 - DNA, 25 bp, Artificial
  probe
  misc_feature (1)..(25): SEQ ID NO: 62; WAN024AGZ_at; Start 19; Stop 43
actagtcacgaaaatcggctgttac

SEQ ID NO: 54323 - DNA, 25 bp, Artificial
  probe
  misc_feature (1)..(25): SEQ ID NO: 266; WAN024AH2_at; Start 106; Stop 130
tcgtgactagtcaagttggataatt

SEQ ID NO: 54324 - DNA, 25 bp, Artificial
  probe
  misc_feature (1)..(25): SEQ ID NO: 266; WAN024AH2_at; Start 101; Stop 125
gattttcgtgactagtcaagttgga

SEQ ID NO: 54325 - DNA, 25 bp, Artificial
  probe
  misc_feature (1)..(25): SEQ ID NO: 266; WAN024AH2_at; Start 98; Stop 122
gccgattttcgtgactagtcaagtt

SEQ ID NO: 54326 - DNA, 25 bp, Artificial
  probe
  misc_feature (1)..(25): SEQ ID NO: 266; WAN024AH2_at; Start 48; Stop 72
ggagtcgatgtcaaccattttttaa

SEQ ID NO: 54327 - DNA, 25 bp, Artificial
  probe
  misc_feature (1)..(25): SEQ ID NO: 266; WAN024AH2_at; Start 109; Stop 133
tgactagtcaagttggataattttt

SEQ ID NO: 54328 - DNA, 25 bp, Artificial
  probe
  misc_feature (1)..(25): SEQ ID NO: 266; WAN024AH2_at; Start 41; Stop 65
tcatataggagtcgatgtcaaccat

SEQ ID NO: 54329 - DNA, 25 bp, Artificial
  probe
  misc_feature (1)..(25): SEQ ID NO: 266; WAN024AH2_at; Start 36; Stop 60
tatactcatataggagtcgatgtca

SEQ ID NO: 54330 - DNA, 25 bp, Artificial
  probe
  misc_feature (1)..(25): SEQ ID NO: 266; WAN024AH2_at; Start 92; Stop 116
gtaacagccgattttcgtgactagt

SEQ ID NO: 54331 - DNA, 25 bp, Artificial
  probe
  misc_feature (1)..(25): SEQ ID NO: 266; WAN024AH2_at; Start 3; Stop 27
tagttaacctcttttctaatgtata

SEQ ID NO: 54332 - DNA, 25 bp, Artificial
  probe
  misc_feature (1)..(25): SEQ ID NO: 266; WAN024AH2_at; Start 103; Stop 127
ttttcgtgactagtcaagttggata

SEQ ID NO: 54333 - DNA, 25 bp, Artificial
  probe
  misc_feature (1)..(25): SEQ ID NO: 266; WAN024AH2_at; Start 91; Stop 115
tgtaacagccgattttcgtgactag

SEQ ID NO: 54334 - DNA, 25 bp, Artificial
  probe
  misc_feature (1)..(25): SEQ ID NO: 266; WAN024AH2_at; Start 86; Stop 110
aaaactgtaacagccgattttcgtg

SEQ ID NO: 54335 - DNA, 25 bp, Artificial
  probe
  misc_feature (1)..(25): SEQ ID NO: 266; WAN024AH2_at; Start 99; Stop 123
ccgattttcgtgactagtcaagttg

SEQ ID NO: 54336 - DNA, 25 bp, Artificial
  probe
  misc_feature (1)..(25): SEQ ID NO: 266; WAN024AH2_at; Start 95; Stop 119
acagccgattttcgtgactagtcaa

SEQ ID NO: 54337 - DNA, 25 bp, Artificial
  probe
  misc_feature (1)..(25): SEQ ID NO: 266; WAN024AH2_at; Start 89; Stop 113
actgtaacagccgattttcgtgact

SEQ ID NO: 54338 - DNA, 25 bp, Artificial
  probe
  misc_feature (1)..(25): SEQ ID NO: 266; WAN024AH2_at; Start 44; Stop 68
tataggagtcgatgtcaaccatttt

SEQ ID NO: 54339 - DNA, 25 bp, Artificial
  probe
  misc_feature (1)..(25): SEQ ID NO: 266; WAN024AH2_at; Start 107; Stop 131
cgtgactagtcaagttggataattt

SEQ ID NO: 54340 - DNA, 25 bp, Artificial
  probe
  misc_feature (1)..(25): SEQ ID NO: 266; WAN024AH2_at; Start 90; Stop 114
ctgtaacagccgattttcgtgacta

SEQ ID NO: 54341 - DNA, 25 bp, Artificial
  probe
  misc_feature (1)..(25): SEQ ID NO: 266; WAN024AH2_at; Start 33; Stop 57
tattatactcatataggagtcgatg

SEQ ID NO: 54342 - DNA, 25 bp, Artificial
  probe
  misc_feature (1)..(25): SEQ ID NO: 266; WAN024AH2_at; Start 29; Stop 53
taactattatactcatataggagtc

SEQ ID NO: 54343 - DNA, 25 bp, Artificial
  probe
  misc_feature (1)..(25): SEQ ID NO: 266; WAN024AH2_at; Start 31; Stop 55
actattatactcatataggagtcga

SEQ ID NO: 54344 - DNA, 25 bp, Artificial
  probe
  misc_feature (1)..(25): SEQ ID NO: 266; WAN024AH2_at; Start 35; Stop 59
ttatactcatataggagtcgatgtc

SEQ ID NO: 54345 - DNA, 25 bp, Artificial
  probe
  misc_feature (1)..(25): SEQ ID NO: 266; WAN024AH2_at; Start 96; Stop 120
cagccgattttcgtgactagtcaag

SEQ ID NO: 54346 - DNA, 25 bp, Artificial
  probe
  misc_feature (1)..(25): SEQ ID NO: 266; WAN024AH2_at; Start 84; Stop 108
caaaaactgtaacagccgattttcg

SEQ ID NO: 54347 - DNA, 25 bp, Artificial
  probe
  misc_feature (1)..(25): SEQ ID NO: 266; WAN024AH2_at; Start 40; Stop 64
ctcatataggagtcgatgtcaacca

SEQ ID NO: 54348 - DNA, 25 bp, Artificial
  probe
  misc_feature (1)..(25): SEQ ID NO: 266; WAN024AH2_at; Start 93; Stop 117
taacagccgattttcgtgactagtc

SEQ ID NO: 54349 - DNA, 25 bp, Artificial
  probe
  misc_feature (1)..(25): SEQ ID NO: 266; WAN024AH2_at; Start 42; Stop 66
catataggagtcgatgtcaaccatt

SEQ ID NO: 54350 - DNA, 25 bp, Artificial
  probe
  misc_feature (1)..(25): SEQ ID NO: 266; WAN024AH2_at; Start 46; Stop 70
taggagtcgatgtcaaccatttttt

SEQ ID NO: 54351 - DNA, 25 bp, Artificial
  probe
  misc_feature (1)..(25): SEQ ID NO: 266; WAN024AH2_at; Start 49; Stop 73
gagtcgatgtcaaccattttttaaa

SEQ ID NO: 54352 - DNA, 25 bp, Artificial
  probe
  misc_feature (1)..(25): SEQ ID NO: 266; WAN024AH2_at; Start 97; Stop 121
agccgattttcgtgactagtcaagt

SEQ ID NO: 54353 - DNA, 25 bp, Artificial
  probe
  misc_feature (1)..(25): SEQ ID NO: 266; WAN024AH2_at; Start 94; Stop 118
aacagccgattttcgtgactagtca

SEQ ID NO: 54354 - DNA, 25 bp, Artificial
  probe
  misc_feature (1)..(25): SEQ ID NO: 266; WAN024AH2_at; Start 38; Stop 62
tactcatataggagtcgatgtcaac

SEQ ID NO: 54355 - DNA, 25 bp, Artificial
  probe
  misc_feature (1)..(25): SEQ ID NO: 266; WAN024AH2_at; Start 39; Stop 63
actcatataggagtcgatgtcaacc

SEQ ID NO: 54356 - DNA, 25 bp, Artificial
  probe
  misc_feature (1)..(25): SEQ ID NO: 266; WAN024AH2_at; Start 100; Stop 124
cgattttcgtgactagtcaagttgg

SEQ ID NO: 54357 - DNA, 25 bp, Artificial
  probe
  misc_feature (1)..(25): SEQ ID NO: 4533; WAN024AH3_at; Start 47; Stop 71
tattgatataaaagaagggaggcca

SEQ ID NO: 54358 - DNA, 25 bp, Artificial
  probe
  misc_feature (1)..(25): SEQ ID NO: 4533; WAN024AH3_at; Start 49; Stop 73
ttgatataaaagaagggaggccaat

SEQ ID NO: 54359 - DNA, 25 bp, Artificial
  probe
  misc_feature (1)..(25): SEQ ID NO: 4533; WAN024AH3_at; Start 44; Stop 68
taatattgatataaaagaagggagg

SEQ ID NO: 54360 - DNA, 25 bp, Artificial
  probe
  misc_feature (1)..(25): SEQ ID NO: 4533; WAN024AH3_at; Start 1; Stop 25
tagtttattcgtaaaatcttgtaga

SEQ ID NO: 54361 - DNA, 25 bp, Artificial
  probe
  misc_feature (1)..(25): SEQ ID NO: 4533; WAN024AH3_at; Start 6; Stop 30
tattcgtaaaatcttgtagatttta

SEQ ID NO: 54362 - DNA, 25 bp, Artificial
  probe
  misc_feature (1)..(25): SEQ ID NO: 4533; WAN024AH3_at; Start 43; Stop 67
ataatattgatataaaagaagggag

SEQ ID NO: 54363 - DNA, 25 bp, Artificial
  probe
  misc_feature (1)..(25): SEQ ID NO: 4533; WAN024AH3_at; Start 9; Stop 33
tcgtaaaatcttgtagattttagga

SEQ ID NO: 54364 - DNA, 25 bp, Artificial
  probe
  misc_feature (1)..(25): SEQ ID NO: 4533; WAN024AH3_at; Start 41; Stop 65
atataatattgatataaaagaaggg

SEQ ID NO: 54365 - DNA, 25 bp, Artificial
  probe
  misc_feature (1)..(25): SEQ ID NO: 4533; WAN024AH3_at; Start 2; Stop 26
agtttattcgtaaaatcttgtagat

SEQ ID NO: 54366 - DNA, 25 bp, Artificial
  probe
  misc_feature (1)..(25): SEQ ID NO: 4533; WAN024AH3_at; Start 46; Stop 70
atattgatataaaagaagggaggcc

SEQ ID NO: 54367 - DNA, 25 bp, Artificial
  probe
  misc_feature (1)..(25): SEQ ID NO: 4533; WAN024AH3_at; Start 42; Stop 66
tataatattgatataaaagaaggga

SEQ ID NO: 54368 - DNA, 25 bp, Artificial
  probe
  misc_feature (1)..(25): SEQ ID NO: 4533; WAN024AH3_at; Start 40; Stop 64
tatataatattgatataaaagaagg

SEQ ID NO: 54369 - DNA, 25 bp, Artificial
  probe
  misc_feature (1)..(25): SEQ ID NO: 4533; WAN024AH3_at; Start 45; Stop 69
aatattgatataaaagaagggaggc

SEQ ID NO: 54370 - DNA, 25 bp, Artificial
  probe
  misc_feature (1)..(25): SEQ ID NO: 4533; WAN024AH3_at; Start 48; Stop 72
attgatataaaagaagggaggccaa

SEQ ID NO: 54371 - DNA, 25 bp, Artificial
  probe
  misc_feature (1)..(25): SEQ ID NO: 3162; WAN024AH4_at; Start 8; Stop 32
tcccttcttttatatcaatattata

SEQ ID NO: 54372 - DNA, 25 bp, Artificial
  probe
  misc_feature (1)..(25): SEQ ID NO: 3162; WAN024AH4_at; Start 22; Stop 46
tcaatattatataaaattttcctaa

SEQ ID NO: 54373 - DNA, 25 bp, Artificial
  probe
  misc_feature (1)..(25): SEQ ID NO: 3162; WAN024AH4_at; Start 49; Stop 73
tctacaagattttacgaataaacta

SEQ ID NO: 54374 - DNA, 25 bp, Artificial
  probe
  misc_feature (1)..(25): SEQ ID NO: 3162; WAN024AH4_at; Start 20; Stop 44
tatcaatattatataaaattttcct

SEQ ID NO: 54375 - DNA, 25 bp, Artificial
  probe
  misc_feature (1)..(25): SEQ ID NO: 3162; WAN024AH4_at; Start 48; Stop 72
atctacaagattttacgaataaact

SEQ ID NO: 54376 - DNA, 25 bp, Artificial
  probe
  misc_feature (1)..(25): SEQ ID NO: 3162; WAN024AH4_at; Start 44; Stop 68
taaaatctacaagattttacgaata

SEQ ID NO: 54377 - DNA, 25 bp, Artificial
  probe
  misc_feature (1)..(25): SEQ ID NO: 3162; WAN024AH4_at; Start 43; Stop 67
ctaaaatctacaagattttacgaat

SEQ ID NO: 54378 - DNA, 25 bp, Artificial
  probe
  misc_feature (1)..(25): SEQ ID NO: 3162; WAN024AH4_at; Start 41; Stop 65
tcctaaaatctacaagattttacga

SEQ ID NO: 54379 - DNA, 25 bp, Artificial
  probe
  misc_feature (1)..(25): SEQ ID NO: 3162; WAN024AH4_at; Start 7; Stop 31
ctcccttcttttatatcaatattat

SEQ ID NO: 54380 - DNA, 25 bp, Artificial
  probe
  misc_feature (1)..(25): SEQ ID NO: 3162; WAN024AH4_at; Start 4; Stop 28
ggcctcccttcttttatatcaatat

SEQ ID NO: 54381 - DNA, 25 bp, Artificial
  probe
  misc_feature (1)..(25): SEQ ID NO: 3162; WAN024AH4_at; Start 3; Stop 27
tggcctcccttcttttatatcaata

SEQ ID NO: 54382 - DNA, 25 bp, Artificial
  probe
  misc_feature (1)..(25): SEQ ID NO: 3162; WAN024AH4_at; Start 2; Stop 26
ttggcctcccttcttttatatcaat

SEQ ID NO: 54383 - DNA, 25 bp, Artificial
  probe
  misc_feature (1)..(25): SEQ ID NO: 3162; WAN024AH4_at; Start 5; Stop 29
gcctcccttcttttatatcaatatt

SEQ ID NO: 54384 - DNA, 25 bp, Artificial
  probe
  misc_feature (1)..(25): SEQ ID NO: 3162; WAN024AH4_at; Start 6; Stop 30
cctcccttcttttatatcaatatta

SEQ ID NO: 54385 - DNA, 25 bp, Artificial
  probe
  misc_feature (1)..(25): SEQ ID NO: 3162; WAN024AH4_at; Start 1; Stop 25
attggcctcccttcttttatatcaa

SEQ ID NO: 54386 - DNA, 25 bp, Artificial
  probe
  misc_feature (1)..(25): SEQ ID NO: 3162; WAN024AH4_at; Start 9; Stop 33
cccttcttttatatcaatattatat

SEQ ID NO: 54387 - DNA, 25 bp, Artificial
  probe
  misc_feature (1)..(25): SEQ ID NO: 4744; WAN024AH5_at; Start 36; Stop 60
ctttattttatcacgttccaaggat

SEQ ID NO: 54388 - DNA, 25 bp, Artificial
  probe
  misc_feature (1)..(25): SEQ ID NO: 4744; WAN024AH5_at; Start 55; Stop 79
aaggattttctcaagttggaggaag

SEQ ID NO: 54389 - DNA, 25 bp, Artificial
  probe
  misc_feature (1)..(25): SEQ ID NO: 4744; WAN024AH5_at; Start 47; Stop 71
cacgttccaaggattttctcaagtt

SEQ ID NO: 54390 - DNA, 25 bp, Artificial
  probe
  misc_feature (1)..(25): SEQ ID NO: 4744; WAN024AH5_at; Start 42; Stop 66
tttatcacgttccaaggattttctc

SEQ ID NO: 54391 - DNA, 25 bp, Artificial
  probe
  misc_feature (1)..(25): SEQ ID NO: 4744; WAN024AH5_at; Start 26; Stop 50
aatccttatcctttattttatcacg

SEQ ID NO: 54392 - DNA, 25 bp, Artificial
  probe
  misc_feature (1)..(25): SEQ ID NO: 4744; WAN024AH5_at; Start 46; Stop 70
tcacgttccaaggattttctcaagt

SEQ ID NO: 54393 - DNA, 25 bp, Artificial
  probe
  misc_feature (1)..(25): SEQ ID NO: 4744; WAN024AH5_at; Start 49; Stop 73
cgttccaaggattttctcaagttgg

SEQ ID NO: 54394 - DNA, 25 bp, Artificial
  probe
  misc_feature (1)..(25): SEQ ID NO: 4744; WAN024AH5_at; Start 32; Stop 56
tatcctttattttatcacgttccaa

SEQ ID NO: 54395 - DNA, 25 bp, Artificial
  probe
  misc_feature (1)..(25): SEQ ID NO: 4744; WAN024AH5_at; Start 31; Stop 55
ttatcctttattttatcacgttcca

SEQ ID NO: 54396 - DNA, 25 bp, Artificial
  probe
  misc_feature (1)..(25): SEQ ID NO: 4744; WAN024AH5_at; Start 33; Stop 57
atcctttattttatcacgttccaag

SEQ ID NO: 54397 - DNA, 25 bp, Artificial
  probe
  misc_feature (1)..(25): SEQ ID NO: 4744; WAN024AH5_at; Start 27; Stop 51
atccttatcctttattttatcacgt

SEQ ID NO: 54398 - DNA, 25 bp, Artificial
  probe
  misc_feature (1)..(25): SEQ ID NO: 4744; WAN024AH5_at; Start 45; Stop 69
atcacgttccaaggattttctcaag

SEQ ID NO: 54399 - DNA, 25 bp, Artificial
  probe
  misc_feature (1)..(25): SEQ ID NO: 4744; WAN024AH5_at; Start 9; Stop 33
tataatgaattattaaaaatcctta

SEQ ID NO: 54400 - DNA, 25 bp, Artificial
  probe
  misc_feature (1)..(25): SEQ ID NO: 4744; WAN024AH5_at; Start 44; Stop 68
tatcacgttccaaggattttctcaa

SEQ ID NO: 54401 - DNA, 25 bp, Artificial
  probe
  misc_feature (1)..(25): SEQ ID NO: 4744; WAN024AH5_at; Start 62; Stop 86
ttctcaagttggaggaaggggacaa

SEQ ID NO: 54402 - DNA, 25 bp, Artificial
  probe
  misc_feature (1)..(25): SEQ ID NO: 4744; WAN024AH5_at; Start 54; Stop 78
caaggattttctcaagttggaggaa

SEQ ID NO: 54403 - DNA, 25 bp, Artificial
  probe
  misc_feature (1)..(25): SEQ ID NO: 4744; WAN024AH5_at; Start 43; Stop 67
ttatcacgttccaaggattttctca

SEQ ID NO: 54404 - DNA, 25 bp, Artificial
  probe
  misc_feature (1)..(25): SEQ ID NO: 4744; WAN024AH5_at; Start 50; Stop 74
gttccaaggattttctcaagttgga

SEQ ID NO: 54405 - DNA, 25 bp, Artificial
  probe
  misc_feature (1)..(25): SEQ ID NO: 4744; WAN024AH5_at; Start 56; Stop 80
aggattttctcaagttggaggaagg

SEQ ID NO: 54406 - DNA, 25 bp, Artificial
  probe
  misc_feature (1)..(25): SEQ ID NO: 4744; WAN024AH5_at; Start 51; Stop 75
ttccaaggattttctcaagttggag

SEQ ID NO: 54407 - DNA, 25 bp, Artificial
  probe
  misc_feature (1)..(25): SEQ ID NO: 4744; WAN024AH5_at; Start 13; Stop 37
atgaattattaaaaatccttatcct

SEQ ID NO: 54408 - DNA, 25 bp, Artificial
  probe
  misc_feature (1)..(25): SEQ ID NO: 4744; WAN024AH5_at; Start 52; Stop 76
tccaaggattttctcaagttggagg

SEQ ID NO: 54409 - DNA, 25 bp, Artificial
  probe
  misc_feature (1)..(25): SEQ ID NO: 4744; WAN024AH5_at; Start 61; Stop 85
tttctcaagttggaggaaggggaca

SEQ ID NO: 54410 - DNA, 25 bp, Artificial
  probe
  misc_feature (1)..(25): SEQ ID NO: 4744; WAN024AH5_at; Start 53; Stop 77
ccaaggattttctcaagttggagga

SEQ ID NO: 54411 - DNA, 25 bp, Artificial
  probe
  misc_feature (1)..(25): SEQ ID NO: 4744; WAN024AH5_at; Start 48; Stop 72
acgttccaaggattttctcaagttg

SEQ ID NO: 54412 - DNA, 25 bp, Artificial
  probe
  misc_feature (1)..(25): SEQ ID NO: 4744; WAN024AH5_at; Start 7; Stop 31
tatataatgaattattaaaaatcct

SEQ ID NO: 54413 - DNA, 25 bp, Artificial
  probe
  misc_feature (1)..(25): SEQ ID NO: 4744; WAN024AH5_at; Start 6; Stop 30
ctatataatgaattattaaaaatcc

SEQ ID NO: 54414 - DNA, 25 bp, Artificial
  probe
  misc_feature (1)..(25): SEQ ID NO: 4744; WAN024AH5_at; Start 11; Stop 35
taatgaattattaaaaatccttatc

SEQ ID NO: 54415 - DNA, 25 bp, Artificial
  probe
  misc_feature (1)..(25): SEQ ID NO: 4495; WAN024AH6_at; Start 19; Stop 43
cctccaacttgagaaaatccttgga

SEQ ID NO: 54416 - DNA, 25 bp, Artificial
  probe
  misc_feature (1)..(25): SEQ ID NO: 4495; WAN024AH6_at; Start 15; Stop 39
ccttcctccaacttgagaaaatcct

SEQ ID NO: 54417 - DNA, 25 bp, Artificial
  probe
  misc_feature (1)..(25): SEQ ID NO: 4495; WAN024AH6_at; Start 58; Stop 82
aggataaggatttttaataattcat

SEQ ID NO: 54418 - DNA, 25 bp, Artificial
  probe
  misc_feature (1)..(25): SEQ ID NO: 4495; WAN024AH6_at; Start 22; Stop 46
ccaacttgagaaaatccttggaacg

SEQ ID NO: 54419 - DNA, 25 bp, Artificial
  probe
  misc_feature (1)..(25): SEQ ID NO: 4495; WAN024AH6_at; Start 21; Stop 45
tccaacttgagaaaatccttggaac

SEQ ID NO: 54420 - DNA, 25 bp, Artificial
  probe
  misc_feature (1)..(25): SEQ ID NO: 4495; WAN024AH6_at; Start 10; Stop 34
tgtccccttcctccaacttgagaaa

SEQ ID NO: 54421 - DNA, 25 bp, Artificial
  probe
  misc_feature (1)..(25): SEQ ID NO: 4495; WAN024AH6_at; Start 9; Stop 33
ttgtccccttcctccaacttgagaa

SEQ ID NO: 54422 - DNA, 25 bp, Artificial
  probe
  misc_feature (1)..(25): SEQ ID NO: 4495; WAN024AH6_at; Start 17; Stop 41
ttcctccaacttgagaaaatccttg

SEQ ID NO: 54423 - DNA, 25 bp, Artificial
  probe
  misc_feature (1)..(25): SEQ ID NO: 4495; WAN024AH6_at; Start 65; Stop 89
ggatttttaataattcattatatag

SEQ ID NO: 54424 - DNA, 25 bp, Artificial
  probe
  misc_feature (1)..(25): SEQ ID NO: 4495; WAN024AH6_at; Start 40; Stop 64
tggaacgtgataaaataaaggataa

SEQ ID NO: 54425 - DNA, 25 bp, Artificial
  probe
  misc_feature (1)..(25): SEQ ID NO: 4495; WAN024AH6_at; Start 26; Stop 50
cttgagaaaatccttggaacgtgat

SEQ ID NO: 54426 - DNA, 25 bp, Artificial
  probe
  misc_feature (1)..(25): SEQ ID NO: 4495; WAN024AH6_at; Start 28; Stop 52
tgagaaaatccttggaacgtgataa

SEQ ID NO: 54427 - DNA, 25 bp, Artificial
  probe
  misc_feature (1)..(25): SEQ ID NO: 4495; WAN024AH6_at; Start 23; Stop 47
caacttgagaaaatccttggaacgt

SEQ ID NO: 54428 - DNA, 25 bp, Artificial
  probe
  misc_feature (1)..(25): SEQ ID NO: 4495; WAN024AH6_at; Start 38; Stop 62
cttggaacgtgataaaataaaggat

SEQ ID NO: 54429 - DNA, 25 bp, Artificial
  probe
  misc_feature (1)..(25): SEQ ID NO: 4495; WAN024AH6_at; Start 25; Stop 49
acttgagaaaatccttggaacgtga

SEQ ID NO: 54430 - DNA, 25 bp, Artificial
  probe
  misc_feature (1)..(25): SEQ ID NO: 4495; WAN024AH6_at; Start 20; Stop 44
ctccaacttgagaaaatccttggaa

SEQ ID NO: 54431 - DNA, 25 bp, Artificial
  probe
  misc_feature (1)..(25): SEQ ID NO: 4495; WAN024AH6_at; Start 44; Stop 68
acgtgataaaataaaggataaggat

SEQ ID NO: 54432 - DNA, 25 bp, Artificial
  probe
  misc_feature (1)..(25): SEQ ID NO: 4495; WAN024AH6_at; Start 29; Stop 53
gagaaaatccttggaacgtgataaa

SEQ ID NO: 54433 - DNA, 25 bp, Artificial
  probe
  misc_feature (1)..(25): SEQ ID NO: 4495; WAN024AH6_at; Start 27; Stop 51
ttgagaaaatccttggaacgtgata

SEQ ID NO: 54434 - DNA, 25 bp, Artificial
  probe
  misc_feature (1)..(25): SEQ ID NO: 4495; WAN024AH6_at; Start 39; Stop 63
ttggaacgtgataaaataaaggata

SEQ ID NO: 54435 - DNA, 25 bp, Artificial
  probe
  misc_feature (1)..(25): SEQ ID NO: 4495; WAN024AH6_at; Start 24; Stop 48
aacttgagaaaatccttggaacgtg

SEQ ID NO: 54436 - DNA, 25 bp, Artificial
  probe
  misc_feature (1)..(25): SEQ ID NO: 4495; WAN024AH6_at; Start 18; Stop 42
tcctccaacttgagaaaatccttgg

SEQ ID NO: 54437 - DNA, 25 bp, Artificial
  probe
  misc_feature (1)..(25): SEQ ID NO: 4495; WAN024AH6_at; Start 60; Stop 84
gataaggatttttaataattcatta

SEQ ID NO: 54438 - DNA, 25 bp, Artificial
  probe
  misc_feature (1)..(25): SEQ ID NO: 4495; WAN024AH6_at; Start 16; Stop 40
cttcctccaacttgagaaaatcctt

SEQ ID NO: 54439 - DNA, 25 bp, Artificial
  probe
  misc_feature (1)..(25): SEQ ID NO: 4495; WAN024AH6_at; Start 45; Stop 69
cgtgataaaataaaggataaggatt

SEQ ID NO: 54440 - DNA, 25 bp, Artificial
  probe
  misc_feature (1)..(25): SEQ ID NO: 4495; WAN024AH6_at; Start 35; Stop 59
atccttggaacgtgataaaataaag

SEQ ID NO: 54441 - DNA, 25 bp, Artificial
  probe
  misc_feature (1)..(25): SEQ ID NO: 526; WAN024AH7_at; Start 11; Stop 35
cttcatcagtccgagactgctgtta

SEQ ID NO: 54442 - DNA, 25 bp, Artificial
  probe
  misc_feature (1)..(25): SEQ ID NO: 526; WAN024AH7_at; Start 29; Stop 53
gctgttaatgttcgattaagtagtc

SEQ ID NO: 54443 - DNA, 25 bp, Artificial
  probe
  misc_feature (1)..(25): SEQ ID NO: 526; WAN024AH7_at; Start 16; Stop 40
tcagtccgagactgctgttaatgtt

SEQ ID NO: 54444 - DNA, 25 bp, Artificial
  probe
  misc_feature (1)..(25): SEQ ID NO: 526; WAN024AH7_at; Start 18; Stop 42
agtccgagactgctgttaatgttcg

SEQ ID NO: 54445 - DNA, 25 bp, Artificial
  probe
  misc_feature (1)..(25): SEQ ID NO: 526; WAN024AH7_at; Start 22; Stop 46
cgagactgctgttaatgttcgatta

SEQ ID NO: 54446 - DNA, 25 bp, Artificial
  probe
  misc_feature (1)..(25): SEQ ID NO: 526; WAN024AH7_at; Start 50; Stop 74
agtcttggaattgcctaaacgttca

SEQ ID NO: 54447 - DNA, 25 bp, Artificial
  probe
  misc_feature (1)..(25): SEQ ID NO: 526; WAN024AH7_at; Start 20; Stop 44
tccgagactgctgttaatgttcgat

SEQ ID NO: 54448 - DNA, 25 bp, Artificial
  probe
  misc_feature (1)..(25): SEQ ID NO: 526; WAN024AH7_at; Start 3; Stop 27
aaagagaccttcatcagtccgagac

SEQ ID NO: 54449 - DNA, 25 bp, Artificial
  probe
  misc_feature (1)..(25): SEQ ID NO: 526; WAN024AH7_at; Start 34; Stop 58
taatgttcgattaagtagtcttgga

SEQ ID NO: 54450 - DNA, 25 bp, Artificial
  probe
  misc_feature (1)..(25): SEQ ID NO: 526; WAN024AH7_at; Start 2; Stop 26
taaagagaccttcatcagtccgaga

SEQ ID NO: 54451 - DNA, 25 bp, Artificial
  probe
  misc_feature (1)..(25): SEQ ID NO: 526; WAN024AH7_at; Start 45; Stop 69
taagtagtcttggaattgcctaaac

SEQ ID NO: 54452 - DNA, 25 bp, Artificial
  probe
  misc_feature (1)..(25): SEQ ID NO: 526; WAN024AH7_at; Start 5; Stop 29
agagaccttcatcagtccgagactg

SEQ ID NO: 54453 - DNA, 25 bp, Artificial
  probe
  misc_feature (1)..(25): SEQ ID NO: 526; WAN024AH7_at; Start 52; Stop 76
tcttggaattgcctaaacgttcaat

SEQ ID NO: 54454 - DNA, 25 bp, Artificial
  probe
  misc_feature (1)..(25): SEQ ID NO: 526; WAN024AH7_at; Start 53; Stop 77
cttggaattgcctaaacgttcaatc

SEQ ID NO: 54455 - DNA, 25 bp, Artificial
  probe
  misc_feature (1)..(25): SEQ ID NO: 526; WAN024AH7_at; Start 4; Stop 28
aagagaccttcatcagtccgagact

SEQ ID NO: 54456 - DNA, 25 bp, Artificial
  probe
  misc_feature (1)..(25): SEQ ID NO: 526; WAN024AH7_at; Start 25; Stop 49
gactgctgttaatgttcgattaagt

SEQ ID NO: 54457 - DNA, 25 bp, Artificial
  probe
  misc_feature (1)..(25): SEQ ID NO: 526; WAN024AH7_at; Start 8; Stop 32
gaccttcatcagtccgagactgctg

SEQ ID NO: 54458 - DNA, 25 bp, Artificial
  probe
  misc_feature (1)..(25): SEQ ID NO: 526; WAN024AH7_at; Start 49; Stop 73
tagtcttggaattgcctaaacgttc

SEQ ID NO: 54459 - DNA, 25 bp, Artificial
  probe
  misc_feature (1)..(25): SEQ ID NO: 526; WAN024AH7_at; Start 21; Stop 45
ccgagactgctgttaatgttcgatt

SEQ ID NO: 54460 - DNA, 25 bp, Artificial
  probe
  misc_feature (1)..(25): SEQ ID NO: 526; WAN024AH7_at; Start 46; Stop 70
aagtagtcttggaattgcctaaacg

SEQ ID NO: 54461 - DNA, 25 bp, Artificial
  probe
  misc_feature (1)..(25): SEQ ID NO: 526; WAN024AH7_at; Start 55; Stop 79
tggaattgcctaaacgttcaatctt

SEQ ID NO: 54462 - DNA, 25 bp, Artificial
  probe
  misc_feature (1)..(25): SEQ ID NO: 526; WAN024AH7_at; Start 47; Stop 71
agtagtcttggaattgcctaaacgt

SEQ ID NO: 54463 - DNA, 25 bp, Artificial
  probe
  misc_feature (1)..(25): SEQ ID NO: 526; WAN024AH7_at; Start 1; Stop 25
ataaagagaccttcatcagtccgag

SEQ ID NO: 54464 - DNA, 25 bp, Artificial
  probe
  misc_feature (1)..(25): SEQ ID NO: 526; WAN024AH7_at; Start 13; Stop 37
tcatcagtccgagactgctgttaat

SEQ ID NO: 54465 - DNA, 25 bp, Artificial
  probe
  misc_feature (1)..(25): SEQ ID NO: 526; WAN024AH7_at; Start 9; Stop 33
accttcatcagtccgagactgctgt

SEQ ID NO: 54466 - DNA, 25 bp, Artificial
  probe
  misc_feature (1)..(25): SEQ ID NO: 526; WAN024AH7_at; Start 23; Stop 47
gagactgctgttaatgttcgattaa

SEQ ID NO: 54467 - DNA, 25 bp, Artificial
  probe
  misc_feature (1)..(25): SEQ ID NO: 526; WAN024AH7_at; Start 14; Stop 38
catcagtccgagactgctgttaatg

SEQ ID NO: 54468 - DNA, 25 bp, Artificial
  probe
  misc_feature (1)..(25): SEQ ID NO: 526; WAN024AH7_at; Start 35; Stop 59
aatgttcgattaagtagtcttggaa

SEQ ID NO: 54469 - DNA, 25 bp, Artificial
  probe
  misc_feature (1)..(25): SEQ ID NO: 526; WAN024AH7_at; Start 17; Stop 41
cagtccgagactgctgttaatgttc

SEQ ID NO: 54470 - DNA, 25 bp, Artificial
  probe
  misc_feature (1)..(25): SEQ ID NO: 526; WAN024AH7_at; Start 41; Stop 65
cgattaagtagtcttggaattgcct

SEQ ID NO: 54471 - DNA, 25 bp, Artificial
  probe
  misc_feature (1)..(25): SEQ ID NO: 526; WAN024AH7_at; Start 6; Stop 30
gagaccttcatcagtccgagactgc

SEQ ID NO: 54472 - DNA, 25 bp, Artificial
  probe
  misc_feature (1)..(25): SEQ ID NO: 526; WAN024AH7_at; Start 42; Stop 66
gattaagtagtcttggaattgccta

SEQ ID NO: 54473 - DNA, 25 bp, Artificial
  probe
  misc_feature (1)..(25): SEQ ID NO: 526; WAN024AH7_at; Start 19; Stop 43
gtccgagactgctgttaatgttcga

SEQ ID NO: 54474 - DNA, 25 bp, Artificial
  probe
  misc_feature (1)..(25): SEQ ID NO: 526; WAN024AH7_at; Start 40; Stop 64
tcgattaagtagtcttggaattgcc

SEQ ID NO: 54475 - DNA, 25 bp, Artificial
  probe
  misc_feature (1)..(25): SEQ ID NO: 127; WAN024AH8_at; Start 10; Stop 34
acgtttaggcaattccaagactact

SEQ ID NO: 54476 - DNA, 25 bp, Artificial
  probe
  misc_feature (1)..(25): SEQ ID NO: 127; WAN024AH8_at; Start 56; Stop 80
ctcggactgatgaaggtctctttat

SEQ ID NO: 54477 - DNA, 25 bp, Artificial
  probe
  misc_feature (1)..(25): SEQ ID NO: 127; WAN024AH8_at; Start 28; Stop 52
gactacttaatcgaacattaacagc

SEQ ID NO: 54478 - DNA, 25 bp, Artificial
  probe
  misc_feature (1)..(25): SEQ ID NO: 127; WAN024AH8_at; Start 55; Stop 79
tctcggactgatgaaggtctcttta

SEQ ID NO: 54479 - DNA, 25 bp, Artificial
  probe
  misc_feature (1)..(25): SEQ ID NO: 127; WAN024AH8_at; Start 43; Stop 67
cattaacagcagtctcggactgatg

SEQ ID NO: 54480 - DNA, 25 bp, Artificial
  probe
  misc_feature (1)..(25): SEQ ID NO: 127; WAN024AH8_at; Start 12; Stop 36
gtttaggcaattccaagactactta

SEQ ID NO: 54481 - DNA, 25 bp, Artificial
  probe
  misc_feature (1)..(25): SEQ ID NO: 127; WAN024AH8_at; Start 40; Stop 64
gaacattaacagcagtctcggactg

SEQ ID NO: 54482 - DNA, 25 bp, Artificial
  probe
  misc_feature (1)..(25): SEQ ID NO: 127; WAN024AH8_at; Start 7; Stop 31
tgaacgtttaggcaattccaagact

SEQ ID NO: 54483 - DNA, 25 bp, Artificial
  probe
  misc_feature (1)..(25): SEQ ID NO: 127; WAN024AH8_at; Start 11; Stop 35
cgtttaggcaattccaagactactt

SEQ ID NO: 54484 - DNA, 25 bp, Artificial
  probe
  misc_feature (1)..(25): SEQ ID NO: 127; WAN024AH8_at; Start 44; Stop 68
attaacagcagtctcggactgatga

SEQ ID NO: 54485 - DNA, 25 bp, Artificial
  probe
  misc_feature (1)..(25): SEQ ID NO: 127; WAN024AH8_at; Start 46; Stop 70
taacagcagtctcggactgatgaag

SEQ ID NO: 54486 - DNA, 25 bp, Artificial
  probe
  misc_feature (1)..(25): SEQ ID NO: 127; WAN024AH8_at; Start 53; Stop 77
agtctcggactgatgaaggtctctt

SEQ ID NO: 54487 - DNA, 25 bp, Artificial
  probe
  misc_feature (1)..(25): SEQ ID NO: 127; WAN024AH8_at; Start 35; Stop 59
taatcgaacattaacagcagtctcg

SEQ ID NO: 54488 - DNA, 25 bp, Artificial
  probe
  misc_feature (1)..(25): SEQ ID NO: 127; WAN024AH8_at; Start 18; Stop 42
gcaattccaagactacttaatcgaa

SEQ ID NO: 54489 - DNA, 25 bp, Artificial
  probe
  misc_feature (1)..(25): SEQ ID NO: 127; WAN024AH8_at; Start 13; Stop 37
tttaggcaattccaagactacttaa

SEQ ID NO: 54490 - DNA, 25 bp, Artificial
  probe
  misc_feature (1)..(25): SEQ ID NO: 127; WAN024AH8_at; Start 2; Stop 26
aagattgaacgtttaggcaattcca

SEQ ID NO: 54491 - DNA, 25 bp, Artificial
  probe
  misc_feature (1)..(25): SEQ ID NO: 127; WAN024AH8_at; Start 38; Stop 62
tcgaacattaacagcagtctcggac

SEQ ID NO: 54492 - DNA, 25 bp, Artificial
  probe
  misc_feature (1)..(25): SEQ ID NO: 127; WAN024AH8_at; Start 20; Stop 44
aattccaagactacttaatcgaaca

SEQ ID NO: 54493 - DNA, 25 bp, Artificial
  probe
  misc_feature (1)..(25): SEQ ID NO: 127; WAN024AH8_at; Start 41; Stop 65
aacattaacagcagtctcggactga

SEQ ID NO: 54494 - DNA, 25 bp, Artificial
  probe
  misc_feature (1)..(25): SEQ ID NO: 127; WAN024AH8_at; Start 23; Stop 47
tccaagactacttaatcgaacatta

SEQ ID NO: 54495 - DNA, 25 bp, Artificial
  probe
  misc_feature (1)..(25): SEQ ID NO: 127; WAN024AH8_at; Start 15; Stop 39
taggcaattccaagactacttaatc

SEQ ID NO: 54496 - DNA, 25 bp, Artificial
  probe
  misc_feature (1)..(25): SEQ ID NO: 127; WAN024AH8_at; Start 36; Stop 60
aatcgaacattaacagcagtctcgg

SEQ ID NO: 54497 - DNA, 25 bp, Artificial
  probe
  misc_feature (1)..(25): SEQ ID NO: 127; WAN024AH8_at; Start 8; Stop 32
gaacgtttaggcaattccaagacta

SEQ ID NO: 54498 - DNA, 25 bp, Artificial
  probe
  misc_feature (1)..(25): SEQ ID NO: 127; WAN024AH8_at; Start 54; Stop 78
gtctcggactgatgaaggtctcttt

SEQ ID NO: 54499 - DNA, 25 bp, Artificial
  probe
  misc_feature (1)..(25): SEQ ID NO: 127; WAN024AH8_at; Start 31; Stop 55
tacttaatcgaacattaacagcagt

SEQ ID NO: 54500 - DNA, 25 bp, Artificial
  probe
  misc_feature (1)..(25): SEQ ID NO: 127; WAN024AH8_at; Start 49; Stop 73
cagcagtctcggactgatgaaggtc

SEQ ID NO: 54501 - DNA, 25 bp, Artificial
  probe
  misc_feature (1)..(25): SEQ ID NO: 127; WAN024AH8_at; Start 33; Stop 57
cttaatcgaacattaacagcagtct

SEQ ID NO: 54502 - DNA, 25 bp, Artificial
  probe
  misc_feature (1)..(25): SEQ ID NO: 127; WAN024AH8_at; Start 51; Stop 75
gcagtctcggactgatgaaggtctc

SEQ ID NO: 54503 - DNA, 25 bp, Artificial
  probe
  misc_feature (1)..(25): SEQ ID NO: 127; WAN024AH8_at; Start 52; Stop 76
cagtctcggactgatgaaggtctct

SEQ ID NO: 54504 - DNA, 25 bp, Artificial
  probe
  misc_feature (1)..(25): SEQ ID NO: 127; WAN024AH8_at; Start 25; Stop 49
caagactacttaatcgaacattaac

SEQ ID NO: 54505 - DNA, 25 bp, Artificial
  probe
  misc_feature (1)..(25): SEQ ID NO: 127; WAN024AH8_at; Start 39; Stop 63
cgaacattaacagcagtctcggact

SEQ ID NO: 54506 - DNA, 25 bp, Artificial
  probe
  misc_feature (1)..(25): SEQ ID NO: 127; WAN024AH8_at; Start 4; Stop 28
gattgaacgtttaggcaattccaag

SEQ ID NO: 54507 - DNA, 25 bp, Artificial
  probe
  misc_feature (1)..(25): SEQ ID NO: 127; WAN024AH8_at; Start 37; Stop 61
atcgaacattaacagcagtctcgga

SEQ ID NO: 54508 - DNA, 25 bp, Artificial
  probe
  misc_feature (1)..(25): SEQ ID NO: 127; WAN024AH8_at; Start 17; Stop 41
ggcaattccaagactacttaatcga

SEQ ID NO: 54509 - DNA, 25 bp, Artificial
  probe
  misc_feature (1)..(25): SEQ ID NO: 5926; WAN024AH9_at; Start 476; Stop 500
taaataactttcaattaagtgtgaa

SEQ ID NO: 54510 - DNA, 25 bp, Artificial
  probe
  misc_feature (1)..(25): SEQ ID NO: 5926; WAN024AH9_at; Start 160; Stop 184
tgtttgaaagatgctatccgtgaat

SEQ ID NO: 54511 - DNA, 25 bp, Artificial
  probe
  misc_feature (1)..(25): SEQ ID NO: 5926; WAN024AH9_at; Start 246; Stop 270
agttggagagttggatacttggctt

SEQ ID NO: 54512 - DNA, 25 bp, Artificial
  probe
  misc_feature (1)..(25): SEQ ID NO: 5926; WAN024AH9_at; Start 406; Stop 430
gaatatgattcaaaattcgcttaga

SEQ ID NO: 54513 - DNA, 25 bp, Artificial
  probe
  misc_feature (1)..(25): SEQ ID NO: 5926; WAN024AH9_at; Start 424; Stop 448
gcttagaatcaatgttttcccactt

SEQ ID NO: 54514 - DNA, 25 bp, Artificial
  probe
  misc_feature (1)..(25): SEQ ID NO: 5926; WAN024AH9_at; Start 43; Stop 67
gctgagctatttagcacatgttcta

SEQ ID NO: 54515 - DNA, 25 bp, Artificial
  probe
  misc_feature (1)..(25): SEQ ID NO: 5926; WAN024AH9_at; Start 106; Stop 130
gacagactataaatttcttaaagta

SEQ ID NO: 54516 - DNA, 25 bp, Artificial
  probe
  misc_feature (1)..(25): SEQ ID NO: 5926; WAN024AH9_at; Start 389; Stop 413
tttaaaaactcccattcgaatatga

SEQ ID NO: 54517 - DNA, 25 bp, Artificial
  probe
  misc_feature (1)..(25): SEQ ID NO: 5926; WAN024AH9_at; Start 141; Stop 165
tgttagaataggaaataaatgtttg

SEQ ID NO: 54518 - DNA, 25 bp, Artificial
  probe
  misc_feature (1)..(25): SEQ ID NO: 5926; WAN024AH9_at; Start 524; Stop 548
caccccatggtgtgaaccatgaagt

SEQ ID NO: 54519 - DNA, 25 bp, Artificial
  probe
  misc_feature (1)..(25): SEQ ID NO: 5926; WAN024AH9_at; Start 482; Stop 506
actttcaattaagtgtgaattttgc

SEQ ID NO: 54520 - DNA, 25 bp, Artificial
  probe
  misc_feature (1)..(25): SEQ ID NO: 5926; WAN024AH9_at; Start 52; Stop 76
tttagcacatgttctattatagcag

SEQ ID NO: 54521 - DNA, 25 bp, Artificial
  probe
  misc_feature (1)..(25): SEQ ID NO: 5926; WAN024AH9_at; Start 526; Stop 550
ccccatggtgtgaaccatgaagtgt

SEQ ID NO: 54522 - DNA, 25 bp, Artificial
  probe
  misc_feature (1)..(25): SEQ ID NO: 5926; WAN024AH9_at; Start 62; Stop 86
gttctattatagcagatttctggca

SEQ ID NO: 54523 - DNA, 25 bp, Artificial
  probe
  misc_feature (1)..(25): SEQ ID NO: 5926; WAN024AH9_at; Start 491; Stop 515
taagtgtgaattttgcttaaaatca

SEQ ID NO: 54524 - DNA, 25 bp, Artificial
  probe
  misc_feature (1)..(25): SEQ ID NO: 5926; WAN024AH9_at; Start 233; Stop 257
tcgcctgaacgagagttggagagtt

SEQ ID NO: 54525 - DNA, 25 bp, Artificial
  probe
  misc_feature (1)..(25): SEQ ID NO: 5926; WAN024AH9_at; Start 422; Stop 446
tcgcttagaatcaatgttttcccac

SEQ ID NO: 54526 - DNA, 25 bp, Artificial
  probe
  misc_feature (1)..(25): SEQ ID NO: 5926; WAN024AH9_at; Start 531; Stop 555
tggtgtgaaccatgaagtgttgtaa

SEQ ID NO: 54527 - DNA, 25 bp, Artificial
  probe
  misc_feature (1)..(25): SEQ ID NO: 5926; WAN024AH9_at; Start 158; Stop 182
aatgtttgaaagatgctatccgtga

SEQ ID NO: 54528 - DNA, 25 bp, Artificial
  probe
  misc_feature (1)..(25): SEQ ID NO: 5926; WAN024AH9_at; Start 54; Stop 78
tagcacatgttctattatagcagat

SEQ ID NO: 54529 - DNA, 25 bp, Artificial
  probe
  misc_feature (1)..(25): SEQ ID NO: 5926; WAN024AH9_at; Start 521; Stop 545
aaacaccccatggtgtgaaccatga

SEQ ID NO: 54530 - DNA, 25 bp, Artificial
  probe
  misc_feature (1)..(25): SEQ ID NO: 5926; WAN024AH9_at; Start 91; Stop 115
tcaagaaaaaaacttgacagactat

SEQ ID NO: 54531 - DNA, 25 bp, Artificial
  probe
  misc_feature (1)..(25): SEQ ID NO: 5926; WAN024AH9_at; Start 240; Stop 264
aacgagagttggagagttggatact

SEQ ID NO: 54532 - DNA, 25 bp, Artificial
  probe
  misc_feature (1)..(25): SEQ ID NO: 5926; WAN024AH9_at; Start 519; Stop 543
aaaaacaccccatggtgtgaaccat

SEQ ID NO: 54533 - DNA, 25 bp, Artificial
  probe
  misc_feature (1)..(25): SEQ ID NO: 5926; WAN024AH9_at; Start 61; Stop 85
tgttctattatagcagatttctggc

SEQ ID NO: 54534 - DNA, 25 bp, Artificial
  probe
  misc_feature (1)..(25): SEQ ID NO: 5926; WAN024AH9_at; Start 414; Stop 438
ttcaaaattcgcttagaatcaatgt

SEQ ID NO: 54535 - DNA, 25 bp, Artificial
  probe
  misc_feature (1)..(25): SEQ ID NO: 5926; WAN024AH9_at; Start 156; Stop 180
taaatgtttgaaagatgctatccgt

SEQ ID NO: 54536 - DNA, 25 bp, Artificial
  probe
  misc_feature (1)..(25): SEQ ID NO: 5926; WAN024AH9_at; Start 383; Stop 407
catgattttaaaaactcccattcga

SEQ ID NO: 54537 - DNA, 25 bp, Artificial
  probe
  misc_feature (1)..(25): SEQ ID NO: 5926; WAN024AH9_at; Start 25; Stop 49
ttttatttcggtgaaatagctgagc

SEQ ID NO: 54538 - DNA, 25 bp, Artificial
  probe
  misc_feature (1)..(25): SEQ ID NO: 5926; WAN024AH9_at; Start 394; Stop 418
aaactcccattcgaatatgattcaa

SEQ ID NO: 54539 - DNA, 25 bp, Artificial
  probe
  misc_feature (1)..(25): SEQ ID NO: 5926; WAN024AH9_at; Start 46; Stop 70
gagctatttagcacatgttctatta

SEQ ID NO: 54540 - DNA, 25 bp, Artificial
  probe
  misc_feature (1)..(25): SEQ ID NO: 5926; WAN024AH9_at; Start 401; Stop 425
cattcgaatatgattcaaaattcgc

SEQ ID NO: 54541 - DNA, 25 bp, Artificial
  probe
  misc_feature (1)..(25): SEQ ID NO: 5926; WAN024AH9_at; Start 28; Stop 52
tatttcggtgaaatagctgagctat

SEQ ID NO: 54542 - DNA, 25 bp, Artificial
  probe
  misc_feature (1)..(25): SEQ ID NO: 5926; WAN024AH9_at; Start 41; Stop 65
tagctgagctatttagcacatgttc

SEQ ID NO: 54543 - DNA, 25 bp, Artificial
  probe
  misc_feature (1)..(25): SEQ ID NO: 4849; WAN024AHA_at; Start 317; Stop 341
cttagaagccaagtatccaactctc

SEQ ID NO: 54544 - DNA, 25 bp, Artificial
  probe
  misc_feature (1)..(25): SEQ ID NO: 4849; WAN024AHA_at; Start 539; Stop 563
aatagctcagctatttcaccgaaat

SEQ ID NO: 54545 - DNA, 25 bp, Artificial
  probe
  misc_feature (1)..(25): SEQ ID NO: 4849; WAN024AHA_at; Start 543; Stop 567
gctcagctatttcaccgaaataaaa

SEQ ID NO: 54546 - DNA, 25 bp, Artificial
  probe
  misc_feature (1)..(25): SEQ ID NO: 4849; WAN024AHA_at; Start 86; Stop 110
gcaaaattcacacttaattgaaagt

SEQ ID NO: 54547 - DNA, 25 bp, Artificial
  probe
  misc_feature (1)..(25): SEQ ID NO: 4849; WAN024AHA_at; Start 284; Stop 308
aagtccatatttcgcttgggaacgg

SEQ ID NO: 54548 - DNA, 25 bp, Artificial
  probe
  misc_feature (1)..(25): SEQ ID NO: 4849; WAN024AHA_at; Start 399; Stop 423
taaaatagtattcacggatagcatc

SEQ ID NO: 54549 - DNA, 25 bp, Artificial
  probe
  misc_feature (1)..(25): SEQ ID NO: 4849; WAN024AHA_at; Start 360; Stop 384
tatgaagggtttgacttggtgttct

SEQ ID NO: 54550 - DNA, 25 bp, Artificial
  probe
  misc_feature (1)..(25): SEQ ID NO: 4849; WAN024AHA_at; Start 247; Stop 271
taaaatgatatctcttgctagtgaa

SEQ ID NO: 54551 - DNA, 25 bp, Artificial
  probe
  misc_feature (1)..(25): SEQ ID NO: 4849; WAN024AHA_at; Start 37; Stop 61
ttacaacacttcatggttcacacca

SEQ ID NO: 54552 - DNA, 25 bp, Artificial
  probe
  misc_feature (1)..(25): SEQ ID NO: 4849; WAN024AHA_at; Start 278; Stop 302
gctaataagtccatatttcgcttgg

SEQ ID NO: 54553 - DNA, 25 bp, Artificial
  probe
  misc_feature (1)..(25): SEQ ID NO: 4849; WAN024AHA_at; Start 321; Stop 345
gaagccaagtatccaactctccaac

SEQ ID NO: 54554 - DNA, 25 bp, Artificial
  probe
  misc_feature (1)..(25): SEQ ID NO: 4849; WAN024AHA_at; Start 269; Stop 293
gaatcatctgctaataagtccatat

SEQ ID NO: 54555 - DNA, 25 bp, Artificial
  probe
  misc_feature (1)..(25): SEQ ID NO: 4849; WAN024AHA_at; Start 206; Stop 230
catgtttcagtggtaaaagtaccaa

SEQ ID NO: 54556 - DNA, 25 bp, Artificial
  probe
  misc_feature (1)..(25): SEQ ID NO: 4849; WAN024AHA_at; Start 515; Stop 539
tctgctataatagaacatgtgctaa

SEQ ID NO: 54557 - DNA, 25 bp, Artificial
  probe
  misc_feature (1)..(25): SEQ ID NO: 4849; WAN024AHA_at; Start 506; Stop 530
tgccagaaatctgctataatagaac

SEQ ID NO: 54558 - DNA, 25 bp, Artificial
  probe
  misc_feature (1)..(25): SEQ ID NO: 4849; WAN024AHA_at; Start 341; Stop 365
ccaactctcgttcaggcgatatgaa

SEQ ID NO: 54559 - DNA, 25 bp, Artificial
  probe
  misc_feature (1)..(25): SEQ ID NO: 4849; WAN024AHA_at; Start 335; Stop 359
aactctccaactctcgttcaggcga

SEQ ID NO: 54560 - DNA, 25 bp, Artificial
  probe
  misc_feature (1)..(25): SEQ ID NO: 4849; WAN024AHA_at; Start 346; Stop 370
tctcgttcaggcgatatgaagggtt

SEQ ID NO: 54561 - DNA, 25 bp, Artificial
  probe
  misc_feature (1)..(25): SEQ ID NO: 4849; WAN024AHA_at; Start 467; Stop 491
taagaaatttatagtctgtcaagtt

SEQ ID NO: 54562 - DNA, 25 bp, Artificial
  probe
  misc_feature (1)..(25): SEQ ID NO: 4849; WAN024AHA_at; Start 77; Stop 101
tgattttaagcaaaattcacactta

SEQ ID NO: 54563 - DNA, 25 bp, Artificial
  probe
  misc_feature (1)..(25): SEQ ID NO: 4849; WAN024AHA_at; Start 224; Stop 248
gtaccaaactggattctccatagta

SEQ ID NO: 54564 - DNA, 25 bp, Artificial
  probe
  misc_feature (1)..(25): SEQ ID NO: 4849; WAN024AHA_at; Start 522; Stop 546
taatagaacatgtgctaaatagctc

SEQ ID NO: 54565 - DNA, 25 bp, Artificial
  probe
  misc_feature (1)..(25): SEQ ID NO: 4849; WAN024AHA_at; Start 265; Stop 289
tagtgaatcatctgctaataagtcc

SEQ ID NO: 54566 - DNA, 25 bp, Artificial
  probe
  misc_feature (1)..(25): SEQ ID NO: 4849; WAN024AHA_at; Start 310; Stop 334
tttggaacttagaagccaagtatcc

SEQ ID NO: 54567 - DNA, 25 bp, Artificial
  probe
  misc_feature (1)..(25): SEQ ID NO: 4849; WAN024AHA_at; Start 41; Stop 65
aacacttcatggttcacaccatggg

SEQ ID NO: 54568 - DNA, 25 bp, Artificial
  probe
  misc_feature (1)..(25): SEQ ID NO: 4849; WAN024AHA_at; Start 427; Stop 451
caaacatttatttcctattctaaca

SEQ ID NO: 54569 - DNA, 25 bp, Artificial
  probe
  misc_feature (1)..(25): SEQ ID NO: 4849; WAN024AHA_at; Start 232; Stop 256
ctggattctccatagtaaaatgata

SEQ ID NO: 54570 - DNA, 25 bp, Artificial
  probe
  misc_feature (1)..(25): SEQ ID NO: 4849; WAN024AHA_at; Start 407; Stop 431
tattcacggatagcatctttcaaac

SEQ ID NO: 54571 - DNA, 25 bp, Artificial
  probe
  misc_feature (1)..(25): SEQ ID NO: 4849; WAN024AHA_at; Start 352; Stop 376
tcaggcgatatgaagggtttgactt

SEQ ID NO: 54572 - DNA, 25 bp, Artificial
  probe
  misc_feature (1)..(25): SEQ ID NO: 4849; WAN024AHA_at; Start 255; Stop 279
tatctcttgctagtgaatcatctgc

SEQ ID NO: 54573 - DNA, 25 bp, Artificial
  probe
  misc_feature (1)..(25): SEQ ID NO: 4849; WAN024AHA_at; Start 412; Stop 436
acggatagcatctttcaaacattta

SEQ ID NO: 54574 - DNA, 25 bp, Artificial
  probe
  misc_feature (1)..(25): SEQ ID NO: 4849; WAN024AHA_at; Start 462; Stop 486
tactttaagaaatttatagtctgtc

SEQ ID NO: 54575 - DNA, 25 bp, Artificial
  probe
  misc_feature (1)..(25): SEQ ID NO: 4849; WAN024AHA_at; Start 289; Stop 313
catatttcgcttgggaacgggtttg

SEQ ID NO: 54576 - DNA, 25 bp, Artificial
  probe
  misc_feature (1)..(25): SEQ ID NO: 4849; WAN024AHA_at; Start 527; Stop 551
gaacatgtgctaaatagctcagcta

SEQ ID NO: 54577 - DNA, 25 bp, Artificial
  probe
  misc_feature (1)..(25): SEQ ID NO: 3679; WAN024AHB_at; Start 8; Stop 32
ctgtaaactactaatatttgaaatc

SEQ ID NO: 54578 - DNA, 25 bp, Artificial
  probe
  misc_feature (1)..(25): SEQ ID NO: 3679; WAN024AHB_at; Start 16; Stop 40
tactaatatttgaaatccacttcct

SEQ ID NO: 54579 - DNA, 25 bp, Artificial
  probe
  misc_feature (1)..(25): SEQ ID NO: 3679; WAN024AHB_at; Start 52; Stop 76
atggttataaatgaatttttgagag

SEQ ID NO: 54580 - DNA, 25 bp, Artificial
  probe
  misc_feature (1)..(25): SEQ ID NO: 3679; WAN024AHB_at; Start 14; Stop 38
actactaatatttgaaatccacttc

SEQ ID NO: 54581 - DNA, 25 bp, Artificial
  probe
  misc_feature (1)..(25): SEQ ID NO: 3679; WAN024AHB_at; Start 17; Stop 41
actaatatttgaaatccacttcctt

SEQ ID NO: 54582 - DNA, 25 bp, Artificial
  probe
  misc_feature (1)..(25): SEQ ID NO: 3679; WAN024AHB_at; Start 51; Stop 75
aatggttataaatgaatttttgaga

SEQ ID NO: 54583 - DNA, 25 bp, Artificial
  probe
  misc_feature (1)..(25): SEQ ID NO: 3679; WAN024AHB_at; Start 2; Stop 26
ccagttctgtaaactactaatattt

SEQ ID NO: 54584 - DNA, 25 bp, Artificial
  probe
  misc_feature (1)..(25): SEQ ID NO: 3679; WAN024AHB_at; Start 55; Stop 79
gttataaatgaatttttgagaggat

SEQ ID NO: 54585 - DNA, 25 bp, Artificial
  probe
  misc_feature (1)..(25): SEQ ID NO: 3679; WAN024AHB_at; Start 5; Stop 29
gttctgtaaactactaatatttgaa

SEQ ID NO: 54586 - DNA, 25 bp, Artificial
  probe
  misc_feature (1)..(25): SEQ ID NO: 3679; WAN024AHB_at; Start 53; Stop 77
tggttataaatgaatttttgagagg

SEQ ID NO: 54587 - DNA, 25 bp, Artificial
  probe
  misc_feature (1)..(25): SEQ ID NO: 3679; WAN024AHB_at; Start 4; Stop 28
agttctgtaaactactaatatttga

SEQ ID NO: 54588 - DNA, 25 bp, Artificial
  probe
  misc_feature (1)..(25): SEQ ID NO: 3679; WAN024AHB_at; Start 6; Stop 30
ttctgtaaactactaatatttgaaa

SEQ ID NO: 54589 - DNA, 25 bp, Artificial
  probe
  misc_feature (1)..(25): SEQ ID NO: 3679; WAN024AHB_at; Start 1; Stop 25
gccagttctgtaaactactaatatt

SEQ ID NO: 54590 - DNA, 25 bp, Artificial
  probe
  misc_feature (1)..(25): SEQ ID NO: 3679; WAN024AHB_at; Start 15; Stop 39
ctactaatatttgaaatccacttcc

SEQ ID NO: 54591 - DNA, 25 bp, Artificial
  probe
  misc_feature (1)..(25): SEQ ID NO: 3679; WAN024AHB_at; Start 11; Stop 35
taaactactaatatttgaaatccac

SEQ ID NO: 54592 - DNA, 25 bp, Artificial
  probe
  misc_feature (1)..(25): SEQ ID NO: 3679; WAN024AHB_at; Start 21; Stop 45
atatttgaaatccacttccttttag

SEQ ID NO: 54593 - DNA, 25 bp, Artificial
  probe
  misc_feature (1)..(25): SEQ ID NO: 3679; WAN024AHB_at; Start 3; Stop 27
cagttctgtaaactactaatatttg

SEQ ID NO: 54594 - DNA, 25 bp, Artificial
  probe
  misc_feature (1)..(25): SEQ ID NO: 3679; WAN024AHB_at; Start 12; Stop 36
aaactactaatatttgaaatccact

SEQ ID NO: 54595 - DNA, 25 bp, Artificial
  probe
  misc_feature (1)..(25): SEQ ID NO: 3679; WAN024AHB_at; Start 56; Stop 80
ttataaatgaatttttgagaggatc

SEQ ID NO: 54596 - DNA, 25 bp, Artificial
  probe
  misc_feature (1)..(25): SEQ ID NO: 3679; WAN024AHB_at; Start 50; Stop 74
caatggttataaatgaatttttgag

SEQ ID NO: 54597 - DNA, 25 bp, Artificial
  probe
  misc_feature (1)..(25): SEQ ID NO: 3679; WAN024AHB_at; Start 10; Stop 34
gtaaactactaatatttgaaatcca

SEQ ID NO: 54598 - DNA, 25 bp, Artificial
  probe
  misc_feature (1)..(25): SEQ ID NO: 3679; WAN024AHB_at; Start 9; Stop 33
tgtaaactactaatatttgaaatcc

SEQ ID NO: 54599 - DNA, 25 bp, Artificial
  probe
  misc_feature (1)..(25): SEQ ID NO: 3679; WAN024AHB_at; Start 59; Stop 83
taaatgaatttttgagaggatcaga

SEQ ID NO: 54600 - DNA, 25 bp, Artificial
  probe
  misc_feature (1)..(25): SEQ ID NO: 3679; WAN024AHB_at; Start 18; Stop 42
ctaatatttgaaatccacttccttt

SEQ ID NO: 54601 - DNA, 25 bp, Artificial
  probe
  misc_feature (1)..(25): SEQ ID NO: 3679; WAN024AHB_at; Start 13; Stop 37
aactactaatatttgaaatccactt

SEQ ID NO: 54602 - DNA, 25 bp, Artificial
  probe
  misc_feature (1)..(25): SEQ ID NO: 3679; WAN024AHB_at; Start 57; Stop 81
tataaatgaatttttgagaggatca

SEQ ID NO: 54603 - DNA, 25 bp, Artificial
  probe
  misc_feature (1)..(25): SEQ ID NO: 3679; WAN024AHB_at; Start 58; Stop 82
ataaatgaatttttgagaggatcag

SEQ ID NO: 54604 - DNA, 25 bp, Artificial
  probe
  misc_feature (1)..(25): SEQ ID NO: 3679; WAN024AHB_at; Start 7; Stop 31
tctgtaaactactaatatttgaaat

SEQ ID NO: 54605 - DNA, 25 bp, Artificial
  probe
  misc_feature (1)..(25): SEQ ID NO: 3679; WAN024AHB_at; Start 54; Stop 78
ggttataaatgaatttttgagagga

SEQ ID NO: 54606 - DNA, 25 bp, Artificial
  probe
  misc_feature (1)..(25): SEQ ID NO: 4652; WAN024AHC_at; Start 7; Stop 31
cctctcaaaaattcatttataacca

SEQ ID NO: 54607 - DNA, 25 bp, Artificial
  probe
  misc_feature (1)..(25): SEQ ID NO: 4652; WAN024AHC_at; Start 47; Stop 71
aagtggatttcaaatattagtagtt

SEQ ID NO: 54608 - DNA, 25 bp, Artificial
  probe
  misc_feature (1)..(25): SEQ ID NO: 4652; WAN024AHC_at; Start 45; Stop 69
ggaagtggatttcaaatattagtag

SEQ ID NO: 54609 - DNA, 25 bp, Artificial
  probe
  misc_feature (1)..(25): SEQ ID NO: 4652; WAN024AHC_at; Start 57; Stop 81
caaatattagtagtttacagaactg

SEQ ID NO: 54610 - DNA, 25 bp, Artificial
  probe
  misc_feature (1)..(25): SEQ ID NO: 4652; WAN024AHC_at; Start 51; Stop 75
ggatttcaaatattagtagtttaca

SEQ ID NO: 54611 - DNA, 25 bp, Artificial
  probe
  misc_feature (1)..(25): SEQ ID NO: 4652; WAN024AHC_at; Start 43; Stop 67
aaggaagtggatttcaaatattagt

SEQ ID NO: 54612 - DNA, 25 bp, Artificial
  probe
  misc_feature (1)..(25): SEQ ID NO: 4652; WAN024AHC_at; Start 52; Stop 76
gatttcaaatattagtagtttacag

SEQ ID NO: 54613 - DNA, 25 bp, Artificial
  probe
  misc_feature (1)..(25): SEQ ID NO: 4652; WAN024AHC_at; Start 3; Stop 27
tgatcctctcaaaaattcatttata

SEQ ID NO: 54614 - DNA, 25 bp, Artificial
  probe
  misc_feature (1)..(25): SEQ ID NO: 4652; WAN024AHC_at; Start 46; Stop 70
gaagtggatttcaaatattagtagt

SEQ ID NO: 54615 - DNA, 25 bp, Artificial
  probe
  misc_feature (1)..(25): SEQ ID NO: 4652; WAN024AHC_at; Start 44; Stop 68
aggaagtggatttcaaatattagta

SEQ ID NO: 54616 - DNA, 25 bp, Artificial
  probe
  misc_feature (1)..(25): SEQ ID NO: 4652; WAN024AHC_at; Start 8; Stop 32
ctctcaaaaattcatttataaccat

SEQ ID NO: 54617 - DNA, 25 bp, Artificial
  probe
  misc_feature (1)..(25): SEQ ID NO: 4652; WAN024AHC_at; Start 9; Stop 33
tctcaaaaattcatttataaccatt

SEQ ID NO: 54618 - DNA, 25 bp, Artificial
  probe
  misc_feature (1)..(25): SEQ ID NO: 4652; WAN024AHC_at; Start 58; Stop 82
aaatattagtagtttacagaactgg

SEQ ID NO: 54619 - DNA, 25 bp, Artificial
  probe
  misc_feature (1)..(25): SEQ ID NO: 4652; WAN024AHC_at; Start 53; Stop 77
atttcaaatattagtagtttacaga

SEQ ID NO: 54620 - DNA, 25 bp, Artificial
  probe
  misc_feature (1)..(25): SEQ ID NO: 4652; WAN024AHC_at; Start 6; Stop 30
tcctctcaaaaattcatttataacc

SEQ ID NO: 54621 - DNA, 25 bp, Artificial
  probe
  misc_feature (1)..(25): SEQ ID NO: 4652; WAN024AHC_at; Start 55; Stop 79
ttcaaatattagtagtttacagaac

SEQ ID NO: 54622 - DNA, 25 bp, Artificial
  probe
  misc_feature (1)..(25): SEQ ID NO: 4652; WAN024AHC_at; Start 56; Stop 80
tcaaatattagtagtttacagaact

SEQ ID NO: 54623 - DNA, 25 bp, Artificial
  probe
  misc_feature (1)..(25): SEQ ID NO: 4652; WAN024AHC_at; Start 49; Stop 73
gtggatttcaaatattagtagttta

SEQ ID NO: 54624 - DNA, 25 bp, Artificial
  probe
  misc_feature (1)..(25): SEQ ID NO: 4652; WAN024AHC_at; Start 1; Stop 25
tctgatcctctcaaaaattcattta

SEQ ID NO: 54625 - DNA, 25 bp, Artificial
  probe
  misc_feature (1)..(25): SEQ ID NO: 4652; WAN024AHC_at; Start 54; Stop 78
tttcaaatattagtagtttacagaa

SEQ ID NO: 54626 - DNA, 25 bp, Artificial
  probe
  misc_feature (1)..(25): SEQ ID NO: 4652; WAN024AHC_at; Start 39; Stop 63
ctaaaaggaagtggatttcaaatat

SEQ ID NO: 54627 - DNA, 25 bp, Artificial
  probe
  misc_feature (1)..(25): SEQ ID NO: 4652; WAN024AHC_at; Start 2; Stop 26
ctgatcctctcaaaaattcatttat

SEQ ID NO: 54628 - DNA, 25 bp, Artificial
  probe
  misc_feature (1)..(25): SEQ ID NO: 4652; WAN024AHC_at; Start 50; Stop 74
tggatttcaaatattagtagtttac

SEQ ID NO: 54629 - DNA, 25 bp, Artificial
  probe
  misc_feature (1)..(25): SEQ ID NO: 4652; WAN024AHC_at; Start 42; Stop 66
aaaggaagtggatttcaaatattag

SEQ ID NO: 54630 - DNA, 25 bp, Artificial
  probe
  misc_feature (1)..(25): SEQ ID NO: 4652; WAN024AHC_at; Start 59; Stop 83
aatattagtagtttacagaactggc

SEQ ID NO: 54631 - DNA, 25 bp, Artificial
  probe
  misc_feature (1)..(25): SEQ ID NO: 4652; WAN024AHC_at; Start 4; Stop 28
gatcctctcaaaaattcatttataa

SEQ ID NO: 54632 - DNA, 25 bp, Artificial
  probe
  misc_feature (1)..(25): SEQ ID NO: 4652; WAN024AHC_at; Start 10; Stop 34
ctcaaaaattcatttataaccattg

SEQ ID NO: 54633 - DNA, 25 bp, Artificial
  probe
  misc_feature (1)..(25): SEQ ID NO: 4652; WAN024AHC_at; Start 5; Stop 29
atcctctcaaaaattcatttataac

SEQ ID NO: 54634 - DNA, 25 bp, Artificial
  probe
  misc_feature (1)..(25): SEQ ID NO: 4652; WAN024AHC_at; Start 48; Stop 72
agtggatttcaaatattagtagttt

SEQ ID NO: 54635 - DNA, 25 bp, Artificial
  probe
  misc_feature (1)..(25): SEQ ID NO: 110; WAN024AHD_at; Start 15; Stop 39
acagtatccacattcggtactgtat

SEQ ID NO: 54636 - DNA, 25 bp, Artificial
  probe
  misc_feature (1)..(25): SEQ ID NO: 110; WAN024AHD_at; Start 13; Stop 37
atacagtatccacattcggtactgt

SEQ ID NO: 54637 - DNA, 25 bp, Artificial
  probe
  misc_feature (1)..(25): SEQ ID NO: 110; WAN024AHD_at; Start 22; Stop 46
ccacattcggtactgtatttctttt

SEQ ID NO: 54638 - DNA, 25 bp, Artificial
  probe
  misc_feature (1)..(25): SEQ ID NO: 110; WAN024AHD_at; Start 16; Stop 40
cagtatccacattcggtactgtatt

SEQ ID NO: 54639 - DNA, 25 bp, Artificial
  probe
  misc_feature (1)..(25): SEQ ID NO: 110; WAN024AHD_at; Start 32; Stop 56
tactgtatttcttttactctcattc

SEQ ID NO: 54640 - DNA, 25 bp, Artificial
  probe
  misc_feature (1)..(25): SEQ ID NO: 110; WAN024AHD_at; Start 19; Stop 43
tatccacattcggtactgtatttct

SEQ ID NO: 54641 - DNA, 25 bp, Artificial
  probe
  misc_feature (1)..(25): SEQ ID NO: 110; WAN024AHD_at; Start 6; Stop 30
aaaaaaaatacagtatccacattcg

SEQ ID NO: 54642 - DNA, 25 bp, Artificial
  probe
  misc_feature (1)..(25): SEQ ID NO: 110; WAN024AHD_at; Start 5; Stop 29
caaaaaaaatacagtatccacattc

SEQ ID NO: 54643 - DNA, 25 bp, Artificial
  probe
  misc_feature (1)..(25): SEQ ID NO: 110; WAN024AHD_at; Start 4; Stop 28
ccaaaaaaaatacagtatccacatt

SEQ ID NO: 54644 - DNA, 25 bp, Artificial
  probe
  misc_feature (1)..(25): SEQ ID NO: 110; WAN024AHD_at; Start 25; Stop 49
cattcggtactgtatttcttttact

SEQ ID NO: 54645 - DNA, 25 bp, Artificial
  probe
  misc_feature (1)..(25): SEQ ID NO: 110; WAN024AHD_at; Start 9; Stop 33
aaaaatacagtatccacattcggta

SEQ ID NO: 54646 - DNA, 25 bp, Artificial
  probe
  misc_feature (1)..(25): SEQ ID NO: 110; WAN024AHD_at; Start 29; Stop 53
cggtactgtatttcttttactctca

SEQ ID NO: 54647 - DNA, 25 bp, Artificial
  probe
  misc_feature (1)..(25): SEQ ID NO: 110; WAN024AHD_at; Start 10; Stop 34
aaaatacagtatccacattcggtac

SEQ ID NO: 54648 - DNA, 25 bp, Artificial
  probe
  misc_feature (1)..(25): SEQ ID NO: 110; WAN024AHD_at; Start 30; Stop 54
ggtactgtatttcttttactctcat

SEQ ID NO: 54649 - DNA, 25 bp, Artificial
  probe
  misc_feature (1)..(25): SEQ ID NO: 110; WAN024AHD_at; Start 23; Stop 47
cacattcggtactgtatttctttta

SEQ ID NO: 54650 - DNA, 25 bp, Artificial
  probe
  misc_feature (1)..(25): SEQ ID NO: 110; WAN024AHD_at; Start 7; Stop 31
aaaaaaatacagtatccacattcgg

SEQ ID NO: 54651 - DNA, 25 bp, Artificial
  probe
  misc_feature (1)..(25): SEQ ID NO: 110; WAN024AHD_at; Start 8; Stop 32
aaaaaatacagtatccacattcggt

SEQ ID NO: 54652 - DNA, 25 bp, Artificial
  probe
  misc_feature (1)..(25): SEQ ID NO: 110; WAN024AHD_at; Start 20; Stop 44
atccacattcggtactgtatttctt

SEQ ID NO: 54653 - DNA, 25 bp, Artificial
  probe
  misc_feature (1)..(25): SEQ ID NO: 110; WAN024AHD_at; Start 11; Stop 35
aaatacagtatccacattcggtact

SEQ ID NO: 54654 - DNA, 25 bp, Artificial
  probe
  misc_feature (1)..(25): SEQ ID NO: 110; WAN024AHD_at; Start 17; Stop 41
agtatccacattcggtactgtattt

SEQ ID NO: 54655 - DNA, 25 bp, Artificial
  probe
  misc_feature (1)..(25): SEQ ID NO: 110; WAN024AHD_at; Start 21; Stop 45
tccacattcggtactgtatttcttt

SEQ ID NO: 54656 - DNA, 25 bp, Artificial
  probe
  misc_feature (1)..(25): SEQ ID NO: 110; WAN024AHD_at; Start 28; Stop 52
tcggtactgtatttcttttactctc

SEQ ID NO: 54657 - DNA, 25 bp, Artificial
  probe
  misc_feature (1)..(25): SEQ ID NO: 110; WAN024AHD_at; Start 14; Stop 38
tacagtatccacattcggtactgta

SEQ ID NO: 54658 - DNA, 25 bp, Artificial
  probe
  misc_feature (1)..(25): SEQ ID NO: 110; WAN024AHD_at; Start 31; Stop 55
gtactgtatttcttttactctcatt

SEQ ID NO: 54659 - DNA, 25 bp, Artificial
  probe
  misc_feature (1)..(25): SEQ ID NO: 110; WAN024AHD_at; Start 18; Stop 42
gtatccacattcggtactgtatttc

SEQ ID NO: 54660 - DNA, 25 bp, Artificial
  probe
  misc_feature (1)..(25): SEQ ID NO: 110; WAN024AHD_at; Start 12; Stop 36
aatacagtatccacattcggtactg

SEQ ID NO: 54661 - DNA, 25 bp, Artificial
  probe
  misc_feature (1)..(25): SEQ ID NO: 110; WAN024AHD_at; Start 3; Stop 27
accaaaaaaaatacagtatccacat

SEQ ID NO: 54662 - DNA, 25 bp, Artificial
  probe
  misc_feature (1)..(25): SEQ ID NO: 3564; WAN024AHE_at; Start 8; Stop 32
agtaaaagaaatacagtaccgaatg

SEQ ID NO: 54663 - DNA, 25 bp, Artificial
  probe
  misc_feature (1)..(25): SEQ ID NO: 3564; WAN024AHE_at; Start 26; Stop 50
ccgaatgtggatactgtattttttt

SEQ ID NO: 54664 - DNA, 25 bp, Artificial
  probe
  misc_feature (1)..(25): SEQ ID NO: 3564; WAN024AHE_at; Start 29; Stop 53
aatgtggatactgtattttttttgg

SEQ ID NO: 54665 - DNA, 25 bp, Artificial
  probe
  misc_feature (1)..(25): SEQ ID NO: 3564; WAN024AHE_at; Start 20; Stop 44
acagtaccgaatgtggatactgtat

SEQ ID NO: 54666 - DNA, 25 bp, Artificial
  probe
  misc_feature (1)..(25): SEQ ID NO: 3564; WAN024AHE_at; Start 11; Stop 35
aaaagaaatacagtaccgaatgtgg

SEQ ID NO: 54667 - DNA, 25 bp, Artificial
  probe
  misc_feature (1)..(25): SEQ ID NO: 3564; WAN024AHE_at; Start 27; Stop 51
cgaatgtggatactgtatttttttt

SEQ ID NO: 54668 - DNA, 25 bp, Artificial
  probe
  misc_feature (1)..(25): SEQ ID NO: 3564; WAN024AHE_at; Start 14; Stop 38
agaaatacagtaccgaatgtggata

SEQ ID NO: 54669 - DNA, 25 bp, Artificial
  probe
  misc_feature (1)..(25): SEQ ID NO: 3564; WAN024AHE_at; Start 23; Stop 47
gtaccgaatgtggatactgtatttt

SEQ ID NO: 54670 - DNA, 25 bp, Artificial
  probe
  misc_feature (1)..(25): SEQ ID NO: 3564; WAN024AHE_at; Start 12; Stop 36
aaagaaatacagtaccgaatgtgga

SEQ ID NO: 54671 - DNA, 25 bp, Artificial
  probe
  misc_feature (1)..(25): SEQ ID NO: 3564; WAN024AHE_at; Start 17; Stop 41
aatacagtaccgaatgtggatactg

SEQ ID NO: 54672 - DNA, 25 bp, Artificial
  probe
  misc_feature (1)..(25): SEQ ID NO: 3564; WAN024AHE_at; Start 19; Stop 43
tacagtaccgaatgtggatactgta

SEQ ID NO: 54673 - DNA, 25 bp, Artificial
  probe
  misc_feature (1)..(25): SEQ ID NO: 3564; WAN024AHE_at; Start 21; Stop 45
cagtaccgaatgtggatactgtatt

SEQ ID NO: 54674 - DNA, 25 bp, Artificial
  probe
  misc_feature (1)..(25): SEQ ID NO: 3564; WAN024AHE_at; Start 13; Stop 37
aagaaatacagtaccgaatgtggat

SEQ ID NO: 54675 - DNA, 25 bp, Artificial
  probe
  misc_feature (1)..(25): SEQ ID NO: 3564; WAN024AHE_at; Start 1; Stop 25
gaatgagagtaaaagaaatacagta

SEQ ID NO: 54676 - DNA, 25 bp, Artificial
  probe
  misc_feature (1)..(25): SEQ ID NO: 3564; WAN024AHE_at; Start 25; Stop 49
accgaatgtggatactgtatttttt

SEQ ID NO: 54677 - DNA, 25 bp, Artificial
  probe
  misc_feature (1)..(25): SEQ ID NO: 3564; WAN024AHE_at; Start 28; Stop 52
gaatgtggatactgtattttttttg

SEQ ID NO: 54678 - DNA, 25 bp, Artificial
  probe
  misc_feature (1)..(25): SEQ ID NO: 3564; WAN024AHE_at; Start 24; Stop 48
taccgaatgtggatactgtattttt

SEQ ID NO: 54679 - DNA, 25 bp, Artificial
  probe
  misc_feature (1)..(25): SEQ ID NO: 3564; WAN024AHE_at; Start 2; Stop 26
aatgagagtaaaagaaatacagtac

SEQ ID NO: 54680 - DNA, 25 bp, Artificial
  probe
  misc_feature (1)..(25): SEQ ID NO: 3564; WAN024AHE_at; Start 16; Stop 40
aaatacagtaccgaatgtggatact

SEQ ID NO: 54681 - DNA, 25 bp, Artificial
  probe
  misc_feature (1)..(25): SEQ ID NO: 3564; WAN024AHE_at; Start 22; Stop 46
agtaccgaatgtggatactgtattt

SEQ ID NO: 54682 - DNA, 25 bp, Artificial
  probe
  misc_feature (1)..(25): SEQ ID NO: 3564; WAN024AHE_at; Start 15; Stop 39
gaaatacagtaccgaatgtggatac

SEQ ID NO: 54683 - DNA, 25 bp, Artificial
  probe
  misc_feature (1)..(25): SEQ ID NO: 3564; WAN024AHE_at; Start 18; Stop 42
atacagtaccgaatgtggatactgt

SEQ ID NO: 54684 - DNA, 25 bp, Artificial
  probe
  misc_feature (1)..(25): SEQ ID NO: 3564; WAN024AHE_at; Start 5; Stop 29
gagagtaaaagaaatacagtaccga

SEQ ID NO: 54685 - DNA, 25 bp, Artificial
  probe
  misc_feature (1)..(25): SEQ ID NO: 3564; WAN024AHE_at; Start 4; Stop 28
tgagagtaaaagaaatacagtaccg

SEQ ID NO: 54686 - DNA, 25 bp, Artificial
  probe
  misc_feature (1)..(25): SEQ ID NO: 3564; WAN024AHE_at; Start 30; Stop 54
atgtggatactgtattttttttggt

SEQ ID NO: 54687 - DNA, 25 bp, Artificial
  probe
  misc_feature (1)..(25): SEQ ID NO: 3564; WAN024AHE_at; Start 3; Stop 27
atgagagtaaaagaaatacagtacc

SEQ ID NO: 54688 - DNA, 25 bp, Artificial
  probe
  misc_feature (1)..(25): SEQ ID NO: 3564; WAN024AHE_at; Start 10; Stop 34
taaaagaaatacagtaccgaatgtg

SEQ ID NO: 54689 - DNA, 25 bp, Artificial
  probe
  misc_feature (1)..(25): SEQ ID NO: 429; WAN024AHF_at; Start 48; Stop 72
tctagcagttagcacgtttctcata

SEQ ID NO: 54690 - DNA, 25 bp, Artificial
  probe
  misc_feature (1)..(25): SEQ ID NO: 429; WAN024AHF_at; Start 52; Stop 76
gcagttagcacgtttctcataaaaa

SEQ ID NO: 54691 - DNA, 25 bp, Artificial
  probe
  misc_feature (1)..(25): SEQ ID NO: 429; WAN024AHF_at; Start 31; Stop 55
tttattctaccataatttctagcag

SEQ ID NO: 54692 - DNA, 25 bp, Artificial
  probe
  misc_feature (1)..(25): SEQ ID NO: 429; WAN024AHF_at; Start 38; Stop 62
taccataatttctagcagttagcac

SEQ ID NO: 54693 - DNA, 25 bp, Artificial
  probe
  misc_feature (1)..(25): SEQ ID NO: 429; WAN024AHF_at; Start 43; Stop 67
taatttctagcagttagcacgtttc

SEQ ID NO: 54694 - DNA, 25 bp, Artificial
  probe
  misc_feature (1)..(25): SEQ ID NO: 429; WAN024AHF_at; Start 98; Stop 122
gtcagaccagaatcttataacctaa

SEQ ID NO: 54695 - DNA, 25 bp, Artificial
  probe
  misc_feature (1)..(25): SEQ ID NO: 429; WAN024AHF_at; Start 74; Stop 98
aaatgaaaaaagtctgacgattttg

SEQ ID NO: 54696 - DNA, 25 bp, Artificial
  probe
  misc_feature (1)..(25): SEQ ID NO: 429; WAN024AHF_at; Start 55; Stop 79
gttagcacgtttctcataaaaatga

SEQ ID NO: 54697 - DNA, 25 bp, Artificial
  probe
  misc_feature (1)..(25): SEQ ID NO: 429; WAN024AHF_at; Start 105; Stop 129
cagaatcttataacctaaaaaagag

SEQ ID NO: 54698 - DNA, 25 bp, Artificial
  probe
  misc_feature (1)..(25): SEQ ID NO: 429; WAN024AHF_at; Start 88; Stop 112
tgacgattttgtcagaccagaatct

SEQ ID NO: 54699 - DNA, 25 bp, Artificial
  probe
  misc_feature (1)..(25): SEQ ID NO: 429; WAN024AHF_at; Start 40; Stop 64
ccataatttctagcagttagcacgt

SEQ ID NO: 54700 - DNA, 25 bp, Artificial
  probe
  misc_feature (1)..(25): SEQ ID NO: 429; WAN024AHF_at; Start 83; Stop 107
aagtctgacgattttgtcagaccag

SEQ ID NO: 54701 - DNA, 25 bp, Artificial
  probe
  misc_feature (1)..(25): SEQ ID NO: 429; WAN024AHF_at; Start 96; Stop 120
ttgtcagaccagaatcttataacct

SEQ ID NO: 54702 - DNA, 25 bp, Artificial
  probe
  misc_feature (1)..(25): SEQ ID NO: 429; WAN024AHF_at; Start 49; Stop 73
ctagcagttagcacgtttctcataa

SEQ ID NO: 54703 - DNA, 25 bp, Artificial
  probe
  misc_feature (1)..(25): SEQ ID NO: 429; WAN024AHF_at; Start 91; Stop 115
cgattttgtcagaccagaatcttat

SEQ ID NO: 54704 - DNA, 25 bp, Artificial
  probe
  misc_feature (1)..(25): SEQ ID NO: 429; WAN024AHF_at; Start 41; Stop 65
cataatttctagcagttagcacgtt

SEQ ID NO: 54705 - DNA, 25 bp, Artificial
  probe
  misc_feature (1)..(25): SEQ ID NO: 429; WAN024AHF_at; Start 129; Stop 153
gaagaacaattcttccctccaacta

SEQ ID NO: 54706 - DNA, 25 bp, Artificial
  probe
  misc_feature (1)..(25): SEQ ID NO: 429; WAN024AHF_at; Start 125; Stop 149
aagagaagaacaattcttccctcca

SEQ ID NO: 54707 - DNA, 25 bp, Artificial
  probe
  misc_feature (1)..(25): SEQ ID NO: 429; WAN024AHF_at; Start 131; Stop 155
agaacaattcttccctccaactatc

SEQ ID NO: 54708 - DNA, 25 bp, Artificial
  probe
  misc_feature (1)..(25): SEQ ID NO: 429; WAN024AHF_at; Start 89; Stop 113
gacgattttgtcagaccagaatctt

SEQ ID NO: 54709 - DNA, 25 bp, Artificial
  probe
  misc_feature (1)..(25): SEQ ID NO: 429; WAN024AHF_at; Start 86; Stop 110
tctgacgattttgtcagaccagaat

SEQ ID NO: 54710 - DNA, 25 bp, Artificial
  probe
  misc_feature (1)..(25): SEQ ID NO: 429; WAN024AHF_at; Start 68; Stop 92
tcataaaaatgaaaaaagtctgacg

SEQ ID NO: 54711 - DNA, 25 bp, Artificial
  probe
  misc_feature (1)..(25): SEQ ID NO: 429; WAN024AHF_at; Start 39; Stop 63
accataatttctagcagttagcacg

SEQ ID NO: 54712 - DNA, 25 bp, Artificial
  probe
  misc_feature (1)..(25): SEQ ID NO: 429; WAN024AHF_at; Start 57; Stop 81
tagcacgtttctcataaaaatgaaa

SEQ ID NO: 54713 - DNA, 25 bp, Artificial
  probe
  misc_feature (1)..(25): SEQ ID NO: 429; WAN024AHF_at; Start 100; Stop 124
cagaccagaatcttataacctaaaa

SEQ ID NO: 54714 - DNA, 25 bp, Artificial
  probe
  misc_feature (1)..(25): SEQ ID NO: 429; WAN024AHF_at; Start 69; Stop 93
cataaaaatgaaaaaagtctgacga

SEQ ID NO: 54715 - DNA, 25 bp, Artificial
  probe
  misc_feature (1)..(25): SEQ ID NO: 429; WAN024AHF_at; Start 78; Stop 102
gaaaaaagtctgacgattttgtcag

SEQ ID NO: 54716 - DNA, 25 bp, Artificial
  probe
  misc_feature (1)..(25): SEQ ID NO: 429; WAN024AHF_at; Start 50; Stop 74
tagcagttagcacgtttctcataaa

SEQ ID NO: 54717 - DNA, 25 bp, Artificial
  probe
  misc_feature (1)..(25): SEQ ID NO: 429; WAN024AHF_at; Start 46; Stop 70
tttctagcagttagcacgtttctca

SEQ ID NO: 54718 - DNA, 25 bp, Artificial
  probe
  misc_feature (1)..(25): SEQ ID NO: 429; WAN024AHF_at; Start 81; Stop 105
aaaagtctgacgattttgtcagacc

SEQ ID NO: 54719 - DNA, 25 bp, Artificial
  probe
  misc_feature (1)..(25): SEQ ID NO: 429; WAN024AHF_at; Start 44; Stop 68
aatttctagcagttagcacgtttct

SEQ ID NO: 54720 - DNA, 25 bp, Artificial
  probe
  misc_feature (1)..(25): SEQ ID NO: 429; WAN024AHF_at; Start 36; Stop 60
tctaccataatttctagcagttagc

SEQ ID NO: 54721 - DNA, 25 bp, Artificial
  probe
  misc_feature (1)..(25): SEQ ID NO: 429; WAN024AHF_at; Start 18; Stop 42
gattacttaatactttattctacca

SEQ ID NO: 54722 - DNA, 25 bp, Artificial
  probe
  misc_feature (1)..(25): SEQ ID NO: 429; WAN024AHF_at; Start 94; Stop 118
ttttgtcagaccagaatcttataac

SEQ ID NO: 54723 - DNA, 25 bp, Artificial
  probe
  misc_feature (1)..(25): SEQ ID NO: 4691; WAN024AHG_at; Start 78; Stop 102
tcatttttatgagaaacgtgctaac

SEQ ID NO: 54724 - DNA, 25 bp, Artificial
  probe
  misc_feature (1)..(25): SEQ ID NO: 4691; WAN024AHG_at; Start 99; Stop 123
taactgctagaaattatggtagaat

SEQ ID NO: 54725 - DNA, 25 bp, Artificial
  probe
  misc_feature (1)..(25): SEQ ID NO: 4691; WAN024AHG_at; Start 118; Stop 142
tagaataaagtattaagtaatcgtg

SEQ ID NO: 54726 - DNA, 25 bp, Artificial
  probe
  misc_feature (1)..(25): SEQ ID NO: 4691; WAN024AHG_at; Start 4; Stop 28
tagttggagggaagaattgttcttc

SEQ ID NO: 54727 - DNA, 25 bp, Artificial
  probe
  misc_feature (1)..(25): SEQ ID NO: 4691; WAN024AHG_at; Start 81; Stop 105
tttttatgagaaacgtgctaactgc

SEQ ID NO: 54728 - DNA, 25 bp, Artificial
  probe
  misc_feature (1)..(25): SEQ ID NO: 4691; WAN024AHG_at; Start 97; Stop 121
gctaactgctagaaattatggtaga

SEQ ID NO: 54729 - DNA, 25 bp, Artificial
  probe
  misc_feature (1)..(25): SEQ ID NO: 4691; WAN024AHG_at; Start 2; Stop 26
gatagttggagggaagaattgttct

SEQ ID NO: 54730 - DNA, 25 bp, Artificial
  probe
  misc_feature (1)..(25): SEQ ID NO: 4691; WAN024AHG_at; Start 94; Stop 118
cgtgctaactgctagaaattatggt

SEQ ID NO: 54731 - DNA, 25 bp, Artificial
  probe
  misc_feature (1)..(25): SEQ ID NO: 4691; WAN024AHG_at; Start 86; Stop 110
atgagaaacgtgctaactgctagaa

SEQ ID NO: 54732 - DNA, 25 bp, Artificial
  probe
  misc_feature (1)..(25): SEQ ID NO: 4691; WAN024AHG_at; Start 39; Stop 63
gttataagattctggtctgacaaaa

SEQ ID NO: 54733 - DNA, 25 bp, Artificial
  probe
  misc_feature (1)..(25): SEQ ID NO: 4691; WAN024AHG_at; Start 87; Stop 111
tgagaaacgtgctaactgctagaaa

SEQ ID NO: 54734 - DNA, 25 bp, Artificial
  probe
  misc_feature (1)..(25): SEQ ID NO: 4691; WAN024AHG_at; Start 103; Stop 127
tgctagaaattatggtagaataaag

SEQ ID NO: 54735 - DNA, 25 bp, Artificial
  probe
  misc_feature (1)..(25): SEQ ID NO: 4691; WAN024AHG_at; Start 65; Stop 89
cgtcagacttttttcatttttatga

SEQ ID NO: 54736 - DNA, 25 bp, Artificial
  probe
  misc_feature (1)..(25): SEQ ID NO: 4691; WAN024AHG_at; Start 41; Stop 65
tataagattctggtctgacaaaatc

SEQ ID NO: 54737 - DNA, 25 bp, Artificial
  probe
  misc_feature (1)..(25): SEQ ID NO: 4691; WAN024AHG_at; Start 92; Stop 116
aacgtgctaactgctagaaattatg

SEQ ID NO: 54738 - DNA, 25 bp, Artificial
  probe
  misc_feature (1)..(25): SEQ ID NO: 4691; WAN024AHG_at; Start 49; Stop 73
tctggtctgacaaaatcgtcagact

SEQ ID NO: 54739 - DNA, 25 bp, Artificial
  probe
  misc_feature (1)..(25): SEQ ID NO: 4691; WAN024AHG_at; Start 79; Stop 103
catttttatgagaaacgtgctaact

SEQ ID NO: 54740 - DNA, 25 bp, Artificial
  probe
  misc_feature (1)..(25): SEQ ID NO: 4691; WAN024AHG_at; Start 43; Stop 67
taagattctggtctgacaaaatcgt

SEQ ID NO: 54741 - DNA, 25 bp, Artificial
  probe
  misc_feature (1)..(25): SEQ ID NO: 4691; WAN024AHG_at; Start 46; Stop 70
gattctggtctgacaaaatcgtcag

SEQ ID NO: 54742 - DNA, 25 bp, Artificial
  probe
  misc_feature (1)..(25): SEQ ID NO: 4691; WAN024AHG_at; Start 96; Stop 120
tgctaactgctagaaattatggtag

SEQ ID NO: 54743 - DNA, 25 bp, Artificial
  probe
  misc_feature (1)..(25): SEQ ID NO: 4691; WAN024AHG_at; Start 88; Stop 112
gagaaacgtgctaactgctagaaat

SEQ ID NO: 54744 - DNA, 25 bp, Artificial
  probe
  misc_feature (1)..(25): SEQ ID NO: 4691; WAN024AHG_at; Start 83; Stop 107
tttatgagaaacgtgctaactgcta

SEQ ID NO: 54745 - DNA, 25 bp, Artificial
  probe
  misc_feature (1)..(25): SEQ ID NO: 4691; WAN024AHG_at; Start 85; Stop 109
tatgagaaacgtgctaactgctaga

SEQ ID NO: 54746 - DNA, 25 bp, Artificial
  probe
  misc_feature (1)..(25): SEQ ID NO: 4691; WAN024AHG_at; Start 90; Stop 114
gaaacgtgctaactgctagaaatta

SEQ ID NO: 54747 - DNA, 25 bp, Artificial
  probe
  misc_feature (1)..(25): SEQ ID NO: 4691; WAN024AHG_at; Start 57; Stop 81
gacaaaatcgtcagacttttttcat

SEQ ID NO: 54748 - DNA, 25 bp, Artificial
  probe
  misc_feature (1)..(25): SEQ ID NO: 4691; WAN024AHG_at; Start 36; Stop 60
taggttataagattctggtctgaca

SEQ ID NO: 54749 - DNA, 25 bp, Artificial
  probe
  misc_feature (1)..(25): SEQ ID NO: 4691; WAN024AHG_at; Start 82; Stop 106
ttttatgagaaacgtgctaactgct

SEQ ID NO: 54750 - DNA, 25 bp, Artificial
  probe
  misc_feature (1)..(25): SEQ ID NO: 4691; WAN024AHG_at; Start 35; Stop 59
ttaggttataagattctggtctgac

SEQ ID NO: 54751 - DNA, 25 bp, Artificial
  probe
  misc_feature (1)..(25): SEQ ID NO: 4691; WAN024AHG_at; Start 44; Stop 68
aagattctggtctgacaaaatcgtc

SEQ ID NO: 54752 - DNA, 25 bp, Artificial
  probe
  misc_feature (1)..(25): SEQ ID NO: 4691; WAN024AHG_at; Start 84; Stop 108
ttatgagaaacgtgctaactgctag

SEQ ID NO: 54753 - DNA, 25 bp, Artificial
  probe
  misc_feature (1)..(25): SEQ ID NO: 4691; WAN024AHG_at; Start 38; Stop 62
ggttataagattctggtctgacaaa

SEQ ID NO: 54754 - DNA, 25 bp, Artificial
  probe
  misc_feature (1)..(25): SEQ ID NO: 4691; WAN024AHG_at; Start 59; Stop 83
caaaatcgtcagacttttttcattt

SEQ ID NO: 54755 - DNA, 25 bp, Artificial
  probe
  misc_feature (1)..(25): SEQ ID NO: 4691; WAN024AHG_at; Start 51; Stop 75
tggtctgacaaaatcgtcagacttt

SEQ ID NO: 54756 - DNA, 25 bp, Artificial
  probe
  misc_feature (1)..(25): SEQ ID NO: 4691; WAN024AHG_at; Start 8; Stop 32
tggagggaagaattgttcttctctt

SEQ ID NO: 54757 - DNA, 25 bp, Artificial
  probe
  misc_feature (1)..(25): SEQ ID NO: 3787; WAN024AHH_at; Start 3; Stop 27
aaatctctactttcgcaaaatggat

SEQ ID NO: 54758 - DNA, 25 bp, Artificial
  probe
  misc_feature (1)..(25): SEQ ID NO: 3787; WAN024AHH_at; Start 32; Stop 56
agaacagtatcccagtatagttaaa

SEQ ID NO: 54759 - DNA, 25 bp, Artificial
  probe
  misc_feature (1)..(25): SEQ ID NO: 3787; WAN024AHH_at; Start 18; Stop 42
caaaatggattttcagaacagtatc

SEQ ID NO: 54760 - DNA, 25 bp, Artificial
  probe
  misc_feature (1)..(25): SEQ ID NO: 3787; WAN024AHH_at; Start 25; Stop 49
gattttcagaacagtatcccagtat

SEQ ID NO: 54761 - DNA, 25 bp, Artificial
  probe
  misc_feature (1)..(25): SEQ ID NO: 3787; WAN024AHH_at; Start 30; Stop 54
tcagaacagtatcccagtatagtta

SEQ ID NO: 54762 - DNA, 25 bp, Artificial
  probe
  misc_feature (1)..(25): SEQ ID NO: 3787; WAN024AHH_at; Start 15; Stop 39
tcgcaaaatggattttcagaacagt

SEQ ID NO: 54763 - DNA, 25 bp, Artificial
  probe
  misc_feature (1)..(25): SEQ ID NO: 3787; WAN024AHH_at; Start 4; Stop 28
aatctctactttcgcaaaatggatt

SEQ ID NO: 54764 - DNA, 25 bp, Artificial
  probe
  misc_feature (1)..(25): SEQ ID NO: 3787; WAN024AHH_at; Start 20; Stop 44
aaatggattttcagaacagtatccc

SEQ ID NO: 54765 - DNA, 25 bp, Artificial
  probe
  misc_feature (1)..(25): SEQ ID NO: 3787; WAN024AHH_at; Start 8; Stop 32
tctactttcgcaaaatggattttca

SEQ ID NO: 54766 - DNA, 25 bp, Artificial
  probe
  misc_feature (1)..(25): SEQ ID NO: 3787; WAN024AHH_at; Start 24; Stop 48
ggattttcagaacagtatcccagta

SEQ ID NO: 54767 - DNA, 25 bp, Artificial
  probe
  misc_feature (1)..(25): SEQ ID NO: 3787; WAN024AHH_at; Start 9; Stop 33
ctactttcgcaaaatggattttcag

SEQ ID NO: 54768 - DNA, 25 bp, Artificial
  probe
  misc_feature (1)..(25): SEQ ID NO: 3787; WAN024AHH_at; Start 16; Stop 40
cgcaaaatggattttcagaacagta

SEQ ID NO: 54769 - DNA, 25 bp, Artificial
  probe
  misc_feature (1)..(25): SEQ ID NO: 3787; WAN024AHH_at; Start 11; Stop 35
actttcgcaaaatggattttcagaa

SEQ ID NO: 54770 - DNA, 25 bp, Artificial
  probe
  misc_feature (1)..(25): SEQ ID NO: 3787; WAN024AHH_at; Start 31; Stop 55
cagaacagtatcccagtatagttaa

SEQ ID NO: 54771 - DNA, 25 bp, Artificial
  probe
  misc_feature (1)..(25): SEQ ID NO: 3787; WAN024AHH_at; Start 36; Stop 60
cagtatcccagtatagttaaaaact

SEQ ID NO: 54772 - DNA, 25 bp, Artificial
  probe
  misc_feature (1)..(25): SEQ ID NO: 3787; WAN024AHH_at; Start 14; Stop 38
ttcgcaaaatggattttcagaacag

SEQ ID NO: 54773 - DNA, 25 bp, Artificial
  probe
  misc_feature (1)..(25): SEQ ID NO: 3787; WAN024AHH_at; Start 10; Stop 34
tactttcgcaaaatggattttcaga

SEQ ID NO: 54774 - DNA, 25 bp, Artificial
  probe
  misc_feature (1)..(25): SEQ ID NO: 3787; WAN024AHH_at; Start 29; Stop 53
ttcagaacagtatcccagtatagtt

SEQ ID NO: 54775 - DNA, 25 bp, Artificial
  probe
  misc_feature (1)..(25): SEQ ID NO: 3787; WAN024AHH_at; Start 6; Stop 30
tctctactttcgcaaaatggatttt

SEQ ID NO: 54776 - DNA, 25 bp, Artificial
  probe
  misc_feature (1)..(25): SEQ ID NO: 3787; WAN024AHH_at; Start 2; Stop 26
taaatctctactttcgcaaaatgga

SEQ ID NO: 54777 - DNA, 25 bp, Artificial
  probe
  misc_feature (1)..(25): SEQ ID NO: 3787; WAN024AHH_at; Start 28; Stop 52
tttcagaacagtatcccagtatagt

SEQ ID NO: 54778 - DNA, 25 bp, Artificial
  probe
  misc_feature (1)..(25): SEQ ID NO: 3787; WAN024AHH_at; Start 23; Stop 47
tggattttcagaacagtatcccagt

SEQ ID NO: 54779 - DNA, 25 bp, Artificial
  probe
  misc_feature (1)..(25): SEQ ID NO: 3787; WAN024AHH_at; Start 33; Stop 57
gaacagtatcccagtatagttaaaa

SEQ ID NO: 54780 - DNA, 25 bp, Artificial
  probe
  misc_feature (1)..(25): SEQ ID NO: 3787; WAN024AHH_at; Start 19; Stop 43
aaaatggattttcagaacagtatcc

SEQ ID NO: 54781 - DNA, 25 bp, Artificial
  probe
  misc_feature (1)..(25): SEQ ID NO: 3787; WAN024AHH_at; Start 21; Stop 45
aatggattttcagaacagtatccca

SEQ ID NO: 54782 - DNA, 25 bp, Artificial
  probe
  misc_feature (1)..(25): SEQ ID NO: 3787; WAN024AHH_at; Start 1; Stop 25
gtaaatctctactttcgcaaaatgg

SEQ ID NO: 54783 - DNA, 25 bp, Artificial
  probe
  misc_feature (1)..(25): SEQ ID NO: 3787; WAN024AHH_at; Start 12; Stop 36
ctttcgcaaaatggattttcagaac

SEQ ID NO: 54784 - DNA, 25 bp, Artificial
  probe
  misc_feature (1)..(25): SEQ ID NO: 3787; WAN024AHH_at; Start 17; Stop 41
gcaaaatggattttcagaacagtat

SEQ ID NO: 54785 - DNA, 25 bp, Artificial
  probe
  misc_feature (1)..(25): SEQ ID NO: 3787; WAN024AHH_at; Start 27; Stop 51
ttttcagaacagtatcccagtatag

SEQ ID NO: 54786 - DNA, 25 bp, Artificial
  probe
  misc_feature (1)..(25): SEQ ID NO: 3787; WAN024AHH_at; Start 26; Stop 50
attttcagaacagtatcccagtata

SEQ ID NO: 54787 - DNA, 25 bp, Artificial
  probe
  misc_feature (1)..(25): SEQ ID NO: 3787; WAN024AHH_at; Start 39; Stop 63
tatcccagtatagttaaaaactata

SEQ ID NO: 54788 - DNA, 25 bp, Artificial
  probe
  misc_feature (1)..(25): SEQ ID NO: 3787; WAN024AHH_at; Start 7; Stop 31
ctctactttcgcaaaatggattttc

SEQ ID NO: 54789 - DNA, 25 bp, Artificial
  probe
  misc_feature (1)..(25): SEQ ID NO: 3787; WAN024AHH_at; Start 22; Stop 46
atggattttcagaacagtatcccag

SEQ ID NO: 54790 - DNA, 25 bp, Artificial
  probe
  misc_feature (1)..(25): SEQ ID NO: 3787; WAN024AHH_at; Start 13; Stop 37
tttcgcaaaatggattttcagaaca

SEQ ID NO: 54791 - DNA, 25 bp, Artificial
  probe
  misc_feature (1)..(25): SEQ ID NO: 3662; WAN024AHI_at; Start 49; Stop 73
tgggatactgttctgaaaatccatt

SEQ ID NO: 54792 - DNA, 25 bp, Artificial
  probe
  misc_feature (1)..(25): SEQ ID NO: 3662; WAN024AHI_at; Start 55; Stop 79
actgttctgaaaatccattttgcga

SEQ ID NO: 54793 - DNA, 25 bp, Artificial
  probe
  misc_feature (1)..(25): SEQ ID NO: 3662; WAN024AHI_at; Start 65; Stop 89
aaatccattttgcgaaagtagagat

SEQ ID NO: 54794 - DNA, 25 bp, Artificial
  probe
  misc_feature (1)..(25): SEQ ID NO: 3662; WAN024AHI_at; Start 40; Stop 64
taactatactgggatactgttctga

SEQ ID NO: 54795 - DNA, 25 bp, Artificial
  probe
  misc_feature (1)..(25): SEQ ID NO: 3662; WAN024AHI_at; Start 43; Stop 67
ctatactgggatactgttctgaaaa

SEQ ID NO: 54796 - DNA, 25 bp, Artificial
  probe
  misc_feature (1)..(25): SEQ ID NO: 3662; WAN024AHI_at; Start 56; Stop 80
ctgttctgaaaatccattttgcgaa

SEQ ID NO: 54797 - DNA, 25 bp, Artificial
  probe
  misc_feature (1)..(25): SEQ ID NO: 3662; WAN024AHI_at; Start 59; Stop 83
ttctgaaaatccattttgcgaaagt

SEQ ID NO: 54798 - DNA, 25 bp, Artificial
  probe
  misc_feature (1)..(25): SEQ ID NO: 3662; WAN024AHI_at; Start 60; Stop 84
tctgaaaatccattttgcgaaagta

SEQ ID NO: 54799 - DNA, 25 bp, Artificial
  probe
  misc_feature (1)..(25): SEQ ID NO: 3662; WAN024AHI_at; Start 37; Stop 61
ttttaactatactgggatactgttc

SEQ ID NO: 54800 - DNA, 25 bp, Artificial
  probe
  misc_feature (1)..(25): SEQ ID NO: 3662; WAN024AHI_at; Start 44; Stop 68
tatactgggatactgttctgaaaat

SEQ ID NO: 54801 - DNA, 25 bp, Artificial
  probe
  misc_feature (1)..(25): SEQ ID NO: 3662; WAN024AHI_at; Start 64; Stop 88
aaaatccattttgcgaaagtagaga

SEQ ID NO: 54802 - DNA, 25 bp, Artificial
  probe
  misc_feature (1)..(25): SEQ ID NO: 3662; WAN024AHI_at; Start 41; Stop 65
aactatactgggatactgttctgaa

SEQ ID NO: 54803 - DNA, 25 bp, Artificial
  probe
  misc_feature (1)..(25): SEQ ID NO: 3662; WAN024AHI_at; Start 58; Stop 82
gttctgaaaatccattttgcgaaag

SEQ ID NO: 54804 - DNA, 25 bp, Artificial
  probe
  misc_feature (1)..(25): SEQ ID NO: 3662; WAN024AHI_at; Start 52; Stop 76
gatactgttctgaaaatccattttg

SEQ ID NO: 54805 - DNA, 25 bp, Artificial
  probe
  misc_feature (1)..(25): SEQ ID NO: 3662; WAN024AHI_at; Start 51; Stop 75
ggatactgttctgaaaatccatttt

SEQ ID NO: 54806 - DNA, 25 bp, Artificial
  probe
  misc_feature (1)..(25): SEQ ID NO: 3662; WAN024AHI_at; Start 34; Stop 58
agtttttaactatactgggatactg

SEQ ID NO: 54807 - DNA, 25 bp, Artificial
  probe
  misc_feature (1)..(25): SEQ ID NO: 3662; WAN024AHI_at; Start 45; Stop 69
atactgggatactgttctgaaaatc

SEQ ID NO: 54808 - DNA, 25 bp, Artificial
  probe
  misc_feature (1)..(25): SEQ ID NO: 3662; WAN024AHI_at; Start 53; Stop 77
atactgttctgaaaatccattttgc

SEQ ID NO: 54809 - DNA, 25 bp, Artificial
  probe
  misc_feature (1)..(25): SEQ ID NO: 3662; WAN024AHI_at; Start 39; Stop 63
ttaactatactgggatactgttctg

SEQ ID NO: 54810 - DNA, 25 bp, Artificial
  probe
  misc_feature (1)..(25): SEQ ID NO: 3662; WAN024AHI_at; Start 38; Stop 62
tttaactatactgggatactgttct

SEQ ID NO: 54811 - DNA, 25 bp, Artificial
  probe
  misc_feature (1)..(25): SEQ ID NO: 3662; WAN024AHI_at; Start 57; Stop 81
tgttctgaaaatccattttgcgaaa

SEQ ID NO: 54812 - DNA, 25 bp, Artificial
  probe
  misc_feature (1)..(25): SEQ ID NO: 3662; WAN024AHI_at; Start 47; Stop 71
actgggatactgttctgaaaatcca

SEQ ID NO: 54813 - DNA, 25 bp, Artificial
  probe
  misc_feature (1)..(25): SEQ ID NO: 3662; WAN024AHI_at; Start 69; Stop 93
ccattttgcgaaagtagagatttac

SEQ ID NO: 54814 - DNA, 25 bp, Artificial
  probe
  misc_feature (1)..(25): SEQ ID NO: 3662; WAN024AHI_at; Start 50; Stop 74
gggatactgttctgaaaatccattt

SEQ ID NO: 54815 - DNA, 25 bp, Artificial
  probe
  misc_feature (1)..(25): SEQ ID NO: 3662; WAN024AHI_at; Start 48; Stop 72
ctgggatactgttctgaaaatccat

SEQ ID NO: 54816 - DNA, 25 bp, Artificial
  probe
  misc_feature (1)..(25): SEQ ID NO: 3662; WAN024AHI_at; Start 62; Stop 86
tgaaaatccattttgcgaaagtaga

SEQ ID NO: 54817 - DNA, 25 bp, Artificial
  probe
  misc_feature (1)..(25): SEQ ID NO: 3662; WAN024AHI_at; Start 68; Stop 92
tccattttgcgaaagtagagattta

SEQ ID NO: 54818 - DNA, 25 bp, Artificial
  probe
  misc_feature (1)..(25): SEQ ID NO: 3662; WAN024AHI_at; Start 61; Stop 85
ctgaaaatccattttgcgaaagtag

SEQ ID NO: 54819 - DNA, 25 bp, Artificial
  probe
  misc_feature (1)..(25): SEQ ID NO: 3662; WAN024AHI_at; Start 42; Stop 66
actatactgggatactgttctgaaa

SEQ ID NO: 54820 - DNA, 25 bp, Artificial
  probe
  misc_feature (1)..(25): SEQ ID NO: 3662; WAN024AHI_at; Start 46; Stop 70
tactgggatactgttctgaaaatcc

SEQ ID NO: 54821 - DNA, 25 bp, Artificial
  probe
  misc_feature (1)..(25): SEQ ID NO: 3662; WAN024AHI_at; Start 63; Stop 87
gaaaatccattttgcgaaagtagag

SEQ ID NO: 54822 - DNA, 25 bp, Artificial
  probe
  misc_feature (1)..(25): SEQ ID NO: 3662; WAN024AHI_at; Start 54; Stop 78
tactgttctgaaaatccattttgcg

SEQ ID NO: 54823 - DNA, 25 bp, Artificial
  probe
  misc_feature (1)..(25): SEQ ID NO: 3662; WAN024AHI_at; Start 66; Stop 90
aatccattttgcgaaagtagagatt

SEQ ID NO: 54824 - DNA, 25 bp, Artificial
  probe
  misc_feature (1)..(25): SEQ ID NO: 3662; WAN024AHI_at; Start 67; Stop 91
atccattttgcgaaagtagagattt

SEQ ID NO: 54825 - DNA, 25 bp, Artificial
  probe
  misc_feature (1)..(25): SEQ ID NO: 70; WAN024AHJ_at; Start 114; Stop 138
catttttaatcgcaatttgcagtct

SEQ ID NO: 54826 - DNA, 25 bp, Artificial
  probe
  misc_feature (1)..(25): SEQ ID NO: 70; WAN024AHJ_at; Start 16; Stop 40
taaaaaatattgttatagagttaca

SEQ ID NO: 54827 - DNA, 25 bp, Artificial
  probe
  misc_feature (1)..(25): SEQ ID NO: 70; WAN024AHJ_at; Start 152; Stop 176
tcggtttagatagttcgttctcata

SEQ ID NO: 54828 - DNA, 25 bp, Artificial
  probe
  misc_feature (1)..(25): SEQ ID NO: 70; WAN024AHJ_at; Start 150; Stop 174
tttcggtttagatagttcgttctca

SEQ ID NO: 54829 - DNA, 25 bp, Artificial
  probe
  misc_feature (1)..(25): SEQ ID NO: 70; WAN024AHJ_at; Start 111; Stop 135
taccatttttaatcgcaatttgcag

SEQ ID NO: 54830 - DNA, 25 bp, Artificial
  probe
  misc_feature (1)..(25): SEQ ID NO: 70; WAN024AHJ_at; Start 41; Stop 65
aagtactgataggaaaactcttcgt

SEQ ID NO: 54831 - DNA, 25 bp, Artificial
  probe
  misc_feature (1)..(25): SEQ ID NO: 70; WAN024AHJ_at; Start 131; Stop 155
tgcagtctttaatgtagtgtttcgg

SEQ ID NO: 54832 - DNA, 25 bp, Artificial
  probe
  misc_feature (1)..(25): SEQ ID NO: 70; WAN024AHJ_at; Start 82; Stop 106
cttatcgggactatataactttatc

SEQ ID NO: 54833 - DNA, 25 bp, Artificial
  probe
  misc_feature (1)..(25): SEQ ID NO: 70; WAN024AHJ_at; Start 120; Stop 144
taatcgcaatttgcagtctttaatg

SEQ ID NO: 54834 - DNA, 25 bp, Artificial
  probe
  misc_feature (1)..(25): SEQ ID NO: 70; WAN024AHJ_at; Start 72; Stop 96
tacctaccatcttatcgggactata

SEQ ID NO: 54835 - DNA, 25 bp, Artificial
  probe
  misc_feature (1)..(25): SEQ ID NO: 70; WAN024AHJ_at; Start 43; Stop 67
gtactgataggaaaactcttcgtaa

SEQ ID NO: 54836 - DNA, 25 bp, Artificial
  probe
  misc_feature (1)..(25): SEQ ID NO: 70; WAN024AHJ_at; Start 143; Stop 167
tgtagtgtttcggtttagatagttc

SEQ ID NO: 54837 - DNA, 25 bp, Artificial
  probe
  misc_feature (1)..(25): SEQ ID NO: 70; WAN024AHJ_at; Start 78; Stop 102
ccatcttatcgggactatataactt

SEQ ID NO: 54838 - DNA, 25 bp, Artificial
  probe
  misc_feature (1)..(25): SEQ ID NO: 70; WAN024AHJ_at; Start 123; Stop 147
tcgcaatttgcagtctttaatgtag

SEQ ID NO: 54839 - DNA, 25 bp, Artificial
  probe
  misc_feature (1)..(25): SEQ ID NO: 70; WAN024AHJ_at; Start 40; Stop 64
aaagtactgataggaaaactcttcg

SEQ ID NO: 54840 - DNA, 25 bp, Artificial
  probe
  misc_feature (1)..(25): SEQ ID NO: 70; WAN024AHJ_at; Start 154; Stop 178
ggtttagatagttcgttctcataaa

SEQ ID NO: 54841 - DNA, 25 bp, Artificial
  probe
  misc_feature (1)..(25): SEQ ID NO: 70; WAN024AHJ_at; Start 37; Stop 61
tacaaagtactgataggaaaactct

SEQ ID NO: 54842 - DNA, 25 bp, Artificial
  probe
  misc_feature (1)..(25): SEQ ID NO: 70; WAN024AHJ_at; Start 70; Stop 94
aatacctaccatcttatcgggacta

SEQ ID NO: 54843 - DNA, 25 bp, Artificial
  probe
  misc_feature (1)..(25): SEQ ID NO: 70; WAN024AHJ_at; Start 133; Stop 157
cagtctttaatgtagtgtttcggtt

SEQ ID NO: 54844 - DNA, 25 bp, Artificial
  probe
  misc_feature (1)..(25): SEQ ID NO: 70; WAN024AHJ_at; Start 29; Stop 53
tatagagttacaaagtactgatagg

SEQ ID NO: 54845 - DNA, 25 bp, Artificial
  probe
  misc_feature (1)..(25): SEQ ID NO: 70; WAN024AHJ_at; Start 39; Stop 63
caaagtactgataggaaaactcttc

SEQ ID NO: 54846 - DNA, 25 bp, Artificial
  probe
  misc_feature (1)..(25): SEQ ID NO: 70; WAN024AHJ_at; Start 84; Stop 108
tatcgggactatataactttatcat

SEQ ID NO: 54847 - DNA, 25 bp, Artificial
  probe
  misc_feature (1)..(25): SEQ ID NO: 70; WAN024AHJ_at; Start 44; Stop 68
tactgataggaaaactcttcgtaat

SEQ ID NO: 54848 - DNA, 25 bp, Artificial
  probe
  misc_feature (1)..(25): SEQ ID NO: 70; WAN024AHJ_at; Start 31; Stop 55
tagagttacaaagtactgataggaa

SEQ ID NO: 54849 - DNA, 25 bp, Artificial
  probe
  misc_feature (1)..(25): SEQ ID NO: 70; WAN024AHJ_at; Start 74; Stop 98
cctaccatcttatcgggactatata

SEQ ID NO: 54850 - DNA, 25 bp, Artificial
  probe
  misc_feature (1)..(25): SEQ ID NO: 70; WAN024AHJ_at; Start 33; Stop 57
gagttacaaagtactgataggaaaa

SEQ ID NO: 54851 - DNA, 25 bp, Artificial
  probe
  misc_feature (1)..(25): SEQ ID NO: 70; WAN024AHJ_at; Start 87; Stop 111
cgggactatataactttatcattat

SEQ ID NO: 54852 - DNA, 25 bp, Artificial
  probe
  misc_feature (1)..(25): SEQ ID NO: 70; WAN024AHJ_at; Start 66; Stop 90
aataaatacctaccatcttatcggg

SEQ ID NO: 54853 - DNA, 25 bp, Artificial
  probe
  misc_feature (1)..(25): SEQ ID NO: 70; WAN024AHJ_at; Start 47; Stop 71
tgataggaaaactcttcgtaataaa

SEQ ID NO: 54854 - DNA, 25 bp, Artificial
  probe
  misc_feature (1)..(25): SEQ ID NO: 70; WAN024AHJ_at; Start 68; Stop 92
taaatacctaccatcttatcgggac

SEQ ID NO: 54855 - DNA, 25 bp, Artificial
  probe
  misc_feature (1)..(25): SEQ ID NO: 70; WAN024AHJ_at; Start 26; Stop 50
tgttatagagttacaaagtactgat

SEQ ID NO: 54856 - DNA, 25 bp, Artificial
  probe
  misc_feature (1)..(25): SEQ ID NO: 70; WAN024AHJ_at; Start 59; Stop 83
tcttcgtaataaatacctaccatct

SEQ ID NO: 54857 - DNA, 25 bp, Artificial
  probe
  misc_feature (1)..(25): SEQ ID NO: 70; WAN024AHJ_at; Start 140; Stop 164
taatgtagtgtttcggtttagatag

SEQ ID NO: 54858 - DNA, 25 bp, Artificial
  probe
  misc_feature (1)..(25): SEQ ID NO: 70; WAN024AHJ_at; Start 125; Stop 149
gcaatttgcagtctttaatgtagtg

SEQ ID NO: 54859 - DNA, 25 bp, Artificial
  probe
  misc_feature (1)..(25): SEQ ID NO: 4482; WAN024AHK_at; Start 69; Stop 93
tacattaaagactgcaaattgcgat

SEQ ID NO: 54860 - DNA, 25 bp, Artificial
  probe
  misc_feature (1)..(25): SEQ ID NO: 4482; WAN024AHK_at; Start 60; Stop 84
ccgaaacactacattaaagactgca

SEQ ID NO: 54861 - DNA, 25 bp, Artificial
  probe
  misc_feature (1)..(25): SEQ ID NO: 4482; WAN024AHK_at; Start 39; Stop 63
tatgagaacgaactatctaaaccga

SEQ ID NO: 54862 - DNA, 25 bp, Artificial
  probe
  misc_feature (1)..(25): SEQ ID NO: 4482; WAN024AHK_at; Start 74; Stop 98
taaagactgcaaattgcgattaaaa

SEQ ID NO: 54863 - DNA, 25 bp, Artificial
  probe
  misc_feature (1)..(25): SEQ ID NO: 4482; WAN024AHK_at; Start 155; Stop 179
gagttttcctatcagtactttgtaa

SEQ ID NO: 54864 - DNA, 25 bp, Artificial
  probe
  misc_feature (1)..(25): SEQ ID NO: 4482; WAN024AHK_at; Start 52; Stop 76
tatctaaaccgaaacactacattaa

SEQ ID NO: 54865 - DNA, 25 bp, Artificial
  probe
  misc_feature (1)..(25): SEQ ID NO: 4482; WAN024AHK_at; Start 119; Stop 143
tatagtcccgataagatggtaggta

SEQ ID NO: 54866 - DNA, 25 bp, Artificial
  probe
  misc_feature (1)..(25): SEQ ID NO: 4482; WAN024AHK_at; Start 105; Stop 129
taatgataaagttatatagtcccga

SEQ ID NO: 54867 - DNA, 25 bp, Artificial
  probe
  misc_feature (1)..(25): SEQ ID NO: 4482; WAN024AHK_at; Start 152; Stop 176
gaagagttttcctatcagtactttg

SEQ ID NO: 54868 - DNA, 25 bp, Artificial
  probe
  misc_feature (1)..(25): SEQ ID NO: 4482; WAN024AHK_at; Start 111; Stop 135
taaagttatatagtcccgataagat

SEQ ID NO: 54869 - DNA, 25 bp, Artificial
  probe
  misc_feature (1)..(25): SEQ ID NO: 4482; WAN024AHK_at; Start 38; Stop 62
ttatgagaacgaactatctaaaccg

SEQ ID NO: 54870 - DNA, 25 bp, Artificial
  probe
  misc_feature (1)..(25): SEQ ID NO: 4482; WAN024AHK_at; Start 71; Stop 95
cattaaagactgcaaattgcgatta

SEQ ID NO: 54871 - DNA, 25 bp, Artificial
  probe
  misc_feature (1)..(25): SEQ ID NO: 4482; WAN024AHK_at; Start 161; Stop 185
tcctatcagtactttgtaactctat

SEQ ID NO: 54872 - DNA, 25 bp, Artificial
  probe
  misc_feature (1)..(25): SEQ ID NO: 4482; WAN024AHK_at; Start 113; Stop 137
aagttatatagtcccgataagatgg

SEQ ID NO: 54873 - DNA, 25 bp, Artificial
  probe
  misc_feature (1)..(25): SEQ ID NO: 4482; WAN024AHK_at; Start 83; Stop 107
caaattgcgattaaaaatggtataa

SEQ ID NO: 54874 - DNA, 25 bp, Artificial
  probe
  misc_feature (1)..(25): SEQ ID NO: 4482; WAN024AHK_at; Start 133; Stop 157
gatggtaggtatttattacgaagag

SEQ ID NO: 54875 - DNA, 25 bp, Artificial
  probe
  misc_feature (1)..(25): SEQ ID NO: 4482; WAN024AHK_at; Start 125; Stop 149
cccgataagatggtaggtatttatt

SEQ ID NO: 54876 - DNA, 25 bp, Artificial
  probe
  misc_feature (1)..(25): SEQ ID NO: 4482; WAN024AHK_at; Start 123; Stop 147
gtcccgataagatggtaggtattta

SEQ ID NO: 54877 - DNA, 25 bp, Artificial
  probe
  misc_feature (1)..(25): SEQ ID NO: 4482; WAN024AHK_at; Start 81; Stop 105
tgcaaattgcgattaaaaatggtat

SEQ ID NO: 54878 - DNA, 25 bp, Artificial
  probe
  misc_feature (1)..(25): SEQ ID NO: 4482; WAN024AHK_at; Start 149; Stop 173
tacgaagagttttcctatcagtact

SEQ ID NO: 54879 - DNA, 25 bp, Artificial
  probe
  misc_feature (1)..(25): SEQ ID NO: 4482; WAN024AHK_at; Start 50; Stop 74
actatctaaaccgaaacactacatt

SEQ ID NO: 54880 - DNA, 25 bp, Artificial
  probe
  misc_feature (1)..(25): SEQ ID NO: 4482; WAN024AHK_at; Start 41; Stop 65
tgagaacgaactatctaaaccgaaa

SEQ ID NO: 54881 - DNA, 25 bp, Artificial
  probe
  misc_feature (1)..(25): SEQ ID NO: 4482; WAN024AHK_at; Start 109; Stop 133
gataaagttatatagtcccgataag

SEQ ID NO: 54882 - DNA, 25 bp, Artificial
  probe
  misc_feature (1)..(25): SEQ ID NO: 4482; WAN024AHK_at; Start 146; Stop 170
tattacgaagagttttcctatcagt

SEQ ID NO: 54883 - DNA, 25 bp, Artificial
  probe
  misc_feature (1)..(25): SEQ ID NO: 4482; WAN024AHK_at; Start 62; Stop 86
gaaacactacattaaagactgcaaa

SEQ ID NO: 54884 - DNA, 25 bp, Artificial
  probe
  misc_feature (1)..(25): SEQ ID NO: 4482; WAN024AHK_at; Start 48; Stop 72
gaactatctaaaccgaaacactaca

SEQ ID NO: 54885 - DNA, 25 bp, Artificial
  probe
  misc_feature (1)..(25): SEQ ID NO: 4482; WAN024AHK_at; Start 121; Stop 145
tagtcccgataagatggtaggtatt

SEQ ID NO: 54886 - DNA, 25 bp, Artificial
  probe
  misc_feature (1)..(25): SEQ ID NO: 4482; WAN024AHK_at; Start 130; Stop 154
taagatggtaggtatttattacgaa

SEQ ID NO: 54887 - DNA, 25 bp, Artificial
  probe
  misc_feature (1)..(25): SEQ ID NO: 4482; WAN024AHK_at; Start 58; Stop 82
aaccgaaacactacattaaagactg

SEQ ID NO: 54888 - DNA, 25 bp, Artificial
  probe
  misc_feature (1)..(25): SEQ ID NO: 4482; WAN024AHK_at; Start 67; Stop 91
actacattaaagactgcaaattgcg

SEQ ID NO: 54889 - DNA, 25 bp, Artificial
  probe
  misc_feature (1)..(25): SEQ ID NO: 4482; WAN024AHK_at; Start 175; Stop 199
tgtaactctataacaatatttttta

SEQ ID NO: 54890 - DNA, 25 bp, Artificial
  probe
  misc_feature (1)..(25): SEQ ID NO: 4482; WAN024AHK_at; Start 117; Stop 141
tatatagtcccgataagatggtagg

SEQ ID NO: 54891 - DNA, 25 bp, Artificial
  probe
  misc_feature (1)..(25): SEQ ID NO: 4482; WAN024AHK_at; Start 79; Stop 103
actgcaaattgcgattaaaaatggt

SEQ ID NO: 54892 - DNA, 25 bp, Artificial
  probe
  misc_feature (1)..(25): SEQ ID NO: 4482; WAN024AHK_at; Start 66; Stop 90
cactacattaaagactgcaaattgc

SEQ ID NO: 54893 - DNA, 25 bp, Artificial
  probe
  misc_feature (1)..(25): SEQ ID NO: 1256; WAN024AHL_at; Start 135; Stop 159
cctgctgatatttcacacaaaatct

SEQ ID NO: 54894 - DNA, 25 bp, Artificial
  probe
  misc_feature (1)..(25): SEQ ID NO: 1256; WAN024AHL_at; Start 88; Stop 112
gccaaggttacttgtcataagacac

SEQ ID NO: 54895 - DNA, 25 bp, Artificial
  probe
  misc_feature (1)..(25): SEQ ID NO: 1256; WAN024AHL_at; Start 45; Stop 69
acttagaaagccctgattcgtgcag

SEQ ID NO: 54896 - DNA, 25 bp, Artificial
  probe
  misc_feature (1)..(25): SEQ ID NO: 1256; WAN024AHL_at; Start 157; Stop 181
tctattctaccatgaatagctggat

SEQ ID NO: 54897 - DNA, 25 bp, Artificial
  probe
  misc_feature (1)..(25): SEQ ID NO: 1256; WAN024AHL_at; Start 55; Stop 79
ccctgattcgtgcagatgcccttcg

SEQ ID NO: 54898 - DNA, 25 bp, Artificial
  probe
  misc_feature (1)..(25): SEQ ID NO: 1256; WAN024AHL_at; Start 36; Stop 60
gaaatagtcacttagaaagccctga

SEQ ID NO: 54899 - DNA, 25 bp, Artificial
  probe
  misc_feature (1)..(25): SEQ ID NO: 1256; WAN024AHL_at; Start 127; Stop 151
catgctttcctgctgatatttcaca

SEQ ID NO: 54900 - DNA, 25 bp, Artificial
  probe
  misc_feature (1)..(25): SEQ ID NO: 1256; WAN024AHL_at; Start 75; Stop 99
cttcgcctaaacagccaaggttact

SEQ ID NO: 54901 - DNA, 25 bp, Artificial
  probe
  misc_feature (1)..(25): SEQ ID NO: 1256; WAN024AHL_at; Start 114; Stop 138
tgttgacgagcttcatgctttcctg

SEQ ID NO: 54902 - DNA, 25 bp, Artificial
  probe
  misc_feature (1)..(25): SEQ ID NO: 1256; WAN024AHL_at; Start 59; Stop 83
gattcgtgcagatgcccttcgccta

SEQ ID NO: 54903 - DNA, 25 bp, Artificial
  probe
  misc_feature (1)..(25): SEQ ID NO: 1256; WAN024AHL_at; Start 162; Stop 186
tctaccatgaatagctggatttgta

SEQ ID NO: 54904 - DNA, 25 bp, Artificial
  probe
  misc_feature (1)..(25): SEQ ID NO: 1256; WAN024AHL_at; Start 2; Stop 26
tgaatgtcctcctgatataaataat

SEQ ID NO: 54905 - DNA, 25 bp, Artificial
  probe
  misc_feature (1)..(25): SEQ ID NO: 1256; WAN024AHL_at; Start 23; Stop 47
taatatttcggtggaaatagtcact

SEQ ID NO: 54906 - DNA, 25 bp, Artificial
  probe
  misc_feature (1)..(25): SEQ ID NO: 1256; WAN024AHL_at; Start 82; Stop 106
taaacagccaaggttacttgtcata

SEQ ID NO: 54907 - DNA, 25 bp, Artificial
  probe
  misc_feature (1)..(25): SEQ ID NO: 1256; WAN024AHL_at; Start 167; Stop 191
catgaatagctggatttgtaaaggg

SEQ ID NO: 54908 - DNA, 25 bp, Artificial
  probe
  misc_feature (1)..(25): SEQ ID NO: 1256; WAN024AHL_at; Start 105; Stop 129
taagacacctgttgacgagcttcat

SEQ ID NO: 54909 - DNA, 25 bp, Artificial
  probe
  misc_feature (1)..(25): SEQ ID NO: 1256; WAN024AHL_at; Start 94; Stop 118
gttacttgtcataagacacctgttg

SEQ ID NO: 54910 - DNA, 25 bp, Artificial
  probe
  misc_feature (1)..(25): SEQ ID NO: 1256; WAN024AHL_at; Start 118; Stop 142
gacgagcttcatgctttcctgctga

SEQ ID NO: 54911 - DNA, 25 bp, Artificial
  probe
  misc_feature (1)..(25): SEQ ID NO: 1256; WAN024AHL_at; Start 108; Stop 132
gacacctgttgacgagcttcatgct

SEQ ID NO: 54912 - DNA, 25 bp, Artificial
  probe
  misc_feature (1)..(25): SEQ ID NO: 1256; WAN024AHL_at; Start 34; Stop 58
tggaaatagtcacttagaaagccct

SEQ ID NO: 54913 - DNA, 25 bp, Artificial
  probe
  misc_feature (1)..(25): SEQ ID NO: 1256; WAN024AHL_at; Start 31; Stop 55
cggtggaaatagtcacttagaaagc

SEQ ID NO: 54914 - DNA, 25 bp, Artificial
  probe
  misc_feature (1)..(25): SEQ ID NO: 1256; WAN024AHL_at; Start 148; Stop 172
cacacaaaatctattctaccatgaa

SEQ ID NO: 54915 - DNA, 25 bp, Artificial
  probe
  misc_feature (1)..(25): SEQ ID NO: 1256; WAN024AHL_at; Start 120; Stop 144
cgagcttcatgctttcctgctgata

SEQ ID NO: 54916 - DNA, 25 bp, Artificial
  probe
  misc_feature (1)..(25): SEQ ID NO: 1256; WAN024AHL_at; Start 9; Stop 33
cctcctgatataaataatatttcgg

SEQ ID NO: 54917 - DNA, 25 bp, Artificial
  probe
  misc_feature (1)..(25): SEQ ID NO: 1256; WAN024AHL_at; Start 78; Stop 102
cgcctaaacagccaaggttacttgt

SEQ ID NO: 54918 - DNA, 25 bp, Artificial
  probe
  misc_feature (1)..(25): SEQ ID NO: 1256; WAN024AHL_at; Start 64; Stop 88
gtgcagatgcccttcgcctaaacag

SEQ ID NO: 54919 - DNA, 25 bp, Artificial
  probe
  misc_feature (1)..(25): SEQ ID NO: 1256; WAN024AHL_at; Start 100; Stop 124
tgtcataagacacctgttgacgagc

SEQ ID NO: 54920 - DNA, 25 bp, Artificial
  probe
  misc_feature (1)..(25): SEQ ID NO: 1256; WAN024AHL_at; Start 40; Stop 64
tagtcacttagaaagccctgattcg

SEQ ID NO: 54921 - DNA, 25 bp, Artificial
  probe
  misc_feature (1)..(25): SEQ ID NO: 1256; WAN024AHL_at; Start 103; Stop 127
cataagacacctgttgacgagcttc

SEQ ID NO: 54922 - DNA, 25 bp, Artificial
  probe
  misc_feature (1)..(25): SEQ ID NO: 1256; WAN024AHL_at; Start 71; Stop 95
tgcccttcgcctaaacagccaaggt

SEQ ID NO: 54923 - DNA, 25 bp, Artificial
  probe
  misc_feature (1)..(25): SEQ ID NO: 1256; WAN024AHL_at; Start 48; Stop 72
tagaaagccctgattcgtgcagatg

SEQ ID NO: 54924 - DNA, 25 bp, Artificial
  probe
  misc_feature (1)..(25): SEQ ID NO: 1256; WAN024AHL_at; Start 130; Stop 154
gctttcctgctgatatttcacacaa

SEQ ID NO: 54925 - DNA, 25 bp, Artificial
  probe
  misc_feature (1)..(25): SEQ ID NO: 1256; WAN024AHL_at; Start 51; Stop 75
aaagccctgattcgtgcagatgccc

SEQ ID NO: 54926 - DNA, 25 bp, Artificial
  probe
  misc_feature (1)..(25): SEQ ID NO: 1256; WAN024AHL_at; Start 110; Stop 134
cacctgttgacgagcttcatgcttt

SEQ ID NO: 54927 - DNA, 25 bp, Artificial
  probe
  misc_feature (1)..(25): SEQ ID NO: 196; WAN024AHM_at; Start 118; Stop 142
aagggcatctgcacgaatcagggct

SEQ ID NO: 54928 - DNA, 25 bp, Artificial
  probe
  misc_feature (1)..(25): SEQ ID NO: 196; WAN024AHM_at; Start 168; Stop 192
tattatttatatcaggaggacattc

SEQ ID NO: 54929 - DNA, 25 bp, Artificial
  probe
  misc_feature (1)..(25): SEQ ID NO: 196; WAN024AHM_at; Start 51; Stop 75
tatcagcaggaaagcatgaagctcg

SEQ ID NO: 54930 - DNA, 25 bp, Artificial
  probe
  misc_feature (1)..(25): SEQ ID NO: 196; WAN024AHM_at; Start 86; Stop 110
tcttatgacaagtaaccttggctgt

SEQ ID NO: 54931 - DNA, 25 bp, Artificial
  probe
  misc_feature (1)..(25): SEQ ID NO: 196; WAN024AHM_at; Start 140; Stop 164
gctttctaagtgactatttccaccg

SEQ ID NO: 54932 - DNA, 25 bp, Artificial
  probe
  misc_feature (1)..(25): SEQ ID NO: 196; WAN024AHM_at; Start 136; Stop 160
cagggctttctaagtgactatttcc

SEQ ID NO: 54933 - DNA, 25 bp, Artificial
  probe
  misc_feature (1)..(25): SEQ ID NO: 196; WAN024AHM_at; Start 115; Stop 139
gcgaagggcatctgcacgaatcagg

SEQ ID NO: 54934 - DNA, 25 bp, Artificial
  probe
  misc_feature (1)..(25): SEQ ID NO: 196; WAN024AHM_at; Start 37; Stop 61
gattttgtgtgaaatatcagcagga

SEQ ID NO: 54935 - DNA, 25 bp, Artificial
  probe
  misc_feature (1)..(25): SEQ ID NO: 196; WAN024AHM_at; Start 125; Stop 149
tctgcacgaatcagggctttctaag

SEQ ID NO: 54936 - DNA, 25 bp, Artificial
  probe
  misc_feature (1)..(25): SEQ ID NO: 196; WAN024AHM_at; Start 42; Stop 66
tgtgtgaaatatcagcaggaaagca

SEQ ID NO: 54937 - DNA, 25 bp, Artificial
  probe
  misc_feature (1)..(25): SEQ ID NO: 196; WAN024AHM_at; Start 131; Stop 155
cgaatcagggctttctaagtgacta

SEQ ID NO: 54938 - DNA, 25 bp, Artificial
  probe
  misc_feature (1)..(25): SEQ ID NO: 196; WAN024AHM_at; Start 108; Stop 132
tgtttaggcgaagggcatctgcacg

SEQ ID NO: 54939 - DNA, 25 bp, Artificial
  probe
  misc_feature (1)..(25): SEQ ID NO: 196; WAN024AHM_at; Start 159; Stop 183
ccaccgaaatattatttatatcagg

SEQ ID NO: 54940 - DNA, 25 bp, Artificial
  probe
  misc_feature (1)..(25): SEQ ID NO: 196; WAN024AHM_at; Start 144; Stop 168
tctaagtgactatttccaccgaaat

SEQ ID NO: 54941 - DNA, 25 bp, Artificial
  probe
  misc_feature (1)..(25): SEQ ID NO: 196; WAN024AHM_at; Start 112; Stop 136
taggcgaagggcatctgcacgaatc

SEQ ID NO: 54942 - DNA, 25 bp, Artificial
  probe
  misc_feature (1)..(25): SEQ ID NO: 196; WAN024AHM_at; Start 56; Stop 80
gcaggaaagcatgaagctcgtcaac

SEQ ID NO: 54943 - DNA, 25 bp, Artificial
  probe
  misc_feature (1)..(25): SEQ ID NO: 196; WAN024AHM_at; Start 53; Stop 77
tcagcaggaaagcatgaagctcgtc

SEQ ID NO: 54944 - DNA, 25 bp, Artificial
  probe
  misc_feature (1)..(25): SEQ ID NO: 196; WAN024AHM_at; Start 11; Stop 35
caaatccagctattcatggtagaat

SEQ ID NO: 54945 - DNA, 25 bp, Artificial
  probe
  misc_feature (1)..(25): SEQ ID NO: 196; WAN024AHM_at; Start 120; Stop 144
gggcatctgcacgaatcagggcttt

SEQ ID NO: 54946 - DNA, 25 bp, Artificial
  probe
  misc_feature (1)..(25): SEQ ID NO: 196; WAN024AHM_at; Start 60; Stop 84
gaaagcatgaagctcgtcaacaggt

SEQ ID NO: 54947 - DNA, 25 bp, Artificial
  probe
  misc_feature (1)..(25): SEQ ID NO: 196; WAN024AHM_at; Start 77; Stop 101
caacaggtgtcttatgacaagtaac

SEQ ID NO: 54948 - DNA, 25 bp, Artificial
  probe
  misc_feature (1)..(25): SEQ ID NO: 196; WAN024AHM_at; Start 170; Stop 194
ttatttatatcaggaggacattcat

SEQ ID NO: 54949 - DNA, 25 bp, Artificial
  probe
  misc_feature (1)..(25): SEQ ID NO: 196; WAN024AHM_at; Start 93; Stop 117
acaagtaaccttggctgtttaggcg

SEQ ID NO: 54950 - DNA, 25 bp, Artificial
  probe
  misc_feature (1)..(25): SEQ ID NO: 196; WAN024AHM_at; Start 83; Stop 107
gtgtcttatgacaagtaaccttggc

SEQ ID NO: 54951 - DNA, 25 bp, Artificial
  probe
  misc_feature (1)..(25): SEQ ID NO: 196; WAN024AHM_at; Start 96; Stop 120
agtaaccttggctgtttaggcgaag

SEQ ID NO: 54952 - DNA, 25 bp, Artificial
  probe
  misc_feature (1)..(25): SEQ ID NO: 196; WAN024AHM_at; Start 102; Stop 126
cttggctgtttaggcgaagggcatc

SEQ ID NO: 54953 - DNA, 25 bp, Artificial
  probe
  misc_feature (1)..(25): SEQ ID NO: 196; WAN024AHM_at; Start 73; Stop 97
tcgtcaacaggtgtcttatgacaag

SEQ ID NO: 54954 - DNA, 25 bp, Artificial
  probe
  misc_feature (1)..(25): SEQ ID NO: 196; WAN024AHM_at; Start 25; Stop 49
catggtagaatagattttgtgtgaa

SEQ ID NO: 54955 - DNA, 25 bp, Artificial
  probe
  misc_feature (1)..(25): SEQ ID NO: 196; WAN024AHM_at; Start 4; Stop 28
ccctttacaaatccagctattcatg

SEQ ID NO: 54956 - DNA, 25 bp, Artificial
  probe
  misc_feature (1)..(25): SEQ ID NO: 196; WAN024AHM_at; Start 68; Stop 92
gaagctcgtcaacaggtgtcttatg

SEQ ID NO: 54957 - DNA, 25 bp, Artificial
  probe
  misc_feature (1)..(25): SEQ ID NO: 196; WAN024AHM_at; Start 123; Stop 147
catctgcacgaatcagggctttcta

SEQ ID NO: 54958 - DNA, 25 bp, Artificial
  probe
  misc_feature (1)..(25): SEQ ID NO: 196; WAN024AHM_at; Start 15; Stop 39
tccagctattcatggtagaatagat

SEQ ID NO: 54959 - DNA, 25 bp, Artificial
  probe
  misc_feature (1)..(25): SEQ ID NO: 196; WAN024AHM_at; Start 106; Stop 130
gctgtttaggcgaagggcatctgca

SEQ ID NO: 54960 - DNA, 25 bp, Artificial
  probe
  misc_feature (1)..(25): SEQ ID NO: 196; WAN024AHM_at; Start 64; Stop 88
gcatgaagctcgtcaacaggtgtct

SEQ ID NO: 54961 - DNA, 25 bp, Artificial
  probe
  misc_feature (1)..(25): SEQ ID NO: 222; WAN024AHN_at; Start 92; Stop 116
ctgtataatagtaagagttgaaaat

SEQ ID NO: 54962 - DNA, 25 bp, Artificial
  probe
  misc_feature (1)..(25): SEQ ID NO: 222; WAN024AHN_at; Start 19; Stop 43
ggctttttttactataagtcatgca

SEQ ID NO: 54963 - DNA, 25 bp, Artificial
  probe
  misc_feature (1)..(25): SEQ ID NO: 222; WAN024AHN_at; Start 15; Stop 39
ttctggctttttttactataagtca

SEQ ID NO: 54964 - DNA, 25 bp, Artificial
  probe
  misc_feature (1)..(25): SEQ ID NO: 222; WAN024AHN_at; Start 5; Stop 29
gtcagtataattctggcttttttta

SEQ ID NO: 54965 - DNA, 25 bp, Artificial
  probe
  misc_feature (1)..(25): SEQ ID NO: 222; WAN024AHN_at; Start 23; Stop 47
ttttttactataagtcatgcaaaaa

SEQ ID NO: 54966 - DNA, 25 bp, Artificial
  probe
  misc_feature (1)..(25): SEQ ID NO: 222; WAN024AHN_at; Start 10; Stop 34
tataattctggctttttttactata

SEQ ID NO: 54967 - DNA, 25 bp, Artificial
  probe
  misc_feature (1)..(25): SEQ ID NO: 222; WAN024AHN_at; Start 22; Stop 46
tttttttactataagtcatgcaaaa

SEQ ID NO: 54968 - DNA, 25 bp, Artificial
  probe
  misc_feature (1)..(25): SEQ ID NO: 222; WAN024AHN_at; Start 16; Stop 40
tctggctttttttactataagtcat

SEQ ID NO: 54969 - DNA, 25 bp, Artificial
  probe
  misc_feature (1)..(25): SEQ ID NO: 222; WAN024AHN_at; Start 17; Stop 41
ctggctttttttactataagtcatg

SEQ ID NO: 54970 - DNA, 25 bp, Artificial
  probe
  misc_feature (1)..(25): SEQ ID NO: 222; WAN024AHN_at; Start 1; Stop 25
aagagtcagtataattctggctttt

SEQ ID NO: 54971 - DNA, 25 bp, Artificial
  probe
  misc_feature (1)..(25): SEQ ID NO: 222; WAN024AHN_at; Start 2; Stop 26
agagtcagtataattctggcttttt

SEQ ID NO: 54972 - DNA, 25 bp, Artificial
  probe
  misc_feature (1)..(25): SEQ ID NO: 222; WAN024AHN_at; Start 6; Stop 30
tcagtataattctggctttttttac

SEQ ID NO: 54973 - DNA, 25 bp, Artificial
  probe
  misc_feature (1)..(25): SEQ ID NO: 222; WAN024AHN_at; Start 21; Stop 45
ctttttttactataagtcatgcaaa

SEQ ID NO: 54974 - DNA, 25 bp, Artificial
  probe
  misc_feature (1)..(25): SEQ ID NO: 222; WAN024AHN_at; Start 7; Stop 31
cagtataattctggctttttttact

SEQ ID NO: 54975 - DNA, 25 bp, Artificial
  probe
  misc_feature (1)..(25): SEQ ID NO: 222; WAN024AHN_at; Start 24; Stop 48
tttttactataagtcatgcaaaaaa

SEQ ID NO: 54976 - DNA, 25 bp, Artificial
  probe
  misc_feature (1)..(25): SEQ ID NO: 222; WAN024AHN_at; Start 93; Stop 117
tgtataatagtaagagttgaaaata

SEQ ID NO: 54977 - DNA, 25 bp, Artificial
  probe
  misc_feature (1)..(25): SEQ ID NO: 222; WAN024AHN_at; Start 3; Stop 27
gagtcagtataattctggctttttt

SEQ ID NO: 54978 - DNA, 25 bp, Artificial
  probe
  misc_feature (1)..(25): SEQ ID NO: 222; WAN024AHN_at; Start 18; Stop 42
tggctttttttactataagtcatgc

SEQ ID NO: 54979 - DNA, 25 bp, Artificial
  probe
  misc_feature (1)..(25): SEQ ID NO: 222; WAN024AHN_at; Start 20; Stop 44
gctttttttactataagtcatgcaa

SEQ ID NO: 54980 - DNA, 25 bp, Artificial
  probe
  misc_feature (1)..(25): SEQ ID NO: 222; WAN024AHN_at; Start 4; Stop 28
agtcagtataattctggcttttttt

SEQ ID NO: 54981 - DNA, 25 bp, Artificial
  probe
  misc_feature (1)..(25): SEQ ID NO: 4687; WAN024AHO_at; Start 86; Stop 110
atgacttatagtaaaaaaagccaga

SEQ ID NO: 54982 - DNA, 25 bp, Artificial
  probe
  misc_feature (1)..(25): SEQ ID NO: 4687; WAN024AHO_at; Start 9; Stop 33
tattttcaactcttactattataca

SEQ ID NO: 54983 - DNA, 25 bp, Artificial
  probe
  misc_feature (1)..(25): SEQ ID NO: 4687; WAN024AHO_at; Start 97; Stop 121
taaaaaaagccagaattatactgac

SEQ ID NO: 54984 - DNA, 25 bp, Artificial
  probe
  misc_feature (1)..(25): SEQ ID NO: 4687; WAN024AHO_at; Start 100; Stop 124
aaaaagccagaattatactgactct

SEQ ID NO: 54985 - DNA, 25 bp, Artificial
  probe
  misc_feature (1)..(25): SEQ ID NO: 4687; WAN024AHO_at; Start 92; Stop 116
tatagtaaaaaaagccagaattata

SEQ ID NO: 54986 - DNA, 25 bp, Artificial
  probe
  misc_feature (1)..(25): SEQ ID NO: 4687; WAN024AHO_at; Start 85; Stop 109
catgacttatagtaaaaaaagccag

SEQ ID NO: 54987 - DNA, 25 bp, Artificial
  probe
  misc_feature (1)..(25): SEQ ID NO: 4687; WAN024AHO_at; Start 96; Stop 120
gtaaaaaaagccagaattatactga

SEQ ID NO: 54988 - DNA, 25 bp, Artificial
  probe
  misc_feature (1)..(25): SEQ ID NO: 4687; WAN024AHO_at; Start 95; Stop 119
agtaaaaaaagccagaattatactg

SEQ ID NO: 54989 - DNA, 25 bp, Artificial
  probe
  misc_feature (1)..(25): SEQ ID NO: 4687; WAN024AHO_at; Start 87; Stop 111
tgacttatagtaaaaaaagccagaa

SEQ ID NO: 54990 - DNA, 25 bp, Artificial
  probe
  misc_feature (1)..(25): SEQ ID NO: 4687; WAN024AHO_at; Start 10; Stop 34
attttcaactcttactattatacag

SEQ ID NO: 54991 - DNA, 25 bp, Artificial
  probe
  misc_feature (1)..(25): SEQ ID NO: 4687; WAN024AHO_at; Start 99; Stop 123
aaaaaagccagaattatactgactc

SEQ ID NO: 54992 - DNA, 25 bp, Artificial
  probe
  misc_feature (1)..(25): SEQ ID NO: 4687; WAN024AHO_at; Start 101; Stop 125
aaaagccagaattatactgactctt

SEQ ID NO: 54993 - DNA, 25 bp, Artificial
  probe
  misc_feature (1)..(25): SEQ ID NO: 4687; WAN024AHO_at; Start 98; Stop 122
aaaaaaagccagaattatactgact

SEQ ID NO: 54994 - DNA, 25 bp, Artificial
  probe
  misc_feature (1)..(25): SEQ ID NO: 189; WAN024AHP_at; Start 52; Stop 76
acagtagtctcacttatttaggcta

SEQ ID NO: 54995 - DNA, 25 bp, Artificial
  probe
  misc_feature (1)..(25): SEQ ID NO: 189; WAN024AHP_at; Start 105; Stop 129
gctggaattttatagttccaacctc

SEQ ID NO: 54996 - DNA, 25 bp, Artificial
  probe
  misc_feature (1)..(25): SEQ ID NO: 189; WAN024AHP_at; Start 79; Stop 103
tccagtagcttctctagtaagaaaa

SEQ ID NO: 54997 - DNA, 25 bp, Artificial
  probe
  misc_feature (1)..(25): SEQ ID NO: 189; WAN024AHP_at; Start 72; Stop 96
ggctatttccagtagcttctctagt

SEQ ID NO: 54998 - DNA, 25 bp, Artificial
  probe
  misc_feature (1)..(25): SEQ ID NO: 189; WAN024AHP_at; Start 87; Stop 111
cttctctagtaagaaaaggctggaa

SEQ ID NO: 54999 - DNA, 25 bp, Artificial
  probe
  misc_feature (1)..(25): SEQ ID NO: 189; WAN024AHP_at; Start 80; Stop 104
ccagtagcttctctagtaagaaaag

SEQ ID NO: 55000 - DNA, 25 bp, Artificial
  probe
  misc_feature (1)..(25): SEQ ID NO: 189; WAN024AHP_at; Start 71; Stop 95
aggctatttccagtagcttctctag

SEQ ID NO: 55001 - DNA, 25 bp, Artificial
  probe
  misc_feature (1)..(25): SEQ ID NO: 189; WAN024AHP_at; Start 106; Stop 130
ctggaattttatagttccaacctct

SEQ ID NO: 55002 - DNA, 25 bp, Artificial
  probe
  misc_feature (1)..(25): SEQ ID NO: 189; WAN024AHP_at; Start 82; Stop 106
agtagcttctctagtaagaaaaggc

SEQ ID NO: 55003 - DNA, 25 bp, Artificial
  probe
  misc_feature (1)..(25): SEQ ID NO: 189; WAN024AHP_at; Start 51; Stop 75
tacagtagtctcacttatttaggct

SEQ ID NO: 55004 - DNA, 25 bp, Artificial
  probe
  misc_feature (1)..(25): SEQ ID NO: 189; WAN024AHP_at; Start 115; Stop 139
tatagttccaacctcttttcagtta

SEQ ID NO: 55005 - DNA, 25 bp, Artificial
  probe
  misc_feature (1)..(25): SEQ ID NO: 189; WAN024AHP_at; Start 86; Stop 110
gcttctctagtaagaaaaggctgga

SEQ ID NO: 55006 - DNA, 25 bp, Artificial
  probe
  misc_feature (1)..(25): SEQ ID NO: 189; WAN024AHP_at; Start 90; Stop 114
ctctagtaagaaaaggctggaattt

SEQ ID NO: 55007 - DNA, 25 bp, Artificial
  probe
  misc_feature (1)..(25): SEQ ID NO: 189; WAN024AHP_at; Start 53; Stop 77
cagtagtctcacttatttaggctat

SEQ ID NO: 55008 - DNA, 25 bp, Artificial
  probe
  misc_feature (1)..(25): SEQ ID NO: 189; WAN024AHP_at; Start 68; Stop 92
tttaggctatttccagtagcttctc

SEQ ID NO: 55009 - DNA, 25 bp, Artificial
  probe
  misc_feature (1)..(25): SEQ ID NO: 189; WAN024AHP_at; Start 81; Stop 105
cagtagcttctctagtaagaaaagg

SEQ ID NO: 55010 - DNA, 25 bp, Artificial
  probe
  misc_feature (1)..(25): SEQ ID NO: 189; WAN024AHP_at; Start 75; Stop 99
tatttccagtagcttctctagtaag

SEQ ID NO: 55011 - DNA, 25 bp, Artificial
  probe
  misc_feature (1)..(25): SEQ ID NO: 189; WAN024AHP_at; Start 31; Stop 55
tataccatattttattccattacag

SEQ ID NO: 55012 - DNA, 25 bp, Artificial
  probe
  misc_feature (1)..(25): SEQ ID NO: 189; WAN024AHP_at; Start 73; Stop 97
gctatttccagtagcttctctagta

SEQ ID NO: 55013 - DNA, 25 bp, Artificial
  probe
  misc_feature (1)..(25): SEQ ID NO: 189; WAN024AHP_at; Start 38; Stop 62
tattttattccattacagtagtctc

SEQ ID NO: 55014 - DNA, 25 bp, Artificial
  probe
  misc_feature (1)..(25): SEQ ID NO: 189; WAN024AHP_at; Start 43; Stop 67
tattccattacagtagtctcactta

SEQ ID NO: 55015 - DNA, 25 bp, Artificial
  probe
  misc_feature (1)..(25): SEQ ID NO: 189; WAN024AHP_at; Start 66; Stop 90
tatttaggctatttccagtagcttc

SEQ ID NO: 55016 - DNA, 25 bp, Artificial
  probe
  misc_feature (1)..(25): SEQ ID NO: 189; WAN024AHP_at; Start 34; Stop 58
accatattttattccattacagtag

SEQ ID NO: 55017 - DNA, 25 bp, Artificial
  probe
  misc_feature (1)..(25): SEQ ID NO: 189; WAN024AHP_at; Start 62; Stop 86
cacttatttaggctatttccagtag

SEQ ID NO: 55018 - DNA, 25 bp, Artificial
  probe
  misc_feature (1)..(25): SEQ ID NO: 189; WAN024AHP_at; Start 57; Stop 81
agtctcacttatttaggctatttcc

SEQ ID NO: 55019 - DNA, 25 bp, Artificial
  probe
  misc_feature (1)..(25): SEQ ID NO: 189; WAN024AHP_at; Start 77; Stop 101
tttccagtagcttctctagtaagaa

SEQ ID NO: 55020 - DNA, 25 bp, Artificial
  probe
  misc_feature (1)..(25): SEQ ID NO: 189; WAN024AHP_at; Start 63; Stop 87
acttatttaggctatttccagtagc

SEQ ID NO: 55021 - DNA, 25 bp, Artificial
  probe
  misc_feature (1)..(25): SEQ ID NO: 189; WAN024AHP_at; Start 59; Stop 83
tctcacttatttaggctatttccag

SEQ ID NO: 55022 - DNA, 25 bp, Artificial
  probe
  misc_feature (1)..(25): SEQ ID NO: 189; WAN024AHP_at; Start 41; Stop 65
tttattccattacagtagtctcact

SEQ ID NO: 55023 - DNA, 25 bp, Artificial
  probe
  misc_feature (1)..(25): SEQ ID NO: 189; WAN024AHP_at; Start 40; Stop 64
ttttattccattacagtagtctcac

SEQ ID NO: 55024 - DNA, 25 bp, Artificial
  probe
  misc_feature (1)..(25): SEQ ID NO: 189; WAN024AHP_at; Start 70; Stop 94
taggctatttccagtagcttctcta

SEQ ID NO: 55025 - DNA, 25 bp, Artificial
  probe
  misc_feature (1)..(25): SEQ ID NO: 189; WAN024AHP_at; Start 89; Stop 113
tctctagtaagaaaaggctggaatt

SEQ ID NO: 55026 - DNA, 25 bp, Artificial
  probe
  misc_feature (1)..(25): SEQ ID NO: 189; WAN024AHP_at; Start 84; Stop 108
tagcttctctagtaagaaaaggctg

SEQ ID NO: 55027 - DNA, 25 bp, Artificial
  probe
  misc_feature (1)..(25): SEQ ID NO: 189; WAN024AHP_at; Start 36; Stop 60
catattttattccattacagtagtc

SEQ ID NO: 55028 - DNA, 25 bp, Artificial
  probe
  misc_feature (1)..(25): SEQ ID NO: 4435; WAN024AHQ_at; Start 83; Stop 107
tactgtaatggaataaaatatggta

SEQ ID NO: 55029 - DNA, 25 bp, Artificial
  probe
  misc_feature (1)..(25): SEQ ID NO: 4435; WAN024AHQ_at; Start 32; Stop 56
cagccttttcttactagagaagcta

SEQ ID NO: 55030 - DNA, 25 bp, Artificial
  probe
  misc_feature (1)..(25): SEQ ID NO: 4435; WAN024AHQ_at; Start 80; Stop 104
gactactgtaatggaataaaatatg

SEQ ID NO: 55031 - DNA, 25 bp, Artificial
  probe
  misc_feature (1)..(25): SEQ ID NO: 4435; WAN024AHQ_at; Start 66; Stop 90
gcctaaataagtgagactactgtaa

SEQ ID NO: 55032 - DNA, 25 bp, Artificial
  probe
  misc_feature (1)..(25): SEQ ID NO: 4435; WAN024AHQ_at; Start 40; Stop 64
tcttactagagaagctactggaaat

SEQ ID NO: 55033 - DNA, 25 bp, Artificial
  probe
  misc_feature (1)..(25): SEQ ID NO: 4435; WAN024AHQ_at; Start 78; Stop 102
gagactactgtaatggaataaaata

SEQ ID NO: 55034 - DNA, 25 bp, Artificial
  probe
  misc_feature (1)..(25): SEQ ID NO: 4435; WAN024AHQ_at; Start 50; Stop 74
gaagctactggaaatagcctaaata

SEQ ID NO: 55035 - DNA, 25 bp, Artificial
  probe
  misc_feature (1)..(25): SEQ ID NO: 4435; WAN024AHQ_at; Start 61; Stop 85
aaatagcctaaataagtgagactac

SEQ ID NO: 55036 - DNA, 25 bp, Artificial
  probe
  misc_feature (1)..(25): SEQ ID NO: 4435; WAN024AHQ_at; Start 44; Stop 68
actagagaagctactggaaatagcc

SEQ ID NO: 55037 - DNA, 25 bp, Artificial
  probe
  misc_feature (1)..(25): SEQ ID NO: 4435; WAN024AHQ_at; Start 46; Stop 70
tagagaagctactggaaatagccta

SEQ ID NO: 55038 - DNA, 25 bp, Artificial
  probe
  misc_feature (1)..(25): SEQ ID NO: 4435; WAN024AHQ_at; Start 54; Stop 78
ctactggaaatagcctaaataagtg

SEQ ID NO: 55039 - DNA, 25 bp, Artificial
  probe
  misc_feature (1)..(25): SEQ ID NO: 4435; WAN024AHQ_at; Start 43; Stop 67
tactagagaagctactggaaatagc

SEQ ID NO: 55040 - DNA, 25 bp, Artificial
  probe
  misc_feature (1)..(25): SEQ ID NO: 4435; WAN024AHQ_at; Start 27; Stop 51
aattccagccttttcttactagaga

SEQ ID NO: 55041 - DNA, 25 bp, Artificial
  probe
  misc_feature (1)..(25): SEQ ID NO: 4435; WAN024AHQ_at; Start 35; Stop 59
ccttttcttactagagaagctactg

SEQ ID NO: 55042 - DNA, 25 bp, Artificial
  probe
  misc_feature (1)..(25): SEQ ID NO: 4435; WAN024AHQ_at; Start 58; Stop 82
tggaaatagcctaaataagtgagac

SEQ ID NO: 55043 - DNA, 25 bp, Artificial
  probe
  misc_feature (1)..(25): SEQ ID NO: 4435; WAN024AHQ_at; Start 82; Stop 106
ctactgtaatggaataaaatatggt

SEQ ID NO: 55044 - DNA, 25 bp, Artificial
  probe
  misc_feature (1)..(25): SEQ ID NO: 4435; WAN024AHQ_at; Start 64; Stop 88
tagcctaaataagtgagactactgt

SEQ ID NO: 55045 - DNA, 25 bp, Artificial
  probe
  misc_feature (1)..(25): SEQ ID NO: 4435; WAN024AHQ_at; Start 56; Stop 80
actggaaatagcctaaataagtgag

SEQ ID NO: 55046 - DNA, 25 bp, Artificial
  probe
  misc_feature (1)..(25): SEQ ID NO: 4435; WAN024AHQ_at; Start 26; Stop 50
aaattccagccttttcttactagag

SEQ ID NO: 55047 - DNA, 25 bp, Artificial
  probe
  misc_feature (1)..(25): SEQ ID NO: 4435; WAN024AHQ_at; Start 48; Stop 72
gagaagctactggaaatagcctaaa

SEQ ID NO: 55048 - DNA, 25 bp, Artificial
  probe
  misc_feature (1)..(25): SEQ ID NO: 4435; WAN024AHQ_at; Start 41; Stop 65
cttactagagaagctactggaaata

SEQ ID NO: 55049 - DNA, 25 bp, Artificial
  probe
  misc_feature (1)..(25): SEQ ID NO: 4435; WAN024AHQ_at; Start 45; Stop 69
ctagagaagctactggaaatagcct

SEQ ID NO: 55050 - DNA, 25 bp, Artificial
  probe
  misc_feature (1)..(25): SEQ ID NO: 4435; WAN024AHQ_at; Start 73; Stop 97
taagtgagactactgtaatggaata

SEQ ID NO: 55051 - DNA, 25 bp, Artificial
  probe
  misc_feature (1)..(25): SEQ ID NO: 4435; WAN024AHQ_at; Start 38; Stop 62
tttcttactagagaagctactggaa

SEQ ID NO: 55052 - DNA, 25 bp, Artificial
  probe
  misc_feature (1)..(25): SEQ ID NO: 4435; WAN024AHQ_at; Start 69; Stop 93
taaataagtgagactactgtaatgg

SEQ ID NO: 55053 - DNA, 25 bp, Artificial
  probe
  misc_feature (1)..(25): SEQ ID NO: 4435; WAN024AHQ_at; Start 30; Stop 54
tccagccttttcttactagagaagc

SEQ ID NO: 55054 - DNA, 25 bp, Artificial
  probe
  misc_feature (1)..(25): SEQ ID NO: 4435; WAN024AHQ_at; Start 37; Stop 61
ttttcttactagagaagctactgga

SEQ ID NO: 55055 - DNA, 25 bp, Artificial
  probe
  misc_feature (1)..(25): SEQ ID NO: 4435; WAN024AHQ_at; Start 29; Stop 53
ttccagccttttcttactagagaag

SEQ ID NO: 55056 - DNA, 25 bp, Artificial
  probe
  misc_feature (1)..(25): SEQ ID NO: 4435; WAN024AHQ_at; Start 53; Stop 77
gctactggaaatagcctaaataagt

SEQ ID NO: 55057 - DNA, 25 bp, Artificial
  probe
  misc_feature (1)..(25): SEQ ID NO: 4435; WAN024AHQ_at; Start 34; Stop 58
gccttttcttactagagaagctact

SEQ ID NO: 55058 - DNA, 25 bp, Artificial
  probe
  misc_feature (1)..(25): SEQ ID NO: 4435; WAN024AHQ_at; Start 11; Stop 35
gaggttggaactataaaattccagc

SEQ ID NO: 55059 - DNA, 25 bp, Artificial
  probe
  misc_feature (1)..(25): SEQ ID NO: 4435; WAN024AHQ_at; Start 75; Stop 99
agtgagactactgtaatggaataaa

SEQ ID NO: 55060 - DNA, 25 bp, Artificial
  probe
  misc_feature (1)..(25): SEQ ID NO: 4435; WAN024AHQ_at; Start 1; Stop 25
taactgaaaagaggttggaactata

SEQ ID NO: 55061 - DNA, 25 bp, Artificial
  probe
  misc_feature (1)..(25): SEQ ID NO: 4435; WAN024AHQ_at; Start 59; Stop 83
ggaaatagcctaaataagtgagact

SEQ ID NO: 55062 - DNA, 25 bp, Artificial
  probe
  misc_feature (1)..(25): SEQ ID NO: 4847; WAN024AHR_at; Start 4; Stop 28
tatgatttaattataccactttaat

SEQ ID NO: 55063 - DNA, 25 bp, Artificial
  probe
  misc_feature (1)..(25): SEQ ID NO: 4847; WAN024AHR_at; Start 1; Stop 25
ttctatgatttaattataccacttt

SEQ ID NO: 55064 - DNA, 25 bp, Artificial
  probe
  misc_feature (1)..(25): SEQ ID NO: 4847; WAN024AHR_at; Start 2; Stop 26
tctatgatttaattataccacttta

SEQ ID NO: 55065 - DNA, 25 bp, Artificial
  probe
  misc_feature (1)..(25): SEQ ID NO: 4847; WAN024AHR_at; Start 3; Stop 27
ctatgatttaattataccactttaa

SEQ ID NO: 55066 - DNA, 25 bp, Artificial
  probe
  misc_feature (1)..(25): SEQ ID NO: 3741; WAN024AHS_at; Start 62; Stop 86
attaaagtggtataattaaatcata

SEQ ID NO: 55067 - DNA, 25 bp, Artificial
  probe
  misc_feature (1)..(25): SEQ ID NO: 3741; WAN024AHS_at; Start 64; Stop 88
taaagtggtataattaaatcataga

SEQ ID NO: 55068 - DNA, 25 bp, Artificial
  probe
  misc_feature (1)..(25): SEQ ID NO: 3741; WAN024AHS_at; Start 63; Stop 87
ttaaagtggtataattaaatcatag

SEQ ID NO: 55069 - DNA, 25 bp, Artificial
  probe
  misc_feature (1)..(25): SEQ ID NO: 3741; WAN024AHS_at; Start 61; Stop 85
aattaaagtggtataattaaatcat

SEQ ID NO: 55070 - DNA, 25 bp, Artificial
  probe
  misc_feature (1)..(25): SEQ ID NO: 3741; WAN024AHS_at; Start 65; Stop 89
aaagtggtataattaaatcatagaa

SEQ ID NO: 55071 - DNA, 25 bp, Artificial
  probe
  misc_feature (1)..(25): SEQ ID NO: 4664; WAN024AHT_at; Start 6; Stop 30
ggaagctcttttcttctgcgcatct

SEQ ID NO: 55072 - DNA, 25 bp, Artificial
  probe
  misc_feature (1)..(25): SEQ ID NO: 4664; WAN024AHT_at; Start 19; Stop 43
ttctgcgcatctcttttcaaaaact

SEQ ID NO: 55073 - DNA, 25 bp, Artificial
  probe
  misc_feature (1)..(25): SEQ ID NO: 4664; WAN024AHT_at; Start 17; Stop 41
tcttctgcgcatctcttttcaaaaa

SEQ ID NO: 55074 - DNA, 25 bp, Artificial
  probe
  misc_feature (1)..(25): SEQ ID NO: 4664; WAN024AHT_at; Start 23; Stop 47
gcgcatctcttttcaaaaactcttg

SEQ ID NO: 55075 - DNA, 25 bp, Artificial
  probe
  misc_feature (1)..(25): SEQ ID NO: 4664; WAN024AHT_at; Start 67; Stop 91
acaatctcctcataaaagcagctat

SEQ ID NO: 55076 - DNA, 25 bp, Artificial
  probe
  misc_feature (1)..(25): SEQ ID NO: 4664; WAN024AHT_at; Start 25; Stop 49
gcatctcttttcaaaaactcttgta

SEQ ID NO: 55077 - DNA, 25 bp, Artificial
  probe
  misc_feature (1)..(25): SEQ ID NO: 4664; WAN024AHT_at; Start 4; Stop 28
ttggaagctcttttcttctgcgcat

SEQ ID NO: 55078 - DNA, 25 bp, Artificial
  probe
  misc_feature (1)..(25): SEQ ID NO: 4664; WAN024AHT_at; Start 8; Stop 32
aagctcttttcttctgcgcatctct

SEQ ID NO: 55079 - DNA, 25 bp, Artificial
  probe
  misc_feature (1)..(25): SEQ ID NO: 4664; WAN024AHT_at; Start 72; Stop 96
ctcctcataaaagcagctattttac

SEQ ID NO: 55080 - DNA, 25 bp, Artificial
  probe
  misc_feature (1)..(25): SEQ ID NO: 4664; WAN024AHT_at; Start 48; Stop 72
tagcaaaaaaggagattttacaatc

SEQ ID NO: 55081 - DNA, 25 bp, Artificial
  probe
  misc_feature (1)..(25): SEQ ID NO: 4664; WAN024AHT_at; Start 71; Stop 95
tctcctcataaaagcagctatttta

SEQ ID NO: 55082 - DNA, 25 bp, Artificial
  probe
  misc_feature (1)..(25): SEQ ID NO: 4664; WAN024AHT_at; Start 3; Stop 27
tttggaagctcttttcttctgcgca

SEQ ID NO: 55083 - DNA, 25 bp, Artificial
  probe
  misc_feature (1)..(25): SEQ ID NO: 4664; WAN024AHT_at; Start 20; Stop 44
tctgcgcatctcttttcaaaaactc

SEQ ID NO: 55084 - DNA, 25 bp, Artificial
  probe
  misc_feature (1)..(25): SEQ ID NO: 4664; WAN024AHT_at; Start 30; Stop 54
tcttttcaaaaactcttgtagcaaa

SEQ ID NO: 55085 - DNA, 25 bp, Artificial
  probe
  misc_feature (1)..(25): SEQ ID NO: 4664; WAN024AHT_at; Start 42; Stop 66
ctcttgtagcaaaaaaggagatttt

SEQ ID NO: 55086 - DNA, 25 bp, Artificial
  probe
  misc_feature (1)..(25): SEQ ID NO: 4664; WAN024AHT_at; Start 1; Stop 25
tctttggaagctcttttcttctgcg

SEQ ID NO: 55087 - DNA, 25 bp, Artificial
  probe
  misc_feature (1)..(25): SEQ ID NO: 4664; WAN024AHT_at; Start 69; Stop 93
aatctcctcataaaagcagctattt

SEQ ID NO: 55088 - DNA, 25 bp, Artificial
  probe
  misc_feature (1)..(25): SEQ ID NO: 4664; WAN024AHT_at; Start 14; Stop 38
ttttcttctgcgcatctcttttcaa

SEQ ID NO: 55089 - DNA, 25 bp, Artificial
  probe
  misc_feature (1)..(25): SEQ ID NO: 4664; WAN024AHT_at; Start 68; Stop 92
caatctcctcataaaagcagctatt

SEQ ID NO: 55090 - DNA, 25 bp, Artificial
  probe
  misc_feature (1)..(25): SEQ ID NO: 4664; WAN024AHT_at; Start 41; Stop 65
actcttgtagcaaaaaaggagattt

SEQ ID NO: 55091 - DNA, 25 bp, Artificial
  probe
  misc_feature (1)..(25): SEQ ID NO: 4664; WAN024AHT_at; Start 50; Stop 74
gcaaaaaaggagattttacaatctc

SEQ ID NO: 55092 - DNA, 25 bp, Artificial
  probe
  misc_feature (1)..(25): SEQ ID NO: 4664; WAN024AHT_at; Start 7; Stop 31
gaagctcttttcttctgcgcatctc

SEQ ID NO: 55093 - DNA, 25 bp, Artificial
  probe
  misc_feature (1)..(25): SEQ ID NO: 4664; WAN024AHT_at; Start 28; Stop 52
tctcttttcaaaaactcttgtagca

SEQ ID NO: 55094 - DNA, 25 bp, Artificial
  probe
  misc_feature (1)..(25): SEQ ID NO: 4664; WAN024AHT_at; Start 43; Stop 67
tcttgtagcaaaaaaggagatttta

SEQ ID NO: 55095 - DNA, 25 bp, Artificial
  probe
  misc_feature (1)..(25): SEQ ID NO: 4664; WAN024AHT_at; Start 66; Stop 90
tacaatctcctcataaaagcagcta

SEQ ID NO: 55096 - DNA, 25 bp, Artificial
  probe
  misc_feature (1)..(25): SEQ ID NO: 4664; WAN024AHT_at; Start 5; Stop 29
tggaagctcttttcttctgcgcatc

SEQ ID NO: 55097 - DNA, 25 bp, Artificial
  probe
  misc_feature (1)..(25): SEQ ID NO: 4664; WAN024AHT_at; Start 2; Stop 26
ctttggaagctcttttcttctgcgc

SEQ ID NO: 55098 - DNA, 25 bp, Artificial
  probe
  misc_feature (1)..(25): SEQ ID NO: 4664; WAN024AHT_at; Start 39; Stop 63
aaactcttgtagcaaaaaaggagat

SEQ ID NO: 55099 - DNA, 25 bp, Artificial
  probe
  misc_feature (1)..(25): SEQ ID NO: 4664; WAN024AHT_at; Start 10; Stop 34
gctcttttcttctgcgcatctcttt

SEQ ID NO: 55100 - DNA, 25 bp, Artificial
  probe
  misc_feature (1)..(25): SEQ ID NO: 4664; WAN024AHT_at; Start 45; Stop 69
ttgtagcaaaaaaggagattttaca

SEQ ID NO: 55101 - DNA, 25 bp, Artificial
  probe
  misc_feature (1)..(25): SEQ ID NO: 4664; WAN024AHT_at; Start 64; Stop 88
tttacaatctcctcataaaagcagc

SEQ ID NO: 55102 - DNA, 25 bp, Artificial
  probe
  misc_feature (1)..(25): SEQ ID NO: 4664; WAN024AHT_at; Start 40; Stop 64
aactcttgtagcaaaaaaggagatt

SEQ ID NO: 55103 - DNA, 25 bp, Artificial
  probe
  misc_feature (1)..(25): SEQ ID NO: 4664; WAN024AHT_at; Start 65; Stop 89
ttacaatctcctcataaaagcagct

SEQ ID NO: 55104 - DNA, 25 bp, Artificial
  probe
  misc_feature (1)..(25): SEQ ID NO: 4664; WAN024AHT_at; Start 18; Stop 42
cttctgcgcatctcttttcaaaaac

SEQ ID NO: 55105 - DNA, 25 bp, Artificial
  probe
  misc_feature (1)..(25): SEQ ID NO: 3784; WAN024AHU_at; Start 8; Stop 32
agctgcttttatgaggagattgtaa

SEQ ID NO: 55106 - DNA, 25 bp, Artificial
  probe
  misc_feature (1)..(25): SEQ ID NO: 3784; WAN024AHU_at; Start 14; Stop 38
ttttatgaggagattgtaaaatctc

SEQ ID NO: 55107 - DNA, 25 bp, Artificial
  probe
  misc_feature (1)..(25): SEQ ID NO: 3784; WAN024AHU_at; Start 32; Stop 56
aaatctccttttttgctacaagagt

SEQ ID NO: 55108 - DNA, 25 bp, Artificial
  probe
  misc_feature (1)..(25): SEQ ID NO: 3784; WAN024AHU_at; Start 10; Stop 34
ctgcttttatgaggagattgtaaaa

SEQ ID NO: 55109 - DNA, 25 bp, Artificial
  probe
  misc_feature (1)..(25): SEQ ID NO: 3784; WAN024AHU_at; Start 17; Stop 41
tatgaggagattgtaaaatctcctt

SEQ ID NO: 55110 - DNA, 25 bp, Artificial
  probe
  misc_feature (1)..(25): SEQ ID NO: 3784; WAN024AHU_at; Start 9; Stop 33
gctgcttttatgaggagattgtaaa

SEQ ID NO: 55111 - DNA, 25 bp, Artificial
  probe
  misc_feature (1)..(25): SEQ ID NO: 3784; WAN024AHU_at; Start 5; Stop 29
aatagctgcttttatgaggagattg

SEQ ID NO: 55112 - DNA, 25 bp, Artificial
  probe
  misc_feature (1)..(25): SEQ ID NO: 3784; WAN024AHU_at; Start 15; Stop 39
tttatgaggagattgtaaaatctcc

SEQ ID NO: 55113 - DNA, 25 bp, Artificial
  probe
  misc_feature (1)..(25): SEQ ID NO: 3784; WAN024AHU_at; Start 12; Stop 36
gcttttatgaggagattgtaaaatc

SEQ ID NO: 55114 - DNA, 25 bp, Artificial
  probe
  misc_feature (1)..(25): SEQ ID NO: 3784; WAN024AHU_at; Start 33; Stop 57
aatctccttttttgctacaagagtt

SEQ ID NO: 55115 - DNA, 25 bp, Artificial
  probe
  misc_feature (1)..(25): SEQ ID NO: 3784; WAN024AHU_at; Start 18; Stop 42
atgaggagattgtaaaatctccttt

SEQ ID NO: 55116 - DNA, 25 bp, Artificial
  probe
  misc_feature (1)..(25): SEQ ID NO: 3784; WAN024AHU_at; Start 2; Stop 26
taaaatagctgcttttatgaggaga

SEQ ID NO: 55117 - DNA, 25 bp, Artificial
  probe
  misc_feature (1)..(25): SEQ ID NO: 3784; WAN024AHU_at; Start 31; Stop 55
aaaatctccttttttgctacaagag

SEQ ID NO: 55118 - DNA, 25 bp, Artificial
  probe
  misc_feature (1)..(25): SEQ ID NO: 3784; WAN024AHU_at; Start 11; Stop 35
tgcttttatgaggagattgtaaaat

SEQ ID NO: 55119 - DNA, 25 bp, Artificial
  probe
  misc_feature (1)..(25): SEQ ID NO: 3784; WAN024AHU_at; Start 34; Stop 58
atctccttttttgctacaagagttt

SEQ ID NO: 55120 - DNA, 25 bp, Artificial
  probe
  misc_feature (1)..(25): SEQ ID NO: 3784; WAN024AHU_at; Start 6; Stop 30
atagctgcttttatgaggagattgt

SEQ ID NO: 55121 - DNA, 25 bp, Artificial
  probe
  misc_feature (1)..(25): SEQ ID NO: 3784; WAN024AHU_at; Start 3; Stop 27
aaaatagctgcttttatgaggagat

SEQ ID NO: 55122 - DNA, 25 bp, Artificial
  probe
  misc_feature (1)..(25): SEQ ID NO: 3784; WAN024AHU_at; Start 4; Stop 28
aaatagctgcttttatgaggagatt

SEQ ID NO: 55123 - DNA, 25 bp, Artificial
  probe
  misc_feature (1)..(25): SEQ ID NO: 3784; WAN024AHU_at; Start 13; Stop 37
cttttatgaggagattgtaaaatct

SEQ ID NO: 55124 - DNA, 25 bp, Artificial
  probe
  misc_feature (1)..(25): SEQ ID NO: 3784; WAN024AHU_at; Start 16; Stop 40
ttatgaggagattgtaaaatctcct

SEQ ID NO: 55125 - DNA, 25 bp, Artificial
  probe
  misc_feature (1)..(25): SEQ ID NO: 3784; WAN024AHU_at; Start 1; Stop 25
gtaaaatagctgcttttatgaggag

SEQ ID NO: 55126 - DNA, 25 bp, Artificial
  probe
  misc_feature (1)..(25): SEQ ID NO: 3784; WAN024AHU_at; Start 19; Stop 43
tgaggagattgtaaaatctcctttt

SEQ ID NO: 55127 - DNA, 25 bp, Artificial
  probe
  misc_feature (1)..(25): SEQ ID NO: 3784; WAN024AHU_at; Start 7; Stop 31
tagctgcttttatgaggagattgta

SEQ ID NO: 55128 - DNA, 25 bp, Artificial
  probe
  misc_feature (1)..(25): SEQ ID NO: 3559; WAN024AHV_at; Start 136; Stop 160
ttgacgcaaatcgtgaaaaattagc

SEQ ID NO: 55129 - DNA, 25 bp, Artificial
  probe
  misc_feature (1)..(25): SEQ ID NO: 3559; WAN024AHV_at; Start 141; Stop 165
gcaaatcgtgaaaaattagcttctt

SEQ ID NO: 55130 - DNA, 25 bp, Artificial
  probe
  misc_feature (1)..(25): SEQ ID NO: 3559; WAN024AHV_at; Start 125; Stop 149
tcgtcagaaaattgacgcaaatcgt

SEQ ID NO: 55131 - DNA, 25 bp, Artificial
  probe
  misc_feature (1)..(25): SEQ ID NO: 3559; WAN024AHV_at; Start 154; Stop 178
aattagcttctttcagggggtctct

SEQ ID NO: 55132 - DNA, 25 bp, Artificial
  probe
  misc_feature (1)..(25): SEQ ID NO: 3559; WAN024AHV_at; Start 190; Stop 214
gggctagaggaagagattgccatct

SEQ ID NO: 55133 - DNA, 25 bp, Artificial
  probe
  misc_feature (1)..(25): SEQ ID NO: 3559; WAN024AHV_at; Start 172; Stop 196
ggtctctttgacctcgaagggctag

SEQ ID NO: 55134 - DNA, 25 bp, Artificial
  probe
  misc_feature (1)..(25): SEQ ID NO: 3559; WAN024AHV_at; Start 99; Stop 123
ggagtatttatggacatttcagtaa

SEQ ID NO: 55135 - DNA, 25 bp, Artificial
  probe
  misc_feature (1)..(25): SEQ ID NO: 3559; WAN024AHV_at; Start 188; Stop 212
aagggctagaggaagagattgccat

SEQ ID NO: 55136 - DNA, 25 bp, Artificial
  probe
  misc_feature (1)..(25): SEQ ID NO: 3559; WAN024AHV_at; Start 178; Stop 202
tttgacctcgaagggctagaggaag

SEQ ID NO: 55137 - DNA, 25 bp, Artificial
  probe
  misc_feature (1)..(25): SEQ ID NO: 3559; WAN024AHV_at; Start 128; Stop 152
tcagaaaattgacgcaaatcgtgaa

SEQ ID NO: 55138 - DNA, 25 bp, Artificial
  probe
  misc_feature (1)..(25): SEQ ID NO: 3559; WAN024AHV_at; Start 60; Stop 84
gaaatgataaaatatgctataatga

SEQ ID NO: 55139 - DNA, 25 bp, Artificial
  probe
  misc_feature (1)..(25): SEQ ID NO: 3559; WAN024AHV_at; Start 12; Stop 36
caaaggcttcttttttcatgaaaag

SEQ ID NO: 55140 - DNA, 25 bp, Artificial
  probe
  misc_feature (1)..(25): SEQ ID NO: 3559; WAN024AHV_at; Start 147; Stop 171
cgtgaaaaattagcttctttcaggg

SEQ ID NO: 55141 - DNA, 25 bp, Artificial
  probe
  misc_feature (1)..(25): SEQ ID NO: 3559; WAN024AHV_at; Start 140; Stop 164
cgcaaatcgtgaaaaattagcttct

SEQ ID NO: 55142 - DNA, 25 bp, Artificial
  probe
  misc_feature (1)..(25): SEQ ID NO: 3559; WAN024AHV_at; Start 138; Stop 162
gacgcaaatcgtgaaaaattagctt

SEQ ID NO: 55143 - DNA, 25 bp, Artificial
  probe
  misc_feature (1)..(25): SEQ ID NO: 3559; WAN024AHV_at; Start 183; Stop 207
cctcgaagggctagaggaagagatt

SEQ ID NO: 55144 - DNA, 25 bp, Artificial
  probe
  misc_feature (1)..(25): SEQ ID NO: 3559; WAN024AHV_at; Start 37; Stop 61
gggattagagcaaaagatggaaaga

SEQ ID NO: 55145 - DNA, 25 bp, Artificial
  probe
  misc_feature (1)..(25): SEQ ID NO: 3559; WAN024AHV_at; Start 118; Stop 142
cagtaattcgtcagaaaattgacgc

SEQ ID NO: 55146 - DNA, 25 bp, Artificial
  probe
  misc_feature (1)..(25): SEQ ID NO: 3559; WAN024AHV_at; Start 120; Stop 144
gtaattcgtcagaaaattgacgcaa

SEQ ID NO: 55147 - DNA, 25 bp, Artificial
  probe
  misc_feature (1)..(25): SEQ ID NO: 3559; WAN024AHV_at; Start 44; Stop 68
gagcaaaagatggaaagaaatgata

SEQ ID NO: 55148 - DNA, 25 bp, Artificial
  probe
  misc_feature (1)..(25): SEQ ID NO: 3559; WAN024AHV_at; Start 52; Stop 76
gatggaaagaaatgataaaatatgc

SEQ ID NO: 55149 - DNA, 25 bp, Artificial
  probe
  misc_feature (1)..(25): SEQ ID NO: 3559; WAN024AHV_at; Start 109; Stop 133
tggacatttcagtaattcgtcagaa

SEQ ID NO: 55150 - DNA, 25 bp, Artificial
  probe
  misc_feature (1)..(25): SEQ ID NO: 3559; WAN024AHV_at; Start 9; Stop 33
gcccaaaggcttcttttttcatgaa

SEQ ID NO: 55151 - DNA, 25 bp, Artificial
  probe
  misc_feature (1)..(25): SEQ ID NO: 3559; WAN024AHV_at; Start 174; Stop 198
tctctttgacctcgaagggctagag

SEQ ID NO: 55152 - DNA, 25 bp, Artificial
  probe
  misc_feature (1)..(25): SEQ ID NO: 3559; WAN024AHV_at; Start 176; Stop 200
tctttgacctcgaagggctagagga

SEQ ID NO: 55153 - DNA, 25 bp, Artificial
  probe
  misc_feature (1)..(25): SEQ ID NO: 3559; WAN024AHV_at; Start 75; Stop 99
gctataatgaaataatgtaaaaaag

SEQ ID NO: 55154 - DNA, 25 bp, Artificial
  probe
  misc_feature (1)..(25): SEQ ID NO: 3559; WAN024AHV_at; Start 7; Stop 31
aagcccaaaggcttcttttttcatg

SEQ ID NO: 55155 - DNA, 25 bp, Artificial
  probe
  misc_feature (1)..(25): SEQ ID NO: 3559; WAN024AHV_at; Start 111; Stop 135
gacatttcagtaattcgtcagaaaa

SEQ ID NO: 55156 - DNA, 25 bp, Artificial
  probe
  misc_feature (1)..(25): SEQ ID NO: 3559; WAN024AHV_at; Start 173; Stop 197
gtctctttgacctcgaagggctaga

SEQ ID NO: 55157 - DNA, 25 bp, Artificial
  probe
  misc_feature (1)..(25): SEQ ID NO: 3559; WAN024AHV_at; Start 131; Stop 155
gaaaattgacgcaaatcgtgaaaaa

SEQ ID NO: 55158 - DNA, 25 bp, Artificial
  probe
  misc_feature (1)..(25): SEQ ID NO: 3559; WAN024AHV_at; Start 24; Stop 48
ttttcatgaaaaggggattagagca

SEQ ID NO: 55159 - DNA, 25 bp, Artificial
  probe
  misc_feature (1)..(25): SEQ ID NO: 3559; WAN024AHV_at; Start 107; Stop 131
tatggacatttcagtaattcgtcag

SEQ ID NO: 55160 - DNA, 25 bp, Artificial
  probe
  misc_feature (1)..(25): SEQ ID NO: 3559; WAN024AHV_at; Start 171; Stop 195
gggtctctttgacctcgaagggcta

SEQ ID NO: 55161 - DNA, 25 bp, Artificial
  probe
  misc_feature (1)..(25): SEQ ID NO: 3559; WAN024AHV_at; Start 96; Stop 120
aaaggagtatttatggacatttcag

SEQ ID NO: 55162 - DNA, 25 bp, Artificial
  probe
  misc_feature (1)..(25): SEQ ID NO: 432; WAN024AHW_at; Start 183; Stop 207
tcatgaaaaaagaagcctttgggct

SEQ ID NO: 55163 - DNA, 25 bp, Artificial
  probe
  misc_feature (1)..(25): SEQ ID NO: 432; WAN024AHW_at; Start 167; Stop 191
tgctctaatccccttttcatgaaaa

SEQ ID NO: 55164 - DNA, 25 bp, Artificial
  probe
  misc_feature (1)..(25): SEQ ID NO: 432; WAN024AHW_at; Start 127; Stop 151
tatttcattatagcatattttatca

SEQ ID NO: 55165 - DNA, 25 bp, Artificial
  probe
  misc_feature (1)..(25): SEQ ID NO: 432; WAN024AHW_at; Start 52; Stop 76
gaagctaatttttcacgatttgcgt

SEQ ID NO: 55166 - DNA, 25 bp, Artificial
  probe
  misc_feature (1)..(25): SEQ ID NO: 432; WAN024AHW_at; Start 86; Stop 110
gacgaattactgaaatgtccataaa

SEQ ID NO: 55167 - DNA, 25 bp, Artificial
  probe
  misc_feature (1)..(25): SEQ ID NO: 432; WAN024AHW_at; Start 92; Stop 116
ttactgaaatgtccataaatactcc

SEQ ID NO: 55168 - DNA, 25 bp, Artificial
  probe
  misc_feature (1)..(25): SEQ ID NO: 432; WAN024AHW_at; Start 67; Stop 91
cgatttgcgtcaattttctgacgaa

SEQ ID NO: 55169 - DNA, 25 bp, Artificial
  probe
  misc_feature (1)..(25): SEQ ID NO: 432; WAN024AHW_at; Start 182; Stop 206
ttcatgaaaaaagaagcctttgggc

SEQ ID NO: 55170 - DNA, 25 bp, Artificial
  probe
  misc_feature (1)..(25): SEQ ID NO: 432; WAN024AHW_at; Start 65; Stop 89
cacgatttgcgtcaattttctgacg

SEQ ID NO: 55171 - DNA, 25 bp, Artificial
  probe
  misc_feature (1)..(25): SEQ ID NO: 432; WAN024AHW_at; Start 2; Stop 26
gatggcaatctcttcctctagccct

SEQ ID NO: 55172 - DNA, 25 bp, Artificial
  probe
  misc_feature (1)..(25): SEQ ID NO: 432; WAN024AHW_at; Start 19; Stop 43
ctagcccttcgaggtcaaagagacc

SEQ ID NO: 55173 - DNA, 25 bp, Artificial
  probe
  misc_feature (1)..(25): SEQ ID NO: 432; WAN024AHW_at; Start 93; Stop 117
tactgaaatgtccataaatactcct

SEQ ID NO: 55174 - DNA, 25 bp, Artificial
  probe
  misc_feature (1)..(25): SEQ ID NO: 432; WAN024AHW_at; Start 83; Stop 107
tctgacgaattactgaaatgtccat

SEQ ID NO: 55175 - DNA, 25 bp, Artificial
  probe
  misc_feature (1)..(25): SEQ ID NO: 432; WAN024AHW_at; Start 81; Stop 105
tttctgacgaattactgaaatgtcc

SEQ ID NO: 55176 - DNA, 25 bp, Artificial
  probe
  misc_feature (1)..(25): SEQ ID NO: 432; WAN024AHW_at; Start 168; Stop 192
gctctaatccccttttcatgaaaaa

SEQ ID NO: 55177 - DNA, 25 bp, Artificial
  probe
  misc_feature (1)..(25): SEQ ID NO: 432; WAN024AHW_at; Start 34; Stop 58
caaagagaccccctgaaagaagcta

SEQ ID NO: 55178 - DNA, 25 bp, Artificial
  probe
  misc_feature (1)..(25): SEQ ID NO: 432; WAN024AHW_at; Start 50; Stop 74
aagaagctaatttttcacgatttgc

SEQ ID NO: 55179 - DNA, 25 bp, Artificial
  probe
  misc_feature (1)..(25): SEQ ID NO: 432; WAN024AHW_at; Start 139; Stop 163
gcatattttatcatttctttccatc

SEQ ID NO: 55180 - DNA, 25 bp, Artificial
  probe
  misc_feature (1)..(25): SEQ ID NO: 432; WAN024AHW_at; Start 158; Stop 182
tccatcttttgctctaatccccttt

SEQ ID NO: 55181 - DNA, 25 bp, Artificial
  probe
  misc_feature (1)..(25): SEQ ID NO: 432; WAN024AHW_at; Start 150; Stop 174
catttctttccatcttttgctctaa

SEQ ID NO: 55182 - DNA, 25 bp, Artificial
  probe
  misc_feature (1)..(25): SEQ ID NO: 432; WAN024AHW_at; Start 184; Stop 208
catgaaaaaagaagcctttgggctt

SEQ ID NO: 55183 - DNA, 25 bp, Artificial
  probe
  misc_feature (1)..(25): SEQ ID NO: 432; WAN024AHW_at; Start 44; Stop 68
ccctgaaagaagctaatttttcacg

SEQ ID NO: 55184 - DNA, 25 bp, Artificial
  probe
  misc_feature (1)..(25): SEQ ID NO: 432; WAN024AHW_at; Start 29; Stop 53
gaggtcaaagagaccccctgaaaga

SEQ ID NO: 55185 - DNA, 25 bp, Artificial
  probe
  misc_feature (1)..(25): SEQ ID NO: 432; WAN024AHW_at; Start 55; Stop 79
gctaatttttcacgatttgcgtcaa

SEQ ID NO: 55186 - DNA, 25 bp, Artificial
  probe
  misc_feature (1)..(25): SEQ ID NO: 432; WAN024AHW_at; Start 16; Stop 40
cctctagcccttcgaggtcaaagag

SEQ ID NO: 55187 - DNA, 25 bp, Artificial
  probe
  misc_feature (1)..(25): SEQ ID NO: 432; WAN024AHW_at; Start 164; Stop 188
ttttgctctaatccccttttcatga

SEQ ID NO: 55188 - DNA, 25 bp, Artificial
  probe
  misc_feature (1)..(25): SEQ ID NO: 432; WAN024AHW_at; Start 20; Stop 44
tagcccttcgaggtcaaagagaccc

SEQ ID NO: 55189 - DNA, 25 bp, Artificial
  probe
  misc_feature (1)..(25): SEQ ID NO: 432; WAN024AHW_at; Start 14; Stop 38
ttcctctagcccttcgaggtcaaag

SEQ ID NO: 55190 - DNA, 25 bp, Artificial
  probe
  misc_feature (1)..(25): SEQ ID NO: 432; WAN024AHW_at; Start 154; Stop 178
tctttccatcttttgctctaatccc

SEQ ID NO: 55191 - DNA, 25 bp, Artificial
  probe
  misc_feature (1)..(25): SEQ ID NO: 432; WAN024AHW_at; Start 8; Stop 32
aatctcttcctctagcccttcgagg

SEQ ID NO: 55192 - DNA, 25 bp, Artificial
  probe
  misc_feature (1)..(25): SEQ ID NO: 432; WAN024AHW_at; Start 75; Stop 99
gtcaattttctgacgaattactgaa

SEQ ID NO: 55193 - DNA, 25 bp, Artificial
  probe
  misc_feature (1)..(25): SEQ ID NO: 432; WAN024AHW_at; Start 24; Stop 48
ccttcgaggtcaaagagaccccctg

SEQ ID NO: 55194 - DNA, 25 bp, Artificial
  probe
  misc_feature (1)..(25): SEQ ID NO: 432; WAN024AHW_at; Start 18; Stop 42
tctagcccttcgaggtcaaagagac

SEQ ID NO: 55195 - DNA, 25 bp, Artificial
  probe
  misc_feature (1)..(25): SEQ ID NO: 432; WAN024AHW_at; Start 96; Stop 120
tgaaatgtccataaatactcctttt

SEQ ID NO: 55196 - DNA, 25 bp, Artificial
  probe
  misc_feature (1)..(25): SEQ ID NO: 3795; WAN024AHX_at; Start 137; Stop 161
tgcaacctaaactagtctcccagac

SEQ ID NO: 55197 - DNA, 25 bp, Artificial
  probe
  misc_feature (1)..(25): SEQ ID NO: 3795; WAN024AHX_at; Start 123; Stop 147
tcgcaatctttatctgcaacctaaa

SEQ ID NO: 55198 - DNA, 25 bp, Artificial
  probe
  misc_feature (1)..(25): SEQ ID NO: 3795; WAN024AHX_at; Start 120; Stop 144
gcttcgcaatctttatctgcaacct

SEQ ID NO: 55199 - DNA, 25 bp, Artificial
  probe
  misc_feature (1)..(25): SEQ ID NO: 3795; WAN024AHX_at; Start 127; Stop 151
aatctttatctgcaacctaaactag

SEQ ID NO: 55200 - DNA, 25 bp, Artificial
  probe
  misc_feature (1)..(25): SEQ ID NO: 3795; WAN024AHX_at; Start 151; Stop 175
gtctcccagactataatgatgatta

SEQ ID NO: 55201 - DNA, 25 bp, Artificial
  probe
  misc_feature (1)..(25): SEQ ID NO: 3795; WAN024AHX_at; Start 196; Stop 220
gactaaaacaatccactggattgtt

SEQ ID NO: 55202 - DNA, 25 bp, Artificial
  probe
  misc_feature (1)..(25): SEQ ID NO: 3795; WAN024AHX_at; Start 157; Stop 181
cagactataatgatgattacttcgt

SEQ ID NO: 55203 - DNA, 25 bp, Artificial
  probe
  misc_feature (1)..(25): SEQ ID NO: 3795; WAN024AHX_at; Start 132; Stop 156
ttatctgcaacctaaactagtctcc

SEQ ID NO: 55204 - DNA, 25 bp, Artificial
  probe
  misc_feature (1)..(25): SEQ ID NO: 3795; WAN024AHX_at; Start 152; Stop 176
tctcccagactataatgatgattac

SEQ ID NO: 55205 - DNA, 25 bp, Artificial
  probe
  misc_feature (1)..(25): SEQ ID NO: 3795; WAN024AHX_at; Start 125; Stop 149
gcaatctttatctgcaacctaaact

SEQ ID NO: 55206 - DNA, 25 bp, Artificial
  probe
  misc_feature (1)..(25): SEQ ID NO: 3795; WAN024AHX_at; Start 147; Stop 171
actagtctcccagactataatgatg

SEQ ID NO: 55207 - DNA, 25 bp, Artificial
  probe
  misc_feature (1)..(25): SEQ ID NO: 3795; WAN024AHX_at; Start 194; Stop 218
ccgactaaaacaatccactggattg

SEQ ID NO: 55208 - DNA, 25 bp, Artificial
  probe
  misc_feature (1)..(25): SEQ ID NO: 3795; WAN024AHX_at; Start 150; Stop 174
agtctcccagactataatgatgatt

SEQ ID NO: 55209 - DNA, 25 bp, Artificial
  probe
  misc_feature (1)..(25): SEQ ID NO: 3795; WAN024AHX_at; Start 156; Stop 180
ccagactataatgatgattacttcg

SEQ ID NO: 55210 - DNA, 25 bp, Artificial
  probe
  misc_feature (1)..(25): SEQ ID NO: 3795; WAN024AHX_at; Start 145; Stop 169
aaactagtctcccagactataatga

SEQ ID NO: 55211 - DNA, 25 bp, Artificial
  probe
  misc_feature (1)..(25): SEQ ID NO: 3795; WAN024AHX_at; Start 131; Stop 155
tttatctgcaacctaaactagtctc

SEQ ID NO: 55212 - DNA, 25 bp, Artificial
  probe
  misc_feature (1)..(25): SEQ ID NO: 3795; WAN024AHX_at; Start 140; Stop 164
aacctaaactagtctcccagactat

SEQ ID NO: 55213 - DNA, 25 bp, Artificial
  probe
  misc_feature (1)..(25): SEQ ID NO: 3795; WAN024AHX_at; Start 161; Stop 185
ctataatgatgattacttcgtaatc

SEQ ID NO: 55214 - DNA, 25 bp, Artificial
  probe
  misc_feature (1)..(25): SEQ ID NO: 3795; WAN024AHX_at; Start 55; Stop 79
ctatattgatgattacttcgtaatc

SEQ ID NO: 55215 - DNA, 25 bp, Artificial
  probe
  misc_feature (1)..(25): SEQ ID NO: 3795; WAN024AHX_at; Start 186; Stop 210
ttcatctgccgactaaaacaatcca

SEQ ID NO: 55216 - DNA, 25 bp, Artificial
  probe
  misc_feature (1)..(25): SEQ ID NO: 3795; WAN024AHX_at; Start 187; Stop 211
tcatctgccgactaaaacaatccac

SEQ ID NO: 55217 - DNA, 25 bp, Artificial
  probe
  misc_feature (1)..(25): SEQ ID NO: 3795; WAN024AHX_at; Start 149; Stop 173
tagtctcccagactataatgatgat

SEQ ID NO: 55218 - DNA, 25 bp, Artificial
  probe
  misc_feature (1)..(25): SEQ ID NO: 3795; WAN024AHX_at; Start 133; Stop 157
tatctgcaacctaaactagtctccc

SEQ ID NO: 55219 - DNA, 25 bp, Artificial
  probe
  misc_feature (1)..(25): SEQ ID NO: 3795; WAN024AHX_at; Start 129; Stop 153
tctttatctgcaacctaaactagtc

SEQ ID NO: 55220 - DNA, 25 bp, Artificial
  probe
  misc_feature (1)..(25): SEQ ID NO: 3795; WAN024AHX_at; Start 142; Stop 166
cctaaactagtctcccagactataa

SEQ ID NO: 55221 - DNA, 25 bp, Artificial
  probe
  misc_feature (1)..(25): SEQ ID NO: 3795; WAN024AHX_at; Start 155; Stop 179
cccagactataatgatgattacttc

SEQ ID NO: 55222 - DNA, 25 bp, Artificial
  probe
  misc_feature (1)..(25): SEQ ID NO: 3795; WAN024AHX_at; Start 153; Stop 177
ctcccagactataatgatgattact

SEQ ID NO: 55223 - DNA, 25 bp, Artificial
  probe
  misc_feature (1)..(25): SEQ ID NO: 3795; WAN024AHX_at; Start 195; Stop 219
cgactaaaacaatccactggattgt

SEQ ID NO: 55224 - DNA, 25 bp, Artificial
  probe
  misc_feature (1)..(25): SEQ ID NO: 3795; WAN024AHX_at; Start 138; Stop 162
gcaacctaaactagtctcccagact

SEQ ID NO: 55225 - DNA, 25 bp, Artificial
  probe
  misc_feature (1)..(25): SEQ ID NO: 3795; WAN024AHX_at; Start 135; Stop 159
tctgcaacctaaactagtctcccag

SEQ ID NO: 55226 - DNA, 25 bp, Artificial
  probe
  misc_feature (1)..(25): SEQ ID NO: 3795; WAN024AHX_at; Start 116; Stop 140
gattgcttcgcaatctttatctgca

SEQ ID NO: 55227 - DNA, 25 bp, Artificial
  probe
  misc_feature (1)..(25): SEQ ID NO: 3795; WAN024AHX_at; Start 119; Stop 143
tgcttcgcaatctttatctgcaacc

SEQ ID NO: 55228 - DNA, 25 bp, Artificial
  probe
  misc_feature (1)..(25): SEQ ID NO: 3795; WAN024AHX_at; Start 159; Stop 183
gactataatgatgattacttcgtaa

SEQ ID NO: 55229 - DNA, 25 bp, Artificial
  probe
  misc_feature (1)..(25): SEQ ID NO: 3795; WAN024AHX_at; Start 53; Stop 77
gactatattgatgattacttcgtaa

SEQ ID NO: 55230 - DNA, 25 bp, Artificial
  probe
  misc_feature (1)..(25): SEQ ID NO: 183; WAN024AHY_at; Start 45; Stop 69
gtaatcatcattatagtctgggaga

SEQ ID NO: 55231 - DNA, 25 bp, Artificial
  probe
  misc_feature (1)..(25): SEQ ID NO: 183; WAN024AHY_at; Start 56; Stop 80
tatagtctgggagactagtttaggt

SEQ ID NO: 55232 - DNA, 25 bp, Artificial
  probe
  misc_feature (1)..(25): SEQ ID NO: 183; WAN024AHY_at; Start 3; Stop 27
caatccagtggattgttttagtcgg

SEQ ID NO: 55233 - DNA, 25 bp, Artificial
  probe
  misc_feature (1)..(25): SEQ ID NO: 183; WAN024AHY_at; Start 68; Stop 92
gactagtttaggttgcagataaaga

SEQ ID NO: 55234 - DNA, 25 bp, Artificial
  probe
  misc_feature (1)..(25): SEQ ID NO: 183; WAN024AHY_at; Start 46; Stop 70
taatcatcattatagtctgggagac

SEQ ID NO: 55235 - DNA, 25 bp, Artificial
  probe
  misc_feature (1)..(25): SEQ ID NO: 183; WAN024AHY_at; Start 133; Stop 157
gcagatggagattacgaagtaatca

SEQ ID NO: 55236 - DNA, 25 bp, Artificial
  probe
  misc_feature (1)..(25): SEQ ID NO: 183; WAN024AHY_at; Start 27; Stop 51
gcagatgaagattacgaagtaatca

SEQ ID NO: 55237 - DNA, 25 bp, Artificial
  probe
  misc_feature (1)..(25): SEQ ID NO: 183; WAN024AHY_at; Start 42; Stop 66
gaagtaatcatcattatagtctggg

SEQ ID NO: 55238 - DNA, 25 bp, Artificial
  probe
  misc_feature (1)..(25): SEQ ID NO: 183; WAN024AHY_at; Start 49; Stop 73
tcatcattatagtctgggagactag

SEQ ID NO: 55239 - DNA, 25 bp, Artificial
  probe
  misc_feature (1)..(25): SEQ ID NO: 183; WAN024AHY_at; Start 61; Stop 85
tctgggagactagtttaggttgcag

SEQ ID NO: 55240 - DNA, 25 bp, Artificial
  probe
  misc_feature (1)..(25): SEQ ID NO: 183; WAN024AHY_at; Start 60; Stop 84
gtctgggagactagtttaggttgca

SEQ ID NO: 55241 - DNA, 25 bp, Artificial
  probe
  misc_feature (1)..(25): SEQ ID NO: 183; WAN024AHY_at; Start 81; Stop 105
tgcagataaagattgcgaagcaatc

SEQ ID NO: 55242 - DNA, 25 bp, Artificial
  probe
  misc_feature (1)..(25): SEQ ID NO: 183; WAN024AHY_at; Start 75; Stop 99
ttaggttgcagataaagattgcgaa

SEQ ID NO: 55243 - DNA, 25 bp, Artificial
  probe
  misc_feature (1)..(25): SEQ ID NO: 183; WAN024AHY_at; Start 66; Stop 90
gagactagtttaggttgcagataaa

SEQ ID NO: 55244 - DNA, 25 bp, Artificial
  probe
  misc_feature (1)..(25): SEQ ID NO: 183; WAN024AHY_at; Start 52; Stop 76
tcattatagtctgggagactagttt

SEQ ID NO: 55245 - DNA, 25 bp, Artificial
  probe
  misc_feature (1)..(25): SEQ ID NO: 183; WAN024AHY_at; Start 10; Stop 34
gtggattgttttagtcggcagatga

SEQ ID NO: 55246 - DNA, 25 bp, Artificial
  probe
  misc_feature (1)..(25): SEQ ID NO: 183; WAN024AHY_at; Start 41; Stop 65
cgaagtaatcatcattatagtctgg

SEQ ID NO: 55247 - DNA, 25 bp, Artificial
  probe
  misc_feature (1)..(25): SEQ ID NO: 183; WAN024AHY_at; Start 50; Stop 74
catcattatagtctgggagactagt

SEQ ID NO: 55248 - DNA, 25 bp, Artificial
  probe
  misc_feature (1)..(25): SEQ ID NO: 183; WAN024AHY_at; Start 82; Stop 106
gcagataaagattgcgaagcaatca

SEQ ID NO: 55249 - DNA, 25 bp, Artificial
  probe
  misc_feature (1)..(25): SEQ ID NO: 183; WAN024AHY_at; Start 62; Stop 86
ctgggagactagtttaggttgcaga

SEQ ID NO: 55250 - DNA, 25 bp, Artificial
  probe
  misc_feature (1)..(25): SEQ ID NO: 183; WAN024AHY_at; Start 76; Stop 100
taggttgcagataaagattgcgaag

SEQ ID NO: 55251 - DNA, 25 bp, Artificial
  probe
  misc_feature (1)..(25): SEQ ID NO: 183; WAN024AHY_at; Start 136; Stop 160
gatggagattacgaagtaatcatca

SEQ ID NO: 55252 - DNA, 25 bp, Artificial
  probe
  misc_feature (1)..(25): SEQ ID NO: 183; WAN024AHY_at; Start 78; Stop 102
ggttgcagataaagattgcgaagca

SEQ ID NO: 55253 - DNA, 25 bp, Artificial
  probe
  misc_feature (1)..(25): SEQ ID NO: 183; WAN024AHY_at; Start 70; Stop 94
ctagtttaggttgcagataaagatt

SEQ ID NO: 55254 - DNA, 25 bp, Artificial
  probe
  misc_feature (1)..(25): SEQ ID NO: 183; WAN024AHY_at; Start 64; Stop 88
gggagactagtttaggttgcagata

SEQ ID NO: 55255 - DNA, 25 bp, Artificial
  probe
  misc_feature (1)..(25): SEQ ID NO: 183; WAN024AHY_at; Start 30; Stop 54
gatgaagattacgaagtaatcatca

SEQ ID NO: 55256 - DNA, 25 bp, Artificial
  probe
  misc_feature (1)..(25): SEQ ID NO: 183; WAN024AHY_at; Start 47; Stop 71
aatcatcattatagtctgggagact

SEQ ID NO: 55257 - DNA, 25 bp, Artificial
  probe
  misc_feature (1)..(25): SEQ ID NO: 183; WAN024AHY_at; Start 44; Stop 68
agtaatcatcattatagtctgggag

SEQ ID NO: 55258 - DNA, 25 bp, Artificial
  probe
  misc_feature (1)..(25): SEQ ID NO: 183; WAN024AHY_at; Start 79; Stop 103
gttgcagataaagattgcgaagcaa

SEQ ID NO: 55259 - DNA, 25 bp, Artificial
  probe
  misc_feature (1)..(25): SEQ ID NO: 183; WAN024AHY_at; Start 11; Stop 35
tggattgttttagtcggcagatgaa

SEQ ID NO: 55260 - DNA, 25 bp, Artificial
  probe
  misc_feature (1)..(25): SEQ ID NO: 183; WAN024AHY_at; Start 65; Stop 89
ggagactagtttaggttgcagataa

SEQ ID NO: 55261 - DNA, 25 bp, Artificial
  probe
  misc_feature (1)..(25): SEQ ID NO: 183; WAN024AHY_at; Start 74; Stop 98
tttaggttgcagataaagattgcga

SEQ ID NO: 55262 - DNA, 25 bp, Artificial
  probe
  misc_feature (1)..(25): SEQ ID NO: 183; WAN024AHY_at; Start 59; Stop 83
agtctgggagactagtttaggttgc

SEQ ID NO: 55263 - DNA, 25 bp, Artificial
  probe
  misc_feature (1)..(25): SEQ ID NO: 183; WAN024AHY_at; Start 72; Stop 96
agtttaggttgcagataaagattgc

SEQ ID NO: 55264 - DNA, 25 bp, Artificial
  probe
  misc_feature (1)..(25): SEQ ID NO: 4608; WAN024AHZ_at; Start 26; Stop 50
ttgttggtcaaatgactgaagataa

SEQ ID NO: 55265 - DNA, 25 bp, Artificial
  probe
  misc_feature (1)..(25): SEQ ID NO: 4608; WAN024AHZ_at; Start 33; Stop 57
tcaaatgactgaagataagactatt

SEQ ID NO: 55266 - DNA, 25 bp, Artificial
  probe
  misc_feature (1)..(25): SEQ ID NO: 4608; WAN024AHZ_at; Start 28; Stop 52
gttggtcaaatgactgaagataaga

SEQ ID NO: 55267 - DNA, 25 bp, Artificial
  probe
  misc_feature (1)..(25): SEQ ID NO: 4608; WAN024AHZ_at; Start 32; Stop 56
gtcaaatgactgaagataagactat

SEQ ID NO: 55268 - DNA, 25 bp, Artificial
  probe
  misc_feature (1)..(25): SEQ ID NO: 4608; WAN024AHZ_at; Start 19; Stop 43
tttaattttgttggtcaaatgactg

SEQ ID NO: 55269 - DNA, 25 bp, Artificial
  probe
  misc_feature (1)..(25): SEQ ID NO: 4608; WAN024AHZ_at; Start 25; Stop 49
tttgttggtcaaatgactgaagata

SEQ ID NO: 55270 - DNA, 25 bp, Artificial
  probe
  misc_feature (1)..(25): SEQ ID NO: 4608; WAN024AHZ_at; Start 24; Stop 48
ttttgttggtcaaatgactgaagat

SEQ ID NO: 55271 - DNA, 25 bp, Artificial
  probe
  misc_feature (1)..(25): SEQ ID NO: 4608; WAN024AHZ_at; Start 27; Stop 51
tgttggtcaaatgactgaagataag

SEQ ID NO: 55272 - DNA, 25 bp, Artificial
  probe
  misc_feature (1)..(25): SEQ ID NO: 4608; WAN024AHZ_at; Start 21; Stop 45
taattttgttggtcaaatgactgaa

SEQ ID NO: 55273 - DNA, 25 bp, Artificial
  probe
  misc_feature (1)..(25): SEQ ID NO: 4608; WAN024AHZ_at; Start 31; Stop 55
ggtcaaatgactgaagataagacta

SEQ ID NO: 55274 - DNA, 25 bp, Artificial
  probe
  misc_feature (1)..(25): SEQ ID NO: 4608; WAN024AHZ_at; Start 34; Stop 58
caaatgactgaagataagactatta

SEQ ID NO: 55275 - DNA, 25 bp, Artificial
  probe
  misc_feature (1)..(25): SEQ ID NO: 4608; WAN024AHZ_at; Start 30; Stop 54
tggtcaaatgactgaagataagact

SEQ ID NO: 55276 - DNA, 25 bp, Artificial
  probe
  misc_feature (1)..(25): SEQ ID NO: 4608; WAN024AHZ_at; Start 22; Stop 46
aattttgttggtcaaatgactgaag

SEQ ID NO: 55277 - DNA, 25 bp, Artificial
  probe
  misc_feature (1)..(25): SEQ ID NO: 4608; WAN024AHZ_at; Start 29; Stop 53
ttggtcaaatgactgaagataagac

SEQ ID NO: 55278 - DNA, 25 bp, Artificial
  probe
  misc_feature (1)..(25): SEQ ID NO: 4608; WAN024AHZ_at; Start 20; Stop 44
ttaattttgttggtcaaatgactga

SEQ ID NO: 55279 - DNA, 25 bp, Artificial
  probe
  misc_feature (1)..(25): SEQ ID NO: 4608; WAN024AHZ_at; Start 23; Stop 47
attttgttggtcaaatgactgaaga

SEQ ID NO: 55280 - DNA, 25 bp, Artificial
  probe
  misc_feature (1)..(25): SEQ ID NO: 3631; WAN024AI2_at; Start 13; Stop 37
gtcttatcttcagtcatttgaccaa

SEQ ID NO: 55281 - DNA, 25 bp, Artificial
  probe
  misc_feature (1)..(25): SEQ ID NO: 3631; WAN024AI2_at; Start 15; Stop 39
cttatcttcagtcatttgaccaaca

SEQ ID NO: 55282 - DNA, 25 bp, Artificial
  probe
  misc_feature (1)..(25): SEQ ID NO: 3631; WAN024AI2_at; Start 12; Stop 36
agtcttatcttcagtcatttgacca

SEQ ID NO: 55283 - DNA, 25 bp, Artificial
  probe
  misc_feature (1)..(25): SEQ ID NO: 3631; WAN024AI2_at; Start 16; Stop 40
ttatcttcagtcatttgaccaacaa

SEQ ID NO: 55284 - DNA, 25 bp, Artificial
  probe
  misc_feature (1)..(25): SEQ ID NO: 3631; WAN024AI2_at; Start 20; Stop 44
cttcagtcatttgaccaacaaaatt

SEQ ID NO: 55285 - DNA, 25 bp, Artificial
  probe
  misc_feature (1)..(25): SEQ ID NO: 3631; WAN024AI2_at; Start 22; Stop 46
tcagtcatttgaccaacaaaattaa

SEQ ID NO: 55286 - DNA, 25 bp, Artificial
  probe
  misc_feature (1)..(25): SEQ ID NO: 3631; WAN024AI2_at; Start 18; Stop 42
atcttcagtcatttgaccaacaaaa

SEQ ID NO: 55287 - DNA, 25 bp, Artificial
  probe
  misc_feature (1)..(25): SEQ ID NO: 3631; WAN024AI2_at; Start 9; Stop 33
aatagtcttatcttcagtcatttga

SEQ ID NO: 55288 - DNA, 25 bp, Artificial
  probe
  misc_feature (1)..(25): SEQ ID NO: 3631; WAN024AI2_at; Start 11; Stop 35
tagtcttatcttcagtcatttgacc

SEQ ID NO: 55289 - DNA, 25 bp, Artificial
  probe
  misc_feature (1)..(25): SEQ ID NO: 3631; WAN024AI2_at; Start 21; Stop 45
ttcagtcatttgaccaacaaaatta

SEQ ID NO: 55290 - DNA, 25 bp, Artificial
  probe
  misc_feature (1)..(25): SEQ ID NO: 3631; WAN024AI2_at; Start 19; Stop 43
tcttcagtcatttgaccaacaaaat

SEQ ID NO: 55291 - DNA, 25 bp, Artificial
  probe
  misc_feature (1)..(25): SEQ ID NO: 3631; WAN024AI2_at; Start 10; Stop 34
atagtcttatcttcagtcatttgac

SEQ ID NO: 55292 - DNA, 25 bp, Artificial
  probe
  misc_feature (1)..(25): SEQ ID NO: 3631; WAN024AI2_at; Start 14; Stop 38
tcttatcttcagtcatttgaccaac

SEQ ID NO: 55293 - DNA, 25 bp, Artificial
  probe
  misc_feature (1)..(25): SEQ ID NO: 3631; WAN024AI2_at; Start 17; Stop 41
tatcttcagtcatttgaccaacaaa

SEQ ID NO: 55294 - DNA, 25 bp, Artificial
  probe
  misc_feature (1)..(25): SEQ ID NO: 3631; WAN024AI2_at; Start 23; Stop 47
cagtcatttgaccaacaaaattaaa

SEQ ID NO: 55295 - DNA, 25 bp, Artificial
  probe
  misc_feature (1)..(25): SEQ ID NO: 3631; WAN024AI2_at; Start 8; Stop 32
taatagtcttatcttcagtcatttg

SEQ ID NO: 55296 - DNA, 25 bp, Artificial
  probe
  misc_feature (1)..(25): SEQ ID NO: 5946; WAN024AI3_at; Start 4; Stop 28
tggaattccttctttcaatttattc

SEQ ID NO: 55297 - DNA, 25 bp, Artificial
  probe
  misc_feature (1)..(25): SEQ ID NO: 5946; WAN024AI3_at; Start 18; Stop 42
tcaatttattcttcttattatacca

SEQ ID NO: 55298 - DNA, 25 bp, Artificial
  probe
  misc_feature (1)..(25): SEQ ID NO: 5946; WAN024AI3_at; Start 19; Stop 43
caatttattcttcttattataccaa

SEQ ID NO: 55299 - DNA, 25 bp, Artificial
  probe
  misc_feature (1)..(25): SEQ ID NO: 5946; WAN024AI3_at; Start 17; Stop 41
ttcaatttattcttcttattatacc

SEQ ID NO: 55300 - DNA, 25 bp, Artificial
  probe
  misc_feature (1)..(25): SEQ ID NO: 170; WAN024AI4_at; Start 50; Stop 74
tataataagaagaataaattgaaag

SEQ ID NO: 55301 - DNA, 25 bp, Artificial
  probe
  misc_feature (1)..(25): SEQ ID NO: 170; WAN024AI4_at; Start 52; Stop 76
taataagaagaataaattgaaagaa

SEQ ID NO: 55302 - DNA, 25 bp, Artificial
  probe
  misc_feature (1)..(25): SEQ ID NO: 170; WAN024AI4_at; Start 51; Stop 75
ataataagaagaataaattgaaaga

SEQ ID NO: 55303 - DNA, 25 bp, Artificial
  probe
  misc_feature (1)..(25): SEQ ID NO: 170; WAN024AI4_at; Start 54; Stop 78
ataagaagaataaattgaaagaagg

SEQ ID NO: 55304 - DNA, 25 bp, Artificial
  probe
  misc_feature (1)..(25): SEQ ID NO: 170; WAN024AI4_at; Start 55; Stop 79
taagaagaataaattgaaagaagga

SEQ ID NO: 55305 - DNA, 25 bp, Artificial
  probe
  misc_feature (1)..(25): SEQ ID NO: 170; WAN024AI4_at; Start 57; Stop 81
agaagaataaattgaaagaaggaat

SEQ ID NO: 55306 - DNA, 25 bp, Artificial
  probe
  misc_feature (1)..(25): SEQ ID NO: 170; WAN024AI4_at; Start 47; Stop 71
tggtataataagaagaataaattga

SEQ ID NO: 55307 - DNA, 25 bp, Artificial
  probe
  misc_feature (1)..(25): SEQ ID NO: 170; WAN024AI4_at; Start 49; Stop 73
gtataataagaagaataaattgaaa

SEQ ID NO: 55308 - DNA, 25 bp, Artificial
  probe
  misc_feature (1)..(25): SEQ ID NO: 170; WAN024AI4_at; Start 48; Stop 72
ggtataataagaagaataaattgaa

SEQ ID NO: 55309 - DNA, 25 bp, Artificial
  probe
  misc_feature (1)..(25): SEQ ID NO: 170; WAN024AI4_at; Start 46; Stop 70
ttggtataataagaagaataaattg

SEQ ID NO: 55310 - DNA, 25 bp, Artificial
  probe
  misc_feature (1)..(25): SEQ ID NO: 170; WAN024AI4_at; Start 53; Stop 77
aataagaagaataaattgaaagaag

SEQ ID NO: 55311 - DNA, 25 bp, Artificial
  probe
  misc_feature (1)..(25): SEQ ID NO: 538; WAN024AI5_at; Start 15; Stop 39
agacagaacctttgtcaatgtataa

SEQ ID NO: 55312 - DNA, 25 bp, Artificial
  probe
  misc_feature (1)..(25): SEQ ID NO: 538; WAN024AI5_at; Start 20; Stop 44
gaacctttgtcaatgtataactgac

SEQ ID NO: 55313 - DNA, 25 bp, Artificial
  probe
  misc_feature (1)..(25): SEQ ID NO: 538; WAN024AI5_at; Start 10; Stop 34
aaaaaagacagaacctttgtcaatg

SEQ ID NO: 55314 - DNA, 25 bp, Artificial
  probe
  misc_feature (1)..(25): SEQ ID NO: 538; WAN024AI5_at; Start 24; Stop 48
ctttgtcaatgtataactgacaaag

SEQ ID NO: 55315 - DNA, 25 bp, Artificial
  probe
  misc_feature (1)..(25): SEQ ID NO: 538; WAN024AI5_at; Start 11; Stop 35
aaaaagacagaacctttgtcaatgt

SEQ ID NO: 55316 - DNA, 25 bp, Artificial
  probe
  misc_feature (1)..(25): SEQ ID NO: 538; WAN024AI5_at; Start 30; Stop 54
caatgtataactgacaaagatggag

SEQ ID NO: 55317 - DNA, 25 bp, Artificial
  probe
  misc_feature (1)..(25): SEQ ID NO: 538; WAN024AI5_at; Start 14; Stop 38
aagacagaacctttgtcaatgtata

SEQ ID NO: 55318 - DNA, 25 bp, Artificial
  probe
  misc_feature (1)..(25): SEQ ID NO: 538; WAN024AI5_at; Start 27; Stop 51
tgtcaatgtataactgacaaagatg

SEQ ID NO: 55319 - DNA, 25 bp, Artificial
  probe
  misc_feature (1)..(25): SEQ ID NO: 538; WAN024AI5_at; Start 28; Stop 52
gtcaatgtataactgacaaagatgg

SEQ ID NO: 55320 - DNA, 25 bp, Artificial
  probe
  misc_feature (1)..(25): SEQ ID NO: 538; WAN024AI5_at; Start 12; Stop 36
aaaagacagaacctttgtcaatgta

SEQ ID NO: 55321 - DNA, 25 bp, Artificial
  probe
  misc_feature (1)..(25): SEQ ID NO: 538; WAN024AI5_at; Start 19; Stop 43
agaacctttgtcaatgtataactga

SEQ ID NO: 55322 - DNA, 25 bp, Artificial
  probe
  misc_feature (1)..(25): SEQ ID NO: 538; WAN024AI5_at; Start 17; Stop 41
acagaacctttgtcaatgtataact

SEQ ID NO: 55323 - DNA, 25 bp, Artificial
  probe
  misc_feature (1)..(25): SEQ ID NO: 538; WAN024AI5_at; Start 29; Stop 53
tcaatgtataactgacaaagatgga

SEQ ID NO: 55324 - DNA, 25 bp, Artificial
  probe
  misc_feature (1)..(25): SEQ ID NO: 538; WAN024AI5_at; Start 16; Stop 40
gacagaacctttgtcaatgtataac

SEQ ID NO: 55325 - DNA, 25 bp, Artificial
  probe
  misc_feature (1)..(25): SEQ ID NO: 538; WAN024AI5_at; Start 21; Stop 45
aacctttgtcaatgtataactgaca

SEQ ID NO: 55326 - DNA, 25 bp, Artificial
  probe
  misc_feature (1)..(25): SEQ ID NO: 538; WAN024AI5_at; Start 13; Stop 37
aaagacagaacctttgtcaatgtat

SEQ ID NO: 55327 - DNA, 25 bp, Artificial
  probe
  misc_feature (1)..(25): SEQ ID NO: 538; WAN024AI5_at; Start 23; Stop 47
cctttgtcaatgtataactgacaaa

SEQ ID NO: 55328 - DNA, 25 bp, Artificial
  probe
  misc_feature (1)..(25): SEQ ID NO: 538; WAN024AI5_at; Start 22; Stop 46
acctttgtcaatgtataactgacaa

SEQ ID NO: 55329 - DNA, 25 bp, Artificial
  probe
  misc_feature (1)..(25): SEQ ID NO: 538; WAN024AI5_at; Start 25; Stop 49
tttgtcaatgtataactgacaaaga

SEQ ID NO: 55330 - DNA, 25 bp, Artificial
  probe
  misc_feature (1)..(25): SEQ ID NO: 538; WAN024AI5_at; Start 26; Stop 50
ttgtcaatgtataactgacaaagat

SEQ ID NO: 55331 - DNA, 25 bp, Artificial
  probe
  misc_feature (1)..(25): SEQ ID NO: 538; WAN024AI5_at; Start 31; Stop 55
aatgtataactgacaaagatggaga

SEQ ID NO: 55332 - DNA, 25 bp, Artificial
  probe
  misc_feature (1)..(25): SEQ ID NO: 538; WAN024AI5_at; Start 18; Stop 42
cagaacctttgtcaatgtataactg

SEQ ID NO: 55333 - DNA, 25 bp, Artificial
  probe
  misc_feature (1)..(25): SEQ ID NO: 406; WAN024AI6_at; Start 14; Stop 38
ctttgtcagttatacattgacaaag

SEQ ID NO: 55334 - DNA, 25 bp, Artificial
  probe
  misc_feature (1)..(25): SEQ ID NO: 406; WAN024AI6_at; Start 27; Stop 51
acattgacaaaggttctgtcttttt

SEQ ID NO: 55335 - DNA, 25 bp, Artificial
  probe
  misc_feature (1)..(25): SEQ ID NO: 406; WAN024AI6_at; Start 26; Stop 50
tacattgacaaaggttctgtctttt

SEQ ID NO: 55336 - DNA, 25 bp, Artificial
  probe
  misc_feature (1)..(25): SEQ ID NO: 406; WAN024AI6_at; Start 21; Stop 45
agttatacattgacaaaggttctgt

SEQ ID NO: 55337 - DNA, 25 bp, Artificial
  probe
  misc_feature (1)..(25): SEQ ID NO: 406; WAN024AI6_at; Start 19; Stop 43
tcagttatacattgacaaaggttct

SEQ ID NO: 55338 - DNA, 25 bp, Artificial
  probe
  misc_feature (1)..(25): SEQ ID NO: 406; WAN024AI6_at; Start 16; Stop 40
ttgtcagttatacattgacaaaggt

SEQ ID NO: 55339 - DNA, 25 bp, Artificial
  probe
  misc_feature (1)..(25): SEQ ID NO: 406; WAN024AI6_at; Start 17; Stop 41
tgtcagttatacattgacaaaggtt

SEQ ID NO: 55340 - DNA, 25 bp, Artificial
  probe
  misc_feature (1)..(25): SEQ ID NO: 406; WAN024AI6_at; Start 24; Stop 48
tatacattgacaaaggttctgtctt

SEQ ID NO: 55341 - DNA, 25 bp, Artificial
  probe
  misc_feature (1)..(25): SEQ ID NO: 406; WAN024AI6_at; Start 13; Stop 37
tctttgtcagttatacattgacaaa

SEQ ID NO: 55342 - DNA, 25 bp, Artificial
  probe
  misc_feature (1)..(25): SEQ ID NO: 406; WAN024AI6_at; Start 12; Stop 36
atctttgtcagttatacattgacaa

SEQ ID NO: 55343 - DNA, 25 bp, Artificial
  probe
  misc_feature (1)..(25): SEQ ID NO: 406; WAN024AI6_at; Start 9; Stop 33
tccatctttgtcagttatacattga

SEQ ID NO: 55344 - DNA, 25 bp, Artificial
  probe
  misc_feature (1)..(25): SEQ ID NO: 406; WAN024AI6_at; Start 10; Stop 34
ccatctttgtcagttatacattgac

SEQ ID NO: 55345 - DNA, 25 bp, Artificial
  probe
  misc_feature (1)..(25): SEQ ID NO: 406; WAN024AI6_at; Start 25; Stop 49
atacattgacaaaggttctgtcttt

SEQ ID NO: 55346 - DNA, 25 bp, Artificial
  probe
  misc_feature (1)..(25): SEQ ID NO: 406; WAN024AI6_at; Start 7; Stop 31
tctccatctttgtcagttatacatt

SEQ ID NO: 55347 - DNA, 25 bp, Artificial
  probe
  misc_feature (1)..(25): SEQ ID NO: 406; WAN024AI6_at; Start 23; Stop 47
ttatacattgacaaaggttctgtct

SEQ ID NO: 55348 - DNA, 25 bp, Artificial
  probe
  misc_feature (1)..(25): SEQ ID NO: 406; WAN024AI6_at; Start 28; Stop 52
cattgacaaaggttctgtctttttt

SEQ ID NO: 55349 - DNA, 25 bp, Artificial
  probe
  misc_feature (1)..(25): SEQ ID NO: 406; WAN024AI6_at; Start 11; Stop 35
catctttgtcagttatacattgaca

SEQ ID NO: 55350 - DNA, 25 bp, Artificial
  probe
  misc_feature (1)..(25): SEQ ID NO: 406; WAN024AI6_at; Start 20; Stop 44
cagttatacattgacaaaggttctg

SEQ ID NO: 55351 - DNA, 25 bp, Artificial
  probe
  misc_feature (1)..(25): SEQ ID NO: 406; WAN024AI6_at; Start 22; Stop 46
gttatacattgacaaaggttctgtc

SEQ ID NO: 55352 - DNA, 25 bp, Artificial
  probe
  misc_feature (1)..(25): SEQ ID NO: 406; WAN024AI6_at; Start 18; Stop 42
gtcagttatacattgacaaaggttc

SEQ ID NO: 55353 - DNA, 25 bp, Artificial
  probe
  misc_feature (1)..(25): SEQ ID NO: 406; WAN024AI6_at; Start 8; Stop 32
ctccatctttgtcagttatacattg

SEQ ID NO: 55354 - DNA, 25 bp, Artificial
  probe
  misc_feature (1)..(25): SEQ ID NO: 406; WAN024AI6_at; Start 15; Stop 39
tttgtcagttatacattgacaaagg

SEQ ID NO: 55355 - DNA, 25 bp, Artificial
  probe
  misc_feature (1)..(25): SEQ ID NO: 3453; WAN024AI7_at; Start 142; Stop 166
atccatcatttatttccttagctga

SEQ ID NO: 55356 - DNA, 25 bp, Artificial
  probe
  misc_feature (1)..(25): SEQ ID NO: 3453; WAN024AI7_at; Start 58; Stop 82
ttgttttacgatgattttaatctgc

SEQ ID NO: 55357 - DNA, 25 bp, Artificial
  probe
  misc_feature (1)..(25): SEQ ID NO: 3453; WAN024AI7_at; Start 85; Stop 109
ttgaaagaaagtcctgattgctgat

SEQ ID NO: 55358 - DNA, 25 bp, Artificial
  probe
  misc_feature (1)..(25): SEQ ID NO: 3453; WAN024AI7_at; Start 87; Stop 111
gaaagaaagtcctgattgctgattg

SEQ ID NO: 55359 - DNA, 25 bp, Artificial
  probe
  misc_feature (1)..(25): SEQ ID NO: 3453; WAN024AI7_at; Start 26; Stop 50
gctatactgctttaagtataacact

SEQ ID NO: 55360 - DNA, 25 bp, Artificial
  probe
  misc_feature (1)..(25): SEQ ID NO: 3453; WAN024AI7_at; Start 17; Stop 41
aaaaacagtgctatactgctttaag

SEQ ID NO: 55361 - DNA, 25 bp, Artificial
  probe
  misc_feature (1)..(25): SEQ ID NO: 3453; WAN024AI7_at; Start 6; Stop 30
tctcctttgataaaaacagtgctat

SEQ ID NO: 55362 - DNA, 25 bp, Artificial
  probe
  misc_feature (1)..(25): SEQ ID NO: 3453; WAN024AI7_at; Start 81; Stop 105
gctattgaaagaaagtcctgattgc

SEQ ID NO: 55363 - DNA, 25 bp, Artificial
  probe
  misc_feature (1)..(25): SEQ ID NO: 3453; WAN024AI7_at; Start 13; Stop 37
tgataaaaacagtgctatactgctt

SEQ ID NO: 55364 - DNA, 25 bp, Artificial
  probe
  misc_feature (1)..(25): SEQ ID NO: 3453; WAN024AI7_at; Start 74; Stop 98
ttaatctgctattgaaagaaagtcc

SEQ ID NO: 55365 - DNA, 25 bp, Artificial
  probe
  misc_feature (1)..(25): SEQ ID NO: 3453; WAN024AI7_at; Start 111; Stop 135
gagttgttaaactaatcttagtcag

SEQ ID NO: 55366 - DNA, 25 bp, Artificial
  probe
  misc_feature (1)..(25): SEQ ID NO: 3453; WAN024AI7_at; Start 83; Stop 107
tattgaaagaaagtcctgattgctg

SEQ ID NO: 55367 - DNA, 25 bp, Artificial
  probe
  misc_feature (1)..(25): SEQ ID NO: 3453; WAN024AI7_at; Start 67; Stop 91
gatgattttaatctgctattgaaag

SEQ ID NO: 55368 - DNA, 25 bp, Artificial
  probe
  misc_feature (1)..(25): SEQ ID NO: 3453; WAN024AI7_at; Start 78; Stop 102
tctgctattgaaagaaagtcctgat

SEQ ID NO: 55369 - DNA, 25 bp, Artificial
  probe
  misc_feature (1)..(25): SEQ ID NO: 3453; WAN024AI7_at; Start 91; Stop 115
gaaagtcctgattgctgattgagtt

SEQ ID NO: 55370 - DNA, 25 bp, Artificial
  probe
  misc_feature (1)..(25): SEQ ID NO: 3453; WAN024AI7_at; Start 89; Stop 113
aagaaagtcctgattgctgattgag

SEQ ID NO: 55371 - DNA, 25 bp, Artificial
  probe
  misc_feature (1)..(25): SEQ ID NO: 3453; WAN024AI7_at; Start 93; Stop 117
aagtcctgattgctgattgagttgt

SEQ ID NO: 55372 - DNA, 25 bp, Artificial
  probe
  misc_feature (1)..(25): SEQ ID NO: 3453; WAN024AI7_at; Start 2; Stop 26
tgtctctcctttgataaaaacagtg

SEQ ID NO: 55373 - DNA, 25 bp, Artificial
  probe
  misc_feature (1)..(25): SEQ ID NO: 3453; WAN024AI7_at; Start 115; Stop 139
tgttaaactaatcttagtcagccca

SEQ ID NO: 55374 - DNA, 25 bp, Artificial
  probe
  misc_feature (1)..(25): SEQ ID NO: 3453; WAN024AI7_at; Start 118; Stop 142
taaactaatcttagtcagcccacta

SEQ ID NO: 55375 - DNA, 25 bp, Artificial
  probe
  misc_feature (1)..(25): SEQ ID NO: 3453; WAN024AI7_at; Start 3; Stop 27
gtctctcctttgataaaaacagtgc

SEQ ID NO: 55376 - DNA, 25 bp, Artificial
  probe
  misc_feature (1)..(25): SEQ ID NO: 3453; WAN024AI7_at; Start 123; Stop 147
taatcttagtcagcccactatccat

SEQ ID NO: 55377 - DNA, 25 bp, Artificial
  probe
  misc_feature (1)..(25): SEQ ID NO: 3453; WAN024AI7_at; Start 76; Stop 100
aatctgctattgaaagaaagtcctg

SEQ ID NO: 55378 - DNA, 25 bp, Artificial
  probe
  misc_feature (1)..(25): SEQ ID NO: 3453; WAN024AI7_at; Start 103; Stop 127
tgctgattgagttgttaaactaatc

SEQ ID NO: 55379 - DNA, 25 bp, Artificial
  probe
  misc_feature (1)..(25): SEQ ID NO: 3453; WAN024AI7_at; Start 129; Stop 153
tagtcagcccactatccatcattta

SEQ ID NO: 55380 - DNA, 25 bp, Artificial
  probe
  misc_feature (1)..(25): SEQ ID NO: 3453; WAN024AI7_at; Start 126; Stop 150
tcttagtcagcccactatccatcat

SEQ ID NO: 55381 - DNA, 25 bp, Artificial
  probe
  misc_feature (1)..(25): SEQ ID NO: 3453; WAN024AI7_at; Start 97; Stop 121
cctgattgctgattgagttgttaaa

SEQ ID NO: 55382 - DNA, 25 bp, Artificial
  probe
  misc_feature (1)..(25): SEQ ID NO: 3453; WAN024AI7_at; Start 100; Stop 124
gattgctgattgagttgttaaacta

SEQ ID NO: 55383 - DNA, 25 bp, Artificial
  probe
  misc_feature (1)..(25): SEQ ID NO: 3453; WAN024AI7_at; Start 19; Stop 43
aaacagtgctatactgctttaagta

SEQ ID NO: 55384 - DNA, 25 bp, Artificial
  probe
  misc_feature (1)..(25): SEQ ID NO: 3453; WAN024AI7_at; Start 33; Stop 57
tgctttaagtataacactattttta

SEQ ID NO: 55385 - DNA, 25 bp, Artificial
  probe
  misc_feature (1)..(25): SEQ ID NO: 3453; WAN024AI7_at; Start 131; Stop 155
gtcagcccactatccatcatttatt

SEQ ID NO: 55386 - DNA, 25 bp, Artificial
  probe
  misc_feature (1)..(25): SEQ ID NO: 3453; WAN024AI7_at; Start 47; Stop 71
cactatttttattgttttacgatga

SEQ ID NO: 55387 - DNA, 25 bp, Artificial
  probe
  misc_feature (1)..(25): SEQ ID NO: 3453; WAN024AI7_at; Start 9; Stop 33
cctttgataaaaacagtgctatact

SEQ ID NO: 55388 - DNA, 25 bp, Artificial
  probe
  misc_feature (1)..(25): SEQ ID NO: 3453; WAN024AI7_at; Start 135; Stop 159
gcccactatccatcatttatttcct

SEQ ID NO: 55389 - DNA, 25 bp, Artificial
  probe
  misc_feature (1)..(25): SEQ ID NO: 4593; WAN024AI8_at; Start 133; Stop 157
cagtatagcactgtttttatcaaag

SEQ ID NO: 55390 - DNA, 25 bp, Artificial
  probe
  misc_feature (1)..(25): SEQ ID NO: 4593; WAN024AI8_at; Start 25; Stop 49
tagtgggctgactaagattagttta

SEQ ID NO: 55391 - DNA, 25 bp, Artificial
  probe
  misc_feature (1)..(25): SEQ ID NO: 4593; WAN024AI8_at; Start 62; Stop 86
gcaatcaggactttctttcaatagc

SEQ ID NO: 55392 - DNA, 25 bp, Artificial
  probe
  misc_feature (1)..(25): SEQ ID NO: 4593; WAN024AI8_at; Start 23; Stop 47
gatagtgggctgactaagattagtt

SEQ ID NO: 55393 - DNA, 25 bp, Artificial
  probe
  misc_feature (1)..(25): SEQ ID NO: 4593; WAN024AI8_at; Start 64; Stop 88
aatcaggactttctttcaatagcag

SEQ ID NO: 55394 - DNA, 25 bp, Artificial
  probe
  misc_feature (1)..(25): SEQ ID NO: 4593; WAN024AI8_at; Start 66; Stop 90
tcaggactttctttcaatagcagat

SEQ ID NO: 55395 - DNA, 25 bp, Artificial
  probe
  misc_feature (1)..(25): SEQ ID NO: 4593; WAN024AI8_at; Start 48; Stop 72
taacaactcaatcagcaatcaggac

SEQ ID NO: 55396 - DNA, 25 bp, Artificial
  probe
  misc_feature (1)..(25): SEQ ID NO: 4593; WAN024AI8_at; Start 140; Stop 164
gcactgtttttatcaaaggagagac

SEQ ID NO: 55397 - DNA, 25 bp, Artificial
  probe
  misc_feature (1)..(25): SEQ ID NO: 4593; WAN024AI8_at; Start 16; Stop 40
aatgatggatagtgggctgactaag

SEQ ID NO: 55398 - DNA, 25 bp, Artificial
  probe
  misc_feature (1)..(25): SEQ ID NO: 4593; WAN024AI8_at; Start 142; Stop 166
actgtttttatcaaaggagagacag

SEQ ID NO: 55399 - DNA, 25 bp, Artificial
  probe
  misc_feature (1)..(25): SEQ ID NO: 4593; WAN024AI8_at; Start 124; Stop 148
tacttaaagcagtatagcactgttt

SEQ ID NO: 55400 - DNA, 25 bp, Artificial
  probe
  misc_feature (1)..(25): SEQ ID NO: 4593; WAN024AI8_at; Start 51; Stop 75
caactcaatcagcaatcaggacttt

SEQ ID NO: 55401 - DNA, 25 bp, Artificial
  probe
  misc_feature (1)..(25): SEQ ID NO: 4593; WAN024AI8_at; Start 53; Stop 77
actcaatcagcaatcaggactttct

SEQ ID NO: 55402 - DNA, 25 bp, Artificial
  probe
  misc_feature (1)..(25): SEQ ID NO: 4593; WAN024AI8_at; Start 40; Stop 64
gattagtttaacaactcaatcagca

SEQ ID NO: 55403 - DNA, 25 bp, Artificial
  probe
  misc_feature (1)..(25): SEQ ID NO: 4593; WAN024AI8_at; Start 43; Stop 67
tagtttaacaactcaatcagcaatc

SEQ ID NO: 55404 - DNA, 25 bp, Artificial
  probe
  misc_feature (1)..(25): SEQ ID NO: 4593; WAN024AI8_at; Start 30; Stop 54
ggctgactaagattagtttaacaac

SEQ ID NO: 55405 - DNA, 25 bp, Artificial
  probe
  misc_feature (1)..(25): SEQ ID NO: 4593; WAN024AI8_at; Start 80; Stop 104
caatagcagattaaaatcatcgtaa

SEQ ID NO: 55406 - DNA, 25 bp, Artificial
  probe
  misc_feature (1)..(25): SEQ ID NO: 4593; WAN024AI8_at; Start 77; Stop 101
tttcaatagcagattaaaatcatcg

SEQ ID NO: 55407 - DNA, 25 bp, Artificial
  probe
  misc_feature (1)..(25): SEQ ID NO: 4593; WAN024AI8_at; Start 69; Stop 93
ggactttctttcaatagcagattaa

SEQ ID NO: 55408 - DNA, 25 bp, Artificial
  probe
  misc_feature (1)..(25): SEQ ID NO: 4593; WAN024AI8_at; Start 122; Stop 146
tatacttaaagcagtatagcactgt

SEQ ID NO: 55409 - DNA, 25 bp, Artificial
  probe
  misc_feature (1)..(25): SEQ ID NO: 4593; WAN024AI8_at; Start 46; Stop 70
tttaacaactcaatcagcaatcagg

SEQ ID NO: 55410 - DNA, 25 bp, Artificial
  probe
  misc_feature (1)..(25): SEQ ID NO: 4593; WAN024AI8_at; Start 138; Stop 162
tagcactgtttttatcaaaggagag

SEQ ID NO: 55411 - DNA, 25 bp, Artificial
  probe
  misc_feature (1)..(25): SEQ ID NO: 4593; WAN024AI8_at; Start 136; Stop 160
tatagcactgtttttatcaaaggag

SEQ ID NO: 55412 - DNA, 25 bp, Artificial
  probe
  misc_feature (1)..(25): SEQ ID NO: 4593; WAN024AI8_at; Start 110; Stop 134
taaaaatagtgttatacttaaagca

SEQ ID NO: 55413 - DNA, 25 bp, Artificial
  probe
  misc_feature (1)..(25): SEQ ID NO: 4593; WAN024AI8_at; Start 21; Stop 45
tggatagtgggctgactaagattag

SEQ ID NO: 55414 - DNA, 25 bp, Artificial
  probe
  misc_feature (1)..(25): SEQ ID NO: 4593; WAN024AI8_at; Start 14; Stop 38
taaatgatggatagtgggctgacta

SEQ ID NO: 55415 - DNA, 25 bp, Artificial
  probe
  misc_feature (1)..(25): SEQ ID NO: 4593; WAN024AI8_at; Start 12; Stop 36
aataaatgatggatagtgggctgac

SEQ ID NO: 55416 - DNA, 25 bp, Artificial
  probe
  misc_feature (1)..(25): SEQ ID NO: 4593; WAN024AI8_at; Start 85; Stop 109
gcagattaaaatcatcgtaaaacaa

SEQ ID NO: 55417 - DNA, 25 bp, Artificial
  probe
  misc_feature (1)..(25): SEQ ID NO: 4593; WAN024AI8_at; Start 96; Stop 120
tcatcgtaaaacaataaaaatagtg

SEQ ID NO: 55418 - DNA, 25 bp, Artificial
  probe
  misc_feature (1)..(25): SEQ ID NO: 4593; WAN024AI8_at; Start 34; Stop 58
gactaagattagtttaacaactcaa

SEQ ID NO: 55419 - DNA, 25 bp, Artificial
  probe
  misc_feature (1)..(25): SEQ ID NO: 4593; WAN024AI8_at; Start 9; Stop 33
ggaaataaatgatggatagtgggct

SEQ ID NO: 55420 - DNA, 25 bp, Artificial
  probe
  misc_feature (1)..(25): SEQ ID NO: 4593; WAN024AI8_at; Start 59; Stop 83
tcagcaatcaggactttctttcaat

SEQ ID NO: 55421 - DNA, 25 bp, Artificial
  probe
  misc_feature (1)..(25): SEQ ID NO: 4593; WAN024AI8_at; Start 56; Stop 80
caatcagcaatcaggactttctttc

SEQ ID NO: 55422 - DNA, 25 bp, Artificial
  probe
  misc_feature (1)..(25): SEQ ID NO: 4593; WAN024AI8_at; Start 1; Stop 25
tcagctaaggaaataaatgatggat

SEQ ID NO: 55423 - DNA, 25 bp, Artificial
  probe
  misc_feature (1)..(25): SEQ ID NO: 4776; WAN024AI9_at; Start 42; Stop 66
aaagttctgctctatgaaaatcaaa

SEQ ID NO: 55424 - DNA, 25 bp, Artificial
  probe
  misc_feature (1)..(25): SEQ ID NO: 4776; WAN024AI9_at; Start 50; Stop 74
gctctatgaaaatcaaagaataaag

SEQ ID NO: 55425 - DNA, 25 bp, Artificial
  probe
  misc_feature (1)..(25): SEQ ID NO: 4776; WAN024AI9_at; Start 70; Stop 94
taaagtctacaagtttcatatttga

SEQ ID NO: 55426 - DNA, 25 bp, Artificial
  probe
  misc_feature (1)..(25): SEQ ID NO: 4776; WAN024AI9_at; Start 71; Stop 95
aaagtctacaagtttcatatttgat

SEQ ID NO: 55427 - DNA, 25 bp, Artificial
  probe
  misc_feature (1)..(25): SEQ ID NO: 4776; WAN024AI9_at; Start 62; Stop 86
tcaaagaataaagtctacaagtttc

SEQ ID NO: 55428 - DNA, 25 bp, Artificial
  probe
  misc_feature (1)..(25): SEQ ID NO: 4776; WAN024AI9_at; Start 45; Stop 69
gttctgctctatgaaaatcaaagaa

SEQ ID NO: 55429 - DNA, 25 bp, Artificial
  probe
  misc_feature (1)..(25): SEQ ID NO: 4776; WAN024AI9_at; Start 67; Stop 91
gaataaagtctacaagtttcatatt

SEQ ID NO: 55430 - DNA, 25 bp, Artificial
  probe
  misc_feature (1)..(25): SEQ ID NO: 4776; WAN024AI9_at; Start 86; Stop 110
catatttgattttcggcgagaggaa

SEQ ID NO: 55431 - DNA, 25 bp, Artificial
  probe
  misc_feature (1)..(25): SEQ ID NO: 4776; WAN024AI9_at; Start 83; Stop 107
tttcatatttgattttcggcgagag

SEQ ID NO: 55432 - DNA, 25 bp, Artificial
  probe
  misc_feature (1)..(25): SEQ ID NO: 4776; WAN024AI9_at; Start 65; Stop 89
aagaataaagtctacaagtttcata

SEQ ID NO: 55433 - DNA, 25 bp, Artificial
  probe
  misc_feature (1)..(25): SEQ ID NO: 4776; WAN024AI9_at; Start 52; Stop 76
tctatgaaaatcaaagaataaagtc

SEQ ID NO: 55434 - DNA, 25 bp, Artificial
  probe
  misc_feature (1)..(25): SEQ ID NO: 4776; WAN024AI9_at; Start 44; Stop 68
agttctgctctatgaaaatcaaaga

SEQ ID NO: 55435 - DNA, 25 bp, Artificial
  probe
  misc_feature (1)..(25): SEQ ID NO: 4776; WAN024AI9_at; Start 82; Stop 106
gtttcatatttgattttcggcgaga

SEQ ID NO: 55436 - DNA, 25 bp, Artificial
  probe
  misc_feature (1)..(25): SEQ ID NO: 4776; WAN024AI9_at; Start 81; Stop 105
agtttcatatttgattttcggcgag

SEQ ID NO: 55437 - DNA, 25 bp, Artificial
  probe
  misc_feature (1)..(25): SEQ ID NO: 4776; WAN024AI9_at; Start 53; Stop 77
ctatgaaaatcaaagaataaagtct

SEQ ID NO: 55438 - DNA, 25 bp, Artificial
  probe
  misc_feature (1)..(25): SEQ ID NO: 4776; WAN024AI9_at; Start 41; Stop 65
taaagttctgctctatgaaaatcaa

SEQ ID NO: 55439 - DNA, 25 bp, Artificial
  probe
  misc_feature (1)..(25): SEQ ID NO: 4776; WAN024AI9_at; Start 84; Stop 108
ttcatatttgattttcggcgagagg

SEQ ID NO: 55440 - DNA, 25 bp, Artificial
  probe
  misc_feature (1)..(25): SEQ ID NO: 4776; WAN024AI9_at; Start 26; Stop 50
attgctccgatcttttaaagttctg

SEQ ID NO: 55441 - DNA, 25 bp, Artificial
  probe
  misc_feature (1)..(25): SEQ ID NO: 4776; WAN024AI9_at; Start 80; Stop 104
aagtttcatatttgattttcggcga

SEQ ID NO: 55442 - DNA, 25 bp, Artificial
  probe
  misc_feature (1)..(25): SEQ ID NO: 4776; WAN024AI9_at; Start 63; Stop 87
caaagaataaagtctacaagtttca

SEQ ID NO: 55443 - DNA, 25 bp, Artificial
  probe
  misc_feature (1)..(25): SEQ ID NO: 4776; WAN024AI9_at; Start 58; Stop 82
aaaatcaaagaataaagtctacaag

SEQ ID NO: 55444 - DNA, 25 bp, Artificial
  probe
  misc_feature (1)..(25): SEQ ID NO: 4776; WAN024AI9_at; Start 27; Stop 51
ttgctccgatcttttaaagttctgc

SEQ ID NO: 55445 - DNA, 25 bp, Artificial
  probe
  misc_feature (1)..(25): SEQ ID NO: 4776; WAN024AI9_at; Start 59; Stop 83
aaatcaaagaataaagtctacaagt

SEQ ID NO: 55446 - DNA, 25 bp, Artificial
  probe
  misc_feature (1)..(25): SEQ ID NO: 4776; WAN024AI9_at; Start 46; Stop 70
ttctgctctatgaaaatcaaagaat

SEQ ID NO: 55447 - DNA, 25 bp, Artificial
  probe
  misc_feature (1)..(25): SEQ ID NO: 4776; WAN024AI9_at; Start 40; Stop 64
ttaaagttctgctctatgaaaatca

SEQ ID NO: 55448 - DNA, 25 bp, Artificial
  probe
  misc_feature (1)..(25): SEQ ID NO: 4776; WAN024AI9_at; Start 55; Stop 79
atgaaaatcaaagaataaagtctac

SEQ ID NO: 55449 - DNA, 25 bp, Artificial
  probe
  misc_feature (1)..(25): SEQ ID NO: 4776; WAN024AI9_at; Start 47; Stop 71
tctgctctatgaaaatcaaagaata

SEQ ID NO: 55450 - DNA, 25 bp, Artificial
  probe
  misc_feature (1)..(25): SEQ ID NO: 4776; WAN024AI9_at; Start 3; Stop 27
actctcctccataaaaagaccggat

SEQ ID NO: 55451 - DNA, 25 bp, Artificial
  probe
  misc_feature (1)..(25): SEQ ID NO: 4776; WAN024AI9_at; Start 79; Stop 103
caagtttcatatttgattttcggcg

SEQ ID NO: 55452 - DNA, 25 bp, Artificial
  probe
  misc_feature (1)..(25): SEQ ID NO: 4776; WAN024AI9_at; Start 85; Stop 109
tcatatttgattttcggcgagagga

SEQ ID NO: 55453 - DNA, 25 bp, Artificial
  probe
  misc_feature (1)..(25): SEQ ID NO: 4776; WAN024AI9_at; Start 48; Stop 72
ctgctctatgaaaatcaaagaataa

SEQ ID NO: 55454 - DNA, 25 bp, Artificial
  probe
  misc_feature (1)..(25): SEQ ID NO: 4776; WAN024AI9_at; Start 43; Stop 67
aagttctgctctatgaaaatcaaag

SEQ ID NO: 55455 - DNA, 25 bp, Artificial
  probe
  misc_feature (1)..(25): SEQ ID NO: 4776; WAN024AI9_at; Start 49; Stop 73
tgctctatgaaaatcaaagaataaa

SEQ ID NO: 55456 - DNA, 25 bp, Artificial
  probe
  misc_feature (1)..(25): SEQ ID NO: 4776; WAN024AI9_at; Start 64; Stop 88
aaagaataaagtctacaagtttcat

SEQ ID NO: 55457 - DNA, 25 bp, Artificial
  probe
  misc_feature (1)..(25): SEQ ID NO: 488; WAN024AIA_at; Start 86; Stop 110
tagctaaggttaacgtcaaatgact

SEQ ID NO: 55458 - DNA, 25 bp, Artificial
  probe
  misc_feature (1)..(25): SEQ ID NO: 488; WAN024AIA_at; Start 38; Stop 62
ttgctccgatctttcaatagttcat

SEQ ID NO: 55459 - DNA, 25 bp, Artificial
  probe
  misc_feature (1)..(25): SEQ ID NO: 488; WAN024AIA_at; Start 83; Stop 107
aaatagctaaggttaacgtcaaatg

SEQ ID NO: 55460 - DNA, 25 bp, Artificial
  probe
  misc_feature (1)..(25): SEQ ID NO: 488; WAN024AIA_at; Start 44; Stop 68
cgatctttcaatagttcatattctc

SEQ ID NO: 55461 - DNA, 25 bp, Artificial
  probe
  misc_feature (1)..(25): SEQ ID NO: 488; WAN024AIA_at; Start 51; Stop 75
tcaatagttcatattctcaatttct

SEQ ID NO: 55462 - DNA, 25 bp, Artificial
  probe
  misc_feature (1)..(25): SEQ ID NO: 488; WAN024AIA_at; Start 48; Stop 72
ctttcaatagttcatattctcaatt

SEQ ID NO: 55463 - DNA, 25 bp, Artificial
  probe
  misc_feature (1)..(25): SEQ ID NO: 488; WAN024AIA_at; Start 43; Stop 67
ccgatctttcaatagttcatattct

SEQ ID NO: 55464 - DNA, 25 bp, Artificial
  probe
  misc_feature (1)..(25): SEQ ID NO: 488; WAN024AIA_at; Start 84; Stop 108
aatagctaaggttaacgtcaaatga

SEQ ID NO: 55465 - DNA, 25 bp, Artificial
  probe
  misc_feature (1)..(25): SEQ ID NO: 488; WAN024AIA_at; Start 89; Stop 113
ctaaggttaacgtcaaatgactacg

SEQ ID NO: 55466 - DNA, 25 bp, Artificial
  probe
  misc_feature (1)..(25): SEQ ID NO: 488; WAN024AIA_at; Start 8; Stop 32
tatgcaatttctttatataaaaaga

SEQ ID NO: 55467 - DNA, 25 bp, Artificial
  probe
  misc_feature (1)..(25): SEQ ID NO: 488; WAN024AIA_at; Start 93; Stop 117
ggttaacgtcaaatgactacgcgac

SEQ ID NO: 55468 - DNA, 25 bp, Artificial
  probe
  misc_feature (1)..(25): SEQ ID NO: 488; WAN024AIA_at; Start 49; Stop 73
tttcaatagttcatattctcaattt

SEQ ID NO: 55469 - DNA, 25 bp, Artificial
  probe
  misc_feature (1)..(25): SEQ ID NO: 488; WAN024AIA_at; Start 42; Stop 66
tccgatctttcaatagttcatattc

SEQ ID NO: 55470 - DNA, 25 bp, Artificial
  probe
  misc_feature (1)..(25): SEQ ID NO: 488; WAN024AIA_at; Start 65; Stop 89
tctcaatttctattttaaaaatagc

SEQ ID NO: 55471 - DNA, 25 bp, Artificial
  probe
  misc_feature (1)..(25): SEQ ID NO: 488; WAN024AIA_at; Start 88; Stop 112
gctaaggttaacgtcaaatgactac

SEQ ID NO: 55472 - DNA, 25 bp, Artificial
  probe
  misc_feature (1)..(25): SEQ ID NO: 488; WAN024AIA_at; Start 46; Stop 70
atctttcaatagttcatattctcaa

SEQ ID NO: 55473 - DNA, 25 bp, Artificial
  probe
  misc_feature (1)..(25): SEQ ID NO: 488; WAN024AIA_at; Start 90; Stop 114
taaggttaacgtcaaatgactacgc

SEQ ID NO: 55474 - DNA, 25 bp, Artificial
  probe
  misc_feature (1)..(25): SEQ ID NO: 488; WAN024AIA_at; Start 37; Stop 61
attgctccgatctttcaatagttca

SEQ ID NO: 55475 - DNA, 25 bp, Artificial
  probe
  misc_feature (1)..(25): SEQ ID NO: 488; WAN024AIA_at; Start 40; Stop 64
gctccgatctttcaatagttcatat

SEQ ID NO: 55476 - DNA, 25 bp, Artificial
  probe
  misc_feature (1)..(25): SEQ ID NO: 488; WAN024AIA_at; Start 91; Stop 115
aaggttaacgtcaaatgactacgcg

SEQ ID NO: 55477 - DNA, 25 bp, Artificial
  probe
  misc_feature (1)..(25): SEQ ID NO: 488; WAN024AIA_at; Start 10; Stop 34
tgcaatttctttatataaaaagacc

SEQ ID NO: 55478 - DNA, 25 bp, Artificial
  probe
  misc_feature (1)..(25): SEQ ID NO: 488; WAN024AIA_at; Start 50; Stop 74
ttcaatagttcatattctcaatttc

SEQ ID NO: 55479 - DNA, 25 bp, Artificial
  probe
  misc_feature (1)..(25): SEQ ID NO: 488; WAN024AIA_at; Start 45; Stop 69
gatctttcaatagttcatattctca

SEQ ID NO: 55480 - DNA, 25 bp, Artificial
  probe
  misc_feature (1)..(25): SEQ ID NO: 488; WAN024AIA_at; Start 52; Stop 76
caatagttcatattctcaatttcta

SEQ ID NO: 55481 - DNA, 25 bp, Artificial
  probe
  misc_feature (1)..(25): SEQ ID NO: 488; WAN024AIA_at; Start 7; Stop 31
atatgcaatttctttatataaaaag

SEQ ID NO: 55482 - DNA, 25 bp, Artificial
  probe
  misc_feature (1)..(25): SEQ ID NO: 488; WAN024AIA_at; Start 87; Stop 111
agctaaggttaacgtcaaatgacta

SEQ ID NO: 55483 - DNA, 25 bp, Artificial
  probe
  misc_feature (1)..(25): SEQ ID NO: 488; WAN024AIA_at; Start 41; Stop 65
ctccgatctttcaatagttcatatt

SEQ ID NO: 55484 - DNA, 25 bp, Artificial
  probe
  misc_feature (1)..(25): SEQ ID NO: 488; WAN024AIA_at; Start 85; Stop 109
atagctaaggttaacgtcaaatgac

SEQ ID NO: 55485 - DNA, 25 bp, Artificial
  probe
  misc_feature (1)..(25): SEQ ID NO: 488; WAN024AIA_at; Start 66; Stop 90
ctcaatttctattttaaaaatagct

SEQ ID NO: 55486 - DNA, 25 bp, Artificial
  probe
  misc_feature (1)..(25): SEQ ID NO: 488; WAN024AIA_at; Start 9; Stop 33
atgcaatttctttatataaaaagac

SEQ ID NO: 55487 - DNA, 25 bp, Artificial
  probe
  misc_feature (1)..(25): SEQ ID NO: 488; WAN024AIA_at; Start 39; Stop 63
tgctccgatctttcaatagttcata

SEQ ID NO: 55488 - DNA, 25 bp, Artificial
  probe
  misc_feature (1)..(25): SEQ ID NO: 488; WAN024AIA_at; Start 47; Stop 71
tctttcaatagttcatattctcaat

SEQ ID NO: 55489 - DNA, 25 bp, Artificial
  probe
  misc_feature (1)..(25): SEQ ID NO: 488; WAN024AIA_at; Start 92; Stop 116
aggttaacgtcaaatgactacgcga

SEQ ID NO: 55490 - DNA, 25 bp, Artificial
  probe
  misc_feature (1)..(25): SEQ ID NO: 3824; WAN024AIB_at; Start 57; Stop 81
tgaactattgaaagatcggagcaat

SEQ ID NO: 55491 - DNA, 25 bp, Artificial
  probe
  misc_feature (1)..(25): SEQ ID NO: 3824; WAN024AIB_at; Start 43; Stop 67
agaaattgagaatatgaactattga

SEQ ID NO: 55492 - DNA, 25 bp, Artificial
  probe
  misc_feature (1)..(25): SEQ ID NO: 3824; WAN024AIB_at; Start 84; Stop 108
ggtctttttatataaagaaattgca

SEQ ID NO: 55493 - DNA, 25 bp, Artificial
  probe
  misc_feature (1)..(25): SEQ ID NO: 3824; WAN024AIB_at; Start 42; Stop 66
tagaaattgagaatatgaactattg

SEQ ID NO: 55494 - DNA, 25 bp, Artificial
  probe
  misc_feature (1)..(25): SEQ ID NO: 3824; WAN024AIB_at; Start 87; Stop 111
ctttttatataaagaaattgcatat

SEQ ID NO: 55495 - DNA, 25 bp, Artificial
  probe
  misc_feature (1)..(25): SEQ ID NO: 3824; WAN024AIB_at; Start 11; Stop 35
catttgacgttaaccttagctattt

SEQ ID NO: 55496 - DNA, 25 bp, Artificial
  probe
  misc_feature (1)..(25): SEQ ID NO: 3824; WAN024AIB_at; Start 47; Stop 71
attgagaatatgaactattgaaaga

SEQ ID NO: 55497 - DNA, 25 bp, Artificial
  probe
  misc_feature (1)..(25): SEQ ID NO: 3824; WAN024AIB_at; Start 46; Stop 70
aattgagaatatgaactattgaaag

SEQ ID NO: 55498 - DNA, 25 bp, Artificial
  probe
  misc_feature (1)..(25): SEQ ID NO: 3824; WAN024AIB_at; Start 4; Stop 28
gcgtagtcatttgacgttaacctta

SEQ ID NO: 55499 - DNA, 25 bp, Artificial
  probe
  misc_feature (1)..(25): SEQ ID NO: 3824; WAN024AIB_at; Start 6; Stop 30
gtagtcatttgacgttaaccttagc

SEQ ID NO: 55500 - DNA, 25 bp, Artificial
  probe
  misc_feature (1)..(25): SEQ ID NO: 3824; WAN024AIB_at; Start 53; Stop 77
aatatgaactattgaaagatcggag

SEQ ID NO: 55501 - DNA, 25 bp, Artificial
  probe
  misc_feature (1)..(25): SEQ ID NO: 3824; WAN024AIB_at; Start 3; Stop 27
cgcgtagtcatttgacgttaacctt

SEQ ID NO: 55502 - DNA, 25 bp, Artificial
  probe
  misc_feature (1)..(25): SEQ ID NO: 3824; WAN024AIB_at; Start 7; Stop 31
tagtcatttgacgttaaccttagct

SEQ ID NO: 55503 - DNA, 25 bp, Artificial
  probe
  misc_feature (1)..(25): SEQ ID NO: 3824; WAN024AIB_at; Start 49; Stop 73
tgagaatatgaactattgaaagatc

SEQ ID NO: 55504 - DNA, 25 bp, Artificial
  probe
  misc_feature (1)..(25): SEQ ID NO: 3824; WAN024AIB_at; Start 55; Stop 79
tatgaactattgaaagatcggagca

SEQ ID NO: 55505 - DNA, 25 bp, Artificial
  probe
  misc_feature (1)..(25): SEQ ID NO: 3824; WAN024AIB_at; Start 9; Stop 33
gtcatttgacgttaaccttagctat

SEQ ID NO: 55506 - DNA, 25 bp, Artificial
  probe
  misc_feature (1)..(25): SEQ ID NO: 3824; WAN024AIB_at; Start 51; Stop 75
agaatatgaactattgaaagatcgg

SEQ ID NO: 55507 - DNA, 25 bp, Artificial
  probe
  misc_feature (1)..(25): SEQ ID NO: 3824; WAN024AIB_at; Start 2; Stop 26
tcgcgtagtcatttgacgttaacct

SEQ ID NO: 55508 - DNA, 25 bp, Artificial
  probe
  misc_feature (1)..(25): SEQ ID NO: 3824; WAN024AIB_at; Start 8; Stop 32
agtcatttgacgttaaccttagcta

SEQ ID NO: 55509 - DNA, 25 bp, Artificial
  probe
  misc_feature (1)..(25): SEQ ID NO: 3824; WAN024AIB_at; Start 45; Stop 69
aaattgagaatatgaactattgaaa

SEQ ID NO: 55510 - DNA, 25 bp, Artificial
  probe
  misc_feature (1)..(25): SEQ ID NO: 3824; WAN024AIB_at; Start 37; Stop 61
taaaatagaaattgagaatatgaac

SEQ ID NO: 55511 - DNA, 25 bp, Artificial
  probe
  misc_feature (1)..(25): SEQ ID NO: 3824; WAN024AIB_at; Start 38; Stop 62
aaaatagaaattgagaatatgaact

SEQ ID NO: 55512 - DNA, 25 bp, Artificial
  probe
  misc_feature (1)..(25): SEQ ID NO: 3824; WAN024AIB_at; Start 1; Stop 25
gtcgcgtagtcatttgacgttaacc

SEQ ID NO: 55513 - DNA, 25 bp, Artificial
  probe
  misc_feature (1)..(25): SEQ ID NO: 3824; WAN024AIB_at; Start 10; Stop 34
tcatttgacgttaaccttagctatt

SEQ ID NO: 55514 - DNA, 25 bp, Artificial
  probe
  misc_feature (1)..(25): SEQ ID NO: 3824; WAN024AIB_at; Start 39; Stop 63
aaatagaaattgagaatatgaacta

SEQ ID NO: 55515 - DNA, 25 bp, Artificial
  probe
  misc_feature (1)..(25): SEQ ID NO: 3824; WAN024AIB_at; Start 29; Stop 53
gctatttttaaaatagaaattgaga

SEQ ID NO: 55516 - DNA, 25 bp, Artificial
  probe
  misc_feature (1)..(25): SEQ ID NO: 3824; WAN024AIB_at; Start 52; Stop 76
gaatatgaactattgaaagatcgga

SEQ ID NO: 55517 - DNA, 25 bp, Artificial
  probe
  misc_feature (1)..(25): SEQ ID NO: 3824; WAN024AIB_at; Start 50; Stop 74
gagaatatgaactattgaaagatcg

SEQ ID NO: 55518 - DNA, 25 bp, Artificial
  probe
  misc_feature (1)..(25): SEQ ID NO: 3824; WAN024AIB_at; Start 54; Stop 78
atatgaactattgaaagatcggagc

SEQ ID NO: 55519 - DNA, 25 bp, Artificial
  probe
  misc_feature (1)..(25): SEQ ID NO: 3824; WAN024AIB_at; Start 92; Stop 116
tatataaagaaattgcatataatac

SEQ ID NO: 55520 - DNA, 25 bp, Artificial
  probe
  misc_feature (1)..(25): SEQ ID NO: 3824; WAN024AIB_at; Start 48; Stop 72
ttgagaatatgaactattgaaagat

SEQ ID NO: 55521 - DNA, 25 bp, Artificial
  probe
  misc_feature (1)..(25): SEQ ID NO: 3824; WAN024AIB_at; Start 5; Stop 29
cgtagtcatttgacgttaaccttag

SEQ ID NO: 55522 - DNA, 25 bp, Artificial
  probe
  misc_feature (1)..(25): SEQ ID NO: 3824; WAN024AIB_at; Start 44; Stop 68
gaaattgagaatatgaactattgaa

SEQ ID NO: 55523 - DNA, 25 bp, Artificial
  probe
  misc_feature (1)..(25): SEQ ID NO: 3824; WAN024AIB_at; Start 56; Stop 80
atgaactattgaaagatcggagcaa

SEQ ID NO: 55524 - DNA, 25 bp, Artificial
  probe
  misc_feature (1)..(25): SEQ ID NO: 4837; WAN024AIC_at; Start 58; Stop 82
gagcagaactttaaaagatcggagc

SEQ ID NO: 55525 - DNA, 25 bp, Artificial
  probe
  misc_feature (1)..(25): SEQ ID NO: 4837; WAN024AIC_at; Start 61; Stop 85
cagaactttaaaagatcggagcaat

SEQ ID NO: 55526 - DNA, 25 bp, Artificial
  probe
  misc_feature (1)..(25): SEQ ID NO: 4837; WAN024AIC_at; Start 10; Stop 34
ccgaaaatcaaatatgaaacttgta

SEQ ID NO: 55527 - DNA, 25 bp, Artificial
  probe
  misc_feature (1)..(25): SEQ ID NO: 4837; WAN024AIC_at; Start 25; Stop 49
gaaacttgtagactttattctttga

SEQ ID NO: 55528 - DNA, 25 bp, Artificial
  probe
  misc_feature (1)..(25): SEQ ID NO: 4837; WAN024AIC_at; Start 56; Stop 80
tagagcagaactttaaaagatcgga

SEQ ID NO: 55529 - DNA, 25 bp, Artificial
  probe
  misc_feature (1)..(25): SEQ ID NO: 4837; WAN024AIC_at; Start 1; Stop 25
ttcctctcgccgaaaatcaaatatg

SEQ ID NO: 55530 - DNA, 25 bp, Artificial
  probe
  misc_feature (1)..(25): SEQ ID NO: 4837; WAN024AIC_at; Start 84; Stop 108
atccggtctttttatggaggagagt

SEQ ID NO: 55531 - DNA, 25 bp, Artificial
  probe
  misc_feature (1)..(25): SEQ ID NO: 4837; WAN024AIC_at; Start 53; Stop 77
tcatagagcagaactttaaaagatc

SEQ ID NO: 55532 - DNA, 25 bp, Artificial
  probe
  misc_feature (1)..(25): SEQ ID NO: 4837; WAN024AIC_at; Start 47; Stop 71
tgattttcatagagcagaactttaa

SEQ ID NO: 55533 - DNA, 25 bp, Artificial
  probe
  misc_feature (1)..(25): SEQ ID NO: 4837; WAN024AIC_at; Start 22; Stop 46
tatgaaacttgtagactttattctt

SEQ ID NO: 55534 - DNA, 25 bp, Artificial
  probe
  misc_feature (1)..(25): SEQ ID NO: 4837; WAN024AIC_at; Start 6; Stop 30
ctcgccgaaaatcaaatatgaaact

SEQ ID NO: 55535 - DNA, 25 bp, Artificial
  probe
  misc_feature (1)..(25): SEQ ID NO: 4837; WAN024AIC_at; Start 18; Stop 42
caaatatgaaacttgtagactttat

SEQ ID NO: 55536 - DNA, 25 bp, Artificial
  probe
  misc_feature (1)..(25): SEQ ID NO: 4837; WAN024AIC_at; Start 5; Stop 29
tctcgccgaaaatcaaatatgaaac

SEQ ID NO: 55537 - DNA, 25 bp, Artificial
  probe
  misc_feature (1)..(25): SEQ ID NO: 4837; WAN024AIC_at; Start 40; Stop 64
tattctttgattttcatagagcaga

SEQ ID NO: 55538 - DNA, 25 bp, Artificial
  probe
  misc_feature (1)..(25): SEQ ID NO: 4837; WAN024AIC_at; Start 43; Stop 67
tctttgattttcatagagcagaact

SEQ ID NO: 55539 - DNA, 25 bp, Artificial
  probe
  misc_feature (1)..(25): SEQ ID NO: 4837; WAN024AIC_at; Start 9; Stop 33
gccgaaaatcaaatatgaaacttgt

SEQ ID NO: 55540 - DNA, 25 bp, Artificial
  probe
  misc_feature (1)..(25): SEQ ID NO: 4837; WAN024AIC_at; Start 57; Stop 81
agagcagaactttaaaagatcggag

SEQ ID NO: 55541 - DNA, 25 bp, Artificial
  probe
  misc_feature (1)..(25): SEQ ID NO: 4837; WAN024AIC_at; Start 48; Stop 72
gattttcatagagcagaactttaaa

SEQ ID NO: 55542 - DNA, 25 bp, Artificial
  probe
  misc_feature (1)..(25): SEQ ID NO: 4837; WAN024AIC_at; Start 50; Stop 74
ttttcatagagcagaactttaaaag

SEQ ID NO: 55543 - DNA, 25 bp, Artificial
  probe
  misc_feature (1)..(25): SEQ ID NO: 4837; WAN024AIC_at; Start 54; Stop 78
catagagcagaactttaaaagatcg

SEQ ID NO: 55544 - DNA, 25 bp, Artificial
  probe
  misc_feature (1)..(25): SEQ ID NO: 4837; WAN024AIC_at; Start 55; Stop 79
atagagcagaactttaaaagatcgg

SEQ ID NO: 55545 - DNA, 25 bp, Artificial
  probe
  misc_feature (1)..(25): SEQ ID NO: 4837; WAN024AIC_at; Start 59; Stop 83
agcagaactttaaaagatcggagca

SEQ ID NO: 55546 - DNA, 25 bp, Artificial
  probe
  misc_feature (1)..(25): SEQ ID NO: 4837; WAN024AIC_at; Start 85; Stop 109
tccggtctttttatggaggagagta

SEQ ID NO: 55547 - DNA, 25 bp, Artificial
  probe
  misc_feature (1)..(25): SEQ ID NO: 4837; WAN024AIC_at; Start 4; Stop 28
ctctcgccgaaaatcaaatatgaaa

SEQ ID NO: 55548 - DNA, 25 bp, Artificial
  probe
  misc_feature (1)..(25): SEQ ID NO: 4837; WAN024AIC_at; Start 3; Stop 27
cctctcgccgaaaatcaaatatgaa

SEQ ID NO: 55549 - DNA, 25 bp, Artificial
  probe
  misc_feature (1)..(25): SEQ ID NO: 4837; WAN024AIC_at; Start 7; Stop 31
tcgccgaaaatcaaatatgaaactt

SEQ ID NO: 55550 - DNA, 25 bp, Artificial
  probe
  misc_feature (1)..(25): SEQ ID NO: 4837; WAN024AIC_at; Start 44; Stop 68
ctttgattttcatagagcagaactt

SEQ ID NO: 55551 - DNA, 25 bp, Artificial
  probe
  misc_feature (1)..(25): SEQ ID NO: 4837; WAN024AIC_at; Start 14; Stop 38
aaatcaaatatgaaacttgtagact

SEQ ID NO: 55552 - DNA, 25 bp, Artificial
  probe
  misc_feature (1)..(25): SEQ ID NO: 4837; WAN024AIC_at; Start 42; Stop 66
ttctttgattttcatagagcagaac

SEQ ID NO: 55553 - DNA, 25 bp, Artificial
  probe
  misc_feature (1)..(25): SEQ ID NO: 4837; WAN024AIC_at; Start 8; Stop 32
cgccgaaaatcaaatatgaaacttg

SEQ ID NO: 55554 - DNA, 25 bp, Artificial
  probe
  misc_feature (1)..(25): SEQ ID NO: 4837; WAN024AIC_at; Start 60; Stop 84
gcagaactttaaaagatcggagcaa

SEQ ID NO: 55555 - DNA, 25 bp, Artificial
  probe
  misc_feature (1)..(25): SEQ ID NO: 4837; WAN024AIC_at; Start 2; Stop 26
tcctctcgccgaaaatcaaatatga

SEQ ID NO: 55556 - DNA, 25 bp, Artificial
  probe
  misc_feature (1)..(25): SEQ ID NO: 4837; WAN024AIC_at; Start 46; Stop 70
ttgattttcatagagcagaacttta

SEQ ID NO: 55557 - DNA, 25 bp, Artificial
  probe
  misc_feature (1)..(25): SEQ ID NO: 4837; WAN024AIC_at; Start 12; Stop 36
gaaaatcaaatatgaaacttgtaga

SEQ ID NO: 55558 - DNA, 25 bp, Artificial
  probe
  misc_feature (1)..(25): SEQ ID NO: 284; WAN024AID_at; Start 180; Stop 204
tataacaaagaaatctagtcattac

SEQ ID NO: 55559 - DNA, 25 bp, Artificial
  probe
  misc_feature (1)..(25): SEQ ID NO: 284; WAN024AID_at; Start 69; Stop 93
aaatttttactattccactgtatca

SEQ ID NO: 55560 - DNA, 25 bp, Artificial
  probe
  misc_feature (1)..(25): SEQ ID NO: 284; WAN024AID_at; Start 38; Stop 62
atacgattacatagaattggaaacg

SEQ ID NO: 55561 - DNA, 25 bp, Artificial
  probe
  misc_feature (1)..(25): SEQ ID NO: 284; WAN024AID_at; Start 110; Stop 134
tctaaaaatctgctcaaaactctct

SEQ ID NO: 55562 - DNA, 25 bp, Artificial
  probe
  misc_feature (1)..(25): SEQ ID NO: 284; WAN024AID_at; Start 91; Stop 115
tcatatttatgctgacttttctaaa

SEQ ID NO: 55563 - DNA, 25 bp, Artificial
  probe
  misc_feature (1)..(25): SEQ ID NO: 284; WAN024AID_at; Start 48; Stop 72
atagaattggaaacgttctccaaat

SEQ ID NO: 55564 - DNA, 25 bp, Artificial
  probe
  misc_feature (1)..(25): SEQ ID NO: 284; WAN024AID_at; Start 182; Stop 206
taacaaagaaatctagtcattactt

SEQ ID NO: 55565 - DNA, 25 bp, Artificial
  probe
  misc_feature (1)..(25): SEQ ID NO: 284; WAN024AID_at; Start 114; Stop 138
aaaatctgctcaaaactctctattc

SEQ ID NO: 55566 - DNA, 25 bp, Artificial
  probe
  misc_feature (1)..(25): SEQ ID NO: 284; WAN024AID_at; Start 84; Stop 108
cactgtatcatatttatgctgactt

SEQ ID NO: 55567 - DNA, 25 bp, Artificial
  probe
  misc_feature (1)..(25): SEQ ID NO: 284; WAN024AID_at; Start 116; Stop 140
aatctgctcaaaactctctattctc

SEQ ID NO: 55568 - DNA, 25 bp, Artificial
  probe
  misc_feature (1)..(25): SEQ ID NO: 284; WAN024AID_at; Start 47; Stop 71
catagaattggaaacgttctccaaa

SEQ ID NO: 55569 - DNA, 25 bp, Artificial
  probe
  misc_feature (1)..(25): SEQ ID NO: 284; WAN024AID_at; Start 98; Stop 122
tatgctgacttttctaaaaatctgc

SEQ ID NO: 55570 - DNA, 25 bp, Artificial
  probe
  misc_feature (1)..(25): SEQ ID NO: 284; WAN024AID_at; Start 45; Stop 69
tacatagaattggaaacgttctcca

SEQ ID NO: 55571 - DNA, 25 bp, Artificial
  probe
  misc_feature (1)..(25): SEQ ID NO: 284; WAN024AID_at; Start 36; Stop 60
gaatacgattacatagaattggaaa

SEQ ID NO: 55572 - DNA, 25 bp, Artificial
  probe
  misc_feature (1)..(25): SEQ ID NO: 284; WAN024AID_at; Start 104; Stop 128
gacttttctaaaaatctgctcaaaa

SEQ ID NO: 55573 - DNA, 25 bp, Artificial
  probe
  misc_feature (1)..(25): SEQ ID NO: 284; WAN024AID_at; Start 34; Stop 58
gagaatacgattacatagaattgga

SEQ ID NO: 55574 - DNA, 25 bp, Artificial
  probe
  misc_feature (1)..(25): SEQ ID NO: 284; WAN024AID_at; Start 28; Stop 52
aacttggagaatacgattacataga

SEQ ID NO: 55575 - DNA, 25 bp, Artificial
  probe
  misc_feature (1)..(25): SEQ ID NO: 284; WAN024AID_at; Start 30; Stop 54
cttggagaatacgattacatagaat

SEQ ID NO: 55576 - DNA, 25 bp, Artificial
  probe
  misc_feature (1)..(25): SEQ ID NO: 284; WAN024AID_at; Start 130; Stop 154
tctctattctctattctaatacagt

SEQ ID NO: 55577 - DNA, 25 bp, Artificial
  probe
  misc_feature (1)..(25): SEQ ID NO: 284; WAN024AID_at; Start 109; Stop 133
ttctaaaaatctgctcaaaactctc

SEQ ID NO: 55578 - DNA, 25 bp, Artificial
  probe
  misc_feature (1)..(25): SEQ ID NO: 284; WAN024AID_at; Start 138; Stop 162
ctctattctaatacagttttgaaag

SEQ ID NO: 55579 - DNA, 25 bp, Artificial
  probe
  misc_feature (1)..(25): SEQ ID NO: 284; WAN024AID_at; Start 26; Stop 50
taaacttggagaatacgattacata

SEQ ID NO: 55580 - DNA, 25 bp, Artificial
  probe
  misc_feature (1)..(25): SEQ ID NO: 284; WAN024AID_at; Start 120; Stop 144
tgctcaaaactctctattctctatt

SEQ ID NO: 55581 - DNA, 25 bp, Artificial
  probe
  misc_feature (1)..(25): SEQ ID NO: 284; WAN024AID_at; Start 44; Stop 68
ttacatagaattggaaacgttctcc

SEQ ID NO: 55582 - DNA, 25 bp, Artificial
  probe
  misc_feature (1)..(25): SEQ ID NO: 284; WAN024AID_at; Start 118; Stop 142
tctgctcaaaactctctattctcta

SEQ ID NO: 55583 - DNA, 25 bp, Artificial
  probe
  misc_feature (1)..(25): SEQ ID NO: 284; WAN024AID_at; Start 41; Stop 65
cgattacatagaattggaaacgttc

SEQ ID NO: 55584 - DNA, 25 bp, Artificial
  probe
  misc_feature (1)..(25): SEQ ID NO: 284; WAN024AID_at; Start 112; Stop 136
taaaaatctgctcaaaactctctat

SEQ ID NO: 55585 - DNA, 25 bp, Artificial
  probe
  misc_feature (1)..(25): SEQ ID NO: 284; WAN024AID_at; Start 24; Stop 48
tttaaacttggagaatacgattaca

SEQ ID NO: 55586 - DNA, 25 bp, Artificial
  probe
  misc_feature (1)..(25): SEQ ID NO: 284; WAN024AID_at; Start 124; Stop 148
caaaactctctattctctattctaa

SEQ ID NO: 55587 - DNA, 25 bp, Artificial
  probe
  misc_feature (1)..(25): SEQ ID NO: 284; WAN024AID_at; Start 64; Stop 88
tctccaaatttttactattccactg

SEQ ID NO: 55588 - DNA, 25 bp, Artificial
  probe
  misc_feature (1)..(25): SEQ ID NO: 284; WAN024AID_at; Start 101; Stop 125
gctgacttttctaaaaatctgctca

SEQ ID NO: 55589 - DNA, 25 bp, Artificial
  probe
  misc_feature (1)..(25): SEQ ID NO: 284; WAN024AID_at; Start 166; Stop 190
tgtcatttctgttttataacaaaga

SEQ ID NO: 55590 - DNA, 25 bp, Artificial
  probe
  misc_feature (1)..(25): SEQ ID NO: 284; WAN024AID_at; Start 1; Stop 25
aatgataactctccttcaatttttt

SEQ ID NO: 55591 - DNA, 25 bp, Artificial
  probe
  misc_feature (1)..(25): SEQ ID NO: 284; WAN024AID_at; Start 32; Stop 56
tggagaatacgattacatagaattg

SEQ ID NO: 55592 - DNA, 25 bp, Artificial
  probe
  misc_feature (1)..(25): SEQ ID NO: 243; WAN024AIE_at; Start 103; Stop 127
cagcataaatatgatacagtggaat

SEQ ID NO: 55593 - DNA, 25 bp, Artificial
  probe
  misc_feature (1)..(25): SEQ ID NO: 243; WAN024AIE_at; Start 157; Stop 181
tatgtaatcgtattctccaagttta

SEQ ID NO: 55594 - DNA, 25 bp, Artificial
  probe
  misc_feature (1)..(25): SEQ ID NO: 243; WAN024AIE_at; Start 119; Stop 143
cagtggaatagtaaaaatttggaga

SEQ ID NO: 55595 - DNA, 25 bp, Artificial
  probe
  misc_feature (1)..(25): SEQ ID NO: 243; WAN024AIE_at; Start 108; Stop 132
taaatatgatacagtggaatagtaa

SEQ ID NO: 55596 - DNA, 25 bp, Artificial
  probe
  misc_feature (1)..(25): SEQ ID NO: 243; WAN024AIE_at; Start 69; Stop 93
gaatagagagttttgagcagatttt

SEQ ID NO: 55597 - DNA, 25 bp, Artificial
  probe
  misc_feature (1)..(25): SEQ ID NO: 243; WAN024AIE_at; Start 62; Stop 86
gaatagagaatagagagttttgagc

SEQ ID NO: 55598 - DNA, 25 bp, Artificial
  probe
  misc_feature (1)..(25): SEQ ID NO: 243; WAN024AIE_at; Start 138; Stop 162
tggagaacgtttccaattctatgta

SEQ ID NO: 55599 - DNA, 25 bp, Artificial
  probe
  misc_feature (1)..(25): SEQ ID NO: 243; WAN024AIE_at; Start 101; Stop 125
gtcagcataaatatgatacagtgga

SEQ ID NO: 55600 - DNA, 25 bp, Artificial
  probe
  misc_feature (1)..(25): SEQ ID NO: 243; WAN024AIE_at; Start 96; Stop 120
gaaaagtcagcataaatatgataca

SEQ ID NO: 55601 - DNA, 25 bp, Artificial
  probe
  misc_feature (1)..(25): SEQ ID NO: 243; WAN024AIE_at; Start 117; Stop 141
tacagtggaatagtaaaaatttgga

SEQ ID NO: 55602 - DNA, 25 bp, Artificial
  probe
  misc_feature (1)..(25): SEQ ID NO: 243; WAN024AIE_at; Start 1; Stop 25
aagtaatgactagatttctttgtta

SEQ ID NO: 55603 - DNA, 25 bp, Artificial
  probe
  misc_feature (1)..(25): SEQ ID NO: 243; WAN024AIE_at; Start 54; Stop 78
ctgtattagaatagagaatagagag

SEQ ID NO: 55604 - DNA, 25 bp, Artificial
  probe
  misc_feature (1)..(25): SEQ ID NO: 243; WAN024AIE_at; Start 45; Stop 69
ctttcaaaactgtattagaatagag

SEQ ID NO: 55605 - DNA, 25 bp, Artificial
  probe
  misc_feature (1)..(25): SEQ ID NO: 243; WAN024AIE_at; Start 151; Stop 175
caattctatgtaatcgtattctcca

SEQ ID NO: 55606 - DNA, 25 bp, Artificial
  probe
  misc_feature (1)..(25): SEQ ID NO: 243; WAN024AIE_at; Start 85; Stop 109
gcagatttttagaaaagtcagcata

SEQ ID NO: 55607 - DNA, 25 bp, Artificial
  probe
  misc_feature (1)..(25): SEQ ID NO: 243; WAN024AIE_at; Start 92; Stop 116
tttagaaaagtcagcataaatatga

SEQ ID NO: 55608 - DNA, 25 bp, Artificial
  probe
  misc_feature (1)..(25): SEQ ID NO: 243; WAN024AIE_at; Start 63; Stop 87
aatagagaatagagagttttgagca

SEQ ID NO: 55609 - DNA, 25 bp, Artificial
  probe
  misc_feature (1)..(25): SEQ ID NO: 243; WAN024AIE_at; Start 159; Stop 183
tgtaatcgtattctccaagtttaaa

SEQ ID NO: 55610 - DNA, 25 bp, Artificial
  probe
  misc_feature (1)..(25): SEQ ID NO: 243; WAN024AIE_at; Start 105; Stop 129
gcataaatatgatacagtggaatag

SEQ ID NO: 55611 - DNA, 25 bp, Artificial
  probe
  misc_feature (1)..(25): SEQ ID NO: 243; WAN024AIE_at; Start 17; Stop 41
tctttgttataaaacagaaatgaca

SEQ ID NO: 55612 - DNA, 25 bp, Artificial
  probe
  misc_feature (1)..(25): SEQ ID NO: 243; WAN024AIE_at; Start 155; Stop 179
tctatgtaatcgtattctccaagtt

SEQ ID NO: 55613 - DNA, 25 bp, Artificial
  probe
  misc_feature (1)..(25): SEQ ID NO: 243; WAN024AIE_at; Start 153; Stop 177
attctatgtaatcgtattctccaag

SEQ ID NO: 55614 - DNA, 25 bp, Artificial
  probe
  misc_feature (1)..(25): SEQ ID NO: 243; WAN024AIE_at; Start 150; Stop 174
ccaattctatgtaatcgtattctcc

SEQ ID NO: 55615 - DNA, 25 bp, Artificial
  probe
  misc_feature (1)..(25): SEQ ID NO: 243; WAN024AIE_at; Start 67; Stop 91
gagaatagagagttttgagcagatt

SEQ ID NO: 55616 - DNA, 25 bp, Artificial
  probe
  misc_feature (1)..(25): SEQ ID NO: 243; WAN024AIE_at; Start 65; Stop 89
tagagaatagagagttttgagcaga

SEQ ID NO: 55617 - DNA, 25 bp, Artificial
  probe
  misc_feature (1)..(25): SEQ ID NO: 243; WAN024AIE_at; Start 106; Stop 130
cataaatatgatacagtggaatagt

SEQ ID NO: 55618 - DNA, 25 bp, Artificial
  probe
  misc_feature (1)..(25): SEQ ID NO: 243; WAN024AIE_at; Start 99; Stop 123
aagtcagcataaatatgatacagtg

SEQ ID NO: 55619 - DNA, 25 bp, Artificial
  probe
  misc_feature (1)..(25): SEQ ID NO: 243; WAN024AIE_at; Start 182; Stop 206
aaaaaattgaaggagagttatcatt

SEQ ID NO: 55620 - DNA, 25 bp, Artificial
  probe
  misc_feature (1)..(25): SEQ ID NO: 243; WAN024AIE_at; Start 48; Stop 72
tcaaaactgtattagaatagagaat

SEQ ID NO: 55621 - DNA, 25 bp, Artificial
  probe
  misc_feature (1)..(25): SEQ ID NO: 243; WAN024AIE_at; Start 8; Stop 32
gactagatttctttgttataaaaca

SEQ ID NO: 55622 - DNA, 25 bp, Artificial
  probe
  misc_feature (1)..(25): SEQ ID NO: 243; WAN024AIE_at; Start 86; Stop 110
cagatttttagaaaagtcagcataa

SEQ ID NO: 55623 - DNA, 25 bp, Artificial
  probe
  misc_feature (1)..(25): SEQ ID NO: 243; WAN024AIE_at; Start 115; Stop 139
gatacagtggaatagtaaaaatttg

SEQ ID NO: 55624 - DNA, 25 bp, Artificial
  probe
  misc_feature (1)..(25): SEQ ID NO: 243; WAN024AIE_at; Start 59; Stop 83
ttagaatagagaatagagagttttg

SEQ ID NO: 55625 - DNA, 25 bp, Artificial
  probe
  misc_feature (1)..(25): SEQ ID NO: 243; WAN024AIE_at; Start 71; Stop 95
atagagagttttgagcagattttta

SEQ ID NO: 55626 - DNA, 25 bp, Artificial
  probe
  misc_feature (1)..(25): SEQ ID NO: 355; WAN024AIF_at; Start 321; Stop 345
tcttaagaatacaaacttcagttgg

SEQ ID NO: 55627 - DNA, 25 bp, Artificial
  probe
  misc_feature (1)..(25): SEQ ID NO: 355; WAN024AIF_at; Start 329; Stop 353
atacaaacttcagttggttgggagg

SEQ ID NO: 55628 - DNA, 25 bp, Artificial
  probe
  misc_feature (1)..(25): SEQ ID NO: 355; WAN024AIF_at; Start 19; Stop 43
tgtcaattacactcatcagtatact

SEQ ID NO: 55629 - DNA, 25 bp, Artificial
  probe
  misc_feature (1)..(25): SEQ ID NO: 355; WAN024AIF_at; Start 145; Stop 169
caataaaaatatgctatactaaaga

SEQ ID NO: 55630 - DNA, 25 bp, Artificial
  probe
  misc_feature (1)..(25): SEQ ID NO: 355; WAN024AIF_at; Start 283; Stop 307
gcagtcttctattgcctttctaaaa

SEQ ID NO: 55631 - DNA, 25 bp, Artificial
  probe
  misc_feature (1)..(25): SEQ ID NO: 355; WAN024AIF_at; Start 212; Stop 236
cgactgttagatccctctgactcaa

SEQ ID NO: 55632 - DNA, 25 bp, Artificial
  probe
  misc_feature (1)..(25): SEQ ID NO: 355; WAN024AIF_at; Start 40; Stop 64
tactcttaaaatctacatttgtcaa

SEQ ID NO: 55633 - DNA, 25 bp, Artificial
  probe
  misc_feature (1)..(25): SEQ ID NO: 355; WAN024AIF_at; Start 276; Stop 300
gggactagcagtcttctattgcctt

SEQ ID NO: 55634 - DNA, 25 bp, Artificial
  probe
  misc_feature (1)..(25): SEQ ID NO: 355; WAN024AIF_at; Start 248; Stop 272
ctagctgatggaagtggaaatgata

SEQ ID NO: 55635 - DNA, 25 bp, Artificial
  probe
  misc_feature (1)..(25): SEQ ID NO: 355; WAN024AIF_at; Start 221; Stop 245
gatccctctgactcaatctaggtaa

SEQ ID NO: 55636 - DNA, 25 bp, Artificial
  probe
  misc_feature (1)..(25): SEQ ID NO: 355; WAN024AIF_at; Start 327; Stop 351
gaatacaaacttcagttggttggga

SEQ ID NO: 55637 - DNA, 25 bp, Artificial
  probe
  misc_feature (1)..(25): SEQ ID NO: 355; WAN024AIF_at; Start 82; Stop 106
tcttcgaaaaatagaattttaatca

SEQ ID NO: 55638 - DNA, 25 bp, Artificial
  probe
  misc_feature (1)..(25): SEQ ID NO: 355; WAN024AIF_at; Start 28; Stop 52
cactcatcagtatactcttaaaatc

SEQ ID NO: 55639 - DNA, 25 bp, Artificial
  probe
  misc_feature (1)..(25): SEQ ID NO: 355; WAN024AIF_at; Start 292; Stop 316
tattgcctttctaaaacagactagc

SEQ ID NO: 55640 - DNA, 25 bp, Artificial
  probe
  misc_feature (1)..(25): SEQ ID NO: 355; WAN024AIF_at; Start 308; Stop 332
cagactagcttgttcttaagaatac

SEQ ID NO: 55641 - DNA, 25 bp, Artificial
  probe
  misc_feature (1)..(25): SEQ ID NO: 355; WAN024AIF_at; Start 13; Stop 37
tacatttgtcaattacactcatcag

SEQ ID NO: 55642 - DNA, 25 bp, Artificial
  probe
  misc_feature (1)..(25): SEQ ID NO: 355; WAN024AIF_at; Start 180; Stop 204
caaccactaggggtgcgtaaagctg

SEQ ID NO: 55643 - DNA, 25 bp, Artificial
  probe
  misc_feature (1)..(25): SEQ ID NO: 355; WAN024AIF_at; Start 206; Stop 230
gattaacgactgttagatccctctg

SEQ ID NO: 55644 - DNA, 25 bp, Artificial
  probe
  misc_feature (1)..(25): SEQ ID NO: 355; WAN024AIF_at; Start 197; Stop 221
taaagctgagattaacgactgttag

SEQ ID NO: 55645 - DNA, 25 bp, Artificial
  probe
  misc_feature (1)..(25): SEQ ID NO: 355; WAN024AIF_at; Start 243; Stop 267
taatgctagctgatggaagtggaaa

SEQ ID NO: 55646 - DNA, 25 bp, Artificial
  probe
  misc_feature (1)..(25): SEQ ID NO: 355; WAN024AIF_at; Start 201; Stop 225
gctgagattaacgactgttagatcc

SEQ ID NO: 55647 - DNA, 25 bp, Artificial
  probe
  misc_feature (1)..(25): SEQ ID NO: 355; WAN024AIF_at; Start 296; Stop 320
gcctttctaaaacagactagcttgt

SEQ ID NO: 55648 - DNA, 25 bp, Artificial
  probe
  misc_feature (1)..(25): SEQ ID NO: 355; WAN024AIF_at; Start 104; Stop 128
tcatttgaaaaacgatttgcagtca

SEQ ID NO: 55649 - DNA, 25 bp, Artificial
  probe
  misc_feature (1)..(25): SEQ ID NO: 355; WAN024AIF_at; Start 252; Stop 276
ctgatggaagtggaaatgataatgg

SEQ ID NO: 55650 - DNA, 25 bp, Artificial
  probe
  misc_feature (1)..(25): SEQ ID NO: 355; WAN024AIF_at; Start 191; Stop 215
ggtgcgtaaagctgagattaacgac

SEQ ID NO: 55651 - DNA, 25 bp, Artificial
  probe
  misc_feature (1)..(25): SEQ ID NO: 355; WAN024AIF_at; Start 193; Stop 217
tgcgtaaagctgagattaacgactg

SEQ ID NO: 55652 - DNA, 25 bp, Artificial
  probe
  misc_feature (1)..(25): SEQ ID NO: 355; WAN024AIF_at; Start 230; Stop 254
gactcaatctaggtaatgctagctg

SEQ ID NO: 55653 - DNA, 25 bp, Artificial
  probe
  misc_feature (1)..(25): SEQ ID NO: 355; WAN024AIF_at; Start 209; Stop 233
taacgactgttagatccctctgact

SEQ ID NO: 55654 - DNA, 25 bp, Artificial
  probe
  misc_feature (1)..(25): SEQ ID NO: 355; WAN024AIF_at; Start 1; Stop 25
acctccaaaatctacatttgtcaat

SEQ ID NO: 55655 - DNA, 25 bp, Artificial
  probe
  misc_feature (1)..(25): SEQ ID NO: 355; WAN024AIF_at; Start 114; Stop 138
aacgatttgcagtcaaatattacta

SEQ ID NO: 55656 - DNA, 25 bp, Artificial
  probe
  misc_feature (1)..(25): SEQ ID NO: 355; WAN024AIF_at; Start 226; Stop 250
ctctgactcaatctaggtaatgcta

SEQ ID NO: 55657 - DNA, 25 bp, Artificial
  probe
  misc_feature (1)..(25): SEQ ID NO: 355; WAN024AIF_at; Start 262; Stop 286
tggaaatgataatggggactagcag

SEQ ID NO: 55658 - DNA, 25 bp, Artificial
  probe
  misc_feature (1)..(25): SEQ ID NO: 355; WAN024AIF_at; Start 234; Stop 258
caatctaggtaatgctagctgatgg

SEQ ID NO: 55659 - DNA, 25 bp, Artificial
  probe
  misc_feature (1)..(25): SEQ ID NO: 355; WAN024AIF_at; Start 239; Stop 263
taggtaatgctagctgatggaagtg

SEQ ID NO: 55660 - DNA, 25 bp, Artificial
  probe
  misc_feature (1)..(25): SEQ ID NO: 3269; WAN024AIG_at; Start 50; Stop 74
ctgttttagaaaggcaatagaagac

SEQ ID NO: 55661 - DNA, 25 bp, Artificial
  probe
  misc_feature (1)..(25): SEQ ID NO: 3269; WAN024AIG_at; Start 126; Stop 150
gagtcagagggatctaacagtcgtt

SEQ ID NO: 55662 - DNA, 25 bp, Artificial
  probe
  misc_feature (1)..(25): SEQ ID NO: 3269; WAN024AIG_at; Start 28; Stop 52
gtattcttaagaacaagctagtctg

SEQ ID NO: 55663 - DNA, 25 bp, Artificial
  probe
  misc_feature (1)..(25): SEQ ID NO: 3269; WAN024AIG_at; Start 308; Stop 332
gattttaagagtatactgatgagtg

SEQ ID NO: 55664 - DNA, 25 bp, Artificial
  probe
  misc_feature (1)..(25): SEQ ID NO: 3269; WAN024AIG_at; Start 130; Stop 154
cagagggatctaacagtcgttaatc

SEQ ID NO: 55665 - DNA, 25 bp, Artificial
  probe
  misc_feature (1)..(25): SEQ ID NO: 3269; WAN024AIG_at; Start 88; Stop 112
tatcatttccacttccatcagctag

SEQ ID NO: 55666 - DNA, 25 bp, Artificial
  probe
  misc_feature (1)..(25): SEQ ID NO: 3269; WAN024AIG_at; Start 122; Stop 146
gattgagtcagagggatctaacagt

SEQ ID NO: 55667 - DNA, 25 bp, Artificial
  probe
  misc_feature (1)..(25): SEQ ID NO: 3269; WAN024AIG_at; Start 152; Stop 176
atctcagctttacgcacccctagtg

SEQ ID NO: 55668 - DNA, 25 bp, Artificial
  probe
  misc_feature (1)..(25): SEQ ID NO: 3269; WAN024AIG_at; Start 69; Stop 93
gaagactgctagtccccattatcat

SEQ ID NO: 55669 - DNA, 25 bp, Artificial
  probe
  misc_feature (1)..(25): SEQ ID NO: 3269; WAN024AIG_at; Start 136; Stop 160
gatctaacagtcgttaatctcagct

SEQ ID NO: 55670 - DNA, 25 bp, Artificial
  probe
  misc_feature (1)..(25): SEQ ID NO: 3269; WAN024AIG_at; Start 148; Stop 172
gttaatctcagctttacgcacccct

SEQ ID NO: 55671 - DNA, 25 bp, Artificial
  probe
  misc_feature (1)..(25): SEQ ID NO: 3269; WAN024AIG_at; Start 97; Stop 121
cacttccatcagctagcattaccta

SEQ ID NO: 55672 - DNA, 25 bp, Artificial
  probe
  misc_feature (1)..(25): SEQ ID NO: 3269; WAN024AIG_at; Start 75; Stop 99
tgctagtccccattatcatttccac

SEQ ID NO: 55673 - DNA, 25 bp, Artificial
  probe
  misc_feature (1)..(25): SEQ ID NO: 3269; WAN024AIG_at; Start 254; Stop 278
tgattaaaattctatttttcgaaga

SEQ ID NO: 55674 - DNA, 25 bp, Artificial
  probe
  misc_feature (1)..(25): SEQ ID NO: 3269; WAN024AIG_at; Start 156; Stop 180
cagctttacgcacccctagtggttg

SEQ ID NO: 55675 - DNA, 25 bp, Artificial
  probe
  misc_feature (1)..(25): SEQ ID NO: 3269; WAN024AIG_at; Start 237; Stop 261
gcaaatcgtttttcaaatgattaaa

SEQ ID NO: 55676 - DNA, 25 bp, Artificial
  probe
  misc_feature (1)..(25): SEQ ID NO: 3269; WAN024AIG_at; Start 232; Stop 256
tgactgcaaatcgtttttcaaatga

SEQ ID NO: 55677 - DNA, 25 bp, Artificial
  probe
  misc_feature (1)..(25): SEQ ID NO: 3269; WAN024AIG_at; Start 220; Stop 244
tatagtaatatttgactgcaaatcg

SEQ ID NO: 55678 - DNA, 25 bp, Artificial
  probe
  misc_feature (1)..(25): SEQ ID NO: 3269; WAN024AIG_at; Start 321; Stop 345
tactgatgagtgtaattgacaaatg

SEQ ID NO: 55679 - DNA, 25 bp, Artificial
  probe
  misc_feature (1)..(25): SEQ ID NO: 3269; WAN024AIG_at; Start 15; Stop 39
ccaactgaagtttgtattcttaaga

SEQ ID NO: 55680 - DNA, 25 bp, Artificial
  probe
  misc_feature (1)..(25): SEQ ID NO: 3269; WAN024AIG_at; Start 63; Stop 87
gcaatagaagactgctagtccccat

SEQ ID NO: 55681 - DNA, 25 bp, Artificial
  probe
  misc_feature (1)..(25): SEQ ID NO: 3269; WAN024AIG_at; Start 54; Stop 78
tttagaaaggcaatagaagactgct

SEQ ID NO: 55682 - DNA, 25 bp, Artificial
  probe
  misc_feature (1)..(25): SEQ ID NO: 3269; WAN024AIG_at; Start 300; Stop 324
caaatgtagattttaagagtatact

SEQ ID NO: 55683 - DNA, 25 bp, Artificial
  probe
  misc_feature (1)..(25): SEQ ID NO: 3269; WAN024AIG_at; Start 60; Stop 84
aaggcaatagaagactgctagtccc

SEQ ID NO: 55684 - DNA, 25 bp, Artificial
  probe
  misc_feature (1)..(25): SEQ ID NO: 3269; WAN024AIG_at; Start 7; Stop 31
cctcccaaccaactgaagtttgtat

SEQ ID NO: 55685 - DNA, 25 bp, Artificial
  probe
  misc_feature (1)..(25): SEQ ID NO: 3269; WAN024AIG_at; Start 110; Stop 134
tagcattacctagattgagtcagag

SEQ ID NO: 55686 - DNA, 25 bp, Artificial
  probe
  misc_feature (1)..(25): SEQ ID NO: 3269; WAN024AIG_at; Start 116; Stop 140
tacctagattgagtcagagggatct

SEQ ID NO: 55687 - DNA, 25 bp, Artificial
  probe
  misc_feature (1)..(25): SEQ ID NO: 3269; WAN024AIG_at; Start 91; Stop 115
catttccacttccatcagctagcat

SEQ ID NO: 55688 - DNA, 25 bp, Artificial
  probe
  misc_feature (1)..(25): SEQ ID NO: 3269; WAN024AIG_at; Start 285; Stop 309
tatttctataattgacaaatgtaga

SEQ ID NO: 55689 - DNA, 25 bp, Artificial
  probe
  misc_feature (1)..(25): SEQ ID NO: 3269; WAN024AIG_at; Start 113; Stop 137
cattacctagattgagtcagaggga

SEQ ID NO: 55690 - DNA, 25 bp, Artificial
  probe
  misc_feature (1)..(25): SEQ ID NO: 3269; WAN024AIG_at; Start 103; Stop 127
catcagctagcattacctagattga

SEQ ID NO: 55691 - DNA, 25 bp, Artificial
  probe
  misc_feature (1)..(25): SEQ ID NO: 3269; WAN024AIG_at; Start 143; Stop 167
cagtcgttaatctcagctttacgca

SEQ ID NO: 55692 - DNA, 25 bp, Artificial
  probe
  misc_feature (1)..(25): SEQ ID NO: 3269; WAN024AIG_at; Start 41; Stop 65
caagctagtctgttttagaaaggca

SEQ ID NO: 55693 - DNA, 25 bp, Artificial
  probe
  misc_feature (1)..(25): SEQ ID NO: 3269; WAN024AIG_at; Start 325; Stop 349
gatgagtgtaattgacaaatgtaga

SEQ ID NO: 55694 - DNA, 25 bp, Artificial
  probe
  misc_feature (1)..(25): SEQ ID NO: 3163; WAN024AIH_at; Start 6; Stop 30
cttctcctctctttacttgttagta

SEQ ID NO: 55695 - DNA, 25 bp, Artificial
  probe
  misc_feature (1)..(25): SEQ ID NO: 3163; WAN024AIH_at; Start 44; Stop 68
caagaaatatcaagcaaaatcgtaa

SEQ ID NO: 55696 - DNA, 25 bp, Artificial
  probe
  misc_feature (1)..(25): SEQ ID NO: 3163; WAN024AIH_at; Start 8; Stop 32
tctcctctctttacttgttagtaat

SEQ ID NO: 55697 - DNA, 25 bp, Artificial
  probe
  misc_feature (1)..(25): SEQ ID NO: 3163; WAN024AIH_at; Start 42; Stop 66
accaagaaatatcaagcaaaatcgt

SEQ ID NO: 55698 - DNA, 25 bp, Artificial
  probe
  misc_feature (1)..(25): SEQ ID NO: 3163; WAN024AIH_at; Start 34; Stop 58
aataaaacaccaagaaatatcaagc

SEQ ID NO: 55699 - DNA, 25 bp, Artificial
  probe
  misc_feature (1)..(25): SEQ ID NO: 3163; WAN024AIH_at; Start 1; Stop 25
atttacttctcctctctttacttgt

SEQ ID NO: 55700 - DNA, 25 bp, Artificial
  probe
  misc_feature (1)..(25): SEQ ID NO: 3163; WAN024AIH_at; Start 50; Stop 74
atatcaagcaaaatcgtaattccac

SEQ ID NO: 55701 - DNA, 25 bp, Artificial
  probe
  misc_feature (1)..(25): SEQ ID NO: 3163; WAN024AIH_at; Start 48; Stop 72
aaatatcaagcaaaatcgtaattcc

SEQ ID NO: 55702 - DNA, 25 bp, Artificial
  probe
  misc_feature (1)..(25): SEQ ID NO: 3163; WAN024AIH_at; Start 36; Stop 60
taaaacaccaagaaatatcaagcaa

SEQ ID NO: 55703 - DNA, 25 bp, Artificial
  probe
  misc_feature (1)..(25): SEQ ID NO: 3163; WAN024AIH_at; Start 38; Stop 62
aaacaccaagaaatatcaagcaaaa

SEQ ID NO: 55704 - DNA, 25 bp, Artificial
  probe
  misc_feature (1)..(25): SEQ ID NO: 3163; WAN024AIH_at; Start 13; Stop 37
tctctttacttgttagtaattaata

SEQ ID NO: 55705 - DNA, 25 bp, Artificial
  probe
  misc_feature (1)..(25): SEQ ID NO: 3163; WAN024AIH_at; Start 33; Stop 57
taataaaacaccaagaaatatcaag

SEQ ID NO: 55706 - DNA, 25 bp, Artificial
  probe
  misc_feature (1)..(25): SEQ ID NO: 3163; WAN024AIH_at; Start 39; Stop 63
aacaccaagaaatatcaagcaaaat

SEQ ID NO: 55707 - DNA, 25 bp, Artificial
  probe
  misc_feature (1)..(25): SEQ ID NO: 3163; WAN024AIH_at; Start 47; Stop 71
gaaatatcaagcaaaatcgtaattc

SEQ ID NO: 55708 - DNA, 25 bp, Artificial
  probe
  misc_feature (1)..(25): SEQ ID NO: 3163; WAN024AIH_at; Start 45; Stop 69
aagaaatatcaagcaaaatcgtaat

SEQ ID NO: 55709 - DNA, 25 bp, Artificial
  probe
  misc_feature (1)..(25): SEQ ID NO: 3163; WAN024AIH_at; Start 40; Stop 64
acaccaagaaatatcaagcaaaatc

SEQ ID NO: 55710 - DNA, 25 bp, Artificial
  probe
  misc_feature (1)..(25): SEQ ID NO: 3163; WAN024AIH_at; Start 46; Stop 70
agaaatatcaagcaaaatcgtaatt

SEQ ID NO: 55711 - DNA, 25 bp, Artificial
  probe
  misc_feature (1)..(25): SEQ ID NO: 3163; WAN024AIH_at; Start 35; Stop 59
ataaaacaccaagaaatatcaagca

SEQ ID NO: 55712 - DNA, 25 bp, Artificial
  probe
  misc_feature (1)..(25): SEQ ID NO: 3163; WAN024AIH_at; Start 12; Stop 36
ctctctttacttgttagtaattaat

SEQ ID NO: 55713 - DNA, 25 bp, Artificial
  probe
  misc_feature (1)..(25): SEQ ID NO: 3163; WAN024AIH_at; Start 43; Stop 67
ccaagaaatatcaagcaaaatcgta

SEQ ID NO: 55714 - DNA, 25 bp, Artificial
  probe
  misc_feature (1)..(25): SEQ ID NO: 3163; WAN024AIH_at; Start 4; Stop 28
tacttctcctctctttacttgttag

SEQ ID NO: 55715 - DNA, 25 bp, Artificial
  probe
  misc_feature (1)..(25): SEQ ID NO: 3163; WAN024AIH_at; Start 49; Stop 73
aatatcaagcaaaatcgtaattcca

SEQ ID NO: 55716 - DNA, 25 bp, Artificial
  probe
  misc_feature (1)..(25): SEQ ID NO: 3163; WAN024AIH_at; Start 9; Stop 33
ctcctctctttacttgttagtaatt

SEQ ID NO: 55717 - DNA, 25 bp, Artificial
  probe
  misc_feature (1)..(25): SEQ ID NO: 3163; WAN024AIH_at; Start 7; Stop 31
ttctcctctctttacttgttagtaa

SEQ ID NO: 55718 - DNA, 25 bp, Artificial
  probe
  misc_feature (1)..(25): SEQ ID NO: 3163; WAN024AIH_at; Start 37; Stop 61
aaaacaccaagaaatatcaagcaaa

SEQ ID NO: 55719 - DNA, 25 bp, Artificial
  probe
  misc_feature (1)..(25): SEQ ID NO: 3163; WAN024AIH_at; Start 32; Stop 56
ttaataaaacaccaagaaatatcaa

SEQ ID NO: 55720 - DNA, 25 bp, Artificial
  probe
  misc_feature (1)..(25): SEQ ID NO: 3163; WAN024AIH_at; Start 3; Stop 27
ttacttctcctctctttacttgtta

SEQ ID NO: 55721 - DNA, 25 bp, Artificial
  probe
  misc_feature (1)..(25): SEQ ID NO: 3163; WAN024AIH_at; Start 5; Stop 29
acttctcctctctttacttgttagt

SEQ ID NO: 55722 - DNA, 25 bp, Artificial
  probe
  misc_feature (1)..(25): SEQ ID NO: 3163; WAN024AIH_at; Start 41; Stop 65
caccaagaaatatcaagcaaaatcg

SEQ ID NO: 55723 - DNA, 25 bp, Artificial
  probe
  misc_feature (1)..(25): SEQ ID NO: 3163; WAN024AIH_at; Start 31; Stop 55
attaataaaacaccaagaaatatca

SEQ ID NO: 55724 - DNA, 25 bp, Artificial
  probe
  misc_feature (1)..(25): SEQ ID NO: 3163; WAN024AIH_at; Start 10; Stop 34
tcctctctttacttgttagtaatta

SEQ ID NO: 55725 - DNA, 25 bp, Artificial
  probe
  misc_feature (1)..(25): SEQ ID NO: 4120; WAN024AII_at; Start 12; Stop 36
attttgcttgatatttcttggtgtt

SEQ ID NO: 55726 - DNA, 25 bp, Artificial
  probe
  misc_feature (1)..(25): SEQ ID NO: 4120; WAN024AII_at; Start 17; Stop 41
gcttgatatttcttggtgttttatt

SEQ ID NO: 55727 - DNA, 25 bp, Artificial
  probe
  misc_feature (1)..(25): SEQ ID NO: 4120; WAN024AII_at; Start 38; Stop 62
tattaattactaacaagtaaagaga

SEQ ID NO: 55728 - DNA, 25 bp, Artificial
  probe
  misc_feature (1)..(25): SEQ ID NO: 4120; WAN024AII_at; Start 18; Stop 42
cttgatatttcttggtgttttatta

SEQ ID NO: 55729 - DNA, 25 bp, Artificial
  probe
  misc_feature (1)..(25): SEQ ID NO: 4120; WAN024AII_at; Start 4; Stop 28
gaattacgattttgcttgatatttc

SEQ ID NO: 55730 - DNA, 25 bp, Artificial
  probe
  misc_feature (1)..(25): SEQ ID NO: 4120; WAN024AII_at; Start 42; Stop 66
aattactaacaagtaaagagaggag

SEQ ID NO: 55731 - DNA, 25 bp, Artificial
  probe
  misc_feature (1)..(25): SEQ ID NO: 4120; WAN024AII_at; Start 41; Stop 65
taattactaacaagtaaagagagga

SEQ ID NO: 55732 - DNA, 25 bp, Artificial
  probe
  misc_feature (1)..(25): SEQ ID NO: 4120; WAN024AII_at; Start 48; Stop 72
taacaagtaaagagaggagaagtaa

SEQ ID NO: 55733 - DNA, 25 bp, Artificial
  probe
  misc_feature (1)..(25): SEQ ID NO: 4120; WAN024AII_at; Start 19; Stop 43
ttgatatttcttggtgttttattaa

SEQ ID NO: 55734 - DNA, 25 bp, Artificial
  probe
  misc_feature (1)..(25): SEQ ID NO: 4120; WAN024AII_at; Start 16; Stop 40
tgcttgatatttcttggtgttttat

SEQ ID NO: 55735 - DNA, 25 bp, Artificial
  probe
  misc_feature (1)..(25): SEQ ID NO: 4120; WAN024AII_at; Start 43; Stop 67
attactaacaagtaaagagaggaga

SEQ ID NO: 55736 - DNA, 25 bp, Artificial
  probe
  misc_feature (1)..(25): SEQ ID NO: 4120; WAN024AII_at; Start 47; Stop 71
ctaacaagtaaagagaggagaagta

SEQ ID NO: 55737 - DNA, 25 bp, Artificial
  probe
  misc_feature (1)..(25): SEQ ID NO: 4120; WAN024AII_at; Start 10; Stop 34
cgattttgcttgatatttcttggtg

SEQ ID NO: 55738 - DNA, 25 bp, Artificial
  probe
  misc_feature (1)..(25): SEQ ID NO: 4120; WAN024AII_at; Start 1; Stop 25
gtggaattacgattttgcttgatat

SEQ ID NO: 55739 - DNA, 25 bp, Artificial
  probe
  misc_feature (1)..(25): SEQ ID NO: 4120; WAN024AII_at; Start 46; Stop 70
actaacaagtaaagagaggagaagt

SEQ ID NO: 55740 - DNA, 25 bp, Artificial
  probe
  misc_feature (1)..(25): SEQ ID NO: 4120; WAN024AII_at; Start 5; Stop 29
aattacgattttgcttgatatttct

SEQ ID NO: 55741 - DNA, 25 bp, Artificial
  probe
  misc_feature (1)..(25): SEQ ID NO: 4120; WAN024AII_at; Start 11; Stop 35
gattttgcttgatatttcttggtgt

SEQ ID NO: 55742 - DNA, 25 bp, Artificial
  probe
  misc_feature (1)..(25): SEQ ID NO: 4120; WAN024AII_at; Start 15; Stop 39
ttgcttgatatttcttggtgtttta

SEQ ID NO: 55743 - DNA, 25 bp, Artificial
  probe
  misc_feature (1)..(25): SEQ ID NO: 4120; WAN024AII_at; Start 2; Stop 26
tggaattacgattttgcttgatatt

SEQ ID NO: 55744 - DNA, 25 bp, Artificial
  probe
  misc_feature (1)..(25): SEQ ID NO: 4120; WAN024AII_at; Start 44; Stop 68
ttactaacaagtaaagagaggagaa

SEQ ID NO: 55745 - DNA, 25 bp, Artificial
  probe
  misc_feature (1)..(25): SEQ ID NO: 4120; WAN024AII_at; Start 13; Stop 37
ttttgcttgatatttcttggtgttt

SEQ ID NO: 55746 - DNA, 25 bp, Artificial
  probe
  misc_feature (1)..(25): SEQ ID NO: 4120; WAN024AII_at; Start 9; Stop 33
acgattttgcttgatatttcttggt

SEQ ID NO: 55747 - DNA, 25 bp, Artificial
  probe
  misc_feature (1)..(25): SEQ ID NO: 4120; WAN024AII_at; Start 20; Stop 44
tgatatttcttggtgttttattaat

SEQ ID NO: 55748 - DNA, 25 bp, Artificial
  probe
  misc_feature (1)..(25): SEQ ID NO: 4120; WAN024AII_at; Start 8; Stop 32
tacgattttgcttgatatttcttgg

SEQ ID NO: 55749 - DNA, 25 bp, Artificial
  probe
  misc_feature (1)..(25): SEQ ID NO: 4120; WAN024AII_at; Start 14; Stop 38
tttgcttgatatttcttggtgtttt

SEQ ID NO: 55750 - DNA, 25 bp, Artificial
  probe
  misc_feature (1)..(25): SEQ ID NO: 4120; WAN024AII_at; Start 39; Stop 63
attaattactaacaagtaaagagag

SEQ ID NO: 55751 - DNA, 25 bp, Artificial
  probe
  misc_feature (1)..(25): SEQ ID NO: 4120; WAN024AII_at; Start 6; Stop 30
attacgattttgcttgatatttctt

SEQ ID NO: 55752 - DNA, 25 bp, Artificial
  probe
  misc_feature (1)..(25): SEQ ID NO: 4120; WAN024AII_at; Start 45; Stop 69
tactaacaagtaaagagaggagaag

SEQ ID NO: 55753 - DNA, 25 bp, Artificial
  probe
  misc_feature (1)..(25): SEQ ID NO: 4120; WAN024AII_at; Start 50; Stop 74
acaagtaaagagaggagaagtaaat

SEQ ID NO: 55754 - DNA, 25 bp, Artificial
  probe
  misc_feature (1)..(25): SEQ ID NO: 4120; WAN024AII_at; Start 7; Stop 31
ttacgattttgcttgatatttcttg

SEQ ID NO: 55755 - DNA, 25 bp, Artificial
  probe
  misc_feature (1)..(25): SEQ ID NO: 4120; WAN024AII_at; Start 3; Stop 27
ggaattacgattttgcttgatattt

SEQ ID NO: 55756 - DNA, 25 bp, Artificial
  probe
  misc_feature (1)..(25): SEQ ID NO: 510; WAN024AIJ_at; Start 27; Stop 51
aatacacgaagaaaaacctccacat

SEQ ID NO: 55757 - DNA, 25 bp, Artificial
  probe
  misc_feature (1)..(25): SEQ ID NO: 510; WAN024AIJ_at; Start 46; Stop 70
ccacattcagtggaggcaatctgtt

SEQ ID NO: 55758 - DNA, 25 bp, Artificial
  probe
  misc_feature (1)..(25): SEQ ID NO: 510; WAN024AIJ_at; Start 14; Stop 38
aatttattcttccaatacacgaaga

SEQ ID NO: 55759 - DNA, 25 bp, Artificial
  probe
  misc_feature (1)..(25): SEQ ID NO: 510; WAN024AIJ_at; Start 37; Stop 61
gaaaaacctccacattcagtggagg

SEQ ID NO: 55760 - DNA, 25 bp, Artificial
  probe
  misc_feature (1)..(25): SEQ ID NO: 510; WAN024AIJ_at; Start 10; Stop 34
tagcaatttattcttccaatacacg

SEQ ID NO: 55761 - DNA, 25 bp, Artificial
  probe
  misc_feature (1)..(25): SEQ ID NO: 510; WAN024AIJ_at; Start 45; Stop 69
tccacattcagtggaggcaatctgt

SEQ ID NO: 55762 - DNA, 25 bp, Artificial
  probe
  misc_feature (1)..(25): SEQ ID NO: 510; WAN024AIJ_at; Start 49; Stop 73
cattcagtggaggcaatctgtttta

SEQ ID NO: 55763 - DNA, 25 bp, Artificial
  probe
  misc_feature (1)..(25): SEQ ID NO: 510; WAN024AIJ_at; Start 13; Stop 37
caatttattcttccaatacacgaag

SEQ ID NO: 55764 - DNA, 25 bp, Artificial
  probe
  misc_feature (1)..(25): SEQ ID NO: 510; WAN024AIJ_at; Start 39; Stop 63
aaaacctccacattcagtggaggca

SEQ ID NO: 55765 - DNA, 25 bp, Artificial
  probe
  misc_feature (1)..(25): SEQ ID NO: 510; WAN024AIJ_at; Start 33; Stop 57
cgaagaaaaacctccacattcagtg

SEQ ID NO: 55766 - DNA, 25 bp, Artificial
  probe
  misc_feature (1)..(25): SEQ ID NO: 510; WAN024AIJ_at; Start 18; Stop 42
tattcttccaatacacgaagaaaaa

SEQ ID NO: 55767 - DNA, 25 bp, Artificial
  probe
  misc_feature (1)..(25): SEQ ID NO: 510; WAN024AIJ_at; Start 38; Stop 62
aaaaacctccacattcagtggaggc

SEQ ID NO: 55768 - DNA, 25 bp, Artificial
  probe
  misc_feature (1)..(25): SEQ ID NO: 510; WAN024AIJ_at; Start 47; Stop 71
cacattcagtggaggcaatctgttt

SEQ ID NO: 55769 - DNA, 25 bp, Artificial
  probe
  misc_feature (1)..(25): SEQ ID NO: 510; WAN024AIJ_at; Start 29; Stop 53
tacacgaagaaaaacctccacattc

SEQ ID NO: 55770 - DNA, 25 bp, Artificial
  probe
  misc_feature (1)..(25): SEQ ID NO: 510; WAN024AIJ_at; Start 12; Stop 36
gcaatttattcttccaatacacgaa

SEQ ID NO: 55771 - DNA, 25 bp, Artificial
  probe
  misc_feature (1)..(25): SEQ ID NO: 510; WAN024AIJ_at; Start 3; Stop 27
ttttcgatagcaatttattcttcca

SEQ ID NO: 55772 - DNA, 25 bp, Artificial
  probe
  misc_feature (1)..(25): SEQ ID NO: 510; WAN024AIJ_at; Start 41; Stop 65
aacctccacattcagtggaggcaat

SEQ ID NO: 55773 - DNA, 25 bp, Artificial
  probe
  misc_feature (1)..(25): SEQ ID NO: 510; WAN024AIJ_at; Start 8; Stop 32
gatagcaatttattcttccaataca

SEQ ID NO: 55774 - DNA, 25 bp, Artificial
  probe
  misc_feature (1)..(25): SEQ ID NO: 510; WAN024AIJ_at; Start 35; Stop 59
aagaaaaacctccacattcagtgga

SEQ ID NO: 55775 - DNA, 25 bp, Artificial
  probe
  misc_feature (1)..(25): SEQ ID NO: 510; WAN024AIJ_at; Start 31; Stop 55
cacgaagaaaaacctccacattcag

SEQ ID NO: 55776 - DNA, 25 bp, Artificial
  probe
  misc_feature (1)..(25): SEQ ID NO: 510; WAN024AIJ_at; Start 6; Stop 30
tcgatagcaatttattcttccaata

SEQ ID NO: 55777 - DNA, 25 bp, Artificial
  probe
  misc_feature (1)..(25): SEQ ID NO: 510; WAN024AIJ_at; Start 30; Stop 54
acacgaagaaaaacctccacattca

SEQ ID NO: 55778 - DNA, 25 bp, Artificial
  probe
  misc_feature (1)..(25): SEQ ID NO: 510; WAN024AIJ_at; Start 36; Stop 60
agaaaaacctccacattcagtggag

SEQ ID NO: 55779 - DNA, 25 bp, Artificial
  probe
  misc_feature (1)..(25): SEQ ID NO: 510; WAN024AIJ_at; Start 26; Stop 50
caatacacgaagaaaaacctccaca

SEQ ID NO: 55780 - DNA, 25 bp, Artificial
  probe
  misc_feature (1)..(25): SEQ ID NO: 510; WAN024AIJ_at; Start 34; Stop 58
gaagaaaaacctccacattcagtgg

SEQ ID NO: 55781 - DNA, 25 bp, Artificial
  probe
  misc_feature (1)..(25): SEQ ID NO: 510; WAN024AIJ_at; Start 11; Stop 35
agcaatttattcttccaatacacga

SEQ ID NO: 55782 - DNA, 25 bp, Artificial
  probe
  misc_feature (1)..(25): SEQ ID NO: 510; WAN024AIJ_at; Start 1; Stop 25
agttttcgatagcaatttattcttc

SEQ ID NO: 55783 - DNA, 25 bp, Artificial
  probe
  misc_feature (1)..(25): SEQ ID NO: 510; WAN024AIJ_at; Start 24; Stop 48
tccaatacacgaagaaaaacctcca

SEQ ID NO: 55784 - DNA, 25 bp, Artificial
  probe
  misc_feature (1)..(25): SEQ ID NO: 510; WAN024AIJ_at; Start 44; Stop 68
ctccacattcagtggaggcaatctg

SEQ ID NO: 55785 - DNA, 25 bp, Artificial
  probe
  misc_feature (1)..(25): SEQ ID NO: 510; WAN024AIJ_at; Start 32; Stop 56
acgaagaaaaacctccacattcagt

SEQ ID NO: 55786 - DNA, 25 bp, Artificial
  probe
  misc_feature (1)..(25): SEQ ID NO: 510; WAN024AIJ_at; Start 28; Stop 52
atacacgaagaaaaacctccacatt

SEQ ID NO: 55787 - DNA, 25 bp, Artificial
  probe
  misc_feature (1)..(25): SEQ ID NO: 510; WAN024AIJ_at; Start 40; Stop 64
aaacctccacattcagtggaggcaa

SEQ ID NO: 55788 - DNA, 25 bp, Artificial
  probe
  misc_feature (1)..(25): SEQ ID NO: 510; WAN024AIJ_at; Start 43; Stop 67
cctccacattcagtggaggcaatct

SEQ ID NO: 55789 - DNA, 25 bp, Artificial
  probe
  misc_feature (1)..(25): SEQ ID NO: 510; WAN024AIJ_at; Start 48; Stop 72
acattcagtggaggcaatctgtttt

SEQ ID NO: 55790 - DNA, 25 bp, Artificial
  probe
  misc_feature (1)..(25): SEQ ID NO: 4399; WAN024AIK_at; Start 44; Stop 68
tattggaagaataaattgctatcga

SEQ ID NO: 55791 - DNA, 25 bp, Artificial
  probe
  misc_feature (1)..(25): SEQ ID NO: 4399; WAN024AIK_at; Start 22; Stop 46
aatgtggaggtttttcttcgtgtat

SEQ ID NO: 55792 - DNA, 25 bp, Artificial
  probe
  misc_feature (1)..(25): SEQ ID NO: 4399; WAN024AIK_at; Start 45; Stop 69
attggaagaataaattgctatcgaa

SEQ ID NO: 55793 - DNA, 25 bp, Artificial
  probe
  misc_feature (1)..(25): SEQ ID NO: 4399; WAN024AIK_at; Start 21; Stop 45
gaatgtggaggtttttcttcgtgta

SEQ ID NO: 55794 - DNA, 25 bp, Artificial
  probe
  misc_feature (1)..(25): SEQ ID NO: 4399; WAN024AIK_at; Start 18; Stop 42
actgaatgtggaggtttttcttcgt

SEQ ID NO: 55795 - DNA, 25 bp, Artificial
  probe
  misc_feature (1)..(25): SEQ ID NO: 4399; WAN024AIK_at; Start 7; Stop 31
agattgcctccactgaatgtggagg

SEQ ID NO: 55796 - DNA, 25 bp, Artificial
  probe
  misc_feature (1)..(25): SEQ ID NO: 4399; WAN024AIK_at; Start 12; Stop 36
gcctccactgaatgtggaggttttt

SEQ ID NO: 55797 - DNA, 25 bp, Artificial
  probe
  misc_feature (1)..(25): SEQ ID NO: 4399; WAN024AIK_at; Start 24; Stop 48
tgtggaggtttttcttcgtgtattg

SEQ ID NO: 55798 - DNA, 25 bp, Artificial
  probe
  misc_feature (1)..(25): SEQ ID NO: 4399; WAN024AIK_at; Start 42; Stop 66
tgtattggaagaataaattgctatc

SEQ ID NO: 55799 - DNA, 25 bp, Artificial
  probe
  misc_feature (1)..(25): SEQ ID NO: 4399; WAN024AIK_at; Start 40; Stop 64
cgtgtattggaagaataaattgcta

SEQ ID NO: 55800 - DNA, 25 bp, Artificial
  probe
  misc_feature (1)..(25): SEQ ID NO: 4399; WAN024AIK_at; Start 15; Stop 39
tccactgaatgtggaggtttttctt

SEQ ID NO: 55801 - DNA, 25 bp, Artificial
  probe
  misc_feature (1)..(25): SEQ ID NO: 4399; WAN024AIK_at; Start 3; Stop 27
aaacagattgcctccactgaatgtg

SEQ ID NO: 55802 - DNA, 25 bp, Artificial
  probe
  misc_feature (1)..(25): SEQ ID NO: 4399; WAN024AIK_at; Start 17; Stop 41
cactgaatgtggaggtttttcttcg

SEQ ID NO: 55803 - DNA, 25 bp, Artificial
  probe
  misc_feature (1)..(25): SEQ ID NO: 4399; WAN024AIK_at; Start 38; Stop 62
ttcgtgtattggaagaataaattgc

SEQ ID NO: 55804 - DNA, 25 bp, Artificial
  probe
  misc_feature (1)..(25): SEQ ID NO: 4399; WAN024AIK_at; Start 16; Stop 40
ccactgaatgtggaggtttttcttc

SEQ ID NO: 55805 - DNA, 25 bp, Artificial
  probe
  misc_feature (1)..(25): SEQ ID NO: 4399; WAN024AIK_at; Start 9; Stop 33
attgcctccactgaatgtggaggtt

SEQ ID NO: 55806 - DNA, 25 bp, Artificial
  probe
  misc_feature (1)..(25): SEQ ID NO: 4399; WAN024AIK_at; Start 8; Stop 32
gattgcctccactgaatgtggaggt

SEQ ID NO: 55807 - DNA, 25 bp, Artificial
  probe
  misc_feature (1)..(25): SEQ ID NO: 4399; WAN024AIK_at; Start 39; Stop 63
tcgtgtattggaagaataaattgct

SEQ ID NO: 55808 - DNA, 25 bp, Artificial
  probe
  misc_feature (1)..(25): SEQ ID NO: 4399; WAN024AIK_at; Start 47; Stop 71
tggaagaataaattgctatcgaaaa

SEQ ID NO: 55809 - DNA, 25 bp, Artificial
  probe
  misc_feature (1)..(25): SEQ ID NO: 4399; WAN024AIK_at; Start 43; Stop 67
gtattggaagaataaattgctatcg

SEQ ID NO: 55810 - DNA, 25 bp, Artificial
  probe
  misc_feature (1)..(25): SEQ ID NO: 4399; WAN024AIK_at; Start 13; Stop 37
cctccactgaatgtggaggtttttc

SEQ ID NO: 55811 - DNA, 25 bp, Artificial
  probe
  misc_feature (1)..(25): SEQ ID NO: 4399; WAN024AIK_at; Start 46; Stop 70
ttggaagaataaattgctatcgaaa

SEQ ID NO: 55812 - DNA, 25 bp, Artificial
  probe
  misc_feature (1)..(25): SEQ ID NO: 4399; WAN024AIK_at; Start 6; Stop 30
cagattgcctccactgaatgtggag

SEQ ID NO: 55813 - DNA, 25 bp, Artificial
  probe
  misc_feature (1)..(25): SEQ ID NO: 4399; WAN024AIK_at; Start 48; Stop 72
ggaagaataaattgctatcgaaaac

SEQ ID NO: 55814 - DNA, 25 bp, Artificial
  probe
  misc_feature (1)..(25): SEQ ID NO: 4399; WAN024AIK_at; Start 2; Stop 26
aaaacagattgcctccactgaatgt

SEQ ID NO: 55815 - DNA, 25 bp, Artificial
  probe
  misc_feature (1)..(25): SEQ ID NO: 4399; WAN024AIK_at; Start 10; Stop 34
ttgcctccactgaatgtggaggttt

SEQ ID NO: 55816 - DNA, 25 bp, Artificial
  probe
  misc_feature (1)..(25): SEQ ID NO: 4399; WAN024AIK_at; Start 49; Stop 73
gaagaataaattgctatcgaaaact

SEQ ID NO: 55817 - DNA, 25 bp, Artificial
  probe
  misc_feature (1)..(25): SEQ ID NO: 4399; WAN024AIK_at; Start 20; Stop 44
tgaatgtggaggtttttcttcgtgt

SEQ ID NO: 55818 - DNA, 25 bp, Artificial
  probe
  misc_feature (1)..(25): SEQ ID NO: 4399; WAN024AIK_at; Start 14; Stop 38
ctccactgaatgtggaggtttttct

SEQ ID NO: 55819 - DNA, 25 bp, Artificial
  probe
  misc_feature (1)..(25): SEQ ID NO: 4399; WAN024AIK_at; Start 26; Stop 50
tggaggtttttcttcgtgtattgga

SEQ ID NO: 55820 - DNA, 25 bp, Artificial
  probe
  misc_feature (1)..(25): SEQ ID NO: 4399; WAN024AIK_at; Start 4; Stop 28
aacagattgcctccactgaatgtgg

SEQ ID NO: 55821 - DNA, 25 bp, Artificial
  probe
  misc_feature (1)..(25): SEQ ID NO: 4399; WAN024AIK_at; Start 5; Stop 29
acagattgcctccactgaatgtgga

SEQ ID NO: 55822 - DNA, 25 bp, Artificial
  probe
  misc_feature (1)..(25): SEQ ID NO: 4399; WAN024AIK_at; Start 19; Stop 43
ctgaatgtggaggtttttcttcgtg

SEQ ID NO: 55823 - DNA, 25 bp, Artificial
  probe
  misc_feature (1)..(25): SEQ ID NO: 4399; WAN024AIK_at; Start 11; Stop 35
tgcctccactgaatgtggaggtttt

SEQ ID NO: 55824 - DNA, 25 bp, Artificial
  probe
  misc_feature (1)..(25): SEQ ID NO: 116; WAN024AIL_at; Start 181; Stop 205
tgctgccaggcatttgaactacttt

SEQ ID NO: 55825 - DNA, 25 bp, Artificial
  probe
  misc_feature (1)..(25): SEQ ID NO: 116; WAN024AIL_at; Start 164; Stop 188
gaatcgttgagattttttgctgcca

SEQ ID NO: 55826 - DNA, 25 bp, Artificial
  probe
  misc_feature (1)..(25): SEQ ID NO: 116; WAN024AIL_at; Start 569; Stop 593
aattcagtctctttttgaatcaaaa

SEQ ID NO: 55827 - DNA, 25 bp, Artificial
  probe
  misc_feature (1)..(25): SEQ ID NO: 116; WAN024AIL_at; Start 168; Stop 192
cgttgagattttttgctgccaggca

SEQ ID NO: 55828 - DNA, 25 bp, Artificial
  probe
  misc_feature (1)..(25): SEQ ID NO: 116; WAN024AIL_at; Start 307; Stop 331
tactgtttaagcaagatactatcct

SEQ ID NO: 55829 - DNA, 25 bp, Artificial
  probe
  misc_feature (1)..(25): SEQ ID NO: 116; WAN024AIL_at; Start 399; Stop 423
gggaatccaagtcaatttctagtac

SEQ ID NO: 55830 - DNA, 25 bp, Artificial
  probe
  misc_feature (1)..(25): SEQ ID NO: 116; WAN024AIL_at; Start 74; Stop 98
tcaagagttttgcttaaaaaccatc

SEQ ID NO: 55831 - DNA, 25 bp, Artificial
  probe
  misc_feature (1)..(25): SEQ ID NO: 116; WAN024AIL_at; Start 317; Stop 341
gcaagatactatcctagttgacgct

SEQ ID NO: 55832 - DNA, 25 bp, Artificial
  probe
  misc_feature (1)..(25): SEQ ID NO: 116; WAN024AIL_at; Start 102; Stop 126
ttttttcatacaatatactagccct

SEQ ID NO: 55833 - DNA, 25 bp, Artificial
  probe
  misc_feature (1)..(25): SEQ ID NO: 116; WAN024AIL_at; Start 437; Stop 461
tcagcgtactatcgtaaaatgaaat

SEQ ID NO: 55834 - DNA, 25 bp, Artificial
  probe
  misc_feature (1)..(25): SEQ ID NO: 116; WAN024AIL_at; Start 262; Stop 286
gaacatcctctaataggacctatgg

SEQ ID NO: 55835 - DNA, 25 bp, Artificial
  probe
  misc_feature (1)..(25): SEQ ID NO: 116; WAN024AIL_at; Start 62; Stop 86
tttcaatcattttcaagagttttgc

SEQ ID NO: 55836 - DNA, 25 bp, Artificial
  probe
  misc_feature (1)..(25): SEQ ID NO: 116; WAN024AIL_at; Start 426; Stop 450
tttgaaaagtttcagcgtactatcg

SEQ ID NO: 55837 - DNA, 25 bp, Artificial
  probe
  misc_feature (1)..(25): SEQ ID NO: 116; WAN024AIL_at; Start 196; Stop 220
gaactacttttttatttgctgattc

SEQ ID NO: 55838 - DNA, 25 bp, Artificial
  probe
  misc_feature (1)..(25): SEQ ID NO: 116; WAN024AIL_at; Start 172; Stop 196
gagattttttgctgccaggcatttg

SEQ ID NO: 55839 - DNA, 25 bp, Artificial
  probe
  misc_feature (1)..(25): SEQ ID NO: 116; WAN024AIL_at; Start 149; Stop 173
tagtctatattaagtgaatcgttga

SEQ ID NO: 55840 - DNA, 25 bp, Artificial
  probe
  misc_feature (1)..(25): SEQ ID NO: 116; WAN024AIL_at; Start 556; Stop 580
cattttctccttaaattcagtctct

SEQ ID NO: 55841 - DNA, 25 bp, Artificial
  probe
  misc_feature (1)..(25): SEQ ID NO: 116; WAN024AIL_at; Start 110; Stop 134
tacaatatactagccctactttcct

SEQ ID NO: 55842 - DNA, 25 bp, Artificial
  probe
  misc_feature (1)..(25): SEQ ID NO: 116; WAN024AIL_at; Start 272; Stop 296
taataggacctatggacttatatca

SEQ ID NO: 55843 - DNA, 25 bp, Artificial
  probe
  misc_feature (1)..(25): SEQ ID NO: 116; WAN024AIL_at; Start 541; Stop 565
caatatactacacttcattttctcc

SEQ ID NO: 55844 - DNA, 25 bp, Artificial
  probe
  misc_feature (1)..(25): SEQ ID NO: 116; WAN024AIL_at; Start 248; Stop 272
tgaataagacaccagaacatcctct

SEQ ID NO: 55845 - DNA, 25 bp, Artificial
  probe
  misc_feature (1)..(25): SEQ ID NO: 116; WAN024AIL_at; Start 375; Stop 399
tagtgaatctgaacaaatcaattgg

SEQ ID NO: 55846 - DNA, 25 bp, Artificial
  probe
  misc_feature (1)..(25): SEQ ID NO: 116; WAN024AIL_at; Start 255; Stop 279
gacaccagaacatcctctaatagga

SEQ ID NO: 55847 - DNA, 25 bp, Artificial
  probe
  misc_feature (1)..(25): SEQ ID NO: 116; WAN024AIL_at; Start 331; Stop 355
tagttgacgctaacttcctatccca

SEQ ID NO: 55848 - DNA, 25 bp, Artificial
  probe
  misc_feature (1)..(25): SEQ ID NO: 116; WAN024AIL_at; Start 37; Stop 61
tactatacaactataataactcttt

SEQ ID NO: 55849 - DNA, 25 bp, Artificial
  probe
  misc_feature (1)..(25): SEQ ID NO: 116; WAN024AIL_at; Start 22; Stop 46
taagcgtttgctttttactatacaa

SEQ ID NO: 55850 - DNA, 25 bp, Artificial
  probe
  misc_feature (1)..(25): SEQ ID NO: 116; WAN024AIL_at; Start 406; Stop 430
caagtcaatttctagtactttttga

SEQ ID NO: 55851 - DNA, 25 bp, Artificial
  probe
  misc_feature (1)..(25): SEQ ID NO: 116; WAN024AIL_at; Start 448; Stop 472
tcgtaaaatgaaataaaacatgcac

SEQ ID NO: 55852 - DNA, 25 bp, Artificial
  probe
  misc_feature (1)..(25): SEQ ID NO: 116; WAN024AIL_at; Start 238; Stop 262
aaaaaacaagtgaataagacaccag

SEQ ID NO: 55853 - DNA, 25 bp, Artificial
  probe
  misc_feature (1)..(25): SEQ ID NO: 116; WAN024AIL_at; Start 339; Stop 363
gctaacttcctatcccacttattaa

SEQ ID NO: 55854 - DNA, 25 bp, Artificial
  probe
  misc_feature (1)..(25): SEQ ID NO: 116; WAN024AIL_at; Start 321; Stop 345
gatactatcctagttgacgctaact

SEQ ID NO: 55855 - DNA, 25 bp, Artificial
  probe
  misc_feature (1)..(25): SEQ ID NO: 116; WAN024AIL_at; Start 298; Stop 322
tcccatatatactgtttaagcaaga

SEQ ID NO: 55856 - DNA, 25 bp, Artificial
  probe
  misc_feature (1)..(25): SEQ ID NO: 116; WAN024AIL_at; Start 213; Stop 237
gctgattctatctactaatactata

SEQ ID NO: 55857 - DNA, 25 bp, Artificial
  probe
  misc_feature (1)..(25): SEQ ID NO: 116; WAN024AIL_at; Start 185; Stop 209
gccaggcatttgaactactttttta

SEQ ID NO: 55858 - DNA, 25 bp, Artificial
  probe
  misc_feature (1)..(25): SEQ ID NO: 3157; WAN024AIM_at; Start 266; Stop 290
taagtgggataggaagttagcgtca

SEQ ID NO: 55859 - DNA, 25 bp, Artificial
  probe
  misc_feature (1)..(25): SEQ ID NO: 3157; WAN024AIM_at; Start 224; Stop 248
ccccaattgatttgttcagattcac

SEQ ID NO: 55860 - DNA, 25 bp, Artificial
  probe
  misc_feature (1)..(25): SEQ ID NO: 3157; WAN024AIM_at; Start 347; Stop 371
cctattagaggatgttctggtgtct

SEQ ID NO: 55861 - DNA, 25 bp, Artificial
  probe
  misc_feature (1)..(25): SEQ ID NO: 3157; WAN024AIM_at; Start 357; Stop 381
gatgttctggtgtcttattcacttg

SEQ ID NO: 55862 - DNA, 25 bp, Artificial
  probe
  misc_feature (1)..(25): SEQ ID NO: 3157; WAN024AIM_at; Start 580; Stop 604
tgtatagtaaaaagcaaacgcttac

SEQ ID NO: 55863 - DNA, 25 bp, Artificial
  probe
  misc_feature (1)..(25): SEQ ID NO: 3157; WAN024AIM_at; Start 167; Stop 191
tcattttacgatagtacgctgaaac

SEQ ID NO: 55864 - DNA, 25 bp, Artificial
  probe
  misc_feature (1)..(25): SEQ ID NO: 3157; WAN024AIM_at; Start 219; Stop 243
ggattccccaattgatttgttcaga

SEQ ID NO: 55865 - DNA, 25 bp, Artificial
  probe
  misc_feature (1)..(25): SEQ ID NO: 3157; WAN024AIM_at; Start 303; Stop 327
tcttgcttaaacagtatatatggga

SEQ ID NO: 55866 - DNA, 25 bp, Artificial
  probe
  misc_feature (1)..(25): SEQ ID NO: 3157; WAN024AIM_at; Start 403; Stop 427
tagaatcagcaaataaaaaagtagt

SEQ ID NO: 55867 - DNA, 25 bp, Artificial
  probe
  misc_feature (1)..(25): SEQ ID NO: 3157; WAN024AIM_at; Start 56; Stop 80
ttaaggagaaaatgaagtgtagtat

SEQ ID NO: 55868 - DNA, 25 bp, Artificial
  probe
  misc_feature (1)..(25): SEQ ID NO: 3157; WAN024AIM_at; Start 203; Stop 227
tactagaaattgacttggattcccc

SEQ ID NO: 55869 - DNA, 25 bp, Artificial
  probe
  misc_feature (1)..(25): SEQ ID NO: 3157; WAN024AIM_at; Start 283; Stop 307
tagcgtcaactaggatagtatcttg

SEQ ID NO: 55870 - DNA, 25 bp, Artificial
  probe
  misc_feature (1)..(25): SEQ ID NO: 3157; WAN024AIM_at; Start 536; Stop 560
taagcaaaactcttgaaaatgattg

SEQ ID NO: 55871 - DNA, 25 bp, Artificial
  probe
  misc_feature (1)..(25): SEQ ID NO: 3157; WAN024AIM_at; Start 547; Stop 571
cttgaaaatgattgaaaaaagagtt

SEQ ID NO: 55872 - DNA, 25 bp, Artificial
  probe
  misc_feature (1)..(25): SEQ ID NO: 3157; WAN024AIM_at; Start 495; Stop 519
aagtagggctagtatattgtatgaa

SEQ ID NO: 55873 - DNA, 25 bp, Artificial
  probe
  misc_feature (1)..(25): SEQ ID NO: 3157; WAN024AIM_at; Start 453; Stop 477
caacgattcacttaatatagactaa

SEQ ID NO: 55874 - DNA, 25 bp, Artificial
  probe
  misc_feature (1)..(25): SEQ ID NO: 3157; WAN024AIM_at; Start 92; Stop 116
aatagtacactttgatttctaagac

SEQ ID NO: 55875 - DNA, 25 bp, Artificial
  probe
  misc_feature (1)..(25): SEQ ID NO: 3157; WAN024AIM_at; Start 196; Stop 220
caaaaagtactagaaattgacttgg

SEQ ID NO: 55876 - DNA, 25 bp, Artificial
  probe
  misc_feature (1)..(25): SEQ ID NO: 3157; WAN024AIM_at; Start 273; Stop 297
gataggaagttagcgtcaactagga

SEQ ID NO: 55877 - DNA, 25 bp, Artificial
  probe
  misc_feature (1)..(25): SEQ ID NO: 3157; WAN024AIM_at; Start 175; Stop 199
cgatagtacgctgaaacttttcaaa

SEQ ID NO: 55878 - DNA, 25 bp, Artificial
  probe
  misc_feature (1)..(25): SEQ ID NO: 3157; WAN024AIM_at; Start 40; Stop 64
caaaaagagactgaatttaaggaga

SEQ ID NO: 55879 - DNA, 25 bp, Artificial
  probe
  misc_feature (1)..(25): SEQ ID NO: 3157; WAN024AIM_at; Start 339; Stop 363
ccataggtcctattagaggatgttc

SEQ ID NO: 55880 - DNA, 25 bp, Artificial
  probe
  misc_feature (1)..(25): SEQ ID NO: 3157; WAN024AIM_at; Start 416; Stop 440
taaaaaagtagttcaaatgcctggc

SEQ ID NO: 55881 - DNA, 25 bp, Artificial
  probe
  misc_feature (1)..(25): SEQ ID NO: 3157; WAN024AIM_at; Start 420; Stop 444
aaagtagttcaaatgcctggcagca

SEQ ID NO: 55882 - DNA, 25 bp, Artificial
  probe
  misc_feature (1)..(25): SEQ ID NO: 3157; WAN024AIM_at; Start 208; Stop 232
gaaattgacttggattccccaattg

SEQ ID NO: 55883 - DNA, 25 bp, Artificial
  probe
  misc_feature (1)..(25): SEQ ID NO: 3157; WAN024AIM_at; Start 330; Stop 354
gatataagtccataggtcctattag

SEQ ID NO: 55884 - DNA, 25 bp, Artificial
  probe
  misc_feature (1)..(25): SEQ ID NO: 3157; WAN024AIM_at; Start 576; Stop 600
tagttgtatagtaaaaagcaaacgc

SEQ ID NO: 55885 - DNA, 25 bp, Artificial
  probe
  misc_feature (1)..(25): SEQ ID NO: 3157; WAN024AIM_at; Start 293; Stop 317
taggatagtatcttgcttaaacagt

SEQ ID NO: 55886 - DNA, 25 bp, Artificial
  probe
  misc_feature (1)..(25): SEQ ID NO: 3157; WAN024AIM_at; Start 509; Stop 533
tattgtatgaaaaaataagatggtt

SEQ ID NO: 55887 - DNA, 25 bp, Artificial
  probe
  misc_feature (1)..(25): SEQ ID NO: 3157; WAN024AIM_at; Start 527; Stop 551
gatggtttttaagcaaaactcttga

SEQ ID NO: 55888 - DNA, 25 bp, Artificial
  probe
  misc_feature (1)..(25): SEQ ID NO: 3157; WAN024AIM_at; Start 388; Stop 412
tatagtattagtagatagaatcagc

SEQ ID NO: 55889 - DNA, 25 bp, Artificial
  probe
  misc_feature (1)..(25): SEQ ID NO: 3157; WAN024AIM_at; Start 433; Stop 457
tgcctggcagcaaaaaatctcaacg

SEQ ID NO: 55890 - DNA, 25 bp, Artificial
  probe
  misc_feature (1)..(25): SEQ ID NO: 3157; WAN024AIM_at; Start 236; Stop 260
tgttcagattcactataaataaaaa

SEQ ID NO: 55891 - DNA, 25 bp, Artificial
  probe
  misc_feature (1)..(25): SEQ ID NO: 3157; WAN024AIM_at; Start 437; Stop 461
tggcagcaaaaaatctcaacgattc

SEQ ID NO: 55892 - DNA, 25 bp, Artificial
  probe
  misc_feature (1)..(25): SEQ ID NO: 3751; WAN024AIN_at; Start 23; Stop 47
aaattgaatacgatgagtcattttt

SEQ ID NO: 55893 - DNA, 25 bp, Artificial
  probe
  misc_feature (1)..(25): SEQ ID NO: 3751; WAN024AIN_at; Start 74; Stop 98
aagcaagaaattcacggataatctt

SEQ ID NO: 55894 - DNA, 25 bp, Artificial
  probe
  misc_feature (1)..(25): SEQ ID NO: 3751; WAN024AIN_at; Start 5; Stop 29
tcctcctagttttactcaaaattga

SEQ ID NO: 55895 - DNA, 25 bp, Artificial
  probe
  misc_feature (1)..(25): SEQ ID NO: 3751; WAN024AIN_at; Start 69; Stop 93
taaataagcaagaaattcacggata

SEQ ID NO: 55896 - DNA, 25 bp, Artificial
  probe
  misc_feature (1)..(25): SEQ ID NO: 3751; WAN024AIN_at; Start 28; Stop 52
gaatacgatgagtcattttttgcga

SEQ ID NO: 55897 - DNA, 25 bp, Artificial
  probe
  misc_feature (1)..(25): SEQ ID NO: 3751; WAN024AIN_at; Start 70; Stop 94
aaataagcaagaaattcacggataa

SEQ ID NO: 55898 - DNA, 25 bp, Artificial
  probe
  misc_feature (1)..(25): SEQ ID NO: 3751; WAN024AIN_at; Start 72; Stop 96
ataagcaagaaattcacggataatc

SEQ ID NO: 55899 - DNA, 25 bp, Artificial
  probe
  misc_feature (1)..(25): SEQ ID NO: 3751; WAN024AIN_at; Start 24; Stop 48
aattgaatacgatgagtcatttttt

SEQ ID NO: 55900 - DNA, 25 bp, Artificial
  probe
  misc_feature (1)..(25): SEQ ID NO: 3751; WAN024AIN_at; Start 60; Stop 84
attttatcataaataagcaagaaat

SEQ ID NO: 55901 - DNA, 25 bp, Artificial
  probe
  misc_feature (1)..(25): SEQ ID NO: 3751; WAN024AIN_at; Start 26; Stop 50
ttgaatacgatgagtcattttttgc

SEQ ID NO: 55902 - DNA, 25 bp, Artificial
  probe
  misc_feature (1)..(25): SEQ ID NO: 3751; WAN024AIN_at; Start 65; Stop 89
atcataaataagcaagaaattcacg

SEQ ID NO: 55903 - DNA, 25 bp, Artificial
  probe
  misc_feature (1)..(25): SEQ ID NO: 3751; WAN024AIN_at; Start 20; Stop 44
tcaaaattgaatacgatgagtcatt

SEQ ID NO: 55904 - DNA, 25 bp, Artificial
  probe
  misc_feature (1)..(25): SEQ ID NO: 3751; WAN024AIN_at; Start 25; Stop 49
attgaatacgatgagtcattttttg

SEQ ID NO: 55905 - DNA, 25 bp, Artificial
  probe
  misc_feature (1)..(25): SEQ ID NO: 3751; WAN024AIN_at; Start 64; Stop 88
tatcataaataagcaagaaattcac

SEQ ID NO: 55906 - DNA, 25 bp, Artificial
  probe
  misc_feature (1)..(25): SEQ ID NO: 3751; WAN024AIN_at; Start 4; Stop 28
atcctcctagttttactcaaaattg

SEQ ID NO: 55907 - DNA, 25 bp, Artificial
  probe
  misc_feature (1)..(25): SEQ ID NO: 3751; WAN024AIN_at; Start 22; Stop 46
aaaattgaatacgatgagtcatttt

SEQ ID NO: 55908 - DNA, 25 bp, Artificial
  probe
  misc_feature (1)..(25): SEQ ID NO: 3751; WAN024AIN_at; Start 59; Stop 83
cattttatcataaataagcaagaaa

SEQ ID NO: 55909 - DNA, 25 bp, Artificial
  probe
  misc_feature (1)..(25): SEQ ID NO: 3751; WAN024AIN_at; Start 62; Stop 86
tttatcataaataagcaagaaattc

SEQ ID NO: 55910 - DNA, 25 bp, Artificial
  probe
  misc_feature (1)..(25): SEQ ID NO: 3751; WAN024AIN_at; Start 19; Stop 43
ctcaaaattgaatacgatgagtcat

SEQ ID NO: 55911 - DNA, 25 bp, Artificial
  probe
  misc_feature (1)..(25): SEQ ID NO: 3751; WAN024AIN_at; Start 67; Stop 91
cataaataagcaagaaattcacgga

SEQ ID NO: 55912 - DNA, 25 bp, Artificial
  probe
  misc_feature (1)..(25): SEQ ID NO: 3751; WAN024AIN_at; Start 77; Stop 101
caagaaattcacggataatctttaa

SEQ ID NO: 55913 - DNA, 25 bp, Artificial
  probe
  misc_feature (1)..(25): SEQ ID NO: 3751; WAN024AIN_at; Start 73; Stop 97
taagcaagaaattcacggataatct

SEQ ID NO: 55914 - DNA, 25 bp, Artificial
  probe
  misc_feature (1)..(25): SEQ ID NO: 3751; WAN024AIN_at; Start 76; Stop 100
gcaagaaattcacggataatcttta

SEQ ID NO: 55915 - DNA, 25 bp, Artificial
  probe
  misc_feature (1)..(25): SEQ ID NO: 3751; WAN024AIN_at; Start 66; Stop 90
tcataaataagcaagaaattcacgg

SEQ ID NO: 55916 - DNA, 25 bp, Artificial
  probe
  misc_feature (1)..(25): SEQ ID NO: 3751; WAN024AIN_at; Start 21; Stop 45
caaaattgaatacgatgagtcattt

SEQ ID NO: 55917 - DNA, 25 bp, Artificial
  probe
  misc_feature (1)..(25): SEQ ID NO: 3751; WAN024AIN_at; Start 61; Stop 85
ttttatcataaataagcaagaaatt

SEQ ID NO: 55918 - DNA, 25 bp, Artificial
  probe
  misc_feature (1)..(25): SEQ ID NO: 3751; WAN024AIN_at; Start 18; Stop 42
actcaaaattgaatacgatgagtca

SEQ ID NO: 55919 - DNA, 25 bp, Artificial
  probe
  misc_feature (1)..(25): SEQ ID NO: 3751; WAN024AIN_at; Start 106; Stop 130
taaaaagaacctgacgctaaaatca

SEQ ID NO: 55920 - DNA, 25 bp, Artificial
  probe
  misc_feature (1)..(25): SEQ ID NO: 3751; WAN024AIN_at; Start 68; Stop 92
ataaataagcaagaaattcacggat

SEQ ID NO: 55921 - DNA, 25 bp, Artificial
  probe
  misc_feature (1)..(25): SEQ ID NO: 3751; WAN024AIN_at; Start 63; Stop 87
ttatcataaataagcaagaaattca

SEQ ID NO: 55922 - DNA, 25 bp, Artificial
  probe
  misc_feature (1)..(25): SEQ ID NO: 3751; WAN024AIN_at; Start 27; Stop 51
tgaatacgatgagtcattttttgcg

SEQ ID NO: 55923 - DNA, 25 bp, Artificial
  probe
  misc_feature (1)..(25): SEQ ID NO: 3751; WAN024AIN_at; Start 71; Stop 95
aataagcaagaaattcacggataat

SEQ ID NO: 55924 - DNA, 25 bp, Artificial
  probe
  misc_feature (1)..(25): SEQ ID NO: 3751; WAN024AIN_at; Start 75; Stop 99
agcaagaaattcacggataatcttt

SEQ ID NO: 55925 - DNA, 25 bp, Artificial
  probe
  misc_feature (1)..(25): SEQ ID NO: 4700; WAN024AIO_at; Start 37; Stop 61
ttatccgtgaatttcttgcttattt

SEQ ID NO: 55926 - DNA, 25 bp, Artificial
  probe
  misc_feature (1)..(25): SEQ ID NO: 4700; WAN024AIO_at; Start 89; Stop 113
tgactcatcgtattcaattttgagt

SEQ ID NO: 55927 - DNA, 25 bp, Artificial
  probe
  misc_feature (1)..(25): SEQ ID NO: 4700; WAN024AIO_at; Start 41; Stop 65
ccgtgaatttcttgcttatttatga

SEQ ID NO: 55928 - DNA, 25 bp, Artificial
  probe
  misc_feature (1)..(25): SEQ ID NO: 4700; WAN024AIO_at; Start 1; Stop 25
tgattttagcgtcaggttcttttta

SEQ ID NO: 55929 - DNA, 25 bp, Artificial
  probe
  misc_feature (1)..(25): SEQ ID NO: 4700; WAN024AIO_at; Start 84; Stop 108
aaaaatgactcatcgtattcaattt

SEQ ID NO: 55930 - DNA, 25 bp, Artificial
  probe
  misc_feature (1)..(25): SEQ ID NO: 4700; WAN024AIO_at; Start 103; Stop 127
caattttgagtaaaactaggaggat

SEQ ID NO: 55931 - DNA, 25 bp, Artificial
  probe
  misc_feature (1)..(25): SEQ ID NO: 4700; WAN024AIO_at; Start 88; Stop 112
atgactcatcgtattcaattttgag

SEQ ID NO: 55932 - DNA, 25 bp, Artificial
  probe
  misc_feature (1)..(25): SEQ ID NO: 4700; WAN024AIO_at; Start 82; Stop 106
caaaaaatgactcatcgtattcaat

SEQ ID NO: 55933 - DNA, 25 bp, Artificial
  probe
  misc_feature (1)..(25): SEQ ID NO: 4700; WAN024AIO_at; Start 32; Stop 56
aaagattatccgtgaatttcttgct

SEQ ID NO: 55934 - DNA, 25 bp, Artificial
  probe
  misc_feature (1)..(25): SEQ ID NO: 4700; WAN024AIO_at; Start 83; Stop 107
aaaaaatgactcatcgtattcaatt

SEQ ID NO: 55935 - DNA, 25 bp, Artificial
  probe
  misc_feature (1)..(25): SEQ ID NO: 4700; WAN024AIO_at; Start 46; Stop 70
aatttcttgcttatttatgataaaa

SEQ ID NO: 55936 - DNA, 25 bp, Artificial
  probe
  misc_feature (1)..(25): SEQ ID NO: 4700; WAN024AIO_at; Start 45; Stop 69
gaatttcttgcttatttatgataaa

SEQ ID NO: 55937 - DNA, 25 bp, Artificial
  probe
  misc_feature (1)..(25): SEQ ID NO: 4700; WAN024AIO_at; Start 86; Stop 110
aaatgactcatcgtattcaattttg

SEQ ID NO: 55938 - DNA, 25 bp, Artificial
  probe
  misc_feature (1)..(25): SEQ ID NO: 4700; WAN024AIO_at; Start 33; Stop 57
aagattatccgtgaatttcttgctt

SEQ ID NO: 55939 - DNA, 25 bp, Artificial
  probe
  misc_feature (1)..(25): SEQ ID NO: 4700; WAN024AIO_at; Start 36; Stop 60
attatccgtgaatttcttgcttatt

SEQ ID NO: 55940 - DNA, 25 bp, Artificial
  probe
  misc_feature (1)..(25): SEQ ID NO: 4700; WAN024AIO_at; Start 81; Stop 105
gcaaaaaatgactcatcgtattcaa

SEQ ID NO: 55941 - DNA, 25 bp, Artificial
  probe
  misc_feature (1)..(25): SEQ ID NO: 4700; WAN024AIO_at; Start 42; Stop 66
cgtgaatttcttgcttatttatgat

SEQ ID NO: 55942 - DNA, 25 bp, Artificial
  probe
  misc_feature (1)..(25): SEQ ID NO: 4700; WAN024AIO_at; Start 30; Stop 54
ttaaagattatccgtgaatttcttg

SEQ ID NO: 55943 - DNA, 25 bp, Artificial
  probe
  misc_feature (1)..(25): SEQ ID NO: 4700; WAN024AIO_at; Start 87; Stop 111
aatgactcatcgtattcaattttga

SEQ ID NO: 55944 - DNA, 25 bp, Artificial
  probe
  misc_feature (1)..(25): SEQ ID NO: 4700; WAN024AIO_at; Start 44; Stop 68
tgaatttcttgcttatttatgataa

SEQ ID NO: 55945 - DNA, 25 bp, Artificial
  probe
  misc_feature (1)..(25): SEQ ID NO: 4700; WAN024AIO_at; Start 80; Stop 104
cgcaaaaaatgactcatcgtattca

SEQ ID NO: 55946 - DNA, 25 bp, Artificial
  probe
  misc_feature (1)..(25): SEQ ID NO: 4700; WAN024AIO_at; Start 48; Stop 72
tttcttgcttatttatgataaaatg

SEQ ID NO: 55947 - DNA, 25 bp, Artificial
  probe
  misc_feature (1)..(25): SEQ ID NO: 4700; WAN024AIO_at; Start 102; Stop 126
tcaattttgagtaaaactaggagga

SEQ ID NO: 55948 - DNA, 25 bp, Artificial
  probe
  misc_feature (1)..(25): SEQ ID NO: 4700; WAN024AIO_at; Start 31; Stop 55
taaagattatccgtgaatttcttgc

SEQ ID NO: 55949 - DNA, 25 bp, Artificial
  probe
  misc_feature (1)..(25): SEQ ID NO: 4700; WAN024AIO_at; Start 43; Stop 67
gtgaatttcttgcttatttatgata

SEQ ID NO: 55950 - DNA, 25 bp, Artificial
  probe
  misc_feature (1)..(25): SEQ ID NO: 4700; WAN024AIO_at; Start 35; Stop 59
gattatccgtgaatttcttgcttat

SEQ ID NO: 55951 - DNA, 25 bp, Artificial
  probe
  misc_feature (1)..(25): SEQ ID NO: 4700; WAN024AIO_at; Start 38; Stop 62
tatccgtgaatttcttgcttattta

SEQ ID NO: 55952 - DNA, 25 bp, Artificial
  probe
  misc_feature (1)..(25): SEQ ID NO: 4700; WAN024AIO_at; Start 39; Stop 63
atccgtgaatttcttgcttatttat

SEQ ID NO: 55953 - DNA, 25 bp, Artificial
  probe
  misc_feature (1)..(25): SEQ ID NO: 4700; WAN024AIO_at; Start 34; Stop 58
agattatccgtgaatttcttgctta

SEQ ID NO: 55954 - DNA, 25 bp, Artificial
  probe
  misc_feature (1)..(25): SEQ ID NO: 4700; WAN024AIO_at; Start 85; Stop 109
aaaatgactcatcgtattcaatttt

SEQ ID NO: 55955 - DNA, 25 bp, Artificial
  probe
  misc_feature (1)..(25): SEQ ID NO: 4700; WAN024AIO_at; Start 40; Stop 64
tccgtgaatttcttgcttatttatg

SEQ ID NO: 55956 - DNA, 25 bp, Artificial
  probe
  misc_feature (1)..(25): SEQ ID NO: 4700; WAN024AIO_at; Start 79; Stop 103
tcgcaaaaaatgactcatcgtattc

SEQ ID NO: 55957 - DNA, 25 bp, Artificial
  probe
  misc_feature (1)..(25): SEQ ID NO: 4405; WAN024AIP_at; Start 90; Stop 114
ggaaatttcagaaattttatgtcta

SEQ ID NO: 55958 - DNA, 25 bp, Artificial
  probe
  misc_feature (1)..(25): SEQ ID NO: 4405; WAN024AIP_at; Start 149; Stop 173
gatattatccaaagaagattttaag

SEQ ID NO: 55959 - DNA, 25 bp, Artificial
  probe
  misc_feature (1)..(25): SEQ ID NO: 4405; WAN024AIP_at; Start 185; Stop 209
ctgtattatttctagatgggaggtt

SEQ ID NO: 55960 - DNA, 25 bp, Artificial
  probe
  misc_feature (1)..(25): SEQ ID NO: 4405; WAN024AIP_at; Start 155; Stop 179
atccaaagaagattttaagtgctac

SEQ ID NO: 55961 - DNA, 25 bp, Artificial
  probe
  misc_feature (1)..(25): SEQ ID NO: 4405; WAN024AIP_at; Start 182; Stop 206
taactgtattatttctagatgggag

SEQ ID NO: 55962 - DNA, 25 bp, Artificial
  probe
  misc_feature (1)..(25): SEQ ID NO: 4405; WAN024AIP_at; Start 167; Stop 191
ttttaagtgctacaataactgtatt

SEQ ID NO: 55963 - DNA, 25 bp, Artificial
  probe
  misc_feature (1)..(25): SEQ ID NO: 4405; WAN024AIP_at; Start 127; Stop 151
cttataacggcaataaaaaatagat

SEQ ID NO: 55964 - DNA, 25 bp, Artificial
  probe
  misc_feature (1)..(25): SEQ ID NO: 4405; WAN024AIP_at; Start 183; Stop 207
aactgtattatttctagatgggagg

SEQ ID NO: 55965 - DNA, 25 bp, Artificial
  probe
  misc_feature (1)..(25): SEQ ID NO: 4405; WAN024AIP_at; Start 168; Stop 192
tttaagtgctacaataactgtatta

SEQ ID NO: 55966 - DNA, 25 bp, Artificial
  probe
  misc_feature (1)..(25): SEQ ID NO: 4405; WAN024AIP_at; Start 172; Stop 196
agtgctacaataactgtattatttc

SEQ ID NO: 55967 - DNA, 25 bp, Artificial
  probe
  misc_feature (1)..(25): SEQ ID NO: 4405; WAN024AIP_at; Start 156; Stop 180
tccaaagaagattttaagtgctaca

SEQ ID NO: 55968 - DNA, 25 bp, Artificial
  probe
  misc_feature (1)..(25): SEQ ID NO: 4405; WAN024AIP_at; Start 152; Stop 176
attatccaaagaagattttaagtgc

SEQ ID NO: 55969 - DNA, 25 bp, Artificial
  probe
  misc_feature (1)..(25): SEQ ID NO: 4405; WAN024AIP_at; Start 153; Stop 177
ttatccaaagaagattttaagtgct

SEQ ID NO: 55970 - DNA, 25 bp, Artificial
  probe
  misc_feature (1)..(25): SEQ ID NO: 4405; WAN024AIP_at; Start 179; Stop 203
caataactgtattatttctagatgg

SEQ ID NO: 55971 - DNA, 25 bp, Artificial
  probe
  misc_feature (1)..(25): SEQ ID NO: 4405; WAN024AIP_at; Start 186; Stop 210
tgtattatttctagatgggaggttc

SEQ ID NO: 55972 - DNA, 25 bp, Artificial
  probe
  misc_feature (1)..(25): SEQ ID NO: 4405; WAN024AIP_at; Start 170; Stop 194
taagtgctacaataactgtattatt

SEQ ID NO: 55973 - DNA, 25 bp, Artificial
  probe
  misc_feature (1)..(25): SEQ ID NO: 4405; WAN024AIP_at; Start 134; Stop 158
cggcaataaaaaatagatattatcc

SEQ ID NO: 55974 - DNA, 25 bp, Artificial
  probe
  misc_feature (1)..(25): SEQ ID NO: 4405; WAN024AIP_at; Start 165; Stop 189
gattttaagtgctacaataactgta

SEQ ID NO: 55975 - DNA, 25 bp, Artificial
  probe
  misc_feature (1)..(25): SEQ ID NO: 4405; WAN024AIP_at; Start 158; Stop 182
caaagaagattttaagtgctacaat

SEQ ID NO: 55976 - DNA, 25 bp, Artificial
  probe
  misc_feature (1)..(25): SEQ ID NO: 4405; WAN024AIP_at; Start 131; Stop 155
taacggcaataaaaaatagatatta

SEQ ID NO: 55977 - DNA, 25 bp, Artificial
  probe
  misc_feature (1)..(25): SEQ ID NO: 4405; WAN024AIP_at; Start 187; Stop 211
gtattatttctagatgggaggttct

SEQ ID NO: 55978 - DNA, 25 bp, Artificial
  probe
  misc_feature (1)..(25): SEQ ID NO: 4405; WAN024AIP_at; Start 129; Stop 153
tataacggcaataaaaaatagatat

SEQ ID NO: 55979 - DNA, 25 bp, Artificial
  probe
  misc_feature (1)..(25): SEQ ID NO: 4405; WAN024AIP_at; Start 163; Stop 187
aagattttaagtgctacaataactg

SEQ ID NO: 55980 - DNA, 25 bp, Artificial
  probe
  misc_feature (1)..(25): SEQ ID NO: 4405; WAN024AIP_at; Start 154; Stop 178
tatccaaagaagattttaagtgcta

SEQ ID NO: 55981 - DNA, 25 bp, Artificial
  probe
  misc_feature (1)..(25): SEQ ID NO: 4405; WAN024AIP_at; Start 175; Stop 199
gctacaataactgtattatttctag

SEQ ID NO: 55982 - DNA, 25 bp, Artificial
  probe
  misc_feature (1)..(25): SEQ ID NO: 4405; WAN024AIP_at; Start 184; Stop 208
actgtattatttctagatgggaggt

SEQ ID NO: 55983 - DNA, 25 bp, Artificial
  probe
  misc_feature (1)..(25): SEQ ID NO: 4405; WAN024AIP_at; Start 189; Stop 213
attatttctagatgggaggttctat

SEQ ID NO: 55984 - DNA, 25 bp, Artificial
  probe
  misc_feature (1)..(25): SEQ ID NO: 4405; WAN024AIP_at; Start 190; Stop 214
ttatttctagatgggaggttctatt

SEQ ID NO: 55985 - DNA, 25 bp, Artificial
  probe
  misc_feature (1)..(25): SEQ ID NO: 4405; WAN024AIP_at; Start 151; Stop 175
tattatccaaagaagattttaagtg

SEQ ID NO: 55986 - DNA, 25 bp, Artificial
  probe
  misc_feature (1)..(25): SEQ ID NO: 4405; WAN024AIP_at; Start 161; Stop 185
agaagattttaagtgctacaataac

SEQ ID NO: 55987 - DNA, 25 bp, Artificial
  probe
  misc_feature (1)..(25): SEQ ID NO: 4405; WAN024AIP_at; Start 159; Stop 183
aaagaagattttaagtgctacaata

SEQ ID NO: 55988 - DNA, 25 bp, Artificial
  probe
  misc_feature (1)..(25): SEQ ID NO: 4405; WAN024AIP_at; Start 188; Stop 212
tattatttctagatgggaggttcta

SEQ ID NO: 55989 - DNA, 25 bp, Artificial
  probe
  misc_feature (1)..(25): SEQ ID NO: 4405; WAN024AIP_at; Start 157; Stop 181
ccaaagaagattttaagtgctacaa

SEQ ID NO: 55990 - DNA, 25 bp, Artificial
  probe
  misc_feature (1)..(25): SEQ ID NO: 4405; WAN024AIP_at; Start 162; Stop 186
gaagattttaagtgctacaataact

SEQ ID NO: 55991 - DNA, 25 bp, Artificial
  probe
  misc_feature (1)..(25): SEQ ID NO: 146; WAN024AIQ_at; Start 102; Stop 126
tagacataaaatttctgaaatttcc

SEQ ID NO: 55992 - DNA, 25 bp, Artificial
  probe
  misc_feature (1)..(25): SEQ ID NO: 146; WAN024AIQ_at; Start 8; Stop 32
acctcccatctagaaataatacagt

SEQ ID NO: 55993 - DNA, 25 bp, Artificial
  probe
  misc_feature (1)..(25): SEQ ID NO: 146; WAN024AIQ_at; Start 104; Stop 128
gacataaaatttctgaaatttccaa

SEQ ID NO: 55994 - DNA, 25 bp, Artificial
  probe
  misc_feature (1)..(25): SEQ ID NO: 146; WAN024AIQ_at; Start 43; Stop 67
cttaaaatcttctttggataatatc

SEQ ID NO: 55995 - DNA, 25 bp, Artificial
  probe
  misc_feature (1)..(25): SEQ ID NO: 146; WAN024AIQ_at; Start 37; Stop 61
gtagcacttaaaatcttctttggat

SEQ ID NO: 55996 - DNA, 25 bp, Artificial
  probe
  misc_feature (1)..(25): SEQ ID NO: 146; WAN024AIQ_at; Start 11; Stop 35
tcccatctagaaataatacagttat

SEQ ID NO: 55997 - DNA, 25 bp, Artificial
  probe
  misc_feature (1)..(25): SEQ ID NO: 146; WAN024AIQ_at; Start 35; Stop 59
ttgtagcacttaaaatcttctttgg

SEQ ID NO: 55998 - DNA, 25 bp, Artificial
  probe
  misc_feature (1)..(25): SEQ ID NO: 146; WAN024AIQ_at; Start 22; Stop 46
aataatacagttattgtagcactta

SEQ ID NO: 55999 - DNA, 25 bp, Artificial
  probe
  misc_feature (1)..(25): SEQ ID NO: 146; WAN024AIQ_at; Start 41; Stop 65
cacttaaaatcttctttggataata

SEQ ID NO: 56000 - DNA, 25 bp, Artificial
  probe
  misc_feature (1)..(25): SEQ ID NO: 146; WAN024AIQ_at; Start 36; Stop 60
tgtagcacttaaaatcttctttgga

SEQ ID NO: 56001 - DNA, 25 bp, Artificial
  probe
  misc_feature (1)..(25): SEQ ID NO: 146; WAN024AIQ_at; Start 38; Stop 62
tagcacttaaaatcttctttggata

SEQ ID NO: 56002 - DNA, 25 bp, Artificial
  probe
  misc_feature (1)..(25): SEQ ID NO: 146; WAN024AIQ_at; Start 20; Stop 44
gaaataatacagttattgtagcact

SEQ ID NO: 56003 - DNA, 25 bp, Artificial
  probe
  misc_feature (1)..(25): SEQ ID NO: 146; WAN024AIQ_at; Start 30; Stop 54
agttattgtagcacttaaaatcttc

SEQ ID NO: 56004 - DNA, 25 bp, Artificial
  probe
  misc_feature (1)..(25): SEQ ID NO: 146; WAN024AIQ_at; Start 4; Stop 28
tagaacctcccatctagaaataata

SEQ ID NO: 56005 - DNA, 25 bp, Artificial
  probe
  misc_feature (1)..(25): SEQ ID NO: 146; WAN024AIQ_at; Start 65; Stop 89
atctattttttattgccgttataag

SEQ ID NO: 56006 - DNA, 25 bp, Artificial
  probe
  misc_feature (1)..(25): SEQ ID NO: 146; WAN024AIQ_at; Start 6; Stop 30
gaacctcccatctagaaataataca

SEQ ID NO: 56007 - DNA, 25 bp, Artificial
  probe
  misc_feature (1)..(25): SEQ ID NO: 146; WAN024AIQ_at; Start 31; Stop 55
gttattgtagcacttaaaatcttct

SEQ ID NO: 56008 - DNA, 25 bp, Artificial
  probe
  misc_feature (1)..(25): SEQ ID NO: 146; WAN024AIQ_at; Start 40; Stop 64
gcacttaaaatcttctttggataat

SEQ ID NO: 56009 - DNA, 25 bp, Artificial
  probe
  misc_feature (1)..(25): SEQ ID NO: 146; WAN024AIQ_at; Start 13; Stop 37
ccatctagaaataatacagttattg

SEQ ID NO: 56010 - DNA, 25 bp, Artificial
  probe
  misc_feature (1)..(25): SEQ ID NO: 146; WAN024AIQ_at; Start 58; Stop 82
ggataatatctattttttattgccg

SEQ ID NO: 56011 - DNA, 25 bp, Artificial
  probe
  misc_feature (1)..(25): SEQ ID NO: 146; WAN024AIQ_at; Start 39; Stop 63
agcacttaaaatcttctttggataa

SEQ ID NO: 56012 - DNA, 25 bp, Artificial
  probe
  misc_feature (1)..(25): SEQ ID NO: 146; WAN024AIQ_at; Start 28; Stop 52
acagttattgtagcacttaaaatct

SEQ ID NO: 56013 - DNA, 25 bp, Artificial
  probe
  misc_feature (1)..(25): SEQ ID NO: 146; WAN024AIQ_at; Start 9; Stop 33
cctcccatctagaaataatacagtt

SEQ ID NO: 56014 - DNA, 25 bp, Artificial
  probe
  misc_feature (1)..(25): SEQ ID NO: 146; WAN024AIQ_at; Start 61; Stop 85
taatatctattttttattgccgtta

SEQ ID NO: 56015 - DNA, 25 bp, Artificial
  probe
  misc_feature (1)..(25): SEQ ID NO: 146; WAN024AIQ_at; Start 27; Stop 51
tacagttattgtagcacttaaaatc

SEQ ID NO: 56016 - DNA, 25 bp, Artificial
  probe
  misc_feature (1)..(25): SEQ ID NO: 146; WAN024AIQ_at; Start 10; Stop 34
ctcccatctagaaataatacagtta

SEQ ID NO: 56017 - DNA, 25 bp, Artificial
  probe
  misc_feature (1)..(25): SEQ ID NO: 146; WAN024AIQ_at; Start 7; Stop 31
aacctcccatctagaaataatacag

SEQ ID NO: 56018 - DNA, 25 bp, Artificial
  probe
  misc_feature (1)..(25): SEQ ID NO: 146; WAN024AIQ_at; Start 29; Stop 53
cagttattgtagcacttaaaatctt

SEQ ID NO: 56019 - DNA, 25 bp, Artificial
  probe
  misc_feature (1)..(25): SEQ ID NO: 146; WAN024AIQ_at; Start 2; Stop 26
aatagaacctcccatctagaaataa

SEQ ID NO: 56020 - DNA, 25 bp, Artificial
  probe
  misc_feature (1)..(25): SEQ ID NO: 146; WAN024AIQ_at; Start 24; Stop 48
taatacagttattgtagcacttaaa

SEQ ID NO: 56021 - DNA, 25 bp, Artificial
  probe
  misc_feature (1)..(25): SEQ ID NO: 146; WAN024AIQ_at; Start 3; Stop 27
atagaacctcccatctagaaataat

SEQ ID NO: 56022 - DNA, 25 bp, Artificial
  probe
  misc_feature (1)..(25): SEQ ID NO: 146; WAN024AIQ_at; Start 45; Stop 69
taaaatcttctttggataatatcta

SEQ ID NO: 56023 - DNA, 25 bp, Artificial
  probe
  misc_feature (1)..(25): SEQ ID NO: 146; WAN024AIQ_at; Start 17; Stop 41
ctagaaataatacagttattgtagc

SEQ ID NO: 56024 - DNA, 25 bp, Artificial
  probe
  misc_feature (1)..(25): SEQ ID NO: 146; WAN024AIQ_at; Start 5; Stop 29
agaacctcccatctagaaataatac

SEQ ID NO: 56025 - DNA, 25 bp, Artificial
  probe
  misc_feature (1)..(25): SEQ ID NO: 4791; WAN024AIR_at; Start 62; Stop 86
ctataacatcctgagtctatctaag

SEQ ID NO: 56026 - DNA, 25 bp, Artificial
  probe
  misc_feature (1)..(25): SEQ ID NO: 4791; WAN024AIR_at; Start 58; Stop 82
ttacctataacatcctgagtctatc

SEQ ID NO: 56027 - DNA, 25 bp, Artificial
  probe
  misc_feature (1)..(25): SEQ ID NO: 4791; WAN024AIR_at; Start 61; Stop 85
cctataacatcctgagtctatctaa

SEQ ID NO: 56028 - DNA, 25 bp, Artificial
  probe
  misc_feature (1)..(25): SEQ ID NO: 4791; WAN024AIR_at; Start 25; Stop 49
ctggattttaagctccaatcccttt

SEQ ID NO: 56029 - DNA, 25 bp, Artificial
  probe
  misc_feature (1)..(25): SEQ ID NO: 4791; WAN024AIR_at; Start 55; Stop 79
attttacctataacatcctgagtct

SEQ ID NO: 56030 - DNA, 25 bp, Artificial
  probe
  misc_feature (1)..(25): SEQ ID NO: 4791; WAN024AIR_at; Start 52; Stop 76
aagattttacctataacatcctgag

SEQ ID NO: 56031 - DNA, 25 bp, Artificial
  probe
  misc_feature (1)..(25): SEQ ID NO: 4791; WAN024AIR_at; Start 53; Stop 77
agattttacctataacatcctgagt

SEQ ID NO: 56032 - DNA, 25 bp, Artificial
  probe
  misc_feature (1)..(25): SEQ ID NO: 4791; WAN024AIR_at; Start 51; Stop 75
taagattttacctataacatcctga

SEQ ID NO: 56033 - DNA, 25 bp, Artificial
  probe
  misc_feature (1)..(25): SEQ ID NO: 4791; WAN024AIR_at; Start 57; Stop 81
tttacctataacatcctgagtctat

SEQ ID NO: 56034 - DNA, 25 bp, Artificial
  probe
  misc_feature (1)..(25): SEQ ID NO: 4791; WAN024AIR_at; Start 54; Stop 78
gattttacctataacatcctgagtc

SEQ ID NO: 56035 - DNA, 25 bp, Artificial
  probe
  misc_feature (1)..(25): SEQ ID NO: 4791; WAN024AIR_at; Start 63; Stop 87
tataacatcctgagtctatctaaga

SEQ ID NO: 56036 - DNA, 25 bp, Artificial
  probe
  misc_feature (1)..(25): SEQ ID NO: 4791; WAN024AIR_at; Start 24; Stop 48
actggattttaagctccaatccctt

SEQ ID NO: 56037 - DNA, 25 bp, Artificial
  probe
  misc_feature (1)..(25): SEQ ID NO: 4791; WAN024AIR_at; Start 65; Stop 89
taacatcctgagtctatctaagatg

SEQ ID NO: 56038 - DNA, 25 bp, Artificial
  probe
  misc_feature (1)..(25): SEQ ID NO: 4791; WAN024AIR_at; Start 59; Stop 83
tacctataacatcctgagtctatct

SEQ ID NO: 56039 - DNA, 25 bp, Artificial
  probe
  misc_feature (1)..(25): SEQ ID NO: 4791; WAN024AIR_at; Start 64; Stop 88
ataacatcctgagtctatctaagat

SEQ ID NO: 56040 - DNA, 25 bp, Artificial
  probe
  misc_feature (1)..(25): SEQ ID NO: 4791; WAN024AIR_at; Start 50; Stop 74
ttaagattttacctataacatcctg

SEQ ID NO: 56041 - DNA, 25 bp, Artificial
  probe
  misc_feature (1)..(25): SEQ ID NO: 4791; WAN024AIR_at; Start 56; Stop 80
ttttacctataacatcctgagtcta

SEQ ID NO: 56042 - DNA, 25 bp, Artificial
  probe
  misc_feature (1)..(25): SEQ ID NO: 4791; WAN024AIR_at; Start 60; Stop 84
acctataacatcctgagtctatcta

SEQ ID NO: 56043 - DNA, 25 bp, Artificial
  probe
  misc_feature (1)..(25): SEQ ID NO: 4791; WAN024AIR_at; Start 66; Stop 90
aacatcctgagtctatctaagatgt

SEQ ID NO: 56044 - DNA, 25 bp, Artificial
  probe
  misc_feature (1)..(25): SEQ ID NO: 339; WAN024AIS_at; Start 16; Stop 40
tcaggatgttataggtaaaatctta

SEQ ID NO: 56045 - DNA, 25 bp, Artificial
  probe
  misc_feature (1)..(25): SEQ ID NO: 339; WAN024AIS_at; Start 42; Stop 66
aaagggattggagcttaaaatccag

SEQ ID NO: 56046 - DNA, 25 bp, Artificial
  probe
  misc_feature (1)..(25): SEQ ID NO: 339; WAN024AIS_at; Start 15; Stop 39
ctcaggatgttataggtaaaatctt

SEQ ID NO: 56047 - DNA, 25 bp, Artificial
  probe
  misc_feature (1)..(25): SEQ ID NO: 339; WAN024AIS_at; Start 12; Stop 36
agactcaggatgttataggtaaaat

SEQ ID NO: 56048 - DNA, 25 bp, Artificial
  probe
  misc_feature (1)..(25): SEQ ID NO: 339; WAN024AIS_at; Start 7; Stop 31
tagatagactcaggatgttataggt

SEQ ID NO: 56049 - DNA, 25 bp, Artificial
  probe
  misc_feature (1)..(25): SEQ ID NO: 339; WAN024AIS_at; Start 17; Stop 41
caggatgttataggtaaaatcttaa

SEQ ID NO: 56050 - DNA, 25 bp, Artificial
  probe
  misc_feature (1)..(25): SEQ ID NO: 339; WAN024AIS_at; Start 3; Stop 27
atcttagatagactcaggatgttat

SEQ ID NO: 56051 - DNA, 25 bp, Artificial
  probe
  misc_feature (1)..(25): SEQ ID NO: 339; WAN024AIS_at; Start 43; Stop 67
aagggattggagcttaaaatccagt

SEQ ID NO: 56052 - DNA, 25 bp, Artificial
  probe
  misc_feature (1)..(25): SEQ ID NO: 339; WAN024AIS_at; Start 11; Stop 35
tagactcaggatgttataggtaaaa

SEQ ID NO: 56053 - DNA, 25 bp, Artificial
  probe
  misc_feature (1)..(25): SEQ ID NO: 339; WAN024AIS_at; Start 2; Stop 26
catcttagatagactcaggatgtta

SEQ ID NO: 56054 - DNA, 25 bp, Artificial
  probe
  misc_feature (1)..(25): SEQ ID NO: 339; WAN024AIS_at; Start 10; Stop 34
atagactcaggatgttataggtaaa

SEQ ID NO: 56055 - DNA, 25 bp, Artificial
  probe
  misc_feature (1)..(25): SEQ ID NO: 339; WAN024AIS_at; Start 5; Stop 29
cttagatagactcaggatgttatag

SEQ ID NO: 56056 - DNA, 25 bp, Artificial
  probe
  misc_feature (1)..(25): SEQ ID NO: 339; WAN024AIS_at; Start 8; Stop 32
agatagactcaggatgttataggta

SEQ ID NO: 56057 - DNA, 25 bp, Artificial
  probe
  misc_feature (1)..(25): SEQ ID NO: 339; WAN024AIS_at; Start 14; Stop 38
actcaggatgttataggtaaaatct

SEQ ID NO: 56058 - DNA, 25 bp, Artificial
  probe
  misc_feature (1)..(25): SEQ ID NO: 339; WAN024AIS_at; Start 6; Stop 30
ttagatagactcaggatgttatagg

SEQ ID NO: 56059 - DNA, 25 bp, Artificial
  probe
  misc_feature (1)..(25): SEQ ID NO: 339; WAN024AIS_at; Start 1; Stop 25
acatcttagatagactcaggatgtt

SEQ ID NO: 56060 - DNA, 25 bp, Artificial
  probe
  misc_feature (1)..(25): SEQ ID NO: 339; WAN024AIS_at; Start 4; Stop 28
tcttagatagactcaggatgttata

SEQ ID NO: 56061 - DNA, 25 bp, Artificial
  probe
  misc_feature (1)..(25): SEQ ID NO: 339; WAN024AIS_at; Start 9; Stop 33
gatagactcaggatgttataggtaa

SEQ ID NO: 56062 - DNA, 25 bp, Artificial
  probe
  misc_feature (1)..(25): SEQ ID NO: 339; WAN024AIS_at; Start 13; Stop 37
gactcaggatgttataggtaaaatc

SEQ ID NO: 56063 - DNA, 25 bp, Artificial
  probe
  misc_feature (1)..(25): SEQ ID NO: 3246; WAN024AIT_at; Start 70; Stop 94
ctttaaggcttactctgacaagtaa

SEQ ID NO: 56064 - DNA, 25 bp, Artificial
  probe
  misc_feature (1)..(25): SEQ ID NO: 3246; WAN024AIT_at; Start 55; Stop 79
cccacaatcaaccatctttaaggct

SEQ ID NO: 56065 - DNA, 25 bp, Artificial
  probe
  misc_feature (1)..(25): SEQ ID NO: 3246; WAN024AIT_at; Start 14; Stop 38
tataataaaaatagggtgtagcatt

SEQ ID NO: 56066 - DNA, 25 bp, Artificial
  probe
  misc_feature (1)..(25): SEQ ID NO: 3246; WAN024AIT_at; Start 12; Stop 36
cttataataaaaatagggtgtagca

SEQ ID NO: 56067 - DNA, 25 bp, Artificial
  probe
  misc_feature (1)..(25): SEQ ID NO: 3246; WAN024AIT_at; Start 59; Stop 83
caatcaaccatctttaaggcttact

SEQ ID NO: 56068 - DNA, 25 bp, Artificial
  probe
  misc_feature (1)..(25): SEQ ID NO: 3246; WAN024AIT_at; Start 23; Stop 47
aatagggtgtagcattcttttttca

SEQ ID NO: 56069 - DNA, 25 bp, Artificial
  probe
  misc_feature (1)..(25): SEQ ID NO: 3246; WAN024AIT_at; Start 25; Stop 49
tagggtgtagcattcttttttcatg

SEQ ID NO: 56070 - DNA, 25 bp, Artificial
  probe
  misc_feature (1)..(25): SEQ ID NO: 3246; WAN024AIT_at; Start 42; Stop 66
ttttcatgctacacccacaatcaac

SEQ ID NO: 56071 - DNA, 25 bp, Artificial
  probe
  misc_feature (1)..(25): SEQ ID NO: 3246; WAN024AIT_at; Start 40; Stop 64
ttttttcatgctacacccacaatca

SEQ ID NO: 56072 - DNA, 25 bp, Artificial
  probe
  misc_feature (1)..(25): SEQ ID NO: 3246; WAN024AIT_at; Start 41; Stop 65
tttttcatgctacacccacaatcaa

SEQ ID NO: 56073 - DNA, 25 bp, Artificial
  probe
  misc_feature (1)..(25): SEQ ID NO: 3246; WAN024AIT_at; Start 62; Stop 86
tcaaccatctttaaggcttactctg

SEQ ID NO: 56074 - DNA, 25 bp, Artificial
  probe
  misc_feature (1)..(25): SEQ ID NO: 3246; WAN024AIT_at; Start 35; Stop 59
cattcttttttcatgctacacccac

SEQ ID NO: 56075 - DNA, 25 bp, Artificial
  probe
  misc_feature (1)..(25): SEQ ID NO: 3246; WAN024AIT_at; Start 56; Stop 80
ccacaatcaaccatctttaaggctt

SEQ ID NO: 56076 - DNA, 25 bp, Artificial
  probe
  misc_feature (1)..(25): SEQ ID NO: 3246; WAN024AIT_at; Start 64; Stop 88
aaccatctttaaggcttactctgac

SEQ ID NO: 56077 - DNA, 25 bp, Artificial
  probe
  misc_feature (1)..(25): SEQ ID NO: 3246; WAN024AIT_at; Start 67; Stop 91
catctttaaggcttactctgacaag

SEQ ID NO: 56078 - DNA, 25 bp, Artificial
  probe
  misc_feature (1)..(25): SEQ ID NO: 3246; WAN024AIT_at; Start 58; Stop 82
acaatcaaccatctttaaggcttac

SEQ ID NO: 56079 - DNA, 25 bp, Artificial
  probe
  misc_feature (1)..(25): SEQ ID NO: 3246; WAN024AIT_at; Start 26; Stop 50
agggtgtagcattcttttttcatgc

SEQ ID NO: 56080 - DNA, 25 bp, Artificial
  probe
  misc_feature (1)..(25): SEQ ID NO: 3246; WAN024AIT_at; Start 36; Stop 60
attcttttttcatgctacacccaca

SEQ ID NO: 56081 - DNA, 25 bp, Artificial
  probe
  misc_feature (1)..(25): SEQ ID NO: 3246; WAN024AIT_at; Start 57; Stop 81
cacaatcaaccatctttaaggctta

SEQ ID NO: 56082 - DNA, 25 bp, Artificial
  probe
  misc_feature (1)..(25): SEQ ID NO: 3246; WAN024AIT_at; Start 51; Stop 75
tacacccacaatcaaccatctttaa

SEQ ID NO: 56083 - DNA, 25 bp, Artificial
  probe
  misc_feature (1)..(25): SEQ ID NO: 3246; WAN024AIT_at; Start 53; Stop 77
cacccacaatcaaccatctttaagg

SEQ ID NO: 56084 - DNA, 25 bp, Artificial
  probe
  misc_feature (1)..(25): SEQ ID NO: 3246; WAN024AIT_at; Start 37; Stop 61
ttcttttttcatgctacacccacaa

SEQ ID NO: 56085 - DNA, 25 bp, Artificial
  probe
  misc_feature (1)..(25): SEQ ID NO: 3246; WAN024AIT_at; Start 18; Stop 42
ataaaaatagggtgtagcattcttt

SEQ ID NO: 56086 - DNA, 25 bp, Artificial
  probe
  misc_feature (1)..(25): SEQ ID NO: 3246; WAN024AIT_at; Start 17; Stop 41
aataaaaatagggtgtagcattctt

SEQ ID NO: 56087 - DNA, 25 bp, Artificial
  probe
  misc_feature (1)..(25): SEQ ID NO: 3246; WAN024AIT_at; Start 54; Stop 78
acccacaatcaaccatctttaaggc

SEQ ID NO: 56088 - DNA, 25 bp, Artificial
  probe
  misc_feature (1)..(25): SEQ ID NO: 3246; WAN024AIT_at; Start 34; Stop 58
gcattcttttttcatgctacaccca

SEQ ID NO: 56089 - DNA, 25 bp, Artificial
  probe
  misc_feature (1)..(25): SEQ ID NO: 3246; WAN024AIT_at; Start 38; Stop 62
tcttttttcatgctacacccacaat

SEQ ID NO: 56090 - DNA, 25 bp, Artificial
  probe
  misc_feature (1)..(25): SEQ ID NO: 3246; WAN024AIT_at; Start 66; Stop 90
ccatctttaaggcttactctgacaa

SEQ ID NO: 56091 - DNA, 25 bp, Artificial
  probe
  misc_feature (1)..(25): SEQ ID NO: 3246; WAN024AIT_at; Start 71; Stop 95
tttaaggcttactctgacaagtaag

SEQ ID NO: 56092 - DNA, 25 bp, Artificial
  probe
  misc_feature (1)..(25): SEQ ID NO: 3246; WAN024AIT_at; Start 15; Stop 39
ataataaaaatagggtgtagcattc

SEQ ID NO: 56093 - DNA, 25 bp, Artificial
  probe
  misc_feature (1)..(25): SEQ ID NO: 3246; WAN024AIT_at; Start 63; Stop 87
caaccatctttaaggcttactctga

SEQ ID NO: 56094 - DNA, 25 bp, Artificial
  probe
  misc_feature (1)..(25): SEQ ID NO: 3246; WAN024AIT_at; Start 60; Stop 84
aatcaaccatctttaaggcttactc

SEQ ID NO: 56095 - DNA, 25 bp, Artificial
  probe
  misc_feature (1)..(25): SEQ ID NO: 3246; WAN024AIT_at; Start 69; Stop 93
tctttaaggcttactctgacaagta

SEQ ID NO: 56096 - DNA, 25 bp, Artificial
  probe
  misc_feature (1)..(25): SEQ ID NO: 3246; WAN024AIT_at; Start 28; Stop 52
ggtgtagcattcttttttcatgcta

SEQ ID NO: 56097 - DNA, 25 bp, Artificial
  probe
  misc_feature (1)..(25): SEQ ID NO: 3480; WAN024AIU_at; Start 49; Stop 73
tgaaaaaagaatgctacaccctatt

SEQ ID NO: 56098 - DNA, 25 bp, Artificial
  probe
  misc_feature (1)..(25): SEQ ID NO: 3480; WAN024AIU_at; Start 31; Stop 55
ttgattgtgggtgtagcatgaaaaa

SEQ ID NO: 56099 - DNA, 25 bp, Artificial
  probe
  misc_feature (1)..(25): SEQ ID NO: 3480; WAN024AIU_at; Start 3; Stop 27
tacttgtcagagtaagccttaaaga

SEQ ID NO: 56100 - DNA, 25 bp, Artificial
  probe
  misc_feature (1)..(25): SEQ ID NO: 3480; WAN024AIU_at; Start 47; Stop 71
catgaaaaaagaatgctacacccta

SEQ ID NO: 56101 - DNA, 25 bp, Artificial
  probe
  misc_feature (1)..(25): SEQ ID NO: 3480; WAN024AIU_at; Start 57; Stop 81
gaatgctacaccctatttttattat

SEQ ID NO: 56102 - DNA, 25 bp, Artificial
  probe
  misc_feature (1)..(25): SEQ ID NO: 3480; WAN024AIU_at; Start 32; Stop 56
tgattgtgggtgtagcatgaaaaaa

SEQ ID NO: 56103 - DNA, 25 bp, Artificial
  probe
  misc_feature (1)..(25): SEQ ID NO: 3480; WAN024AIU_at; Start 40; Stop 64
ggtgtagcatgaaaaaagaatgcta

SEQ ID NO: 56104 - DNA, 25 bp, Artificial
  probe
  misc_feature (1)..(25): SEQ ID NO: 3480; WAN024AIU_at; Start 36; Stop 60
tgtgggtgtagcatgaaaaaagaat

SEQ ID NO: 56105 - DNA, 25 bp, Artificial
  probe
  misc_feature (1)..(25): SEQ ID NO: 3480; WAN024AIU_at; Start 60; Stop 84
tgctacaccctatttttattataag

SEQ ID NO: 56106 - DNA, 25 bp, Artificial
  probe
  misc_feature (1)..(25): SEQ ID NO: 3480; WAN024AIU_at; Start 10; Stop 34
cagagtaagccttaaagatggttga

SEQ ID NO: 56107 - DNA, 25 bp, Artificial
  probe
  misc_feature (1)..(25): SEQ ID NO: 3480; WAN024AIU_at; Start 54; Stop 78
aaagaatgctacaccctatttttat

SEQ ID NO: 56108 - DNA, 25 bp, Artificial
  probe
  misc_feature (1)..(25): SEQ ID NO: 3480; WAN024AIU_at; Start 39; Stop 63
gggtgtagcatgaaaaaagaatgct

SEQ ID NO: 56109 - DNA, 25 bp, Artificial
  probe
  misc_feature (1)..(25): SEQ ID NO: 3480; WAN024AIU_at; Start 44; Stop 68
tagcatgaaaaaagaatgctacacc

SEQ ID NO: 56110 - DNA, 25 bp, Artificial
  probe
  misc_feature (1)..(25): SEQ ID NO: 3480; WAN024AIU_at; Start 2; Stop 26
ttacttgtcagagtaagccttaaag

SEQ ID NO: 56111 - DNA, 25 bp, Artificial
  probe
  misc_feature (1)..(25): SEQ ID NO: 3480; WAN024AIU_at; Start 20; Stop 44
cttaaagatggttgattgtgggtgt

SEQ ID NO: 56112 - DNA, 25 bp, Artificial
  probe
  misc_feature (1)..(25): SEQ ID NO: 3480; WAN024AIU_at; Start 48; Stop 72
atgaaaaaagaatgctacaccctat

SEQ ID NO: 56113 - DNA, 25 bp, Artificial
  probe
  misc_feature (1)..(25): SEQ ID NO: 3480; WAN024AIU_at; Start 18; Stop 42
gccttaaagatggttgattgtgggt

SEQ ID NO: 56114 - DNA, 25 bp, Artificial
  probe
  misc_feature (1)..(25): SEQ ID NO: 3480; WAN024AIU_at; Start 21; Stop 45
ttaaagatggttgattgtgggtgta

SEQ ID NO: 56115 - DNA, 25 bp, Artificial
  probe
  misc_feature (1)..(25): SEQ ID NO: 3480; WAN024AIU_at; Start 15; Stop 39
taagccttaaagatggttgattgtg

SEQ ID NO: 56116 - DNA, 25 bp, Artificial
  probe
  misc_feature (1)..(25): SEQ ID NO: 3480; WAN024AIU_at; Start 46; Stop 70
gcatgaaaaaagaatgctacaccct

SEQ ID NO: 56117 - DNA, 25 bp, Artificial
  probe
  misc_feature (1)..(25): SEQ ID NO: 3480; WAN024AIU_at; Start 6; Stop 30
ttgtcagagtaagccttaaagatgg

SEQ ID NO: 56118 - DNA, 25 bp, Artificial
  probe
  misc_feature (1)..(25): SEQ ID NO: 3480; WAN024AIU_at; Start 9; Stop 33
tcagagtaagccttaaagatggttg

SEQ ID NO: 56119 - DNA, 25 bp, Artificial
  probe
  misc_feature (1)..(25): SEQ ID NO: 3480; WAN024AIU_at; Start 11; Stop 35
agagtaagccttaaagatggttgat

SEQ ID NO: 56120 - DNA, 25 bp, Artificial
  probe
  misc_feature (1)..(25): SEQ ID NO: 3480; WAN024AIU_at; Start 19; Stop 43
ccttaaagatggttgattgtgggtg

SEQ ID NO: 56121 - DNA, 25 bp, Artificial
  probe
  misc_feature (1)..(25): SEQ ID NO: 3480; WAN024AIU_at; Start 16; Stop 40
aagccttaaagatggttgattgtgg

SEQ ID NO: 56122 - DNA, 25 bp, Artificial
  probe
  misc_feature (1)..(25): SEQ ID NO: 3480; WAN024AIU_at; Start 33; Stop 57
gattgtgggtgtagcatgaaaaaag

SEQ ID NO: 56123 - DNA, 25 bp, Artificial
  probe
  misc_feature (1)..(25): SEQ ID NO: 3480; WAN024AIU_at; Start 1; Stop 25
cttacttgtcagagtaagccttaaa

SEQ ID NO: 56124 - DNA, 25 bp, Artificial
  probe
  misc_feature (1)..(25): SEQ ID NO: 3480; WAN024AIU_at; Start 38; Stop 62
tgggtgtagcatgaaaaaagaatgc

SEQ ID NO: 56125 - DNA, 25 bp, Artificial
  probe
  misc_feature (1)..(25): SEQ ID NO: 3480; WAN024AIU_at; Start 5; Stop 29
cttgtcagagtaagccttaaagatg

SEQ ID NO: 56126 - DNA, 25 bp, Artificial
  probe
  misc_feature (1)..(25): SEQ ID NO: 3480; WAN024AIU_at; Start 12; Stop 36
gagtaagccttaaagatggttgatt

SEQ ID NO: 56127 - DNA, 25 bp, Artificial
  probe
  misc_feature (1)..(25): SEQ ID NO: 3480; WAN024AIU_at; Start 8; Stop 32
gtcagagtaagccttaaagatggtt

SEQ ID NO: 56128 - DNA, 25 bp, Artificial
  probe
  misc_feature (1)..(25): SEQ ID NO: 3480; WAN024AIU_at; Start 30; Stop 54
gttgattgtgggtgtagcatgaaaa

SEQ ID NO: 56129 - DNA, 25 bp, Artificial
  probe
  misc_feature (1)..(25): SEQ ID NO: 3480; WAN024AIU_at; Start 35; Stop 59
ttgtgggtgtagcatgaaaaaagaa

SEQ ID NO: 56130 - DNA, 25 bp, Artificial
  probe
  misc_feature (1)..(25): SEQ ID NO: 3480; WAN024AIU_at; Start 17; Stop 41
agccttaaagatggttgattgtggg

SEQ ID NO: 56131 - DNA, 25 bp, Artificial
  probe
  misc_feature (1)..(25): SEQ ID NO: 3816; WAN024AIV_at; Start 86; Stop 110
acaacgctttcttttgttgatataa

SEQ ID NO: 56132 - DNA, 25 bp, Artificial
  probe
  misc_feature (1)..(25): SEQ ID NO: 3816; WAN024AIV_at; Start 1; Stop 25
gtcagtaagataaagagagacgagg

SEQ ID NO: 56133 - DNA, 25 bp, Artificial
  probe
  misc_feature (1)..(25): SEQ ID NO: 3816; WAN024AIV_at; Start 90; Stop 114
cgctttcttttgttgatataatgaa

SEQ ID NO: 56134 - DNA, 25 bp, Artificial
  probe
  misc_feature (1)..(25): SEQ ID NO: 3816; WAN024AIV_at; Start 93; Stop 117
tttcttttgttgatataatgaaaat

SEQ ID NO: 56135 - DNA, 25 bp, Artificial
  probe
  misc_feature (1)..(25): SEQ ID NO: 3816; WAN024AIV_at; Start 126; Stop 150
tatcaaattgatcaatcaactatct

SEQ ID NO: 56136 - DNA, 25 bp, Artificial
  probe
  misc_feature (1)..(25): SEQ ID NO: 3816; WAN024AIV_at; Start 121; Stop 145
atatgtatcaaattgatcaatcaac

SEQ ID NO: 56137 - DNA, 25 bp, Artificial
  probe
  misc_feature (1)..(25): SEQ ID NO: 3816; WAN024AIV_at; Start 8; Stop 32
agataaagagagacgaggctaccga

SEQ ID NO: 56138 - DNA, 25 bp, Artificial
  probe
  misc_feature (1)..(25): SEQ ID NO: 3816; WAN024AIV_at; Start 91; Stop 115
gctttcttttgttgatataatgaaa

SEQ ID NO: 56139 - DNA, 25 bp, Artificial
  probe
  misc_feature (1)..(25): SEQ ID NO: 3816; WAN024AIV_at; Start 9; Stop 33
gataaagagagacgaggctaccgag

SEQ ID NO: 56140 - DNA, 25 bp, Artificial
  probe
  misc_feature (1)..(25): SEQ ID NO: 3816; WAN024AIV_at; Start 88; Stop 112
aacgctttcttttgttgatataatg

SEQ ID NO: 56141 - DNA, 25 bp, Artificial
  probe
  misc_feature (1)..(25): SEQ ID NO: 3816; WAN024AIV_at; Start 5; Stop 29
gtaagataaagagagacgaggctac

SEQ ID NO: 56142 - DNA, 25 bp, Artificial
  probe
  misc_feature (1)..(25): SEQ ID NO: 3816; WAN024AIV_at; Start 127; Stop 151
atcaaattgatcaatcaactatctt

SEQ ID NO: 56143 - DNA, 25 bp, Artificial
  probe
  misc_feature (1)..(25): SEQ ID NO: 3816; WAN024AIV_at; Start 83; Stop 107
ttgacaacgctttcttttgttgata

SEQ ID NO: 56144 - DNA, 25 bp, Artificial
  probe
  misc_feature (1)..(25): SEQ ID NO: 3816; WAN024AIV_at; Start 6; Stop 30
taagataaagagagacgaggctacc

SEQ ID NO: 56145 - DNA, 25 bp, Artificial
  probe
  misc_feature (1)..(25): SEQ ID NO: 3816; WAN024AIV_at; Start 7; Stop 31
aagataaagagagacgaggctaccg

SEQ ID NO: 56146 - DNA, 25 bp, Artificial
  probe
  misc_feature (1)..(25): SEQ ID NO: 3816; WAN024AIV_at; Start 123; Stop 147
atgtatcaaattgatcaatcaacta

SEQ ID NO: 56147 - DNA, 25 bp, Artificial
  probe
  misc_feature (1)..(25): SEQ ID NO: 3816; WAN024AIV_at; Start 125; Stop 149
gtatcaaattgatcaatcaactatc

SEQ ID NO: 56148 - DNA, 25 bp, Artificial
  probe
  misc_feature (1)..(25): SEQ ID NO: 3816; WAN024AIV_at; Start 92; Stop 116
ctttcttttgttgatataatgaaaa

SEQ ID NO: 56149 - DNA, 25 bp, Artificial
  probe
  misc_feature (1)..(25): SEQ ID NO: 3816; WAN024AIV_at; Start 89; Stop 113
acgctttcttttgttgatataatga

SEQ ID NO: 56150 - DNA, 25 bp, Artificial
  probe
  misc_feature (1)..(25): SEQ ID NO: 3816; WAN024AIV_at; Start 84; Stop 108
tgacaacgctttcttttgttgatat

SEQ ID NO: 56151 - DNA, 25 bp, Artificial
  probe
  misc_feature (1)..(25): SEQ ID NO: 3816; WAN024AIV_at; Start 120; Stop 144
aatatgtatcaaattgatcaatcaa

SEQ ID NO: 56152 - DNA, 25 bp, Artificial
  probe
  misc_feature (1)..(25): SEQ ID NO: 3816; WAN024AIV_at; Start 3; Stop 27
cagtaagataaagagagacgaggct

SEQ ID NO: 56153 - DNA, 25 bp, Artificial
  probe
  misc_feature (1)..(25): SEQ ID NO: 3816; WAN024AIV_at; Start 119; Stop 143
taatatgtatcaaattgatcaatca

SEQ ID NO: 56154 - DNA, 25 bp, Artificial
  probe
  misc_feature (1)..(25): SEQ ID NO: 3816; WAN024AIV_at; Start 85; Stop 109
gacaacgctttcttttgttgatata

SEQ ID NO: 56155 - DNA, 25 bp, Artificial
  probe
  misc_feature (1)..(25): SEQ ID NO: 3816; WAN024AIV_at; Start 124; Stop 148
tgtatcaaattgatcaatcaactat

SEQ ID NO: 56156 - DNA, 25 bp, Artificial
  probe
  misc_feature (1)..(25): SEQ ID NO: 3816; WAN024AIV_at; Start 4; Stop 28
agtaagataaagagagacgaggcta

SEQ ID NO: 56157 - DNA, 25 bp, Artificial
  probe
  misc_feature (1)..(25): SEQ ID NO: 3816; WAN024AIV_at; Start 122; Stop 146
tatgtatcaaattgatcaatcaact

SEQ ID NO: 56158 - DNA, 25 bp, Artificial
  probe
  misc_feature (1)..(25): SEQ ID NO: 3816; WAN024AIV_at; Start 2; Stop 26
tcagtaagataaagagagacgaggc

SEQ ID NO: 56159 - DNA, 25 bp, Artificial
  probe
  misc_feature (1)..(25): SEQ ID NO: 3816; WAN024AIV_at; Start 87; Stop 111
caacgctttcttttgttgatataat

SEQ ID NO: 56160 - DNA, 25 bp, Artificial
  probe
  misc_feature (1)..(25): SEQ ID NO: 4679; WAN024AIW_at; Start 154; Stop 178
agcctcgtctctctttatcttactg

SEQ ID NO: 56161 - DNA, 25 bp, Artificial
  probe
  misc_feature (1)..(25): SEQ ID NO: 4679; WAN024AIW_at; Start 68; Stop 92
tcattatatcaacaaaagaaagcgt

SEQ ID NO: 56162 - DNA, 25 bp, Artificial
  probe
  misc_feature (1)..(25): SEQ ID NO: 4679; WAN024AIW_at; Start 69; Stop 93
cattatatcaacaaaagaaagcgtt

SEQ ID NO: 56163 - DNA, 25 bp, Artificial
  probe
  misc_feature (1)..(25): SEQ ID NO: 4679; WAN024AIW_at; Start 33; Stop 57
atagttgattgatcaatttgataca

SEQ ID NO: 56164 - DNA, 25 bp, Artificial
  probe
  misc_feature (1)..(25): SEQ ID NO: 4679; WAN024AIW_at; Start 38; Stop 62
tgattgatcaatttgatacatatta

SEQ ID NO: 56165 - DNA, 25 bp, Artificial
  probe
  misc_feature (1)..(25): SEQ ID NO: 4679; WAN024AIW_at; Start 152; Stop 176
gtagcctcgtctctctttatcttac

SEQ ID NO: 56166 - DNA, 25 bp, Artificial
  probe
  misc_feature (1)..(25): SEQ ID NO: 4679; WAN024AIW_at; Start 32; Stop 56
gatagttgattgatcaatttgatac

SEQ ID NO: 56167 - DNA, 25 bp, Artificial
  probe
  misc_feature (1)..(25): SEQ ID NO: 4679; WAN024AIW_at; Start 37; Stop 61
ttgattgatcaatttgatacatatt

SEQ ID NO: 56168 - DNA, 25 bp, Artificial
  probe
  misc_feature (1)..(25): SEQ ID NO: 4679; WAN024AIW_at; Start 150; Stop 174
cggtagcctcgtctctctttatctt

SEQ ID NO: 56169 - DNA, 25 bp, Artificial
  probe
  misc_feature (1)..(25): SEQ ID NO: 4679; WAN024AIW_at; Start 73; Stop 97
atatcaacaaaagaaagcgttgtca

SEQ ID NO: 56170 - DNA, 25 bp, Artificial
  probe
  misc_feature (1)..(25): SEQ ID NO: 4679; WAN024AIW_at; Start 148; Stop 172
ctcggtagcctcgtctctctttatc

SEQ ID NO: 56171 - DNA, 25 bp, Artificial
  probe
  misc_feature (1)..(25): SEQ ID NO: 4679; WAN024AIW_at; Start 36; Stop 60
gttgattgatcaatttgatacatat

SEQ ID NO: 56172 - DNA, 25 bp, Artificial
  probe
  misc_feature (1)..(25): SEQ ID NO: 4679; WAN024AIW_at; Start 149; Stop 173
tcggtagcctcgtctctctttatct

SEQ ID NO: 56173 - DNA, 25 bp, Artificial
  probe
  misc_feature (1)..(25): SEQ ID NO: 4679; WAN024AIW_at; Start 74; Stop 98
tatcaacaaaagaaagcgttgtcaa

SEQ ID NO: 56174 - DNA, 25 bp, Artificial
  probe
  misc_feature (1)..(25): SEQ ID NO: 4679; WAN024AIW_at; Start 66; Stop 90
tttcattatatcaacaaaagaaagc

SEQ ID NO: 56175 - DNA, 25 bp, Artificial
  probe
  misc_feature (1)..(25): SEQ ID NO: 4679; WAN024AIW_at; Start 153; Stop 177
tagcctcgtctctctttatcttact

SEQ ID NO: 56176 - DNA, 25 bp, Artificial
  probe
  misc_feature (1)..(25): SEQ ID NO: 4679; WAN024AIW_at; Start 151; Stop 175
ggtagcctcgtctctctttatctta

SEQ ID NO: 56177 - DNA, 25 bp, Artificial
  probe
  misc_feature (1)..(25): SEQ ID NO: 4679; WAN024AIW_at; Start 71; Stop 95
ttatatcaacaaaagaaagcgttgt

SEQ ID NO: 56178 - DNA, 25 bp, Artificial
  probe
  misc_feature (1)..(25): SEQ ID NO: 4679; WAN024AIW_at; Start 70; Stop 94
attatatcaacaaaagaaagcgttg

SEQ ID NO: 56179 - DNA, 25 bp, Artificial
  probe
  misc_feature (1)..(25): SEQ ID NO: 4679; WAN024AIW_at; Start 67; Stop 91
ttcattatatcaacaaaagaaagcg

SEQ ID NO: 56180 - DNA, 25 bp, Artificial
  probe
  misc_feature (1)..(25): SEQ ID NO: 4679; WAN024AIW_at; Start 155; Stop 179
gcctcgtctctctttatcttactga

SEQ ID NO: 56181 - DNA, 25 bp, Artificial
  probe
  misc_feature (1)..(25): SEQ ID NO: 4679; WAN024AIW_at; Start 65; Stop 89
ttttcattatatcaacaaaagaaag

SEQ ID NO: 56182 - DNA, 25 bp, Artificial
  probe
  misc_feature (1)..(25): SEQ ID NO: 4679; WAN024AIW_at; Start 35; Stop 59
agttgattgatcaatttgatacata

SEQ ID NO: 56183 - DNA, 25 bp, Artificial
  probe
  misc_feature (1)..(25): SEQ ID NO: 4679; WAN024AIW_at; Start 30; Stop 54
aagatagttgattgatcaatttgat

SEQ ID NO: 56184 - DNA, 25 bp, Artificial
  probe
  misc_feature (1)..(25): SEQ ID NO: 4679; WAN024AIW_at; Start 31; Stop 55
agatagttgattgatcaatttgata

SEQ ID NO: 56185 - DNA, 25 bp, Artificial
  probe
  misc_feature (1)..(25): SEQ ID NO: 4679; WAN024AIW_at; Start 34; Stop 58
tagttgattgatcaatttgatacat

SEQ ID NO: 56186 - DNA, 25 bp, Artificial
  probe
  misc_feature (1)..(25): SEQ ID NO: 4679; WAN024AIW_at; Start 156; Stop 180
cctcgtctctctttatcttactgac

SEQ ID NO: 56187 - DNA, 25 bp, Artificial
  probe
  misc_feature (1)..(25): SEQ ID NO: 4679; WAN024AIW_at; Start 72; Stop 96
tatatcaacaaaagaaagcgttgtc

SEQ ID NO: 56188 - DNA, 25 bp, Artificial
  probe
  misc_feature (1)..(25): SEQ ID NO: 4679; WAN024AIW_at; Start 64; Stop 88
attttcattatatcaacaaaagaaa

SEQ ID NO: 56189 - DNA, 25 bp, Artificial
  probe
  misc_feature (1)..(25): SEQ ID NO: 473; WAN024AIX_at; Start 8; Stop 32
tccttttacctttactagtgagaga

SEQ ID NO: 56190 - DNA, 25 bp, Artificial
  probe
  misc_feature (1)..(25): SEQ ID NO: 473; WAN024AIX_at; Start 50; Stop 74
cacgaaaaaaggaacctgccaacag

SEQ ID NO: 56191 - DNA, 25 bp, Artificial
  probe
  misc_feature (1)..(25): SEQ ID NO: 473; WAN024AIX_at; Start 69; Stop 93
caacagcaaggttccacgaaaaatg

SEQ ID NO: 56192 - DNA, 25 bp, Artificial
  probe
  misc_feature (1)..(25): SEQ ID NO: 473; WAN024AIX_at; Start 14; Stop 38
tacctttactagtgagagagtctgg

SEQ ID NO: 56193 - DNA, 25 bp, Artificial
  probe
  misc_feature (1)..(25): SEQ ID NO: 473; WAN024AIX_at; Start 20; Stop 44
tactagtgagagagtctggccaaca

SEQ ID NO: 56194 - DNA, 25 bp, Artificial
  probe
  misc_feature (1)..(25): SEQ ID NO: 473; WAN024AIX_at; Start 31; Stop 55
gagtctggccaacagaagccacgaa

SEQ ID NO: 56195 - DNA, 25 bp, Artificial
  probe
  misc_feature (1)..(25): SEQ ID NO: 473; WAN024AIX_at; Start 96; Stop 120
tagtctccaccctttcaccgtctaa

SEQ ID NO: 56196 - DNA, 25 bp, Artificial
  probe
  misc_feature (1)..(25): SEQ ID NO: 473; WAN024AIX_at; Start 43; Stop 67
cagaagccacgaaaaaaggaacctg

SEQ ID NO: 56197 - DNA, 25 bp, Artificial
  probe
  misc_feature (1)..(25): SEQ ID NO: 473; WAN024AIX_at; Start 16; Stop 40
cctttactagtgagagagtctggcc

SEQ ID NO: 56198 - DNA, 25 bp, Artificial
  probe
  misc_feature (1)..(25): SEQ ID NO: 473; WAN024AIX_at; Start 71; Stop 95
acagcaaggttccacgaaaaatggg

SEQ ID NO: 56199 - DNA, 25 bp, Artificial
  probe
  misc_feature (1)..(25): SEQ ID NO: 473; WAN024AIX_at; Start 22; Stop 46
ctagtgagagagtctggccaacaga

SEQ ID NO: 56200 - DNA, 25 bp, Artificial
  probe
  misc_feature (1)..(25): SEQ ID NO: 473; WAN024AIX_at; Start 25; Stop 49
gtgagagagtctggccaacagaagc

SEQ ID NO: 56201 - DNA, 25 bp, Artificial
  probe
  misc_feature (1)..(25): SEQ ID NO: 473; WAN024AIX_at; Start 61; Stop 85
gaacctgccaacagcaaggttccac

SEQ ID NO: 56202 - DNA, 25 bp, Artificial
  probe
  misc_feature (1)..(25): SEQ ID NO: 473; WAN024AIX_at; Start 80; Stop 104
ttccacgaaaaatgggtagtctcca

SEQ ID NO: 56203 - DNA, 25 bp, Artificial
  probe
  misc_feature (1)..(25): SEQ ID NO: 473; WAN024AIX_at; Start 23; Stop 47
tagtgagagagtctggccaacagaa

SEQ ID NO: 56204 - DNA, 25 bp, Artificial
  probe
  misc_feature (1)..(25): SEQ ID NO: 473; WAN024AIX_at; Start 57; Stop 81
aaaggaacctgccaacagcaaggtt

SEQ ID NO: 56205 - DNA, 25 bp, Artificial
  probe
  misc_feature (1)..(25): SEQ ID NO: 473; WAN024AIX_at; Start 11; Stop 35
ttttacctttactagtgagagagtc

SEQ ID NO: 56206 - DNA, 25 bp, Artificial
  probe
  misc_feature (1)..(25): SEQ ID NO: 473; WAN024AIX_at; Start 55; Stop 79
aaaaaggaacctgccaacagcaagg

SEQ ID NO: 56207 - DNA, 25 bp, Artificial
  probe
  misc_feature (1)..(25): SEQ ID NO: 473; WAN024AIX_at; Start 17; Stop 41
ctttactagtgagagagtctggcca

SEQ ID NO: 56208 - DNA, 25 bp, Artificial
  probe
  misc_feature (1)..(25): SEQ ID NO: 473; WAN024AIX_at; Start 9; Stop 33
ccttttacctttactagtgagagag

SEQ ID NO: 56209 - DNA, 25 bp, Artificial
  probe
  misc_feature (1)..(25): SEQ ID NO: 473; WAN024AIX_at; Start 29; Stop 53
gagagtctggccaacagaagccacg

SEQ ID NO: 56210 - DNA, 25 bp, Artificial
  probe
  misc_feature (1)..(25): SEQ ID NO: 473; WAN024AIX_at; Start 72; Stop 96
cagcaaggttccacgaaaaatgggt

SEQ ID NO: 56211 - DNA, 25 bp, Artificial
  probe
  misc_feature (1)..(25): SEQ ID NO: 473; WAN024AIX_at; Start 33; Stop 57
gtctggccaacagaagccacgaaaa

SEQ ID NO: 56212 - DNA, 25 bp, Artificial
  probe
  misc_feature (1)..(25): SEQ ID NO: 473; WAN024AIX_at; Start 91; Stop 115
atgggtagtctccaccctttcaccg

SEQ ID NO: 56213 - DNA, 25 bp, Artificial
  probe
  misc_feature (1)..(25): SEQ ID NO: 473; WAN024AIX_at; Start 38; Stop 62
gccaacagaagccacgaaaaaagga

SEQ ID NO: 56214 - DNA, 25 bp, Artificial
  probe
  misc_feature (1)..(25): SEQ ID NO: 473; WAN024AIX_at; Start 81; Stop 105
tccacgaaaaatgggtagtctccac

SEQ ID NO: 56215 - DNA, 25 bp, Artificial
  probe
  misc_feature (1)..(25): SEQ ID NO: 473; WAN024AIX_at; Start 19; Stop 43
ttactagtgagagagtctggccaac

SEQ ID NO: 56216 - DNA, 25 bp, Artificial
  probe
  misc_feature (1)..(25): SEQ ID NO: 473; WAN024AIX_at; Start 52; Stop 76
cgaaaaaaggaacctgccaacagca

SEQ ID NO: 56217 - DNA, 25 bp, Artificial
  probe
  misc_feature (1)..(25): SEQ ID NO: 473; WAN024AIX_at; Start 66; Stop 90
tgccaacagcaaggttccacgaaaa

SEQ ID NO: 56218 - DNA, 25 bp, Artificial
  probe
  misc_feature (1)..(25): SEQ ID NO: 473; WAN024AIX_at; Start 64; Stop 88
cctgccaacagcaaggttccacgaa

SEQ ID NO: 56219 - DNA, 25 bp, Artificial
  probe
  misc_feature (1)..(25): SEQ ID NO: 473; WAN024AIX_at; Start 67; Stop 91
gccaacagcaaggttccacgaaaaa

SEQ ID NO: 56220 - DNA, 25 bp, Artificial
  probe
  misc_feature (1)..(25): SEQ ID NO: 473; WAN024AIX_at; Start 36; Stop 60
tggccaacagaagccacgaaaaaag

SEQ ID NO: 56221 - DNA, 25 bp, Artificial
  probe
  misc_feature (1)..(25): SEQ ID NO: 473; WAN024AIX_at; Start 18; Stop 42
tttactagtgagagagtctggccaa

SEQ ID NO: 56222 - DNA, 25 bp, Artificial
  probe
  misc_feature (1)..(25): SEQ ID NO: 473; WAN024AIX_at; Start 53; Stop 77
gaaaaaaggaacctgccaacagcaa

SEQ ID NO: 56223 - DNA, 25 bp, Artificial
  probe
  misc_feature (1)..(25): SEQ ID NO: 3274; WAN024AIY_at; Start 34; Stop 58
catttttcgtggaaccttgctgttg

SEQ ID NO: 56224 - DNA, 25 bp, Artificial
  probe
  misc_feature (1)..(25): SEQ ID NO: 3274; WAN024AIY_at; Start 32; Stop 56
cccatttttcgtggaaccttgctgt

SEQ ID NO: 56225 - DNA, 25 bp, Artificial
  probe
  misc_feature (1)..(25): SEQ ID NO: 3274; WAN024AIY_at; Start 40; Stop 64
tcgtggaaccttgctgttggcaggt

SEQ ID NO: 56226 - DNA, 25 bp, Artificial
  probe
  misc_feature (1)..(25): SEQ ID NO: 3274; WAN024AIY_at; Start 38; Stop 62
tttcgtggaaccttgctgttggcag

SEQ ID NO: 56227 - DNA, 25 bp, Artificial
  probe
  misc_feature (1)..(25): SEQ ID NO: 3274; WAN024AIY_at; Start 72; Stop 96
ttcgtggcttctgttggccagactc

SEQ ID NO: 56228 - DNA, 25 bp, Artificial
  probe
  misc_feature (1)..(25): SEQ ID NO: 3274; WAN024AIY_at; Start 53; Stop 77
ctgttggcaggttccttttttcgtg

SEQ ID NO: 56229 - DNA, 25 bp, Artificial
  probe
  misc_feature (1)..(25): SEQ ID NO: 3274; WAN024AIY_at; Start 87; Stop 111
ggccagactctctcactagtaaagg

SEQ ID NO: 56230 - DNA, 25 bp, Artificial
  probe
  misc_feature (1)..(25): SEQ ID NO: 3274; WAN024AIY_at; Start 86; Stop 110
tggccagactctctcactagtaaag

SEQ ID NO: 56231 - DNA, 25 bp, Artificial
  probe
  misc_feature (1)..(25): SEQ ID NO: 3274; WAN024AIY_at; Start 81; Stop 105
tctgttggccagactctctcactag

SEQ ID NO: 56232 - DNA, 25 bp, Artificial
  probe
  misc_feature (1)..(25): SEQ ID NO: 3274; WAN024AIY_at; Start 73; Stop 97
tcgtggcttctgttggccagactct

SEQ ID NO: 56233 - DNA, 25 bp, Artificial
  probe
  misc_feature (1)..(25): SEQ ID NO: 3274; WAN024AIY_at; Start 36; Stop 60
tttttcgtggaaccttgctgttggc

SEQ ID NO: 56234 - DNA, 25 bp, Artificial
  probe
  misc_feature (1)..(25): SEQ ID NO: 3274; WAN024AIY_at; Start 51; Stop 75
tgctgttggcaggttccttttttcg

SEQ ID NO: 56235 - DNA, 25 bp, Artificial
  probe
  misc_feature (1)..(25): SEQ ID NO: 3274; WAN024AIY_at; Start 22; Stop 46
gtggagactacccatttttcgtgga

SEQ ID NO: 56236 - DNA, 25 bp, Artificial
  probe
  misc_feature (1)..(25): SEQ ID NO: 3274; WAN024AIY_at; Start 83; Stop 107
tgttggccagactctctcactagta

SEQ ID NO: 56237 - DNA, 25 bp, Artificial
  probe
  misc_feature (1)..(25): SEQ ID NO: 3274; WAN024AIY_at; Start 31; Stop 55
acccatttttcgtggaaccttgctg

SEQ ID NO: 56238 - DNA, 25 bp, Artificial
  probe
  misc_feature (1)..(25): SEQ ID NO: 3274; WAN024AIY_at; Start 45; Stop 69
gaaccttgctgttggcaggttcctt

SEQ ID NO: 56239 - DNA, 25 bp, Artificial
  probe
  misc_feature (1)..(25): SEQ ID NO: 3274; WAN024AIY_at; Start 78; Stop 102
gcttctgttggccagactctctcac

SEQ ID NO: 56240 - DNA, 25 bp, Artificial
  probe
  misc_feature (1)..(25): SEQ ID NO: 3274; WAN024AIY_at; Start 23; Stop 47
tggagactacccatttttcgtggaa

SEQ ID NO: 56241 - DNA, 25 bp, Artificial
  probe
  misc_feature (1)..(25): SEQ ID NO: 3274; WAN024AIY_at; Start 70; Stop 94
ttttcgtggcttctgttggccagac

SEQ ID NO: 56242 - DNA, 25 bp, Artificial
  probe
  misc_feature (1)..(25): SEQ ID NO: 3274; WAN024AIY_at; Start 65; Stop 89
tccttttttcgtggcttctgttggc

SEQ ID NO: 56243 - DNA, 25 bp, Artificial
  probe
  misc_feature (1)..(25): SEQ ID NO: 3274; WAN024AIY_at; Start 94; Stop 118
ctctctcactagtaaaggtaaaagg

SEQ ID NO: 56244 - DNA, 25 bp, Artificial
  probe
  misc_feature (1)..(25): SEQ ID NO: 3274; WAN024AIY_at; Start 60; Stop 84
caggttccttttttcgtggcttctg

SEQ ID NO: 56245 - DNA, 25 bp, Artificial
  probe
  misc_feature (1)..(25): SEQ ID NO: 3274; WAN024AIY_at; Start 12; Stop 36
cggtgaaagggtggagactacccat

SEQ ID NO: 56246 - DNA, 25 bp, Artificial
  probe
  misc_feature (1)..(25): SEQ ID NO: 3274; WAN024AIY_at; Start 84; Stop 108
gttggccagactctctcactagtaa

SEQ ID NO: 56247 - DNA, 25 bp, Artificial
  probe
  misc_feature (1)..(25): SEQ ID NO: 3274; WAN024AIY_at; Start 92; Stop 116
gactctctcactagtaaaggtaaaa

SEQ ID NO: 56248 - DNA, 25 bp, Artificial
  probe
  misc_feature (1)..(25): SEQ ID NO: 3274; WAN024AIY_at; Start 95; Stop 119
tctctcactagtaaaggtaaaagga

SEQ ID NO: 56249 - DNA, 25 bp, Artificial
  probe
  misc_feature (1)..(25): SEQ ID NO: 3274; WAN024AIY_at; Start 97; Stop 121
tctcactagtaaaggtaaaaggaga

SEQ ID NO: 56250 - DNA, 25 bp, Artificial
  probe
  misc_feature (1)..(25): SEQ ID NO: 3274; WAN024AIY_at; Start 75; Stop 99
gtggcttctgttggccagactctct

SEQ ID NO: 56251 - DNA, 25 bp, Artificial
  probe
  misc_feature (1)..(25): SEQ ID NO: 3274; WAN024AIY_at; Start 90; Stop 114
cagactctctcactagtaaaggtaa

SEQ ID NO: 56252 - DNA, 25 bp, Artificial
  probe
  misc_feature (1)..(25): SEQ ID NO: 3274; WAN024AIY_at; Start 39; Stop 63
ttcgtggaaccttgctgttggcagg

SEQ ID NO: 56253 - DNA, 25 bp, Artificial
  probe
  misc_feature (1)..(25): SEQ ID NO: 3274; WAN024AIY_at; Start 67; Stop 91
cttttttcgtggcttctgttggcca

SEQ ID NO: 56254 - DNA, 25 bp, Artificial
  probe
  misc_feature (1)..(25): SEQ ID NO: 3274; WAN024AIY_at; Start 88; Stop 112
gccagactctctcactagtaaaggt

SEQ ID NO: 56255 - DNA, 25 bp, Artificial
  probe
  misc_feature (1)..(25): SEQ ID NO: 3274; WAN024AIY_at; Start 48; Stop 72
ccttgctgttggcaggttccttttt

SEQ ID NO: 56256 - DNA, 25 bp, Artificial
  probe
  misc_feature (1)..(25): SEQ ID NO: 3274; WAN024AIY_at; Start 37; Stop 61
ttttcgtggaaccttgctgttggca

SEQ ID NO: 56257 - DNA, 25 bp, Artificial
  probe
  misc_feature (1)..(25): SEQ ID NO: 560; WAN024AIZ_at; Start 23; Stop 47
gacagagaaaaagagtttgcttgtt

SEQ ID NO: 56258 - DNA, 25 bp, Artificial
  probe
  misc_feature (1)..(25): SEQ ID NO: 560; WAN024AIZ_at; Start 22; Stop 46
ggacagagaaaaagagtttgcttgt

SEQ ID NO: 56259 - DNA, 25 bp, Artificial
  probe
  misc_feature (1)..(25): SEQ ID NO: 560; WAN024AIZ_at; Start 25; Stop 49
cagagaaaaagagtttgcttgttac

SEQ ID NO: 56260 - DNA, 25 bp, Artificial
  probe
  misc_feature (1)..(25): SEQ ID NO: 560; WAN024AIZ_at; Start 24; Stop 48
acagagaaaaagagtttgcttgtta

SEQ ID NO: 56261 - DNA, 25 bp, Artificial
  probe
  misc_feature (1)..(25): SEQ ID NO: 560; WAN024AIZ_at; Start 40; Stop 64
tgcttgttaccctttaattgaacaa

SEQ ID NO: 56262 - DNA, 25 bp, Artificial
  probe
  misc_feature (1)..(25): SEQ ID NO: 560; WAN024AIZ_at; Start 39; Stop 63
ttgcttgttaccctttaattgaaca

SEQ ID NO: 56263 - DNA, 25 bp, Artificial
  probe
  misc_feature (1)..(25): SEQ ID NO: 5806; WAN024AJ2_at; Start 2; Stop 26
tgttcaattaaagggtaacaagcaa

SEQ ID NO: 56264 - DNA, 25 bp, Artificial
  probe
  misc_feature (1)..(25): SEQ ID NO: 5806; WAN024AJ2_at; Start 16; Stop 40
gtaacaagcaaactctttttctctg

SEQ ID NO: 56265 - DNA, 25 bp, Artificial
  probe
  misc_feature (1)..(25): SEQ ID NO: 5806; WAN024AJ2_at; Start 17; Stop 41
taacaagcaaactctttttctctgt

SEQ ID NO: 56266 - DNA, 25 bp, Artificial
  probe
  misc_feature (1)..(25): SEQ ID NO: 5806; WAN024AJ2_at; Start 18; Stop 42
aacaagcaaactctttttctctgtc

SEQ ID NO: 56267 - DNA, 25 bp, Artificial
  probe
  misc_feature (1)..(25): SEQ ID NO: 5806; WAN024AJ2_at; Start 19; Stop 43
acaagcaaactctttttctctgtcc

SEQ ID NO: 56268 - DNA, 25 bp, Artificial
  probe
  misc_feature (1)..(25): SEQ ID NO: 5806; WAN024AJ2_at; Start 1; Stop 25
ttgttcaattaaagggtaacaagca

SEQ ID NO: 56269 - DNA, 25 bp, Artificial
  probe
  misc_feature (1)..(25): SEQ ID NO: 3284; WAN024AJ3_at; Start 126; Stop 150
tatcacccaaaacttctgcaattag

SEQ ID NO: 56270 - DNA, 25 bp, Artificial
  probe
  misc_feature (1)..(25): SEQ ID NO: 3284; WAN024AJ3_at; Start 129; Stop 153
cacccaaaacttctgcaattagtat

SEQ ID NO: 56271 - DNA, 25 bp, Artificial
  probe
  misc_feature (1)..(25): SEQ ID NO: 3284; WAN024AJ3_at; Start 38; Stop 62
tacaagacaggttttgaagcacttt

SEQ ID NO: 56272 - DNA, 25 bp, Artificial
  probe
  misc_feature (1)..(25): SEQ ID NO: 3284; WAN024AJ3_at; Start 137; Stop 161
acttctgcaattagtatgagcacta

SEQ ID NO: 56273 - DNA, 25 bp, Artificial
  probe
  misc_feature (1)..(25): SEQ ID NO: 3284; WAN024AJ3_at; Start 47; Stop 71
ggttttgaagcactttttgaagcac

SEQ ID NO: 56274 - DNA, 25 bp, Artificial
  probe
  misc_feature (1)..(25): SEQ ID NO: 3284; WAN024AJ3_at; Start 73; Stop 97
tatagaggagatttaaaaatgttgc

SEQ ID NO: 56275 - DNA, 25 bp, Artificial
  probe
  misc_feature (1)..(25): SEQ ID NO: 3284; WAN024AJ3_at; Start 2; Stop 26
tagcttattaatcaccgtccccaaa

SEQ ID NO: 56276 - DNA, 25 bp, Artificial
  probe
  misc_feature (1)..(25): SEQ ID NO: 3284; WAN024AJ3_at; Start 45; Stop 69
caggttttgaagcactttttgaagc

SEQ ID NO: 56277 - DNA, 25 bp, Artificial
  probe
  misc_feature (1)..(25): SEQ ID NO: 3284; WAN024AJ3_at; Start 143; Stop 167
gcaattagtatgagcactattgtta

SEQ ID NO: 56278 - DNA, 25 bp, Artificial
  probe
  misc_feature (1)..(25): SEQ ID NO: 3284; WAN024AJ3_at; Start 1; Stop 25
ctagcttattaatcaccgtccccaa

SEQ ID NO: 56279 - DNA, 25 bp, Artificial
  probe
  misc_feature (1)..(25): SEQ ID NO: 3284; WAN024AJ3_at; Start 114; Stop 138
tatcagttatcttatcacccaaaac

SEQ ID NO: 56280 - DNA, 25 bp, Artificial
  probe
  misc_feature (1)..(25): SEQ ID NO: 3284; WAN024AJ3_at; Start 22; Stop 46
ccaaaaatacttggattacaagaca

SEQ ID NO: 56281 - DNA, 25 bp, Artificial
  probe
  misc_feature (1)..(25): SEQ ID NO: 3284; WAN024AJ3_at; Start 25; Stop 49
aaaatacttggattacaagacaggt

SEQ ID NO: 56282 - DNA, 25 bp, Artificial
  probe
  misc_feature (1)..(25): SEQ ID NO: 3284; WAN024AJ3_at; Start 108; Stop 132
gcaatttatcagttatcttatcacc

SEQ ID NO: 56283 - DNA, 25 bp, Artificial
  probe
  misc_feature (1)..(25): SEQ ID NO: 3284; WAN024AJ3_at; Start 96; Stop 120
gcattttttattgcaatttatcagt

SEQ ID NO: 56284 - DNA, 25 bp, Artificial
  probe
  misc_feature (1)..(25): SEQ ID NO: 3284; WAN024AJ3_at; Start 65; Stop 89
gaagcacttatagaggagatttaaa

SEQ ID NO: 56285 - DNA, 25 bp, Artificial
  probe
  misc_feature (1)..(25): SEQ ID NO: 3284; WAN024AJ3_at; Start 53; Stop 77
gaagcactttttgaagcacttatag

SEQ ID NO: 56286 - DNA, 25 bp, Artificial
  probe
  misc_feature (1)..(25): SEQ ID NO: 3284; WAN024AJ3_at; Start 140; Stop 164
tctgcaattagtatgagcactattg

SEQ ID NO: 56287 - DNA, 25 bp, Artificial
  probe
  misc_feature (1)..(25): SEQ ID NO: 3284; WAN024AJ3_at; Start 29; Stop 53
tacttggattacaagacaggttttg

SEQ ID NO: 56288 - DNA, 25 bp, Artificial
  probe
  misc_feature (1)..(25): SEQ ID NO: 3284; WAN024AJ3_at; Start 133; Stop 157
caaaacttctgcaattagtatgagc

SEQ ID NO: 56289 - DNA, 25 bp, Artificial
  probe
  misc_feature (1)..(25): SEQ ID NO: 3284; WAN024AJ3_at; Start 119; Stop 143
gttatcttatcacccaaaacttctg

SEQ ID NO: 56290 - DNA, 25 bp, Artificial
  probe
  misc_feature (1)..(25): SEQ ID NO: 3284; WAN024AJ3_at; Start 56; Stop 80
gcactttttgaagcacttatagagg

SEQ ID NO: 56291 - DNA, 25 bp, Artificial
  probe
  misc_feature (1)..(25): SEQ ID NO: 3284; WAN024AJ3_at; Start 77; Stop 101
gaggagatttaaaaatgttgcattt

SEQ ID NO: 56292 - DNA, 25 bp, Artificial
  probe
  misc_feature (1)..(25): SEQ ID NO: 3284; WAN024AJ3_at; Start 43; Stop 67
gacaggttttgaagcactttttgaa

SEQ ID NO: 56293 - DNA, 25 bp, Artificial
  probe
  misc_feature (1)..(25): SEQ ID NO: 3284; WAN024AJ3_at; Start 149; Stop 173
agtatgagcactattgttatttttc

SEQ ID NO: 56294 - DNA, 25 bp, Artificial
  probe
  misc_feature (1)..(25): SEQ ID NO: 3284; WAN024AJ3_at; Start 40; Stop 64
caagacaggttttgaagcacttttt

SEQ ID NO: 56295 - DNA, 25 bp, Artificial
  probe
  misc_feature (1)..(25): SEQ ID NO: 3284; WAN024AJ3_at; Start 35; Stop 59
gattacaagacaggttttgaagcac

SEQ ID NO: 56296 - DNA, 25 bp, Artificial
  probe
  misc_feature (1)..(25): SEQ ID NO: 3284; WAN024AJ3_at; Start 135; Stop 159
aaacttctgcaattagtatgagcac

SEQ ID NO: 56297 - DNA, 25 bp, Artificial
  probe
  misc_feature (1)..(25): SEQ ID NO: 3284; WAN024AJ3_at; Start 31; Stop 55
cttggattacaagacaggttttgaa

SEQ ID NO: 56298 - DNA, 25 bp, Artificial
  probe
  misc_feature (1)..(25): SEQ ID NO: 3284; WAN024AJ3_at; Start 50; Stop 74
tttgaagcactttttgaagcactta

SEQ ID NO: 56299 - DNA, 25 bp, Artificial
  probe
  misc_feature (1)..(25): SEQ ID NO: 3284; WAN024AJ3_at; Start 62; Stop 86
tttgaagcacttatagaggagattt

SEQ ID NO: 56300 - DNA, 25 bp, Artificial
  probe
  misc_feature (1)..(25): SEQ ID NO: 3284; WAN024AJ3_at; Start 121; Stop 145
tatcttatcacccaaaacttctgca

SEQ ID NO: 56301 - DNA, 25 bp, Artificial
  probe
  misc_feature (1)..(25): SEQ ID NO: 3284; WAN024AJ3_at; Start 59; Stop 83
ctttttgaagcacttatagaggaga

SEQ ID NO: 56302 - DNA, 25 bp, Artificial
  probe
  misc_feature (1)..(25): SEQ ID NO: 3284; WAN024AJ3_at; Start 123; Stop 147
tcttatcacccaaaacttctgcaat

SEQ ID NO: 56303 - DNA, 25 bp, Artificial
  probe
  misc_feature (1)..(25): SEQ ID NO: 5918; WAN024AJ4_at; Start 135; Stop 159
gcttcaaaacctgtcttgtaatcca

SEQ ID NO: 56304 - DNA, 25 bp, Artificial
  probe
  misc_feature (1)..(25): SEQ ID NO: 5918; WAN024AJ4_at; Start 40; Stop 64
tactaattgcagaagttttgggtga

SEQ ID NO: 56305 - DNA, 25 bp, Artificial
  probe
  misc_feature (1)..(25): SEQ ID NO: 5918; WAN024AJ4_at; Start 25; Stop 49
taacaatagtgctcatactaattgc

SEQ ID NO: 56306 - DNA, 25 bp, Artificial
  probe
  misc_feature (1)..(25): SEQ ID NO: 5918; WAN024AJ4_at; Start 123; Stop 147
gcttcaaaaagtgcttcaaaacctg

SEQ ID NO: 56307 - DNA, 25 bp, Artificial
  probe
  misc_feature (1)..(25): SEQ ID NO: 5918; WAN024AJ4_at; Start 126; Stop 150
tcaaaaagtgcttcaaaacctgtct

SEQ ID NO: 56308 - DNA, 25 bp, Artificial
  probe
  misc_feature (1)..(25): SEQ ID NO: 5918; WAN024AJ4_at; Start 42; Stop 66
ctaattgcagaagttttgggtgata

SEQ ID NO: 56309 - DNA, 25 bp, Artificial
  probe
  misc_feature (1)..(25): SEQ ID NO: 5918; WAN024AJ4_at; Start 106; Stop 130
aaatctcctctataagtgcttcaaa

SEQ ID NO: 56310 - DNA, 25 bp, Artificial
  probe
  misc_feature (1)..(25): SEQ ID NO: 5918; WAN024AJ4_at; Start 60; Stop 84
ggtgataagataactgataaattgc

SEQ ID NO: 56311 - DNA, 25 bp, Artificial
  probe
  misc_feature (1)..(25): SEQ ID NO: 5918; WAN024AJ4_at; Start 146; Stop 170
tgtcttgtaatccaagtatttttgg

SEQ ID NO: 56312 - DNA, 25 bp, Artificial
  probe
  misc_feature (1)..(25): SEQ ID NO: 5918; WAN024AJ4_at; Start 137; Stop 161
ttcaaaacctgtcttgtaatccaag

SEQ ID NO: 56313 - DNA, 25 bp, Artificial
  probe
  misc_feature (1)..(25): SEQ ID NO: 5918; WAN024AJ4_at; Start 35; Stop 59
gctcatactaattgcagaagttttg

SEQ ID NO: 56314 - DNA, 25 bp, Artificial
  probe
  misc_feature (1)..(25): SEQ ID NO: 5918; WAN024AJ4_at; Start 31; Stop 55
tagtgctcatactaattgcagaagt

SEQ ID NO: 56315 - DNA, 25 bp, Artificial
  probe
  misc_feature (1)..(25): SEQ ID NO: 5918; WAN024AJ4_at; Start 47; Stop 71
tgcagaagttttgggtgataagata

SEQ ID NO: 56316 - DNA, 25 bp, Artificial
  probe
  misc_feature (1)..(25): SEQ ID NO: 5918; WAN024AJ4_at; Start 112; Stop 136
cctctataagtgcttcaaaaagtgc

SEQ ID NO: 56317 - DNA, 25 bp, Artificial
  probe
  misc_feature (1)..(25): SEQ ID NO: 5918; WAN024AJ4_at; Start 91; Stop 115
aaatgcaacatttttaaatctcctc

SEQ ID NO: 56318 - DNA, 25 bp, Artificial
  probe
  misc_feature (1)..(25): SEQ ID NO: 5918; WAN024AJ4_at; Start 15; Stop 39
aaaagaaaaataacaatagtgctca

SEQ ID NO: 56319 - DNA, 25 bp, Artificial
  probe
  misc_feature (1)..(25): SEQ ID NO: 5918; WAN024AJ4_at; Start 139; Stop 163
caaaacctgtcttgtaatccaagta

SEQ ID NO: 56320 - DNA, 25 bp, Artificial
  probe
  misc_feature (1)..(25): SEQ ID NO: 5918; WAN024AJ4_at; Start 109; Stop 133
tctcctctataagtgcttcaaaaag

SEQ ID NO: 56321 - DNA, 25 bp, Artificial
  probe
  misc_feature (1)..(25): SEQ ID NO: 5918; WAN024AJ4_at; Start 118; Stop 142
taagtgcttcaaaaagtgcttcaaa

SEQ ID NO: 56322 - DNA, 25 bp, Artificial
  probe
  misc_feature (1)..(25): SEQ ID NO: 5918; WAN024AJ4_at; Start 54; Stop 78
gttttgggtgataagataactgata

SEQ ID NO: 56323 - DNA, 25 bp, Artificial
  probe
  misc_feature (1)..(25): SEQ ID NO: 5918; WAN024AJ4_at; Start 105; Stop 129
taaatctcctctataagtgcttcaa

SEQ ID NO: 56324 - DNA, 25 bp, Artificial
  probe
  misc_feature (1)..(25): SEQ ID NO: 5918; WAN024AJ4_at; Start 141; Stop 165
aaacctgtcttgtaatccaagtatt

SEQ ID NO: 56325 - DNA, 25 bp, Artificial
  probe
  misc_feature (1)..(25): SEQ ID NO: 5918; WAN024AJ4_at; Start 28; Stop 52
caatagtgctcatactaattgcaga

SEQ ID NO: 56326 - DNA, 25 bp, Artificial
  probe
  misc_feature (1)..(25): SEQ ID NO: 5918; WAN024AJ4_at; Start 19; Stop 43
gaaaaataacaatagtgctcatact

SEQ ID NO: 56327 - DNA, 25 bp, Artificial
  probe
  misc_feature (1)..(25): SEQ ID NO: 5918; WAN024AJ4_at; Start 63; Stop 87
gataagataactgataaattgcaat

SEQ ID NO: 56328 - DNA, 25 bp, Artificial
  probe
  misc_feature (1)..(25): SEQ ID NO: 5918; WAN024AJ4_at; Start 131; Stop 155
aagtgcttcaaaacctgtcttgtaa

SEQ ID NO: 56329 - DNA, 25 bp, Artificial
  probe
  misc_feature (1)..(25): SEQ ID NO: 5918; WAN024AJ4_at; Start 167; Stop 191
ttggggacggtgattaataagctag

SEQ ID NO: 56330 - DNA, 25 bp, Artificial
  probe
  misc_feature (1)..(25): SEQ ID NO: 5918; WAN024AJ4_at; Start 121; Stop 145
gtgcttcaaaaagtgcttcaaaacc

SEQ ID NO: 56331 - DNA, 25 bp, Artificial
  probe
  misc_feature (1)..(25): SEQ ID NO: 5918; WAN024AJ4_at; Start 49; Stop 73
cagaagttttgggtgataagataac

SEQ ID NO: 56332 - DNA, 25 bp, Artificial
  probe
  misc_feature (1)..(25): SEQ ID NO: 5918; WAN024AJ4_at; Start 116; Stop 140
tataagtgcttcaaaaagtgcttca

SEQ ID NO: 56333 - DNA, 25 bp, Artificial
  probe
  misc_feature (1)..(25): SEQ ID NO: 5918; WAN024AJ4_at; Start 128; Stop 152
aaaaagtgcttcaaaacctgtcttg

SEQ ID NO: 56334 - DNA, 25 bp, Artificial
  probe
  misc_feature (1)..(25): SEQ ID NO: 5918; WAN024AJ4_at; Start 72; Stop 96
actgataaattgcaataaaaaatgc

SEQ ID NO: 56335 - DNA, 25 bp, Artificial
  probe
  misc_feature (1)..(25): SEQ ID NO: 5918; WAN024AJ4_at; Start 38; Stop 62
catactaattgcagaagttttgggt

SEQ ID NO: 56336 - DNA, 25 bp, Artificial
  probe
  misc_feature (1)..(25): SEQ ID NO: 5918; WAN024AJ4_at; Start 114; Stop 138
tctataagtgcttcaaaaagtgctt

SEQ ID NO: 56337 - DNA, 25 bp, Artificial
  probe
  misc_feature (1)..(25): SEQ ID NO: 3563; WAN024AJ5_at; Start 4; Stop 28
tattaatcgttgtggtctttccaga

SEQ ID NO: 56338 - DNA, 25 bp, Artificial
  probe
  misc_feature (1)..(25): SEQ ID NO: 3563; WAN024AJ5_at; Start 2; Stop 26
aatattaatcgttgtggtctttcca

SEQ ID NO: 56339 - DNA, 25 bp, Artificial
  probe
  misc_feature (1)..(25): SEQ ID NO: 3563; WAN024AJ5_at; Start 7; Stop 31
taatcgttgtggtctttccagaacc

SEQ ID NO: 56340 - DNA, 25 bp, Artificial
  probe
  misc_feature (1)..(25): SEQ ID NO: 3563; WAN024AJ5_at; Start 1; Stop 25
gaatattaatcgttgtggtctttcc

SEQ ID NO: 56341 - DNA, 25 bp, Artificial
  probe
  misc_feature (1)..(25): SEQ ID NO: 3563; WAN024AJ5_at; Start 8; Stop 32
aatcgttgtggtctttccagaacca

SEQ ID NO: 56342 - DNA, 25 bp, Artificial
  probe
  misc_feature (1)..(25): SEQ ID NO: 3563; WAN024AJ5_at; Start 5; Stop 29
attaatcgttgtggtctttccagaa

SEQ ID NO: 56343 - DNA, 25 bp, Artificial
  probe
  misc_feature (1)..(25): SEQ ID NO: 3563; WAN024AJ5_at; Start 3; Stop 27
atattaatcgttgtggtctttccag

SEQ ID NO: 56344 - DNA, 25 bp, Artificial
  probe
  misc_feature (1)..(25): SEQ ID NO: 3563; WAN024AJ5_at; Start 6; Stop 30
ttaatcgttgtggtctttccagaac

SEQ ID NO: 56345 - DNA, 25 bp, Artificial
  probe
  misc_feature (1)..(25): SEQ ID NO: 3181; WAN024AJ6_at; Start 26; Stop 50
gttctggaaagaccacaacgattaa

SEQ ID NO: 56346 - DNA, 25 bp, Artificial
  probe
  misc_feature (1)..(25): SEQ ID NO: 3181; WAN024AJ6_at; Start 30; Stop 54
tggaaagaccacaacgattaatatt

SEQ ID NO: 56347 - DNA, 25 bp, Artificial
  probe
  misc_feature (1)..(25): SEQ ID NO: 3181; WAN024AJ6_at; Start 31; Stop 55
ggaaagaccacaacgattaatattc

SEQ ID NO: 56348 - DNA, 25 bp, Artificial
  probe
  misc_feature (1)..(25): SEQ ID NO: 3181; WAN024AJ6_at; Start 25; Stop 49
ggttctggaaagaccacaacgatta

SEQ ID NO: 56349 - DNA, 25 bp, Artificial
  probe
  misc_feature (1)..(25): SEQ ID NO: 3181; WAN024AJ6_at; Start 27; Stop 51
ttctggaaagaccacaacgattaat

SEQ ID NO: 56350 - DNA, 25 bp, Artificial
  probe
  misc_feature (1)..(25): SEQ ID NO: 3181; WAN024AJ6_at; Start 28; Stop 52
tctggaaagaccacaacgattaata

SEQ ID NO: 56351 - DNA, 25 bp, Artificial
  probe
  misc_feature (1)..(25): SEQ ID NO: 3181; WAN024AJ6_at; Start 29; Stop 53
ctggaaagaccacaacgattaatat

SEQ ID NO: 56352 - DNA, 25 bp, Artificial
  probe
  misc_feature (1)..(25): SEQ ID NO: 4507; WAN024AJ7_at; Start 13; Stop 37
tctaattttgtactattgtatcaaa

SEQ ID NO: 56353 - DNA, 25 bp, Artificial
  probe
  misc_feature (1)..(25): SEQ ID NO: 4507; WAN024AJ7_at; Start 11; Stop 35
cctctaattttgtactattgtatca

SEQ ID NO: 56354 - DNA, 25 bp, Artificial
  probe
  misc_feature (1)..(25): SEQ ID NO: 4507; WAN024AJ7_at; Start 10; Stop 34
tcctctaattttgtactattgtatc

SEQ ID NO: 56355 - DNA, 25 bp, Artificial
  probe
  misc_feature (1)..(25): SEQ ID NO: 4507; WAN024AJ7_at; Start 9; Stop 33
ctcctctaattttgtactattgtat

SEQ ID NO: 56356 - DNA, 25 bp, Artificial
  probe
  misc_feature (1)..(25): SEQ ID NO: 4507; WAN024AJ7_at; Start 14; Stop 38
ctaattttgtactattgtatcaaaa

SEQ ID NO: 56357 - DNA, 25 bp, Artificial
  probe
  misc_feature (1)..(25): SEQ ID NO: 4507; WAN024AJ7_at; Start 12; Stop 36
ctctaattttgtactattgtatcaa

SEQ ID NO: 56358 - DNA, 25 bp, Artificial
  probe
  misc_feature (1)..(25): SEQ ID NO: 4507; WAN024AJ7_at; Start 8; Stop 32
cctcctctaattttgtactattgta

SEQ ID NO: 56359 - DNA, 25 bp, Artificial
  probe
  misc_feature (1)..(25): SEQ ID NO: 4827; WAN024AJ8_at; Start 34; Stop 58
tttgatacaatagtacaaaattaga

SEQ ID NO: 56360 - DNA, 25 bp, Artificial
  probe
  misc_feature (1)..(25): SEQ ID NO: 4827; WAN024AJ8_at; Start 33; Stop 57
ttttgatacaatagtacaaaattag

SEQ ID NO: 56361 - DNA, 25 bp, Artificial
  probe
  misc_feature (1)..(25): SEQ ID NO: 4827; WAN024AJ8_at; Start 36; Stop 60
tgatacaatagtacaaaattagagg

SEQ ID NO: 56362 - DNA, 25 bp, Artificial
  probe
  misc_feature (1)..(25): SEQ ID NO: 4827; WAN024AJ8_at; Start 39; Stop 63
tacaatagtacaaaattagaggagg

SEQ ID NO: 56363 - DNA, 25 bp, Artificial
  probe
  misc_feature (1)..(25): SEQ ID NO: 4827; WAN024AJ8_at; Start 37; Stop 61
gatacaatagtacaaaattagagga

SEQ ID NO: 56364 - DNA, 25 bp, Artificial
  probe
  misc_feature (1)..(25): SEQ ID NO: 4827; WAN024AJ8_at; Start 38; Stop 62
atacaatagtacaaaattagaggag

SEQ ID NO: 56365 - DNA, 25 bp, Artificial
  probe
  misc_feature (1)..(25): SEQ ID NO: 4827; WAN024AJ8_at; Start 35; Stop 59
ttgatacaatagtacaaaattagag

SEQ ID NO: 56366 - DNA, 25 bp, Artificial
  probe
  misc_feature (1)..(25): SEQ ID NO: 392; WAN024AJ9_at; Start 309; Stop 333
cattataccttcttttttataagca

SEQ ID NO: 56367 - DNA, 25 bp, Artificial
  probe
  misc_feature (1)..(25): SEQ ID NO: 392; WAN024AJ9_at; Start 38; Stop 62
gctcctaatactaatactgttttat

SEQ ID NO: 56368 - DNA, 25 bp, Artificial
  probe
  misc_feature (1)..(25): SEQ ID NO: 392; WAN024AJ9_at; Start 101; Stop 125
tagtaacctttagttctagaatatc

SEQ ID NO: 56369 - DNA, 25 bp, Artificial
  probe
  misc_feature (1)..(25): SEQ ID NO: 392; WAN024AJ9_at; Start 254; Stop 278
cttgcgaaatttgaggttctatagc

SEQ ID NO: 56370 - DNA, 25 bp, Artificial
  probe
  misc_feature (1)..(25): SEQ ID NO: 392; WAN024AJ9_at; Start 111; Stop 135
tagttctagaatatctactatcaat

SEQ ID NO: 56371 - DNA, 25 bp, Artificial
  probe
  misc_feature (1)..(25): SEQ ID NO: 392; WAN024AJ9_at; Start 154; Stop 178
taaaatttgttcatttatagttcaa

SEQ ID NO: 56372 - DNA, 25 bp, Artificial
  probe
  misc_feature (1)..(25): SEQ ID NO: 392; WAN024AJ9_at; Start 220; Stop 244
tccttacaactattaaatagatcgt

SEQ ID NO: 56373 - DNA, 25 bp, Artificial
  probe
  misc_feature (1)..(25): SEQ ID NO: 392; WAN024AJ9_at; Start 33; Stop 57
ctcctgctcctaatactaatactgt

SEQ ID NO: 56374 - DNA, 25 bp, Artificial
  probe
  misc_feature (1)..(25): SEQ ID NO: 392; WAN024AJ9_at; Start 75; Stop 99
tatactcttcattataaaataacga

SEQ ID NO: 56375 - DNA, 25 bp, Artificial
  probe
  misc_feature (1)..(25): SEQ ID NO: 392; WAN024AJ9_at; Start 290; Stop 314
tactccgaccacgtaaatacattat

SEQ ID NO: 56376 - DNA, 25 bp, Artificial
  probe
  misc_feature (1)..(25): SEQ ID NO: 392; WAN024AJ9_at; Start 257; Stop 281
gcgaaatttgaggttctatagctat

SEQ ID NO: 56377 - DNA, 25 bp, Artificial
  probe
  misc_feature (1)..(25): SEQ ID NO: 392; WAN024AJ9_at; Start 299; Stop 323
cacgtaaatacattataccttcttt

SEQ ID NO: 56378 - DNA, 25 bp, Artificial
  probe
  misc_feature (1)..(25): SEQ ID NO: 392; WAN024AJ9_at; Start 6; Stop 30
gacttagagatatataacatcctaa

SEQ ID NO: 56379 - DNA, 25 bp, Artificial
  probe
  misc_feature (1)..(25): SEQ ID NO: 392; WAN024AJ9_at; Start 183; Stop 207
tagtttactgcctaatacttcttct

SEQ ID NO: 56380 - DNA, 25 bp, Artificial
  probe
  misc_feature (1)..(25): SEQ ID NO: 392; WAN024AJ9_at; Start 237; Stop 261
tagatcgttgataaattcttgcgaa

SEQ ID NO: 56381 - DNA, 25 bp, Artificial
  probe
  misc_feature (1)..(25): SEQ ID NO: 392; WAN024AJ9_at; Start 171; Stop 195
tagttcaaatgttagtttactgcct

SEQ ID NO: 56382 - DNA, 25 bp, Artificial
  probe
  misc_feature (1)..(25): SEQ ID NO: 392; WAN024AJ9_at; Start 139; Stop 163
tatctcatccgaaattaaaatttgt

SEQ ID NO: 56383 - DNA, 25 bp, Artificial
  probe
  misc_feature (1)..(25): SEQ ID NO: 392; WAN024AJ9_at; Start 235; Stop 259
aatagatcgttgataaattcttgcg

SEQ ID NO: 56384 - DNA, 25 bp, Artificial
  probe
  misc_feature (1)..(25): SEQ ID NO: 392; WAN024AJ9_at; Start 132; Stop 156
caatatctatctcatccgaaattaa

SEQ ID NO: 56385 - DNA, 25 bp, Artificial
  probe
  misc_feature (1)..(25): SEQ ID NO: 392; WAN024AJ9_at; Start 3; Stop 27
ttagacttagagatatataacatcc

SEQ ID NO: 56386 - DNA, 25 bp, Artificial
  probe
  misc_feature (1)..(25): SEQ ID NO: 392; WAN024AJ9_at; Start 266; Stop 290
gaggttctatagctatttcccgcat

SEQ ID NO: 56387 - DNA, 25 bp, Artificial
  probe
  misc_feature (1)..(25): SEQ ID NO: 392; WAN024AJ9_at; Start 268; Stop 292
ggttctatagctatttcccgcatac

SEQ ID NO: 56388 - DNA, 25 bp, Artificial
  probe
  misc_feature (1)..(25): SEQ ID NO: 392; WAN024AJ9_at; Start 176; Stop 200
caaatgttagtttactgcctaatac

SEQ ID NO: 56389 - DNA, 25 bp, Artificial
  probe
  misc_feature (1)..(25): SEQ ID NO: 392; WAN024AJ9_at; Start 264; Stop 288
ttgaggttctatagctatttcccgc

SEQ ID NO: 56390 - DNA, 25 bp, Artificial
  probe
  misc_feature (1)..(25): SEQ ID NO: 392; WAN024AJ9_at; Start 248; Stop 272
taaattcttgcgaaatttgaggttc

SEQ ID NO: 56391 - DNA, 25 bp, Artificial
  probe
  misc_feature (1)..(25): SEQ ID NO: 392; WAN024AJ9_at; Start 272; Stop 296
ctatagctatttcccgcatactccg

SEQ ID NO: 56392 - DNA, 25 bp, Artificial
  probe
  misc_feature (1)..(25): SEQ ID NO: 392; WAN024AJ9_at; Start 126; Stop 150
tactatcaatatctatctcatccga

SEQ ID NO: 56393 - DNA, 25 bp, Artificial
  probe
  misc_feature (1)..(25): SEQ ID NO: 392; WAN024AJ9_at; Start 83; Stop 107
tcattataaaataacgaatagtaac

SEQ ID NO: 56394 - DNA, 25 bp, Artificial
  probe
  misc_feature (1)..(25): SEQ ID NO: 392; WAN024AJ9_at; Start 192; Stop 216
gcctaatacttcttctatctctaat

SEQ ID NO: 56395 - DNA, 25 bp, Artificial
  probe
  misc_feature (1)..(25): SEQ ID NO: 392; WAN024AJ9_at; Start 35; Stop 59
cctgctcctaatactaatactgttt

SEQ ID NO: 56396 - DNA, 25 bp, Artificial
  probe
  misc_feature (1)..(25): SEQ ID NO: 392; WAN024AJ9_at; Start 105; Stop 129
aacctttagttctagaatatctact

SEQ ID NO: 56397 - DNA, 25 bp, Artificial
  probe
  misc_feature (1)..(25): SEQ ID NO: 392; WAN024AJ9_at; Start 293; Stop 317
tccgaccacgtaaatacattatacc

SEQ ID NO: 56398 - DNA, 25 bp, Artificial
  probe
  misc_feature (1)..(25): SEQ ID NO: 392; WAN024AJ9_at; Start 287; Stop 311
gcatactccgaccacgtaaatacat

SEQ ID NO: 56399 - DNA, 25 bp, Artificial
  probe
  misc_feature (1)..(25): SEQ ID NO: 392; WAN024AJ9_at; Start 205; Stop 229
tctatctctaatagttccttacaac

SEQ ID NO: 56400 - DNA, 25 bp, Artificial
  probe
  misc_feature (1)..(25): SEQ ID NO: 4804; WAN024AJA_at; Start 265; Stop 289
tataataaaatacagaataaaacag

SEQ ID NO: 56401 - DNA, 25 bp, Artificial
  probe
  misc_feature (1)..(25): SEQ ID NO: 4804; WAN024AJA_at; Start 47; Stop 71
cggagtatgcgggaaatagctatag

SEQ ID NO: 56402 - DNA, 25 bp, Artificial
  probe
  misc_feature (1)..(25): SEQ ID NO: 4804; WAN024AJA_at; Start 55; Stop 79
gcgggaaatagctatagaacctcaa

SEQ ID NO: 56403 - DNA, 25 bp, Artificial
  probe
  misc_feature (1)..(25): SEQ ID NO: 4804; WAN024AJA_at; Start 85; Stop 109
gcaagaatttatcaacgatctattt

SEQ ID NO: 56404 - DNA, 25 bp, Artificial
  probe
  misc_feature (1)..(25): SEQ ID NO: 4804; WAN024AJA_at; Start 149; Stop 173
ggcagtaaactaacatttgaactat

SEQ ID NO: 56405 - DNA, 25 bp, Artificial
  probe
  misc_feature (1)..(25): SEQ ID NO: 4804; WAN024AJA_at; Start 218; Stop 242
gatattctagaactaaaggttacta

SEQ ID NO: 56406 - DNA, 25 bp, Artificial
  probe
  misc_feature (1)..(25): SEQ ID NO: 4804; WAN024AJA_at; Start 65; Stop 89
gctatagaacctcaaatttcgcaag

SEQ ID NO: 56407 - DNA, 25 bp, Artificial
  probe
  misc_feature (1)..(25): SEQ ID NO: 4804; WAN024AJA_at; Start 140; Stop 164
gaagtattaggcagtaaactaacat

SEQ ID NO: 56408 - DNA, 25 bp, Artificial
  probe
  misc_feature (1)..(25): SEQ ID NO: 4804; WAN024AJA_at; Start 82; Stop 106
ttcgcaagaatttatcaacgatcta

SEQ ID NO: 56409 - DNA, 25 bp, Artificial
  probe
  misc_feature (1)..(25): SEQ ID NO: 4804; WAN024AJA_at; Start 317; Stop 341
gatgttatatatctctaagtctaag

SEQ ID NO: 56410 - DNA, 25 bp, Artificial
  probe
  misc_feature (1)..(25): SEQ ID NO: 4804; WAN024AJA_at; Start 158; Stop 182
ctaacatttgaactataaatgaaca

SEQ ID NO: 56411 - DNA, 25 bp, Artificial
  probe
  misc_feature (1)..(25): SEQ ID NO: 4804; WAN024AJA_at; Start 26; Stop 50
ggtataatgtatttacgtggtcgga

SEQ ID NO: 56412 - DNA, 25 bp, Artificial
  probe
  misc_feature (1)..(25): SEQ ID NO: 4804; WAN024AJA_at; Start 10; Stop 34
tgcttataaaaaagaaggtataatg

SEQ ID NO: 56413 - DNA, 25 bp, Artificial
  probe
  misc_feature (1)..(25): SEQ ID NO: 4804; WAN024AJA_at; Start 194; Stop 218
cggatgagatagatattgatagtag

SEQ ID NO: 56414 - DNA, 25 bp, Artificial
  probe
  misc_feature (1)..(25): SEQ ID NO: 4804; WAN024AJA_at; Start 71; Stop 95
gaacctcaaatttcgcaagaattta

SEQ ID NO: 56415 - DNA, 25 bp, Artificial
  probe
  misc_feature (1)..(25): SEQ ID NO: 4804; WAN024AJA_at; Start 33; Stop 57
tgtatttacgtggtcggagtatgcg

SEQ ID NO: 56416 - DNA, 25 bp, Artificial
  probe
  misc_feature (1)..(25): SEQ ID NO: 4804; WAN024AJA_at; Start 57; Stop 81
gggaaatagctatagaacctcaaat

SEQ ID NO: 56417 - DNA, 25 bp, Artificial
  probe
  misc_feature (1)..(25): SEQ ID NO: 4804; WAN024AJA_at; Start 30; Stop 54
taatgtatttacgtggtcggagtat

SEQ ID NO: 56418 - DNA, 25 bp, Artificial
  probe
  misc_feature (1)..(25): SEQ ID NO: 4804; WAN024AJA_at; Start 178; Stop 202
gaacaaattttaatttcggatgaga

SEQ ID NO: 56419 - DNA, 25 bp, Artificial
  probe
  misc_feature (1)..(25): SEQ ID NO: 4804; WAN024AJA_at; Start 114; Stop 138
gttgtaaggaactattagagataga

SEQ ID NO: 56420 - DNA, 25 bp, Artificial
  probe
  misc_feature (1)..(25): SEQ ID NO: 4804; WAN024AJA_at; Start 63; Stop 87
tagctatagaacctcaaatttcgca

SEQ ID NO: 56421 - DNA, 25 bp, Artificial
  probe
  misc_feature (1)..(25): SEQ ID NO: 4804; WAN024AJA_at; Start 240; Stop 264
ctattcgttattttataatgaagag

SEQ ID NO: 56422 - DNA, 25 bp, Artificial
  probe
  misc_feature (1)..(25): SEQ ID NO: 4804; WAN024AJA_at; Start 188; Stop 212
taatttcggatgagatagatattga

SEQ ID NO: 56423 - DNA, 25 bp, Artificial
  probe
  misc_feature (1)..(25): SEQ ID NO: 4804; WAN024AJA_at; Start 52; Stop 76
tatgcgggaaatagctatagaacct

SEQ ID NO: 56424 - DNA, 25 bp, Artificial
  probe
  misc_feature (1)..(25): SEQ ID NO: 4804; WAN024AJA_at; Start 101; Stop 125
gatctatttaatagttgtaaggaac

SEQ ID NO: 56425 - DNA, 25 bp, Artificial
  probe
  misc_feature (1)..(25): SEQ ID NO: 4804; WAN024AJA_at; Start 67; Stop 91
tatagaacctcaaatttcgcaagaa

SEQ ID NO: 56426 - DNA, 25 bp, Artificial
  probe
  misc_feature (1)..(25): SEQ ID NO: 4804; WAN024AJA_at; Start 135; Stop 159
tagaagaagtattaggcagtaaact

SEQ ID NO: 56427 - DNA, 25 bp, Artificial
  probe
  misc_feature (1)..(25): SEQ ID NO: 4804; WAN024AJA_at; Start 181; Stop 205
caaattttaatttcggatgagatag

SEQ ID NO: 56428 - DNA, 25 bp, Artificial
  probe
  misc_feature (1)..(25): SEQ ID NO: 4804; WAN024AJA_at; Start 283; Stop 307
aaaacagtattagtattaggagcag

SEQ ID NO: 56429 - DNA, 25 bp, Artificial
  probe
  misc_feature (1)..(25): SEQ ID NO: 4804; WAN024AJA_at; Start 129; Stop 153
tagagatagaagaagtattaggcag

SEQ ID NO: 56430 - DNA, 25 bp, Artificial
  probe
  misc_feature (1)..(25): SEQ ID NO: 4804; WAN024AJA_at; Start 147; Stop 171
taggcagtaaactaacatttgaact

SEQ ID NO: 56431 - DNA, 25 bp, Artificial
  probe
  misc_feature (1)..(25): SEQ ID NO: 4804; WAN024AJA_at; Start 77; Stop 101
caaatttcgcaagaatttatcaacg

SEQ ID NO: 56432 - DNA, 25 bp, Artificial
  probe
  misc_feature (1)..(25): SEQ ID NO: 4804; WAN024AJA_at; Start 286; Stop 310
acagtattagtattaggagcaggag

SEQ ID NO: 56433 - DNA, 25 bp, Artificial
  probe
  misc_feature (1)..(25): SEQ ID NO: 4804; WAN024AJA_at; Start 211; Stop 235
gatagtagatattctagaactaaag

SEQ ID NO: 56434 - DNA, 25 bp, Artificial
  probe
  misc_feature (1)..(25): SEQ ID NO: 4425; WAN024AJB_at; Start 41; Stop 65
aaaacatactctagtccctcagtcc

SEQ ID NO: 56435 - DNA, 25 bp, Artificial
  probe
  misc_feature (1)..(25): SEQ ID NO: 4425; WAN024AJB_at; Start 158; Stop 182
gcttgatgttagtaaatgaacaaac

SEQ ID NO: 56436 - DNA, 25 bp, Artificial
  probe
  misc_feature (1)..(25): SEQ ID NO: 4425; WAN024AJB_at; Start 132; Stop 156
tgactgtctaaaatgaaattgaaaa

SEQ ID NO: 56437 - DNA, 25 bp, Artificial
  probe
  misc_feature (1)..(25): SEQ ID NO: 4425; WAN024AJB_at; Start 98; Stop 122
tctcttgctgcaagactaatacgga

SEQ ID NO: 56438 - DNA, 25 bp, Artificial
  probe
  misc_feature (1)..(25): SEQ ID NO: 4425; WAN024AJB_at; Start 66; Stop 90
gcaatcaataaaataatgactaatt

SEQ ID NO: 56439 - DNA, 25 bp, Artificial
  probe
  misc_feature (1)..(25): SEQ ID NO: 4425; WAN024AJB_at; Start 151; Stop 175
tgaaaaagcttgatgttagtaaatg

SEQ ID NO: 56440 - DNA, 25 bp, Artificial
  probe
  misc_feature (1)..(25): SEQ ID NO: 4425; WAN024AJB_at; Start 135; Stop 159
ctgtctaaaatgaaattgaaaaagc

SEQ ID NO: 56441 - DNA, 25 bp, Artificial
  probe
  misc_feature (1)..(25): SEQ ID NO: 4425; WAN024AJB_at; Start 56; Stop 80
ccctcagtccgcaatcaataaaata

SEQ ID NO: 56442 - DNA, 25 bp, Artificial
  probe
  misc_feature (1)..(25): SEQ ID NO: 4425; WAN024AJB_at; Start 57; Stop 81
cctcagtccgcaatcaataaaataa

SEQ ID NO: 56443 - DNA, 25 bp, Artificial
  probe
  misc_feature (1)..(25): SEQ ID NO: 4425; WAN024AJB_at; Start 159; Stop 183
cttgatgttagtaaatgaacaaact

SEQ ID NO: 56444 - DNA, 25 bp, Artificial
  probe
  misc_feature (1)..(25): SEQ ID NO: 4425; WAN024AJB_at; Start 90; Stop 114
tctattaatctcttgctgcaagact

SEQ ID NO: 56445 - DNA, 25 bp, Artificial
  probe
  misc_feature (1)..(25): SEQ ID NO: 4425; WAN024AJB_at; Start 103; Stop 127
tgctgcaagactaatacggaaaatt

SEQ ID NO: 56446 - DNA, 25 bp, Artificial
  probe
  misc_feature (1)..(25): SEQ ID NO: 4425; WAN024AJB_at; Start 83; Stop 107
gactaattctattaatctcttgctg

SEQ ID NO: 56447 - DNA, 25 bp, Artificial
  probe
  misc_feature (1)..(25): SEQ ID NO: 4425; WAN024AJB_at; Start 99; Stop 123
ctcttgctgcaagactaatacggaa

SEQ ID NO: 56448 - DNA, 25 bp, Artificial
  probe
  misc_feature (1)..(25): SEQ ID NO: 4425; WAN024AJB_at; Start 100; Stop 124
tcttgctgcaagactaatacggaaa

SEQ ID NO: 56449 - DNA, 25 bp, Artificial
  probe
  misc_feature (1)..(25): SEQ ID NO: 4425; WAN024AJB_at; Start 63; Stop 87
tccgcaatcaataaaataatgacta

SEQ ID NO: 56450 - DNA, 25 bp, Artificial
  probe
  misc_feature (1)..(25): SEQ ID NO: 4425; WAN024AJB_at; Start 145; Stop 169
tgaaattgaaaaagcttgatgttag

SEQ ID NO: 56451 - DNA, 25 bp, Artificial
  probe
  misc_feature (1)..(25): SEQ ID NO: 4425; WAN024AJB_at; Start 52; Stop 76
tagtccctcagtccgcaatcaataa

SEQ ID NO: 56452 - DNA, 25 bp, Artificial
  probe
  misc_feature (1)..(25): SEQ ID NO: 4425; WAN024AJB_at; Start 36; Stop 60
taagtaaaacatactctagtccctc

SEQ ID NO: 56453 - DNA, 25 bp, Artificial
  probe
  misc_feature (1)..(25): SEQ ID NO: 4425; WAN024AJB_at; Start 38; Stop 62
agtaaaacatactctagtccctcag

SEQ ID NO: 56454 - DNA, 25 bp, Artificial
  probe
  misc_feature (1)..(25): SEQ ID NO: 4425; WAN024AJB_at; Start 39; Stop 63
gtaaaacatactctagtccctcagt

SEQ ID NO: 56455 - DNA, 25 bp, Artificial
  probe
  misc_feature (1)..(25): SEQ ID NO: 4425; WAN024AJB_at; Start 40; Stop 64
taaaacatactctagtccctcagtc

SEQ ID NO: 56456 - DNA, 25 bp, Artificial
  probe
  misc_feature (1)..(25): SEQ ID NO: 4425; WAN024AJB_at; Start 102; Stop 126
ttgctgcaagactaatacggaaaat

SEQ ID NO: 56457 - DNA, 25 bp, Artificial
  probe
  misc_feature (1)..(25): SEQ ID NO: 4425; WAN024AJB_at; Start 59; Stop 83
tcagtccgcaatcaataaaataatg

SEQ ID NO: 56458 - DNA, 25 bp, Artificial
  probe
  misc_feature (1)..(25): SEQ ID NO: 4425; WAN024AJB_at; Start 46; Stop 70
atactctagtccctcagtccgcaat

SEQ ID NO: 56459 - DNA, 25 bp, Artificial
  probe
  misc_feature (1)..(25): SEQ ID NO: 4425; WAN024AJB_at; Start 101; Stop 125
cttgctgcaagactaatacggaaaa

SEQ ID NO: 56460 - DNA, 25 bp, Artificial
  probe
  misc_feature (1)..(25): SEQ ID NO: 4425; WAN024AJB_at; Start 89; Stop 113
ttctattaatctcttgctgcaagac

SEQ ID NO: 56461 - DNA, 25 bp, Artificial
  probe
  misc_feature (1)..(25): SEQ ID NO: 4425; WAN024AJB_at; Start 141; Stop 165
aaaatgaaattgaaaaagcttgatg

SEQ ID NO: 56462 - DNA, 25 bp, Artificial
  probe
  misc_feature (1)..(25): SEQ ID NO: 4425; WAN024AJB_at; Start 129; Stop 153
aaatgactgtctaaaatgaaattga

SEQ ID NO: 56463 - DNA, 25 bp, Artificial
  probe
  misc_feature (1)..(25): SEQ ID NO: 4425; WAN024AJB_at; Start 87; Stop 111
aattctattaatctcttgctgcaag

SEQ ID NO: 56464 - DNA, 25 bp, Artificial
  probe
  misc_feature (1)..(25): SEQ ID NO: 4425; WAN024AJB_at; Start 138; Stop 162
tctaaaatgaaattgaaaaagcttg

SEQ ID NO: 56465 - DNA, 25 bp, Artificial
  probe
  misc_feature (1)..(25): SEQ ID NO: 4425; WAN024AJB_at; Start 154; Stop 178
aaaagcttgatgttagtaaatgaac

SEQ ID NO: 56466 - DNA, 25 bp, Artificial
  probe
  misc_feature (1)..(25): SEQ ID NO: 4425; WAN024AJB_at; Start 60; Stop 84
cagtccgcaatcaataaaataatga

SEQ ID NO: 56467 - DNA, 25 bp, Artificial
  probe
  misc_feature (1)..(25): SEQ ID NO: 4425; WAN024AJB_at; Start 55; Stop 79
tccctcagtccgcaatcaataaaat

SEQ ID NO: 56468 - DNA, 25 bp, Artificial
  probe
  misc_feature (1)..(25): SEQ ID NO: 509; WAN024AJC_at; Start 121; Stop 145
actgagggactagagtatgttttac

SEQ ID NO: 56469 - DNA, 25 bp, Artificial
  probe
  misc_feature (1)..(25): SEQ ID NO: 509; WAN024AJC_at; Start 16; Stop 40
taacatcaagctttttcaatttcat

SEQ ID NO: 56470 - DNA, 25 bp, Artificial
  probe
  misc_feature (1)..(25): SEQ ID NO: 509; WAN024AJC_at; Start 104; Stop 128
tattttattgattgcggactgaggg

SEQ ID NO: 56471 - DNA, 25 bp, Artificial
  probe
  misc_feature (1)..(25): SEQ ID NO: 509; WAN024AJC_at; Start 64; Stop 88
cgtattagtcttgcagcaagagatt

SEQ ID NO: 56472 - DNA, 25 bp, Artificial
  probe
  misc_feature (1)..(25): SEQ ID NO: 509; WAN024AJC_at; Start 66; Stop 90
tattagtcttgcagcaagagattaa

SEQ ID NO: 56473 - DNA, 25 bp, Artificial
  probe
  misc_feature (1)..(25): SEQ ID NO: 509; WAN024AJC_at; Start 73; Stop 97
cttgcagcaagagattaatagaatt

SEQ ID NO: 56474 - DNA, 25 bp, Artificial
  probe
  misc_feature (1)..(25): SEQ ID NO: 509; WAN024AJC_at; Start 69; Stop 93
tagtcttgcagcaagagattaatag

SEQ ID NO: 56475 - DNA, 25 bp, Artificial
  probe
  misc_feature (1)..(25): SEQ ID NO: 509; WAN024AJC_at; Start 71; Stop 95
gtcttgcagcaagagattaatagaa

SEQ ID NO: 56476 - DNA, 25 bp, Artificial
  probe
  misc_feature (1)..(25): SEQ ID NO: 509; WAN024AJC_at; Start 109; Stop 133
tattgattgcggactgagggactag

SEQ ID NO: 56477 - DNA, 25 bp, Artificial
  probe
  misc_feature (1)..(25): SEQ ID NO: 509; WAN024AJC_at; Start 114; Stop 138
attgcggactgagggactagagtat

SEQ ID NO: 56478 - DNA, 25 bp, Artificial
  probe
  misc_feature (1)..(25): SEQ ID NO: 509; WAN024AJC_at; Start 124; Stop 148
gagggactagagtatgttttactta

SEQ ID NO: 56479 - DNA, 25 bp, Artificial
  probe
  misc_feature (1)..(25): SEQ ID NO: 509; WAN024AJC_at; Start 31; Stop 55
tcaatttcattttagacagtcattt

SEQ ID NO: 56480 - DNA, 25 bp, Artificial
  probe
  misc_feature (1)..(25): SEQ ID NO: 509; WAN024AJC_at; Start 13; Stop 37
tactaacatcaagctttttcaattt

SEQ ID NO: 56481 - DNA, 25 bp, Artificial
  probe
  misc_feature (1)..(25): SEQ ID NO: 509; WAN024AJC_at; Start 57; Stop 81
aattttccgtattagtcttgcagca

SEQ ID NO: 56482 - DNA, 25 bp, Artificial
  probe
  misc_feature (1)..(25): SEQ ID NO: 509; WAN024AJC_at; Start 60; Stop 84
tttccgtattagtcttgcagcaaga

SEQ ID NO: 56483 - DNA, 25 bp, Artificial
  probe
  misc_feature (1)..(25): SEQ ID NO: 509; WAN024AJC_at; Start 80; Stop 104
caagagattaatagaattagtcatt

SEQ ID NO: 56484 - DNA, 25 bp, Artificial
  probe
  misc_feature (1)..(25): SEQ ID NO: 509; WAN024AJC_at; Start 119; Stop 143
ggactgagggactagagtatgtttt

SEQ ID NO: 56485 - DNA, 25 bp, Artificial
  probe
  misc_feature (1)..(25): SEQ ID NO: 509; WAN024AJC_at; Start 2; Stop 26
gtttgttcatttactaacatcaagc

SEQ ID NO: 56486 - DNA, 25 bp, Artificial
  probe
  misc_feature (1)..(25): SEQ ID NO: 509; WAN024AJC_at; Start 72; Stop 96
tcttgcagcaagagattaatagaat

SEQ ID NO: 56487 - DNA, 25 bp, Artificial
  probe
  misc_feature (1)..(25): SEQ ID NO: 509; WAN024AJC_at; Start 59; Stop 83
ttttccgtattagtcttgcagcaag

SEQ ID NO: 56488 - DNA, 25 bp, Artificial
  probe
  misc_feature (1)..(25): SEQ ID NO: 509; WAN024AJC_at; Start 77; Stop 101
cagcaagagattaatagaattagtc

SEQ ID NO: 56489 - DNA, 25 bp, Artificial
  probe
  misc_feature (1)..(25): SEQ ID NO: 509; WAN024AJC_at; Start 61; Stop 85
ttccgtattagtcttgcagcaagag

SEQ ID NO: 56490 - DNA, 25 bp, Artificial
  probe
  misc_feature (1)..(25): SEQ ID NO: 509; WAN024AJC_at; Start 75; Stop 99
tgcagcaagagattaatagaattag

SEQ ID NO: 56491 - DNA, 25 bp, Artificial
  probe
  misc_feature (1)..(25): SEQ ID NO: 509; WAN024AJC_at; Start 105; Stop 129
attttattgattgcggactgaggga

SEQ ID NO: 56492 - DNA, 25 bp, Artificial
  probe
  misc_feature (1)..(25): SEQ ID NO: 509; WAN024AJC_at; Start 62; Stop 86
tccgtattagtcttgcagcaagaga

SEQ ID NO: 56493 - DNA, 25 bp, Artificial
  probe
  misc_feature (1)..(25): SEQ ID NO: 509; WAN024AJC_at; Start 122; Stop 146
ctgagggactagagtatgttttact

SEQ ID NO: 56494 - DNA, 25 bp, Artificial
  probe
  misc_feature (1)..(25): SEQ ID NO: 509; WAN024AJC_at; Start 79; Stop 103
gcaagagattaatagaattagtcat

SEQ ID NO: 56495 - DNA, 25 bp, Artificial
  probe
  misc_feature (1)..(25): SEQ ID NO: 509; WAN024AJC_at; Start 63; Stop 87
ccgtattagtcttgcagcaagagat

SEQ ID NO: 56496 - DNA, 25 bp, Artificial
  probe
  misc_feature (1)..(25): SEQ ID NO: 509; WAN024AJC_at; Start 29; Stop 53
tttcaatttcattttagacagtcat

SEQ ID NO: 56497 - DNA, 25 bp, Artificial
  probe
  misc_feature (1)..(25): SEQ ID NO: 509; WAN024AJC_at; Start 108; Stop 132
ttattgattgcggactgagggacta

SEQ ID NO: 56498 - DNA, 25 bp, Artificial
  probe
  misc_feature (1)..(25): SEQ ID NO: 509; WAN024AJC_at; Start 120; Stop 144
gactgagggactagagtatgtttta

SEQ ID NO: 56499 - DNA, 25 bp, Artificial
  probe
  misc_feature (1)..(25): SEQ ID NO: 509; WAN024AJC_at; Start 5; Stop 29
tgttcatttactaacatcaagcttt

SEQ ID NO: 56500 - DNA, 25 bp, Artificial
  probe
  misc_feature (1)..(25): SEQ ID NO: 509; WAN024AJC_at; Start 9; Stop 33
catttactaacatcaagctttttca

SEQ ID NO: 56501 - DNA, 25 bp, Artificial
  probe
  misc_feature (1)..(25): SEQ ID NO: 509; WAN024AJC_at; Start 58; Stop 82
attttccgtattagtcttgcagcaa

SEQ ID NO: 56502 - DNA, 25 bp, Artificial
  probe
  misc_feature (1)..(25): SEQ ID NO: 3827; WAN024AJD_at; Start 1; Stop 25
gtctcgaactccatttctactccta

SEQ ID NO: 56503 - DNA, 25 bp, Artificial
  probe
  misc_feature (1)..(25): SEQ ID NO: 3827; WAN024AJD_at; Start 4; Stop 28
tcgaactccatttctactcctacta

SEQ ID NO: 56504 - DNA, 25 bp, Artificial
  probe
  misc_feature (1)..(25): SEQ ID NO: 3827; WAN024AJD_at; Start 70; Stop 94
ttgtgactctttcttctaactgaat

SEQ ID NO: 56505 - DNA, 25 bp, Artificial
  probe
  misc_feature (1)..(25): SEQ ID NO: 3827; WAN024AJD_at; Start 6; Stop 30
gaactccatttctactcctactatt

SEQ ID NO: 56506 - DNA, 25 bp, Artificial
  probe
  misc_feature (1)..(25): SEQ ID NO: 3827; WAN024AJD_at; Start 72; Stop 96
gtgactctttcttctaactgaatct

SEQ ID NO: 56507 - DNA, 25 bp, Artificial
  probe
  misc_feature (1)..(25): SEQ ID NO: 3827; WAN024AJD_at; Start 54; Stop 78
aagccacaaagtgtgtttgtgactc

SEQ ID NO: 56508 - DNA, 25 bp, Artificial
  probe
  misc_feature (1)..(25): SEQ ID NO: 3827; WAN024AJD_at; Start 67; Stop 91
tgtttgtgactctttcttctaactg

SEQ ID NO: 56509 - DNA, 25 bp, Artificial
  probe
  misc_feature (1)..(25): SEQ ID NO: 3827; WAN024AJD_at; Start 78; Stop 102
ctttcttctaactgaatcttaccat

SEQ ID NO: 56510 - DNA, 25 bp, Artificial
  probe
  misc_feature (1)..(25): SEQ ID NO: 3827; WAN024AJD_at; Start 62; Stop 86
aagtgtgtttgtgactctttcttct

SEQ ID NO: 56511 - DNA, 25 bp, Artificial
  probe
  misc_feature (1)..(25): SEQ ID NO: 3827; WAN024AJD_at; Start 55; Stop 79
agccacaaagtgtgtttgtgactct

SEQ ID NO: 56512 - DNA, 25 bp, Artificial
  probe
  misc_feature (1)..(25): SEQ ID NO: 3827; WAN024AJD_at; Start 74; Stop 98
gactctttcttctaactgaatctta

SEQ ID NO: 56513 - DNA, 25 bp, Artificial
  probe
  misc_feature (1)..(25): SEQ ID NO: 3827; WAN024AJD_at; Start 64; Stop 88
gtgtgtttgtgactctttcttctaa

SEQ ID NO: 56514 - DNA, 25 bp, Artificial
  probe
  misc_feature (1)..(25): SEQ ID NO: 3827; WAN024AJD_at; Start 75; Stop 99
actctttcttctaactgaatcttac

SEQ ID NO: 56515 - DNA, 25 bp, Artificial
  probe
  misc_feature (1)..(25): SEQ ID NO: 3827; WAN024AJD_at; Start 48; Stop 72
ataaaaaagccacaaagtgtgtttg

SEQ ID NO: 56516 - DNA, 25 bp, Artificial
  probe
  misc_feature (1)..(25): SEQ ID NO: 3827; WAN024AJD_at; Start 60; Stop 84
caaagtgtgtttgtgactctttctt

SEQ ID NO: 56517 - DNA, 25 bp, Artificial
  probe
  misc_feature (1)..(25): SEQ ID NO: 3827; WAN024AJD_at; Start 69; Stop 93
tttgtgactctttcttctaactgaa

SEQ ID NO: 56518 - DNA, 25 bp, Artificial
  probe
  misc_feature (1)..(25): SEQ ID NO: 3827; WAN024AJD_at; Start 79; Stop 103
tttcttctaactgaatcttaccata

SEQ ID NO: 56519 - DNA, 25 bp, Artificial
  probe
  misc_feature (1)..(25): SEQ ID NO: 3827; WAN024AJD_at; Start 59; Stop 83
acaaagtgtgtttgtgactctttct

SEQ ID NO: 56520 - DNA, 25 bp, Artificial
  probe
  misc_feature (1)..(25): SEQ ID NO: 3827; WAN024AJD_at; Start 50; Stop 74
aaaaaagccacaaagtgtgtttgtg

SEQ ID NO: 56521 - DNA, 25 bp, Artificial
  probe
  misc_feature (1)..(25): SEQ ID NO: 3827; WAN024AJD_at; Start 10; Stop 34
tccatttctactcctactattttac

SEQ ID NO: 56522 - DNA, 25 bp, Artificial
  probe
  misc_feature (1)..(25): SEQ ID NO: 3827; WAN024AJD_at; Start 68; Stop 92
gtttgtgactctttcttctaactga

SEQ ID NO: 56523 - DNA, 25 bp, Artificial
  probe
  misc_feature (1)..(25): SEQ ID NO: 3827; WAN024AJD_at; Start 71; Stop 95
tgtgactctttcttctaactgaatc

SEQ ID NO: 56524 - DNA, 25 bp, Artificial
  probe
  misc_feature (1)..(25): SEQ ID NO: 3827; WAN024AJD_at; Start 42; Stop 66
atggaaataaaaaagccacaaagtg

SEQ ID NO: 56525 - DNA, 25 bp, Artificial
  probe
  misc_feature (1)..(25): SEQ ID NO: 3827; WAN024AJD_at; Start 65; Stop 89
tgtgtttgtgactctttcttctaac

SEQ ID NO: 56526 - DNA, 25 bp, Artificial
  probe
  misc_feature (1)..(25): SEQ ID NO: 3827; WAN024AJD_at; Start 56; Stop 80
gccacaaagtgtgtttgtgactctt

SEQ ID NO: 56527 - DNA, 25 bp, Artificial
  probe
  misc_feature (1)..(25): SEQ ID NO: 3827; WAN024AJD_at; Start 61; Stop 85
aaagtgtgtttgtgactctttcttc

SEQ ID NO: 56528 - DNA, 25 bp, Artificial
  probe
  misc_feature (1)..(25): SEQ ID NO: 3827; WAN024AJD_at; Start 57; Stop 81
ccacaaagtgtgtttgtgactcttt

SEQ ID NO: 56529 - DNA, 25 bp, Artificial
  probe
  misc_feature (1)..(25): SEQ ID NO: 3827; WAN024AJD_at; Start 53; Stop 77
aaagccacaaagtgtgtttgtgact

SEQ ID NO: 56530 - DNA, 25 bp, Artificial
  probe
  misc_feature (1)..(25): SEQ ID NO: 3827; WAN024AJD_at; Start 5; Stop 29
cgaactccatttctactcctactat

SEQ ID NO: 56531 - DNA, 25 bp, Artificial
  probe
  misc_feature (1)..(25): SEQ ID NO: 3827; WAN024AJD_at; Start 58; Stop 82
cacaaagtgtgtttgtgactctttc

SEQ ID NO: 56532 - DNA, 25 bp, Artificial
  probe
  misc_feature (1)..(25): SEQ ID NO: 3827; WAN024AJD_at; Start 77; Stop 101
tctttcttctaactgaatcttacca

SEQ ID NO: 56533 - DNA, 25 bp, Artificial
  probe
  misc_feature (1)..(25): SEQ ID NO: 3827; WAN024AJD_at; Start 63; Stop 87
agtgtgtttgtgactctttcttcta

SEQ ID NO: 56534 - DNA, 25 bp, Artificial
  probe
  misc_feature (1)..(25): SEQ ID NO: 3827; WAN024AJD_at; Start 51; Stop 75
aaaaagccacaaagtgtgtttgtga

SEQ ID NO: 56535 - DNA, 25 bp, Artificial
  probe
  misc_feature (1)..(25): SEQ ID NO: 3827; WAN024AJD_at; Start 52; Stop 76
aaaagccacaaagtgtgtttgtgac

SEQ ID NO: 56536 - DNA, 25 bp, Artificial
  probe
  misc_feature (1)..(25): SEQ ID NO: 4562; WAN024AJE_at; Start 23; Stop 47
aaagagtcacaaacacactttgtgg

SEQ ID NO: 56537 - DNA, 25 bp, Artificial
  probe
  misc_feature (1)..(25): SEQ ID NO: 4562; WAN024AJE_at; Start 22; Stop 46
gaaagagtcacaaacacactttgtg

SEQ ID NO: 56538 - DNA, 25 bp, Artificial
  probe
  misc_feature (1)..(25): SEQ ID NO: 4562; WAN024AJE_at; Start 74; Stop 98
aatagtaggagtagaaatggagttc

SEQ ID NO: 56539 - DNA, 25 bp, Artificial
  probe
  misc_feature (1)..(25): SEQ ID NO: 4562; WAN024AJE_at; Start 12; Stop 36
tcagttagaagaaagagtcacaaac

SEQ ID NO: 56540 - DNA, 25 bp, Artificial
  probe
  misc_feature (1)..(25): SEQ ID NO: 4562; WAN024AJE_at; Start 4; Stop 28
ggtaagattcagttagaagaaagag

SEQ ID NO: 56541 - DNA, 25 bp, Artificial
  probe
  misc_feature (1)..(25): SEQ ID NO: 4562; WAN024AJE_at; Start 25; Stop 49
agagtcacaaacacactttgtggct

SEQ ID NO: 56542 - DNA, 25 bp, Artificial
  probe
  misc_feature (1)..(25): SEQ ID NO: 4562; WAN024AJE_at; Start 1; Stop 25
tatggtaagattcagttagaagaaa

SEQ ID NO: 56543 - DNA, 25 bp, Artificial
  probe
  misc_feature (1)..(25): SEQ ID NO: 4562; WAN024AJE_at; Start 20; Stop 44
aagaaagagtcacaaacacactttg

SEQ ID NO: 56544 - DNA, 25 bp, Artificial
  probe
  misc_feature (1)..(25): SEQ ID NO: 4562; WAN024AJE_at; Start 24; Stop 48
aagagtcacaaacacactttgtggc

SEQ ID NO: 56545 - DNA, 25 bp, Artificial
  probe
  misc_feature (1)..(25): SEQ ID NO: 4562; WAN024AJE_at; Start 9; Stop 33
gattcagttagaagaaagagtcaca

SEQ ID NO: 56546 - DNA, 25 bp, Artificial
  probe
  misc_feature (1)..(25): SEQ ID NO: 4562; WAN024AJE_at; Start 14; Stop 38
agttagaagaaagagtcacaaacac

SEQ ID NO: 56547 - DNA, 25 bp, Artificial
  probe
  misc_feature (1)..(25): SEQ ID NO: 4562; WAN024AJE_at; Start 38; Stop 62
cactttgtggcttttttatttccat

SEQ ID NO: 56548 - DNA, 25 bp, Artificial
  probe
  misc_feature (1)..(25): SEQ ID NO: 4562; WAN024AJE_at; Start 27; Stop 51
agtcacaaacacactttgtggcttt

SEQ ID NO: 56549 - DNA, 25 bp, Artificial
  probe
  misc_feature (1)..(25): SEQ ID NO: 4562; WAN024AJE_at; Start 32; Stop 56
caaacacactttgtggcttttttat

SEQ ID NO: 56550 - DNA, 25 bp, Artificial
  probe
  misc_feature (1)..(25): SEQ ID NO: 4562; WAN024AJE_at; Start 10; Stop 34
attcagttagaagaaagagtcacaa

SEQ ID NO: 56551 - DNA, 25 bp, Artificial
  probe
  misc_feature (1)..(25): SEQ ID NO: 4562; WAN024AJE_at; Start 17; Stop 41
tagaagaaagagtcacaaacacact

SEQ ID NO: 56552 - DNA, 25 bp, Artificial
  probe
  misc_feature (1)..(25): SEQ ID NO: 4562; WAN024AJE_at; Start 6; Stop 30
taagattcagttagaagaaagagtc

SEQ ID NO: 56553 - DNA, 25 bp, Artificial
  probe
  misc_feature (1)..(25): SEQ ID NO: 4562; WAN024AJE_at; Start 18; Stop 42
agaagaaagagtcacaaacacactt

SEQ ID NO: 56554 - DNA, 25 bp, Artificial
  probe
  misc_feature (1)..(25): SEQ ID NO: 4562; WAN024AJE_at; Start 76; Stop 100
tagtaggagtagaaatggagttcga

SEQ ID NO: 56555 - DNA, 25 bp, Artificial
  probe
  misc_feature (1)..(25): SEQ ID NO: 4562; WAN024AJE_at; Start 28; Stop 52
gtcacaaacacactttgtggctttt

SEQ ID NO: 56556 - DNA, 25 bp, Artificial
  probe
  misc_feature (1)..(25): SEQ ID NO: 4562; WAN024AJE_at; Start 21; Stop 45
agaaagagtcacaaacacactttgt

SEQ ID NO: 56557 - DNA, 25 bp, Artificial
  probe
  misc_feature (1)..(25): SEQ ID NO: 4562; WAN024AJE_at; Start 11; Stop 35
ttcagttagaagaaagagtcacaaa

SEQ ID NO: 56558 - DNA, 25 bp, Artificial
  probe
  misc_feature (1)..(25): SEQ ID NO: 4562; WAN024AJE_at; Start 60; Stop 84
cataaaaatggtaaaatagtaggag

SEQ ID NO: 56559 - DNA, 25 bp, Artificial
  probe
  misc_feature (1)..(25): SEQ ID NO: 4562; WAN024AJE_at; Start 79; Stop 103
taggagtagaaatggagttcgagac

SEQ ID NO: 56560 - DNA, 25 bp, Artificial
  probe
  misc_feature (1)..(25): SEQ ID NO: 4562; WAN024AJE_at; Start 68; Stop 92
tggtaaaatagtaggagtagaaatg

SEQ ID NO: 56561 - DNA, 25 bp, Artificial
  probe
  misc_feature (1)..(25): SEQ ID NO: 4562; WAN024AJE_at; Start 15; Stop 39
gttagaagaaagagtcacaaacaca

SEQ ID NO: 56562 - DNA, 25 bp, Artificial
  probe
  misc_feature (1)..(25): SEQ ID NO: 4562; WAN024AJE_at; Start 16; Stop 40
ttagaagaaagagtcacaaacacac

SEQ ID NO: 56563 - DNA, 25 bp, Artificial
  probe
  misc_feature (1)..(25): SEQ ID NO: 4562; WAN024AJE_at; Start 19; Stop 43
gaagaaagagtcacaaacacacttt

SEQ ID NO: 56564 - DNA, 25 bp, Artificial
  probe
  misc_feature (1)..(25): SEQ ID NO: 4562; WAN024AJE_at; Start 71; Stop 95
taaaatagtaggagtagaaatggag

SEQ ID NO: 56565 - DNA, 25 bp, Artificial
  probe
  misc_feature (1)..(25): SEQ ID NO: 4562; WAN024AJE_at; Start 13; Stop 37
cagttagaagaaagagtcacaaaca

SEQ ID NO: 56566 - DNA, 25 bp, Artificial
  probe
  misc_feature (1)..(25): SEQ ID NO: 4562; WAN024AJE_at; Start 30; Stop 54
cacaaacacactttgtggctttttt

SEQ ID NO: 56567 - DNA, 25 bp, Artificial
  probe
  misc_feature (1)..(25): SEQ ID NO: 4562; WAN024AJE_at; Start 8; Stop 32
agattcagttagaagaaagagtcac

SEQ ID NO: 56568 - DNA, 25 bp, Artificial
  probe
  misc_feature (1)..(25): SEQ ID NO: 4562; WAN024AJE_at; Start 26; Stop 50
gagtcacaaacacactttgtggctt

SEQ ID NO: 56569 - DNA, 25 bp, Artificial
  probe
  misc_feature (1)..(25): SEQ ID NO: 4562; WAN024AJE_at; Start 75; Stop 99
atagtaggagtagaaatggagttcg

SEQ ID NO: 56570 - DNA, 25 bp, Artificial
  probe
  misc_feature (1)..(25): SEQ ID NO: 257; WAN024AJH_at; Start 74; Stop 98
cgacttatgataagataggcacagt

SEQ ID NO: 56571 - DNA, 25 bp, Artificial
  probe
  misc_feature (1)..(25): SEQ ID NO: 257; WAN024AJH_at; Start 10; Stop 34
actcaagcaagtgtaaatgttttca

SEQ ID NO: 56572 - DNA, 25 bp, Artificial
  probe
  misc_feature (1)..(25): SEQ ID NO: 257; WAN024AJH_at; Start 73; Stop 97
gcgacttatgataagataggcacag

SEQ ID NO: 56573 - DNA, 25 bp, Artificial
  probe
  misc_feature (1)..(25): SEQ ID NO: 257; WAN024AJH_at; Start 2; Stop 26
ataacataactcaagcaagtgtaaa

SEQ ID NO: 56574 - DNA, 25 bp, Artificial
  probe
  misc_feature (1)..(25): SEQ ID NO: 257; WAN024AJH_at; Start 12; Stop 36
tcaagcaagtgtaaatgttttcact

SEQ ID NO: 56575 - DNA, 25 bp, Artificial
  probe
  misc_feature (1)..(25): SEQ ID NO: 257; WAN024AJH_at; Start 5; Stop 29
acataactcaagcaagtgtaaatgt

SEQ ID NO: 56576 - DNA, 25 bp, Artificial
  probe
  misc_feature (1)..(25): SEQ ID NO: 257; WAN024AJH_at; Start 72; Stop 96
agcgacttatgataagataggcaca

SEQ ID NO: 56577 - DNA, 25 bp, Artificial
  probe
  misc_feature (1)..(25): SEQ ID NO: 257; WAN024AJH_at; Start 43; Stop 67
ttcttttcacgtcaagccttttcaa

SEQ ID NO: 56578 - DNA, 25 bp, Artificial
  probe
  misc_feature (1)..(25): SEQ ID NO: 257; WAN024AJH_at; Start 42; Stop 66
tttcttttcacgtcaagccttttca

SEQ ID NO: 56579 - DNA, 25 bp, Artificial
  probe
  misc_feature (1)..(25): SEQ ID NO: 257; WAN024AJH_at; Start 3; Stop 27
taacataactcaagcaagtgtaaat

SEQ ID NO: 56580 - DNA, 25 bp, Artificial
  probe
  misc_feature (1)..(25): SEQ ID NO: 257; WAN024AJH_at; Start 8; Stop 32
taactcaagcaagtgtaaatgtttt

SEQ ID NO: 56581 - DNA, 25 bp, Artificial
  probe
  misc_feature (1)..(25): SEQ ID NO: 257; WAN024AJH_at; Start 1; Stop 25
aataacataactcaagcaagtgtaa

SEQ ID NO: 56582 - DNA, 25 bp, Artificial
  probe
  misc_feature (1)..(25): SEQ ID NO: 257; WAN024AJH_at; Start 44; Stop 68
tcttttcacgtcaagccttttcaaa

SEQ ID NO: 56583 - DNA, 25 bp, Artificial
  probe
  misc_feature (1)..(25): SEQ ID NO: 257; WAN024AJH_at; Start 13; Stop 37
caagcaagtgtaaatgttttcactc

SEQ ID NO: 56584 - DNA, 25 bp, Artificial
  probe
  misc_feature (1)..(25): SEQ ID NO: 257; WAN024AJH_at; Start 11; Stop 35
ctcaagcaagtgtaaatgttttcac

SEQ ID NO: 56585 - DNA, 25 bp, Artificial
  probe
  misc_feature (1)..(25): SEQ ID NO: 257; WAN024AJH_at; Start 46; Stop 70
ttttcacgtcaagccttttcaaagc

SEQ ID NO: 56586 - DNA, 25 bp, Artificial
  probe
  misc_feature (1)..(25): SEQ ID NO: 257; WAN024AJH_at; Start 9; Stop 33
aactcaagcaagtgtaaatgttttc

SEQ ID NO: 56587 - DNA, 25 bp, Artificial
  probe
  misc_feature (1)..(25): SEQ ID NO: 257; WAN024AJH_at; Start 4; Stop 28
aacataactcaagcaagtgtaaatg

SEQ ID NO: 56588 - DNA, 25 bp, Artificial
  probe
  misc_feature (1)..(25): SEQ ID NO: 257; WAN024AJH_at; Start 6; Stop 30
cataactcaagcaagtgtaaatgtt

SEQ ID NO: 56589 - DNA, 25 bp, Artificial
  probe
  misc_feature (1)..(25): SEQ ID NO: 257; WAN024AJH_at; Start 45; Stop 69
cttttcacgtcaagccttttcaaag

SEQ ID NO: 56590 - DNA, 25 bp, Artificial
  probe
  misc_feature (1)..(25): SEQ ID NO: 257; WAN024AJH_at; Start 7; Stop 31
ataactcaagcaagtgtaaatgttt

SEQ ID NO: 56591 - DNA, 25 bp, Artificial
  probe
  misc_feature (1)..(25): SEQ ID NO: 387; WAN024AJI_at; Start 31; Stop 55
tttgaaaaggcttgacgtgaaaaga

SEQ ID NO: 56592 - DNA, 25 bp, Artificial
  probe
  misc_feature (1)..(25): SEQ ID NO: 387; WAN024AJI_at; Start 3; Stop 27
tgtgcctatcttatcataagtcgct

SEQ ID NO: 56593 - DNA, 25 bp, Artificial
  probe
  misc_feature (1)..(25): SEQ ID NO: 387; WAN024AJI_at; Start 73; Stop 97
tttacacttgcttgagttatgttat

SEQ ID NO: 56594 - DNA, 25 bp, Artificial
  probe
  misc_feature (1)..(25): SEQ ID NO: 387; WAN024AJI_at; Start 72; Stop 96
atttacacttgcttgagttatgtta

SEQ ID NO: 56595 - DNA, 25 bp, Artificial
  probe
  misc_feature (1)..(25): SEQ ID NO: 387; WAN024AJI_at; Start 69; Stop 93
aacatttacacttgcttgagttatg

SEQ ID NO: 56596 - DNA, 25 bp, Artificial
  probe
  misc_feature (1)..(25): SEQ ID NO: 387; WAN024AJI_at; Start 33; Stop 57
tgaaaaggcttgacgtgaaaagaaa

SEQ ID NO: 56597 - DNA, 25 bp, Artificial
  probe
  misc_feature (1)..(25): SEQ ID NO: 387; WAN024AJI_at; Start 29; Stop 53
gctttgaaaaggcttgacgtgaaaa

SEQ ID NO: 56598 - DNA, 25 bp, Artificial
  probe
  misc_feature (1)..(25): SEQ ID NO: 387; WAN024AJI_at; Start 1; Stop 25
actgtgcctatcttatcataagtcg

SEQ ID NO: 56599 - DNA, 25 bp, Artificial
  probe
  misc_feature (1)..(25): SEQ ID NO: 387; WAN024AJI_at; Start 67; Stop 91
aaaacatttacacttgcttgagtta

SEQ ID NO: 56600 - DNA, 25 bp, Artificial
  probe
  misc_feature (1)..(25): SEQ ID NO: 387; WAN024AJI_at; Start 2; Stop 26
ctgtgcctatcttatcataagtcgc

SEQ ID NO: 56601 - DNA, 25 bp, Artificial
  probe
  misc_feature (1)..(25): SEQ ID NO: 387; WAN024AJI_at; Start 71; Stop 95
catttacacttgcttgagttatgtt

SEQ ID NO: 56602 - DNA, 25 bp, Artificial
  probe
  misc_feature (1)..(25): SEQ ID NO: 387; WAN024AJI_at; Start 30; Stop 54
ctttgaaaaggcttgacgtgaaaag

SEQ ID NO: 56603 - DNA, 25 bp, Artificial
  probe
  misc_feature (1)..(25): SEQ ID NO: 387; WAN024AJI_at; Start 70; Stop 94
acatttacacttgcttgagttatgt

SEQ ID NO: 56604 - DNA, 25 bp, Artificial
  probe
  misc_feature (1)..(25): SEQ ID NO: 387; WAN024AJI_at; Start 64; Stop 88
gtgaaaacatttacacttgcttgag

SEQ ID NO: 56605 - DNA, 25 bp, Artificial
  probe
  misc_feature (1)..(25): SEQ ID NO: 387; WAN024AJI_at; Start 63; Stop 87
agtgaaaacatttacacttgcttga

SEQ ID NO: 56606 - DNA, 25 bp, Artificial
  probe
  misc_feature (1)..(25): SEQ ID NO: 387; WAN024AJI_at; Start 74; Stop 98
ttacacttgcttgagttatgttatt

SEQ ID NO: 56607 - DNA, 25 bp, Artificial
  probe
  misc_feature (1)..(25): SEQ ID NO: 387; WAN024AJI_at; Start 68; Stop 92
aaacatttacacttgcttgagttat

SEQ ID NO: 56608 - DNA, 25 bp, Artificial
  probe
  misc_feature (1)..(25): SEQ ID NO: 387; WAN024AJI_at; Start 62; Stop 86
gagtgaaaacatttacacttgcttg

SEQ ID NO: 56609 - DNA, 25 bp, Artificial
  probe
  misc_feature (1)..(25): SEQ ID NO: 387; WAN024AJI_at; Start 65; Stop 89
tgaaaacatttacacttgcttgagt

SEQ ID NO: 56610 - DNA, 25 bp, Artificial
  probe
  misc_feature (1)..(25): SEQ ID NO: 387; WAN024AJI_at; Start 66; Stop 90
gaaaacatttacacttgcttgagtt

SEQ ID NO: 56611 - DNA, 25 bp, Artificial
  probe
  misc_feature (1)..(25): SEQ ID NO: 387; WAN024AJI_at; Start 32; Stop 56
ttgaaaaggcttgacgtgaaaagaa

SEQ ID NO: 56612 - DNA, 25 bp, Artificial
  probe
  misc_feature (1)..(25): SEQ ID NO: 4803; WAN024AJJ_at; Start 54; Stop 78
atagcttcatcctatcattcgacta

SEQ ID NO: 56613 - DNA, 25 bp, Artificial
  probe
  misc_feature (1)..(25): SEQ ID NO: 4803; WAN024AJJ_at; Start 65; Stop 89
ctatcattcgactaatttggaaata

SEQ ID NO: 56614 - DNA, 25 bp, Artificial
  probe
  misc_feature (1)..(25): SEQ ID NO: 4803; WAN024AJJ_at; Start 66; Stop 90
tatcattcgactaatttggaaataa

SEQ ID NO: 56615 - DNA, 25 bp, Artificial
  probe
  misc_feature (1)..(25): SEQ ID NO: 4803; WAN024AJJ_at; Start 57; Stop 81
gcttcatcctatcattcgactaatt

SEQ ID NO: 56616 - DNA, 25 bp, Artificial
  probe
  misc_feature (1)..(25): SEQ ID NO: 4803; WAN024AJJ_at; Start 44; Stop 68
ctataaaacaatagcttcatcctat

SEQ ID NO: 56617 - DNA, 25 bp, Artificial
  probe
  misc_feature (1)..(25): SEQ ID NO: 4803; WAN024AJJ_at; Start 64; Stop 88
cctatcattcgactaatttggaaat

SEQ ID NO: 56618 - DNA, 25 bp, Artificial
  probe
  misc_feature (1)..(25): SEQ ID NO: 4803; WAN024AJJ_at; Start 39; Stop 63
ttatactataaaacaatagcttcat

SEQ ID NO: 56619 - DNA, 25 bp, Artificial
  probe
  misc_feature (1)..(25): SEQ ID NO: 4803; WAN024AJJ_at; Start 36; Stop 60
taattatactataaaacaatagctt

SEQ ID NO: 56620 - DNA, 25 bp, Artificial
  probe
  misc_feature (1)..(25): SEQ ID NO: 4803; WAN024AJJ_at; Start 55; Stop 79
tagcttcatcctatcattcgactaa

SEQ ID NO: 56621 - DNA, 25 bp, Artificial
  probe
  misc_feature (1)..(25): SEQ ID NO: 4803; WAN024AJJ_at; Start 56; Stop 80
agcttcatcctatcattcgactaat

SEQ ID NO: 56622 - DNA, 25 bp, Artificial
  probe
  misc_feature (1)..(25): SEQ ID NO: 4803; WAN024AJJ_at; Start 41; Stop 65
atactataaaacaatagcttcatcc

SEQ ID NO: 56623 - DNA, 25 bp, Artificial
  probe
  misc_feature (1)..(25): SEQ ID NO: 4803; WAN024AJJ_at; Start 61; Stop 85
catcctatcattcgactaatttgga

SEQ ID NO: 56624 - DNA, 25 bp, Artificial
  probe
  misc_feature (1)..(25): SEQ ID NO: 4803; WAN024AJJ_at; Start 49; Stop 73
aaacaatagcttcatcctatcattc

SEQ ID NO: 56625 - DNA, 25 bp, Artificial
  probe
  misc_feature (1)..(25): SEQ ID NO: 4803; WAN024AJJ_at; Start 50; Stop 74
aacaatagcttcatcctatcattcg

SEQ ID NO: 56626 - DNA, 25 bp, Artificial
  probe
  misc_feature (1)..(25): SEQ ID NO: 4803; WAN024AJJ_at; Start 51; Stop 75
acaatagcttcatcctatcattcga

SEQ ID NO: 56627 - DNA, 25 bp, Artificial
  probe
  misc_feature (1)..(25): SEQ ID NO: 4803; WAN024AJJ_at; Start 43; Stop 67
actataaaacaatagcttcatccta

SEQ ID NO: 56628 - DNA, 25 bp, Artificial
  probe
  misc_feature (1)..(25): SEQ ID NO: 4803; WAN024AJJ_at; Start 40; Stop 64
tatactataaaacaatagcttcatc

SEQ ID NO: 56629 - DNA, 25 bp, Artificial
  probe
  misc_feature (1)..(25): SEQ ID NO: 4803; WAN024AJJ_at; Start 59; Stop 83
ttcatcctatcattcgactaatttg

SEQ ID NO: 56630 - DNA, 25 bp, Artificial
  probe
  misc_feature (1)..(25): SEQ ID NO: 4803; WAN024AJJ_at; Start 42; Stop 66
tactataaaacaatagcttcatcct

SEQ ID NO: 56631 - DNA, 25 bp, Artificial
  probe
  misc_feature (1)..(25): SEQ ID NO: 4803; WAN024AJJ_at; Start 68; Stop 92
tcattcgactaatttggaaataagg

SEQ ID NO: 56632 - DNA, 25 bp, Artificial
  probe
  misc_feature (1)..(25): SEQ ID NO: 4803; WAN024AJJ_at; Start 52; Stop 76
caatagcttcatcctatcattcgac

SEQ ID NO: 56633 - DNA, 25 bp, Artificial
  probe
  misc_feature (1)..(25): SEQ ID NO: 4803; WAN024AJJ_at; Start 35; Stop 59
ttaattatactataaaacaatagct

SEQ ID NO: 56634 - DNA, 25 bp, Artificial
  probe
  misc_feature (1)..(25): SEQ ID NO: 4803; WAN024AJJ_at; Start 63; Stop 87
tcctatcattcgactaatttggaaa

SEQ ID NO: 56635 - DNA, 25 bp, Artificial
  probe
  misc_feature (1)..(25): SEQ ID NO: 4803; WAN024AJJ_at; Start 38; Stop 62
attatactataaaacaatagcttca

SEQ ID NO: 56636 - DNA, 25 bp, Artificial
  probe
  misc_feature (1)..(25): SEQ ID NO: 4803; WAN024AJJ_at; Start 53; Stop 77
aatagcttcatcctatcattcgact

SEQ ID NO: 56637 - DNA, 25 bp, Artificial
  probe
  misc_feature (1)..(25): SEQ ID NO: 4803; WAN024AJJ_at; Start 47; Stop 71
taaaacaatagcttcatcctatcat

SEQ ID NO: 56638 - DNA, 25 bp, Artificial
  probe
  misc_feature (1)..(25): SEQ ID NO: 4803; WAN024AJJ_at; Start 45; Stop 69
tataaaacaatagcttcatcctatc

SEQ ID NO: 56639 - DNA, 25 bp, Artificial
  probe
  misc_feature (1)..(25): SEQ ID NO: 4803; WAN024AJJ_at; Start 48; Stop 72
aaaacaatagcttcatcctatcatt

SEQ ID NO: 56640 - DNA, 25 bp, Artificial
  probe
  misc_feature (1)..(25): SEQ ID NO: 4803; WAN024AJJ_at; Start 60; Stop 84
tcatcctatcattcgactaatttgg

SEQ ID NO: 56641 - DNA, 25 bp, Artificial
  probe
  misc_feature (1)..(25): SEQ ID NO: 4803; WAN024AJJ_at; Start 62; Stop 86
atcctatcattcgactaatttggaa

SEQ ID NO: 56642 - DNA, 25 bp, Artificial
  probe
  misc_feature (1)..(25): SEQ ID NO: 4803; WAN024AJJ_at; Start 67; Stop 91
atcattcgactaatttggaaataag

SEQ ID NO: 56643 - DNA, 25 bp, Artificial
  probe
  misc_feature (1)..(25): SEQ ID NO: 4803; WAN024AJJ_at; Start 37; Stop 61
aattatactataaaacaatagcttc

SEQ ID NO: 56644 - DNA, 25 bp, Artificial
  probe
  misc_feature (1)..(25): SEQ ID NO: 4803; WAN024AJJ_at; Start 46; Stop 70
ataaaacaatagcttcatcctatca

SEQ ID NO: 56645 - DNA, 25 bp, Artificial
  probe
  misc_feature (1)..(25): SEQ ID NO: 4803; WAN024AJJ_at; Start 58; Stop 82
cttcatcctatcattcgactaattt

SEQ ID NO: 56646 - DNA, 25 bp, Artificial
  probe
  misc_feature (1)..(25): SEQ ID NO: 3248; WAN024AJK_at; Start 27; Stop 51
aggatgaagctattgttttatagta

SEQ ID NO: 56647 - DNA, 25 bp, Artificial
  probe
  misc_feature (1)..(25): SEQ ID NO: 3248; WAN024AJK_at; Start 10; Stop 34
caaattagtcgaatgataggatgaa

SEQ ID NO: 56648 - DNA, 25 bp, Artificial
  probe
  misc_feature (1)..(25): SEQ ID NO: 3248; WAN024AJK_at; Start 15; Stop 39
tagtcgaatgataggatgaagctat

SEQ ID NO: 56649 - DNA, 25 bp, Artificial
  probe
  misc_feature (1)..(25): SEQ ID NO: 3248; WAN024AJK_at; Start 9; Stop 33
ccaaattagtcgaatgataggatga

SEQ ID NO: 56650 - DNA, 25 bp, Artificial
  probe
  misc_feature (1)..(25): SEQ ID NO: 3248; WAN024AJK_at; Start 21; Stop 45
aatgataggatgaagctattgtttt

SEQ ID NO: 56651 - DNA, 25 bp, Artificial
  probe
  misc_feature (1)..(25): SEQ ID NO: 3248; WAN024AJK_at; Start 22; Stop 46
atgataggatgaagctattgtttta

SEQ ID NO: 56652 - DNA, 25 bp, Artificial
  probe
  misc_feature (1)..(25): SEQ ID NO: 3248; WAN024AJK_at; Start 7; Stop 31
ttccaaattagtcgaatgataggat

SEQ ID NO: 56653 - DNA, 25 bp, Artificial
  probe
  misc_feature (1)..(25): SEQ ID NO: 3248; WAN024AJK_at; Start 28; Stop 52
ggatgaagctattgttttatagtat

SEQ ID NO: 56654 - DNA, 25 bp, Artificial
  probe
  misc_feature (1)..(25): SEQ ID NO: 3248; WAN024AJK_at; Start 1; Stop 25
ccttatttccaaattagtcgaatga

SEQ ID NO: 56655 - DNA, 25 bp, Artificial
  probe
  misc_feature (1)..(25): SEQ ID NO: 3248; WAN024AJK_at; Start 2; Stop 26
cttatttccaaattagtcgaatgat

SEQ ID NO: 56656 - DNA, 25 bp, Artificial
  probe
  misc_feature (1)..(25): SEQ ID NO: 3248; WAN024AJK_at; Start 4; Stop 28
tatttccaaattagtcgaatgatag

SEQ ID NO: 56657 - DNA, 25 bp, Artificial
  probe
  misc_feature (1)..(25): SEQ ID NO: 3248; WAN024AJK_at; Start 12; Stop 36
aattagtcgaatgataggatgaagc

SEQ ID NO: 56658 - DNA, 25 bp, Artificial
  probe
  misc_feature (1)..(25): SEQ ID NO: 3248; WAN024AJK_at; Start 31; Stop 55
tgaagctattgttttatagtataat

SEQ ID NO: 56659 - DNA, 25 bp, Artificial
  probe
  misc_feature (1)..(25): SEQ ID NO: 3248; WAN024AJK_at; Start 17; Stop 41
gtcgaatgataggatgaagctattg

SEQ ID NO: 56660 - DNA, 25 bp, Artificial
  probe
  misc_feature (1)..(25): SEQ ID NO: 3248; WAN024AJK_at; Start 8; Stop 32
tccaaattagtcgaatgataggatg

SEQ ID NO: 56661 - DNA, 25 bp, Artificial
  probe
  misc_feature (1)..(25): SEQ ID NO: 3248; WAN024AJK_at; Start 13; Stop 37
attagtcgaatgataggatgaagct

SEQ ID NO: 56662 - DNA, 25 bp, Artificial
  probe
  misc_feature (1)..(25): SEQ ID NO: 3248; WAN024AJK_at; Start 18; Stop 42
tcgaatgataggatgaagctattgt

SEQ ID NO: 56663 - DNA, 25 bp, Artificial
  probe
  misc_feature (1)..(25): SEQ ID NO: 3248; WAN024AJK_at; Start 20; Stop 44
gaatgataggatgaagctattgttt

SEQ ID NO: 56664 - DNA, 25 bp, Artificial
  probe
  misc_feature (1)..(25): SEQ ID NO: 3248; WAN024AJK_at; Start 32; Stop 56
gaagctattgttttatagtataatt

SEQ ID NO: 56665 - DNA, 25 bp, Artificial
  probe
  misc_feature (1)..(25): SEQ ID NO: 3248; WAN024AJK_at; Start 6; Stop 30
tttccaaattagtcgaatgatagga

SEQ ID NO: 56666 - DNA, 25 bp, Artificial
  probe
  misc_feature (1)..(25): SEQ ID NO: 3248; WAN024AJK_at; Start 30; Stop 54
atgaagctattgttttatagtataa

SEQ ID NO: 56667 - DNA, 25 bp, Artificial
  probe
  misc_feature (1)..(25): SEQ ID NO: 3248; WAN024AJK_at; Start 11; Stop 35
aaattagtcgaatgataggatgaag

SEQ ID NO: 56668 - DNA, 25 bp, Artificial
  probe
  misc_feature (1)..(25): SEQ ID NO: 3248; WAN024AJK_at; Start 5; Stop 29
atttccaaattagtcgaatgatagg

SEQ ID NO: 56669 - DNA, 25 bp, Artificial
  probe
  misc_feature (1)..(25): SEQ ID NO: 3248; WAN024AJK_at; Start 16; Stop 40
agtcgaatgataggatgaagctatt

SEQ ID NO: 56670 - DNA, 25 bp, Artificial
  probe
  misc_feature (1)..(25): SEQ ID NO: 3248; WAN024AJK_at; Start 29; Stop 53
gatgaagctattgttttatagtata

SEQ ID NO: 56671 - DNA, 25 bp, Artificial
  probe
  misc_feature (1)..(25): SEQ ID NO: 3248; WAN024AJK_at; Start 19; Stop 43
cgaatgataggatgaagctattgtt

SEQ ID NO: 56672 - DNA, 25 bp, Artificial
  probe
  misc_feature (1)..(25): SEQ ID NO: 3248; WAN024AJK_at; Start 24; Stop 48
gataggatgaagctattgttttata

SEQ ID NO: 56673 - DNA, 25 bp, Artificial
  probe
  misc_feature (1)..(25): SEQ ID NO: 3248; WAN024AJK_at; Start 33; Stop 57
aagctattgttttatagtataatta

SEQ ID NO: 56674 - DNA, 25 bp, Artificial
  probe
  misc_feature (1)..(25): SEQ ID NO: 3248; WAN024AJK_at; Start 3; Stop 27
ttatttccaaattagtcgaatgata

SEQ ID NO: 56675 - DNA, 25 bp, Artificial
  probe
  misc_feature (1)..(25): SEQ ID NO: 3248; WAN024AJK_at; Start 23; Stop 47
tgataggatgaagctattgttttat

SEQ ID NO: 56676 - DNA, 25 bp, Artificial
  probe
  misc_feature (1)..(25): SEQ ID NO: 3248; WAN024AJK_at; Start 25; Stop 49
ataggatgaagctattgttttatag

SEQ ID NO: 56677 - DNA, 25 bp, Artificial
  probe
  misc_feature (1)..(25): SEQ ID NO: 3248; WAN024AJK_at; Start 14; Stop 38
ttagtcgaatgataggatgaagcta

SEQ ID NO: 56678 - DNA, 25 bp, Artificial
  probe
  misc_feature (1)..(25): SEQ ID NO: 3248; WAN024AJK_at; Start 26; Stop 50
taggatgaagctattgttttatagt

SEQ ID NO: 56679 - DNA, 25 bp, Artificial
  probe
  misc_feature (1)..(25): SEQ ID NO: 3541; WAN024AJL_at; Start 1; Stop 25
gaaatgataagaaccaatatgtagg

SEQ ID NO: 56680 - DNA, 25 bp, Artificial
  probe
  misc_feature (1)..(25): SEQ ID NO: 3541; WAN024AJL_at; Start 10; Stop 34
agaaccaatatgtaggctagcaaca

SEQ ID NO: 56681 - DNA, 25 bp, Artificial
  probe
  misc_feature (1)..(25): SEQ ID NO: 3541; WAN024AJL_at; Start 11; Stop 35
gaaccaatatgtaggctagcaacaa

SEQ ID NO: 56682 - DNA, 25 bp, Artificial
  probe
  misc_feature (1)..(25): SEQ ID NO: 3541; WAN024AJL_at; Start 8; Stop 32
taagaaccaatatgtaggctagcaa

SEQ ID NO: 56683 - DNA, 25 bp, Artificial
  probe
  misc_feature (1)..(25): SEQ ID NO: 3541; WAN024AJL_at; Start 6; Stop 30
gataagaaccaatatgtaggctagc

SEQ ID NO: 56684 - DNA, 25 bp, Artificial
  probe
  misc_feature (1)..(25): SEQ ID NO: 3541; WAN024AJL_at; Start 18; Stop 42
tatgtaggctagcaacaacctgcac

SEQ ID NO: 56685 - DNA, 25 bp, Artificial
  probe
  misc_feature (1)..(25): SEQ ID NO: 3541; WAN024AJL_at; Start 9; Stop 33
aagaaccaatatgtaggctagcaac

SEQ ID NO: 56686 - DNA, 25 bp, Artificial
  probe
  misc_feature (1)..(25): SEQ ID NO: 3541; WAN024AJL_at; Start 29; Stop 53
gcaacaacctgcacattggttcttt

SEQ ID NO: 56687 - DNA, 25 bp, Artificial
  probe
  misc_feature (1)..(25): SEQ ID NO: 3541; WAN024AJL_at; Start 17; Stop 41
atatgtaggctagcaacaacctgca

SEQ ID NO: 56688 - DNA, 25 bp, Artificial
  probe
  misc_feature (1)..(25): SEQ ID NO: 3541; WAN024AJL_at; Start 27; Stop 51
tagcaacaacctgcacattggttct

SEQ ID NO: 56689 - DNA, 25 bp, Artificial
  probe
  misc_feature (1)..(25): SEQ ID NO: 3541; WAN024AJL_at; Start 4; Stop 28
atgataagaaccaatatgtaggcta

SEQ ID NO: 56690 - DNA, 25 bp, Artificial
  probe
  misc_feature (1)..(25): SEQ ID NO: 3541; WAN024AJL_at; Start 19; Stop 43
atgtaggctagcaacaacctgcaca

SEQ ID NO: 56691 - DNA, 25 bp, Artificial
  probe
  misc_feature (1)..(25): SEQ ID NO: 3541; WAN024AJL_at; Start 5; Stop 29
tgataagaaccaatatgtaggctag

SEQ ID NO: 56692 - DNA, 25 bp, Artificial
  probe
  misc_feature (1)..(25): SEQ ID NO: 3541; WAN024AJL_at; Start 16; Stop 40
aatatgtaggctagcaacaacctgc

SEQ ID NO: 56693 - DNA, 25 bp, Artificial
  probe
  misc_feature (1)..(25): SEQ ID NO: 3541; WAN024AJL_at; Start 20; Stop 44
tgtaggctagcaacaacctgcacat

SEQ ID NO: 56694 - DNA, 25 bp, Artificial
  probe
  misc_feature (1)..(25): SEQ ID NO: 3541; WAN024AJL_at; Start 14; Stop 38
ccaatatgtaggctagcaacaacct

SEQ ID NO: 56695 - DNA, 25 bp, Artificial
  probe
  misc_feature (1)..(25): SEQ ID NO: 3541; WAN024AJL_at; Start 22; Stop 46
taggctagcaacaacctgcacattg

SEQ ID NO: 56696 - DNA, 25 bp, Artificial
  probe
  misc_feature (1)..(25): SEQ ID NO: 3541; WAN024AJL_at; Start 3; Stop 27
aatgataagaaccaatatgtaggct

SEQ ID NO: 56697 - DNA, 25 bp, Artificial
  probe
  misc_feature (1)..(25): SEQ ID NO: 3541; WAN024AJL_at; Start 24; Stop 48
ggctagcaacaacctgcacattggt

SEQ ID NO: 56698 - DNA, 25 bp, Artificial
  probe
  misc_feature (1)..(25): SEQ ID NO: 3541; WAN024AJL_at; Start 21; Stop 45
gtaggctagcaacaacctgcacatt

SEQ ID NO: 56699 - DNA, 25 bp, Artificial
  probe
  misc_feature (1)..(25): SEQ ID NO: 3541; WAN024AJL_at; Start 25; Stop 49
gctagcaacaacctgcacattggtt

SEQ ID NO: 56700 - DNA, 25 bp, Artificial
  probe
  misc_feature (1)..(25): SEQ ID NO: 3541; WAN024AJL_at; Start 15; Stop 39
caatatgtaggctagcaacaacctg

SEQ ID NO: 56701 - DNA, 25 bp, Artificial
  probe
  misc_feature (1)..(25): SEQ ID NO: 3541; WAN024AJL_at; Start 23; Stop 47
aggctagcaacaacctgcacattgg

SEQ ID NO: 56702 - DNA, 25 bp, Artificial
  probe
  misc_feature (1)..(25): SEQ ID NO: 3541; WAN024AJL_at; Start 12; Stop 36
aaccaatatgtaggctagcaacaac

SEQ ID NO: 56703 - DNA, 25 bp, Artificial
  probe
  misc_feature (1)..(25): SEQ ID NO: 3541; WAN024AJL_at; Start 28; Stop 52
agcaacaacctgcacattggttctt

SEQ ID NO: 56704 - DNA, 25 bp, Artificial
  probe
  misc_feature (1)..(25): SEQ ID NO: 3541; WAN024AJL_at; Start 7; Stop 31
ataagaaccaatatgtaggctagca

SEQ ID NO: 56705 - DNA, 25 bp, Artificial
  probe
  misc_feature (1)..(25): SEQ ID NO: 3541; WAN024AJL_at; Start 2; Stop 26
aaatgataagaaccaatatgtaggc

SEQ ID NO: 56706 - DNA, 25 bp, Artificial
  probe
  misc_feature (1)..(25): SEQ ID NO: 3541; WAN024AJL_at; Start 26; Stop 50
ctagcaacaacctgcacattggttc

SEQ ID NO: 56707 - DNA, 25 bp, Artificial
  probe
  misc_feature (1)..(25): SEQ ID NO: 3541; WAN024AJL_at; Start 13; Stop 37
accaatatgtaggctagcaacaacc

SEQ ID NO: 56708 - DNA, 25 bp, Artificial
  probe
  misc_feature (1)..(25): SEQ ID NO: 122; WAN024AJM_at; Start 26; Stop 50
tagcctacatattggttcttatcat

SEQ ID NO: 56709 - DNA, 25 bp, Artificial
  probe
  misc_feature (1)..(25): SEQ ID NO: 122; WAN024AJM_at; Start 12; Stop 36
gtgcaggttgttgctagcctacata

SEQ ID NO: 56710 - DNA, 25 bp, Artificial
  probe
  misc_feature (1)..(25): SEQ ID NO: 122; WAN024AJM_at; Start 27; Stop 51
agcctacatattggttcttatcatt

SEQ ID NO: 56711 - DNA, 25 bp, Artificial
  probe
  misc_feature (1)..(25): SEQ ID NO: 122; WAN024AJM_at; Start 28; Stop 52
gcctacatattggttcttatcattt

SEQ ID NO: 56712 - DNA, 25 bp, Artificial
  probe
  misc_feature (1)..(25): SEQ ID NO: 122; WAN024AJM_at; Start 9; Stop 33
aatgtgcaggttgttgctagcctac

SEQ ID NO: 56713 - DNA, 25 bp, Artificial
  probe
  misc_feature (1)..(25): SEQ ID NO: 122; WAN024AJM_at; Start 23; Stop 47
tgctagcctacatattggttcttat

SEQ ID NO: 56714 - DNA, 25 bp, Artificial
  probe
  misc_feature (1)..(25): SEQ ID NO: 122; WAN024AJM_at; Start 22; Stop 46
ttgctagcctacatattggttctta

SEQ ID NO: 56715 - DNA, 25 bp, Artificial
  probe
  misc_feature (1)..(25): SEQ ID NO: 122; WAN024AJM_at; Start 25; Stop 49
ctagcctacatattggttcttatca

SEQ ID NO: 56716 - DNA, 25 bp, Artificial
  probe
  misc_feature (1)..(25): SEQ ID NO: 122; WAN024AJM_at; Start 18; Stop 42
gttgttgctagcctacatattggtt

SEQ ID NO: 56717 - DNA, 25 bp, Artificial
  probe
  misc_feature (1)..(25): SEQ ID NO: 122; WAN024AJM_at; Start 20; Stop 44
tgttgctagcctacatattggttct

SEQ ID NO: 56718 - DNA, 25 bp, Artificial
  probe
  misc_feature (1)..(25): SEQ ID NO: 122; WAN024AJM_at; Start 21; Stop 45
gttgctagcctacatattggttctt

SEQ ID NO: 56719 - DNA, 25 bp, Artificial
  probe
  misc_feature (1)..(25): SEQ ID NO: 122; WAN024AJM_at; Start 3; Stop 27
agaaccaatgtgcaggttgttgcta

SEQ ID NO: 56720 - DNA, 25 bp, Artificial
  probe
  misc_feature (1)..(25): SEQ ID NO: 122; WAN024AJM_at; Start 10; Stop 34
atgtgcaggttgttgctagcctaca

SEQ ID NO: 56721 - DNA, 25 bp, Artificial
  probe
  misc_feature (1)..(25): SEQ ID NO: 122; WAN024AJM_at; Start 1; Stop 25
aaagaaccaatgtgcaggttgttgc

SEQ ID NO: 56722 - DNA, 25 bp, Artificial
  probe
  misc_feature (1)..(25): SEQ ID NO: 122; WAN024AJM_at; Start 8; Stop 32
caatgtgcaggttgttgctagccta

SEQ ID NO: 56723 - DNA, 25 bp, Artificial
  probe
  misc_feature (1)..(25): SEQ ID NO: 122; WAN024AJM_at; Start 2; Stop 26
aagaaccaatgtgcaggttgttgct

SEQ ID NO: 56724 - DNA, 25 bp, Artificial
  probe
  misc_feature (1)..(25): SEQ ID NO: 122; WAN024AJM_at; Start 4; Stop 28
gaaccaatgtgcaggttgttgctag

SEQ ID NO: 56725 - DNA, 25 bp, Artificial
  probe
  misc_feature (1)..(25): SEQ ID NO: 122; WAN024AJM_at; Start 13; Stop 37
tgcaggttgttgctagcctacatat

SEQ ID NO: 56726 - DNA, 25 bp, Artificial
  probe
  misc_feature (1)..(25): SEQ ID NO: 122; WAN024AJM_at; Start 17; Stop 41
ggttgttgctagcctacatattggt

SEQ ID NO: 56727 - DNA, 25 bp, Artificial
  probe
  misc_feature (1)..(25): SEQ ID NO: 122; WAN024AJM_at; Start 14; Stop 38
gcaggttgttgctagcctacatatt

SEQ ID NO: 56728 - DNA, 25 bp, Artificial
  probe
  misc_feature (1)..(25): SEQ ID NO: 122; WAN024AJM_at; Start 24; Stop 48
gctagcctacatattggttcttatc

SEQ ID NO: 56729 - DNA, 25 bp, Artificial
  probe
  misc_feature (1)..(25): SEQ ID NO: 122; WAN024AJM_at; Start 6; Stop 30
accaatgtgcaggttgttgctagcc

SEQ ID NO: 56730 - DNA, 25 bp, Artificial
  probe
  misc_feature (1)..(25): SEQ ID NO: 122; WAN024AJM_at; Start 29; Stop 53
cctacatattggttcttatcatttc

SEQ ID NO: 56731 - DNA, 25 bp, Artificial
  probe
  misc_feature (1)..(25): SEQ ID NO: 122; WAN024AJM_at; Start 19; Stop 43
ttgttgctagcctacatattggttc

SEQ ID NO: 56732 - DNA, 25 bp, Artificial
  probe
  misc_feature (1)..(25): SEQ ID NO: 122; WAN024AJM_at; Start 15; Stop 39
caggttgttgctagcctacatattg

SEQ ID NO: 56733 - DNA, 25 bp, Artificial
  probe
  misc_feature (1)..(25): SEQ ID NO: 122; WAN024AJM_at; Start 11; Stop 35
tgtgcaggttgttgctagcctacat

SEQ ID NO: 56734 - DNA, 25 bp, Artificial
  probe
  misc_feature (1)..(25): SEQ ID NO: 122; WAN024AJM_at; Start 7; Stop 31
ccaatgtgcaggttgttgctagcct

SEQ ID NO: 56735 - DNA, 25 bp, Artificial
  probe
  misc_feature (1)..(25): SEQ ID NO: 122; WAN024AJM_at; Start 16; Stop 40
aggttgttgctagcctacatattgg

SEQ ID NO: 56736 - DNA, 25 bp, Artificial
  probe
  misc_feature (1)..(25): SEQ ID NO: 122; WAN024AJM_at; Start 5; Stop 29
aaccaatgtgcaggttgttgctagc

SEQ ID NO: 56737 - DNA, 25 bp, Artificial
  probe
  misc_feature (1)..(25): SEQ ID NO: 3800; WAN024AJN_at; Start 23; Stop 47
ggaacattactaactctaggttagc

SEQ ID NO: 56738 - DNA, 25 bp, Artificial
  probe
  misc_feature (1)..(25): SEQ ID NO: 3800; WAN024AJN_at; Start 33; Stop 57
taactctaggttagcattttcctct

SEQ ID NO: 56739 - DNA, 25 bp, Artificial
  probe
  misc_feature (1)..(25): SEQ ID NO: 3800; WAN024AJN_at; Start 28; Stop 52
attactaactctaggttagcatttt

SEQ ID NO: 56740 - DNA, 25 bp, Artificial
  probe
  misc_feature (1)..(25): SEQ ID NO: 3800; WAN024AJN_at; Start 30; Stop 54
tactaactctaggttagcattttcc

SEQ ID NO: 56741 - DNA, 25 bp, Artificial
  probe
  misc_feature (1)..(25): SEQ ID NO: 3800; WAN024AJN_at; Start 31; Stop 55
actaactctaggttagcattttcct

SEQ ID NO: 56742 - DNA, 25 bp, Artificial
  probe
  misc_feature (1)..(25): SEQ ID NO: 3800; WAN024AJN_at; Start 32; Stop 56
ctaactctaggttagcattttcctc

SEQ ID NO: 56743 - DNA, 25 bp, Artificial
  probe
  misc_feature (1)..(25): SEQ ID NO: 3800; WAN024AJN_at; Start 15; Stop 39
ataaaagaggaacattactaactct

SEQ ID NO: 56744 - DNA, 25 bp, Artificial
  probe
  misc_feature (1)..(25): SEQ ID NO: 3800; WAN024AJN_at; Start 29; Stop 53
ttactaactctaggttagcattttc

SEQ ID NO: 56745 - DNA, 25 bp, Artificial
  probe
  misc_feature (1)..(25): SEQ ID NO: 3800; WAN024AJN_at; Start 1; Stop 25
gtatagcataaaaaataaaagagga

SEQ ID NO: 56746 - DNA, 25 bp, Artificial
  probe
  misc_feature (1)..(25): SEQ ID NO: 3800; WAN024AJN_at; Start 2; Stop 26
tatagcataaaaaataaaagaggaa

SEQ ID NO: 56747 - DNA, 25 bp, Artificial
  probe
  misc_feature (1)..(25): SEQ ID NO: 3800; WAN024AJN_at; Start 26; Stop 50
acattactaactctaggttagcatt

SEQ ID NO: 56748 - DNA, 25 bp, Artificial
  probe
  misc_feature (1)..(25): SEQ ID NO: 3800; WAN024AJN_at; Start 17; Stop 41
aaaagaggaacattactaactctag

SEQ ID NO: 56749 - DNA, 25 bp, Artificial
  probe
  misc_feature (1)..(25): SEQ ID NO: 3800; WAN024AJN_at; Start 5; Stop 29
agcataaaaaataaaagaggaacat

SEQ ID NO: 56750 - DNA, 25 bp, Artificial
  probe
  misc_feature (1)..(25): SEQ ID NO: 3800; WAN024AJN_at; Start 35; Stop 59
actctaggttagcattttcctctct

SEQ ID NO: 56751 - DNA, 25 bp, Artificial
  probe
  misc_feature (1)..(25): SEQ ID NO: 3800; WAN024AJN_at; Start 20; Stop 44
agaggaacattactaactctaggtt

SEQ ID NO: 56752 - DNA, 25 bp, Artificial
  probe
  misc_feature (1)..(25): SEQ ID NO: 3800; WAN024AJN_at; Start 38; Stop 62
ctaggttagcattttcctctctcat

SEQ ID NO: 56753 - DNA, 25 bp, Artificial
  probe
  misc_feature (1)..(25): SEQ ID NO: 3800; WAN024AJN_at; Start 18; Stop 42
aaagaggaacattactaactctagg

SEQ ID NO: 56754 - DNA, 25 bp, Artificial
  probe
  misc_feature (1)..(25): SEQ ID NO: 3800; WAN024AJN_at; Start 36; Stop 60
ctctaggttagcattttcctctctc

SEQ ID NO: 56755 - DNA, 25 bp, Artificial
  probe
  misc_feature (1)..(25): SEQ ID NO: 3800; WAN024AJN_at; Start 21; Stop 45
gaggaacattactaactctaggtta

SEQ ID NO: 56756 - DNA, 25 bp, Artificial
  probe
  misc_feature (1)..(25): SEQ ID NO: 3800; WAN024AJN_at; Start 34; Stop 58
aactctaggttagcattttcctctc

SEQ ID NO: 56757 - DNA, 25 bp, Artificial
  probe
  misc_feature (1)..(25): SEQ ID NO: 3800; WAN024AJN_at; Start 4; Stop 28
tagcataaaaaataaaagaggaaca

SEQ ID NO: 56758 - DNA, 25 bp, Artificial
  probe
  misc_feature (1)..(25): SEQ ID NO: 3800; WAN024AJN_at; Start 39; Stop 63
taggttagcattttcctctctcatt

SEQ ID NO: 56759 - DNA, 25 bp, Artificial
  probe
  misc_feature (1)..(25): SEQ ID NO: 3800; WAN024AJN_at; Start 25; Stop 49
aacattactaactctaggttagcat

SEQ ID NO: 56760 - DNA, 25 bp, Artificial
  probe
  misc_feature (1)..(25): SEQ ID NO: 3800; WAN024AJN_at; Start 22; Stop 46
aggaacattactaactctaggttag

SEQ ID NO: 56761 - DNA, 25 bp, Artificial
  probe
  misc_feature (1)..(25): SEQ ID NO: 3800; WAN024AJN_at; Start 40; Stop 64
aggttagcattttcctctctcatta

SEQ ID NO: 56762 - DNA, 25 bp, Artificial
  probe
  misc_feature (1)..(25): SEQ ID NO: 3800; WAN024AJN_at; Start 27; Stop 51
cattactaactctaggttagcattt

SEQ ID NO: 56763 - DNA, 25 bp, Artificial
  probe
  misc_feature (1)..(25): SEQ ID NO: 3800; WAN024AJN_at; Start 37; Stop 61
tctaggttagcattttcctctctca

SEQ ID NO: 56764 - DNA, 25 bp, Artificial
  probe
  misc_feature (1)..(25): SEQ ID NO: 3800; WAN024AJN_at; Start 19; Stop 43
aagaggaacattactaactctaggt

SEQ ID NO: 56765 - DNA, 25 bp, Artificial
  probe
  misc_feature (1)..(25): SEQ ID NO: 3800; WAN024AJN_at; Start 24; Stop 48
gaacattactaactctaggttagca

SEQ ID NO: 56766 - DNA, 25 bp, Artificial
  probe
  misc_feature (1)..(25): SEQ ID NO: 3800; WAN024AJN_at; Start 16; Stop 40
taaaagaggaacattactaactcta

SEQ ID NO: 56767 - DNA, 25 bp, Artificial
  probe
  misc_feature (1)..(25): SEQ ID NO: 3621; WAN024AJO_at; Start 1; Stop 25
gataatgagagaggaaaatgctaac

SEQ ID NO: 56768 - DNA, 25 bp, Artificial
  probe
  misc_feature (1)..(25): SEQ ID NO: 3621; WAN024AJO_at; Start 22; Stop 46
taacctagagttagtaatgttcctc

SEQ ID NO: 56769 - DNA, 25 bp, Artificial
  probe
  misc_feature (1)..(25): SEQ ID NO: 3621; WAN024AJO_at; Start 15; Stop 39
aaaatgctaacctagagttagtaat

SEQ ID NO: 56770 - DNA, 25 bp, Artificial
  probe
  misc_feature (1)..(25): SEQ ID NO: 3621; WAN024AJO_at; Start 14; Stop 38
gaaaatgctaacctagagttagtaa

SEQ ID NO: 56771 - DNA, 25 bp, Artificial
  probe
  misc_feature (1)..(25): SEQ ID NO: 3621; WAN024AJO_at; Start 27; Stop 51
tagagttagtaatgttcctctttta

SEQ ID NO: 56772 - DNA, 25 bp, Artificial
  probe
  misc_feature (1)..(25): SEQ ID NO: 3621; WAN024AJO_at; Start 9; Stop 33
gagaggaaaatgctaacctagagtt

SEQ ID NO: 56773 - DNA, 25 bp, Artificial
  probe
  misc_feature (1)..(25): SEQ ID NO: 3621; WAN024AJO_at; Start 24; Stop 48
acctagagttagtaatgttcctctt

SEQ ID NO: 56774 - DNA, 25 bp, Artificial
  probe
  misc_feature (1)..(25): SEQ ID NO: 3621; WAN024AJO_at; Start 13; Stop 37
ggaaaatgctaacctagagttagta

SEQ ID NO: 56775 - DNA, 25 bp, Artificial
  probe
  misc_feature (1)..(25): SEQ ID NO: 3621; WAN024AJO_at; Start 20; Stop 44
gctaacctagagttagtaatgttcc

SEQ ID NO: 56776 - DNA, 25 bp, Artificial
  probe
  misc_feature (1)..(25): SEQ ID NO: 3621; WAN024AJO_at; Start 2; Stop 26
ataatgagagaggaaaatgctaacc

SEQ ID NO: 56777 - DNA, 25 bp, Artificial
  probe
  misc_feature (1)..(25): SEQ ID NO: 3621; WAN024AJO_at; Start 42; Stop 66
tcctcttttattttttatgctatac

SEQ ID NO: 56778 - DNA, 25 bp, Artificial
  probe
  misc_feature (1)..(25): SEQ ID NO: 3621; WAN024AJO_at; Start 4; Stop 28
aatgagagaggaaaatgctaaccta

SEQ ID NO: 56779 - DNA, 25 bp, Artificial
  probe
  misc_feature (1)..(25): SEQ ID NO: 3621; WAN024AJO_at; Start 11; Stop 35
gaggaaaatgctaacctagagttag

SEQ ID NO: 56780 - DNA, 25 bp, Artificial
  probe
  misc_feature (1)..(25): SEQ ID NO: 3621; WAN024AJO_at; Start 18; Stop 42
atgctaacctagagttagtaatgtt

SEQ ID NO: 56781 - DNA, 25 bp, Artificial
  probe
  misc_feature (1)..(25): SEQ ID NO: 3621; WAN024AJO_at; Start 25; Stop 49
cctagagttagtaatgttcctcttt

SEQ ID NO: 56782 - DNA, 25 bp, Artificial
  probe
  misc_feature (1)..(25): SEQ ID NO: 3621; WAN024AJO_at; Start 21; Stop 45
ctaacctagagttagtaatgttcct

SEQ ID NO: 56783 - DNA, 25 bp, Artificial
  probe
  misc_feature (1)..(25): SEQ ID NO: 3621; WAN024AJO_at; Start 17; Stop 41
aatgctaacctagagttagtaatgt

SEQ ID NO: 56784 - DNA, 25 bp, Artificial
  probe
  misc_feature (1)..(25): SEQ ID NO: 3621; WAN024AJO_at; Start 38; Stop 62
atgttcctcttttattttttatgct

SEQ ID NO: 56785 - DNA, 25 bp, Artificial
  probe
  misc_feature (1)..(25): SEQ ID NO: 3621; WAN024AJO_at; Start 10; Stop 34
agaggaaaatgctaacctagagtta

SEQ ID NO: 56786 - DNA, 25 bp, Artificial
  probe
  misc_feature (1)..(25): SEQ ID NO: 3621; WAN024AJO_at; Start 16; Stop 40
aaatgctaacctagagttagtaatg

SEQ ID NO: 56787 - DNA, 25 bp, Artificial
  probe
  misc_feature (1)..(25): SEQ ID NO: 3621; WAN024AJO_at; Start 23; Stop 47
aacctagagttagtaatgttcctct

SEQ ID NO: 56788 - DNA, 25 bp, Artificial
  probe
  misc_feature (1)..(25): SEQ ID NO: 3621; WAN024AJO_at; Start 26; Stop 50
ctagagttagtaatgttcctctttt

SEQ ID NO: 56789 - DNA, 25 bp, Artificial
  probe
  misc_feature (1)..(25): SEQ ID NO: 3621; WAN024AJO_at; Start 12; Stop 36
aggaaaatgctaacctagagttagt

SEQ ID NO: 56790 - DNA, 25 bp, Artificial
  probe
  misc_feature (1)..(25): SEQ ID NO: 3621; WAN024AJO_at; Start 6; Stop 30
tgagagaggaaaatgctaacctaga

SEQ ID NO: 56791 - DNA, 25 bp, Artificial
  probe
  misc_feature (1)..(25): SEQ ID NO: 3621; WAN024AJO_at; Start 7; Stop 31
gagagaggaaaatgctaacctagag

SEQ ID NO: 56792 - DNA, 25 bp, Artificial
  probe
  misc_feature (1)..(25): SEQ ID NO: 3621; WAN024AJO_at; Start 5; Stop 29
atgagagaggaaaatgctaacctag

SEQ ID NO: 56793 - DNA, 25 bp, Artificial
  probe
  misc_feature (1)..(25): SEQ ID NO: 3621; WAN024AJO_at; Start 8; Stop 32
agagaggaaaatgctaacctagagt

SEQ ID NO: 56794 - DNA, 25 bp, Artificial
  probe
  misc_feature (1)..(25): SEQ ID NO: 3621; WAN024AJO_at; Start 28; Stop 52
agagttagtaatgttcctcttttat

SEQ ID NO: 56795 - DNA, 25 bp, Artificial
  probe
  misc_feature (1)..(25): SEQ ID NO: 3621; WAN024AJO_at; Start 39; Stop 63
tgttcctcttttattttttatgcta

SEQ ID NO: 56796 - DNA, 25 bp, Artificial
  probe
  misc_feature (1)..(25): SEQ ID NO: 3621; WAN024AJO_at; Start 3; Stop 27
taatgagagaggaaaatgctaacct

SEQ ID NO: 56797 - DNA, 25 bp, Artificial
  probe
  misc_feature (1)..(25): SEQ ID NO: 3621; WAN024AJO_at; Start 19; Stop 43
tgctaacctagagttagtaatgttc

SEQ ID NO: 56798 - DNA, 25 bp, Artificial
  probe
  misc_feature (1)..(25): SEQ ID NO: 3155; WAN024AJP_at; Start 34; Stop 58
gcttacagtactagtatatcaaaat

SEQ ID NO: 56799 - DNA, 25 bp, Artificial
  probe
  misc_feature (1)..(25): SEQ ID NO: 3155; WAN024AJP_at; Start 20; Stop 44
tagtaattgaaaatgcttacagtac

SEQ ID NO: 56800 - DNA, 25 bp, Artificial
  probe
  misc_feature (1)..(25): SEQ ID NO: 3155; WAN024AJP_at; Start 13; Stop 37
cattgtgtagtaattgaaaatgctt

SEQ ID NO: 56801 - DNA, 25 bp, Artificial
  probe
  misc_feature (1)..(25): SEQ ID NO: 3155; WAN024AJP_at; Start 25; Stop 49
attgaaaatgcttacagtactagta

SEQ ID NO: 56802 - DNA, 25 bp, Artificial
  probe
  misc_feature (1)..(25): SEQ ID NO: 3155; WAN024AJP_at; Start 29; Stop 53
aaaatgcttacagtactagtatatc

SEQ ID NO: 56803 - DNA, 25 bp, Artificial
  probe
  misc_feature (1)..(25): SEQ ID NO: 3155; WAN024AJP_at; Start 1; Stop 25
attctcctttttcattgtgtagtaa

SEQ ID NO: 56804 - DNA, 25 bp, Artificial
  probe
  misc_feature (1)..(25): SEQ ID NO: 3155; WAN024AJP_at; Start 4; Stop 28
ctcctttttcattgtgtagtaattg

SEQ ID NO: 56805 - DNA, 25 bp, Artificial
  probe
  misc_feature (1)..(25): SEQ ID NO: 3155; WAN024AJP_at; Start 11; Stop 35
ttcattgtgtagtaattgaaaatgc

SEQ ID NO: 56806 - DNA, 25 bp, Artificial
  probe
  misc_feature (1)..(25): SEQ ID NO: 3155; WAN024AJP_at; Start 17; Stop 41
gtgtagtaattgaaaatgcttacag

SEQ ID NO: 56807 - DNA, 25 bp, Artificial
  probe
  misc_feature (1)..(25): SEQ ID NO: 3155; WAN024AJP_at; Start 28; Stop 52
gaaaatgcttacagtactagtatat

SEQ ID NO: 56808 - DNA, 25 bp, Artificial
  probe
  misc_feature (1)..(25): SEQ ID NO: 3155; WAN024AJP_at; Start 19; Stop 43
gtagtaattgaaaatgcttacagta

SEQ ID NO: 56809 - DNA, 25 bp, Artificial
  probe
  misc_feature (1)..(25): SEQ ID NO: 3155; WAN024AJP_at; Start 27; Stop 51
tgaaaatgcttacagtactagtata

SEQ ID NO: 56810 - DNA, 25 bp, Artificial
  probe
  misc_feature (1)..(25): SEQ ID NO: 3155; WAN024AJP_at; Start 23; Stop 47
taattgaaaatgcttacagtactag

SEQ ID NO: 56811 - DNA, 25 bp, Artificial
  probe
  misc_feature (1)..(25): SEQ ID NO: 3155; WAN024AJP_at; Start 22; Stop 46
gtaattgaaaatgcttacagtacta

SEQ ID NO: 56812 - DNA, 25 bp, Artificial
  probe
  misc_feature (1)..(25): SEQ ID NO: 3155; WAN024AJP_at; Start 108; Stop 132
tcgcctaccagtatctgttaatcat

SEQ ID NO: 56813 - DNA, 25 bp, Artificial
  probe
  misc_feature (1)..(25): SEQ ID NO: 3155; WAN024AJP_at; Start 12; Stop 36
tcattgtgtagtaattgaaaatgct

SEQ ID NO: 56814 - DNA, 25 bp, Artificial
  probe
  misc_feature (1)..(25): SEQ ID NO: 3155; WAN024AJP_at; Start 105; Stop 129
ttttcgcctaccagtatctgttaat

SEQ ID NO: 56815 - DNA, 25 bp, Artificial
  probe
  misc_feature (1)..(25): SEQ ID NO: 3155; WAN024AJP_at; Start 107; Stop 131
ttcgcctaccagtatctgttaatca

SEQ ID NO: 56816 - DNA, 25 bp, Artificial
  probe
  misc_feature (1)..(25): SEQ ID NO: 3155; WAN024AJP_at; Start 26; Stop 50
ttgaaaatgcttacagtactagtat

SEQ ID NO: 56817 - DNA, 25 bp, Artificial
  probe
  misc_feature (1)..(25): SEQ ID NO: 3155; WAN024AJP_at; Start 18; Stop 42
tgtagtaattgaaaatgcttacagt

SEQ ID NO: 56818 - DNA, 25 bp, Artificial
  probe
  misc_feature (1)..(25): SEQ ID NO: 3155; WAN024AJP_at; Start 104; Stop 128
tttttcgcctaccagtatctgttaa

SEQ ID NO: 56819 - DNA, 25 bp, Artificial
  probe
  misc_feature (1)..(25): SEQ ID NO: 3155; WAN024AJP_at; Start 15; Stop 39
ttgtgtagtaattgaaaatgcttac

SEQ ID NO: 56820 - DNA, 25 bp, Artificial
  probe
  misc_feature (1)..(25): SEQ ID NO: 3155; WAN024AJP_at; Start 5; Stop 29
tcctttttcattgtgtagtaattga

SEQ ID NO: 56821 - DNA, 25 bp, Artificial
  probe
  misc_feature (1)..(25): SEQ ID NO: 3155; WAN024AJP_at; Start 16; Stop 40
tgtgtagtaattgaaaatgcttaca

SEQ ID NO: 56822 - DNA, 25 bp, Artificial
  probe
  misc_feature (1)..(25): SEQ ID NO: 3155; WAN024AJP_at; Start 32; Stop 56
atgcttacagtactagtatatcaaa

SEQ ID NO: 56823 - DNA, 25 bp, Artificial
  probe
  misc_feature (1)..(25): SEQ ID NO: 3155; WAN024AJP_at; Start 103; Stop 127
ttttttcgcctaccagtatctgtta

SEQ ID NO: 56824 - DNA, 25 bp, Artificial
  probe
  misc_feature (1)..(25): SEQ ID NO: 3155; WAN024AJP_at; Start 30; Stop 54
aaatgcttacagtactagtatatca

SEQ ID NO: 56825 - DNA, 25 bp, Artificial
  probe
  misc_feature (1)..(25): SEQ ID NO: 3155; WAN024AJP_at; Start 6; Stop 30
cctttttcattgtgtagtaattgaa

SEQ ID NO: 56826 - DNA, 25 bp, Artificial
  probe
  misc_feature (1)..(25): SEQ ID NO: 3155; WAN024AJP_at; Start 24; Stop 48
aattgaaaatgcttacagtactagt

SEQ ID NO: 56827 - DNA, 25 bp, Artificial
  probe
  misc_feature (1)..(25): SEQ ID NO: 3155; WAN024AJP_at; Start 33; Stop 57
tgcttacagtactagtatatcaaaa

SEQ ID NO: 56828 - DNA, 25 bp, Artificial
  probe
  misc_feature (1)..(25): SEQ ID NO: 3155; WAN024AJP_at; Start 60; Stop 84
cattcacttatgcaaaggtttgcgt

SEQ ID NO: 56829 - DNA, 25 bp, Artificial
  probe
  misc_feature (1)..(25): SEQ ID NO: 3155; WAN024AJP_at; Start 21; Stop 45
agtaattgaaaatgcttacagtact

SEQ ID NO: 56830 - DNA, 25 bp, Artificial
  probe
  misc_feature (1)..(25): SEQ ID NO: 3155; WAN024AJP_at; Start 106; Stop 130
tttcgcctaccagtatctgttaatc

SEQ ID NO: 56831 - DNA, 25 bp, Artificial
  probe
  misc_feature (1)..(25): SEQ ID NO: 3155; WAN024AJP_at; Start 31; Stop 55
aatgcttacagtactagtatatcaa

SEQ ID NO: 56832 - DNA, 25 bp, Artificial
  probe
  misc_feature (1)..(25): SEQ ID NO: 1784; WAN024AJQ_at; Start 79; Stop 103
tgatatactagtactgtaagcattt

SEQ ID NO: 56833 - DNA, 25 bp, Artificial
  probe
  misc_feature (1)..(25): SEQ ID NO: 1784; WAN024AJQ_at; Start 98; Stop 122
gcattttcaattactacacaatgaa

SEQ ID NO: 56834 - DNA, 25 bp, Artificial
  probe
  misc_feature (1)..(25): SEQ ID NO: 1784; WAN024AJQ_at; Start 90; Stop 114
tactgtaagcattttcaattactac

SEQ ID NO: 56835 - DNA, 25 bp, Artificial
  probe
  misc_feature (1)..(25): SEQ ID NO: 1784; WAN024AJQ_at; Start 4; Stop 28
attaacagatactggtaggcgaaaa

SEQ ID NO: 56836 - DNA, 25 bp, Artificial
  probe
  misc_feature (1)..(25): SEQ ID NO: 1784; WAN024AJQ_at; Start 2; Stop 26
tgattaacagatactggtaggcgaa

SEQ ID NO: 56837 - DNA, 25 bp, Artificial
  probe
  misc_feature (1)..(25): SEQ ID NO: 1784; WAN024AJQ_at; Start 3; Stop 27
gattaacagatactggtaggcgaaa

SEQ ID NO: 56838 - DNA, 25 bp, Artificial
  probe
  misc_feature (1)..(25): SEQ ID NO: 1784; WAN024AJQ_at; Start 106; Stop 130
aattactacacaatgaaaaaggaga

SEQ ID NO: 56839 - DNA, 25 bp, Artificial
  probe
  misc_feature (1)..(25): SEQ ID NO: 1784; WAN024AJQ_at; Start 87; Stop 111
tagtactgtaagcattttcaattac

SEQ ID NO: 56840 - DNA, 25 bp, Artificial
  probe
  misc_feature (1)..(25): SEQ ID NO: 1784; WAN024AJQ_at; Start 92; Stop 116
ctgtaagcattttcaattactacac

SEQ ID NO: 56841 - DNA, 25 bp, Artificial
  probe
  misc_feature (1)..(25): SEQ ID NO: 1784; WAN024AJQ_at; Start 9; Stop 33
cagatactggtaggcgaaaaaaatt

SEQ ID NO: 56842 - DNA, 25 bp, Artificial
  probe
  misc_feature (1)..(25): SEQ ID NO: 1784; WAN024AJQ_at; Start 77; Stop 101
tttgatatactagtactgtaagcat

SEQ ID NO: 56843 - DNA, 25 bp, Artificial
  probe
  misc_feature (1)..(25): SEQ ID NO: 1784; WAN024AJQ_at; Start 103; Stop 127
ttcaattactacacaatgaaaaagg

SEQ ID NO: 56844 - DNA, 25 bp, Artificial
  probe
  misc_feature (1)..(25): SEQ ID NO: 1784; WAN024AJQ_at; Start 105; Stop 129
caattactacacaatgaaaaaggag

SEQ ID NO: 56845 - DNA, 25 bp, Artificial
  probe
  misc_feature (1)..(25): SEQ ID NO: 1784; WAN024AJQ_at; Start 78; Stop 102
ttgatatactagtactgtaagcatt

SEQ ID NO: 56846 - DNA, 25 bp, Artificial
  probe
  misc_feature (1)..(25): SEQ ID NO: 1784; WAN024AJQ_at; Start 89; Stop 113
gtactgtaagcattttcaattacta

SEQ ID NO: 56847 - DNA, 25 bp, Artificial
  probe
  misc_feature (1)..(25): SEQ ID NO: 1784; WAN024AJQ_at; Start 95; Stop 119
taagcattttcaattactacacaat

SEQ ID NO: 56848 - DNA, 25 bp, Artificial
  probe
  misc_feature (1)..(25): SEQ ID NO: 1784; WAN024AJQ_at; Start 5; Stop 29
ttaacagatactggtaggcgaaaaa

SEQ ID NO: 56849 - DNA, 25 bp, Artificial
  probe
  misc_feature (1)..(25): SEQ ID NO: 1784; WAN024AJQ_at; Start 82; Stop 106
tatactagtactgtaagcattttca

SEQ ID NO: 56850 - DNA, 25 bp, Artificial
  probe
  misc_feature (1)..(25): SEQ ID NO: 1784; WAN024AJQ_at; Start 97; Stop 121
agcattttcaattactacacaatga

SEQ ID NO: 56851 - DNA, 25 bp, Artificial
  probe
  misc_feature (1)..(25): SEQ ID NO: 1784; WAN024AJQ_at; Start 1; Stop 25
atgattaacagatactggtaggcga

SEQ ID NO: 56852 - DNA, 25 bp, Artificial
  probe
  misc_feature (1)..(25): SEQ ID NO: 1784; WAN024AJQ_at; Start 104; Stop 128
tcaattactacacaatgaaaaagga

SEQ ID NO: 56853 - DNA, 25 bp, Artificial
  probe
  misc_feature (1)..(25): SEQ ID NO: 1784; WAN024AJQ_at; Start 94; Stop 118
gtaagcattttcaattactacacaa

SEQ ID NO: 56854 - DNA, 25 bp, Artificial
  probe
  misc_feature (1)..(25): SEQ ID NO: 1784; WAN024AJQ_at; Start 75; Stop 99
attttgatatactagtactgtaagc

SEQ ID NO: 56855 - DNA, 25 bp, Artificial
  probe
  misc_feature (1)..(25): SEQ ID NO: 1784; WAN024AJQ_at; Start 93; Stop 117
tgtaagcattttcaattactacaca

SEQ ID NO: 56856 - DNA, 25 bp, Artificial
  probe
  misc_feature (1)..(25): SEQ ID NO: 1784; WAN024AJQ_at; Start 76; Stop 100
ttttgatatactagtactgtaagca

SEQ ID NO: 56857 - DNA, 25 bp, Artificial
  probe
  misc_feature (1)..(25): SEQ ID NO: 1784; WAN024AJQ_at; Start 84; Stop 108
tactagtactgtaagcattttcaat

SEQ ID NO: 56858 - DNA, 25 bp, Artificial
  probe
  misc_feature (1)..(25): SEQ ID NO: 1784; WAN024AJQ_at; Start 80; Stop 104
gatatactagtactgtaagcatttt

SEQ ID NO: 56859 - DNA, 25 bp, Artificial
  probe
  misc_feature (1)..(25): SEQ ID NO: 1784; WAN024AJQ_at; Start 83; Stop 107
atactagtactgtaagcattttcaa

SEQ ID NO: 56860 - DNA, 25 bp, Artificial
  probe
  misc_feature (1)..(25): SEQ ID NO: 1784; WAN024AJQ_at; Start 86; Stop 110
ctagtactgtaagcattttcaatta

SEQ ID NO: 56861 - DNA, 25 bp, Artificial
  probe
  misc_feature (1)..(25): SEQ ID NO: 1784; WAN024AJQ_at; Start 91; Stop 115
actgtaagcattttcaattactaca

SEQ ID NO: 56862 - DNA, 25 bp, Artificial
  probe
  misc_feature (1)..(25): SEQ ID NO: 1784; WAN024AJQ_at; Start 49; Stop 73
acgcaaacctttgcataagtgaatg

SEQ ID NO: 56863 - DNA, 25 bp, Artificial
  probe
  misc_feature (1)..(25): SEQ ID NO: 1784; WAN024AJQ_at; Start 85; Stop 109
actagtactgtaagcattttcaatt

SEQ ID NO: 56864 - DNA, 25 bp, Artificial
  probe
  misc_feature (1)..(25): SEQ ID NO: 1784; WAN024AJQ_at; Start 96; Stop 120
aagcattttcaattactacacaatg

SEQ ID NO: 56865 - DNA, 25 bp, Artificial
  probe
  misc_feature (1)..(25): SEQ ID NO: 1784; WAN024AJQ_at; Start 6; Stop 30
taacagatactggtaggcgaaaaaa

SEQ ID NO: 56866 - DNA, 25 bp, Artificial
  probe
  misc_feature (1)..(25): SEQ ID NO: 7407; WAN024AJR_at; Start 15; Stop 39
ctgctttgcggatgagggttttctt

SEQ ID NO: 56867 - DNA, 25 bp, Artificial
  probe
  misc_feature (1)..(25): SEQ ID NO: 7407; WAN024AJR_at; Start 17; Stop 41
gctttgcggatgagggttttcttat

SEQ ID NO: 56868 - DNA, 25 bp, Artificial
  probe
  misc_feature (1)..(25): SEQ ID NO: 7407; WAN024AJR_at; Start 11; Stop 35
tcatctgctttgcggatgagggttt

SEQ ID NO: 56869 - DNA, 25 bp, Artificial
  probe
  misc_feature (1)..(25): SEQ ID NO: 7407; WAN024AJR_at; Start 16; Stop 40
tgctttgcggatgagggttttctta

SEQ ID NO: 56870 - DNA, 25 bp, Artificial
  probe
  misc_feature (1)..(25): SEQ ID NO: 7407; WAN024AJR_at; Start 23; Stop 47
cggatgagggttttcttattttatg

SEQ ID NO: 56871 - DNA, 25 bp, Artificial
  probe
  misc_feature (1)..(25): SEQ ID NO: 7407; WAN024AJR_at; Start 10; Stop 34
ctcatctgctttgcggatgagggtt

SEQ ID NO: 56872 - DNA, 25 bp, Artificial
  probe
  misc_feature (1)..(25): SEQ ID NO: 7407; WAN024AJR_at; Start 8; Stop 32
ctctcatctgctttgcggatgaggg

SEQ ID NO: 56873 - DNA, 25 bp, Artificial
  probe
  misc_feature (1)..(25): SEQ ID NO: 7407; WAN024AJR_at; Start 2; Stop 26
tgaaatctctcatctgctttgcgga

SEQ ID NO: 56874 - DNA, 25 bp, Artificial
  probe
  misc_feature (1)..(25): SEQ ID NO: 7407; WAN024AJR_at; Start 12; Stop 36
catctgctttgcggatgagggtttt

SEQ ID NO: 56875 - DNA, 25 bp, Artificial
  probe
  misc_feature (1)..(25): SEQ ID NO: 7407; WAN024AJR_at; Start 14; Stop 38
tctgctttgcggatgagggttttct

SEQ ID NO: 56876 - DNA, 25 bp, Artificial
  probe
  misc_feature (1)..(25): SEQ ID NO: 7407; WAN024AJR_at; Start 3; Stop 27
gaaatctctcatctgctttgcggat

SEQ ID NO: 56877 - DNA, 25 bp, Artificial
  probe
  misc_feature (1)..(25): SEQ ID NO: 7407; WAN024AJR_at; Start 26; Stop 50
atgagggttttcttattttatgcta

SEQ ID NO: 56878 - DNA, 25 bp, Artificial
  probe
  misc_feature (1)..(25): SEQ ID NO: 7407; WAN024AJR_at; Start 1; Stop 25
ttgaaatctctcatctgctttgcgg

SEQ ID NO: 56879 - DNA, 25 bp, Artificial
  probe
  misc_feature (1)..(25): SEQ ID NO: 7407; WAN024AJR_at; Start 6; Stop 30
atctctcatctgctttgcggatgag

SEQ ID NO: 56880 - DNA, 25 bp, Artificial
  probe
  misc_feature (1)..(25): SEQ ID NO: 7407; WAN024AJR_at; Start 9; Stop 33
tctcatctgctttgcggatgagggt

SEQ ID NO: 56881 - DNA, 25 bp, Artificial
  probe
  misc_feature (1)..(25): SEQ ID NO: 7407; WAN024AJR_at; Start 28; Stop 52
gagggttttcttattttatgctata

SEQ ID NO: 56882 - DNA, 25 bp, Artificial
  probe
  misc_feature (1)..(25): SEQ ID NO: 7407; WAN024AJR_at; Start 25; Stop 49
gatgagggttttcttattttatgct

SEQ ID NO: 56883 - DNA, 25 bp, Artificial
  probe
  misc_feature (1)..(25): SEQ ID NO: 7407; WAN024AJR_at; Start 21; Stop 45
tgcggatgagggttttcttatttta

SEQ ID NO: 56884 - DNA, 25 bp, Artificial
  probe
  misc_feature (1)..(25): SEQ ID NO: 7407; WAN024AJR_at; Start 4; Stop 28
aaatctctcatctgctttgcggatg

SEQ ID NO: 56885 - DNA, 25 bp, Artificial
  probe
  misc_feature (1)..(25): SEQ ID NO: 7407; WAN024AJR_at; Start 13; Stop 37
atctgctttgcggatgagggttttc

SEQ ID NO: 56886 - DNA, 25 bp, Artificial
  probe
  misc_feature (1)..(25): SEQ ID NO: 7407; WAN024AJR_at; Start 5; Stop 29
aatctctcatctgctttgcggatga

SEQ ID NO: 56887 - DNA, 25 bp, Artificial
  probe
  misc_feature (1)..(25): SEQ ID NO: 7407; WAN024AJR_at; Start 24; Stop 48
ggatgagggttttcttattttatgc

SEQ ID NO: 56888 - DNA, 25 bp, Artificial
  probe
  misc_feature (1)..(25): SEQ ID NO: 7407; WAN024AJR_at; Start 7; Stop 31
tctctcatctgctttgcggatgagg

SEQ ID NO: 56889 - DNA, 25 bp, Artificial
  probe
  misc_feature (1)..(25): SEQ ID NO: 7407; WAN024AJR_at; Start 27; Stop 51
tgagggttttcttattttatgctat

SEQ ID NO: 56890 - DNA, 25 bp, Artificial
  probe
  misc_feature (1)..(25): SEQ ID NO: 7407; WAN024AJR_at; Start 18; Stop 42
ctttgcggatgagggttttcttatt

SEQ ID NO: 56891 - DNA, 25 bp, Artificial
  probe
  misc_feature (1)..(25): SEQ ID NO: 7201; WAN024AJS_at; Start 27; Stop 51
atcagctttgtctgtatctgccttt

SEQ ID NO: 56892 - DNA, 25 bp, Artificial
  probe
  misc_feature (1)..(25): SEQ ID NO: 7201; WAN024AJS_at; Start 37; Stop 61
tctgtatctgcctttttatgctata

SEQ ID NO: 56893 - DNA, 25 bp, Artificial
  probe
  misc_feature (1)..(25): SEQ ID NO: 7201; WAN024AJS_at; Start 9; Stop 33
aaaatcgtaaaaaggtagatcagct

SEQ ID NO: 56894 - DNA, 25 bp, Artificial
  probe
  misc_feature (1)..(25): SEQ ID NO: 7201; WAN024AJS_at; Start 32; Stop 56
ctttgtctgtatctgcctttttatg

SEQ ID NO: 56895 - DNA, 25 bp, Artificial
  probe
  misc_feature (1)..(25): SEQ ID NO: 7201; WAN024AJS_at; Start 22; Stop 46
ggtagatcagctttgtctgtatctg

SEQ ID NO: 56896 - DNA, 25 bp, Artificial
  probe
  misc_feature (1)..(25): SEQ ID NO: 7201; WAN024AJS_at; Start 26; Stop 50
gatcagctttgtctgtatctgcctt

SEQ ID NO: 56897 - DNA, 25 bp, Artificial
  probe
  misc_feature (1)..(25): SEQ ID NO: 7201; WAN024AJS_at; Start 28; Stop 52
tcagctttgtctgtatctgcctttt

SEQ ID NO: 56898 - DNA, 25 bp, Artificial
  probe
  misc_feature (1)..(25): SEQ ID NO: 7201; WAN024AJS_at; Start 40; Stop 64
gtatctgcctttttatgctatactt

SEQ ID NO: 56899 - DNA, 25 bp, Artificial
  probe
  misc_feature (1)..(25): SEQ ID NO: 7201; WAN024AJS_at; Start 35; Stop 59
tgtctgtatctgcctttttatgcta

SEQ ID NO: 56900 - DNA, 25 bp, Artificial
  probe
  misc_feature (1)..(25): SEQ ID NO: 7201; WAN024AJS_at; Start 14; Stop 38
cgtaaaaaggtagatcagctttgtc

SEQ ID NO: 56901 - DNA, 25 bp, Artificial
  probe
  misc_feature (1)..(25): SEQ ID NO: 7201; WAN024AJS_at; Start 19; Stop 43
aaaggtagatcagctttgtctgtat

SEQ ID NO: 56902 - DNA, 25 bp, Artificial
  probe
  misc_feature (1)..(25): SEQ ID NO: 7201; WAN024AJS_at; Start 21; Stop 45
aggtagatcagctttgtctgtatct

SEQ ID NO: 56903 - DNA, 25 bp, Artificial
  probe
  misc_feature (1)..(25): SEQ ID NO: 7201; WAN024AJS_at; Start 34; Stop 58
ttgtctgtatctgcctttttatgct

SEQ ID NO: 56904 - DNA, 25 bp, Artificial
  probe
  misc_feature (1)..(25): SEQ ID NO: 7201; WAN024AJS_at; Start 31; Stop 55
gctttgtctgtatctgcctttttat

SEQ ID NO: 56905 - DNA, 25 bp, Artificial
  probe
  misc_feature (1)..(25): SEQ ID NO: 7201; WAN024AJS_at; Start 25; Stop 49
agatcagctttgtctgtatctgcct

SEQ ID NO: 56906 - DNA, 25 bp, Artificial
  probe
  misc_feature (1)..(25): SEQ ID NO: 7201; WAN024AJS_at; Start 18; Stop 42
aaaaggtagatcagctttgtctgta

SEQ ID NO: 56907 - DNA, 25 bp, Artificial
  probe
  misc_feature (1)..(25): SEQ ID NO: 7201; WAN024AJS_at; Start 24; Stop 48
tagatcagctttgtctgtatctgcc

SEQ ID NO: 56908 - DNA, 25 bp, Artificial
  probe
  misc_feature (1)..(25): SEQ ID NO: 7201; WAN024AJS_at; Start 8; Stop 32
taaaatcgtaaaaaggtagatcagc

SEQ ID NO: 56909 - DNA, 25 bp, Artificial
  probe
  misc_feature (1)..(25): SEQ ID NO: 7201; WAN024AJS_at; Start 38; Stop 62
ctgtatctgcctttttatgctatac

SEQ ID NO: 56910 - DNA, 25 bp, Artificial
  probe
  misc_feature (1)..(25): SEQ ID NO: 7201; WAN024AJS_at; Start 12; Stop 36
atcgtaaaaaggtagatcagctttg

SEQ ID NO: 56911 - DNA, 25 bp, Artificial
  probe
  misc_feature (1)..(25): SEQ ID NO: 7201; WAN024AJS_at; Start 13; Stop 37
tcgtaaaaaggtagatcagctttgt

SEQ ID NO: 56912 - DNA, 25 bp, Artificial
  probe
  misc_feature (1)..(25): SEQ ID NO: 7201; WAN024AJS_at; Start 15; Stop 39
gtaaaaaggtagatcagctttgtct

SEQ ID NO: 56913 - DNA, 25 bp, Artificial
  probe
  misc_feature (1)..(25): SEQ ID NO: 7201; WAN024AJS_at; Start 29; Stop 53
cagctttgtctgtatctgccttttt

SEQ ID NO: 56914 - DNA, 25 bp, Artificial
  probe
  misc_feature (1)..(25): SEQ ID NO: 7201; WAN024AJS_at; Start 33; Stop 57
tttgtctgtatctgcctttttatgc

SEQ ID NO: 56915 - DNA, 25 bp, Artificial
  probe
  misc_feature (1)..(25): SEQ ID NO: 7201; WAN024AJS_at; Start 16; Stop 40
taaaaaggtagatcagctttgtctg

SEQ ID NO: 56916 - DNA, 25 bp, Artificial
  probe
  misc_feature (1)..(25): SEQ ID NO: 7201; WAN024AJS_at; Start 39; Stop 63
tgtatctgcctttttatgctatact

SEQ ID NO: 56917 - DNA, 25 bp, Artificial
  probe
  misc_feature (1)..(25): SEQ ID NO: 7201; WAN024AJS_at; Start 7; Stop 31
ataaaatcgtaaaaaggtagatcag

SEQ ID NO: 56918 - DNA, 25 bp, Artificial
  probe
  misc_feature (1)..(25): SEQ ID NO: 7201; WAN024AJS_at; Start 20; Stop 44
aaggtagatcagctttgtctgtatc

SEQ ID NO: 56919 - DNA, 25 bp, Artificial
  probe
  misc_feature (1)..(25): SEQ ID NO: 7201; WAN024AJS_at; Start 23; Stop 47
gtagatcagctttgtctgtatctgc

SEQ ID NO: 56920 - DNA, 25 bp, Artificial
  probe
  misc_feature (1)..(25): SEQ ID NO: 7201; WAN024AJS_at; Start 30; Stop 54
agctttgtctgtatctgccttttta

SEQ ID NO: 56921 - DNA, 25 bp, Artificial
  probe
  misc_feature (1)..(25): SEQ ID NO: 7201; WAN024AJS_at; Start 36; Stop 60
gtctgtatctgcctttttatgctat

SEQ ID NO: 56922 - DNA, 25 bp, Artificial
  probe
  misc_feature (1)..(25): SEQ ID NO: 7201; WAN024AJS_at; Start 17; Stop 41
aaaaaggtagatcagctttgtctgt

SEQ ID NO: 56923 - DNA, 25 bp, Artificial
  probe
  misc_feature (1)..(25): SEQ ID NO: 7201; WAN024AJS_at; Start 10; Stop 34
aaatcgtaaaaaggtagatcagctt

SEQ ID NO: 56924 - DNA, 25 bp, Artificial
  probe
  misc_feature (1)..(25): SEQ ID NO: 7201; WAN024AJS_at; Start 11; Stop 35
aatcgtaaaaaggtagatcagcttt

SEQ ID NO: 56925 - DNA, 25 bp, Artificial
  probe
  misc_feature (1)..(25): SEQ ID NO: 6278; WAN024AJT_at; Start 27; Stop 51
aaccctcatccgcaaagcagatgag

SEQ ID NO: 56926 - DNA, 25 bp, Artificial
  probe
  misc_feature (1)..(25): SEQ ID NO: 6278; WAN024AJT_at; Start 16; Stop 40
taaaataagaaaaccctcatccgca

SEQ ID NO: 56927 - DNA, 25 bp, Artificial
  probe
  misc_feature (1)..(25): SEQ ID NO: 6278; WAN024AJT_at; Start 11; Stop 35
tagcataaaataagaaaaccctcat

SEQ ID NO: 56928 - DNA, 25 bp, Artificial
  probe
  misc_feature (1)..(25): SEQ ID NO: 6278; WAN024AJT_at; Start 22; Stop 46
aagaaaaccctcatccgcaaagcag

SEQ ID NO: 56929 - DNA, 25 bp, Artificial
  probe
  misc_feature (1)..(25): SEQ ID NO: 6278; WAN024AJT_at; Start 26; Stop 50
aaaccctcatccgcaaagcagatga

SEQ ID NO: 56930 - DNA, 25 bp, Artificial
  probe
  misc_feature (1)..(25): SEQ ID NO: 6278; WAN024AJT_at; Start 36; Stop 60
ccgcaaagcagatgagagatttcaa

SEQ ID NO: 56931 - DNA, 25 bp, Artificial
  probe
  misc_feature (1)..(25): SEQ ID NO: 6278; WAN024AJT_at; Start 34; Stop 58
atccgcaaagcagatgagagatttc

SEQ ID NO: 56932 - DNA, 25 bp, Artificial
  probe
  misc_feature (1)..(25): SEQ ID NO: 6278; WAN024AJT_at; Start 21; Stop 45
taagaaaaccctcatccgcaaagca

SEQ ID NO: 56933 - DNA, 25 bp, Artificial
  probe
  misc_feature (1)..(25): SEQ ID NO: 6278; WAN024AJT_at; Start 35; Stop 59
tccgcaaagcagatgagagatttca

SEQ ID NO: 56934 - DNA, 25 bp, Artificial
  probe
  misc_feature (1)..(25): SEQ ID NO: 6278; WAN024AJT_at; Start 30; Stop 54
cctcatccgcaaagcagatgagaga

SEQ ID NO: 56935 - DNA, 25 bp, Artificial
  probe
  misc_feature (1)..(25): SEQ ID NO: 6278; WAN024AJT_at; Start 31; Stop 55
ctcatccgcaaagcagatgagagat

SEQ ID NO: 56936 - DNA, 25 bp, Artificial
  probe
  misc_feature (1)..(25): SEQ ID NO: 6278; WAN024AJT_at; Start 10; Stop 34
atagcataaaataagaaaaccctca

SEQ ID NO: 56937 - DNA, 25 bp, Artificial
  probe
  misc_feature (1)..(25): SEQ ID NO: 6278; WAN024AJT_at; Start 28; Stop 52
accctcatccgcaaagcagatgaga

SEQ ID NO: 56938 - DNA, 25 bp, Artificial
  probe
  misc_feature (1)..(25): SEQ ID NO: 6278; WAN024AJT_at; Start 23; Stop 47
agaaaaccctcatccgcaaagcaga

SEQ ID NO: 56939 - DNA, 25 bp, Artificial
  probe
  misc_feature (1)..(25): SEQ ID NO: 6278; WAN024AJT_at; Start 19; Stop 43
aataagaaaaccctcatccgcaaag

SEQ ID NO: 56940 - DNA, 25 bp, Artificial
  probe
  misc_feature (1)..(25): SEQ ID NO: 6278; WAN024AJT_at; Start 20; Stop 44
ataagaaaaccctcatccgcaaagc

SEQ ID NO: 56941 - DNA, 25 bp, Artificial
  probe
  misc_feature (1)..(25): SEQ ID NO: 6278; WAN024AJT_at; Start 24; Stop 48
gaaaaccctcatccgcaaagcagat

SEQ ID NO: 56942 - DNA, 25 bp, Artificial
  probe
  misc_feature (1)..(25): SEQ ID NO: 6278; WAN024AJT_at; Start 9; Stop 33
tatagcataaaataagaaaaccctc

SEQ ID NO: 56943 - DNA, 25 bp, Artificial
  probe
  misc_feature (1)..(25): SEQ ID NO: 6278; WAN024AJT_at; Start 12; Stop 36
agcataaaataagaaaaccctcatc

SEQ ID NO: 56944 - DNA, 25 bp, Artificial
  probe
  misc_feature (1)..(25): SEQ ID NO: 6278; WAN024AJT_at; Start 33; Stop 57
catccgcaaagcagatgagagattt

SEQ ID NO: 56945 - DNA, 25 bp, Artificial
  probe
  misc_feature (1)..(25): SEQ ID NO: 6278; WAN024AJT_at; Start 14; Stop 38
cataaaataagaaaaccctcatccg

SEQ ID NO: 56946 - DNA, 25 bp, Artificial
  probe
  misc_feature (1)..(25): SEQ ID NO: 6278; WAN024AJT_at; Start 32; Stop 56
tcatccgcaaagcagatgagagatt

SEQ ID NO: 56947 - DNA, 25 bp, Artificial
  probe
  misc_feature (1)..(25): SEQ ID NO: 6278; WAN024AJT_at; Start 29; Stop 53
ccctcatccgcaaagcagatgagag

SEQ ID NO: 56948 - DNA, 25 bp, Artificial
  probe
  misc_feature (1)..(25): SEQ ID NO: 6278; WAN024AJT_at; Start 25; Stop 49
aaaaccctcatccgcaaagcagatg

SEQ ID NO: 56949 - DNA, 25 bp, Artificial
  probe
  misc_feature (1)..(25): SEQ ID NO: 6278; WAN024AJT_at; Start 13; Stop 37
gcataaaataagaaaaccctcatcc

SEQ ID NO: 56950 - DNA, 25 bp, Artificial
  probe
  misc_feature (1)..(25): SEQ ID NO: 3316; WAN024AJU_at; Start 75; Stop 99
tttgcccaattacgcataaaactcc

SEQ ID NO: 56951 - DNA, 25 bp, Artificial
  probe
  misc_feature (1)..(25): SEQ ID NO: 3316; WAN024AJU_at; Start 78; Stop 102
gcccaattacgcataaaactcccag

SEQ ID NO: 56952 - DNA, 25 bp, Artificial
  probe
  misc_feature (1)..(25): SEQ ID NO: 3316; WAN024AJU_at; Start 79; Stop 103
cccaattacgcataaaactcccaga

SEQ ID NO: 56953 - DNA, 25 bp, Artificial
  probe
  misc_feature (1)..(25): SEQ ID NO: 3316; WAN024AJU_at; Start 47; Stop 71
tttttagcaagatagacaacctaga

SEQ ID NO: 56954 - DNA, 25 bp, Artificial
  probe
  misc_feature (1)..(25): SEQ ID NO: 3316; WAN024AJU_at; Start 7; Stop 31
tacctctgttgtcactcttctatca

SEQ ID NO: 56955 - DNA, 25 bp, Artificial
  probe
  misc_feature (1)..(25): SEQ ID NO: 3316; WAN024AJU_at; Start 85; Stop 109
tacgcataaaactcccagaattgac

SEQ ID NO: 56956 - DNA, 25 bp, Artificial
  probe
  misc_feature (1)..(25): SEQ ID NO: 3316; WAN024AJU_at; Start 60; Stop 84
agacaacctagaaagtttgcccaat

SEQ ID NO: 56957 - DNA, 25 bp, Artificial
  probe
  misc_feature (1)..(25): SEQ ID NO: 3316; WAN024AJU_at; Start 89; Stop 113
cataaaactcccagaattgactggg

SEQ ID NO: 56958 - DNA, 25 bp, Artificial
  probe
  misc_feature (1)..(25): SEQ ID NO: 3316; WAN024AJU_at; Start 46; Stop 70
gtttttagcaagatagacaacctag

SEQ ID NO: 56959 - DNA, 25 bp, Artificial
  probe
  misc_feature (1)..(25): SEQ ID NO: 3316; WAN024AJU_at; Start 74; Stop 98
gtttgcccaattacgcataaaactc

SEQ ID NO: 56960 - DNA, 25 bp, Artificial
  probe
  misc_feature (1)..(25): SEQ ID NO: 3316; WAN024AJU_at; Start 84; Stop 108
ttacgcataaaactcccagaattga

SEQ ID NO: 56961 - DNA, 25 bp, Artificial
  probe
  misc_feature (1)..(25): SEQ ID NO: 3316; WAN024AJU_at; Start 45; Stop 69
tgtttttagcaagatagacaaccta

SEQ ID NO: 56962 - DNA, 25 bp, Artificial
  probe
  misc_feature (1)..(25): SEQ ID NO: 3316; WAN024AJU_at; Start 88; Stop 112
gcataaaactcccagaattgactgg

SEQ ID NO: 56963 - DNA, 25 bp, Artificial
  probe
  misc_feature (1)..(25): SEQ ID NO: 3316; WAN024AJU_at; Start 4; Stop 28
tgttacctctgttgtcactcttcta

SEQ ID NO: 56964 - DNA, 25 bp, Artificial
  probe
  misc_feature (1)..(25): SEQ ID NO: 3316; WAN024AJU_at; Start 22; Stop 46
tcttctatcataccgttttttcttg

SEQ ID NO: 56965 - DNA, 25 bp, Artificial
  probe
  misc_feature (1)..(25): SEQ ID NO: 3316; WAN024AJU_at; Start 55; Stop 79
aagatagacaacctagaaagtttgc

SEQ ID NO: 56966 - DNA, 25 bp, Artificial
  probe
  misc_feature (1)..(25): SEQ ID NO: 3316; WAN024AJU_at; Start 81; Stop 105
caattacgcataaaactcccagaat

SEQ ID NO: 56967 - DNA, 25 bp, Artificial
  probe
  misc_feature (1)..(25): SEQ ID NO: 3316; WAN024AJU_at; Start 50; Stop 74
ttagcaagatagacaacctagaaag

SEQ ID NO: 56968 - DNA, 25 bp, Artificial
  probe
  misc_feature (1)..(25): SEQ ID NO: 3316; WAN024AJU_at; Start 5; Stop 29
gttacctctgttgtcactcttctat

SEQ ID NO: 56969 - DNA, 25 bp, Artificial
  probe
  misc_feature (1)..(25): SEQ ID NO: 3316; WAN024AJU_at; Start 57; Stop 81
gatagacaacctagaaagtttgccc

SEQ ID NO: 56970 - DNA, 25 bp, Artificial
  probe
  misc_feature (1)..(25): SEQ ID NO: 3316; WAN024AJU_at; Start 70; Stop 94
gaaagtttgcccaattacgcataaa

SEQ ID NO: 56971 - DNA, 25 bp, Artificial
  probe
  misc_feature (1)..(25): SEQ ID NO: 3316; WAN024AJU_at; Start 51; Stop 75
tagcaagatagacaacctagaaagt

SEQ ID NO: 56972 - DNA, 25 bp, Artificial
  probe
  misc_feature (1)..(25): SEQ ID NO: 3316; WAN024AJU_at; Start 43; Stop 67
cttgtttttagcaagatagacaacc

SEQ ID NO: 56973 - DNA, 25 bp, Artificial
  probe
  misc_feature (1)..(25): SEQ ID NO: 3316; WAN024AJU_at; Start 86; Stop 110
acgcataaaactcccagaattgact

SEQ ID NO: 56974 - DNA, 25 bp, Artificial
  probe
  misc_feature (1)..(25): SEQ ID NO: 3316; WAN024AJU_at; Start 17; Stop 41
gtcactcttctatcataccgttttt

SEQ ID NO: 56975 - DNA, 25 bp, Artificial
  probe
  misc_feature (1)..(25): SEQ ID NO: 3316; WAN024AJU_at; Start 66; Stop 90
cctagaaagtttgcccaattacgca

SEQ ID NO: 56976 - DNA, 25 bp, Artificial
  probe
  misc_feature (1)..(25): SEQ ID NO: 3316; WAN024AJU_at; Start 53; Stop 77
gcaagatagacaacctagaaagttt

SEQ ID NO: 56977 - DNA, 25 bp, Artificial
  probe
  misc_feature (1)..(25): SEQ ID NO: 3316; WAN024AJU_at; Start 91; Stop 115
taaaactcccagaattgactgggag

SEQ ID NO: 56978 - DNA, 25 bp, Artificial
  probe
  misc_feature (1)..(25): SEQ ID NO: 3316; WAN024AJU_at; Start 14; Stop 38
gttgtcactcttctatcataccgtt

SEQ ID NO: 56979 - DNA, 25 bp, Artificial
  probe
  misc_feature (1)..(25): SEQ ID NO: 3316; WAN024AJU_at; Start 2; Stop 26
tctgttacctctgttgtcactcttc

SEQ ID NO: 56980 - DNA, 25 bp, Artificial
  probe
  misc_feature (1)..(25): SEQ ID NO: 3316; WAN024AJU_at; Start 13; Stop 37
tgttgtcactcttctatcataccgt

SEQ ID NO: 56981 - DNA, 25 bp, Artificial
  probe
  misc_feature (1)..(25): SEQ ID NO: 3316; WAN024AJU_at; Start 59; Stop 83
tagacaacctagaaagtttgcccaa

SEQ ID NO: 56982 - DNA, 25 bp, Artificial
  probe
  misc_feature (1)..(25): SEQ ID NO: 3316; WAN024AJU_at; Start 48; Stop 72
ttttagcaagatagacaacctagaa

SEQ ID NO: 56983 - DNA, 25 bp, Artificial
  probe
  misc_feature (1)..(25): SEQ ID NO: 3316; WAN024AJU_at; Start 9; Stop 33
cctctgttgtcactcttctatcata

SEQ ID NO: 56984 - DNA, 25 bp, Artificial
  probe
  misc_feature (1)..(25): SEQ ID NO: 3307; WAN024AJV_at; Start 76; Stop 100
aaaacggtatgatagaagagtgaca

SEQ ID NO: 56985 - DNA, 25 bp, Artificial
  probe
  misc_feature (1)..(25): SEQ ID NO: 3307; WAN024AJV_at; Start 70; Stop 94
caagaaaaaacggtatgatagaaga

SEQ ID NO: 56986 - DNA, 25 bp, Artificial
  probe
  misc_feature (1)..(25): SEQ ID NO: 3307; WAN024AJV_at; Start 15; Stop 39
tgggagttttatgcgtaattgggca

SEQ ID NO: 56987 - DNA, 25 bp, Artificial
  probe
  misc_feature (1)..(25): SEQ ID NO: 3307; WAN024AJV_at; Start 22; Stop 46
tttatgcgtaattgggcaaactttc

SEQ ID NO: 56988 - DNA, 25 bp, Artificial
  probe
  misc_feature (1)..(25): SEQ ID NO: 3307; WAN024AJV_at; Start 79; Stop 103
acggtatgatagaagagtgacaaca

SEQ ID NO: 56989 - DNA, 25 bp, Artificial
  probe
  misc_feature (1)..(25): SEQ ID NO: 3307; WAN024AJV_at; Start 34; Stop 58
tgggcaaactttctaggttgtctat

SEQ ID NO: 56990 - DNA, 25 bp, Artificial
  probe
  misc_feature (1)..(25): SEQ ID NO: 3307; WAN024AJV_at; Start 85; Stop 109
tgatagaagagtgacaacagaggta

SEQ ID NO: 56991 - DNA, 25 bp, Artificial
  probe
  misc_feature (1)..(25): SEQ ID NO: 3307; WAN024AJV_at; Start 4; Stop 28
ccagtcaattctgggagttttatgc

SEQ ID NO: 56992 - DNA, 25 bp, Artificial
  probe
  misc_feature (1)..(25): SEQ ID NO: 3307; WAN024AJV_at; Start 13; Stop 37
tctgggagttttatgcgtaattggg

SEQ ID NO: 56993 - DNA, 25 bp, Artificial
  probe
  misc_feature (1)..(25): SEQ ID NO: 3307; WAN024AJV_at; Start 54; Stop 78
tctatcttgctaaaaacaagaaaaa

SEQ ID NO: 56994 - DNA, 25 bp, Artificial
  probe
  misc_feature (1)..(25): SEQ ID NO: 3307; WAN024AJV_at; Start 7; Stop 31
gtcaattctgggagttttatgcgta

SEQ ID NO: 56995 - DNA, 25 bp, Artificial
  probe
  misc_feature (1)..(25): SEQ ID NO: 3307; WAN024AJV_at; Start 52; Stop 76
tgtctatcttgctaaaaacaagaaa

SEQ ID NO: 56996 - DNA, 25 bp, Artificial
  probe
  misc_feature (1)..(25): SEQ ID NO: 3307; WAN024AJV_at; Start 33; Stop 57
ttgggcaaactttctaggttgtcta

SEQ ID NO: 56997 - DNA, 25 bp, Artificial
  probe
  misc_feature (1)..(25): SEQ ID NO: 3307; WAN024AJV_at; Start 36; Stop 60
ggcaaactttctaggttgtctatct

SEQ ID NO: 56998 - DNA, 25 bp, Artificial
  probe
  misc_feature (1)..(25): SEQ ID NO: 3307; WAN024AJV_at; Start 14; Stop 38
ctgggagttttatgcgtaattgggc

SEQ ID NO: 56999 - DNA, 25 bp, Artificial
  probe
  misc_feature (1)..(25): SEQ ID NO: 3307; WAN024AJV_at; Start 23; Stop 47
ttatgcgtaattgggcaaactttct

SEQ ID NO: 57000 - DNA, 25 bp, Artificial
  probe
  misc_feature (1)..(25): SEQ ID NO: 3307; WAN024AJV_at; Start 83; Stop 107
tatgatagaagagtgacaacagagg

SEQ ID NO: 57001 - DNA, 25 bp, Artificial
  probe
  misc_feature (1)..(25): SEQ ID NO: 3307; WAN024AJV_at; Start 75; Stop 99
aaaaacggtatgatagaagagtgac

SEQ ID NO: 57002 - DNA, 25 bp, Artificial
  probe
  misc_feature (1)..(25): SEQ ID NO: 3307; WAN024AJV_at; Start 73; Stop 97
gaaaaaacggtatgatagaagagtg

SEQ ID NO: 57003 - DNA, 25 bp, Artificial
  probe
  misc_feature (1)..(25): SEQ ID NO: 3307; WAN024AJV_at; Start 32; Stop 56
attgggcaaactttctaggttgtct

SEQ ID NO: 57004 - DNA, 25 bp, Artificial
  probe
  misc_feature (1)..(25): SEQ ID NO: 3307; WAN024AJV_at; Start 80; Stop 104
cggtatgatagaagagtgacaacag

SEQ ID NO: 57005 - DNA, 25 bp, Artificial
  probe
  misc_feature (1)..(25): SEQ ID NO: 3307; WAN024AJV_at; Start 78; Stop 102
aacggtatgatagaagagtgacaac

SEQ ID NO: 57006 - DNA, 25 bp, Artificial
  probe
  misc_feature (1)..(25): SEQ ID NO: 3307; WAN024AJV_at; Start 77; Stop 101
aaacggtatgatagaagagtgacaa

SEQ ID NO: 57007 - DNA, 25 bp, Artificial
  probe
  misc_feature (1)..(25): SEQ ID NO: 3307; WAN024AJV_at; Start 37; Stop 61
gcaaactttctaggttgtctatctt

SEQ ID NO: 57008 - DNA, 25 bp, Artificial
  probe
  misc_feature (1)..(25): SEQ ID NO: 3307; WAN024AJV_at; Start 17; Stop 41
ggagttttatgcgtaattgggcaaa

SEQ ID NO: 57009 - DNA, 25 bp, Artificial
  probe
  misc_feature (1)..(25): SEQ ID NO: 3307; WAN024AJV_at; Start 8; Stop 32
tcaattctgggagttttatgcgtaa

SEQ ID NO: 57010 - DNA, 25 bp, Artificial
  probe
  misc_feature (1)..(25): SEQ ID NO: 3307; WAN024AJV_at; Start 6; Stop 30
agtcaattctgggagttttatgcgt

SEQ ID NO: 57011 - DNA, 25 bp, Artificial
  probe
  misc_feature (1)..(25): SEQ ID NO: 3307; WAN024AJV_at; Start 18; Stop 42
gagttttatgcgtaattgggcaaac

SEQ ID NO: 57012 - DNA, 25 bp, Artificial
  probe
  misc_feature (1)..(25): SEQ ID NO: 3307; WAN024AJV_at; Start 39; Stop 63
aaactttctaggttgtctatcttgc

SEQ ID NO: 57013 - DNA, 25 bp, Artificial
  probe
  misc_feature (1)..(25): SEQ ID NO: 3307; WAN024AJV_at; Start 41; Stop 65
actttctaggttgtctatcttgcta

SEQ ID NO: 57014 - DNA, 25 bp, Artificial
  probe
  misc_feature (1)..(25): SEQ ID NO: 3307; WAN024AJV_at; Start 9; Stop 33
caattctgggagttttatgcgtaat

SEQ ID NO: 57015 - DNA, 25 bp, Artificial
  probe
  misc_feature (1)..(25): SEQ ID NO: 3307; WAN024AJV_at; Start 35; Stop 59
gggcaaactttctaggttgtctatc

SEQ ID NO: 57016 - DNA, 25 bp, Artificial
  probe
  misc_feature (1)..(25): SEQ ID NO: 3307; WAN024AJV_at; Start 81; Stop 105
ggtatgatagaagagtgacaacaga

SEQ ID NO: 57017 - DNA, 25 bp, Artificial
  probe
  misc_feature (1)..(25): SEQ ID NO: 3307; WAN024AJV_at; Start 82; Stop 106
gtatgatagaagagtgacaacagag

SEQ ID NO: 57018 - DNA, 25 bp, Artificial
  probe
  misc_feature (1)..(25): SEQ ID NO: 137; WAN024AJW_at; Start 90; Stop 114
taatcagatgatttagaaatcttgg

SEQ ID NO: 57019 - DNA, 25 bp, Artificial
  probe
  misc_feature (1)..(25): SEQ ID NO: 137; WAN024AJW_at; Start 98; Stop 122
tgatttagaaatcttggacaaaaac

SEQ ID NO: 57020 - DNA, 25 bp, Artificial
  probe
  misc_feature (1)..(25): SEQ ID NO: 137; WAN024AJW_at; Start 1; Stop 25
aaagttcctcctatcattttattga

SEQ ID NO: 57021 - DNA, 25 bp, Artificial
  probe
  misc_feature (1)..(25): SEQ ID NO: 137; WAN024AJW_at; Start 125; Stop 149
tacaaaaaactgtcaaagcacaaaa

SEQ ID NO: 57022 - DNA, 25 bp, Artificial
  probe
  misc_feature (1)..(25): SEQ ID NO: 137; WAN024AJW_at; Start 24; Stop 48
gatagatttattatactccttccat

SEQ ID NO: 57023 - DNA, 25 bp, Artificial
  probe
  misc_feature (1)..(25): SEQ ID NO: 137; WAN024AJW_at; Start 46; Stop 70
cattttcgaaaaaacagggacaatg

SEQ ID NO: 57024 - DNA, 25 bp, Artificial
  probe
  misc_feature (1)..(25): SEQ ID NO: 137; WAN024AJW_at; Start 150; Stop 174
gcgcatagtatcaagattctataaa

SEQ ID NO: 57025 - DNA, 25 bp, Artificial
  probe
  misc_feature (1)..(25): SEQ ID NO: 137; WAN024AJW_at; Start 186; Stop 210
atgcgcttttgtaatggataaatag

SEQ ID NO: 57026 - DNA, 25 bp, Artificial
  probe
  misc_feature (1)..(25): SEQ ID NO: 137; WAN024AJW_at; Start 183; Stop 207
actatgcgcttttgtaatggataaa

SEQ ID NO: 57027 - DNA, 25 bp, Artificial
  probe
  misc_feature (1)..(25): SEQ ID NO: 137; WAN024AJW_at; Start 32; Stop 56
tattatactccttccattttcgaaa

SEQ ID NO: 57028 - DNA, 25 bp, Artificial
  probe
  misc_feature (1)..(25): SEQ ID NO: 137; WAN024AJW_at; Start 75; Stop 99
gggaaaataggaatttaatcagatg

SEQ ID NO: 57029 - DNA, 25 bp, Artificial
  probe
  misc_feature (1)..(25): SEQ ID NO: 137; WAN024AJW_at; Start 50; Stop 74
ttcgaaaaaacagggacaatgatag

SEQ ID NO: 57030 - DNA, 25 bp, Artificial
  probe
  misc_feature (1)..(25): SEQ ID NO: 137; WAN024AJW_at; Start 129; Stop 153
aaaaactgtcaaagcacaaaagcgc

SEQ ID NO: 57031 - DNA, 25 bp, Artificial
  probe
  misc_feature (1)..(25): SEQ ID NO: 137; WAN024AJW_at; Start 94; Stop 118
cagatgatttagaaatcttggacaa

SEQ ID NO: 57032 - DNA, 25 bp, Artificial
  probe
  misc_feature (1)..(25): SEQ ID NO: 137; WAN024AJW_at; Start 133; Stop 157
actgtcaaagcacaaaagcgcatag

SEQ ID NO: 57033 - DNA, 25 bp, Artificial
  probe
  misc_feature (1)..(25): SEQ ID NO: 137; WAN024AJW_at; Start 134; Stop 158
ctgtcaaagcacaaaagcgcatagt

SEQ ID NO: 57034 - DNA, 25 bp, Artificial
  probe
  misc_feature (1)..(25): SEQ ID NO: 137; WAN024AJW_at; Start 157; Stop 181
gtatcaagattctataaagccttga

SEQ ID NO: 57035 - DNA, 25 bp, Artificial
  probe
  misc_feature (1)..(25): SEQ ID NO: 137; WAN024AJW_at; Start 130; Stop 154
aaaactgtcaaagcacaaaagcgca

SEQ ID NO: 57036 - DNA, 25 bp, Artificial
  probe
  misc_feature (1)..(25): SEQ ID NO: 137; WAN024AJW_at; Start 132; Stop 156
aactgtcaaagcacaaaagcgcata

SEQ ID NO: 57037 - DNA, 25 bp, Artificial
  probe
  misc_feature (1)..(25): SEQ ID NO: 137; WAN024AJW_at; Start 155; Stop 179
tagtatcaagattctataaagcctt

SEQ ID NO: 57038 - DNA, 25 bp, Artificial
  probe
  misc_feature (1)..(25): SEQ ID NO: 137; WAN024AJW_at; Start 161; Stop 185
caagattctataaagccttgatact

SEQ ID NO: 57039 - DNA, 25 bp, Artificial
  probe
  misc_feature (1)..(25): SEQ ID NO: 137; WAN024AJW_at; Start 52; Stop 76
cgaaaaaacagggacaatgataggg

SEQ ID NO: 57040 - DNA, 25 bp, Artificial
  probe
  misc_feature (1)..(25): SEQ ID NO: 137; WAN024AJW_at; Start 60; Stop 84
cagggacaatgataggggaaaatag

SEQ ID NO: 57041 - DNA, 25 bp, Artificial
  probe
  misc_feature (1)..(25): SEQ ID NO: 137; WAN024AJW_at; Start 153; Stop 177
catagtatcaagattctataaagcc

SEQ ID NO: 57042 - DNA, 25 bp, Artificial
  probe
  misc_feature (1)..(25): SEQ ID NO: 137; WAN024AJW_at; Start 121; Stop 145
actatacaaaaaactgtcaaagcac

SEQ ID NO: 57043 - DNA, 25 bp, Artificial
  probe
  misc_feature (1)..(25): SEQ ID NO: 137; WAN024AJW_at; Start 49; Stop 73
tttcgaaaaaacagggacaatgata

SEQ ID NO: 57044 - DNA, 25 bp, Artificial
  probe
  misc_feature (1)..(25): SEQ ID NO: 137; WAN024AJW_at; Start 185; Stop 209
tatgcgcttttgtaatggataaata

SEQ ID NO: 57045 - DNA, 25 bp, Artificial
  probe
  misc_feature (1)..(25): SEQ ID NO: 137; WAN024AJW_at; Start 123; Stop 147
tatacaaaaaactgtcaaagcacaa

SEQ ID NO: 57046 - DNA, 25 bp, Artificial
  probe
  misc_feature (1)..(25): SEQ ID NO: 137; WAN024AJW_at; Start 127; Stop 151
caaaaaactgtcaaagcacaaaagc

SEQ ID NO: 57047 - DNA, 25 bp, Artificial
  probe
  misc_feature (1)..(25): SEQ ID NO: 137; WAN024AJW_at; Start 103; Stop 127
tagaaatcttggacaaaaactatac

SEQ ID NO: 57048 - DNA, 25 bp, Artificial
  probe
  misc_feature (1)..(25): SEQ ID NO: 137; WAN024AJW_at; Start 131; Stop 155
aaactgtcaaagcacaaaagcgcat

SEQ ID NO: 57049 - DNA, 25 bp, Artificial
  probe
  misc_feature (1)..(25): SEQ ID NO: 137; WAN024AJW_at; Start 167; Stop 191
tctataaagccttgatactatgcgc

SEQ ID NO: 57050 - DNA, 25 bp, Artificial
  probe
  misc_feature (1)..(25): SEQ ID NO: 137; WAN024AJW_at; Start 4; Stop 28
gttcctcctatcattttattgatag

SEQ ID NO: 57051 - DNA, 25 bp, Artificial
  probe
  misc_feature (1)..(25): SEQ ID NO: 137; WAN024AJW_at; Start 105; Stop 129
gaaatcttggacaaaaactatacaa

SEQ ID NO: 57052 - DNA, 25 bp, Artificial
  probe
  misc_feature (1)..(25): SEQ ID NO: 3296; WAN024AJX_at; Start 184; Stop 208
tatcaataaaatgataggaggaact

SEQ ID NO: 57053 - DNA, 25 bp, Artificial
  probe
  misc_feature (1)..(25): SEQ ID NO: 3296; WAN024AJX_at; Start 186; Stop 210
tcaataaaatgataggaggaacttt

SEQ ID NO: 57054 - DNA, 25 bp, Artificial
  probe
  misc_feature (1)..(25): SEQ ID NO: 3296; WAN024AJX_at; Start 141; Stop 165
cattgtccctgttttttcgaaaatg

SEQ ID NO: 57055 - DNA, 25 bp, Artificial
  probe
  misc_feature (1)..(25): SEQ ID NO: 3296; WAN024AJX_at; Start 157; Stop 181
tcgaaaatggaaggagtataataaa

SEQ ID NO: 57056 - DNA, 25 bp, Artificial
  probe
  misc_feature (1)..(25): SEQ ID NO: 3296; WAN024AJX_at; Start 53; Stop 77
actatgcgcttttgtgctttgacag

SEQ ID NO: 57057 - DNA, 25 bp, Artificial
  probe
  misc_feature (1)..(25): SEQ ID NO: 3296; WAN024AJX_at; Start 57; Stop 81
tgcgcttttgtgctttgacagtttt

SEQ ID NO: 57058 - DNA, 25 bp, Artificial
  probe
  misc_feature (1)..(25): SEQ ID NO: 3296; WAN024AJX_at; Start 65; Stop 89
tgtgctttgacagttttttgtatag

SEQ ID NO: 57059 - DNA, 25 bp, Artificial
  probe
  misc_feature (1)..(25): SEQ ID NO: 3296; WAN024AJX_at; Start 20; Stop 44
gcgcatagtatcaaggctttataga

SEQ ID NO: 57060 - DNA, 25 bp, Artificial
  probe
  misc_feature (1)..(25): SEQ ID NO: 3296; WAN024AJX_at; Start 135; Stop 159
ccctatcattgtccctgttttttcg

SEQ ID NO: 57061 - DNA, 25 bp, Artificial
  probe
  misc_feature (1)..(25): SEQ ID NO: 3296; WAN024AJX_at; Start 2; Stop 26
tatttatccattacaaaagcgcata

SEQ ID NO: 57062 - DNA, 25 bp, Artificial
  probe
  misc_feature (1)..(25): SEQ ID NO: 3296; WAN024AJX_at; Start 1; Stop 25
ctatttatccattacaaaagcgcat

SEQ ID NO: 57063 - DNA, 25 bp, Artificial
  probe
  misc_feature (1)..(25): SEQ ID NO: 3296; WAN024AJX_at; Start 138; Stop 162
tatcattgtccctgttttttcgaaa

SEQ ID NO: 57064 - DNA, 25 bp, Artificial
  probe
  misc_feature (1)..(25): SEQ ID NO: 3296; WAN024AJX_at; Start 159; Stop 183
gaaaatggaaggagtataataaatc

SEQ ID NO: 57065 - DNA, 25 bp, Artificial
  probe
  misc_feature (1)..(25): SEQ ID NO: 3296; WAN024AJX_at; Start 54; Stop 78
ctatgcgcttttgtgctttgacagt

SEQ ID NO: 57066 - DNA, 25 bp, Artificial
  probe
  misc_feature (1)..(25): SEQ ID NO: 3296; WAN024AJX_at; Start 27; Stop 51
gtatcaaggctttatagaatcttga

SEQ ID NO: 57067 - DNA, 25 bp, Artificial
  probe
  misc_feature (1)..(25): SEQ ID NO: 3296; WAN024AJX_at; Start 128; Stop 152
tattttcccctatcattgtccctgt

SEQ ID NO: 57068 - DNA, 25 bp, Artificial
  probe
  misc_feature (1)..(25): SEQ ID NO: 3296; WAN024AJX_at; Start 31; Stop 55
caaggctttatagaatcttgatact

SEQ ID NO: 57069 - DNA, 25 bp, Artificial
  probe
  misc_feature (1)..(25): SEQ ID NO: 3296; WAN024AJX_at; Start 25; Stop 49
tagtatcaaggctttatagaatctt

SEQ ID NO: 57070 - DNA, 25 bp, Artificial
  probe
  misc_feature (1)..(25): SEQ ID NO: 3296; WAN024AJX_at; Start 37; Stop 61
tttatagaatcttgatactatgcgc

SEQ ID NO: 57071 - DNA, 25 bp, Artificial
  probe
  misc_feature (1)..(25): SEQ ID NO: 3296; WAN024AJX_at; Start 84; Stop 108
gtatagtttttgtccaagatttcta

SEQ ID NO: 57072 - DNA, 25 bp, Artificial
  probe
  misc_feature (1)..(25): SEQ ID NO: 3296; WAN024AJX_at; Start 155; Stop 179
tttcgaaaatggaaggagtataata

SEQ ID NO: 57073 - DNA, 25 bp, Artificial
  probe
  misc_feature (1)..(25): SEQ ID NO: 3296; WAN024AJX_at; Start 21; Stop 45
cgcatagtatcaaggctttatagaa

SEQ ID NO: 57074 - DNA, 25 bp, Artificial
  probe
  misc_feature (1)..(25): SEQ ID NO: 3296; WAN024AJX_at; Start 165; Stop 189
ggaaggagtataataaatctatcaa

SEQ ID NO: 57075 - DNA, 25 bp, Artificial
  probe
  misc_feature (1)..(25): SEQ ID NO: 3296; WAN024AJX_at; Start 97; Stop 121
ccaagatttctaaatcatctgatta

SEQ ID NO: 57076 - DNA, 25 bp, Artificial
  probe
  misc_feature (1)..(25): SEQ ID NO: 3296; WAN024AJX_at; Start 112; Stop 136
catctgattaaattcctattttccc

SEQ ID NO: 57077 - DNA, 25 bp, Artificial
  probe
  misc_feature (1)..(25): SEQ ID NO: 3296; WAN024AJX_at; Start 169; Stop 193
ggagtataataaatctatcaataaa

SEQ ID NO: 57078 - DNA, 25 bp, Artificial
  probe
  misc_feature (1)..(25): SEQ ID NO: 3296; WAN024AJX_at; Start 89; Stop 113
gtttttgtccaagatttctaaatca

SEQ ID NO: 57079 - DNA, 25 bp, Artificial
  probe
  misc_feature (1)..(25): SEQ ID NO: 3296; WAN024AJX_at; Start 60; Stop 84
gcttttgtgctttgacagttttttg

SEQ ID NO: 57080 - DNA, 25 bp, Artificial
  probe
  misc_feature (1)..(25): SEQ ID NO: 3296; WAN024AJX_at; Start 94; Stop 118
tgtccaagatttctaaatcatctga

SEQ ID NO: 57081 - DNA, 25 bp, Artificial
  probe
  misc_feature (1)..(25): SEQ ID NO: 3296; WAN024AJX_at; Start 4; Stop 28
tttatccattacaaaagcgcatagt

SEQ ID NO: 57082 - DNA, 25 bp, Artificial
  probe
  misc_feature (1)..(25): SEQ ID NO: 3296; WAN024AJX_at; Start 55; Stop 79
tatgcgcttttgtgctttgacagtt

SEQ ID NO: 57083 - DNA, 25 bp, Artificial
  probe
  misc_feature (1)..(25): SEQ ID NO: 3296; WAN024AJX_at; Start 127; Stop 151
ctattttcccctatcattgtccctg

SEQ ID NO: 57084 - DNA, 25 bp, Artificial
  probe
  misc_feature (1)..(25): SEQ ID NO: 3296; WAN024AJX_at; Start 22; Stop 46
gcatagtatcaaggctttatagaat

SEQ ID NO: 57085 - DNA, 25 bp, Artificial
  probe
  misc_feature (1)..(25): SEQ ID NO: 3296; WAN024AJX_at; Start 121; Stop 145
aaattcctattttcccctatcattg

SEQ ID NO: 57086 - DNA, 25 bp, Artificial
  probe
  misc_feature (1)..(25): SEQ ID NO: 7367; WAN024AJY_at; Start 188; Stop 212
agaactattttgtcctagactcttt

SEQ ID NO: 57087 - DNA, 25 bp, Artificial
  probe
  misc_feature (1)..(25): SEQ ID NO: 7367; WAN024AJY_at; Start 190; Stop 214
aactattttgtcctagactcttttg

SEQ ID NO: 57088 - DNA, 25 bp, Artificial
  probe
  misc_feature (1)..(25): SEQ ID NO: 7367; WAN024AJY_at; Start 233; Stop 257
aatcattctctaattaaagtaggaa

SEQ ID NO: 57089 - DNA, 25 bp, Artificial
  probe
  misc_feature (1)..(25): SEQ ID NO: 7367; WAN024AJY_at; Start 250; Stop 274
agtaggaagaatacactaatttagt

SEQ ID NO: 57090 - DNA, 25 bp, Artificial
  probe
  misc_feature (1)..(25): SEQ ID NO: 7367; WAN024AJY_at; Start 236; Stop 260
cattctctaattaaagtaggaagaa

SEQ ID NO: 57091 - DNA, 25 bp, Artificial
  probe
  misc_feature (1)..(25): SEQ ID NO: 7367; WAN024AJY_at; Start 239; Stop 263
tctctaattaaagtaggaagaatac

SEQ ID NO: 57092 - DNA, 25 bp, Artificial
  probe
  misc_feature (1)..(25): SEQ ID NO: 7367; WAN024AJY_at; Start 186; Stop 210
tgagaactattttgtcctagactct

SEQ ID NO: 57093 - DNA, 25 bp, Artificial
  probe
  misc_feature (1)..(25): SEQ ID NO: 7367; WAN024AJY_at; Start 241; Stop 265
tctaattaaagtaggaagaatacac

SEQ ID NO: 57094 - DNA, 25 bp, Artificial
  probe
  misc_feature (1)..(25): SEQ ID NO: 7367; WAN024AJY_at; Start 231; Stop 255
taaatcattctctaattaaagtagg

SEQ ID NO: 57095 - DNA, 25 bp, Artificial
  probe
  misc_feature (1)..(25): SEQ ID NO: 7367; WAN024AJY_at; Start 249; Stop 273
aagtaggaagaatacactaatttag

SEQ ID NO: 57096 - DNA, 25 bp, Artificial
  probe
  misc_feature (1)..(25): SEQ ID NO: 7367; WAN024AJY_at; Start 240; Stop 264
ctctaattaaagtaggaagaataca

SEQ ID NO: 57097 - DNA, 25 bp, Artificial
  probe
  misc_feature (1)..(25): SEQ ID NO: 7367; WAN024AJY_at; Start 128; Stop 152
cgactcaaaattaaaaagctagagt

SEQ ID NO: 57098 - DNA, 25 bp, Artificial
  probe
  misc_feature (1)..(25): SEQ ID NO: 7367; WAN024AJY_at; Start 203; Stop 227
tagactcttttgatttttaaagaga

SEQ ID NO: 57099 - DNA, 25 bp, Artificial
  probe
  misc_feature (1)..(25): SEQ ID NO: 7367; WAN024AJY_at; Start 187; Stop 211
gagaactattttgtcctagactctt

SEQ ID NO: 57100 - DNA, 25 bp, Artificial
  probe
  misc_feature (1)..(25): SEQ ID NO: 7367; WAN024AJY_at; Start 218; Stop 242
tttaaagagaacttaaatcattctc

SEQ ID NO: 57101 - DNA, 25 bp, Artificial
  probe
  misc_feature (1)..(25): SEQ ID NO: 7367; WAN024AJY_at; Start 251; Stop 275
gtaggaagaatacactaatttagta

SEQ ID NO: 57102 - DNA, 25 bp, Artificial
  probe
  misc_feature (1)..(25): SEQ ID NO: 7367; WAN024AJY_at; Start 54; Stop 78
atctgaggggcaagtgagaattgac

SEQ ID NO: 57103 - DNA, 25 bp, Artificial
  probe
  misc_feature (1)..(25): SEQ ID NO: 7367; WAN024AJY_at; Start 242; Stop 266
ctaattaaagtaggaagaatacact

SEQ ID NO: 57104 - DNA, 25 bp, Artificial
  probe
  misc_feature (1)..(25): SEQ ID NO: 7367; WAN024AJY_at; Start 163; Stop 187
gaaatctttagcttttttgtgattg

SEQ ID NO: 57105 - DNA, 25 bp, Artificial
  probe
  misc_feature (1)..(25): SEQ ID NO: 7367; WAN024AJY_at; Start 164; Stop 188
aaatctttagcttttttgtgattga

SEQ ID NO: 57106 - DNA, 25 bp, Artificial
  probe
  misc_feature (1)..(25): SEQ ID NO: 7367; WAN024AJY_at; Start 192; Stop 216
ctattttgtcctagactcttttgat

SEQ ID NO: 57107 - DNA, 25 bp, Artificial
  probe
  misc_feature (1)..(25): SEQ ID NO: 7367; WAN024AJY_at; Start 245; Stop 269
attaaagtaggaagaatacactaat

SEQ ID NO: 57108 - DNA, 25 bp, Artificial
  probe
  misc_feature (1)..(25): SEQ ID NO: 7367; WAN024AJY_at; Start 127; Stop 151
acgactcaaaattaaaaagctagag

SEQ ID NO: 57109 - DNA, 25 bp, Artificial
  probe
  misc_feature (1)..(25): SEQ ID NO: 7367; WAN024AJY_at; Start 235; Stop 259
tcattctctaattaaagtaggaaga

SEQ ID NO: 57110 - DNA, 25 bp, Artificial
  probe
  misc_feature (1)..(25): SEQ ID NO: 7367; WAN024AJY_at; Start 193; Stop 217
tattttgtcctagactcttttgatt

SEQ ID NO: 57111 - DNA, 25 bp, Artificial
  probe
  misc_feature (1)..(25): SEQ ID NO: 7367; WAN024AJY_at; Start 191; Stop 215
actattttgtcctagactcttttga

SEQ ID NO: 57112 - DNA, 25 bp, Artificial
  probe
  misc_feature (1)..(25): SEQ ID NO: 7367; WAN024AJY_at; Start 252; Stop 276
taggaagaatacactaatttagtaa

SEQ ID NO: 57113 - DNA, 25 bp, Artificial
  probe
  misc_feature (1)..(25): SEQ ID NO: 7367; WAN024AJY_at; Start 202; Stop 226
ctagactcttttgatttttaaagag

SEQ ID NO: 57114 - DNA, 25 bp, Artificial
  probe
  misc_feature (1)..(25): SEQ ID NO: 7367; WAN024AJY_at; Start 232; Stop 256
aaatcattctctaattaaagtagga

SEQ ID NO: 57115 - DNA, 25 bp, Artificial
  probe
  misc_feature (1)..(25): SEQ ID NO: 7367; WAN024AJY_at; Start 198; Stop 222
tgtcctagactcttttgatttttaa

SEQ ID NO: 57116 - DNA, 25 bp, Artificial
  probe
  misc_feature (1)..(25): SEQ ID NO: 7367; WAN024AJY_at; Start 220; Stop 244
taaagagaacttaaatcattctcta

SEQ ID NO: 57117 - DNA, 25 bp, Artificial
  probe
  misc_feature (1)..(25): SEQ ID NO: 7367; WAN024AJY_at; Start 243; Stop 267
taattaaagtaggaagaatacacta

SEQ ID NO: 57118 - DNA, 25 bp, Artificial
  probe
  misc_feature (1)..(25): SEQ ID NO: 7367; WAN024AJY_at; Start 161; Stop 185
tggaaatctttagcttttttgtgat

SEQ ID NO: 57119 - DNA, 25 bp, Artificial
  probe
  misc_feature (1)..(25): SEQ ID NO: 7367; WAN024AJY_at; Start 234; Stop 258
atcattctctaattaaagtaggaag

SEQ ID NO: 57120 - DNA, 25 bp, Artificial
  probe
  misc_feature (1)..(25): SEQ ID NO: 7058; WAN024AJZ_at; Start 173; Stop 197
tgtattttaggaggttattggccat

SEQ ID NO: 57121 - DNA, 25 bp, Artificial
  probe
  misc_feature (1)..(25): SEQ ID NO: 7058; WAN024AJZ_at; Start 158; Stop 182
gagtcgttctcttattgtattttag

SEQ ID NO: 57122 - DNA, 25 bp, Artificial
  probe
  misc_feature (1)..(25): SEQ ID NO: 7058; WAN024AJZ_at; Start 27; Stop 51
tgtattcttcctactttaattagag

SEQ ID NO: 57123 - DNA, 25 bp, Artificial
  probe
  misc_feature (1)..(25): SEQ ID NO: 7058; WAN024AJZ_at; Start 32; Stop 56
tcttcctactttaattagagaatga

SEQ ID NO: 57124 - DNA, 25 bp, Artificial
  probe
  misc_feature (1)..(25): SEQ ID NO: 7058; WAN024AJZ_at; Start 191; Stop 215
tggccataagtaccaatcccatgtc

SEQ ID NO: 57125 - DNA, 25 bp, Artificial
  probe
  misc_feature (1)..(25): SEQ ID NO: 7058; WAN024AJZ_at; Start 240; Stop 264
catctcttgtaacccaaagaagcct

SEQ ID NO: 57126 - DNA, 25 bp, Artificial
  probe
  misc_feature (1)..(25): SEQ ID NO: 7058; WAN024AJZ_at; Start 80; Stop 104
aagagtctaggacaaaatagttctc

SEQ ID NO: 57127 - DNA, 25 bp, Artificial
  probe
  misc_feature (1)..(25): SEQ ID NO: 7058; WAN024AJZ_at; Start 192; Stop 216
ggccataagtaccaatcccatgtca

SEQ ID NO: 57128 - DNA, 25 bp, Artificial
  probe
  misc_feature (1)..(25): SEQ ID NO: 7058; WAN024AJZ_at; Start 185; Stop 209
ggttattggccataagtaccaatcc

SEQ ID NO: 57129 - DNA, 25 bp, Artificial
  probe
  misc_feature (1)..(25): SEQ ID NO: 7058; WAN024AJZ_at; Start 106; Stop 130
atcacaaaaaagctaaagatttcca

SEQ ID NO: 57130 - DNA, 25 bp, Artificial
  probe
  misc_feature (1)..(25): SEQ ID NO: 7058; WAN024AJZ_at; Start 213; Stop 237
gtcaattctcacttgcccctcagat

SEQ ID NO: 57131 - DNA, 25 bp, Artificial
  probe
  misc_feature (1)..(25): SEQ ID NO: 7058; WAN024AJZ_at; Start 100; Stop 124
ttctcaatcacaaaaaagctaaaga

SEQ ID NO: 57132 - DNA, 25 bp, Artificial
  probe
  misc_feature (1)..(25): SEQ ID NO: 7058; WAN024AJZ_at; Start 183; Stop 207
gaggttattggccataagtaccaat

SEQ ID NO: 57133 - DNA, 25 bp, Artificial
  probe
  misc_feature (1)..(25): SEQ ID NO: 7058; WAN024AJZ_at; Start 76; Stop 100
tcaaaagagtctaggacaaaatagt

SEQ ID NO: 57134 - DNA, 25 bp, Artificial
  probe
  misc_feature (1)..(25): SEQ ID NO: 7058; WAN024AJZ_at; Start 16; Stop 40
tactaaattagtgtattcttcctac

SEQ ID NO: 57135 - DNA, 25 bp, Artificial
  probe
  misc_feature (1)..(25): SEQ ID NO: 7058; WAN024AJZ_at; Start 193; Stop 217
gccataagtaccaatcccatgtcaa

SEQ ID NO: 57136 - DNA, 25 bp, Artificial
  probe
  misc_feature (1)..(25): SEQ ID NO: 7058; WAN024AJZ_at; Start 81; Stop 105
agagtctaggacaaaatagttctca

SEQ ID NO: 57137 - DNA, 25 bp, Artificial
  probe
  misc_feature (1)..(25): SEQ ID NO: 7058; WAN024AJZ_at; Start 227; Stop 251
gcccctcagattacatctcttgtaa

SEQ ID NO: 57138 - DNA, 25 bp, Artificial
  probe
  misc_feature (1)..(25): SEQ ID NO: 7058; WAN024AJZ_at; Start 180; Stop 204
taggaggttattggccataagtacc

SEQ ID NO: 57139 - DNA, 25 bp, Artificial
  probe
  misc_feature (1)..(25): SEQ ID NO: 7058; WAN024AJZ_at; Start 195; Stop 219
cataagtaccaatcccatgtcaatt

SEQ ID NO: 57140 - DNA, 25 bp, Artificial
  probe
  misc_feature (1)..(25): SEQ ID NO: 7058; WAN024AJZ_at; Start 170; Stop 194
tattgtattttaggaggttattggc

SEQ ID NO: 57141 - DNA, 25 bp, Artificial
  probe
  misc_feature (1)..(25): SEQ ID NO: 7058; WAN024AJZ_at; Start 214; Stop 238
tcaattctcacttgcccctcagatt

SEQ ID NO: 57142 - DNA, 25 bp, Artificial
  probe
  misc_feature (1)..(25): SEQ ID NO: 7058; WAN024AJZ_at; Start 162; Stop 186
cgttctcttattgtattttaggagg

SEQ ID NO: 57143 - DNA, 25 bp, Artificial
  probe
  misc_feature (1)..(25): SEQ ID NO: 7058; WAN024AJZ_at; Start 43; Stop 67
taattagagaatgatttaagttctc

SEQ ID NO: 57144 - DNA, 25 bp, Artificial
  probe
  misc_feature (1)..(25): SEQ ID NO: 7058; WAN024AJZ_at; Start 234; Stop 258
agattacatctcttgtaacccaaag

SEQ ID NO: 57145 - DNA, 25 bp, Artificial
  probe
  misc_feature (1)..(25): SEQ ID NO: 7058; WAN024AJZ_at; Start 238; Stop 262
tacatctcttgtaacccaaagaagc

SEQ ID NO: 57146 - DNA, 25 bp, Artificial
  probe
  misc_feature (1)..(25): SEQ ID NO: 7058; WAN024AJZ_at; Start 49; Stop 73
gagaatgatttaagttctctttaaa

SEQ ID NO: 57147 - DNA, 25 bp, Artificial
  probe
  misc_feature (1)..(25): SEQ ID NO: 7058; WAN024AJZ_at; Start 225; Stop 249
ttgcccctcagattacatctcttgt

SEQ ID NO: 57148 - DNA, 25 bp, Artificial
  probe
  misc_feature (1)..(25): SEQ ID NO: 7058; WAN024AJZ_at; Start 152; Stop 176
aattttgagtcgttctcttattgta

SEQ ID NO: 57149 - DNA, 25 bp, Artificial
  probe
  misc_feature (1)..(25): SEQ ID NO: 7058; WAN024AJZ_at; Start 36; Stop 60
cctactttaattagagaatgattta

SEQ ID NO: 57150 - DNA, 25 bp, Artificial
  probe
  misc_feature (1)..(25): SEQ ID NO: 7058; WAN024AJZ_at; Start 235; Stop 259
gattacatctcttgtaacccaaaga

SEQ ID NO: 57151 - DNA, 25 bp, Artificial
  probe
  misc_feature (1)..(25): SEQ ID NO: 7058; WAN024AJZ_at; Start 69; Stop 93
ttaaaaatcaaaagagtctaggaca

SEQ ID NO: 57152 - DNA, 25 bp, Artificial
  probe
  misc_feature (1)..(25): SEQ ID NO: 7058; WAN024AJZ_at; Start 188; Stop 212
tattggccataagtaccaatcccat

SEQ ID NO: 57153 - DNA, 25 bp, Artificial
  probe
  misc_feature (1)..(25): SEQ ID NO: 7058; WAN024AJZ_at; Start 175; Stop 199
tattttaggaggttattggccataa

SEQ ID NO: 57154 - DNA, 25 bp, Artificial
  probe
  misc_feature (1)..(25): SEQ ID NO: 182; WAN024AK2_at; Start 6; Stop 30
ttgataccttctttatcattaaaga

SEQ ID NO: 57155 - DNA, 25 bp, Artificial
  probe
  misc_feature (1)..(25): SEQ ID NO: 182; WAN024AK2_at; Start 7; Stop 31
tgataccttctttatcattaaagac

SEQ ID NO: 57156 - DNA, 25 bp, Artificial
  probe
  misc_feature (1)..(25): SEQ ID NO: 182; WAN024AK2_at; Start 14; Stop 38
ttctttatcattaaagaccaaagaa

SEQ ID NO: 57157 - DNA, 25 bp, Artificial
  probe
  misc_feature (1)..(25): SEQ ID NO: 182; WAN024AK2_at; Start 8; Stop 32
gataccttctttatcattaaagacc

SEQ ID NO: 57158 - DNA, 25 bp, Artificial
  probe
  misc_feature (1)..(25): SEQ ID NO: 182; WAN024AK2_at; Start 85; Stop 109
tctcaaccacaaaaaagctagatat

SEQ ID NO: 57159 - DNA, 25 bp, Artificial
  probe
  misc_feature (1)..(25): SEQ ID NO: 182; WAN024AK2_at; Start 44; Stop 68
cttgtcctaaatagaagataaagag

SEQ ID NO: 57160 - DNA, 25 bp, Artificial
  probe
  misc_feature (1)..(25): SEQ ID NO: 182; WAN024AK2_at; Start 42; Stop 66
ctcttgtcctaaatagaagataaag

SEQ ID NO: 57161 - DNA, 25 bp, Artificial
  probe
  misc_feature (1)..(25): SEQ ID NO: 182; WAN024AK2_at; Start 84; Stop 108
ttctcaaccacaaaaaagctagata

SEQ ID NO: 57162 - DNA, 25 bp, Artificial
  probe
  misc_feature (1)..(25): SEQ ID NO: 182; WAN024AK2_at; Start 38; Stop 62
aaaactcttgtcctaaatagaagat

SEQ ID NO: 57163 - DNA, 25 bp, Artificial
  probe
  misc_feature (1)..(25): SEQ ID NO: 182; WAN024AK2_at; Start 13; Stop 37
cttctttatcattaaagaccaaaga

SEQ ID NO: 57164 - DNA, 25 bp, Artificial
  probe
  misc_feature (1)..(25): SEQ ID NO: 182; WAN024AK2_at; Start 15; Stop 39
tctttatcattaaagaccaaagaaa

SEQ ID NO: 57165 - DNA, 25 bp, Artificial
  probe
  misc_feature (1)..(25): SEQ ID NO: 182; WAN024AK2_at; Start 5; Stop 29
tttgataccttctttatcattaaag

SEQ ID NO: 57166 - DNA, 25 bp, Artificial
  probe
  misc_feature (1)..(25): SEQ ID NO: 182; WAN024AK2_at; Start 12; Stop 36
ccttctttatcattaaagaccaaag

SEQ ID NO: 57167 - DNA, 25 bp, Artificial
  probe
  misc_feature (1)..(25): SEQ ID NO: 182; WAN024AK2_at; Start 39; Stop 63
aaactcttgtcctaaatagaagata

SEQ ID NO: 57168 - DNA, 25 bp, Artificial
  probe
  misc_feature (1)..(25): SEQ ID NO: 182; WAN024AK2_at; Start 43; Stop 67
tcttgtcctaaatagaagataaaga

SEQ ID NO: 57169 - DNA, 25 bp, Artificial
  probe
  misc_feature (1)..(25): SEQ ID NO: 182; WAN024AK2_at; Start 10; Stop 34
taccttctttatcattaaagaccaa

SEQ ID NO: 57170 - DNA, 25 bp, Artificial
  probe
  misc_feature (1)..(25): SEQ ID NO: 182; WAN024AK2_at; Start 4; Stop 28
ttttgataccttctttatcattaaa

SEQ ID NO: 57171 - DNA, 25 bp, Artificial
  probe
  misc_feature (1)..(25): SEQ ID NO: 182; WAN024AK2_at; Start 40; Stop 64
aactcttgtcctaaatagaagataa

SEQ ID NO: 57172 - DNA, 25 bp, Artificial
  probe
  misc_feature (1)..(25): SEQ ID NO: 182; WAN024AK2_at; Start 1; Stop 25
aaattttgataccttctttatcatt

SEQ ID NO: 57173 - DNA, 25 bp, Artificial
  probe
  misc_feature (1)..(25): SEQ ID NO: 182; WAN024AK2_at; Start 41; Stop 65
actcttgtcctaaatagaagataaa

SEQ ID NO: 57174 - DNA, 25 bp, Artificial
  probe
  misc_feature (1)..(25): SEQ ID NO: 182; WAN024AK2_at; Start 3; Stop 27
attttgataccttctttatcattaa

SEQ ID NO: 57175 - DNA, 25 bp, Artificial
  probe
  misc_feature (1)..(25): SEQ ID NO: 182; WAN024AK2_at; Start 2; Stop 26
aattttgataccttctttatcatta

SEQ ID NO: 57176 - DNA, 25 bp, Artificial
  probe
  misc_feature (1)..(25): SEQ ID NO: 182; WAN024AK2_at; Start 9; Stop 33
ataccttctttatcattaaagacca

SEQ ID NO: 57177 - DNA, 25 bp, Artificial
  probe
  misc_feature (1)..(25): SEQ ID NO: 4746; WAN024AK3_at; Start 105; Stop 129
tggtctttaatgataaagaaggtat

SEQ ID NO: 57178 - DNA, 25 bp, Artificial
  probe
  misc_feature (1)..(25): SEQ ID NO: 4746; WAN024AK3_at; Start 100; Stop 124
ttctttggtctttaatgataaagaa

SEQ ID NO: 57179 - DNA, 25 bp, Artificial
  probe
  misc_feature (1)..(25): SEQ ID NO: 4746; WAN024AK3_at; Start 108; Stop 132
tctttaatgataaagaaggtatcaa

SEQ ID NO: 57180 - DNA, 25 bp, Artificial
  probe
  misc_feature (1)..(25): SEQ ID NO: 4746; WAN024AK3_at; Start 27; Stop 51
aaatatctagcttttttgtggttga

SEQ ID NO: 57181 - DNA, 25 bp, Artificial
  probe
  misc_feature (1)..(25): SEQ ID NO: 4746; WAN024AK3_at; Start 109; Stop 133
ctttaatgataaagaaggtatcaaa

SEQ ID NO: 57182 - DNA, 25 bp, Artificial
  probe
  misc_feature (1)..(25): SEQ ID NO: 4746; WAN024AK3_at; Start 101; Stop 125
tctttggtctttaatgataaagaag

SEQ ID NO: 57183 - DNA, 25 bp, Artificial
  probe
  misc_feature (1)..(25): SEQ ID NO: 4746; WAN024AK3_at; Start 24; Stop 48
tggaaatatctagcttttttgtggt

SEQ ID NO: 57184 - DNA, 25 bp, Artificial
  probe
  misc_feature (1)..(25): SEQ ID NO: 4746; WAN024AK3_at; Start 110; Stop 134
tttaatgataaagaaggtatcaaaa

SEQ ID NO: 57185 - DNA, 25 bp, Artificial
  probe
  misc_feature (1)..(25): SEQ ID NO: 4746; WAN024AK3_at; Start 99; Stop 123
tttctttggtctttaatgataaaga

SEQ ID NO: 57186 - DNA, 25 bp, Artificial
  probe
  misc_feature (1)..(25): SEQ ID NO: 4746; WAN024AK3_at; Start 76; Stop 100
atcttctatttaggacaagagtttt

SEQ ID NO: 57187 - DNA, 25 bp, Artificial
  probe
  misc_feature (1)..(25): SEQ ID NO: 4746; WAN024AK3_at; Start 29; Stop 53
atatctagcttttttgtggttgaga

SEQ ID NO: 57188 - DNA, 25 bp, Artificial
  probe
  misc_feature (1)..(25): SEQ ID NO: 4746; WAN024AK3_at; Start 26; Stop 50
gaaatatctagcttttttgtggttg

SEQ ID NO: 57189 - DNA, 25 bp, Artificial
  probe
  misc_feature (1)..(25): SEQ ID NO: 4746; WAN024AK3_at; Start 70; Stop 94
ctctttatcttctatttaggacaag

SEQ ID NO: 57190 - DNA, 25 bp, Artificial
  probe
  misc_feature (1)..(25): SEQ ID NO: 4746; WAN024AK3_at; Start 75; Stop 99
tatcttctatttaggacaagagttt

SEQ ID NO: 57191 - DNA, 25 bp, Artificial
  probe
  misc_feature (1)..(25): SEQ ID NO: 4746; WAN024AK3_at; Start 73; Stop 97
tttatcttctatttaggacaagagt

SEQ ID NO: 57192 - DNA, 25 bp, Artificial
  probe
  misc_feature (1)..(25): SEQ ID NO: 4746; WAN024AK3_at; Start 74; Stop 98
ttatcttctatttaggacaagagtt

SEQ ID NO: 57193 - DNA, 25 bp, Artificial
  probe
  misc_feature (1)..(25): SEQ ID NO: 4746; WAN024AK3_at; Start 112; Stop 136
taatgataaagaaggtatcaaaatt

SEQ ID NO: 57194 - DNA, 25 bp, Artificial
  probe
  misc_feature (1)..(25): SEQ ID NO: 4746; WAN024AK3_at; Start 111; Stop 135
ttaatgataaagaaggtatcaaaat

SEQ ID NO: 57195 - DNA, 25 bp, Artificial
  probe
  misc_feature (1)..(25): SEQ ID NO: 4746; WAN024AK3_at; Start 104; Stop 128
ttggtctttaatgataaagaaggta

SEQ ID NO: 57196 - DNA, 25 bp, Artificial
  probe
  misc_feature (1)..(25): SEQ ID NO: 4746; WAN024AK3_at; Start 107; Stop 131
gtctttaatgataaagaaggtatca

SEQ ID NO: 57197 - DNA, 25 bp, Artificial
  probe
  misc_feature (1)..(25): SEQ ID NO: 4746; WAN024AK3_at; Start 106; Stop 130
ggtctttaatgataaagaaggtatc

SEQ ID NO: 57198 - DNA, 25 bp, Artificial
  probe
  misc_feature (1)..(25): SEQ ID NO: 4746; WAN024AK3_at; Start 113; Stop 137
aatgataaagaaggtatcaaaattt

SEQ ID NO: 57199 - DNA, 25 bp, Artificial
  probe
  misc_feature (1)..(25): SEQ ID NO: 4746; WAN024AK3_at; Start 71; Stop 95
tctttatcttctatttaggacaaga

SEQ ID NO: 57200 - DNA, 25 bp, Artificial
  probe
  misc_feature (1)..(25): SEQ ID NO: 4746; WAN024AK3_at; Start 28; Stop 52
aatatctagcttttttgtggttgag

SEQ ID NO: 57201 - DNA, 25 bp, Artificial
  probe
  misc_feature (1)..(25): SEQ ID NO: 4746; WAN024AK3_at; Start 102; Stop 126
ctttggtctttaatgataaagaagg

SEQ ID NO: 57202 - DNA, 25 bp, Artificial
  probe
  misc_feature (1)..(25): SEQ ID NO: 4746; WAN024AK3_at; Start 72; Stop 96
ctttatcttctatttaggacaagag

SEQ ID NO: 57203 - DNA, 25 bp, Artificial
  probe
  misc_feature (1)..(25): SEQ ID NO: 4746; WAN024AK3_at; Start 30; Stop 54
tatctagcttttttgtggttgagaa

SEQ ID NO: 57204 - DNA, 25 bp, Artificial
  probe
  misc_feature (1)..(25): SEQ ID NO: 4689; WAN024AK4_at; Start 23; Stop 47
gcttggagtatttgtttgtgtgttt

SEQ ID NO: 57205 - DNA, 25 bp, Artificial
  probe
  misc_feature (1)..(25): SEQ ID NO: 4689; WAN024AK4_at; Start 127; Stop 151
ttcatatagtgttatacttatagca

SEQ ID NO: 57206 - DNA, 25 bp, Artificial
  probe
  misc_feature (1)..(25): SEQ ID NO: 4689; WAN024AK4_at; Start 132; Stop 156
atagtgttatacttatagcataaag

SEQ ID NO: 57207 - DNA, 25 bp, Artificial
  probe
  misc_feature (1)..(25): SEQ ID NO: 4689; WAN024AK4_at; Start 18; Stop 42
aaaatgcttggagtatttgtttgtg

SEQ ID NO: 57208 - DNA, 25 bp, Artificial
  probe
  misc_feature (1)..(25): SEQ ID NO: 4689; WAN024AK4_at; Start 129; Stop 153
catatagtgttatacttatagcata

SEQ ID NO: 57209 - DNA, 25 bp, Artificial
  probe
  misc_feature (1)..(25): SEQ ID NO: 4689; WAN024AK4_at; Start 21; Stop 45
atgcttggagtatttgtttgtgtgt

SEQ ID NO: 57210 - DNA, 25 bp, Artificial
  probe
  misc_feature (1)..(25): SEQ ID NO: 4689; WAN024AK4_at; Start 131; Stop 155
tatagtgttatacttatagcataaa

SEQ ID NO: 57211 - DNA, 25 bp, Artificial
  probe
  misc_feature (1)..(25): SEQ ID NO: 4689; WAN024AK4_at; Start 11; Stop 35
aacagaaaaaatgcttggagtattt

SEQ ID NO: 57212 - DNA, 25 bp, Artificial
  probe
  misc_feature (1)..(25): SEQ ID NO: 4689; WAN024AK4_at; Start 25; Stop 49
ttggagtatttgtttgtgtgtttat

SEQ ID NO: 57213 - DNA, 25 bp, Artificial
  probe
  misc_feature (1)..(25): SEQ ID NO: 4689; WAN024AK4_at; Start 24; Stop 48
cttggagtatttgtttgtgtgttta

SEQ ID NO: 57214 - DNA, 25 bp, Artificial
  probe
  misc_feature (1)..(25): SEQ ID NO: 4689; WAN024AK4_at; Start 12; Stop 36
acagaaaaaatgcttggagtatttg

SEQ ID NO: 57215 - DNA, 25 bp, Artificial
  probe
  misc_feature (1)..(25): SEQ ID NO: 4689; WAN024AK4_at; Start 130; Stop 154
atatagtgttatacttatagcataa

SEQ ID NO: 57216 - DNA, 25 bp, Artificial
  probe
  misc_feature (1)..(25): SEQ ID NO: 4689; WAN024AK4_at; Start 133; Stop 157
tagtgttatacttatagcataaagt

SEQ ID NO: 57217 - DNA, 25 bp, Artificial
  probe
  misc_feature (1)..(25): SEQ ID NO: 4689; WAN024AK4_at; Start 13; Stop 37
cagaaaaaatgcttggagtatttgt

SEQ ID NO: 57218 - DNA, 25 bp, Artificial
  probe
  misc_feature (1)..(25): SEQ ID NO: 4689; WAN024AK4_at; Start 20; Stop 44
aatgcttggagtatttgtttgtgtg

SEQ ID NO: 57219 - DNA, 25 bp, Artificial
  probe
  misc_feature (1)..(25): SEQ ID NO: 4689; WAN024AK4_at; Start 10; Stop 34
gaacagaaaaaatgcttggagtatt

SEQ ID NO: 57220 - DNA, 25 bp, Artificial
  probe
  misc_feature (1)..(25): SEQ ID NO: 4689; WAN024AK4_at; Start 135; Stop 159
gtgttatacttatagcataaagtta

SEQ ID NO: 57221 - DNA, 25 bp, Artificial
  probe
  misc_feature (1)..(25): SEQ ID NO: 4689; WAN024AK4_at; Start 128; Stop 152
tcatatagtgttatacttatagcat

SEQ ID NO: 57222 - DNA, 25 bp, Artificial
  probe
  misc_feature (1)..(25): SEQ ID NO: 4689; WAN024AK4_at; Start 22; Stop 46
tgcttggagtatttgtttgtgtgtt

SEQ ID NO: 57223 - DNA, 25 bp, Artificial
  probe
  misc_feature (1)..(25): SEQ ID NO: 4689; WAN024AK4_at; Start 17; Stop 41
aaaaatgcttggagtatttgtttgt

SEQ ID NO: 57224 - DNA, 25 bp, Artificial
  probe
  misc_feature (1)..(25): SEQ ID NO: 4689; WAN024AK4_at; Start 16; Stop 40
aaaaaatgcttggagtatttgtttg

SEQ ID NO: 57225 - DNA, 25 bp, Artificial
  probe
  misc_feature (1)..(25): SEQ ID NO: 4689; WAN024AK4_at; Start 14; Stop 38
agaaaaaatgcttggagtatttgtt

SEQ ID NO: 57226 - DNA, 25 bp, Artificial
  probe
  misc_feature (1)..(25): SEQ ID NO: 4689; WAN024AK4_at; Start 126; Stop 150
tttcatatagtgttatacttatagc

SEQ ID NO: 57227 - DNA, 25 bp, Artificial
  probe
  misc_feature (1)..(25): SEQ ID NO: 4689; WAN024AK4_at; Start 26; Stop 50
tggagtatttgtttgtgtgtttatt

SEQ ID NO: 57228 - DNA, 25 bp, Artificial
  probe
  misc_feature (1)..(25): SEQ ID NO: 4689; WAN024AK4_at; Start 19; Stop 43
aaatgcttggagtatttgtttgtgt

SEQ ID NO: 57229 - DNA, 25 bp, Artificial
  probe
  misc_feature (1)..(25): SEQ ID NO: 4689; WAN024AK4_at; Start 134; Stop 158
agtgttatacttatagcataaagtt

SEQ ID NO: 57230 - DNA, 25 bp, Artificial
  probe
  misc_feature (1)..(25): SEQ ID NO: 4436; WAN024AK5_at; Start 5; Stop 29
tttatgctataagtataacactata

SEQ ID NO: 57231 - DNA, 25 bp, Artificial
  probe
  misc_feature (1)..(25): SEQ ID NO: 4436; WAN024AK5_at; Start 113; Stop 137
aaacacacaaacaaatactccaagc

SEQ ID NO: 57232 - DNA, 25 bp, Artificial
  probe
  misc_feature (1)..(25): SEQ ID NO: 4436; WAN024AK5_at; Start 119; Stop 143
acaaacaaatactccaagcattttt

SEQ ID NO: 57233 - DNA, 25 bp, Artificial
  probe
  misc_feature (1)..(25): SEQ ID NO: 4436; WAN024AK5_at; Start 6; Stop 30
ttatgctataagtataacactatat

SEQ ID NO: 57234 - DNA, 25 bp, Artificial
  probe
  misc_feature (1)..(25): SEQ ID NO: 4436; WAN024AK5_at; Start 97; Stop 121
tttgttatataaaaataaacacaca

SEQ ID NO: 57235 - DNA, 25 bp, Artificial
  probe
  misc_feature (1)..(25): SEQ ID NO: 4436; WAN024AK5_at; Start 128; Stop 152
tactccaagcattttttctgttcta

SEQ ID NO: 57236 - DNA, 25 bp, Artificial
  probe
  misc_feature (1)..(25): SEQ ID NO: 4436; WAN024AK5_at; Start 111; Stop 135
ataaacacacaaacaaatactccaa

SEQ ID NO: 57237 - DNA, 25 bp, Artificial
  probe
  misc_feature (1)..(25): SEQ ID NO: 4436; WAN024AK5_at; Start 131; Stop 155
tccaagcattttttctgttctaata

SEQ ID NO: 57238 - DNA, 25 bp, Artificial
  probe
  misc_feature (1)..(25): SEQ ID NO: 4436; WAN024AK5_at; Start 10; Stop 34
gctataagtataacactatatgaaa

SEQ ID NO: 57239 - DNA, 25 bp, Artificial
  probe
  misc_feature (1)..(25): SEQ ID NO: 4436; WAN024AK5_at; Start 7; Stop 31
tatgctataagtataacactatatg

SEQ ID NO: 57240 - DNA, 25 bp, Artificial
  probe
  misc_feature (1)..(25): SEQ ID NO: 4436; WAN024AK5_at; Start 99; Stop 123
tgttatataaaaataaacacacaaa

SEQ ID NO: 57241 - DNA, 25 bp, Artificial
  probe
  misc_feature (1)..(25): SEQ ID NO: 4436; WAN024AK5_at; Start 9; Stop 33
tgctataagtataacactatatgaa

SEQ ID NO: 57242 - DNA, 25 bp, Artificial
  probe
  misc_feature (1)..(25): SEQ ID NO: 4436; WAN024AK5_at; Start 4; Stop 28
ctttatgctataagtataacactat

SEQ ID NO: 57243 - DNA, 25 bp, Artificial
  probe
  misc_feature (1)..(25): SEQ ID NO: 4436; WAN024AK5_at; Start 129; Stop 153
actccaagcattttttctgttctaa

SEQ ID NO: 57244 - DNA, 25 bp, Artificial
  probe
  misc_feature (1)..(25): SEQ ID NO: 4436; WAN024AK5_at; Start 118; Stop 142
cacaaacaaatactccaagcatttt

SEQ ID NO: 57245 - DNA, 25 bp, Artificial
  probe
  misc_feature (1)..(25): SEQ ID NO: 4436; WAN024AK5_at; Start 114; Stop 138
aacacacaaacaaatactccaagca

SEQ ID NO: 57246 - DNA, 25 bp, Artificial
  probe
  misc_feature (1)..(25): SEQ ID NO: 4436; WAN024AK5_at; Start 8; Stop 32
atgctataagtataacactatatga

SEQ ID NO: 57247 - DNA, 25 bp, Artificial
  probe
  misc_feature (1)..(25): SEQ ID NO: 4436; WAN024AK5_at; Start 126; Stop 150
aatactccaagcattttttctgttc

SEQ ID NO: 57248 - DNA, 25 bp, Artificial
  probe
  misc_feature (1)..(25): SEQ ID NO: 4436; WAN024AK5_at; Start 130; Stop 154
ctccaagcattttttctgttctaat

SEQ ID NO: 57249 - DNA, 25 bp, Artificial
  probe
  misc_feature (1)..(25): SEQ ID NO: 4436; WAN024AK5_at; Start 127; Stop 151
atactccaagcattttttctgttct

SEQ ID NO: 57250 - DNA, 25 bp, Artificial
  probe
  misc_feature (1)..(25): SEQ ID NO: 4436; WAN024AK5_at; Start 120; Stop 144
caaacaaatactccaagcatttttt

SEQ ID NO: 57251 - DNA, 25 bp, Artificial
  probe
  misc_feature (1)..(25): SEQ ID NO: 4436; WAN024AK5_at; Start 116; Stop 140
cacacaaacaaatactccaagcatt

SEQ ID NO: 57252 - DNA, 25 bp, Artificial
  probe
  misc_feature (1)..(25): SEQ ID NO: 4436; WAN024AK5_at; Start 102; Stop 126
tatataaaaataaacacacaaacaa

SEQ ID NO: 57253 - DNA, 25 bp, Artificial
  probe
  misc_feature (1)..(25): SEQ ID NO: 4436; WAN024AK5_at; Start 110; Stop 134
aataaacacacaaacaaatactcca

SEQ ID NO: 57254 - DNA, 25 bp, Artificial
  probe
  misc_feature (1)..(25): SEQ ID NO: 4436; WAN024AK5_at; Start 123; Stop 147
acaaatactccaagcattttttctg

SEQ ID NO: 57255 - DNA, 25 bp, Artificial
  probe
  misc_feature (1)..(25): SEQ ID NO: 4436; WAN024AK5_at; Start 115; Stop 139
acacacaaacaaatactccaagcat

SEQ ID NO: 57256 - DNA, 25 bp, Artificial
  probe
  misc_feature (1)..(25): SEQ ID NO: 4436; WAN024AK5_at; Start 1; Stop 25
taactttatgctataagtataacac

SEQ ID NO: 57257 - DNA, 25 bp, Artificial
  probe
  misc_feature (1)..(25): SEQ ID NO: 4436; WAN024AK5_at; Start 124; Stop 148
caaatactccaagcattttttctgt

SEQ ID NO: 57258 - DNA, 25 bp, Artificial
  probe
  misc_feature (1)..(25): SEQ ID NO: 4436; WAN024AK5_at; Start 122; Stop 146
aacaaatactccaagcattttttct

SEQ ID NO: 57259 - DNA, 25 bp, Artificial
  probe
  misc_feature (1)..(25): SEQ ID NO: 4436; WAN024AK5_at; Start 117; Stop 141
acacaaacaaatactccaagcattt

SEQ ID NO: 57260 - DNA, 25 bp, Artificial
  probe
  misc_feature (1)..(25): SEQ ID NO: 4436; WAN024AK5_at; Start 3; Stop 27
actttatgctataagtataacacta

SEQ ID NO: 57261 - DNA, 25 bp, Artificial
  probe
  misc_feature (1)..(25): SEQ ID NO: 4436; WAN024AK5_at; Start 112; Stop 136
taaacacacaaacaaatactccaag

SEQ ID NO: 57262 - DNA, 25 bp, Artificial
  probe
  misc_feature (1)..(25): SEQ ID NO: 4436; WAN024AK5_at; Start 125; Stop 149
aaatactccaagcattttttctgtt

SEQ ID NO: 57263 - DNA, 25 bp, Artificial
  probe
  misc_feature (1)..(25): SEQ ID NO: 4436; WAN024AK5_at; Start 2; Stop 26
aactttatgctataagtataacact

SEQ ID NO: 57264 - DNA, 25 bp, Artificial
  probe
  misc_feature (1)..(25): SEQ ID NO: 3252; WAN024AK6_at; Start 81; Stop 105
tagcctttaaattttgatagactct

SEQ ID NO: 57265 - DNA, 25 bp, Artificial
  probe
  misc_feature (1)..(25): SEQ ID NO: 3252; WAN024AK6_at; Start 61; Stop 85
aattgtctcatcacctctattagcc

SEQ ID NO: 57266 - DNA, 25 bp, Artificial
  probe
  misc_feature (1)..(25): SEQ ID NO: 3252; WAN024AK6_at; Start 83; Stop 107
gcctttaaattttgatagactctat

SEQ ID NO: 57267 - DNA, 25 bp, Artificial
  probe
  misc_feature (1)..(25): SEQ ID NO: 3252; WAN024AK6_at; Start 74; Stop 98
cctctattagcctttaaattttgat

SEQ ID NO: 57268 - DNA, 25 bp, Artificial
  probe
  misc_feature (1)..(25): SEQ ID NO: 3252; WAN024AK6_at; Start 29; Stop 53
attaagcaaccaaacgctacttaat

SEQ ID NO: 57269 - DNA, 25 bp, Artificial
  probe
  misc_feature (1)..(25): SEQ ID NO: 3252; WAN024AK6_at; Start 80; Stop 104
ttagcctttaaattttgatagactc

SEQ ID NO: 57270 - DNA, 25 bp, Artificial
  probe
  misc_feature (1)..(25): SEQ ID NO: 3252; WAN024AK6_at; Start 76; Stop 100
tctattagcctttaaattttgatag

SEQ ID NO: 57271 - DNA, 25 bp, Artificial
  probe
  misc_feature (1)..(25): SEQ ID NO: 3252; WAN024AK6_at; Start 27; Stop 51
gaattaagcaaccaaacgctactta

SEQ ID NO: 57272 - DNA, 25 bp, Artificial
  probe
  misc_feature (1)..(25): SEQ ID NO: 3252; WAN024AK6_at; Start 72; Stop 96
cacctctattagcctttaaattttg

SEQ ID NO: 57273 - DNA, 25 bp, Artificial
  probe
  misc_feature (1)..(25): SEQ ID NO: 3252; WAN024AK6_at; Start 64; Stop 88
tgtctcatcacctctattagccttt

SEQ ID NO: 57274 - DNA, 25 bp, Artificial
  probe
  misc_feature (1)..(25): SEQ ID NO: 3252; WAN024AK6_at; Start 25; Stop 49
aggaattaagcaaccaaacgctact

SEQ ID NO: 57275 - DNA, 25 bp, Artificial
  probe
  misc_feature (1)..(25): SEQ ID NO: 3252; WAN024AK6_at; Start 85; Stop 109
ctttaaattttgatagactctattt

SEQ ID NO: 57276 - DNA, 25 bp, Artificial
  probe
  misc_feature (1)..(25): SEQ ID NO: 3252; WAN024AK6_at; Start 77; Stop 101
ctattagcctttaaattttgataga

SEQ ID NO: 57277 - DNA, 25 bp, Artificial
  probe
  misc_feature (1)..(25): SEQ ID NO: 3252; WAN024AK6_at; Start 62; Stop 86
attgtctcatcacctctattagcct

SEQ ID NO: 57278 - DNA, 25 bp, Artificial
  probe
  misc_feature (1)..(25): SEQ ID NO: 3252; WAN024AK6_at; Start 82; Stop 106
agcctttaaattttgatagactcta

SEQ ID NO: 57279 - DNA, 25 bp, Artificial
  probe
  misc_feature (1)..(25): SEQ ID NO: 3252; WAN024AK6_at; Start 78; Stop 102
tattagcctttaaattttgatagac

SEQ ID NO: 57280 - DNA, 25 bp, Artificial
  probe
  misc_feature (1)..(25): SEQ ID NO: 3252; WAN024AK6_at; Start 31; Stop 55
taagcaaccaaacgctacttaattc

SEQ ID NO: 57281 - DNA, 25 bp, Artificial
  probe
  misc_feature (1)..(25): SEQ ID NO: 3252; WAN024AK6_at; Start 70; Stop 94
atcacctctattagcctttaaattt

SEQ ID NO: 57282 - DNA, 25 bp, Artificial
  probe
  misc_feature (1)..(25): SEQ ID NO: 3252; WAN024AK6_at; Start 66; Stop 90
tctcatcacctctattagcctttaa

SEQ ID NO: 57283 - DNA, 25 bp, Artificial
  probe
  misc_feature (1)..(25): SEQ ID NO: 3252; WAN024AK6_at; Start 89; Stop 113
aaattttgatagactctattttcta

SEQ ID NO: 57284 - DNA, 25 bp, Artificial
  probe
  misc_feature (1)..(25): SEQ ID NO: 3252; WAN024AK6_at; Start 59; Stop 83
gaaattgtctcatcacctctattag

SEQ ID NO: 57285 - DNA, 25 bp, Artificial
  probe
  misc_feature (1)..(25): SEQ ID NO: 3252; WAN024AK6_at; Start 79; Stop 103
attagcctttaaattttgatagact

SEQ ID NO: 57286 - DNA, 25 bp, Artificial
  probe
  misc_feature (1)..(25): SEQ ID NO: 3252; WAN024AK6_at; Start 60; Stop 84
aaattgtctcatcacctctattagc

SEQ ID NO: 57287 - DNA, 25 bp, Artificial
  probe
  misc_feature (1)..(25): SEQ ID NO: 3252; WAN024AK6_at; Start 84; Stop 108
cctttaaattttgatagactctatt

SEQ ID NO: 57288 - DNA, 25 bp, Artificial
  probe
  misc_feature (1)..(25): SEQ ID NO: 3252; WAN024AK6_at; Start 88; Stop 112
taaattttgatagactctattttct

SEQ ID NO: 57289 - DNA, 25 bp, Artificial
  probe
  misc_feature (1)..(25): SEQ ID NO: 3252; WAN024AK6_at; Start 75; Stop 99
ctctattagcctttaaattttgata

SEQ ID NO: 57290 - DNA, 25 bp, Artificial
  probe
  misc_feature (1)..(25): SEQ ID NO: 3252; WAN024AK6_at; Start 67; Stop 91
ctcatcacctctattagcctttaaa

SEQ ID NO: 57291 - DNA, 25 bp, Artificial
  probe
  misc_feature (1)..(25): SEQ ID NO: 3252; WAN024AK6_at; Start 68; Stop 92
tcatcacctctattagcctttaaat

SEQ ID NO: 57292 - DNA, 25 bp, Artificial
  probe
  misc_feature (1)..(25): SEQ ID NO: 3252; WAN024AK6_at; Start 65; Stop 89
gtctcatcacctctattagccttta

SEQ ID NO: 57293 - DNA, 25 bp, Artificial
  probe
  misc_feature (1)..(25): SEQ ID NO: 3252; WAN024AK6_at; Start 69; Stop 93
catcacctctattagcctttaaatt

SEQ ID NO: 57294 - DNA, 25 bp, Artificial
  probe
  misc_feature (1)..(25): SEQ ID NO: 3252; WAN024AK6_at; Start 63; Stop 87
ttgtctcatcacctctattagcctt

SEQ ID NO: 57295 - DNA, 25 bp, Artificial
  probe
  misc_feature (1)..(25): SEQ ID NO: 3252; WAN024AK6_at; Start 87; Stop 111
ttaaattttgatagactctattttc

SEQ ID NO: 57296 - DNA, 25 bp, Artificial
  probe
  misc_feature (1)..(25): SEQ ID NO: 3252; WAN024AK6_at; Start 90; Stop 114
aattttgatagactctattttctaa

SEQ ID NO: 57297 - DNA, 25 bp, Artificial
  probe
  misc_feature (1)..(25): SEQ ID NO: 3252; WAN024AK6_at; Start 33; Stop 57
agcaaccaaacgctacttaattcct

SEQ ID NO: 57298 - DNA, 25 bp, Artificial
  probe
  misc_feature (1)..(25): SEQ ID NO: 4782; WAN024AK7_at; Start 15; Stop 39
ctatcaaaatttaaaggctaataga

SEQ ID NO: 57299 - DNA, 25 bp, Artificial
  probe
  misc_feature (1)..(25): SEQ ID NO: 4782; WAN024AK7_at; Start 26; Stop 50
taaaggctaatagaggtgatgagac

SEQ ID NO: 57300 - DNA, 25 bp, Artificial
  probe
  misc_feature (1)..(25): SEQ ID NO: 4782; WAN024AK7_at; Start 8; Stop 32
atagagtctatcaaaatttaaaggc

SEQ ID NO: 57301 - DNA, 25 bp, Artificial
  probe
  misc_feature (1)..(25): SEQ ID NO: 4782; WAN024AK7_at; Start 21; Stop 45
aaatttaaaggctaatagaggtgat

SEQ ID NO: 57302 - DNA, 25 bp, Artificial
  probe
  misc_feature (1)..(25): SEQ ID NO: 4782; WAN024AK7_at; Start 27; Stop 51
aaaggctaatagaggtgatgagaca

SEQ ID NO: 57303 - DNA, 25 bp, Artificial
  probe
  misc_feature (1)..(25): SEQ ID NO: 4782; WAN024AK7_at; Start 3; Stop 27
agaaaatagagtctatcaaaattta

SEQ ID NO: 57304 - DNA, 25 bp, Artificial
  probe
  misc_feature (1)..(25): SEQ ID NO: 4782; WAN024AK7_at; Start 60; Stop 84
gaattaagtagcgtttggttgctta

SEQ ID NO: 57305 - DNA, 25 bp, Artificial
  probe
  misc_feature (1)..(25): SEQ ID NO: 4782; WAN024AK7_at; Start 22; Stop 46
aatttaaaggctaatagaggtgatg

SEQ ID NO: 57306 - DNA, 25 bp, Artificial
  probe
  misc_feature (1)..(25): SEQ ID NO: 4782; WAN024AK7_at; Start 32; Stop 56
ctaatagaggtgatgagacaatttc

SEQ ID NO: 57307 - DNA, 25 bp, Artificial
  probe
  misc_feature (1)..(25): SEQ ID NO: 4782; WAN024AK7_at; Start 58; Stop 82
aggaattaagtagcgtttggttgct

SEQ ID NO: 57308 - DNA, 25 bp, Artificial
  probe
  misc_feature (1)..(25): SEQ ID NO: 4782; WAN024AK7_at; Start 12; Stop 36
agtctatcaaaatttaaaggctaat

SEQ ID NO: 57309 - DNA, 25 bp, Artificial
  probe
  misc_feature (1)..(25): SEQ ID NO: 4782; WAN024AK7_at; Start 14; Stop 38
tctatcaaaatttaaaggctaatag

SEQ ID NO: 57310 - DNA, 25 bp, Artificial
  probe
  misc_feature (1)..(25): SEQ ID NO: 4782; WAN024AK7_at; Start 29; Stop 53
aggctaatagaggtgatgagacaat

SEQ ID NO: 57311 - DNA, 25 bp, Artificial
  probe
  misc_feature (1)..(25): SEQ ID NO: 4782; WAN024AK7_at; Start 7; Stop 31
aatagagtctatcaaaatttaaagg

SEQ ID NO: 57312 - DNA, 25 bp, Artificial
  probe
  misc_feature (1)..(25): SEQ ID NO: 4782; WAN024AK7_at; Start 23; Stop 47
atttaaaggctaatagaggtgatga

SEQ ID NO: 57313 - DNA, 25 bp, Artificial
  probe
  misc_feature (1)..(25): SEQ ID NO: 4782; WAN024AK7_at; Start 25; Stop 49
ttaaaggctaatagaggtgatgaga

SEQ ID NO: 57314 - DNA, 25 bp, Artificial
  probe
  misc_feature (1)..(25): SEQ ID NO: 4782; WAN024AK7_at; Start 13; Stop 37
gtctatcaaaatttaaaggctaata

SEQ ID NO: 57315 - DNA, 25 bp, Artificial
  probe
  misc_feature (1)..(25): SEQ ID NO: 4782; WAN024AK7_at; Start 66; Stop 90
agtagcgtttggttgcttaattcct

SEQ ID NO: 57316 - DNA, 25 bp, Artificial
  probe
  misc_feature (1)..(25): SEQ ID NO: 4782; WAN024AK7_at; Start 62; Stop 86
attaagtagcgtttggttgcttaat

SEQ ID NO: 57317 - DNA, 25 bp, Artificial
  probe
  misc_feature (1)..(25): SEQ ID NO: 4782; WAN024AK7_at; Start 11; Stop 35
gagtctatcaaaatttaaaggctaa

SEQ ID NO: 57318 - DNA, 25 bp, Artificial
  probe
  misc_feature (1)..(25): SEQ ID NO: 4782; WAN024AK7_at; Start 9; Stop 33
tagagtctatcaaaatttaaaggct

SEQ ID NO: 57319 - DNA, 25 bp, Artificial
  probe
  misc_feature (1)..(25): SEQ ID NO: 4782; WAN024AK7_at; Start 28; Stop 52
aaggctaatagaggtgatgagacaa

SEQ ID NO: 57320 - DNA, 25 bp, Artificial
  probe
  misc_feature (1)..(25): SEQ ID NO: 4782; WAN024AK7_at; Start 19; Stop 43
caaaatttaaaggctaatagaggtg

SEQ ID NO: 57321 - DNA, 25 bp, Artificial
  probe
  misc_feature (1)..(25): SEQ ID NO: 4782; WAN024AK7_at; Start 1; Stop 25
ttagaaaatagagtctatcaaaatt

SEQ ID NO: 57322 - DNA, 25 bp, Artificial
  probe
  misc_feature (1)..(25): SEQ ID NO: 4782; WAN024AK7_at; Start 64; Stop 88
taagtagcgtttggttgcttaattc

SEQ ID NO: 57323 - DNA, 25 bp, Artificial
  probe
  misc_feature (1)..(25): SEQ ID NO: 4782; WAN024AK7_at; Start 2; Stop 26
tagaaaatagagtctatcaaaattt

SEQ ID NO: 57324 - DNA, 25 bp, Artificial
  probe
  misc_feature (1)..(25): SEQ ID NO: 4782; WAN024AK7_at; Start 24; Stop 48
tttaaaggctaatagaggtgatgag

SEQ ID NO: 57325 - DNA, 25 bp, Artificial
  probe
  misc_feature (1)..(25): SEQ ID NO: 4782; WAN024AK7_at; Start 17; Stop 41
atcaaaatttaaaggctaatagagg

SEQ ID NO: 57326 - DNA, 25 bp, Artificial
  probe
  misc_feature (1)..(25): SEQ ID NO: 4782; WAN024AK7_at; Start 10; Stop 34
agagtctatcaaaatttaaaggcta

SEQ ID NO: 57327 - DNA, 25 bp, Artificial
  probe
  misc_feature (1)..(25): SEQ ID NO: 4782; WAN024AK7_at; Start 31; Stop 55
gctaatagaggtgatgagacaattt

SEQ ID NO: 57328 - DNA, 25 bp, Artificial
  probe
  misc_feature (1)..(25): SEQ ID NO: 4782; WAN024AK7_at; Start 6; Stop 30
aaatagagtctatcaaaatttaaag

SEQ ID NO: 57329 - DNA, 25 bp, Artificial
  probe
  misc_feature (1)..(25): SEQ ID NO: 4782; WAN024AK7_at; Start 30; Stop 54
ggctaatagaggtgatgagacaatt

SEQ ID NO: 57330 - DNA, 25 bp, Artificial
  probe
  misc_feature (1)..(25): SEQ ID NO: 4782; WAN024AK7_at; Start 16; Stop 40
tatcaaaatttaaaggctaatagag

SEQ ID NO: 57331 - DNA, 25 bp, Artificial
  probe
  misc_feature (1)..(25): SEQ ID NO: 4782; WAN024AK7_at; Start 4; Stop 28
gaaaatagagtctatcaaaatttaa

SEQ ID NO: 57332 - DNA, 25 bp, Artificial
  probe
  misc_feature (1)..(25): SEQ ID NO: 265; WAN024AK8_at; Start 63; Stop 87
aaactatgtcatcacctcactatct

SEQ ID NO: 57333 - DNA, 25 bp, Artificial
  probe
  misc_feature (1)..(25): SEQ ID NO: 265; WAN024AK8_at; Start 65; Stop 89
actatgtcatcacctcactatctaa

SEQ ID NO: 57334 - DNA, 25 bp, Artificial
  probe
  misc_feature (1)..(25): SEQ ID NO: 265; WAN024AK8_at; Start 83; Stop 107
tatctaatctcagtacataaaccat

SEQ ID NO: 57335 - DNA, 25 bp, Artificial
  probe
  misc_feature (1)..(25): SEQ ID NO: 265; WAN024AK8_at; Start 82; Stop 106
ctatctaatctcagtacataaacca

SEQ ID NO: 57336 - DNA, 25 bp, Artificial
  probe
  misc_feature (1)..(25): SEQ ID NO: 265; WAN024AK8_at; Start 69; Stop 93
tgtcatcacctcactatctaatctc

SEQ ID NO: 57337 - DNA, 25 bp, Artificial
  probe
  misc_feature (1)..(25): SEQ ID NO: 265; WAN024AK8_at; Start 60; Stop 84
acaaaactatgtcatcacctcacta

SEQ ID NO: 57338 - DNA, 25 bp, Artificial
  probe
  misc_feature (1)..(25): SEQ ID NO: 265; WAN024AK8_at; Start 66; Stop 90
ctatgtcatcacctcactatctaat

SEQ ID NO: 57339 - DNA, 25 bp, Artificial
  probe
  misc_feature (1)..(25): SEQ ID NO: 265; WAN024AK8_at; Start 81; Stop 105
actatctaatctcagtacataaacc

SEQ ID NO: 57340 - DNA, 25 bp, Artificial
  probe
  misc_feature (1)..(25): SEQ ID NO: 265; WAN024AK8_at; Start 77; Stop 101
cctcactatctaatctcagtacata

SEQ ID NO: 57341 - DNA, 25 bp, Artificial
  probe
  misc_feature (1)..(25): SEQ ID NO: 265; WAN024AK8_at; Start 71; Stop 95
tcatcacctcactatctaatctcag

SEQ ID NO: 57342 - DNA, 25 bp, Artificial
  probe
  misc_feature (1)..(25): SEQ ID NO: 265; WAN024AK8_at; Start 64; Stop 88
aactatgtcatcacctcactatcta

SEQ ID NO: 57343 - DNA, 25 bp, Artificial
  probe
  misc_feature (1)..(25): SEQ ID NO: 265; WAN024AK8_at; Start 59; Stop 83
cacaaaactatgtcatcacctcact

SEQ ID NO: 57344 - DNA, 25 bp, Artificial
  probe
  misc_feature (1)..(25): SEQ ID NO: 265; WAN024AK8_at; Start 61; Stop 85
caaaactatgtcatcacctcactat

SEQ ID NO: 57345 - DNA, 25 bp, Artificial
  probe
  misc_feature (1)..(25): SEQ ID NO: 265; WAN024AK8_at; Start 78; Stop 102
ctcactatctaatctcagtacataa

SEQ ID NO: 57346 - DNA, 25 bp, Artificial
  probe
  misc_feature (1)..(25): SEQ ID NO: 265; WAN024AK8_at; Start 55; Stop 79
ttttcacaaaactatgtcatcacct

SEQ ID NO: 57347 - DNA, 25 bp, Artificial
  probe
  misc_feature (1)..(25): SEQ ID NO: 265; WAN024AK8_at; Start 70; Stop 94
gtcatcacctcactatctaatctca

SEQ ID NO: 57348 - DNA, 25 bp, Artificial
  probe
  misc_feature (1)..(25): SEQ ID NO: 265; WAN024AK8_at; Start 28; Stop 52
actaaataattgagttataaatggc

SEQ ID NO: 57349 - DNA, 25 bp, Artificial
  probe
  misc_feature (1)..(25): SEQ ID NO: 265; WAN024AK8_at; Start 67; Stop 91
tatgtcatcacctcactatctaatc

SEQ ID NO: 57350 - DNA, 25 bp, Artificial
  probe
  misc_feature (1)..(25): SEQ ID NO: 265; WAN024AK8_at; Start 29; Stop 53
ctaaataattgagttataaatggct

SEQ ID NO: 57351 - DNA, 25 bp, Artificial
  probe
  misc_feature (1)..(25): SEQ ID NO: 265; WAN024AK8_at; Start 74; Stop 98
tcacctcactatctaatctcagtac

SEQ ID NO: 57352 - DNA, 25 bp, Artificial
  probe
  misc_feature (1)..(25): SEQ ID NO: 265; WAN024AK8_at; Start 96; Stop 120
tacataaaccatttttttctatagc

SEQ ID NO: 57353 - DNA, 25 bp, Artificial
  probe
  misc_feature (1)..(25): SEQ ID NO: 265; WAN024AK8_at; Start 73; Stop 97
atcacctcactatctaatctcagta

SEQ ID NO: 57354 - DNA, 25 bp, Artificial
  probe
  misc_feature (1)..(25): SEQ ID NO: 265; WAN024AK8_at; Start 75; Stop 99
cacctcactatctaatctcagtaca

SEQ ID NO: 57355 - DNA, 25 bp, Artificial
  probe
  misc_feature (1)..(25): SEQ ID NO: 265; WAN024AK8_at; Start 57; Stop 81
ttcacaaaactatgtcatcacctca

SEQ ID NO: 57356 - DNA, 25 bp, Artificial
  probe
  misc_feature (1)..(25): SEQ ID NO: 265; WAN024AK8_at; Start 87; Stop 111
taatctcagtacataaaccattttt

SEQ ID NO: 57357 - DNA, 25 bp, Artificial
  probe
  misc_feature (1)..(25): SEQ ID NO: 265; WAN024AK8_at; Start 88; Stop 112
aatctcagtacataaaccatttttt

SEQ ID NO: 57358 - DNA, 25 bp, Artificial
  probe
  misc_feature (1)..(25): SEQ ID NO: 265; WAN024AK8_at; Start 80; Stop 104
cactatctaatctcagtacataaac

SEQ ID NO: 57359 - DNA, 25 bp, Artificial
  probe
  misc_feature (1)..(25): SEQ ID NO: 265; WAN024AK8_at; Start 86; Stop 110
ctaatctcagtacataaaccatttt

SEQ ID NO: 57360 - DNA, 25 bp, Artificial
  probe
  misc_feature (1)..(25): SEQ ID NO: 265; WAN024AK8_at; Start 56; Stop 80
tttcacaaaactatgtcatcacctc

SEQ ID NO: 57361 - DNA, 25 bp, Artificial
  probe
  misc_feature (1)..(25): SEQ ID NO: 265; WAN024AK8_at; Start 72; Stop 96
catcacctcactatctaatctcagt

SEQ ID NO: 57362 - DNA, 25 bp, Artificial
  probe
  misc_feature (1)..(25): SEQ ID NO: 265; WAN024AK8_at; Start 76; Stop 100
acctcactatctaatctcagtacat

SEQ ID NO: 57363 - DNA, 25 bp, Artificial
  probe
  misc_feature (1)..(25): SEQ ID NO: 265; WAN024AK8_at; Start 85; Stop 109
tctaatctcagtacataaaccattt

SEQ ID NO: 57364 - DNA, 25 bp, Artificial
  probe
  misc_feature (1)..(25): SEQ ID NO: 265; WAN024AK8_at; Start 79; Stop 103
tcactatctaatctcagtacataaa

SEQ ID NO: 57365 - DNA, 25 bp, Artificial
  probe
  misc_feature (1)..(25): SEQ ID NO: 265; WAN024AK8_at; Start 62; Stop 86
aaaactatgtcatcacctcactatc

SEQ ID NO: 57366 - DNA, 25 bp, Artificial
  probe
  misc_feature (1)..(25): SEQ ID NO: 3667; WAN024AK9_at; Start 23; Stop 47
ggtttatgtactgagattagatagt

SEQ ID NO: 57367 - DNA, 25 bp, Artificial
  probe
  misc_feature (1)..(25): SEQ ID NO: 3667; WAN024AK9_at; Start 43; Stop 67
atagtgaggtgatgacatagttttg

SEQ ID NO: 57368 - DNA, 25 bp, Artificial
  probe
  misc_feature (1)..(25): SEQ ID NO: 3667; WAN024AK9_at; Start 24; Stop 48
gtttatgtactgagattagatagtg

SEQ ID NO: 57369 - DNA, 25 bp, Artificial
  probe
  misc_feature (1)..(25): SEQ ID NO: 3667; WAN024AK9_at; Start 41; Stop 65
agatagtgaggtgatgacatagttt

SEQ ID NO: 57370 - DNA, 25 bp, Artificial
  probe
  misc_feature (1)..(25): SEQ ID NO: 3667; WAN024AK9_at; Start 42; Stop 66
gatagtgaggtgatgacatagtttt

SEQ ID NO: 57371 - DNA, 25 bp, Artificial
  probe
  misc_feature (1)..(25): SEQ ID NO: 3667; WAN024AK9_at; Start 49; Stop 73
aggtgatgacatagttttgtgaaaa

SEQ ID NO: 57372 - DNA, 25 bp, Artificial
  probe
  misc_feature (1)..(25): SEQ ID NO: 3667; WAN024AK9_at; Start 22; Stop 46
tggtttatgtactgagattagatag

SEQ ID NO: 57373 - DNA, 25 bp, Artificial
  probe
  misc_feature (1)..(25): SEQ ID NO: 3667; WAN024AK9_at; Start 76; Stop 100
gccatttataactcaattatttagt

SEQ ID NO: 57374 - DNA, 25 bp, Artificial
  probe
  misc_feature (1)..(25): SEQ ID NO: 3667; WAN024AK9_at; Start 35; Stop 59
gagattagatagtgaggtgatgaca

SEQ ID NO: 57375 - DNA, 25 bp, Artificial
  probe
  misc_feature (1)..(25): SEQ ID NO: 3667; WAN024AK9_at; Start 47; Stop 71
tgaggtgatgacatagttttgtgaa

SEQ ID NO: 57376 - DNA, 25 bp, Artificial
  probe
  misc_feature (1)..(25): SEQ ID NO: 3667; WAN024AK9_at; Start 20; Stop 44
aatggtttatgtactgagattagat

SEQ ID NO: 57377 - DNA, 25 bp, Artificial
  probe
  misc_feature (1)..(25): SEQ ID NO: 3667; WAN024AK9_at; Start 18; Stop 42
aaaatggtttatgtactgagattag

SEQ ID NO: 57378 - DNA, 25 bp, Artificial
  probe
  misc_feature (1)..(25): SEQ ID NO: 3667; WAN024AK9_at; Start 16; Stop 40
aaaaaatggtttatgtactgagatt

SEQ ID NO: 57379 - DNA, 25 bp, Artificial
  probe
  misc_feature (1)..(25): SEQ ID NO: 3667; WAN024AK9_at; Start 39; Stop 63
ttagatagtgaggtgatgacatagt

SEQ ID NO: 57380 - DNA, 25 bp, Artificial
  probe
  misc_feature (1)..(25): SEQ ID NO: 3667; WAN024AK9_at; Start 34; Stop 58
tgagattagatagtgaggtgatgac

SEQ ID NO: 57381 - DNA, 25 bp, Artificial
  probe
  misc_feature (1)..(25): SEQ ID NO: 3667; WAN024AK9_at; Start 38; Stop 62
attagatagtgaggtgatgacatag

SEQ ID NO: 57382 - DNA, 25 bp, Artificial
  probe
  misc_feature (1)..(25): SEQ ID NO: 3667; WAN024AK9_at; Start 31; Stop 55
tactgagattagatagtgaggtgat

SEQ ID NO: 57383 - DNA, 25 bp, Artificial
  probe
  misc_feature (1)..(25): SEQ ID NO: 3667; WAN024AK9_at; Start 27; Stop 51
tatgtactgagattagatagtgagg

SEQ ID NO: 57384 - DNA, 25 bp, Artificial
  probe
  misc_feature (1)..(25): SEQ ID NO: 3667; WAN024AK9_at; Start 32; Stop 56
actgagattagatagtgaggtgatg

SEQ ID NO: 57385 - DNA, 25 bp, Artificial
  probe
  misc_feature (1)..(25): SEQ ID NO: 3667; WAN024AK9_at; Start 26; Stop 50
ttatgtactgagattagatagtgag

SEQ ID NO: 57386 - DNA, 25 bp, Artificial
  probe
  misc_feature (1)..(25): SEQ ID NO: 3667; WAN024AK9_at; Start 30; Stop 54
gtactgagattagatagtgaggtga

SEQ ID NO: 57387 - DNA, 25 bp, Artificial
  probe
  misc_feature (1)..(25): SEQ ID NO: 3667; WAN024AK9_at; Start 40; Stop 64
tagatagtgaggtgatgacatagtt

SEQ ID NO: 57388 - DNA, 25 bp, Artificial
  probe
  misc_feature (1)..(25): SEQ ID NO: 3667; WAN024AK9_at; Start 44; Stop 68
tagtgaggtgatgacatagttttgt

SEQ ID NO: 57389 - DNA, 25 bp, Artificial
  probe
  misc_feature (1)..(25): SEQ ID NO: 3667; WAN024AK9_at; Start 6; Stop 30
aagctatagaaaaaaatggtttatg

SEQ ID NO: 57390 - DNA, 25 bp, Artificial
  probe
  misc_feature (1)..(25): SEQ ID NO: 3667; WAN024AK9_at; Start 37; Stop 61
gattagatagtgaggtgatgacata

SEQ ID NO: 57391 - DNA, 25 bp, Artificial
  probe
  misc_feature (1)..(25): SEQ ID NO: 3667; WAN024AK9_at; Start 36; Stop 60
agattagatagtgaggtgatgacat

SEQ ID NO: 57392 - DNA, 25 bp, Artificial
  probe
  misc_feature (1)..(25): SEQ ID NO: 3667; WAN024AK9_at; Start 33; Stop 57
ctgagattagatagtgaggtgatga

SEQ ID NO: 57393 - DNA, 25 bp, Artificial
  probe
  misc_feature (1)..(25): SEQ ID NO: 3667; WAN024AK9_at; Start 45; Stop 69
agtgaggtgatgacatagttttgtg

SEQ ID NO: 57394 - DNA, 25 bp, Artificial
  probe
  misc_feature (1)..(25): SEQ ID NO: 3667; WAN024AK9_at; Start 17; Stop 41
aaaaatggtttatgtactgagatta

SEQ ID NO: 57395 - DNA, 25 bp, Artificial
  probe
  misc_feature (1)..(25): SEQ ID NO: 3667; WAN024AK9_at; Start 25; Stop 49
tttatgtactgagattagatagtga

SEQ ID NO: 57396 - DNA, 25 bp, Artificial
  probe
  misc_feature (1)..(25): SEQ ID NO: 3667; WAN024AK9_at; Start 75; Stop 99
agccatttataactcaattatttag

SEQ ID NO: 57397 - DNA, 25 bp, Artificial
  probe
  misc_feature (1)..(25): SEQ ID NO: 3667; WAN024AK9_at; Start 29; Stop 53
tgtactgagattagatagtgaggtg

SEQ ID NO: 57398 - DNA, 25 bp, Artificial
  probe
  misc_feature (1)..(25): SEQ ID NO: 3667; WAN024AK9_at; Start 48; Stop 72
gaggtgatgacatagttttgtgaaa

SEQ ID NO: 57399 - DNA, 25 bp, Artificial
  probe
  misc_feature (1)..(25): SEQ ID NO: 3667; WAN024AK9_at; Start 19; Stop 43
aaatggtttatgtactgagattaga

SEQ ID NO: 57400 - DNA, 25 bp, Artificial
  probe
  misc_feature (1)..(25): SEQ ID NO: 442; WAN024AKE_at; Start 123; Stop 147
gcttaacggttatcttctacctatc

SEQ ID NO: 57401 - DNA, 25 bp, Artificial
  probe
  misc_feature (1)..(25): SEQ ID NO: 442; WAN024AKE_at; Start 174; Stop 198
tctacctataacctaggctttacga

SEQ ID NO: 57402 - DNA, 25 bp, Artificial
  probe
  misc_feature (1)..(25): SEQ ID NO: 442; WAN024AKE_at; Start 52; Stop 76
aaacacgaaaacaggcataattgat

SEQ ID NO: 57403 - DNA, 25 bp, Artificial
  probe
  misc_feature (1)..(25): SEQ ID NO: 442; WAN024AKE_at; Start 13; Stop 37
ccatcaaaaatagtagcaataaact

SEQ ID NO: 57404 - DNA, 25 bp, Artificial
  probe
  misc_feature (1)..(25): SEQ ID NO: 442; WAN024AKE_at; Start 5; Stop 29
cattcataccatcaaaaatagtagc

SEQ ID NO: 57405 - DNA, 25 bp, Artificial
  probe
  misc_feature (1)..(25): SEQ ID NO: 442; WAN024AKE_at; Start 38; Stop 62
tgaacaactaccagaaacacgaaaa

SEQ ID NO: 57406 - DNA, 25 bp, Artificial
  probe
  misc_feature (1)..(25): SEQ ID NO: 442; WAN024AKE_at; Start 42; Stop 66
caactaccagaaacacgaaaacagg

SEQ ID NO: 57407 - DNA, 25 bp, Artificial
  probe
  misc_feature (1)..(25): SEQ ID NO: 442; WAN024AKE_at; Start 44; Stop 68
actaccagaaacacgaaaacaggca

SEQ ID NO: 57408 - DNA, 25 bp, Artificial
  probe
  misc_feature (1)..(25): SEQ ID NO: 442; WAN024AKE_at; Start 160; Stop 184
tcctcagtcgtttatctacctataa

SEQ ID NO: 57409 - DNA, 25 bp, Artificial
  probe
  misc_feature (1)..(25): SEQ ID NO: 442; WAN024AKE_at; Start 182; Stop 206
taacctaggctttacgagtgccttg

SEQ ID NO: 57410 - DNA, 25 bp, Artificial
  probe
  misc_feature (1)..(25): SEQ ID NO: 442; WAN024AKE_at; Start 28; Stop 52
gcaataaacttgaacaactaccaga

SEQ ID NO: 57411 - DNA, 25 bp, Artificial
  probe
  misc_feature (1)..(25): SEQ ID NO: 442; WAN024AKE_at; Start 133; Stop 157
tatcttctacctatctattttttca

SEQ ID NO: 57412 - DNA, 25 bp, Artificial
  probe
  misc_feature (1)..(25): SEQ ID NO: 442; WAN024AKE_at; Start 1; Stop 25
agcacattcataccatcaaaaatag

SEQ ID NO: 57413 - DNA, 25 bp, Artificial
  probe
  misc_feature (1)..(25): SEQ ID NO: 442; WAN024AKE_at; Start 185; Stop 209
cctaggctttacgagtgccttgctc

SEQ ID NO: 57414 - DNA, 25 bp, Artificial
  probe
  misc_feature (1)..(25): SEQ ID NO: 442; WAN024AKE_at; Start 179; Stop 203
ctataacctaggctttacgagtgcc

SEQ ID NO: 57415 - DNA, 25 bp, Artificial
  probe
  misc_feature (1)..(25): SEQ ID NO: 442; WAN024AKE_at; Start 36; Stop 60
cttgaacaactaccagaaacacgaa

SEQ ID NO: 57416 - DNA, 25 bp, Artificial
  probe
  misc_feature (1)..(25): SEQ ID NO: 442; WAN024AKE_at; Start 187; Stop 211
taggctttacgagtgccttgctcta

SEQ ID NO: 57417 - DNA, 25 bp, Artificial
  probe
  misc_feature (1)..(25): SEQ ID NO: 442; WAN024AKE_at; Start 21; Stop 45
aatagtagcaataaacttgaacaac

SEQ ID NO: 57418 - DNA, 25 bp, Artificial
  probe
  misc_feature (1)..(25): SEQ ID NO: 442; WAN024AKE_at; Start 180; Stop 204
tataacctaggctttacgagtgcct

SEQ ID NO: 57419 - DNA, 25 bp, Artificial
  probe
  misc_feature (1)..(25): SEQ ID NO: 442; WAN024AKE_at; Start 32; Stop 56
taaacttgaacaactaccagaaaca

SEQ ID NO: 57420 - DNA, 25 bp, Artificial
  probe
  misc_feature (1)..(25): SEQ ID NO: 442; WAN024AKE_at; Start 222; Stop 246
taaatcggcgattacacttacagta

SEQ ID NO: 57421 - DNA, 25 bp, Artificial
  probe
  misc_feature (1)..(25): SEQ ID NO: 442; WAN024AKE_at; Start 249; Stop 273
gcactctgagaatagatgtcaagta

SEQ ID NO: 57422 - DNA, 25 bp, Artificial
  probe
  misc_feature (1)..(25): SEQ ID NO: 442; WAN024AKE_at; Start 46; Stop 70
taccagaaacacgaaaacaggcata

SEQ ID NO: 57423 - DNA, 25 bp, Artificial
  probe
  misc_feature (1)..(25): SEQ ID NO: 442; WAN024AKE_at; Start 51; Stop 75
gaaacacgaaaacaggcataattga

SEQ ID NO: 57424 - DNA, 25 bp, Artificial
  probe
  misc_feature (1)..(25): SEQ ID NO: 442; WAN024AKE_at; Start 183; Stop 207
aacctaggctttacgagtgccttgc

SEQ ID NO: 57425 - DNA, 25 bp, Artificial
  probe
  misc_feature (1)..(25): SEQ ID NO: 442; WAN024AKE_at; Start 167; Stop 191
tcgtttatctacctataacctaggc

SEQ ID NO: 57426 - DNA, 25 bp, Artificial
  probe
  misc_feature (1)..(25): SEQ ID NO: 442; WAN024AKE_at; Start 220; Stop 244
gctaaatcggcgattacacttacag

SEQ ID NO: 57427 - DNA, 25 bp, Artificial
  probe
  misc_feature (1)..(25): SEQ ID NO: 442; WAN024AKE_at; Start 193; Stop 217
ttacgagtgccttgctctaccaact

SEQ ID NO: 57428 - DNA, 25 bp, Artificial
  probe
  misc_feature (1)..(25): SEQ ID NO: 442; WAN024AKE_at; Start 9; Stop 33
cataccatcaaaaatagtagcaata

SEQ ID NO: 57429 - DNA, 25 bp, Artificial
  probe
  misc_feature (1)..(25): SEQ ID NO: 442; WAN024AKE_at; Start 126; Stop 150
taacggttatcttctacctatctat

SEQ ID NO: 57430 - DNA, 25 bp, Artificial
  probe
  misc_feature (1)..(25): SEQ ID NO: 442; WAN024AKE_at; Start 252; Stop 276
ctctgagaatagatgtcaagtaata

SEQ ID NO: 57431 - DNA, 25 bp, Artificial
  probe
  misc_feature (1)..(25): SEQ ID NO: 442; WAN024AKE_at; Start 48; Stop 72
ccagaaacacgaaaacaggcataat

SEQ ID NO: 57432 - DNA, 25 bp, Artificial
  probe
  misc_feature (1)..(25): SEQ ID NO: 442; WAN024AKE_at; Start 34; Stop 58
aacttgaacaactaccagaaacacg

SEQ ID NO: 57433 - DNA, 25 bp, Artificial
  probe
  misc_feature (1)..(25): SEQ ID NO: 442; WAN024AKE_at; Start 189; Stop 213
ggctttacgagtgccttgctctacc

SEQ ID NO: 57434 - DNA, 25 bp, Artificial
  probe
  misc_feature (1)..(25): SEQ ID NO: 4566; WAN024AKF_at; Start 130; Stop 154
gataggtagaagataaccgttaagc

SEQ ID NO: 57435 - DNA, 25 bp, Artificial
  probe
  misc_feature (1)..(25): SEQ ID NO: 4566; WAN024AKF_at; Start 217; Stop 241
ttcgtgtttctggtagttgttcaag

SEQ ID NO: 57436 - DNA, 25 bp, Artificial
  probe
  misc_feature (1)..(25): SEQ ID NO: 4566; WAN024AKF_at; Start 71; Stop 95
caaggcactcgtaaagcctaggtta

SEQ ID NO: 57437 - DNA, 25 bp, Artificial
  probe
  misc_feature (1)..(25): SEQ ID NO: 4566; WAN024AKF_at; Start 208; Stop 232
atgcctgttttcgtgtttctggtag

SEQ ID NO: 57438 - DNA, 25 bp, Artificial
  probe
  misc_feature (1)..(25): SEQ ID NO: 4566; WAN024AKF_at; Start 88; Stop 112
ctaggttataggtagataaacgact

SEQ ID NO: 57439 - DNA, 25 bp, Artificial
  probe
  misc_feature (1)..(25): SEQ ID NO: 4566; WAN024AKF_at; Start 240; Stop 264
agtttattgctactatttttgatgg

SEQ ID NO: 57440 - DNA, 25 bp, Artificial
  probe
  misc_feature (1)..(25): SEQ ID NO: 4566; WAN024AKF_at; Start 202; Stop 226
tcaattatgcctgttttcgtgtttc

SEQ ID NO: 57441 - DNA, 25 bp, Artificial
  probe
  misc_feature (1)..(25): SEQ ID NO: 4566; WAN024AKF_at; Start 74; Stop 98
ggcactcgtaaagcctaggttatag

SEQ ID NO: 57442 - DNA, 25 bp, Artificial
  probe
  misc_feature (1)..(25): SEQ ID NO: 4566; WAN024AKF_at; Start 70; Stop 94
gcaaggcactcgtaaagcctaggtt

SEQ ID NO: 57443 - DNA, 25 bp, Artificial
  probe
  misc_feature (1)..(25): SEQ ID NO: 4566; WAN024AKF_at; Start 68; Stop 92
gagcaaggcactcgtaaagcctagg

SEQ ID NO: 57444 - DNA, 25 bp, Artificial
  probe
  misc_feature (1)..(25): SEQ ID NO: 4566; WAN024AKF_at; Start 31; Stop 55
tactgtaagtgtaatcgccgattta

SEQ ID NO: 57445 - DNA, 25 bp, Artificial
  probe
  misc_feature (1)..(25): SEQ ID NO: 4566; WAN024AKF_at; Start 86; Stop 110
gcctaggttataggtagataaacga

SEQ ID NO: 57446 - DNA, 25 bp, Artificial
  probe
  misc_feature (1)..(25): SEQ ID NO: 4566; WAN024AKF_at; Start 91; Stop 115
ggttataggtagataaacgactgag

SEQ ID NO: 57447 - DNA, 25 bp, Artificial
  probe
  misc_feature (1)..(25): SEQ ID NO: 4566; WAN024AKF_at; Start 126; Stop 150
aatagataggtagaagataaccgtt

SEQ ID NO: 57448 - DNA, 25 bp, Artificial
  probe
  misc_feature (1)..(25): SEQ ID NO: 4566; WAN024AKF_at; Start 252; Stop 276
ctatttttgatggtatgaatgtgct

SEQ ID NO: 57449 - DNA, 25 bp, Artificial
  probe
  misc_feature (1)..(25): SEQ ID NO: 4566; WAN024AKF_at; Start 34; Stop 58
tgtaagtgtaatcgccgatttagct

SEQ ID NO: 57450 - DNA, 25 bp, Artificial
  probe
  misc_feature (1)..(25): SEQ ID NO: 4566; WAN024AKF_at; Start 64; Stop 88
ggtagagcaaggcactcgtaaagcc

SEQ ID NO: 57451 - DNA, 25 bp, Artificial
  probe
  misc_feature (1)..(25): SEQ ID NO: 4566; WAN024AKF_at; Start 160; Stop 184
tcttagcggttatttatattgttta

SEQ ID NO: 57452 - DNA, 25 bp, Artificial
  probe
  misc_feature (1)..(25): SEQ ID NO: 4566; WAN024AKF_at; Start 4; Stop 28
tacttgacatctattctcagagtgc

SEQ ID NO: 57453 - DNA, 25 bp, Artificial
  probe
  misc_feature (1)..(25): SEQ ID NO: 4566; WAN024AKF_at; Start 204; Stop 228
aattatgcctgttttcgtgtttctg

SEQ ID NO: 57454 - DNA, 25 bp, Artificial
  probe
  misc_feature (1)..(25): SEQ ID NO: 4566; WAN024AKF_at; Start 76; Stop 100
cactcgtaaagcctaggttataggt

SEQ ID NO: 57455 - DNA, 25 bp, Artificial
  probe
  misc_feature (1)..(25): SEQ ID NO: 4566; WAN024AKF_at; Start 228; Stop 252
ggtagttgttcaagtttattgctac

SEQ ID NO: 57456 - DNA, 25 bp, Artificial
  probe
  misc_feature (1)..(25): SEQ ID NO: 4566; WAN024AKF_at; Start 248; Stop 272
gctactatttttgatggtatgaatg

SEQ ID NO: 57457 - DNA, 25 bp, Artificial
  probe
  misc_feature (1)..(25): SEQ ID NO: 4566; WAN024AKF_at; Start 211; Stop 235
cctgttttcgtgtttctggtagttg

SEQ ID NO: 57458 - DNA, 25 bp, Artificial
  probe
  misc_feature (1)..(25): SEQ ID NO: 4566; WAN024AKF_at; Start 66; Stop 90
tagagcaaggcactcgtaaagccta

SEQ ID NO: 57459 - DNA, 25 bp, Artificial
  probe
  misc_feature (1)..(25): SEQ ID NO: 4566; WAN024AKF_at; Start 60; Stop 84
agttggtagagcaaggcactcgtaa

SEQ ID NO: 57460 - DNA, 25 bp, Artificial
  probe
  misc_feature (1)..(25): SEQ ID NO: 4566; WAN024AKF_at; Start 225; Stop 249
tctggtagttgttcaagtttattgc

SEQ ID NO: 57461 - DNA, 25 bp, Artificial
  probe
  misc_feature (1)..(25): SEQ ID NO: 4566; WAN024AKF_at; Start 219; Stop 243
cgtgtttctggtagttgttcaagtt

SEQ ID NO: 57462 - DNA, 25 bp, Artificial
  probe
  misc_feature (1)..(25): SEQ ID NO: 4566; WAN024AKF_at; Start 62; Stop 86
ttggtagagcaaggcactcgtaaag

SEQ ID NO: 57463 - DNA, 25 bp, Artificial
  probe
  misc_feature (1)..(25): SEQ ID NO: 4566; WAN024AKF_at; Start 80; Stop 104
cgtaaagcctaggttataggtagat

SEQ ID NO: 57464 - DNA, 25 bp, Artificial
  probe
  misc_feature (1)..(25): SEQ ID NO: 4566; WAN024AKF_at; Start 1; Stop 25
tattacttgacatctattctcagag

SEQ ID NO: 57465 - DNA, 25 bp, Artificial
  probe
  misc_feature (1)..(25): SEQ ID NO: 4566; WAN024AKF_at; Start 167; Stop 191
ggttatttatattgtttaatagcgc

SEQ ID NO: 57466 - DNA, 25 bp, Artificial
  probe
  misc_feature (1)..(25): SEQ ID NO: 4566; WAN024AKF_at; Start 124; Stop 148
aaaatagataggtagaagataaccg

SEQ ID NO: 57467 - DNA, 25 bp, Artificial
  probe
  misc_feature (1)..(25): SEQ ID NO: 4566; WAN024AKF_at; Start 93; Stop 117
ttataggtagataaacgactgagga

SEQ ID NO: 57468 - DNA, 25 bp, Artificial
  probe
  misc_feature (1)..(25): SEQ ID NO: 168; WAN024AKG_at; Start 96; Stop 120
tattaactttgatcataaaatcgga

SEQ ID NO: 57469 - DNA, 25 bp, Artificial
  probe
  misc_feature (1)..(25): SEQ ID NO: 168; WAN024AKG_at; Start 104; Stop 128
ttgatcataaaatcggatactccct

SEQ ID NO: 57470 - DNA, 25 bp, Artificial
  probe
  misc_feature (1)..(25): SEQ ID NO: 168; WAN024AKG_at; Start 74; Stop 98
tcatcttctcaccagagggcggtat

SEQ ID NO: 57471 - DNA, 25 bp, Artificial
  probe
  misc_feature (1)..(25): SEQ ID NO: 168; WAN024AKG_at; Start 113; Stop 137
aaatcggatactccctctatccaga

SEQ ID NO: 57472 - DNA, 25 bp, Artificial
  probe
  misc_feature (1)..(25): SEQ ID NO: 168; WAN024AKG_at; Start 58; Stop 82
taaattaccaacctactcatcttct

SEQ ID NO: 57473 - DNA, 25 bp, Artificial
  probe
  misc_feature (1)..(25): SEQ ID NO: 168; WAN024AKG_at; Start 103; Stop 127
tttgatcataaaatcggatactccc

SEQ ID NO: 57474 - DNA, 25 bp, Artificial
  probe
  misc_feature (1)..(25): SEQ ID NO: 168; WAN024AKG_at; Start 67; Stop 91
aacctactcatcttctcaccagagg

SEQ ID NO: 57475 - DNA, 25 bp, Artificial
  probe
  misc_feature (1)..(25): SEQ ID NO: 168; WAN024AKG_at; Start 78; Stop 102
cttctcaccagagggcggtattaac

SEQ ID NO: 57476 - DNA, 25 bp, Artificial
  probe
  misc_feature (1)..(25): SEQ ID NO: 168; WAN024AKG_at; Start 117; Stop 141
cggatactccctctatccagaaaat

SEQ ID NO: 57477 - DNA, 25 bp, Artificial
  probe
  misc_feature (1)..(25): SEQ ID NO: 168; WAN024AKG_at; Start 88; Stop 112
gagggcggtattaactttgatcata

SEQ ID NO: 57478 - DNA, 25 bp, Artificial
  probe
  misc_feature (1)..(25): SEQ ID NO: 168; WAN024AKG_at; Start 90; Stop 114
gggcggtattaactttgatcataaa

SEQ ID NO: 57479 - DNA, 25 bp, Artificial
  probe
  misc_feature (1)..(25): SEQ ID NO: 168; WAN024AKG_at; Start 87; Stop 111
agagggcggtattaactttgatcat

SEQ ID NO: 57480 - DNA, 25 bp, Artificial
  probe
  misc_feature (1)..(25): SEQ ID NO: 168; WAN024AKG_at; Start 91; Stop 115
ggcggtattaactttgatcataaaa

SEQ ID NO: 57481 - DNA, 25 bp, Artificial
  probe
  misc_feature (1)..(25): SEQ ID NO: 168; WAN024AKG_at; Start 99; Stop 123
taactttgatcataaaatcggatac

SEQ ID NO: 57482 - DNA, 25 bp, Artificial
  probe
  misc_feature (1)..(25): SEQ ID NO: 168; WAN024AKG_at; Start 73; Stop 97
ctcatcttctcaccagagggcggta

SEQ ID NO: 57483 - DNA, 25 bp, Artificial
  probe
  misc_feature (1)..(25): SEQ ID NO: 168; WAN024AKG_at; Start 116; Stop 140
tcggatactccctctatccagaaaa

SEQ ID NO: 57484 - DNA, 25 bp, Artificial
  probe
  misc_feature (1)..(25): SEQ ID NO: 168; WAN024AKG_at; Start 89; Stop 113
agggcggtattaactttgatcataa

SEQ ID NO: 57485 - DNA, 25 bp, Artificial
  probe
  misc_feature (1)..(25): SEQ ID NO: 168; WAN024AKG_at; Start 72; Stop 96
actcatcttctcaccagagggcggt

SEQ ID NO: 57486 - DNA, 25 bp, Artificial
  probe
  misc_feature (1)..(25): SEQ ID NO: 168; WAN024AKG_at; Start 75; Stop 99
catcttctcaccagagggcggtatt

SEQ ID NO: 57487 - DNA, 25 bp, Artificial
  probe
  misc_feature (1)..(25): SEQ ID NO: 168; WAN024AKG_at; Start 109; Stop 133
cataaaatcggatactccctctatc

SEQ ID NO: 57488 - DNA, 25 bp, Artificial
  probe
  misc_feature (1)..(25): SEQ ID NO: 168; WAN024AKG_at; Start 60; Stop 84
aattaccaacctactcatcttctca

SEQ ID NO: 57489 - DNA, 25 bp, Artificial
  probe
  misc_feature (1)..(25): SEQ ID NO: 168; WAN024AKG_at; Start 112; Stop 136
aaaatcggatactccctctatccag

SEQ ID NO: 57490 - DNA, 25 bp, Artificial
  probe
  misc_feature (1)..(25): SEQ ID NO: 168; WAN024AKG_at; Start 107; Stop 131
atcataaaatcggatactccctcta

SEQ ID NO: 57491 - DNA, 25 bp, Artificial
  probe
  misc_feature (1)..(25): SEQ ID NO: 168; WAN024AKG_at; Start 86; Stop 110
cagagggcggtattaactttgatca

SEQ ID NO: 57492 - DNA, 25 bp, Artificial
  probe
  misc_feature (1)..(25): SEQ ID NO: 168; WAN024AKG_at; Start 77; Stop 101
tcttctcaccagagggcggtattaa

SEQ ID NO: 57493 - DNA, 25 bp, Artificial
  probe
  misc_feature (1)..(25): SEQ ID NO: 168; WAN024AKG_at; Start 111; Stop 135
taaaatcggatactccctctatcca

SEQ ID NO: 57494 - DNA, 25 bp, Artificial
  probe
  misc_feature (1)..(25): SEQ ID NO: 168; WAN024AKG_at; Start 105; Stop 129
tgatcataaaatcggatactccctc

SEQ ID NO: 57495 - DNA, 25 bp, Artificial
  probe
  misc_feature (1)..(25): SEQ ID NO: 168; WAN024AKG_at; Start 102; Stop 126
ctttgatcataaaatcggatactcc

SEQ ID NO: 57496 - DNA, 25 bp, Artificial
  probe
  misc_feature (1)..(25): SEQ ID NO: 168; WAN024AKG_at; Start 68; Stop 92
acctactcatcttctcaccagaggg

SEQ ID NO: 57497 - DNA, 25 bp, Artificial
  probe
  misc_feature (1)..(25): SEQ ID NO: 168; WAN024AKG_at; Start 85; Stop 109
ccagagggcggtattaactttgatc

SEQ ID NO: 57498 - DNA, 25 bp, Artificial
  probe
  misc_feature (1)..(25): SEQ ID NO: 168; WAN024AKG_at; Start 83; Stop 107
caccagagggcggtattaactttga

SEQ ID NO: 57499 - DNA, 25 bp, Artificial
  probe
  misc_feature (1)..(25): SEQ ID NO: 168; WAN024AKG_at; Start 71; Stop 95
tactcatcttctcaccagagggcgg

SEQ ID NO: 57500 - DNA, 25 bp, Artificial
  probe
  misc_feature (1)..(25): SEQ ID NO: 168; WAN024AKG_at; Start 70; Stop 94
ctactcatcttctcaccagagggcg

SEQ ID NO: 57501 - DNA, 25 bp, Artificial
  probe
  misc_feature (1)..(25): SEQ ID NO: 168; WAN024AKG_at; Start 94; Stop 118
ggtattaactttgatcataaaatcg

SEQ ID NO: 57502 - DNA, 25 bp, Artificial
  probe
  misc_feature (1)..(25): SEQ ID NO: 3177; WAN024AKH_at; Start 47; Stop 71
ccgccctctggtgagaagatgagta

SEQ ID NO: 57503 - DNA, 25 bp, Artificial
  probe
  misc_feature (1)..(25): SEQ ID NO: 3177; WAN024AKH_at; Start 33; Stop 57
gatcaaagttaataccgccctctgg

SEQ ID NO: 57504 - DNA, 25 bp, Artificial
  probe
  misc_feature (1)..(25): SEQ ID NO: 3177; WAN024AKH_at; Start 6; Stop 30
ctggatagagggagtatccgatttt

SEQ ID NO: 57505 - DNA, 25 bp, Artificial
  probe
  misc_feature (1)..(25): SEQ ID NO: 3177; WAN024AKH_at; Start 58; Stop 82
tgagaagatgagtaggttggtaatt

SEQ ID NO: 57506 - DNA, 25 bp, Artificial
  probe
  misc_feature (1)..(25): SEQ ID NO: 3177; WAN024AKH_at; Start 5; Stop 29
tctggatagagggagtatccgattt

SEQ ID NO: 57507 - DNA, 25 bp, Artificial
  probe
  misc_feature (1)..(25): SEQ ID NO: 3177; WAN024AKH_at; Start 35; Stop 59
tcaaagttaataccgccctctggtg

SEQ ID NO: 57508 - DNA, 25 bp, Artificial
  probe
  misc_feature (1)..(25): SEQ ID NO: 3177; WAN024AKH_at; Start 44; Stop 68
ataccgccctctggtgagaagatga

SEQ ID NO: 57509 - DNA, 25 bp, Artificial
  probe
  misc_feature (1)..(25): SEQ ID NO: 3177; WAN024AKH_at; Start 28; Stop 52
tttatgatcaaagttaataccgccc

SEQ ID NO: 57510 - DNA, 25 bp, Artificial
  probe
  misc_feature (1)..(25): SEQ ID NO: 3177; WAN024AKH_at; Start 20; Stop 44
tatccgattttatgatcaaagttaa

SEQ ID NO: 57511 - DNA, 25 bp, Artificial
  probe
  misc_feature (1)..(25): SEQ ID NO: 3177; WAN024AKH_at; Start 46; Stop 70
accgccctctggtgagaagatgagt

SEQ ID NO: 57512 - DNA, 25 bp, Artificial
  probe
  misc_feature (1)..(25): SEQ ID NO: 3177; WAN024AKH_at; Start 61; Stop 85
gaagatgagtaggttggtaatttaa

SEQ ID NO: 57513 - DNA, 25 bp, Artificial
  probe
  misc_feature (1)..(25): SEQ ID NO: 3177; WAN024AKH_at; Start 17; Stop 41
gagtatccgattttatgatcaaagt

SEQ ID NO: 57514 - DNA, 25 bp, Artificial
  probe
  misc_feature (1)..(25): SEQ ID NO: 3177; WAN024AKH_at; Start 32; Stop 56
tgatcaaagttaataccgccctctg

SEQ ID NO: 57515 - DNA, 25 bp, Artificial
  probe
  misc_feature (1)..(25): SEQ ID NO: 3177; WAN024AKH_at; Start 43; Stop 67
aataccgccctctggtgagaagatg

SEQ ID NO: 57516 - DNA, 25 bp, Artificial
  probe
  misc_feature (1)..(25): SEQ ID NO: 3177; WAN024AKH_at; Start 30; Stop 54
tatgatcaaagttaataccgccctc

SEQ ID NO: 57517 - DNA, 25 bp, Artificial
  probe
  misc_feature (1)..(25): SEQ ID NO: 3177; WAN024AKH_at; Start 45; Stop 69
taccgccctctggtgagaagatgag

SEQ ID NO: 57518 - DNA, 25 bp, Artificial
  probe
  misc_feature (1)..(25): SEQ ID NO: 3177; WAN024AKH_at; Start 27; Stop 51
ttttatgatcaaagttaataccgcc

SEQ ID NO: 57519 - DNA, 25 bp, Artificial
  probe
  misc_feature (1)..(25): SEQ ID NO: 3177; WAN024AKH_at; Start 34; Stop 58
atcaaagttaataccgccctctggt

SEQ ID NO: 57520 - DNA, 25 bp, Artificial
  probe
  misc_feature (1)..(25): SEQ ID NO: 3177; WAN024AKH_at; Start 3; Stop 27
tttctggatagagggagtatccgat

SEQ ID NO: 57521 - DNA, 25 bp, Artificial
  probe
  misc_feature (1)..(25): SEQ ID NO: 3177; WAN024AKH_at; Start 41; Stop 65
ttaataccgccctctggtgagaaga

SEQ ID NO: 57522 - DNA, 25 bp, Artificial
  probe
  misc_feature (1)..(25): SEQ ID NO: 3177; WAN024AKH_at; Start 40; Stop 64
gttaataccgccctctggtgagaag

SEQ ID NO: 57523 - DNA, 25 bp, Artificial
  probe
  misc_feature (1)..(25): SEQ ID NO: 3177; WAN024AKH_at; Start 15; Stop 39
gggagtatccgattttatgatcaaa

SEQ ID NO: 57524 - DNA, 25 bp, Artificial
  probe
  misc_feature (1)..(25): SEQ ID NO: 3177; WAN024AKH_at; Start 11; Stop 35
tagagggagtatccgattttatgat

SEQ ID NO: 57525 - DNA, 25 bp, Artificial
  probe
  misc_feature (1)..(25): SEQ ID NO: 3177; WAN024AKH_at; Start 2; Stop 26
ttttctggatagagggagtatccga

SEQ ID NO: 57526 - DNA, 25 bp, Artificial
  probe
  misc_feature (1)..(25): SEQ ID NO: 3177; WAN024AKH_at; Start 48; Stop 72
cgccctctggtgagaagatgagtag

SEQ ID NO: 57527 - DNA, 25 bp, Artificial
  probe
  misc_feature (1)..(25): SEQ ID NO: 3177; WAN024AKH_at; Start 29; Stop 53
ttatgatcaaagttaataccgccct

SEQ ID NO: 57528 - DNA, 25 bp, Artificial
  probe
  misc_feature (1)..(25): SEQ ID NO: 3177; WAN024AKH_at; Start 50; Stop 74
ccctctggtgagaagatgagtaggt

SEQ ID NO: 57529 - DNA, 25 bp, Artificial
  probe
  misc_feature (1)..(25): SEQ ID NO: 3177; WAN024AKH_at; Start 25; Stop 49
gattttatgatcaaagttaataccg

SEQ ID NO: 57530 - DNA, 25 bp, Artificial
  probe
  misc_feature (1)..(25): SEQ ID NO: 3177; WAN024AKH_at; Start 16; Stop 40
ggagtatccgattttatgatcaaag

SEQ ID NO: 57531 - DNA, 25 bp, Artificial
  probe
  misc_feature (1)..(25): SEQ ID NO: 3177; WAN024AKH_at; Start 1; Stop 25
attttctggatagagggagtatccg

SEQ ID NO: 57532 - DNA, 25 bp, Artificial
  probe
  misc_feature (1)..(25): SEQ ID NO: 3177; WAN024AKH_at; Start 9; Stop 33
gatagagggagtatccgattttatg

SEQ ID NO: 57533 - DNA, 25 bp, Artificial
  probe
  misc_feature (1)..(25): SEQ ID NO: 3177; WAN024AKH_at; Start 51; Stop 75
cctctggtgagaagatgagtaggtt

SEQ ID NO: 57534 - DNA, 25 bp, Artificial
  probe
  misc_feature (1)..(25): SEQ ID NO: 3177; WAN024AKH_at; Start 42; Stop 66
taataccgccctctggtgagaagat

SEQ ID NO: 57535 - DNA, 25 bp, Artificial
  probe
  misc_feature (1)..(25): SEQ ID NO: 3177; WAN024AKH_at; Start 13; Stop 37
gagggagtatccgattttatgatca

SEQ ID NO: 57536 - DNA, 25 bp, Artificial
  probe
  misc_feature (1)..(25): SEQ ID NO: 5909; WAN024AKI_at; Start 21; Stop 45
ggttcaatcgattttcatctcccac

SEQ ID NO: 57537 - DNA, 25 bp, Artificial
  probe
  misc_feature (1)..(25): SEQ ID NO: 5909; WAN024AKI_at; Start 64; Stop 88
gaagtcttgcgggttttcagtctac

SEQ ID NO: 57538 - DNA, 25 bp, Artificial
  probe
  misc_feature (1)..(25): SEQ ID NO: 5909; WAN024AKI_at; Start 11; Stop 35
ccttgtaagtggttcaatcgatttt

SEQ ID NO: 57539 - DNA, 25 bp, Artificial
  probe
  misc_feature (1)..(25): SEQ ID NO: 5909; WAN024AKI_at; Start 67; Stop 91
gtcttgcgggttttcagtctactat

SEQ ID NO: 57540 - DNA, 25 bp, Artificial
  probe
  misc_feature (1)..(25): SEQ ID NO: 5909; WAN024AKI_at; Start 172; Stop 196
aatagactgctgtgagattttctac

SEQ ID NO: 57541 - DNA, 25 bp, Artificial
  probe
  misc_feature (1)..(25): SEQ ID NO: 5909; WAN024AKI_at; Start 126; Stop 150
tacccaagtacaagcctcagtcact

SEQ ID NO: 57542 - DNA, 25 bp, Artificial
  probe
  misc_feature (1)..(25): SEQ ID NO: 5909; WAN024AKI_at; Start 52; Stop 76
tctcgaaatgatgaagtcttgcggg

SEQ ID NO: 57543 - DNA, 25 bp, Artificial
  probe
  misc_feature (1)..(25): SEQ ID NO: 5909; WAN024AKI_at; Start 43; Stop 67
cacgtcacttctcgaaatgatgaag

SEQ ID NO: 57544 - DNA, 25 bp, Artificial
  probe
  misc_feature (1)..(25): SEQ ID NO: 5909; WAN024AKI_at; Start 93; Stop 117
tttctcttcctacggccttaagctc

SEQ ID NO: 57545 - DNA, 25 bp, Artificial
  probe
  misc_feature (1)..(25): SEQ ID NO: 5909; WAN024AKI_at; Start 103; Stop 127
tacggccttaagctcccttgctgta

SEQ ID NO: 57546 - DNA, 25 bp, Artificial
  probe
  misc_feature (1)..(25): SEQ ID NO: 5909; WAN024AKI_at; Start 166; Stop 190
gcaactaatagactgctgtgagatt

SEQ ID NO: 57547 - DNA, 25 bp, Artificial
  probe
  misc_feature (1)..(25): SEQ ID NO: 5909; WAN024AKI_at; Start 38; Stop 62
tctcccacgtcacttctcgaaatga

SEQ ID NO: 57548 - DNA, 25 bp, Artificial
  probe
  misc_feature (1)..(25): SEQ ID NO: 5909; WAN024AKI_at; Start 183; Stop 207
gtgagattttctactgtgttattga

SEQ ID NO: 57549 - DNA, 25 bp, Artificial
  probe
  misc_feature (1)..(25): SEQ ID NO: 5909; WAN024AKI_at; Start 69; Stop 93
cttgcgggttttcagtctactattt

SEQ ID NO: 57550 - DNA, 25 bp, Artificial
  probe
  misc_feature (1)..(25): SEQ ID NO: 5909; WAN024AKI_at; Start 149; Stop 173
cttgcctagtatgaaaagcaactaa

SEQ ID NO: 57551 - DNA, 25 bp, Artificial
  probe
  misc_feature (1)..(25): SEQ ID NO: 5909; WAN024AKI_at; Start 146; Stop 170
tcacttgcctagtatgaaaagcaac

SEQ ID NO: 57552 - DNA, 25 bp, Artificial
  probe
  misc_feature (1)..(25): SEQ ID NO: 5909; WAN024AKI_at; Start 176; Stop 200
gactgctgtgagattttctactgtg

SEQ ID NO: 57553 - DNA, 25 bp, Artificial
  probe
  misc_feature (1)..(25): SEQ ID NO: 5909; WAN024AKI_at; Start 25; Stop 49
caatcgattttcatctcccacgtca

SEQ ID NO: 57554 - DNA, 25 bp, Artificial
  probe
  misc_feature (1)..(25): SEQ ID NO: 5909; WAN024AKI_at; Start 55; Stop 79
cgaaatgatgaagtcttgcgggttt

SEQ ID NO: 57555 - DNA, 25 bp, Artificial
  probe
  misc_feature (1)..(25): SEQ ID NO: 5909; WAN024AKI_at; Start 157; Stop 181
gtatgaaaagcaactaatagactgc

SEQ ID NO: 57556 - DNA, 25 bp, Artificial
  probe
  misc_feature (1)..(25): SEQ ID NO: 5909; WAN024AKI_at; Start 161; Stop 185
gaaaagcaactaatagactgctgtg

SEQ ID NO: 57557 - DNA, 25 bp, Artificial
  probe
  misc_feature (1)..(25): SEQ ID NO: 5909; WAN024AKI_at; Start 131; Stop 155
aagtacaagcctcagtcacttgcct

SEQ ID NO: 57558 - DNA, 25 bp, Artificial
  probe
  misc_feature (1)..(25): SEQ ID NO: 5909; WAN024AKI_at; Start 143; Stop 167
cagtcacttgcctagtatgaaaagc

SEQ ID NO: 57559 - DNA, 25 bp, Artificial
  probe
  misc_feature (1)..(25): SEQ ID NO: 5909; WAN024AKI_at; Start 111; Stop 135
taagctcccttgctgtacccaagta

SEQ ID NO: 57560 - DNA, 25 bp, Artificial
  probe
  misc_feature (1)..(25): SEQ ID NO: 5909; WAN024AKI_at; Start 8; Stop 32
tctccttgtaagtggttcaatcgat

SEQ ID NO: 57561 - DNA, 25 bp, Artificial
  probe
  misc_feature (1)..(25): SEQ ID NO: 5909; WAN024AKI_at; Start 116; Stop 140
tcccttgctgtacccaagtacaagc

SEQ ID NO: 57562 - DNA, 25 bp, Artificial
  probe
  misc_feature (1)..(25): SEQ ID NO: 5909; WAN024AKI_at; Start 139; Stop 163
gcctcagtcacttgcctagtatgaa

SEQ ID NO: 57563 - DNA, 25 bp, Artificial
  probe
  misc_feature (1)..(25): SEQ ID NO: 5909; WAN024AKI_at; Start 84; Stop 108
tctactatttttctcttcctacggc

SEQ ID NO: 57564 - DNA, 25 bp, Artificial
  probe
  misc_feature (1)..(25): SEQ ID NO: 5909; WAN024AKI_at; Start 17; Stop 41
aagtggttcaatcgattttcatctc

SEQ ID NO: 57565 - DNA, 25 bp, Artificial
  probe
  misc_feature (1)..(25): SEQ ID NO: 5909; WAN024AKI_at; Start 3; Stop 27
tctattctccttgtaagtggttcaa

SEQ ID NO: 57566 - DNA, 25 bp, Artificial
  probe
  misc_feature (1)..(25): SEQ ID NO: 5909; WAN024AKI_at; Start 134; Stop 158
tacaagcctcagtcacttgcctagt

SEQ ID NO: 57567 - DNA, 25 bp, Artificial
  probe
  misc_feature (1)..(25): SEQ ID NO: 5909; WAN024AKI_at; Start 124; Stop 148
tgtacccaagtacaagcctcagtca

SEQ ID NO: 57568 - DNA, 25 bp, Artificial
  probe
  misc_feature (1)..(25): SEQ ID NO: 5909; WAN024AKI_at; Start 28; Stop 52
tcgattttcatctcccacgtcactt

SEQ ID NO: 57569 - DNA, 25 bp, Artificial
  probe
  misc_feature (1)..(25): SEQ ID NO: 5909; WAN024AKI_at; Start 121; Stop 145
tgctgtacccaagtacaagcctcag

SEQ ID NO: 57570 - DNA, 25 bp, Artificial
  probe
  misc_feature (1)..(25): SEQ ID NO: 4586; WAN024AKJ_at; Start 18; Stop 42
aatctcacagcagtctattagttgc

SEQ ID NO: 57571 - DNA, 25 bp, Artificial
  probe
  misc_feature (1)..(25): SEQ ID NO: 4586; WAN024AKJ_at; Start 1; Stop 25
tcaataacacagtagaaaatctcac

SEQ ID NO: 57572 - DNA, 25 bp, Artificial
  probe
  misc_feature (1)..(25): SEQ ID NO: 4586; WAN024AKJ_at; Start 45; Stop 69
ttcatactaggcaagtgactgaggc

SEQ ID NO: 57573 - DNA, 25 bp, Artificial
  probe
  misc_feature (1)..(25): SEQ ID NO: 4586; WAN024AKJ_at; Start 81; Stop 105
tacagcaagggagcttaaggccgta

SEQ ID NO: 57574 - DNA, 25 bp, Artificial
  probe
  misc_feature (1)..(25): SEQ ID NO: 4586; WAN024AKJ_at; Start 15; Stop 39
gaaaatctcacagcagtctattagt

SEQ ID NO: 57575 - DNA, 25 bp, Artificial
  probe
  misc_feature (1)..(25): SEQ ID NO: 4586; WAN024AKJ_at; Start 33; Stop 57
tattagttgcttttcatactaggca

SEQ ID NO: 57576 - DNA, 25 bp, Artificial
  probe
  misc_feature (1)..(25): SEQ ID NO: 4586; WAN024AKJ_at; Start 143; Stop 167
tcatcatttcgagaagtgacgtggg

SEQ ID NO: 57577 - DNA, 25 bp, Artificial
  probe
  misc_feature (1)..(25): SEQ ID NO: 4586; WAN024AKJ_at; Start 162; Stop 186
cgtgggagatgaaaatcgattgaac

SEQ ID NO: 57578 - DNA, 25 bp, Artificial
  probe
  misc_feature (1)..(25): SEQ ID NO: 4586; WAN024AKJ_at; Start 147; Stop 171
catttcgagaagtgacgtgggagat

SEQ ID NO: 57579 - DNA, 25 bp, Artificial
  probe
  misc_feature (1)..(25): SEQ ID NO: 4586; WAN024AKJ_at; Start 169; Stop 193
gatgaaaatcgattgaaccacttac

SEQ ID NO: 57580 - DNA, 25 bp, Artificial
  probe
  misc_feature (1)..(25): SEQ ID NO: 4586; WAN024AKJ_at; Start 60; Stop 84
tgactgaggcttgtacttgggtaca

SEQ ID NO: 57581 - DNA, 25 bp, Artificial
  probe
  misc_feature (1)..(25): SEQ ID NO: 4586; WAN024AKJ_at; Start 10; Stop 34
cagtagaaaatctcacagcagtcta

SEQ ID NO: 57582 - DNA, 25 bp, Artificial
  probe
  misc_feature (1)..(25): SEQ ID NO: 4586; WAN024AKJ_at; Start 100; Stop 124
gccgtaggaagagaaaaatagtaga

SEQ ID NO: 57583 - DNA, 25 bp, Artificial
  probe
  misc_feature (1)..(25): SEQ ID NO: 4586; WAN024AKJ_at; Start 173; Stop 197
aaaatcgattgaaccacttacaagg

SEQ ID NO: 57584 - DNA, 25 bp, Artificial
  probe
  misc_feature (1)..(25): SEQ ID NO: 4586; WAN024AKJ_at; Start 73; Stop 97
tacttgggtacagcaagggagctta

SEQ ID NO: 57585 - DNA, 25 bp, Artificial
  probe
  misc_feature (1)..(25): SEQ ID NO: 4586; WAN024AKJ_at; Start 8; Stop 32
cacagtagaaaatctcacagcagtc

SEQ ID NO: 57586 - DNA, 25 bp, Artificial
  probe
  misc_feature (1)..(25): SEQ ID NO: 4586; WAN024AKJ_at; Start 156; Stop 180
aagtgacgtgggagatgaaaatcga

SEQ ID NO: 57587 - DNA, 25 bp, Artificial
  probe
  misc_feature (1)..(25): SEQ ID NO: 4586; WAN024AKJ_at; Start 41; Stop 65
gcttttcatactaggcaagtgactg

SEQ ID NO: 57588 - DNA, 25 bp, Artificial
  probe
  misc_feature (1)..(25): SEQ ID NO: 4586; WAN024AKJ_at; Start 134; Stop 158
cgcaagacttcatcatttcgagaag

SEQ ID NO: 57589 - DNA, 25 bp, Artificial
  probe
  misc_feature (1)..(25): SEQ ID NO: 4586; WAN024AKJ_at; Start 166; Stop 190
ggagatgaaaatcgattgaaccact

SEQ ID NO: 57590 - DNA, 25 bp, Artificial
  probe
  misc_feature (1)..(25): SEQ ID NO: 4586; WAN024AKJ_at; Start 183; Stop 207
gaaccacttacaaggagaatagaaa

SEQ ID NO: 57591 - DNA, 25 bp, Artificial
  probe
  misc_feature (1)..(25): SEQ ID NO: 4586; WAN024AKJ_at; Start 47; Stop 71
catactaggcaagtgactgaggctt

SEQ ID NO: 57592 - DNA, 25 bp, Artificial
  probe
  misc_feature (1)..(25): SEQ ID NO: 4586; WAN024AKJ_at; Start 177; Stop 201
tcgattgaaccacttacaaggagaa

SEQ ID NO: 57593 - DNA, 25 bp, Artificial
  probe
  misc_feature (1)..(25): SEQ ID NO: 4586; WAN024AKJ_at; Start 132; Stop 156
cccgcaagacttcatcatttcgaga

SEQ ID NO: 57594 - DNA, 25 bp, Artificial
  probe
  misc_feature (1)..(25): SEQ ID NO: 4586; WAN024AKJ_at; Start 118; Stop 142
tagtagactgaaaacccgcaagact

SEQ ID NO: 57595 - DNA, 25 bp, Artificial
  probe
  misc_feature (1)..(25): SEQ ID NO: 4586; WAN024AKJ_at; Start 52; Stop 76
taggcaagtgactgaggcttgtact

SEQ ID NO: 57596 - DNA, 25 bp, Artificial
  probe
  misc_feature (1)..(25): SEQ ID NO: 4586; WAN024AKJ_at; Start 91; Stop 115
gagcttaaggccgtaggaagagaaa

SEQ ID NO: 57597 - DNA, 25 bp, Artificial
  probe
  misc_feature (1)..(25): SEQ ID NO: 4586; WAN024AKJ_at; Start 65; Stop 89
gaggcttgtacttgggtacagcaag

SEQ ID NO: 57598 - DNA, 25 bp, Artificial
  probe
  misc_feature (1)..(25): SEQ ID NO: 4586; WAN024AKJ_at; Start 126; Stop 150
tgaaaacccgcaagacttcatcatt

SEQ ID NO: 57599 - DNA, 25 bp, Artificial
  probe
  misc_feature (1)..(25): SEQ ID NO: 4586; WAN024AKJ_at; Start 68; Stop 92
gcttgtacttgggtacagcaaggga

SEQ ID NO: 57600 - DNA, 25 bp, Artificial
  probe
  misc_feature (1)..(25): SEQ ID NO: 4586; WAN024AKJ_at; Start 102; Stop 126
cgtaggaagagaaaaatagtagact

SEQ ID NO: 57601 - DNA, 25 bp, Artificial
  probe
  misc_feature (1)..(25): SEQ ID NO: 4586; WAN024AKJ_at; Start 115; Stop 139
aaatagtagactgaaaacccgcaag

SEQ ID NO: 57602 - DNA, 25 bp, Artificial
  probe
  misc_feature (1)..(25): SEQ ID NO: 4586; WAN024AKJ_at; Start 27; Stop 51
gcagtctattagttgcttttcatac

SEQ ID NO: 57603 - DNA, 25 bp, Artificial
  probe
  misc_feature (1)..(25): SEQ ID NO: 4586; WAN024AKJ_at; Start 120; Stop 144
gtagactgaaaacccgcaagacttc

SEQ ID NO: 57604 - DNA, 25 bp, Artificial
  probe
  misc_feature (1)..(25): SEQ ID NO: 3164; WAN024AKK_at; Start 12; Stop 36
actgacctagtataccacgattagg

SEQ ID NO: 57605 - DNA, 25 bp, Artificial
  probe
  misc_feature (1)..(25): SEQ ID NO: 3164; WAN024AKK_at; Start 127; Stop 151
tccacaccaagtaggagaaatgcaa

SEQ ID NO: 57606 - DNA, 25 bp, Artificial
  probe
  misc_feature (1)..(25): SEQ ID NO: 3164; WAN024AKK_at; Start 32; Stop 56
ttaggagtctgaaaaaagcatcacg

SEQ ID NO: 57607 - DNA, 25 bp, Artificial
  probe
  misc_feature (1)..(25): SEQ ID NO: 3164; WAN024AKK_at; Start 21; Stop 45
gtataccacgattaggagtctgaaa

SEQ ID NO: 57608 - DNA, 25 bp, Artificial
  probe
  misc_feature (1)..(25): SEQ ID NO: 3164; WAN024AKK_at; Start 129; Stop 153
cacaccaagtaggagaaatgcaaaa

SEQ ID NO: 57609 - DNA, 25 bp, Artificial
  probe
  misc_feature (1)..(25): SEQ ID NO: 3164; WAN024AKK_at; Start 11; Stop 35
tactgacctagtataccacgattag

SEQ ID NO: 57610 - DNA, 25 bp, Artificial
  probe
  misc_feature (1)..(25): SEQ ID NO: 3164; WAN024AKK_at; Start 29; Stop 53
cgattaggagtctgaaaaaagcatc

SEQ ID NO: 57611 - DNA, 25 bp, Artificial
  probe
  misc_feature (1)..(25): SEQ ID NO: 3164; WAN024AKK_at; Start 25; Stop 49
accacgattaggagtctgaaaaaag

SEQ ID NO: 57612 - DNA, 25 bp, Artificial
  probe
  misc_feature (1)..(25): SEQ ID NO: 3164; WAN024AKK_at; Start 19; Stop 43
tagtataccacgattaggagtctga

SEQ ID NO: 57613 - DNA, 25 bp, Artificial
  probe
  misc_feature (1)..(25): SEQ ID NO: 3164; WAN024AKK_at; Start 26; Stop 50
ccacgattaggagtctgaaaaaagc

SEQ ID NO: 57614 - DNA, 25 bp, Artificial
  probe
  misc_feature (1)..(25): SEQ ID NO: 3164; WAN024AKK_at; Start 22; Stop 46
tataccacgattaggagtctgaaaa

SEQ ID NO: 57615 - DNA, 25 bp, Artificial
  probe
  misc_feature (1)..(25): SEQ ID NO: 3164; WAN024AKK_at; Start 123; Stop 147
ccagtccacaccaagtaggagaaat

SEQ ID NO: 57616 - DNA, 25 bp, Artificial
  probe
  misc_feature (1)..(25): SEQ ID NO: 3164; WAN024AKK_at; Start 27; Stop 51
cacgattaggagtctgaaaaaagca

SEQ ID NO: 57617 - DNA, 25 bp, Artificial
  probe
  misc_feature (1)..(25): SEQ ID NO: 3164; WAN024AKK_at; Start 131; Stop 155
caccaagtaggagaaatgcaaaatt

SEQ ID NO: 57618 - DNA, 25 bp, Artificial
  probe
  misc_feature (1)..(25): SEQ ID NO: 3164; WAN024AKK_at; Start 108; Stop 132
ataaaactctcctacccagtccaca

SEQ ID NO: 57619 - DNA, 25 bp, Artificial
  probe
  misc_feature (1)..(25): SEQ ID NO: 3164; WAN024AKK_at; Start 18; Stop 42
ctagtataccacgattaggagtctg

SEQ ID NO: 57620 - DNA, 25 bp, Artificial
  probe
  misc_feature (1)..(25): SEQ ID NO: 3164; WAN024AKK_at; Start 128; Stop 152
ccacaccaagtaggagaaatgcaaa

SEQ ID NO: 57621 - DNA, 25 bp, Artificial
  probe
  misc_feature (1)..(25): SEQ ID NO: 3164; WAN024AKK_at; Start 15; Stop 39
gacctagtataccacgattaggagt

SEQ ID NO: 57622 - DNA, 25 bp, Artificial
  probe
  misc_feature (1)..(25): SEQ ID NO: 3164; WAN024AKK_at; Start 6; Stop 30
taaaatactgacctagtataccacg

SEQ ID NO: 57623 - DNA, 25 bp, Artificial
  probe
  misc_feature (1)..(25): SEQ ID NO: 3164; WAN024AKK_at; Start 17; Stop 41
cctagtataccacgattaggagtct

SEQ ID NO: 57624 - DNA, 25 bp, Artificial
  probe
  misc_feature (1)..(25): SEQ ID NO: 3164; WAN024AKK_at; Start 13; Stop 37
ctgacctagtataccacgattagga

SEQ ID NO: 57625 - DNA, 25 bp, Artificial
  probe
  misc_feature (1)..(25): SEQ ID NO: 3164; WAN024AKK_at; Start 20; Stop 44
agtataccacgattaggagtctgaa

SEQ ID NO: 57626 - DNA, 25 bp, Artificial
  probe
  misc_feature (1)..(25): SEQ ID NO: 3164; WAN024AKK_at; Start 14; Stop 38
tgacctagtataccacgattaggag

SEQ ID NO: 57627 - DNA, 25 bp, Artificial
  probe
  misc_feature (1)..(25): SEQ ID NO: 3164; WAN024AKK_at; Start 124; Stop 148
cagtccacaccaagtaggagaaatg

SEQ ID NO: 57628 - DNA, 25 bp, Artificial
  probe
  misc_feature (1)..(25): SEQ ID NO: 3164; WAN024AKK_at; Start 121; Stop 145
acccagtccacaccaagtaggagaa

SEQ ID NO: 57629 - DNA, 25 bp, Artificial
  probe
  misc_feature (1)..(25): SEQ ID NO: 3164; WAN024AKK_at; Start 33; Stop 57
taggagtctgaaaaaagcatcacga

SEQ ID NO: 57630 - DNA, 25 bp, Artificial
  probe
  misc_feature (1)..(25): SEQ ID NO: 3164; WAN024AKK_at; Start 30; Stop 54
gattaggagtctgaaaaaagcatca

SEQ ID NO: 57631 - DNA, 25 bp, Artificial
  probe
  misc_feature (1)..(25): SEQ ID NO: 3164; WAN024AKK_at; Start 126; Stop 150
gtccacaccaagtaggagaaatgca

SEQ ID NO: 57632 - DNA, 25 bp, Artificial
  probe
  misc_feature (1)..(25): SEQ ID NO: 3164; WAN024AKK_at; Start 23; Stop 47
ataccacgattaggagtctgaaaaa

SEQ ID NO: 57633 - DNA, 25 bp, Artificial
  probe
  misc_feature (1)..(25): SEQ ID NO: 3164; WAN024AKK_at; Start 125; Stop 149
agtccacaccaagtaggagaaatgc

SEQ ID NO: 57634 - DNA, 25 bp, Artificial
  probe
  misc_feature (1)..(25): SEQ ID NO: 3164; WAN024AKK_at; Start 120; Stop 144
tacccagtccacaccaagtaggaga

SEQ ID NO: 57635 - DNA, 25 bp, Artificial
  probe
  misc_feature (1)..(25): SEQ ID NO: 3164; WAN024AKK_at; Start 122; Stop 146
cccagtccacaccaagtaggagaaa

SEQ ID NO: 57636 - DNA, 25 bp, Artificial
  probe
  misc_feature (1)..(25): SEQ ID NO: 3164; WAN024AKK_at; Start 7; Stop 31
aaaatactgacctagtataccacga

SEQ ID NO: 57637 - DNA, 25 bp, Artificial
  probe
  misc_feature (1)..(25): SEQ ID NO: 3164; WAN024AKK_at; Start 24; Stop 48
taccacgattaggagtctgaaaaaa

SEQ ID NO: 57638 - DNA, 25 bp, Artificial
  probe
  misc_feature (1)..(25): SEQ ID NO: 310; WAN024AKL_at; Start 12; Stop 36
tctcctacttggtgtggactgggta

SEQ ID NO: 57639 - DNA, 25 bp, Artificial
  probe
  misc_feature (1)..(25): SEQ ID NO: 310; WAN024AKL_at; Start 107; Stop 131
cttttttcagactcctaatcgtggt

SEQ ID NO: 57640 - DNA, 25 bp, Artificial
  probe
  misc_feature (1)..(25): SEQ ID NO: 310; WAN024AKL_at; Start 111; Stop 135
tttcagactcctaatcgtggtatac

SEQ ID NO: 57641 - DNA, 25 bp, Artificial
  probe
  misc_feature (1)..(25): SEQ ID NO: 310; WAN024AKL_at; Start 119; Stop 143
tcctaatcgtggtatactaggtcag

SEQ ID NO: 57642 - DNA, 25 bp, Artificial
  probe
  misc_feature (1)..(25): SEQ ID NO: 310; WAN024AKL_at; Start 112; Stop 136
ttcagactcctaatcgtggtatact

SEQ ID NO: 57643 - DNA, 25 bp, Artificial
  probe
  misc_feature (1)..(25): SEQ ID NO: 310; WAN024AKL_at; Start 1; Stop 25
aattttgcatttctcctacttggtg

SEQ ID NO: 57644 - DNA, 25 bp, Artificial
  probe
  misc_feature (1)..(25): SEQ ID NO: 310; WAN024AKL_at; Start 4; Stop 28
tttgcatttctcctacttggtgtgg

SEQ ID NO: 57645 - DNA, 25 bp, Artificial
  probe
  misc_feature (1)..(25): SEQ ID NO: 310; WAN024AKL_at; Start 10; Stop 34
tttctcctacttggtgtggactggg

SEQ ID NO: 57646 - DNA, 25 bp, Artificial
  probe
  misc_feature (1)..(25): SEQ ID NO: 310; WAN024AKL_at; Start 115; Stop 139
agactcctaatcgtggtatactagg

SEQ ID NO: 57647 - DNA, 25 bp, Artificial
  probe
  misc_feature (1)..(25): SEQ ID NO: 310; WAN024AKL_at; Start 120; Stop 144
cctaatcgtggtatactaggtcagt

SEQ ID NO: 57648 - DNA, 25 bp, Artificial
  probe
  misc_feature (1)..(25): SEQ ID NO: 310; WAN024AKL_at; Start 24; Stop 48
tgtggactgggtaggagagttttat

SEQ ID NO: 57649 - DNA, 25 bp, Artificial
  probe
  misc_feature (1)..(25): SEQ ID NO: 310; WAN024AKL_at; Start 100; Stop 124
cgtgatgcttttttcagactcctaa

SEQ ID NO: 57650 - DNA, 25 bp, Artificial
  probe
  misc_feature (1)..(25): SEQ ID NO: 310; WAN024AKL_at; Start 114; Stop 138
cagactcctaatcgtggtatactag

SEQ ID NO: 57651 - DNA, 25 bp, Artificial
  probe
  misc_feature (1)..(25): SEQ ID NO: 310; WAN024AKL_at; Start 11; Stop 35
ttctcctacttggtgtggactgggt

SEQ ID NO: 57652 - DNA, 25 bp, Artificial
  probe
  misc_feature (1)..(25): SEQ ID NO: 310; WAN024AKL_at; Start 116; Stop 140
gactcctaatcgtggtatactaggt

SEQ ID NO: 57653 - DNA, 25 bp, Artificial
  probe
  misc_feature (1)..(25): SEQ ID NO: 310; WAN024AKL_at; Start 103; Stop 127
gatgcttttttcagactcctaatcg

SEQ ID NO: 57654 - DNA, 25 bp, Artificial
  probe
  misc_feature (1)..(25): SEQ ID NO: 310; WAN024AKL_at; Start 121; Stop 145
ctaatcgtggtatactaggtcagta

SEQ ID NO: 57655 - DNA, 25 bp, Artificial
  probe
  misc_feature (1)..(25): SEQ ID NO: 310; WAN024AKL_at; Start 129; Stop 153
ggtatactaggtcagtattttataa

SEQ ID NO: 57656 - DNA, 25 bp, Artificial
  probe
  misc_feature (1)..(25): SEQ ID NO: 310; WAN024AKL_at; Start 7; Stop 31
gcatttctcctacttggtgtggact

SEQ ID NO: 57657 - DNA, 25 bp, Artificial
  probe
  misc_feature (1)..(25): SEQ ID NO: 310; WAN024AKL_at; Start 105; Stop 129
tgcttttttcagactcctaatcgtg

SEQ ID NO: 57658 - DNA, 25 bp, Artificial
  probe
  misc_feature (1)..(25): SEQ ID NO: 310; WAN024AKL_at; Start 101; Stop 125
gtgatgcttttttcagactcctaat

SEQ ID NO: 57659 - DNA, 25 bp, Artificial
  probe
  misc_feature (1)..(25): SEQ ID NO: 310; WAN024AKL_at; Start 118; Stop 142
ctcctaatcgtggtatactaggtca

SEQ ID NO: 57660 - DNA, 25 bp, Artificial
  probe
  misc_feature (1)..(25): SEQ ID NO: 310; WAN024AKL_at; Start 13; Stop 37
ctcctacttggtgtggactgggtag

SEQ ID NO: 57661 - DNA, 25 bp, Artificial
  probe
  misc_feature (1)..(25): SEQ ID NO: 310; WAN024AKL_at; Start 109; Stop 133
tttttcagactcctaatcgtggtat

SEQ ID NO: 57662 - DNA, 25 bp, Artificial
  probe
  misc_feature (1)..(25): SEQ ID NO: 310; WAN024AKL_at; Start 108; Stop 132
ttttttcagactcctaatcgtggta

SEQ ID NO: 57663 - DNA, 25 bp, Artificial
  probe
  misc_feature (1)..(25): SEQ ID NO: 310; WAN024AKL_at; Start 113; Stop 137
tcagactcctaatcgtggtatacta

SEQ ID NO: 57664 - DNA, 25 bp, Artificial
  probe
  misc_feature (1)..(25): SEQ ID NO: 310; WAN024AKL_at; Start 122; Stop 146
taatcgtggtatactaggtcagtat

SEQ ID NO: 57665 - DNA, 25 bp, Artificial
  probe
  misc_feature (1)..(25): SEQ ID NO: 310; WAN024AKL_at; Start 110; Stop 134
ttttcagactcctaatcgtggtata

SEQ ID NO: 57666 - DNA, 25 bp, Artificial
  probe
  misc_feature (1)..(25): SEQ ID NO: 310; WAN024AKL_at; Start 126; Stop 150
cgtggtatactaggtcagtatttta

SEQ ID NO: 57667 - DNA, 25 bp, Artificial
  probe
  misc_feature (1)..(25): SEQ ID NO: 310; WAN024AKL_at; Start 17; Stop 41
tacttggtgtggactgggtaggaga

SEQ ID NO: 57668 - DNA, 25 bp, Artificial
  probe
  misc_feature (1)..(25): SEQ ID NO: 310; WAN024AKL_at; Start 8; Stop 32
catttctcctacttggtgtggactg

SEQ ID NO: 57669 - DNA, 25 bp, Artificial
  probe
  misc_feature (1)..(25): SEQ ID NO: 310; WAN024AKL_at; Start 106; Stop 130
gcttttttcagactcctaatcgtgg

SEQ ID NO: 57670 - DNA, 25 bp, Artificial
  probe
  misc_feature (1)..(25): SEQ ID NO: 310; WAN024AKL_at; Start 6; Stop 30
tgcatttctcctacttggtgtggac

SEQ ID NO: 57671 - DNA, 25 bp, Artificial
  probe
  misc_feature (1)..(25): SEQ ID NO: 310; WAN024AKL_at; Start 99; Stop 123
tcgtgatgcttttttcagactccta

SEQ ID NO: 57672 - DNA, 25 bp, Artificial
  probe
  misc_feature (1)..(25): SEQ ID NO: 428; WAN024AKM_at; Start 37; Stop 61
ttttagtttgcattggctattttag

SEQ ID NO: 57673 - DNA, 25 bp, Artificial
  probe
  misc_feature (1)..(25): SEQ ID NO: 428; WAN024AKM_at; Start 29; Stop 53
aatcgcttttttagtttgcattggc

SEQ ID NO: 57674 - DNA, 25 bp, Artificial
  probe
  misc_feature (1)..(25): SEQ ID NO: 428; WAN024AKM_at; Start 33; Stop 57
gcttttttagtttgcattggctatt

SEQ ID NO: 57675 - DNA, 25 bp, Artificial
  probe
  misc_feature (1)..(25): SEQ ID NO: 428; WAN024AKM_at; Start 32; Stop 56
cgcttttttagtttgcattggctat

SEQ ID NO: 57676 - DNA, 25 bp, Artificial
  probe
  misc_feature (1)..(25): SEQ ID NO: 428; WAN024AKM_at; Start 1; Stop 25
agatatactaaaagcgattggacca

SEQ ID NO: 57677 - DNA, 25 bp, Artificial
  probe
  misc_feature (1)..(25): SEQ ID NO: 428; WAN024AKM_at; Start 2; Stop 26
gatatactaaaagcgattggaccag

SEQ ID NO: 57678 - DNA, 25 bp, Artificial
  probe
  misc_feature (1)..(25): SEQ ID NO: 428; WAN024AKM_at; Start 3; Stop 27
atatactaaaagcgattggaccagc

SEQ ID NO: 57679 - DNA, 25 bp, Artificial
  probe
  misc_feature (1)..(25): SEQ ID NO: 428; WAN024AKM_at; Start 40; Stop 64
tagtttgcattggctattttaggaa

SEQ ID NO: 57680 - DNA, 25 bp, Artificial
  probe
  misc_feature (1)..(25): SEQ ID NO: 428; WAN024AKM_at; Start 36; Stop 60
tttttagtttgcattggctatttta

SEQ ID NO: 57681 - DNA, 25 bp, Artificial
  probe
  misc_feature (1)..(25): SEQ ID NO: 428; WAN024AKM_at; Start 42; Stop 66
gtttgcattggctattttaggaaac

SEQ ID NO: 57682 - DNA, 25 bp, Artificial
  probe
  misc_feature (1)..(25): SEQ ID NO: 428; WAN024AKM_at; Start 43; Stop 67
tttgcattggctattttaggaaact

SEQ ID NO: 57683 - DNA, 25 bp, Artificial
  probe
  misc_feature (1)..(25): SEQ ID NO: 428; WAN024AKM_at; Start 44; Stop 68
ttgcattggctattttaggaaactc

SEQ ID NO: 57684 - DNA, 25 bp, Artificial
  probe
  misc_feature (1)..(25): SEQ ID NO: 428; WAN024AKM_at; Start 31; Stop 55
tcgcttttttagtttgcattggcta

SEQ ID NO: 57685 - DNA, 25 bp, Artificial
  probe
  misc_feature (1)..(25): SEQ ID NO: 428; WAN024AKM_at; Start 38; Stop 62
tttagtttgcattggctattttagg

SEQ ID NO: 57686 - DNA, 25 bp, Artificial
  probe
  misc_feature (1)..(25): SEQ ID NO: 428; WAN024AKM_at; Start 30; Stop 54
atcgcttttttagtttgcattggct

SEQ ID NO: 57687 - DNA, 25 bp, Artificial
  probe
  misc_feature (1)..(25): SEQ ID NO: 428; WAN024AKM_at; Start 41; Stop 65
agtttgcattggctattttaggaaa

SEQ ID NO: 57688 - DNA, 25 bp, Artificial
  probe
  misc_feature (1)..(25): SEQ ID NO: 428; WAN024AKM_at; Start 34; Stop 58
cttttttagtttgcattggctattt

SEQ ID NO: 57689 - DNA, 25 bp, Artificial
  probe
  misc_feature (1)..(25): SEQ ID NO: 428; WAN024AKM_at; Start 39; Stop 63
ttagtttgcattggctattttagga

SEQ ID NO: 57690 - DNA, 25 bp, Artificial
  probe
  misc_feature (1)..(25): SEQ ID NO: 3614; WAN024AKN_at; Start 16; Stop 40
gccaatgcaaactaaaaaagcgatt

SEQ ID NO: 57691 - DNA, 25 bp, Artificial
  probe
  misc_feature (1)..(25): SEQ ID NO: 3614; WAN024AKN_at; Start 12; Stop 36
aatagccaatgcaaactaaaaaagc

SEQ ID NO: 57692 - DNA, 25 bp, Artificial
  probe
  misc_feature (1)..(25): SEQ ID NO: 3614; WAN024AKN_at; Start 43; Stop 67
ctggtccaatcgcttttagtatatc

SEQ ID NO: 57693 - DNA, 25 bp, Artificial
  probe
  misc_feature (1)..(25): SEQ ID NO: 3614; WAN024AKN_at; Start 8; Stop 32
ctaaaatagccaatgcaaactaaaa

SEQ ID NO: 57694 - DNA, 25 bp, Artificial
  probe
  misc_feature (1)..(25): SEQ ID NO: 3614; WAN024AKN_at; Start 15; Stop 39
agccaatgcaaactaaaaaagcgat

SEQ ID NO: 57695 - DNA, 25 bp, Artificial
  probe
  misc_feature (1)..(25): SEQ ID NO: 3614; WAN024AKN_at; Start 11; Stop 35
aaatagccaatgcaaactaaaaaag

SEQ ID NO: 57696 - DNA, 25 bp, Artificial
  probe
  misc_feature (1)..(25): SEQ ID NO: 3614; WAN024AKN_at; Start 2; Stop 26
agtttcctaaaatagccaatgcaaa

SEQ ID NO: 57697 - DNA, 25 bp, Artificial
  probe
  misc_feature (1)..(25): SEQ ID NO: 3614; WAN024AKN_at; Start 7; Stop 31
cctaaaatagccaatgcaaactaaa

SEQ ID NO: 57698 - DNA, 25 bp, Artificial
  probe
  misc_feature (1)..(25): SEQ ID NO: 3614; WAN024AKN_at; Start 1; Stop 25
gagtttcctaaaatagccaatgcaa

SEQ ID NO: 57699 - DNA, 25 bp, Artificial
  probe
  misc_feature (1)..(25): SEQ ID NO: 3614; WAN024AKN_at; Start 14; Stop 38
tagccaatgcaaactaaaaaagcga

SEQ ID NO: 57700 - DNA, 25 bp, Artificial
  probe
  misc_feature (1)..(25): SEQ ID NO: 3614; WAN024AKN_at; Start 44; Stop 68
tggtccaatcgcttttagtatatct

SEQ ID NO: 57701 - DNA, 25 bp, Artificial
  probe
  misc_feature (1)..(25): SEQ ID NO: 3614; WAN024AKN_at; Start 3; Stop 27
gtttcctaaaatagccaatgcaaac

SEQ ID NO: 57702 - DNA, 25 bp, Artificial
  probe
  misc_feature (1)..(25): SEQ ID NO: 3614; WAN024AKN_at; Start 5; Stop 29
ttcctaaaatagccaatgcaaacta

SEQ ID NO: 57703 - DNA, 25 bp, Artificial
  probe
  misc_feature (1)..(25): SEQ ID NO: 3614; WAN024AKN_at; Start 4; Stop 28
tttcctaaaatagccaatgcaaact

SEQ ID NO: 57704 - DNA, 25 bp, Artificial
  probe
  misc_feature (1)..(25): SEQ ID NO: 3614; WAN024AKN_at; Start 42; Stop 66
gctggtccaatcgcttttagtatat

SEQ ID NO: 57705 - DNA, 25 bp, Artificial
  probe
  misc_feature (1)..(25): SEQ ID NO: 3614; WAN024AKN_at; Start 6; Stop 30
tcctaaaatagccaatgcaaactaa

SEQ ID NO: 57706 - DNA, 25 bp, Artificial
  probe
  misc_feature (1)..(25): SEQ ID NO: 3614; WAN024AKN_at; Start 9; Stop 33
taaaatagccaatgcaaactaaaaa

SEQ ID NO: 57707 - DNA, 25 bp, Artificial
  probe
  misc_feature (1)..(25): SEQ ID NO: 3614; WAN024AKN_at; Start 13; Stop 37
atagccaatgcaaactaaaaaagcg

SEQ ID NO: 57708 - DNA, 25 bp, Artificial
  probe
  misc_feature (1)..(25): SEQ ID NO: 258; WAN024AKO_at; Start 32; Stop 56
agaaatctaaatactgactttttca

SEQ ID NO: 57709 - DNA, 25 bp, Artificial
  probe
  misc_feature (1)..(25): SEQ ID NO: 258; WAN024AKO_at; Start 33; Stop 57
gaaatctaaatactgactttttcat

SEQ ID NO: 57710 - DNA, 25 bp, Artificial
  probe
  misc_feature (1)..(25): SEQ ID NO: 258; WAN024AKO_at; Start 34; Stop 58
aaatctaaatactgactttttcatc

SEQ ID NO: 57711 - DNA, 25 bp, Artificial
  probe
  misc_feature (1)..(25): SEQ ID NO: 3635; WAN024AKP_at; Start 10; Stop 34
gtcagtatttagatttcttttagct

SEQ ID NO: 57712 - DNA, 25 bp, Artificial
  probe
  misc_feature (1)..(25): SEQ ID NO: 3635; WAN024AKP_at; Start 3; Stop 27
tgaaaaagtcagtatttagatttct

SEQ ID NO: 57713 - DNA, 25 bp, Artificial
  probe
  misc_feature (1)..(25): SEQ ID NO: 3635; WAN024AKP_at; Start 12; Stop 36
cagtatttagatttcttttagcttc

SEQ ID NO: 57714 - DNA, 25 bp, Artificial
  probe
  misc_feature (1)..(25): SEQ ID NO: 3635; WAN024AKP_at; Start 9; Stop 33
agtcagtatttagatttcttttagc

SEQ ID NO: 57715 - DNA, 25 bp, Artificial
  probe
  misc_feature (1)..(25): SEQ ID NO: 3635; WAN024AKP_at; Start 1; Stop 25
gatgaaaaagtcagtatttagattt

SEQ ID NO: 57716 - DNA, 25 bp, Artificial
  probe
  misc_feature (1)..(25): SEQ ID NO: 3635; WAN024AKP_at; Start 8; Stop 32
aagtcagtatttagatttcttttag

SEQ ID NO: 57717 - DNA, 25 bp, Artificial
  probe
  misc_feature (1)..(25): SEQ ID NO: 3635; WAN024AKP_at; Start 2; Stop 26
atgaaaaagtcagtatttagatttc

SEQ ID NO: 57718 - DNA, 25 bp, Artificial
  probe
  misc_feature (1)..(25): SEQ ID NO: 3635; WAN024AKP_at; Start 11; Stop 35
tcagtatttagatttcttttagctt

SEQ ID NO: 57719 - DNA, 25 bp, Artificial
  probe
  misc_feature (1)..(25): SEQ ID NO: 3635; WAN024AKP_at; Start 13; Stop 37
agtatttagatttcttttagcttct

SEQ ID NO: 57720 - DNA, 25 bp, Artificial
  probe
  misc_feature (1)..(25): SEQ ID NO: 4832; WAN024AKQ_at; Start 40; Stop 64
ctactttcgtttgaaaagtctagtg

SEQ ID NO: 57721 - DNA, 25 bp, Artificial
  probe
  misc_feature (1)..(25): SEQ ID NO: 4832; WAN024AKQ_at; Start 8; Stop 32
tctctttcctccagtattttattac

SEQ ID NO: 57722 - DNA, 25 bp, Artificial
  probe
  misc_feature (1)..(25): SEQ ID NO: 4832; WAN024AKQ_at; Start 85; Stop 109
tctactccccctatgctgaagttca

SEQ ID NO: 57723 - DNA, 25 bp, Artificial
  probe
  misc_feature (1)..(25): SEQ ID NO: 4832; WAN024AKQ_at; Start 49; Stop 73
tttgaaaagtctagtgaaaacatat

SEQ ID NO: 57724 - DNA, 25 bp, Artificial
  probe
  misc_feature (1)..(25): SEQ ID NO: 4832; WAN024AKQ_at; Start 29; Stop 53
ttactattctactactttcgtttga

SEQ ID NO: 57725 - DNA, 25 bp, Artificial
  probe
  misc_feature (1)..(25): SEQ ID NO: 4832; WAN024AKQ_at; Start 87; Stop 111
tactccccctatgctgaagttcaaa

SEQ ID NO: 57726 - DNA, 25 bp, Artificial
  probe
  misc_feature (1)..(25): SEQ ID NO: 4832; WAN024AKQ_at; Start 41; Stop 65
tactttcgtttgaaaagtctagtga

SEQ ID NO: 57727 - DNA, 25 bp, Artificial
  probe
  misc_feature (1)..(25): SEQ ID NO: 4832; WAN024AKQ_at; Start 6; Stop 30
actctctttcctccagtattttatt

SEQ ID NO: 57728 - DNA, 25 bp, Artificial
  probe
  misc_feature (1)..(25): SEQ ID NO: 4832; WAN024AKQ_at; Start 48; Stop 72
gtttgaaaagtctagtgaaaacata

SEQ ID NO: 57729 - DNA, 25 bp, Artificial
  probe
  misc_feature (1)..(25): SEQ ID NO: 4832; WAN024AKQ_at; Start 47; Stop 71
cgtttgaaaagtctagtgaaaacat

SEQ ID NO: 57730 - DNA, 25 bp, Artificial
  probe
  misc_feature (1)..(25): SEQ ID NO: 4832; WAN024AKQ_at; Start 77; Stop 101
attttagttctactccccctatgct

SEQ ID NO: 57731 - DNA, 25 bp, Artificial
  probe
  misc_feature (1)..(25): SEQ ID NO: 4832; WAN024AKQ_at; Start 83; Stop 107
gttctactccccctatgctgaagtt

SEQ ID NO: 57732 - DNA, 25 bp, Artificial
  probe
  misc_feature (1)..(25): SEQ ID NO: 4832; WAN024AKQ_at; Start 51; Stop 75
tgaaaagtctagtgaaaacatattt

SEQ ID NO: 57733 - DNA, 25 bp, Artificial
  probe
  misc_feature (1)..(25): SEQ ID NO: 4832; WAN024AKQ_at; Start 86; Stop 110
ctactccccctatgctgaagttcaa

SEQ ID NO: 57734 - DNA, 25 bp, Artificial
  probe
  misc_feature (1)..(25): SEQ ID NO: 4832; WAN024AKQ_at; Start 4; Stop 28
ctactctctttcctccagtatttta

SEQ ID NO: 57735 - DNA, 25 bp, Artificial
  probe
  misc_feature (1)..(25): SEQ ID NO: 4832; WAN024AKQ_at; Start 7; Stop 31
ctctctttcctccagtattttatta

SEQ ID NO: 57736 - DNA, 25 bp, Artificial
  probe
  misc_feature (1)..(25): SEQ ID NO: 4832; WAN024AKQ_at; Start 59; Stop 83
ctagtgaaaacatattttattttag

SEQ ID NO: 57737 - DNA, 25 bp, Artificial
  probe
  misc_feature (1)..(25): SEQ ID NO: 4832; WAN024AKQ_at; Start 28; Stop 52
attactattctactactttcgtttg

SEQ ID NO: 57738 - DNA, 25 bp, Artificial
  probe
  misc_feature (1)..(25): SEQ ID NO: 4832; WAN024AKQ_at; Start 15; Stop 39
cctccagtattttattactattcta

SEQ ID NO: 57739 - DNA, 25 bp, Artificial
  probe
  misc_feature (1)..(25): SEQ ID NO: 4832; WAN024AKQ_at; Start 46; Stop 70
tcgtttgaaaagtctagtgaaaaca

SEQ ID NO: 57740 - DNA, 25 bp, Artificial
  probe
  misc_feature (1)..(25): SEQ ID NO: 4832; WAN024AKQ_at; Start 14; Stop 38
tcctccagtattttattactattct

SEQ ID NO: 57741 - DNA, 25 bp, Artificial
  probe
  misc_feature (1)..(25): SEQ ID NO: 4832; WAN024AKQ_at; Start 56; Stop 80
agtctagtgaaaacatattttattt

SEQ ID NO: 57742 - DNA, 25 bp, Artificial
  probe
  misc_feature (1)..(25): SEQ ID NO: 4832; WAN024AKQ_at; Start 54; Stop 78
aaagtctagtgaaaacatattttat

SEQ ID NO: 57743 - DNA, 25 bp, Artificial
  probe
  misc_feature (1)..(25): SEQ ID NO: 4832; WAN024AKQ_at; Start 3; Stop 27
cctactctctttcctccagtatttt

SEQ ID NO: 57744 - DNA, 25 bp, Artificial
  probe
  misc_feature (1)..(25): SEQ ID NO: 4832; WAN024AKQ_at; Start 78; Stop 102
ttttagttctactccccctatgctg

SEQ ID NO: 57745 - DNA, 25 bp, Artificial
  probe
  misc_feature (1)..(25): SEQ ID NO: 4832; WAN024AKQ_at; Start 50; Stop 74
ttgaaaagtctagtgaaaacatatt

SEQ ID NO: 57746 - DNA, 25 bp, Artificial
  probe
  misc_feature (1)..(25): SEQ ID NO: 4832; WAN024AKQ_at; Start 79; Stop 103
tttagttctactccccctatgctga

SEQ ID NO: 57747 - DNA, 25 bp, Artificial
  probe
  misc_feature (1)..(25): SEQ ID NO: 4832; WAN024AKQ_at; Start 30; Stop 54
tactattctactactttcgtttgaa

SEQ ID NO: 57748 - DNA, 25 bp, Artificial
  probe
  misc_feature (1)..(25): SEQ ID NO: 4832; WAN024AKQ_at; Start 2; Stop 26
tcctactctctttcctccagtattt

SEQ ID NO: 57749 - DNA, 25 bp, Artificial
  probe
  misc_feature (1)..(25): SEQ ID NO: 4832; WAN024AKQ_at; Start 1; Stop 25
ttcctactctctttcctccagtatt

SEQ ID NO: 57750 - DNA, 25 bp, Artificial
  probe
  misc_feature (1)..(25): SEQ ID NO: 4832; WAN024AKQ_at; Start 84; Stop 108
ttctactccccctatgctgaagttc

SEQ ID NO: 57751 - DNA, 25 bp, Artificial
  probe
  misc_feature (1)..(25): SEQ ID NO: 4832; WAN024AKQ_at; Start 5; Stop 29
tactctctttcctccagtattttat

SEQ ID NO: 57752 - DNA, 25 bp, Artificial
  probe
  misc_feature (1)..(25): SEQ ID NO: 4832; WAN024AKQ_at; Start 10; Stop 34
tctttcctccagtattttattacta

SEQ ID NO: 57753 - DNA, 25 bp, Artificial
  probe
  misc_feature (1)..(25): SEQ ID NO: 4832; WAN024AKQ_at; Start 76; Stop 100
tattttagttctactccccctatgc

SEQ ID NO: 57754 - DNA, 25 bp, Artificial
  probe
  misc_feature (1)..(25): SEQ ID NO: 5916; WAN024AKR_at; Start 29; Stop 53
ctaaaataaaatatgttttcactag

SEQ ID NO: 57755 - DNA, 25 bp, Artificial
  probe
  misc_feature (1)..(25): SEQ ID NO: 5916; WAN024AKR_at; Start 3; Stop 27
tgaacttcagcatagggggagtaga

SEQ ID NO: 57756 - DNA, 25 bp, Artificial
  probe
  misc_feature (1)..(25): SEQ ID NO: 5916; WAN024AKR_at; Start 60; Stop 84
caaacgaaagtagtagaatagtaat

SEQ ID NO: 57757 - DNA, 25 bp, Artificial
  probe
  misc_feature (1)..(25): SEQ ID NO: 5916; WAN024AKR_at; Start 7; Stop 31
cttcagcatagggggagtagaacta

SEQ ID NO: 57758 - DNA, 25 bp, Artificial
  probe
  misc_feature (1)..(25): SEQ ID NO: 5916; WAN024AKR_at; Start 34; Stop 58
ataaaatatgttttcactagacttt

SEQ ID NO: 57759 - DNA, 25 bp, Artificial
  probe
  misc_feature (1)..(25): SEQ ID NO: 5916; WAN024AKR_at; Start 11; Stop 35
agcatagggggagtagaactaaaat

SEQ ID NO: 57760 - DNA, 25 bp, Artificial
  probe
  misc_feature (1)..(25): SEQ ID NO: 5916; WAN024AKR_at; Start 33; Stop 57
aataaaatatgttttcactagactt

SEQ ID NO: 57761 - DNA, 25 bp, Artificial
  probe
  misc_feature (1)..(25): SEQ ID NO: 5916; WAN024AKR_at; Start 10; Stop 34
cagcatagggggagtagaactaaaa

SEQ ID NO: 57762 - DNA, 25 bp, Artificial
  probe
  misc_feature (1)..(25): SEQ ID NO: 5916; WAN024AKR_at; Start 37; Stop 61
aaatatgttttcactagacttttca

SEQ ID NO: 57763 - DNA, 25 bp, Artificial
  probe
  misc_feature (1)..(25): SEQ ID NO: 5916; WAN024AKR_at; Start 47; Stop 71
tcactagacttttcaaacgaaagta

SEQ ID NO: 57764 - DNA, 25 bp, Artificial
  probe
  misc_feature (1)..(25): SEQ ID NO: 5916; WAN024AKR_at; Start 59; Stop 83
tcaaacgaaagtagtagaatagtaa

SEQ ID NO: 57765 - DNA, 25 bp, Artificial
  probe
  misc_feature (1)..(25): SEQ ID NO: 5916; WAN024AKR_at; Start 2; Stop 26
ttgaacttcagcatagggggagtag

SEQ ID NO: 57766 - DNA, 25 bp, Artificial
  probe
  misc_feature (1)..(25): SEQ ID NO: 5916; WAN024AKR_at; Start 4; Stop 28
gaacttcagcatagggggagtagaa

SEQ ID NO: 57767 - DNA, 25 bp, Artificial
  probe
  misc_feature (1)..(25): SEQ ID NO: 5916; WAN024AKR_at; Start 86; Stop 110
aaatactggaggaaagagagtagga

SEQ ID NO: 57768 - DNA, 25 bp, Artificial
  probe
  misc_feature (1)..(25): SEQ ID NO: 5916; WAN024AKR_at; Start 85; Stop 109
aaaatactggaggaaagagagtagg

SEQ ID NO: 57769 - DNA, 25 bp, Artificial
  probe
  misc_feature (1)..(25): SEQ ID NO: 5916; WAN024AKR_at; Start 6; Stop 30
acttcagcatagggggagtagaact

SEQ ID NO: 57770 - DNA, 25 bp, Artificial
  probe
  misc_feature (1)..(25): SEQ ID NO: 5916; WAN024AKR_at; Start 30; Stop 54
taaaataaaatatgttttcactaga

SEQ ID NO: 57771 - DNA, 25 bp, Artificial
  probe
  misc_feature (1)..(25): SEQ ID NO: 5916; WAN024AKR_at; Start 81; Stop 105
taataaaatactggaggaaagagag

SEQ ID NO: 57772 - DNA, 25 bp, Artificial
  probe
  misc_feature (1)..(25): SEQ ID NO: 5916; WAN024AKR_at; Start 41; Stop 65
atgttttcactagacttttcaaacg

SEQ ID NO: 57773 - DNA, 25 bp, Artificial
  probe
  misc_feature (1)..(25): SEQ ID NO: 5916; WAN024AKR_at; Start 58; Stop 82
ttcaaacgaaagtagtagaatagta

SEQ ID NO: 57774 - DNA, 25 bp, Artificial
  probe
  misc_feature (1)..(25): SEQ ID NO: 5916; WAN024AKR_at; Start 84; Stop 108
taaaatactggaggaaagagagtag

SEQ ID NO: 57775 - DNA, 25 bp, Artificial
  probe
  misc_feature (1)..(25): SEQ ID NO: 5916; WAN024AKR_at; Start 42; Stop 66
tgttttcactagacttttcaaacga

SEQ ID NO: 57776 - DNA, 25 bp, Artificial
  probe
  misc_feature (1)..(25): SEQ ID NO: 5916; WAN024AKR_at; Start 87; Stop 111
aatactggaggaaagagagtaggaa

SEQ ID NO: 57777 - DNA, 25 bp, Artificial
  probe
  misc_feature (1)..(25): SEQ ID NO: 5916; WAN024AKR_at; Start 38; Stop 62
aatatgttttcactagacttttcaa

SEQ ID NO: 57778 - DNA, 25 bp, Artificial
  probe
  misc_feature (1)..(25): SEQ ID NO: 5916; WAN024AKR_at; Start 39; Stop 63
atatgttttcactagacttttcaaa

SEQ ID NO: 57779 - DNA, 25 bp, Artificial
  probe
  misc_feature (1)..(25): SEQ ID NO: 5916; WAN024AKR_at; Start 1; Stop 25
tttgaacttcagcatagggggagta

SEQ ID NO: 57780 - DNA, 25 bp, Artificial
  probe
  misc_feature (1)..(25): SEQ ID NO: 5916; WAN024AKR_at; Start 5; Stop 29
aacttcagcatagggggagtagaac

SEQ ID NO: 57781 - DNA, 25 bp, Artificial
  probe
  misc_feature (1)..(25): SEQ ID NO: 5916; WAN024AKR_at; Start 82; Stop 106
aataaaatactggaggaaagagagt

SEQ ID NO: 57782 - DNA, 25 bp, Artificial
  probe
  misc_feature (1)..(25): SEQ ID NO: 5916; WAN024AKR_at; Start 12; Stop 36
gcatagggggagtagaactaaaata

SEQ ID NO: 57783 - DNA, 25 bp, Artificial
  probe
  misc_feature (1)..(25): SEQ ID NO: 5916; WAN024AKR_at; Start 48; Stop 72
cactagacttttcaaacgaaagtag

SEQ ID NO: 57784 - DNA, 25 bp, Artificial
  probe
  misc_feature (1)..(25): SEQ ID NO: 5916; WAN024AKR_at; Start 9; Stop 33
tcagcatagggggagtagaactaaa

SEQ ID NO: 57785 - DNA, 25 bp, Artificial
  probe
  misc_feature (1)..(25): SEQ ID NO: 5916; WAN024AKR_at; Start 83; Stop 107
ataaaatactggaggaaagagagta

SEQ ID NO: 57786 - DNA, 25 bp, Artificial
  probe
  misc_feature (1)..(25): SEQ ID NO: 5916; WAN024AKR_at; Start 40; Stop 64
tatgttttcactagacttttcaaac

SEQ ID NO: 57787 - DNA, 25 bp, Artificial
  probe
  misc_feature (1)..(25): SEQ ID NO: 5916; WAN024AKR_at; Start 32; Stop 56
aaataaaatatgttttcactagact

SEQ ID NO: 57788 - DNA, 25 bp, Artificial
  probe
  misc_feature (1)..(25): SEQ ID NO: 3664; WAN024AKS_at; Start 40; Stop 64
ctcgactttctctctgtttatttca

SEQ ID NO: 57789 - DNA, 25 bp, Artificial
  probe
  misc_feature (1)..(25): SEQ ID NO: 3664; WAN024AKS_at; Start 20; Stop 44
tctataagaaaaagccgaaactcga

SEQ ID NO: 57790 - DNA, 25 bp, Artificial
  probe
  misc_feature (1)..(25): SEQ ID NO: 3664; WAN024AKS_at; Start 6; Stop 30
tctccttctatttttctataagaaa

SEQ ID NO: 57791 - DNA, 25 bp, Artificial
  probe
  misc_feature (1)..(25): SEQ ID NO: 3664; WAN024AKS_at; Start 4; Stop 28
tttctccttctatttttctataaga

SEQ ID NO: 57792 - DNA, 25 bp, Artificial
  probe
  misc_feature (1)..(25): SEQ ID NO: 3664; WAN024AKS_at; Start 39; Stop 63
actcgactttctctctgtttatttc

SEQ ID NO: 57793 - DNA, 25 bp, Artificial
  probe
  misc_feature (1)..(25): SEQ ID NO: 3664; WAN024AKS_at; Start 42; Stop 66
cgactttctctctgtttatttcaac

SEQ ID NO: 57794 - DNA, 25 bp, Artificial
  probe
  misc_feature (1)..(25): SEQ ID NO: 3664; WAN024AKS_at; Start 33; Stop 57
gccgaaactcgactttctctctgtt

SEQ ID NO: 57795 - DNA, 25 bp, Artificial
  probe
  misc_feature (1)..(25): SEQ ID NO: 3664; WAN024AKS_at; Start 30; Stop 54
aaagccgaaactcgactttctctct

SEQ ID NO: 57796 - DNA, 25 bp, Artificial
  probe
  misc_feature (1)..(25): SEQ ID NO: 3664; WAN024AKS_at; Start 1; Stop 25
gattttctccttctatttttctata

SEQ ID NO: 57797 - DNA, 25 bp, Artificial
  probe
  misc_feature (1)..(25): SEQ ID NO: 3664; WAN024AKS_at; Start 34; Stop 58
ccgaaactcgactttctctctgttt

SEQ ID NO: 57798 - DNA, 25 bp, Artificial
  probe
  misc_feature (1)..(25): SEQ ID NO: 3664; WAN024AKS_at; Start 36; Stop 60
gaaactcgactttctctctgtttat

SEQ ID NO: 57799 - DNA, 25 bp, Artificial
  probe
  misc_feature (1)..(25): SEQ ID NO: 3664; WAN024AKS_at; Start 43; Stop 67
gactttctctctgtttatttcaacg

SEQ ID NO: 57800 - DNA, 25 bp, Artificial
  probe
  misc_feature (1)..(25): SEQ ID NO: 3664; WAN024AKS_at; Start 5; Stop 29
ttctccttctatttttctataagaa

SEQ ID NO: 57801 - DNA, 25 bp, Artificial
  probe
  misc_feature (1)..(25): SEQ ID NO: 3664; WAN024AKS_at; Start 32; Stop 56
agccgaaactcgactttctctctgt

SEQ ID NO: 57802 - DNA, 25 bp, Artificial
  probe
  misc_feature (1)..(25): SEQ ID NO: 3664; WAN024AKS_at; Start 35; Stop 59
cgaaactcgactttctctctgttta

SEQ ID NO: 57803 - DNA, 25 bp, Artificial
  probe
  misc_feature (1)..(25): SEQ ID NO: 3664; WAN024AKS_at; Start 44; Stop 68
actttctctctgtttatttcaacga

SEQ ID NO: 57804 - DNA, 25 bp, Artificial
  probe
  misc_feature (1)..(25): SEQ ID NO: 3664; WAN024AKS_at; Start 38; Stop 62
aactcgactttctctctgtttattt

SEQ ID NO: 57805 - DNA, 25 bp, Artificial
  probe
  misc_feature (1)..(25): SEQ ID NO: 3664; WAN024AKS_at; Start 31; Stop 55
aagccgaaactcgactttctctctg

SEQ ID NO: 57806 - DNA, 25 bp, Artificial
  probe
  misc_feature (1)..(25): SEQ ID NO: 3664; WAN024AKS_at; Start 37; Stop 61
aaactcgactttctctctgtttatt

SEQ ID NO: 57807 - DNA, 25 bp, Artificial
  probe
  misc_feature (1)..(25): SEQ ID NO: 3664; WAN024AKS_at; Start 41; Stop 65
tcgactttctctctgtttatttcaa

SEQ ID NO: 57808 - DNA, 25 bp, Artificial
  probe
  misc_feature (1)..(25): SEQ ID NO: 4638; WAN024AKT_at; Start 1; Stop 25
tcgttgaaataaacagagagaaagt

SEQ ID NO: 57809 - DNA, 25 bp, Artificial
  probe
  misc_feature (1)..(25): SEQ ID NO: 4638; WAN024AKT_at; Start 7; Stop 31
aaataaacagagagaaagtcgagtt

SEQ ID NO: 57810 - DNA, 25 bp, Artificial
  probe
  misc_feature (1)..(25): SEQ ID NO: 4638; WAN024AKT_at; Start 25; Stop 49
tcgagtttcggctttttcttataga

SEQ ID NO: 57811 - DNA, 25 bp, Artificial
  probe
  misc_feature (1)..(25): SEQ ID NO: 4638; WAN024AKT_at; Start 39; Stop 63
tttcttatagaaaaatagaaggaga

SEQ ID NO: 57812 - DNA, 25 bp, Artificial
  probe
  misc_feature (1)..(25): SEQ ID NO: 4638; WAN024AKT_at; Start 13; Stop 37
acagagagaaagtcgagtttcggct

SEQ ID NO: 57813 - DNA, 25 bp, Artificial
  probe
  misc_feature (1)..(25): SEQ ID NO: 4638; WAN024AKT_at; Start 10; Stop 34
taaacagagagaaagtcgagtttcg

SEQ ID NO: 57814 - DNA, 25 bp, Artificial
  probe
  misc_feature (1)..(25): SEQ ID NO: 4638; WAN024AKT_at; Start 44; Stop 68
tatagaaaaatagaaggagaaaatc

SEQ ID NO: 57815 - DNA, 25 bp, Artificial
  probe
  misc_feature (1)..(25): SEQ ID NO: 4638; WAN024AKT_at; Start 8; Stop 32
aataaacagagagaaagtcgagttt

SEQ ID NO: 57816 - DNA, 25 bp, Artificial
  probe
  misc_feature (1)..(25): SEQ ID NO: 4638; WAN024AKT_at; Start 6; Stop 30
gaaataaacagagagaaagtcgagt

SEQ ID NO: 57817 - DNA, 25 bp, Artificial
  probe
  misc_feature (1)..(25): SEQ ID NO: 4638; WAN024AKT_at; Start 2; Stop 26
cgttgaaataaacagagagaaagtc

SEQ ID NO: 57818 - DNA, 25 bp, Artificial
  probe
  misc_feature (1)..(25): SEQ ID NO: 4638; WAN024AKT_at; Start 15; Stop 39
agagagaaagtcgagtttcggcttt

SEQ ID NO: 57819 - DNA, 25 bp, Artificial
  probe
  misc_feature (1)..(25): SEQ ID NO: 4638; WAN024AKT_at; Start 12; Stop 36
aacagagagaaagtcgagtttcggc

SEQ ID NO: 57820 - DNA, 25 bp, Artificial
  probe
  misc_feature (1)..(25): SEQ ID NO: 4638; WAN024AKT_at; Start 14; Stop 38
cagagagaaagtcgagtttcggctt

SEQ ID NO: 57821 - DNA, 25 bp, Artificial
  probe
  misc_feature (1)..(25): SEQ ID NO: 4638; WAN024AKT_at; Start 3; Stop 27
gttgaaataaacagagagaaagtcg

SEQ ID NO: 57822 - DNA, 25 bp, Artificial
  probe
  misc_feature (1)..(25): SEQ ID NO: 4638; WAN024AKT_at; Start 9; Stop 33
ataaacagagagaaagtcgagtttc

SEQ ID NO: 57823 - DNA, 25 bp, Artificial
  probe
  misc_feature (1)..(25): SEQ ID NO: 4638; WAN024AKT_at; Start 5; Stop 29
tgaaataaacagagagaaagtcgag

SEQ ID NO: 57824 - DNA, 25 bp, Artificial
  probe
  misc_feature (1)..(25): SEQ ID NO: 4638; WAN024AKT_at; Start 40; Stop 64
ttcttatagaaaaatagaaggagaa

SEQ ID NO: 57825 - DNA, 25 bp, Artificial
  probe
  misc_feature (1)..(25): SEQ ID NO: 4638; WAN024AKT_at; Start 4; Stop 28
ttgaaataaacagagagaaagtcga

SEQ ID NO: 57826 - DNA, 25 bp, Artificial
  probe
  misc_feature (1)..(25): SEQ ID NO: 4638; WAN024AKT_at; Start 41; Stop 65
tcttatagaaaaatagaaggagaaa

SEQ ID NO: 57827 - DNA, 25 bp, Artificial
  probe
  misc_feature (1)..(25): SEQ ID NO: 4638; WAN024AKT_at; Start 11; Stop 35
aaacagagagaaagtcgagtttcgg

SEQ ID NO: 57828 - DNA, 25 bp, Artificial
  probe
  misc_feature (1)..(25): SEQ ID NO: 5897; WAN024AKU_at; Start 100; Stop 124
tgattttcttctaactccatctatg

SEQ ID NO: 57829 - DNA, 25 bp, Artificial
  probe
  misc_feature (1)..(25): SEQ ID NO: 5897; WAN024AKU_at; Start 94; Stop 118
ttcgattgattttcttctaactcca

SEQ ID NO: 57830 - DNA, 25 bp, Artificial
  probe
  misc_feature (1)..(25): SEQ ID NO: 5897; WAN024AKU_at; Start 113; Stop 137
actccatctatgtaaaccctttctc

SEQ ID NO: 57831 - DNA, 25 bp, Artificial
  probe
  misc_feature (1)..(25): SEQ ID NO: 5897; WAN024AKU_at; Start 101; Stop 125
gattttcttctaactccatctatgt

SEQ ID NO: 57832 - DNA, 25 bp, Artificial
  probe
  misc_feature (1)..(25): SEQ ID NO: 5897; WAN024AKU_at; Start 15; Stop 39
tgtatatttttatgggtcatcccat

SEQ ID NO: 57833 - DNA, 25 bp, Artificial
  probe
  misc_feature (1)..(25): SEQ ID NO: 5897; WAN024AKU_at; Start 28; Stop 52
gggtcatcccatttacattgttcat

SEQ ID NO: 57834 - DNA, 25 bp, Artificial
  probe
  misc_feature (1)..(25): SEQ ID NO: 5897; WAN024AKU_at; Start 7; Stop 31
aggcctcctgtatatttttatgggt

SEQ ID NO: 57835 - DNA, 25 bp, Artificial
  probe
  misc_feature (1)..(25): SEQ ID NO: 5897; WAN024AKU_at; Start 88; Stop 112
cgcagtttcgattgattttcttcta

SEQ ID NO: 57836 - DNA, 25 bp, Artificial
  probe
  misc_feature (1)..(25): SEQ ID NO: 5897; WAN024AKU_at; Start 9; Stop 33
gcctcctgtatatttttatgggtca

SEQ ID NO: 57837 - DNA, 25 bp, Artificial
  probe
  misc_feature (1)..(25): SEQ ID NO: 5897; WAN024AKU_at; Start 56; Stop 80
atcactttttgccaaaaaaatctag

SEQ ID NO: 57838 - DNA, 25 bp, Artificial
  probe
  misc_feature (1)..(25): SEQ ID NO: 5897; WAN024AKU_at; Start 89; Stop 113
gcagtttcgattgattttcttctaa

SEQ ID NO: 57839 - DNA, 25 bp, Artificial
  probe
  misc_feature (1)..(25): SEQ ID NO: 5897; WAN024AKU_at; Start 79; Stop 103
agtttttcccgcagtttcgattgat

SEQ ID NO: 57840 - DNA, 25 bp, Artificial
  probe
  misc_feature (1)..(25): SEQ ID NO: 5897; WAN024AKU_at; Start 13; Stop 37
cctgtatatttttatgggtcatccc

SEQ ID NO: 57841 - DNA, 25 bp, Artificial
  probe
  misc_feature (1)..(25): SEQ ID NO: 5897; WAN024AKU_at; Start 86; Stop 110
cccgcagtttcgattgattttcttc

SEQ ID NO: 57842 - DNA, 25 bp, Artificial
  probe
  misc_feature (1)..(25): SEQ ID NO: 5897; WAN024AKU_at; Start 111; Stop 135
taactccatctatgtaaaccctttc

SEQ ID NO: 57843 - DNA, 25 bp, Artificial
  probe
  misc_feature (1)..(25): SEQ ID NO: 5897; WAN024AKU_at; Start 10; Stop 34
cctcctgtatatttttatgggtcat

SEQ ID NO: 57844 - DNA, 25 bp, Artificial
  probe
  misc_feature (1)..(25): SEQ ID NO: 5897; WAN024AKU_at; Start 103; Stop 127
ttttcttctaactccatctatgtaa

SEQ ID NO: 57845 - DNA, 25 bp, Artificial
  probe
  misc_feature (1)..(25): SEQ ID NO: 5897; WAN024AKU_at; Start 84; Stop 108
ttcccgcagtttcgattgattttct

SEQ ID NO: 57846 - DNA, 25 bp, Artificial
  probe
  misc_feature (1)..(25): SEQ ID NO: 5897; WAN024AKU_at; Start 5; Stop 29
tcaggcctcctgtatatttttatgg

SEQ ID NO: 57847 - DNA, 25 bp, Artificial
  probe
  misc_feature (1)..(25): SEQ ID NO: 5897; WAN024AKU_at; Start 6; Stop 30
caggcctcctgtatatttttatggg

SEQ ID NO: 57848 - DNA, 25 bp, Artificial
  probe
  misc_feature (1)..(25): SEQ ID NO: 5897; WAN024AKU_at; Start 97; Stop 121
gattgattttcttctaactccatct

SEQ ID NO: 57849 - DNA, 25 bp, Artificial
  probe
  misc_feature (1)..(25): SEQ ID NO: 5897; WAN024AKU_at; Start 32; Stop 56
catcccatttacattgttcatttta

SEQ ID NO: 57850 - DNA, 25 bp, Artificial
  probe
  misc_feature (1)..(25): SEQ ID NO: 5897; WAN024AKU_at; Start 115; Stop 139
tccatctatgtaaaccctttctctc

SEQ ID NO: 57851 - DNA, 25 bp, Artificial
  probe
  misc_feature (1)..(25): SEQ ID NO: 5897; WAN024AKU_at; Start 90; Stop 114
cagtttcgattgattttcttctaac

SEQ ID NO: 57852 - DNA, 25 bp, Artificial
  probe
  misc_feature (1)..(25): SEQ ID NO: 5897; WAN024AKU_at; Start 12; Stop 36
tcctgtatatttttatgggtcatcc

SEQ ID NO: 57853 - DNA, 25 bp, Artificial
  probe
  misc_feature (1)..(25): SEQ ID NO: 5897; WAN024AKU_at; Start 29; Stop 53
ggtcatcccatttacattgttcatt

SEQ ID NO: 57854 - DNA, 25 bp, Artificial
  probe
  misc_feature (1)..(25): SEQ ID NO: 5897; WAN024AKU_at; Start 106; Stop 130
tcttctaactccatctatgtaaacc

SEQ ID NO: 57855 - DNA, 25 bp, Artificial
  probe
  misc_feature (1)..(25): SEQ ID NO: 5897; WAN024AKU_at; Start 109; Stop 133
tctaactccatctatgtaaaccctt

SEQ ID NO: 57856 - DNA, 25 bp, Artificial
  probe
  misc_feature (1)..(25): SEQ ID NO: 5897; WAN024AKU_at; Start 78; Stop 102
tagtttttcccgcagtttcgattga

SEQ ID NO: 57857 - DNA, 25 bp, Artificial
  probe
  misc_feature (1)..(25): SEQ ID NO: 5897; WAN024AKU_at; Start 85; Stop 109
tcccgcagtttcgattgattttctt

SEQ ID NO: 57858 - DNA, 25 bp, Artificial
  probe
  misc_feature (1)..(25): SEQ ID NO: 5897; WAN024AKU_at; Start 95; Stop 119
tcgattgattttcttctaactccat

SEQ ID NO: 57859 - DNA, 25 bp, Artificial
  probe
  misc_feature (1)..(25): SEQ ID NO: 5897; WAN024AKU_at; Start 83; Stop 107
tttcccgcagtttcgattgattttc

SEQ ID NO: 57860 - DNA, 25 bp, Artificial
  probe
  misc_feature (1)..(25): SEQ ID NO: 5897; WAN024AKU_at; Start 27; Stop 51
tgggtcatcccatttacattgttca

SEQ ID NO: 57861 - DNA, 25 bp, Artificial
  probe
  misc_feature (1)..(25): SEQ ID NO: 5897; WAN024AKU_at; Start 36; Stop 60
ccatttacattgttcattttatcac

SEQ ID NO: 57862 - DNA, 25 bp, Artificial
  probe
  misc_feature (1)..(25): SEQ ID NO: 3729; WAN024AKV_at; Start 34; Stop 58
gaaaatcaatcgaaactgcgggaaa

SEQ ID NO: 57863 - DNA, 25 bp, Artificial
  probe
  misc_feature (1)..(25): SEQ ID NO: 3729; WAN024AKV_at; Start 113; Stop 137
cataaaaatatacaggaggcctgat

SEQ ID NO: 57864 - DNA, 25 bp, Artificial
  probe
  misc_feature (1)..(25): SEQ ID NO: 3729; WAN024AKV_at; Start 23; Stop 47
tggagttagaagaaaatcaatcgaa

SEQ ID NO: 57865 - DNA, 25 bp, Artificial
  probe
  misc_feature (1)..(25): SEQ ID NO: 3729; WAN024AKV_at; Start 94; Stop 118
caatgtaaatgggatgacccataaa

SEQ ID NO: 57866 - DNA, 25 bp, Artificial
  probe
  misc_feature (1)..(25): SEQ ID NO: 3729; WAN024AKV_at; Start 106; Stop 130
gatgacccataaaaatatacaggag

SEQ ID NO: 57867 - DNA, 25 bp, Artificial
  probe
  misc_feature (1)..(25): SEQ ID NO: 3729; WAN024AKV_at; Start 8; Stop 32
aagggtttacatagatggagttaga

SEQ ID NO: 57868 - DNA, 25 bp, Artificial
  probe
  misc_feature (1)..(25): SEQ ID NO: 3729; WAN024AKV_at; Start 17; Stop 41
catagatggagttagaagaaaatca

SEQ ID NO: 57869 - DNA, 25 bp, Artificial
  probe
  misc_feature (1)..(25): SEQ ID NO: 3729; WAN024AKV_at; Start 6; Stop 30
gaaagggtttacatagatggagtta

SEQ ID NO: 57870 - DNA, 25 bp, Artificial
  probe
  misc_feature (1)..(25): SEQ ID NO: 3729; WAN024AKV_at; Start 104; Stop 128
gggatgacccataaaaatatacagg

SEQ ID NO: 57871 - DNA, 25 bp, Artificial
  probe
  misc_feature (1)..(25): SEQ ID NO: 3729; WAN024AKV_at; Start 42; Stop 66
atcgaaactgcgggaaaaactagat

SEQ ID NO: 57872 - DNA, 25 bp, Artificial
  probe
  misc_feature (1)..(25): SEQ ID NO: 3729; WAN024AKV_at; Start 88; Stop 112
aatgaacaatgtaaatgggatgacc

SEQ ID NO: 57873 - DNA, 25 bp, Artificial
  probe
  misc_feature (1)..(25): SEQ ID NO: 3729; WAN024AKV_at; Start 82; Stop 106
tgataaaatgaacaatgtaaatggg

SEQ ID NO: 57874 - DNA, 25 bp, Artificial
  probe
  misc_feature (1)..(25): SEQ ID NO: 3729; WAN024AKV_at; Start 39; Stop 63
tcaatcgaaactgcgggaaaaacta

SEQ ID NO: 57875 - DNA, 25 bp, Artificial
  probe
  misc_feature (1)..(25): SEQ ID NO: 3729; WAN024AKV_at; Start 105; Stop 129
ggatgacccataaaaatatacagga

SEQ ID NO: 57876 - DNA, 25 bp, Artificial
  probe
  misc_feature (1)..(25): SEQ ID NO: 3729; WAN024AKV_at; Start 30; Stop 54
agaagaaaatcaatcgaaactgcgg

SEQ ID NO: 57877 - DNA, 25 bp, Artificial
  probe
  misc_feature (1)..(25): SEQ ID NO: 3729; WAN024AKV_at; Start 91; Stop 115
gaacaatgtaaatgggatgacccat

SEQ ID NO: 57878 - DNA, 25 bp, Artificial
  probe
  misc_feature (1)..(25): SEQ ID NO: 3729; WAN024AKV_at; Start 38; Stop 62
atcaatcgaaactgcgggaaaaact

SEQ ID NO: 57879 - DNA, 25 bp, Artificial
  probe
  misc_feature (1)..(25): SEQ ID NO: 3729; WAN024AKV_at; Start 10; Stop 34
gggtttacatagatggagttagaag

SEQ ID NO: 57880 - DNA, 25 bp, Artificial
  probe
  misc_feature (1)..(25): SEQ ID NO: 3729; WAN024AKV_at; Start 89; Stop 113
atgaacaatgtaaatgggatgaccc

SEQ ID NO: 57881 - DNA, 25 bp, Artificial
  probe
  misc_feature (1)..(25): SEQ ID NO: 3729; WAN024AKV_at; Start 33; Stop 57
agaaaatcaatcgaaactgcgggaa

SEQ ID NO: 57882 - DNA, 25 bp, Artificial
  probe
  misc_feature (1)..(25): SEQ ID NO: 3729; WAN024AKV_at; Start 4; Stop 28
gagaaagggtttacatagatggagt

SEQ ID NO: 57883 - DNA, 25 bp, Artificial
  probe
  misc_feature (1)..(25): SEQ ID NO: 3729; WAN024AKV_at; Start 31; Stop 55
gaagaaaatcaatcgaaactgcggg

SEQ ID NO: 57884 - DNA, 25 bp, Artificial
  probe
  misc_feature (1)..(25): SEQ ID NO: 3729; WAN024AKV_at; Start 21; Stop 45
gatggagttagaagaaaatcaatcg

SEQ ID NO: 57885 - DNA, 25 bp, Artificial
  probe
  misc_feature (1)..(25): SEQ ID NO: 3729; WAN024AKV_at; Start 112; Stop 136
ccataaaaatatacaggaggcctga

SEQ ID NO: 57886 - DNA, 25 bp, Artificial
  probe
  misc_feature (1)..(25): SEQ ID NO: 3729; WAN024AKV_at; Start 61; Stop 85
ctagatttttttggcaaaaagtgat

SEQ ID NO: 57887 - DNA, 25 bp, Artificial
  probe
  misc_feature (1)..(25): SEQ ID NO: 3729; WAN024AKV_at; Start 115; Stop 139
taaaaatatacaggaggcctgataa

SEQ ID NO: 57888 - DNA, 25 bp, Artificial
  probe
  misc_feature (1)..(25): SEQ ID NO: 3729; WAN024AKV_at; Start 108; Stop 132
tgacccataaaaatatacaggaggc

SEQ ID NO: 57889 - DNA, 25 bp, Artificial
  probe
  misc_feature (1)..(25): SEQ ID NO: 3729; WAN024AKV_at; Start 2; Stop 26
gagagaaagggtttacatagatgga

SEQ ID NO: 57890 - DNA, 25 bp, Artificial
  probe
  misc_feature (1)..(25): SEQ ID NO: 3729; WAN024AKV_at; Start 92; Stop 116
aacaatgtaaatgggatgacccata

SEQ ID NO: 57891 - DNA, 25 bp, Artificial
  probe
  misc_feature (1)..(25): SEQ ID NO: 3729; WAN024AKV_at; Start 32; Stop 56
aagaaaatcaatcgaaactgcggga

SEQ ID NO: 57892 - DNA, 25 bp, Artificial
  probe
  misc_feature (1)..(25): SEQ ID NO: 3729; WAN024AKV_at; Start 15; Stop 39
tacatagatggagttagaagaaaat

SEQ ID NO: 57893 - DNA, 25 bp, Artificial
  probe
  misc_feature (1)..(25): SEQ ID NO: 3729; WAN024AKV_at; Start 90; Stop 114
tgaacaatgtaaatgggatgaccca

SEQ ID NO: 57894 - DNA, 25 bp, Artificial
  probe
  misc_feature (1)..(25): SEQ ID NO: 3729; WAN024AKV_at; Start 116; Stop 140
aaaaatatacaggaggcctgataaa

SEQ ID NO: 57895 - DNA, 25 bp, Artificial
  probe
  misc_feature (1)..(25): SEQ ID NO: 3729; WAN024AKV_at; Start 111; Stop 135
cccataaaaatatacaggaggcctg

SEQ ID NO: 57896 - DNA, 25 bp, Artificial
  probe
  misc_feature (1)..(25): SEQ ID NO: 172; WAN024AKW_at; Start 131; Stop 155
gaatagaaacacaagatgcaatctt

SEQ ID NO: 57897 - DNA, 25 bp, Artificial
  probe
  misc_feature (1)..(25): SEQ ID NO: 172; WAN024AKW_at; Start 61; Stop 85
gcaatgattttcaccactgctttcg

SEQ ID NO: 57898 - DNA, 25 bp, Artificial
  probe
  misc_feature (1)..(25): SEQ ID NO: 172; WAN024AKW_at; Start 52; Stop 76
caactgaaagcaatgattttcacca

SEQ ID NO: 57899 - DNA, 25 bp, Artificial
  probe
  misc_feature (1)..(25): SEQ ID NO: 172; WAN024AKW_at; Start 77; Stop 101
ctgctttcggatttattttgaattg

SEQ ID NO: 57900 - DNA, 25 bp, Artificial
  probe
  misc_feature (1)..(25): SEQ ID NO: 172; WAN024AKW_at; Start 65; Stop 89
tgattttcaccactgctttcggatt

SEQ ID NO: 57901 - DNA, 25 bp, Artificial
  probe
  misc_feature (1)..(25): SEQ ID NO: 172; WAN024AKW_at; Start 72; Stop 96
caccactgctttcggatttattttg

SEQ ID NO: 57902 - DNA, 25 bp, Artificial
  probe
  misc_feature (1)..(25): SEQ ID NO: 172; WAN024AKW_at; Start 63; Stop 87
aatgattttcaccactgctttcgga

SEQ ID NO: 57903 - DNA, 25 bp, Artificial
  probe
  misc_feature (1)..(25): SEQ ID NO: 172; WAN024AKW_at; Start 74; Stop 98
ccactgctttcggatttattttgaa

SEQ ID NO: 57904 - DNA, 25 bp, Artificial
  probe
  misc_feature (1)..(25): SEQ ID NO: 172; WAN024AKW_at; Start 92; Stop 116
ttttgaattgttaaatagccattcc

SEQ ID NO: 57905 - DNA, 25 bp, Artificial
  probe
  misc_feature (1)..(25): SEQ ID NO: 172; WAN024AKW_at; Start 124; Stop 148
tattcttgaatagaaacacaagatg

SEQ ID NO: 57906 - DNA, 25 bp, Artificial
  probe
  misc_feature (1)..(25): SEQ ID NO: 172; WAN024AKW_at; Start 53; Stop 77
aactgaaagcaatgattttcaccac

SEQ ID NO: 57907 - DNA, 25 bp, Artificial
  probe
  misc_feature (1)..(25): SEQ ID NO: 172; WAN024AKW_at; Start 68; Stop 92
ttttcaccactgctttcggatttat

SEQ ID NO: 57908 - DNA, 25 bp, Artificial
  probe
  misc_feature (1)..(25): SEQ ID NO: 172; WAN024AKW_at; Start 103; Stop 127
taaatagccattcctatccactatt

SEQ ID NO: 57909 - DNA, 25 bp, Artificial
  probe
  misc_feature (1)..(25): SEQ ID NO: 172; WAN024AKW_at; Start 62; Stop 86
caatgattttcaccactgctttcgg

SEQ ID NO: 57910 - DNA, 25 bp, Artificial
  probe
  misc_feature (1)..(25): SEQ ID NO: 172; WAN024AKW_at; Start 75; Stop 99
cactgctttcggatttattttgaat

SEQ ID NO: 57911 - DNA, 25 bp, Artificial
  probe
  misc_feature (1)..(25): SEQ ID NO: 172; WAN024AKW_at; Start 107; Stop 131
tagccattcctatccactattcttg

SEQ ID NO: 57912 - DNA, 25 bp, Artificial
  probe
  misc_feature (1)..(25): SEQ ID NO: 172; WAN024AKW_at; Start 64; Stop 88
atgattttcaccactgctttcggat

SEQ ID NO: 57913 - DNA, 25 bp, Artificial
  probe
  misc_feature (1)..(25): SEQ ID NO: 172; WAN024AKW_at; Start 56; Stop 80
tgaaagcaatgattttcaccactgc

SEQ ID NO: 57914 - DNA, 25 bp, Artificial
  probe
  misc_feature (1)..(25): SEQ ID NO: 172; WAN024AKW_at; Start 112; Stop 136
attcctatccactattcttgaatag

SEQ ID NO: 57915 - DNA, 25 bp, Artificial
  probe
  misc_feature (1)..(25): SEQ ID NO: 172; WAN024AKW_at; Start 70; Stop 94
ttcaccactgctttcggatttattt

SEQ ID NO: 57916 - DNA, 25 bp, Artificial
  probe
  misc_feature (1)..(25): SEQ ID NO: 172; WAN024AKW_at; Start 101; Stop 125
gttaaatagccattcctatccacta

SEQ ID NO: 57917 - DNA, 25 bp, Artificial
  probe
  misc_feature (1)..(25): SEQ ID NO: 172; WAN024AKW_at; Start 134; Stop 158
tagaaacacaagatgcaatctttat

SEQ ID NO: 57918 - DNA, 25 bp, Artificial
  probe
  misc_feature (1)..(25): SEQ ID NO: 172; WAN024AKW_at; Start 127; Stop 151
tcttgaatagaaacacaagatgcaa

SEQ ID NO: 57919 - DNA, 25 bp, Artificial
  probe
  misc_feature (1)..(25): SEQ ID NO: 172; WAN024AKW_at; Start 96; Stop 120
gaattgttaaatagccattcctatc

SEQ ID NO: 57920 - DNA, 25 bp, Artificial
  probe
  misc_feature (1)..(25): SEQ ID NO: 172; WAN024AKW_at; Start 97; Stop 121
aattgttaaatagccattcctatcc

SEQ ID NO: 57921 - DNA, 25 bp, Artificial
  probe
  misc_feature (1)..(25): SEQ ID NO: 172; WAN024AKW_at; Start 130; Stop 154
tgaatagaaacacaagatgcaatct

SEQ ID NO: 57922 - DNA, 25 bp, Artificial
  probe
  misc_feature (1)..(25): SEQ ID NO: 172; WAN024AKW_at; Start 100; Stop 124
tgttaaatagccattcctatccact

SEQ ID NO: 57923 - DNA, 25 bp, Artificial
  probe
  misc_feature (1)..(25): SEQ ID NO: 172; WAN024AKW_at; Start 136; Stop 160
gaaacacaagatgcaatctttattc

SEQ ID NO: 57924 - DNA, 25 bp, Artificial
  probe
  misc_feature (1)..(25): SEQ ID NO: 172; WAN024AKW_at; Start 119; Stop 143
tccactattcttgaatagaaacaca

SEQ ID NO: 57925 - DNA, 25 bp, Artificial
  probe
  misc_feature (1)..(25): SEQ ID NO: 172; WAN024AKW_at; Start 109; Stop 133
gccattcctatccactattcttgaa

SEQ ID NO: 57926 - DNA, 25 bp, Artificial
  probe
  misc_feature (1)..(25): SEQ ID NO: 172; WAN024AKW_at; Start 57; Stop 81
gaaagcaatgattttcaccactgct

SEQ ID NO: 57927 - DNA, 25 bp, Artificial
  probe
  misc_feature (1)..(25): SEQ ID NO: 172; WAN024AKW_at; Start 66; Stop 90
gattttcaccactgctttcggattt

SEQ ID NO: 57928 - DNA, 25 bp, Artificial
  probe
  misc_feature (1)..(25): SEQ ID NO: 172; WAN024AKW_at; Start 121; Stop 145
cactattcttgaatagaaacacaag

SEQ ID NO: 57929 - DNA, 25 bp, Artificial
  probe
  misc_feature (1)..(25): SEQ ID NO: 172; WAN024AKW_at; Start 129; Stop 153
ttgaatagaaacacaagatgcaatc

SEQ ID NO: 57930 - DNA, 25 bp, Artificial
  probe
  misc_feature (1)..(25): SEQ ID NO: 3170; WAN024AKX_at; Start 84; Stop 108
caaaataaatccgaaagcagtggtg

SEQ ID NO: 57931 - DNA, 25 bp, Artificial
  probe
  misc_feature (1)..(25): SEQ ID NO: 3170; WAN024AKX_at; Start 90; Stop 114
aaatccgaaagcagtggtgaaaatc

SEQ ID NO: 57932 - DNA, 25 bp, Artificial
  probe
  misc_feature (1)..(25): SEQ ID NO: 3170; WAN024AKX_at; Start 86; Stop 110
aaataaatccgaaagcagtggtgaa

SEQ ID NO: 57933 - DNA, 25 bp, Artificial
  probe
  misc_feature (1)..(25): SEQ ID NO: 3170; WAN024AKX_at; Start 94; Stop 118
ccgaaagcagtggtgaaaatcattg

SEQ ID NO: 57934 - DNA, 25 bp, Artificial
  probe
  misc_feature (1)..(25): SEQ ID NO: 3170; WAN024AKX_at; Start 60; Stop 84
gataggaatggctatttaacaattc

SEQ ID NO: 57935 - DNA, 25 bp, Artificial
  probe
  misc_feature (1)..(25): SEQ ID NO: 3170; WAN024AKX_at; Start 57; Stop 81
gtggataggaatggctatttaacaa

SEQ ID NO: 57936 - DNA, 25 bp, Artificial
  probe
  misc_feature (1)..(25): SEQ ID NO: 3170; WAN024AKX_at; Start 52; Stop 76
gaatagtggataggaatggctattt

SEQ ID NO: 57937 - DNA, 25 bp, Artificial
  probe
  misc_feature (1)..(25): SEQ ID NO: 3170; WAN024AKX_at; Start 97; Stop 121
aaagcagtggtgaaaatcattgctt

SEQ ID NO: 57938 - DNA, 25 bp, Artificial
  probe
  misc_feature (1)..(25): SEQ ID NO: 3170; WAN024AKX_at; Start 88; Stop 112
ataaatccgaaagcagtggtgaaaa

SEQ ID NO: 57939 - DNA, 25 bp, Artificial
  probe
  misc_feature (1)..(25): SEQ ID NO: 3170; WAN024AKX_at; Start 82; Stop 106
ttcaaaataaatccgaaagcagtgg

SEQ ID NO: 57940 - DNA, 25 bp, Artificial
  probe
  misc_feature (1)..(25): SEQ ID NO: 3170; WAN024AKX_at; Start 101; Stop 125
cagtggtgaaaatcattgctttcag

SEQ ID NO: 57941 - DNA, 25 bp, Artificial
  probe
  misc_feature (1)..(25): SEQ ID NO: 3170; WAN024AKX_at; Start 92; Stop 116
atccgaaagcagtggtgaaaatcat

SEQ ID NO: 57942 - DNA, 25 bp, Artificial
  probe
  misc_feature (1)..(25): SEQ ID NO: 3170; WAN024AKX_at; Start 95; Stop 119
cgaaagcagtggtgaaaatcattgc

SEQ ID NO: 57943 - DNA, 25 bp, Artificial
  probe
  misc_feature (1)..(25): SEQ ID NO: 3170; WAN024AKX_at; Start 89; Stop 113
taaatccgaaagcagtggtgaaaat

SEQ ID NO: 57944 - DNA, 25 bp, Artificial
  probe
  misc_feature (1)..(25): SEQ ID NO: 3170; WAN024AKX_at; Start 47; Stop 71
ttcaagaatagtggataggaatggc

SEQ ID NO: 57945 - DNA, 25 bp, Artificial
  probe
  misc_feature (1)..(25): SEQ ID NO: 3170; WAN024AKX_at; Start 64; Stop 88
ggaatggctatttaacaattcaaaa

SEQ ID NO: 57946 - DNA, 25 bp, Artificial
  probe
  misc_feature (1)..(25): SEQ ID NO: 3170; WAN024AKX_at; Start 85; Stop 109
aaaataaatccgaaagcagtggtga

SEQ ID NO: 57947 - DNA, 25 bp, Artificial
  probe
  misc_feature (1)..(25): SEQ ID NO: 3170; WAN024AKX_at; Start 104; Stop 128
tggtgaaaatcattgctttcagttg

SEQ ID NO: 57948 - DNA, 25 bp, Artificial
  probe
  misc_feature (1)..(25): SEQ ID NO: 3170; WAN024AKX_at; Start 62; Stop 86
taggaatggctatttaacaattcaa

SEQ ID NO: 57949 - DNA, 25 bp, Artificial
  probe
  misc_feature (1)..(25): SEQ ID NO: 3170; WAN024AKX_at; Start 37; Stop 61
tgtgtttctattcaagaatagtgga

SEQ ID NO: 57950 - DNA, 25 bp, Artificial
  probe
  misc_feature (1)..(25): SEQ ID NO: 3170; WAN024AKX_at; Start 79; Stop 103
caattcaaaataaatccgaaagcag

SEQ ID NO: 57951 - DNA, 25 bp, Artificial
  probe
  misc_feature (1)..(25): SEQ ID NO: 3170; WAN024AKX_at; Start 93; Stop 117
tccgaaagcagtggtgaaaatcatt

SEQ ID NO: 57952 - DNA, 25 bp, Artificial
  probe
  misc_feature (1)..(25): SEQ ID NO: 3170; WAN024AKX_at; Start 20; Stop 44
gaataaagattgcatcttgtgtttc

SEQ ID NO: 57953 - DNA, 25 bp, Artificial
  probe
  misc_feature (1)..(25): SEQ ID NO: 3170; WAN024AKX_at; Start 48; Stop 72
tcaagaatagtggataggaatggct

SEQ ID NO: 57954 - DNA, 25 bp, Artificial
  probe
  misc_feature (1)..(25): SEQ ID NO: 3170; WAN024AKX_at; Start 55; Stop 79
tagtggataggaatggctatttaac

SEQ ID NO: 57955 - DNA, 25 bp, Artificial
  probe
  misc_feature (1)..(25): SEQ ID NO: 3170; WAN024AKX_at; Start 91; Stop 115
aatccgaaagcagtggtgaaaatca

SEQ ID NO: 57956 - DNA, 25 bp, Artificial
  probe
  misc_feature (1)..(25): SEQ ID NO: 3170; WAN024AKX_at; Start 100; Stop 124
gcagtggtgaaaatcattgctttca

SEQ ID NO: 57957 - DNA, 25 bp, Artificial
  probe
  misc_feature (1)..(25): SEQ ID NO: 3170; WAN024AKX_at; Start 87; Stop 111
aataaatccgaaagcagtggtgaaa

SEQ ID NO: 57958 - DNA, 25 bp, Artificial
  probe
  misc_feature (1)..(25): SEQ ID NO: 3170; WAN024AKX_at; Start 99; Stop 123
agcagtggtgaaaatcattgctttc

SEQ ID NO: 57959 - DNA, 25 bp, Artificial
  probe
  misc_feature (1)..(25): SEQ ID NO: 3170; WAN024AKX_at; Start 30; Stop 54
tgcatcttgtgtttctattcaagaa

SEQ ID NO: 57960 - DNA, 25 bp, Artificial
  probe
  misc_feature (1)..(25): SEQ ID NO: 3170; WAN024AKX_at; Start 43; Stop 67
tctattcaagaatagtggataggaa

SEQ ID NO: 57961 - DNA, 25 bp, Artificial
  probe
  misc_feature (1)..(25): SEQ ID NO: 3170; WAN024AKX_at; Start 49; Stop 73
caagaatagtggataggaatggcta

SEQ ID NO: 57962 - DNA, 25 bp, Artificial
  probe
  misc_feature (1)..(25): SEQ ID NO: 3170; WAN024AKX_at; Start 27; Stop 51
gattgcatcttgtgtttctattcaa

SEQ ID NO: 57963 - DNA, 25 bp, Artificial
  probe
  misc_feature (1)..(25): SEQ ID NO: 3170; WAN024AKX_at; Start 96; Stop 120
gaaagcagtggtgaaaatcattgct

SEQ ID NO: 57964 - DNA, 25 bp, Artificial
  probe
  misc_feature (1)..(25): SEQ ID NO: 570; WAN024AKY_at; Start 8; Stop 32
taattcattcctttcgtttcactca

SEQ ID NO: 57965 - DNA, 25 bp, Artificial
  probe
  misc_feature (1)..(25): SEQ ID NO: 570; WAN024AKY_at; Start 16; Stop 40
tcctttcgtttcactcaaggcacaa

SEQ ID NO: 57966 - DNA, 25 bp, Artificial
  probe
  misc_feature (1)..(25): SEQ ID NO: 570; WAN024AKY_at; Start 30; Stop 54
tcaaggcacaacacagaatgaaaaa

SEQ ID NO: 57967 - DNA, 25 bp, Artificial
  probe
  misc_feature (1)..(25): SEQ ID NO: 570; WAN024AKY_at; Start 20; Stop 44
ttcgtttcactcaaggcacaacaca

SEQ ID NO: 57968 - DNA, 25 bp, Artificial
  probe
  misc_feature (1)..(25): SEQ ID NO: 570; WAN024AKY_at; Start 25; Stop 49
ttcactcaaggcacaacacagaatg

SEQ ID NO: 57969 - DNA, 25 bp, Artificial
  probe
  misc_feature (1)..(25): SEQ ID NO: 570; WAN024AKY_at; Start 31; Stop 55
caaggcacaacacagaatgaaaaag

SEQ ID NO: 57970 - DNA, 25 bp, Artificial
  probe
  misc_feature (1)..(25): SEQ ID NO: 570; WAN024AKY_at; Start 22; Stop 46
cgtttcactcaaggcacaacacaga

SEQ ID NO: 57971 - DNA, 25 bp, Artificial
  probe
  misc_feature (1)..(25): SEQ ID NO: 570; WAN024AKY_at; Start 35; Stop 59
gcacaacacagaatgaaaaagtgtt

SEQ ID NO: 57972 - DNA, 25 bp, Artificial
  probe
  misc_feature (1)..(25): SEQ ID NO: 570; WAN024AKY_at; Start 27; Stop 51
cactcaaggcacaacacagaatgaa

SEQ ID NO: 57973 - DNA, 25 bp, Artificial
  probe
  misc_feature (1)..(25): SEQ ID NO: 570; WAN024AKY_at; Start 45; Stop 69
gaatgaaaaagtgttgtgatcttta

SEQ ID NO: 57974 - DNA, 25 bp, Artificial
  probe
  misc_feature (1)..(25): SEQ ID NO: 570; WAN024AKY_at; Start 28; Stop 52
actcaaggcacaacacagaatgaaa

SEQ ID NO: 57975 - DNA, 25 bp, Artificial
  probe
  misc_feature (1)..(25): SEQ ID NO: 570; WAN024AKY_at; Start 123; Stop 147
ggtgaataagtgagtggtacagcca

SEQ ID NO: 57976 - DNA, 25 bp, Artificial
  probe
  misc_feature (1)..(25): SEQ ID NO: 570; WAN024AKY_at; Start 9; Stop 33
aattcattcctttcgtttcactcaa

SEQ ID NO: 57977 - DNA, 25 bp, Artificial
  probe
  misc_feature (1)..(25): SEQ ID NO: 570; WAN024AKY_at; Start 41; Stop 65
cacagaatgaaaaagtgttgtgatc

SEQ ID NO: 57978 - DNA, 25 bp, Artificial
  probe
  misc_feature (1)..(25): SEQ ID NO: 570; WAN024AKY_at; Start 32; Stop 56
aaggcacaacacagaatgaaaaagt

SEQ ID NO: 57979 - DNA, 25 bp, Artificial
  probe
  misc_feature (1)..(25): SEQ ID NO: 570; WAN024AKY_at; Start 43; Stop 67
cagaatgaaaaagtgttgtgatctt

SEQ ID NO: 57980 - DNA, 25 bp, Artificial
  probe
  misc_feature (1)..(25): SEQ ID NO: 570; WAN024AKY_at; Start 24; Stop 48
tttcactcaaggcacaacacagaat

SEQ ID NO: 57981 - DNA, 25 bp, Artificial
  probe
  misc_feature (1)..(25): SEQ ID NO: 570; WAN024AKY_at; Start 38; Stop 62
caacacagaatgaaaaagtgttgtg

SEQ ID NO: 57982 - DNA, 25 bp, Artificial
  probe
  misc_feature (1)..(25): SEQ ID NO: 570; WAN024AKY_at; Start 18; Stop 42
ctttcgtttcactcaaggcacaaca

SEQ ID NO: 57983 - DNA, 25 bp, Artificial
  probe
  misc_feature (1)..(25): SEQ ID NO: 570; WAN024AKY_at; Start 122; Stop 146
aggtgaataagtgagtggtacagcc

SEQ ID NO: 57984 - DNA, 25 bp, Artificial
  probe
  misc_feature (1)..(25): SEQ ID NO: 570; WAN024AKY_at; Start 21; Stop 45
tcgtttcactcaaggcacaacacag

SEQ ID NO: 57985 - DNA, 25 bp, Artificial
  probe
  misc_feature (1)..(25): SEQ ID NO: 570; WAN024AKY_at; Start 13; Stop 37
cattcctttcgtttcactcaaggca

SEQ ID NO: 57986 - DNA, 25 bp, Artificial
  probe
  misc_feature (1)..(25): SEQ ID NO: 570; WAN024AKY_at; Start 34; Stop 58
ggcacaacacagaatgaaaaagtgt

SEQ ID NO: 57987 - DNA, 25 bp, Artificial
  probe
  misc_feature (1)..(25): SEQ ID NO: 570; WAN024AKY_at; Start 26; Stop 50
tcactcaaggcacaacacagaatga

SEQ ID NO: 57988 - DNA, 25 bp, Artificial
  probe
  misc_feature (1)..(25): SEQ ID NO: 570; WAN024AKY_at; Start 101; Stop 125
tcactactacaaatcacggggaggt

SEQ ID NO: 57989 - DNA, 25 bp, Artificial
  probe
  misc_feature (1)..(25): SEQ ID NO: 570; WAN024AKY_at; Start 19; Stop 43
tttcgtttcactcaaggcacaacac

SEQ ID NO: 57990 - DNA, 25 bp, Artificial
  probe
  misc_feature (1)..(25): SEQ ID NO: 570; WAN024AKY_at; Start 10; Stop 34
attcattcctttcgtttcactcaag

SEQ ID NO: 57991 - DNA, 25 bp, Artificial
  probe
  misc_feature (1)..(25): SEQ ID NO: 570; WAN024AKY_at; Start 105; Stop 129
tactacaaatcacggggaggtgaat

SEQ ID NO: 57992 - DNA, 25 bp, Artificial
  probe
  misc_feature (1)..(25): SEQ ID NO: 570; WAN024AKY_at; Start 29; Stop 53
ctcaaggcacaacacagaatgaaaa

SEQ ID NO: 57993 - DNA, 25 bp, Artificial
  probe
  misc_feature (1)..(25): SEQ ID NO: 570; WAN024AKY_at; Start 14; Stop 38
attcctttcgtttcactcaaggcac

SEQ ID NO: 57994 - DNA, 25 bp, Artificial
  probe
  misc_feature (1)..(25): SEQ ID NO: 570; WAN024AKY_at; Start 12; Stop 36
tcattcctttcgtttcactcaaggc

SEQ ID NO: 57995 - DNA, 25 bp, Artificial
  probe
  misc_feature (1)..(25): SEQ ID NO: 570; WAN024AKY_at; Start 99; Stop 123
tatcactactacaaatcacggggag

SEQ ID NO: 57996 - DNA, 25 bp, Artificial
  probe
  misc_feature (1)..(25): SEQ ID NO: 570; WAN024AKY_at; Start 17; Stop 41
cctttcgtttcactcaaggcacaac

SEQ ID NO: 57997 - DNA, 25 bp, Artificial
  probe
  misc_feature (1)..(25): SEQ ID NO: 570; WAN024AKY_at; Start 50; Stop 74
aaaaagtgttgtgatctttattttg

SEQ ID NO: 57998 - DNA, 25 bp, Artificial
  probe
  misc_feature (1)..(25): SEQ ID NO: 4712; WAN024AKZ_at; Start 83; Stop 107
gatcacaacactttttcattctgtg

SEQ ID NO: 57999 - DNA, 25 bp, Artificial
  probe
  misc_feature (1)..(25): SEQ ID NO: 4712; WAN024AKZ_at; Start 119; Stop 143
gtgaaacgaaaggaatgaattataa

SEQ ID NO: 58000 - DNA, 25 bp, Artificial
  probe
  misc_feature (1)..(25): SEQ ID NO: 4712; WAN024AKZ_at; Start 99; Stop 123
cattctgtgttgtgccttgagtgaa

SEQ ID NO: 58001 - DNA, 25 bp, Artificial
  probe
  misc_feature (1)..(25): SEQ ID NO: 4712; WAN024AKZ_at; Start 27; Stop 51
ccccgtgatttgtagtagtgatagg

SEQ ID NO: 58002 - DNA, 25 bp, Artificial
  probe
  misc_feature (1)..(25): SEQ ID NO: 4712; WAN024AKZ_at; Start 24; Stop 48
cctccccgtgatttgtagtagtgat

SEQ ID NO: 58003 - DNA, 25 bp, Artificial
  probe
  misc_feature (1)..(25): SEQ ID NO: 4712; WAN024AKZ_at; Start 103; Stop 127
ctgtgttgtgccttgagtgaaacga

SEQ ID NO: 58004 - DNA, 25 bp, Artificial
  probe
  misc_feature (1)..(25): SEQ ID NO: 4712; WAN024AKZ_at; Start 123; Stop 147
aacgaaaggaatgaattataaatat

SEQ ID NO: 58005 - DNA, 25 bp, Artificial
  probe
  misc_feature (1)..(25): SEQ ID NO: 4712; WAN024AKZ_at; Start 108; Stop 132
ttgtgccttgagtgaaacgaaagga

SEQ ID NO: 58006 - DNA, 25 bp, Artificial
  probe
  misc_feature (1)..(25): SEQ ID NO: 4712; WAN024AKZ_at; Start 69; Stop 93
taaaacaaaataaagatcacaacac

SEQ ID NO: 58007 - DNA, 25 bp, Artificial
  probe
  misc_feature (1)..(25): SEQ ID NO: 4712; WAN024AKZ_at; Start 100; Stop 124
attctgtgttgtgccttgagtgaaa

SEQ ID NO: 58008 - DNA, 25 bp, Artificial
  probe
  misc_feature (1)..(25): SEQ ID NO: 4712; WAN024AKZ_at; Start 95; Stop 119
ttttcattctgtgttgtgccttgag

SEQ ID NO: 58009 - DNA, 25 bp, Artificial
  probe
  misc_feature (1)..(25): SEQ ID NO: 4712; WAN024AKZ_at; Start 90; Stop 114
acactttttcattctgtgttgtgcc

SEQ ID NO: 58010 - DNA, 25 bp, Artificial
  probe
  misc_feature (1)..(25): SEQ ID NO: 4712; WAN024AKZ_at; Start 97; Stop 121
ttcattctgtgttgtgccttgagtg

SEQ ID NO: 58011 - DNA, 25 bp, Artificial
  probe
  misc_feature (1)..(25): SEQ ID NO: 4712; WAN024AKZ_at; Start 116; Stop 140
tgagtgaaacgaaaggaatgaatta

SEQ ID NO: 58012 - DNA, 25 bp, Artificial
  probe
  misc_feature (1)..(25): SEQ ID NO: 4712; WAN024AKZ_at; Start 104; Stop 128
tgtgttgtgccttgagtgaaacgaa

SEQ ID NO: 58013 - DNA, 25 bp, Artificial
  probe
  misc_feature (1)..(25): SEQ ID NO: 4712; WAN024AKZ_at; Start 20; Stop 44
ttcacctccccgtgatttgtagtag

SEQ ID NO: 58014 - DNA, 25 bp, Artificial
  probe
  misc_feature (1)..(25): SEQ ID NO: 4712; WAN024AKZ_at; Start 117; Stop 141
gagtgaaacgaaaggaatgaattat

SEQ ID NO: 58015 - DNA, 25 bp, Artificial
  probe
  misc_feature (1)..(25): SEQ ID NO: 4712; WAN024AKZ_at; Start 114; Stop 138
cttgagtgaaacgaaaggaatgaat

SEQ ID NO: 58016 - DNA, 25 bp, Artificial
  probe
  misc_feature (1)..(25): SEQ ID NO: 4712; WAN024AKZ_at; Start 55; Stop 79
tctcactattattataaaacaaaat

SEQ ID NO: 58017 - DNA, 25 bp, Artificial
  probe
  misc_feature (1)..(25): SEQ ID NO: 4712; WAN024AKZ_at; Start 105; Stop 129
gtgttgtgccttgagtgaaacgaaa

SEQ ID NO: 58018 - DNA, 25 bp, Artificial
  probe
  misc_feature (1)..(25): SEQ ID NO: 4712; WAN024AKZ_at; Start 22; Stop 46
cacctccccgtgatttgtagtagtg

SEQ ID NO: 58019 - DNA, 25 bp, Artificial
  probe
  misc_feature (1)..(25): SEQ ID NO: 4712; WAN024AKZ_at; Start 113; Stop 137
ccttgagtgaaacgaaaggaatgaa

SEQ ID NO: 58020 - DNA, 25 bp, Artificial
  probe
  misc_feature (1)..(25): SEQ ID NO: 4712; WAN024AKZ_at; Start 102; Stop 126
tctgtgttgtgccttgagtgaaacg

SEQ ID NO: 58021 - DNA, 25 bp, Artificial
  probe
  misc_feature (1)..(25): SEQ ID NO: 4712; WAN024AKZ_at; Start 109; Stop 133
tgtgccttgagtgaaacgaaaggaa

SEQ ID NO: 58022 - DNA, 25 bp, Artificial
  probe
  misc_feature (1)..(25): SEQ ID NO: 4712; WAN024AKZ_at; Start 111; Stop 135
tgccttgagtgaaacgaaaggaatg

SEQ ID NO: 58023 - DNA, 25 bp, Artificial
  probe
  misc_feature (1)..(25): SEQ ID NO: 4712; WAN024AKZ_at; Start 106; Stop 130
tgttgtgccttgagtgaaacgaaag

SEQ ID NO: 58024 - DNA, 25 bp, Artificial
  probe
  misc_feature (1)..(25): SEQ ID NO: 4712; WAN024AKZ_at; Start 26; Stop 50
tccccgtgatttgtagtagtgatag

SEQ ID NO: 58025 - DNA, 25 bp, Artificial
  probe
  misc_feature (1)..(25): SEQ ID NO: 4712; WAN024AKZ_at; Start 14; Stop 38
cacttattcacctccccgtgatttg

SEQ ID NO: 58026 - DNA, 25 bp, Artificial
  probe
  misc_feature (1)..(25): SEQ ID NO: 4712; WAN024AKZ_at; Start 93; Stop 117
ctttttcattctgtgttgtgccttg

SEQ ID NO: 58027 - DNA, 25 bp, Artificial
  probe
  misc_feature (1)..(25): SEQ ID NO: 4712; WAN024AKZ_at; Start 23; Stop 47
acctccccgtgatttgtagtagtga

SEQ ID NO: 58028 - DNA, 25 bp, Artificial
  probe
  misc_feature (1)..(25): SEQ ID NO: 4712; WAN024AKZ_at; Start 25; Stop 49
ctccccgtgatttgtagtagtgata

SEQ ID NO: 58029 - DNA, 25 bp, Artificial
  probe
  misc_feature (1)..(25): SEQ ID NO: 4712; WAN024AKZ_at; Start 2; Stop 26
ggctgtaccactcacttattcacct

SEQ ID NO: 58030 - DNA, 25 bp, Artificial
  probe
  misc_feature (1)..(25): SEQ ID NO: 4712; WAN024AKZ_at; Start 1; Stop 25
tggctgtaccactcacttattcacc

SEQ ID NO: 58031 - DNA, 25 bp, Artificial
  probe
  misc_feature (1)..(25): SEQ ID NO: 4712; WAN024AKZ_at; Start 112; Stop 136
gccttgagtgaaacgaaaggaatga

SEQ ID NO: 58032 - DNA, 25 bp, Artificial
  probe
  misc_feature (1)..(25): SEQ ID NO: 152; WAN024AL2_at; Start 25; Stop 49
tccaagaacaattagtttcatcact

SEQ ID NO: 58033 - DNA, 25 bp, Artificial
  probe
  misc_feature (1)..(25): SEQ ID NO: 152; WAN024AL2_at; Start 26; Stop 50
ccaagaacaattagtttcatcacta

SEQ ID NO: 58034 - DNA, 25 bp, Artificial
  probe
  misc_feature (1)..(25): SEQ ID NO: 152; WAN024AL2_at; Start 38; Stop 62
agtttcatcactaaaagttcaagta

SEQ ID NO: 58035 - DNA, 25 bp, Artificial
  probe
  misc_feature (1)..(25): SEQ ID NO: 152; WAN024AL2_at; Start 27; Stop 51
caagaacaattagtttcatcactaa

SEQ ID NO: 58036 - DNA, 25 bp, Artificial
  probe
  misc_feature (1)..(25): SEQ ID NO: 152; WAN024AL2_at; Start 40; Stop 64
tttcatcactaaaagttcaagtaaa

SEQ ID NO: 58037 - DNA, 25 bp, Artificial
  probe
  misc_feature (1)..(25): SEQ ID NO: 152; WAN024AL2_at; Start 8; Stop 32
aatcaggaaagctgaaatccaagaa

SEQ ID NO: 58038 - DNA, 25 bp, Artificial
  probe
  misc_feature (1)..(25): SEQ ID NO: 152; WAN024AL2_at; Start 7; Stop 31
taatcaggaaagctgaaatccaaga

SEQ ID NO: 58039 - DNA, 25 bp, Artificial
  probe
  misc_feature (1)..(25): SEQ ID NO: 152; WAN024AL2_at; Start 55; Stop 79
ttcaagtaaatttcagtccgaatat

SEQ ID NO: 58040 - DNA, 25 bp, Artificial
  probe
  misc_feature (1)..(25): SEQ ID NO: 152; WAN024AL2_at; Start 37; Stop 61
tagtttcatcactaaaagttcaagt

SEQ ID NO: 58041 - DNA, 25 bp, Artificial
  probe
  misc_feature (1)..(25): SEQ ID NO: 152; WAN024AL2_at; Start 5; Stop 29
cataatcaggaaagctgaaatccaa

SEQ ID NO: 58042 - DNA, 25 bp, Artificial
  probe
  misc_feature (1)..(25): SEQ ID NO: 152; WAN024AL2_at; Start 39; Stop 63
gtttcatcactaaaagttcaagtaa

SEQ ID NO: 58043 - DNA, 25 bp, Artificial
  probe
  misc_feature (1)..(25): SEQ ID NO: 152; WAN024AL2_at; Start 22; Stop 46
aaatccaagaacaattagtttcatc

SEQ ID NO: 58044 - DNA, 25 bp, Artificial
  probe
  misc_feature (1)..(25): SEQ ID NO: 152; WAN024AL2_at; Start 33; Stop 57
caattagtttcatcactaaaagttc

SEQ ID NO: 58045 - DNA, 25 bp, Artificial
  probe
  misc_feature (1)..(25): SEQ ID NO: 152; WAN024AL2_at; Start 45; Stop 69
tcactaaaagttcaagtaaatttca

SEQ ID NO: 58046 - DNA, 25 bp, Artificial
  probe
  misc_feature (1)..(25): SEQ ID NO: 152; WAN024AL2_at; Start 6; Stop 30
ataatcaggaaagctgaaatccaag

SEQ ID NO: 58047 - DNA, 25 bp, Artificial
  probe
  misc_feature (1)..(25): SEQ ID NO: 152; WAN024AL2_at; Start 53; Stop 77
agttcaagtaaatttcagtccgaat

SEQ ID NO: 58048 - DNA, 25 bp, Artificial
  probe
  misc_feature (1)..(25): SEQ ID NO: 152; WAN024AL2_at; Start 24; Stop 48
atccaagaacaattagtttcatcac

SEQ ID NO: 58049 - DNA, 25 bp, Artificial
  probe
  misc_feature (1)..(25): SEQ ID NO: 152; WAN024AL2_at; Start 30; Stop 54
gaacaattagtttcatcactaaaag

SEQ ID NO: 58050 - DNA, 25 bp, Artificial
  probe
  misc_feature (1)..(25): SEQ ID NO: 152; WAN024AL2_at; Start 4; Stop 28
tcataatcaggaaagctgaaatcca

SEQ ID NO: 58051 - DNA, 25 bp, Artificial
  probe
  misc_feature (1)..(25): SEQ ID NO: 152; WAN024AL2_at; Start 23; Stop 47
aatccaagaacaattagtttcatca

SEQ ID NO: 58052 - DNA, 25 bp, Artificial
  probe
  misc_feature (1)..(25): SEQ ID NO: 152; WAN024AL2_at; Start 19; Stop 43
ctgaaatccaagaacaattagtttc

SEQ ID NO: 58053 - DNA, 25 bp, Artificial
  probe
  misc_feature (1)..(25): SEQ ID NO: 152; WAN024AL2_at; Start 41; Stop 65
ttcatcactaaaagttcaagtaaat

SEQ ID NO: 58054 - DNA, 25 bp, Artificial
  probe
  misc_feature (1)..(25): SEQ ID NO: 152; WAN024AL2_at; Start 20; Stop 44
tgaaatccaagaacaattagtttca

SEQ ID NO: 58055 - DNA, 25 bp, Artificial
  probe
  misc_feature (1)..(25): SEQ ID NO: 152; WAN024AL2_at; Start 46; Stop 70
cactaaaagttcaagtaaatttcag

SEQ ID NO: 58056 - DNA, 25 bp, Artificial
  probe
  misc_feature (1)..(25): SEQ ID NO: 152; WAN024AL2_at; Start 3; Stop 27
atcataatcaggaaagctgaaatcc

SEQ ID NO: 58057 - DNA, 25 bp, Artificial
  probe
  misc_feature (1)..(25): SEQ ID NO: 152; WAN024AL2_at; Start 43; Stop 67
catcactaaaagttcaagtaaattt

SEQ ID NO: 58058 - DNA, 25 bp, Artificial
  probe
  misc_feature (1)..(25): SEQ ID NO: 152; WAN024AL2_at; Start 21; Stop 45
gaaatccaagaacaattagtttcat

SEQ ID NO: 58059 - DNA, 25 bp, Artificial
  probe
  misc_feature (1)..(25): SEQ ID NO: 152; WAN024AL2_at; Start 36; Stop 60
ttagtttcatcactaaaagttcaag

SEQ ID NO: 58060 - DNA, 25 bp, Artificial
  probe
  misc_feature (1)..(25): SEQ ID NO: 152; WAN024AL2_at; Start 56; Stop 80
tcaagtaaatttcagtccgaatatc

SEQ ID NO: 58061 - DNA, 25 bp, Artificial
  probe
  misc_feature (1)..(25): SEQ ID NO: 152; WAN024AL2_at; Start 54; Stop 78
gttcaagtaaatttcagtccgaata

SEQ ID NO: 58062 - DNA, 25 bp, Artificial
  probe
  misc_feature (1)..(25): SEQ ID NO: 152; WAN024AL2_at; Start 2; Stop 26
aatcataatcaggaaagctgaaatc

SEQ ID NO: 58063 - DNA, 25 bp, Artificial
  probe
  misc_feature (1)..(25): SEQ ID NO: 152; WAN024AL2_at; Start 42; Stop 66
tcatcactaaaagttcaagtaaatt

SEQ ID NO: 58064 - DNA, 25 bp, Artificial
  probe
  misc_feature (1)..(25): SEQ ID NO: 152; WAN024AL2_at; Start 34; Stop 58
aattagtttcatcactaaaagttca

SEQ ID NO: 58065 - DNA, 25 bp, Artificial
  probe
  misc_feature (1)..(25): SEQ ID NO: 152; WAN024AL2_at; Start 57; Stop 81
caagtaaatttcagtccgaatatct

SEQ ID NO: 58066 - DNA, 25 bp, Artificial
  probe
  misc_feature (1)..(25): SEQ ID NO: 430; WAN024AL3_at; Start 19; Stop 43
ttacttgaacttttagtgatgaaac

SEQ ID NO: 58067 - DNA, 25 bp, Artificial
  probe
  misc_feature (1)..(25): SEQ ID NO: 430; WAN024AL3_at; Start 35; Stop 59
tgatgaaactaattgttcttggatt

SEQ ID NO: 58068 - DNA, 25 bp, Artificial
  probe
  misc_feature (1)..(25): SEQ ID NO: 430; WAN024AL3_at; Start 39; Stop 63
gaaactaattgttcttggatttcag

SEQ ID NO: 58069 - DNA, 25 bp, Artificial
  probe
  misc_feature (1)..(25): SEQ ID NO: 430; WAN024AL3_at; Start 23; Stop 47
ttgaacttttagtgatgaaactaat

SEQ ID NO: 58070 - DNA, 25 bp, Artificial
  probe
  misc_feature (1)..(25): SEQ ID NO: 430; WAN024AL3_at; Start 57; Stop 81
atttcagctttcctgattatgattt

SEQ ID NO: 58071 - DNA, 25 bp, Artificial
  probe
  misc_feature (1)..(25): SEQ ID NO: 430; WAN024AL3_at; Start 53; Stop 77
ttggatttcagctttcctgattatg

SEQ ID NO: 58072 - DNA, 25 bp, Artificial
  probe
  misc_feature (1)..(25): SEQ ID NO: 430; WAN024AL3_at; Start 33; Stop 57
agtgatgaaactaattgttcttgga

SEQ ID NO: 58073 - DNA, 25 bp, Artificial
  probe
  misc_feature (1)..(25): SEQ ID NO: 430; WAN024AL3_at; Start 20; Stop 44
tacttgaacttttagtgatgaaact

SEQ ID NO: 58074 - DNA, 25 bp, Artificial
  probe
  misc_feature (1)..(25): SEQ ID NO: 430; WAN024AL3_at; Start 15; Stop 39
aaatttacttgaacttttagtgatg

SEQ ID NO: 58075 - DNA, 25 bp, Artificial
  probe
  misc_feature (1)..(25): SEQ ID NO: 430; WAN024AL3_at; Start 2; Stop 26
gatattcggactgaaatttacttga

SEQ ID NO: 58076 - DNA, 25 bp, Artificial
  probe
  misc_feature (1)..(25): SEQ ID NO: 430; WAN024AL3_at; Start 17; Stop 41
atttacttgaacttttagtgatgaa

SEQ ID NO: 58077 - DNA, 25 bp, Artificial
  probe
  misc_feature (1)..(25): SEQ ID NO: 430; WAN024AL3_at; Start 16; Stop 40
aatttacttgaacttttagtgatga

SEQ ID NO: 58078 - DNA, 25 bp, Artificial
  probe
  misc_feature (1)..(25): SEQ ID NO: 430; WAN024AL3_at; Start 56; Stop 80
gatttcagctttcctgattatgatt

SEQ ID NO: 58079 - DNA, 25 bp, Artificial
  probe
  misc_feature (1)..(25): SEQ ID NO: 430; WAN024AL3_at; Start 3; Stop 27
atattcggactgaaatttacttgaa

SEQ ID NO: 58080 - DNA, 25 bp, Artificial
  probe
  misc_feature (1)..(25): SEQ ID NO: 430; WAN024AL3_at; Start 34; Stop 58
gtgatgaaactaattgttcttggat

SEQ ID NO: 58081 - DNA, 25 bp, Artificial
  probe
  misc_feature (1)..(25): SEQ ID NO: 430; WAN024AL3_at; Start 22; Stop 46
cttgaacttttagtgatgaaactaa

SEQ ID NO: 58082 - DNA, 25 bp, Artificial
  probe
  misc_feature (1)..(25): SEQ ID NO: 430; WAN024AL3_at; Start 13; Stop 37
tgaaatttacttgaacttttagtga

SEQ ID NO: 58083 - DNA, 25 bp, Artificial
  probe
  misc_feature (1)..(25): SEQ ID NO: 430; WAN024AL3_at; Start 18; Stop 42
tttacttgaacttttagtgatgaaa

SEQ ID NO: 58084 - DNA, 25 bp, Artificial
  probe
  misc_feature (1)..(25): SEQ ID NO: 430; WAN024AL3_at; Start 24; Stop 48
tgaacttttagtgatgaaactaatt

SEQ ID NO: 58085 - DNA, 25 bp, Artificial
  probe
  misc_feature (1)..(25): SEQ ID NO: 430; WAN024AL3_at; Start 28; Stop 52
cttttagtgatgaaactaattgttc

SEQ ID NO: 58086 - DNA, 25 bp, Artificial
  probe
  misc_feature (1)..(25): SEQ ID NO: 430; WAN024AL3_at; Start 55; Stop 79
ggatttcagctttcctgattatgat

SEQ ID NO: 58087 - DNA, 25 bp, Artificial
  probe
  misc_feature (1)..(25): SEQ ID NO: 430; WAN024AL3_at; Start 26; Stop 50
aacttttagtgatgaaactaattgt

SEQ ID NO: 58088 - DNA, 25 bp, Artificial
  probe
  misc_feature (1)..(25): SEQ ID NO: 430; WAN024AL3_at; Start 1; Stop 25
agatattcggactgaaatttacttg

SEQ ID NO: 58089 - DNA, 25 bp, Artificial
  probe
  misc_feature (1)..(25): SEQ ID NO: 430; WAN024AL3_at; Start 12; Stop 36
ctgaaatttacttgaacttttagtg

SEQ ID NO: 58090 - DNA, 25 bp, Artificial
  probe
  misc_feature (1)..(25): SEQ ID NO: 430; WAN024AL3_at; Start 5; Stop 29
attcggactgaaatttacttgaact

SEQ ID NO: 58091 - DNA, 25 bp, Artificial
  probe
  misc_feature (1)..(25): SEQ ID NO: 430; WAN024AL3_at; Start 52; Stop 76
cttggatttcagctttcctgattat

SEQ ID NO: 58092 - DNA, 25 bp, Artificial
  probe
  misc_feature (1)..(25): SEQ ID NO: 430; WAN024AL3_at; Start 36; Stop 60
gatgaaactaattgttcttggattt

SEQ ID NO: 58093 - DNA, 25 bp, Artificial
  probe
  misc_feature (1)..(25): SEQ ID NO: 430; WAN024AL3_at; Start 51; Stop 75
tcttggatttcagctttcctgatta

SEQ ID NO: 58094 - DNA, 25 bp, Artificial
  probe
  misc_feature (1)..(25): SEQ ID NO: 430; WAN024AL3_at; Start 54; Stop 78
tggatttcagctttcctgattatga

SEQ ID NO: 58095 - DNA, 25 bp, Artificial
  probe
  misc_feature (1)..(25): SEQ ID NO: 430; WAN024AL3_at; Start 25; Stop 49
gaacttttagtgatgaaactaattg

SEQ ID NO: 58096 - DNA, 25 bp, Artificial
  probe
  misc_feature (1)..(25): SEQ ID NO: 430; WAN024AL3_at; Start 21; Stop 45
acttgaacttttagtgatgaaacta

SEQ ID NO: 58097 - DNA, 25 bp, Artificial
  probe
  misc_feature (1)..(25): SEQ ID NO: 430; WAN024AL3_at; Start 4; Stop 28
tattcggactgaaatttacttgaac

SEQ ID NO: 58098 - DNA, 25 bp, Artificial
  probe
  misc_feature (1)..(25): SEQ ID NO: 430; WAN024AL3_at; Start 29; Stop 53
ttttagtgatgaaactaattgttct

SEQ ID NO: 58099 - DNA, 25 bp, Artificial
  probe
  misc_feature (1)..(25): SEQ ID NO: 430; WAN024AL3_at; Start 32; Stop 56
tagtgatgaaactaattgttcttgg

SEQ ID NO: 58100 - DNA, 25 bp, Artificial
  probe
  misc_feature (1)..(25): SEQ ID NO: 417; WAN024AL4_at; Start 58; Stop 82
tggacggttcggcttgccgaacatt

SEQ ID NO: 58101 - DNA, 25 bp, Artificial
  probe
  misc_feature (1)..(25): SEQ ID NO: 417; WAN024AL4_at; Start 53; Stop 77
tattttggacggttcggcttgccga

SEQ ID NO: 58102 - DNA, 25 bp, Artificial
  probe
  misc_feature (1)..(25): SEQ ID NO: 417; WAN024AL4_at; Start 32; Stop 56
gccgtgttcaattacacaagatatt

SEQ ID NO: 58103 - DNA, 25 bp, Artificial
  probe
  misc_feature (1)..(25): SEQ ID NO: 417; WAN024AL4_at; Start 67; Stop 91
cggcttgccgaacatttctgtagaa

SEQ ID NO: 58104 - DNA, 25 bp, Artificial
  probe
  misc_feature (1)..(25): SEQ ID NO: 417; WAN024AL4_at; Start 30; Stop 54
cggccgtgttcaattacacaagata

SEQ ID NO: 58105 - DNA, 25 bp, Artificial
  probe
  misc_feature (1)..(25): SEQ ID NO: 417; WAN024AL4_at; Start 16; Stop 40
tttacacagcttttcggccgtgttc

SEQ ID NO: 58106 - DNA, 25 bp, Artificial
  probe
  misc_feature (1)..(25): SEQ ID NO: 417; WAN024AL4_at; Start 85; Stop 109
tgtagaaaaataggaaggtgacgtc

SEQ ID NO: 58107 - DNA, 25 bp, Artificial
  probe
  misc_feature (1)..(25): SEQ ID NO: 417; WAN024AL4_at; Start 9; Stop 33
tatcttttttacacagcttttcggc

SEQ ID NO: 58108 - DNA, 25 bp, Artificial
  probe
  misc_feature (1)..(25): SEQ ID NO: 417; WAN024AL4_at; Start 27; Stop 51
tttcggccgtgttcaattacacaag

SEQ ID NO: 58109 - DNA, 25 bp, Artificial
  probe
  misc_feature (1)..(25): SEQ ID NO: 417; WAN024AL4_at; Start 93; Stop 117
aataggaaggtgacgtcgcactcga

SEQ ID NO: 58110 - DNA, 25 bp, Artificial
  probe
  misc_feature (1)..(25): SEQ ID NO: 417; WAN024AL4_at; Start 46; Stop 70
cacaagatattttggacggttcggc

SEQ ID NO: 58111 - DNA, 25 bp, Artificial
  probe
  misc_feature (1)..(25): SEQ ID NO: 417; WAN024AL4_at; Start 95; Stop 119
taggaaggtgacgtcgcactcgacg

SEQ ID NO: 58112 - DNA, 25 bp, Artificial
  probe
  misc_feature (1)..(25): SEQ ID NO: 417; WAN024AL4_at; Start 91; Stop 115
aaaataggaaggtgacgtcgcactc

SEQ ID NO: 58113 - DNA, 25 bp, Artificial
  probe
  misc_feature (1)..(25): SEQ ID NO: 417; WAN024AL4_at; Start 2; Stop 26
gacagtttatcttttttacacagct

SEQ ID NO: 58114 - DNA, 25 bp, Artificial
  probe
  misc_feature (1)..(25): SEQ ID NO: 417; WAN024AL4_at; Start 28; Stop 52
ttcggccgtgttcaattacacaaga

SEQ ID NO: 58115 - DNA, 25 bp, Artificial
  probe
  misc_feature (1)..(25): SEQ ID NO: 417; WAN024AL4_at; Start 40; Stop 64
caattacacaagatattttggacgg

SEQ ID NO: 58116 - DNA, 25 bp, Artificial
  probe
  misc_feature (1)..(25): SEQ ID NO: 417; WAN024AL4_at; Start 96; Stop 120
aggaaggtgacgtcgcactcgacga

SEQ ID NO: 58117 - DNA, 25 bp, Artificial
  probe
  misc_feature (1)..(25): SEQ ID NO: 417; WAN024AL4_at; Start 73; Stop 97
gccgaacatttctgtagaaaaatag

SEQ ID NO: 58118 - DNA, 25 bp, Artificial
  probe
  misc_feature (1)..(25): SEQ ID NO: 417; WAN024AL4_at; Start 66; Stop 90
tcggcttgccgaacatttctgtaga

SEQ ID NO: 58119 - DNA, 25 bp, Artificial
  probe
  misc_feature (1)..(25): SEQ ID NO: 417; WAN024AL4_at; Start 18; Stop 42
tacacagcttttcggccgtgttcaa

SEQ ID NO: 58120 - DNA, 25 bp, Artificial
  probe
  misc_feature (1)..(25): SEQ ID NO: 417; WAN024AL4_at; Start 23; Stop 47
agcttttcggccgtgttcaattaca

SEQ ID NO: 58121 - DNA, 25 bp, Artificial
  probe
  misc_feature (1)..(25): SEQ ID NO: 417; WAN024AL4_at; Start 36; Stop 60
tgttcaattacacaagatattttgg

SEQ ID NO: 58122 - DNA, 25 bp, Artificial
  probe
  misc_feature (1)..(25): SEQ ID NO: 417; WAN024AL4_at; Start 44; Stop 68
tacacaagatattttggacggttcg

SEQ ID NO: 58123 - DNA, 25 bp, Artificial
  probe
  misc_feature (1)..(25): SEQ ID NO: 417; WAN024AL4_at; Start 48; Stop 72
caagatattttggacggttcggctt

SEQ ID NO: 58124 - DNA, 25 bp, Artificial
  probe
  misc_feature (1)..(25): SEQ ID NO: 417; WAN024AL4_at; Start 94; Stop 118
ataggaaggtgacgtcgcactcgac

SEQ ID NO: 58125 - DNA, 25 bp, Artificial
  probe
  misc_feature (1)..(25): SEQ ID NO: 417; WAN024AL4_at; Start 69; Stop 93
gcttgccgaacatttctgtagaaaa

SEQ ID NO: 58126 - DNA, 25 bp, Artificial
  probe
  misc_feature (1)..(25): SEQ ID NO: 417; WAN024AL4_at; Start 50; Stop 74
agatattttggacggttcggcttgc

SEQ ID NO: 58127 - DNA, 25 bp, Artificial
  probe
  misc_feature (1)..(25): SEQ ID NO: 417; WAN024AL4_at; Start 87; Stop 111
tagaaaaataggaaggtgacgtcgc

SEQ ID NO: 58128 - DNA, 25 bp, Artificial
  probe
  misc_feature (1)..(25): SEQ ID NO: 417; WAN024AL4_at; Start 82; Stop 106
ttctgtagaaaaataggaaggtgac

SEQ ID NO: 58129 - DNA, 25 bp, Artificial
  probe
  misc_feature (1)..(25): SEQ ID NO: 417; WAN024AL4_at; Start 25; Stop 49
cttttcggccgtgttcaattacaca

SEQ ID NO: 58130 - DNA, 25 bp, Artificial
  probe
  misc_feature (1)..(25): SEQ ID NO: 417; WAN024AL4_at; Start 79; Stop 103
catttctgtagaaaaataggaaggt

SEQ ID NO: 58131 - DNA, 25 bp, Artificial
  probe
  misc_feature (1)..(25): SEQ ID NO: 417; WAN024AL4_at; Start 68; Stop 92
ggcttgccgaacatttctgtagaaa

SEQ ID NO: 58132 - DNA, 25 bp, Artificial
  probe
  misc_feature (1)..(25): SEQ ID NO: 417; WAN024AL4_at; Start 89; Stop 113
gaaaaataggaaggtgacgtcgcac

SEQ ID NO: 58133 - DNA, 25 bp, Artificial
  probe
  misc_feature (1)..(25): SEQ ID NO: 417; WAN024AL4_at; Start 92; Stop 116
aaataggaaggtgacgtcgcactcg

SEQ ID NO: 58134 - DNA, 25 bp, Artificial
  probe
  misc_feature (1)..(25): SEQ ID NO: 4635; WAN024AL5_at; Start 69; Stop 93
tcttgtgtaattgaacacggccgaa

SEQ ID NO: 58135 - DNA, 25 bp, Artificial
  probe
  misc_feature (1)..(25): SEQ ID NO: 4635; WAN024AL5_at; Start 57; Stop 81
ccgtccaaaatatcttgtgtaattg

SEQ ID NO: 58136 - DNA, 25 bp, Artificial
  probe
  misc_feature (1)..(25): SEQ ID NO: 4635; WAN024AL5_at; Start 81; Stop 105
gaacacggccgaaaagctgtgtaaa

SEQ ID NO: 58137 - DNA, 25 bp, Artificial
  probe
  misc_feature (1)..(25): SEQ ID NO: 4635; WAN024AL5_at; Start 37; Stop 61
gaaatgttcggcaagccgaaccgtc

SEQ ID NO: 58138 - DNA, 25 bp, Artificial
  probe
  misc_feature (1)..(25): SEQ ID NO: 4635; WAN024AL5_at; Start 32; Stop 56
ctacagaaatgttcggcaagccgaa

SEQ ID NO: 58139 - DNA, 25 bp, Artificial
  probe
  misc_feature (1)..(25): SEQ ID NO: 4635; WAN024AL5_at; Start 70; Stop 94
cttgtgtaattgaacacggccgaaa

SEQ ID NO: 58140 - DNA, 25 bp, Artificial
  probe
  misc_feature (1)..(25): SEQ ID NO: 4635; WAN024AL5_at; Start 33; Stop 57
tacagaaatgttcggcaagccgaac

SEQ ID NO: 58141 - DNA, 25 bp, Artificial
  probe
  misc_feature (1)..(25): SEQ ID NO: 4635; WAN024AL5_at; Start 31; Stop 55
tctacagaaatgttcggcaagccga

SEQ ID NO: 58142 - DNA, 25 bp, Artificial
  probe
  misc_feature (1)..(25): SEQ ID NO: 4635; WAN024AL5_at; Start 74; Stop 98
tgtaattgaacacggccgaaaagct

SEQ ID NO: 58143 - DNA, 25 bp, Artificial
  probe
  misc_feature (1)..(25): SEQ ID NO: 4635; WAN024AL5_at; Start 61; Stop 85
ccaaaatatcttgtgtaattgaaca

SEQ ID NO: 58144 - DNA, 25 bp, Artificial
  probe
  misc_feature (1)..(25): SEQ ID NO: 4635; WAN024AL5_at; Start 6; Stop 30
gagtgcgacgtcaccttcctatttt

SEQ ID NO: 58145 - DNA, 25 bp, Artificial
  probe
  misc_feature (1)..(25): SEQ ID NO: 4635; WAN024AL5_at; Start 25; Stop 49
tatttttctacagaaatgttcggca

SEQ ID NO: 58146 - DNA, 25 bp, Artificial
  probe
  misc_feature (1)..(25): SEQ ID NO: 4635; WAN024AL5_at; Start 44; Stop 68
tcggcaagccgaaccgtccaaaata

SEQ ID NO: 58147 - DNA, 25 bp, Artificial
  probe
  misc_feature (1)..(25): SEQ ID NO: 4635; WAN024AL5_at; Start 10; Stop 34
gcgacgtcaccttcctatttttcta

SEQ ID NO: 58148 - DNA, 25 bp, Artificial
  probe
  misc_feature (1)..(25): SEQ ID NO: 4635; WAN024AL5_at; Start 96; Stop 120
gctgtgtaaaaaagataaactgtct

SEQ ID NO: 58149 - DNA, 25 bp, Artificial
  probe
  misc_feature (1)..(25): SEQ ID NO: 4635; WAN024AL5_at; Start 53; Stop 77
cgaaccgtccaaaatatcttgtgta

SEQ ID NO: 58150 - DNA, 25 bp, Artificial
  probe
  misc_feature (1)..(25): SEQ ID NO: 4635; WAN024AL5_at; Start 1; Stop 25
tcgtcgagtgcgacgtcaccttcct

SEQ ID NO: 58151 - DNA, 25 bp, Artificial
  probe
  misc_feature (1)..(25): SEQ ID NO: 4635; WAN024AL5_at; Start 47; Stop 71
gcaagccgaaccgtccaaaatatct

SEQ ID NO: 58152 - DNA, 25 bp, Artificial
  probe
  misc_feature (1)..(25): SEQ ID NO: 4635; WAN024AL5_at; Start 12; Stop 36
gacgtcaccttcctatttttctaca

SEQ ID NO: 58153 - DNA, 25 bp, Artificial
  probe
  misc_feature (1)..(25): SEQ ID NO: 4635; WAN024AL5_at; Start 51; Stop 75
gccgaaccgtccaaaatatcttgtg

SEQ ID NO: 58154 - DNA, 25 bp, Artificial
  probe
  misc_feature (1)..(25): SEQ ID NO: 4635; WAN024AL5_at; Start 30; Stop 54
ttctacagaaatgttcggcaagccg

SEQ ID NO: 58155 - DNA, 25 bp, Artificial
  probe
  misc_feature (1)..(25): SEQ ID NO: 4635; WAN024AL5_at; Start 49; Stop 73
aagccgaaccgtccaaaatatcttg

SEQ ID NO: 58156 - DNA, 25 bp, Artificial
  probe
  misc_feature (1)..(25): SEQ ID NO: 4635; WAN024AL5_at; Start 54; Stop 78
gaaccgtccaaaatatcttgtgtaa

SEQ ID NO: 58157 - DNA, 25 bp, Artificial
  probe
  misc_feature (1)..(25): SEQ ID NO: 4635; WAN024AL5_at; Start 67; Stop 91
tatcttgtgtaattgaacacggccg

SEQ ID NO: 58158 - DNA, 25 bp, Artificial
  probe
  misc_feature (1)..(25): SEQ ID NO: 4635; WAN024AL5_at; Start 80; Stop 104
tgaacacggccgaaaagctgtgtaa

SEQ ID NO: 58159 - DNA, 25 bp, Artificial
  probe
  misc_feature (1)..(25): SEQ ID NO: 4635; WAN024AL5_at; Start 79; Stop 103
ttgaacacggccgaaaagctgtgta

SEQ ID NO: 58160 - DNA, 25 bp, Artificial
  probe
  misc_feature (1)..(25): SEQ ID NO: 4635; WAN024AL5_at; Start 39; Stop 63
aatgttcggcaagccgaaccgtcca

SEQ ID NO: 58161 - DNA, 25 bp, Artificial
  probe
  misc_feature (1)..(25): SEQ ID NO: 4635; WAN024AL5_at; Start 72; Stop 96
tgtgtaattgaacacggccgaaaag

SEQ ID NO: 58162 - DNA, 25 bp, Artificial
  probe
  misc_feature (1)..(25): SEQ ID NO: 4635; WAN024AL5_at; Start 4; Stop 28
tcgagtgcgacgtcaccttcctatt

SEQ ID NO: 58163 - DNA, 25 bp, Artificial
  probe
  misc_feature (1)..(25): SEQ ID NO: 4635; WAN024AL5_at; Start 3; Stop 27
gtcgagtgcgacgtcaccttcctat

SEQ ID NO: 58164 - DNA, 25 bp, Artificial
  probe
  misc_feature (1)..(25): SEQ ID NO: 4635; WAN024AL5_at; Start 28; Stop 52
ttttctacagaaatgttcggcaagc

SEQ ID NO: 58165 - DNA, 25 bp, Artificial
  probe
  misc_feature (1)..(25): SEQ ID NO: 4635; WAN024AL5_at; Start 88; Stop 112
gccgaaaagctgtgtaaaaaagata

SEQ ID NO: 58166 - DNA, 25 bp, Artificial
  probe
  misc_feature (1)..(25): SEQ ID NO: 4635; WAN024AL5_at; Start 65; Stop 89
aatatcttgtgtaattgaacacggc

SEQ ID NO: 58167 - DNA, 25 bp, Artificial
  probe
  misc_feature (1)..(25): SEQ ID NO: 4635; WAN024AL5_at; Start 15; Stop 39
gtcaccttcctatttttctacagaa

SEQ ID NO: 58168 - DNA, 25 bp, Artificial
  probe
  misc_feature (1)..(25): SEQ ID NO: 337; WAN024AL6_at; Start 140; Stop 164
aaaggaaccattcccctcacctgag

SEQ ID NO: 58169 - DNA, 25 bp, Artificial
  probe
  misc_feature (1)..(25): SEQ ID NO: 337; WAN024AL6_at; Start 17; Stop 41
ctcgtgtcgttaaatcttacagttt

SEQ ID NO: 58170 - DNA, 25 bp, Artificial
  probe
  misc_feature (1)..(25): SEQ ID NO: 337; WAN024AL6_at; Start 154; Stop 178
cctcacctgagaagaatggtttgct

SEQ ID NO: 58171 - DNA, 25 bp, Artificial
  probe
  misc_feature (1)..(25): SEQ ID NO: 337; WAN024AL6_at; Start 153; Stop 177
ccctcacctgagaagaatggtttgc

SEQ ID NO: 58172 - DNA, 25 bp, Artificial
  probe
  misc_feature (1)..(25): SEQ ID NO: 337; WAN024AL6_at; Start 74; Stop 98
tgtatcaagtacgtacagaatttat

SEQ ID NO: 58173 - DNA, 25 bp, Artificial
  probe
  misc_feature (1)..(25): SEQ ID NO: 337; WAN024AL6_at; Start 143; Stop 167
ggaaccattcccctcacctgagaag

SEQ ID NO: 58174 - DNA, 25 bp, Artificial
  probe
  misc_feature (1)..(25): SEQ ID NO: 337; WAN024AL6_at; Start 31; Stop 55
tcttacagtttaaatgcattgtatt

SEQ ID NO: 58175 - DNA, 25 bp, Artificial
  probe
  misc_feature (1)..(25): SEQ ID NO: 337; WAN024AL6_at; Start 70; Stop 94
tctttgtatcaagtacgtacagaat

SEQ ID NO: 58176 - DNA, 25 bp, Artificial
  probe
  misc_feature (1)..(25): SEQ ID NO: 337; WAN024AL6_at; Start 150; Stop 174
ttcccctcacctgagaagaatggtt

SEQ ID NO: 58177 - DNA, 25 bp, Artificial
  probe
  misc_feature (1)..(25): SEQ ID NO: 337; WAN024AL6_at; Start 6; Stop 30
gatttgactcactcgtgtcgttaaa

SEQ ID NO: 58178 - DNA, 25 bp, Artificial
  probe
  misc_feature (1)..(25): SEQ ID NO: 337; WAN024AL6_at; Start 148; Stop 172
cattcccctcacctgagaagaatgg

SEQ ID NO: 58179 - DNA, 25 bp, Artificial
  probe
  misc_feature (1)..(25): SEQ ID NO: 337; WAN024AL6_at; Start 67; Stop 91
tcatctttgtatcaagtacgtacag

SEQ ID NO: 58180 - DNA, 25 bp, Artificial
  probe
  misc_feature (1)..(25): SEQ ID NO: 337; WAN024AL6_at; Start 4; Stop 28
tcgatttgactcactcgtgtcgtta

SEQ ID NO: 58181 - DNA, 25 bp, Artificial
  probe
  misc_feature (1)..(25): SEQ ID NO: 337; WAN024AL6_at; Start 15; Stop 39
cactcgtgtcgttaaatcttacagt

SEQ ID NO: 58182 - DNA, 25 bp, Artificial
  probe
  misc_feature (1)..(25): SEQ ID NO: 337; WAN024AL6_at; Start 82; Stop 106
gtacgtacagaatttattttatcat

SEQ ID NO: 58183 - DNA, 25 bp, Artificial
  probe
  misc_feature (1)..(25): SEQ ID NO: 337; WAN024AL6_at; Start 144; Stop 168
gaaccattcccctcacctgagaaga

SEQ ID NO: 58184 - DNA, 25 bp, Artificial
  probe
  misc_feature (1)..(25): SEQ ID NO: 337; WAN024AL6_at; Start 24; Stop 48
cgttaaatcttacagtttaaatgca

SEQ ID NO: 58185 - DNA, 25 bp, Artificial
  probe
  misc_feature (1)..(25): SEQ ID NO: 337; WAN024AL6_at; Start 152; Stop 176
cccctcacctgagaagaatggtttg

SEQ ID NO: 58186 - DNA, 25 bp, Artificial
  probe
  misc_feature (1)..(25): SEQ ID NO: 337; WAN024AL6_at; Start 68; Stop 92
catctttgtatcaagtacgtacaga

SEQ ID NO: 58187 - DNA, 25 bp, Artificial
  probe
  misc_feature (1)..(25): SEQ ID NO: 337; WAN024AL6_at; Start 9; Stop 33
ttgactcactcgtgtcgttaaatct

SEQ ID NO: 58188 - DNA, 25 bp, Artificial
  probe
  misc_feature (1)..(25): SEQ ID NO: 337; WAN024AL6_at; Start 79; Stop 103
caagtacgtacagaatttattttat

SEQ ID NO: 58189 - DNA, 25 bp, Artificial
  probe
  misc_feature (1)..(25): SEQ ID NO: 337; WAN024AL6_at; Start 27; Stop 51
taaatcttacagtttaaatgcattg

SEQ ID NO: 58190 - DNA, 25 bp, Artificial
  probe
  misc_feature (1)..(25): SEQ ID NO: 337; WAN024AL6_at; Start 156; Stop 180
tcacctgagaagaatggtttgcttt

SEQ ID NO: 58191 - DNA, 25 bp, Artificial
  probe
  misc_feature (1)..(25): SEQ ID NO: 337; WAN024AL6_at; Start 62; Stop 86
taccttcatctttgtatcaagtacg

SEQ ID NO: 58192 - DNA, 25 bp, Artificial
  probe
  misc_feature (1)..(25): SEQ ID NO: 337; WAN024AL6_at; Start 64; Stop 88
ccttcatctttgtatcaagtacgta

SEQ ID NO: 58193 - DNA, 25 bp, Artificial
  probe
  misc_feature (1)..(25): SEQ ID NO: 337; WAN024AL6_at; Start 158; Stop 182
acctgagaagaatggtttgctttta

SEQ ID NO: 58194 - DNA, 25 bp, Artificial
  probe
  misc_feature (1)..(25): SEQ ID NO: 337; WAN024AL6_at; Start 2; Stop 26
catcgatttgactcactcgtgtcgt

SEQ ID NO: 58195 - DNA, 25 bp, Artificial
  probe
  misc_feature (1)..(25): SEQ ID NO: 337; WAN024AL6_at; Start 11; Stop 35
gactcactcgtgtcgttaaatctta

SEQ ID NO: 58196 - DNA, 25 bp, Artificial
  probe
  misc_feature (1)..(25): SEQ ID NO: 337; WAN024AL6_at; Start 102; Stop 126
atcatatttttcttaaaaagtgagg

SEQ ID NO: 58197 - DNA, 25 bp, Artificial
  probe
  misc_feature (1)..(25): SEQ ID NO: 337; WAN024AL6_at; Start 5; Stop 29
cgatttgactcactcgtgtcgttaa

SEQ ID NO: 58198 - DNA, 25 bp, Artificial
  probe
  misc_feature (1)..(25): SEQ ID NO: 337; WAN024AL6_at; Start 155; Stop 179
ctcacctgagaagaatggtttgctt

SEQ ID NO: 58199 - DNA, 25 bp, Artificial
  probe
  misc_feature (1)..(25): SEQ ID NO: 337; WAN024AL6_at; Start 41; Stop 65
taaatgcattgtattatttaatacc

SEQ ID NO: 58200 - DNA, 25 bp, Artificial
  probe
  misc_feature (1)..(25): SEQ ID NO: 337; WAN024AL6_at; Start 1; Stop 25
acatcgatttgactcactcgtgtcg

SEQ ID NO: 58201 - DNA, 25 bp, Artificial
  probe
  misc_feature (1)..(25): SEQ ID NO: 337; WAN024AL6_at; Start 14; Stop 38
tcactcgtgtcgttaaatcttacag

SEQ ID NO: 58202 - DNA, 25 bp, Artificial
  probe
  misc_feature (1)..(25): SEQ ID NO: 4401; WAN024AL7_at; Start 115; Stop 139
gaaggtattaaataatacaatgcat

SEQ ID NO: 58203 - DNA, 25 bp, Artificial
  probe
  misc_feature (1)..(25): SEQ ID NO: 4401; WAN024AL7_at; Start 84; Stop 108
aataaattctgtacgtacttgatac

SEQ ID NO: 58204 - DNA, 25 bp, Artificial
  probe
  misc_feature (1)..(25): SEQ ID NO: 4401; WAN024AL7_at; Start 5; Stop 29
agcaaaccattcttctcaggtgagg

SEQ ID NO: 58205 - DNA, 25 bp, Artificial
  probe
  misc_feature (1)..(25): SEQ ID NO: 4401; WAN024AL7_at; Start 145; Stop 169
ctgtaagatttaacgacacgagtga

SEQ ID NO: 58206 - DNA, 25 bp, Artificial
  probe
  misc_feature (1)..(25): SEQ ID NO: 4401; WAN024AL7_at; Start 97; Stop 121
cgtacttgatacaaagatgaaggta

SEQ ID NO: 58207 - DNA, 25 bp, Artificial
  probe
  misc_feature (1)..(25): SEQ ID NO: 4401; WAN024AL7_at; Start 101; Stop 125
cttgatacaaagatgaaggtattaa

SEQ ID NO: 58208 - DNA, 25 bp, Artificial
  probe
  misc_feature (1)..(25): SEQ ID NO: 4401; WAN024AL7_at; Start 86; Stop 110
taaattctgtacgtacttgatacaa

SEQ ID NO: 58209 - DNA, 25 bp, Artificial
  probe
  misc_feature (1)..(25): SEQ ID NO: 4401; WAN024AL7_at; Start 149; Stop 173
aagatttaacgacacgagtgagtca

SEQ ID NO: 58210 - DNA, 25 bp, Artificial
  probe
  misc_feature (1)..(25): SEQ ID NO: 4401; WAN024AL7_at; Start 151; Stop 175
gatttaacgacacgagtgagtcaaa

SEQ ID NO: 58211 - DNA, 25 bp, Artificial
  probe
  misc_feature (1)..(25): SEQ ID NO: 4401; WAN024AL7_at; Start 81; Stop 105
taaaataaattctgtacgtacttga

SEQ ID NO: 58212 - DNA, 25 bp, Artificial
  probe
  misc_feature (1)..(25): SEQ ID NO: 4401; WAN024AL7_at; Start 158; Stop 182
cgacacgagtgagtcaaatcgatgt

SEQ ID NO: 58213 - DNA, 25 bp, Artificial
  probe
  misc_feature (1)..(25): SEQ ID NO: 4401; WAN024AL7_at; Start 78; Stop 102
tgataaaataaattctgtacgtact

SEQ ID NO: 58214 - DNA, 25 bp, Artificial
  probe
  misc_feature (1)..(25): SEQ ID NO: 4401; WAN024AL7_at; Start 6; Stop 30
gcaaaccattcttctcaggtgaggg

SEQ ID NO: 58215 - DNA, 25 bp, Artificial
  probe
  misc_feature (1)..(25): SEQ ID NO: 4401; WAN024AL7_at; Start 57; Stop 81
cctcactttttaagaaaaatatgat

SEQ ID NO: 58216 - DNA, 25 bp, Artificial
  probe
  misc_feature (1)..(25): SEQ ID NO: 4401; WAN024AL7_at; Start 16; Stop 40
cttctcaggtgaggggaatggttcc

SEQ ID NO: 58217 - DNA, 25 bp, Artificial
  probe
  misc_feature (1)..(25): SEQ ID NO: 4401; WAN024AL7_at; Start 142; Stop 166
aaactgtaagatttaacgacacgag

SEQ ID NO: 58218 - DNA, 25 bp, Artificial
  probe
  misc_feature (1)..(25): SEQ ID NO: 4401; WAN024AL7_at; Start 146; Stop 170
tgtaagatttaacgacacgagtgag

SEQ ID NO: 58219 - DNA, 25 bp, Artificial
  probe
  misc_feature (1)..(25): SEQ ID NO: 4401; WAN024AL7_at; Start 141; Stop 165
taaactgtaagatttaacgacacga

SEQ ID NO: 58220 - DNA, 25 bp, Artificial
  probe
  misc_feature (1)..(25): SEQ ID NO: 4401; WAN024AL7_at; Start 154; Stop 178
ttaacgacacgagtgagtcaaatcg

SEQ ID NO: 58221 - DNA, 25 bp, Artificial
  probe
  misc_feature (1)..(25): SEQ ID NO: 4401; WAN024AL7_at; Start 91; Stop 115
tctgtacgtacttgatacaaagatg

SEQ ID NO: 58222 - DNA, 25 bp, Artificial
  probe
  misc_feature (1)..(25): SEQ ID NO: 4401; WAN024AL7_at; Start 144; Stop 168
actgtaagatttaacgacacgagtg

SEQ ID NO: 58223 - DNA, 25 bp, Artificial
  probe
  misc_feature (1)..(25): SEQ ID NO: 4401; WAN024AL7_at; Start 1; Stop 25
taaaagcaaaccattcttctcaggt

SEQ ID NO: 58224 - DNA, 25 bp, Artificial
  probe
  misc_feature (1)..(25): SEQ ID NO: 4401; WAN024AL7_at; Start 88; Stop 112
aattctgtacgtacttgatacaaag

SEQ ID NO: 58225 - DNA, 25 bp, Artificial
  probe
  misc_feature (1)..(25): SEQ ID NO: 4401; WAN024AL7_at; Start 157; Stop 181
acgacacgagtgagtcaaatcgatg

SEQ ID NO: 58226 - DNA, 25 bp, Artificial
  probe
  misc_feature (1)..(25): SEQ ID NO: 4401; WAN024AL7_at; Start 108; Stop 132
caaagatgaaggtattaaataatac

SEQ ID NO: 58227 - DNA, 25 bp, Artificial
  probe
  misc_feature (1)..(25): SEQ ID NO: 4401; WAN024AL7_at; Start 148; Stop 172
taagatttaacgacacgagtgagtc

SEQ ID NO: 58228 - DNA, 25 bp, Artificial
  probe
  misc_feature (1)..(25): SEQ ID NO: 4401; WAN024AL7_at; Start 3; Stop 27
aaagcaaaccattcttctcaggtga

SEQ ID NO: 58229 - DNA, 25 bp, Artificial
  probe
  misc_feature (1)..(25): SEQ ID NO: 4401; WAN024AL7_at; Start 95; Stop 119
tacgtacttgatacaaagatgaagg

SEQ ID NO: 58230 - DNA, 25 bp, Artificial
  probe
  misc_feature (1)..(25): SEQ ID NO: 4401; WAN024AL7_at; Start 127; Stop 151
taatacaatgcatttaaactgtaag

SEQ ID NO: 58231 - DNA, 25 bp, Artificial
  probe
  misc_feature (1)..(25): SEQ ID NO: 4401; WAN024AL7_at; Start 155; Stop 179
taacgacacgagtgagtcaaatcga

SEQ ID NO: 58232 - DNA, 25 bp, Artificial
  probe
  misc_feature (1)..(25): SEQ ID NO: 4401; WAN024AL7_at; Start 156; Stop 180
aacgacacgagtgagtcaaatcgat

SEQ ID NO: 58233 - DNA, 25 bp, Artificial
  probe
  misc_feature (1)..(25): SEQ ID NO: 4401; WAN024AL7_at; Start 150; Stop 174
agatttaacgacacgagtgagtcaa

SEQ ID NO: 58234 - DNA, 25 bp, Artificial
  probe
  misc_feature (1)..(25): SEQ ID NO: 4401; WAN024AL7_at; Start 92; Stop 116
ctgtacgtacttgatacaaagatga

SEQ ID NO: 58235 - DNA, 25 bp, Artificial
  probe
  misc_feature (1)..(25): SEQ ID NO: 4401; WAN024AL7_at; Start 4; Stop 28
aagcaaaccattcttctcaggtgag

SEQ ID NO: 58236 - DNA, 25 bp, Artificial
  probe
  misc_feature (1)..(25): SEQ ID NO: 584; WAN024AL8_at; Start 7; Stop 31
tgtatagcttgttttatagctttat

SEQ ID NO: 58237 - DNA, 25 bp, Artificial
  probe
  misc_feature (1)..(25): SEQ ID NO: 584; WAN024AL8_at; Start 11; Stop 35
tagcttgttttatagctttatttca

SEQ ID NO: 58238 - DNA, 25 bp, Artificial
  probe
  misc_feature (1)..(25): SEQ ID NO: 584; WAN024AL8_at; Start 86; Stop 110
tgttattagaaaagactataactga

SEQ ID NO: 58239 - DNA, 25 bp, Artificial
  probe
  misc_feature (1)..(25): SEQ ID NO: 584; WAN024AL8_at; Start 10; Stop 34
atagcttgttttatagctttatttc

SEQ ID NO: 58240 - DNA, 25 bp, Artificial
  probe
  misc_feature (1)..(25): SEQ ID NO: 584; WAN024AL8_at; Start 6; Stop 30
ttgtatagcttgttttatagcttta

SEQ ID NO: 58241 - DNA, 25 bp, Artificial
  probe
  misc_feature (1)..(25): SEQ ID NO: 584; WAN024AL8_at; Start 5; Stop 29
tttgtatagcttgttttatagcttt

SEQ ID NO: 58242 - DNA, 25 bp, Artificial
  probe
  misc_feature (1)..(25): SEQ ID NO: 584; WAN024AL8_at; Start 88; Stop 112
ttattagaaaagactataactgatt

SEQ ID NO: 58243 - DNA, 25 bp, Artificial
  probe
  misc_feature (1)..(25): SEQ ID NO: 584; WAN024AL8_at; Start 8; Stop 32
gtatagcttgttttatagctttatt

SEQ ID NO: 58244 - DNA, 25 bp, Artificial
  probe
  misc_feature (1)..(25): SEQ ID NO: 584; WAN024AL8_at; Start 54; Stop 78
gttattagtaattcttataagtgac

SEQ ID NO: 58245 - DNA, 25 bp, Artificial
  probe
  misc_feature (1)..(25): SEQ ID NO: 584; WAN024AL8_at; Start 1; Stop 25
atcctttgtatagcttgttttatag

SEQ ID NO: 58246 - DNA, 25 bp, Artificial
  probe
  misc_feature (1)..(25): SEQ ID NO: 584; WAN024AL8_at; Start 91; Stop 115
ttagaaaagactataactgattcta

SEQ ID NO: 58247 - DNA, 25 bp, Artificial
  probe
  misc_feature (1)..(25): SEQ ID NO: 584; WAN024AL8_at; Start 2; Stop 26
tcctttgtatagcttgttttatagc

SEQ ID NO: 58248 - DNA, 25 bp, Artificial
  probe
  misc_feature (1)..(25): SEQ ID NO: 584; WAN024AL8_at; Start 90; Stop 114
attagaaaagactataactgattct

SEQ ID NO: 58249 - DNA, 25 bp, Artificial
  probe
  misc_feature (1)..(25): SEQ ID NO: 584; WAN024AL8_at; Start 92; Stop 116
tagaaaagactataactgattctag

SEQ ID NO: 58250 - DNA, 25 bp, Artificial
  probe
  misc_feature (1)..(25): SEQ ID NO: 584; WAN024AL8_at; Start 9; Stop 33
tatagcttgttttatagctttattt

SEQ ID NO: 58251 - DNA, 25 bp, Artificial
  probe
  misc_feature (1)..(25): SEQ ID NO: 584; WAN024AL8_at; Start 56; Stop 80
tattagtaattcttataagtgacta

SEQ ID NO: 58252 - DNA, 25 bp, Artificial
  probe
  misc_feature (1)..(25): SEQ ID NO: 584; WAN024AL8_at; Start 58; Stop 82
ttagtaattcttataagtgactatg

SEQ ID NO: 58253 - DNA, 25 bp, Artificial
  probe
  misc_feature (1)..(25): SEQ ID NO: 584; WAN024AL8_at; Start 3; Stop 27
cctttgtatagcttgttttatagct

SEQ ID NO: 58254 - DNA, 25 bp, Artificial
  probe
  misc_feature (1)..(25): SEQ ID NO: 584; WAN024AL8_at; Start 87; Stop 111
gttattagaaaagactataactgat

SEQ ID NO: 58255 - DNA, 25 bp, Artificial
  probe
  misc_feature (1)..(25): SEQ ID NO: 584; WAN024AL8_at; Start 57; Stop 81
attagtaattcttataagtgactat

SEQ ID NO: 58256 - DNA, 25 bp, Artificial
  probe
  misc_feature (1)..(25): SEQ ID NO: 584; WAN024AL8_at; Start 4; Stop 28
ctttgtatagcttgttttatagctt

SEQ ID NO: 58257 - DNA, 25 bp, Artificial
  probe
  misc_feature (1)..(25): SEQ ID NO: 584; WAN024AL8_at; Start 89; Stop 113
tattagaaaagactataactgattc

SEQ ID NO: 58258 - DNA, 25 bp, Artificial
  probe
  misc_feature (1)..(25): SEQ ID NO: 584; WAN024AL8_at; Start 55; Stop 79
ttattagtaattcttataagtgact

SEQ ID NO: 58259 - DNA, 25 bp, Artificial
  probe
  misc_feature (1)..(25): SEQ ID NO: 3281; WAN024AL9_at; Start 90; Stop 114
agctataaaacaagctatacaaagg

SEQ ID NO: 58260 - DNA, 25 bp, Artificial
  probe
  misc_feature (1)..(25): SEQ ID NO: 3281; WAN024AL9_at; Start 5; Stop 29
aatcagttatagtcttttctaataa

SEQ ID NO: 58261 - DNA, 25 bp, Artificial
  probe
  misc_feature (1)..(25): SEQ ID NO: 3281; WAN024AL9_at; Start 92; Stop 116
ctataaaacaagctatacaaaggat

SEQ ID NO: 58262 - DNA, 25 bp, Artificial
  probe
  misc_feature (1)..(25): SEQ ID NO: 3281; WAN024AL9_at; Start 82; Stop 106
tgaaataaagctataaaacaagcta

SEQ ID NO: 58263 - DNA, 25 bp, Artificial
  probe
  misc_feature (1)..(25): SEQ ID NO: 3281; WAN024AL9_at; Start 2; Stop 26
tagaatcagttatagtcttttctaa

SEQ ID NO: 58264 - DNA, 25 bp, Artificial
  probe
  misc_feature (1)..(25): SEQ ID NO: 3281; WAN024AL9_at; Start 6; Stop 30
atcagttatagtcttttctaataac

SEQ ID NO: 58265 - DNA, 25 bp, Artificial
  probe
  misc_feature (1)..(25): SEQ ID NO: 3281; WAN024AL9_at; Start 91; Stop 115
gctataaaacaagctatacaaagga

SEQ ID NO: 58266 - DNA, 25 bp, Artificial
  probe
  misc_feature (1)..(25): SEQ ID NO: 3281; WAN024AL9_at; Start 7; Stop 31
tcagttatagtcttttctaataaca

SEQ ID NO: 58267 - DNA, 25 bp, Artificial
  probe
  misc_feature (1)..(25): SEQ ID NO: 3281; WAN024AL9_at; Start 88; Stop 112
aaagctataaaacaagctatacaaa

SEQ ID NO: 58268 - DNA, 25 bp, Artificial
  probe
  misc_feature (1)..(25): SEQ ID NO: 3281; WAN024AL9_at; Start 83; Stop 107
gaaataaagctataaaacaagctat

SEQ ID NO: 58269 - DNA, 25 bp, Artificial
  probe
  misc_feature (1)..(25): SEQ ID NO: 3281; WAN024AL9_at; Start 36; Stop 60
atagtcacttataagaattactaat

SEQ ID NO: 58270 - DNA, 25 bp, Artificial
  probe
  misc_feature (1)..(25): SEQ ID NO: 3281; WAN024AL9_at; Start 35; Stop 59
catagtcacttataagaattactaa

SEQ ID NO: 58271 - DNA, 25 bp, Artificial
  probe
  misc_feature (1)..(25): SEQ ID NO: 3281; WAN024AL9_at; Start 37; Stop 61
tagtcacttataagaattactaata

SEQ ID NO: 58272 - DNA, 25 bp, Artificial
  probe
  misc_feature (1)..(25): SEQ ID NO: 3281; WAN024AL9_at; Start 3; Stop 27
agaatcagttatagtcttttctaat

SEQ ID NO: 58273 - DNA, 25 bp, Artificial
  probe
  misc_feature (1)..(25): SEQ ID NO: 3281; WAN024AL9_at; Start 89; Stop 113
aagctataaaacaagctatacaaag

SEQ ID NO: 58274 - DNA, 25 bp, Artificial
  probe
  misc_feature (1)..(25): SEQ ID NO: 3281; WAN024AL9_at; Start 87; Stop 111
taaagctataaaacaagctatacaa

SEQ ID NO: 58275 - DNA, 25 bp, Artificial
  probe
  misc_feature (1)..(25): SEQ ID NO: 3281; WAN024AL9_at; Start 86; Stop 110
ataaagctataaaacaagctataca

SEQ ID NO: 58276 - DNA, 25 bp, Artificial
  probe
  misc_feature (1)..(25): SEQ ID NO: 3281; WAN024AL9_at; Start 84; Stop 108
aaataaagctataaaacaagctata

SEQ ID NO: 58277 - DNA, 25 bp, Artificial
  probe
  misc_feature (1)..(25): SEQ ID NO: 3281; WAN024AL9_at; Start 85; Stop 109
aataaagctataaaacaagctatac

SEQ ID NO: 58278 - DNA, 25 bp, Artificial
  probe
  misc_feature (1)..(25): SEQ ID NO: 3281; WAN024AL9_at; Start 4; Stop 28
gaatcagttatagtcttttctaata

SEQ ID NO: 58279 - DNA, 25 bp, Artificial
  probe
  misc_feature (1)..(25): SEQ ID NO: 3281; WAN024AL9_at; Start 1; Stop 25
ctagaatcagttatagtcttttcta

SEQ ID NO: 58280 - DNA, 25 bp, Artificial
  probe
  misc_feature (1)..(25): SEQ ID NO: 3281; WAN024AL9_at; Start 38; Stop 62
agtcacttataagaattactaataa

SEQ ID NO: 58281 - DNA, 25 bp, Artificial
  probe
  misc_feature (1)..(25): SEQ ID NO: 3281; WAN024AL9_at; Start 39; Stop 63
gtcacttataagaattactaataac

SEQ ID NO: 58282 - DNA, 25 bp, Artificial
  probe
  misc_feature (1)..(25): SEQ ID NO: 3137; WAN024ALA_at; Start 10; Stop 34
aatagcactattcttcatcacttaa

SEQ ID NO: 58283 - DNA, 25 bp, Artificial
  probe
  misc_feature (1)..(25): SEQ ID NO: 3137; WAN024ALA_at; Start 14; Stop 38
gcactattcttcatcacttaaccct

SEQ ID NO: 58284 - DNA, 25 bp, Artificial
  probe
  misc_feature (1)..(25): SEQ ID NO: 3137; WAN024ALA_at; Start 11; Stop 35
atagcactattcttcatcacttaac

SEQ ID NO: 58285 - DNA, 25 bp, Artificial
  probe
  misc_feature (1)..(25): SEQ ID NO: 3137; WAN024ALA_at; Start 16; Stop 40
actattcttcatcacttaaccctct

SEQ ID NO: 58286 - DNA, 25 bp, Artificial
  probe
  misc_feature (1)..(25): SEQ ID NO: 3137; WAN024ALA_at; Start 7; Stop 31
cccaatagcactattcttcatcact

SEQ ID NO: 58287 - DNA, 25 bp, Artificial
  probe
  misc_feature (1)..(25): SEQ ID NO: 3137; WAN024ALA_at; Start 6; Stop 30
tcccaatagcactattcttcatcac

SEQ ID NO: 58288 - DNA, 25 bp, Artificial
  probe
  misc_feature (1)..(25): SEQ ID NO: 3137; WAN024ALA_at; Start 8; Stop 32
ccaatagcactattcttcatcactt

SEQ ID NO: 58289 - DNA, 25 bp, Artificial
  probe
  misc_feature (1)..(25): SEQ ID NO: 3137; WAN024ALA_at; Start 5; Stop 29
ctcccaatagcactattcttcatca

SEQ ID NO: 58290 - DNA, 25 bp, Artificial
  probe
  misc_feature (1)..(25): SEQ ID NO: 3137; WAN024ALA_at; Start 2; Stop 26
ttactcccaatagcactattcttca

SEQ ID NO: 58291 - DNA, 25 bp, Artificial
  probe
  misc_feature (1)..(25): SEQ ID NO: 3137; WAN024ALA_at; Start 17; Stop 41
ctattcttcatcacttaaccctctt

SEQ ID NO: 58292 - DNA, 25 bp, Artificial
  probe
  misc_feature (1)..(25): SEQ ID NO: 3137; WAN024ALA_at; Start 15; Stop 39
cactattcttcatcacttaaccctc

SEQ ID NO: 58293 - DNA, 25 bp, Artificial
  probe
  misc_feature (1)..(25): SEQ ID NO: 3137; WAN024ALA_at; Start 1; Stop 25
attactcccaatagcactattcttc

SEQ ID NO: 58294 - DNA, 25 bp, Artificial
  probe
  misc_feature (1)..(25): SEQ ID NO: 3137; WAN024ALA_at; Start 3; Stop 27
tactcccaatagcactattcttcat

SEQ ID NO: 58295 - DNA, 25 bp, Artificial
  probe
  misc_feature (1)..(25): SEQ ID NO: 3137; WAN024ALA_at; Start 12; Stop 36
tagcactattcttcatcacttaacc

SEQ ID NO: 58296 - DNA, 25 bp, Artificial
  probe
  misc_feature (1)..(25): SEQ ID NO: 3137; WAN024ALA_at; Start 4; Stop 28
actcccaatagcactattcttcatc

SEQ ID NO: 58297 - DNA, 25 bp, Artificial
  probe
  misc_feature (1)..(25): SEQ ID NO: 3137; WAN024ALA_at; Start 18; Stop 42
tattcttcatcacttaaccctcttt

SEQ ID NO: 58298 - DNA, 25 bp, Artificial
  probe
  misc_feature (1)..(25): SEQ ID NO: 3137; WAN024ALA_at; Start 9; Stop 33
caatagcactattcttcatcactta

SEQ ID NO: 58299 - DNA, 25 bp, Artificial
  probe
  misc_feature (1)..(25): SEQ ID NO: 3137; WAN024ALA_at; Start 13; Stop 37
agcactattcttcatcacttaaccc

SEQ ID NO: 58300 - DNA, 25 bp, Artificial
  probe
  misc_feature (1)..(25): SEQ ID NO: 3137; WAN024ALA_at; Start 60; Stop 84
ttttaaaaaaatgagcgaattatga

SEQ ID NO: 58301 - DNA, 25 bp, Artificial
  probe
  misc_feature (1)..(25): SEQ ID NO: 4600; WAN024ALB_at; Start 8; Stop 32
tcgctcatttttttaaaaatacata

SEQ ID NO: 58302 - DNA, 25 bp, Artificial
  probe
  misc_feature (1)..(25): SEQ ID NO: 4600; WAN024ALB_at; Start 10; Stop 34
gctcatttttttaaaaatacataga

SEQ ID NO: 58303 - DNA, 25 bp, Artificial
  probe
  misc_feature (1)..(25): SEQ ID NO: 4600; WAN024ALB_at; Start 53; Stop 77
aagtgatgaagaatagtgctattgg

SEQ ID NO: 58304 - DNA, 25 bp, Artificial
  probe
  misc_feature (1)..(25): SEQ ID NO: 4600; WAN024ALB_at; Start 48; Stop 72
gggttaagtgatgaagaatagtgct

SEQ ID NO: 58305 - DNA, 25 bp, Artificial
  probe
  misc_feature (1)..(25): SEQ ID NO: 4600; WAN024ALB_at; Start 58; Stop 82
atgaagaatagtgctattgggagta

SEQ ID NO: 58306 - DNA, 25 bp, Artificial
  probe
  misc_feature (1)..(25): SEQ ID NO: 4600; WAN024ALB_at; Start 52; Stop 76
taagtgatgaagaatagtgctattg

SEQ ID NO: 58307 - DNA, 25 bp, Artificial
  probe
  misc_feature (1)..(25): SEQ ID NO: 4600; WAN024ALB_at; Start 54; Stop 78
agtgatgaagaatagtgctattggg

SEQ ID NO: 58308 - DNA, 25 bp, Artificial
  probe
  misc_feature (1)..(25): SEQ ID NO: 4600; WAN024ALB_at; Start 51; Stop 75
ttaagtgatgaagaatagtgctatt

SEQ ID NO: 58309 - DNA, 25 bp, Artificial
  probe
  misc_feature (1)..(25): SEQ ID NO: 4600; WAN024ALB_at; Start 44; Stop 68
aagagggttaagtgatgaagaatag

SEQ ID NO: 58310 - DNA, 25 bp, Artificial
  probe
  misc_feature (1)..(25): SEQ ID NO: 4600; WAN024ALB_at; Start 55; Stop 79
gtgatgaagaatagtgctattggga

SEQ ID NO: 58311 - DNA, 25 bp, Artificial
  probe
  misc_feature (1)..(25): SEQ ID NO: 4600; WAN024ALB_at; Start 43; Stop 67
aaagagggttaagtgatgaagaata

SEQ ID NO: 58312 - DNA, 25 bp, Artificial
  probe
  misc_feature (1)..(25): SEQ ID NO: 4600; WAN024ALB_at; Start 9; Stop 33
cgctcatttttttaaaaatacatag

SEQ ID NO: 58313 - DNA, 25 bp, Artificial
  probe
  misc_feature (1)..(25): SEQ ID NO: 4600; WAN024ALB_at; Start 56; Stop 80
tgatgaagaatagtgctattgggag

SEQ ID NO: 58314 - DNA, 25 bp, Artificial
  probe
  misc_feature (1)..(25): SEQ ID NO: 4600; WAN024ALB_at; Start 47; Stop 71
agggttaagtgatgaagaatagtgc

SEQ ID NO: 58315 - DNA, 25 bp, Artificial
  probe
  misc_feature (1)..(25): SEQ ID NO: 4600; WAN024ALB_at; Start 59; Stop 83
tgaagaatagtgctattgggagtaa

SEQ ID NO: 58316 - DNA, 25 bp, Artificial
  probe
  misc_feature (1)..(25): SEQ ID NO: 4600; WAN024ALB_at; Start 57; Stop 81
gatgaagaatagtgctattgggagt

SEQ ID NO: 58317 - DNA, 25 bp, Artificial
  probe
  misc_feature (1)..(25): SEQ ID NO: 4600; WAN024ALB_at; Start 1; Stop 25
tcataattcgctcatttttttaaaa

SEQ ID NO: 58318 - DNA, 25 bp, Artificial
  probe
  misc_feature (1)..(25): SEQ ID NO: 4600; WAN024ALB_at; Start 60; Stop 84
gaagaatagtgctattgggagtaat

SEQ ID NO: 58319 - DNA, 25 bp, Artificial
  probe
  misc_feature (1)..(25): SEQ ID NO: 4600; WAN024ALB_at; Start 46; Stop 70
gagggttaagtgatgaagaatagtg

SEQ ID NO: 58320 - DNA, 25 bp, Artificial
  probe
  misc_feature (1)..(25): SEQ ID NO: 4600; WAN024ALB_at; Start 50; Stop 74
gttaagtgatgaagaatagtgctat

SEQ ID NO: 58321 - DNA, 25 bp, Artificial
  probe
  misc_feature (1)..(25): SEQ ID NO: 4600; WAN024ALB_at; Start 49; Stop 73
ggttaagtgatgaagaatagtgcta

SEQ ID NO: 58322 - DNA, 25 bp, Artificial
  probe
  misc_feature (1)..(25): SEQ ID NO: 4600; WAN024ALB_at; Start 45; Stop 69
agagggttaagtgatgaagaatagt

SEQ ID NO: 58323 - DNA, 25 bp, Artificial
  probe
  misc_feature (1)..(25): SEQ ID NO: 3607; WAN024ALC_at; Start 33; Stop 57
ggagaaaccacttctatcttatcat

SEQ ID NO: 58324 - DNA, 25 bp, Artificial
  probe
  misc_feature (1)..(25): SEQ ID NO: 3607; WAN024ALC_at; Start 26; Stop 50
tagtggcggagaaaccacttctatc

SEQ ID NO: 58325 - DNA, 25 bp, Artificial
  probe
  misc_feature (1)..(25): SEQ ID NO: 3607; WAN024ALC_at; Start 30; Stop 54
ggcggagaaaccacttctatcttat

SEQ ID NO: 58326 - DNA, 25 bp, Artificial
  probe
  misc_feature (1)..(25): SEQ ID NO: 3607; WAN024ALC_at; Start 87; Stop 111
aaagctctatggaaccactagcata

SEQ ID NO: 58327 - DNA, 25 bp, Artificial
  probe
  misc_feature (1)..(25): SEQ ID NO: 3607; WAN024ALC_at; Start 28; Stop 52
gtggcggagaaaccacttctatctt

SEQ ID NO: 58328 - DNA, 25 bp, Artificial
  probe
  misc_feature (1)..(25): SEQ ID NO: 3607; WAN024ALC_at; Start 77; Stop 101
taccacgctaaaagctctatggaac

SEQ ID NO: 58329 - DNA, 25 bp, Artificial
  probe
  misc_feature (1)..(25): SEQ ID NO: 3607; WAN024ALC_at; Start 124; Stop 148
cgggagacaacaaaaaagttggatg

SEQ ID NO: 58330 - DNA, 25 bp, Artificial
  probe
  misc_feature (1)..(25): SEQ ID NO: 3607; WAN024ALC_at; Start 110; Stop 134
tagctagtggttttcgggagacaac

SEQ ID NO: 58331 - DNA, 25 bp, Artificial
  probe
  misc_feature (1)..(25): SEQ ID NO: 3607; WAN024ALC_at; Start 108; Stop 132
catagctagtggttttcgggagaca

SEQ ID NO: 58332 - DNA, 25 bp, Artificial
  probe
  misc_feature (1)..(25): SEQ ID NO: 3607; WAN024ALC_at; Start 80; Stop 104
cacgctaaaagctctatggaaccac

SEQ ID NO: 58333 - DNA, 25 bp, Artificial
  probe
  misc_feature (1)..(25): SEQ ID NO: 3607; WAN024ALC_at; Start 14; Stop 38
tatgatatgttgtagtggcggagaa

SEQ ID NO: 58334 - DNA, 25 bp, Artificial
  probe
  misc_feature (1)..(25): SEQ ID NO: 3607; WAN024ALC_at; Start 82; Stop 106
cgctaaaagctctatggaaccacta

SEQ ID NO: 58335 - DNA, 25 bp, Artificial
  probe
  misc_feature (1)..(25): SEQ ID NO: 3607; WAN024ALC_at; Start 75; Stop 99
gttaccacgctaaaagctctatgga

SEQ ID NO: 58336 - DNA, 25 bp, Artificial
  probe
  misc_feature (1)..(25): SEQ ID NO: 3607; WAN024ALC_at; Start 129; Stop 153
gacaacaaaaaagttggatgaccca

SEQ ID NO: 58337 - DNA, 25 bp, Artificial
  probe
  misc_feature (1)..(25): SEQ ID NO: 3607; WAN024ALC_at; Start 4; Stop 28
gtacctcctgtatgatatgttgtag

SEQ ID NO: 58338 - DNA, 25 bp, Artificial
  probe
  misc_feature (1)..(25): SEQ ID NO: 3607; WAN024ALC_at; Start 74; Stop 98
tgttaccacgctaaaagctctatgg

SEQ ID NO: 58339 - DNA, 25 bp, Artificial
  probe
  misc_feature (1)..(25): SEQ ID NO: 3607; WAN024ALC_at; Start 18; Stop 42
atatgttgtagtggcggagaaacca

SEQ ID NO: 58340 - DNA, 25 bp, Artificial
  probe
  misc_feature (1)..(25): SEQ ID NO: 3607; WAN024ALC_at; Start 106; Stop 130
agcatagctagtggttttcgggaga

SEQ ID NO: 58341 - DNA, 25 bp, Artificial
  probe
  misc_feature (1)..(25): SEQ ID NO: 3607; WAN024ALC_at; Start 94; Stop 118
tatggaaccactagcatagctagtg

SEQ ID NO: 58342 - DNA, 25 bp, Artificial
  probe
  misc_feature (1)..(25): SEQ ID NO: 3607; WAN024ALC_at; Start 83; Stop 107
gctaaaagctctatggaaccactag

SEQ ID NO: 58343 - DNA, 25 bp, Artificial
  probe
  misc_feature (1)..(25): SEQ ID NO: 3607; WAN024ALC_at; Start 24; Stop 48
tgtagtggcggagaaaccacttcta

SEQ ID NO: 58344 - DNA, 25 bp, Artificial
  probe
  misc_feature (1)..(25): SEQ ID NO: 3607; WAN024ALC_at; Start 104; Stop 128
ctagcatagctagtggttttcggga

SEQ ID NO: 58345 - DNA, 25 bp, Artificial
  probe
  misc_feature (1)..(25): SEQ ID NO: 3607; WAN024ALC_at; Start 90; Stop 114
gctctatggaaccactagcatagct

SEQ ID NO: 58346 - DNA, 25 bp, Artificial
  probe
  misc_feature (1)..(25): SEQ ID NO: 3607; WAN024ALC_at; Start 111; Stop 135
agctagtggttttcgggagacaaca

SEQ ID NO: 58347 - DNA, 25 bp, Artificial
  probe
  misc_feature (1)..(25): SEQ ID NO: 3607; WAN024ALC_at; Start 92; Stop 116
tctatggaaccactagcatagctag

SEQ ID NO: 58348 - DNA, 25 bp, Artificial
  probe
  misc_feature (1)..(25): SEQ ID NO: 3607; WAN024ALC_at; Start 1; Stop 25
gaggtacctcctgtatgatatgttg

SEQ ID NO: 58349 - DNA, 25 bp, Artificial
  probe
  misc_feature (1)..(25): SEQ ID NO: 3607; WAN024ALC_at; Start 47; Stop 71
tatcttatcattttaggaggttctt

SEQ ID NO: 58350 - DNA, 25 bp, Artificial
  probe
  misc_feature (1)..(25): SEQ ID NO: 3607; WAN024ALC_at; Start 45; Stop 69
tctatcttatcattttaggaggttc

SEQ ID NO: 58351 - DNA, 25 bp, Artificial
  probe
  misc_feature (1)..(25): SEQ ID NO: 3607; WAN024ALC_at; Start 9; Stop 33
tcctgtatgatatgttgtagtggcg

SEQ ID NO: 58352 - DNA, 25 bp, Artificial
  probe
  misc_feature (1)..(25): SEQ ID NO: 3607; WAN024ALC_at; Start 10; Stop 34
cctgtatgatatgttgtagtggcgg

SEQ ID NO: 58353 - DNA, 25 bp, Artificial
  probe
  misc_feature (1)..(25): SEQ ID NO: 3607; WAN024ALC_at; Start 17; Stop 41
gatatgttgtagtggcggagaaacc

SEQ ID NO: 58354 - DNA, 25 bp, Artificial
  probe
  misc_feature (1)..(25): SEQ ID NO: 3607; WAN024ALC_at; Start 41; Stop 65
cacttctatcttatcattttaggag

SEQ ID NO: 58355 - DNA, 25 bp, Artificial
  probe
  misc_feature (1)..(25): SEQ ID NO: 3607; WAN024ALC_at; Start 22; Stop 46
gttgtagtggcggagaaaccacttc

SEQ ID NO: 58356 - DNA, 25 bp, Artificial
  probe
  misc_feature (1)..(25): SEQ ID NO: 3607; WAN024ALC_at; Start 85; Stop 109
taaaagctctatggaaccactagca

SEQ ID NO: 58357 - DNA, 25 bp, Artificial
  probe
  misc_feature (1)..(25): SEQ ID NO: 248; WAN024ALD_at; Start 43; Stop 67
tagctatgctagtggttccatagag

SEQ ID NO: 58358 - DNA, 25 bp, Artificial
  probe
  misc_feature (1)..(25): SEQ ID NO: 248; WAN024ALD_at; Start 28; Stop 52
tctcccgaaaaccactagctatgct

SEQ ID NO: 58359 - DNA, 25 bp, Artificial
  probe
  misc_feature (1)..(25): SEQ ID NO: 248; WAN024ALD_at; Start 133; Stop 157
caacatatcatacaggaggtacctc

SEQ ID NO: 58360 - DNA, 25 bp, Artificial
  probe
  misc_feature (1)..(25): SEQ ID NO: 248; WAN024ALD_at; Start 61; Stop 85
catagagcttttagcgtggtaacaa

SEQ ID NO: 58361 - DNA, 25 bp, Artificial
  probe
  misc_feature (1)..(25): SEQ ID NO: 248; WAN024ALD_at; Start 54; Stop 78
gtggttccatagagcttttagcgtg

SEQ ID NO: 58362 - DNA, 25 bp, Artificial
  probe
  misc_feature (1)..(25): SEQ ID NO: 248; WAN024ALD_at; Start 116; Stop 140
tggtttctccgccactacaacatat

SEQ ID NO: 58363 - DNA, 25 bp, Artificial
  probe
  misc_feature (1)..(25): SEQ ID NO: 248; WAN024ALD_at; Start 110; Stop 134
tagaagtggtttctccgccactaca

SEQ ID NO: 58364 - DNA, 25 bp, Artificial
  probe
  misc_feature (1)..(25): SEQ ID NO: 248; WAN024ALD_at; Start 103; Stop 127
gataagatagaagtggtttctccgc

SEQ ID NO: 58365 - DNA, 25 bp, Artificial
  probe
  misc_feature (1)..(25): SEQ ID NO: 248; WAN024ALD_at; Start 32; Stop 56
ccgaaaaccactagctatgctagtg

SEQ ID NO: 58366 - DNA, 25 bp, Artificial
  probe
  misc_feature (1)..(25): SEQ ID NO: 248; WAN024ALD_at; Start 10; Stop 34
catccaacttttttgttgtctcccg

SEQ ID NO: 58367 - DNA, 25 bp, Artificial
  probe
  misc_feature (1)..(25): SEQ ID NO: 248; WAN024ALD_at; Start 56; Stop 80
ggttccatagagcttttagcgtggt

SEQ ID NO: 58368 - DNA, 25 bp, Artificial
  probe
  misc_feature (1)..(25): SEQ ID NO: 248; WAN024ALD_at; Start 23; Stop 47
tgttgtctcccgaaaaccactagct

SEQ ID NO: 58369 - DNA, 25 bp, Artificial
  probe
  misc_feature (1)..(25): SEQ ID NO: 248; WAN024ALD_at; Start 52; Stop 76
tagtggttccatagagcttttagcg

SEQ ID NO: 58370 - DNA, 25 bp, Artificial
  probe
  misc_feature (1)..(25): SEQ ID NO: 248; WAN024ALD_at; Start 59; Stop 83
tccatagagcttttagcgtggtaac

SEQ ID NO: 58371 - DNA, 25 bp, Artificial
  probe
  misc_feature (1)..(25): SEQ ID NO: 248; WAN024ALD_at; Start 95; Stop 119
cctaaaatgataagatagaagtggt

SEQ ID NO: 58372 - DNA, 25 bp, Artificial
  probe
  misc_feature (1)..(25): SEQ ID NO: 248; WAN024ALD_at; Start 89; Stop 113
gaacctcctaaaatgataagataga

SEQ ID NO: 58373 - DNA, 25 bp, Artificial
  probe
  misc_feature (1)..(25): SEQ ID NO: 248; WAN024ALD_at; Start 47; Stop 71
tatgctagtggttccatagagcttt

SEQ ID NO: 58374 - DNA, 25 bp, Artificial
  probe
  misc_feature (1)..(25): SEQ ID NO: 248; WAN024ALD_at; Start 30; Stop 54
tcccgaaaaccactagctatgctag

SEQ ID NO: 58375 - DNA, 25 bp, Artificial
  probe
  misc_feature (1)..(25): SEQ ID NO: 248; WAN024ALD_at; Start 105; Stop 129
taagatagaagtggtttctccgcca

SEQ ID NO: 58376 - DNA, 25 bp, Artificial
  probe
  misc_feature (1)..(25): SEQ ID NO: 248; WAN024ALD_at; Start 118; Stop 142
gtttctccgccactacaacatatca

SEQ ID NO: 58377 - DNA, 25 bp, Artificial
  probe
  misc_feature (1)..(25): SEQ ID NO: 248; WAN024ALD_at; Start 128; Stop 152
cactacaacatatcatacaggaggt

SEQ ID NO: 58378 - DNA, 25 bp, Artificial
  probe
  misc_feature (1)..(25): SEQ ID NO: 248; WAN024ALD_at; Start 123; Stop 147
tccgccactacaacatatcatacag

SEQ ID NO: 58379 - DNA, 25 bp, Artificial
  probe
  misc_feature (1)..(25): SEQ ID NO: 248; WAN024ALD_at; Start 126; Stop 150
gccactacaacatatcatacaggag

SEQ ID NO: 58380 - DNA, 25 bp, Artificial
  probe
  misc_feature (1)..(25): SEQ ID NO: 248; WAN024ALD_at; Start 86; Stop 110
aaagaacctcctaaaatgataagat

SEQ ID NO: 58381 - DNA, 25 bp, Artificial
  probe
  misc_feature (1)..(25): SEQ ID NO: 248; WAN024ALD_at; Start 62; Stop 86
atagagcttttagcgtggtaacaaa

SEQ ID NO: 58382 - DNA, 25 bp, Artificial
  probe
  misc_feature (1)..(25): SEQ ID NO: 248; WAN024ALD_at; Start 131; Stop 155
tacaacatatcatacaggaggtacc

SEQ ID NO: 58383 - DNA, 25 bp, Artificial
  probe
  misc_feature (1)..(25): SEQ ID NO: 248; WAN024ALD_at; Start 106; Stop 130
aagatagaagtggtttctccgccac

SEQ ID NO: 58384 - DNA, 25 bp, Artificial
  probe
  misc_feature (1)..(25): SEQ ID NO: 248; WAN024ALD_at; Start 112; Stop 136
gaagtggtttctccgccactacaac

SEQ ID NO: 58385 - DNA, 25 bp, Artificial
  probe
  misc_feature (1)..(25): SEQ ID NO: 248; WAN024ALD_at; Start 92; Stop 116
cctcctaaaatgataagatagaagt

SEQ ID NO: 58386 - DNA, 25 bp, Artificial
  probe
  misc_feature (1)..(25): SEQ ID NO: 248; WAN024ALD_at; Start 5; Stop 29
tgggtcatccaacttttttgttgtc

SEQ ID NO: 58387 - DNA, 25 bp, Artificial
  probe
  misc_feature (1)..(25): SEQ ID NO: 248; WAN024ALD_at; Start 26; Stop 50
tgtctcccgaaaaccactagctatg

SEQ ID NO: 58388 - DNA, 25 bp, Artificial
  probe
  misc_feature (1)..(25): SEQ ID NO: 248; WAN024ALD_at; Start 45; Stop 69
gctatgctagtggttccatagagct

SEQ ID NO: 58389 - DNA, 25 bp, Artificial
  probe
  misc_feature (1)..(25): SEQ ID NO: 248; WAN024ALD_at; Start 108; Stop 132
gatagaagtggtttctccgccacta

SEQ ID NO: 58390 - DNA, 25 bp, Artificial
  probe
  misc_feature (1)..(25): SEQ ID NO: 248; WAN024ALD_at; Start 41; Stop 65
actagctatgctagtggttccatag

SEQ ID NO: 58391 - DNA, 25 bp, Artificial
  probe
  misc_feature (1)..(25): SEQ ID NO: 3315; WAN024ALE_at; Start 89; Stop 113
tcaatcaagtaaagtcacaaagtca

SEQ ID NO: 58392 - DNA, 25 bp, Artificial
  probe
  misc_feature (1)..(25): SEQ ID NO: 3315; WAN024ALE_at; Start 114; Stop 138
cattagctccgagcaaccattgcaa

SEQ ID NO: 58393 - DNA, 25 bp, Artificial
  probe
  misc_feature (1)..(25): SEQ ID NO: 3315; WAN024ALE_at; Start 127; Stop 151
caaccattgcaaattgaggtactca

SEQ ID NO: 58394 - DNA, 25 bp, Artificial
  probe
  misc_feature (1)..(25): SEQ ID NO: 3315; WAN024ALE_at; Start 126; Stop 150
gcaaccattgcaaattgaggtactc

SEQ ID NO: 58395 - DNA, 25 bp, Artificial
  probe
  misc_feature (1)..(25): SEQ ID NO: 3315; WAN024ALE_at; Start 122; Stop 146
ccgagcaaccattgcaaattgaggt

SEQ ID NO: 58396 - DNA, 25 bp, Artificial
  probe
  misc_feature (1)..(25): SEQ ID NO: 3315; WAN024ALE_at; Start 124; Stop 148
gagcaaccattgcaaattgaggtac

SEQ ID NO: 58397 - DNA, 25 bp, Artificial
  probe
  misc_feature (1)..(25): SEQ ID NO: 3315; WAN024ALE_at; Start 108; Stop 132
aagtcacattagctccgagcaacca

SEQ ID NO: 58398 - DNA, 25 bp, Artificial
  probe
  misc_feature (1)..(25): SEQ ID NO: 3315; WAN024ALE_at; Start 2; Stop 26
tctgtgccttttaatcatttcaatc

SEQ ID NO: 58399 - DNA, 25 bp, Artificial
  probe
  misc_feature (1)..(25): SEQ ID NO: 3315; WAN024ALE_at; Start 102; Stop 126
gtcacaaagtcacattagctccgag

SEQ ID NO: 58400 - DNA, 25 bp, Artificial
  probe
  misc_feature (1)..(25): SEQ ID NO: 3315; WAN024ALE_at; Start 105; Stop 129
acaaagtcacattagctccgagcaa

SEQ ID NO: 58401 - DNA, 25 bp, Artificial
  probe
  misc_feature (1)..(25): SEQ ID NO: 3315; WAN024ALE_at; Start 93; Stop 117
tcaagtaaagtcacaaagtcacatt

SEQ ID NO: 58402 - DNA, 25 bp, Artificial
  probe
  misc_feature (1)..(25): SEQ ID NO: 3315; WAN024ALE_at; Start 116; Stop 140
ttagctccgagcaaccattgcaaat

SEQ ID NO: 58403 - DNA, 25 bp, Artificial
  probe
  misc_feature (1)..(25): SEQ ID NO: 3315; WAN024ALE_at; Start 82; Stop 106
aagaatatcaatcaagtaaagtcac

SEQ ID NO: 58404 - DNA, 25 bp, Artificial
  probe
  misc_feature (1)..(25): SEQ ID NO: 3315; WAN024ALE_at; Start 98; Stop 122
taaagtcacaaagtcacattagctc

SEQ ID NO: 58405 - DNA, 25 bp, Artificial
  probe
  misc_feature (1)..(25): SEQ ID NO: 3315; WAN024ALE_at; Start 100; Stop 124
aagtcacaaagtcacattagctccg

SEQ ID NO: 58406 - DNA, 25 bp, Artificial
  probe
  misc_feature (1)..(25): SEQ ID NO: 3315; WAN024ALE_at; Start 119; Stop 143
gctccgagcaaccattgcaaattga

SEQ ID NO: 58407 - DNA, 25 bp, Artificial
  probe
  misc_feature (1)..(25): SEQ ID NO: 3315; WAN024ALE_at; Start 104; Stop 128
cacaaagtcacattagctccgagca

SEQ ID NO: 58408 - DNA, 25 bp, Artificial
  probe
  misc_feature (1)..(25): SEQ ID NO: 3315; WAN024ALE_at; Start 13; Stop 37
taatcatttcaatcttaaattggac

SEQ ID NO: 58409 - DNA, 25 bp, Artificial
  probe
  misc_feature (1)..(25): SEQ ID NO: 3315; WAN024ALE_at; Start 107; Stop 131
aaagtcacattagctccgagcaacc

SEQ ID NO: 58410 - DNA, 25 bp, Artificial
  probe
  misc_feature (1)..(25): SEQ ID NO: 3315; WAN024ALE_at; Start 106; Stop 130
caaagtcacattagctccgagcaac

SEQ ID NO: 58411 - DNA, 25 bp, Artificial
  probe
  misc_feature (1)..(25): SEQ ID NO: 3315; WAN024ALE_at; Start 117; Stop 141
tagctccgagcaaccattgcaaatt

SEQ ID NO: 58412 - DNA, 25 bp, Artificial
  probe
  misc_feature (1)..(25): SEQ ID NO: 3315; WAN024ALE_at; Start 84; Stop 108
gaatatcaatcaagtaaagtcacaa

SEQ ID NO: 58413 - DNA, 25 bp, Artificial
  probe
  misc_feature (1)..(25): SEQ ID NO: 3315; WAN024ALE_at; Start 73; Stop 97
gacaagaaaaagaatatcaatcaag

SEQ ID NO: 58414 - DNA, 25 bp, Artificial
  probe
  misc_feature (1)..(25): SEQ ID NO: 3315; WAN024ALE_at; Start 121; Stop 145
tccgagcaaccattgcaaattgagg

SEQ ID NO: 58415 - DNA, 25 bp, Artificial
  probe
  misc_feature (1)..(25): SEQ ID NO: 3315; WAN024ALE_at; Start 17; Stop 41
catttcaatcttaaattggactttt

SEQ ID NO: 58416 - DNA, 25 bp, Artificial
  probe
  misc_feature (1)..(25): SEQ ID NO: 3315; WAN024ALE_at; Start 129; Stop 153
accattgcaaattgaggtactcaca

SEQ ID NO: 58417 - DNA, 25 bp, Artificial
  probe
  misc_feature (1)..(25): SEQ ID NO: 3315; WAN024ALE_at; Start 95; Stop 119
aagtaaagtcacaaagtcacattag

SEQ ID NO: 58418 - DNA, 25 bp, Artificial
  probe
  misc_feature (1)..(25): SEQ ID NO: 3315; WAN024ALE_at; Start 110; Stop 134
gtcacattagctccgagcaaccatt

SEQ ID NO: 58419 - DNA, 25 bp, Artificial
  probe
  misc_feature (1)..(25): SEQ ID NO: 3315; WAN024ALE_at; Start 69; Stop 93
ggaagacaagaaaaagaatatcaat

SEQ ID NO: 58420 - DNA, 25 bp, Artificial
  probe
  misc_feature (1)..(25): SEQ ID NO: 3315; WAN024ALE_at; Start 90; Stop 114
caatcaagtaaagtcacaaagtcac

SEQ ID NO: 58421 - DNA, 25 bp, Artificial
  probe
  misc_feature (1)..(25): SEQ ID NO: 3315; WAN024ALE_at; Start 130; Stop 154
ccattgcaaattgaggtactcacac

SEQ ID NO: 58422 - DNA, 25 bp, Artificial
  probe
  misc_feature (1)..(25): SEQ ID NO: 3315; WAN024ALE_at; Start 131; Stop 155
cattgcaaattgaggtactcacaca

SEQ ID NO: 58423 - DNA, 25 bp, Artificial
  probe
  misc_feature (1)..(25): SEQ ID NO: 3315; WAN024ALE_at; Start 87; Stop 111
tatcaatcaagtaaagtcacaaagt

SEQ ID NO: 58424 - DNA, 25 bp, Artificial
  probe
  misc_feature (1)..(25): SEQ ID NO: 3315; WAN024ALE_at; Start 103; Stop 127
tcacaaagtcacattagctccgagc

SEQ ID NO: 58425 - DNA, 25 bp, Artificial
  probe
  misc_feature (1)..(25): SEQ ID NO: 4733; WAN024ALF_at; Start 30; Stop 54
ctcggagctaatgtgactttgtgac

SEQ ID NO: 58426 - DNA, 25 bp, Artificial
  probe
  misc_feature (1)..(25): SEQ ID NO: 4733; WAN024ALF_at; Start 15; Stop 39
aatttgcaatggttgctcggagcta

SEQ ID NO: 58427 - DNA, 25 bp, Artificial
  probe
  misc_feature (1)..(25): SEQ ID NO: 4733; WAN024ALF_at; Start 36; Stop 60
gctaatgtgactttgtgactttact

SEQ ID NO: 58428 - DNA, 25 bp, Artificial
  probe
  misc_feature (1)..(25): SEQ ID NO: 4733; WAN024ALF_at; Start 17; Stop 41
tttgcaatggttgctcggagctaat

SEQ ID NO: 58429 - DNA, 25 bp, Artificial
  probe
  misc_feature (1)..(25): SEQ ID NO: 4733; WAN024ALF_at; Start 62; Stop 86
gattgatattctttttcttgtcttc

SEQ ID NO: 58430 - DNA, 25 bp, Artificial
  probe
  misc_feature (1)..(25): SEQ ID NO: 4733; WAN024ALF_at; Start 10; Stop 34
acctcaatttgcaatggttgctcgg

SEQ ID NO: 58431 - DNA, 25 bp, Artificial
  probe
  misc_feature (1)..(25): SEQ ID NO: 4733; WAN024ALF_at; Start 6; Stop 30
gagtacctcaatttgcaatggttgc

SEQ ID NO: 58432 - DNA, 25 bp, Artificial
  probe
  misc_feature (1)..(25): SEQ ID NO: 4733; WAN024ALF_at; Start 131; Stop 155
attgaaatgattaaaaggcacagag

SEQ ID NO: 58433 - DNA, 25 bp, Artificial
  probe
  misc_feature (1)..(25): SEQ ID NO: 4733; WAN024ALF_at; Start 1; Stop 25
tgtgtgagtacctcaatttgcaatg

SEQ ID NO: 58434 - DNA, 25 bp, Artificial
  probe
  misc_feature (1)..(25): SEQ ID NO: 4733; WAN024ALF_at; Start 130; Stop 154
gattgaaatgattaaaaggcacaga

SEQ ID NO: 58435 - DNA, 25 bp, Artificial
  probe
  misc_feature (1)..(25): SEQ ID NO: 4733; WAN024ALF_at; Start 5; Stop 29
tgagtacctcaatttgcaatggttg

SEQ ID NO: 58436 - DNA, 25 bp, Artificial
  probe
  misc_feature (1)..(25): SEQ ID NO: 4733; WAN024ALF_at; Start 3; Stop 27
tgtgagtacctcaatttgcaatggt

SEQ ID NO: 58437 - DNA, 25 bp, Artificial
  probe
  misc_feature (1)..(25): SEQ ID NO: 4733; WAN024ALF_at; Start 9; Stop 33
tacctcaatttgcaatggttgctcg

SEQ ID NO: 58438 - DNA, 25 bp, Artificial
  probe
  misc_feature (1)..(25): SEQ ID NO: 4733; WAN024ALF_at; Start 2; Stop 26
gtgtgagtacctcaatttgcaatgg

SEQ ID NO: 58439 - DNA, 25 bp, Artificial
  probe
  misc_feature (1)..(25): SEQ ID NO: 4733; WAN024ALF_at; Start 22; Stop 46
aatggttgctcggagctaatgtgac

SEQ ID NO: 58440 - DNA, 25 bp, Artificial
  probe
  misc_feature (1)..(25): SEQ ID NO: 4733; WAN024ALF_at; Start 44; Stop 68
gactttgtgactttacttgattgat

SEQ ID NO: 58441 - DNA, 25 bp, Artificial
  probe
  misc_feature (1)..(25): SEQ ID NO: 4733; WAN024ALF_at; Start 26; Stop 50
gttgctcggagctaatgtgactttg

SEQ ID NO: 58442 - DNA, 25 bp, Artificial
  probe
  misc_feature (1)..(25): SEQ ID NO: 4733; WAN024ALF_at; Start 11; Stop 35
cctcaatttgcaatggttgctcgga

SEQ ID NO: 58443 - DNA, 25 bp, Artificial
  probe
  misc_feature (1)..(25): SEQ ID NO: 4733; WAN024ALF_at; Start 14; Stop 38
caatttgcaatggttgctcggagct

SEQ ID NO: 58444 - DNA, 25 bp, Artificial
  probe
  misc_feature (1)..(25): SEQ ID NO: 4733; WAN024ALF_at; Start 16; Stop 40
atttgcaatggttgctcggagctaa

SEQ ID NO: 58445 - DNA, 25 bp, Artificial
  probe
  misc_feature (1)..(25): SEQ ID NO: 4733; WAN024ALF_at; Start 29; Stop 53
gctcggagctaatgtgactttgtga

SEQ ID NO: 58446 - DNA, 25 bp, Artificial
  probe
  misc_feature (1)..(25): SEQ ID NO: 4733; WAN024ALF_at; Start 49; Stop 73
tgtgactttacttgattgatattct

SEQ ID NO: 58447 - DNA, 25 bp, Artificial
  probe
  misc_feature (1)..(25): SEQ ID NO: 4733; WAN024ALF_at; Start 28; Stop 52
tgctcggagctaatgtgactttgtg

SEQ ID NO: 58448 - DNA, 25 bp, Artificial
  probe
  misc_feature (1)..(25): SEQ ID NO: 4733; WAN024ALF_at; Start 13; Stop 37
tcaatttgcaatggttgctcggagc

SEQ ID NO: 58449 - DNA, 25 bp, Artificial
  probe
  misc_feature (1)..(25): SEQ ID NO: 4733; WAN024ALF_at; Start 115; Stop 139
aaaagtccaatttaagattgaaatg

SEQ ID NO: 58450 - DNA, 25 bp, Artificial
  probe
  misc_feature (1)..(25): SEQ ID NO: 4733; WAN024ALF_at; Start 34; Stop 58
gagctaatgtgactttgtgacttta

SEQ ID NO: 58451 - DNA, 25 bp, Artificial
  probe
  misc_feature (1)..(25): SEQ ID NO: 4733; WAN024ALF_at; Start 25; Stop 49
ggttgctcggagctaatgtgacttt

SEQ ID NO: 58452 - DNA, 25 bp, Artificial
  probe
  misc_feature (1)..(25): SEQ ID NO: 4733; WAN024ALF_at; Start 127; Stop 151
taagattgaaatgattaaaaggcac

SEQ ID NO: 58453 - DNA, 25 bp, Artificial
  probe
  misc_feature (1)..(25): SEQ ID NO: 4733; WAN024ALF_at; Start 19; Stop 43
tgcaatggttgctcggagctaatgt

SEQ ID NO: 58454 - DNA, 25 bp, Artificial
  probe
  misc_feature (1)..(25): SEQ ID NO: 4733; WAN024ALF_at; Start 8; Stop 32
gtacctcaatttgcaatggttgctc

SEQ ID NO: 58455 - DNA, 25 bp, Artificial
  probe
  misc_feature (1)..(25): SEQ ID NO: 4733; WAN024ALF_at; Start 42; Stop 66
gtgactttgtgactttacttgattg

SEQ ID NO: 58456 - DNA, 25 bp, Artificial
  probe
  misc_feature (1)..(25): SEQ ID NO: 4733; WAN024ALF_at; Start 31; Stop 55
tcggagctaatgtgactttgtgact

SEQ ID NO: 58457 - DNA, 25 bp, Artificial
  probe
  misc_feature (1)..(25): SEQ ID NO: 4733; WAN024ALF_at; Start 39; Stop 63
aatgtgactttgtgactttacttga

SEQ ID NO: 58458 - DNA, 25 bp, Artificial
  probe
  misc_feature (1)..(25): SEQ ID NO: 4733; WAN024ALF_at; Start 32; Stop 56
cggagctaatgtgactttgtgactt

SEQ ID NO: 58459 - DNA, 25 bp, Artificial
  probe
  misc_feature (1)..(25): SEQ ID NO: 4808; WAN024ALG_at; Start 32; Stop 56
cataaactagagggggaatttgtat

SEQ ID NO: 58460 - DNA, 25 bp, Artificial
  probe
  misc_feature (1)..(25): SEQ ID NO: 4808; WAN024ALG_at; Start 2; Stop 26
tattttatataaaatcacccctcta

SEQ ID NO: 58461 - DNA, 25 bp, Artificial
  probe
  misc_feature (1)..(25): SEQ ID NO: 4808; WAN024ALG_at; Start 31; Stop 55
tcataaactagagggggaatttgta

SEQ ID NO: 58462 - DNA, 25 bp, Artificial
  probe
  misc_feature (1)..(25): SEQ ID NO: 363; WAN024ALH_at; Start 13; Stop 37
tacaaattccccctctagtttatga

SEQ ID NO: 58463 - DNA, 25 bp, Artificial
  probe
  misc_feature (1)..(25): SEQ ID NO: 363; WAN024ALH_at; Start 42; Stop 66
tagaggggtgattttatataaaata

SEQ ID NO: 58464 - DNA, 25 bp, Artificial
  probe
  misc_feature (1)..(25): SEQ ID NO: 363; WAN024ALH_at; Start 12; Stop 36
atacaaattccccctctagtttatg

SEQ ID NO: 58465 - DNA, 25 bp, Artificial
  probe
  misc_feature (1)..(25): SEQ ID NO: 303; WAN024ALI_at; Start 49; Stop 73
ctatcatttcaatagaagaatcctc

SEQ ID NO: 58466 - DNA, 25 bp, Artificial
  probe
  misc_feature (1)..(25): SEQ ID NO: 303; WAN024ALI_at; Start 50; Stop 74
tatcatttcaatagaagaatcctct

SEQ ID NO: 58467 - DNA, 25 bp, Artificial
  probe
  misc_feature (1)..(25): SEQ ID NO: 303; WAN024ALI_at; Start 37; Stop 61
tcttttcctttcctatcatttcaat

SEQ ID NO: 58468 - DNA, 25 bp, Artificial
  probe
  misc_feature (1)..(25): SEQ ID NO: 303; WAN024ALI_at; Start 41; Stop 65
ttcctttcctatcatttcaatagaa

SEQ ID NO: 58469 - DNA, 25 bp, Artificial
  probe
  misc_feature (1)..(25): SEQ ID NO: 303; WAN024ALI_at; Start 51; Stop 75
atcatttcaatagaagaatcctctt

SEQ ID NO: 58470 - DNA, 25 bp, Artificial
  probe
  misc_feature (1)..(25): SEQ ID NO: 303; WAN024ALI_at; Start 42; Stop 66
tcctttcctatcatttcaatagaag

SEQ ID NO: 58471 - DNA, 25 bp, Artificial
  probe
  misc_feature (1)..(25): SEQ ID NO: 303; WAN024ALI_at; Start 52; Stop 76
tcatttcaatagaagaatcctcttc

SEQ ID NO: 58472 - DNA, 25 bp, Artificial
  probe
  misc_feature (1)..(25): SEQ ID NO: 303; WAN024ALI_at; Start 40; Stop 64
tttcctttcctatcatttcaataga

SEQ ID NO: 58473 - DNA, 25 bp, Artificial
  probe
  misc_feature (1)..(25): SEQ ID NO: 303; WAN024ALI_at; Start 35; Stop 59
gttcttttcctttcctatcatttca

SEQ ID NO: 58474 - DNA, 25 bp, Artificial
  probe
  misc_feature (1)..(25): SEQ ID NO: 303; WAN024ALI_at; Start 48; Stop 72
cctatcatttcaatagaagaatcct

SEQ ID NO: 58475 - DNA, 25 bp, Artificial
  probe
  misc_feature (1)..(25): SEQ ID NO: 303; WAN024ALI_at; Start 45; Stop 69
tttcctatcatttcaatagaagaat

SEQ ID NO: 58476 - DNA, 25 bp, Artificial
  probe
  misc_feature (1)..(25): SEQ ID NO: 303; WAN024ALI_at; Start 36; Stop 60
ttcttttcctttcctatcatttcaa

SEQ ID NO: 58477 - DNA, 25 bp, Artificial
  probe
  misc_feature (1)..(25): SEQ ID NO: 303; WAN024ALI_at; Start 44; Stop 68
ctttcctatcatttcaatagaagaa

SEQ ID NO: 58478 - DNA, 25 bp, Artificial
  probe
  misc_feature (1)..(25): SEQ ID NO: 303; WAN024ALI_at; Start 46; Stop 70
ttcctatcatttcaatagaagaatc

SEQ ID NO: 58479 - DNA, 25 bp, Artificial
  probe
  misc_feature (1)..(25): SEQ ID NO: 303; WAN024ALI_at; Start 38; Stop 62
cttttcctttcctatcatttcaata

SEQ ID NO: 58480 - DNA, 25 bp, Artificial
  probe
  misc_feature (1)..(25): SEQ ID NO: 303; WAN024ALI_at; Start 47; Stop 71
tcctatcatttcaatagaagaatcc

SEQ ID NO: 58481 - DNA, 25 bp, Artificial
  probe
  misc_feature (1)..(25): SEQ ID NO: 303; WAN024ALI_at; Start 43; Stop 67
cctttcctatcatttcaatagaaga

SEQ ID NO: 58482 - DNA, 25 bp, Artificial
  probe
  misc_feature (1)..(25): SEQ ID NO: 303; WAN024ALI_at; Start 39; Stop 63
ttttcctttcctatcatttcaatag

SEQ ID NO: 58483 - DNA, 25 bp, Artificial
  probe
  misc_feature (1)..(25): SEQ ID NO: 3554; WAN024ALJ_at; Start 2; Stop 26
aagaggattcttctattgaaatgat

SEQ ID NO: 58484 - DNA, 25 bp, Artificial
  probe
  misc_feature (1)..(25): SEQ ID NO: 3554; WAN024ALJ_at; Start 11; Stop 35
cttctattgaaatgataggaaagga

SEQ ID NO: 58485 - DNA, 25 bp, Artificial
  probe
  misc_feature (1)..(25): SEQ ID NO: 3554; WAN024ALJ_at; Start 15; Stop 39
tattgaaatgataggaaaggaaaag

SEQ ID NO: 58486 - DNA, 25 bp, Artificial
  probe
  misc_feature (1)..(25): SEQ ID NO: 3554; WAN024ALJ_at; Start 5; Stop 29
aggattcttctattgaaatgatagg

SEQ ID NO: 58487 - DNA, 25 bp, Artificial
  probe
  misc_feature (1)..(25): SEQ ID NO: 3554; WAN024ALJ_at; Start 13; Stop 37
tctattgaaatgataggaaaggaaa

SEQ ID NO: 58488 - DNA, 25 bp, Artificial
  probe
  misc_feature (1)..(25): SEQ ID NO: 3554; WAN024ALJ_at; Start 16; Stop 40
attgaaatgataggaaaggaaaaga

SEQ ID NO: 58489 - DNA, 25 bp, Artificial
  probe
  misc_feature (1)..(25): SEQ ID NO: 3554; WAN024ALJ_at; Start 4; Stop 28
gaggattcttctattgaaatgatag

SEQ ID NO: 58490 - DNA, 25 bp, Artificial
  probe
  misc_feature (1)..(25): SEQ ID NO: 3554; WAN024ALJ_at; Start 12; Stop 36
ttctattgaaatgataggaaaggaa

SEQ ID NO: 58491 - DNA, 25 bp, Artificial
  probe
  misc_feature (1)..(25): SEQ ID NO: 3554; WAN024ALJ_at; Start 8; Stop 32
attcttctattgaaatgataggaaa

SEQ ID NO: 58492 - DNA, 25 bp, Artificial
  probe
  misc_feature (1)..(25): SEQ ID NO: 3554; WAN024ALJ_at; Start 10; Stop 34
tcttctattgaaatgataggaaagg

SEQ ID NO: 58493 - DNA, 25 bp, Artificial
  probe
  misc_feature (1)..(25): SEQ ID NO: 3554; WAN024ALJ_at; Start 14; Stop 38
ctattgaaatgataggaaaggaaaa

SEQ ID NO: 58494 - DNA, 25 bp, Artificial
  probe
  misc_feature (1)..(25): SEQ ID NO: 3554; WAN024ALJ_at; Start 18; Stop 42
tgaaatgataggaaaggaaaagaac

SEQ ID NO: 58495 - DNA, 25 bp, Artificial
  probe
  misc_feature (1)..(25): SEQ ID NO: 3554; WAN024ALJ_at; Start 7; Stop 31
gattcttctattgaaatgataggaa

SEQ ID NO: 58496 - DNA, 25 bp, Artificial
  probe
  misc_feature (1)..(25): SEQ ID NO: 3554; WAN024ALJ_at; Start 1; Stop 25
gaagaggattcttctattgaaatga

SEQ ID NO: 58497 - DNA, 25 bp, Artificial
  probe
  misc_feature (1)..(25): SEQ ID NO: 3554; WAN024ALJ_at; Start 9; Stop 33
ttcttctattgaaatgataggaaag

SEQ ID NO: 58498 - DNA, 25 bp, Artificial
  probe
  misc_feature (1)..(25): SEQ ID NO: 3554; WAN024ALJ_at; Start 6; Stop 30
ggattcttctattgaaatgatagga

SEQ ID NO: 58499 - DNA, 25 bp, Artificial
  probe
  misc_feature (1)..(25): SEQ ID NO: 3554; WAN024ALJ_at; Start 17; Stop 41
ttgaaatgataggaaaggaaaagaa

SEQ ID NO: 58500 - DNA, 25 bp, Artificial
  probe
  misc_feature (1)..(25): SEQ ID NO: 3554; WAN024ALJ_at; Start 3; Stop 27
agaggattcttctattgaaatgata

SEQ ID NO: 58501 - DNA, 25 bp, Artificial
  probe
  misc_feature (1)..(25): SEQ ID NO: 5957; WAN024ALK_at; Start 192; Stop 216
gctaacaagcagaagtaagataggt

SEQ ID NO: 58502 - DNA, 25 bp, Artificial
  probe
  misc_feature (1)..(25): SEQ ID NO: 5957; WAN024ALK_at; Start 101; Stop 125
tataggggagtgtcaattaatttaa

SEQ ID NO: 58503 - DNA, 25 bp, Artificial
  probe
  misc_feature (1)..(25): SEQ ID NO: 5957; WAN024ALK_at; Start 294; Stop 318
tatatcagggaggagagccgtgact

SEQ ID NO: 58504 - DNA, 25 bp, Artificial
  probe
  misc_feature (1)..(25): SEQ ID NO: 5957; WAN024ALK_at; Start 194; Stop 218
taacaagcagaagtaagataggtct

SEQ ID NO: 58505 - DNA, 25 bp, Artificial
  probe
  misc_feature (1)..(25): SEQ ID NO: 5957; WAN024ALK_at; Start 318; Stop 342
tgcaagctctctatatgaaagctgg

SEQ ID NO: 58506 - DNA, 25 bp, Artificial
  probe
  misc_feature (1)..(25): SEQ ID NO: 5957; WAN024ALK_at; Start 267; Stop 291
tctgaaagactagtagcccaaggga

SEQ ID NO: 58507 - DNA, 25 bp, Artificial
  probe
  misc_feature (1)..(25): SEQ ID NO: 5957; WAN024ALK_at; Start 280; Stop 304
tagcccaagggaagtatatcaggga

SEQ ID NO: 58508 - DNA, 25 bp, Artificial
  probe
  misc_feature (1)..(25): SEQ ID NO: 5957; WAN024ALK_at; Start 207; Stop 231
taagataggtcttgcaagaatggta

SEQ ID NO: 58509 - DNA, 25 bp, Artificial
  probe
  misc_feature (1)..(25): SEQ ID NO: 5957; WAN024ALK_at; Start 210; Stop 234
gataggtcttgcaagaatggtaaaa

SEQ ID NO: 58510 - DNA, 25 bp, Artificial
  probe
  misc_feature (1)..(25): SEQ ID NO: 5957; WAN024ALK_at; Start 311; Stop 335
ccgtgactgcaagctctctatatga

SEQ ID NO: 58511 - DNA, 25 bp, Artificial
  probe
  misc_feature (1)..(25): SEQ ID NO: 5957; WAN024ALK_at; Start 308; Stop 332
gagccgtgactgcaagctctctata

SEQ ID NO: 58512 - DNA, 25 bp, Artificial
  probe
  misc_feature (1)..(25): SEQ ID NO: 5957; WAN024ALK_at; Start 328; Stop 352
ctatatgaaagctgggtgaattcac

SEQ ID NO: 58513 - DNA, 25 bp, Artificial
  probe
  misc_feature (1)..(25): SEQ ID NO: 5957; WAN024ALK_at; Start 323; Stop 347
gctctctatatgaaagctgggtgaa

SEQ ID NO: 58514 - DNA, 25 bp, Artificial
  probe
  misc_feature (1)..(25): SEQ ID NO: 5957; WAN024ALK_at; Start 265; Stop 289
aatctgaaagactagtagcccaagg

SEQ ID NO: 58515 - DNA, 25 bp, Artificial
  probe
  misc_feature (1)..(25): SEQ ID NO: 5957; WAN024ALK_at; Start 320; Stop 344
caagctctctatatgaaagctgggt

SEQ ID NO: 58516 - DNA, 25 bp, Artificial
  probe
  misc_feature (1)..(25): SEQ ID NO: 5957; WAN024ALK_at; Start 186; Stop 210
gaataagctaacaagcagaagtaag

SEQ ID NO: 58517 - DNA, 25 bp, Artificial
  probe
  misc_feature (1)..(25): SEQ ID NO: 5957; WAN024ALK_at; Start 276; Stop 300
ctagtagcccaagggaagtatatca

SEQ ID NO: 58518 - DNA, 25 bp, Artificial
  probe
  misc_feature (1)..(25): SEQ ID NO: 5957; WAN024ALK_at; Start 214; Stop 238
ggtcttgcaagaatggtaaaaatct

SEQ ID NO: 58519 - DNA, 25 bp, Artificial
  probe
  misc_feature (1)..(25): SEQ ID NO: 5957; WAN024ALK_at; Start 32; Stop 56
taaggtggcatttcattaaatatgg

SEQ ID NO: 58520 - DNA, 25 bp, Artificial
  probe
  misc_feature (1)..(25): SEQ ID NO: 5957; WAN024ALK_at; Start 183; Stop 207
taagaataagctaacaagcagaagt

SEQ ID NO: 58521 - DNA, 25 bp, Artificial
  probe
  misc_feature (1)..(25): SEQ ID NO: 5957; WAN024ALK_at; Start 22; Stop 46
ttatcacggttaaggtggcatttca

SEQ ID NO: 58522 - DNA, 25 bp, Artificial
  probe
  misc_feature (1)..(25): SEQ ID NO: 5957; WAN024ALK_at; Start 303; Stop 327
gaggagagccgtgactgcaagctct

SEQ ID NO: 58523 - DNA, 25 bp, Artificial
  probe
  misc_feature (1)..(25): SEQ ID NO: 5957; WAN024ALK_at; Start 179; Stop 203
tagataagaataagctaacaagcag

SEQ ID NO: 58524 - DNA, 25 bp, Artificial
  probe
  misc_feature (1)..(25): SEQ ID NO: 5957; WAN024ALK_at; Start 216; Stop 240
tcttgcaagaatggtaaaaatctga

SEQ ID NO: 58525 - DNA, 25 bp, Artificial
  probe
  misc_feature (1)..(25): SEQ ID NO: 5957; WAN024ALK_at; Start 269; Stop 293
tgaaagactagtagcccaagggaag

SEQ ID NO: 58526 - DNA, 25 bp, Artificial
  probe
  misc_feature (1)..(25): SEQ ID NO: 5957; WAN024ALK_at; Start 314; Stop 338
tgactgcaagctctctatatgaaag

SEQ ID NO: 58527 - DNA, 25 bp, Artificial
  probe
  misc_feature (1)..(25): SEQ ID NO: 5957; WAN024ALK_at; Start 197; Stop 221
caagcagaagtaagataggtcttgc

SEQ ID NO: 58528 - DNA, 25 bp, Artificial
  probe
  misc_feature (1)..(25): SEQ ID NO: 5957; WAN024ALK_at; Start 26; Stop 50
cacggttaaggtggcatttcattaa

SEQ ID NO: 58529 - DNA, 25 bp, Artificial
  probe
  misc_feature (1)..(25): SEQ ID NO: 5957; WAN024ALK_at; Start 201; Stop 225
cagaagtaagataggtcttgcaaga

SEQ ID NO: 58530 - DNA, 25 bp, Artificial
  probe
  misc_feature (1)..(25): SEQ ID NO: 5957; WAN024ALK_at; Start 35; Stop 59
ggtggcatttcattaaatatggaat

SEQ ID NO: 58531 - DNA, 25 bp, Artificial
  probe
  misc_feature (1)..(25): SEQ ID NO: 5957; WAN024ALK_at; Start 2; Stop 26
tttttattgatgactagctattatc

SEQ ID NO: 58532 - DNA, 25 bp, Artificial
  probe
  misc_feature (1)..(25): SEQ ID NO: 5957; WAN024ALK_at; Start 283; Stop 307
cccaagggaagtatatcagggagga

SEQ ID NO: 58533 - DNA, 25 bp, Artificial
  probe
  misc_feature (1)..(25): SEQ ID NO: 5957; WAN024ALK_at; Start 274; Stop 298
gactagtagcccaagggaagtatat

SEQ ID NO: 58534 - DNA, 25 bp, Artificial
  probe
  misc_feature (1)..(25): SEQ ID NO: 5957; WAN024ALK_at; Start 326; Stop 350
ctctatatgaaagctgggtgaattc

SEQ ID NO: 58535 - DNA, 25 bp, Artificial
  probe
  misc_feature (1)..(25): SEQ ID NO: 3914; WAN024ALL_at; Start 233; Stop 257
ttaattgacactcccctataaaata

SEQ ID NO: 58536 - DNA, 25 bp, Artificial
  probe
  misc_feature (1)..(25): SEQ ID NO: 3914; WAN024ALL_at; Start 3; Stop 27
gaattcacccagctttcatatagag

SEQ ID NO: 58537 - DNA, 25 bp, Artificial
  probe
  misc_feature (1)..(25): SEQ ID NO: 3914; WAN024ALL_at; Start 11; Stop 35
ccagctttcatatagagagcttgca

SEQ ID NO: 58538 - DNA, 25 bp, Artificial
  probe
  misc_feature (1)..(25): SEQ ID NO: 3914; WAN024ALL_at; Start 304; Stop 328
taatgaaatgccaccttaaccgtga

SEQ ID NO: 58539 - DNA, 25 bp, Artificial
  probe
  misc_feature (1)..(25): SEQ ID NO: 3914; WAN024ALL_at; Start 114; Stop 138
cagatttttaccattcttgcaagac

SEQ ID NO: 58540 - DNA, 25 bp, Artificial
  probe
  misc_feature (1)..(25): SEQ ID NO: 3914; WAN024ALL_at; Start 136; Stop 160
gacctatcttacttctgcttgttag

SEQ ID NO: 58541 - DNA, 25 bp, Artificial
  probe
  misc_feature (1)..(25): SEQ ID NO: 3914; WAN024ALL_at; Start 228; Stop 252
ttaaattaattgacactcccctata

SEQ ID NO: 58542 - DNA, 25 bp, Artificial
  probe
  misc_feature (1)..(25): SEQ ID NO: 3914; WAN024ALL_at; Start 15; Stop 39
ctttcatatagagagcttgcagtca

SEQ ID NO: 58543 - DNA, 25 bp, Artificial
  probe
  misc_feature (1)..(25): SEQ ID NO: 3914; WAN024ALL_at; Start 23; Stop 47
tagagagcttgcagtcacggctctc

SEQ ID NO: 58544 - DNA, 25 bp, Artificial
  probe
  misc_feature (1)..(25): SEQ ID NO: 3914; WAN024ALL_at; Start 150; Stop 174
ctgcttgttagcttattcttatcta

SEQ ID NO: 58545 - DNA, 25 bp, Artificial
  probe
  misc_feature (1)..(25): SEQ ID NO: 3914; WAN024ALL_at; Start 56; Stop 80
tatacttcccttgggctactagtct

SEQ ID NO: 58546 - DNA, 25 bp, Artificial
  probe
  misc_feature (1)..(25): SEQ ID NO: 3914; WAN024ALL_at; Start 17; Stop 41
ttcatatagagagcttgcagtcacg

SEQ ID NO: 58547 - DNA, 25 bp, Artificial
  probe
  misc_feature (1)..(25): SEQ ID NO: 3914; WAN024ALL_at; Start 62; Stop 86
tcccttgggctactagtctttcaga

SEQ ID NO: 58548 - DNA, 25 bp, Artificial
  probe
  misc_feature (1)..(25): SEQ ID NO: 3914; WAN024ALL_at; Start 132; Stop 156
gcaagacctatcttacttctgcttg

SEQ ID NO: 58549 - DNA, 25 bp, Artificial
  probe
  misc_feature (1)..(25): SEQ ID NO: 3914; WAN024ALL_at; Start 21; Stop 45
tatagagagcttgcagtcacggctc

SEQ ID NO: 58550 - DNA, 25 bp, Artificial
  probe
  misc_feature (1)..(25): SEQ ID NO: 3914; WAN024ALL_at; Start 5; Stop 29
attcacccagctttcatatagagag

SEQ ID NO: 58551 - DNA, 25 bp, Artificial
  probe
  misc_feature (1)..(25): SEQ ID NO: 3914; WAN024ALL_at; Start 116; Stop 140
gatttttaccattcttgcaagacct

SEQ ID NO: 58552 - DNA, 25 bp, Artificial
  probe
  misc_feature (1)..(25): SEQ ID NO: 3914; WAN024ALL_at; Start 26; Stop 50
agagcttgcagtcacggctctcctc

SEQ ID NO: 58553 - DNA, 25 bp, Artificial
  probe
  misc_feature (1)..(25): SEQ ID NO: 3914; WAN024ALL_at; Start 53; Stop 77
tgatatacttcccttgggctactag

SEQ ID NO: 58554 - DNA, 25 bp, Artificial
  probe
  misc_feature (1)..(25): SEQ ID NO: 3914; WAN024ALL_at; Start 297; Stop 321
ccatatttaatgaaatgccacctta

SEQ ID NO: 58555 - DNA, 25 bp, Artificial
  probe
  misc_feature (1)..(25): SEQ ID NO: 3914; WAN024ALL_at; Start 128; Stop 152
tcttgcaagacctatcttacttctg

SEQ ID NO: 58556 - DNA, 25 bp, Artificial
  probe
  misc_feature (1)..(25): SEQ ID NO: 3914; WAN024ALL_at; Start 103; Stop 127
acttagtttatcagatttttaccat

SEQ ID NO: 58557 - DNA, 25 bp, Artificial
  probe
  misc_feature (1)..(25): SEQ ID NO: 3914; WAN024ALL_at; Start 49; Stop 73
tccctgatatacttcccttgggcta

SEQ ID NO: 58558 - DNA, 25 bp, Artificial
  probe
  misc_feature (1)..(25): SEQ ID NO: 3914; WAN024ALL_at; Start 124; Stop 148
ccattcttgcaagacctatcttact

SEQ ID NO: 58559 - DNA, 25 bp, Artificial
  probe
  misc_feature (1)..(25): SEQ ID NO: 3914; WAN024ALL_at; Start 7; Stop 31
tcacccagctttcatatagagagct

SEQ ID NO: 58560 - DNA, 25 bp, Artificial
  probe
  misc_feature (1)..(25): SEQ ID NO: 3914; WAN024ALL_at; Start 19; Stop 43
catatagagagcttgcagtcacggc

SEQ ID NO: 58561 - DNA, 25 bp, Artificial
  probe
  misc_feature (1)..(25): SEQ ID NO: 3914; WAN024ALL_at; Start 46; Stop 70
tcctccctgatatacttcccttggg

SEQ ID NO: 58562 - DNA, 25 bp, Artificial
  probe
  misc_feature (1)..(25): SEQ ID NO: 3914; WAN024ALL_at; Start 35; Stop 59
agtcacggctctcctccctgatata

SEQ ID NO: 58563 - DNA, 25 bp, Artificial
  probe
  misc_feature (1)..(25): SEQ ID NO: 3914; WAN024ALL_at; Start 143; Stop 167
cttacttctgcttgttagcttattc

SEQ ID NO: 58564 - DNA, 25 bp, Artificial
  probe
  misc_feature (1)..(25): SEQ ID NO: 3914; WAN024ALL_at; Start 327; Stop 351
gataatagctagtcatcaataaaaa

SEQ ID NO: 58565 - DNA, 25 bp, Artificial
  probe
  misc_feature (1)..(25): SEQ ID NO: 3914; WAN024ALL_at; Start 119; Stop 143
ttttaccattcttgcaagacctatc

SEQ ID NO: 58566 - DNA, 25 bp, Artificial
  probe
  misc_feature (1)..(25): SEQ ID NO: 3914; WAN024ALL_at; Start 307; Stop 331
tgaaatgccaccttaaccgtgataa

SEQ ID NO: 58567 - DNA, 25 bp, Artificial
  probe
  misc_feature (1)..(25): SEQ ID NO: 3914; WAN024ALL_at; Start 293; Stop 317
tattccatatttaatgaaatgccac

SEQ ID NO: 58568 - DNA, 25 bp, Artificial
  probe
  misc_feature (1)..(25): SEQ ID NO: 3914; WAN024ALL_at; Start 64; Stop 88
ccttgggctactagtctttcagatt

SEQ ID NO: 58569 - DNA, 25 bp, Artificial
  probe
  misc_feature (1)..(25): SEQ ID NO: 105; WAN024ALM_at; Start 85; Stop 109
cttgtattagtgataacatcctttt

SEQ ID NO: 58570 - DNA, 25 bp, Artificial
  probe
  misc_feature (1)..(25): SEQ ID NO: 105; WAN024ALM_at; Start 44; Stop 68
caagaaacttcttctgatgtgatta

SEQ ID NO: 58571 - DNA, 25 bp, Artificial
  probe
  misc_feature (1)..(25): SEQ ID NO: 105; WAN024ALM_at; Start 73; Stop 97
ggttcctgctcacttgtattagtga

SEQ ID NO: 58572 - DNA, 25 bp, Artificial
  probe
  misc_feature (1)..(25): SEQ ID NO: 105; WAN024ALM_at; Start 56; Stop 80
tctgatgtgattaaataggttcctg

SEQ ID NO: 58573 - DNA, 25 bp, Artificial
  probe
  misc_feature (1)..(25): SEQ ID NO: 105; WAN024ALM_at; Start 46; Stop 70
agaaacttcttctgatgtgattaaa

SEQ ID NO: 58574 - DNA, 25 bp, Artificial
  probe
  misc_feature (1)..(25): SEQ ID NO: 105; WAN024ALM_at; Start 68; Stop 92
aaataggttcctgctcacttgtatt

SEQ ID NO: 58575 - DNA, 25 bp, Artificial
  probe
  misc_feature (1)..(25): SEQ ID NO: 105; WAN024ALM_at; Start 113; Stop 137
tcaatttttaatggtgacatgaagc

SEQ ID NO: 58576 - DNA, 25 bp, Artificial
  probe
  misc_feature (1)..(25): SEQ ID NO: 105; WAN024ALM_at; Start 35; Stop 59
aaaaaacatcaagaaacttcttctg

SEQ ID NO: 58577 - DNA, 25 bp, Artificial
  probe
  misc_feature (1)..(25): SEQ ID NO: 105; WAN024ALM_at; Start 136; Stop 160
gcttaaataattaataactctgtaa

SEQ ID NO: 58578 - DNA, 25 bp, Artificial
  probe
  misc_feature (1)..(25): SEQ ID NO: 105; WAN024ALM_at; Start 77; Stop 101
cctgctcacttgtattagtgataac

SEQ ID NO: 58579 - DNA, 25 bp, Artificial
  probe
  misc_feature (1)..(25): SEQ ID NO: 105; WAN024ALM_at; Start 80; Stop 104
gctcacttgtattagtgataacatc

SEQ ID NO: 58580 - DNA, 25 bp, Artificial
  probe
  misc_feature (1)..(25): SEQ ID NO: 105; WAN024ALM_at; Start 124; Stop 148
tggtgacatgaagcttaaataatta

SEQ ID NO: 58581 - DNA, 25 bp, Artificial
  probe
  misc_feature (1)..(25): SEQ ID NO: 105; WAN024ALM_at; Start 41; Stop 65
catcaagaaacttcttctgatgtga

SEQ ID NO: 58582 - DNA, 25 bp, Artificial
  probe
  misc_feature (1)..(25): SEQ ID NO: 105; WAN024ALM_at; Start 57; Stop 81
ctgatgtgattaaataggttcctgc

SEQ ID NO: 58583 - DNA, 25 bp, Artificial
  probe
  misc_feature (1)..(25): SEQ ID NO: 105; WAN024ALM_at; Start 117; Stop 141
tttttaatggtgacatgaagcttaa

SEQ ID NO: 58584 - DNA, 25 bp, Artificial
  probe
  misc_feature (1)..(25): SEQ ID NO: 105; WAN024ALM_at; Start 83; Stop 107
cacttgtattagtgataacatcctt

SEQ ID NO: 58585 - DNA, 25 bp, Artificial
  probe
  misc_feature (1)..(25): SEQ ID NO: 105; WAN024ALM_at; Start 71; Stop 95
taggttcctgctcacttgtattagt

SEQ ID NO: 58586 - DNA, 25 bp, Artificial
  probe
  misc_feature (1)..(25): SEQ ID NO: 105; WAN024ALM_at; Start 67; Stop 91
taaataggttcctgctcacttgtat

SEQ ID NO: 58587 - DNA, 25 bp, Artificial
  probe
  misc_feature (1)..(25): SEQ ID NO: 105; WAN024ALM_at; Start 62; Stop 86
gtgattaaataggttcctgctcact

SEQ ID NO: 58588 - DNA, 25 bp, Artificial
  probe
  misc_feature (1)..(25): SEQ ID NO: 105; WAN024ALM_at; Start 125; Stop 149
ggtgacatgaagcttaaataattaa

SEQ ID NO: 58589 - DNA, 25 bp, Artificial
  probe
  misc_feature (1)..(25): SEQ ID NO: 105; WAN024ALM_at; Start 66; Stop 90
ttaaataggttcctgctcacttgta

SEQ ID NO: 58590 - DNA, 25 bp, Artificial
  probe
  misc_feature (1)..(25): SEQ ID NO: 105; WAN024ALM_at; Start 72; Stop 96
aggttcctgctcacttgtattagtg

SEQ ID NO: 58591 - DNA, 25 bp, Artificial
  probe
  misc_feature (1)..(25): SEQ ID NO: 105; WAN024ALM_at; Start 92; Stop 116
tagtgataacatccttttatttcaa

SEQ ID NO: 58592 - DNA, 25 bp, Artificial
  probe
  misc_feature (1)..(25): SEQ ID NO: 105; WAN024ALM_at; Start 133; Stop 157
gaagcttaaataattaataactctg

SEQ ID NO: 58593 - DNA, 25 bp, Artificial
  probe
  misc_feature (1)..(25): SEQ ID NO: 105; WAN024ALM_at; Start 70; Stop 94
ataggttcctgctcacttgtattag

SEQ ID NO: 58594 - DNA, 25 bp, Artificial
  probe
  misc_feature (1)..(25): SEQ ID NO: 105; WAN024ALM_at; Start 50; Stop 74
acttcttctgatgtgattaaatagg

SEQ ID NO: 58595 - DNA, 25 bp, Artificial
  probe
  misc_feature (1)..(25): SEQ ID NO: 105; WAN024ALM_at; Start 61; Stop 85
tgtgattaaataggttcctgctcac

SEQ ID NO: 58596 - DNA, 25 bp, Artificial
  probe
  misc_feature (1)..(25): SEQ ID NO: 105; WAN024ALM_at; Start 121; Stop 145
taatggtgacatgaagcttaaataa

SEQ ID NO: 58597 - DNA, 25 bp, Artificial
  probe
  misc_feature (1)..(25): SEQ ID NO: 105; WAN024ALM_at; Start 60; Stop 84
atgtgattaaataggttcctgctca

SEQ ID NO: 58598 - DNA, 25 bp, Artificial
  probe
  misc_feature (1)..(25): SEQ ID NO: 105; WAN024ALM_at; Start 59; Stop 83
gatgtgattaaataggttcctgctc

SEQ ID NO: 58599 - DNA, 25 bp, Artificial
  probe
  misc_feature (1)..(25): SEQ ID NO: 105; WAN024ALM_at; Start 47; Stop 71
gaaacttcttctgatgtgattaaat

SEQ ID NO: 58600 - DNA, 25 bp, Artificial
  probe
  misc_feature (1)..(25): SEQ ID NO: 105; WAN024ALM_at; Start 64; Stop 88
gattaaataggttcctgctcacttg

SEQ ID NO: 58601 - DNA, 25 bp, Artificial
  probe
  misc_feature (1)..(25): SEQ ID NO: 105; WAN024ALM_at; Start 114; Stop 138
caatttttaatggtgacatgaagct

SEQ ID NO: 58602 - DNA, 25 bp, Artificial
  probe
  misc_feature (1)..(25): SEQ ID NO: 105; WAN024ALM_at; Start 54; Stop 78
cttctgatgtgattaaataggttcc

SEQ ID NO: 58603 - DNA, 25 bp, Artificial
  probe
  misc_feature (1)..(25): SEQ ID NO: 4501; WAN024ALN_at; Start 107; Stop 131
gagcaggaacctatttaatcacatc

SEQ ID NO: 58604 - DNA, 25 bp, Artificial
  probe
  misc_feature (1)..(25): SEQ ID NO: 4501; WAN024ALN_at; Start 81; Stop 105
aaaaggatgttatcactaatacaag

SEQ ID NO: 58605 - DNA, 25 bp, Artificial
  probe
  misc_feature (1)..(25): SEQ ID NO: 4501; WAN024ALN_at; Start 4; Stop 28
attgaaatatcataaaataaaaacg

SEQ ID NO: 58606 - DNA, 25 bp, Artificial
  probe
  misc_feature (1)..(25): SEQ ID NO: 4501; WAN024ALN_at; Start 57; Stop 81
catgtcaccattaaaaattgaaata

SEQ ID NO: 58607 - DNA, 25 bp, Artificial
  probe
  misc_feature (1)..(25): SEQ ID NO: 4501; WAN024ALN_at; Start 125; Stop 149
tcacatcagaagaagtttcttgatg

SEQ ID NO: 58608 - DNA, 25 bp, Artificial
  probe
  misc_feature (1)..(25): SEQ ID NO: 4501; WAN024ALN_at; Start 128; Stop 152
catcagaagaagtttcttgatgttt

SEQ ID NO: 58609 - DNA, 25 bp, Artificial
  probe
  misc_feature (1)..(25): SEQ ID NO: 4501; WAN024ALN_at; Start 110; Stop 134
caggaacctatttaatcacatcaga

SEQ ID NO: 58610 - DNA, 25 bp, Artificial
  probe
  misc_feature (1)..(25): SEQ ID NO: 4501; WAN024ALN_at; Start 102; Stop 126
caagtgagcaggaacctatttaatc

SEQ ID NO: 58611 - DNA, 25 bp, Artificial
  probe
  misc_feature (1)..(25): SEQ ID NO: 4501; WAN024ALN_at; Start 89; Stop 113
gttatcactaatacaagtgagcagg

SEQ ID NO: 58612 - DNA, 25 bp, Artificial
  probe
  misc_feature (1)..(25): SEQ ID NO: 4501; WAN024ALN_at; Start 86; Stop 110
gatgttatcactaatacaagtgagc

SEQ ID NO: 58613 - DNA, 25 bp, Artificial
  probe
  misc_feature (1)..(25): SEQ ID NO: 4501; WAN024ALN_at; Start 42; Stop 66
taattatttaagcttcatgtcacca

SEQ ID NO: 58614 - DNA, 25 bp, Artificial
  probe
  misc_feature (1)..(25): SEQ ID NO: 4501; WAN024ALN_at; Start 109; Stop 133
gcaggaacctatttaatcacatcag

SEQ ID NO: 58615 - DNA, 25 bp, Artificial
  probe
  misc_feature (1)..(25): SEQ ID NO: 4501; WAN024ALN_at; Start 122; Stop 146
taatcacatcagaagaagtttcttg

SEQ ID NO: 58616 - DNA, 25 bp, Artificial
  probe
  misc_feature (1)..(25): SEQ ID NO: 4501; WAN024ALN_at; Start 31; Stop 55
tacagagttattaattatttaagct

SEQ ID NO: 58617 - DNA, 25 bp, Artificial
  probe
  misc_feature (1)..(25): SEQ ID NO: 4501; WAN024ALN_at; Start 46; Stop 70
tatttaagcttcatgtcaccattaa

SEQ ID NO: 58618 - DNA, 25 bp, Artificial
  probe
  misc_feature (1)..(25): SEQ ID NO: 4501; WAN024ALN_at; Start 83; Stop 107
aaggatgttatcactaatacaagtg

SEQ ID NO: 58619 - DNA, 25 bp, Artificial
  probe
  misc_feature (1)..(25): SEQ ID NO: 4501; WAN024ALN_at; Start 120; Stop 144
tttaatcacatcagaagaagtttct

SEQ ID NO: 58620 - DNA, 25 bp, Artificial
  probe
  misc_feature (1)..(25): SEQ ID NO: 4501; WAN024ALN_at; Start 116; Stop 140
cctatttaatcacatcagaagaagt

SEQ ID NO: 58621 - DNA, 25 bp, Artificial
  probe
  misc_feature (1)..(25): SEQ ID NO: 4501; WAN024ALN_at; Start 96; Stop 120
ctaatacaagtgagcaggaacctat

SEQ ID NO: 58622 - DNA, 25 bp, Artificial
  probe
  misc_feature (1)..(25): SEQ ID NO: 4501; WAN024ALN_at; Start 113; Stop 137
gaacctatttaatcacatcagaaga

SEQ ID NO: 58623 - DNA, 25 bp, Artificial
  probe
  misc_feature (1)..(25): SEQ ID NO: 4501; WAN024ALN_at; Start 98; Stop 122
aatacaagtgagcaggaacctattt

SEQ ID NO: 58624 - DNA, 25 bp, Artificial
  probe
  misc_feature (1)..(25): SEQ ID NO: 4501; WAN024ALN_at; Start 91; Stop 115
tatcactaatacaagtgagcaggaa

SEQ ID NO: 58625 - DNA, 25 bp, Artificial
  probe
  misc_feature (1)..(25): SEQ ID NO: 4501; WAN024ALN_at; Start 118; Stop 142
tatttaatcacatcagaagaagttt

SEQ ID NO: 58626 - DNA, 25 bp, Artificial
  probe
  misc_feature (1)..(25): SEQ ID NO: 4501; WAN024ALN_at; Start 95; Stop 119
actaatacaagtgagcaggaaccta

SEQ ID NO: 58627 - DNA, 25 bp, Artificial
  probe
  misc_feature (1)..(25): SEQ ID NO: 4501; WAN024ALN_at; Start 94; Stop 118
cactaatacaagtgagcaggaacct

SEQ ID NO: 58628 - DNA, 25 bp, Artificial
  probe
  misc_feature (1)..(25): SEQ ID NO: 4501; WAN024ALN_at; Start 112; Stop 136
ggaacctatttaatcacatcagaag

SEQ ID NO: 58629 - DNA, 25 bp, Artificial
  probe
  misc_feature (1)..(25): SEQ ID NO: 4501; WAN024ALN_at; Start 53; Stop 77
gcttcatgtcaccattaaaaattga

SEQ ID NO: 58630 - DNA, 25 bp, Artificial
  probe
  misc_feature (1)..(25): SEQ ID NO: 4501; WAN024ALN_at; Start 50; Stop 74
taagcttcatgtcaccattaaaaat

SEQ ID NO: 58631 - DNA, 25 bp, Artificial
  probe
  misc_feature (1)..(25): SEQ ID NO: 4501; WAN024ALN_at; Start 72; Stop 96
aattgaaataaaaggatgttatcac

SEQ ID NO: 58632 - DNA, 25 bp, Artificial
  probe
  misc_feature (1)..(25): SEQ ID NO: 4501; WAN024ALN_at; Start 103; Stop 127
aagtgagcaggaacctatttaatca

SEQ ID NO: 58633 - DNA, 25 bp, Artificial
  probe
  misc_feature (1)..(25): SEQ ID NO: 4501; WAN024ALN_at; Start 97; Stop 121
taatacaagtgagcaggaacctatt

SEQ ID NO: 58634 - DNA, 25 bp, Artificial
  probe
  misc_feature (1)..(25): SEQ ID NO: 4501; WAN024ALN_at; Start 100; Stop 124
tacaagtgagcaggaacctatttaa

SEQ ID NO: 58635 - DNA, 25 bp, Artificial
  probe
  misc_feature (1)..(25): SEQ ID NO: 4501; WAN024ALN_at; Start 93; Stop 117
tcactaatacaagtgagcaggaacc

SEQ ID NO: 58636 - DNA, 25 bp, Artificial
  probe
  misc_feature (1)..(25): SEQ ID NO: 4501; WAN024ALN_at; Start 105; Stop 129
gtgagcaggaacctatttaatcaca

SEQ ID NO: 58637 - DNA, 25 bp, Artificial
  probe
  misc_feature (1)..(25): SEQ ID NO: 195; WAN024ALO_at; Start 30; Stop 54
tacaggtcgtgatgttatagccaaa

SEQ ID NO: 58638 - DNA, 25 bp, Artificial
  probe
  misc_feature (1)..(25): SEQ ID NO: 195; WAN024ALO_at; Start 188; Stop 212
gaatgtgtttatccgcggtaccacc

SEQ ID NO: 58639 - DNA, 25 bp, Artificial
  probe
  misc_feature (1)..(25): SEQ ID NO: 195; WAN024ALO_at; Start 13; Stop 37
tagactataagaggaactacaggtc

SEQ ID NO: 58640 - DNA, 25 bp, Artificial
  probe
  misc_feature (1)..(25): SEQ ID NO: 195; WAN024ALO_at; Start 168; Stop 192
gccatctacatgacagggacgaatg

SEQ ID NO: 58641 - DNA, 25 bp, Artificial
  probe
  misc_feature (1)..(25): SEQ ID NO: 195; WAN024ALO_at; Start 15; Stop 39
gactataagaggaactacaggtcgt

SEQ ID NO: 58642 - DNA, 25 bp, Artificial
  probe
  misc_feature (1)..(25): SEQ ID NO: 195; WAN024ALO_at; Start 17; Stop 41
ctataagaggaactacaggtcgtga

SEQ ID NO: 58643 - DNA, 25 bp, Artificial
  probe
  misc_feature (1)..(25): SEQ ID NO: 195; WAN024ALO_at; Start 170; Stop 194
catctacatgacagggacgaatgtg

SEQ ID NO: 58644 - DNA, 25 bp, Artificial
  probe
  misc_feature (1)..(25): SEQ ID NO: 195; WAN024ALO_at; Start 165; Stop 189
cctgccatctacatgacagggacga

SEQ ID NO: 58645 - DNA, 25 bp, Artificial
  probe
  misc_feature (1)..(25): SEQ ID NO: 195; WAN024ALO_at; Start 8; Stop 32
tctcctagactataagaggaactac

SEQ ID NO: 58646 - DNA, 25 bp, Artificial
  probe
  misc_feature (1)..(25): SEQ ID NO: 195; WAN024ALO_at; Start 282; Stop 306
cattagcaaccagttttgacacatt

SEQ ID NO: 58647 - DNA, 25 bp, Artificial
  probe
  misc_feature (1)..(25): SEQ ID NO: 195; WAN024ALO_at; Start 158; Stop 182
gaaaagccctgccatctacatgaca

SEQ ID NO: 58648 - DNA, 25 bp, Artificial
  probe
  misc_feature (1)..(25): SEQ ID NO: 195; WAN024ALO_at; Start 18; Stop 42
tataagaggaactacaggtcgtgat

SEQ ID NO: 58649 - DNA, 25 bp, Artificial
  probe
  misc_feature (1)..(25): SEQ ID NO: 195; WAN024ALO_at; Start 155; Stop 179
aaagaaaagccctgccatctacatg

SEQ ID NO: 58650 - DNA, 25 bp, Artificial
  probe
  misc_feature (1)..(25): SEQ ID NO: 195; WAN024ALO_at; Start 186; Stop 210
acgaatgtgtttatccgcggtacca

SEQ ID NO: 58651 - DNA, 25 bp, Artificial
  probe
  misc_feature (1)..(25): SEQ ID NO: 195; WAN024ALO_at; Start 11; Stop 35
cctagactataagaggaactacagg

SEQ ID NO: 58652 - DNA, 25 bp, Artificial
  probe
  misc_feature (1)..(25): SEQ ID NO: 195; WAN024ALO_at; Start 27; Stop 51
aactacaggtcgtgatgttatagcc

SEQ ID NO: 58653 - DNA, 25 bp, Artificial
  probe
  misc_feature (1)..(25): SEQ ID NO: 195; WAN024ALO_at; Start 176; Stop 200
catgacagggacgaatgtgtttatc

SEQ ID NO: 58654 - DNA, 25 bp, Artificial
  probe
  misc_feature (1)..(25): SEQ ID NO: 195; WAN024ALO_at; Start 167; Stop 191
tgccatctacatgacagggacgaat

SEQ ID NO: 58655 - DNA, 25 bp, Artificial
  probe
  misc_feature (1)..(25): SEQ ID NO: 195; WAN024ALO_at; Start 37; Stop 61
cgtgatgttatagccaaaattctaa

SEQ ID NO: 58656 - DNA, 25 bp, Artificial
  probe
  misc_feature (1)..(25): SEQ ID NO: 195; WAN024ALO_at; Start 22; Stop 46
agaggaactacaggtcgtgatgtta

SEQ ID NO: 58657 - DNA, 25 bp, Artificial
  probe
  misc_feature (1)..(25): SEQ ID NO: 195; WAN024ALO_at; Start 5; Stop 29
caatctcctagactataagaggaac

SEQ ID NO: 58658 - DNA, 25 bp, Artificial
  probe
  misc_feature (1)..(25): SEQ ID NO: 195; WAN024ALO_at; Start 1; Stop 25
aacccaatctcctagactataagag

SEQ ID NO: 58659 - DNA, 25 bp, Artificial
  probe
  misc_feature (1)..(25): SEQ ID NO: 195; WAN024ALO_at; Start 34; Stop 58
ggtcgtgatgttatagccaaaattc

SEQ ID NO: 58660 - DNA, 25 bp, Artificial
  probe
  misc_feature (1)..(25): SEQ ID NO: 195; WAN024ALO_at; Start 173; Stop 197
ctacatgacagggacgaatgtgttt

SEQ ID NO: 58661 - DNA, 25 bp, Artificial
  probe
  misc_feature (1)..(25): SEQ ID NO: 195; WAN024ALO_at; Start 49; Stop 73
gccaaaattctaatcttgatatcct

SEQ ID NO: 58662 - DNA, 25 bp, Artificial
  probe
  misc_feature (1)..(25): SEQ ID NO: 195; WAN024ALO_at; Start 42; Stop 66
tgttatagccaaaattctaatcttg

SEQ ID NO: 58663 - DNA, 25 bp, Artificial
  probe
  misc_feature (1)..(25): SEQ ID NO: 195; WAN024ALO_at; Start 62; Stop 86
tcttgatatcctaaaataaaaacag

SEQ ID NO: 58664 - DNA, 25 bp, Artificial
  probe
  misc_feature (1)..(25): SEQ ID NO: 195; WAN024ALO_at; Start 20; Stop 44
taagaggaactacaggtcgtgatgt

SEQ ID NO: 58665 - DNA, 25 bp, Artificial
  probe
  misc_feature (1)..(25): SEQ ID NO: 195; WAN024ALO_at; Start 32; Stop 56
caggtcgtgatgttatagccaaaat

SEQ ID NO: 58666 - DNA, 25 bp, Artificial
  probe
  misc_feature (1)..(25): SEQ ID NO: 195; WAN024ALO_at; Start 179; Stop 203
gacagggacgaatgtgtttatccgc

SEQ ID NO: 58667 - DNA, 25 bp, Artificial
  probe
  misc_feature (1)..(25): SEQ ID NO: 195; WAN024ALO_at; Start 181; Stop 205
cagggacgaatgtgtttatccgcgg

SEQ ID NO: 58668 - DNA, 25 bp, Artificial
  probe
  misc_feature (1)..(25): SEQ ID NO: 195; WAN024ALO_at; Start 185; Stop 209
gacgaatgtgtttatccgcggtacc

SEQ ID NO: 58669 - DNA, 25 bp, Artificial
  probe
  misc_feature (1)..(25): SEQ ID NO: 195; WAN024ALO_at; Start 160; Stop 184
aaagccctgccatctacatgacagg

SEQ ID NO: 58670 - DNA, 25 bp, Artificial
  probe
  misc_feature (1)..(25): SEQ ID NO: 195; WAN024ALO_at; Start 65; Stop 89
tgatatcctaaaataaaaacaggaa

SEQ ID NO: 58671 - DNA, 25 bp, Artificial
  probe
  misc_feature (1)..(25): SEQ ID NO: 164; WAN024ALP_at; Start 271; Stop 295
gacctgtagttcctcttatagtcta

SEQ ID NO: 58672 - DNA, 25 bp, Artificial
  probe
  misc_feature (1)..(25): SEQ ID NO: 164; WAN024ALP_at; Start 260; Stop 284
tataacatcacgacctgtagttcct

SEQ ID NO: 58673 - DNA, 25 bp, Artificial
  probe
  misc_feature (1)..(25): SEQ ID NO: 164; WAN024ALP_at; Start 118; Stop 142
ttcgtccctgtcatgtagatggcag

SEQ ID NO: 58674 - DNA, 25 bp, Artificial
  probe
  misc_feature (1)..(25): SEQ ID NO: 164; WAN024ALP_at; Start 116; Stop 140
cattcgtccctgtcatgtagatggc

SEQ ID NO: 58675 - DNA, 25 bp, Artificial
  probe
  misc_feature (1)..(25): SEQ ID NO: 164; WAN024ALP_at; Start 98; Stop 122
tggtaccgcggataaacacattcgt

SEQ ID NO: 58676 - DNA, 25 bp, Artificial
  probe
  misc_feature (1)..(25): SEQ ID NO: 164; WAN024ALP_at; Start 122; Stop 146
tccctgtcatgtagatggcagggct

SEQ ID NO: 58677 - DNA, 25 bp, Artificial
  probe
  misc_feature (1)..(25): SEQ ID NO: 164; WAN024ALP_at; Start 106; Stop 130
cggataaacacattcgtccctgtca

SEQ ID NO: 58678 - DNA, 25 bp, Artificial
  probe
  misc_feature (1)..(25): SEQ ID NO: 164; WAN024ALP_at; Start 119; Stop 143
tcgtccctgtcatgtagatggcagg

SEQ ID NO: 58679 - DNA, 25 bp, Artificial
  probe
  misc_feature (1)..(25): SEQ ID NO: 164; WAN024ALP_at; Start 268; Stop 292
cacgacctgtagttcctcttatagt

SEQ ID NO: 58680 - DNA, 25 bp, Artificial
  probe
  misc_feature (1)..(25): SEQ ID NO: 164; WAN024ALP_at; Start 255; Stop 279
ttggctataacatcacgacctgtag

SEQ ID NO: 58681 - DNA, 25 bp, Artificial
  probe
  misc_feature (1)..(25): SEQ ID NO: 164; WAN024ALP_at; Start 108; Stop 132
gataaacacattcgtccctgtcatg

SEQ ID NO: 58682 - DNA, 25 bp, Artificial
  probe
  misc_feature (1)..(25): SEQ ID NO: 164; WAN024ALP_at; Start 2; Stop 26
aatgtgtcaaaactggttgctaatg

SEQ ID NO: 58683 - DNA, 25 bp, Artificial
  probe
  misc_feature (1)..(25): SEQ ID NO: 164; WAN024ALP_at; Start 257; Stop 281
ggctataacatcacgacctgtagtt

SEQ ID NO: 58684 - DNA, 25 bp, Artificial
  probe
  misc_feature (1)..(25): SEQ ID NO: 164; WAN024ALP_at; Start 250; Stop 274
gaattttggctataacatcacgacc

SEQ ID NO: 58685 - DNA, 25 bp, Artificial
  probe
  misc_feature (1)..(25): SEQ ID NO: 164; WAN024ALP_at; Start 262; Stop 286
taacatcacgacctgtagttcctct

SEQ ID NO: 58686 - DNA, 25 bp, Artificial
  probe
  misc_feature (1)..(25): SEQ ID NO: 164; WAN024ALP_at; Start 281; Stop 305
tcctcttatagtctaggagattggg

SEQ ID NO: 58687 - DNA, 25 bp, Artificial
  probe
  misc_feature (1)..(25): SEQ ID NO: 164; WAN024ALP_at; Start 267; Stop 291
tcacgacctgtagttcctcttatag

SEQ ID NO: 58688 - DNA, 25 bp, Artificial
  probe
  misc_feature (1)..(25): SEQ ID NO: 164; WAN024ALP_at; Start 130; Stop 154
atgtagatggcagggcttttctttt

SEQ ID NO: 58689 - DNA, 25 bp, Artificial
  probe
  misc_feature (1)..(25): SEQ ID NO: 164; WAN024ALP_at; Start 221; Stop 245
cctgtttttattttaggatatcaag

SEQ ID NO: 58690 - DNA, 25 bp, Artificial
  probe
  misc_feature (1)..(25): SEQ ID NO: 164; WAN024ALP_at; Start 114; Stop 138
cacattcgtccctgtcatgtagatg

SEQ ID NO: 58691 - DNA, 25 bp, Artificial
  probe
  misc_feature (1)..(25): SEQ ID NO: 164; WAN024ALP_at; Start 276; Stop 300
gtagttcctcttatagtctaggaga

SEQ ID NO: 58692 - DNA, 25 bp, Artificial
  probe
  misc_feature (1)..(25): SEQ ID NO: 164; WAN024ALP_at; Start 101; Stop 125
taccgcggataaacacattcgtccc

SEQ ID NO: 58693 - DNA, 25 bp, Artificial
  probe
  misc_feature (1)..(25): SEQ ID NO: 164; WAN024ALP_at; Start 104; Stop 128
cgcggataaacacattcgtccctgt

SEQ ID NO: 58694 - DNA, 25 bp, Artificial
  probe
  misc_feature (1)..(25): SEQ ID NO: 164; WAN024ALP_at; Start 264; Stop 288
acatcacgacctgtagttcctctta

SEQ ID NO: 58695 - DNA, 25 bp, Artificial
  probe
  misc_feature (1)..(25): SEQ ID NO: 164; WAN024ALP_at; Start 111; Stop 135
aaacacattcgtccctgtcatgtag

SEQ ID NO: 58696 - DNA, 25 bp, Artificial
  probe
  misc_feature (1)..(25): SEQ ID NO: 164; WAN024ALP_at; Start 126; Stop 150
tgtcatgtagatggcagggcttttc

SEQ ID NO: 58697 - DNA, 25 bp, Artificial
  probe
  misc_feature (1)..(25): SEQ ID NO: 164; WAN024ALP_at; Start 96; Stop 120
ggtggtaccgcggataaacacattc

SEQ ID NO: 58698 - DNA, 25 bp, Artificial
  probe
  misc_feature (1)..(25): SEQ ID NO: 164; WAN024ALP_at; Start 99; Stop 123
ggtaccgcggataaacacattcgtc

SEQ ID NO: 58699 - DNA, 25 bp, Artificial
  probe
  misc_feature (1)..(25): SEQ ID NO: 164; WAN024ALP_at; Start 128; Stop 152
tcatgtagatggcagggcttttctt

SEQ ID NO: 58700 - DNA, 25 bp, Artificial
  probe
  misc_feature (1)..(25): SEQ ID NO: 164; WAN024ALP_at; Start 124; Stop 148
cctgtcatgtagatggcagggcttt

SEQ ID NO: 58701 - DNA, 25 bp, Artificial
  probe
  misc_feature (1)..(25): SEQ ID NO: 164; WAN024ALP_at; Start 283; Stop 307
ctcttatagtctaggagattgggtt

SEQ ID NO: 58702 - DNA, 25 bp, Artificial
  probe
  misc_feature (1)..(25): SEQ ID NO: 164; WAN024ALP_at; Start 273; Stop 297
cctgtagttcctcttatagtctagg

SEQ ID NO: 58703 - DNA, 25 bp, Artificial
  probe
  misc_feature (1)..(25): SEQ ID NO: 164; WAN024ALP_at; Start 253; Stop 277
ttttggctataacatcacgacctgt

SEQ ID NO: 58704 - DNA, 25 bp, Artificial
  probe
  misc_feature (1)..(25): SEQ ID NO: 164; WAN024ALP_at; Start 236; Stop 260
ggatatcaagattagaattttggct

SEQ ID NO: 58705 - DNA, 25 bp, Artificial
  probe
  misc_feature (1)..(25): SEQ ID NO: 6261; WAN024ALQ_at; Start 4; Stop 28
actgagacaccagatctcagccttt

SEQ ID NO: 58706 - DNA, 25 bp, Artificial
  probe
  misc_feature (1)..(25): SEQ ID NO: 6261; WAN024ALQ_at; Start 19; Stop 43
ctcagcctttttcggctctataata

SEQ ID NO: 58707 - DNA, 25 bp, Artificial
  probe
  misc_feature (1)..(25): SEQ ID NO: 6261; WAN024ALQ_at; Start 21; Stop 45
cagcctttttcggctctataatatt

SEQ ID NO: 58708 - DNA, 25 bp, Artificial
  probe
  misc_feature (1)..(25): SEQ ID NO: 6261; WAN024ALQ_at; Start 12; Stop 36
accagatctcagcctttttcggctc

SEQ ID NO: 58709 - DNA, 25 bp, Artificial
  probe
  misc_feature (1)..(25): SEQ ID NO: 6261; WAN024ALQ_at; Start 6; Stop 30
tgagacaccagatctcagccttttt

SEQ ID NO: 58710 - DNA, 25 bp, Artificial
  probe
  misc_feature (1)..(25): SEQ ID NO: 6261; WAN024ALQ_at; Start 8; Stop 32
agacaccagatctcagcctttttcg

SEQ ID NO: 58711 - DNA, 25 bp, Artificial
  probe
  misc_feature (1)..(25): SEQ ID NO: 6261; WAN024ALQ_at; Start 7; Stop 31
gagacaccagatctcagcctttttc

SEQ ID NO: 58712 - DNA, 25 bp, Artificial
  probe
  misc_feature (1)..(25): SEQ ID NO: 6261; WAN024ALQ_at; Start 1; Stop 25
aagactgagacaccagatctcagcc

SEQ ID NO: 58713 - DNA, 25 bp, Artificial
  probe
  misc_feature (1)..(25): SEQ ID NO: 6261; WAN024ALQ_at; Start 10; Stop 34
acaccagatctcagcctttttcggc

SEQ ID NO: 58714 - DNA, 25 bp, Artificial
  probe
  misc_feature (1)..(25): SEQ ID NO: 6261; WAN024ALQ_at; Start 9; Stop 33
gacaccagatctcagcctttttcgg

SEQ ID NO: 58715 - DNA, 25 bp, Artificial
  probe
  misc_feature (1)..(25): SEQ ID NO: 6261; WAN024ALQ_at; Start 18; Stop 42
tctcagcctttttcggctctataat

SEQ ID NO: 58716 - DNA, 25 bp, Artificial
  probe
  misc_feature (1)..(25): SEQ ID NO: 6261; WAN024ALQ_at; Start 17; Stop 41
atctcagcctttttcggctctataa

SEQ ID NO: 58717 - DNA, 25 bp, Artificial
  probe
  misc_feature (1)..(25): SEQ ID NO: 6261; WAN024ALQ_at; Start 15; Stop 39
agatctcagcctttttcggctctat

SEQ ID NO: 58718 - DNA, 25 bp, Artificial
  probe
  misc_feature (1)..(25): SEQ ID NO: 6261; WAN024ALQ_at; Start 14; Stop 38
cagatctcagcctttttcggctcta

SEQ ID NO: 58719 - DNA, 25 bp, Artificial
  probe
  misc_feature (1)..(25): SEQ ID NO: 6261; WAN024ALQ_at; Start 5; Stop 29
ctgagacaccagatctcagcctttt

SEQ ID NO: 58720 - DNA, 25 bp, Artificial
  probe
  misc_feature (1)..(25): SEQ ID NO: 6261; WAN024ALQ_at; Start 13; Stop 37
ccagatctcagcctttttcggctct

SEQ ID NO: 58721 - DNA, 25 bp, Artificial
  probe
  misc_feature (1)..(25): SEQ ID NO: 6261; WAN024ALQ_at; Start 2; Stop 26
agactgagacaccagatctcagcct

SEQ ID NO: 58722 - DNA, 25 bp, Artificial
  probe
  misc_feature (1)..(25): SEQ ID NO: 6261; WAN024ALQ_at; Start 11; Stop 35
caccagatctcagcctttttcggct

SEQ ID NO: 58723 - DNA, 25 bp, Artificial
  probe
  misc_feature (1)..(25): SEQ ID NO: 6261; WAN024ALQ_at; Start 20; Stop 44
tcagcctttttcggctctataatat

SEQ ID NO: 58724 - DNA, 25 bp, Artificial
  probe
  misc_feature (1)..(25): SEQ ID NO: 6261; WAN024ALQ_at; Start 16; Stop 40
gatctcagcctttttcggctctata

SEQ ID NO: 58725 - DNA, 25 bp, Artificial
  probe
  misc_feature (1)..(25): SEQ ID NO: 6261; WAN024ALQ_at; Start 22; Stop 46
agcctttttcggctctataatattt

SEQ ID NO: 58726 - DNA, 25 bp, Artificial
  probe
  misc_feature (1)..(25): SEQ ID NO: 6261; WAN024ALQ_at; Start 3; Stop 27
gactgagacaccagatctcagcctt

SEQ ID NO: 58727 - DNA, 25 bp, Artificial
  probe
  misc_feature (1)..(25): SEQ ID NO: 6285; WAN024ALR_at; Start 372; Stop 396
agattccttaccttgagacaactgg

SEQ ID NO: 58728 - DNA, 25 bp, Artificial
  probe
  misc_feature (1)..(25): SEQ ID NO: 6285; WAN024ALR_at; Start 12; Stop 36
atcaaaaaaggagcagagacaaaag

SEQ ID NO: 58729 - DNA, 25 bp, Artificial
  probe
  misc_feature (1)..(25): SEQ ID NO: 6285; WAN024ALR_at; Start 369; Stop 393
ctaagattccttaccttgagacaac

SEQ ID NO: 58730 - DNA, 25 bp, Artificial
  probe
  misc_feature (1)..(25): SEQ ID NO: 6285; WAN024ALR_at; Start 21; Stop 45
ggagcagagacaaaagaaaaatccc

SEQ ID NO: 58731 - DNA, 25 bp, Artificial
  probe
  misc_feature (1)..(25): SEQ ID NO: 6285; WAN024ALR_at; Start 24; Stop 48
gcagagacaaaagaaaaatcccttg

SEQ ID NO: 58732 - DNA, 25 bp, Artificial
  probe
  misc_feature (1)..(25): SEQ ID NO: 6285; WAN024ALR_at; Start 58; Stop 82
caaaggatttttggctctataatat

SEQ ID NO: 58733 - DNA, 25 bp, Artificial
  probe
  misc_feature (1)..(25): SEQ ID NO: 6285; WAN024ALR_at; Start 18; Stop 42
aaaggagcagagacaaaagaaaaat

SEQ ID NO: 58734 - DNA, 25 bp, Artificial
  probe
  misc_feature (1)..(25): SEQ ID NO: 6285; WAN024ALR_at; Start 367; Stop 391
gtctaagattccttaccttgagaca

SEQ ID NO: 58735 - DNA, 25 bp, Artificial
  probe
  misc_feature (1)..(25): SEQ ID NO: 6285; WAN024ALR_at; Start 14; Stop 38
caaaaaaggagcagagacaaaagaa

SEQ ID NO: 58736 - DNA, 25 bp, Artificial
  probe
  misc_feature (1)..(25): SEQ ID NO: 6285; WAN024ALR_at; Start 10; Stop 34
atatcaaaaaaggagcagagacaaa

SEQ ID NO: 58737 - DNA, 25 bp, Artificial
  probe
  misc_feature (1)..(25): SEQ ID NO: 6285; WAN024ALR_at; Start 19; Stop 43
aaggagcagagacaaaagaaaaatc

SEQ ID NO: 58738 - DNA, 25 bp, Artificial
  probe
  misc_feature (1)..(25): SEQ ID NO: 6285; WAN024ALR_at; Start 370; Stop 394
taagattccttaccttgagacaact

SEQ ID NO: 58739 - DNA, 25 bp, Artificial
  probe
  misc_feature (1)..(25): SEQ ID NO: 6285; WAN024ALR_at; Start 54; Stop 78
taaacaaaggatttttggctctata

SEQ ID NO: 58740 - DNA, 25 bp, Artificial
  probe
  misc_feature (1)..(25): SEQ ID NO: 6285; WAN024ALR_at; Start 13; Stop 37
tcaaaaaaggagcagagacaaaaga

SEQ ID NO: 58741 - DNA, 25 bp, Artificial
  probe
  misc_feature (1)..(25): SEQ ID NO: 6285; WAN024ALR_at; Start 371; Stop 395
aagattccttaccttgagacaactg

SEQ ID NO: 58742 - DNA, 25 bp, Artificial
  probe
  misc_feature (1)..(25): SEQ ID NO: 6285; WAN024ALR_at; Start 9; Stop 33
tatatcaaaaaaggagcagagacaa

SEQ ID NO: 58743 - DNA, 25 bp, Artificial
  probe
  misc_feature (1)..(25): SEQ ID NO: 6285; WAN024ALR_at; Start 366; Stop 390
cgtctaagattccttaccttgagac

SEQ ID NO: 58744 - DNA, 25 bp, Artificial
  probe
  misc_feature (1)..(25): SEQ ID NO: 6285; WAN024ALR_at; Start 368; Stop 392
tctaagattccttaccttgagacaa

SEQ ID NO: 58745 - DNA, 25 bp, Artificial
  probe
  misc_feature (1)..(25): SEQ ID NO: 6285; WAN024ALR_at; Start 25; Stop 49
cagagacaaaagaaaaatcccttgt

SEQ ID NO: 58746 - DNA, 25 bp, Artificial
  probe
  misc_feature (1)..(25): SEQ ID NO: 6285; WAN024ALR_at; Start 57; Stop 81
acaaaggatttttggctctataata

SEQ ID NO: 58747 - DNA, 25 bp, Artificial
  probe
  misc_feature (1)..(25): SEQ ID NO: 6285; WAN024ALR_at; Start 373; Stop 397
gattccttaccttgagacaactggt

SEQ ID NO: 58748 - DNA, 25 bp, Artificial
  probe
  misc_feature (1)..(25): SEQ ID NO: 6285; WAN024ALR_at; Start 22; Stop 46
gagcagagacaaaagaaaaatccct

SEQ ID NO: 58749 - DNA, 25 bp, Artificial
  probe
  misc_feature (1)..(25): SEQ ID NO: 6285; WAN024ALR_at; Start 56; Stop 80
aacaaaggatttttggctctataat

SEQ ID NO: 58750 - DNA, 25 bp, Artificial
  probe
  misc_feature (1)..(25): SEQ ID NO: 6285; WAN024ALR_at; Start 20; Stop 44
aggagcagagacaaaagaaaaatcc

SEQ ID NO: 58751 - DNA, 25 bp, Artificial
  probe
  misc_feature (1)..(25): SEQ ID NO: 6285; WAN024ALR_at; Start 365; Stop 389
ccgtctaagattccttaccttgaga

SEQ ID NO: 58752 - DNA, 25 bp, Artificial
  probe
  misc_feature (1)..(25): SEQ ID NO: 6285; WAN024ALR_at; Start 23; Stop 47
agcagagacaaaagaaaaatccctt

SEQ ID NO: 58753 - DNA, 25 bp, Artificial
  probe
  misc_feature (1)..(25): SEQ ID NO: 6285; WAN024ALR_at; Start 11; Stop 35
tatcaaaaaaggagcagagacaaaa

SEQ ID NO: 58754 - DNA, 25 bp, Artificial
  probe
  misc_feature (1)..(25): SEQ ID NO: 6286; WAN024ALS_at; Start 114; Stop 138
ttgtctagctaagtcatagtaaggg

SEQ ID NO: 58755 - DNA, 25 bp, Artificial
  probe
  misc_feature (1)..(25): SEQ ID NO: 6286; WAN024ALS_at; Start 654; Stop 678
tggtttccgcactcagggcaagatg

SEQ ID NO: 58756 - DNA, 25 bp, Artificial
  probe
  misc_feature (1)..(25): SEQ ID NO: 6286; WAN024ALS_at; Start 110; Stop 134
gaagttgtctagctaagtcatagta

SEQ ID NO: 58757 - DNA, 25 bp, Artificial
  probe
  misc_feature (1)..(25): SEQ ID NO: 6286; WAN024ALS_at; Start 735; Stop 759
tctaaaatctggatattagggtctt

SEQ ID NO: 58758 - DNA, 25 bp, Artificial
  probe
  misc_feature (1)..(25): SEQ ID NO: 6286; WAN024ALS_at; Start 912; Stop 936
tattatagagccaaaaatcctttgt

SEQ ID NO: 58759 - DNA, 25 bp, Artificial
  probe
  misc_feature (1)..(25): SEQ ID NO: 6286; WAN024ALS_at; Start 648; Stop 672
ttcaattggtttccgcactcagggc

SEQ ID NO: 58760 - DNA, 25 bp, Artificial
  probe
  misc_feature (1)..(25): SEQ ID NO: 6286; WAN024ALS_at; Start 640; Stop 664
catatttcttcaattggtttccgca

SEQ ID NO: 58761 - DNA, 25 bp, Artificial
  probe
  misc_feature (1)..(25): SEQ ID NO: 6286; WAN024ALS_at; Start 104; Stop 128
gaaagcgaagttgtctagctaagtc

SEQ ID NO: 58762 - DNA, 25 bp, Artificial
  probe
  misc_feature (1)..(25): SEQ ID NO: 6286; WAN024ALS_at; Start 236; Stop 260
gaacagtgatgatatcgagcttgtc

SEQ ID NO: 58763 - DNA, 25 bp, Artificial
  probe
  misc_feature (1)..(25): SEQ ID NO: 6286; WAN024ALS_at; Start 239; Stop 263
cagtgatgatatcgagcttgtcaaa

SEQ ID NO: 58764 - DNA, 25 bp, Artificial
  probe
  misc_feature (1)..(25): SEQ ID NO: 6286; WAN024ALS_at; Start 731; Stop 755
gatgtctaaaatctggatattaggg

SEQ ID NO: 58765 - DNA, 25 bp, Artificial
  probe
  misc_feature (1)..(25): SEQ ID NO: 6286; WAN024ALS_at; Start 108; Stop 132
gcgaagttgtctagctaagtcatag

SEQ ID NO: 58766 - DNA, 25 bp, Artificial
  probe
  misc_feature (1)..(25): SEQ ID NO: 6286; WAN024ALS_at; Start 756; Stop 780
tctttaatgtctagtaattttgtga

SEQ ID NO: 58767 - DNA, 25 bp, Artificial
  probe
  misc_feature (1)..(25): SEQ ID NO: 6286; WAN024ALS_at; Start 646; Stop 670
tcttcaattggtttccgcactcagg

SEQ ID NO: 58768 - DNA, 25 bp, Artificial
  probe
  misc_feature (1)..(25): SEQ ID NO: 6286; WAN024ALS_at; Start 246; Stop 270
gatatcgagcttgtcaaaatcttgc

SEQ ID NO: 58769 - DNA, 25 bp, Artificial
  probe
  misc_feature (1)..(25): SEQ ID NO: 6286; WAN024ALS_at; Start 99; Stop 123
aatttgaaagcgaagttgtctagct

SEQ ID NO: 58770 - DNA, 25 bp, Artificial
  probe
  misc_feature (1)..(25): SEQ ID NO: 6286; WAN024ALS_at; Start 748; Stop 772
tattagggtctttaatgtctagtaa

SEQ ID NO: 58771 - DNA, 25 bp, Artificial
  probe
  misc_feature (1)..(25): SEQ ID NO: 6286; WAN024ALS_at; Start 945; Stop 969
caagggatttttcttttgtctctgc

SEQ ID NO: 58772 - DNA, 25 bp, Artificial
  probe
  misc_feature (1)..(25): SEQ ID NO: 6286; WAN024ALS_at; Start 598; Stop 622
cagttgtctcaaggtaaggaatctt

SEQ ID NO: 58773 - DNA, 25 bp, Artificial
  probe
  misc_feature (1)..(25): SEQ ID NO: 6286; WAN024ALS_at; Start 948; Stop 972
gggatttttcttttgtctctgctcc

SEQ ID NO: 58774 - DNA, 25 bp, Artificial
  probe
  misc_feature (1)..(25): SEQ ID NO: 6286; WAN024ALS_at; Start 651; Stop 675
aattggtttccgcactcagggcaag

SEQ ID NO: 58775 - DNA, 25 bp, Artificial
  probe
  misc_feature (1)..(25): SEQ ID NO: 6286; WAN024ALS_at; Start 604; Stop 628
tctcaaggtaaggaatcttagacgg

SEQ ID NO: 58776 - DNA, 25 bp, Artificial
  probe
  misc_feature (1)..(25): SEQ ID NO: 6286; WAN024ALS_at; Start 745; Stop 769
ggatattagggtctttaatgtctag

SEQ ID NO: 58777 - DNA, 25 bp, Artificial
  probe
  misc_feature (1)..(25): SEQ ID NO: 6286; WAN024ALS_at; Start 600; Stop 624
gttgtctcaaggtaaggaatcttag

SEQ ID NO: 58778 - DNA, 25 bp, Artificial
  probe
  misc_feature (1)..(25): SEQ ID NO: 6286; WAN024ALS_at; Start 652; Stop 676
attggtttccgcactcagggcaaga

SEQ ID NO: 58779 - DNA, 25 bp, Artificial
  probe
  misc_feature (1)..(25): SEQ ID NO: 6286; WAN024ALS_at; Start 249; Stop 273
atcgagcttgtcaaaatcttgcgca

SEQ ID NO: 58780 - DNA, 25 bp, Artificial
  probe
  misc_feature (1)..(25): SEQ ID NO: 6286; WAN024ALS_at; Start 596; Stop 620
accagttgtctcaaggtaaggaatc

SEQ ID NO: 58781 - DNA, 25 bp, Artificial
  probe
  misc_feature (1)..(25): SEQ ID NO: 6286; WAN024ALS_at; Start 961; Stop 985
tgtctctgctccttttttgatataa

SEQ ID NO: 58782 - DNA, 25 bp, Artificial
  probe
  misc_feature (1)..(25): SEQ ID NO: 6286; WAN024ALS_at; Start 963; Stop 987
tctctgctccttttttgatataata

SEQ ID NO: 58783 - DNA, 25 bp, Artificial
  probe
  misc_feature (1)..(25): SEQ ID NO: 6286; WAN024ALS_at; Start 672; Stop 696
caagatggggcgtcgtagtccagtt

SEQ ID NO: 58784 - DNA, 25 bp, Artificial
  probe
  misc_feature (1)..(25): SEQ ID NO: 6286; WAN024ALS_at; Start 915; Stop 939
tatagagccaaaaatcctttgttta

SEQ ID NO: 58785 - DNA, 25 bp, Artificial
  probe
  misc_feature (1)..(25): SEQ ID NO: 6286; WAN024ALS_at; Start 723; Stop 747
ttattgatgatgtctaaaatctgga

SEQ ID NO: 58786 - DNA, 25 bp, Artificial
  probe
  misc_feature (1)..(25): SEQ ID NO: 6286; WAN024ALS_at; Start 243; Stop 267
gatgatatcgagcttgtcaaaatct

SEQ ID NO: 58787 - DNA, 25 bp, Artificial
  probe
  misc_feature (1)..(25): SEQ ID NO: 6286; WAN024ALS_at; Start 248; Stop 272
tatcgagcttgtcaaaatcttgcgc

SEQ ID NO: 58788 - DNA, 25 bp, Artificial
  probe
  misc_feature (1)..(25): SEQ ID NO: 7350; WAN024ALT_at; Start 754; Stop 778
gggtctttaatatcgagcagttttg

SEQ ID NO: 58789 - DNA, 25 bp, Artificial
  probe
  misc_feature (1)..(25): SEQ ID NO: 7350; WAN024ALT_at; Start 930; Stop 954
ggctgagatctggtgtctcagtctt

SEQ ID NO: 58790 - DNA, 25 bp, Artificial
  probe
  misc_feature (1)..(25): SEQ ID NO: 7350; WAN024ALT_at; Start 654; Stop 678
tagacttccacaatcagggcaagat

SEQ ID NO: 58791 - DNA, 25 bp, Artificial
  probe
  misc_feature (1)..(25): SEQ ID NO: 7350; WAN024ALT_at; Start 696; Stop 720
cttagcgataatttctttgtgggta

SEQ ID NO: 58792 - DNA, 25 bp, Artificial
  probe
  misc_feature (1)..(25): SEQ ID NO: 7350; WAN024ALT_at; Start 713; Stop 737
tgtgggtatccatattgatgatgtc

SEQ ID NO: 58793 - DNA, 25 bp, Artificial
  probe
  misc_feature (1)..(25): SEQ ID NO: 7350; WAN024ALT_at; Start 750; Stop 774
gtttgggtctttaatatcgagcagt

SEQ ID NO: 58794 - DNA, 25 bp, Artificial
  probe
  misc_feature (1)..(25): SEQ ID NO: 7350; WAN024ALT_at; Start 721; Stop 745
tccatattgatgatgtctagaatct

SEQ ID NO: 58795 - DNA, 25 bp, Artificial
  probe
  misc_feature (1)..(25): SEQ ID NO: 7350; WAN024ALT_at; Start 656; Stop 680
gacttccacaatcagggcaagatgg

SEQ ID NO: 58796 - DNA, 25 bp, Artificial
  probe
  misc_feature (1)..(25): SEQ ID NO: 7350; WAN024ALT_at; Start 912; Stop 936
tattatagagccgaaaaaggctgag

SEQ ID NO: 58797 - DNA, 25 bp, Artificial
  probe
  misc_feature (1)..(25): SEQ ID NO: 7350; WAN024ALT_at; Start 757; Stop 781
tctttaatatcgagcagttttgtga

SEQ ID NO: 58798 - DNA, 25 bp, Artificial
  probe
  misc_feature (1)..(25): SEQ ID NO: 7350; WAN024ALT_at; Start 682; Stop 706
gcctcataatccagcttagcgataa

SEQ ID NO: 58799 - DNA, 25 bp, Artificial
  probe
  misc_feature (1)..(25): SEQ ID NO: 7350; WAN024ALT_at; Start 915; Stop 939
tatagagccgaaaaaggctgagatc

SEQ ID NO: 58800 - DNA, 25 bp, Artificial
  probe
  misc_feature (1)..(25): SEQ ID NO: 7350; WAN024ALT_at; Start 662; Stop 686
cacaatcagggcaagatggagcctc

SEQ ID NO: 58801 - DNA, 25 bp, Artificial
  probe
  misc_feature (1)..(25): SEQ ID NO: 7350; WAN024ALT_at; Start 673; Stop 697
caagatggagcctcataatccagct

SEQ ID NO: 58802 - DNA, 25 bp, Artificial
  probe
  misc_feature (1)..(25): SEQ ID NO: 7350; WAN024ALT_at; Start 667; Stop 691
tcagggcaagatggagcctcataat

SEQ ID NO: 58803 - DNA, 25 bp, Artificial
  probe
  misc_feature (1)..(25): SEQ ID NO: 7350; WAN024ALT_at; Start 709; Stop 733
tctttgtgggtatccatattgatga

SEQ ID NO: 58804 - DNA, 25 bp, Artificial
  probe
  misc_feature (1)..(25): SEQ ID NO: 7350; WAN024ALT_at; Start 686; Stop 710
cataatccagcttagcgataatttc

SEQ ID NO: 58805 - DNA, 25 bp, Artificial
  probe
  misc_feature (1)..(25): SEQ ID NO: 7350; WAN024ALT_at; Start 692; Stop 716
ccagcttagcgataatttctttgtg

SEQ ID NO: 58806 - DNA, 25 bp, Artificial
  probe
  misc_feature (1)..(25): SEQ ID NO: 7350; WAN024ALT_at; Start 732; Stop 756
gatgtctagaatcttgatgtttggg

SEQ ID NO: 58807 - DNA, 25 bp, Artificial
  probe
  misc_feature (1)..(25): SEQ ID NO: 7350; WAN024ALT_at; Start 717; Stop 741
ggtatccatattgatgatgtctaga

SEQ ID NO: 58808 - DNA, 25 bp, Artificial
  probe
  misc_feature (1)..(25): SEQ ID NO: 7350; WAN024ALT_at; Start 670; Stop 694
gggcaagatggagcctcataatcca

SEQ ID NO: 58809 - DNA, 25 bp, Artificial
  probe
  misc_feature (1)..(25): SEQ ID NO: 7350; WAN024ALT_at; Start 764; Stop 788
tatcgagcagttttgtgataaaatg

SEQ ID NO: 58810 - DNA, 25 bp, Artificial
  probe
  misc_feature (1)..(25): SEQ ID NO: 7350; WAN024ALT_at; Start 651; Stop 675
cattagacttccacaatcagggcaa

SEQ ID NO: 58811 - DNA, 25 bp, Artificial
  probe
  misc_feature (1)..(25): SEQ ID NO: 7350; WAN024ALT_at; Start 923; Stop 947
cgaaaaaggctgagatctggtgtct

SEQ ID NO: 58812 - DNA, 25 bp, Artificial
  probe
  misc_feature (1)..(25): SEQ ID NO: 7350; WAN024ALT_at; Start 676; Stop 700
gatggagcctcataatccagcttag

SEQ ID NO: 58813 - DNA, 25 bp, Artificial
  probe
  misc_feature (1)..(25): SEQ ID NO: 7350; WAN024ALT_at; Start 664; Stop 688
caatcagggcaagatggagcctcat

SEQ ID NO: 58814 - DNA, 25 bp, Artificial
  probe
  misc_feature (1)..(25): SEQ ID NO: 7350; WAN024ALT_at; Start 926; Stop 950
aaaaggctgagatctggtgtctcag

SEQ ID NO: 58815 - DNA, 25 bp, Artificial
  probe
  misc_feature (1)..(25): SEQ ID NO: 7350; WAN024ALT_at; Start 736; Stop 760
tctagaatcttgatgtttgggtctt

SEQ ID NO: 58816 - DNA, 25 bp, Artificial
  probe
  misc_feature (1)..(25): SEQ ID NO: 7350; WAN024ALT_at; Start 647; Stop 671
tcttcattagacttccacaatcagg

SEQ ID NO: 58817 - DNA, 25 bp, Artificial
  probe
  misc_feature (1)..(25): SEQ ID NO: 7350; WAN024ALT_at; Start 700; Stop 724
gcgataatttctttgtgggtatcca

SEQ ID NO: 58818 - DNA, 25 bp, Artificial
  probe
  misc_feature (1)..(25): SEQ ID NO: 7350; WAN024ALT_at; Start 747; Stop 771
gatgtttgggtctttaatatcgagc

SEQ ID NO: 58819 - DNA, 25 bp, Artificial
  probe
  misc_feature (1)..(25): SEQ ID NO: 7350; WAN024ALT_at; Start 921; Stop 945
gccgaaaaaggctgagatctggtgt

SEQ ID NO: 58820 - DNA, 25 bp, Artificial
  probe
  misc_feature (1)..(25): SEQ ID NO: 7350; WAN024ALT_at; Start 649; Stop 673
ttcattagacttccacaatcagggc

SEQ ID NO: 58821 - DNA, 25 bp, Artificial
  probe
  misc_feature (1)..(25): SEQ ID NO: 7350; WAN024ALT_at; Start 679; Stop 703
ggagcctcataatccagcttagcga

SEQ ID NO: 58822 - DNA, 25 bp, Artificial
  probe
  misc_feature (1)..(25): SEQ ID NO: 3617; WAN024ALU_at; Start 51; Stop 75
aacattctatcaagattttagtgaa

SEQ ID NO: 58823 - DNA, 25 bp, Artificial
  probe
  misc_feature (1)..(25): SEQ ID NO: 3617; WAN024ALU_at; Start 30; Stop 54
ctctgacaaggatttaacataaaca

SEQ ID NO: 58824 - DNA, 25 bp, Artificial
  probe
  misc_feature (1)..(25): SEQ ID NO: 3617; WAN024ALU_at; Start 20; Stop 44
aaaatccctgctctgacaaggattt

SEQ ID NO: 58825 - DNA, 25 bp, Artificial
  probe
  misc_feature (1)..(25): SEQ ID NO: 3617; WAN024ALU_at; Start 21; Stop 45
aaatccctgctctgacaaggattta

SEQ ID NO: 58826 - DNA, 25 bp, Artificial
  probe
  misc_feature (1)..(25): SEQ ID NO: 3617; WAN024ALU_at; Start 10; Stop 34
ctttcaataaaaaatccctgctctg

SEQ ID NO: 58827 - DNA, 25 bp, Artificial
  probe
  misc_feature (1)..(25): SEQ ID NO: 3617; WAN024ALU_at; Start 17; Stop 41
taaaaaatccctgctctgacaagga

SEQ ID NO: 58828 - DNA, 25 bp, Artificial
  probe
  misc_feature (1)..(25): SEQ ID NO: 3617; WAN024ALU_at; Start 36; Stop 60
caaggatttaacataaacattctat

SEQ ID NO: 58829 - DNA, 25 bp, Artificial
  probe
  misc_feature (1)..(25): SEQ ID NO: 3617; WAN024ALU_at; Start 33; Stop 57
tgacaaggatttaacataaacattc

SEQ ID NO: 58830 - DNA, 25 bp, Artificial
  probe
  misc_feature (1)..(25): SEQ ID NO: 3617; WAN024ALU_at; Start 15; Stop 39
aataaaaaatccctgctctgacaag

SEQ ID NO: 58831 - DNA, 25 bp, Artificial
  probe
  misc_feature (1)..(25): SEQ ID NO: 3617; WAN024ALU_at; Start 70; Stop 94
agtgaaaaatcaagaatctttctcg

SEQ ID NO: 58832 - DNA, 25 bp, Artificial
  probe
  misc_feature (1)..(25): SEQ ID NO: 3617; WAN024ALU_at; Start 16; Stop 40
ataaaaaatccctgctctgacaagg

SEQ ID NO: 58833 - DNA, 25 bp, Artificial
  probe
  misc_feature (1)..(25): SEQ ID NO: 3617; WAN024ALU_at; Start 40; Stop 64
gatttaacataaacattctatcaag

SEQ ID NO: 58834 - DNA, 25 bp, Artificial
  probe
  misc_feature (1)..(25): SEQ ID NO: 3617; WAN024ALU_at; Start 69; Stop 93
tagtgaaaaatcaagaatctttctc

SEQ ID NO: 58835 - DNA, 25 bp, Artificial
  probe
  misc_feature (1)..(25): SEQ ID NO: 3617; WAN024ALU_at; Start 8; Stop 32
tcctttcaataaaaaatccctgctc

SEQ ID NO: 58836 - DNA, 25 bp, Artificial
  probe
  misc_feature (1)..(25): SEQ ID NO: 3617; WAN024ALU_at; Start 18; Stop 42
aaaaaatccctgctctgacaaggat

SEQ ID NO: 58837 - DNA, 25 bp, Artificial
  probe
  misc_feature (1)..(25): SEQ ID NO: 3617; WAN024ALU_at; Start 34; Stop 58
gacaaggatttaacataaacattct

SEQ ID NO: 58838 - DNA, 25 bp, Artificial
  probe
  misc_feature (1)..(25): SEQ ID NO: 3617; WAN024ALU_at; Start 23; Stop 47
atccctgctctgacaaggatttaac

SEQ ID NO: 58839 - DNA, 25 bp, Artificial
  probe
  misc_feature (1)..(25): SEQ ID NO: 3617; WAN024ALU_at; Start 29; Stop 53
gctctgacaaggatttaacataaac

SEQ ID NO: 58840 - DNA, 25 bp, Artificial
  probe
  misc_feature (1)..(25): SEQ ID NO: 3617; WAN024ALU_at; Start 19; Stop 43
aaaaatccctgctctgacaaggatt

SEQ ID NO: 58841 - DNA, 25 bp, Artificial
  probe
  misc_feature (1)..(25): SEQ ID NO: 3617; WAN024ALU_at; Start 31; Stop 55
tctgacaaggatttaacataaacat

SEQ ID NO: 58842 - DNA, 25 bp, Artificial
  probe
  misc_feature (1)..(25): SEQ ID NO: 3617; WAN024ALU_at; Start 56; Stop 80
tctatcaagattttagtgaaaaatc

SEQ ID NO: 58843 - DNA, 25 bp, Artificial
  probe
  misc_feature (1)..(25): SEQ ID NO: 3617; WAN024ALU_at; Start 67; Stop 91
tttagtgaaaaatcaagaatctttc

SEQ ID NO: 58844 - DNA, 25 bp, Artificial
  probe
  misc_feature (1)..(25): SEQ ID NO: 3617; WAN024ALU_at; Start 53; Stop 77
cattctatcaagattttagtgaaaa

SEQ ID NO: 58845 - DNA, 25 bp, Artificial
  probe
  misc_feature (1)..(25): SEQ ID NO: 3617; WAN024ALU_at; Start 25; Stop 49
ccctgctctgacaaggatttaacat

SEQ ID NO: 58846 - DNA, 25 bp, Artificial
  probe
  misc_feature (1)..(25): SEQ ID NO: 3617; WAN024ALU_at; Start 27; Stop 51
ctgctctgacaaggatttaacataa

SEQ ID NO: 58847 - DNA, 25 bp, Artificial
  probe
  misc_feature (1)..(25): SEQ ID NO: 3617; WAN024ALU_at; Start 28; Stop 52
tgctctgacaaggatttaacataaa

SEQ ID NO: 58848 - DNA, 25 bp, Artificial
  probe
  misc_feature (1)..(25): SEQ ID NO: 3617; WAN024ALU_at; Start 49; Stop 73
taaacattctatcaagattttagtg

SEQ ID NO: 58849 - DNA, 25 bp, Artificial
  probe
  misc_feature (1)..(25): SEQ ID NO: 3617; WAN024ALU_at; Start 71; Stop 95
gtgaaaaatcaagaatctttctcgt

SEQ ID NO: 58850 - DNA, 25 bp, Artificial
  probe
  misc_feature (1)..(25): SEQ ID NO: 3617; WAN024ALU_at; Start 22; Stop 46
aatccctgctctgacaaggatttaa

SEQ ID NO: 58851 - DNA, 25 bp, Artificial
  probe
  misc_feature (1)..(25): SEQ ID NO: 3617; WAN024ALU_at; Start 13; Stop 37
tcaataaaaaatccctgctctgaca

SEQ ID NO: 58852 - DNA, 25 bp, Artificial
  probe
  misc_feature (1)..(25): SEQ ID NO: 3617; WAN024ALU_at; Start 11; Stop 35
tttcaataaaaaatccctgctctga

SEQ ID NO: 58853 - DNA, 25 bp, Artificial
  probe
  misc_feature (1)..(25): SEQ ID NO: 3617; WAN024ALU_at; Start 26; Stop 50
cctgctctgacaaggatttaacata

SEQ ID NO: 58854 - DNA, 25 bp, Artificial
  probe
  misc_feature (1)..(25): SEQ ID NO: 3617; WAN024ALU_at; Start 9; Stop 33
cctttcaataaaaaatccctgctct

SEQ ID NO: 58855 - DNA, 25 bp, Artificial
  probe
  misc_feature (1)..(25): SEQ ID NO: 3617; WAN024ALU_at; Start 24; Stop 48
tccctgctctgacaaggatttaaca

SEQ ID NO: 58856 - DNA, 25 bp, Artificial
  probe
  misc_feature (1)..(25): SEQ ID NO: 360; WAN024ALV_at; Start 47; Stop 71
atgttaaatccttgtcagagcaggg

SEQ ID NO: 58857 - DNA, 25 bp, Artificial
  probe
  misc_feature (1)..(25): SEQ ID NO: 360; WAN024ALV_at; Start 22; Stop 46
tcactaaaatcttgatagaatgttt

SEQ ID NO: 58858 - DNA, 25 bp, Artificial
  probe
  misc_feature (1)..(25): SEQ ID NO: 360; WAN024ALV_at; Start 5; Stop 29
gaaagattcttgatttttcactaaa

SEQ ID NO: 58859 - DNA, 25 bp, Artificial
  probe
  misc_feature (1)..(25): SEQ ID NO: 360; WAN024ALV_at; Start 63; Stop 87
agagcagggattttttattgaaagg

SEQ ID NO: 58860 - DNA, 25 bp, Artificial
  probe
  misc_feature (1)..(25): SEQ ID NO: 360; WAN024ALV_at; Start 65; Stop 89
agcagggattttttattgaaaggat

SEQ ID NO: 58861 - DNA, 25 bp, Artificial
  probe
  misc_feature (1)..(25): SEQ ID NO: 360; WAN024ALV_at; Start 52; Stop 76
aaatccttgtcagagcagggatttt

SEQ ID NO: 58862 - DNA, 25 bp, Artificial
  probe
  misc_feature (1)..(25): SEQ ID NO: 360; WAN024ALV_at; Start 20; Stop 44
tttcactaaaatcttgatagaatgt

SEQ ID NO: 58863 - DNA, 25 bp, Artificial
  probe
  misc_feature (1)..(25): SEQ ID NO: 360; WAN024ALV_at; Start 55; Stop 79
tccttgtcagagcagggatttttta

SEQ ID NO: 58864 - DNA, 25 bp, Artificial
  probe
  misc_feature (1)..(25): SEQ ID NO: 360; WAN024ALV_at; Start 56; Stop 80
ccttgtcagagcagggattttttat

SEQ ID NO: 58865 - DNA, 25 bp, Artificial
  probe
  misc_feature (1)..(25): SEQ ID NO: 360; WAN024ALV_at; Start 34; Stop 58
tgatagaatgtttatgttaaatcct

SEQ ID NO: 58866 - DNA, 25 bp, Artificial
  probe
  misc_feature (1)..(25): SEQ ID NO: 360; WAN024ALV_at; Start 57; Stop 81
cttgtcagagcagggattttttatt

SEQ ID NO: 58867 - DNA, 25 bp, Artificial
  probe
  misc_feature (1)..(25): SEQ ID NO: 360; WAN024ALV_at; Start 51; Stop 75
taaatccttgtcagagcagggattt

SEQ ID NO: 58868 - DNA, 25 bp, Artificial
  probe
  misc_feature (1)..(25): SEQ ID NO: 360; WAN024ALV_at; Start 45; Stop 69
ttatgttaaatccttgtcagagcag

SEQ ID NO: 58869 - DNA, 25 bp, Artificial
  probe
  misc_feature (1)..(25): SEQ ID NO: 360; WAN024ALV_at; Start 46; Stop 70
tatgttaaatccttgtcagagcagg

SEQ ID NO: 58870 - DNA, 25 bp, Artificial
  probe
  misc_feature (1)..(25): SEQ ID NO: 360; WAN024ALV_at; Start 43; Stop 67
gtttatgttaaatccttgtcagagc

SEQ ID NO: 58871 - DNA, 25 bp, Artificial
  probe
  misc_feature (1)..(25): SEQ ID NO: 360; WAN024ALV_at; Start 23; Stop 47
cactaaaatcttgatagaatgttta

SEQ ID NO: 58872 - DNA, 25 bp, Artificial
  probe
  misc_feature (1)..(25): SEQ ID NO: 360; WAN024ALV_at; Start 1; Stop 25
acgagaaagattcttgatttttcac

SEQ ID NO: 58873 - DNA, 25 bp, Artificial
  probe
  misc_feature (1)..(25): SEQ ID NO: 360; WAN024ALV_at; Start 39; Stop 63
gaatgtttatgttaaatccttgtca

SEQ ID NO: 58874 - DNA, 25 bp, Artificial
  probe
  misc_feature (1)..(25): SEQ ID NO: 360; WAN024ALV_at; Start 59; Stop 83
tgtcagagcagggattttttattga

SEQ ID NO: 58875 - DNA, 25 bp, Artificial
  probe
  misc_feature (1)..(25): SEQ ID NO: 360; WAN024ALV_at; Start 64; Stop 88
gagcagggattttttattgaaagga

SEQ ID NO: 58876 - DNA, 25 bp, Artificial
  probe
  misc_feature (1)..(25): SEQ ID NO: 360; WAN024ALV_at; Start 42; Stop 66
tgtttatgttaaatccttgtcagag

SEQ ID NO: 58877 - DNA, 25 bp, Artificial
  probe
  misc_feature (1)..(25): SEQ ID NO: 360; WAN024ALV_at; Start 44; Stop 68
tttatgttaaatccttgtcagagca

SEQ ID NO: 58878 - DNA, 25 bp, Artificial
  probe
  misc_feature (1)..(25): SEQ ID NO: 360; WAN024ALV_at; Start 50; Stop 74
ttaaatccttgtcagagcagggatt

SEQ ID NO: 58879 - DNA, 25 bp, Artificial
  probe
  misc_feature (1)..(25): SEQ ID NO: 360; WAN024ALV_at; Start 16; Stop 40
gatttttcactaaaatcttgataga

SEQ ID NO: 58880 - DNA, 25 bp, Artificial
  probe
  misc_feature (1)..(25): SEQ ID NO: 360; WAN024ALV_at; Start 3; Stop 27
gagaaagattcttgatttttcacta

SEQ ID NO: 58881 - DNA, 25 bp, Artificial
  probe
  misc_feature (1)..(25): SEQ ID NO: 360; WAN024ALV_at; Start 48; Stop 72
tgttaaatccttgtcagagcaggga

SEQ ID NO: 58882 - DNA, 25 bp, Artificial
  probe
  misc_feature (1)..(25): SEQ ID NO: 360; WAN024ALV_at; Start 2; Stop 26
cgagaaagattcttgatttttcact

SEQ ID NO: 58883 - DNA, 25 bp, Artificial
  probe
  misc_feature (1)..(25): SEQ ID NO: 360; WAN024ALV_at; Start 19; Stop 43
ttttcactaaaatcttgatagaatg

SEQ ID NO: 58884 - DNA, 25 bp, Artificial
  probe
  misc_feature (1)..(25): SEQ ID NO: 360; WAN024ALV_at; Start 35; Stop 59
gatagaatgtttatgttaaatcctt

SEQ ID NO: 58885 - DNA, 25 bp, Artificial
  probe
  misc_feature (1)..(25): SEQ ID NO: 360; WAN024ALV_at; Start 62; Stop 86
cagagcagggattttttattgaaag

SEQ ID NO: 58886 - DNA, 25 bp, Artificial
  probe
  misc_feature (1)..(25): SEQ ID NO: 360; WAN024ALV_at; Start 49; Stop 73
gttaaatccttgtcagagcagggat

SEQ ID NO: 58887 - DNA, 25 bp, Artificial
  probe
  misc_feature (1)..(25): SEQ ID NO: 360; WAN024ALV_at; Start 61; Stop 85
tcagagcagggattttttattgaaa

SEQ ID NO: 58888 - DNA, 25 bp, Artificial
  probe
  misc_feature (1)..(25): SEQ ID NO: 360; WAN024ALV_at; Start 53; Stop 77
aatccttgtcagagcagggattttt

SEQ ID NO: 58889 - DNA, 25 bp, Artificial
  probe
  misc_feature (1)..(25): SEQ ID NO: 360; WAN024ALV_at; Start 40; Stop 64
aatgtttatgttaaatccttgtcag

SEQ ID NO: 58890 - DNA, 25 bp, Artificial
  probe
  misc_feature (1)..(25): SEQ ID NO: 3142; WAN024ALW_at; Start 23; Stop 47
cattttctaattagataacattaaa

SEQ ID NO: 58891 - DNA, 25 bp, Artificial
  probe
  misc_feature (1)..(25): SEQ ID NO: 3142; WAN024ALW_at; Start 31; Stop 55
aattagataacattaaaaaatacag

SEQ ID NO: 58892 - DNA, 25 bp, Artificial
  probe
  misc_feature (1)..(25): SEQ ID NO: 3142; WAN024ALW_at; Start 18; Stop 42
aaaagcattttctaattagataaca

SEQ ID NO: 58893 - DNA, 25 bp, Artificial
  probe
  misc_feature (1)..(25): SEQ ID NO: 3142; WAN024ALW_at; Start 32; Stop 56
attagataacattaaaaaatacaga

SEQ ID NO: 58894 - DNA, 25 bp, Artificial
  probe
  misc_feature (1)..(25): SEQ ID NO: 3142; WAN024ALW_at; Start 35; Stop 59
agataacattaaaaaatacagaatc

SEQ ID NO: 58895 - DNA, 25 bp, Artificial
  probe
  misc_feature (1)..(25): SEQ ID NO: 3142; WAN024ALW_at; Start 19; Stop 43
aaagcattttctaattagataacat

SEQ ID NO: 58896 - DNA, 25 bp, Artificial
  probe
  misc_feature (1)..(25): SEQ ID NO: 3142; WAN024ALW_at; Start 36; Stop 60
gataacattaaaaaatacagaatcc

SEQ ID NO: 58897 - DNA, 25 bp, Artificial
  probe
  misc_feature (1)..(25): SEQ ID NO: 3142; WAN024ALW_at; Start 33; Stop 57
ttagataacattaaaaaatacagaa

SEQ ID NO: 58898 - DNA, 25 bp, Artificial
  probe
  misc_feature (1)..(25): SEQ ID NO: 3142; WAN024ALW_at; Start 1; Stop 25
attatatttcctacaaaaaaagcat

SEQ ID NO: 58899 - DNA, 25 bp, Artificial
  probe
  misc_feature (1)..(25): SEQ ID NO: 3142; WAN024ALW_at; Start 28; Stop 52
tctaattagataacattaaaaaata

SEQ ID NO: 58900 - DNA, 25 bp, Artificial
  probe
  misc_feature (1)..(25): SEQ ID NO: 3142; WAN024ALW_at; Start 22; Stop 46
gcattttctaattagataacattaa

SEQ ID NO: 58901 - DNA, 25 bp, Artificial
  probe
  misc_feature (1)..(25): SEQ ID NO: 3142; WAN024ALW_at; Start 30; Stop 54
taattagataacattaaaaaataca

SEQ ID NO: 58902 - DNA, 25 bp, Artificial
  probe
  misc_feature (1)..(25): SEQ ID NO: 3142; WAN024ALW_at; Start 14; Stop 38
caaaaaaagcattttctaattagat

SEQ ID NO: 58903 - DNA, 25 bp, Artificial
  probe
  misc_feature (1)..(25): SEQ ID NO: 3142; WAN024ALW_at; Start 20; Stop 44
aagcattttctaattagataacatt

SEQ ID NO: 58904 - DNA, 25 bp, Artificial
  probe
  misc_feature (1)..(25): SEQ ID NO: 3142; WAN024ALW_at; Start 21; Stop 45
agcattttctaattagataacatta

SEQ ID NO: 58905 - DNA, 25 bp, Artificial
  probe
  misc_feature (1)..(25): SEQ ID NO: 3142; WAN024ALW_at; Start 34; Stop 58
tagataacattaaaaaatacagaat

SEQ ID NO: 58906 - DNA, 25 bp, Artificial
  probe
  misc_feature (1)..(25): SEQ ID NO: 5891; WAN024ALX_at; Start 34; Stop 58
tgttatctaattagaaaatgctttt

SEQ ID NO: 58907 - DNA, 25 bp, Artificial
  probe
  misc_feature (1)..(25): SEQ ID NO: 5891; WAN024ALX_at; Start 30; Stop 54
ttaatgttatctaattagaaaatgc

SEQ ID NO: 58908 - DNA, 25 bp, Artificial
  probe
  misc_feature (1)..(25): SEQ ID NO: 5891; WAN024ALX_at; Start 29; Stop 53
tttaatgttatctaattagaaaatg

SEQ ID NO: 58909 - DNA, 25 bp, Artificial
  probe
  misc_feature (1)..(25): SEQ ID NO: 5891; WAN024ALX_at; Start 17; Stop 41
gattctgtattttttaatgttatct

SEQ ID NO: 58910 - DNA, 25 bp, Artificial
  probe
  misc_feature (1)..(25): SEQ ID NO: 5891; WAN024ALX_at; Start 31; Stop 55
taatgttatctaattagaaaatgct

SEQ ID NO: 58911 - DNA, 25 bp, Artificial
  probe
  misc_feature (1)..(25): SEQ ID NO: 5891; WAN024ALX_at; Start 32; Stop 56
aatgttatctaattagaaaatgctt

SEQ ID NO: 58912 - DNA, 25 bp, Artificial
  probe
  misc_feature (1)..(25): SEQ ID NO: 5891; WAN024ALX_at; Start 38; Stop 62
atctaattagaaaatgctttttttg

SEQ ID NO: 58913 - DNA, 25 bp, Artificial
  probe
  misc_feature (1)..(25): SEQ ID NO: 5891; WAN024ALX_at; Start 33; Stop 57
atgttatctaattagaaaatgcttt

SEQ ID NO: 58914 - DNA, 25 bp, Artificial
  probe
  misc_feature (1)..(25): SEQ ID NO: 5891; WAN024ALX_at; Start 16; Stop 40
ggattctgtattttttaatgttatc

SEQ ID NO: 58915 - DNA, 25 bp, Artificial
  probe
  misc_feature (1)..(25): SEQ ID NO: 5891; WAN024ALX_at; Start 51; Stop 75
atgctttttttgtaggaaatataat

SEQ ID NO: 58916 - DNA, 25 bp, Artificial
  probe
  misc_feature (1)..(25): SEQ ID NO: 234; WAN024ALY_at; Start 15; Stop 39
gacctagctattttaaacttcttga

SEQ ID NO: 58917 - DNA, 25 bp, Artificial
  probe
  misc_feature (1)..(25): SEQ ID NO: 234; WAN024ALY_at; Start 75; Stop 99
gtcatctgcttctttcgccgtggtg

SEQ ID NO: 58918 - DNA, 25 bp, Artificial
  probe
  misc_feature (1)..(25): SEQ ID NO: 234; WAN024ALY_at; Start 167; Stop 191
caatgaaaccatcggtttgcttgcg

SEQ ID NO: 58919 - DNA, 25 bp, Artificial
  probe
  misc_feature (1)..(25): SEQ ID NO: 234; WAN024ALY_at; Start 99; Stop 123
gaaagtgatggaactgatttatcag

SEQ ID NO: 58920 - DNA, 25 bp, Artificial
  probe
  misc_feature (1)..(25): SEQ ID NO: 234; WAN024ALY_at; Start 82; Stop 106
gcttctttcgccgtggtgaaagtga

SEQ ID NO: 58921 - DNA, 25 bp, Artificial
  probe
  misc_feature (1)..(25): SEQ ID NO: 234; WAN024ALY_at; Start 135; Stop 159
gggatttttgagaccctaggctcaa

SEQ ID NO: 58922 - DNA, 25 bp, Artificial
  probe
  misc_feature (1)..(25): SEQ ID NO: 234; WAN024ALY_at; Start 172; Stop 196
aaaccatcggtttgcttgcgtccct

SEQ ID NO: 58923 - DNA, 25 bp, Artificial
  probe
  misc_feature (1)..(25): SEQ ID NO: 234; WAN024ALY_at; Start 174; Stop 198
accatcggtttgcttgcgtccctca

SEQ ID NO: 58924 - DNA, 25 bp, Artificial
  probe
  misc_feature (1)..(25): SEQ ID NO: 234; WAN024ALY_at; Start 148; Stop 172
ccctaggctcaaaaataagcaatga

SEQ ID NO: 58925 - DNA, 25 bp, Artificial
  probe
  misc_feature (1)..(25): SEQ ID NO: 234; WAN024ALY_at; Start 153; Stop 177
ggctcaaaaataagcaatgaaacca

SEQ ID NO: 58926 - DNA, 25 bp, Artificial
  probe
  misc_feature (1)..(25): SEQ ID NO: 234; WAN024ALY_at; Start 144; Stop 168
gagaccctaggctcaaaaataagca

SEQ ID NO: 58927 - DNA, 25 bp, Artificial
  probe
  misc_feature (1)..(25): SEQ ID NO: 234; WAN024ALY_at; Start 194; Stop 218
cctcaccacctaagaaaggagcaaa

SEQ ID NO: 58928 - DNA, 25 bp, Artificial
  probe
  misc_feature (1)..(25): SEQ ID NO: 234; WAN024ALY_at; Start 77; Stop 101
catctgcttctttcgccgtggtgaa

SEQ ID NO: 58929 - DNA, 25 bp, Artificial
  probe
  misc_feature (1)..(25): SEQ ID NO: 234; WAN024ALY_at; Start 171; Stop 195
gaaaccatcggtttgcttgcgtccc

SEQ ID NO: 58930 - DNA, 25 bp, Artificial
  probe
  misc_feature (1)..(25): SEQ ID NO: 234; WAN024ALY_at; Start 10; Stop 34
cagcagacctagctattttaaactt

SEQ ID NO: 58931 - DNA, 25 bp, Artificial
  probe
  misc_feature (1)..(25): SEQ ID NO: 234; WAN024ALY_at; Start 86; Stop 110
ctttcgccgtggtgaaagtgatgga

SEQ ID NO: 58932 - DNA, 25 bp, Artificial
  probe
  misc_feature (1)..(25): SEQ ID NO: 234; WAN024ALY_at; Start 43; Stop 67
tcagtttaaattgaaacgaagttca

SEQ ID NO: 58933 - DNA, 25 bp, Artificial
  probe
  misc_feature (1)..(25): SEQ ID NO: 234; WAN024ALY_at; Start 62; Stop 86
agttcaatttgaagtcatctgcttc

SEQ ID NO: 58934 - DNA, 25 bp, Artificial
  probe
  misc_feature (1)..(25): SEQ ID NO: 234; WAN024ALY_at; Start 196; Stop 220
tcaccacctaagaaaggagcaaaaa

SEQ ID NO: 58935 - DNA, 25 bp, Artificial
  probe
  misc_feature (1)..(25): SEQ ID NO: 234; WAN024ALY_at; Start 7; Stop 31
ggccagcagacctagctattttaaa

SEQ ID NO: 58936 - DNA, 25 bp, Artificial
  probe
  misc_feature (1)..(25): SEQ ID NO: 234; WAN024ALY_at; Start 21; Stop 45
gctattttaaacttcttgattttca

SEQ ID NO: 58937 - DNA, 25 bp, Artificial
  probe
  misc_feature (1)..(25): SEQ ID NO: 234; WAN024ALY_at; Start 89; Stop 113
tcgccgtggtgaaagtgatggaact

SEQ ID NO: 58938 - DNA, 25 bp, Artificial
  probe
  misc_feature (1)..(25): SEQ ID NO: 234; WAN024ALY_at; Start 163; Stop 187
taagcaatgaaaccatcggtttgct

SEQ ID NO: 58939 - DNA, 25 bp, Artificial
  probe
  misc_feature (1)..(25): SEQ ID NO: 234; WAN024ALY_at; Start 78; Stop 102
atctgcttctttcgccgtggtgaaa

SEQ ID NO: 58940 - DNA, 25 bp, Artificial
  probe
  misc_feature (1)..(25): SEQ ID NO: 234; WAN024ALY_at; Start 112; Stop 136
ctgatttatcagtcccatcacaggg

SEQ ID NO: 58941 - DNA, 25 bp, Artificial
  probe
  misc_feature (1)..(25): SEQ ID NO: 234; WAN024ALY_at; Start 73; Stop 97
aagtcatctgcttctttcgccgtgg

SEQ ID NO: 58942 - DNA, 25 bp, Artificial
  probe
  misc_feature (1)..(25): SEQ ID NO: 234; WAN024ALY_at; Start 146; Stop 170
gaccctaggctcaaaaataagcaat

SEQ ID NO: 58943 - DNA, 25 bp, Artificial
  probe
  misc_feature (1)..(25): SEQ ID NO: 234; WAN024ALY_at; Start 192; Stop 216
tccctcaccacctaagaaaggagca

SEQ ID NO: 58944 - DNA, 25 bp, Artificial
  probe
  misc_feature (1)..(25): SEQ ID NO: 234; WAN024ALY_at; Start 120; Stop 144
tcagtcccatcacaggggatttttg

SEQ ID NO: 58945 - DNA, 25 bp, Artificial
  probe
  misc_feature (1)..(25): SEQ ID NO: 234; WAN024ALY_at; Start 157; Stop 181
caaaaataagcaatgaaaccatcgg

SEQ ID NO: 58946 - DNA, 25 bp, Artificial
  probe
  misc_feature (1)..(25): SEQ ID NO: 234; WAN024ALY_at; Start 104; Stop 128
tgatggaactgatttatcagtccca

SEQ ID NO: 58947 - DNA, 25 bp, Artificial
  probe
  misc_feature (1)..(25): SEQ ID NO: 234; WAN024ALY_at; Start 161; Stop 185
aataagcaatgaaaccatcggtttg

SEQ ID NO: 58948 - DNA, 25 bp, Artificial
  probe
  misc_feature (1)..(25): SEQ ID NO: 234; WAN024ALY_at; Start 177; Stop 201
atcggtttgcttgcgtccctcacca

SEQ ID NO: 58949 - DNA, 25 bp, Artificial
  probe
  misc_feature (1)..(25): SEQ ID NO: 234; WAN024ALY_at; Start 92; Stop 116
ccgtggtgaaagtgatggaactgat

SEQ ID NO: 58950 - DNA, 25 bp, Artificial
  probe
  misc_feature (1)..(25): SEQ ID NO: 3666; WAN024ALZ_at; Start 70; Stop 94
cctagggtctcaaaaatcccctgtg

SEQ ID NO: 58951 - DNA, 25 bp, Artificial
  probe
  misc_feature (1)..(25): SEQ ID NO: 3666; WAN024ALZ_at; Start 193; Stop 217
tttaaaatagctaggtctgctggcc

SEQ ID NO: 58952 - DNA, 25 bp, Artificial
  probe
  misc_feature (1)..(25): SEQ ID NO: 3666; WAN024ALZ_at; Start 31; Stop 55
gacgcaagcaaaccgatggtttcat

SEQ ID NO: 58953 - DNA, 25 bp, Artificial
  probe
  misc_feature (1)..(25): SEQ ID NO: 3666; WAN024ALZ_at; Start 169; Stop 193
caatttaaactgaaaatcaagaagt

SEQ ID NO: 58954 - DNA, 25 bp, Artificial
  probe
  misc_feature (1)..(25): SEQ ID NO: 3666; WAN024ALZ_at; Start 12; Stop 36
cctttcttaggtggtgagggacgca

SEQ ID NO: 58955 - DNA, 25 bp, Artificial
  probe
  misc_feature (1)..(25): SEQ ID NO: 3666; WAN024ALZ_at; Start 6; Stop 30
tttgctcctttcttaggtggtgagg

SEQ ID NO: 58956 - DNA, 25 bp, Artificial
  probe
  misc_feature (1)..(25): SEQ ID NO: 3666; WAN024ALZ_at; Start 195; Stop 219
taaaatagctaggtctgctggccta

SEQ ID NO: 58957 - DNA, 25 bp, Artificial
  probe
  misc_feature (1)..(25): SEQ ID NO: 3666; WAN024ALZ_at; Start 111; Stop 135
agttccatcactttcaccacggcga

SEQ ID NO: 58958 - DNA, 25 bp, Artificial
  probe
  misc_feature (1)..(25): SEQ ID NO: 3666; WAN024ALZ_at; Start 118; Stop 142
tcactttcaccacggcgaaagaagc

SEQ ID NO: 58959 - DNA, 25 bp, Artificial
  probe
  misc_feature (1)..(25): SEQ ID NO: 3666; WAN024ALZ_at; Start 127; Stop 151
ccacggcgaaagaagcagatgactt

SEQ ID NO: 58960 - DNA, 25 bp, Artificial
  probe
  misc_feature (1)..(25): SEQ ID NO: 3666; WAN024ALZ_at; Start 79; Stop 103
tcaaaaatcccctgtgatgggactg

SEQ ID NO: 58961 - DNA, 25 bp, Artificial
  probe
  misc_feature (1)..(25): SEQ ID NO: 3666; WAN024ALZ_at; Start 89; Stop 113
cctgtgatgggactgataaatcagt

SEQ ID NO: 58962 - DNA, 25 bp, Artificial
  probe
  misc_feature (1)..(25): SEQ ID NO: 3666; WAN024ALZ_at; Start 93; Stop 117
tgatgggactgataaatcagttcca

SEQ ID NO: 58963 - DNA, 25 bp, Artificial
  probe
  misc_feature (1)..(25): SEQ ID NO: 3666; WAN024ALZ_at; Start 138; Stop 162
gaagcagatgacttcaaattgaact

SEQ ID NO: 58964 - DNA, 25 bp, Artificial
  probe
  misc_feature (1)..(25): SEQ ID NO: 3666; WAN024ALZ_at; Start 114; Stop 138
tccatcactttcaccacggcgaaag

SEQ ID NO: 58965 - DNA, 25 bp, Artificial
  probe
  misc_feature (1)..(25): SEQ ID NO: 3666; WAN024ALZ_at; Start 97; Stop 121
gggactgataaatcagttccatcac

SEQ ID NO: 58966 - DNA, 25 bp, Artificial
  probe
  misc_feature (1)..(25): SEQ ID NO: 3666; WAN024ALZ_at; Start 66; Stop 90
tgagcctagggtctcaaaaatcccc

SEQ ID NO: 58967 - DNA, 25 bp, Artificial
  probe
  misc_feature (1)..(25): SEQ ID NO: 3666; WAN024ALZ_at; Start 157; Stop 181
tgaacttcgtttcaatttaaactga

SEQ ID NO: 58968 - DNA, 25 bp, Artificial
  probe
  misc_feature (1)..(25): SEQ ID NO: 3666; WAN024ALZ_at; Start 185; Stop 209
tcaagaagtttaaaatagctaggtc

SEQ ID NO: 58969 - DNA, 25 bp, Artificial
  probe
  misc_feature (1)..(25): SEQ ID NO: 3666; WAN024ALZ_at; Start 39; Stop 63
caaaccgatggtttcattgcttatt

SEQ ID NO: 58970 - DNA, 25 bp, Artificial
  probe
  misc_feature (1)..(25): SEQ ID NO: 3666; WAN024ALZ_at; Start 125; Stop 149
caccacggcgaaagaagcagatgac

SEQ ID NO: 58971 - DNA, 25 bp, Artificial
  probe
  misc_feature (1)..(25): SEQ ID NO: 3666; WAN024ALZ_at; Start 122; Stop 146
tttcaccacggcgaaagaagcagat

SEQ ID NO: 58972 - DNA, 25 bp, Artificial
  probe
  misc_feature (1)..(25): SEQ ID NO: 3666; WAN024ALZ_at; Start 13; Stop 37
ctttcttaggtggtgagggacgcaa

SEQ ID NO: 58973 - DNA, 25 bp, Artificial
  probe
  misc_feature (1)..(25): SEQ ID NO: 3666; WAN024ALZ_at; Start 28; Stop 52
agggacgcaagcaaaccgatggttt

SEQ ID NO: 58974 - DNA, 25 bp, Artificial
  probe
  misc_feature (1)..(25): SEQ ID NO: 3666; WAN024ALZ_at; Start 130; Stop 154
cggcgaaagaagcagatgacttcaa

SEQ ID NO: 58975 - DNA, 25 bp, Artificial
  probe
  misc_feature (1)..(25): SEQ ID NO: 3666; WAN024ALZ_at; Start 26; Stop 50
tgagggacgcaagcaaaccgatggt

SEQ ID NO: 58976 - DNA, 25 bp, Artificial
  probe
  misc_feature (1)..(25): SEQ ID NO: 3666; WAN024ALZ_at; Start 57; Stop 81
gcttatttttgagcctagggtctca

SEQ ID NO: 58977 - DNA, 25 bp, Artificial
  probe
  misc_feature (1)..(25): SEQ ID NO: 3666; WAN024ALZ_at; Start 197; Stop 221
aaatagctaggtctgctggcctagc

SEQ ID NO: 58978 - DNA, 25 bp, Artificial
  probe
  misc_feature (1)..(25): SEQ ID NO: 3666; WAN024ALZ_at; Start 87; Stop 111
cccctgtgatgggactgataaatca

SEQ ID NO: 58979 - DNA, 25 bp, Artificial
  probe
  misc_feature (1)..(25): SEQ ID NO: 3666; WAN024ALZ_at; Start 9; Stop 33
gctcctttcttaggtggtgagggac

SEQ ID NO: 58980 - DNA, 25 bp, Artificial
  probe
  misc_feature (1)..(25): SEQ ID NO: 3666; WAN024ALZ_at; Start 35; Stop 59
caagcaaaccgatggtttcattgct

SEQ ID NO: 58981 - DNA, 25 bp, Artificial
  probe
  misc_feature (1)..(25): SEQ ID NO: 3666; WAN024ALZ_at; Start 74; Stop 98
gggtctcaaaaatcccctgtgatgg

SEQ ID NO: 58982 - DNA, 25 bp, Artificial
  probe
  misc_feature (1)..(25): SEQ ID NO: 3666; WAN024ALZ_at; Start 52; Stop 76
tcattgcttatttttgagcctaggg

SEQ ID NO: 58983 - DNA, 25 bp, Artificial
  probe
  misc_feature (1)..(25): SEQ ID NO: 3666; WAN024ALZ_at; Start 82; Stop 106
aaaatcccctgtgatgggactgata

SEQ ID NO: 58984 - DNA, 25 bp, Artificial
  probe
  misc_feature (1)..(25): SEQ ID NO: 3508; WAN024AM2_at; Start 28; Stop 52
cacgtttgccaacttatgtaaagca

SEQ ID NO: 58985 - DNA, 25 bp, Artificial
  probe
  misc_feature (1)..(25): SEQ ID NO: 3508; WAN024AM2_at; Start 27; Stop 51
gcacgtttgccaacttatgtaaagc

SEQ ID NO: 58986 - DNA, 25 bp, Artificial
  probe
  misc_feature (1)..(25): SEQ ID NO: 3508; WAN024AM2_at; Start 45; Stop 69
gtaaagcaaaagcacttgtacagcc

SEQ ID NO: 58987 - DNA, 25 bp, Artificial
  probe
  misc_feature (1)..(25): SEQ ID NO: 3508; WAN024AM2_at; Start 38; Stop 62
aacttatgtaaagcaaaagcacttg

SEQ ID NO: 58988 - DNA, 25 bp, Artificial
  probe
  misc_feature (1)..(25): SEQ ID NO: 3508; WAN024AM2_at; Start 41; Stop 65
ttatgtaaagcaaaagcacttgtac

SEQ ID NO: 58989 - DNA, 25 bp, Artificial
  probe
  misc_feature (1)..(25): SEQ ID NO: 3508; WAN024AM2_at; Start 20; Stop 44
cagtatagcacgtttgccaacttat

SEQ ID NO: 58990 - DNA, 25 bp, Artificial
  probe
  misc_feature (1)..(25): SEQ ID NO: 3508; WAN024AM2_at; Start 40; Stop 64
cttatgtaaagcaaaagcacttgta

SEQ ID NO: 58991 - DNA, 25 bp, Artificial
  probe
  misc_feature (1)..(25): SEQ ID NO: 3508; WAN024AM2_at; Start 30; Stop 54
cgtttgccaacttatgtaaagcaaa

SEQ ID NO: 58992 - DNA, 25 bp, Artificial
  probe
  misc_feature (1)..(25): SEQ ID NO: 3508; WAN024AM2_at; Start 33; Stop 57
ttgccaacttatgtaaagcaaaagc

SEQ ID NO: 58993 - DNA, 25 bp, Artificial
  probe
  misc_feature (1)..(25): SEQ ID NO: 3508; WAN024AM2_at; Start 54; Stop 78
aagcacttgtacagcctaattttag

SEQ ID NO: 58994 - DNA, 25 bp, Artificial
  probe
  misc_feature (1)..(25): SEQ ID NO: 3508; WAN024AM2_at; Start 16; Stop 40
ctatcagtatagcacgtttgccaac

SEQ ID NO: 58995 - DNA, 25 bp, Artificial
  probe
  misc_feature (1)..(25): SEQ ID NO: 3508; WAN024AM2_at; Start 42; Stop 66
tatgtaaagcaaaagcacttgtaca

SEQ ID NO: 58996 - DNA, 25 bp, Artificial
  probe
  misc_feature (1)..(25): SEQ ID NO: 3508; WAN024AM2_at; Start 21; Stop 45
agtatagcacgtttgccaacttatg

SEQ ID NO: 58997 - DNA, 25 bp, Artificial
  probe
  misc_feature (1)..(25): SEQ ID NO: 3508; WAN024AM2_at; Start 6; Stop 30
catattcttactatcagtatagcac

SEQ ID NO: 58998 - DNA, 25 bp, Artificial
  probe
  misc_feature (1)..(25): SEQ ID NO: 3508; WAN024AM2_at; Start 36; Stop 60
ccaacttatgtaaagcaaaagcact

SEQ ID NO: 58999 - DNA, 25 bp, Artificial
  probe
  misc_feature (1)..(25): SEQ ID NO: 3508; WAN024AM2_at; Start 46; Stop 70
taaagcaaaagcacttgtacagcct

SEQ ID NO: 59000 - DNA, 25 bp, Artificial
  probe
  misc_feature (1)..(25): SEQ ID NO: 3508; WAN024AM2_at; Start 13; Stop 37
ttactatcagtatagcacgtttgcc

SEQ ID NO: 59001 - DNA, 25 bp, Artificial
  probe
  misc_feature (1)..(25): SEQ ID NO: 3508; WAN024AM2_at; Start 8; Stop 32
tattcttactatcagtatagcacgt

SEQ ID NO: 59002 - DNA, 25 bp, Artificial
  probe
  misc_feature (1)..(25): SEQ ID NO: 3508; WAN024AM2_at; Start 51; Stop 75
caaaagcacttgtacagcctaattt

SEQ ID NO: 59003 - DNA, 25 bp, Artificial
  probe
  misc_feature (1)..(25): SEQ ID NO: 3508; WAN024AM2_at; Start 11; Stop 35
tcttactatcagtatagcacgtttg

SEQ ID NO: 59004 - DNA, 25 bp, Artificial
  probe
  misc_feature (1)..(25): SEQ ID NO: 3508; WAN024AM2_at; Start 15; Stop 39
actatcagtatagcacgtttgccaa

SEQ ID NO: 59005 - DNA, 25 bp, Artificial
  probe
  misc_feature (1)..(25): SEQ ID NO: 3508; WAN024AM2_at; Start 19; Stop 43
tcagtatagcacgtttgccaactta

SEQ ID NO: 59006 - DNA, 25 bp, Artificial
  probe
  misc_feature (1)..(25): SEQ ID NO: 3508; WAN024AM2_at; Start 25; Stop 49
tagcacgtttgccaacttatgtaaa

SEQ ID NO: 59007 - DNA, 25 bp, Artificial
  probe
  misc_feature (1)..(25): SEQ ID NO: 3508; WAN024AM2_at; Start 26; Stop 50
agcacgtttgccaacttatgtaaag

SEQ ID NO: 59008 - DNA, 25 bp, Artificial
  probe
  misc_feature (1)..(25): SEQ ID NO: 3508; WAN024AM2_at; Start 49; Stop 73
agcaaaagcacttgtacagcctaat

SEQ ID NO: 59009 - DNA, 25 bp, Artificial
  probe
  misc_feature (1)..(25): SEQ ID NO: 3508; WAN024AM2_at; Start 14; Stop 38
tactatcagtatagcacgtttgcca

SEQ ID NO: 59010 - DNA, 25 bp, Artificial
  probe
  misc_feature (1)..(25): SEQ ID NO: 3508; WAN024AM2_at; Start 17; Stop 41
tatcagtatagcacgtttgccaact

SEQ ID NO: 59011 - DNA, 25 bp, Artificial
  probe
  misc_feature (1)..(25): SEQ ID NO: 3508; WAN024AM2_at; Start 55; Stop 79
agcacttgtacagcctaattttagg

SEQ ID NO: 59012 - DNA, 25 bp, Artificial
  probe
  misc_feature (1)..(25): SEQ ID NO: 3508; WAN024AM2_at; Start 44; Stop 68
tgtaaagcaaaagcacttgtacagc

SEQ ID NO: 59013 - DNA, 25 bp, Artificial
  probe
  misc_feature (1)..(25): SEQ ID NO: 3508; WAN024AM2_at; Start 47; Stop 71
aaagcaaaagcacttgtacagccta

SEQ ID NO: 59014 - DNA, 25 bp, Artificial
  probe
  misc_feature (1)..(25): SEQ ID NO: 3508; WAN024AM2_at; Start 23; Stop 47
tatagcacgtttgccaacttatgta

SEQ ID NO: 59015 - DNA, 25 bp, Artificial
  probe
  misc_feature (1)..(25): SEQ ID NO: 3508; WAN024AM2_at; Start 48; Stop 72
aagcaaaagcacttgtacagcctaa

SEQ ID NO: 59016 - DNA, 25 bp, Artificial
  probe
  misc_feature (1)..(25): SEQ ID NO: 3508; WAN024AM2_at; Start 35; Stop 59
gccaacttatgtaaagcaaaagcac

SEQ ID NO: 59017 - DNA, 25 bp, Artificial
  probe
  misc_feature (1)..(25): SEQ ID NO: 3508; WAN024AM2_at; Start 50; Stop 74
gcaaaagcacttgtacagcctaatt

SEQ ID NO: 59018 - DNA, 25 bp, Artificial
  probe
  misc_feature (1)..(25): SEQ ID NO: 3595; WAN024AM3_at; Start 10; Stop 34
taaaattaggctgtacaagtgcttt

SEQ ID NO: 59019 - DNA, 25 bp, Artificial
  probe
  misc_feature (1)..(25): SEQ ID NO: 3595; WAN024AM3_at; Start 48; Stop 72
ttggcaaacgtgctatactgatagt

SEQ ID NO: 59020 - DNA, 25 bp, Artificial
  probe
  misc_feature (1)..(25): SEQ ID NO: 3595; WAN024AM3_at; Start 9; Stop 33
ctaaaattaggctgtacaagtgctt

SEQ ID NO: 59021 - DNA, 25 bp, Artificial
  probe
  misc_feature (1)..(25): SEQ ID NO: 3595; WAN024AM3_at; Start 19; Stop 43
gctgtacaagtgcttttgctttaca

SEQ ID NO: 59022 - DNA, 25 bp, Artificial
  probe
  misc_feature (1)..(25): SEQ ID NO: 3595; WAN024AM3_at; Start 23; Stop 47
tacaagtgcttttgctttacataag

SEQ ID NO: 59023 - DNA, 25 bp, Artificial
  probe
  misc_feature (1)..(25): SEQ ID NO: 3595; WAN024AM3_at; Start 44; Stop 68
taagttggcaaacgtgctatactga

SEQ ID NO: 59024 - DNA, 25 bp, Artificial
  probe
  misc_feature (1)..(25): SEQ ID NO: 3595; WAN024AM3_at; Start 46; Stop 70
agttggcaaacgtgctatactgata

SEQ ID NO: 59025 - DNA, 25 bp, Artificial
  probe
  misc_feature (1)..(25): SEQ ID NO: 3595; WAN024AM3_at; Start 43; Stop 67
ataagttggcaaacgtgctatactg

SEQ ID NO: 59026 - DNA, 25 bp, Artificial
  probe
  misc_feature (1)..(25): SEQ ID NO: 3595; WAN024AM3_at; Start 14; Stop 38
attaggctgtacaagtgcttttgct

SEQ ID NO: 59027 - DNA, 25 bp, Artificial
  probe
  misc_feature (1)..(25): SEQ ID NO: 3595; WAN024AM3_at; Start 35; Stop 59
tgctttacataagttggcaaacgtg

SEQ ID NO: 59028 - DNA, 25 bp, Artificial
  probe
  misc_feature (1)..(25): SEQ ID NO: 3595; WAN024AM3_at; Start 16; Stop 40
taggctgtacaagtgcttttgcttt

SEQ ID NO: 59029 - DNA, 25 bp, Artificial
  probe
  misc_feature (1)..(25): SEQ ID NO: 3595; WAN024AM3_at; Start 28; Stop 52
gtgcttttgctttacataagttggc

SEQ ID NO: 59030 - DNA, 25 bp, Artificial
  probe
  misc_feature (1)..(25): SEQ ID NO: 3595; WAN024AM3_at; Start 49; Stop 73
tggcaaacgtgctatactgatagta

SEQ ID NO: 59031 - DNA, 25 bp, Artificial
  probe
  misc_feature (1)..(25): SEQ ID NO: 3595; WAN024AM3_at; Start 12; Stop 36
aaattaggctgtacaagtgcttttg

SEQ ID NO: 59032 - DNA, 25 bp, Artificial
  probe
  misc_feature (1)..(25): SEQ ID NO: 3595; WAN024AM3_at; Start 38; Stop 62
tttacataagttggcaaacgtgcta

SEQ ID NO: 59033 - DNA, 25 bp, Artificial
  probe
  misc_feature (1)..(25): SEQ ID NO: 3595; WAN024AM3_at; Start 50; Stop 74
ggcaaacgtgctatactgatagtaa

SEQ ID NO: 59034 - DNA, 25 bp, Artificial
  probe
  misc_feature (1)..(25): SEQ ID NO: 3595; WAN024AM3_at; Start 42; Stop 66
cataagttggcaaacgtgctatact

SEQ ID NO: 59035 - DNA, 25 bp, Artificial
  probe
  misc_feature (1)..(25): SEQ ID NO: 3595; WAN024AM3_at; Start 8; Stop 32
cctaaaattaggctgtacaagtgct

SEQ ID NO: 59036 - DNA, 25 bp, Artificial
  probe
  misc_feature (1)..(25): SEQ ID NO: 3595; WAN024AM3_at; Start 25; Stop 49
caagtgcttttgctttacataagtt

SEQ ID NO: 59037 - DNA, 25 bp, Artificial
  probe
  misc_feature (1)..(25): SEQ ID NO: 3595; WAN024AM3_at; Start 40; Stop 64
tacataagttggcaaacgtgctata

SEQ ID NO: 59038 - DNA, 25 bp, Artificial
  probe
  misc_feature (1)..(25): SEQ ID NO: 3595; WAN024AM3_at; Start 59; Stop 83
gctatactgatagtaagaatatgaa

SEQ ID NO: 59039 - DNA, 25 bp, Artificial
  probe
  misc_feature (1)..(25): SEQ ID NO: 3595; WAN024AM3_at; Start 62; Stop 86
atactgatagtaagaatatgaaaag

SEQ ID NO: 59040 - DNA, 25 bp, Artificial
  probe
  misc_feature (1)..(25): SEQ ID NO: 3595; WAN024AM3_at; Start 13; Stop 37
aattaggctgtacaagtgcttttgc

SEQ ID NO: 59041 - DNA, 25 bp, Artificial
  probe
  misc_feature (1)..(25): SEQ ID NO: 3595; WAN024AM3_at; Start 41; Stop 65
acataagttggcaaacgtgctatac

SEQ ID NO: 59042 - DNA, 25 bp, Artificial
  probe
  misc_feature (1)..(25): SEQ ID NO: 3595; WAN024AM3_at; Start 52; Stop 76
caaacgtgctatactgatagtaaga

SEQ ID NO: 59043 - DNA, 25 bp, Artificial
  probe
  misc_feature (1)..(25): SEQ ID NO: 3595; WAN024AM3_at; Start 37; Stop 61
ctttacataagttggcaaacgtgct

SEQ ID NO: 59044 - DNA, 25 bp, Artificial
  probe
  misc_feature (1)..(25): SEQ ID NO: 3595; WAN024AM3_at; Start 18; Stop 42
ggctgtacaagtgcttttgctttac

SEQ ID NO: 59045 - DNA, 25 bp, Artificial
  probe
  misc_feature (1)..(25): SEQ ID NO: 3595; WAN024AM3_at; Start 30; Stop 54
gcttttgctttacataagttggcaa

SEQ ID NO: 59046 - DNA, 25 bp, Artificial
  probe
  misc_feature (1)..(25): SEQ ID NO: 3595; WAN024AM3_at; Start 56; Stop 80
cgtgctatactgatagtaagaatat

SEQ ID NO: 59047 - DNA, 25 bp, Artificial
  probe
  misc_feature (1)..(25): SEQ ID NO: 3595; WAN024AM3_at; Start 53; Stop 77
aaacgtgctatactgatagtaagaa

SEQ ID NO: 59048 - DNA, 25 bp, Artificial
  probe
  misc_feature (1)..(25): SEQ ID NO: 3595; WAN024AM3_at; Start 47; Stop 71
gttggcaaacgtgctatactgatag

SEQ ID NO: 59049 - DNA, 25 bp, Artificial
  probe
  misc_feature (1)..(25): SEQ ID NO: 3595; WAN024AM3_at; Start 36; Stop 60
gctttacataagttggcaaacgtgc

SEQ ID NO: 59050 - DNA, 25 bp, Artificial
  probe
  misc_feature (1)..(25): SEQ ID NO: 3595; WAN024AM3_at; Start 51; Stop 75
gcaaacgtgctatactgatagtaag

SEQ ID NO: 59051 - DNA, 25 bp, Artificial
  probe
  misc_feature (1)..(25): SEQ ID NO: 3595; WAN024AM3_at; Start 45; Stop 69
aagttggcaaacgtgctatactgat

SEQ ID NO: 59052 - DNA, 25 bp, Artificial
  probe
  misc_feature (1)..(25): SEQ ID NO: 352; WAN024AM4_at; Start 2; Stop 26
cccgattctcaaagaaaagcctctg

SEQ ID NO: 59053 - DNA, 25 bp, Artificial
  probe
  misc_feature (1)..(25): SEQ ID NO: 352; WAN024AM4_at; Start 47; Stop 71
tagcttgaaaaaggtaagcaccgtc

SEQ ID NO: 59054 - DNA, 25 bp, Artificial
  probe
  misc_feature (1)..(25): SEQ ID NO: 352; WAN024AM4_at; Start 41; Stop 65
tcattatagcttgaaaaaggtaagc

SEQ ID NO: 59055 - DNA, 25 bp, Artificial
  probe
  misc_feature (1)..(25): SEQ ID NO: 352; WAN024AM4_at; Start 15; Stop 39
gaaaagcctctggattggcttgggt

SEQ ID NO: 59056 - DNA, 25 bp, Artificial
  probe
  misc_feature (1)..(25): SEQ ID NO: 352; WAN024AM4_at; Start 22; Stop 46
ctctggattggcttgggtatcatta

SEQ ID NO: 59057 - DNA, 25 bp, Artificial
  probe
  misc_feature (1)..(25): SEQ ID NO: 352; WAN024AM4_at; Start 21; Stop 45
cctctggattggcttgggtatcatt

SEQ ID NO: 59058 - DNA, 25 bp, Artificial
  probe
  misc_feature (1)..(25): SEQ ID NO: 352; WAN024AM4_at; Start 3; Stop 27
ccgattctcaaagaaaagcctctgg

SEQ ID NO: 59059 - DNA, 25 bp, Artificial
  probe
  misc_feature (1)..(25): SEQ ID NO: 352; WAN024AM4_at; Start 10; Stop 34
tcaaagaaaagcctctggattggct

SEQ ID NO: 59060 - DNA, 25 bp, Artificial
  probe
  misc_feature (1)..(25): SEQ ID NO: 352; WAN024AM4_at; Start 13; Stop 37
aagaaaagcctctggattggcttgg

SEQ ID NO: 59061 - DNA, 25 bp, Artificial
  probe
  misc_feature (1)..(25): SEQ ID NO: 352; WAN024AM4_at; Start 19; Stop 43
agcctctggattggcttgggtatca

SEQ ID NO: 59062 - DNA, 25 bp, Artificial
  probe
  misc_feature (1)..(25): SEQ ID NO: 352; WAN024AM4_at; Start 37; Stop 61
ggtatcattatagcttgaaaaaggt

SEQ ID NO: 59063 - DNA, 25 bp, Artificial
  probe
  misc_feature (1)..(25): SEQ ID NO: 352; WAN024AM4_at; Start 65; Stop 89
caccgtcttctgcttaccttttcat

SEQ ID NO: 59064 - DNA, 25 bp, Artificial
  probe
  misc_feature (1)..(25): SEQ ID NO: 352; WAN024AM4_at; Start 32; Stop 56
gcttgggtatcattatagcttgaaa

SEQ ID NO: 59065 - DNA, 25 bp, Artificial
  probe
  misc_feature (1)..(25): SEQ ID NO: 352; WAN024AM4_at; Start 69; Stop 93
gtcttctgcttaccttttcataatt

SEQ ID NO: 59066 - DNA, 25 bp, Artificial
  probe
  misc_feature (1)..(25): SEQ ID NO: 352; WAN024AM4_at; Start 11; Stop 35
caaagaaaagcctctggattggctt

SEQ ID NO: 59067 - DNA, 25 bp, Artificial
  probe
  misc_feature (1)..(25): SEQ ID NO: 352; WAN024AM4_at; Start 57; Stop 81
aaggtaagcaccgtcttctgcttac

SEQ ID NO: 59068 - DNA, 25 bp, Artificial
  probe
  misc_feature (1)..(25): SEQ ID NO: 352; WAN024AM4_at; Start 53; Stop 77
gaaaaaggtaagcaccgtcttctgc

SEQ ID NO: 59069 - DNA, 25 bp, Artificial
  probe
  misc_feature (1)..(25): SEQ ID NO: 352; WAN024AM4_at; Start 54; Stop 78
aaaaaggtaagcaccgtcttctgct

SEQ ID NO: 59070 - DNA, 25 bp, Artificial
  probe
  misc_feature (1)..(25): SEQ ID NO: 352; WAN024AM4_at; Start 52; Stop 76
tgaaaaaggtaagcaccgtcttctg

SEQ ID NO: 59071 - DNA, 25 bp, Artificial
  probe
  misc_feature (1)..(25): SEQ ID NO: 352; WAN024AM4_at; Start 55; Stop 79
aaaaggtaagcaccgtcttctgctt

SEQ ID NO: 59072 - DNA, 25 bp, Artificial
  probe
  misc_feature (1)..(25): SEQ ID NO: 352; WAN024AM4_at; Start 30; Stop 54
tggcttgggtatcattatagcttga

SEQ ID NO: 59073 - DNA, 25 bp, Artificial
  probe
  misc_feature (1)..(25): SEQ ID NO: 352; WAN024AM4_at; Start 5; Stop 29
gattctcaaagaaaagcctctggat

SEQ ID NO: 59074 - DNA, 25 bp, Artificial
  probe
  misc_feature (1)..(25): SEQ ID NO: 352; WAN024AM4_at; Start 16; Stop 40
aaaagcctctggattggcttgggta

SEQ ID NO: 59075 - DNA, 25 bp, Artificial
  probe
  misc_feature (1)..(25): SEQ ID NO: 352; WAN024AM4_at; Start 48; Stop 72
agcttgaaaaaggtaagcaccgtct

SEQ ID NO: 59076 - DNA, 25 bp, Artificial
  probe
  misc_feature (1)..(25): SEQ ID NO: 352; WAN024AM4_at; Start 45; Stop 69
tatagcttgaaaaaggtaagcaccg

SEQ ID NO: 59077 - DNA, 25 bp, Artificial
  probe
  misc_feature (1)..(25): SEQ ID NO: 352; WAN024AM4_at; Start 24; Stop 48
ctggattggcttgggtatcattata

SEQ ID NO: 59078 - DNA, 25 bp, Artificial
  probe
  misc_feature (1)..(25): SEQ ID NO: 352; WAN024AM4_at; Start 61; Stop 85
taagcaccgtcttctgcttaccttt

SEQ ID NO: 59079 - DNA, 25 bp, Artificial
  probe
  misc_feature (1)..(25): SEQ ID NO: 352; WAN024AM4_at; Start 27; Stop 51
gattggcttgggtatcattatagct

SEQ ID NO: 59080 - DNA, 25 bp, Artificial
  probe
  misc_feature (1)..(25): SEQ ID NO: 352; WAN024AM4_at; Start 4; Stop 28
cgattctcaaagaaaagcctctgga

SEQ ID NO: 59081 - DNA, 25 bp, Artificial
  probe
  misc_feature (1)..(25): SEQ ID NO: 352; WAN024AM4_at; Start 8; Stop 32
tctcaaagaaaagcctctggattgg

SEQ ID NO: 59082 - DNA, 25 bp, Artificial
  probe
  misc_feature (1)..(25): SEQ ID NO: 352; WAN024AM4_at; Start 7; Stop 31
ttctcaaagaaaagcctctggattg

SEQ ID NO: 59083 - DNA, 25 bp, Artificial
  probe
  misc_feature (1)..(25): SEQ ID NO: 352; WAN024AM4_at; Start 36; Stop 60
gggtatcattatagcttgaaaaagg

SEQ ID NO: 59084 - DNA, 25 bp, Artificial
  probe
  misc_feature (1)..(25): SEQ ID NO: 352; WAN024AM4_at; Start 26; Stop 50
ggattggcttgggtatcattatagc

SEQ ID NO: 59085 - DNA, 25 bp, Artificial
  probe
  misc_feature (1)..(25): SEQ ID NO: 352; WAN024AM4_at; Start 67; Stop 91
ccgtcttctgcttaccttttcataa

SEQ ID NO: 59086 - DNA, 25 bp, Artificial
  probe
  misc_feature (1)..(25): SEQ ID NO: 171; WAN024AM5_at; Start 14; Stop 38
gtaagcagaagacggtgcttacctt

SEQ ID NO: 59087 - DNA, 25 bp, Artificial
  probe
  misc_feature (1)..(25): SEQ ID NO: 171; WAN024AM5_at; Start 58; Stop 82
ccaagccaatccagaggcttttctt

SEQ ID NO: 59088 - DNA, 25 bp, Artificial
  probe
  misc_feature (1)..(25): SEQ ID NO: 171; WAN024AM5_at; Start 53; Stop 77
gatacccaagccaatccagaggctt

SEQ ID NO: 59089 - DNA, 25 bp, Artificial
  probe
  misc_feature (1)..(25): SEQ ID NO: 171; WAN024AM5_at; Start 35; Stop 59
cctttttcaagctataatgataccc

SEQ ID NO: 59090 - DNA, 25 bp, Artificial
  probe
  misc_feature (1)..(25): SEQ ID NO: 171; WAN024AM5_at; Start 61; Stop 85
agccaatccagaggcttttctttga

SEQ ID NO: 59091 - DNA, 25 bp, Artificial
  probe
  misc_feature (1)..(25): SEQ ID NO: 171; WAN024AM5_at; Start 69; Stop 93
cagaggcttttctttgagaatcggg

SEQ ID NO: 59092 - DNA, 25 bp, Artificial
  probe
  misc_feature (1)..(25): SEQ ID NO: 171; WAN024AM5_at; Start 64; Stop 88
caatccagaggcttttctttgagaa

SEQ ID NO: 59093 - DNA, 25 bp, Artificial
  probe
  misc_feature (1)..(25): SEQ ID NO: 171; WAN024AM5_at; Start 52; Stop 76
tgatacccaagccaatccagaggct

SEQ ID NO: 59094 - DNA, 25 bp, Artificial
  probe
  misc_feature (1)..(25): SEQ ID NO: 171; WAN024AM5_at; Start 5; Stop 29
tatgaaaaggtaagcagaagacggt

SEQ ID NO: 59095 - DNA, 25 bp, Artificial
  probe
  misc_feature (1)..(25): SEQ ID NO: 171; WAN024AM5_at; Start 6; Stop 30
atgaaaaggtaagcagaagacggtg

SEQ ID NO: 59096 - DNA, 25 bp, Artificial
  probe
  misc_feature (1)..(25): SEQ ID NO: 171; WAN024AM5_at; Start 47; Stop 71
tataatgatacccaagccaatccag

SEQ ID NO: 59097 - DNA, 25 bp, Artificial
  probe
  misc_feature (1)..(25): SEQ ID NO: 171; WAN024AM5_at; Start 19; Stop 43
cagaagacggtgcttacctttttca

SEQ ID NO: 59098 - DNA, 25 bp, Artificial
  probe
  misc_feature (1)..(25): SEQ ID NO: 171; WAN024AM5_at; Start 63; Stop 87
ccaatccagaggcttttctttgaga

SEQ ID NO: 59099 - DNA, 25 bp, Artificial
  probe
  misc_feature (1)..(25): SEQ ID NO: 171; WAN024AM5_at; Start 18; Stop 42
gcagaagacggtgcttacctttttc

SEQ ID NO: 59100 - DNA, 25 bp, Artificial
  probe
  misc_feature (1)..(25): SEQ ID NO: 171; WAN024AM5_at; Start 38; Stop 62
ttttcaagctataatgatacccaag

SEQ ID NO: 59101 - DNA, 25 bp, Artificial
  probe
  misc_feature (1)..(25): SEQ ID NO: 171; WAN024AM5_at; Start 9; Stop 33
aaaaggtaagcagaagacggtgctt

SEQ ID NO: 59102 - DNA, 25 bp, Artificial
  probe
  misc_feature (1)..(25): SEQ ID NO: 171; WAN024AM5_at; Start 40; Stop 64
ttcaagctataatgatacccaagcc

SEQ ID NO: 59103 - DNA, 25 bp, Artificial
  probe
  misc_feature (1)..(25): SEQ ID NO: 171; WAN024AM5_at; Start 11; Stop 35
aaggtaagcagaagacggtgcttac

SEQ ID NO: 59104 - DNA, 25 bp, Artificial
  probe
  misc_feature (1)..(25): SEQ ID NO: 171; WAN024AM5_at; Start 45; Stop 69
gctataatgatacccaagccaatcc

SEQ ID NO: 59105 - DNA, 25 bp, Artificial
  probe
  misc_feature (1)..(25): SEQ ID NO: 171; WAN024AM5_at; Start 8; Stop 32
gaaaaggtaagcagaagacggtgct

SEQ ID NO: 59106 - DNA, 25 bp, Artificial
  probe
  misc_feature (1)..(25): SEQ ID NO: 171; WAN024AM5_at; Start 30; Stop 54
gcttacctttttcaagctataatga

SEQ ID NO: 59107 - DNA, 25 bp, Artificial
  probe
  misc_feature (1)..(25): SEQ ID NO: 171; WAN024AM5_at; Start 55; Stop 79
tacccaagccaatccagaggctttt

SEQ ID NO: 59108 - DNA, 25 bp, Artificial
  probe
  misc_feature (1)..(25): SEQ ID NO: 171; WAN024AM5_at; Start 24; Stop 48
gacggtgcttacctttttcaagcta

SEQ ID NO: 59109 - DNA, 25 bp, Artificial
  probe
  misc_feature (1)..(25): SEQ ID NO: 171; WAN024AM5_at; Start 4; Stop 28
ttatgaaaaggtaagcagaagacgg

SEQ ID NO: 59110 - DNA, 25 bp, Artificial
  probe
  misc_feature (1)..(25): SEQ ID NO: 171; WAN024AM5_at; Start 42; Stop 66
caagctataatgatacccaagccaa

SEQ ID NO: 59111 - DNA, 25 bp, Artificial
  probe
  misc_feature (1)..(25): SEQ ID NO: 171; WAN024AM5_at; Start 68; Stop 92
ccagaggcttttctttgagaatcgg

SEQ ID NO: 59112 - DNA, 25 bp, Artificial
  probe
  misc_feature (1)..(25): SEQ ID NO: 171; WAN024AM5_at; Start 50; Stop 74
aatgatacccaagccaatccagagg

SEQ ID NO: 59113 - DNA, 25 bp, Artificial
  probe
  misc_feature (1)..(25): SEQ ID NO: 171; WAN024AM5_at; Start 27; Stop 51
ggtgcttacctttttcaagctataa

SEQ ID NO: 59114 - DNA, 25 bp, Artificial
  probe
  misc_feature (1)..(25): SEQ ID NO: 171; WAN024AM5_at; Start 26; Stop 50
cggtgcttacctttttcaagctata

SEQ ID NO: 59115 - DNA, 25 bp, Artificial
  probe
  misc_feature (1)..(25): SEQ ID NO: 171; WAN024AM5_at; Start 41; Stop 65
tcaagctataatgatacccaagcca

SEQ ID NO: 59116 - DNA, 25 bp, Artificial
  probe
  misc_feature (1)..(25): SEQ ID NO: 171; WAN024AM5_at; Start 70; Stop 94
agaggcttttctttgagaatcgggt

SEQ ID NO: 59117 - DNA, 25 bp, Artificial
  probe
  misc_feature (1)..(25): SEQ ID NO: 171; WAN024AM5_at; Start 2; Stop 26
aattatgaaaaggtaagcagaagac

SEQ ID NO: 59118 - DNA, 25 bp, Artificial
  probe
  misc_feature (1)..(25): SEQ ID NO: 171; WAN024AM5_at; Start 49; Stop 73
taatgatacccaagccaatccagag

SEQ ID NO: 59119 - DNA, 25 bp, Artificial
  probe
  misc_feature (1)..(25): SEQ ID NO: 171; WAN024AM5_at; Start 67; Stop 91
tccagaggcttttctttgagaatcg

SEQ ID NO: 59120 - DNA, 25 bp, Artificial
  probe
  misc_feature (1)..(25): SEQ ID NO: 100; WAN024AM6_at; Start 5; Stop 29
ttatcctcctcaacaaacagacttc

SEQ ID NO: 59121 - DNA, 25 bp, Artificial
  probe
  misc_feature (1)..(25): SEQ ID NO: 100; WAN024AM6_at; Start 26; Stop 50
cttcctacacgtcattctttagttc

SEQ ID NO: 59122 - DNA, 25 bp, Artificial
  probe
  misc_feature (1)..(25): SEQ ID NO: 100; WAN024AM6_at; Start 34; Stop 58
acgtcattctttagttctagccttt

SEQ ID NO: 59123 - DNA, 25 bp, Artificial
  probe
  misc_feature (1)..(25): SEQ ID NO: 100; WAN024AM6_at; Start 24; Stop 48
gacttcctacacgtcattctttagt

SEQ ID NO: 59124 - DNA, 25 bp, Artificial
  probe
  misc_feature (1)..(25): SEQ ID NO: 100; WAN024AM6_at; Start 17; Stop 41
acaaacagacttcctacacgtcatt

SEQ ID NO: 59125 - DNA, 25 bp, Artificial
  probe
  misc_feature (1)..(25): SEQ ID NO: 100; WAN024AM6_at; Start 4; Stop 28
attatcctcctcaacaaacagactt

SEQ ID NO: 59126 - DNA, 25 bp, Artificial
  probe
  misc_feature (1)..(25): SEQ ID NO: 100; WAN024AM6_at; Start 20; Stop 44
aacagacttcctacacgtcattctt

SEQ ID NO: 59127 - DNA, 25 bp, Artificial
  probe
  misc_feature (1)..(25): SEQ ID NO: 100; WAN024AM6_at; Start 35; Stop 59
cgtcattctttagttctagcctttc

SEQ ID NO: 59128 - DNA, 25 bp, Artificial
  probe
  misc_feature (1)..(25): SEQ ID NO: 100; WAN024AM6_at; Start 7; Stop 31
atcctcctcaacaaacagacttcct

SEQ ID NO: 59129 - DNA, 25 bp, Artificial
  probe
  misc_feature (1)..(25): SEQ ID NO: 100; WAN024AM6_at; Start 29; Stop 53
cctacacgtcattctttagttctag

SEQ ID NO: 59130 - DNA, 25 bp, Artificial
  probe
  misc_feature (1)..(25): SEQ ID NO: 100; WAN024AM6_at; Start 8; Stop 32
tcctcctcaacaaacagacttccta

SEQ ID NO: 59131 - DNA, 25 bp, Artificial
  probe
  misc_feature (1)..(25): SEQ ID NO: 100; WAN024AM6_at; Start 1; Stop 25
aaaattatcctcctcaacaaacaga

SEQ ID NO: 59132 - DNA, 25 bp, Artificial
  probe
  misc_feature (1)..(25): SEQ ID NO: 100; WAN024AM6_at; Start 30; Stop 54
ctacacgtcattctttagttctagc

SEQ ID NO: 59133 - DNA, 25 bp, Artificial
  probe
  misc_feature (1)..(25): SEQ ID NO: 100; WAN024AM6_at; Start 2; Stop 26
aaattatcctcctcaacaaacagac

SEQ ID NO: 59134 - DNA, 25 bp, Artificial
  probe
  misc_feature (1)..(25): SEQ ID NO: 100; WAN024AM6_at; Start 38; Stop 62
cattctttagttctagcctttccaa

SEQ ID NO: 59135 - DNA, 25 bp, Artificial
  probe
  misc_feature (1)..(25): SEQ ID NO: 100; WAN024AM6_at; Start 23; Stop 47
agacttcctacacgtcattctttag

SEQ ID NO: 59136 - DNA, 25 bp, Artificial
  probe
  misc_feature (1)..(25): SEQ ID NO: 100; WAN024AM6_at; Start 21; Stop 45
acagacttcctacacgtcattcttt

SEQ ID NO: 59137 - DNA, 25 bp, Artificial
  probe
  misc_feature (1)..(25): SEQ ID NO: 100; WAN024AM6_at; Start 16; Stop 40
aacaaacagacttcctacacgtcat

SEQ ID NO: 59138 - DNA, 25 bp, Artificial
  probe
  misc_feature (1)..(25): SEQ ID NO: 100; WAN024AM6_at; Start 13; Stop 37
ctcaacaaacagacttcctacacgt

SEQ ID NO: 59139 - DNA, 25 bp, Artificial
  probe
  misc_feature (1)..(25): SEQ ID NO: 100; WAN024AM6_at; Start 22; Stop 46
cagacttcctacacgtcattcttta

SEQ ID NO: 59140 - DNA, 25 bp, Artificial
  probe
  misc_feature (1)..(25): SEQ ID NO: 100; WAN024AM6_at; Start 6; Stop 30
tatcctcctcaacaaacagacttcc

SEQ ID NO: 59141 - DNA, 25 bp, Artificial
  probe
  misc_feature (1)..(25): SEQ ID NO: 100; WAN024AM6_at; Start 27; Stop 51
ttcctacacgtcattctttagttct

SEQ ID NO: 59142 - DNA, 25 bp, Artificial
  probe
  misc_feature (1)..(25): SEQ ID NO: 100; WAN024AM6_at; Start 18; Stop 42
caaacagacttcctacacgtcattc

SEQ ID NO: 59143 - DNA, 25 bp, Artificial
  probe
  misc_feature (1)..(25): SEQ ID NO: 100; WAN024AM6_at; Start 37; Stop 61
tcattctttagttctagcctttcca

SEQ ID NO: 59144 - DNA, 25 bp, Artificial
  probe
  misc_feature (1)..(25): SEQ ID NO: 100; WAN024AM6_at; Start 33; Stop 57
cacgtcattctttagttctagcctt

SEQ ID NO: 59145 - DNA, 25 bp, Artificial
  probe
  misc_feature (1)..(25): SEQ ID NO: 100; WAN024AM6_at; Start 14; Stop 38
tcaacaaacagacttcctacacgtc

SEQ ID NO: 59146 - DNA, 25 bp, Artificial
  probe
  misc_feature (1)..(25): SEQ ID NO: 100; WAN024AM6_at; Start 3; Stop 27
aattatcctcctcaacaaacagact

SEQ ID NO: 59147 - DNA, 25 bp, Artificial
  probe
  misc_feature (1)..(25): SEQ ID NO: 100; WAN024AM6_at; Start 32; Stop 56
acacgtcattctttagttctagcct

SEQ ID NO: 59148 - DNA, 25 bp, Artificial
  probe
  misc_feature (1)..(25): SEQ ID NO: 100; WAN024AM6_at; Start 36; Stop 60
gtcattctttagttctagcctttcc

SEQ ID NO: 59149 - DNA, 25 bp, Artificial
  probe
  misc_feature (1)..(25): SEQ ID NO: 100; WAN024AM6_at; Start 25; Stop 49
acttcctacacgtcattctttagtt

SEQ ID NO: 59150 - DNA, 25 bp, Artificial
  probe
  misc_feature (1)..(25): SEQ ID NO: 100; WAN024AM6_at; Start 31; Stop 55
tacacgtcattctttagttctagcc

SEQ ID NO: 59151 - DNA, 25 bp, Artificial
  probe
  misc_feature (1)..(25): SEQ ID NO: 100; WAN024AM6_at; Start 15; Stop 39
caacaaacagacttcctacacgtca

SEQ ID NO: 59152 - DNA, 25 bp, Artificial
  probe
  misc_feature (1)..(25): SEQ ID NO: 100; WAN024AM6_at; Start 28; Stop 52
tcctacacgtcattctttagttcta

SEQ ID NO: 59153 - DNA, 25 bp, Artificial
  probe
  misc_feature (1)..(25): SEQ ID NO: 100; WAN024AM6_at; Start 19; Stop 43
aaacagacttcctacacgtcattct

SEQ ID NO: 59154 - DNA, 25 bp, Artificial
  probe
  misc_feature (1)..(25): SEQ ID NO: 97; WAN024AM7_at; Start 49; Stop 73
agtctgtttgttgaggaggataatt

SEQ ID NO: 59155 - DNA, 25 bp, Artificial
  probe
  misc_feature (1)..(25): SEQ ID NO: 97; WAN024AM7_at; Start 23; Stop 47
ctagaactaaagaatgacgtgtagg

SEQ ID NO: 59156 - DNA, 25 bp, Artificial
  probe
  misc_feature (1)..(25): SEQ ID NO: 97; WAN024AM7_at; Start 47; Stop 71
gaagtctgtttgttgaggaggataa

SEQ ID NO: 59157 - DNA, 25 bp, Artificial
  probe
  misc_feature (1)..(25): SEQ ID NO: 97; WAN024AM7_at; Start 24; Stop 48
tagaactaaagaatgacgtgtagga

SEQ ID NO: 59158 - DNA, 25 bp, Artificial
  probe
  misc_feature (1)..(25): SEQ ID NO: 97; WAN024AM7_at; Start 22; Stop 46
gctagaactaaagaatgacgtgtag

SEQ ID NO: 59159 - DNA, 25 bp, Artificial
  probe
  misc_feature (1)..(25): SEQ ID NO: 97; WAN024AM7_at; Start 20; Stop 44
aggctagaactaaagaatgacgtgt

SEQ ID NO: 59160 - DNA, 25 bp, Artificial
  probe
  misc_feature (1)..(25): SEQ ID NO: 97; WAN024AM7_at; Start 26; Stop 50
gaactaaagaatgacgtgtaggaag

SEQ ID NO: 59161 - DNA, 25 bp, Artificial
  probe
  misc_feature (1)..(25): SEQ ID NO: 97; WAN024AM7_at; Start 18; Stop 42
aaaggctagaactaaagaatgacgt

SEQ ID NO: 59162 - DNA, 25 bp, Artificial
  probe
  misc_feature (1)..(25): SEQ ID NO: 97; WAN024AM7_at; Start 40; Stop 64
cgtgtaggaagtctgtttgttgagg

SEQ ID NO: 59163 - DNA, 25 bp, Artificial
  probe
  misc_feature (1)..(25): SEQ ID NO: 97; WAN024AM7_at; Start 32; Stop 56
aagaatgacgtgtaggaagtctgtt

SEQ ID NO: 59164 - DNA, 25 bp, Artificial
  probe
  misc_feature (1)..(25): SEQ ID NO: 97; WAN024AM7_at; Start 34; Stop 58
gaatgacgtgtaggaagtctgtttg

SEQ ID NO: 59165 - DNA, 25 bp, Artificial
  probe
  misc_feature (1)..(25): SEQ ID NO: 97; WAN024AM7_at; Start 50; Stop 74
gtctgtttgttgaggaggataattt

SEQ ID NO: 59166 - DNA, 25 bp, Artificial
  probe
  misc_feature (1)..(25): SEQ ID NO: 97; WAN024AM7_at; Start 38; Stop 62
gacgtgtaggaagtctgtttgttga

SEQ ID NO: 59167 - DNA, 25 bp, Artificial
  probe
  misc_feature (1)..(25): SEQ ID NO: 97; WAN024AM7_at; Start 25; Stop 49
agaactaaagaatgacgtgtaggaa

SEQ ID NO: 59168 - DNA, 25 bp, Artificial
  probe
  misc_feature (1)..(25): SEQ ID NO: 97; WAN024AM7_at; Start 39; Stop 63
acgtgtaggaagtctgtttgttgag

SEQ ID NO: 59169 - DNA, 25 bp, Artificial
  probe
  misc_feature (1)..(25): SEQ ID NO: 97; WAN024AM7_at; Start 14; Stop 38
ttggaaaggctagaactaaagaatg

SEQ ID NO: 59170 - DNA, 25 bp, Artificial
  probe
  misc_feature (1)..(25): SEQ ID NO: 97; WAN024AM7_at; Start 17; Stop 41
gaaaggctagaactaaagaatgacg

SEQ ID NO: 59171 - DNA, 25 bp, Artificial
  probe
  misc_feature (1)..(25): SEQ ID NO: 97; WAN024AM7_at; Start 19; Stop 43
aaggctagaactaaagaatgacgtg

SEQ ID NO: 59172 - DNA, 25 bp, Artificial
  probe
  misc_feature (1)..(25): SEQ ID NO: 97; WAN024AM7_at; Start 33; Stop 57
agaatgacgtgtaggaagtctgttt

SEQ ID NO: 59173 - DNA, 25 bp, Artificial
  probe
  misc_feature (1)..(25): SEQ ID NO: 97; WAN024AM7_at; Start 37; Stop 61
tgacgtgtaggaagtctgtttgttg

SEQ ID NO: 59174 - DNA, 25 bp, Artificial
  probe
  misc_feature (1)..(25): SEQ ID NO: 97; WAN024AM7_at; Start 30; Stop 54
taaagaatgacgtgtaggaagtctg

SEQ ID NO: 59175 - DNA, 25 bp, Artificial
  probe
  misc_feature (1)..(25): SEQ ID NO: 97; WAN024AM7_at; Start 21; Stop 45
ggctagaactaaagaatgacgtgta

SEQ ID NO: 59176 - DNA, 25 bp, Artificial
  probe
  misc_feature (1)..(25): SEQ ID NO: 97; WAN024AM7_at; Start 51; Stop 75
tctgtttgttgaggaggataatttt

SEQ ID NO: 59177 - DNA, 25 bp, Artificial
  probe
  misc_feature (1)..(25): SEQ ID NO: 97; WAN024AM7_at; Start 31; Stop 55
aaagaatgacgtgtaggaagtctgt

SEQ ID NO: 59178 - DNA, 25 bp, Artificial
  probe
  misc_feature (1)..(25): SEQ ID NO: 97; WAN024AM7_at; Start 29; Stop 53
ctaaagaatgacgtgtaggaagtct

SEQ ID NO: 59179 - DNA, 25 bp, Artificial
  probe
  misc_feature (1)..(25): SEQ ID NO: 97; WAN024AM7_at; Start 28; Stop 52
actaaagaatgacgtgtaggaagtc

SEQ ID NO: 59180 - DNA, 25 bp, Artificial
  probe
  misc_feature (1)..(25): SEQ ID NO: 97; WAN024AM7_at; Start 36; Stop 60
atgacgtgtaggaagtctgtttgtt

SEQ ID NO: 59181 - DNA, 25 bp, Artificial
  probe
  misc_feature (1)..(25): SEQ ID NO: 97; WAN024AM7_at; Start 16; Stop 40
ggaaaggctagaactaaagaatgac

SEQ ID NO: 59182 - DNA, 25 bp, Artificial
  probe
  misc_feature (1)..(25): SEQ ID NO: 97; WAN024AM7_at; Start 15; Stop 39
tggaaaggctagaactaaagaatga

SEQ ID NO: 59183 - DNA, 25 bp, Artificial
  probe
  misc_feature (1)..(25): SEQ ID NO: 97; WAN024AM7_at; Start 42; Stop 66
tgtaggaagtctgtttgttgaggag

SEQ ID NO: 59184 - DNA, 25 bp, Artificial
  probe
  misc_feature (1)..(25): SEQ ID NO: 97; WAN024AM7_at; Start 35; Stop 59
aatgacgtgtaggaagtctgtttgt

SEQ ID NO: 59185 - DNA, 25 bp, Artificial
  probe
  misc_feature (1)..(25): SEQ ID NO: 97; WAN024AM7_at; Start 48; Stop 72
aagtctgtttgttgaggaggataat

SEQ ID NO: 59186 - DNA, 25 bp, Artificial
  probe
  misc_feature (1)..(25): SEQ ID NO: 97; WAN024AM7_at; Start 27; Stop 51
aactaaagaatgacgtgtaggaagt

SEQ ID NO: 59187 - DNA, 25 bp, Artificial
  probe
  misc_feature (1)..(25): SEQ ID NO: 97; WAN024AM7_at; Start 44; Stop 68
taggaagtctgtttgttgaggagga

SEQ ID NO: 59188 - DNA, 25 bp, Artificial
  probe
  misc_feature (1)..(25): SEQ ID NO: 5936; WAN024AM8_at; Start 10; Stop 34
aacactctataactatttattatct

SEQ ID NO: 59189 - DNA, 25 bp, Artificial
  probe
  misc_feature (1)..(25): SEQ ID NO: 5936; WAN024AM8_at; Start 7; Stop 31
gataacactctataactatttatta

SEQ ID NO: 59190 - DNA, 25 bp, Artificial
  probe
  misc_feature (1)..(25): SEQ ID NO: 5936; WAN024AM8_at; Start 24; Stop 48
atttattatcttatcaaaaaggaga

SEQ ID NO: 59191 - DNA, 25 bp, Artificial
  probe
  misc_feature (1)..(25): SEQ ID NO: 5936; WAN024AM8_at; Start 6; Stop 30
agataacactctataactatttatt

SEQ ID NO: 59192 - DNA, 25 bp, Artificial
  probe
  misc_feature (1)..(25): SEQ ID NO: 5936; WAN024AM8_at; Start 2; Stop 26
tttcagataacactctataactatt

SEQ ID NO: 59193 - DNA, 25 bp, Artificial
  probe
  misc_feature (1)..(25): SEQ ID NO: 5936; WAN024AM8_at; Start 23; Stop 47
tatttattatcttatcaaaaaggag

SEQ ID NO: 59194 - DNA, 25 bp, Artificial
  probe
  misc_feature (1)..(25): SEQ ID NO: 5936; WAN024AM8_at; Start 9; Stop 33
taacactctataactatttattatc

SEQ ID NO: 59195 - DNA, 25 bp, Artificial
  probe
  misc_feature (1)..(25): SEQ ID NO: 5936; WAN024AM8_at; Start 27; Stop 51
tattatcttatcaaaaaggagaatc

SEQ ID NO: 59196 - DNA, 25 bp, Artificial
  probe
  misc_feature (1)..(25): SEQ ID NO: 5936; WAN024AM8_at; Start 31; Stop 55
atcttatcaaaaaggagaatcataa

SEQ ID NO: 59197 - DNA, 25 bp, Artificial
  probe
  misc_feature (1)..(25): SEQ ID NO: 5936; WAN024AM8_at; Start 4; Stop 28
tcagataacactctataactattta

SEQ ID NO: 59198 - DNA, 25 bp, Artificial
  probe
  misc_feature (1)..(25): SEQ ID NO: 5936; WAN024AM8_at; Start 1; Stop 25
ttttcagataacactctataactat

SEQ ID NO: 59199 - DNA, 25 bp, Artificial
  probe
  misc_feature (1)..(25): SEQ ID NO: 5936; WAN024AM8_at; Start 5; Stop 29
cagataacactctataactatttat

SEQ ID NO: 59200 - DNA, 25 bp, Artificial
  probe
  misc_feature (1)..(25): SEQ ID NO: 5936; WAN024AM8_at; Start 32; Stop 56
tcttatcaaaaaggagaatcataac

SEQ ID NO: 59201 - DNA, 25 bp, Artificial
  probe
  misc_feature (1)..(25): SEQ ID NO: 5936; WAN024AM8_at; Start 28; Stop 52
attatcttatcaaaaaggagaatca

SEQ ID NO: 59202 - DNA, 25 bp, Artificial
  probe
  misc_feature (1)..(25): SEQ ID NO: 5936; WAN024AM8_at; Start 21; Stop 45
actatttattatcttatcaaaaagg

SEQ ID NO: 59203 - DNA, 25 bp, Artificial
  probe
  misc_feature (1)..(25): SEQ ID NO: 5936; WAN024AM8_at; Start 30; Stop 54
tatcttatcaaaaaggagaatcata

SEQ ID NO: 59204 - DNA, 25 bp, Artificial
  probe
  misc_feature (1)..(25): SEQ ID NO: 5936; WAN024AM8_at; Start 25; Stop 49
tttattatcttatcaaaaaggagaa

SEQ ID NO: 59205 - DNA, 25 bp, Artificial
  probe
  misc_feature (1)..(25): SEQ ID NO: 5936; WAN024AM8_at; Start 22; Stop 46
ctatttattatcttatcaaaaagga

SEQ ID NO: 59206 - DNA, 25 bp, Artificial
  probe
  misc_feature (1)..(25): SEQ ID NO: 5936; WAN024AM8_at; Start 29; Stop 53
ttatcttatcaaaaaggagaatcat

SEQ ID NO: 59207 - DNA, 25 bp, Artificial
  probe
  misc_feature (1)..(25): SEQ ID NO: 5936; WAN024AM8_at; Start 3; Stop 27
ttcagataacactctataactattt

SEQ ID NO: 59208 - DNA, 25 bp, Artificial
  probe
  misc_feature (1)..(25): SEQ ID NO: 5936; WAN024AM8_at; Start 26; Stop 50
ttattatcttatcaaaaaggagaat

SEQ ID NO: 59209 - DNA, 25 bp, Artificial
  probe
  misc_feature (1)..(25): SEQ ID NO: 4344; WAN024AM9_at; Start 19; Stop 43
gataagataataaatagttatagag

SEQ ID NO: 59210 - DNA, 25 bp, Artificial
  probe
  misc_feature (1)..(25): SEQ ID NO: 4344; WAN024AM9_at; Start 9; Stop 33
tctcctttttgataagataataaat

SEQ ID NO: 59211 - DNA, 25 bp, Artificial
  probe
  misc_feature (1)..(25): SEQ ID NO: 4344; WAN024AM9_at; Start 21; Stop 45
taagataataaatagttatagagtg

SEQ ID NO: 59212 - DNA, 25 bp, Artificial
  probe
  misc_feature (1)..(25): SEQ ID NO: 4344; WAN024AM9_at; Start 29; Stop 53
taaatagttatagagtgttatctga

SEQ ID NO: 59213 - DNA, 25 bp, Artificial
  probe
  misc_feature (1)..(25): SEQ ID NO: 4344; WAN024AM9_at; Start 7; Stop 31
attctcctttttgataagataataa

SEQ ID NO: 59214 - DNA, 25 bp, Artificial
  probe
  misc_feature (1)..(25): SEQ ID NO: 4344; WAN024AM9_at; Start 2; Stop 26
ttatgattctcctttttgataagat

SEQ ID NO: 59215 - DNA, 25 bp, Artificial
  probe
  misc_feature (1)..(25): SEQ ID NO: 4344; WAN024AM9_at; Start 26; Stop 50
taataaatagttatagagtgttatc

SEQ ID NO: 59216 - DNA, 25 bp, Artificial
  probe
  misc_feature (1)..(25): SEQ ID NO: 4344; WAN024AM9_at; Start 11; Stop 35
tcctttttgataagataataaatag

SEQ ID NO: 59217 - DNA, 25 bp, Artificial
  probe
  misc_feature (1)..(25): SEQ ID NO: 4344; WAN024AM9_at; Start 5; Stop 29
tgattctcctttttgataagataat

SEQ ID NO: 59218 - DNA, 25 bp, Artificial
  probe
  misc_feature (1)..(25): SEQ ID NO: 4344; WAN024AM9_at; Start 8; Stop 32
ttctcctttttgataagataataaa

SEQ ID NO: 59219 - DNA, 25 bp, Artificial
  probe
  misc_feature (1)..(25): SEQ ID NO: 4344; WAN024AM9_at; Start 31; Stop 55
aatagttatagagtgttatctgaaa

SEQ ID NO: 59220 - DNA, 25 bp, Artificial
  probe
  misc_feature (1)..(25): SEQ ID NO: 4344; WAN024AM9_at; Start 27; Stop 51
aataaatagttatagagtgttatct

SEQ ID NO: 59221 - DNA, 25 bp, Artificial
  probe
  misc_feature (1)..(25): SEQ ID NO: 4344; WAN024AM9_at; Start 18; Stop 42
tgataagataataaatagttataga

SEQ ID NO: 59222 - DNA, 25 bp, Artificial
  probe
  misc_feature (1)..(25): SEQ ID NO: 4344; WAN024AM9_at; Start 30; Stop 54
aaatagttatagagtgttatctgaa

SEQ ID NO: 59223 - DNA, 25 bp, Artificial
  probe
  misc_feature (1)..(25): SEQ ID NO: 4344; WAN024AM9_at; Start 3; Stop 27
tatgattctcctttttgataagata

SEQ ID NO: 59224 - DNA, 25 bp, Artificial
  probe
  misc_feature (1)..(25): SEQ ID NO: 4344; WAN024AM9_at; Start 17; Stop 41
ttgataagataataaatagttatag

SEQ ID NO: 59225 - DNA, 25 bp, Artificial
  probe
  misc_feature (1)..(25): SEQ ID NO: 4344; WAN024AM9_at; Start 23; Stop 47
agataataaatagttatagagtgtt

SEQ ID NO: 59226 - DNA, 25 bp, Artificial
  probe
  misc_feature (1)..(25): SEQ ID NO: 4344; WAN024AM9_at; Start 24; Stop 48
gataataaatagttatagagtgtta

SEQ ID NO: 59227 - DNA, 25 bp, Artificial
  probe
  misc_feature (1)..(25): SEQ ID NO: 4344; WAN024AM9_at; Start 22; Stop 46
aagataataaatagttatagagtgt

SEQ ID NO: 59228 - DNA, 25 bp, Artificial
  probe
  misc_feature (1)..(25): SEQ ID NO: 4344; WAN024AM9_at; Start 6; Stop 30
gattctcctttttgataagataata

SEQ ID NO: 59229 - DNA, 25 bp, Artificial
  probe
  misc_feature (1)..(25): SEQ ID NO: 4344; WAN024AM9_at; Start 28; Stop 52
ataaatagttatagagtgttatctg

SEQ ID NO: 59230 - DNA, 25 bp, Artificial
  probe
  misc_feature (1)..(25): SEQ ID NO: 4344; WAN024AM9_at; Start 12; Stop 36
cctttttgataagataataaatagt

SEQ ID NO: 59231 - DNA, 25 bp, Artificial
  probe
  misc_feature (1)..(25): SEQ ID NO: 4344; WAN024AM9_at; Start 4; Stop 28
atgattctcctttttgataagataa

SEQ ID NO: 59232 - DNA, 25 bp, Artificial
  probe
  misc_feature (1)..(25): SEQ ID NO: 4344; WAN024AM9_at; Start 10; Stop 34
ctcctttttgataagataataaata

SEQ ID NO: 59233 - DNA, 25 bp, Artificial
  probe
  misc_feature (1)..(25): SEQ ID NO: 4344; WAN024AM9_at; Start 1; Stop 25
gttatgattctcctttttgataaga

SEQ ID NO: 59234 - DNA, 25 bp, Artificial
  probe
  misc_feature (1)..(25): SEQ ID NO: 4344; WAN024AM9_at; Start 32; Stop 56
atagttatagagtgttatctgaaaa

SEQ ID NO: 59235 - DNA, 25 bp, Artificial
  probe
  misc_feature (1)..(25): SEQ ID NO: 4344; WAN024AM9_at; Start 13; Stop 37
ctttttgataagataataaatagtt

SEQ ID NO: 59236 - DNA, 25 bp, Artificial
  probe
  misc_feature (1)..(25): SEQ ID NO: 4711; WAN024AMA_at; Start 145; Stop 169
gcgcaattcaagacatttcaatgac

SEQ ID NO: 59237 - DNA, 25 bp, Artificial
  probe
  misc_feature (1)..(25): SEQ ID NO: 4711; WAN024AMA_at; Start 127; Stop 151
tatcataaaattcactcagcgcaat

SEQ ID NO: 59238 - DNA, 25 bp, Artificial
  probe
  misc_feature (1)..(25): SEQ ID NO: 4711; WAN024AMA_at; Start 125; Stop 149
tttatcataaaattcactcagcgca

SEQ ID NO: 59239 - DNA, 25 bp, Artificial
  probe
  misc_feature (1)..(25): SEQ ID NO: 4711; WAN024AMA_at; Start 224; Stop 248
aaacacagttgccagaagtaagact

SEQ ID NO: 59240 - DNA, 25 bp, Artificial
  probe
  misc_feature (1)..(25): SEQ ID NO: 4711; WAN024AMA_at; Start 139; Stop 163
cactcagcgcaattcaagacatttc

SEQ ID NO: 59241 - DNA, 25 bp, Artificial
  probe
  misc_feature (1)..(25): SEQ ID NO: 4711; WAN024AMA_at; Start 227; Stop 251
cacagttgccagaagtaagactggc

SEQ ID NO: 59242 - DNA, 25 bp, Artificial
  probe
  misc_feature (1)..(25): SEQ ID NO: 4711; WAN024AMA_at; Start 132; Stop 156
taaaattcactcagcgcaattcaag

SEQ ID NO: 59243 - DNA, 25 bp, Artificial
  probe
  misc_feature (1)..(25): SEQ ID NO: 4711; WAN024AMA_at; Start 105; Stop 129
catgatgagcttacaactattttat

SEQ ID NO: 59244 - DNA, 25 bp, Artificial
  probe
  misc_feature (1)..(25): SEQ ID NO: 4711; WAN024AMA_at; Start 218; Stop 242
gtatcaaaacacagttgccagaagt

SEQ ID NO: 59245 - DNA, 25 bp, Artificial
  probe
  misc_feature (1)..(25): SEQ ID NO: 4711; WAN024AMA_at; Start 236; Stop 260
cagaagtaagactggcacccagatt

SEQ ID NO: 59246 - DNA, 25 bp, Artificial
  probe
  misc_feature (1)..(25): SEQ ID NO: 4711; WAN024AMA_at; Start 142; Stop 166
tcagcgcaattcaagacatttcaat

SEQ ID NO: 59247 - DNA, 25 bp, Artificial
  probe
  misc_feature (1)..(25): SEQ ID NO: 4711; WAN024AMA_at; Start 234; Stop 258
gccagaagtaagactggcacccaga

SEQ ID NO: 59248 - DNA, 25 bp, Artificial
  probe
  misc_feature (1)..(25): SEQ ID NO: 4711; WAN024AMA_at; Start 153; Stop 177
caagacatttcaatgacaattaaag

SEQ ID NO: 59249 - DNA, 25 bp, Artificial
  probe
  misc_feature (1)..(25): SEQ ID NO: 4711; WAN024AMA_at; Start 198; Stop 222
ttaaaagtgataaactaacagtatc

SEQ ID NO: 59250 - DNA, 25 bp, Artificial
  probe
  misc_feature (1)..(25): SEQ ID NO: 4711; WAN024AMA_at; Start 111; Stop 135
gagcttacaactattttatcataaa

SEQ ID NO: 59251 - DNA, 25 bp, Artificial
  probe
  misc_feature (1)..(25): SEQ ID NO: 4711; WAN024AMA_at; Start 241; Stop 265
gtaagactggcacccagattaaagg

SEQ ID NO: 59252 - DNA, 25 bp, Artificial
  probe
  misc_feature (1)..(25): SEQ ID NO: 4711; WAN024AMA_at; Start 213; Stop 237
taacagtatcaaaacacagttgcca

SEQ ID NO: 59253 - DNA, 25 bp, Artificial
  probe
  misc_feature (1)..(25): SEQ ID NO: 4711; WAN024AMA_at; Start 229; Stop 253
cagttgccagaagtaagactggcac

SEQ ID NO: 59254 - DNA, 25 bp, Artificial
  probe
  misc_feature (1)..(25): SEQ ID NO: 4711; WAN024AMA_at; Start 22; Stop 46
gaataacagaaaaggtctagcccaa

SEQ ID NO: 59255 - DNA, 25 bp, Artificial
  probe
  misc_feature (1)..(25): SEQ ID NO: 4711; WAN024AMA_at; Start 250; Stop 274
gcacccagattaaaggaggcattcc

SEQ ID NO: 59256 - DNA, 25 bp, Artificial
  probe
  misc_feature (1)..(25): SEQ ID NO: 4711; WAN024AMA_at; Start 24; Stop 48
ataacagaaaaggtctagcccaagc

SEQ ID NO: 59257 - DNA, 25 bp, Artificial
  probe
  misc_feature (1)..(25): SEQ ID NO: 4711; WAN024AMA_at; Start 137; Stop 161
ttcactcagcgcaattcaagacatt

SEQ ID NO: 59258 - DNA, 25 bp, Artificial
  probe
  misc_feature (1)..(25): SEQ ID NO: 4711; WAN024AMA_at; Start 251; Stop 275
cacccagattaaaggaggcattccc

SEQ ID NO: 59259 - DNA, 25 bp, Artificial
  probe
  misc_feature (1)..(25): SEQ ID NO: 4711; WAN024AMA_at; Start 8; Stop 32
tcctcctaagaaaagaataacagaa

SEQ ID NO: 59260 - DNA, 25 bp, Artificial
  probe
  misc_feature (1)..(25): SEQ ID NO: 4711; WAN024AMA_at; Start 247; Stop 271
ctggcacccagattaaaggaggcat

SEQ ID NO: 59261 - DNA, 25 bp, Artificial
  probe
  misc_feature (1)..(25): SEQ ID NO: 4711; WAN024AMA_at; Start 245; Stop 269
gactggcacccagattaaaggaggc

SEQ ID NO: 59262 - DNA, 25 bp, Artificial
  probe
  misc_feature (1)..(25): SEQ ID NO: 4711; WAN024AMA_at; Start 99; Stop 123
caacatcatgatgagcttacaacta

SEQ ID NO: 59263 - DNA, 25 bp, Artificial
  probe
  misc_feature (1)..(25): SEQ ID NO: 4711; WAN024AMA_at; Start 216; Stop 240
cagtatcaaaacacagttgccagaa

SEQ ID NO: 59264 - DNA, 25 bp, Artificial
  probe
  misc_feature (1)..(25): SEQ ID NO: 4711; WAN024AMA_at; Start 102; Stop 126
catcatgatgagcttacaactattt

SEQ ID NO: 59265 - DNA, 25 bp, Artificial
  probe
  misc_feature (1)..(25): SEQ ID NO: 4711; WAN024AMA_at; Start 6; Stop 30
tctcctcctaagaaaagaataacag

SEQ ID NO: 59266 - DNA, 25 bp, Artificial
  probe
  misc_feature (1)..(25): SEQ ID NO: 4711; WAN024AMA_at; Start 1; Stop 25
tggattctcctcctaagaaaagaat

SEQ ID NO: 59267 - DNA, 25 bp, Artificial
  probe
  misc_feature (1)..(25): SEQ ID NO: 4711; WAN024AMA_at; Start 50; Stop 74
cacccaatcctaaacagtctttgaa

SEQ ID NO: 59268 - DNA, 25 bp, Artificial
  probe
  misc_feature (1)..(25): SEQ ID NO: 4711; WAN024AMA_at; Start 221; Stop 245
tcaaaacacagttgccagaagtaag

SEQ ID NO: 59269 - DNA, 25 bp, Artificial
  probe
  misc_feature (1)..(25): SEQ ID NO: 4711; WAN024AMA_at; Start 158; Stop 182
catttcaatgacaattaaagatttg

SEQ ID NO: 59270 - DNA, 25 bp, Artificial
  probe
  misc_feature (1)..(25): SEQ ID NO: 3748; WAN024AMB_at; Start 31; Stop 55
cttacttctggcaactgtgttttga

SEQ ID NO: 59271 - DNA, 25 bp, Artificial
  probe
  misc_feature (1)..(25): SEQ ID NO: 3748; WAN024AMB_at; Start 11; Stop 35
cctttaatctgggtgccagtcttac

SEQ ID NO: 59272 - DNA, 25 bp, Artificial
  probe
  misc_feature (1)..(25): SEQ ID NO: 3748; WAN024AMB_at; Start 18; Stop 42
tctgggtgccagtcttacttctggc

SEQ ID NO: 59273 - DNA, 25 bp, Artificial
  probe
  misc_feature (1)..(25): SEQ ID NO: 3748; WAN024AMB_at; Start 107; Stop 131
gtcattgaaatgtcttgaattgcgc

SEQ ID NO: 59274 - DNA, 25 bp, Artificial
  probe
  misc_feature (1)..(25): SEQ ID NO: 3748; WAN024AMB_at; Start 7; Stop 31
gcctcctttaatctgggtgccagtc

SEQ ID NO: 59275 - DNA, 25 bp, Artificial
  probe
  misc_feature (1)..(25): SEQ ID NO: 3748; WAN024AMB_at; Start 41; Stop 65
gcaactgtgttttgatactgttagt

SEQ ID NO: 59276 - DNA, 25 bp, Artificial
  probe
  misc_feature (1)..(25): SEQ ID NO: 3748; WAN024AMB_at; Start 3; Stop 27
gaatgcctcctttaatctgggtgcc

SEQ ID NO: 59277 - DNA, 25 bp, Artificial
  probe
  misc_feature (1)..(25): SEQ ID NO: 3748; WAN024AMB_at; Start 5; Stop 29
atgcctcctttaatctgggtgccag

SEQ ID NO: 59278 - DNA, 25 bp, Artificial
  probe
  misc_feature (1)..(25): SEQ ID NO: 3748; WAN024AMB_at; Start 21; Stop 45
gggtgccagtcttacttctggcaac

SEQ ID NO: 59279 - DNA, 25 bp, Artificial
  probe
  misc_feature (1)..(25): SEQ ID NO: 3748; WAN024AMB_at; Start 251; Stop 275
attcttttcttaggaggagaatcca

SEQ ID NO: 59280 - DNA, 25 bp, Artificial
  probe
  misc_feature (1)..(25): SEQ ID NO: 3748; WAN024AMB_at; Start 128; Stop 152
gcgctgagtgaattttatgataaaa

SEQ ID NO: 59281 - DNA, 25 bp, Artificial
  probe
  misc_feature (1)..(25): SEQ ID NO: 3748; WAN024AMB_at; Start 202; Stop 226
ttcaaagactgtttaggattgggtg

SEQ ID NO: 59282 - DNA, 25 bp, Artificial
  probe
  misc_feature (1)..(25): SEQ ID NO: 3748; WAN024AMB_at; Start 25; Stop 49
gccagtcttacttctggcaactgtg

SEQ ID NO: 59283 - DNA, 25 bp, Artificial
  probe
  misc_feature (1)..(25): SEQ ID NO: 3748; WAN024AMB_at; Start 119; Stop 143
tcttgaattgcgctgagtgaatttt

SEQ ID NO: 59284 - DNA, 25 bp, Artificial
  probe
  misc_feature (1)..(25): SEQ ID NO: 3748; WAN024AMB_at; Start 153; Stop 177
tagttgtaagctcatcatgatgttg

SEQ ID NO: 59285 - DNA, 25 bp, Artificial
  probe
  misc_feature (1)..(25): SEQ ID NO: 3748; WAN024AMB_at; Start 54; Stop 78
gatactgttagtttatcacttttaa

SEQ ID NO: 59286 - DNA, 25 bp, Artificial
  probe
  misc_feature (1)..(25): SEQ ID NO: 3748; WAN024AMB_at; Start 37; Stop 61
tctggcaactgtgttttgatactgt

SEQ ID NO: 59287 - DNA, 25 bp, Artificial
  probe
  misc_feature (1)..(25): SEQ ID NO: 3748; WAN024AMB_at; Start 115; Stop 139
aatgtcttgaattgcgctgagtgaa

SEQ ID NO: 59288 - DNA, 25 bp, Artificial
  probe
  misc_feature (1)..(25): SEQ ID NO: 3748; WAN024AMB_at; Start 34; Stop 58
acttctggcaactgtgttttgatac

SEQ ID NO: 59289 - DNA, 25 bp, Artificial
  probe
  misc_feature (1)..(25): SEQ ID NO: 3748; WAN024AMB_at; Start 15; Stop 39
taatctgggtgccagtcttacttct

SEQ ID NO: 59290 - DNA, 25 bp, Artificial
  probe
  misc_feature (1)..(25): SEQ ID NO: 3748; WAN024AMB_at; Start 123; Stop 147
gaattgcgctgagtgaattttatga

SEQ ID NO: 59291 - DNA, 25 bp, Artificial
  probe
  misc_feature (1)..(25): SEQ ID NO: 3748; WAN024AMB_at; Start 250; Stop 274
tattcttttcttaggaggagaatcc

SEQ ID NO: 59292 - DNA, 25 bp, Artificial
  probe
  misc_feature (1)..(25): SEQ ID NO: 3748; WAN024AMB_at; Start 113; Stop 137
gaaatgtcttgaattgcgctgagtg

SEQ ID NO: 59293 - DNA, 25 bp, Artificial
  probe
  misc_feature (1)..(25): SEQ ID NO: 3748; WAN024AMB_at; Start 148; Stop 172
taaaatagttgtaagctcatcatga

SEQ ID NO: 59294 - DNA, 25 bp, Artificial
  probe
  misc_feature (1)..(25): SEQ ID NO: 3748; WAN024AMB_at; Start 150; Stop 174
aaatagttgtaagctcatcatgatg

SEQ ID NO: 59295 - DNA, 25 bp, Artificial
  probe
  misc_feature (1)..(25): SEQ ID NO: 3748; WAN024AMB_at; Start 231; Stop 255
tgggctagaccttttctgttattct

SEQ ID NO: 59296 - DNA, 25 bp, Artificial
  probe
  misc_feature (1)..(25): SEQ ID NO: 3748; WAN024AMB_at; Start 94; Stop 118
caaatctttaattgtcattgaaatg

SEQ ID NO: 59297 - DNA, 25 bp, Artificial
  probe
  misc_feature (1)..(25): SEQ ID NO: 3748; WAN024AMB_at; Start 228; Stop 252
gcttgggctagaccttttctgttat

SEQ ID NO: 59298 - DNA, 25 bp, Artificial
  probe
  misc_feature (1)..(25): SEQ ID NO: 3748; WAN024AMB_at; Start 141; Stop 165
tttatgataaaatagttgtaagctc

SEQ ID NO: 59299 - DNA, 25 bp, Artificial
  probe
  misc_feature (1)..(25): SEQ ID NO: 3748; WAN024AMB_at; Start 245; Stop 269
tctgttattcttttcttaggaggag

SEQ ID NO: 59300 - DNA, 25 bp, Artificial
  probe
  misc_feature (1)..(25): SEQ ID NO: 3748; WAN024AMB_at; Start 1; Stop 25
gggaatgcctcctttaatctgggtg

SEQ ID NO: 59301 - DNA, 25 bp, Artificial
  probe
  misc_feature (1)..(25): SEQ ID NO: 3748; WAN024AMB_at; Start 198; Stop 222
agttttcaaagactgtttaggattg

SEQ ID NO: 59302 - DNA, 25 bp, Artificial
  probe
  misc_feature (1)..(25): SEQ ID NO: 3748; WAN024AMB_at; Start 27; Stop 51
cagtcttacttctggcaactgtgtt

SEQ ID NO: 59303 - DNA, 25 bp, Artificial
  probe
  misc_feature (1)..(25): SEQ ID NO: 3748; WAN024AMB_at; Start 109; Stop 133
cattgaaatgtcttgaattgcgctg

SEQ ID NO: 59304 - DNA, 25 bp, Artificial
  probe
  misc_feature (1)..(25): SEQ ID NO: 3176; WAN024AMC_at; Start 14; Stop 38
ctggtataatgtagctatattatat

SEQ ID NO: 59305 - DNA, 25 bp, Artificial
  probe
  misc_feature (1)..(25): SEQ ID NO: 3176; WAN024AMC_at; Start 35; Stop 59
atatcaaaattcagtacagtagagg

SEQ ID NO: 59306 - DNA, 25 bp, Artificial
  probe
  misc_feature (1)..(25): SEQ ID NO: 3176; WAN024AMC_at; Start 19; Stop 43
ataatgtagctatattatatcaaaa

SEQ ID NO: 59307 - DNA, 25 bp, Artificial
  probe
  misc_feature (1)..(25): SEQ ID NO: 3176; WAN024AMC_at; Start 16; Stop 40
ggtataatgtagctatattatatca

SEQ ID NO: 59308 - DNA, 25 bp, Artificial
  probe
  misc_feature (1)..(25): SEQ ID NO: 3176; WAN024AMC_at; Start 11; Stop 35
aatctggtataatgtagctatatta

SEQ ID NO: 59309 - DNA, 25 bp, Artificial
  probe
  misc_feature (1)..(25): SEQ ID NO: 3176; WAN024AMC_at; Start 9; Stop 33
caaatctggtataatgtagctatat

SEQ ID NO: 59310 - DNA, 25 bp, Artificial
  probe
  misc_feature (1)..(25): SEQ ID NO: 3176; WAN024AMC_at; Start 39; Stop 63
caaaattcagtacagtagaggtaga

SEQ ID NO: 59311 - DNA, 25 bp, Artificial
  probe
  misc_feature (1)..(25): SEQ ID NO: 3176; WAN024AMC_at; Start 20; Stop 44
taatgtagctatattatatcaaaat

SEQ ID NO: 59312 - DNA, 25 bp, Artificial
  probe
  misc_feature (1)..(25): SEQ ID NO: 3176; WAN024AMC_at; Start 34; Stop 58
tatatcaaaattcagtacagtagag

SEQ ID NO: 59313 - DNA, 25 bp, Artificial
  probe
  misc_feature (1)..(25): SEQ ID NO: 3176; WAN024AMC_at; Start 21; Stop 45
aatgtagctatattatatcaaaatt

SEQ ID NO: 59314 - DNA, 25 bp, Artificial
  probe
  misc_feature (1)..(25): SEQ ID NO: 3176; WAN024AMC_at; Start 42; Stop 66
aattcagtacagtagaggtagattt

SEQ ID NO: 59315 - DNA, 25 bp, Artificial
  probe
  misc_feature (1)..(25): SEQ ID NO: 3176; WAN024AMC_at; Start 5; Stop 29
tctccaaatctggtataatgtagct

SEQ ID NO: 59316 - DNA, 25 bp, Artificial
  probe
  misc_feature (1)..(25): SEQ ID NO: 3176; WAN024AMC_at; Start 10; Stop 34
aaatctggtataatgtagctatatt

SEQ ID NO: 59317 - DNA, 25 bp, Artificial
  probe
  misc_feature (1)..(25): SEQ ID NO: 3176; WAN024AMC_at; Start 37; Stop 61
atcaaaattcagtacagtagaggta

SEQ ID NO: 59318 - DNA, 25 bp, Artificial
  probe
  misc_feature (1)..(25): SEQ ID NO: 3176; WAN024AMC_at; Start 17; Stop 41
gtataatgtagctatattatatcaa

SEQ ID NO: 59319 - DNA, 25 bp, Artificial
  probe
  misc_feature (1)..(25): SEQ ID NO: 3176; WAN024AMC_at; Start 36; Stop 60
tatcaaaattcagtacagtagaggt

SEQ ID NO: 59320 - DNA, 25 bp, Artificial
  probe
  misc_feature (1)..(25): SEQ ID NO: 3176; WAN024AMC_at; Start 18; Stop 42
tataatgtagctatattatatcaaa

SEQ ID NO: 59321 - DNA, 25 bp, Artificial
  probe
  misc_feature (1)..(25): SEQ ID NO: 3176; WAN024AMC_at; Start 2; Stop 26
ttttctccaaatctggtataatgta

SEQ ID NO: 59322 - DNA, 25 bp, Artificial
  probe
  misc_feature (1)..(25): SEQ ID NO: 3176; WAN024AMC_at; Start 40; Stop 64
aaaattcagtacagtagaggtagat

SEQ ID NO: 59323 - DNA, 25 bp, Artificial
  probe
  misc_feature (1)..(25): SEQ ID NO: 3176; WAN024AMC_at; Start 38; Stop 62
tcaaaattcagtacagtagaggtag

SEQ ID NO: 59324 - DNA, 25 bp, Artificial
  probe
  misc_feature (1)..(25): SEQ ID NO: 3176; WAN024AMC_at; Start 22; Stop 46
atgtagctatattatatcaaaattc

SEQ ID NO: 59325 - DNA, 25 bp, Artificial
  probe
  misc_feature (1)..(25): SEQ ID NO: 3176; WAN024AMC_at; Start 15; Stop 39
tggtataatgtagctatattatatc

SEQ ID NO: 59326 - DNA, 25 bp, Artificial
  probe
  misc_feature (1)..(25): SEQ ID NO: 3176; WAN024AMC_at; Start 43; Stop 67
attcagtacagtagaggtagatttt

SEQ ID NO: 59327 - DNA, 25 bp, Artificial
  probe
  misc_feature (1)..(25): SEQ ID NO: 3176; WAN024AMC_at; Start 7; Stop 31
tccaaatctggtataatgtagctat

SEQ ID NO: 59328 - DNA, 25 bp, Artificial
  probe
  misc_feature (1)..(25): SEQ ID NO: 3176; WAN024AMC_at; Start 33; Stop 57
ttatatcaaaattcagtacagtaga

SEQ ID NO: 59329 - DNA, 25 bp, Artificial
  probe
  misc_feature (1)..(25): SEQ ID NO: 3176; WAN024AMC_at; Start 3; Stop 27
tttctccaaatctggtataatgtag

SEQ ID NO: 59330 - DNA, 25 bp, Artificial
  probe
  misc_feature (1)..(25): SEQ ID NO: 3176; WAN024AMC_at; Start 12; Stop 36
atctggtataatgtagctatattat

SEQ ID NO: 59331 - DNA, 25 bp, Artificial
  probe
  misc_feature (1)..(25): SEQ ID NO: 3176; WAN024AMC_at; Start 41; Stop 65
aaattcagtacagtagaggtagatt

SEQ ID NO: 59332 - DNA, 25 bp, Artificial
  probe
  misc_feature (1)..(25): SEQ ID NO: 3176; WAN024AMC_at; Start 4; Stop 28
ttctccaaatctggtataatgtagc

SEQ ID NO: 59333 - DNA, 25 bp, Artificial
  probe
  misc_feature (1)..(25): SEQ ID NO: 3176; WAN024AMC_at; Start 1; Stop 25
attttctccaaatctggtataatgt

SEQ ID NO: 59334 - DNA, 25 bp, Artificial
  probe
  misc_feature (1)..(25): SEQ ID NO: 3176; WAN024AMC_at; Start 13; Stop 37
tctggtataatgtagctatattata

SEQ ID NO: 59335 - DNA, 25 bp, Artificial
  probe
  misc_feature (1)..(25): SEQ ID NO: 3176; WAN024AMC_at; Start 6; Stop 30
ctccaaatctggtataatgtagcta

SEQ ID NO: 59336 - DNA, 25 bp, Artificial
  probe
  misc_feature (1)..(25): SEQ ID NO: 3176; WAN024AMC_at; Start 8; Stop 32
ccaaatctggtataatgtagctata

SEQ ID NO: 59337 - DNA, 25 bp, Artificial
  probe
  misc_feature (1)..(25): SEQ ID NO: 94; WAN024AMD_at; Start 41; Stop 65
ctacattataccagatttggagaaa

SEQ ID NO: 59338 - DNA, 25 bp, Artificial
  probe
  misc_feature (1)..(25): SEQ ID NO: 94; WAN024AMD_at; Start 39; Stop 63
agctacattataccagatttggaga

SEQ ID NO: 59339 - DNA, 25 bp, Artificial
  probe
  misc_feature (1)..(25): SEQ ID NO: 94; WAN024AMD_at; Start 32; Stop 56
ataatatagctacattataccagat

SEQ ID NO: 59340 - DNA, 25 bp, Artificial
  probe
  misc_feature (1)..(25): SEQ ID NO: 94; WAN024AMD_at; Start 4; Stop 28
atctacctctactgtactgaatttt

SEQ ID NO: 59341 - DNA, 25 bp, Artificial
  probe
  misc_feature (1)..(25): SEQ ID NO: 94; WAN024AMD_at; Start 28; Stop 52
tgatataatatagctacattatacc

SEQ ID NO: 59342 - DNA, 25 bp, Artificial
  probe
  misc_feature (1)..(25): SEQ ID NO: 94; WAN024AMD_at; Start 11; Stop 35
tctactgtactgaattttgatataa

SEQ ID NO: 59343 - DNA, 25 bp, Artificial
  probe
  misc_feature (1)..(25): SEQ ID NO: 94; WAN024AMD_at; Start 31; Stop 55
tataatatagctacattataccaga

SEQ ID NO: 59344 - DNA, 25 bp, Artificial
  probe
  misc_feature (1)..(25): SEQ ID NO: 94; WAN024AMD_at; Start 37; Stop 61
atagctacattataccagatttgga

SEQ ID NO: 59345 - DNA, 25 bp, Artificial
  probe
  misc_feature (1)..(25): SEQ ID NO: 94; WAN024AMD_at; Start 25; Stop 49
ttttgatataatatagctacattat

SEQ ID NO: 59346 - DNA, 25 bp, Artificial
  probe
  misc_feature (1)..(25): SEQ ID NO: 94; WAN024AMD_at; Start 2; Stop 26
aaatctacctctactgtactgaatt

SEQ ID NO: 59347 - DNA, 25 bp, Artificial
  probe
  misc_feature (1)..(25): SEQ ID NO: 94; WAN024AMD_at; Start 6; Stop 30
ctacctctactgtactgaattttga

SEQ ID NO: 59348 - DNA, 25 bp, Artificial
  probe
  misc_feature (1)..(25): SEQ ID NO: 94; WAN024AMD_at; Start 22; Stop 46
gaattttgatataatatagctacat

SEQ ID NO: 59349 - DNA, 25 bp, Artificial
  probe
  misc_feature (1)..(25): SEQ ID NO: 94; WAN024AMD_at; Start 42; Stop 66
tacattataccagatttggagaaaa

SEQ ID NO: 59350 - DNA, 25 bp, Artificial
  probe
  misc_feature (1)..(25): SEQ ID NO: 94; WAN024AMD_at; Start 35; Stop 59
atatagctacattataccagatttg

SEQ ID NO: 59351 - DNA, 25 bp, Artificial
  probe
  misc_feature (1)..(25): SEQ ID NO: 94; WAN024AMD_at; Start 43; Stop 67
acattataccagatttggagaaaat

SEQ ID NO: 59352 - DNA, 25 bp, Artificial
  probe
  misc_feature (1)..(25): SEQ ID NO: 94; WAN024AMD_at; Start 10; Stop 34
ctctactgtactgaattttgatata

SEQ ID NO: 59353 - DNA, 25 bp, Artificial
  probe
  misc_feature (1)..(25): SEQ ID NO: 94; WAN024AMD_at; Start 3; Stop 27
aatctacctctactgtactgaattt

SEQ ID NO: 59354 - DNA, 25 bp, Artificial
  probe
  misc_feature (1)..(25): SEQ ID NO: 94; WAN024AMD_at; Start 24; Stop 48
attttgatataatatagctacatta

SEQ ID NO: 59355 - DNA, 25 bp, Artificial
  probe
  misc_feature (1)..(25): SEQ ID NO: 94; WAN024AMD_at; Start 7; Stop 31
tacctctactgtactgaattttgat

SEQ ID NO: 59356 - DNA, 25 bp, Artificial
  probe
  misc_feature (1)..(25): SEQ ID NO: 94; WAN024AMD_at; Start 9; Stop 33
cctctactgtactgaattttgatat

SEQ ID NO: 59357 - DNA, 25 bp, Artificial
  probe
  misc_feature (1)..(25): SEQ ID NO: 94; WAN024AMD_at; Start 36; Stop 60
tatagctacattataccagatttgg

SEQ ID NO: 59358 - DNA, 25 bp, Artificial
  probe
  misc_feature (1)..(25): SEQ ID NO: 94; WAN024AMD_at; Start 33; Stop 57
taatatagctacattataccagatt

SEQ ID NO: 59359 - DNA, 25 bp, Artificial
  probe
  misc_feature (1)..(25): SEQ ID NO: 94; WAN024AMD_at; Start 40; Stop 64
gctacattataccagatttggagaa

SEQ ID NO: 59360 - DNA, 25 bp, Artificial
  probe
  misc_feature (1)..(25): SEQ ID NO: 94; WAN024AMD_at; Start 27; Stop 51
ttgatataatatagctacattatac

SEQ ID NO: 59361 - DNA, 25 bp, Artificial
  probe
  misc_feature (1)..(25): SEQ ID NO: 94; WAN024AMD_at; Start 5; Stop 29
tctacctctactgtactgaattttg

SEQ ID NO: 59362 - DNA, 25 bp, Artificial
  probe
  misc_feature (1)..(25): SEQ ID NO: 94; WAN024AMD_at; Start 38; Stop 62
tagctacattataccagatttggag

SEQ ID NO: 59363 - DNA, 25 bp, Artificial
  probe
  misc_feature (1)..(25): SEQ ID NO: 94; WAN024AMD_at; Start 8; Stop 32
acctctactgtactgaattttgata

SEQ ID NO: 59364 - DNA, 25 bp, Artificial
  probe
  misc_feature (1)..(25): SEQ ID NO: 94; WAN024AMD_at; Start 34; Stop 58
aatatagctacattataccagattt

SEQ ID NO: 59365 - DNA, 25 bp, Artificial
  probe
  misc_feature (1)..(25): SEQ ID NO: 94; WAN024AMD_at; Start 30; Stop 54
atataatatagctacattataccag

SEQ ID NO: 59366 - DNA, 25 bp, Artificial
  probe
  misc_feature (1)..(25): SEQ ID NO: 94; WAN024AMD_at; Start 23; Stop 47
aattttgatataatatagctacatt

SEQ ID NO: 59367 - DNA, 25 bp, Artificial
  probe
  misc_feature (1)..(25): SEQ ID NO: 94; WAN024AMD_at; Start 29; Stop 53
gatataatatagctacattatacca

SEQ ID NO: 59368 - DNA, 25 bp, Artificial
  probe
  misc_feature (1)..(25): SEQ ID NO: 94; WAN024AMD_at; Start 1; Stop 25
aaaatctacctctactgtactgaat

SEQ ID NO: 59369 - DNA, 25 bp, Artificial
  probe
  misc_feature (1)..(25): SEQ ID NO: 74; WAN024AME_at; Start 56; Stop 80
taaaccaatctgtttgaattgtcaa

SEQ ID NO: 59370 - DNA, 25 bp, Artificial
  probe
  misc_feature (1)..(25): SEQ ID NO: 74; WAN024AME_at; Start 165; Stop 189
gctctttaaattcggaatataggac

SEQ ID NO: 59371 - DNA, 25 bp, Artificial
  probe
  misc_feature (1)..(25): SEQ ID NO: 74; WAN024AME_at; Start 160; Stop 184
caaacgctctttaaattcggaatat

SEQ ID NO: 59372 - DNA, 25 bp, Artificial
  probe
  misc_feature (1)..(25): SEQ ID NO: 74; WAN024AME_at; Start 159; Stop 183
tcaaacgctctttaaattcggaata

SEQ ID NO: 59373 - DNA, 25 bp, Artificial
  probe
  misc_feature (1)..(25): SEQ ID NO: 74; WAN024AME_at; Start 59; Stop 83
accaatctgtttgaattgtcaatag

SEQ ID NO: 59374 - DNA, 25 bp, Artificial
  probe
  misc_feature (1)..(25): SEQ ID NO: 74; WAN024AME_at; Start 83; Stop 107
gaaattgtcgggatatttactgcat

SEQ ID NO: 59375 - DNA, 25 bp, Artificial
  probe
  misc_feature (1)..(25): SEQ ID NO: 74; WAN024AME_at; Start 149; Stop 173
tagacccatttcaaacgctctttaa

SEQ ID NO: 59376 - DNA, 25 bp, Artificial
  probe
  misc_feature (1)..(25): SEQ ID NO: 74; WAN024AME_at; Start 24; Stop 48
gtttgcgctttcatttgttgttata

SEQ ID NO: 59377 - DNA, 25 bp, Artificial
  probe
  misc_feature (1)..(25): SEQ ID NO: 74; WAN024AME_at; Start 162; Stop 186
aacgctctttaaattcggaatatag

SEQ ID NO: 59378 - DNA, 25 bp, Artificial
  probe
  misc_feature (1)..(25): SEQ ID NO: 74; WAN024AME_at; Start 78; Stop 102
caatagaaattgtcgggatatttac

SEQ ID NO: 59379 - DNA, 25 bp, Artificial
  probe
  misc_feature (1)..(25): SEQ ID NO: 74; WAN024AME_at; Start 70; Stop 94
tgaattgtcaatagaaattgtcggg

SEQ ID NO: 59380 - DNA, 25 bp, Artificial
  probe
  misc_feature (1)..(25): SEQ ID NO: 74; WAN024AME_at; Start 19; Stop 43
cgaaagtttgcgctttcatttgttg

SEQ ID NO: 59381 - DNA, 25 bp, Artificial
  probe
  misc_feature (1)..(25): SEQ ID NO: 74; WAN024AME_at; Start 143; Stop 167
catttttagacccatttcaaacgct

SEQ ID NO: 59382 - DNA, 25 bp, Artificial
  probe
  misc_feature (1)..(25): SEQ ID NO: 74; WAN024AME_at; Start 75; Stop 99
tgtcaatagaaattgtcgggatatt

SEQ ID NO: 59383 - DNA, 25 bp, Artificial
  probe
  misc_feature (1)..(25): SEQ ID NO: 74; WAN024AME_at; Start 123; Stop 147
cacattcaattagtttcaaacattt

SEQ ID NO: 59384 - DNA, 25 bp, Artificial
  probe
  misc_feature (1)..(25): SEQ ID NO: 74; WAN024AME_at; Start 100; Stop 124
tactgcatttttactattatacaca

SEQ ID NO: 59385 - DNA, 25 bp, Artificial
  probe
  misc_feature (1)..(25): SEQ ID NO: 74; WAN024AME_at; Start 91; Stop 115
cgggatatttactgcatttttacta

SEQ ID NO: 59386 - DNA, 25 bp, Artificial
  probe
  misc_feature (1)..(25): SEQ ID NO: 74; WAN024AME_at; Start 138; Stop 162
tcaaacatttttagacccatttcaa

SEQ ID NO: 59387 - DNA, 25 bp, Artificial
  probe
  misc_feature (1)..(25): SEQ ID NO: 74; WAN024AME_at; Start 11; Stop 35
tccgaccgcgaaagtttgcgctttc

SEQ ID NO: 59388 - DNA, 25 bp, Artificial
  probe
  misc_feature (1)..(25): SEQ ID NO: 74; WAN024AME_at; Start 89; Stop 113
gtcgggatatttactgcatttttac

SEQ ID NO: 59389 - DNA, 25 bp, Artificial
  probe
  misc_feature (1)..(25): SEQ ID NO: 74; WAN024AME_at; Start 47; Stop 71
tattaattataaaccaatctgtttg

SEQ ID NO: 59390 - DNA, 25 bp, Artificial
  probe
  misc_feature (1)..(25): SEQ ID NO: 74; WAN024AME_at; Start 72; Stop 96
aattgtcaatagaaattgtcgggat

SEQ ID NO: 59391 - DNA, 25 bp, Artificial
  probe
  misc_feature (1)..(25): SEQ ID NO: 74; WAN024AME_at; Start 12; Stop 36
ccgaccgcgaaagtttgcgctttca

SEQ ID NO: 59392 - DNA, 25 bp, Artificial
  probe
  misc_feature (1)..(25): SEQ ID NO: 74; WAN024AME_at; Start 85; Stop 109
aattgtcgggatatttactgcattt

SEQ ID NO: 59393 - DNA, 25 bp, Artificial
  probe
  misc_feature (1)..(25): SEQ ID NO: 74; WAN024AME_at; Start 16; Stop 40
ccgcgaaagtttgcgctttcatttg

SEQ ID NO: 59394 - DNA, 25 bp, Artificial
  probe
  misc_feature (1)..(25): SEQ ID NO: 74; WAN024AME_at; Start 54; Stop 78
tataaaccaatctgtttgaattgtc

SEQ ID NO: 59395 - DNA, 25 bp, Artificial
  probe
  misc_feature (1)..(25): SEQ ID NO: 74; WAN024AME_at; Start 155; Stop 179
catttcaaacgctctttaaattcgg

SEQ ID NO: 59396 - DNA, 25 bp, Artificial
  probe
  misc_feature (1)..(25): SEQ ID NO: 74; WAN024AME_at; Start 61; Stop 85
caatctgtttgaattgtcaatagaa

SEQ ID NO: 59397 - DNA, 25 bp, Artificial
  probe
  misc_feature (1)..(25): SEQ ID NO: 74; WAN024AME_at; Start 9; Stop 33
cttccgaccgcgaaagtttgcgctt

SEQ ID NO: 59398 - DNA, 25 bp, Artificial
  probe
  misc_feature (1)..(25): SEQ ID NO: 74; WAN024AME_at; Start 164; Stop 188
cgctctttaaattcggaatatagga

SEQ ID NO: 59399 - DNA, 25 bp, Artificial
  probe
  misc_feature (1)..(25): SEQ ID NO: 74; WAN024AME_at; Start 111; Stop 135
tactattatacacacattcaattag

SEQ ID NO: 59400 - DNA, 25 bp, Artificial
  probe
  misc_feature (1)..(25): SEQ ID NO: 74; WAN024AME_at; Start 14; Stop 38
gaccgcgaaagtttgcgctttcatt

SEQ ID NO: 59401 - DNA, 25 bp, Artificial
  probe
  misc_feature (1)..(25): SEQ ID NO: 74; WAN024AME_at; Start 22; Stop 46
aagtttgcgctttcatttgttgtta

SEQ ID NO: 59402 - DNA, 25 bp, Artificial
  probe
  misc_feature (1)..(25): SEQ ID NO: 74; WAN024AME_at; Start 121; Stop 145
cacacattcaattagtttcaaacat

SEQ ID NO: 59403 - DNA, 25 bp, Artificial
  probe
  misc_feature (1)..(25): SEQ ID NO: 165; WAN024AMF_at; Start 170; Stop 194
tataacaacaaatgaaagcgcaaac

SEQ ID NO: 59404 - DNA, 25 bp, Artificial
  probe
  misc_feature (1)..(25): SEQ ID NO: 165; WAN024AMF_at; Start 103; Stop 127
tagtaaaaatgcagtaaatatcccg

SEQ ID NO: 59405 - DNA, 25 bp, Artificial
  probe
  misc_feature (1)..(25): SEQ ID NO: 165; WAN024AMF_at; Start 125; Stop 149
ccgacaatttctattgacaattcaa

SEQ ID NO: 59406 - DNA, 25 bp, Artificial
  probe
  misc_feature (1)..(25): SEQ ID NO: 165; WAN024AMF_at; Start 183; Stop 207
gaaagcgcaaactttcgcggtcgga

SEQ ID NO: 59407 - DNA, 25 bp, Artificial
  probe
  misc_feature (1)..(25): SEQ ID NO: 165; WAN024AMF_at; Start 105; Stop 129
gtaaaaatgcagtaaatatcccgac

SEQ ID NO: 59408 - DNA, 25 bp, Artificial
  probe
  misc_feature (1)..(25): SEQ ID NO: 165; WAN024AMF_at; Start 93; Stop 117
gtgtgtataatagtaaaaatgcagt

SEQ ID NO: 59409 - DNA, 25 bp, Artificial
  probe
  misc_feature (1)..(25): SEQ ID NO: 165; WAN024AMF_at; Start 172; Stop 196
taacaacaaatgaaagcgcaaactt

SEQ ID NO: 59410 - DNA, 25 bp, Artificial
  probe
  misc_feature (1)..(25): SEQ ID NO: 165; WAN024AMF_at; Start 46; Stop 70
taaagagcgtttgaaatgggtctaa

SEQ ID NO: 59411 - DNA, 25 bp, Artificial
  probe
  misc_feature (1)..(25): SEQ ID NO: 165; WAN024AMF_at; Start 185; Stop 209
aagcgcaaactttcgcggtcggaag

SEQ ID NO: 59412 - DNA, 25 bp, Artificial
  probe
  misc_feature (1)..(25): SEQ ID NO: 165; WAN024AMF_at; Start 134; Stop 158
tctattgacaattcaaacagattgg

SEQ ID NO: 59413 - DNA, 25 bp, Artificial
  probe
  misc_feature (1)..(25): SEQ ID NO: 165; WAN024AMF_at; Start 119; Stop 143
aatatcccgacaatttctattgaca

SEQ ID NO: 59414 - DNA, 25 bp, Artificial
  probe
  misc_feature (1)..(25): SEQ ID NO: 165; WAN024AMF_at; Start 32; Stop 56
ctatattccgaatttaaagagcgtt

SEQ ID NO: 59415 - DNA, 25 bp, Artificial
  probe
  misc_feature (1)..(25): SEQ ID NO: 165; WAN024AMF_at; Start 35; Stop 59
tattccgaatttaaagagcgtttga

SEQ ID NO: 59416 - DNA, 25 bp, Artificial
  probe
  misc_feature (1)..(25): SEQ ID NO: 165; WAN024AMF_at; Start 71; Stop 95
aaatgtttgaaactaattgaatgtg

SEQ ID NO: 59417 - DNA, 25 bp, Artificial
  probe
  misc_feature (1)..(25): SEQ ID NO: 165; WAN024AMF_at; Start 30; Stop 54
tcctatattccgaatttaaagagcg

SEQ ID NO: 59418 - DNA, 25 bp, Artificial
  probe
  misc_feature (1)..(25): SEQ ID NO: 165; WAN024AMF_at; Start 136; Stop 160
tattgacaattcaaacagattggtt

SEQ ID NO: 59419 - DNA, 25 bp, Artificial
  probe
  misc_feature (1)..(25): SEQ ID NO: 165; WAN024AMF_at; Start 147; Stop 171
caaacagattggtttataattaata

SEQ ID NO: 59420 - DNA, 25 bp, Artificial
  probe
  misc_feature (1)..(25): SEQ ID NO: 165; WAN024AMF_at; Start 74; Stop 98
tgtttgaaactaattgaatgtgtgt

SEQ ID NO: 59421 - DNA, 25 bp, Artificial
  probe
  misc_feature (1)..(25): SEQ ID NO: 165; WAN024AMF_at; Start 182; Stop 206
tgaaagcgcaaactttcgcggtcgg

SEQ ID NO: 59422 - DNA, 25 bp, Artificial
  probe
  misc_feature (1)..(25): SEQ ID NO: 165; WAN024AMF_at; Start 140; Stop 164
gacaattcaaacagattggtttata

SEQ ID NO: 59423 - DNA, 25 bp, Artificial
  probe
  misc_feature (1)..(25): SEQ ID NO: 165; WAN024AMF_at; Start 180; Stop 204
aatgaaagcgcaaactttcgcggtc

SEQ ID NO: 59424 - DNA, 25 bp, Artificial
  probe
  misc_feature (1)..(25): SEQ ID NO: 165; WAN024AMF_at; Start 57; Stop 81
tgaaatgggtctaaaaatgtttgaa

SEQ ID NO: 59425 - DNA, 25 bp, Artificial
  probe
  misc_feature (1)..(25): SEQ ID NO: 165; WAN024AMF_at; Start 112; Stop 136
tgcagtaaatatcccgacaatttct

SEQ ID NO: 59426 - DNA, 25 bp, Artificial
  probe
  misc_feature (1)..(25): SEQ ID NO: 165; WAN024AMF_at; Start 179; Stop 203
aaatgaaagcgcaaactttcgcggt

SEQ ID NO: 59427 - DNA, 25 bp, Artificial
  probe
  misc_feature (1)..(25): SEQ ID NO: 165; WAN024AMF_at; Start 116; Stop 140
gtaaatatcccgacaatttctattg

SEQ ID NO: 59428 - DNA, 25 bp, Artificial
  probe
  misc_feature (1)..(25): SEQ ID NO: 165; WAN024AMF_at; Start 39; Stop 63
ccgaatttaaagagcgtttgaaatg

SEQ ID NO: 59429 - DNA, 25 bp, Artificial
  probe
  misc_feature (1)..(25): SEQ ID NO: 165; WAN024AMF_at; Start 175; Stop 199
caacaaatgaaagcgcaaactttcg

SEQ ID NO: 59430 - DNA, 25 bp, Artificial
  probe
  misc_feature (1)..(25): SEQ ID NO: 165; WAN024AMF_at; Start 121; Stop 145
tatcccgacaatttctattgacaat

SEQ ID NO: 59431 - DNA, 25 bp, Artificial
  probe
  misc_feature (1)..(25): SEQ ID NO: 165; WAN024AMF_at; Start 51; Stop 75
agcgtttgaaatgggtctaaaaatg

SEQ ID NO: 59432 - DNA, 25 bp, Artificial
  probe
  misc_feature (1)..(25): SEQ ID NO: 165; WAN024AMF_at; Start 168; Stop 192
aatataacaacaaatgaaagcgcaa

SEQ ID NO: 59433 - DNA, 25 bp, Artificial
  probe
  misc_feature (1)..(25): SEQ ID NO: 165; WAN024AMF_at; Start 106; Stop 130
taaaaatgcagtaaatatcccgaca

SEQ ID NO: 59434 - DNA, 25 bp, Artificial
  probe
  misc_feature (1)..(25): SEQ ID NO: 165; WAN024AMF_at; Start 81; Stop 105
aactaattgaatgtgtgtataatag

SEQ ID NO: 59435 - DNA, 25 bp, Artificial
  probe
  misc_feature (1)..(25): SEQ ID NO: 165; WAN024AMF_at; Start 178; Stop 202
caaatgaaagcgcaaactttcgcgg

SEQ ID NO: 59436 - DNA, 25 bp, Artificial
  probe
  misc_feature (1)..(25): SEQ ID NO: 165; WAN024AMF_at; Start 108; Stop 132
aaaatgcagtaaatatcccgacaat

SEQ ID NO: 59437 - DNA, 25 bp, Artificial
  probe
  misc_feature (1)..(25): SEQ ID NO: 4790; WAN024AMG_at; Start 144; Stop 168
ggctgggttgcaacctctgcaaata

SEQ ID NO: 59438 - DNA, 25 bp, Artificial
  probe
  misc_feature (1)..(25): SEQ ID NO: 4790; WAN024AMG_at; Start 135; Stop 159
aaaaacagaggctgggttgcaacct

SEQ ID NO: 59439 - DNA, 25 bp, Artificial
  probe
  misc_feature (1)..(25): SEQ ID NO: 4790; WAN024AMG_at; Start 188; Stop 212
gattttaaatatcctataagtacag

SEQ ID NO: 59440 - DNA, 25 bp, Artificial
  probe
  misc_feature (1)..(25): SEQ ID NO: 4790; WAN024AMG_at; Start 95; Stop 119
gacaaaacccaaacaaatgagattc

SEQ ID NO: 59441 - DNA, 25 bp, Artificial
  probe
  misc_feature (1)..(25): SEQ ID NO: 4790; WAN024AMG_at; Start 97; Stop 121
caaaacccaaacaaatgagattccg

SEQ ID NO: 59442 - DNA, 25 bp, Artificial
  probe
  misc_feature (1)..(25): SEQ ID NO: 4790; WAN024AMG_at; Start 134; Stop 158
gaaaaacagaggctgggttgcaacc

SEQ ID NO: 59443 - DNA, 25 bp, Artificial
  probe
  misc_feature (1)..(25): SEQ ID NO: 4790; WAN024AMG_at; Start 38; Stop 62
agaaattctgaaacccgtgttcagt

SEQ ID NO: 59444 - DNA, 25 bp, Artificial
  probe
  misc_feature (1)..(25): SEQ ID NO: 4790; WAN024AMG_at; Start 102; Stop 126
cccaaacaaatgagattccgtccct

SEQ ID NO: 59445 - DNA, 25 bp, Artificial
  probe
  misc_feature (1)..(25): SEQ ID NO: 4790; WAN024AMG_at; Start 142; Stop 166
gaggctgggttgcaacctctgcaaa

SEQ ID NO: 59446 - DNA, 25 bp, Artificial
  probe
  misc_feature (1)..(25): SEQ ID NO: 4790; WAN024AMG_at; Start 110; Stop 134
aatgagattccgtccctttttatcg

SEQ ID NO: 59447 - DNA, 25 bp, Artificial
  probe
  misc_feature (1)..(25): SEQ ID NO: 4790; WAN024AMG_at; Start 153; Stop 177
gcaacctctgcaaataagtaaatta

SEQ ID NO: 59448 - DNA, 25 bp, Artificial
  probe
  misc_feature (1)..(25): SEQ ID NO: 4790; WAN024AMG_at; Start 147; Stop 171
tgggttgcaacctctgcaaataagt

SEQ ID NO: 59449 - DNA, 25 bp, Artificial
  probe
  misc_feature (1)..(25): SEQ ID NO: 4790; WAN024AMG_at; Start 104; Stop 128
caaacaaatgagattccgtcccttt

SEQ ID NO: 59450 - DNA, 25 bp, Artificial
  probe
  misc_feature (1)..(25): SEQ ID NO: 4790; WAN024AMG_at; Start 84; Stop 108
tctattgatgagacaaaacccaaac

SEQ ID NO: 59451 - DNA, 25 bp, Artificial
  probe
  misc_feature (1)..(25): SEQ ID NO: 4790; WAN024AMG_at; Start 67; Stop 91
aacactctttgttcctttctattga

SEQ ID NO: 59452 - DNA, 25 bp, Artificial
  probe
  misc_feature (1)..(25): SEQ ID NO: 4790; WAN024AMG_at; Start 157; Stop 181
cctctgcaaataagtaaattaactt

SEQ ID NO: 59453 - DNA, 25 bp, Artificial
  probe
  misc_feature (1)..(25): SEQ ID NO: 4790; WAN024AMG_at; Start 89; Stop 113
tgatgagacaaaacccaaacaaatg

SEQ ID NO: 59454 - DNA, 25 bp, Artificial
  probe
  misc_feature (1)..(25): SEQ ID NO: 4790; WAN024AMG_at; Start 136; Stop 160
aaaacagaggctgggttgcaacctc

SEQ ID NO: 59455 - DNA, 25 bp, Artificial
  probe
  misc_feature (1)..(25): SEQ ID NO: 4790; WAN024AMG_at; Start 93; Stop 117
gagacaaaacccaaacaaatgagat

SEQ ID NO: 59456 - DNA, 25 bp, Artificial
  probe
  misc_feature (1)..(25): SEQ ID NO: 4790; WAN024AMG_at; Start 59; Stop 83
cagttacgaacactctttgttcctt

SEQ ID NO: 59457 - DNA, 25 bp, Artificial
  probe
  misc_feature (1)..(25): SEQ ID NO: 4790; WAN024AMG_at; Start 36; Stop 60
taagaaattctgaaacccgtgttca

SEQ ID NO: 59458 - DNA, 25 bp, Artificial
  probe
  misc_feature (1)..(25): SEQ ID NO: 4790; WAN024AMG_at; Start 132; Stop 156
tcgaaaaacagaggctgggttgcaa

SEQ ID NO: 59459 - DNA, 25 bp, Artificial
  probe
  misc_feature (1)..(25): SEQ ID NO: 4790; WAN024AMG_at; Start 130; Stop 154
tatcgaaaaacagaggctgggttgc

SEQ ID NO: 59460 - DNA, 25 bp, Artificial
  probe
  misc_feature (1)..(25): SEQ ID NO: 4790; WAN024AMG_at; Start 80; Stop 104
cctttctattgatgagacaaaaccc

SEQ ID NO: 59461 - DNA, 25 bp, Artificial
  probe
  misc_feature (1)..(25): SEQ ID NO: 4790; WAN024AMG_at; Start 138; Stop 162
aacagaggctgggttgcaacctctg

SEQ ID NO: 59462 - DNA, 25 bp, Artificial
  probe
  misc_feature (1)..(25): SEQ ID NO: 4790; WAN024AMG_at; Start 81; Stop 105
ctttctattgatgagacaaaaccca

SEQ ID NO: 59463 - DNA, 25 bp, Artificial
  probe
  misc_feature (1)..(25): SEQ ID NO: 4790; WAN024AMG_at; Start 140; Stop 164
cagaggctgggttgcaacctctgca

SEQ ID NO: 59464 - DNA, 25 bp, Artificial
  probe
  misc_feature (1)..(25): SEQ ID NO: 4790; WAN024AMG_at; Start 57; Stop 81
ttcagttacgaacactctttgttcc

SEQ ID NO: 59465 - DNA, 25 bp, Artificial
  probe
  misc_feature (1)..(25): SEQ ID NO: 4790; WAN024AMG_at; Start 27; Stop 51
tatatttagtaagaaattctgaaac

SEQ ID NO: 59466 - DNA, 25 bp, Artificial
  probe
  misc_feature (1)..(25): SEQ ID NO: 4790; WAN024AMG_at; Start 92; Stop 116
tgagacaaaacccaaacaaatgaga

SEQ ID NO: 59467 - DNA, 25 bp, Artificial
  probe
  misc_feature (1)..(25): SEQ ID NO: 4790; WAN024AMG_at; Start 86; Stop 110
tattgatgagacaaaacccaaacaa

SEQ ID NO: 59468 - DNA, 25 bp, Artificial
  probe
  misc_feature (1)..(25): SEQ ID NO: 4790; WAN024AMG_at; Start 149; Stop 173
ggttgcaacctctgcaaataagtaa

SEQ ID NO: 59469 - DNA, 25 bp, Artificial
  probe
  misc_feature (1)..(25): SEQ ID NO: 4790; WAN024AMG_at; Start 145; Stop 169
gctgggttgcaacctctgcaaataa

SEQ ID NO: 59470 - DNA, 25 bp, Artificial
  probe
  misc_feature (1)..(25): SEQ ID NO: 4790; WAN024AMG_at; Start 111; Stop 135
atgagattccgtccctttttatcga

SEQ ID NO: 59471 - DNA, 25 bp, Artificial
  probe
  misc_feature (1)..(25): SEQ ID NO: 3553; WAN024AMH_at; Start 27; Stop 51
ctgtacttataggatatttaaaatc

SEQ ID NO: 59472 - DNA, 25 bp, Artificial
  probe
  misc_feature (1)..(25): SEQ ID NO: 3553; WAN024AMH_at; Start 192; Stop 216
cagaatttcttactaaatataaaag

SEQ ID NO: 59473 - DNA, 25 bp, Artificial
  probe
  misc_feature (1)..(25): SEQ ID NO: 3553; WAN024AMH_at; Start 79; Stop 103
gaggttgcaacccagcctctgtttt

SEQ ID NO: 59474 - DNA, 25 bp, Artificial
  probe
  misc_feature (1)..(25): SEQ ID NO: 3553; WAN024AMH_at; Start 76; Stop 100
gcagaggttgcaacccagcctctgt

SEQ ID NO: 59475 - DNA, 25 bp, Artificial
  probe
  misc_feature (1)..(25): SEQ ID NO: 3553; WAN024AMH_at; Start 86; Stop 110
caacccagcctctgtttttcgataa

SEQ ID NO: 59476 - DNA, 25 bp, Artificial
  probe
  misc_feature (1)..(25): SEQ ID NO: 3553; WAN024AMH_at; Start 91; Stop 115
cagcctctgtttttcgataaaaagg

SEQ ID NO: 59477 - DNA, 25 bp, Artificial
  probe
  misc_feature (1)..(25): SEQ ID NO: 3553; WAN024AMH_at; Start 172; Stop 196
tcgtaactgaacacgggtttcagaa

SEQ ID NO: 59478 - DNA, 25 bp, Artificial
  probe
  misc_feature (1)..(25): SEQ ID NO: 3553; WAN024AMH_at; Start 123; Stop 147
tctcatttgtttgggttttgtctca

SEQ ID NO: 59479 - DNA, 25 bp, Artificial
  probe
  misc_feature (1)..(25): SEQ ID NO: 3553; WAN024AMH_at; Start 179; Stop 203
tgaacacgggtttcagaatttctta

SEQ ID NO: 59480 - DNA, 25 bp, Artificial
  probe
  misc_feature (1)..(25): SEQ ID NO: 3553; WAN024AMH_at; Start 113; Stop 137
agggacggaatctcatttgtttggg

SEQ ID NO: 59481 - DNA, 25 bp, Artificial
  probe
  misc_feature (1)..(25): SEQ ID NO: 3553; WAN024AMH_at; Start 111; Stop 135
aaagggacggaatctcatttgtttg

SEQ ID NO: 59482 - DNA, 25 bp, Artificial
  probe
  misc_feature (1)..(25): SEQ ID NO: 3553; WAN024AMH_at; Start 62; Stop 86
taatttacttatttgcagaggttgc

SEQ ID NO: 59483 - DNA, 25 bp, Artificial
  probe
  misc_feature (1)..(25): SEQ ID NO: 3553; WAN024AMH_at; Start 131; Stop 155
gtttgggttttgtctcatcaataga

SEQ ID NO: 59484 - DNA, 25 bp, Artificial
  probe
  misc_feature (1)..(25): SEQ ID NO: 3553; WAN024AMH_at; Start 159; Stop 183
gaacaaagagtgttcgtaactgaac

SEQ ID NO: 59485 - DNA, 25 bp, Artificial
  probe
  misc_feature (1)..(25): SEQ ID NO: 3553; WAN024AMH_at; Start 164; Stop 188
aagagtgttcgtaactgaacacggg

SEQ ID NO: 59486 - DNA, 25 bp, Artificial
  probe
  misc_feature (1)..(25): SEQ ID NO: 3553; WAN024AMH_at; Start 73; Stop 97
tttgcagaggttgcaacccagcctc

SEQ ID NO: 59487 - DNA, 25 bp, Artificial
  probe
  misc_feature (1)..(25): SEQ ID NO: 3553; WAN024AMH_at; Start 169; Stop 193
tgttcgtaactgaacacgggtttca

SEQ ID NO: 59488 - DNA, 25 bp, Artificial
  probe
  misc_feature (1)..(25): SEQ ID NO: 3553; WAN024AMH_at; Start 142; Stop 166
gtctcatcaatagaaaggaacaaag

SEQ ID NO: 59489 - DNA, 25 bp, Artificial
  probe
  misc_feature (1)..(25): SEQ ID NO: 3553; WAN024AMH_at; Start 118; Stop 142
cggaatctcatttgtttgggttttg

SEQ ID NO: 59490 - DNA, 25 bp, Artificial
  probe
  misc_feature (1)..(25): SEQ ID NO: 3553; WAN024AMH_at; Start 85; Stop 109
gcaacccagcctctgtttttcgata

SEQ ID NO: 59491 - DNA, 25 bp, Artificial
  probe
  misc_feature (1)..(25): SEQ ID NO: 3553; WAN024AMH_at; Start 126; Stop 150
catttgtttgggttttgtctcatca

SEQ ID NO: 59492 - DNA, 25 bp, Artificial
  probe
  misc_feature (1)..(25): SEQ ID NO: 3553; WAN024AMH_at; Start 145; Stop 169
tcatcaatagaaaggaacaaagagt

SEQ ID NO: 59493 - DNA, 25 bp, Artificial
  probe
  misc_feature (1)..(25): SEQ ID NO: 3553; WAN024AMH_at; Start 69; Stop 93
cttatttgcagaggttgcaacccag

SEQ ID NO: 59494 - DNA, 25 bp, Artificial
  probe
  misc_feature (1)..(25): SEQ ID NO: 3553; WAN024AMH_at; Start 152; Stop 176
tagaaaggaacaaagagtgttcgta

SEQ ID NO: 59495 - DNA, 25 bp, Artificial
  probe
  misc_feature (1)..(25): SEQ ID NO: 3553; WAN024AMH_at; Start 71; Stop 95
tatttgcagaggttgcaacccagcc

SEQ ID NO: 59496 - DNA, 25 bp, Artificial
  probe
  misc_feature (1)..(25): SEQ ID NO: 3553; WAN024AMH_at; Start 74; Stop 98
ttgcagaggttgcaacccagcctct

SEQ ID NO: 59497 - DNA, 25 bp, Artificial
  probe
  misc_feature (1)..(25): SEQ ID NO: 3553; WAN024AMH_at; Start 105; Stop 129
cgataaaaagggacggaatctcatt

SEQ ID NO: 59498 - DNA, 25 bp, Artificial
  probe
  misc_feature (1)..(25): SEQ ID NO: 3553; WAN024AMH_at; Start 139; Stop 163
tttgtctcatcaatagaaaggaaca

SEQ ID NO: 59499 - DNA, 25 bp, Artificial
  probe
  misc_feature (1)..(25): SEQ ID NO: 3553; WAN024AMH_at; Start 104; Stop 128
tcgataaaaagggacggaatctcat

SEQ ID NO: 59500 - DNA, 25 bp, Artificial
  probe
  misc_feature (1)..(25): SEQ ID NO: 3553; WAN024AMH_at; Start 67; Stop 91
tacttatttgcagaggttgcaaccc

SEQ ID NO: 59501 - DNA, 25 bp, Artificial
  probe
  misc_feature (1)..(25): SEQ ID NO: 3553; WAN024AMH_at; Start 148; Stop 172
tcaatagaaaggaacaaagagtgtt

SEQ ID NO: 59502 - DNA, 25 bp, Artificial
  probe
  misc_feature (1)..(25): SEQ ID NO: 3553; WAN024AMH_at; Start 162; Stop 186
caaagagtgttcgtaactgaacacg

SEQ ID NO: 59503 - DNA, 25 bp, Artificial
  probe
  misc_feature (1)..(25): SEQ ID NO: 3553; WAN024AMH_at; Start 81; Stop 105
ggttgcaacccagcctctgtttttc

SEQ ID NO: 59504 - DNA, 25 bp, Artificial
  probe
  misc_feature (1)..(25): SEQ ID NO: 3553; WAN024AMH_at; Start 135; Stop 159
gggttttgtctcatcaatagaaagg

SEQ ID NO: 59505 - DNA, 25 bp, Artificial
  probe
  misc_feature (1)..(25): SEQ ID NO: 517; WAN024AMI_at; Start 54; Stop 78
caaagtttagtcaaagagattgacg

SEQ ID NO: 59506 - DNA, 25 bp, Artificial
  probe
  misc_feature (1)..(25): SEQ ID NO: 517; WAN024AMI_at; Start 60; Stop 84
ttagtcaaagagattgacgaagtca

SEQ ID NO: 59507 - DNA, 25 bp, Artificial
  probe
  misc_feature (1)..(25): SEQ ID NO: 517; WAN024AMI_at; Start 50; Stop 74
ggctcaaagtttagtcaaagagatt

SEQ ID NO: 59508 - DNA, 25 bp, Artificial
  probe
  misc_feature (1)..(25): SEQ ID NO: 517; WAN024AMI_at; Start 77; Stop 101
cgaagtcaagctctgacggcgtcgc

SEQ ID NO: 59509 - DNA, 25 bp, Artificial
  probe
  misc_feature (1)..(25): SEQ ID NO: 517; WAN024AMI_at; Start 71; Stop 95
gattgacgaagtcaagctctgacgg

SEQ ID NO: 59510 - DNA, 25 bp, Artificial
  probe
  misc_feature (1)..(25): SEQ ID NO: 517; WAN024AMI_at; Start 72; Stop 96
attgacgaagtcaagctctgacggc

SEQ ID NO: 59511 - DNA, 25 bp, Artificial
  probe
  misc_feature (1)..(25): SEQ ID NO: 517; WAN024AMI_at; Start 55; Stop 79
aaagtttagtcaaagagattgacga

SEQ ID NO: 59512 - DNA, 25 bp, Artificial
  probe
  misc_feature (1)..(25): SEQ ID NO: 517; WAN024AMI_at; Start 57; Stop 81
agtttagtcaaagagattgacgaag

SEQ ID NO: 59513 - DNA, 25 bp, Artificial
  probe
  misc_feature (1)..(25): SEQ ID NO: 517; WAN024AMI_at; Start 59; Stop 83
tttagtcaaagagattgacgaagtc

SEQ ID NO: 59514 - DNA, 25 bp, Artificial
  probe
  misc_feature (1)..(25): SEQ ID NO: 517; WAN024AMI_at; Start 23; Stop 47
gctatttgcgcaaattttgagacct

SEQ ID NO: 59515 - DNA, 25 bp, Artificial
  probe
  misc_feature (1)..(25): SEQ ID NO: 517; WAN024AMI_at; Start 79; Stop 103
aagtcaagctctgacggcgtcgcca

SEQ ID NO: 59516 - DNA, 25 bp, Artificial
  probe
  misc_feature (1)..(25): SEQ ID NO: 517; WAN024AMI_at; Start 24; Stop 48
ctatttgcgcaaattttgagacctt

SEQ ID NO: 59517 - DNA, 25 bp, Artificial
  probe
  misc_feature (1)..(25): SEQ ID NO: 517; WAN024AMI_at; Start 64; Stop 88
tcaaagagattgacgaagtcaagct

SEQ ID NO: 59518 - DNA, 25 bp, Artificial
  probe
  misc_feature (1)..(25): SEQ ID NO: 517; WAN024AMI_at; Start 74; Stop 98
tgacgaagtcaagctctgacggcgt

SEQ ID NO: 59519 - DNA, 25 bp, Artificial
  probe
  misc_feature (1)..(25): SEQ ID NO: 517; WAN024AMI_at; Start 73; Stop 97
ttgacgaagtcaagctctgacggcg

SEQ ID NO: 59520 - DNA, 25 bp, Artificial
  probe
  misc_feature (1)..(25): SEQ ID NO: 517; WAN024AMI_at; Start 68; Stop 92
agagattgacgaagtcaagctctga

SEQ ID NO: 59521 - DNA, 25 bp, Artificial
  probe
  misc_feature (1)..(25): SEQ ID NO: 517; WAN024AMI_at; Start 75; Stop 99
gacgaagtcaagctctgacggcgtc

SEQ ID NO: 59522 - DNA, 25 bp, Artificial
  probe
  misc_feature (1)..(25): SEQ ID NO: 517; WAN024AMI_at; Start 61; Stop 85
tagtcaaagagattgacgaagtcaa

SEQ ID NO: 59523 - DNA, 25 bp, Artificial
  probe
  misc_feature (1)..(25): SEQ ID NO: 517; WAN024AMI_at; Start 66; Stop 90
aaagagattgacgaagtcaagctct

SEQ ID NO: 59524 - DNA, 25 bp, Artificial
  probe
  misc_feature (1)..(25): SEQ ID NO: 517; WAN024AMI_at; Start 47; Stop 71
ttaggctcaaagtttagtcaaagag

SEQ ID NO: 59525 - DNA, 25 bp, Artificial
  probe
  misc_feature (1)..(25): SEQ ID NO: 517; WAN024AMI_at; Start 25; Stop 49
tatttgcgcaaattttgagacctta

SEQ ID NO: 59526 - DNA, 25 bp, Artificial
  probe
  misc_feature (1)..(25): SEQ ID NO: 517; WAN024AMI_at; Start 78; Stop 102
gaagtcaagctctgacggcgtcgcc

SEQ ID NO: 59527 - DNA, 25 bp, Artificial
  probe
  misc_feature (1)..(25): SEQ ID NO: 517; WAN024AMI_at; Start 51; Stop 75
gctcaaagtttagtcaaagagattg

SEQ ID NO: 59528 - DNA, 25 bp, Artificial
  probe
  misc_feature (1)..(25): SEQ ID NO: 517; WAN024AMI_at; Start 52; Stop 76
ctcaaagtttagtcaaagagattga

SEQ ID NO: 59529 - DNA, 25 bp, Artificial
  probe
  misc_feature (1)..(25): SEQ ID NO: 517; WAN024AMI_at; Start 63; Stop 87
gtcaaagagattgacgaagtcaagc

SEQ ID NO: 59530 - DNA, 25 bp, Artificial
  probe
  misc_feature (1)..(25): SEQ ID NO: 517; WAN024AMI_at; Start 76; Stop 100
acgaagtcaagctctgacggcgtcg

SEQ ID NO: 59531 - DNA, 25 bp, Artificial
  probe
  misc_feature (1)..(25): SEQ ID NO: 517; WAN024AMI_at; Start 65; Stop 89
caaagagattgacgaagtcaagctc

SEQ ID NO: 59532 - DNA, 25 bp, Artificial
  probe
  misc_feature (1)..(25): SEQ ID NO: 517; WAN024AMI_at; Start 62; Stop 86
agtcaaagagattgacgaagtcaag

SEQ ID NO: 59533 - DNA, 25 bp, Artificial
  probe
  misc_feature (1)..(25): SEQ ID NO: 517; WAN024AMI_at; Start 67; Stop 91
aagagattgacgaagtcaagctctg

SEQ ID NO: 59534 - DNA, 25 bp, Artificial
  probe
  misc_feature (1)..(25): SEQ ID NO: 517; WAN024AMI_at; Start 48; Stop 72
taggctcaaagtttagtcaaagaga

SEQ ID NO: 59535 - DNA, 25 bp, Artificial
  probe
  misc_feature (1)..(25): SEQ ID NO: 517; WAN024AMI_at; Start 69; Stop 93
gagattgacgaagtcaagctctgac

SEQ ID NO: 59536 - DNA, 25 bp, Artificial
  probe
  misc_feature (1)..(25): SEQ ID NO: 517; WAN024AMI_at; Start 28; Stop 52
ttgcgcaaattttgagaccttaggc

SEQ ID NO: 59537 - DNA, 25 bp, Artificial
  probe
  misc_feature (1)..(25): SEQ ID NO: 517; WAN024AMI_at; Start 70; Stop 94
agattgacgaagtcaagctctgacg

SEQ ID NO: 59538 - DNA, 25 bp, Artificial
  probe
  misc_feature (1)..(25): SEQ ID NO: 517; WAN024AMI_at; Start 27; Stop 51
tttgcgcaaattttgagaccttagg

SEQ ID NO: 59539 - DNA, 25 bp, Artificial
  probe
  misc_feature (1)..(25): SEQ ID NO: 3215; WAN024AMJ_at; Start 23; Stop 47
tgacttcgtcaatctctttgactaa

SEQ ID NO: 59540 - DNA, 25 bp, Artificial
  probe
  misc_feature (1)..(25): SEQ ID NO: 3215; WAN024AMJ_at; Start 16; Stop 40
cagagcttgacttcgtcaatctctt

SEQ ID NO: 59541 - DNA, 25 bp, Artificial
  probe
  misc_feature (1)..(25): SEQ ID NO: 3215; WAN024AMJ_at; Start 12; Stop 36
ccgtcagagcttgacttcgtcaatc

SEQ ID NO: 59542 - DNA, 25 bp, Artificial
  probe
  misc_feature (1)..(25): SEQ ID NO: 3215; WAN024AMJ_at; Start 55; Stop 79
gcctaaggtctcaaaatttgcgcaa

SEQ ID NO: 59543 - DNA, 25 bp, Artificial
  probe
  misc_feature (1)..(25): SEQ ID NO: 3215; WAN024AMJ_at; Start 21; Stop 45
cttgacttcgtcaatctctttgact

SEQ ID NO: 59544 - DNA, 25 bp, Artificial
  probe
  misc_feature (1)..(25): SEQ ID NO: 3215; WAN024AMJ_at; Start 34; Stop 58
atctctttgactaaactttgagcct

SEQ ID NO: 59545 - DNA, 25 bp, Artificial
  probe
  misc_feature (1)..(25): SEQ ID NO: 3215; WAN024AMJ_at; Start 14; Stop 38
gtcagagcttgacttcgtcaatctc

SEQ ID NO: 59546 - DNA, 25 bp, Artificial
  probe
  misc_feature (1)..(25): SEQ ID NO: 3215; WAN024AMJ_at; Start 11; Stop 35
gccgtcagagcttgacttcgtcaat

SEQ ID NO: 59547 - DNA, 25 bp, Artificial
  probe
  misc_feature (1)..(25): SEQ ID NO: 3215; WAN024AMJ_at; Start 58; Stop 82
taaggtctcaaaatttgcgcaaata

SEQ ID NO: 59548 - DNA, 25 bp, Artificial
  probe
  misc_feature (1)..(25): SEQ ID NO: 3215; WAN024AMJ_at; Start 5; Stop 29
ggcgacgccgtcagagcttgacttc

SEQ ID NO: 59549 - DNA, 25 bp, Artificial
  probe
  misc_feature (1)..(25): SEQ ID NO: 3215; WAN024AMJ_at; Start 4; Stop 28
tggcgacgccgtcagagcttgactt

SEQ ID NO: 59550 - DNA, 25 bp, Artificial
  probe
  misc_feature (1)..(25): SEQ ID NO: 3215; WAN024AMJ_at; Start 57; Stop 81
ctaaggtctcaaaatttgcgcaaat

SEQ ID NO: 59551 - DNA, 25 bp, Artificial
  probe
  misc_feature (1)..(25): SEQ ID NO: 3215; WAN024AMJ_at; Start 9; Stop 33
acgccgtcagagcttgacttcgtca

SEQ ID NO: 59552 - DNA, 25 bp, Artificial
  probe
  misc_feature (1)..(25): SEQ ID NO: 3215; WAN024AMJ_at; Start 6; Stop 30
gcgacgccgtcagagcttgacttcg

SEQ ID NO: 59553 - DNA, 25 bp, Artificial
  probe
  misc_feature (1)..(25): SEQ ID NO: 3215; WAN024AMJ_at; Start 20; Stop 44
gcttgacttcgtcaatctctttgac

SEQ ID NO: 59554 - DNA, 25 bp, Artificial
  probe
  misc_feature (1)..(25): SEQ ID NO: 3215; WAN024AMJ_at; Start 59; Stop 83
aaggtctcaaaatttgcgcaaatag

SEQ ID NO: 59555 - DNA, 25 bp, Artificial
  probe
  misc_feature (1)..(25): SEQ ID NO: 3215; WAN024AMJ_at; Start 3; Stop 27
gtggcgacgccgtcagagcttgact

SEQ ID NO: 59556 - DNA, 25 bp, Artificial
  probe
  misc_feature (1)..(25): SEQ ID NO: 3215; WAN024AMJ_at; Start 2; Stop 26
agtggcgacgccgtcagagcttgac

SEQ ID NO: 59557 - DNA, 25 bp, Artificial
  probe
  misc_feature (1)..(25): SEQ ID NO: 3215; WAN024AMJ_at; Start 25; Stop 49
acttcgtcaatctctttgactaaac

SEQ ID NO: 59558 - DNA, 25 bp, Artificial
  probe
  misc_feature (1)..(25): SEQ ID NO: 3215; WAN024AMJ_at; Start 29; Stop 53
cgtcaatctctttgactaaactttg

SEQ ID NO: 59559 - DNA, 25 bp, Artificial
  probe
  misc_feature (1)..(25): SEQ ID NO: 3215; WAN024AMJ_at; Start 7; Stop 31
cgacgccgtcagagcttgacttcgt

SEQ ID NO: 59560 - DNA, 25 bp, Artificial
  probe
  misc_feature (1)..(25): SEQ ID NO: 3215; WAN024AMJ_at; Start 60; Stop 84
aggtctcaaaatttgcgcaaatagc

SEQ ID NO: 59561 - DNA, 25 bp, Artificial
  probe
  misc_feature (1)..(25): SEQ ID NO: 3215; WAN024AMJ_at; Start 33; Stop 57
aatctctttgactaaactttgagcc

SEQ ID NO: 59562 - DNA, 25 bp, Artificial
  probe
  misc_feature (1)..(25): SEQ ID NO: 3215; WAN024AMJ_at; Start 8; Stop 32
gacgccgtcagagcttgacttcgtc

SEQ ID NO: 59563 - DNA, 25 bp, Artificial
  probe
  misc_feature (1)..(25): SEQ ID NO: 3215; WAN024AMJ_at; Start 19; Stop 43
agcttgacttcgtcaatctctttga

SEQ ID NO: 59564 - DNA, 25 bp, Artificial
  probe
  misc_feature (1)..(25): SEQ ID NO: 3215; WAN024AMJ_at; Start 32; Stop 56
caatctctttgactaaactttgagc

SEQ ID NO: 59565 - DNA, 25 bp, Artificial
  probe
  misc_feature (1)..(25): SEQ ID NO: 3215; WAN024AMJ_at; Start 18; Stop 42
gagcttgacttcgtcaatctctttg

SEQ ID NO: 59566 - DNA, 25 bp, Artificial
  probe
  misc_feature (1)..(25): SEQ ID NO: 3215; WAN024AMJ_at; Start 10; Stop 34
cgccgtcagagcttgacttcgtcaa

SEQ ID NO: 59567 - DNA, 25 bp, Artificial
  probe
  misc_feature (1)..(25): SEQ ID NO: 3215; WAN024AMJ_at; Start 31; Stop 55
tcaatctctttgactaaactttgag

SEQ ID NO: 59568 - DNA, 25 bp, Artificial
  probe
  misc_feature (1)..(25): SEQ ID NO: 3215; WAN024AMJ_at; Start 56; Stop 80
cctaaggtctcaaaatttgcgcaaa

SEQ ID NO: 59569 - DNA, 25 bp, Artificial
  probe
  misc_feature (1)..(25): SEQ ID NO: 3215; WAN024AMJ_at; Start 15; Stop 39
tcagagcttgacttcgtcaatctct

SEQ ID NO: 59570 - DNA, 25 bp, Artificial
  probe
  misc_feature (1)..(25): SEQ ID NO: 3215; WAN024AMJ_at; Start 13; Stop 37
cgtcagagcttgacttcgtcaatct

SEQ ID NO: 59571 - DNA, 25 bp, Artificial
  probe
  misc_feature (1)..(25): SEQ ID NO: 3215; WAN024AMJ_at; Start 26; Stop 50
cttcgtcaatctctttgactaaact

SEQ ID NO: 59572 - DNA, 25 bp, Artificial
  probe
  misc_feature (1)..(25): SEQ ID NO: 3215; WAN024AMJ_at; Start 24; Stop 48
gacttcgtcaatctctttgactaaa

SEQ ID NO: 59573 - DNA, 25 bp, Artificial
  probe
  misc_feature (1)..(25): SEQ ID NO: 3299; WAN024AMK_at; Start 48; Stop 72
aagagaatgtcaagacaaaaactca

SEQ ID NO: 59574 - DNA, 25 bp, Artificial
  probe
  misc_feature (1)..(25): SEQ ID NO: 3299; WAN024AMK_at; Start 63; Stop 87
caaaaactcaaaaaattagcactct

SEQ ID NO: 59575 - DNA, 25 bp, Artificial
  probe
  misc_feature (1)..(25): SEQ ID NO: 3299; WAN024AMK_at; Start 94; Stop 118
aagagtgctaaaaatcaatctgaag

SEQ ID NO: 59576 - DNA, 25 bp, Artificial
  probe
  misc_feature (1)..(25): SEQ ID NO: 3299; WAN024AMK_at; Start 32; Stop 56
tattatacacccttagaagagaatg

SEQ ID NO: 59577 - DNA, 25 bp, Artificial
  probe
  misc_feature (1)..(25): SEQ ID NO: 3299; WAN024AMK_at; Start 38; Stop 62
acacccttagaagagaatgtcaaga

SEQ ID NO: 59578 - DNA, 25 bp, Artificial
  probe
  misc_feature (1)..(25): SEQ ID NO: 3299; WAN024AMK_at; Start 29; Stop 53
ttctattatacacccttagaagaga

SEQ ID NO: 59579 - DNA, 25 bp, Artificial
  probe
  misc_feature (1)..(25): SEQ ID NO: 3299; WAN024AMK_at; Start 33; Stop 57
attatacacccttagaagagaatgt

SEQ ID NO: 59580 - DNA, 25 bp, Artificial
  probe
  misc_feature (1)..(25): SEQ ID NO: 3299; WAN024AMK_at; Start 45; Stop 69
tagaagagaatgtcaagacaaaaac

SEQ ID NO: 59581 - DNA, 25 bp, Artificial
  probe
  misc_feature (1)..(25): SEQ ID NO: 3299; WAN024AMK_at; Start 98; Stop 122
gtgctaaaaatcaatctgaagacct

SEQ ID NO: 59582 - DNA, 25 bp, Artificial
  probe
  misc_feature (1)..(25): SEQ ID NO: 3299; WAN024AMK_at; Start 97; Stop 121
agtgctaaaaatcaatctgaagacc

SEQ ID NO: 59583 - DNA, 25 bp, Artificial
  probe
  misc_feature (1)..(25): SEQ ID NO: 3299; WAN024AMK_at; Start 96; Stop 120
gagtgctaaaaatcaatctgaagac

SEQ ID NO: 59584 - DNA, 25 bp, Artificial
  probe
  misc_feature (1)..(25): SEQ ID NO: 3299; WAN024AMK_at; Start 42; Stop 66
ccttagaagagaatgtcaagacaaa

SEQ ID NO: 59585 - DNA, 25 bp, Artificial
  probe
  misc_feature (1)..(25): SEQ ID NO: 3299; WAN024AMK_at; Start 107; Stop 131
atcaatctgaagacctagaaccttg

SEQ ID NO: 59586 - DNA, 25 bp, Artificial
  probe
  misc_feature (1)..(25): SEQ ID NO: 3299; WAN024AMK_at; Start 31; Stop 55
ctattatacacccttagaagagaat

SEQ ID NO: 59587 - DNA, 25 bp, Artificial
  probe
  misc_feature (1)..(25): SEQ ID NO: 3299; WAN024AMK_at; Start 34; Stop 58
ttatacacccttagaagagaatgtc

SEQ ID NO: 59588 - DNA, 25 bp, Artificial
  probe
  misc_feature (1)..(25): SEQ ID NO: 3299; WAN024AMK_at; Start 41; Stop 65
cccttagaagagaatgtcaagacaa

SEQ ID NO: 59589 - DNA, 25 bp, Artificial
  probe
  misc_feature (1)..(25): SEQ ID NO: 3299; WAN024AMK_at; Start 103; Stop 127
aaaaatcaatctgaagacctagaac

SEQ ID NO: 59590 - DNA, 25 bp, Artificial
  probe
  misc_feature (1)..(25): SEQ ID NO: 3299; WAN024AMK_at; Start 101; Stop 125
ctaaaaatcaatctgaagacctaga

SEQ ID NO: 59591 - DNA, 25 bp, Artificial
  probe
  misc_feature (1)..(25): SEQ ID NO: 3299; WAN024AMK_at; Start 43; Stop 67
cttagaagagaatgtcaagacaaaa

SEQ ID NO: 59592 - DNA, 25 bp, Artificial
  probe
  misc_feature (1)..(25): SEQ ID NO: 3299; WAN024AMK_at; Start 99; Stop 123
tgctaaaaatcaatctgaagaccta

SEQ ID NO: 59593 - DNA, 25 bp, Artificial
  probe
  misc_feature (1)..(25): SEQ ID NO: 3299; WAN024AMK_at; Start 102; Stop 126
taaaaatcaatctgaagacctagaa

SEQ ID NO: 59594 - DNA, 25 bp, Artificial
  probe
  misc_feature (1)..(25): SEQ ID NO: 3299; WAN024AMK_at; Start 68; Stop 92
actcaaaaaattagcactcttttat

SEQ ID NO: 59595 - DNA, 25 bp, Artificial
  probe
  misc_feature (1)..(25): SEQ ID NO: 3299; WAN024AMK_at; Start 26; Stop 50
tgattctattatacacccttagaag

SEQ ID NO: 59596 - DNA, 25 bp, Artificial
  probe
  misc_feature (1)..(25): SEQ ID NO: 3299; WAN024AMK_at; Start 37; Stop 61
tacacccttagaagagaatgtcaag

SEQ ID NO: 59597 - DNA, 25 bp, Artificial
  probe
  misc_feature (1)..(25): SEQ ID NO: 3299; WAN024AMK_at; Start 47; Stop 71
gaagagaatgtcaagacaaaaactc

SEQ ID NO: 59598 - DNA, 25 bp, Artificial
  probe
  misc_feature (1)..(25): SEQ ID NO: 3299; WAN024AMK_at; Start 105; Stop 129
aaatcaatctgaagacctagaacct

SEQ ID NO: 59599 - DNA, 25 bp, Artificial
  probe
  misc_feature (1)..(25): SEQ ID NO: 3299; WAN024AMK_at; Start 35; Stop 59
tatacacccttagaagagaatgtca

SEQ ID NO: 59600 - DNA, 25 bp, Artificial
  probe
  misc_feature (1)..(25): SEQ ID NO: 3299; WAN024AMK_at; Start 39; Stop 63
cacccttagaagagaatgtcaagac

SEQ ID NO: 59601 - DNA, 25 bp, Artificial
  probe
  misc_feature (1)..(25): SEQ ID NO: 3299; WAN024AMK_at; Start 106; Stop 130
aatcaatctgaagacctagaacctt

SEQ ID NO: 59602 - DNA, 25 bp, Artificial
  probe
  misc_feature (1)..(25): SEQ ID NO: 3299; WAN024AMK_at; Start 100; Stop 124
gctaaaaatcaatctgaagacctag

SEQ ID NO: 59603 - DNA, 25 bp, Artificial
  probe
  misc_feature (1)..(25): SEQ ID NO: 3299; WAN024AMK_at; Start 95; Stop 119
agagtgctaaaaatcaatctgaaga

SEQ ID NO: 59604 - DNA, 25 bp, Artificial
  probe
  misc_feature (1)..(25): SEQ ID NO: 3299; WAN024AMK_at; Start 40; Stop 64
acccttagaagagaatgtcaagaca

SEQ ID NO: 59605 - DNA, 25 bp, Artificial
  probe
  misc_feature (1)..(25): SEQ ID NO: 3299; WAN024AMK_at; Start 27; Stop 51
gattctattatacacccttagaaga

SEQ ID NO: 59606 - DNA, 25 bp, Artificial
  probe
  misc_feature (1)..(25): SEQ ID NO: 3299; WAN024AMK_at; Start 104; Stop 128
aaaatcaatctgaagacctagaacc

SEQ ID NO: 59607 - DNA, 25 bp, Artificial
  probe
  misc_feature (1)..(25): SEQ ID NO: 3198; WAN024AML_at; Start 67; Stop 91
ttgtcttgacattctcttctaaggg

SEQ ID NO: 59608 - DNA, 25 bp, Artificial
  probe
  misc_feature (1)..(25): SEQ ID NO: 3198; WAN024AML_at; Start 12; Stop 36
gtcttcagattgatttttagcactc

SEQ ID NO: 59609 - DNA, 25 bp, Artificial
  probe
  misc_feature (1)..(25): SEQ ID NO: 3198; WAN024AML_at; Start 1; Stop 25
caaggttctaggtcttcagattgat

SEQ ID NO: 59610 - DNA, 25 bp, Artificial
  probe
  misc_feature (1)..(25): SEQ ID NO: 3198; WAN024AML_at; Start 73; Stop 97
tgacattctcttctaagggtgtata

SEQ ID NO: 59611 - DNA, 25 bp, Artificial
  probe
  misc_feature (1)..(25): SEQ ID NO: 3198; WAN024AML_at; Start 45; Stop 69
agagtgctaattttttgagtttttg

SEQ ID NO: 59612 - DNA, 25 bp, Artificial
  probe
  misc_feature (1)..(25): SEQ ID NO: 3198; WAN024AML_at; Start 61; Stop 85
gagtttttgtcttgacattctcttc

SEQ ID NO: 59613 - DNA, 25 bp, Artificial
  probe
  misc_feature (1)..(25): SEQ ID NO: 3198; WAN024AML_at; Start 2; Stop 26
aaggttctaggtcttcagattgatt

SEQ ID NO: 59614 - DNA, 25 bp, Artificial
  probe
  misc_feature (1)..(25): SEQ ID NO: 3198; WAN024AML_at; Start 83; Stop 107
ttctaagggtgtataatagaatcat

SEQ ID NO: 59615 - DNA, 25 bp, Artificial
  probe
  misc_feature (1)..(25): SEQ ID NO: 3198; WAN024AML_at; Start 76; Stop 100
cattctcttctaagggtgtataata

SEQ ID NO: 59616 - DNA, 25 bp, Artificial
  probe
  misc_feature (1)..(25): SEQ ID NO: 3198; WAN024AML_at; Start 9; Stop 33
taggtcttcagattgatttttagca

SEQ ID NO: 59617 - DNA, 25 bp, Artificial
  probe
  misc_feature (1)..(25): SEQ ID NO: 3198; WAN024AML_at; Start 7; Stop 31
tctaggtcttcagattgatttttag

SEQ ID NO: 59618 - DNA, 25 bp, Artificial
  probe
  misc_feature (1)..(25): SEQ ID NO: 3198; WAN024AML_at; Start 68; Stop 92
tgtcttgacattctcttctaagggt

SEQ ID NO: 59619 - DNA, 25 bp, Artificial
  probe
  misc_feature (1)..(25): SEQ ID NO: 3198; WAN024AML_at; Start 72; Stop 96
ttgacattctcttctaagggtgtat

SEQ ID NO: 59620 - DNA, 25 bp, Artificial
  probe
  misc_feature (1)..(25): SEQ ID NO: 3198; WAN024AML_at; Start 40; Stop 64
ataaaagagtgctaattttttgagt

SEQ ID NO: 59621 - DNA, 25 bp, Artificial
  probe
  misc_feature (1)..(25): SEQ ID NO: 3198; WAN024AML_at; Start 80; Stop 104
ctcttctaagggtgtataatagaat

SEQ ID NO: 59622 - DNA, 25 bp, Artificial
  probe
  misc_feature (1)..(25): SEQ ID NO: 3198; WAN024AML_at; Start 65; Stop 89
ttttgtcttgacattctcttctaag

SEQ ID NO: 59623 - DNA, 25 bp, Artificial
  probe
  misc_feature (1)..(25): SEQ ID NO: 3198; WAN024AML_at; Start 11; Stop 35
ggtcttcagattgatttttagcact

SEQ ID NO: 59624 - DNA, 25 bp, Artificial
  probe
  misc_feature (1)..(25): SEQ ID NO: 3198; WAN024AML_at; Start 71; Stop 95
cttgacattctcttctaagggtgta

SEQ ID NO: 59625 - DNA, 25 bp, Artificial
  probe
  misc_feature (1)..(25): SEQ ID NO: 3198; WAN024AML_at; Start 10; Stop 34
aggtcttcagattgatttttagcac

SEQ ID NO: 59626 - DNA, 25 bp, Artificial
  probe
  misc_feature (1)..(25): SEQ ID NO: 3198; WAN024AML_at; Start 75; Stop 99
acattctcttctaagggtgtataat

SEQ ID NO: 59627 - DNA, 25 bp, Artificial
  probe
  misc_feature (1)..(25): SEQ ID NO: 3198; WAN024AML_at; Start 13; Stop 37
tcttcagattgatttttagcactct

SEQ ID NO: 59628 - DNA, 25 bp, Artificial
  probe
  misc_feature (1)..(25): SEQ ID NO: 3198; WAN024AML_at; Start 82; Stop 106
cttctaagggtgtataatagaatca

SEQ ID NO: 59629 - DNA, 25 bp, Artificial
  probe
  misc_feature (1)..(25): SEQ ID NO: 3198; WAN024AML_at; Start 8; Stop 32
ctaggtcttcagattgatttttagc

SEQ ID NO: 59630 - DNA, 25 bp, Artificial
  probe
  misc_feature (1)..(25): SEQ ID NO: 3198; WAN024AML_at; Start 5; Stop 29
gttctaggtcttcagattgattttt

SEQ ID NO: 59631 - DNA, 25 bp, Artificial
  probe
  misc_feature (1)..(25): SEQ ID NO: 3198; WAN024AML_at; Start 81; Stop 105
tcttctaagggtgtataatagaatc

SEQ ID NO: 59632 - DNA, 25 bp, Artificial
  probe
  misc_feature (1)..(25): SEQ ID NO: 3198; WAN024AML_at; Start 4; Stop 28
ggttctaggtcttcagattgatttt

SEQ ID NO: 59633 - DNA, 25 bp, Artificial
  probe
  misc_feature (1)..(25): SEQ ID NO: 3198; WAN024AML_at; Start 3; Stop 27
aggttctaggtcttcagattgattt

SEQ ID NO: 59634 - DNA, 25 bp, Artificial
  probe
  misc_feature (1)..(25): SEQ ID NO: 3198; WAN024AML_at; Start 79; Stop 103
tctcttctaagggtgtataatagaa

SEQ ID NO: 59635 - DNA, 25 bp, Artificial
  probe
  misc_feature (1)..(25): SEQ ID NO: 3198; WAN024AML_at; Start 77; Stop 101
attctcttctaagggtgtataatag

SEQ ID NO: 59636 - DNA, 25 bp, Artificial
  probe
  misc_feature (1)..(25): SEQ ID NO: 3198; WAN024AML_at; Start 14; Stop 38
cttcagattgatttttagcactctt

SEQ ID NO: 59637 - DNA, 25 bp, Artificial
  probe
  misc_feature (1)..(25): SEQ ID NO: 3198; WAN024AML_at; Start 66; Stop 90
tttgtcttgacattctcttctaagg

SEQ ID NO: 59638 - DNA, 25 bp, Artificial
  probe
  misc_feature (1)..(25): SEQ ID NO: 3198; WAN024AML_at; Start 74; Stop 98
gacattctcttctaagggtgtataa

SEQ ID NO: 59639 - DNA, 25 bp, Artificial
  probe
  misc_feature (1)..(25): SEQ ID NO: 3198; WAN024AML_at; Start 70; Stop 94
tcttgacattctcttctaagggtgt

SEQ ID NO: 59640 - DNA, 25 bp, Artificial
  probe
  misc_feature (1)..(25): SEQ ID NO: 3198; WAN024AML_at; Start 69; Stop 93
gtcttgacattctcttctaagggtg

SEQ ID NO: 59641 - DNA, 25 bp, Artificial
  probe
  misc_feature (1)..(25): SEQ ID NO: 4735; WAN024AMM_at; Start 180; Stop 204
aagtcgcctgccgaaaacagcgaaa

SEQ ID NO: 59642 - DNA, 25 bp, Artificial
  probe
  misc_feature (1)..(25): SEQ ID NO: 4735; WAN024AMM_at; Start 168; Stop 192
tagaatgataataagtcgcctgccg

SEQ ID NO: 59643 - DNA, 25 bp, Artificial
  probe
  misc_feature (1)..(25): SEQ ID NO: 4735; WAN024AMM_at; Start 44; Stop 68
aatattatggcaaaatttacgccag

SEQ ID NO: 59644 - DNA, 25 bp, Artificial
  probe
  misc_feature (1)..(25): SEQ ID NO: 4735; WAN024AMM_at; Start 74; Stop 98
gaacggctgatgtagatattttata

SEQ ID NO: 59645 - DNA, 25 bp, Artificial
  probe
  misc_feature (1)..(25): SEQ ID NO: 4735; WAN024AMM_at; Start 146; Stop 170
ccagcccgactgaaagtgcttatag

SEQ ID NO: 59646 - DNA, 25 bp, Artificial
  probe
  misc_feature (1)..(25): SEQ ID NO: 4735; WAN024AMM_at; Start 170; Stop 194
gaatgataataagtcgcctgccgaa

SEQ ID NO: 59647 - DNA, 25 bp, Artificial
  probe
  misc_feature (1)..(25): SEQ ID NO: 4735; WAN024AMM_at; Start 320; Stop 344
tctgatagtttattttatggagaag

SEQ ID NO: 59648 - DNA, 25 bp, Artificial
  probe
  misc_feature (1)..(25): SEQ ID NO: 4735; WAN024AMM_at; Start 246; Stop 270
gtatattgcatacttattttcaaca

SEQ ID NO: 59649 - DNA, 25 bp, Artificial
  probe
  misc_feature (1)..(25): SEQ ID NO: 4735; WAN024AMM_at; Start 65; Stop 89
ccagtttttgaacggctgatgtaga

SEQ ID NO: 59650 - DNA, 25 bp, Artificial
  probe
  misc_feature (1)..(25): SEQ ID NO: 4735; WAN024AMM_at; Start 345; Stop 369
tagatttttagaatgcggagggttc

SEQ ID NO: 59651 - DNA, 25 bp, Artificial
  probe
  misc_feature (1)..(25): SEQ ID NO: 4735; WAN024AMM_at; Start 79; Stop 103
gctgatgtagatattttatactttc

SEQ ID NO: 59652 - DNA, 25 bp, Artificial
  probe
  misc_feature (1)..(25): SEQ ID NO: 4735; WAN024AMM_at; Start 213; Stop 237
tgttatgcggagataatctgacgcg

SEQ ID NO: 59653 - DNA, 25 bp, Artificial
  probe
  misc_feature (1)..(25): SEQ ID NO: 4735; WAN024AMM_at; Start 151; Stop 175
ccgactgaaagtgcttatagaatga

SEQ ID NO: 59654 - DNA, 25 bp, Artificial
  probe
  misc_feature (1)..(25): SEQ ID NO: 4735; WAN024AMM_at; Start 149; Stop 173
gcccgactgaaagtgcttatagaat

SEQ ID NO: 59655 - DNA, 25 bp, Artificial
  probe
  misc_feature (1)..(25): SEQ ID NO: 4735; WAN024AMM_at; Start 276; Stop 300
gcagagtatttttataagtgtgata

SEQ ID NO: 59656 - DNA, 25 bp, Artificial
  probe
  misc_feature (1)..(25): SEQ ID NO: 4735; WAN024AMM_at; Start 95; Stop 119
tatactttcaaaatgtttaaatgtg

SEQ ID NO: 59657 - DNA, 25 bp, Artificial
  probe
  misc_feature (1)..(25): SEQ ID NO: 4735; WAN024AMM_at; Start 347; Stop 371
gatttttagaatgcggagggttcaa

SEQ ID NO: 59658 - DNA, 25 bp, Artificial
  probe
  misc_feature (1)..(25): SEQ ID NO: 4735; WAN024AMM_at; Start 234; Stop 258
cgcgatgcgaaagtatattgcatac

SEQ ID NO: 59659 - DNA, 25 bp, Artificial
  probe
  misc_feature (1)..(25): SEQ ID NO: 4735; WAN024AMM_at; Start 337; Stop 361
tggagaagtagatttttagaatgcg

SEQ ID NO: 59660 - DNA, 25 bp, Artificial
  probe
  misc_feature (1)..(25): SEQ ID NO: 4735; WAN024AMM_at; Start 230; Stop 254
ctgacgcgatgcgaaagtatattgc

SEQ ID NO: 59661 - DNA, 25 bp, Artificial
  probe
  misc_feature (1)..(25): SEQ ID NO: 4735; WAN024AMM_at; Start 183; Stop 207
tcgcctgccgaaaacagcgaaaaat

SEQ ID NO: 59662 - DNA, 25 bp, Artificial
  probe
  misc_feature (1)..(25): SEQ ID NO: 4735; WAN024AMM_at; Start 262; Stop 286
ttttcaacaatttagcagagtattt

SEQ ID NO: 59663 - DNA, 25 bp, Artificial
  probe
  misc_feature (1)..(25): SEQ ID NO: 4735; WAN024AMM_at; Start 32; Stop 56
tatttaaacgaaaatattatggcaa

SEQ ID NO: 59664 - DNA, 25 bp, Artificial
  probe
  misc_feature (1)..(25): SEQ ID NO: 4735; WAN024AMM_at; Start 61; Stop 85
tacgccagtttttgaacggctgatg

SEQ ID NO: 59665 - DNA, 25 bp, Artificial
  probe
  misc_feature (1)..(25): SEQ ID NO: 4735; WAN024AMM_at; Start 176; Stop 200
taataagtcgcctgccgaaaacagc

SEQ ID NO: 59666 - DNA, 25 bp, Artificial
  probe
  misc_feature (1)..(25): SEQ ID NO: 4735; WAN024AMM_at; Start 143; Stop 167
tcaccagcccgactgaaagtgctta

SEQ ID NO: 59667 - DNA, 25 bp, Artificial
  probe
  misc_feature (1)..(25): SEQ ID NO: 4735; WAN024AMM_at; Start 166; Stop 190
tatagaatgataataagtcgcctgc

SEQ ID NO: 59668 - DNA, 25 bp, Artificial
  probe
  misc_feature (1)..(25): SEQ ID NO: 4735; WAN024AMM_at; Start 304; Stop 328
tagaagtataatttgttctgatagt

SEQ ID NO: 59669 - DNA, 25 bp, Artificial
  probe
  misc_feature (1)..(25): SEQ ID NO: 4735; WAN024AMM_at; Start 220; Stop 244
cggagataatctgacgcgatgcgaa

SEQ ID NO: 59670 - DNA, 25 bp, Artificial
  probe
  misc_feature (1)..(25): SEQ ID NO: 4735; WAN024AMM_at; Start 216; Stop 240
tatgcggagataatctgacgcgatg

SEQ ID NO: 59671 - DNA, 25 bp, Artificial
  probe
  misc_feature (1)..(25): SEQ ID NO: 4735; WAN024AMM_at; Start 58; Stop 82
atttacgccagtttttgaacggctg

SEQ ID NO: 59672 - DNA, 25 bp, Artificial
  probe
  misc_feature (1)..(25): SEQ ID NO: 4735; WAN024AMM_at; Start 186; Stop 210
cctgccgaaaacagcgaaaaatagc

SEQ ID NO: 59673 - DNA, 25 bp, Artificial
  probe
  misc_feature (1)..(25): SEQ ID NO: 4735; WAN024AMM_at; Start 222; Stop 246
gagataatctgacgcgatgcgaaag

SEQ ID NO: 59674 - DNA, 25 bp, Artificial
  probe
  misc_feature (1)..(25): SEQ ID NO: 4735; WAN024AMM_at; Start 226; Stop 250
taatctgacgcgatgcgaaagtata

SEQ ID NO: 59675 - DNA, 25 bp, Artificial
  probe
  misc_feature (1)..(25): SEQ ID NO: 3160; WAN024AMN_at; Start 163; Stop 187
gctatttttcgctgttttcggcagg

SEQ ID NO: 59676 - DNA, 25 bp, Artificial
  probe
  misc_feature (1)..(25): SEQ ID NO: 3160; WAN024AMN_at; Start 91; Stop 115
actctgctaaattgttgaaaataag

SEQ ID NO: 59677 - DNA, 25 bp, Artificial
  probe
  misc_feature (1)..(25): SEQ ID NO: 3160; WAN024AMN_at; Start 277; Stop 301
taaaatatctacatcagccgttcaa

SEQ ID NO: 59678 - DNA, 25 bp, Artificial
  probe
  misc_feature (1)..(25): SEQ ID NO: 3160; WAN024AMN_at; Start 275; Stop 299
tataaaatatctacatcagccgttc

SEQ ID NO: 59679 - DNA, 25 bp, Artificial
  probe
  misc_feature (1)..(25): SEQ ID NO: 3160; WAN024AMN_at; Start 132; Stop 156
gcatcgcgtcagattatctccgcat

SEQ ID NO: 59680 - DNA, 25 bp, Artificial
  probe
  misc_feature (1)..(25): SEQ ID NO: 3160; WAN024AMN_at; Start 299; Stop 323
caaaaactggcgtaaattttgccat

SEQ ID NO: 59681 - DNA, 25 bp, Artificial
  probe
  misc_feature (1)..(25): SEQ ID NO: 3160; WAN024AMN_at; Start 173; Stop 197
gctgttttcggcaggcgacttatta

SEQ ID NO: 59682 - DNA, 25 bp, Artificial
  probe
  misc_feature (1)..(25): SEQ ID NO: 3160; WAN024AMN_at; Start 206; Stop 230
taagcactttcagtcgggctggtga

SEQ ID NO: 59683 - DNA, 25 bp, Artificial
  probe
  misc_feature (1)..(25): SEQ ID NO: 3160; WAN024AMN_at; Start 204; Stop 228
tataagcactttcagtcgggctggt

SEQ ID NO: 59684 - DNA, 25 bp, Artificial
  probe
  misc_feature (1)..(25): SEQ ID NO: 3160; WAN024AMN_at; Start 137; Stop 161
gcgtcagattatctccgcataacac

SEQ ID NO: 59685 - DNA, 25 bp, Artificial
  probe
  misc_feature (1)..(25): SEQ ID NO: 3160; WAN024AMN_at; Start 116; Stop 140
tatgcaatatactttcgcatcgcgt

SEQ ID NO: 59686 - DNA, 25 bp, Artificial
  probe
  misc_feature (1)..(25): SEQ ID NO: 3160; WAN024AMN_at; Start 288; Stop 312
catcagccgttcaaaaactggcgta

SEQ ID NO: 59687 - DNA, 25 bp, Artificial
  probe
  misc_feature (1)..(25): SEQ ID NO: 3160; WAN024AMN_at; Start 270; Stop 294
gaaagtataaaatatctacatcagc

SEQ ID NO: 59688 - DNA, 25 bp, Artificial
  probe
  misc_feature (1)..(25): SEQ ID NO: 3160; WAN024AMN_at; Start 309; Stop 333
cgtaaattttgccataatattttcg

SEQ ID NO: 59689 - DNA, 25 bp, Artificial
  probe
  misc_feature (1)..(25): SEQ ID NO: 3160; WAN024AMN_at; Start 42; Stop 66
taaactatcagaacaaattatactt

SEQ ID NO: 59690 - DNA, 25 bp, Artificial
  probe
  misc_feature (1)..(25): SEQ ID NO: 3160; WAN024AMN_at; Start 165; Stop 189
tatttttcgctgttttcggcaggcg

SEQ ID NO: 59691 - DNA, 25 bp, Artificial
  probe
  misc_feature (1)..(25): SEQ ID NO: 3160; WAN024AMN_at; Start 250; Stop 274
taatcacatttaaacattttgaaag

SEQ ID NO: 59692 - DNA, 25 bp, Artificial
  probe
  misc_feature (1)..(25): SEQ ID NO: 3160; WAN024AMN_at; Start 103; Stop 127
tgttgaaaataagtatgcaatatac

SEQ ID NO: 59693 - DNA, 25 bp, Artificial
  probe
  misc_feature (1)..(25): SEQ ID NO: 3160; WAN024AMN_at; Start 183; Stop 207
gcaggcgacttattatcattctata

SEQ ID NO: 59694 - DNA, 25 bp, Artificial
  probe
  misc_feature (1)..(25): SEQ ID NO: 3160; WAN024AMN_at; Start 13; Stop 37
gcattctaaaaatctacttctccat

SEQ ID NO: 59695 - DNA, 25 bp, Artificial
  probe
  misc_feature (1)..(25): SEQ ID NO: 3160; WAN024AMN_at; Start 28; Stop 52
acttctccataaaataaactatcag

SEQ ID NO: 59696 - DNA, 25 bp, Artificial
  probe
  misc_feature (1)..(25): SEQ ID NO: 3160; WAN024AMN_at; Start 73; Stop 97
tatcacacttataaaaatactctgc

SEQ ID NO: 59697 - DNA, 25 bp, Artificial
  probe
  misc_feature (1)..(25): SEQ ID NO: 3160; WAN024AMN_at; Start 4; Stop 28
gaaccctccgcattctaaaaatcta

SEQ ID NO: 59698 - DNA, 25 bp, Artificial
  probe
  misc_feature (1)..(25): SEQ ID NO: 3160; WAN024AMN_at; Start 199; Stop 223
cattctataagcactttcagtcggg

SEQ ID NO: 59699 - DNA, 25 bp, Artificial
  probe
  misc_feature (1)..(25): SEQ ID NO: 3160; WAN024AMN_at; Start 202; Stop 226
tctataagcactttcagtcgggctg

SEQ ID NO: 59700 - DNA, 25 bp, Artificial
  probe
  misc_feature (1)..(25): SEQ ID NO: 3160; WAN024AMN_at; Start 291; Stop 315
cagccgttcaaaaactggcgtaaat

SEQ ID NO: 59701 - DNA, 25 bp, Artificial
  probe
  misc_feature (1)..(25): SEQ ID NO: 3160; WAN024AMN_at; Start 168; Stop 192
ttttcgctgttttcggcaggcgact

SEQ ID NO: 59702 - DNA, 25 bp, Artificial
  probe
  misc_feature (1)..(25): SEQ ID NO: 3160; WAN024AMN_at; Start 129; Stop 153
ttcgcatcgcgtcagattatctccg

SEQ ID NO: 59703 - DNA, 25 bp, Artificial
  probe
  misc_feature (1)..(25): SEQ ID NO: 3160; WAN024AMN_at; Start 123; Stop 147
tatactttcgcatcgcgtcagatta

SEQ ID NO: 59704 - DNA, 25 bp, Artificial
  probe
  misc_feature (1)..(25): SEQ ID NO: 3160; WAN024AMN_at; Start 119; Stop 143
gcaatatactttcgcatcgcgtcag

SEQ ID NO: 59705 - DNA, 25 bp, Artificial
  probe
  misc_feature (1)..(25): SEQ ID NO: 3160; WAN024AMN_at; Start 84; Stop 108
taaaaatactctgctaaattgttga

SEQ ID NO: 59706 - DNA, 25 bp, Artificial
  probe
  misc_feature (1)..(25): SEQ ID NO: 3160; WAN024AMN_at; Start 286; Stop 310
tacatcagccgttcaaaaactggcg

SEQ ID NO: 59707 - DNA, 25 bp, Artificial
  probe
  misc_feature (1)..(25): SEQ ID NO: 3160; WAN024AMN_at; Start 179; Stop 203
ttcggcaggcgacttattatcattc

SEQ ID NO: 59708 - DNA, 25 bp, Artificial
  probe
  misc_feature (1)..(25): SEQ ID NO: 3160; WAN024AMN_at; Start 284; Stop 308
tctacatcagccgttcaaaaactgg

SEQ ID NO: 59709 - DNA, 25 bp, Artificial
  probe
  misc_feature (1)..(25): SEQ ID NO: 7188; WAN024AMO_at; Start 106; Stop 130
gaaacgtcttgaattgcaaaaatta

SEQ ID NO: 59710 - DNA, 25 bp, Artificial
  probe
  misc_feature (1)..(25): SEQ ID NO: 7188; WAN024AMO_at; Start 108; Stop 132
aacgtcttgaattgcaaaaattaca

SEQ ID NO: 59711 - DNA, 25 bp, Artificial
  probe
  misc_feature (1)..(25): SEQ ID NO: 7188; WAN024AMO_at; Start 111; Stop 135
gtcttgaattgcaaaaattacatta

SEQ ID NO: 59712 - DNA, 25 bp, Artificial
  probe
  misc_feature (1)..(25): SEQ ID NO: 7188; WAN024AMO_at; Start 114; Stop 138
ttgaattgcaaaaattacattagac

SEQ ID NO: 59713 - DNA, 25 bp, Artificial
  probe
  misc_feature (1)..(25): SEQ ID NO: 7188; WAN024AMO_at; Start 110; Stop 134
cgtcttgaattgcaaaaattacatt

SEQ ID NO: 59714 - DNA, 25 bp, Artificial
  probe
  misc_feature (1)..(25): SEQ ID NO: 7188; WAN024AMO_at; Start 119; Stop 143
ttgcaaaaattacattagacttcct

SEQ ID NO: 59715 - DNA, 25 bp, Artificial
  probe
  misc_feature (1)..(25): SEQ ID NO: 7188; WAN024AMO_at; Start 117; Stop 141
aattgcaaaaattacattagacttc

SEQ ID NO: 59716 - DNA, 25 bp, Artificial
  probe
  misc_feature (1)..(25): SEQ ID NO: 7188; WAN024AMO_at; Start 109; Stop 133
acgtcttgaattgcaaaaattacat

SEQ ID NO: 59717 - DNA, 25 bp, Artificial
  probe
  misc_feature (1)..(25): SEQ ID NO: 7188; WAN024AMO_at; Start 122; Stop 146
caaaaattacattagacttcctgca

SEQ ID NO: 59718 - DNA, 25 bp, Artificial
  probe
  misc_feature (1)..(25): SEQ ID NO: 7188; WAN024AMO_at; Start 120; Stop 144
tgcaaaaattacattagacttcctg

SEQ ID NO: 59719 - DNA, 25 bp, Artificial
  probe
  misc_feature (1)..(25): SEQ ID NO: 7188; WAN024AMO_at; Start 123; Stop 147
aaaaattacattagacttcctgcaa

SEQ ID NO: 59720 - DNA, 25 bp, Artificial
  probe
  misc_feature (1)..(25): SEQ ID NO: 7188; WAN024AMO_at; Start 115; Stop 139
tgaattgcaaaaattacattagact

SEQ ID NO: 59721 - DNA, 25 bp, Artificial
  probe
  misc_feature (1)..(25): SEQ ID NO: 7188; WAN024AMO_at; Start 113; Stop 137
cttgaattgcaaaaattacattaga

SEQ ID NO: 59722 - DNA, 25 bp, Artificial
  probe
  misc_feature (1)..(25): SEQ ID NO: 7188; WAN024AMO_at; Start 112; Stop 136
tcttgaattgcaaaaattacattag

SEQ ID NO: 59723 - DNA, 25 bp, Artificial
  probe
  misc_feature (1)..(25): SEQ ID NO: 7188; WAN024AMO_at; Start 121; Stop 145
gcaaaaattacattagacttcctgc

SEQ ID NO: 59724 - DNA, 25 bp, Artificial
  probe
  misc_feature (1)..(25): SEQ ID NO: 7188; WAN024AMO_at; Start 118; Stop 142
attgcaaaaattacattagacttcc

SEQ ID NO: 59725 - DNA, 25 bp, Artificial
  probe
  misc_feature (1)..(25): SEQ ID NO: 7188; WAN024AMO_at; Start 116; Stop 140
gaattgcaaaaattacattagactt

SEQ ID NO: 59726 - DNA, 25 bp, Artificial
  probe
  misc_feature (1)..(25): SEQ ID NO: 7733; WAN024AMP_at; Start 26; Stop 50
ttgcaattcaagacgtttcgatgac

SEQ ID NO: 59727 - DNA, 25 bp, Artificial
  probe
  misc_feature (1)..(25): SEQ ID NO: 7733; WAN024AMP_at; Start 44; Stop 68
cgatgactattcaaaatctggatga

SEQ ID NO: 59728 - DNA, 25 bp, Artificial
  probe
  misc_feature (1)..(25): SEQ ID NO: 7733; WAN024AMP_at; Start 45; Stop 69
gatgactattcaaaatctggatgaa

SEQ ID NO: 59729 - DNA, 25 bp, Artificial
  probe
  misc_feature (1)..(25): SEQ ID NO: 7733; WAN024AMP_at; Start 8; Stop 32
ggaagtctaatgtaatttttgcaat

SEQ ID NO: 59730 - DNA, 25 bp, Artificial
  probe
  misc_feature (1)..(25): SEQ ID NO: 7733; WAN024AMP_at; Start 51; Stop 75
tattcaaaatctggatgaaaaattt

SEQ ID NO: 59731 - DNA, 25 bp, Artificial
  probe
  misc_feature (1)..(25): SEQ ID NO: 7733; WAN024AMP_at; Start 96; Stop 120
aacttgtcaaagttacaacaagaca

SEQ ID NO: 59732 - DNA, 25 bp, Artificial
  probe
  misc_feature (1)..(25): SEQ ID NO: 7733; WAN024AMP_at; Start 43; Stop 67
tcgatgactattcaaaatctggatg

SEQ ID NO: 59733 - DNA, 25 bp, Artificial
  probe
  misc_feature (1)..(25): SEQ ID NO: 7733; WAN024AMP_at; Start 18; Stop 42
tgtaatttttgcaattcaagacgtt

SEQ ID NO: 59734 - DNA, 25 bp, Artificial
  probe
  misc_feature (1)..(25): SEQ ID NO: 7733; WAN024AMP_at; Start 23; Stop 47
tttttgcaattcaagacgtttcgat

SEQ ID NO: 59735 - DNA, 25 bp, Artificial
  probe
  misc_feature (1)..(25): SEQ ID NO: 7733; WAN024AMP_at; Start 35; Stop 59
aagacgtttcgatgactattcaaaa

SEQ ID NO: 59736 - DNA, 25 bp, Artificial
  probe
  misc_feature (1)..(25): SEQ ID NO: 7733; WAN024AMP_at; Start 4; Stop 28
tgcaggaagtctaatgtaatttttg

SEQ ID NO: 59737 - DNA, 25 bp, Artificial
  probe
  misc_feature (1)..(25): SEQ ID NO: 7733; WAN024AMP_at; Start 39; Stop 63
cgtttcgatgactattcaaaatctg

SEQ ID NO: 59738 - DNA, 25 bp, Artificial
  probe
  misc_feature (1)..(25): SEQ ID NO: 7733; WAN024AMP_at; Start 5; Stop 29
gcaggaagtctaatgtaatttttgc

SEQ ID NO: 59739 - DNA, 25 bp, Artificial
  probe
  misc_feature (1)..(25): SEQ ID NO: 7733; WAN024AMP_at; Start 48; Stop 72
gactattcaaaatctggatgaaaaa

SEQ ID NO: 59740 - DNA, 25 bp, Artificial
  probe
  misc_feature (1)..(25): SEQ ID NO: 7733; WAN024AMP_at; Start 47; Stop 71
tgactattcaaaatctggatgaaaa

SEQ ID NO: 59741 - DNA, 25 bp, Artificial
  probe
  misc_feature (1)..(25): SEQ ID NO: 7733; WAN024AMP_at; Start 24; Stop 48
ttttgcaattcaagacgtttcgatg

SEQ ID NO: 59742 - DNA, 25 bp, Artificial
  probe
  misc_feature (1)..(25): SEQ ID NO: 7733; WAN024AMP_at; Start 36; Stop 60
agacgtttcgatgactattcaaaat

SEQ ID NO: 59743 - DNA, 25 bp, Artificial
  probe
  misc_feature (1)..(25): SEQ ID NO: 7733; WAN024AMP_at; Start 42; Stop 66
ttcgatgactattcaaaatctggat

SEQ ID NO: 59744 - DNA, 25 bp, Artificial
  probe
  misc_feature (1)..(25): SEQ ID NO: 7733; WAN024AMP_at; Start 28; Stop 52
gcaattcaagacgtttcgatgacta

SEQ ID NO: 59745 - DNA, 25 bp, Artificial
  probe
  misc_feature (1)..(25): SEQ ID NO: 7733; WAN024AMP_at; Start 37; Stop 61
gacgtttcgatgactattcaaaatc

SEQ ID NO: 59746 - DNA, 25 bp, Artificial
  probe
  misc_feature (1)..(25): SEQ ID NO: 7733; WAN024AMP_at; Start 22; Stop 46
atttttgcaattcaagacgtttcga

SEQ ID NO: 59747 - DNA, 25 bp, Artificial
  probe
  misc_feature (1)..(25): SEQ ID NO: 7733; WAN024AMP_at; Start 34; Stop 58
caagacgtttcgatgactattcaaa

SEQ ID NO: 59748 - DNA, 25 bp, Artificial
  probe
  misc_feature (1)..(25): SEQ ID NO: 7733; WAN024AMP_at; Start 21; Stop 45
aatttttgcaattcaagacgtttcg

SEQ ID NO: 59749 - DNA, 25 bp, Artificial
  probe
  misc_feature (1)..(25): SEQ ID NO: 7733; WAN024AMP_at; Start 7; Stop 31
aggaagtctaatgtaatttttgcaa

SEQ ID NO: 59750 - DNA, 25 bp, Artificial
  probe
  misc_feature (1)..(25): SEQ ID NO: 7733; WAN024AMP_at; Start 98; Stop 122
cttgtcaaagttacaacaagacaaa

SEQ ID NO: 59751 - DNA, 25 bp, Artificial
  probe
  misc_feature (1)..(25): SEQ ID NO: 7733; WAN024AMP_at; Start 97; Stop 121
acttgtcaaagttacaacaagacaa

SEQ ID NO: 59752 - DNA, 25 bp, Artificial
  probe
  misc_feature (1)..(25): SEQ ID NO: 7733; WAN024AMP_at; Start 16; Stop 40
aatgtaatttttgcaattcaagacg

SEQ ID NO: 59753 - DNA, 25 bp, Artificial
  probe
  misc_feature (1)..(25): SEQ ID NO: 7733; WAN024AMP_at; Start 41; Stop 65
tttcgatgactattcaaaatctgga

SEQ ID NO: 59754 - DNA, 25 bp, Artificial
  probe
  misc_feature (1)..(25): SEQ ID NO: 7733; WAN024AMP_at; Start 2; Stop 26
tttgcaggaagtctaatgtaatttt

SEQ ID NO: 59755 - DNA, 25 bp, Artificial
  probe
  misc_feature (1)..(25): SEQ ID NO: 7733; WAN024AMP_at; Start 6; Stop 30
caggaagtctaatgtaatttttgca

SEQ ID NO: 59756 - DNA, 25 bp, Artificial
  probe
  misc_feature (1)..(25): SEQ ID NO: 7733; WAN024AMP_at; Start 25; Stop 49
tttgcaattcaagacgtttcgatga

SEQ ID NO: 59757 - DNA, 25 bp, Artificial
  probe
  misc_feature (1)..(25): SEQ ID NO: 7733; WAN024AMP_at; Start 40; Stop 64
gtttcgatgactattcaaaatctgg

SEQ ID NO: 59758 - DNA, 25 bp, Artificial
  probe
  misc_feature (1)..(25): SEQ ID NO: 7733; WAN024AMP_at; Start 27; Stop 51
tgcaattcaagacgtttcgatgact

SEQ ID NO: 59759 - DNA, 25 bp, Artificial
  probe
  misc_feature (1)..(25): SEQ ID NO: 7733; WAN024AMP_at; Start 20; Stop 44
taatttttgcaattcaagacgtttc

SEQ ID NO: 59760 - DNA, 25 bp, Artificial
  probe
  misc_feature (1)..(25): SEQ ID NO: 84; WAN024AMQ_at; Start 97; Stop 121
aaagtctacaaacaagttggtatca

SEQ ID NO: 59761 - DNA, 25 bp, Artificial
  probe
  misc_feature (1)..(25): SEQ ID NO: 84; WAN024AMQ_at; Start 191; Stop 215
cgatgacaattcaagatttggatga

SEQ ID NO: 59762 - DNA, 25 bp, Artificial
  probe
  misc_feature (1)..(25): SEQ ID NO: 84; WAN024AMQ_at; Start 84; Stop 108
gatagcaggatgaaaagtctacaaa

SEQ ID NO: 59763 - DNA, 25 bp, Artificial
  probe
  misc_feature (1)..(25): SEQ ID NO: 84; WAN024AMQ_at; Start 173; Stop 197
taacaattcaagatgtttcgatgac

SEQ ID NO: 59764 - DNA, 25 bp, Artificial
  probe
  misc_feature (1)..(25): SEQ ID NO: 84; WAN024AMQ_at; Start 187; Stop 211
gtttcgatgacaattcaagatttgg

SEQ ID NO: 59765 - DNA, 25 bp, Artificial
  probe
  misc_feature (1)..(25): SEQ ID NO: 84; WAN024AMQ_at; Start 11; Stop 35
tctcccctgtatttgctagcttaat

SEQ ID NO: 59766 - DNA, 25 bp, Artificial
  probe
  misc_feature (1)..(25): SEQ ID NO: 84; WAN024AMQ_at; Start 195; Stop 219
gacaattcaagatttggatgaaaaa

SEQ ID NO: 59767 - DNA, 25 bp, Artificial
  probe
  misc_feature (1)..(25): SEQ ID NO: 84; WAN024AMQ_at; Start 281; Stop 305
taaaaatcgctcttgattgataagc

SEQ ID NO: 59768 - DNA, 25 bp, Artificial
  probe
  misc_feature (1)..(25): SEQ ID NO: 84; WAN024AMQ_at; Start 92; Stop 116
gatgaaaagtctacaaacaagttgg

SEQ ID NO: 59769 - DNA, 25 bp, Artificial
  probe
  misc_feature (1)..(25): SEQ ID NO: 84; WAN024AMQ_at; Start 66; Stop 90
cctgtcaaaatgatatgtgatagca

SEQ ID NO: 59770 - DNA, 25 bp, Artificial
  probe
  misc_feature (1)..(25): SEQ ID NO: 84; WAN024AMQ_at; Start 253; Stop 277
agttgcaacgggtgctgctacatta

SEQ ID NO: 59771 - DNA, 25 bp, Artificial
  probe
  misc_feature (1)..(25): SEQ ID NO: 84; WAN024AMQ_at; Start 19; Stop 43
gtatttgctagcttaatttacaggg

SEQ ID NO: 59772 - DNA, 25 bp, Artificial
  probe
  misc_feature (1)..(25): SEQ ID NO: 84; WAN024AMQ_at; Start 288; Stop 312
cgctcttgattgataagctggattt

SEQ ID NO: 59773 - DNA, 25 bp, Artificial
  probe
  misc_feature (1)..(25): SEQ ID NO: 84; WAN024AMQ_at; Start 261; Stop 285
cgggtgctgctacattatgttaaaa

SEQ ID NO: 59774 - DNA, 25 bp, Artificial
  probe
  misc_feature (1)..(25): SEQ ID NO: 84; WAN024AMQ_at; Start 81; Stop 105
tgtgatagcaggatgaaaagtctac

SEQ ID NO: 59775 - DNA, 25 bp, Artificial
  probe
  misc_feature (1)..(25): SEQ ID NO: 84; WAN024AMQ_at; Start 258; Stop 282
caacgggtgctgctacattatgtta

SEQ ID NO: 59776 - DNA, 25 bp, Artificial
  probe
  misc_feature (1)..(25): SEQ ID NO: 84; WAN024AMQ_at; Start 49; Stop 73
tctttaatattgtttcgcctgtcaa

SEQ ID NO: 59777 - DNA, 25 bp, Artificial
  probe
  misc_feature (1)..(25): SEQ ID NO: 84; WAN024AMQ_at; Start 71; Stop 95
caaaatgatatgtgatagcaggatg

SEQ ID NO: 59778 - DNA, 25 bp, Artificial
  probe
  misc_feature (1)..(25): SEQ ID NO: 84; WAN024AMQ_at; Start 243; Stop 267
aacttgtcaaagttgcaacgggtgc

SEQ ID NO: 59779 - DNA, 25 bp, Artificial
  probe
  misc_feature (1)..(25): SEQ ID NO: 84; WAN024AMQ_at; Start 295; Stop 319
gattgataagctggatttgttagga

SEQ ID NO: 59780 - DNA, 25 bp, Artificial
  probe
  misc_feature (1)..(25): SEQ ID NO: 84; WAN024AMQ_at; Start 246; Stop 270
ttgtcaaagttgcaacgggtgctgc

SEQ ID NO: 59781 - DNA, 25 bp, Artificial
  probe
  misc_feature (1)..(25): SEQ ID NO: 84; WAN024AMQ_at; Start 103; Stop 127
tacaaacaagttggtatcaatacaa

SEQ ID NO: 59782 - DNA, 25 bp, Artificial
  probe
  misc_feature (1)..(25): SEQ ID NO: 84; WAN024AMQ_at; Start 60; Stop 84
gtttcgcctgtcaaaatgatatgtg

SEQ ID NO: 59783 - DNA, 25 bp, Artificial
  probe
  misc_feature (1)..(25): SEQ ID NO: 84; WAN024AMQ_at; Start 63; Stop 87
tcgcctgtcaaaatgatatgtgata

SEQ ID NO: 59784 - DNA, 25 bp, Artificial
  probe
  misc_feature (1)..(25): SEQ ID NO: 84; WAN024AMQ_at; Start 56; Stop 80
tattgtttcgcctgtcaaaatgata

SEQ ID NO: 59785 - DNA, 25 bp, Artificial
  probe
  misc_feature (1)..(25): SEQ ID NO: 84; WAN024AMQ_at; Start 284; Stop 308
aaatcgctcttgattgataagctgg

SEQ ID NO: 59786 - DNA, 25 bp, Artificial
  probe
  misc_feature (1)..(25): SEQ ID NO: 84; WAN024AMQ_at; Start 248; Stop 272
gtcaaagttgcaacgggtgctgcta

SEQ ID NO: 59787 - DNA, 25 bp, Artificial
  probe
  misc_feature (1)..(25): SEQ ID NO: 84; WAN024AMQ_at; Start 88; Stop 112
gcaggatgaaaagtctacaaacaag

SEQ ID NO: 59788 - DNA, 25 bp, Artificial
  probe
  misc_feature (1)..(25): SEQ ID NO: 84; WAN024AMQ_at; Start 175; Stop 199
acaattcaagatgtttcgatgacaa

SEQ ID NO: 59789 - DNA, 25 bp, Artificial
  probe
  misc_feature (1)..(25): SEQ ID NO: 84; WAN024AMQ_at; Start 79; Stop 103
tatgtgatagcaggatgaaaagtct

SEQ ID NO: 59790 - DNA, 25 bp, Artificial
  probe
  misc_feature (1)..(25): SEQ ID NO: 84; WAN024AMQ_at; Start 273; Stop 297
cattatgttaaaaatcgctcttgat

SEQ ID NO: 59791 - DNA, 25 bp, Artificial
  probe
  misc_feature (1)..(25): SEQ ID NO: 84; WAN024AMQ_at; Start 268; Stop 292
tgctacattatgttaaaaatcgctc

SEQ ID NO: 59792 - DNA, 25 bp, Artificial
  probe
  misc_feature (1)..(25): SEQ ID NO: 84; WAN024AMQ_at; Start 6; Stop 30
aaatttctcccctgtatttgctagc

SEQ ID NO: 59793 - DNA, 25 bp, Artificial
  probe
  misc_feature (1)..(25): SEQ ID NO: 84; WAN024AMQ_at; Start 256; Stop 280
tgcaacgggtgctgctacattatgt

SEQ ID NO: 59794 - DNA, 25 bp, Artificial
  probe
  misc_feature (1)..(25): SEQ ID NO: 4453; WAN024AMR_at; Start 303; Stop 327
taagctagcaaatacaggggagaaa

SEQ ID NO: 59795 - DNA, 25 bp, Artificial
  probe
  misc_feature (1)..(25): SEQ ID NO: 4453; WAN024AMR_at; Start 198; Stop 222
tcctctttatattgtattgatacca

SEQ ID NO: 59796 - DNA, 25 bp, Artificial
  probe
  misc_feature (1)..(25): SEQ ID NO: 4453; WAN024AMR_at; Start 178; Stop 202
taagcattaaaaacatactttcctc

SEQ ID NO: 59797 - DNA, 25 bp, Artificial
  probe
  misc_feature (1)..(25): SEQ ID NO: 4453; WAN024AMR_at; Start 28; Stop 52
ccagcttatcaatcaagagcgattt

SEQ ID NO: 59798 - DNA, 25 bp, Artificial
  probe
  misc_feature (1)..(25): SEQ ID NO: 4453; WAN024AMR_at; Start 68; Stop 92
agcacccgttgcaactttgacaagt

SEQ ID NO: 59799 - DNA, 25 bp, Artificial
  probe
  misc_feature (1)..(25): SEQ ID NO: 4453; WAN024AMR_at; Start 70; Stop 94
cacccgttgcaactttgacaagttt

SEQ ID NO: 59800 - DNA, 25 bp, Artificial
  probe
  misc_feature (1)..(25): SEQ ID NO: 4453; WAN024AMR_at; Start 226; Stop 250
tgtttgtagacttttcatcctgcta

SEQ ID NO: 59801 - DNA, 25 bp, Artificial
  probe
  misc_feature (1)..(25): SEQ ID NO: 4453; WAN024AMR_at; Start 292; Stop 316
cccctgtaaattaagctagcaaata

SEQ ID NO: 59802 - DNA, 25 bp, Artificial
  probe
  misc_feature (1)..(25): SEQ ID NO: 4453; WAN024AMR_at; Start 234; Stop 258
gacttttcatcctgctatcacatat

SEQ ID NO: 59803 - DNA, 25 bp, Artificial
  probe
  misc_feature (1)..(25): SEQ ID NO: 4453; WAN024AMR_at; Start 249; Stop 273
tatcacatatcattttgacaggcga

SEQ ID NO: 59804 - DNA, 25 bp, Artificial
  probe
  misc_feature (1)..(25): SEQ ID NO: 4453; WAN024AMR_at; Start 254; Stop 278
catatcattttgacaggcgaaacaa

SEQ ID NO: 59805 - DNA, 25 bp, Artificial
  probe
  misc_feature (1)..(25): SEQ ID NO: 4453; WAN024AMR_at; Start 8; Stop 32
ttactcctttcctaacaaatccagc

SEQ ID NO: 59806 - DNA, 25 bp, Artificial
  probe
  misc_feature (1)..(25): SEQ ID NO: 4453; WAN024AMR_at; Start 66; Stop 90
gcagcacccgttgcaactttgacaa

SEQ ID NO: 59807 - DNA, 25 bp, Artificial
  probe
  misc_feature (1)..(25): SEQ ID NO: 4453; WAN024AMR_at; Start 34; Stop 58
tatcaatcaagagcgatttttaaca

SEQ ID NO: 59808 - DNA, 25 bp, Artificial
  probe
  misc_feature (1)..(25): SEQ ID NO: 4453; WAN024AMR_at; Start 57; Stop 81
cataatgtagcagcacccgttgcaa

SEQ ID NO: 59809 - DNA, 25 bp, Artificial
  probe
  misc_feature (1)..(25): SEQ ID NO: 4453; WAN024AMR_at; Start 59; Stop 83
taatgtagcagcacccgttgcaact

SEQ ID NO: 59810 - DNA, 25 bp, Artificial
  probe
  misc_feature (1)..(25): SEQ ID NO: 4453; WAN024AMR_at; Start 52; Stop 76
tttaacataatgtagcagcacccgt

SEQ ID NO: 59811 - DNA, 25 bp, Artificial
  probe
  misc_feature (1)..(25): SEQ ID NO: 4453; WAN024AMR_at; Start 41; Stop 65
caagagcgatttttaacataatgta

SEQ ID NO: 59812 - DNA, 25 bp, Artificial
  probe
  misc_feature (1)..(25): SEQ ID NO: 4453; WAN024AMR_at; Start 297; Stop 321
gtaaattaagctagcaaatacaggg

SEQ ID NO: 59813 - DNA, 25 bp, Artificial
  probe
  misc_feature (1)..(25): SEQ ID NO: 4453; WAN024AMR_at; Start 252; Stop 276
cacatatcattttgacaggcgaaac

SEQ ID NO: 59814 - DNA, 25 bp, Artificial
  probe
  misc_feature (1)..(25): SEQ ID NO: 4453; WAN024AMR_at; Start 262; Stop 286
tttgacaggcgaaacaatattaaag

SEQ ID NO: 59815 - DNA, 25 bp, Artificial
  probe
  misc_feature (1)..(25): SEQ ID NO: 4453; WAN024AMR_at; Start 20; Stop 44
taacaaatccagcttatcaatcaag

SEQ ID NO: 59816 - DNA, 25 bp, Artificial
  probe
  misc_feature (1)..(25): SEQ ID NO: 4453; WAN024AMR_at; Start 267; Stop 291
caggcgaaacaatattaaagaaact

SEQ ID NO: 59817 - DNA, 25 bp, Artificial
  probe
  misc_feature (1)..(25): SEQ ID NO: 4453; WAN024AMR_at; Start 143; Stop 167
tcgaaacatcttgaattgttaaaaa

SEQ ID NO: 59818 - DNA, 25 bp, Artificial
  probe
  misc_feature (1)..(25): SEQ ID NO: 4453; WAN024AMR_at; Start 54; Stop 78
taacataatgtagcagcacccgttg

SEQ ID NO: 59819 - DNA, 25 bp, Artificial
  probe
  misc_feature (1)..(25): SEQ ID NO: 4453; WAN024AMR_at; Start 187; Stop 211
aaaacatactttcctctttatattg

SEQ ID NO: 59820 - DNA, 25 bp, Artificial
  probe
  misc_feature (1)..(25): SEQ ID NO: 4453; WAN024AMR_at; Start 139; Stop 163
gtcatcgaaacatcttgaattgtta

SEQ ID NO: 59821 - DNA, 25 bp, Artificial
  probe
  misc_feature (1)..(25): SEQ ID NO: 4453; WAN024AMR_at; Start 63; Stop 87
gtagcagcacccgttgcaactttga

SEQ ID NO: 59822 - DNA, 25 bp, Artificial
  probe
  misc_feature (1)..(25): SEQ ID NO: 4453; WAN024AMR_at; Start 221; Stop 245
caacttgtttgtagacttttcatcc

SEQ ID NO: 59823 - DNA, 25 bp, Artificial
  probe
  misc_feature (1)..(25): SEQ ID NO: 4453; WAN024AMR_at; Start 23; Stop 47
caaatccagcttatcaatcaagagc

SEQ ID NO: 59824 - DNA, 25 bp, Artificial
  probe
  misc_feature (1)..(25): SEQ ID NO: 4453; WAN024AMR_at; Start 13; Stop 37
cctttcctaacaaatccagcttatc

SEQ ID NO: 59825 - DNA, 25 bp, Artificial
  probe
  misc_feature (1)..(25): SEQ ID NO: 4453; WAN024AMR_at; Start 231; Stop 255
gtagacttttcatcctgctatcaca

SEQ ID NO: 59826 - DNA, 25 bp, Artificial
  probe
  misc_feature (1)..(25): SEQ ID NO: 4453; WAN024AMR_at; Start 212; Stop 236
tattgataccaacttgtttgtagac

SEQ ID NO: 59827 - DNA, 25 bp, Artificial
  probe
  misc_feature (1)..(25): SEQ ID NO: 4453; WAN024AMR_at; Start 288; Stop 312
aactcccctgtaaattaagctagca

SEQ ID NO: 59828 - DNA, 25 bp, Artificial
  probe
  misc_feature (1)..(25): SEQ ID NO: 3260; WAN024AMS_at; Start 23; Stop 47
tgatagaaattccaccgcacgtaaa

SEQ ID NO: 59829 - DNA, 25 bp, Artificial
  probe
  misc_feature (1)..(25): SEQ ID NO: 3260; WAN024AMS_at; Start 3; Stop 27
taaaactcctatcttatgtttgata

SEQ ID NO: 59830 - DNA, 25 bp, Artificial
  probe
  misc_feature (1)..(25): SEQ ID NO: 3260; WAN024AMS_at; Start 15; Stop 39
cttatgtttgatagaaattccaccg

SEQ ID NO: 59831 - DNA, 25 bp, Artificial
  probe
  misc_feature (1)..(25): SEQ ID NO: 3260; WAN024AMS_at; Start 10; Stop 34
cctatcttatgtttgatagaaattc

SEQ ID NO: 59832 - DNA, 25 bp, Artificial
  probe
  misc_feature (1)..(25): SEQ ID NO: 3260; WAN024AMS_at; Start 11; Stop 35
ctatcttatgtttgatagaaattcc

SEQ ID NO: 59833 - DNA, 25 bp, Artificial
  probe
  misc_feature (1)..(25): SEQ ID NO: 3260; WAN024AMS_at; Start 16; Stop 40
ttatgtttgatagaaattccaccgc

SEQ ID NO: 59834 - DNA, 25 bp, Artificial
  probe
  misc_feature (1)..(25): SEQ ID NO: 3260; WAN024AMS_at; Start 6; Stop 30
aactcctatcttatgtttgatagaa

SEQ ID NO: 59835 - DNA, 25 bp, Artificial
  probe
  misc_feature (1)..(25): SEQ ID NO: 3260; WAN024AMS_at; Start 21; Stop 45
tttgatagaaattccaccgcacgta

SEQ ID NO: 59836 - DNA, 25 bp, Artificial
  probe
  misc_feature (1)..(25): SEQ ID NO: 3260; WAN024AMS_at; Start 5; Stop 29
aaactcctatcttatgtttgataga

SEQ ID NO: 59837 - DNA, 25 bp, Artificial
  probe
  misc_feature (1)..(25): SEQ ID NO: 3260; WAN024AMS_at; Start 19; Stop 43
tgtttgatagaaattccaccgcacg

SEQ ID NO: 59838 - DNA, 25 bp, Artificial
  probe
  misc_feature (1)..(25): SEQ ID NO: 3260; WAN024AMS_at; Start 17; Stop 41
tatgtttgatagaaattccaccgca

SEQ ID NO: 59839 - DNA, 25 bp, Artificial
  probe
  misc_feature (1)..(25): SEQ ID NO: 3260; WAN024AMS_at; Start 1; Stop 25
cgtaaaactcctatcttatgtttga

SEQ ID NO: 59840 - DNA, 25 bp, Artificial
  probe
  misc_feature (1)..(25): SEQ ID NO: 3260; WAN024AMS_at; Start 22; Stop 46
ttgatagaaattccaccgcacgtaa

SEQ ID NO: 59841 - DNA, 25 bp, Artificial
  probe
  misc_feature (1)..(25): SEQ ID NO: 3260; WAN024AMS_at; Start 12; Stop 36
tatcttatgtttgatagaaattcca

SEQ ID NO: 59842 - DNA, 25 bp, Artificial
  probe
  misc_feature (1)..(25): SEQ ID NO: 3260; WAN024AMS_at; Start 14; Stop 38
tcttatgtttgatagaaattccacc

SEQ ID NO: 59843 - DNA, 25 bp, Artificial
  probe
  misc_feature (1)..(25): SEQ ID NO: 3260; WAN024AMS_at; Start 32; Stop 56
ttccaccgcacgtaaaactattata

SEQ ID NO: 59844 - DNA, 25 bp, Artificial
  probe
  misc_feature (1)..(25): SEQ ID NO: 3260; WAN024AMS_at; Start 24; Stop 48
gatagaaattccaccgcacgtaaaa

SEQ ID NO: 59845 - DNA, 25 bp, Artificial
  probe
  misc_feature (1)..(25): SEQ ID NO: 3260; WAN024AMS_at; Start 18; Stop 42
atgtttgatagaaattccaccgcac

SEQ ID NO: 59846 - DNA, 25 bp, Artificial
  probe
  misc_feature (1)..(25): SEQ ID NO: 3260; WAN024AMS_at; Start 8; Stop 32
ctcctatcttatgtttgatagaaat

SEQ ID NO: 59847 - DNA, 25 bp, Artificial
  probe
  misc_feature (1)..(25): SEQ ID NO: 3260; WAN024AMS_at; Start 31; Stop 55
attccaccgcacgtaaaactattat

SEQ ID NO: 59848 - DNA, 25 bp, Artificial
  probe
  misc_feature (1)..(25): SEQ ID NO: 3260; WAN024AMS_at; Start 13; Stop 37
atcttatgtttgatagaaattccac

SEQ ID NO: 59849 - DNA, 25 bp, Artificial
  probe
  misc_feature (1)..(25): SEQ ID NO: 3260; WAN024AMS_at; Start 20; Stop 44
gtttgatagaaattccaccgcacgt

SEQ ID NO: 59850 - DNA, 25 bp, Artificial
  probe
  misc_feature (1)..(25): SEQ ID NO: 3260; WAN024AMS_at; Start 9; Stop 33
tcctatcttatgtttgatagaaatt

SEQ ID NO: 59851 - DNA, 25 bp, Artificial
  probe
  misc_feature (1)..(25): SEQ ID NO: 3260; WAN024AMS_at; Start 2; Stop 26
gtaaaactcctatcttatgtttgat

SEQ ID NO: 59852 - DNA, 25 bp, Artificial
  probe
  misc_feature (1)..(25): SEQ ID NO: 3260; WAN024AMS_at; Start 4; Stop 28
aaaactcctatcttatgtttgatag

SEQ ID NO: 59853 - DNA, 25 bp, Artificial
  probe
  misc_feature (1)..(25): SEQ ID NO: 3260; WAN024AMS_at; Start 7; Stop 31
actcctatcttatgtttgatagaaa

SEQ ID NO: 59854 - DNA, 25 bp, Artificial
  probe
  misc_feature (1)..(25): SEQ ID NO: 4543; WAN024AMT_at; Start 20; Stop 44
gtggaatttctatcaaacataagat

SEQ ID NO: 59855 - DNA, 25 bp, Artificial
  probe
  misc_feature (1)..(25): SEQ ID NO: 4543; WAN024AMT_at; Start 22; Stop 46
ggaatttctatcaaacataagatag

SEQ ID NO: 59856 - DNA, 25 bp, Artificial
  probe
  misc_feature (1)..(25): SEQ ID NO: 4543; WAN024AMT_at; Start 13; Stop 37
acgtgcggtggaatttctatcaaac

SEQ ID NO: 59857 - DNA, 25 bp, Artificial
  probe
  misc_feature (1)..(25): SEQ ID NO: 4543; WAN024AMT_at; Start 31; Stop 55
atcaaacataagataggagttttac

SEQ ID NO: 59858 - DNA, 25 bp, Artificial
  probe
  misc_feature (1)..(25): SEQ ID NO: 4543; WAN024AMT_at; Start 28; Stop 52
tctatcaaacataagataggagttt

SEQ ID NO: 59859 - DNA, 25 bp, Artificial
  probe
  misc_feature (1)..(25): SEQ ID NO: 4543; WAN024AMT_at; Start 29; Stop 53
ctatcaaacataagataggagtttt

SEQ ID NO: 59860 - DNA, 25 bp, Artificial
  probe
  misc_feature (1)..(25): SEQ ID NO: 4543; WAN024AMT_at; Start 16; Stop 40
tgcggtggaatttctatcaaacata

SEQ ID NO: 59861 - DNA, 25 bp, Artificial
  probe
  misc_feature (1)..(25): SEQ ID NO: 4543; WAN024AMT_at; Start 10; Stop 34
tttacgtgcggtggaatttctatca

SEQ ID NO: 59862 - DNA, 25 bp, Artificial
  probe
  misc_feature (1)..(25): SEQ ID NO: 4543; WAN024AMT_at; Start 18; Stop 42
cggtggaatttctatcaaacataag

SEQ ID NO: 59863 - DNA, 25 bp, Artificial
  probe
  misc_feature (1)..(25): SEQ ID NO: 4543; WAN024AMT_at; Start 27; Stop 51
ttctatcaaacataagataggagtt

SEQ ID NO: 59864 - DNA, 25 bp, Artificial
  probe
  misc_feature (1)..(25): SEQ ID NO: 4543; WAN024AMT_at; Start 25; Stop 49
atttctatcaaacataagataggag

SEQ ID NO: 59865 - DNA, 25 bp, Artificial
  probe
  misc_feature (1)..(25): SEQ ID NO: 4543; WAN024AMT_at; Start 24; Stop 48
aatttctatcaaacataagatagga

SEQ ID NO: 59866 - DNA, 25 bp, Artificial
  probe
  misc_feature (1)..(25): SEQ ID NO: 4543; WAN024AMT_at; Start 26; Stop 50
tttctatcaaacataagataggagt

SEQ ID NO: 59867 - DNA, 25 bp, Artificial
  probe
  misc_feature (1)..(25): SEQ ID NO: 4543; WAN024AMT_at; Start 19; Stop 43
ggtggaatttctatcaaacataaga

SEQ ID NO: 59868 - DNA, 25 bp, Artificial
  probe
  misc_feature (1)..(25): SEQ ID NO: 4543; WAN024AMT_at; Start 14; Stop 38
cgtgcggtggaatttctatcaaaca

SEQ ID NO: 59869 - DNA, 25 bp, Artificial
  probe
  misc_feature (1)..(25): SEQ ID NO: 4543; WAN024AMT_at; Start 2; Stop 26
ataatagttttacgtgcggtggaat

SEQ ID NO: 59870 - DNA, 25 bp, Artificial
  probe
  misc_feature (1)..(25): SEQ ID NO: 4543; WAN024AMT_at; Start 23; Stop 47
gaatttctatcaaacataagatagg

SEQ ID NO: 59871 - DNA, 25 bp, Artificial
  probe
  misc_feature (1)..(25): SEQ ID NO: 4543; WAN024AMT_at; Start 21; Stop 45
tggaatttctatcaaacataagata

SEQ ID NO: 59872 - DNA, 25 bp, Artificial
  probe
  misc_feature (1)..(25): SEQ ID NO: 4543; WAN024AMT_at; Start 32; Stop 56
tcaaacataagataggagttttacg

SEQ ID NO: 59873 - DNA, 25 bp, Artificial
  probe
  misc_feature (1)..(25): SEQ ID NO: 4543; WAN024AMT_at; Start 30; Stop 54
tatcaaacataagataggagtttta

SEQ ID NO: 59874 - DNA, 25 bp, Artificial
  probe
  misc_feature (1)..(25): SEQ ID NO: 4543; WAN024AMT_at; Start 15; Stop 39
gtgcggtggaatttctatcaaacat

SEQ ID NO: 59875 - DNA, 25 bp, Artificial
  probe
  misc_feature (1)..(25): SEQ ID NO: 4543; WAN024AMT_at; Start 9; Stop 33
ttttacgtgcggtggaatttctatc

SEQ ID NO: 59876 - DNA, 25 bp, Artificial
  probe
  misc_feature (1)..(25): SEQ ID NO: 4543; WAN024AMT_at; Start 17; Stop 41
gcggtggaatttctatcaaacataa

SEQ ID NO: 59877 - DNA, 25 bp, Artificial
  probe
  misc_feature (1)..(25): SEQ ID NO: 4543; WAN024AMT_at; Start 12; Stop 36
tacgtgcggtggaatttctatcaaa

SEQ ID NO: 59878 - DNA, 25 bp, Artificial
  probe
  misc_feature (1)..(25): SEQ ID NO: 4543; WAN024AMT_at; Start 11; Stop 35
ttacgtgcggtggaatttctatcaa

SEQ ID NO: 59879 - DNA, 25 bp, Artificial
  probe
  misc_feature (1)..(25): SEQ ID NO: 4543; WAN024AMT_at; Start 1; Stop 25
tataatagttttacgtgcggtggaa

SEQ ID NO: 59880 - DNA, 25 bp, Artificial
  probe
  misc_feature (1)..(25): SEQ ID NO: 3487; WAN024AMU_at; Start 63; Stop 87
aggtttattgttgatgagattgtag

SEQ ID NO: 59881 - DNA, 25 bp, Artificial
  probe
  misc_feature (1)..(25): SEQ ID NO: 3487; WAN024AMU_at; Start 7; Stop 31
tgcttcaagtatataaaaaggcgta

SEQ ID NO: 59882 - DNA, 25 bp, Artificial
  probe
  misc_feature (1)..(25): SEQ ID NO: 3487; WAN024AMU_at; Start 32; Stop 56
aaaatacgcctatagataatggggt

SEQ ID NO: 59883 - DNA, 25 bp, Artificial
  probe
  misc_feature (1)..(25): SEQ ID NO: 3487; WAN024AMU_at; Start 40; Stop 64
cctatagataatggggttgaaatag

SEQ ID NO: 59884 - DNA, 25 bp, Artificial
  probe
  misc_feature (1)..(25): SEQ ID NO: 3487; WAN024AMU_at; Start 65; Stop 89
gtttattgttgatgagattgtagat

SEQ ID NO: 59885 - DNA, 25 bp, Artificial
  probe
  misc_feature (1)..(25): SEQ ID NO: 3487; WAN024AMU_at; Start 33; Stop 57
aaatacgcctatagataatggggtt

SEQ ID NO: 59886 - DNA, 25 bp, Artificial
  probe
  misc_feature (1)..(25): SEQ ID NO: 3487; WAN024AMU_at; Start 4; Stop 28
atgtgcttcaagtatataaaaaggc

SEQ ID NO: 59887 - DNA, 25 bp, Artificial
  probe
  misc_feature (1)..(25): SEQ ID NO: 3487; WAN024AMU_at; Start 38; Stop 62
cgcctatagataatggggttgaaat

SEQ ID NO: 59888 - DNA, 25 bp, Artificial
  probe
  misc_feature (1)..(25): SEQ ID NO: 3487; WAN024AMU_at; Start 60; Stop 84
aataggtttattgttgatgagattg

SEQ ID NO: 59889 - DNA, 25 bp, Artificial
  probe
  misc_feature (1)..(25): SEQ ID NO: 3487; WAN024AMU_at; Start 62; Stop 86
taggtttattgttgatgagattgta

SEQ ID NO: 59890 - DNA, 25 bp, Artificial
  probe
  misc_feature (1)..(25): SEQ ID NO: 3487; WAN024AMU_at; Start 35; Stop 59
atacgcctatagataatggggttga

SEQ ID NO: 59891 - DNA, 25 bp, Artificial
  probe
  misc_feature (1)..(25): SEQ ID NO: 3487; WAN024AMU_at; Start 70; Stop 94
ttgttgatgagattgtagataattc

SEQ ID NO: 59892 - DNA, 25 bp, Artificial
  probe
  misc_feature (1)..(25): SEQ ID NO: 3487; WAN024AMU_at; Start 54; Stop 78
ggttgaaataggtttattgttgatg

SEQ ID NO: 59893 - DNA, 25 bp, Artificial
  probe
  misc_feature (1)..(25): SEQ ID NO: 3487; WAN024AMU_at; Start 67; Stop 91
ttattgttgatgagattgtagataa

SEQ ID NO: 59894 - DNA, 25 bp, Artificial
  probe
  misc_feature (1)..(25): SEQ ID NO: 3487; WAN024AMU_at; Start 31; Stop 55
aaaaatacgcctatagataatgggg

SEQ ID NO: 59895 - DNA, 25 bp, Artificial
  probe
  misc_feature (1)..(25): SEQ ID NO: 3487; WAN024AMU_at; Start 71; Stop 95
tgttgatgagattgtagataattca

SEQ ID NO: 59896 - DNA, 25 bp, Artificial
  probe
  misc_feature (1)..(25): SEQ ID NO: 3487; WAN024AMU_at; Start 36; Stop 60
tacgcctatagataatggggttgaa

SEQ ID NO: 59897 - DNA, 25 bp, Artificial
  probe
  misc_feature (1)..(25): SEQ ID NO: 3487; WAN024AMU_at; Start 37; Stop 61
acgcctatagataatggggttgaaa

SEQ ID NO: 59898 - DNA, 25 bp, Artificial
  probe
  misc_feature (1)..(25): SEQ ID NO: 3487; WAN024AMU_at; Start 39; Stop 63
gcctatagataatggggttgaaata

SEQ ID NO: 59899 - DNA, 25 bp, Artificial
  probe
  misc_feature (1)..(25): SEQ ID NO: 3487; WAN024AMU_at; Start 26; Stop 50
ggcgtaaaaatacgcctatagataa

SEQ ID NO: 59900 - DNA, 25 bp, Artificial
  probe
  misc_feature (1)..(25): SEQ ID NO: 3487; WAN024AMU_at; Start 61; Stop 85
ataggtttattgttgatgagattgt

SEQ ID NO: 59901 - DNA, 25 bp, Artificial
  probe
  misc_feature (1)..(25): SEQ ID NO: 3487; WAN024AMU_at; Start 57; Stop 81
tgaaataggtttattgttgatgaga

SEQ ID NO: 59902 - DNA, 25 bp, Artificial
  probe
  misc_feature (1)..(25): SEQ ID NO: 3487; WAN024AMU_at; Start 59; Stop 83
aaataggtttattgttgatgagatt

SEQ ID NO: 59903 - DNA, 25 bp, Artificial
  probe
  misc_feature (1)..(25): SEQ ID NO: 3487; WAN024AMU_at; Start 3; Stop 27
tatgtgcttcaagtatataaaaagg

SEQ ID NO: 59904 - DNA, 25 bp, Artificial
  probe
  misc_feature (1)..(25): SEQ ID NO: 3487; WAN024AMU_at; Start 5; Stop 29
tgtgcttcaagtatataaaaaggcg

SEQ ID NO: 59905 - DNA, 25 bp, Artificial
  probe
  misc_feature (1)..(25): SEQ ID NO: 3487; WAN024AMU_at; Start 34; Stop 58
aatacgcctatagataatggggttg

SEQ ID NO: 59906 - DNA, 25 bp, Artificial
  probe
  misc_feature (1)..(25): SEQ ID NO: 3487; WAN024AMU_at; Start 29; Stop 53
gtaaaaatacgcctatagataatgg

SEQ ID NO: 59907 - DNA, 25 bp, Artificial
  probe
  misc_feature (1)..(25): SEQ ID NO: 3487; WAN024AMU_at; Start 64; Stop 88
ggtttattgttgatgagattgtaga

SEQ ID NO: 59908 - DNA, 25 bp, Artificial
  probe
  misc_feature (1)..(25): SEQ ID NO: 3487; WAN024AMU_at; Start 58; Stop 82
gaaataggtttattgttgatgagat

SEQ ID NO: 59909 - DNA, 25 bp, Artificial
  probe
  misc_feature (1)..(25): SEQ ID NO: 3487; WAN024AMU_at; Start 6; Stop 30
gtgcttcaagtatataaaaaggcgt

SEQ ID NO: 59910 - DNA, 25 bp, Artificial
  probe
  misc_feature (1)..(25): SEQ ID NO: 3487; WAN024AMU_at; Start 8; Stop 32
gcttcaagtatataaaaaggcgtaa

SEQ ID NO: 59911 - DNA, 25 bp, Artificial
  probe
  misc_feature (1)..(25): SEQ ID NO: 3487; WAN024AMU_at; Start 30; Stop 54
taaaaatacgcctatagataatggg

SEQ ID NO: 59912 - DNA, 25 bp, Artificial
  probe
  misc_feature (1)..(25): SEQ ID NO: 3487; WAN024AMU_at; Start 68; Stop 92
tattgttgatgagattgtagataat

SEQ ID NO: 59913 - DNA, 25 bp, Artificial
  probe
  misc_feature (1)..(25): SEQ ID NO: 3487; WAN024AMU_at; Start 66; Stop 90
tttattgttgatgagattgtagata

SEQ ID NO: 59914 - DNA, 25 bp, Artificial
  probe
  misc_feature (1)..(25): SEQ ID NO: 4677; WAN024AMV_at; Start 68; Stop 92
gcctttttatatacttgaagcacat

SEQ ID NO: 59915 - DNA, 25 bp, Artificial
  probe
  misc_feature (1)..(25): SEQ ID NO: 4677; WAN024AMV_at; Start 70; Stop 94
ctttttatatacttgaagcacataa

SEQ ID NO: 59916 - DNA, 25 bp, Artificial
  probe
  misc_feature (1)..(25): SEQ ID NO: 4677; WAN024AMV_at; Start 17; Stop 41
tcatcaacaataaacctatttcaac

SEQ ID NO: 59917 - DNA, 25 bp, Artificial
  probe
  misc_feature (1)..(25): SEQ ID NO: 4677; WAN024AMV_at; Start 11; Stop 35
acaatctcatcaacaataaacctat

SEQ ID NO: 59918 - DNA, 25 bp, Artificial
  probe
  misc_feature (1)..(25): SEQ ID NO: 4677; WAN024AMV_at; Start 15; Stop 39
tctcatcaacaataaacctatttca

SEQ ID NO: 59919 - DNA, 25 bp, Artificial
  probe
  misc_feature (1)..(25): SEQ ID NO: 4677; WAN024AMV_at; Start 41; Stop 65
ccccattatctataggcgtattttt

SEQ ID NO: 59920 - DNA, 25 bp, Artificial
  probe
  misc_feature (1)..(25): SEQ ID NO: 4677; WAN024AMV_at; Start 8; Stop 32
tctacaatctcatcaacaataaacc

SEQ ID NO: 59921 - DNA, 25 bp, Artificial
  probe
  misc_feature (1)..(25): SEQ ID NO: 4677; WAN024AMV_at; Start 6; Stop 30
tatctacaatctcatcaacaataaa

SEQ ID NO: 59922 - DNA, 25 bp, Artificial
  probe
  misc_feature (1)..(25): SEQ ID NO: 4677; WAN024AMV_at; Start 69; Stop 93
cctttttatatacttgaagcacata

SEQ ID NO: 59923 - DNA, 25 bp, Artificial
  probe
  misc_feature (1)..(25): SEQ ID NO: 4677; WAN024AMV_at; Start 33; Stop 57
tatttcaaccccattatctataggc

SEQ ID NO: 59924 - DNA, 25 bp, Artificial
  probe
  misc_feature (1)..(25): SEQ ID NO: 4677; WAN024AMV_at; Start 18; Stop 42
catcaacaataaacctatttcaacc

SEQ ID NO: 59925 - DNA, 25 bp, Artificial
  probe
  misc_feature (1)..(25): SEQ ID NO: 4677; WAN024AMV_at; Start 40; Stop 64
accccattatctataggcgtatttt

SEQ ID NO: 59926 - DNA, 25 bp, Artificial
  probe
  misc_feature (1)..(25): SEQ ID NO: 4677; WAN024AMV_at; Start 34; Stop 58
atttcaaccccattatctataggcg

SEQ ID NO: 59927 - DNA, 25 bp, Artificial
  probe
  misc_feature (1)..(25): SEQ ID NO: 4677; WAN024AMV_at; Start 2; Stop 26
gaattatctacaatctcatcaacaa

SEQ ID NO: 59928 - DNA, 25 bp, Artificial
  probe
  misc_feature (1)..(25): SEQ ID NO: 4677; WAN024AMV_at; Start 42; Stop 66
cccattatctataggcgtattttta

SEQ ID NO: 59929 - DNA, 25 bp, Artificial
  probe
  misc_feature (1)..(25): SEQ ID NO: 4677; WAN024AMV_at; Start 39; Stop 63
aaccccattatctataggcgtattt

SEQ ID NO: 59930 - DNA, 25 bp, Artificial
  probe
  misc_feature (1)..(25): SEQ ID NO: 4677; WAN024AMV_at; Start 46; Stop 70
ttatctataggcgtatttttacgcc

SEQ ID NO: 59931 - DNA, 25 bp, Artificial
  probe
  misc_feature (1)..(25): SEQ ID NO: 4677; WAN024AMV_at; Start 47; Stop 71
tatctataggcgtatttttacgcct

SEQ ID NO: 59932 - DNA, 25 bp, Artificial
  probe
  misc_feature (1)..(25): SEQ ID NO: 4677; WAN024AMV_at; Start 38; Stop 62
caaccccattatctataggcgtatt

SEQ ID NO: 59933 - DNA, 25 bp, Artificial
  probe
  misc_feature (1)..(25): SEQ ID NO: 4677; WAN024AMV_at; Start 9; Stop 33
ctacaatctcatcaacaataaacct

SEQ ID NO: 59934 - DNA, 25 bp, Artificial
  probe
  misc_feature (1)..(25): SEQ ID NO: 4677; WAN024AMV_at; Start 66; Stop 90
acgcctttttatatacttgaagcac

SEQ ID NO: 59935 - DNA, 25 bp, Artificial
  probe
  misc_feature (1)..(25): SEQ ID NO: 4677; WAN024AMV_at; Start 36; Stop 60
ttcaaccccattatctataggcgta

SEQ ID NO: 59936 - DNA, 25 bp, Artificial
  probe
  misc_feature (1)..(25): SEQ ID NO: 4677; WAN024AMV_at; Start 71; Stop 95
tttttatatacttgaagcacataag

SEQ ID NO: 59937 - DNA, 25 bp, Artificial
  probe
  misc_feature (1)..(25): SEQ ID NO: 4677; WAN024AMV_at; Start 43; Stop 67
ccattatctataggcgtatttttac

SEQ ID NO: 59938 - DNA, 25 bp, Artificial
  probe
  misc_feature (1)..(25): SEQ ID NO: 4677; WAN024AMV_at; Start 67; Stop 91
cgcctttttatatacttgaagcaca

SEQ ID NO: 59939 - DNA, 25 bp, Artificial
  probe
  misc_feature (1)..(25): SEQ ID NO: 4677; WAN024AMV_at; Start 5; Stop 29
ttatctacaatctcatcaacaataa

SEQ ID NO: 59940 - DNA, 25 bp, Artificial
  probe
  misc_feature (1)..(25): SEQ ID NO: 4677; WAN024AMV_at; Start 12; Stop 36
caatctcatcaacaataaacctatt

SEQ ID NO: 59941 - DNA, 25 bp, Artificial
  probe
  misc_feature (1)..(25): SEQ ID NO: 4677; WAN024AMV_at; Start 13; Stop 37
aatctcatcaacaataaacctattt

SEQ ID NO: 59942 - DNA, 25 bp, Artificial
  probe
  misc_feature (1)..(25): SEQ ID NO: 4677; WAN024AMV_at; Start 3; Stop 27
aattatctacaatctcatcaacaat

SEQ ID NO: 59943 - DNA, 25 bp, Artificial
  probe
  misc_feature (1)..(25): SEQ ID NO: 4677; WAN024AMV_at; Start 37; Stop 61
tcaaccccattatctataggcgtat

SEQ ID NO: 59944 - DNA, 25 bp, Artificial
  probe
  misc_feature (1)..(25): SEQ ID NO: 4677; WAN024AMV_at; Start 1; Stop 25
tgaattatctacaatctcatcaaca

SEQ ID NO: 59945 - DNA, 25 bp, Artificial
  probe
  misc_feature (1)..(25): SEQ ID NO: 4677; WAN024AMV_at; Start 35; Stop 59
tttcaaccccattatctataggcgt

SEQ ID NO: 59946 - DNA, 25 bp, Artificial
  probe
  misc_feature (1)..(25): SEQ ID NO: 4677; WAN024AMV_at; Start 65; Stop 89
tacgcctttttatatacttgaagca

SEQ ID NO: 59947 - DNA, 25 bp, Artificial
  probe
  misc_feature (1)..(25): SEQ ID NO: 4677; WAN024AMV_at; Start 10; Stop 34
tacaatctcatcaacaataaaccta

SEQ ID NO: 59948 - DNA, 25 bp, Artificial
  probe
  misc_feature (1)..(25): SEQ ID NO: 3689; WAN024AMW_at; Start 58; Stop 82
gactgtttacccacaggcaatcttt

SEQ ID NO: 59949 - DNA, 25 bp, Artificial
  probe
  misc_feature (1)..(25): SEQ ID NO: 3689; WAN024AMW_at; Start 57; Stop 81
tgactgtttacccacaggcaatctt

SEQ ID NO: 59950 - DNA, 25 bp, Artificial
  probe
  misc_feature (1)..(25): SEQ ID NO: 3689; WAN024AMW_at; Start 29; Stop 53
taggtatttgatggcttagactgct

SEQ ID NO: 59951 - DNA, 25 bp, Artificial
  probe
  misc_feature (1)..(25): SEQ ID NO: 3689; WAN024AMW_at; Start 39; Stop 63
atggcttagactgctgtgtgactgt

SEQ ID NO: 59952 - DNA, 25 bp, Artificial
  probe
  misc_feature (1)..(25): SEQ ID NO: 3689; WAN024AMW_at; Start 31; Stop 55
ggtatttgatggcttagactgctgt

SEQ ID NO: 59953 - DNA, 25 bp, Artificial
  probe
  misc_feature (1)..(25): SEQ ID NO: 3689; WAN024AMW_at; Start 27; Stop 51
tataggtatttgatggcttagactg

SEQ ID NO: 59954 - DNA, 25 bp, Artificial
  probe
  misc_feature (1)..(25): SEQ ID NO: 3689; WAN024AMW_at; Start 54; Stop 78
gtgtgactgtttacccacaggcaat

SEQ ID NO: 59955 - DNA, 25 bp, Artificial
  probe
  misc_feature (1)..(25): SEQ ID NO: 3689; WAN024AMW_at; Start 33; Stop 57
tatttgatggcttagactgctgtgt

SEQ ID NO: 59956 - DNA, 25 bp, Artificial
  probe
  misc_feature (1)..(25): SEQ ID NO: 3689; WAN024AMW_at; Start 53; Stop 77
tgtgtgactgtttacccacaggcaa

SEQ ID NO: 59957 - DNA, 25 bp, Artificial
  probe
  misc_feature (1)..(25): SEQ ID NO: 3689; WAN024AMW_at; Start 45; Stop 69
tagactgctgtgtgactgtttaccc

SEQ ID NO: 59958 - DNA, 25 bp, Artificial
  probe
  misc_feature (1)..(25): SEQ ID NO: 3689; WAN024AMW_at; Start 36; Stop 60
ttgatggcttagactgctgtgtgac

SEQ ID NO: 59959 - DNA, 25 bp, Artificial
  probe
  misc_feature (1)..(25): SEQ ID NO: 3689; WAN024AMW_at; Start 47; Stop 71
gactgctgtgtgactgtttacccac

SEQ ID NO: 59960 - DNA, 25 bp, Artificial
  probe
  misc_feature (1)..(25): SEQ ID NO: 3689; WAN024AMW_at; Start 63; Stop 87
tttacccacaggcaatctttcttct

SEQ ID NO: 59961 - DNA, 25 bp, Artificial
  probe
  misc_feature (1)..(25): SEQ ID NO: 3689; WAN024AMW_at; Start 35; Stop 59
tttgatggcttagactgctgtgtga

SEQ ID NO: 59962 - DNA, 25 bp, Artificial
  probe
  misc_feature (1)..(25): SEQ ID NO: 3689; WAN024AMW_at; Start 50; Stop 74
tgctgtgtgactgtttacccacagg

SEQ ID NO: 59963 - DNA, 25 bp, Artificial
  probe
  misc_feature (1)..(25): SEQ ID NO: 3689; WAN024AMW_at; Start 55; Stop 79
tgtgactgtttacccacaggcaatc

SEQ ID NO: 59964 - DNA, 25 bp, Artificial
  probe
  misc_feature (1)..(25): SEQ ID NO: 3689; WAN024AMW_at; Start 41; Stop 65
ggcttagactgctgtgtgactgttt

SEQ ID NO: 59965 - DNA, 25 bp, Artificial
  probe
  misc_feature (1)..(25): SEQ ID NO: 3689; WAN024AMW_at; Start 40; Stop 64
tggcttagactgctgtgtgactgtt

SEQ ID NO: 59966 - DNA, 25 bp, Artificial
  probe
  misc_feature (1)..(25): SEQ ID NO: 3689; WAN024AMW_at; Start 46; Stop 70
agactgctgtgtgactgtttaccca

SEQ ID NO: 59967 - DNA, 25 bp, Artificial
  probe
  misc_feature (1)..(25): SEQ ID NO: 3689; WAN024AMW_at; Start 65; Stop 89
tacccacaggcaatctttcttctat

SEQ ID NO: 59968 - DNA, 25 bp, Artificial
  probe
  misc_feature (1)..(25): SEQ ID NO: 3689; WAN024AMW_at; Start 67; Stop 91
cccacaggcaatctttcttctatat

SEQ ID NO: 59969 - DNA, 25 bp, Artificial
  probe
  misc_feature (1)..(25): SEQ ID NO: 3689; WAN024AMW_at; Start 38; Stop 62
gatggcttagactgctgtgtgactg

SEQ ID NO: 59970 - DNA, 25 bp, Artificial
  probe
  misc_feature (1)..(25): SEQ ID NO: 3689; WAN024AMW_at; Start 72; Stop 96
aggcaatctttcttctatattagta

SEQ ID NO: 59971 - DNA, 25 bp, Artificial
  probe
  misc_feature (1)..(25): SEQ ID NO: 3689; WAN024AMW_at; Start 28; Stop 52
ataggtatttgatggcttagactgc

SEQ ID NO: 59972 - DNA, 25 bp, Artificial
  probe
  misc_feature (1)..(25): SEQ ID NO: 3689; WAN024AMW_at; Start 51; Stop 75
gctgtgtgactgtttacccacaggc

SEQ ID NO: 59973 - DNA, 25 bp, Artificial
  probe
  misc_feature (1)..(25): SEQ ID NO: 3689; WAN024AMW_at; Start 69; Stop 93
cacaggcaatctttcttctatatta

SEQ ID NO: 59974 - DNA, 25 bp, Artificial
  probe
  misc_feature (1)..(25): SEQ ID NO: 3689; WAN024AMW_at; Start 37; Stop 61
tgatggcttagactgctgtgtgact

SEQ ID NO: 59975 - DNA, 25 bp, Artificial
  probe
  misc_feature (1)..(25): SEQ ID NO: 3689; WAN024AMW_at; Start 48; Stop 72
actgctgtgtgactgtttacccaca

SEQ ID NO: 59976 - DNA, 25 bp, Artificial
  probe
  misc_feature (1)..(25): SEQ ID NO: 3689; WAN024AMW_at; Start 71; Stop 95
caggcaatctttcttctatattagt

SEQ ID NO: 59977 - DNA, 25 bp, Artificial
  probe
  misc_feature (1)..(25): SEQ ID NO: 3689; WAN024AMW_at; Start 43; Stop 67
cttagactgctgtgtgactgtttac

SEQ ID NO: 59978 - DNA, 25 bp, Artificial
  probe
  misc_feature (1)..(25): SEQ ID NO: 3689; WAN024AMW_at; Start 61; Stop 85
tgtttacccacaggcaatctttctt

SEQ ID NO: 59979 - DNA, 25 bp, Artificial
  probe
  misc_feature (1)..(25): SEQ ID NO: 3689; WAN024AMW_at; Start 44; Stop 68
ttagactgctgtgtgactgtttacc

SEQ ID NO: 59980 - DNA, 25 bp, Artificial
  probe
  misc_feature (1)..(25): SEQ ID NO: 3689; WAN024AMW_at; Start 20; Stop 44
taagggttataggtatttgatggct

SEQ ID NO: 59981 - DNA, 25 bp, Artificial
  probe
  misc_feature (1)..(25): SEQ ID NO: 3689; WAN024AMW_at; Start 42; Stop 66
gcttagactgctgtgtgactgttta

SEQ ID NO: 59982 - DNA, 25 bp, Artificial
  probe
  misc_feature (1)..(25): SEQ ID NO: 4467; WAN024AMX_at; Start 36; Stop 60
agtcacacagcagtctaagccatca

SEQ ID NO: 59983 - DNA, 25 bp, Artificial
  probe
  misc_feature (1)..(25): SEQ ID NO: 4467; WAN024AMX_at; Start 20; Stop 44
ttgcctgtgggtaaacagtcacaca

SEQ ID NO: 59984 - DNA, 25 bp, Artificial
  probe
  misc_feature (1)..(25): SEQ ID NO: 4467; WAN024AMX_at; Start 25; Stop 49
tgtgggtaaacagtcacacagcagt

SEQ ID NO: 59985 - DNA, 25 bp, Artificial
  probe
  misc_feature (1)..(25): SEQ ID NO: 4467; WAN024AMX_at; Start 12; Stop 36
aagaaagattgcctgtgggtaaaca

SEQ ID NO: 59986 - DNA, 25 bp, Artificial
  probe
  misc_feature (1)..(25): SEQ ID NO: 4467; WAN024AMX_at; Start 7; Stop 31
tatagaagaaagattgcctgtgggt

SEQ ID NO: 59987 - DNA, 25 bp, Artificial
  probe
  misc_feature (1)..(25): SEQ ID NO: 4467; WAN024AMX_at; Start 29; Stop 53
ggtaaacagtcacacagcagtctaa

SEQ ID NO: 59988 - DNA, 25 bp, Artificial
  probe
  misc_feature (1)..(25): SEQ ID NO: 4467; WAN024AMX_at; Start 35; Stop 59
cagtcacacagcagtctaagccatc

SEQ ID NO: 59989 - DNA, 25 bp, Artificial
  probe
  misc_feature (1)..(25): SEQ ID NO: 4467; WAN024AMX_at; Start 28; Stop 52
gggtaaacagtcacacagcagtcta

SEQ ID NO: 59990 - DNA, 25 bp, Artificial
  probe
  misc_feature (1)..(25): SEQ ID NO: 4467; WAN024AMX_at; Start 31; Stop 55
taaacagtcacacagcagtctaagc

SEQ ID NO: 59991 - DNA, 25 bp, Artificial
  probe
  misc_feature (1)..(25): SEQ ID NO: 4467; WAN024AMX_at; Start 14; Stop 38
gaaagattgcctgtgggtaaacagt

SEQ ID NO: 59992 - DNA, 25 bp, Artificial
  probe
  misc_feature (1)..(25): SEQ ID NO: 4467; WAN024AMX_at; Start 18; Stop 42
gattgcctgtgggtaaacagtcaca

SEQ ID NO: 59993 - DNA, 25 bp, Artificial
  probe
  misc_feature (1)..(25): SEQ ID NO: 4467; WAN024AMX_at; Start 48; Stop 72
gtctaagccatcaaatacctataac

SEQ ID NO: 59994 - DNA, 25 bp, Artificial
  probe
  misc_feature (1)..(25): SEQ ID NO: 4467; WAN024AMX_at; Start 3; Stop 27
ctaatatagaagaaagattgcctgt

SEQ ID NO: 59995 - DNA, 25 bp, Artificial
  probe
  misc_feature (1)..(25): SEQ ID NO: 4467; WAN024AMX_at; Start 38; Stop 62
tcacacagcagtctaagccatcaaa

SEQ ID NO: 59996 - DNA, 25 bp, Artificial
  probe
  misc_feature (1)..(25): SEQ ID NO: 4467; WAN024AMX_at; Start 30; Stop 54
gtaaacagtcacacagcagtctaag

SEQ ID NO: 59997 - DNA, 25 bp, Artificial
  probe
  misc_feature (1)..(25): SEQ ID NO: 4467; WAN024AMX_at; Start 42; Stop 66
acagcagtctaagccatcaaatacc

SEQ ID NO: 59998 - DNA, 25 bp, Artificial
  probe
  misc_feature (1)..(25): SEQ ID NO: 4467; WAN024AMX_at; Start 23; Stop 47
cctgtgggtaaacagtcacacagca

SEQ ID NO: 59999 - DNA, 25 bp, Artificial
  probe
  misc_feature (1)..(25): SEQ ID NO: 4467; WAN024AMX_at; Start 5; Stop 29
aatatagaagaaagattgcctgtgg

SEQ ID NO: 60000 - DNA, 25 bp, Artificial
  probe
  misc_feature (1)..(25): SEQ ID NO: 4467; WAN024AMX_at; Start 37; Stop 61
gtcacacagcagtctaagccatcaa

SEQ ID NO: 60001 - DNA, 25 bp, Artificial
  probe
  misc_feature (1)..(25): SEQ ID NO: 4467; WAN024AMX_at; Start 4; Stop 28
taatatagaagaaagattgcctgtg

SEQ ID NO: 60002 - DNA, 25 bp, Artificial
  probe
  misc_feature (1)..(25): SEQ ID NO: 4467; WAN024AMX_at; Start 46; Stop 70
cagtctaagccatcaaatacctata

SEQ ID NO: 60003 - DNA, 25 bp, Artificial
  probe
  misc_feature (1)..(25): SEQ ID NO: 4467; WAN024AMX_at; Start 41; Stop 65
cacagcagtctaagccatcaaatac

SEQ ID NO: 60004 - DNA, 25 bp, Artificial
  probe
  misc_feature (1)..(25): SEQ ID NO: 4467; WAN024AMX_at; Start 9; Stop 33
tagaagaaagattgcctgtgggtaa

SEQ ID NO: 60005 - DNA, 25 bp, Artificial
  probe
  misc_feature (1)..(25): SEQ ID NO: 4467; WAN024AMX_at; Start 54; Stop 78
gccatcaaatacctataacccttaa

SEQ ID NO: 60006 - DNA, 25 bp, Artificial
  probe
  misc_feature (1)..(25): SEQ ID NO: 4467; WAN024AMX_at; Start 32; Stop 56
aaacagtcacacagcagtctaagcc

SEQ ID NO: 60007 - DNA, 25 bp, Artificial
  probe
  misc_feature (1)..(25): SEQ ID NO: 4467; WAN024AMX_at; Start 33; Stop 57
aacagtcacacagcagtctaagcca

SEQ ID NO: 60008 - DNA, 25 bp, Artificial
  probe
  misc_feature (1)..(25): SEQ ID NO: 4467; WAN024AMX_at; Start 16; Stop 40
aagattgcctgtgggtaaacagtca

SEQ ID NO: 60009 - DNA, 25 bp, Artificial
  probe
  misc_feature (1)..(25): SEQ ID NO: 4467; WAN024AMX_at; Start 51; Stop 75
taagccatcaaatacctataaccct

SEQ ID NO: 60010 - DNA, 25 bp, Artificial
  probe
  misc_feature (1)..(25): SEQ ID NO: 4467; WAN024AMX_at; Start 27; Stop 51
tgggtaaacagtcacacagcagtct

SEQ ID NO: 60011 - DNA, 25 bp, Artificial
  probe
  misc_feature (1)..(25): SEQ ID NO: 4467; WAN024AMX_at; Start 45; Stop 69
gcagtctaagccatcaaatacctat

SEQ ID NO: 60012 - DNA, 25 bp, Artificial
  probe
  misc_feature (1)..(25): SEQ ID NO: 4467; WAN024AMX_at; Start 1; Stop 25
tactaatatagaagaaagattgcct

SEQ ID NO: 60013 - DNA, 25 bp, Artificial
  probe
  misc_feature (1)..(25): SEQ ID NO: 4467; WAN024AMX_at; Start 21; Stop 45
tgcctgtgggtaaacagtcacacag

SEQ ID NO: 60014 - DNA, 25 bp, Artificial
  probe
  misc_feature (1)..(25): SEQ ID NO: 4467; WAN024AMX_at; Start 15; Stop 39
aaagattgcctgtgggtaaacagtc

SEQ ID NO: 60015 - DNA, 25 bp, Artificial
  probe
  misc_feature (1)..(25): SEQ ID NO: 4467; WAN024AMX_at; Start 39; Stop 63
cacacagcagtctaagccatcaaat

SEQ ID NO: 60016 - DNA, 25 bp, Artificial
  probe
  misc_feature (1)..(25): SEQ ID NO: 4775; WAN024AMY_at; Start 46; Stop 70
acgtcaattgataatgttataaaat

SEQ ID NO: 60017 - DNA, 25 bp, Artificial
  probe
  misc_feature (1)..(25): SEQ ID NO: 4775; WAN024AMY_at; Start 40; Stop 64
agacaaacgtcaattgataatgtta

SEQ ID NO: 60018 - DNA, 25 bp, Artificial
  probe
  misc_feature (1)..(25): SEQ ID NO: 4775; WAN024AMY_at; Start 9; Stop 33
tccttctttctgtctattatagtct

SEQ ID NO: 60019 - DNA, 25 bp, Artificial
  probe
  misc_feature (1)..(25): SEQ ID NO: 4775; WAN024AMY_at; Start 41; Stop 65
gacaaacgtcaattgataatgttat

SEQ ID NO: 60020 - DNA, 25 bp, Artificial
  probe
  misc_feature (1)..(25): SEQ ID NO: 4775; WAN024AMY_at; Start 1; Stop 25
ttacaatttccttctttctgtctat

SEQ ID NO: 60021 - DNA, 25 bp, Artificial
  probe
  misc_feature (1)..(25): SEQ ID NO: 4775; WAN024AMY_at; Start 10; Stop 34
ccttctttctgtctattatagtcta

SEQ ID NO: 60022 - DNA, 25 bp, Artificial
  probe
  misc_feature (1)..(25): SEQ ID NO: 4775; WAN024AMY_at; Start 48; Stop 72
gtcaattgataatgttataaaatgt

SEQ ID NO: 60023 - DNA, 25 bp, Artificial
  probe
  misc_feature (1)..(25): SEQ ID NO: 4775; WAN024AMY_at; Start 4; Stop 28
caatttccttctttctgtctattat

SEQ ID NO: 60024 - DNA, 25 bp, Artificial
  probe
  misc_feature (1)..(25): SEQ ID NO: 4775; WAN024AMY_at; Start 3; Stop 27
acaatttccttctttctgtctatta

SEQ ID NO: 60025 - DNA, 25 bp, Artificial
  probe
  misc_feature (1)..(25): SEQ ID NO: 4775; WAN024AMY_at; Start 44; Stop 68
aaacgtcaattgataatgttataaa

SEQ ID NO: 60026 - DNA, 25 bp, Artificial
  probe
  misc_feature (1)..(25): SEQ ID NO: 4775; WAN024AMY_at; Start 50; Stop 74
caattgataatgttataaaatgtaa

SEQ ID NO: 60027 - DNA, 25 bp, Artificial
  probe
  misc_feature (1)..(25): SEQ ID NO: 4775; WAN024AMY_at; Start 49; Stop 73
tcaattgataatgttataaaatgta

SEQ ID NO: 60028 - DNA, 25 bp, Artificial
  probe
  misc_feature (1)..(25): SEQ ID NO: 4775; WAN024AMY_at; Start 6; Stop 30
atttccttctttctgtctattatag

SEQ ID NO: 60029 - DNA, 25 bp, Artificial
  probe
  misc_feature (1)..(25): SEQ ID NO: 4775; WAN024AMY_at; Start 36; Stop 60
aaaaagacaaacgtcaattgataat

SEQ ID NO: 60030 - DNA, 25 bp, Artificial
  probe
  misc_feature (1)..(25): SEQ ID NO: 4775; WAN024AMY_at; Start 7; Stop 31
tttccttctttctgtctattatagt

SEQ ID NO: 60031 - DNA, 25 bp, Artificial
  probe
  misc_feature (1)..(25): SEQ ID NO: 4775; WAN024AMY_at; Start 17; Stop 41
tctgtctattatagtctaaaaaaag

SEQ ID NO: 60032 - DNA, 25 bp, Artificial
  probe
  misc_feature (1)..(25): SEQ ID NO: 4775; WAN024AMY_at; Start 5; Stop 29
aatttccttctttctgtctattata

SEQ ID NO: 60033 - DNA, 25 bp, Artificial
  probe
  misc_feature (1)..(25): SEQ ID NO: 4775; WAN024AMY_at; Start 11; Stop 35
cttctttctgtctattatagtctaa

SEQ ID NO: 60034 - DNA, 25 bp, Artificial
  probe
  misc_feature (1)..(25): SEQ ID NO: 4775; WAN024AMY_at; Start 47; Stop 71
cgtcaattgataatgttataaaatg

SEQ ID NO: 60035 - DNA, 25 bp, Artificial
  probe
  misc_feature (1)..(25): SEQ ID NO: 4775; WAN024AMY_at; Start 15; Stop 39
tttctgtctattatagtctaaaaaa

SEQ ID NO: 60036 - DNA, 25 bp, Artificial
  probe
  misc_feature (1)..(25): SEQ ID NO: 4775; WAN024AMY_at; Start 42; Stop 66
acaaacgtcaattgataatgttata

SEQ ID NO: 60037 - DNA, 25 bp, Artificial
  probe
  misc_feature (1)..(25): SEQ ID NO: 4775; WAN024AMY_at; Start 14; Stop 38
ctttctgtctattatagtctaaaaa

SEQ ID NO: 60038 - DNA, 25 bp, Artificial
  probe
  misc_feature (1)..(25): SEQ ID NO: 4775; WAN024AMY_at; Start 38; Stop 62
aaagacaaacgtcaattgataatgt

SEQ ID NO: 60039 - DNA, 25 bp, Artificial
  probe
  misc_feature (1)..(25): SEQ ID NO: 4775; WAN024AMY_at; Start 43; Stop 67
caaacgtcaattgataatgttataa

SEQ ID NO: 60040 - DNA, 25 bp, Artificial
  probe
  misc_feature (1)..(25): SEQ ID NO: 4775; WAN024AMY_at; Start 16; Stop 40
ttctgtctattatagtctaaaaaaa

SEQ ID NO: 60041 - DNA, 25 bp, Artificial
  probe
  misc_feature (1)..(25): SEQ ID NO: 4775; WAN024AMY_at; Start 39; Stop 63
aagacaaacgtcaattgataatgtt

SEQ ID NO: 60042 - DNA, 25 bp, Artificial
  probe
  misc_feature (1)..(25): SEQ ID NO: 4775; WAN024AMY_at; Start 12; Stop 36
ttctttctgtctattatagtctaaa

SEQ ID NO: 60043 - DNA, 25 bp, Artificial
  probe
  misc_feature (1)..(25): SEQ ID NO: 4775; WAN024AMY_at; Start 2; Stop 26
tacaatttccttctttctgtctatt

SEQ ID NO: 60044 - DNA, 25 bp, Artificial
  probe
  misc_feature (1)..(25): SEQ ID NO: 4775; WAN024AMY_at; Start 8; Stop 32
ttccttctttctgtctattatagtc

SEQ ID NO: 60045 - DNA, 25 bp, Artificial
  probe
  misc_feature (1)..(25): SEQ ID NO: 4775; WAN024AMY_at; Start 51; Stop 75
aattgataatgttataaaatgtaac

SEQ ID NO: 60046 - DNA, 25 bp, Artificial
  probe
  misc_feature (1)..(25): SEQ ID NO: 4775; WAN024AMY_at; Start 45; Stop 69
aacgtcaattgataatgttataaaa

SEQ ID NO: 60047 - DNA, 25 bp, Artificial
  probe
  misc_feature (1)..(25): SEQ ID NO: 4775; WAN024AMY_at; Start 13; Stop 37
tctttctgtctattatagtctaaaa

SEQ ID NO: 60048 - DNA, 25 bp, Artificial
  probe
  misc_feature (1)..(25): SEQ ID NO: 4775; WAN024AMY_at; Start 37; Stop 61
aaaagacaaacgtcaattgataatg

SEQ ID NO: 60049 - DNA, 25 bp, Artificial
  probe
  misc_feature (1)..(25): SEQ ID NO: 4775; WAN024AMY_at; Start 52; Stop 76
attgataatgttataaaatgtaaca

SEQ ID NO: 60050 - DNA, 25 bp, Artificial
  probe
  misc_feature (1)..(25): SEQ ID NO: 4736; WAN024AMZ_at; Start 52; Stop 76
atagacagaaagaaggaaattgtaa

SEQ ID NO: 60051 - DNA, 25 bp, Artificial
  probe
  misc_feature (1)..(25): SEQ ID NO: 4736; WAN024AMZ_at; Start 45; Stop 69
gactataatagacagaaagaaggaa

SEQ ID NO: 60052 - DNA, 25 bp, Artificial
  probe
  misc_feature (1)..(25): SEQ ID NO: 4736; WAN024AMZ_at; Start 4; Stop 28
tacattttataacattatcaattga

SEQ ID NO: 60053 - DNA, 25 bp, Artificial
  probe
  misc_feature (1)..(25): SEQ ID NO: 4736; WAN024AMZ_at; Start 33; Stop 57
tgtctttttttagactataatagac

SEQ ID NO: 60054 - DNA, 25 bp, Artificial
  probe
  misc_feature (1)..(25): SEQ ID NO: 4736; WAN024AMZ_at; Start 39; Stop 63
tttttagactataatagacagaaag

SEQ ID NO: 60055 - DNA, 25 bp, Artificial
  probe
  misc_feature (1)..(25): SEQ ID NO: 4736; WAN024AMZ_at; Start 43; Stop 67
tagactataatagacagaaagaagg

SEQ ID NO: 60056 - DNA, 25 bp, Artificial
  probe
  misc_feature (1)..(25): SEQ ID NO: 4736; WAN024AMZ_at; Start 8; Stop 32
ttttataacattatcaattgacgtt

SEQ ID NO: 60057 - DNA, 25 bp, Artificial
  probe
  misc_feature (1)..(25): SEQ ID NO: 4736; WAN024AMZ_at; Start 46; Stop 70
actataatagacagaaagaaggaaa

SEQ ID NO: 60058 - DNA, 25 bp, Artificial
  probe
  misc_feature (1)..(25): SEQ ID NO: 4736; WAN024AMZ_at; Start 35; Stop 59
tctttttttagactataatagacag

SEQ ID NO: 60059 - DNA, 25 bp, Artificial
  probe
  misc_feature (1)..(25): SEQ ID NO: 4736; WAN024AMZ_at; Start 48; Stop 72
tataatagacagaaagaaggaaatt

SEQ ID NO: 60060 - DNA, 25 bp, Artificial
  probe
  misc_feature (1)..(25): SEQ ID NO: 4736; WAN024AMZ_at; Start 38; Stop 62
ttttttagactataatagacagaaa

SEQ ID NO: 60061 - DNA, 25 bp, Artificial
  probe
  misc_feature (1)..(25): SEQ ID NO: 4736; WAN024AMZ_at; Start 34; Stop 58
gtctttttttagactataatagaca

SEQ ID NO: 60062 - DNA, 25 bp, Artificial
  probe
  misc_feature (1)..(25): SEQ ID NO: 4736; WAN024AMZ_at; Start 41; Stop 65
tttagactataatagacagaaagaa

SEQ ID NO: 60063 - DNA, 25 bp, Artificial
  probe
  misc_feature (1)..(25): SEQ ID NO: 4736; WAN024AMZ_at; Start 11; Stop 35
tataacattatcaattgacgtttgt

SEQ ID NO: 60064 - DNA, 25 bp, Artificial
  probe
  misc_feature (1)..(25): SEQ ID NO: 4736; WAN024AMZ_at; Start 17; Stop 41
attatcaattgacgtttgtcttttt

SEQ ID NO: 60065 - DNA, 25 bp, Artificial
  probe
  misc_feature (1)..(25): SEQ ID NO: 4736; WAN024AMZ_at; Start 6; Stop 30
cattttataacattatcaattgacg

SEQ ID NO: 60066 - DNA, 25 bp, Artificial
  probe
  misc_feature (1)..(25): SEQ ID NO: 4736; WAN024AMZ_at; Start 42; Stop 66
ttagactataatagacagaaagaag

SEQ ID NO: 60067 - DNA, 25 bp, Artificial
  probe
  misc_feature (1)..(25): SEQ ID NO: 4736; WAN024AMZ_at; Start 37; Stop 61
tttttttagactataatagacagaa

SEQ ID NO: 60068 - DNA, 25 bp, Artificial
  probe
  misc_feature (1)..(25): SEQ ID NO: 4736; WAN024AMZ_at; Start 51; Stop 75
aatagacagaaagaaggaaattgta

SEQ ID NO: 60069 - DNA, 25 bp, Artificial
  probe
  misc_feature (1)..(25): SEQ ID NO: 4736; WAN024AMZ_at; Start 16; Stop 40
cattatcaattgacgtttgtctttt

SEQ ID NO: 60070 - DNA, 25 bp, Artificial
  probe
  misc_feature (1)..(25): SEQ ID NO: 4736; WAN024AMZ_at; Start 5; Stop 29
acattttataacattatcaattgac

SEQ ID NO: 60071 - DNA, 25 bp, Artificial
  probe
  misc_feature (1)..(25): SEQ ID NO: 4736; WAN024AMZ_at; Start 14; Stop 38
aacattatcaattgacgtttgtctt

SEQ ID NO: 60072 - DNA, 25 bp, Artificial
  probe
  misc_feature (1)..(25): SEQ ID NO: 4736; WAN024AMZ_at; Start 10; Stop 34
ttataacattatcaattgacgtttg

SEQ ID NO: 60073 - DNA, 25 bp, Artificial
  probe
  misc_feature (1)..(25): SEQ ID NO: 4736; WAN024AMZ_at; Start 12; Stop 36
ataacattatcaattgacgtttgtc

SEQ ID NO: 60074 - DNA, 25 bp, Artificial
  probe
  misc_feature (1)..(25): SEQ ID NO: 4736; WAN024AMZ_at; Start 50; Stop 74
taatagacagaaagaaggaaattgt

SEQ ID NO: 60075 - DNA, 25 bp, Artificial
  probe
  misc_feature (1)..(25): SEQ ID NO: 4736; WAN024AMZ_at; Start 44; Stop 68
agactataatagacagaaagaagga

SEQ ID NO: 60076 - DNA, 25 bp, Artificial
  probe
  misc_feature (1)..(25): SEQ ID NO: 4736; WAN024AMZ_at; Start 9; Stop 33
tttataacattatcaattgacgttt

SEQ ID NO: 60077 - DNA, 25 bp, Artificial
  probe
  misc_feature (1)..(25): SEQ ID NO: 4736; WAN024AMZ_at; Start 40; Stop 64
ttttagactataatagacagaaaga

SEQ ID NO: 60078 - DNA, 25 bp, Artificial
  probe
  misc_feature (1)..(25): SEQ ID NO: 4736; WAN024AMZ_at; Start 7; Stop 31
attttataacattatcaattgacgt

SEQ ID NO: 60079 - DNA, 25 bp, Artificial
  probe
  misc_feature (1)..(25): SEQ ID NO: 4736; WAN024AMZ_at; Start 15; Stop 39
acattatcaattgacgtttgtcttt

SEQ ID NO: 60080 - DNA, 25 bp, Artificial
  probe
  misc_feature (1)..(25): SEQ ID NO: 4736; WAN024AMZ_at; Start 36; Stop 60
ctttttttagactataatagacaga

SEQ ID NO: 60081 - DNA, 25 bp, Artificial
  probe
  misc_feature (1)..(25): SEQ ID NO: 4736; WAN024AMZ_at; Start 13; Stop 37
taacattatcaattgacgtttgtct

SEQ ID NO: 60082 - DNA, 25 bp, Artificial
  probe
  misc_feature (1)..(25): SEQ ID NO: 4736; WAN024AMZ_at; Start 49; Stop 73
ataatagacagaaagaaggaaattg

SEQ ID NO: 60083 - DNA, 25 bp, Artificial
  probe
  misc_feature (1)..(25): SEQ ID NO: 4736; WAN024AMZ_at; Start 47; Stop 71
ctataatagacagaaagaaggaaat

SEQ ID NO: 60084 - DNA, 25 bp, Artificial
  probe
  misc_feature (1)..(25): SEQ ID NO: 281; WAN024AN2_at; Start 45; Stop 69
tatgagtaatagttgagaggaagcg

SEQ ID NO: 60085 - DNA, 25 bp, Artificial
  probe
  misc_feature (1)..(25): SEQ ID NO: 281; WAN024AN2_at; Start 20; Stop 44
cattttatcataaatcggtgatttt

SEQ ID NO: 60086 - DNA, 25 bp, Artificial
  probe
  misc_feature (1)..(25): SEQ ID NO: 281; WAN024AN2_at; Start 7; Stop 31
aactttctatttccattttatcata

SEQ ID NO: 60087 - DNA, 25 bp, Artificial
  probe
  misc_feature (1)..(25): SEQ ID NO: 281; WAN024AN2_at; Start 41; Stop 65
tttttatgagtaatagttgagagga

SEQ ID NO: 60088 - DNA, 25 bp, Artificial
  probe
  misc_feature (1)..(25): SEQ ID NO: 281; WAN024AN2_at; Start 53; Stop 77
atagttgagaggaagcgtttttatt

SEQ ID NO: 60089 - DNA, 25 bp, Artificial
  probe
  misc_feature (1)..(25): SEQ ID NO: 281; WAN024AN2_at; Start 37; Stop 61
gtgatttttatgagtaatagttgag

SEQ ID NO: 60090 - DNA, 25 bp, Artificial
  probe
  misc_feature (1)..(25): SEQ ID NO: 281; WAN024AN2_at; Start 31; Stop 55
aaatcggtgatttttatgagtaata

SEQ ID NO: 60091 - DNA, 25 bp, Artificial
  probe
  misc_feature (1)..(25): SEQ ID NO: 281; WAN024AN2_at; Start 35; Stop 59
cggtgatttttatgagtaatagttg

SEQ ID NO: 60092 - DNA, 25 bp, Artificial
  probe
  misc_feature (1)..(25): SEQ ID NO: 281; WAN024AN2_at; Start 2; Stop 26
atctcaactttctatttccatttta

SEQ ID NO: 60093 - DNA, 25 bp, Artificial
  probe
  misc_feature (1)..(25): SEQ ID NO: 281; WAN024AN2_at; Start 38; Stop 62
tgatttttatgagtaatagttgaga

SEQ ID NO: 60094 - DNA, 25 bp, Artificial
  probe
  misc_feature (1)..(25): SEQ ID NO: 281; WAN024AN2_at; Start 3; Stop 27
tctcaactttctatttccattttat

SEQ ID NO: 60095 - DNA, 25 bp, Artificial
  probe
  misc_feature (1)..(25): SEQ ID NO: 281; WAN024AN2_at; Start 32; Stop 56
aatcggtgatttttatgagtaatag

SEQ ID NO: 60096 - DNA, 25 bp, Artificial
  probe
  misc_feature (1)..(25): SEQ ID NO: 281; WAN024AN2_at; Start 9; Stop 33
ctttctatttccattttatcataaa

SEQ ID NO: 60097 - DNA, 25 bp, Artificial
  probe
  misc_feature (1)..(25): SEQ ID NO: 281; WAN024AN2_at; Start 30; Stop 54
taaatcggtgatttttatgagtaat

SEQ ID NO: 60098 - DNA, 25 bp, Artificial
  probe
  misc_feature (1)..(25): SEQ ID NO: 281; WAN024AN2_at; Start 48; Stop 72
gagtaatagttgagaggaagcgttt

SEQ ID NO: 60099 - DNA, 25 bp, Artificial
  probe
  misc_feature (1)..(25): SEQ ID NO: 281; WAN024AN2_at; Start 52; Stop 76
aatagttgagaggaagcgtttttat

SEQ ID NO: 60100 - DNA, 25 bp, Artificial
  probe
  misc_feature (1)..(25): SEQ ID NO: 281; WAN024AN2_at; Start 47; Stop 71
tgagtaatagttgagaggaagcgtt

SEQ ID NO: 60101 - DNA, 25 bp, Artificial
  probe
  misc_feature (1)..(25): SEQ ID NO: 281; WAN024AN2_at; Start 42; Stop 66
ttttatgagtaatagttgagaggaa

SEQ ID NO: 60102 - DNA, 25 bp, Artificial
  probe
  misc_feature (1)..(25): SEQ ID NO: 281; WAN024AN2_at; Start 8; Stop 32
actttctatttccattttatcataa

SEQ ID NO: 60103 - DNA, 25 bp, Artificial
  probe
  misc_feature (1)..(25): SEQ ID NO: 281; WAN024AN2_at; Start 36; Stop 60
ggtgatttttatgagtaatagttga

SEQ ID NO: 60104 - DNA, 25 bp, Artificial
  probe
  misc_feature (1)..(25): SEQ ID NO: 281; WAN024AN2_at; Start 49; Stop 73
agtaatagttgagaggaagcgtttt

SEQ ID NO: 60105 - DNA, 25 bp, Artificial
  probe
  misc_feature (1)..(25): SEQ ID NO: 281; WAN024AN2_at; Start 4; Stop 28
ctcaactttctatttccattttatc

SEQ ID NO: 60106 - DNA, 25 bp, Artificial
  probe
  misc_feature (1)..(25): SEQ ID NO: 281; WAN024AN2_at; Start 43; Stop 67
tttatgagtaatagttgagaggaag

SEQ ID NO: 60107 - DNA, 25 bp, Artificial
  probe
  misc_feature (1)..(25): SEQ ID NO: 281; WAN024AN2_at; Start 44; Stop 68
ttatgagtaatagttgagaggaagc

SEQ ID NO: 60108 - DNA, 25 bp, Artificial
  probe
  misc_feature (1)..(25): SEQ ID NO: 281; WAN024AN2_at; Start 39; Stop 63
gatttttatgagtaatagttgagag

SEQ ID NO: 60109 - DNA, 25 bp, Artificial
  probe
  misc_feature (1)..(25): SEQ ID NO: 281; WAN024AN2_at; Start 5; Stop 29
tcaactttctatttccattttatca

SEQ ID NO: 60110 - DNA, 25 bp, Artificial
  probe
  misc_feature (1)..(25): SEQ ID NO: 281; WAN024AN2_at; Start 29; Stop 53
ataaatcggtgatttttatgagtaa

SEQ ID NO: 60111 - DNA, 25 bp, Artificial
  probe
  misc_feature (1)..(25): SEQ ID NO: 281; WAN024AN2_at; Start 51; Stop 75
taatagttgagaggaagcgttttta

SEQ ID NO: 60112 - DNA, 25 bp, Artificial
  probe
  misc_feature (1)..(25): SEQ ID NO: 281; WAN024AN2_at; Start 33; Stop 57
atcggtgatttttatgagtaatagt

SEQ ID NO: 60113 - DNA, 25 bp, Artificial
  probe
  misc_feature (1)..(25): SEQ ID NO: 281; WAN024AN2_at; Start 46; Stop 70
atgagtaatagttgagaggaagcgt

SEQ ID NO: 60114 - DNA, 25 bp, Artificial
  probe
  misc_feature (1)..(25): SEQ ID NO: 281; WAN024AN2_at; Start 6; Stop 30
caactttctatttccattttatcat

SEQ ID NO: 60115 - DNA, 25 bp, Artificial
  probe
  misc_feature (1)..(25): SEQ ID NO: 281; WAN024AN2_at; Start 1; Stop 25
aatctcaactttctatttccatttt

SEQ ID NO: 60116 - DNA, 25 bp, Artificial
  probe
  misc_feature (1)..(25): SEQ ID NO: 281; WAN024AN2_at; Start 40; Stop 64
atttttatgagtaatagttgagagg

SEQ ID NO: 60117 - DNA, 25 bp, Artificial
  probe
  misc_feature (1)..(25): SEQ ID NO: 281; WAN024AN2_at; Start 28; Stop 52
cataaatcggtgatttttatgagta

SEQ ID NO: 60118 - DNA, 25 bp, Artificial
  probe
  misc_feature (1)..(25): SEQ ID NO: 3663; WAN024AN3_at; Start 69; Stop 93
cttcctctcaactattactcataaa

SEQ ID NO: 60119 - DNA, 25 bp, Artificial
  probe
  misc_feature (1)..(25): SEQ ID NO: 3663; WAN024AN3_at; Start 67; Stop 91
cgcttcctctcaactattactcata

SEQ ID NO: 60120 - DNA, 25 bp, Artificial
  probe
  misc_feature (1)..(25): SEQ ID NO: 3663; WAN024AN3_at; Start 84; Stop 108
tactcataaaaatcaccgatttatg

SEQ ID NO: 60121 - DNA, 25 bp, Artificial
  probe
  misc_feature (1)..(25): SEQ ID NO: 3663; WAN024AN3_at; Start 61; Stop 85
taaaaacgcttcctctcaactatta

SEQ ID NO: 60122 - DNA, 25 bp, Artificial
  probe
  misc_feature (1)..(25): SEQ ID NO: 3663; WAN024AN3_at; Start 71; Stop 95
tcctctcaactattactcataaaaa

SEQ ID NO: 60123 - DNA, 25 bp, Artificial
  probe
  misc_feature (1)..(25): SEQ ID NO: 3663; WAN024AN3_at; Start 79; Stop 103
actattactcataaaaatcaccgat

SEQ ID NO: 60124 - DNA, 25 bp, Artificial
  probe
  misc_feature (1)..(25): SEQ ID NO: 3663; WAN024AN3_at; Start 77; Stop 101
caactattactcataaaaatcaccg

SEQ ID NO: 60125 - DNA, 25 bp, Artificial
  probe
  misc_feature (1)..(25): SEQ ID NO: 3663; WAN024AN3_at; Start 64; Stop 88
aaacgcttcctctcaactattactc

SEQ ID NO: 60126 - DNA, 25 bp, Artificial
  probe
  misc_feature (1)..(25): SEQ ID NO: 3663; WAN024AN3_at; Start 80; Stop 104
ctattactcataaaaatcaccgatt

SEQ ID NO: 60127 - DNA, 25 bp, Artificial
  probe
  misc_feature (1)..(25): SEQ ID NO: 3663; WAN024AN3_at; Start 86; Stop 110
ctcataaaaatcaccgatttatgat

SEQ ID NO: 60128 - DNA, 25 bp, Artificial
  probe
  misc_feature (1)..(25): SEQ ID NO: 3663; WAN024AN3_at; Start 83; Stop 107
ttactcataaaaatcaccgatttat

SEQ ID NO: 60129 - DNA, 25 bp, Artificial
  probe
  misc_feature (1)..(25): SEQ ID NO: 3663; WAN024AN3_at; Start 82; Stop 106
attactcataaaaatcaccgattta

SEQ ID NO: 60130 - DNA, 25 bp, Artificial
  probe
  misc_feature (1)..(25): SEQ ID NO: 3663; WAN024AN3_at; Start 106; Stop 130
atgataaaatggaaatagaaagttg

SEQ ID NO: 60131 - DNA, 25 bp, Artificial
  probe
  misc_feature (1)..(25): SEQ ID NO: 3663; WAN024AN3_at; Start 92; Stop 116
aaaatcaccgatttatgataaaatg

SEQ ID NO: 60132 - DNA, 25 bp, Artificial
  probe
  misc_feature (1)..(25): SEQ ID NO: 3663; WAN024AN3_at; Start 66; Stop 90
acgcttcctctcaactattactcat

SEQ ID NO: 60133 - DNA, 25 bp, Artificial
  probe
  misc_feature (1)..(25): SEQ ID NO: 3663; WAN024AN3_at; Start 70; Stop 94
ttcctctcaactattactcataaaa

SEQ ID NO: 60134 - DNA, 25 bp, Artificial
  probe
  misc_feature (1)..(25): SEQ ID NO: 3663; WAN024AN3_at; Start 107; Stop 131
tgataaaatggaaatagaaagttga

SEQ ID NO: 60135 - DNA, 25 bp, Artificial
  probe
  misc_feature (1)..(25): SEQ ID NO: 3663; WAN024AN3_at; Start 63; Stop 87
aaaacgcttcctctcaactattact

SEQ ID NO: 60136 - DNA, 25 bp, Artificial
  probe
  misc_feature (1)..(25): SEQ ID NO: 3663; WAN024AN3_at; Start 81; Stop 105
tattactcataaaaatcaccgattt

SEQ ID NO: 60137 - DNA, 25 bp, Artificial
  probe
  misc_feature (1)..(25): SEQ ID NO: 3663; WAN024AN3_at; Start 111; Stop 135
aaaatggaaatagaaagttgagatt

SEQ ID NO: 60138 - DNA, 25 bp, Artificial
  probe
  misc_feature (1)..(25): SEQ ID NO: 3663; WAN024AN3_at; Start 108; Stop 132
gataaaatggaaatagaaagttgag

SEQ ID NO: 60139 - DNA, 25 bp, Artificial
  probe
  misc_feature (1)..(25): SEQ ID NO: 3663; WAN024AN3_at; Start 105; Stop 129
tatgataaaatggaaatagaaagtt

SEQ ID NO: 60140 - DNA, 25 bp, Artificial
  probe
  misc_feature (1)..(25): SEQ ID NO: 3663; WAN024AN3_at; Start 60; Stop 84
ataaaaacgcttcctctcaactatt

SEQ ID NO: 60141 - DNA, 25 bp, Artificial
  probe
  misc_feature (1)..(25): SEQ ID NO: 3663; WAN024AN3_at; Start 85; Stop 109
actcataaaaatcaccgatttatga

SEQ ID NO: 60142 - DNA, 25 bp, Artificial
  probe
  misc_feature (1)..(25): SEQ ID NO: 3663; WAN024AN3_at; Start 68; Stop 92
gcttcctctcaactattactcataa

SEQ ID NO: 60143 - DNA, 25 bp, Artificial
  probe
  misc_feature (1)..(25): SEQ ID NO: 3663; WAN024AN3_at; Start 59; Stop 83
aataaaaacgcttcctctcaactat

SEQ ID NO: 60144 - DNA, 25 bp, Artificial
  probe
  misc_feature (1)..(25): SEQ ID NO: 3663; WAN024AN3_at; Start 73; Stop 97
ctctcaactattactcataaaaatc

SEQ ID NO: 60145 - DNA, 25 bp, Artificial
  probe
  misc_feature (1)..(25): SEQ ID NO: 3663; WAN024AN3_at; Start 65; Stop 89
aacgcttcctctcaactattactca

SEQ ID NO: 60146 - DNA, 25 bp, Artificial
  probe
  misc_feature (1)..(25): SEQ ID NO: 3663; WAN024AN3_at; Start 76; Stop 100
tcaactattactcataaaaatcacc

SEQ ID NO: 60147 - DNA, 25 bp, Artificial
  probe
  misc_feature (1)..(25): SEQ ID NO: 3663; WAN024AN3_at; Start 72; Stop 96
cctctcaactattactcataaaaat

SEQ ID NO: 60148 - DNA, 25 bp, Artificial
  probe
  misc_feature (1)..(25): SEQ ID NO: 3663; WAN024AN3_at; Start 75; Stop 99
ctcaactattactcataaaaatcac

SEQ ID NO: 60149 - DNA, 25 bp, Artificial
  probe
  misc_feature (1)..(25): SEQ ID NO: 3663; WAN024AN3_at; Start 74; Stop 98
tctcaactattactcataaaaatca

SEQ ID NO: 60150 - DNA, 25 bp, Artificial
  probe
  misc_feature (1)..(25): SEQ ID NO: 3663; WAN024AN3_at; Start 109; Stop 133
ataaaatggaaatagaaagttgaga

SEQ ID NO: 60151 - DNA, 25 bp, Artificial
  probe
  misc_feature (1)..(25): SEQ ID NO: 3663; WAN024AN3_at; Start 110; Stop 134
taaaatggaaatagaaagttgagat

SEQ ID NO: 60152 - DNA, 25 bp, Artificial
  probe
  misc_feature (1)..(25): SEQ ID NO: 3239; WAN024AN6_at; Start 48; Stop 72
aagggaacagaatggagaaaatgga

SEQ ID NO: 60153 - DNA, 25 bp, Artificial
  probe
  misc_feature (1)..(25): SEQ ID NO: 3239; WAN024AN6_at; Start 38; Stop 62
ttaggagctaaagggaacagaatgg

SEQ ID NO: 60154 - DNA, 25 bp, Artificial
  probe
  misc_feature (1)..(25): SEQ ID NO: 3239; WAN024AN6_at; Start 21; Stop 45
tctcttttttgtgcagtttaggagc

SEQ ID NO: 60155 - DNA, 25 bp, Artificial
  probe
  misc_feature (1)..(25): SEQ ID NO: 3239; WAN024AN6_at; Start 34; Stop 58
cagtttaggagctaaagggaacaga

SEQ ID NO: 60156 - DNA, 25 bp, Artificial
  probe
  misc_feature (1)..(25): SEQ ID NO: 3239; WAN024AN6_at; Start 60; Stop 84
tggagaaaatggaacaaatgtgttt

SEQ ID NO: 60157 - DNA, 25 bp, Artificial
  probe
  misc_feature (1)..(25): SEQ ID NO: 3239; WAN024AN6_at; Start 69; Stop 93
tggaacaaatgtgttttctaatctg

SEQ ID NO: 60158 - DNA, 25 bp, Artificial
  probe
  misc_feature (1)..(25): SEQ ID NO: 3239; WAN024AN6_at; Start 23; Stop 47
tcttttttgtgcagtttaggagcta

SEQ ID NO: 60159 - DNA, 25 bp, Artificial
  probe
  misc_feature (1)..(25): SEQ ID NO: 3239; WAN024AN6_at; Start 64; Stop 88
gaaaatggaacaaatgtgttttcta

SEQ ID NO: 60160 - DNA, 25 bp, Artificial
  probe
  misc_feature (1)..(25): SEQ ID NO: 3239; WAN024AN6_at; Start 52; Stop 76
gaacagaatggagaaaatggaacaa

SEQ ID NO: 60161 - DNA, 25 bp, Artificial
  probe
  misc_feature (1)..(25): SEQ ID NO: 3239; WAN024AN6_at; Start 32; Stop 56
tgcagtttaggagctaaagggaaca

SEQ ID NO: 60162 - DNA, 25 bp, Artificial
  probe
  misc_feature (1)..(25): SEQ ID NO: 3239; WAN024AN6_at; Start 50; Stop 74
gggaacagaatggagaaaatggaac

SEQ ID NO: 60163 - DNA, 25 bp, Artificial
  probe
  misc_feature (1)..(25): SEQ ID NO: 3239; WAN024AN6_at; Start 26; Stop 50
tttttgtgcagtttaggagctaaag

SEQ ID NO: 60164 - DNA, 25 bp, Artificial
  probe
  misc_feature (1)..(25): SEQ ID NO: 3239; WAN024AN6_at; Start 55; Stop 79
cagaatggagaaaatggaacaaatg

SEQ ID NO: 60165 - DNA, 25 bp, Artificial
  probe
  misc_feature (1)..(25): SEQ ID NO: 3239; WAN024AN6_at; Start 43; Stop 67
agctaaagggaacagaatggagaaa

SEQ ID NO: 60166 - DNA, 25 bp, Artificial
  probe
  misc_feature (1)..(25): SEQ ID NO: 3239; WAN024AN6_at; Start 46; Stop 70
taaagggaacagaatggagaaaatg

SEQ ID NO: 60167 - DNA, 25 bp, Artificial
  probe
  misc_feature (1)..(25): SEQ ID NO: 3239; WAN024AN6_at; Start 51; Stop 75
ggaacagaatggagaaaatggaaca

SEQ ID NO: 60168 - DNA, 25 bp, Artificial
  probe
  misc_feature (1)..(25): SEQ ID NO: 3239; WAN024AN6_at; Start 57; Stop 81
gaatggagaaaatggaacaaatgtg

SEQ ID NO: 60169 - DNA, 25 bp, Artificial
  probe
  misc_feature (1)..(25): SEQ ID NO: 3239; WAN024AN6_at; Start 73; Stop 97
acaaatgtgttttctaatctgttag

SEQ ID NO: 60170 - DNA, 25 bp, Artificial
  probe
  misc_feature (1)..(25): SEQ ID NO: 3239; WAN024AN6_at; Start 58; Stop 82
aatggagaaaatggaacaaatgtgt

SEQ ID NO: 60171 - DNA, 25 bp, Artificial
  probe
  misc_feature (1)..(25): SEQ ID NO: 3239; WAN024AN6_at; Start 87; Stop 111
taatctgttagactgtatctagaaa

SEQ ID NO: 60172 - DNA, 25 bp, Artificial
  probe
  misc_feature (1)..(25): SEQ ID NO: 3239; WAN024AN6_at; Start 70; Stop 94
ggaacaaatgtgttttctaatctgt

SEQ ID NO: 60173 - DNA, 25 bp, Artificial
  probe
  misc_feature (1)..(25): SEQ ID NO: 3239; WAN024AN6_at; Start 62; Stop 86
gagaaaatggaacaaatgtgttttc

SEQ ID NO: 60174 - DNA, 25 bp, Artificial
  probe
  misc_feature (1)..(25): SEQ ID NO: 3239; WAN024AN6_at; Start 28; Stop 52
tttgtgcagtttaggagctaaaggg

SEQ ID NO: 60175 - DNA, 25 bp, Artificial
  probe
  misc_feature (1)..(25): SEQ ID NO: 3239; WAN024AN6_at; Start 90; Stop 114
tctgttagactgtatctagaaaggg

SEQ ID NO: 60176 - DNA, 25 bp, Artificial
  probe
  misc_feature (1)..(25): SEQ ID NO: 3239; WAN024AN6_at; Start 24; Stop 48
cttttttgtgcagtttaggagctaa

SEQ ID NO: 60177 - DNA, 25 bp, Artificial
  probe
  misc_feature (1)..(25): SEQ ID NO: 3239; WAN024AN6_at; Start 53; Stop 77
aacagaatggagaaaatggaacaaa

SEQ ID NO: 60178 - DNA, 25 bp, Artificial
  probe
  misc_feature (1)..(25): SEQ ID NO: 3239; WAN024AN6_at; Start 42; Stop 66
gagctaaagggaacagaatggagaa

SEQ ID NO: 60179 - DNA, 25 bp, Artificial
  probe
  misc_feature (1)..(25): SEQ ID NO: 3239; WAN024AN6_at; Start 85; Stop 109
tctaatctgttagactgtatctaga

SEQ ID NO: 60180 - DNA, 25 bp, Artificial
  probe
  misc_feature (1)..(25): SEQ ID NO: 3239; WAN024AN6_at; Start 45; Stop 69
ctaaagggaacagaatggagaaaat

SEQ ID NO: 60181 - DNA, 25 bp, Artificial
  probe
  misc_feature (1)..(25): SEQ ID NO: 3239; WAN024AN6_at; Start 95; Stop 119
tagactgtatctagaaaggggaaaa

SEQ ID NO: 60182 - DNA, 25 bp, Artificial
  probe
  misc_feature (1)..(25): SEQ ID NO: 3239; WAN024AN6_at; Start 37; Stop 61
tttaggagctaaagggaacagaatg

SEQ ID NO: 60183 - DNA, 25 bp, Artificial
  probe
  misc_feature (1)..(25): SEQ ID NO: 3239; WAN024AN6_at; Start 44; Stop 68
gctaaagggaacagaatggagaaaa

SEQ ID NO: 60184 - DNA, 25 bp, Artificial
  probe
  misc_feature (1)..(25): SEQ ID NO: 3239; WAN024AN6_at; Start 30; Stop 54
tgtgcagtttaggagctaaagggaa

SEQ ID NO: 60185 - DNA, 25 bp, Artificial
  probe
  misc_feature (1)..(25): SEQ ID NO: 3239; WAN024AN6_at; Start 75; Stop 99
aaatgtgttttctaatctgttagac

SEQ ID NO: 60186 - DNA, 25 bp, Artificial
  probe
  misc_feature (1)..(25): SEQ ID NO: 308; WAN024AN7_at; Start 71; Stop 95
cctttagctcctaaactgcacaaaa

SEQ ID NO: 60187 - DNA, 25 bp, Artificial
  probe
  misc_feature (1)..(25): SEQ ID NO: 308; WAN024AN7_at; Start 74; Stop 98
ttagctcctaaactgcacaaaaaag

SEQ ID NO: 60188 - DNA, 25 bp, Artificial
  probe
  misc_feature (1)..(25): SEQ ID NO: 308; WAN024AN7_at; Start 13; Stop 37
tctagatacagtctaacagattaga

SEQ ID NO: 60189 - DNA, 25 bp, Artificial
  probe
  misc_feature (1)..(25): SEQ ID NO: 308; WAN024AN7_at; Start 21; Stop 45
cagtctaacagattagaaaacacat

SEQ ID NO: 60190 - DNA, 25 bp, Artificial
  probe
  misc_feature (1)..(25): SEQ ID NO: 308; WAN024AN7_at; Start 12; Stop 36
ttctagatacagtctaacagattag

SEQ ID NO: 60191 - DNA, 25 bp, Artificial
  probe
  misc_feature (1)..(25): SEQ ID NO: 308; WAN024AN7_at; Start 6; Stop 30
tcccctttctagatacagtctaaca

SEQ ID NO: 60192 - DNA, 25 bp, Artificial
  probe
  misc_feature (1)..(25): SEQ ID NO: 308; WAN024AN7_at; Start 39; Stop 63
aacacatttgttccattttctccat

SEQ ID NO: 60193 - DNA, 25 bp, Artificial
  probe
  misc_feature (1)..(25): SEQ ID NO: 308; WAN024AN7_at; Start 31; Stop 55
gattagaaaacacatttgttccatt

SEQ ID NO: 60194 - DNA, 25 bp, Artificial
  probe
  misc_feature (1)..(25): SEQ ID NO: 308; WAN024AN7_at; Start 77; Stop 101
gctcctaaactgcacaaaaaagaga

SEQ ID NO: 60195 - DNA, 25 bp, Artificial
  probe
  misc_feature (1)..(25): SEQ ID NO: 308; WAN024AN7_at; Start 64; Stop 88
tctgttccctttagctcctaaactg

SEQ ID NO: 60196 - DNA, 25 bp, Artificial
  probe
  misc_feature (1)..(25): SEQ ID NO: 308; WAN024AN7_at; Start 4; Stop 28
tttcccctttctagatacagtctaa

SEQ ID NO: 60197 - DNA, 25 bp, Artificial
  probe
  misc_feature (1)..(25): SEQ ID NO: 308; WAN024AN7_at; Start 56; Stop 80
ttctccattctgttccctttagctc

SEQ ID NO: 60198 - DNA, 25 bp, Artificial
  probe
  misc_feature (1)..(25): SEQ ID NO: 308; WAN024AN7_at; Start 14; Stop 38
ctagatacagtctaacagattagaa

SEQ ID NO: 60199 - DNA, 25 bp, Artificial
  probe
  misc_feature (1)..(25): SEQ ID NO: 308; WAN024AN7_at; Start 2; Stop 26
attttcccctttctagatacagtct

SEQ ID NO: 60200 - DNA, 25 bp, Artificial
  probe
  misc_feature (1)..(25): SEQ ID NO: 308; WAN024AN7_at; Start 47; Stop 71
tgttccattttctccattctgttcc

SEQ ID NO: 60201 - DNA, 25 bp, Artificial
  probe
  misc_feature (1)..(25): SEQ ID NO: 308; WAN024AN7_at; Start 52; Stop 76
cattttctccattctgttcccttta

SEQ ID NO: 60202 - DNA, 25 bp, Artificial
  probe
  misc_feature (1)..(25): SEQ ID NO: 308; WAN024AN7_at; Start 61; Stop 85
cattctgttccctttagctcctaaa

SEQ ID NO: 60203 - DNA, 25 bp, Artificial
  probe
  misc_feature (1)..(25): SEQ ID NO: 308; WAN024AN7_at; Start 43; Stop 67
catttgttccattttctccattctg

SEQ ID NO: 60204 - DNA, 25 bp, Artificial
  probe
  misc_feature (1)..(25): SEQ ID NO: 308; WAN024AN7_at; Start 66; Stop 90
tgttccctttagctcctaaactgca

SEQ ID NO: 60205 - DNA, 25 bp, Artificial
  probe
  misc_feature (1)..(25): SEQ ID NO: 308; WAN024AN7_at; Start 75; Stop 99
tagctcctaaactgcacaaaaaaga

SEQ ID NO: 60206 - DNA, 25 bp, Artificial
  probe
  misc_feature (1)..(25): SEQ ID NO: 308; WAN024AN7_at; Start 76; Stop 100
agctcctaaactgcacaaaaaagag

SEQ ID NO: 60207 - DNA, 25 bp, Artificial
  probe
  misc_feature (1)..(25): SEQ ID NO: 308; WAN024AN7_at; Start 24; Stop 48
tctaacagattagaaaacacatttg

SEQ ID NO: 60208 - DNA, 25 bp, Artificial
  probe
  misc_feature (1)..(25): SEQ ID NO: 308; WAN024AN7_at; Start 60; Stop 84
ccattctgttccctttagctcctaa

SEQ ID NO: 60209 - DNA, 25 bp, Artificial
  probe
  misc_feature (1)..(25): SEQ ID NO: 308; WAN024AN7_at; Start 17; Stop 41
gatacagtctaacagattagaaaac

SEQ ID NO: 60210 - DNA, 25 bp, Artificial
  probe
  misc_feature (1)..(25): SEQ ID NO: 308; WAN024AN7_at; Start 9; Stop 33
cctttctagatacagtctaacagat

SEQ ID NO: 60211 - DNA, 25 bp, Artificial
  probe
  misc_feature (1)..(25): SEQ ID NO: 308; WAN024AN7_at; Start 19; Stop 43
tacagtctaacagattagaaaacac

SEQ ID NO: 60212 - DNA, 25 bp, Artificial
  probe
  misc_feature (1)..(25): SEQ ID NO: 308; WAN024AN7_at; Start 48; Stop 72
gttccattttctccattctgttccc

SEQ ID NO: 60213 - DNA, 25 bp, Artificial
  probe
  misc_feature (1)..(25): SEQ ID NO: 308; WAN024AN7_at; Start 54; Stop 78
ttttctccattctgttccctttagc

SEQ ID NO: 60214 - DNA, 25 bp, Artificial
  probe
  misc_feature (1)..(25): SEQ ID NO: 308; WAN024AN7_at; Start 36; Stop 60
gaaaacacatttgttccattttctc

SEQ ID NO: 60215 - DNA, 25 bp, Artificial
  probe
  misc_feature (1)..(25): SEQ ID NO: 308; WAN024AN7_at; Start 69; Stop 93
tccctttagctcctaaactgcacaa

SEQ ID NO: 60216 - DNA, 25 bp, Artificial
  probe
  misc_feature (1)..(25): SEQ ID NO: 308; WAN024AN7_at; Start 8; Stop 32
ccctttctagatacagtctaacaga

SEQ ID NO: 60217 - DNA, 25 bp, Artificial
  probe
  misc_feature (1)..(25): SEQ ID NO: 308; WAN024AN7_at; Start 29; Stop 53
cagattagaaaacacatttgttcca

SEQ ID NO: 60218 - DNA, 25 bp, Artificial
  probe
  misc_feature (1)..(25): SEQ ID NO: 308; WAN024AN7_at; Start 25; Stop 49
ctaacagattagaaaacacatttgt

SEQ ID NO: 60219 - DNA, 25 bp, Artificial
  probe
  misc_feature (1)..(25): SEQ ID NO: 308; WAN024AN7_at; Start 72; Stop 96
ctttagctcctaaactgcacaaaaa

SEQ ID NO: 60220 - DNA, 25 bp, Artificial
  probe
  misc_feature (1)..(25): SEQ ID NO: 3228; WAN024AN8_at; Start 35; Stop 59
aataactgtttgcacaaatctaaaa

SEQ ID NO: 60221 - DNA, 25 bp, Artificial
  probe
  misc_feature (1)..(25): SEQ ID NO: 3228; WAN024AN8_at; Start 128; Stop 152
cacttgttagatttacttttatcct

SEQ ID NO: 60222 - DNA, 25 bp, Artificial
  probe
  misc_feature (1)..(25): SEQ ID NO: 3228; WAN024AN8_at; Start 169; Stop 193
gatattccgcgattatttttcggag

SEQ ID NO: 60223 - DNA, 25 bp, Artificial
  probe
  misc_feature (1)..(25): SEQ ID NO: 3228; WAN024AN8_at; Start 163; Stop 187
ataggagatattccgcgattatttt

SEQ ID NO: 60224 - DNA, 25 bp, Artificial
  probe
  misc_feature (1)..(25): SEQ ID NO: 3228; WAN024AN8_at; Start 160; Stop 184
agaataggagatattccgcgattat

SEQ ID NO: 60225 - DNA, 25 bp, Artificial
  probe
  misc_feature (1)..(25): SEQ ID NO: 3228; WAN024AN8_at; Start 120; Stop 144
gacattaacacttgttagatttact

SEQ ID NO: 60226 - DNA, 25 bp, Artificial
  probe
  misc_feature (1)..(25): SEQ ID NO: 3228; WAN024AN8_at; Start 106; Stop 130
tcttttacaaacttgacattaacac

SEQ ID NO: 60227 - DNA, 25 bp, Artificial
  probe
  misc_feature (1)..(25): SEQ ID NO: 3228; WAN024AN8_at; Start 34; Stop 58
caataactgtttgcacaaatctaaa

SEQ ID NO: 60228 - DNA, 25 bp, Artificial
  probe
  misc_feature (1)..(25): SEQ ID NO: 3228; WAN024AN8_at; Start 115; Stop 139
aacttgacattaacacttgttagat

SEQ ID NO: 60229 - DNA, 25 bp, Artificial
  probe
  misc_feature (1)..(25): SEQ ID NO: 3228; WAN024AN8_at; Start 113; Stop 137
caaacttgacattaacacttgttag

SEQ ID NO: 60230 - DNA, 25 bp, Artificial
  probe
  misc_feature (1)..(25): SEQ ID NO: 3228; WAN024AN8_at; Start 43; Stop 67
tttgcacaaatctaaaataaggtta

SEQ ID NO: 60231 - DNA, 25 bp, Artificial
  probe
  misc_feature (1)..(25): SEQ ID NO: 3228; WAN024AN8_at; Start 171; Stop 195
tattccgcgattatttttcggagga

SEQ ID NO: 60232 - DNA, 25 bp, Artificial
  probe
  misc_feature (1)..(25): SEQ ID NO: 3228; WAN024AN8_at; Start 45; Stop 69
tgcacaaatctaaaataaggttaaa

SEQ ID NO: 60233 - DNA, 25 bp, Artificial
  probe
  misc_feature (1)..(25): SEQ ID NO: 3228; WAN024AN8_at; Start 110; Stop 134
ttacaaacttgacattaacacttgt

SEQ ID NO: 60234 - DNA, 25 bp, Artificial
  probe
  misc_feature (1)..(25): SEQ ID NO: 3228; WAN024AN8_at; Start 168; Stop 192
agatattccgcgattatttttcgga

SEQ ID NO: 60235 - DNA, 25 bp, Artificial
  probe
  misc_feature (1)..(25): SEQ ID NO: 3228; WAN024AN8_at; Start 146; Stop 170
ttatcctttaaaatagaataggaga

SEQ ID NO: 60236 - DNA, 25 bp, Artificial
  probe
  misc_feature (1)..(25): SEQ ID NO: 3228; WAN024AN8_at; Start 159; Stop 183
tagaataggagatattccgcgatta

SEQ ID NO: 60237 - DNA, 25 bp, Artificial
  probe
  misc_feature (1)..(25): SEQ ID NO: 3228; WAN024AN8_at; Start 154; Stop 178
taaaatagaataggagatattccgc

SEQ ID NO: 60238 - DNA, 25 bp, Artificial
  probe
  misc_feature (1)..(25): SEQ ID NO: 3228; WAN024AN8_at; Start 111; Stop 135
tacaaacttgacattaacacttgtt

SEQ ID NO: 60239 - DNA, 25 bp, Artificial
  probe
  misc_feature (1)..(25): SEQ ID NO: 3228; WAN024AN8_at; Start 155; Stop 179
aaaatagaataggagatattccgcg

SEQ ID NO: 60240 - DNA, 25 bp, Artificial
  probe
  misc_feature (1)..(25): SEQ ID NO: 3228; WAN024AN8_at; Start 41; Stop 65
tgtttgcacaaatctaaaataaggt

SEQ ID NO: 60241 - DNA, 25 bp, Artificial
  probe
  misc_feature (1)..(25): SEQ ID NO: 3228; WAN024AN8_at; Start 167; Stop 191
gagatattccgcgattatttttcgg

SEQ ID NO: 60242 - DNA, 25 bp, Artificial
  probe
  misc_feature (1)..(25): SEQ ID NO: 3228; WAN024AN8_at; Start 71; Stop 95
actcttaaaaataatacacttatca

SEQ ID NO: 60243 - DNA, 25 bp, Artificial
  probe
  misc_feature (1)..(25): SEQ ID NO: 3228; WAN024AN8_at; Start 158; Stop 182
atagaataggagatattccgcgatt

SEQ ID NO: 60244 - DNA, 25 bp, Artificial
  probe
  misc_feature (1)..(25): SEQ ID NO: 3228; WAN024AN8_at; Start 162; Stop 186
aataggagatattccgcgattattt

SEQ ID NO: 60245 - DNA, 25 bp, Artificial
  probe
  misc_feature (1)..(25): SEQ ID NO: 3228; WAN024AN8_at; Start 156; Stop 180
aaatagaataggagatattccgcga

SEQ ID NO: 60246 - DNA, 25 bp, Artificial
  probe
  misc_feature (1)..(25): SEQ ID NO: 3228; WAN024AN8_at; Start 37; Stop 61
taactgtttgcacaaatctaaaata

SEQ ID NO: 60247 - DNA, 25 bp, Artificial
  probe
  misc_feature (1)..(25): SEQ ID NO: 3228; WAN024AN8_at; Start 170; Stop 194
atattccgcgattatttttcggagg

SEQ ID NO: 60248 - DNA, 25 bp, Artificial
  probe
  misc_feature (1)..(25): SEQ ID NO: 3228; WAN024AN8_at; Start 161; Stop 185
gaataggagatattccgcgattatt

SEQ ID NO: 60249 - DNA, 25 bp, Artificial
  probe
  misc_feature (1)..(25): SEQ ID NO: 3228; WAN024AN8_at; Start 150; Stop 174
cctttaaaatagaataggagatatt

SEQ ID NO: 60250 - DNA, 25 bp, Artificial
  probe
  misc_feature (1)..(25): SEQ ID NO: 3228; WAN024AN8_at; Start 114; Stop 138
aaacttgacattaacacttgttaga

SEQ ID NO: 60251 - DNA, 25 bp, Artificial
  probe
  misc_feature (1)..(25): SEQ ID NO: 3228; WAN024AN8_at; Start 157; Stop 181
aatagaataggagatattccgcgat

SEQ ID NO: 60252 - DNA, 25 bp, Artificial
  probe
  misc_feature (1)..(25): SEQ ID NO: 3228; WAN024AN8_at; Start 109; Stop 133
tttacaaacttgacattaacacttg

SEQ ID NO: 60253 - DNA, 25 bp, Artificial
  probe
  misc_feature (1)..(25): SEQ ID NO: 3228; WAN024AN8_at; Start 40; Stop 64
ctgtttgcacaaatctaaaataagg

SEQ ID NO: 60254 - DNA, 25 bp, Artificial
  probe
  misc_feature (1)..(25): SEQ ID NO: 4858; WAN024AN9_at; Start 74; Stop 98
tgttaatgtcaagtttgtaaaagaa

SEQ ID NO: 60255 - DNA, 25 bp, Artificial
  probe
  misc_feature (1)..(25): SEQ ID NO: 4858; WAN024AN9_at; Start 10; Stop 34
ctccgaaaaataatcgcggaatatc

SEQ ID NO: 60256 - DNA, 25 bp, Artificial
  probe
  misc_feature (1)..(25): SEQ ID NO: 4858; WAN024AN9_at; Start 145; Stop 169
tttagatttgtgcaaacagttattg

SEQ ID NO: 60257 - DNA, 25 bp, Artificial
  probe
  misc_feature (1)..(25): SEQ ID NO: 4858; WAN024AN9_at; Start 23; Stop 47
tcgcggaatatctcctattctattt

SEQ ID NO: 60258 - DNA, 25 bp, Artificial
  probe
  misc_feature (1)..(25): SEQ ID NO: 4858; WAN024AN9_at; Start 21; Stop 45
aatcgcggaatatctcctattctat

SEQ ID NO: 60259 - DNA, 25 bp, Artificial
  probe
  misc_feature (1)..(25): SEQ ID NO: 4858; WAN024AN9_at; Start 25; Stop 49
gcggaatatctcctattctatttta

SEQ ID NO: 60260 - DNA, 25 bp, Artificial
  probe
  misc_feature (1)..(25): SEQ ID NO: 4858; WAN024AN9_at; Start 33; Stop 57
tctcctattctattttaaaggataa

SEQ ID NO: 60261 - DNA, 25 bp, Artificial
  probe
  misc_feature (1)..(25): SEQ ID NO: 4858; WAN024AN9_at; Start 20; Stop 44
taatcgcggaatatctcctattcta

SEQ ID NO: 60262 - DNA, 25 bp, Artificial
  probe
  misc_feature (1)..(25): SEQ ID NO: 4858; WAN024AN9_at; Start 16; Stop 40
aaaataatcgcggaatatctcctat

SEQ ID NO: 60263 - DNA, 25 bp, Artificial
  probe
  misc_feature (1)..(25): SEQ ID NO: 4858; WAN024AN9_at; Start 70; Stop 94
caagtgttaatgtcaagtttgtaaa

SEQ ID NO: 60264 - DNA, 25 bp, Artificial
  probe
  misc_feature (1)..(25): SEQ ID NO: 4858; WAN024AN9_at; Start 67; Stop 91
taacaagtgttaatgtcaagtttgt

SEQ ID NO: 60265 - DNA, 25 bp, Artificial
  probe
  misc_feature (1)..(25): SEQ ID NO: 4858; WAN024AN9_at; Start 142; Stop 166
tattttagatttgtgcaaacagtta

SEQ ID NO: 60266 - DNA, 25 bp, Artificial
  probe
  misc_feature (1)..(25): SEQ ID NO: 4858; WAN024AN9_at; Start 139; Stop 163
ccttattttagatttgtgcaaacag

SEQ ID NO: 60267 - DNA, 25 bp, Artificial
  probe
  misc_feature (1)..(25): SEQ ID NO: 4858; WAN024AN9_at; Start 65; Stop 89
tctaacaagtgttaatgtcaagttt

SEQ ID NO: 60268 - DNA, 25 bp, Artificial
  probe
  misc_feature (1)..(25): SEQ ID NO: 4858; WAN024AN9_at; Start 62; Stop 86
aaatctaacaagtgttaatgtcaag

SEQ ID NO: 60269 - DNA, 25 bp, Artificial
  probe
  misc_feature (1)..(25): SEQ ID NO: 4858; WAN024AN9_at; Start 72; Stop 96
agtgttaatgtcaagtttgtaaaag

SEQ ID NO: 60270 - DNA, 25 bp, Artificial
  probe
  misc_feature (1)..(25): SEQ ID NO: 4858; WAN024AN9_at; Start 136; Stop 160
taaccttattttagatttgtgcaaa

SEQ ID NO: 60271 - DNA, 25 bp, Artificial
  probe
  misc_feature (1)..(25): SEQ ID NO: 4858; WAN024AN9_at; Start 66; Stop 90
ctaacaagtgttaatgtcaagtttg

SEQ ID NO: 60272 - DNA, 25 bp, Artificial
  probe
  misc_feature (1)..(25): SEQ ID NO: 4858; WAN024AN9_at; Start 26; Stop 50
cggaatatctcctattctattttaa

SEQ ID NO: 60273 - DNA, 25 bp, Artificial
  probe
  misc_feature (1)..(25): SEQ ID NO: 4858; WAN024AN9_at; Start 11; Stop 35
tccgaaaaataatcgcggaatatct

SEQ ID NO: 60274 - DNA, 25 bp, Artificial
  probe
  misc_feature (1)..(25): SEQ ID NO: 4858; WAN024AN9_at; Start 63; Stop 87
aatctaacaagtgttaatgtcaagt

SEQ ID NO: 60275 - DNA, 25 bp, Artificial
  probe
  misc_feature (1)..(25): SEQ ID NO: 4858; WAN024AN9_at; Start 24; Stop 48
cgcggaatatctcctattctatttt

SEQ ID NO: 60276 - DNA, 25 bp, Artificial
  probe
  misc_feature (1)..(25): SEQ ID NO: 4858; WAN024AN9_at; Start 140; Stop 164
cttattttagatttgtgcaaacagt

SEQ ID NO: 60277 - DNA, 25 bp, Artificial
  probe
  misc_feature (1)..(25): SEQ ID NO: 4858; WAN024AN9_at; Start 18; Stop 42
aataatcgcggaatatctcctattc

SEQ ID NO: 60278 - DNA, 25 bp, Artificial
  probe
  misc_feature (1)..(25): SEQ ID NO: 4858; WAN024AN9_at; Start 108; Stop 132
tgataagtgtattatttttaagagt

SEQ ID NO: 60279 - DNA, 25 bp, Artificial
  probe
  misc_feature (1)..(25): SEQ ID NO: 4858; WAN024AN9_at; Start 60; Stop 84
gtaaatctaacaagtgttaatgtca

SEQ ID NO: 60280 - DNA, 25 bp, Artificial
  probe
  misc_feature (1)..(25): SEQ ID NO: 4858; WAN024AN9_at; Start 9; Stop 33
cctccgaaaaataatcgcggaatat

SEQ ID NO: 60281 - DNA, 25 bp, Artificial
  probe
  misc_feature (1)..(25): SEQ ID NO: 4858; WAN024AN9_at; Start 57; Stop 81
aaagtaaatctaacaagtgttaatg

SEQ ID NO: 60282 - DNA, 25 bp, Artificial
  probe
  misc_feature (1)..(25): SEQ ID NO: 4858; WAN024AN9_at; Start 17; Stop 41
aaataatcgcggaatatctcctatt

SEQ ID NO: 60283 - DNA, 25 bp, Artificial
  probe
  misc_feature (1)..(25): SEQ ID NO: 4858; WAN024AN9_at; Start 29; Stop 53
aatatctcctattctattttaaagg

SEQ ID NO: 60284 - DNA, 25 bp, Artificial
  probe
  misc_feature (1)..(25): SEQ ID NO: 4858; WAN024AN9_at; Start 138; Stop 162
accttattttagatttgtgcaaaca

SEQ ID NO: 60285 - DNA, 25 bp, Artificial
  probe
  misc_feature (1)..(25): SEQ ID NO: 4858; WAN024AN9_at; Start 68; Stop 92
aacaagtgttaatgtcaagtttgta

SEQ ID NO: 60286 - DNA, 25 bp, Artificial
  probe
  misc_feature (1)..(25): SEQ ID NO: 4858; WAN024AN9_at; Start 12; Stop 36
ccgaaaaataatcgcggaatatctc

SEQ ID NO: 60287 - DNA, 25 bp, Artificial
  probe
  misc_feature (1)..(25): SEQ ID NO: 4858; WAN024AN9_at; Start 51; Stop 75
aggataaaagtaaatctaacaagtg

SEQ ID NO: 60288 - DNA, 25 bp, Artificial
  probe
  misc_feature (1)..(25): SEQ ID NO: 4366; WAN024ANA_at; Start 8; Stop 32
gaagctatccatcataattggatgg

SEQ ID NO: 60289 - DNA, 25 bp, Artificial
  probe
  misc_feature (1)..(25): SEQ ID NO: 4366; WAN024ANA_at; Start 3; Stop 27
accaagaagctatccatcataattg

SEQ ID NO: 60290 - DNA, 25 bp, Artificial
  probe
  misc_feature (1)..(25): SEQ ID NO: 4366; WAN024ANA_at; Start 65; Stop 89
aatgaaactgaaagagtattctgca

SEQ ID NO: 60291 - DNA, 25 bp, Artificial
  probe
  misc_feature (1)..(25): SEQ ID NO: 4366; WAN024ANA_at; Start 75; Stop 99
aaagagtattctgcagatatataat

SEQ ID NO: 60292 - DNA, 25 bp, Artificial
  probe
  misc_feature (1)..(25): SEQ ID NO: 4366; WAN024ANA_at; Start 66; Stop 90
atgaaactgaaagagtattctgcag

SEQ ID NO: 60293 - DNA, 25 bp, Artificial
  probe
  misc_feature (1)..(25): SEQ ID NO: 4366; WAN024ANA_at; Start 73; Stop 97
tgaaagagtattctgcagatatata

SEQ ID NO: 60294 - DNA, 25 bp, Artificial
  probe
  misc_feature (1)..(25): SEQ ID NO: 4366; WAN024ANA_at; Start 76; Stop 100
aagagtattctgcagatatataata

SEQ ID NO: 60295 - DNA, 25 bp, Artificial
  probe
  misc_feature (1)..(25): SEQ ID NO: 4366; WAN024ANA_at; Start 67; Stop 91
tgaaactgaaagagtattctgcaga

SEQ ID NO: 60296 - DNA, 25 bp, Artificial
  probe
  misc_feature (1)..(25): SEQ ID NO: 4366; WAN024ANA_at; Start 72; Stop 96
ctgaaagagtattctgcagatatat

SEQ ID NO: 60297 - DNA, 25 bp, Artificial
  probe
  misc_feature (1)..(25): SEQ ID NO: 4366; WAN024ANA_at; Start 4; Stop 28
ccaagaagctatccatcataattgg

SEQ ID NO: 60298 - DNA, 25 bp, Artificial
  probe
  misc_feature (1)..(25): SEQ ID NO: 4366; WAN024ANA_at; Start 68; Stop 92
gaaactgaaagagtattctgcagat

SEQ ID NO: 60299 - DNA, 25 bp, Artificial
  probe
  misc_feature (1)..(25): SEQ ID NO: 4366; WAN024ANA_at; Start 10; Stop 34
agctatccatcataattggatggct

SEQ ID NO: 60300 - DNA, 25 bp, Artificial
  probe
  misc_feature (1)..(25): SEQ ID NO: 4366; WAN024ANA_at; Start 9; Stop 33
aagctatccatcataattggatggc

SEQ ID NO: 60301 - DNA, 25 bp, Artificial
  probe
  misc_feature (1)..(25): SEQ ID NO: 4366; WAN024ANA_at; Start 77; Stop 101
agagtattctgcagatatataatat

SEQ ID NO: 60302 - DNA, 25 bp, Artificial
  probe
  misc_feature (1)..(25): SEQ ID NO: 4366; WAN024ANA_at; Start 70; Stop 94
aactgaaagagtattctgcagatat

SEQ ID NO: 60303 - DNA, 25 bp, Artificial
  probe
  misc_feature (1)..(25): SEQ ID NO: 4366; WAN024ANA_at; Start 11; Stop 35
gctatccatcataattggatggctt

SEQ ID NO: 60304 - DNA, 25 bp, Artificial
  probe
  misc_feature (1)..(25): SEQ ID NO: 4366; WAN024ANA_at; Start 69; Stop 93
aaactgaaagagtattctgcagata

SEQ ID NO: 60305 - DNA, 25 bp, Artificial
  probe
  misc_feature (1)..(25): SEQ ID NO: 4366; WAN024ANA_at; Start 64; Stop 88
gaatgaaactgaaagagtattctgc

SEQ ID NO: 60306 - DNA, 25 bp, Artificial
  probe
  misc_feature (1)..(25): SEQ ID NO: 4366; WAN024ANA_at; Start 63; Stop 87
tgaatgaaactgaaagagtattctg

SEQ ID NO: 60307 - DNA, 25 bp, Artificial
  probe
  misc_feature (1)..(25): SEQ ID NO: 4366; WAN024ANA_at; Start 74; Stop 98
gaaagagtattctgcagatatataa

SEQ ID NO: 60308 - DNA, 25 bp, Artificial
  probe
  misc_feature (1)..(25): SEQ ID NO: 4366; WAN024ANA_at; Start 71; Stop 95
actgaaagagtattctgcagatata

SEQ ID NO: 60309 - DNA, 25 bp, Artificial
  probe
  misc_feature (1)..(25): SEQ ID NO: 4366; WAN024ANA_at; Start 6; Stop 30
aagaagctatccatcataattggat

SEQ ID NO: 60310 - DNA, 25 bp, Artificial
  probe
  misc_feature (1)..(25): SEQ ID NO: 4366; WAN024ANA_at; Start 2; Stop 26
aaccaagaagctatccatcataatt

SEQ ID NO: 60311 - DNA, 25 bp, Artificial
  probe
  misc_feature (1)..(25): SEQ ID NO: 4366; WAN024ANA_at; Start 5; Stop 29
caagaagctatccatcataattgga

SEQ ID NO: 60312 - DNA, 25 bp, Artificial
  probe
  misc_feature (1)..(25): SEQ ID NO: 4366; WAN024ANA_at; Start 7; Stop 31
agaagctatccatcataattggatg

SEQ ID NO: 60313 - DNA, 25 bp, Artificial
  probe
  misc_feature (1)..(25): SEQ ID NO: 567; WAN024ANB_at; Start 9; Stop 33
tatctgcagaatactctttcagttt

SEQ ID NO: 60314 - DNA, 25 bp, Artificial
  probe
  misc_feature (1)..(25): SEQ ID NO: 567; WAN024ANB_at; Start 3; Stop 27
attatatatctgcagaatactcttt

SEQ ID NO: 60315 - DNA, 25 bp, Artificial
  probe
  misc_feature (1)..(25): SEQ ID NO: 567; WAN024ANB_at; Start 12; Stop 36
ctgcagaatactctttcagtttcat

SEQ ID NO: 60316 - DNA, 25 bp, Artificial
  probe
  misc_feature (1)..(25): SEQ ID NO: 567; WAN024ANB_at; Start 2; Stop 26
tattatatatctgcagaatactctt

SEQ ID NO: 60317 - DNA, 25 bp, Artificial
  probe
  misc_feature (1)..(25): SEQ ID NO: 567; WAN024ANB_at; Start 7; Stop 31
tatatctgcagaatactctttcagt

SEQ ID NO: 60318 - DNA, 25 bp, Artificial
  probe
  misc_feature (1)..(25): SEQ ID NO: 567; WAN024ANB_at; Start 1; Stop 25
atattatatatctgcagaatactct

SEQ ID NO: 60319 - DNA, 25 bp, Artificial
  probe
  misc_feature (1)..(25): SEQ ID NO: 567; WAN024ANB_at; Start 6; Stop 30
atatatctgcagaatactctttcag

SEQ ID NO: 60320 - DNA, 25 bp, Artificial
  probe
  misc_feature (1)..(25): SEQ ID NO: 567; WAN024ANB_at; Start 13; Stop 37
tgcagaatactctttcagtttcatt

SEQ ID NO: 60321 - DNA, 25 bp, Artificial
  probe
  misc_feature (1)..(25): SEQ ID NO: 567; WAN024ANB_at; Start 71; Stop 95
catccaattatgatggatagcttct

SEQ ID NO: 60322 - DNA, 25 bp, Artificial
  probe
  misc_feature (1)..(25): SEQ ID NO: 567; WAN024ANB_at; Start 5; Stop 29
tatatatctgcagaatactctttca

SEQ ID NO: 60323 - DNA, 25 bp, Artificial
  probe
  misc_feature (1)..(25): SEQ ID NO: 567; WAN024ANB_at; Start 8; Stop 32
atatctgcagaatactctttcagtt

SEQ ID NO: 60324 - DNA, 25 bp, Artificial
  probe
  misc_feature (1)..(25): SEQ ID NO: 567; WAN024ANB_at; Start 10; Stop 34
atctgcagaatactctttcagtttc

SEQ ID NO: 60325 - DNA, 25 bp, Artificial
  probe
  misc_feature (1)..(25): SEQ ID NO: 567; WAN024ANB_at; Start 15; Stop 39
cagaatactctttcagtttcattca

SEQ ID NO: 60326 - DNA, 25 bp, Artificial
  probe
  misc_feature (1)..(25): SEQ ID NO: 567; WAN024ANB_at; Start 75; Stop 99
caattatgatggatagcttcttggt

SEQ ID NO: 60327 - DNA, 25 bp, Artificial
  probe
  misc_feature (1)..(25): SEQ ID NO: 567; WAN024ANB_at; Start 74; Stop 98
ccaattatgatggatagcttcttgg

SEQ ID NO: 60328 - DNA, 25 bp, Artificial
  probe
  misc_feature (1)..(25): SEQ ID NO: 567; WAN024ANB_at; Start 72; Stop 96
atccaattatgatggatagcttctt

SEQ ID NO: 60329 - DNA, 25 bp, Artificial
  probe
  misc_feature (1)..(25): SEQ ID NO: 567; WAN024ANB_at; Start 67; Stop 91
aagccatccaattatgatggatagc

SEQ ID NO: 60330 - DNA, 25 bp, Artificial
  probe
  misc_feature (1)..(25): SEQ ID NO: 567; WAN024ANB_at; Start 11; Stop 35
tctgcagaatactctttcagtttca

SEQ ID NO: 60331 - DNA, 25 bp, Artificial
  probe
  misc_feature (1)..(25): SEQ ID NO: 567; WAN024ANB_at; Start 76; Stop 100
aattatgatggatagcttcttggtt

SEQ ID NO: 60332 - DNA, 25 bp, Artificial
  probe
  misc_feature (1)..(25): SEQ ID NO: 567; WAN024ANB_at; Start 69; Stop 93
gccatccaattatgatggatagctt

SEQ ID NO: 60333 - DNA, 25 bp, Artificial
  probe
  misc_feature (1)..(25): SEQ ID NO: 567; WAN024ANB_at; Start 4; Stop 28
ttatatatctgcagaatactctttc

SEQ ID NO: 60334 - DNA, 25 bp, Artificial
  probe
  misc_feature (1)..(25): SEQ ID NO: 567; WAN024ANB_at; Start 70; Stop 94
ccatccaattatgatggatagcttc

SEQ ID NO: 60335 - DNA, 25 bp, Artificial
  probe
  misc_feature (1)..(25): SEQ ID NO: 567; WAN024ANB_at; Start 68; Stop 92
agccatccaattatgatggatagct

SEQ ID NO: 60336 - DNA, 25 bp, Artificial
  probe
  misc_feature (1)..(25): SEQ ID NO: 567; WAN024ANB_at; Start 14; Stop 38
gcagaatactctttcagtttcattc

SEQ ID NO: 60337 - DNA, 25 bp, Artificial
  probe
  misc_feature (1)..(25): SEQ ID NO: 567; WAN024ANB_at; Start 73; Stop 97
tccaattatgatggatagcttcttg

SEQ ID NO: 60338 - DNA, 25 bp, Artificial
  probe
  misc_feature (1)..(25): SEQ ID NO: 3199; WAN024ANC_at; Start 23; Stop 47
ctagaaattgatttggctttccgaa

SEQ ID NO: 60339 - DNA, 25 bp, Artificial
  probe
  misc_feature (1)..(25): SEQ ID NO: 3199; WAN024ANC_at; Start 2; Stop 26
aatccagttcctaaaactttgctag

SEQ ID NO: 60340 - DNA, 25 bp, Artificial
  probe
  misc_feature (1)..(25): SEQ ID NO: 3199; WAN024ANC_at; Start 31; Stop 55
tgatttggctttccgaattaatttg

SEQ ID NO: 60341 - DNA, 25 bp, Artificial
  probe
  misc_feature (1)..(25): SEQ ID NO: 3199; WAN024ANC_at; Start 9; Stop 33
ttcctaaaactttgctagaaattga

SEQ ID NO: 60342 - DNA, 25 bp, Artificial
  probe
  misc_feature (1)..(25): SEQ ID NO: 3199; WAN024ANC_at; Start 4; Stop 28
tccagttcctaaaactttgctagaa

SEQ ID NO: 60343 - DNA, 25 bp, Artificial
  probe
  misc_feature (1)..(25): SEQ ID NO: 3199; WAN024ANC_at; Start 10; Stop 34
tcctaaaactttgctagaaattgat

SEQ ID NO: 60344 - DNA, 25 bp, Artificial
  probe
  misc_feature (1)..(25): SEQ ID NO: 3199; WAN024ANC_at; Start 35; Stop 59
ttggctttccgaattaatttgttca

SEQ ID NO: 60345 - DNA, 25 bp, Artificial
  probe
  misc_feature (1)..(25): SEQ ID NO: 3199; WAN024ANC_at; Start 25; Stop 49
agaaattgatttggctttccgaatt

SEQ ID NO: 60346 - DNA, 25 bp, Artificial
  probe
  misc_feature (1)..(25): SEQ ID NO: 3199; WAN024ANC_at; Start 6; Stop 30
cagttcctaaaactttgctagaaat

SEQ ID NO: 60347 - DNA, 25 bp, Artificial
  probe
  misc_feature (1)..(25): SEQ ID NO: 3199; WAN024ANC_at; Start 24; Stop 48
tagaaattgatttggctttccgaat

SEQ ID NO: 60348 - DNA, 25 bp, Artificial
  probe
  misc_feature (1)..(25): SEQ ID NO: 3199; WAN024ANC_at; Start 28; Stop 52
aattgatttggctttccgaattaat

SEQ ID NO: 60349 - DNA, 25 bp, Artificial
  probe
  misc_feature (1)..(25): SEQ ID NO: 3199; WAN024ANC_at; Start 26; Stop 50
gaaattgatttggctttccgaatta

SEQ ID NO: 60350 - DNA, 25 bp, Artificial
  probe
  misc_feature (1)..(25): SEQ ID NO: 3199; WAN024ANC_at; Start 29; Stop 53
attgatttggctttccgaattaatt

SEQ ID NO: 60351 - DNA, 25 bp, Artificial
  probe
  misc_feature (1)..(25): SEQ ID NO: 3199; WAN024ANC_at; Start 36; Stop 60
tggctttccgaattaatttgttcaa

SEQ ID NO: 60352 - DNA, 25 bp, Artificial
  probe
  misc_feature (1)..(25): SEQ ID NO: 3199; WAN024ANC_at; Start 1; Stop 25
caatccagttcctaaaactttgcta

SEQ ID NO: 60353 - DNA, 25 bp, Artificial
  probe
  misc_feature (1)..(25): SEQ ID NO: 3199; WAN024ANC_at; Start 3; Stop 27
atccagttcctaaaactttgctaga

SEQ ID NO: 60354 - DNA, 25 bp, Artificial
  probe
  misc_feature (1)..(25): SEQ ID NO: 4406; WAN024AND_at; Start 25; Stop 49
aaagccaaatcaatttctagcaaag

SEQ ID NO: 60355 - DNA, 25 bp, Artificial
  probe
  misc_feature (1)..(25): SEQ ID NO: 4406; WAN024AND_at; Start 40; Stop 64
tctagcaaagttttaggaactggat

SEQ ID NO: 60356 - DNA, 25 bp, Artificial
  probe
  misc_feature (1)..(25): SEQ ID NO: 4406; WAN024AND_at; Start 27; Stop 51
agccaaatcaatttctagcaaagtt

SEQ ID NO: 60357 - DNA, 25 bp, Artificial
  probe
  misc_feature (1)..(25): SEQ ID NO: 4406; WAN024AND_at; Start 18; Stop 42
aattcggaaagccaaatcaatttct

SEQ ID NO: 60358 - DNA, 25 bp, Artificial
  probe
  misc_feature (1)..(25): SEQ ID NO: 4406; WAN024AND_at; Start 7; Stop 31
ttgaacaaattaattcggaaagcca

SEQ ID NO: 60359 - DNA, 25 bp, Artificial
  probe
  misc_feature (1)..(25): SEQ ID NO: 4406; WAN024AND_at; Start 34; Stop 58
tcaatttctagcaaagttttaggaa

SEQ ID NO: 60360 - DNA, 25 bp, Artificial
  probe
  misc_feature (1)..(25): SEQ ID NO: 4406; WAN024AND_at; Start 14; Stop 38
aattaattcggaaagccaaatcaat

SEQ ID NO: 60361 - DNA, 25 bp, Artificial
  probe
  misc_feature (1)..(25): SEQ ID NO: 4406; WAN024AND_at; Start 30; Stop 54
caaatcaatttctagcaaagtttta

SEQ ID NO: 60362 - DNA, 25 bp, Artificial
  probe
  misc_feature (1)..(25): SEQ ID NO: 4406; WAN024AND_at; Start 32; Stop 56
aatcaatttctagcaaagttttagg

SEQ ID NO: 60363 - DNA, 25 bp, Artificial
  probe
  misc_feature (1)..(25): SEQ ID NO: 4406; WAN024AND_at; Start 33; Stop 57
atcaatttctagcaaagttttagga

SEQ ID NO: 60364 - DNA, 25 bp, Artificial
  probe
  misc_feature (1)..(25): SEQ ID NO: 4406; WAN024AND_at; Start 42; Stop 66
tagcaaagttttaggaactggattg

SEQ ID NO: 60365 - DNA, 25 bp, Artificial
  probe
  misc_feature (1)..(25): SEQ ID NO: 4406; WAN024AND_at; Start 28; Stop 52
gccaaatcaatttctagcaaagttt

SEQ ID NO: 60366 - DNA, 25 bp, Artificial
  probe
  misc_feature (1)..(25): SEQ ID NO: 4406; WAN024AND_at; Start 21; Stop 45
tcggaaagccaaatcaatttctagc

SEQ ID NO: 60367 - DNA, 25 bp, Artificial
  probe
  misc_feature (1)..(25): SEQ ID NO: 4406; WAN024AND_at; Start 39; Stop 63
ttctagcaaagttttaggaactgga

SEQ ID NO: 60368 - DNA, 25 bp, Artificial
  probe
  misc_feature (1)..(25): SEQ ID NO: 4406; WAN024AND_at; Start 22; Stop 46
cggaaagccaaatcaatttctagca

SEQ ID NO: 60369 - DNA, 25 bp, Artificial
  probe
  misc_feature (1)..(25): SEQ ID NO: 4406; WAN024AND_at; Start 37; Stop 61
atttctagcaaagttttaggaactg

SEQ ID NO: 60370 - DNA, 25 bp, Artificial
  probe
  misc_feature (1)..(25): SEQ ID NO: 4406; WAN024AND_at; Start 19; Stop 43
attcggaaagccaaatcaatttcta

SEQ ID NO: 60371 - DNA, 25 bp, Artificial
  probe
  misc_feature (1)..(25): SEQ ID NO: 4406; WAN024AND_at; Start 24; Stop 48
gaaagccaaatcaatttctagcaaa

SEQ ID NO: 60372 - DNA, 25 bp, Artificial
  probe
  misc_feature (1)..(25): SEQ ID NO: 4406; WAN024AND_at; Start 15; Stop 39
attaattcggaaagccaaatcaatt

SEQ ID NO: 60373 - DNA, 25 bp, Artificial
  probe
  misc_feature (1)..(25): SEQ ID NO: 4406; WAN024AND_at; Start 20; Stop 44
ttcggaaagccaaatcaatttctag

SEQ ID NO: 60374 - DNA, 25 bp, Artificial
  probe
  misc_feature (1)..(25): SEQ ID NO: 4406; WAN024AND_at; Start 23; Stop 47
ggaaagccaaatcaatttctagcaa

SEQ ID NO: 60375 - DNA, 25 bp, Artificial
  probe
  misc_feature (1)..(25): SEQ ID NO: 4406; WAN024AND_at; Start 17; Stop 41
taattcggaaagccaaatcaatttc

SEQ ID NO: 60376 - DNA, 25 bp, Artificial
  probe
  misc_feature (1)..(25): SEQ ID NO: 4406; WAN024AND_at; Start 29; Stop 53
ccaaatcaatttctagcaaagtttt

SEQ ID NO: 60377 - DNA, 25 bp, Artificial
  probe
  misc_feature (1)..(25): SEQ ID NO: 4406; WAN024AND_at; Start 31; Stop 55
aaatcaatttctagcaaagttttag

SEQ ID NO: 60378 - DNA, 25 bp, Artificial
  probe
  misc_feature (1)..(25): SEQ ID NO: 4406; WAN024AND_at; Start 8; Stop 32
tgaacaaattaattcggaaagccaa

SEQ ID NO: 60379 - DNA, 25 bp, Artificial
  probe
  misc_feature (1)..(25): SEQ ID NO: 4406; WAN024AND_at; Start 26; Stop 50
aagccaaatcaatttctagcaaagt

SEQ ID NO: 60380 - DNA, 25 bp, Artificial
  probe
  misc_feature (1)..(25): SEQ ID NO: 4406; WAN024AND_at; Start 12; Stop 36
caaattaattcggaaagccaaatca

SEQ ID NO: 60381 - DNA, 25 bp, Artificial
  probe
  misc_feature (1)..(25): SEQ ID NO: 4406; WAN024AND_at; Start 41; Stop 65
ctagcaaagttttaggaactggatt

SEQ ID NO: 60382 - DNA, 25 bp, Artificial
  probe
  misc_feature (1)..(25): SEQ ID NO: 3605; WAN024ANE_at; Start 10; Stop 34
tacctcagatatactgcaatatcat

SEQ ID NO: 60383 - DNA, 25 bp, Artificial
  probe
  misc_feature (1)..(25): SEQ ID NO: 3605; WAN024ANE_at; Start 13; Stop 37
ctcagatatactgcaatatcatcgt

SEQ ID NO: 60384 - DNA, 25 bp, Artificial
  probe
  misc_feature (1)..(25): SEQ ID NO: 3605; WAN024ANE_at; Start 44; Stop 68
aaaacctctgagatttttctcaaag

SEQ ID NO: 60385 - DNA, 25 bp, Artificial
  probe
  misc_feature (1)..(25): SEQ ID NO: 3605; WAN024ANE_at; Start 35; Stop 59
cgtatgcaaaaaacctctgagattt

SEQ ID NO: 60386 - DNA, 25 bp, Artificial
  probe
  misc_feature (1)..(25): SEQ ID NO: 3605; WAN024ANE_at; Start 41; Stop 65
caaaaaacctctgagatttttctca

SEQ ID NO: 60387 - DNA, 25 bp, Artificial
  probe
  misc_feature (1)..(25): SEQ ID NO: 3605; WAN024ANE_at; Start 27; Stop 51
aatatcatcgtatgcaaaaaacctc

SEQ ID NO: 60388 - DNA, 25 bp, Artificial
  probe
  misc_feature (1)..(25): SEQ ID NO: 3605; WAN024ANE_at; Start 52; Stop 76
tgagatttttctcaaaggttctgat

SEQ ID NO: 60389 - DNA, 25 bp, Artificial
  probe
  misc_feature (1)..(25): SEQ ID NO: 3605; WAN024ANE_at; Start 37; Stop 61
tatgcaaaaaacctctgagattttt

SEQ ID NO: 60390 - DNA, 25 bp, Artificial
  probe
  misc_feature (1)..(25): SEQ ID NO: 3605; WAN024ANE_at; Start 19; Stop 43
tatactgcaatatcatcgtatgcaa

SEQ ID NO: 60391 - DNA, 25 bp, Artificial
  probe
  misc_feature (1)..(25): SEQ ID NO: 3605; WAN024ANE_at; Start 39; Stop 63
tgcaaaaaacctctgagatttttct

SEQ ID NO: 60392 - DNA, 25 bp, Artificial
  probe
  misc_feature (1)..(25): SEQ ID NO: 3605; WAN024ANE_at; Start 15; Stop 39
cagatatactgcaatatcatcgtat

SEQ ID NO: 60393 - DNA, 25 bp, Artificial
  probe
  misc_feature (1)..(25): SEQ ID NO: 3605; WAN024ANE_at; Start 50; Stop 74
tctgagatttttctcaaaggttctg

SEQ ID NO: 60394 - DNA, 25 bp, Artificial
  probe
  misc_feature (1)..(25): SEQ ID NO: 3605; WAN024ANE_at; Start 12; Stop 36
cctcagatatactgcaatatcatcg

SEQ ID NO: 60395 - DNA, 25 bp, Artificial
  probe
  misc_feature (1)..(25): SEQ ID NO: 3605; WAN024ANE_at; Start 17; Stop 41
gatatactgcaatatcatcgtatgc

SEQ ID NO: 60396 - DNA, 25 bp, Artificial
  probe
  misc_feature (1)..(25): SEQ ID NO: 3605; WAN024ANE_at; Start 29; Stop 53
tatcatcgtatgcaaaaaacctctg

SEQ ID NO: 60397 - DNA, 25 bp, Artificial
  probe
  misc_feature (1)..(25): SEQ ID NO: 3605; WAN024ANE_at; Start 9; Stop 33
ctacctcagatatactgcaatatca

SEQ ID NO: 60398 - DNA, 25 bp, Artificial
  probe
  misc_feature (1)..(25): SEQ ID NO: 3605; WAN024ANE_at; Start 45; Stop 69
aaacctctgagatttttctcaaagg

SEQ ID NO: 60399 - DNA, 25 bp, Artificial
  probe
  misc_feature (1)..(25): SEQ ID NO: 3605; WAN024ANE_at; Start 56; Stop 80
atttttctcaaaggttctgattttg

SEQ ID NO: 60400 - DNA, 25 bp, Artificial
  probe
  misc_feature (1)..(25): SEQ ID NO: 3605; WAN024ANE_at; Start 46; Stop 70
aacctctgagatttttctcaaaggt

SEQ ID NO: 60401 - DNA, 25 bp, Artificial
  probe
  misc_feature (1)..(25): SEQ ID NO: 3605; WAN024ANE_at; Start 53; Stop 77
gagatttttctcaaaggttctgatt

SEQ ID NO: 60402 - DNA, 25 bp, Artificial
  probe
  misc_feature (1)..(25): SEQ ID NO: 3605; WAN024ANE_at; Start 48; Stop 72
cctctgagatttttctcaaaggttc

SEQ ID NO: 60403 - DNA, 25 bp, Artificial
  probe
  misc_feature (1)..(25): SEQ ID NO: 3605; WAN024ANE_at; Start 36; Stop 60
gtatgcaaaaaacctctgagatttt

SEQ ID NO: 60404 - DNA, 25 bp, Artificial
  probe
  misc_feature (1)..(25): SEQ ID NO: 3605; WAN024ANE_at; Start 31; Stop 55
tcatcgtatgcaaaaaacctctgag

SEQ ID NO: 60405 - DNA, 25 bp, Artificial
  probe
  misc_feature (1)..(25): SEQ ID NO: 3605; WAN024ANE_at; Start 22; Stop 46
actgcaatatcatcgtatgcaaaaa

SEQ ID NO: 60406 - DNA, 25 bp, Artificial
  probe
  misc_feature (1)..(25): SEQ ID NO: 3605; WAN024ANE_at; Start 33; Stop 57
atcgtatgcaaaaaacctctgagat

SEQ ID NO: 60407 - DNA, 25 bp, Artificial
  probe
  misc_feature (1)..(25): SEQ ID NO: 3605; WAN024ANE_at; Start 54; Stop 78
agatttttctcaaaggttctgattt

SEQ ID NO: 60408 - DNA, 25 bp, Artificial
  probe
  misc_feature (1)..(25): SEQ ID NO: 3605; WAN024ANE_at; Start 32; Stop 56
catcgtatgcaaaaaacctctgaga

SEQ ID NO: 60409 - DNA, 25 bp, Artificial
  probe
  misc_feature (1)..(25): SEQ ID NO: 3605; WAN024ANE_at; Start 34; Stop 58
tcgtatgcaaaaaacctctgagatt

SEQ ID NO: 60410 - DNA, 25 bp, Artificial
  probe
  misc_feature (1)..(25): SEQ ID NO: 3605; WAN024ANE_at; Start 30; Stop 54
atcatcgtatgcaaaaaacctctga

SEQ ID NO: 60411 - DNA, 25 bp, Artificial
  probe
  misc_feature (1)..(25): SEQ ID NO: 3605; WAN024ANE_at; Start 14; Stop 38
tcagatatactgcaatatcatcgta

SEQ ID NO: 60412 - DNA, 25 bp, Artificial
  probe
  misc_feature (1)..(25): SEQ ID NO: 3605; WAN024ANE_at; Start 21; Stop 45
tactgcaatatcatcgtatgcaaaa

SEQ ID NO: 60413 - DNA, 25 bp, Artificial
  probe
  misc_feature (1)..(25): SEQ ID NO: 3605; WAN024ANE_at; Start 8; Stop 32
cctacctcagatatactgcaatatc

SEQ ID NO: 60414 - DNA, 25 bp, Artificial
  probe
  misc_feature (1)..(25): SEQ ID NO: 3605; WAN024ANE_at; Start 26; Stop 50
caatatcatcgtatgcaaaaaacct

SEQ ID NO: 60415 - DNA, 25 bp, Artificial
  probe
  misc_feature (1)..(25): SEQ ID NO: 3605; WAN024ANE_at; Start 51; Stop 75
ctgagatttttctcaaaggttctga

SEQ ID NO: 60416 - DNA, 25 bp, Artificial
  probe
  misc_feature (1)..(25): SEQ ID NO: 3189; WAN024ANF_at; Start 48; Stop 72
tgatattgcagtatatctgaggtag

SEQ ID NO: 60417 - DNA, 25 bp, Artificial
  probe
  misc_feature (1)..(25): SEQ ID NO: 3189; WAN024ANF_at; Start 36; Stop 60
ttttgcatacgatgatattgcagta

SEQ ID NO: 60418 - DNA, 25 bp, Artificial
  probe
  misc_feature (1)..(25): SEQ ID NO: 3189; WAN024ANF_at; Start 41; Stop 65
catacgatgatattgcagtatatct

SEQ ID NO: 60419 - DNA, 25 bp, Artificial
  probe
  misc_feature (1)..(25): SEQ ID NO: 3189; WAN024ANF_at; Start 30; Stop 54
gaggttttttgcatacgatgatatt

SEQ ID NO: 60420 - DNA, 25 bp, Artificial
  probe
  misc_feature (1)..(25): SEQ ID NO: 3189; WAN024ANF_at; Start 43; Stop 67
tacgatgatattgcagtatatctga

SEQ ID NO: 60421 - DNA, 25 bp, Artificial
  probe
  misc_feature (1)..(25): SEQ ID NO: 3189; WAN024ANF_at; Start 39; Stop 63
tgcatacgatgatattgcagtatat

SEQ ID NO: 60422 - DNA, 25 bp, Artificial
  probe
  misc_feature (1)..(25): SEQ ID NO: 3189; WAN024ANF_at; Start 34; Stop 58
ttttttgcatacgatgatattgcag

SEQ ID NO: 60423 - DNA, 25 bp, Artificial
  probe
  misc_feature (1)..(25): SEQ ID NO: 3189; WAN024ANF_at; Start 45; Stop 69
cgatgatattgcagtatatctgagg

SEQ ID NO: 60424 - DNA, 25 bp, Artificial
  probe
  misc_feature (1)..(25): SEQ ID NO: 3189; WAN024ANF_at; Start 46; Stop 70
gatgatattgcagtatatctgaggt

SEQ ID NO: 60425 - DNA, 25 bp, Artificial
  probe
  misc_feature (1)..(25): SEQ ID NO: 3189; WAN024ANF_at; Start 8; Stop 32
agaacctttgagaaaaatctcagag

SEQ ID NO: 60426 - DNA, 25 bp, Artificial
  probe
  misc_feature (1)..(25): SEQ ID NO: 3189; WAN024ANF_at; Start 26; Stop 50
ctcagaggttttttgcatacgatga

SEQ ID NO: 60427 - DNA, 25 bp, Artificial
  probe
  misc_feature (1)..(25): SEQ ID NO: 3189; WAN024ANF_at; Start 27; Stop 51
tcagaggttttttgcatacgatgat

SEQ ID NO: 60428 - DNA, 25 bp, Artificial
  probe
  misc_feature (1)..(25): SEQ ID NO: 3189; WAN024ANF_at; Start 40; Stop 64
gcatacgatgatattgcagtatatc

SEQ ID NO: 60429 - DNA, 25 bp, Artificial
  probe
  misc_feature (1)..(25): SEQ ID NO: 3189; WAN024ANF_at; Start 6; Stop 30
tcagaacctttgagaaaaatctcag

SEQ ID NO: 60430 - DNA, 25 bp, Artificial
  probe
  misc_feature (1)..(25): SEQ ID NO: 3189; WAN024ANF_at; Start 19; Stop 43
gaaaaatctcagaggttttttgcat

SEQ ID NO: 60431 - DNA, 25 bp, Artificial
  probe
  misc_feature (1)..(25): SEQ ID NO: 3189; WAN024ANF_at; Start 38; Stop 62
ttgcatacgatgatattgcagtata

SEQ ID NO: 60432 - DNA, 25 bp, Artificial
  probe
  misc_feature (1)..(25): SEQ ID NO: 3189; WAN024ANF_at; Start 9; Stop 33
gaacctttgagaaaaatctcagagg

SEQ ID NO: 60433 - DNA, 25 bp, Artificial
  probe
  misc_feature (1)..(25): SEQ ID NO: 3189; WAN024ANF_at; Start 17; Stop 41
gagaaaaatctcagaggttttttgc

SEQ ID NO: 60434 - DNA, 25 bp, Artificial
  probe
  misc_feature (1)..(25): SEQ ID NO: 3189; WAN024ANF_at; Start 32; Stop 56
ggttttttgcatacgatgatattgc

SEQ ID NO: 60435 - DNA, 25 bp, Artificial
  probe
  misc_feature (1)..(25): SEQ ID NO: 3189; WAN024ANF_at; Start 10; Stop 34
aacctttgagaaaaatctcagaggt

SEQ ID NO: 60436 - DNA, 25 bp, Artificial
  probe
  misc_feature (1)..(25): SEQ ID NO: 3189; WAN024ANF_at; Start 25; Stop 49
tctcagaggttttttgcatacgatg

SEQ ID NO: 60437 - DNA, 25 bp, Artificial
  probe
  misc_feature (1)..(25): SEQ ID NO: 3189; WAN024ANF_at; Start 23; Stop 47
aatctcagaggttttttgcatacga

SEQ ID NO: 60438 - DNA, 25 bp, Artificial
  probe
  misc_feature (1)..(25): SEQ ID NO: 3189; WAN024ANF_at; Start 1; Stop 25
caaaatcagaacctttgagaaaaat

SEQ ID NO: 60439 - DNA, 25 bp, Artificial
  probe
  misc_feature (1)..(25): SEQ ID NO: 3189; WAN024ANF_at; Start 29; Stop 53
agaggttttttgcatacgatgatat

SEQ ID NO: 60440 - DNA, 25 bp, Artificial
  probe
  misc_feature (1)..(25): SEQ ID NO: 3189; WAN024ANF_at; Start 7; Stop 31
cagaacctttgagaaaaatctcaga

SEQ ID NO: 60441 - DNA, 25 bp, Artificial
  probe
  misc_feature (1)..(25): SEQ ID NO: 3189; WAN024ANF_at; Start 3; Stop 27
aaatcagaacctttgagaaaaatct

SEQ ID NO: 60442 - DNA, 25 bp, Artificial
  probe
  misc_feature (1)..(25): SEQ ID NO: 3189; WAN024ANF_at; Start 13; Stop 37
ctttgagaaaaatctcagaggtttt

SEQ ID NO: 60443 - DNA, 25 bp, Artificial
  probe
  misc_feature (1)..(25): SEQ ID NO: 3189; WAN024ANF_at; Start 22; Stop 46
aaatctcagaggttttttgcatacg

SEQ ID NO: 60444 - DNA, 25 bp, Artificial
  probe
  misc_feature (1)..(25): SEQ ID NO: 3189; WAN024ANF_at; Start 49; Stop 73
gatattgcagtatatctgaggtagg

SEQ ID NO: 60445 - DNA, 25 bp, Artificial
  probe
  misc_feature (1)..(25): SEQ ID NO: 3189; WAN024ANF_at; Start 28; Stop 52
cagaggttttttgcatacgatgata

SEQ ID NO: 60446 - DNA, 25 bp, Artificial
  probe
  misc_feature (1)..(25): SEQ ID NO: 3189; WAN024ANF_at; Start 4; Stop 28
aatcagaacctttgagaaaaatctc

SEQ ID NO: 60447 - DNA, 25 bp, Artificial
  probe
  misc_feature (1)..(25): SEQ ID NO: 3189; WAN024ANF_at; Start 12; Stop 36
cctttgagaaaaatctcagaggttt

SEQ ID NO: 60448 - DNA, 25 bp, Artificial
  probe
  misc_feature (1)..(25): SEQ ID NO: 3189; WAN024ANF_at; Start 37; Stop 61
tttgcatacgatgatattgcagtat

SEQ ID NO: 60449 - DNA, 25 bp, Artificial
  probe
  misc_feature (1)..(25): SEQ ID NO: 3189; WAN024ANF_at; Start 21; Stop 45
aaaatctcagaggttttttgcatac

SEQ ID NO: 60450 - DNA, 25 bp, Artificial
  probe
  misc_feature (1)..(25): SEQ ID NO: 436; WAN024ANG_at; Start 20; Stop 44
gctcaaggtcttgttaactacgagg

SEQ ID NO: 60451 - DNA, 25 bp, Artificial
  probe
  misc_feature (1)..(25): SEQ ID NO: 436; WAN024ANG_at; Start 28; Stop 52
tcttgttaactacgaggggatatag

SEQ ID NO: 60452 - DNA, 25 bp, Artificial
  probe
  misc_feature (1)..(25): SEQ ID NO: 436; WAN024ANG_at; Start 68; Stop 92
taataagaataatctgggacgactg

SEQ ID NO: 60453 - DNA, 25 bp, Artificial
  probe
  misc_feature (1)..(25): SEQ ID NO: 436; WAN024ANG_at; Start 71; Stop 95
taagaataatctgggacgactgcac

SEQ ID NO: 60454 - DNA, 25 bp, Artificial
  probe
  misc_feature (1)..(25): SEQ ID NO: 436; WAN024ANG_at; Start 84; Stop 108
ggacgactgcaccagattcacaact

SEQ ID NO: 60455 - DNA, 25 bp, Artificial
  probe
  misc_feature (1)..(25): SEQ ID NO: 436; WAN024ANG_at; Start 13; Stop 37
ctaaaatgctcaaggtcttgttaac

SEQ ID NO: 60456 - DNA, 25 bp, Artificial
  probe
  misc_feature (1)..(25): SEQ ID NO: 436; WAN024ANG_at; Start 5; Stop 29
tcctctttctaaaatgctcaaggtc

SEQ ID NO: 60457 - DNA, 25 bp, Artificial
  probe
  misc_feature (1)..(25): SEQ ID NO: 436; WAN024ANG_at; Start 8; Stop 32
tctttctaaaatgctcaaggtcttg

SEQ ID NO: 60458 - DNA, 25 bp, Artificial
  probe
  misc_feature (1)..(25): SEQ ID NO: 436; WAN024ANG_at; Start 9; Stop 33
ctttctaaaatgctcaaggtcttgt

SEQ ID NO: 60459 - DNA, 25 bp, Artificial
  probe
  misc_feature (1)..(25): SEQ ID NO: 436; WAN024ANG_at; Start 83; Stop 107
gggacgactgcaccagattcacaac

SEQ ID NO: 60460 - DNA, 25 bp, Artificial
  probe
  misc_feature (1)..(25): SEQ ID NO: 436; WAN024ANG_at; Start 62; Stop 86
ccctactaataagaataatctggga

SEQ ID NO: 60461 - DNA, 25 bp, Artificial
  probe
  misc_feature (1)..(25): SEQ ID NO: 436; WAN024ANG_at; Start 3; Stop 27
attcctctttctaaaatgctcaagg

SEQ ID NO: 60462 - DNA, 25 bp, Artificial
  probe
  misc_feature (1)..(25): SEQ ID NO: 436; WAN024ANG_at; Start 74; Stop 98
gaataatctgggacgactgcaccag

SEQ ID NO: 60463 - DNA, 25 bp, Artificial
  probe
  misc_feature (1)..(25): SEQ ID NO: 436; WAN024ANG_at; Start 67; Stop 91
ctaataagaataatctgggacgact

SEQ ID NO: 60464 - DNA, 25 bp, Artificial
  probe
  misc_feature (1)..(25): SEQ ID NO: 436; WAN024ANG_at; Start 48; Stop 72
tatagaaaacaagaccctactaata

SEQ ID NO: 60465 - DNA, 25 bp, Artificial
  probe
  misc_feature (1)..(25): SEQ ID NO: 436; WAN024ANG_at; Start 60; Stop 84
gaccctactaataagaataatctgg

SEQ ID NO: 60466 - DNA, 25 bp, Artificial
  probe
  misc_feature (1)..(25): SEQ ID NO: 436; WAN024ANG_at; Start 45; Stop 69
ggatatagaaaacaagaccctacta

SEQ ID NO: 60467 - DNA, 25 bp, Artificial
  probe
  misc_feature (1)..(25): SEQ ID NO: 436; WAN024ANG_at; Start 11; Stop 35
ttctaaaatgctcaaggtcttgtta

SEQ ID NO: 60468 - DNA, 25 bp, Artificial
  probe
  misc_feature (1)..(25): SEQ ID NO: 436; WAN024ANG_at; Start 66; Stop 90
actaataagaataatctgggacgac

SEQ ID NO: 60469 - DNA, 25 bp, Artificial
  probe
  misc_feature (1)..(25): SEQ ID NO: 436; WAN024ANG_at; Start 19; Stop 43
tgctcaaggtcttgttaactacgag

SEQ ID NO: 60470 - DNA, 25 bp, Artificial
  probe
  misc_feature (1)..(25): SEQ ID NO: 436; WAN024ANG_at; Start 63; Stop 87
cctactaataagaataatctgggac

SEQ ID NO: 60471 - DNA, 25 bp, Artificial
  probe
  misc_feature (1)..(25): SEQ ID NO: 436; WAN024ANG_at; Start 69; Stop 93
aataagaataatctgggacgactgc

SEQ ID NO: 60472 - DNA, 25 bp, Artificial
  probe
  misc_feature (1)..(25): SEQ ID NO: 436; WAN024ANG_at; Start 21; Stop 45
ctcaaggtcttgttaactacgaggg

SEQ ID NO: 60473 - DNA, 25 bp, Artificial
  probe
  misc_feature (1)..(25): SEQ ID NO: 436; WAN024ANG_at; Start 2; Stop 26
gattcctctttctaaaatgctcaag

SEQ ID NO: 60474 - DNA, 25 bp, Artificial
  probe
  misc_feature (1)..(25): SEQ ID NO: 436; WAN024ANG_at; Start 17; Stop 41
aatgctcaaggtcttgttaactacg

SEQ ID NO: 60475 - DNA, 25 bp, Artificial
  probe
  misc_feature (1)..(25): SEQ ID NO: 436; WAN024ANG_at; Start 73; Stop 97
agaataatctgggacgactgcacca

SEQ ID NO: 60476 - DNA, 25 bp, Artificial
  probe
  misc_feature (1)..(25): SEQ ID NO: 436; WAN024ANG_at; Start 82; Stop 106
tgggacgactgcaccagattcacaa

SEQ ID NO: 60477 - DNA, 25 bp, Artificial
  probe
  misc_feature (1)..(25): SEQ ID NO: 436; WAN024ANG_at; Start 85; Stop 109
gacgactgcaccagattcacaacta

SEQ ID NO: 60478 - DNA, 25 bp, Artificial
  probe
  misc_feature (1)..(25): SEQ ID NO: 436; WAN024ANG_at; Start 80; Stop 104
tctgggacgactgcaccagattcac

SEQ ID NO: 60479 - DNA, 25 bp, Artificial
  probe
  misc_feature (1)..(25): SEQ ID NO: 436; WAN024ANG_at; Start 77; Stop 101
taatctgggacgactgcaccagatt

SEQ ID NO: 60480 - DNA, 25 bp, Artificial
  probe
  misc_feature (1)..(25): SEQ ID NO: 436; WAN024ANG_at; Start 64; Stop 88
ctactaataagaataatctgggacg

SEQ ID NO: 60481 - DNA, 25 bp, Artificial
  probe
  misc_feature (1)..(25): SEQ ID NO: 436; WAN024ANG_at; Start 6; Stop 30
cctctttctaaaatgctcaaggtct

SEQ ID NO: 60482 - DNA, 25 bp, Artificial
  probe
  misc_feature (1)..(25): SEQ ID NO: 436; WAN024ANG_at; Start 46; Stop 70
gatatagaaaacaagaccctactaa

SEQ ID NO: 60483 - DNA, 25 bp, Artificial
  probe
  misc_feature (1)..(25): SEQ ID NO: 436; WAN024ANG_at; Start 75; Stop 99
aataatctgggacgactgcaccaga

SEQ ID NO: 60484 - DNA, 25 bp, Artificial
  probe
  misc_feature (1)..(25): SEQ ID NO: 4531; WAN024ANH_at; Start 78; Stop 102
caagaccttgagcattttagaaaga

SEQ ID NO: 60485 - DNA, 25 bp, Artificial
  probe
  misc_feature (1)..(25): SEQ ID NO: 4531; WAN024ANH_at; Start 79; Stop 103
aagaccttgagcattttagaaagag

SEQ ID NO: 60486 - DNA, 25 bp, Artificial
  probe
  misc_feature (1)..(25): SEQ ID NO: 4531; WAN024ANH_at; Start 29; Stop 53
gattattcttattagtagggtcttg

SEQ ID NO: 60487 - DNA, 25 bp, Artificial
  probe
  misc_feature (1)..(25): SEQ ID NO: 4531; WAN024ANH_at; Start 41; Stop 65
tagtagggtcttgttttctatatcc

SEQ ID NO: 60488 - DNA, 25 bp, Artificial
  probe
  misc_feature (1)..(25): SEQ ID NO: 4531; WAN024ANH_at; Start 49; Stop 73
tcttgttttctatatcccctcgtag

SEQ ID NO: 60489 - DNA, 25 bp, Artificial
  probe
  misc_feature (1)..(25): SEQ ID NO: 4531; WAN024ANH_at; Start 3; Stop 27
gttgtgaatctggtgcagtcgtccc

SEQ ID NO: 60490 - DNA, 25 bp, Artificial
  probe
  misc_feature (1)..(25): SEQ ID NO: 4531; WAN024ANH_at; Start 71; Stop 95
tagttaacaagaccttgagcatttt

SEQ ID NO: 60491 - DNA, 25 bp, Artificial
  probe
  misc_feature (1)..(25): SEQ ID NO: 4531; WAN024ANH_at; Start 65; Stop 89
ccctcgtagttaacaagaccttgag

SEQ ID NO: 60492 - DNA, 25 bp, Artificial
  probe
  misc_feature (1)..(25): SEQ ID NO: 4531; WAN024ANH_at; Start 81; Stop 105
gaccttgagcattttagaaagagga

SEQ ID NO: 60493 - DNA, 25 bp, Artificial
  probe
  misc_feature (1)..(25): SEQ ID NO: 4531; WAN024ANH_at; Start 83; Stop 107
ccttgagcattttagaaagaggaat

SEQ ID NO: 60494 - DNA, 25 bp, Artificial
  probe
  misc_feature (1)..(25): SEQ ID NO: 4531; WAN024ANH_at; Start 52; Stop 76
tgttttctatatcccctcgtagtta

SEQ ID NO: 60495 - DNA, 25 bp, Artificial
  probe
  misc_feature (1)..(25): SEQ ID NO: 4531; WAN024ANH_at; Start 13; Stop 37
tggtgcagtcgtcccagattattct

SEQ ID NO: 60496 - DNA, 25 bp, Artificial
  probe
  misc_feature (1)..(25): SEQ ID NO: 4531; WAN024ANH_at; Start 75; Stop 99
taacaagaccttgagcattttagaa

SEQ ID NO: 60497 - DNA, 25 bp, Artificial
  probe
  misc_feature (1)..(25): SEQ ID NO: 4531; WAN024ANH_at; Start 68; Stop 92
tcgtagttaacaagaccttgagcat

SEQ ID NO: 60498 - DNA, 25 bp, Artificial
  probe
  misc_feature (1)..(25): SEQ ID NO: 4531; WAN024ANH_at; Start 48; Stop 72
gtcttgttttctatatcccctcgta

SEQ ID NO: 60499 - DNA, 25 bp, Artificial
  probe
  misc_feature (1)..(25): SEQ ID NO: 4531; WAN024ANH_at; Start 2; Stop 26
agttgtgaatctggtgcagtcgtcc

SEQ ID NO: 60500 - DNA, 25 bp, Artificial
  probe
  misc_feature (1)..(25): SEQ ID NO: 4531; WAN024ANH_at; Start 59; Stop 83
tatatcccctcgtagttaacaagac

SEQ ID NO: 60501 - DNA, 25 bp, Artificial
  probe
  misc_feature (1)..(25): SEQ ID NO: 4531; WAN024ANH_at; Start 8; Stop 32
gaatctggtgcagtcgtcccagatt

SEQ ID NO: 60502 - DNA, 25 bp, Artificial
  probe
  misc_feature (1)..(25): SEQ ID NO: 4531; WAN024ANH_at; Start 26; Stop 50
ccagattattcttattagtagggtc

SEQ ID NO: 60503 - DNA, 25 bp, Artificial
  probe
  misc_feature (1)..(25): SEQ ID NO: 4531; WAN024ANH_at; Start 19; Stop 43
agtcgtcccagattattcttattag

SEQ ID NO: 60504 - DNA, 25 bp, Artificial
  probe
  misc_feature (1)..(25): SEQ ID NO: 4531; WAN024ANH_at; Start 85; Stop 109
ttgagcattttagaaagaggaatct

SEQ ID NO: 60505 - DNA, 25 bp, Artificial
  probe
  misc_feature (1)..(25): SEQ ID NO: 4531; WAN024ANH_at; Start 69; Stop 93
cgtagttaacaagaccttgagcatt

SEQ ID NO: 60506 - DNA, 25 bp, Artificial
  probe
  misc_feature (1)..(25): SEQ ID NO: 4531; WAN024ANH_at; Start 17; Stop 41
gcagtcgtcccagattattcttatt

SEQ ID NO: 60507 - DNA, 25 bp, Artificial
  probe
  misc_feature (1)..(25): SEQ ID NO: 4531; WAN024ANH_at; Start 67; Stop 91
ctcgtagttaacaagaccttgagca

SEQ ID NO: 60508 - DNA, 25 bp, Artificial
  probe
  misc_feature (1)..(25): SEQ ID NO: 4531; WAN024ANH_at; Start 22; Stop 46
cgtcccagattattcttattagtag

SEQ ID NO: 60509 - DNA, 25 bp, Artificial
  probe
  misc_feature (1)..(25): SEQ ID NO: 4531; WAN024ANH_at; Start 11; Stop 35
tctggtgcagtcgtcccagattatt

SEQ ID NO: 60510 - DNA, 25 bp, Artificial
  probe
  misc_feature (1)..(25): SEQ ID NO: 4531; WAN024ANH_at; Start 1; Stop 25
tagttgtgaatctggtgcagtcgtc

SEQ ID NO: 60511 - DNA, 25 bp, Artificial
  probe
  misc_feature (1)..(25): SEQ ID NO: 4531; WAN024ANH_at; Start 7; Stop 31
tgaatctggtgcagtcgtcccagat

SEQ ID NO: 60512 - DNA, 25 bp, Artificial
  probe
  misc_feature (1)..(25): SEQ ID NO: 4531; WAN024ANH_at; Start 5; Stop 29
tgtgaatctggtgcagtcgtcccag

SEQ ID NO: 60513 - DNA, 25 bp, Artificial
  probe
  misc_feature (1)..(25): SEQ ID NO: 4531; WAN024ANH_at; Start 15; Stop 39
gtgcagtcgtcccagattattctta

SEQ ID NO: 60514 - DNA, 25 bp, Artificial
  probe
  misc_feature (1)..(25): SEQ ID NO: 4531; WAN024ANH_at; Start 6; Stop 30
gtgaatctggtgcagtcgtcccaga

SEQ ID NO: 60515 - DNA, 25 bp, Artificial
  probe
  misc_feature (1)..(25): SEQ ID NO: 4531; WAN024ANH_at; Start 57; Stop 81
tctatatcccctcgtagttaacaag

SEQ ID NO: 60516 - DNA, 25 bp, Artificial
  probe
  misc_feature (1)..(25): SEQ ID NO: 4531; WAN024ANH_at; Start 4; Stop 28
ttgtgaatctggtgcagtcgtccca

SEQ ID NO: 60517 - DNA, 25 bp, Artificial
  probe
  misc_feature (1)..(25): SEQ ID NO: 4531; WAN024ANH_at; Start 66; Stop 90
cctcgtagttaacaagaccttgagc

SEQ ID NO: 60518 - DNA, 25 bp, Artificial
  probe
  misc_feature (1)..(25): SEQ ID NO: 556; WAN024ANI_at; Start 49; Stop 73
aacaatatgatacctaaaaatagga

SEQ ID NO: 60519 - DNA, 25 bp, Artificial
  probe
  misc_feature (1)..(25): SEQ ID NO: 556; WAN024ANI_at; Start 31; Stop 55
ctctaaaagaggtgcccaaacaata

SEQ ID NO: 60520 - DNA, 25 bp, Artificial
  probe
  misc_feature (1)..(25): SEQ ID NO: 556; WAN024ANI_at; Start 67; Stop 91
aataggataattgtcaatagctaac

SEQ ID NO: 60521 - DNA, 25 bp, Artificial
  probe
  misc_feature (1)..(25): SEQ ID NO: 556; WAN024ANI_at; Start 50; Stop 74
acaatatgatacctaaaaataggat

SEQ ID NO: 60522 - DNA, 25 bp, Artificial
  probe
  misc_feature (1)..(25): SEQ ID NO: 556; WAN024ANI_at; Start 63; Stop 87
taaaaataggataattgtcaatagc

SEQ ID NO: 60523 - DNA, 25 bp, Artificial
  probe
  misc_feature (1)..(25): SEQ ID NO: 556; WAN024ANI_at; Start 37; Stop 61
aagaggtgcccaaacaatatgatac

SEQ ID NO: 60524 - DNA, 25 bp, Artificial
  probe
  misc_feature (1)..(25): SEQ ID NO: 556; WAN024ANI_at; Start 28; Stop 52
gacctctaaaagaggtgcccaaaca

SEQ ID NO: 60525 - DNA, 25 bp, Artificial
  probe
  misc_feature (1)..(25): SEQ ID NO: 556; WAN024ANI_at; Start 30; Stop 54
cctctaaaagaggtgcccaaacaat

SEQ ID NO: 60526 - DNA, 25 bp, Artificial
  probe
  misc_feature (1)..(25): SEQ ID NO: 556; WAN024ANI_at; Start 42; Stop 66
gtgcccaaacaatatgatacctaaa

SEQ ID NO: 60527 - DNA, 25 bp, Artificial
  probe
  misc_feature (1)..(25): SEQ ID NO: 556; WAN024ANI_at; Start 33; Stop 57
ctaaaagaggtgcccaaacaatatg

SEQ ID NO: 60528 - DNA, 25 bp, Artificial
  probe
  misc_feature (1)..(25): SEQ ID NO: 556; WAN024ANI_at; Start 69; Stop 93
taggataattgtcaatagctaactc

SEQ ID NO: 60529 - DNA, 25 bp, Artificial
  probe
  misc_feature (1)..(25): SEQ ID NO: 556; WAN024ANI_at; Start 40; Stop 64
aggtgcccaaacaatatgataccta

SEQ ID NO: 60530 - DNA, 25 bp, Artificial
  probe
  misc_feature (1)..(25): SEQ ID NO: 556; WAN024ANI_at; Start 43; Stop 67
tgcccaaacaatatgatacctaaaa

SEQ ID NO: 60531 - DNA, 25 bp, Artificial
  probe
  misc_feature (1)..(25): SEQ ID NO: 556; WAN024ANI_at; Start 35; Stop 59
aaaagaggtgcccaaacaatatgat

SEQ ID NO: 60532 - DNA, 25 bp, Artificial
  probe
  misc_feature (1)..(25): SEQ ID NO: 556; WAN024ANI_at; Start 51; Stop 75
caatatgatacctaaaaataggata

SEQ ID NO: 60533 - DNA, 25 bp, Artificial
  probe
  misc_feature (1)..(25): SEQ ID NO: 556; WAN024ANI_at; Start 65; Stop 89
aaaataggataattgtcaatagcta

SEQ ID NO: 60534 - DNA, 25 bp, Artificial
  probe
  misc_feature (1)..(25): SEQ ID NO: 556; WAN024ANI_at; Start 59; Stop 83
tacctaaaaataggataattgtcaa

SEQ ID NO: 60535 - DNA, 25 bp, Artificial
  probe
  misc_feature (1)..(25): SEQ ID NO: 556; WAN024ANI_at; Start 32; Stop 56
tctaaaagaggtgcccaaacaatat

SEQ ID NO: 60536 - DNA, 25 bp, Artificial
  probe
  misc_feature (1)..(25): SEQ ID NO: 556; WAN024ANI_at; Start 39; Stop 63
gaggtgcccaaacaatatgatacct

SEQ ID NO: 60537 - DNA, 25 bp, Artificial
  probe
  misc_feature (1)..(25): SEQ ID NO: 556; WAN024ANI_at; Start 61; Stop 85
cctaaaaataggataattgtcaata

SEQ ID NO: 60538 - DNA, 25 bp, Artificial
  probe
  misc_feature (1)..(25): SEQ ID NO: 556; WAN024ANI_at; Start 44; Stop 68
gcccaaacaatatgatacctaaaaa

SEQ ID NO: 60539 - DNA, 25 bp, Artificial
  probe
  misc_feature (1)..(25): SEQ ID NO: 556; WAN024ANI_at; Start 21; Stop 45
gagccccgacctctaaaagaggtgc

SEQ ID NO: 60540 - DNA, 25 bp, Artificial
  probe
  misc_feature (1)..(25): SEQ ID NO: 556; WAN024ANI_at; Start 2; Stop 26
tagctccctaagaactagggagccc

SEQ ID NO: 60541 - DNA, 25 bp, Artificial
  probe
  misc_feature (1)..(25): SEQ ID NO: 556; WAN024ANI_at; Start 41; Stop 65
ggtgcccaaacaatatgatacctaa

SEQ ID NO: 60542 - DNA, 25 bp, Artificial
  probe
  misc_feature (1)..(25): SEQ ID NO: 556; WAN024ANI_at; Start 36; Stop 60
aaagaggtgcccaaacaatatgata

SEQ ID NO: 60543 - DNA, 25 bp, Artificial
  probe
  misc_feature (1)..(25): SEQ ID NO: 556; WAN024ANI_at; Start 48; Stop 72
aaacaatatgatacctaaaaatagg

SEQ ID NO: 60544 - DNA, 25 bp, Artificial
  probe
  misc_feature (1)..(25): SEQ ID NO: 556; WAN024ANI_at; Start 47; Stop 71
caaacaatatgatacctaaaaatag

SEQ ID NO: 60545 - DNA, 25 bp, Artificial
  probe
  misc_feature (1)..(25): SEQ ID NO: 556; WAN024ANI_at; Start 64; Stop 88
aaaaataggataattgtcaatagct

SEQ ID NO: 60546 - DNA, 25 bp, Artificial
  probe
  misc_feature (1)..(25): SEQ ID NO: 556; WAN024ANI_at; Start 1; Stop 25
atagctccctaagaactagggagcc

SEQ ID NO: 60547 - DNA, 25 bp, Artificial
  probe
  misc_feature (1)..(25): SEQ ID NO: 556; WAN024ANI_at; Start 56; Stop 80
tgatacctaaaaataggataattgt

SEQ ID NO: 60548 - DNA, 25 bp, Artificial
  probe
  misc_feature (1)..(25): SEQ ID NO: 556; WAN024ANI_at; Start 38; Stop 62
agaggtgcccaaacaatatgatacc

SEQ ID NO: 60549 - DNA, 25 bp, Artificial
  probe
  misc_feature (1)..(25): SEQ ID NO: 556; WAN024ANI_at; Start 46; Stop 70
ccaaacaatatgatacctaaaaata

SEQ ID NO: 60550 - DNA, 25 bp, Artificial
  probe
  misc_feature (1)..(25): SEQ ID NO: 556; WAN024ANI_at; Start 45; Stop 69
cccaaacaatatgatacctaaaaat

SEQ ID NO: 60551 - DNA, 25 bp, Artificial
  probe
  misc_feature (1)..(25): SEQ ID NO: 556; WAN024ANI_at; Start 60; Stop 84
acctaaaaataggataattgtcaat

SEQ ID NO: 60552 - DNA, 25 bp, Artificial
  probe
  misc_feature (1)..(25): SEQ ID NO: 3613; WAN024ANJ_at; Start 37; Stop 61
catattgtttgggcacctcttttag

SEQ ID NO: 60553 - DNA, 25 bp, Artificial
  probe
  misc_feature (1)..(25): SEQ ID NO: 3613; WAN024ANJ_at; Start 32; Stop 56
ggtatcatattgtttgggcacctct

SEQ ID NO: 60554 - DNA, 25 bp, Artificial
  probe
  misc_feature (1)..(25): SEQ ID NO: 3613; WAN024ANJ_at; Start 30; Stop 54
taggtatcatattgtttgggcacct

SEQ ID NO: 60555 - DNA, 25 bp, Artificial
  probe
  misc_feature (1)..(25): SEQ ID NO: 3613; WAN024ANJ_at; Start 28; Stop 52
tttaggtatcatattgtttgggcac

SEQ ID NO: 60556 - DNA, 25 bp, Artificial
  probe
  misc_feature (1)..(25): SEQ ID NO: 3613; WAN024ANJ_at; Start 24; Stop 48
tatttttaggtatcatattgtttgg

SEQ ID NO: 60557 - DNA, 25 bp, Artificial
  probe
  misc_feature (1)..(25): SEQ ID NO: 3613; WAN024ANJ_at; Start 42; Stop 66
tgtttgggcacctcttttagaggtc

SEQ ID NO: 60558 - DNA, 25 bp, Artificial
  probe
  misc_feature (1)..(25): SEQ ID NO: 3613; WAN024ANJ_at; Start 10; Stop 34
attgacaattatcctatttttaggt

SEQ ID NO: 60559 - DNA, 25 bp, Artificial
  probe
  misc_feature (1)..(25): SEQ ID NO: 3613; WAN024ANJ_at; Start 16; Stop 40
aattatcctatttttaggtatcata

SEQ ID NO: 60560 - DNA, 25 bp, Artificial
  probe
  misc_feature (1)..(25): SEQ ID NO: 3613; WAN024ANJ_at; Start 21; Stop 45
tcctatttttaggtatcatattgtt

SEQ ID NO: 60561 - DNA, 25 bp, Artificial
  probe
  misc_feature (1)..(25): SEQ ID NO: 3613; WAN024ANJ_at; Start 39; Stop 63
tattgtttgggcacctcttttagag

SEQ ID NO: 60562 - DNA, 25 bp, Artificial
  probe
  misc_feature (1)..(25): SEQ ID NO: 3613; WAN024ANJ_at; Start 25; Stop 49
atttttaggtatcatattgtttggg

SEQ ID NO: 60563 - DNA, 25 bp, Artificial
  probe
  misc_feature (1)..(25): SEQ ID NO: 3613; WAN024ANJ_at; Start 11; Stop 35
ttgacaattatcctatttttaggta

SEQ ID NO: 60564 - DNA, 25 bp, Artificial
  probe
  misc_feature (1)..(25): SEQ ID NO: 3613; WAN024ANJ_at; Start 14; Stop 38
acaattatcctatttttaggtatca

SEQ ID NO: 60565 - DNA, 25 bp, Artificial
  probe
  misc_feature (1)..(25): SEQ ID NO: 3613; WAN024ANJ_at; Start 26; Stop 50
tttttaggtatcatattgtttgggc

SEQ ID NO: 60566 - DNA, 25 bp, Artificial
  probe
  misc_feature (1)..(25): SEQ ID NO: 3613; WAN024ANJ_at; Start 35; Stop 59
atcatattgtttgggcacctctttt

SEQ ID NO: 60567 - DNA, 25 bp, Artificial
  probe
  misc_feature (1)..(25): SEQ ID NO: 3613; WAN024ANJ_at; Start 23; Stop 47
ctatttttaggtatcatattgtttg

SEQ ID NO: 60568 - DNA, 25 bp, Artificial
  probe
  misc_feature (1)..(25): SEQ ID NO: 3613; WAN024ANJ_at; Start 22; Stop 46
cctatttttaggtatcatattgttt

SEQ ID NO: 60569 - DNA, 25 bp, Artificial
  probe
  misc_feature (1)..(25): SEQ ID NO: 3613; WAN024ANJ_at; Start 15; Stop 39
caattatcctatttttaggtatcat

SEQ ID NO: 60570 - DNA, 25 bp, Artificial
  probe
  misc_feature (1)..(25): SEQ ID NO: 3613; WAN024ANJ_at; Start 38; Stop 62
atattgtttgggcacctcttttaga

SEQ ID NO: 60571 - DNA, 25 bp, Artificial
  probe
  misc_feature (1)..(25): SEQ ID NO: 3613; WAN024ANJ_at; Start 36; Stop 60
tcatattgtttgggcacctctttta

SEQ ID NO: 60572 - DNA, 25 bp, Artificial
  probe
  misc_feature (1)..(25): SEQ ID NO: 3613; WAN024ANJ_at; Start 49; Stop 73
gcacctcttttagaggtcggggctc

SEQ ID NO: 60573 - DNA, 25 bp, Artificial
  probe
  misc_feature (1)..(25): SEQ ID NO: 3613; WAN024ANJ_at; Start 34; Stop 58
tatcatattgtttgggcacctcttt

SEQ ID NO: 60574 - DNA, 25 bp, Artificial
  probe
  misc_feature (1)..(25): SEQ ID NO: 3613; WAN024ANJ_at; Start 20; Stop 44
atcctatttttaggtatcatattgt

SEQ ID NO: 60575 - DNA, 25 bp, Artificial
  probe
  misc_feature (1)..(25): SEQ ID NO: 3613; WAN024ANJ_at; Start 33; Stop 57
gtatcatattgtttgggcacctctt

SEQ ID NO: 60576 - DNA, 25 bp, Artificial
  probe
  misc_feature (1)..(25): SEQ ID NO: 3613; WAN024ANJ_at; Start 13; Stop 37
gacaattatcctatttttaggtatc

SEQ ID NO: 60577 - DNA, 25 bp, Artificial
  probe
  misc_feature (1)..(25): SEQ ID NO: 3613; WAN024ANJ_at; Start 40; Stop 64
attgtttgggcacctcttttagagg

SEQ ID NO: 60578 - DNA, 25 bp, Artificial
  probe
  misc_feature (1)..(25): SEQ ID NO: 3613; WAN024ANJ_at; Start 69; Stop 93
ggctccctagttcttagggagctat

SEQ ID NO: 60579 - DNA, 25 bp, Artificial
  probe
  misc_feature (1)..(25): SEQ ID NO: 3613; WAN024ANJ_at; Start 19; Stop 43
tatcctatttttaggtatcatattg

SEQ ID NO: 60580 - DNA, 25 bp, Artificial
  probe
  misc_feature (1)..(25): SEQ ID NO: 3613; WAN024ANJ_at; Start 68; Stop 92
gggctccctagttcttagggagcta

SEQ ID NO: 60581 - DNA, 25 bp, Artificial
  probe
  misc_feature (1)..(25): SEQ ID NO: 3613; WAN024ANJ_at; Start 27; Stop 51
ttttaggtatcatattgtttgggca

SEQ ID NO: 60582 - DNA, 25 bp, Artificial
  probe
  misc_feature (1)..(25): SEQ ID NO: 3613; WAN024ANJ_at; Start 12; Stop 36
tgacaattatcctatttttaggtat

SEQ ID NO: 60583 - DNA, 25 bp, Artificial
  probe
  misc_feature (1)..(25): SEQ ID NO: 3613; WAN024ANJ_at; Start 31; Stop 55
aggtatcatattgtttgggcacctc

SEQ ID NO: 60584 - DNA, 25 bp, Artificial
  probe
  misc_feature (1)..(25): SEQ ID NO: 3613; WAN024ANJ_at; Start 29; Stop 53
ttaggtatcatattgtttgggcacc

SEQ ID NO: 60585 - DNA, 25 bp, Artificial
  probe
  misc_feature (1)..(25): SEQ ID NO: 4797; WAN024ANK_at; Start 17; Stop 41
agagcgaacagactctgacctcatt

SEQ ID NO: 60586 - DNA, 25 bp, Artificial
  probe
  misc_feature (1)..(25): SEQ ID NO: 4797; WAN024ANK_at; Start 22; Stop 46
gaacagactctgacctcattttatc

SEQ ID NO: 60587 - DNA, 25 bp, Artificial
  probe
  misc_feature (1)..(25): SEQ ID NO: 4797; WAN024ANK_at; Start 28; Stop 52
actctgacctcattttatcatttac

SEQ ID NO: 60588 - DNA, 25 bp, Artificial
  probe
  misc_feature (1)..(25): SEQ ID NO: 4797; WAN024ANK_at; Start 1; Stop 25
ttatactactatcgccagagcgaac

SEQ ID NO: 60589 - DNA, 25 bp, Artificial
  probe
  misc_feature (1)..(25): SEQ ID NO: 4797; WAN024ANK_at; Start 7; Stop 31
tactatcgccagagcgaacagactc

SEQ ID NO: 60590 - DNA, 25 bp, Artificial
  probe
  misc_feature (1)..(25): SEQ ID NO: 4797; WAN024ANK_at; Start 13; Stop 37
cgccagagcgaacagactctgacct

SEQ ID NO: 60591 - DNA, 25 bp, Artificial
  probe
  misc_feature (1)..(25): SEQ ID NO: 4797; WAN024ANK_at; Start 31; Stop 55
ctgacctcattttatcatttactct

SEQ ID NO: 60592 - DNA, 25 bp, Artificial
  probe
  misc_feature (1)..(25): SEQ ID NO: 4797; WAN024ANK_at; Start 61; Stop 85
ttacgataattttgcggaatagtca

SEQ ID NO: 60593 - DNA, 25 bp, Artificial
  probe
  misc_feature (1)..(25): SEQ ID NO: 4797; WAN024ANK_at; Start 19; Stop 43
agcgaacagactctgacctcatttt

SEQ ID NO: 60594 - DNA, 25 bp, Artificial
  probe
  misc_feature (1)..(25): SEQ ID NO: 4797; WAN024ANK_at; Start 60; Stop 84
tttacgataattttgcggaatagtc

SEQ ID NO: 60595 - DNA, 25 bp, Artificial
  probe
  misc_feature (1)..(25): SEQ ID NO: 4797; WAN024ANK_at; Start 24; Stop 48
acagactctgacctcattttatcat

SEQ ID NO: 60596 - DNA, 25 bp, Artificial
  probe
  misc_feature (1)..(25): SEQ ID NO: 4797; WAN024ANK_at; Start 14; Stop 38
gccagagcgaacagactctgacctc

SEQ ID NO: 60597 - DNA, 25 bp, Artificial
  probe
  misc_feature (1)..(25): SEQ ID NO: 4797; WAN024ANK_at; Start 12; Stop 36
tcgccagagcgaacagactctgacc

SEQ ID NO: 60598 - DNA, 25 bp, Artificial
  probe
  misc_feature (1)..(25): SEQ ID NO: 4797; WAN024ANK_at; Start 5; Stop 29
actactatcgccagagcgaacagac

SEQ ID NO: 60599 - DNA, 25 bp, Artificial
  probe
  misc_feature (1)..(25): SEQ ID NO: 4797; WAN024ANK_at; Start 52; Stop 76
ctctttattttacgataattttgcg

SEQ ID NO: 60600 - DNA, 25 bp, Artificial
  probe
  misc_feature (1)..(25): SEQ ID NO: 4797; WAN024ANK_at; Start 33; Stop 57
gacctcattttatcatttactcttt

SEQ ID NO: 60601 - DNA, 25 bp, Artificial
  probe
  misc_feature (1)..(25): SEQ ID NO: 4797; WAN024ANK_at; Start 58; Stop 82
attttacgataattttgcggaatag

SEQ ID NO: 60602 - DNA, 25 bp, Artificial
  probe
  misc_feature (1)..(25): SEQ ID NO: 4797; WAN024ANK_at; Start 10; Stop 34
tatcgccagagcgaacagactctga

SEQ ID NO: 60603 - DNA, 25 bp, Artificial
  probe
  misc_feature (1)..(25): SEQ ID NO: 4797; WAN024ANK_at; Start 42; Stop 66
ttatcatttactctttattttacga

SEQ ID NO: 60604 - DNA, 25 bp, Artificial
  probe
  misc_feature (1)..(25): SEQ ID NO: 4797; WAN024ANK_at; Start 11; Stop 35
atcgccagagcgaacagactctgac

SEQ ID NO: 60605 - DNA, 25 bp, Artificial
  probe
  misc_feature (1)..(25): SEQ ID NO: 4797; WAN024ANK_at; Start 66; Stop 90
ataattttgcggaatagtcaaaggt

SEQ ID NO: 60606 - DNA, 25 bp, Artificial
  probe
  misc_feature (1)..(25): SEQ ID NO: 4797; WAN024ANK_at; Start 27; Stop 51
gactctgacctcattttatcattta

SEQ ID NO: 60607 - DNA, 25 bp, Artificial
  probe
  misc_feature (1)..(25): SEQ ID NO: 4797; WAN024ANK_at; Start 30; Stop 54
tctgacctcattttatcatttactc

SEQ ID NO: 60608 - DNA, 25 bp, Artificial
  probe
  misc_feature (1)..(25): SEQ ID NO: 4797; WAN024ANK_at; Start 6; Stop 30
ctactatcgccagagcgaacagact

SEQ ID NO: 60609 - DNA, 25 bp, Artificial
  probe
  misc_feature (1)..(25): SEQ ID NO: 4797; WAN024ANK_at; Start 23; Stop 47
aacagactctgacctcattttatca

SEQ ID NO: 60610 - DNA, 25 bp, Artificial
  probe
  misc_feature (1)..(25): SEQ ID NO: 4797; WAN024ANK_at; Start 21; Stop 45
cgaacagactctgacctcattttat

SEQ ID NO: 60611 - DNA, 25 bp, Artificial
  probe
  misc_feature (1)..(25): SEQ ID NO: 4797; WAN024ANK_at; Start 8; Stop 32
actatcgccagagcgaacagactct

SEQ ID NO: 60612 - DNA, 25 bp, Artificial
  probe
  misc_feature (1)..(25): SEQ ID NO: 4797; WAN024ANK_at; Start 20; Stop 44
gcgaacagactctgacctcatttta

SEQ ID NO: 60613 - DNA, 25 bp, Artificial
  probe
  misc_feature (1)..(25): SEQ ID NO: 4797; WAN024ANK_at; Start 65; Stop 89
gataattttgcggaatagtcaaagg

SEQ ID NO: 60614 - DNA, 25 bp, Artificial
  probe
  misc_feature (1)..(25): SEQ ID NO: 4797; WAN024ANK_at; Start 16; Stop 40
cagagcgaacagactctgacctcat

SEQ ID NO: 60615 - DNA, 25 bp, Artificial
  probe
  misc_feature (1)..(25): SEQ ID NO: 4797; WAN024ANK_at; Start 25; Stop 49
cagactctgacctcattttatcatt

SEQ ID NO: 60616 - DNA, 25 bp, Artificial
  probe
  misc_feature (1)..(25): SEQ ID NO: 4797; WAN024ANK_at; Start 4; Stop 28
tactactatcgccagagcgaacaga

SEQ ID NO: 60617 - DNA, 25 bp, Artificial
  probe
  misc_feature (1)..(25): SEQ ID NO: 4797; WAN024ANK_at; Start 18; Stop 42
gagcgaacagactctgacctcattt

SEQ ID NO: 60618 - DNA, 25 bp, Artificial
  probe
  misc_feature (1)..(25): SEQ ID NO: 4797; WAN024ANK_at; Start 62; Stop 86
tacgataattttgcggaatagtcaa

SEQ ID NO: 60619 - DNA, 25 bp, Artificial
  probe
  misc_feature (1)..(25): SEQ ID NO: 4624; WAN024ANL_at; Start 78; Stop 102
gtcagagtctgttcgctctggcgat

SEQ ID NO: 60620 - DNA, 25 bp, Artificial
  probe
  misc_feature (1)..(25): SEQ ID NO: 4624; WAN024ANL_at; Start 79; Stop 103
tcagagtctgttcgctctggcgata

SEQ ID NO: 60621 - DNA, 25 bp, Artificial
  probe
  misc_feature (1)..(25): SEQ ID NO: 4624; WAN024ANL_at; Start 47; Stop 71
tcgtaaaataaagagtaaatgataa

SEQ ID NO: 60622 - DNA, 25 bp, Artificial
  probe
  misc_feature (1)..(25): SEQ ID NO: 4624; WAN024ANL_at; Start 55; Stop 79
taaagagtaaatgataaaatgaggt

SEQ ID NO: 60623 - DNA, 25 bp, Artificial
  probe
  misc_feature (1)..(25): SEQ ID NO: 4624; WAN024ANL_at; Start 67; Stop 91
gataaaatgaggtcagagtctgttc

SEQ ID NO: 60624 - DNA, 25 bp, Artificial
  probe
  misc_feature (1)..(25): SEQ ID NO: 4624; WAN024ANL_at; Start 88; Stop 112
gttcgctctggcgatagtagtataa

SEQ ID NO: 60625 - DNA, 25 bp, Artificial
  probe
  misc_feature (1)..(25): SEQ ID NO: 4624; WAN024ANL_at; Start 71; Stop 95
aaatgaggtcagagtctgttcgctc

SEQ ID NO: 60626 - DNA, 25 bp, Artificial
  probe
  misc_feature (1)..(25): SEQ ID NO: 4624; WAN024ANL_at; Start 76; Stop 100
aggtcagagtctgttcgctctggcg

SEQ ID NO: 60627 - DNA, 25 bp, Artificial
  probe
  misc_feature (1)..(25): SEQ ID NO: 4624; WAN024ANL_at; Start 37; Stop 61
cgcaaaattatcgtaaaataaagag

SEQ ID NO: 60628 - DNA, 25 bp, Artificial
  probe
  misc_feature (1)..(25): SEQ ID NO: 4624; WAN024ANL_at; Start 64; Stop 88
aatgataaaatgaggtcagagtctg

SEQ ID NO: 60629 - DNA, 25 bp, Artificial
  probe
  misc_feature (1)..(25): SEQ ID NO: 4624; WAN024ANL_at; Start 65; Stop 89
atgataaaatgaggtcagagtctgt

SEQ ID NO: 60630 - DNA, 25 bp, Artificial
  probe
  misc_feature (1)..(25): SEQ ID NO: 4624; WAN024ANL_at; Start 77; Stop 101
ggtcagagtctgttcgctctggcga

SEQ ID NO: 60631 - DNA, 25 bp, Artificial
  probe
  misc_feature (1)..(25): SEQ ID NO: 4624; WAN024ANL_at; Start 72; Stop 96
aatgaggtcagagtctgttcgctct

SEQ ID NO: 60632 - DNA, 25 bp, Artificial
  probe
  misc_feature (1)..(25): SEQ ID NO: 4624; WAN024ANL_at; Start 27; Stop 51
ttgactattccgcaaaattatcgta

SEQ ID NO: 60633 - DNA, 25 bp, Artificial
  probe
  misc_feature (1)..(25): SEQ ID NO: 4624; WAN024ANL_at; Start 68; Stop 92
ataaaatgaggtcagagtctgttcg

SEQ ID NO: 60634 - DNA, 25 bp, Artificial
  probe
  misc_feature (1)..(25): SEQ ID NO: 4624; WAN024ANL_at; Start 24; Stop 48
cctttgactattccgcaaaattatc

SEQ ID NO: 60635 - DNA, 25 bp, Artificial
  probe
  misc_feature (1)..(25): SEQ ID NO: 4624; WAN024ANL_at; Start 70; Stop 94
aaaatgaggtcagagtctgttcgct

SEQ ID NO: 60636 - DNA, 25 bp, Artificial
  probe
  misc_feature (1)..(25): SEQ ID NO: 4624; WAN024ANL_at; Start 69; Stop 93
taaaatgaggtcagagtctgttcgc

SEQ ID NO: 60637 - DNA, 25 bp, Artificial
  probe
  misc_feature (1)..(25): SEQ ID NO: 4624; WAN024ANL_at; Start 45; Stop 69
tatcgtaaaataaagagtaaatgat

SEQ ID NO: 60638 - DNA, 25 bp, Artificial
  probe
  misc_feature (1)..(25): SEQ ID NO: 4624; WAN024ANL_at; Start 66; Stop 90
tgataaaatgaggtcagagtctgtt

SEQ ID NO: 60639 - DNA, 25 bp, Artificial
  probe
  misc_feature (1)..(25): SEQ ID NO: 4624; WAN024ANL_at; Start 31; Stop 55
ctattccgcaaaattatcgtaaaat

SEQ ID NO: 60640 - DNA, 25 bp, Artificial
  probe
  misc_feature (1)..(25): SEQ ID NO: 4624; WAN024ANL_at; Start 56; Stop 80
aaagagtaaatgataaaatgaggtc

SEQ ID NO: 60641 - DNA, 25 bp, Artificial
  probe
  misc_feature (1)..(25): SEQ ID NO: 4624; WAN024ANL_at; Start 83; Stop 107
agtctgttcgctctggcgatagtag

SEQ ID NO: 60642 - DNA, 25 bp, Artificial
  probe
  misc_feature (1)..(25): SEQ ID NO: 4624; WAN024ANL_at; Start 73; Stop 97
atgaggtcagagtctgttcgctctg

SEQ ID NO: 60643 - DNA, 25 bp, Artificial
  probe
  misc_feature (1)..(25): SEQ ID NO: 4624; WAN024ANL_at; Start 85; Stop 109
tctgttcgctctggcgatagtagta

SEQ ID NO: 60644 - DNA, 25 bp, Artificial
  probe
  misc_feature (1)..(25): SEQ ID NO: 4624; WAN024ANL_at; Start 29; Stop 53
gactattccgcaaaattatcgtaaa

SEQ ID NO: 60645 - DNA, 25 bp, Artificial
  probe
  misc_feature (1)..(25): SEQ ID NO: 4624; WAN024ANL_at; Start 28; Stop 52
tgactattccgcaaaattatcgtaa

SEQ ID NO: 60646 - DNA, 25 bp, Artificial
  probe
  misc_feature (1)..(25): SEQ ID NO: 4624; WAN024ANL_at; Start 62; Stop 86
taaatgataaaatgaggtcagagtc

SEQ ID NO: 60647 - DNA, 25 bp, Artificial
  probe
  misc_feature (1)..(25): SEQ ID NO: 4624; WAN024ANL_at; Start 59; Stop 83
gagtaaatgataaaatgaggtcaga

SEQ ID NO: 60648 - DNA, 25 bp, Artificial
  probe
  misc_feature (1)..(25): SEQ ID NO: 4624; WAN024ANL_at; Start 75; Stop 99
gaggtcagagtctgttcgctctggc

SEQ ID NO: 60649 - DNA, 25 bp, Artificial
  probe
  misc_feature (1)..(25): SEQ ID NO: 4624; WAN024ANL_at; Start 84; Stop 108
gtctgttcgctctggcgatagtagt

SEQ ID NO: 60650 - DNA, 25 bp, Artificial
  probe
  misc_feature (1)..(25): SEQ ID NO: 4624; WAN024ANL_at; Start 63; Stop 87
aaatgataaaatgaggtcagagtct

SEQ ID NO: 60651 - DNA, 25 bp, Artificial
  probe
  misc_feature (1)..(25): SEQ ID NO: 4624; WAN024ANL_at; Start 81; Stop 105
agagtctgttcgctctggcgatagt

SEQ ID NO: 60652 - DNA, 25 bp, Artificial
  probe
  misc_feature (1)..(25): SEQ ID NO: 4624; WAN024ANL_at; Start 82; Stop 106
gagtctgttcgctctggcgatagta

SEQ ID NO: 60653 - DNA, 25 bp, Artificial
  probe
  misc_feature (1)..(25): SEQ ID NO: 95; WAN024ANM_at; Start 22; Stop 46
aaaatgcttgcgcttgcaagcgttt

SEQ ID NO: 60654 - DNA, 25 bp, Artificial
  probe
  misc_feature (1)..(25): SEQ ID NO: 95; WAN024ANM_at; Start 138; Stop 162
ttgacaagctttgcctaaccagaag

SEQ ID NO: 60655 - DNA, 25 bp, Artificial
  probe
  misc_feature (1)..(25): SEQ ID NO: 95; WAN024ANM_at; Start 49; Stop 73
tgttatgataaaagagtcttcaggg

SEQ ID NO: 60656 - DNA, 25 bp, Artificial
  probe
  misc_feature (1)..(25): SEQ ID NO: 95; WAN024ANM_at; Start 162; Stop 186
gttatgcctacagcttgtcgcctag

SEQ ID NO: 60657 - DNA, 25 bp, Artificial
  probe
  misc_feature (1)..(25): SEQ ID NO: 95; WAN024ANM_at; Start 129; Stop 153
tatactttgttgacaagctttgcct

SEQ ID NO: 60658 - DNA, 25 bp, Artificial
  probe
  misc_feature (1)..(25): SEQ ID NO: 95; WAN024ANM_at; Start 98; Stop 122
tgactttaactaggaaatgatcttt

SEQ ID NO: 60659 - DNA, 25 bp, Artificial
  probe
  misc_feature (1)..(25): SEQ ID NO: 95; WAN024ANM_at; Start 179; Stop 203
tcgcctagtctaaaagaaaaatctc

SEQ ID NO: 60660 - DNA, 25 bp, Artificial
  probe
  misc_feature (1)..(25): SEQ ID NO: 95; WAN024ANM_at; Start 19; Stop 43
aacaaaatgcttgcgcttgcaagcg

SEQ ID NO: 60661 - DNA, 25 bp, Artificial
  probe
  misc_feature (1)..(25): SEQ ID NO: 95; WAN024ANM_at; Start 95; Stop 119
cggtgactttaactaggaaatgatc

SEQ ID NO: 60662 - DNA, 25 bp, Artificial
  probe
  misc_feature (1)..(25): SEQ ID NO: 95; WAN024ANM_at; Start 150; Stop 174
gcctaaccagaagttatgcctacag

SEQ ID NO: 60663 - DNA, 25 bp, Artificial
  probe
  misc_feature (1)..(25): SEQ ID NO: 95; WAN024ANM_at; Start 92; Stop 116
cggcggtgactttaactaggaaatg

SEQ ID NO: 60664 - DNA, 25 bp, Artificial
  probe
  misc_feature (1)..(25): SEQ ID NO: 95; WAN024ANM_at; Start 11; Stop 35
tgaaaatgaacaaaatgcttgcgct

SEQ ID NO: 60665 - DNA, 25 bp, Artificial
  probe
  misc_feature (1)..(25): SEQ ID NO: 95; WAN024ANM_at; Start 145; Stop 169
gctttgcctaaccagaagttatgcc

SEQ ID NO: 60666 - DNA, 25 bp, Artificial
  probe
  misc_feature (1)..(25): SEQ ID NO: 95; WAN024ANM_at; Start 55; Stop 79
gataaaagagtcttcagggcagggt

SEQ ID NO: 60667 - DNA, 25 bp, Artificial
  probe
  misc_feature (1)..(25): SEQ ID NO: 95; WAN024ANM_at; Start 123; Stop 147
tccttttatactttgttgacaagct

SEQ ID NO: 60668 - DNA, 25 bp, Artificial
  probe
  misc_feature (1)..(25): SEQ ID NO: 95; WAN024ANM_at; Start 171; Stop 195
acagcttgtcgcctagtctaaaaga

SEQ ID NO: 60669 - DNA, 25 bp, Artificial
  probe
  misc_feature (1)..(25): SEQ ID NO: 95; WAN024ANM_at; Start 164; Stop 188
tatgcctacagcttgtcgcctagtc

SEQ ID NO: 60670 - DNA, 25 bp, Artificial
  probe
  misc_feature (1)..(25): SEQ ID NO: 95; WAN024ANM_at; Start 153; Stop 177
taaccagaagttatgcctacagctt

SEQ ID NO: 60671 - DNA, 25 bp, Artificial
  probe
  misc_feature (1)..(25): SEQ ID NO: 95; WAN024ANM_at; Start 14; Stop 38
aaatgaacaaaatgcttgcgcttgc

SEQ ID NO: 60672 - DNA, 25 bp, Artificial
  probe
  misc_feature (1)..(25): SEQ ID NO: 95; WAN024ANM_at; Start 140; Stop 164
gacaagctttgcctaaccagaagtt

SEQ ID NO: 60673 - DNA, 25 bp, Artificial
  probe
  misc_feature (1)..(25): SEQ ID NO: 95; WAN024ANM_at; Start 167; Stop 191
gcctacagcttgtcgcctagtctaa

SEQ ID NO: 60674 - DNA, 25 bp, Artificial
  probe
  misc_feature (1)..(25): SEQ ID NO: 95; WAN024ANM_at; Start 52; Stop 76
tatgataaaagagtcttcagggcag

SEQ ID NO: 60675 - DNA, 25 bp, Artificial
  probe
  misc_feature (1)..(25): SEQ ID NO: 95; WAN024ANM_at; Start 136; Stop 160
tgttgacaagctttgcctaaccaga

SEQ ID NO: 60676 - DNA, 25 bp, Artificial
  probe
  misc_feature (1)..(25): SEQ ID NO: 95; WAN024ANM_at; Start 157; Stop 181
cagaagttatgcctacagcttgtcg

SEQ ID NO: 60677 - DNA, 25 bp, Artificial
  probe
  misc_feature (1)..(25): SEQ ID NO: 95; WAN024ANM_at; Start 132; Stop 156
actttgttgacaagctttgcctaac

SEQ ID NO: 60678 - DNA, 25 bp, Artificial
  probe
  misc_feature (1)..(25): SEQ ID NO: 95; WAN024ANM_at; Start 36; Stop 60
tgcaagcgttttttgttatgataaa

SEQ ID NO: 60679 - DNA, 25 bp, Artificial
  probe
  misc_feature (1)..(25): SEQ ID NO: 95; WAN024ANM_at; Start 142; Stop 166
caagctttgcctaaccagaagttat

SEQ ID NO: 60680 - DNA, 25 bp, Artificial
  probe
  misc_feature (1)..(25): SEQ ID NO: 95; WAN024ANM_at; Start 113; Stop 137
aatgatcttttccttttatactttg

SEQ ID NO: 60681 - DNA, 25 bp, Artificial
  probe
  misc_feature (1)..(25): SEQ ID NO: 95; WAN024ANM_at; Start 177; Stop 201
tgtcgcctagtctaaaagaaaaatc

SEQ ID NO: 60682 - DNA, 25 bp, Artificial
  probe
  misc_feature (1)..(25): SEQ ID NO: 95; WAN024ANM_at; Start 174; Stop 198
gcttgtcgcctagtctaaaagaaaa

SEQ ID NO: 60683 - DNA, 25 bp, Artificial
  probe
  misc_feature (1)..(25): SEQ ID NO: 95; WAN024ANM_at; Start 5; Stop 29
tgaaaatgaaaatgaacaaaatgct

SEQ ID NO: 60684 - DNA, 25 bp, Artificial
  probe
  misc_feature (1)..(25): SEQ ID NO: 95; WAN024ANM_at; Start 159; Stop 183
gaagttatgcctacagcttgtcgcc

SEQ ID NO: 60685 - DNA, 25 bp, Artificial
  probe
  misc_feature (1)..(25): SEQ ID NO: 95; WAN024ANM_at; Start 17; Stop 41
tgaacaaaatgcttgcgcttgcaag

SEQ ID NO: 60686 - DNA, 25 bp, Artificial
  probe
  misc_feature (1)..(25): SEQ ID NO: 95; WAN024ANM_at; Start 32; Stop 56
cgcttgcaagcgttttttgttatga

SEQ ID NO: 60687 - DNA, 25 bp, Artificial
  probe
  misc_feature (1)..(25): SEQ ID NO: 3601; WAN024ANN_at; Start 151; Stop 175
taacaaaaaacgcttgcaagcgcaa

SEQ ID NO: 60688 - DNA, 25 bp, Artificial
  probe
  misc_feature (1)..(25): SEQ ID NO: 3601; WAN024ANN_at; Start 67; Stop 91
caaagtataaaaggaaaagatcatt

SEQ ID NO: 60689 - DNA, 25 bp, Artificial
  probe
  misc_feature (1)..(25): SEQ ID NO: 3601; WAN024ANN_at; Start 6; Stop 30
ttttcttttagactaggcgacaagc

SEQ ID NO: 60690 - DNA, 25 bp, Artificial
  probe
  misc_feature (1)..(25): SEQ ID NO: 3601; WAN024ANN_at; Start 154; Stop 178
caaaaaacgcttgcaagcgcaagca

SEQ ID NO: 60691 - DNA, 25 bp, Artificial
  probe
  misc_feature (1)..(25): SEQ ID NO: 3601; WAN024ANN_at; Start 29; Stop 53
gctgtaggcataacttctggttagg

SEQ ID NO: 60692 - DNA, 25 bp, Artificial
  probe
  misc_feature (1)..(25): SEQ ID NO: 3601; WAN024ANN_at; Start 132; Stop 156
cctgaagactcttttatcataacaa

SEQ ID NO: 60693 - DNA, 25 bp, Artificial
  probe
  misc_feature (1)..(25): SEQ ID NO: 3601; WAN024ANN_at; Start 9; Stop 33
tcttttagactaggcgacaagctgt

SEQ ID NO: 60694 - DNA, 25 bp, Artificial
  probe
  misc_feature (1)..(25): SEQ ID NO: 3601; WAN024ANN_at; Start 144; Stop 168
tttatcataacaaaaaacgcttgca

SEQ ID NO: 60695 - DNA, 25 bp, Artificial
  probe
  misc_feature (1)..(25): SEQ ID NO: 3601; WAN024ANN_at; Start 19; Stop 43
taggcgacaagctgtaggcataact

SEQ ID NO: 60696 - DNA, 25 bp, Artificial
  probe
  misc_feature (1)..(25): SEQ ID NO: 3601; WAN024ANN_at; Start 42; Stop 66
cttctggttaggcaaagcttgtcaa

SEQ ID NO: 60697 - DNA, 25 bp, Artificial
  probe
  misc_feature (1)..(25): SEQ ID NO: 3601; WAN024ANN_at; Start 163; Stop 187
cttgcaagcgcaagcattttgttca

SEQ ID NO: 60698 - DNA, 25 bp, Artificial
  probe
  misc_feature (1)..(25): SEQ ID NO: 3601; WAN024ANN_at; Start 39; Stop 63
taacttctggttaggcaaagcttgt

SEQ ID NO: 60699 - DNA, 25 bp, Artificial
  probe
  misc_feature (1)..(25): SEQ ID NO: 3601; WAN024ANN_at; Start 26; Stop 50
caagctgtaggcataacttctggtt

SEQ ID NO: 60700 - DNA, 25 bp, Artificial
  probe
  misc_feature (1)..(25): SEQ ID NO: 3601; WAN024ANN_at; Start 125; Stop 149
accctgccctgaagactcttttatc

SEQ ID NO: 60701 - DNA, 25 bp, Artificial
  probe
  misc_feature (1)..(25): SEQ ID NO: 3601; WAN024ANN_at; Start 21; Stop 45
ggcgacaagctgtaggcataacttc

SEQ ID NO: 60702 - DNA, 25 bp, Artificial
  probe
  misc_feature (1)..(25): SEQ ID NO: 3601; WAN024ANN_at; Start 31; Stop 55
tgtaggcataacttctggttaggca

SEQ ID NO: 60703 - DNA, 25 bp, Artificial
  probe
  misc_feature (1)..(25): SEQ ID NO: 3601; WAN024ANN_at; Start 170; Stop 194
gcgcaagcattttgttcattttcat

SEQ ID NO: 60704 - DNA, 25 bp, Artificial
  probe
  misc_feature (1)..(25): SEQ ID NO: 3601; WAN024ANN_at; Start 36; Stop 60
gcataacttctggttaggcaaagct

SEQ ID NO: 60705 - DNA, 25 bp, Artificial
  probe
  misc_feature (1)..(25): SEQ ID NO: 3601; WAN024ANN_at; Start 16; Stop 40
gactaggcgacaagctgtaggcata

SEQ ID NO: 60706 - DNA, 25 bp, Artificial
  probe
  misc_feature (1)..(25): SEQ ID NO: 3601; WAN024ANN_at; Start 88; Stop 112
catttcctagttaaagtcaccgccg

SEQ ID NO: 60707 - DNA, 25 bp, Artificial
  probe
  misc_feature (1)..(25): SEQ ID NO: 3601; WAN024ANN_at; Start 33; Stop 57
taggcataacttctggttaggcaaa

SEQ ID NO: 60708 - DNA, 25 bp, Artificial
  probe
  misc_feature (1)..(25): SEQ ID NO: 3601; WAN024ANN_at; Start 23; Stop 47
cgacaagctgtaggcataacttctg

SEQ ID NO: 60709 - DNA, 25 bp, Artificial
  probe
  misc_feature (1)..(25): SEQ ID NO: 3601; WAN024ANN_at; Start 50; Stop 74
taggcaaagcttgtcaacaaagtat

SEQ ID NO: 60710 - DNA, 25 bp, Artificial
  probe
  misc_feature (1)..(25): SEQ ID NO: 3601; WAN024ANN_at; Start 52; Stop 76
ggcaaagcttgtcaacaaagtataa

SEQ ID NO: 60711 - DNA, 25 bp, Artificial
  probe
  misc_feature (1)..(25): SEQ ID NO: 3601; WAN024ANN_at; Start 12; Stop 36
tttagactaggcgacaagctgtagg

SEQ ID NO: 60712 - DNA, 25 bp, Artificial
  probe
  misc_feature (1)..(25): SEQ ID NO: 3601; WAN024ANN_at; Start 166; Stop 190
gcaagcgcaagcattttgttcattt

SEQ ID NO: 60713 - DNA, 25 bp, Artificial
  probe
  misc_feature (1)..(25): SEQ ID NO: 3601; WAN024ANN_at; Start 85; Stop 109
gatcatttcctagttaaagtcaccg

SEQ ID NO: 60714 - DNA, 25 bp, Artificial
  probe
  misc_feature (1)..(25): SEQ ID NO: 3601; WAN024ANN_at; Start 148; Stop 172
tcataacaaaaaacgcttgcaagcg

SEQ ID NO: 60715 - DNA, 25 bp, Artificial
  probe
  misc_feature (1)..(25): SEQ ID NO: 3601; WAN024ANN_at; Start 44; Stop 68
tctggttaggcaaagcttgtcaaca

SEQ ID NO: 60716 - DNA, 25 bp, Artificial
  probe
  misc_feature (1)..(25): SEQ ID NO: 3601; WAN024ANN_at; Start 1; Stop 25
gagatttttcttttagactaggcga

SEQ ID NO: 60717 - DNA, 25 bp, Artificial
  probe
  misc_feature (1)..(25): SEQ ID NO: 3601; WAN024ANN_at; Start 3; Stop 27
gatttttcttttagactaggcgaca

SEQ ID NO: 60718 - DNA, 25 bp, Artificial
  probe
  misc_feature (1)..(25): SEQ ID NO: 3601; WAN024ANN_at; Start 14; Stop 38
tagactaggcgacaagctgtaggca

SEQ ID NO: 60719 - DNA, 25 bp, Artificial
  probe
  misc_feature (1)..(25): SEQ ID NO: 3601; WAN024ANN_at; Start 47; Stop 71
ggttaggcaaagcttgtcaacaaag

SEQ ID NO: 60720 - DNA, 25 bp, Artificial
  probe
  misc_feature (1)..(25): SEQ ID NO: 3601; WAN024ANN_at; Start 58; Stop 82
gcttgtcaacaaagtataaaaggaa

SEQ ID NO: 60721 - DNA, 25 bp, Artificial
  probe
  misc_feature (1)..(25): SEQ ID NO: 3387; WAN024ANO_at; Start 5; Stop 29
ccggagtcaagctcagcaaacagcg

SEQ ID NO: 60722 - DNA, 25 bp, Artificial
  probe
  misc_feature (1)..(25): SEQ ID NO: 3387; WAN024ANO_at; Start 18; Stop 42
cagcaaacagcgtggttaaggcatc

SEQ ID NO: 60723 - DNA, 25 bp, Artificial
  probe
  misc_feature (1)..(25): SEQ ID NO: 3387; WAN024ANO_at; Start 10; Stop 34
gtcaagctcagcaaacagcgtggtt

SEQ ID NO: 60724 - DNA, 25 bp, Artificial
  probe
  misc_feature (1)..(25): SEQ ID NO: 3387; WAN024ANO_at; Start 14; Stop 38
agctcagcaaacagcgtggttaagg

SEQ ID NO: 60725 - DNA, 25 bp, Artificial
  probe
  misc_feature (1)..(25): SEQ ID NO: 3387; WAN024ANO_at; Start 55; Stop 79
cacaacaggtttgaagtaaatcagc

SEQ ID NO: 60726 - DNA, 25 bp, Artificial
  probe
  misc_feature (1)..(25): SEQ ID NO: 3387; WAN024ANO_at; Start 15; Stop 39
gctcagcaaacagcgtggttaaggc

SEQ ID NO: 60727 - DNA, 25 bp, Artificial
  probe
  misc_feature (1)..(25): SEQ ID NO: 3387; WAN024ANO_at; Start 71; Stop 95
taaatcagcgaaactactttcttag

SEQ ID NO: 60728 - DNA, 25 bp, Artificial
  probe
  misc_feature (1)..(25): SEQ ID NO: 3387; WAN024ANO_at; Start 8; Stop 32
gagtcaagctcagcaaacagcgtgg

SEQ ID NO: 60729 - DNA, 25 bp, Artificial
  probe
  misc_feature (1)..(25): SEQ ID NO: 3387; WAN024ANO_at; Start 37; Stop 61
ggcatcgttaacttacctcacaaca

SEQ ID NO: 60730 - DNA, 25 bp, Artificial
  probe
  misc_feature (1)..(25): SEQ ID NO: 3387; WAN024ANO_at; Start 64; Stop 88
tttgaagtaaatcagcgaaactact

SEQ ID NO: 60731 - DNA, 25 bp, Artificial
  probe
  misc_feature (1)..(25): SEQ ID NO: 3387; WAN024ANO_at; Start 52; Stop 76
cctcacaacaggtttgaagtaaatc

SEQ ID NO: 60732 - DNA, 25 bp, Artificial
  probe
  misc_feature (1)..(25): SEQ ID NO: 3387; WAN024ANO_at; Start 44; Stop 68
ttaacttacctcacaacaggtttga

SEQ ID NO: 60733 - DNA, 25 bp, Artificial
  probe
  misc_feature (1)..(25): SEQ ID NO: 3387; WAN024ANO_at; Start 7; Stop 31
ggagtcaagctcagcaaacagcgtg

SEQ ID NO: 60734 - DNA, 25 bp, Artificial
  probe
  misc_feature (1)..(25): SEQ ID NO: 3387; WAN024ANO_at; Start 3; Stop 27
gcccggagtcaagctcagcaaacag

SEQ ID NO: 60735 - DNA, 25 bp, Artificial
  probe
  misc_feature (1)..(25): SEQ ID NO: 3387; WAN024ANO_at; Start 46; Stop 70
aacttacctcacaacaggtttgaag

SEQ ID NO: 60736 - DNA, 25 bp, Artificial
  probe
  misc_feature (1)..(25): SEQ ID NO: 3387; WAN024ANO_at; Start 98; Stop 122
taacactttcagaatcattgtcaat

SEQ ID NO: 60737 - DNA, 25 bp, Artificial
  probe
  misc_feature (1)..(25): SEQ ID NO: 3387; WAN024ANO_at; Start 72; Stop 96
aaatcagcgaaactactttcttagt

SEQ ID NO: 60738 - DNA, 25 bp, Artificial
  probe
  misc_feature (1)..(25): SEQ ID NO: 3387; WAN024ANO_at; Start 25; Stop 49
cagcgtggttaaggcatcgttaact

SEQ ID NO: 60739 - DNA, 25 bp, Artificial
  probe
  misc_feature (1)..(25): SEQ ID NO: 3387; WAN024ANO_at; Start 27; Stop 51
gcgtggttaaggcatcgttaactta

SEQ ID NO: 60740 - DNA, 25 bp, Artificial
  probe
  misc_feature (1)..(25): SEQ ID NO: 3387; WAN024ANO_at; Start 39; Stop 63
catcgttaacttacctcacaacagg

SEQ ID NO: 60741 - DNA, 25 bp, Artificial
  probe
  misc_feature (1)..(25): SEQ ID NO: 3387; WAN024ANO_at; Start 12; Stop 36
caagctcagcaaacagcgtggttaa

SEQ ID NO: 60742 - DNA, 25 bp, Artificial
  probe
  misc_feature (1)..(25): SEQ ID NO: 3387; WAN024ANO_at; Start 17; Stop 41
tcagcaaacagcgtggttaaggcat

SEQ ID NO: 60743 - DNA, 25 bp, Artificial
  probe
  misc_feature (1)..(25): SEQ ID NO: 3387; WAN024ANO_at; Start 20; Stop 44
gcaaacagcgtggttaaggcatcgt

SEQ ID NO: 60744 - DNA, 25 bp, Artificial
  probe
  misc_feature (1)..(25): SEQ ID NO: 3387; WAN024ANO_at; Start 62; Stop 86
ggtttgaagtaaatcagcgaaacta

SEQ ID NO: 60745 - DNA, 25 bp, Artificial
  probe
  misc_feature (1)..(25): SEQ ID NO: 3387; WAN024ANO_at; Start 34; Stop 58
taaggcatcgttaacttacctcaca

SEQ ID NO: 60746 - DNA, 25 bp, Artificial
  probe
  misc_feature (1)..(25): SEQ ID NO: 3387; WAN024ANO_at; Start 101; Stop 125
cactttcagaatcattgtcaataga

SEQ ID NO: 60747 - DNA, 25 bp, Artificial
  probe
  misc_feature (1)..(25): SEQ ID NO: 3387; WAN024ANO_at; Start 60; Stop 84
caggtttgaagtaaatcagcgaaac

SEQ ID NO: 60748 - DNA, 25 bp, Artificial
  probe
  misc_feature (1)..(25): SEQ ID NO: 3387; WAN024ANO_at; Start 2; Stop 26
tgcccggagtcaagctcagcaaaca

SEQ ID NO: 60749 - DNA, 25 bp, Artificial
  probe
  misc_feature (1)..(25): SEQ ID NO: 3387; WAN024ANO_at; Start 66; Stop 90
tgaagtaaatcagcgaaactacttt

SEQ ID NO: 60750 - DNA, 25 bp, Artificial
  probe
  misc_feature (1)..(25): SEQ ID NO: 3387; WAN024ANO_at; Start 32; Stop 56
gttaaggcatcgttaacttacctca

SEQ ID NO: 60751 - DNA, 25 bp, Artificial
  probe
  misc_feature (1)..(25): SEQ ID NO: 3387; WAN024ANO_at; Start 21; Stop 45
caaacagcgtggttaaggcatcgtt

SEQ ID NO: 60752 - DNA, 25 bp, Artificial
  probe
  misc_feature (1)..(25): SEQ ID NO: 3387; WAN024ANO_at; Start 23; Stop 47
aacagcgtggttaaggcatcgttaa

SEQ ID NO: 60753 - DNA, 25 bp, Artificial
  probe
  misc_feature (1)..(25): SEQ ID NO: 3387; WAN024ANO_at; Start 57; Stop 81
caacaggtttgaagtaaatcagcga

SEQ ID NO: 60754 - DNA, 25 bp, Artificial
  probe
  misc_feature (1)..(25): SEQ ID NO: 3387; WAN024ANO_at; Start 103; Stop 127
ctttcagaatcattgtcaatagaaa

SEQ ID NO: 60755 - DNA, 25 bp, Artificial
  probe
  misc_feature (1)..(25): SEQ ID NO: 3497; WAN024ANP_at; Start 76; Stop 100
gctgatttacttcaaacctgttgtg

SEQ ID NO: 60756 - DNA, 25 bp, Artificial
  probe
  misc_feature (1)..(25): SEQ ID NO: 3497; WAN024ANP_at; Start 79; Stop 103
gatttacttcaaacctgttgtgagg

SEQ ID NO: 60757 - DNA, 25 bp, Artificial
  probe
  misc_feature (1)..(25): SEQ ID NO: 3497; WAN024ANP_at; Start 111; Stop 135
acgatgccttaaccacgctgtttgc

SEQ ID NO: 60758 - DNA, 25 bp, Artificial
  probe
  misc_feature (1)..(25): SEQ ID NO: 3497; WAN024ANP_at; Start 97; Stop 121
tgtgaggtaagttaacgatgcctta

SEQ ID NO: 60759 - DNA, 25 bp, Artificial
  probe
  misc_feature (1)..(25): SEQ ID NO: 3497; WAN024ANP_at; Start 126; Stop 150
cgctgtttgctgagcttgactccgg

SEQ ID NO: 60760 - DNA, 25 bp, Artificial
  probe
  misc_feature (1)..(25): SEQ ID NO: 3497; WAN024ANP_at; Start 28; Stop 52
tttctattgacaatgattctgaaag

SEQ ID NO: 60761 - DNA, 25 bp, Artificial
  probe
  misc_feature (1)..(25): SEQ ID NO: 3497; WAN024ANP_at; Start 129; Stop 153
tgtttgctgagcttgactccgggca

SEQ ID NO: 60762 - DNA, 25 bp, Artificial
  probe
  misc_feature (1)..(25): SEQ ID NO: 3497; WAN024ANP_at; Start 95; Stop 119
gttgtgaggtaagttaacgatgcct

SEQ ID NO: 60763 - DNA, 25 bp, Artificial
  probe
  misc_feature (1)..(25): SEQ ID NO: 3497; WAN024ANP_at; Start 83; Stop 107
tacttcaaacctgttgtgaggtaag

SEQ ID NO: 60764 - DNA, 25 bp, Artificial
  probe
  misc_feature (1)..(25): SEQ ID NO: 3497; WAN024ANP_at; Start 116; Stop 140
gccttaaccacgctgtttgctgagc

SEQ ID NO: 60765 - DNA, 25 bp, Artificial
  probe
  misc_feature (1)..(25): SEQ ID NO: 3497; WAN024ANP_at; Start 122; Stop 146
accacgctgtttgctgagcttgact

SEQ ID NO: 60766 - DNA, 25 bp, Artificial
  probe
  misc_feature (1)..(25): SEQ ID NO: 3497; WAN024ANP_at; Start 92; Stop 116
cctgttgtgaggtaagttaacgatg

SEQ ID NO: 60767 - DNA, 25 bp, Artificial
  probe
  misc_feature (1)..(25): SEQ ID NO: 3497; WAN024ANP_at; Start 71; Stop 95
gtttcgctgatttacttcaaacctg

SEQ ID NO: 60768 - DNA, 25 bp, Artificial
  probe
  misc_feature (1)..(25): SEQ ID NO: 3497; WAN024ANP_at; Start 127; Stop 151
gctgtttgctgagcttgactccggg

SEQ ID NO: 60769 - DNA, 25 bp, Artificial
  probe
  misc_feature (1)..(25): SEQ ID NO: 3497; WAN024ANP_at; Start 117; Stop 141
ccttaaccacgctgtttgctgagct

SEQ ID NO: 60770 - DNA, 25 bp, Artificial
  probe
  misc_feature (1)..(25): SEQ ID NO: 3497; WAN024ANP_at; Start 74; Stop 98
tcgctgatttacttcaaacctgttg

SEQ ID NO: 60771 - DNA, 25 bp, Artificial
  probe
  misc_feature (1)..(25): SEQ ID NO: 3497; WAN024ANP_at; Start 69; Stop 93
tagtttcgctgatttacttcaaacc

SEQ ID NO: 60772 - DNA, 25 bp, Artificial
  probe
  misc_feature (1)..(25): SEQ ID NO: 3497; WAN024ANP_at; Start 107; Stop 131
gttaacgatgccttaaccacgctgt

SEQ ID NO: 60773 - DNA, 25 bp, Artificial
  probe
  misc_feature (1)..(25): SEQ ID NO: 3497; WAN024ANP_at; Start 87; Stop 111
tcaaacctgttgtgaggtaagttaa

SEQ ID NO: 60774 - DNA, 25 bp, Artificial
  probe
  misc_feature (1)..(25): SEQ ID NO: 3497; WAN024ANP_at; Start 120; Stop 144
taaccacgctgtttgctgagcttga

SEQ ID NO: 60775 - DNA, 25 bp, Artificial
  probe
  misc_feature (1)..(25): SEQ ID NO: 3497; WAN024ANP_at; Start 106; Stop 130
agttaacgatgccttaaccacgctg

SEQ ID NO: 60776 - DNA, 25 bp, Artificial
  probe
  misc_feature (1)..(25): SEQ ID NO: 3497; WAN024ANP_at; Start 67; Stop 91
agtagtttcgctgatttacttcaaa

SEQ ID NO: 60777 - DNA, 25 bp, Artificial
  probe
  misc_feature (1)..(25): SEQ ID NO: 3497; WAN024ANP_at; Start 109; Stop 133
taacgatgccttaaccacgctgttt

SEQ ID NO: 60778 - DNA, 25 bp, Artificial
  probe
  misc_feature (1)..(25): SEQ ID NO: 3497; WAN024ANP_at; Start 130; Stop 154
gtttgctgagcttgactccgggcag

SEQ ID NO: 60779 - DNA, 25 bp, Artificial
  probe
  misc_feature (1)..(25): SEQ ID NO: 3497; WAN024ANP_at; Start 94; Stop 118
tgttgtgaggtaagttaacgatgcc

SEQ ID NO: 60780 - DNA, 25 bp, Artificial
  probe
  misc_feature (1)..(25): SEQ ID NO: 3497; WAN024ANP_at; Start 119; Stop 143
ttaaccacgctgtttgctgagcttg

SEQ ID NO: 60781 - DNA, 25 bp, Artificial
  probe
  misc_feature (1)..(25): SEQ ID NO: 3497; WAN024ANP_at; Start 99; Stop 123
tgaggtaagttaacgatgccttaac

SEQ ID NO: 60782 - DNA, 25 bp, Artificial
  probe
  misc_feature (1)..(25): SEQ ID NO: 3497; WAN024ANP_at; Start 128; Stop 152
ctgtttgctgagcttgactccgggc

SEQ ID NO: 60783 - DNA, 25 bp, Artificial
  probe
  misc_feature (1)..(25): SEQ ID NO: 3497; WAN024ANP_at; Start 61; Stop 85
taagaaagtagtttcgctgatttac

SEQ ID NO: 60784 - DNA, 25 bp, Artificial
  probe
  misc_feature (1)..(25): SEQ ID NO: 3497; WAN024ANP_at; Start 124; Stop 148
cacgctgtttgctgagcttgactcc

SEQ ID NO: 60785 - DNA, 25 bp, Artificial
  probe
  misc_feature (1)..(25): SEQ ID NO: 3497; WAN024ANP_at; Start 114; Stop 138
atgccttaaccacgctgtttgctga

SEQ ID NO: 60786 - DNA, 25 bp, Artificial
  probe
  misc_feature (1)..(25): SEQ ID NO: 3497; WAN024ANP_at; Start 104; Stop 128
taagttaacgatgccttaaccacgc

SEQ ID NO: 60787 - DNA, 25 bp, Artificial
  probe
  misc_feature (1)..(25): SEQ ID NO: 3497; WAN024ANP_at; Start 113; Stop 137
gatgccttaaccacgctgtttgctg

SEQ ID NO: 60788 - DNA, 25 bp, Artificial
  probe
  misc_feature (1)..(25): SEQ ID NO: 3497; WAN024ANP_at; Start 121; Stop 145
aaccacgctgtttgctgagcttgac

SEQ ID NO: 60789 - DNA, 25 bp, Artificial
  probe
  misc_feature (1)..(25): SEQ ID NO: 546; WAN024ANR_at; Start 31; Stop 55
tttatcacttcaaaattagcttgtc

SEQ ID NO: 60790 - DNA, 25 bp, Artificial
  probe
  misc_feature (1)..(25): SEQ ID NO: 546; WAN024ANR_at; Start 21; Stop 45
ttgcatttattttatcacttcaaaa

SEQ ID NO: 60791 - DNA, 25 bp, Artificial
  probe
  misc_feature (1)..(25): SEQ ID NO: 546; WAN024ANR_at; Start 23; Stop 47
gcatttattttatcacttcaaaatt

SEQ ID NO: 60792 - DNA, 25 bp, Artificial
  probe
  misc_feature (1)..(25): SEQ ID NO: 546; WAN024ANR_at; Start 30; Stop 54
ttttatcacttcaaaattagcttgt

SEQ ID NO: 60793 - DNA, 25 bp, Artificial
  probe
  misc_feature (1)..(25): SEQ ID NO: 546; WAN024ANR_at; Start 20; Stop 44
cttgcatttattttatcacttcaaa

SEQ ID NO: 60794 - DNA, 25 bp, Artificial
  probe
  misc_feature (1)..(25): SEQ ID NO: 546; WAN024ANR_at; Start 32; Stop 56
ttatcacttcaaaattagcttgtca

SEQ ID NO: 60795 - DNA, 25 bp, Artificial
  probe
  misc_feature (1)..(25): SEQ ID NO: 546; WAN024ANR_at; Start 24; Stop 48
catttattttatcacttcaaaatta

SEQ ID NO: 60796 - DNA, 25 bp, Artificial
  probe
  misc_feature (1)..(25): SEQ ID NO: 546; WAN024ANR_at; Start 22; Stop 46
tgcatttattttatcacttcaaaat

SEQ ID NO: 60797 - DNA, 25 bp, Artificial
  probe
  misc_feature (1)..(25): SEQ ID NO: 546; WAN024ANR_at; Start 19; Stop 43
tcttgcatttattttatcacttcaa

SEQ ID NO: 60798 - DNA, 25 bp, Artificial
  probe
  misc_feature (1)..(25): SEQ ID NO: 546; WAN024ANR_at; Start 16; Stop 40
ttttcttgcatttattttatcactt

SEQ ID NO: 60799 - DNA, 25 bp, Artificial
  probe
  misc_feature (1)..(25): SEQ ID NO: 546; WAN024ANR_at; Start 28; Stop 52
tattttatcacttcaaaattagctt

SEQ ID NO: 60800 - DNA, 25 bp, Artificial
  probe
  misc_feature (1)..(25): SEQ ID NO: 546; WAN024ANR_at; Start 18; Stop 42
ttcttgcatttattttatcacttca

SEQ ID NO: 60801 - DNA, 25 bp, Artificial
  probe
  misc_feature (1)..(25): SEQ ID NO: 546; WAN024ANR_at; Start 26; Stop 50
tttattttatcacttcaaaattagc

SEQ ID NO: 60802 - DNA, 25 bp, Artificial
  probe
  misc_feature (1)..(25): SEQ ID NO: 546; WAN024ANR_at; Start 29; Stop 53
attttatcacttcaaaattagcttg

SEQ ID NO: 60803 - DNA, 25 bp, Artificial
  probe
  misc_feature (1)..(25): SEQ ID NO: 546; WAN024ANR_at; Start 33; Stop 57
tatcacttcaaaattagcttgtcaa

SEQ ID NO: 60804 - DNA, 25 bp, Artificial
  probe
  misc_feature (1)..(25): SEQ ID NO: 546; WAN024ANR_at; Start 15; Stop 39
gttttcttgcatttattttatcact

SEQ ID NO: 60805 - DNA, 25 bp, Artificial
  probe
  misc_feature (1)..(25): SEQ ID NO: 546; WAN024ANR_at; Start 17; Stop 41
tttcttgcatttattttatcacttc

SEQ ID NO: 60806 - DNA, 25 bp, Artificial
  probe
  misc_feature (1)..(25): SEQ ID NO: 546; WAN024ANR_at; Start 27; Stop 51
ttattttatcacttcaaaattagct

SEQ ID NO: 60807 - DNA, 25 bp, Artificial
  probe
  misc_feature (1)..(25): SEQ ID NO: 4368; WAN024ANS_at; Start 106; Stop 130
aattttgaagtgataaaataaatgc

SEQ ID NO: 60808 - DNA, 25 bp, Artificial
  probe
  misc_feature (1)..(25): SEQ ID NO: 4368; WAN024ANS_at; Start 111; Stop 135
tgaagtgataaaataaatgcaagaa

SEQ ID NO: 60809 - DNA, 25 bp, Artificial
  probe
  misc_feature (1)..(25): SEQ ID NO: 4368; WAN024ANS_at; Start 105; Stop 129
taattttgaagtgataaaataaatg

SEQ ID NO: 60810 - DNA, 25 bp, Artificial
  probe
  misc_feature (1)..(25): SEQ ID NO: 4368; WAN024ANS_at; Start 107; Stop 131
attttgaagtgataaaataaatgca

SEQ ID NO: 60811 - DNA, 25 bp, Artificial
  probe
  misc_feature (1)..(25): SEQ ID NO: 4368; WAN024ANS_at; Start 100; Stop 124
caagctaattttgaagtgataaaat

SEQ ID NO: 60812 - DNA, 25 bp, Artificial
  probe
  misc_feature (1)..(25): SEQ ID NO: 4368; WAN024ANS_at; Start 103; Stop 127
gctaattttgaagtgataaaataaa

SEQ ID NO: 60813 - DNA, 25 bp, Artificial
  probe
  misc_feature (1)..(25): SEQ ID NO: 4368; WAN024ANS_at; Start 108; Stop 132
ttttgaagtgataaaataaatgcaa

SEQ ID NO: 60814 - DNA, 25 bp, Artificial
  probe
  misc_feature (1)..(25): SEQ ID NO: 4368; WAN024ANS_at; Start 99; Stop 123
acaagctaattttgaagtgataaaa

SEQ ID NO: 60815 - DNA, 25 bp, Artificial
  probe
  misc_feature (1)..(25): SEQ ID NO: 4368; WAN024ANS_at; Start 110; Stop 134
ttgaagtgataaaataaatgcaaga

SEQ ID NO: 60816 - DNA, 25 bp, Artificial
  probe
  misc_feature (1)..(25): SEQ ID NO: 4368; WAN024ANS_at; Start 101; Stop 125
aagctaattttgaagtgataaaata

SEQ ID NO: 60817 - DNA, 25 bp, Artificial
  probe
  misc_feature (1)..(25): SEQ ID NO: 4368; WAN024ANS_at; Start 109; Stop 133
tttgaagtgataaaataaatgcaag

SEQ ID NO: 60818 - DNA, 25 bp, Artificial
  probe
  misc_feature (1)..(25): SEQ ID NO: 4368; WAN024ANS_at; Start 104; Stop 128
ctaattttgaagtgataaaataaat

SEQ ID NO: 60819 - DNA, 25 bp, Artificial
  probe
  misc_feature (1)..(25): SEQ ID NO: 4368; WAN024ANS_at; Start 96; Stop 120
ttgacaagctaattttgaagtgata

SEQ ID NO: 60820 - DNA, 25 bp, Artificial
  probe
  misc_feature (1)..(25): SEQ ID NO: 4368; WAN024ANS_at; Start 98; Stop 122
gacaagctaattttgaagtgataaa

SEQ ID NO: 60821 - DNA, 25 bp, Artificial
  probe
  misc_feature (1)..(25): SEQ ID NO: 4368; WAN024ANS_at; Start 102; Stop 126
agctaattttgaagtgataaaataa

SEQ ID NO: 60822 - DNA, 25 bp, Artificial
  probe
  misc_feature (1)..(25): SEQ ID NO: 4368; WAN024ANS_at; Start 97; Stop 121
tgacaagctaattttgaagtgataa

SEQ ID NO: 60823 - DNA, 25 bp, Artificial
  probe
  misc_feature (1)..(25): SEQ ID NO: 4360; WAN024ANT_at; Start 210; Stop 234
ccaactgttcccctagttctttcag

SEQ ID NO: 60824 - DNA, 25 bp, Artificial
  probe
  misc_feature (1)..(25): SEQ ID NO: 4360; WAN024ANT_at; Start 115; Stop 139
catcgtcaacttatttactttccat

SEQ ID NO: 60825 - DNA, 25 bp, Artificial
  probe
  misc_feature (1)..(25): SEQ ID NO: 4360; WAN024ANT_at; Start 182; Stop 206
cacttttcatacctatcactttcta

SEQ ID NO: 60826 - DNA, 25 bp, Artificial
  probe
  misc_feature (1)..(25): SEQ ID NO: 4360; WAN024ANT_at; Start 197; Stop 221
tcactttctaattccaactgttccc

SEQ ID NO: 60827 - DNA, 25 bp, Artificial
  probe
  misc_feature (1)..(25): SEQ ID NO: 4360; WAN024ANT_at; Start 161; Stop 185
aaacttattcagcttcaacgccact

SEQ ID NO: 60828 - DNA, 25 bp, Artificial
  probe
  misc_feature (1)..(25): SEQ ID NO: 4360; WAN024ANT_at; Start 195; Stop 219
tatcactttctaattccaactgttc

SEQ ID NO: 60829 - DNA, 25 bp, Artificial
  probe
  misc_feature (1)..(25): SEQ ID NO: 4360; WAN024ANT_at; Start 172; Stop 196
gcttcaacgccacttttcataccta

SEQ ID NO: 60830 - DNA, 25 bp, Artificial
  probe
  misc_feature (1)..(25): SEQ ID NO: 4360; WAN024ANT_at; Start 149; Stop 173
caaacgctttataaacttattcagc

SEQ ID NO: 60831 - DNA, 25 bp, Artificial
  probe
  misc_feature (1)..(25): SEQ ID NO: 4360; WAN024ANT_at; Start 164; Stop 188
cttattcagcttcaacgccactttt

SEQ ID NO: 60832 - DNA, 25 bp, Artificial
  probe
  misc_feature (1)..(25): SEQ ID NO: 4360; WAN024ANT_at; Start 133; Stop 157
tttccatttcttcattcaaacgctt

SEQ ID NO: 60833 - DNA, 25 bp, Artificial
  probe
  misc_feature (1)..(25): SEQ ID NO: 4360; WAN024ANT_at; Start 211; Stop 235
caactgttcccctagttctttcagc

SEQ ID NO: 60834 - DNA, 25 bp, Artificial
  probe
  misc_feature (1)..(25): SEQ ID NO: 4360; WAN024ANT_at; Start 158; Stop 182
tataaacttattcagcttcaacgcc

SEQ ID NO: 60835 - DNA, 25 bp, Artificial
  probe
  misc_feature (1)..(25): SEQ ID NO: 4360; WAN024ANT_at; Start 175; Stop 199
tcaacgccacttttcatacctatca

SEQ ID NO: 60836 - DNA, 25 bp, Artificial
  probe
  misc_feature (1)..(25): SEQ ID NO: 4360; WAN024ANT_at; Start 135; Stop 159
tccatttcttcattcaaacgcttta

SEQ ID NO: 60837 - DNA, 25 bp, Artificial
  probe
  misc_feature (1)..(25): SEQ ID NO: 4360; WAN024ANT_at; Start 130; Stop 154
tactttccatttcttcattcaaacg

SEQ ID NO: 60838 - DNA, 25 bp, Artificial
  probe
  misc_feature (1)..(25): SEQ ID NO: 4360; WAN024ANT_at; Start 160; Stop 184
taaacttattcagcttcaacgccac

SEQ ID NO: 60839 - DNA, 25 bp, Artificial
  probe
  misc_feature (1)..(25): SEQ ID NO: 4360; WAN024ANT_at; Start 143; Stop 167
ttcattcaaacgctttataaactta

SEQ ID NO: 60840 - DNA, 25 bp, Artificial
  probe
  misc_feature (1)..(25): SEQ ID NO: 4360; WAN024ANT_at; Start 179; Stop 203
cgccacttttcatacctatcacttt

SEQ ID NO: 60841 - DNA, 25 bp, Artificial
  probe
  misc_feature (1)..(25): SEQ ID NO: 4360; WAN024ANT_at; Start 167; Stop 191
attcagcttcaacgccacttttcat

SEQ ID NO: 60842 - DNA, 25 bp, Artificial
  probe
  misc_feature (1)..(25): SEQ ID NO: 4360; WAN024ANT_at; Start 162; Stop 186
aacttattcagcttcaacgccactt

SEQ ID NO: 60843 - DNA, 25 bp, Artificial
  probe
  misc_feature (1)..(25): SEQ ID NO: 4360; WAN024ANT_at; Start 159; Stop 183
ataaacttattcagcttcaacgcca

SEQ ID NO: 60844 - DNA, 25 bp, Artificial
  probe
  misc_feature (1)..(25): SEQ ID NO: 4360; WAN024ANT_at; Start 166; Stop 190
tattcagcttcaacgccacttttca

SEQ ID NO: 60845 - DNA, 25 bp, Artificial
  probe
  misc_feature (1)..(25): SEQ ID NO: 4360; WAN024ANT_at; Start 192; Stop 216
acctatcactttctaattccaactg

SEQ ID NO: 60846 - DNA, 25 bp, Artificial
  probe
  misc_feature (1)..(25): SEQ ID NO: 4360; WAN024ANT_at; Start 141; Stop 165
tcttcattcaaacgctttataaact

SEQ ID NO: 60847 - DNA, 25 bp, Artificial
  probe
  misc_feature (1)..(25): SEQ ID NO: 4360; WAN024ANT_at; Start 153; Stop 177
cgctttataaacttattcagcttca

SEQ ID NO: 60848 - DNA, 25 bp, Artificial
  probe
  misc_feature (1)..(25): SEQ ID NO: 4360; WAN024ANT_at; Start 110; Stop 134
taattcatcgtcaacttatttactt

SEQ ID NO: 60849 - DNA, 25 bp, Artificial
  probe
  misc_feature (1)..(25): SEQ ID NO: 4360; WAN024ANT_at; Start 174; Stop 198
ttcaacgccacttttcatacctatc

SEQ ID NO: 60850 - DNA, 25 bp, Artificial
  probe
  misc_feature (1)..(25): SEQ ID NO: 4360; WAN024ANT_at; Start 35; Stop 59
taattgtaacatgattaaatctaaa

SEQ ID NO: 60851 - DNA, 25 bp, Artificial
  probe
  misc_feature (1)..(25): SEQ ID NO: 4360; WAN024ANT_at; Start 137; Stop 161
catttcttcattcaaacgctttata

SEQ ID NO: 60852 - DNA, 25 bp, Artificial
  probe
  misc_feature (1)..(25): SEQ ID NO: 4360; WAN024ANT_at; Start 165; Stop 189
ttattcagcttcaacgccacttttc

SEQ ID NO: 60853 - DNA, 25 bp, Artificial
  probe
  misc_feature (1)..(25): SEQ ID NO: 4360; WAN024ANT_at; Start 114; Stop 138
tcatcgtcaacttatttactttcca

SEQ ID NO: 60854 - DNA, 25 bp, Artificial
  probe
  misc_feature (1)..(25): SEQ ID NO: 4360; WAN024ANT_at; Start 177; Stop 201
aacgccacttttcatacctatcact

SEQ ID NO: 60855 - DNA, 25 bp, Artificial
  probe
  misc_feature (1)..(25): SEQ ID NO: 4360; WAN024ANT_at; Start 163; Stop 187
acttattcagcttcaacgccacttt

SEQ ID NO: 60856 - DNA, 25 bp, Artificial
  probe
  misc_feature (1)..(25): SEQ ID NO: 4360; WAN024ANT_at; Start 189; Stop 213
catacctatcactttctaattccaa

SEQ ID NO: 60857 - DNA, 25 bp, Artificial
  probe
  misc_feature (1)..(25): SEQ ID NO: 548; WAN024ANU_at; Start 75; Stop 99
gctgaataagtttataaagcgtttg

SEQ ID NO: 60858 - DNA, 25 bp, Artificial
  probe
  misc_feature (1)..(25): SEQ ID NO: 548; WAN024ANU_at; Start 47; Stop 71
agtgataggtatgaaaagtggcgtt

SEQ ID NO: 60859 - DNA, 25 bp, Artificial
  probe
  misc_feature (1)..(25): SEQ ID NO: 548; WAN024ANU_at; Start 91; Stop 115
aagcgtttgaatgaagaaatggaaa

SEQ ID NO: 60860 - DNA, 25 bp, Artificial
  probe
  misc_feature (1)..(25): SEQ ID NO: 548; WAN024ANU_at; Start 32; Stop 56
cagttggaattagaaagtgataggt

SEQ ID NO: 60861 - DNA, 25 bp, Artificial
  probe
  misc_feature (1)..(25): SEQ ID NO: 548; WAN024ANU_at; Start 112; Stop 136
gaaagtaaataagttgacgatgaat

SEQ ID NO: 60862 - DNA, 25 bp, Artificial
  probe
  misc_feature (1)..(25): SEQ ID NO: 548; WAN024ANU_at; Start 114; Stop 138
aagtaaataagttgacgatgaatta

SEQ ID NO: 60863 - DNA, 25 bp, Artificial
  probe
  misc_feature (1)..(25): SEQ ID NO: 548; WAN024ANU_at; Start 65; Stop 89
tggcgttgaagctgaataagtttat

SEQ ID NO: 60864 - DNA, 25 bp, Artificial
  probe
  misc_feature (1)..(25): SEQ ID NO: 548; WAN024ANU_at; Start 58; Stop 82
tgaaaagtggcgttgaagctgaata

SEQ ID NO: 60865 - DNA, 25 bp, Artificial
  probe
  misc_feature (1)..(25): SEQ ID NO: 548; WAN024ANU_at; Start 64; Stop 88
gtggcgttgaagctgaataagttta

SEQ ID NO: 60866 - DNA, 25 bp, Artificial
  probe
  misc_feature (1)..(25): SEQ ID NO: 548; WAN024ANU_at; Start 59; Stop 83
gaaaagtggcgttgaagctgaataa

SEQ ID NO: 60867 - DNA, 25 bp, Artificial
  probe
  misc_feature (1)..(25): SEQ ID NO: 548; WAN024ANU_at; Start 29; Stop 53
gaacagttggaattagaaagtgata

SEQ ID NO: 60868 - DNA, 25 bp, Artificial
  probe
  misc_feature (1)..(25): SEQ ID NO: 548; WAN024ANU_at; Start 44; Stop 68
gaaagtgataggtatgaaaagtggc

SEQ ID NO: 60869 - DNA, 25 bp, Artificial
  probe
  misc_feature (1)..(25): SEQ ID NO: 548; WAN024ANU_at; Start 71; Stop 95
tgaagctgaataagtttataaagcg

SEQ ID NO: 60870 - DNA, 25 bp, Artificial
  probe
  misc_feature (1)..(25): SEQ ID NO: 548; WAN024ANU_at; Start 38; Stop 62
gaattagaaagtgataggtatgaaa

SEQ ID NO: 60871 - DNA, 25 bp, Artificial
  probe
  misc_feature (1)..(25): SEQ ID NO: 548; WAN024ANU_at; Start 89; Stop 113
taaagcgtttgaatgaagaaatgga

SEQ ID NO: 60872 - DNA, 25 bp, Artificial
  probe
  misc_feature (1)..(25): SEQ ID NO: 548; WAN024ANU_at; Start 60; Stop 84
aaaagtggcgttgaagctgaataag

SEQ ID NO: 60873 - DNA, 25 bp, Artificial
  probe
  misc_feature (1)..(25): SEQ ID NO: 548; WAN024ANU_at; Start 49; Stop 73
tgataggtatgaaaagtggcgttga

SEQ ID NO: 60874 - DNA, 25 bp, Artificial
  probe
  misc_feature (1)..(25): SEQ ID NO: 548; WAN024ANU_at; Start 93; Stop 117
gcgtttgaatgaagaaatggaaagt

SEQ ID NO: 60875 - DNA, 25 bp, Artificial
  probe
  misc_feature (1)..(25): SEQ ID NO: 548; WAN024ANU_at; Start 61; Stop 85
aaagtggcgttgaagctgaataagt

SEQ ID NO: 60876 - DNA, 25 bp, Artificial
  probe
  misc_feature (1)..(25): SEQ ID NO: 548; WAN024ANU_at; Start 53; Stop 77
aggtatgaaaagtggcgttgaagct

SEQ ID NO: 60877 - DNA, 25 bp, Artificial
  probe
  misc_feature (1)..(25): SEQ ID NO: 548; WAN024ANU_at; Start 94; Stop 118
cgtttgaatgaagaaatggaaagta

SEQ ID NO: 60878 - DNA, 25 bp, Artificial
  probe
  misc_feature (1)..(25): SEQ ID NO: 548; WAN024ANU_at; Start 13; Stop 37
gctgaaagaactaggggaacagttg

SEQ ID NO: 60879 - DNA, 25 bp, Artificial
  probe
  misc_feature (1)..(25): SEQ ID NO: 548; WAN024ANU_at; Start 81; Stop 105
taagtttataaagcgtttgaatgaa

SEQ ID NO: 60880 - DNA, 25 bp, Artificial
  probe
  misc_feature (1)..(25): SEQ ID NO: 548; WAN024ANU_at; Start 110; Stop 134
tggaaagtaaataagttgacgatga

SEQ ID NO: 60881 - DNA, 25 bp, Artificial
  probe
  misc_feature (1)..(25): SEQ ID NO: 548; WAN024ANU_at; Start 36; Stop 60
tggaattagaaagtgataggtatga

SEQ ID NO: 60882 - DNA, 25 bp, Artificial
  probe
  misc_feature (1)..(25): SEQ ID NO: 548; WAN024ANU_at; Start 63; Stop 87
agtggcgttgaagctgaataagttt

SEQ ID NO: 60883 - DNA, 25 bp, Artificial
  probe
  misc_feature (1)..(25): SEQ ID NO: 548; WAN024ANU_at; Start 45; Stop 69
aaagtgataggtatgaaaagtggcg

SEQ ID NO: 60884 - DNA, 25 bp, Artificial
  probe
  misc_feature (1)..(25): SEQ ID NO: 548; WAN024ANU_at; Start 27; Stop 51
gggaacagttggaattagaaagtga

SEQ ID NO: 60885 - DNA, 25 bp, Artificial
  probe
  misc_feature (1)..(25): SEQ ID NO: 548; WAN024ANU_at; Start 52; Stop 76
taggtatgaaaagtggcgttgaagc

SEQ ID NO: 60886 - DNA, 25 bp, Artificial
  probe
  misc_feature (1)..(25): SEQ ID NO: 548; WAN024ANU_at; Start 98; Stop 122
tgaatgaagaaatggaaagtaaata

SEQ ID NO: 60887 - DNA, 25 bp, Artificial
  probe
  misc_feature (1)..(25): SEQ ID NO: 548; WAN024ANU_at; Start 72; Stop 96
gaagctgaataagtttataaagcgt

SEQ ID NO: 60888 - DNA, 25 bp, Artificial
  probe
  misc_feature (1)..(25): SEQ ID NO: 548; WAN024ANU_at; Start 50; Stop 74
gataggtatgaaaagtggcgttgaa

SEQ ID NO: 60889 - DNA, 25 bp, Artificial
  probe
  misc_feature (1)..(25): SEQ ID NO: 548; WAN024ANU_at; Start 87; Stop 111
tataaagcgtttgaatgaagaaatg

SEQ ID NO: 60890 - DNA, 25 bp, Artificial
  probe
  misc_feature (1)..(25): SEQ ID NO: 548; WAN024ANU_at; Start 67; Stop 91
gcgttgaagctgaataagtttataa

SEQ ID NO: 60891 - DNA, 25 bp, Artificial
  probe
  misc_feature (1)..(25): SEQ ID NO: 3479; WAN024ANV_at; Start 68; Stop 92
ctcttaaaatcttagcgccaaaaag

SEQ ID NO: 60892 - DNA, 25 bp, Artificial
  probe
  misc_feature (1)..(25): SEQ ID NO: 3479; WAN024ANV_at; Start 76; Stop 100
atcttagcgccaaaaagattcctat

SEQ ID NO: 60893 - DNA, 25 bp, Artificial
  probe
  misc_feature (1)..(25): SEQ ID NO: 3479; WAN024ANV_at; Start 32; Stop 56
attttatcataaatcaagcccttct

SEQ ID NO: 60894 - DNA, 25 bp, Artificial
  probe
  misc_feature (1)..(25): SEQ ID NO: 3479; WAN024ANV_at; Start 80; Stop 104
tagcgccaaaaagattcctatccta

SEQ ID NO: 60895 - DNA, 25 bp, Artificial
  probe
  misc_feature (1)..(25): SEQ ID NO: 3479; WAN024ANV_at; Start 10; Stop 34
ttcattcgcttcttagacttctatt

SEQ ID NO: 60896 - DNA, 25 bp, Artificial
  probe
  misc_feature (1)..(25): SEQ ID NO: 3479; WAN024ANV_at; Start 36; Stop 60
tatcataaatcaagcccttcttgca

SEQ ID NO: 60897 - DNA, 25 bp, Artificial
  probe
  misc_feature (1)..(25): SEQ ID NO: 3479; WAN024ANV_at; Start 9; Stop 33
cttcattcgcttcttagacttctat

SEQ ID NO: 60898 - DNA, 25 bp, Artificial
  probe
  misc_feature (1)..(25): SEQ ID NO: 3479; WAN024ANV_at; Start 42; Stop 66
aaatcaagcccttcttgcagtctct

SEQ ID NO: 60899 - DNA, 25 bp, Artificial
  probe
  misc_feature (1)..(25): SEQ ID NO: 3479; WAN024ANV_at; Start 6; Stop 30
tctcttcattcgcttcttagacttc

SEQ ID NO: 60900 - DNA, 25 bp, Artificial
  probe
  misc_feature (1)..(25): SEQ ID NO: 3479; WAN024ANV_at; Start 37; Stop 61
atcataaatcaagcccttcttgcag

SEQ ID NO: 60901 - DNA, 25 bp, Artificial
  probe
  misc_feature (1)..(25): SEQ ID NO: 3479; WAN024ANV_at; Start 3; Stop 27
tactctcttcattcgcttcttagac

SEQ ID NO: 60902 - DNA, 25 bp, Artificial
  probe
  misc_feature (1)..(25): SEQ ID NO: 3479; WAN024ANV_at; Start 17; Stop 41
gcttcttagacttctattttatcat

SEQ ID NO: 60903 - DNA, 25 bp, Artificial
  probe
  misc_feature (1)..(25): SEQ ID NO: 3479; WAN024ANV_at; Start 34; Stop 58
tttatcataaatcaagcccttcttg

SEQ ID NO: 60904 - DNA, 25 bp, Artificial
  probe
  misc_feature (1)..(25): SEQ ID NO: 3479; WAN024ANV_at; Start 4; Stop 28
actctcttcattcgcttcttagact

SEQ ID NO: 60905 - DNA, 25 bp, Artificial
  probe
  misc_feature (1)..(25): SEQ ID NO: 3479; WAN024ANV_at; Start 79; Stop 103
ttagcgccaaaaagattcctatcct

SEQ ID NO: 60906 - DNA, 25 bp, Artificial
  probe
  misc_feature (1)..(25): SEQ ID NO: 3479; WAN024ANV_at; Start 75; Stop 99
aatcttagcgccaaaaagattccta

SEQ ID NO: 60907 - DNA, 25 bp, Artificial
  probe
  misc_feature (1)..(25): SEQ ID NO: 3479; WAN024ANV_at; Start 12; Stop 36
cattcgcttcttagacttctatttt

SEQ ID NO: 60908 - DNA, 25 bp, Artificial
  probe
  misc_feature (1)..(25): SEQ ID NO: 3479; WAN024ANV_at; Start 74; Stop 98
aaatcttagcgccaaaaagattcct

SEQ ID NO: 60909 - DNA, 25 bp, Artificial
  probe
  misc_feature (1)..(25): SEQ ID NO: 3479; WAN024ANV_at; Start 2; Stop 26
ttactctcttcattcgcttcttaga

SEQ ID NO: 60910 - DNA, 25 bp, Artificial
  probe
  misc_feature (1)..(25): SEQ ID NO: 3479; WAN024ANV_at; Start 38; Stop 62
tcataaatcaagcccttcttgcagt

SEQ ID NO: 60911 - DNA, 25 bp, Artificial
  probe
  misc_feature (1)..(25): SEQ ID NO: 3479; WAN024ANV_at; Start 31; Stop 55
tattttatcataaatcaagcccttc

SEQ ID NO: 60912 - DNA, 25 bp, Artificial
  probe
  misc_feature (1)..(25): SEQ ID NO: 3479; WAN024ANV_at; Start 7; Stop 31
ctcttcattcgcttcttagacttct

SEQ ID NO: 60913 - DNA, 25 bp, Artificial
  probe
  misc_feature (1)..(25): SEQ ID NO: 3479; WAN024ANV_at; Start 16; Stop 40
cgcttcttagacttctattttatca

SEQ ID NO: 60914 - DNA, 25 bp, Artificial
  probe
  misc_feature (1)..(25): SEQ ID NO: 3479; WAN024ANV_at; Start 35; Stop 59
ttatcataaatcaagcccttcttgc

SEQ ID NO: 60915 - DNA, 25 bp, Artificial
  probe
  misc_feature (1)..(25): SEQ ID NO: 3479; WAN024ANV_at; Start 11; Stop 35
tcattcgcttcttagacttctattt

SEQ ID NO: 60916 - DNA, 25 bp, Artificial
  probe
  misc_feature (1)..(25): SEQ ID NO: 3479; WAN024ANV_at; Start 33; Stop 57
ttttatcataaatcaagcccttctt

SEQ ID NO: 60917 - DNA, 25 bp, Artificial
  probe
  misc_feature (1)..(25): SEQ ID NO: 3479; WAN024ANV_at; Start 8; Stop 32
tcttcattcgcttcttagacttcta

SEQ ID NO: 60918 - DNA, 25 bp, Artificial
  probe
  misc_feature (1)..(25): SEQ ID NO: 3479; WAN024ANV_at; Start 69; Stop 93
tcttaaaatcttagcgccaaaaaga

SEQ ID NO: 60919 - DNA, 25 bp, Artificial
  probe
  misc_feature (1)..(25): SEQ ID NO: 3479; WAN024ANV_at; Start 40; Stop 64
ataaatcaagcccttcttgcagtct

SEQ ID NO: 60920 - DNA, 25 bp, Artificial
  probe
  misc_feature (1)..(25): SEQ ID NO: 3479; WAN024ANV_at; Start 70; Stop 94
cttaaaatcttagcgccaaaaagat

SEQ ID NO: 60921 - DNA, 25 bp, Artificial
  probe
  misc_feature (1)..(25): SEQ ID NO: 3479; WAN024ANV_at; Start 1; Stop 25
cttactctcttcattcgcttcttag

SEQ ID NO: 60922 - DNA, 25 bp, Artificial
  probe
  misc_feature (1)..(25): SEQ ID NO: 3479; WAN024ANV_at; Start 78; Stop 102
cttagcgccaaaaagattcctatcc

SEQ ID NO: 60923 - DNA, 25 bp, Artificial
  probe
  misc_feature (1)..(25): SEQ ID NO: 3479; WAN024ANV_at; Start 41; Stop 65
taaatcaagcccttcttgcagtctc

SEQ ID NO: 60924 - DNA, 25 bp, Artificial
  probe
  misc_feature (1)..(25): SEQ ID NO: 3479; WAN024ANV_at; Start 77; Stop 101
tcttagcgccaaaaagattcctatc

SEQ ID NO: 60925 - DNA, 25 bp, Artificial
  probe
  misc_feature (1)..(25): SEQ ID NO: 4517; WAN024ANW_at; Start 68; Stop 92
taaaatagaagtctaagaagcgaat

SEQ ID NO: 60926 - DNA, 25 bp, Artificial
  probe
  misc_feature (1)..(25): SEQ ID NO: 4517; WAN024ANW_at; Start 71; Stop 95
aatagaagtctaagaagcgaatgaa

SEQ ID NO: 60927 - DNA, 25 bp, Artificial
  probe
  misc_feature (1)..(25): SEQ ID NO: 4517; WAN024ANW_at; Start 11; Stop 35
atctttttggcgctaagattttaag

SEQ ID NO: 60928 - DNA, 25 bp, Artificial
  probe
  misc_feature (1)..(25): SEQ ID NO: 4517; WAN024ANW_at; Start 72; Stop 96
atagaagtctaagaagcgaatgaag

SEQ ID NO: 60929 - DNA, 25 bp, Artificial
  probe
  misc_feature (1)..(25): SEQ ID NO: 4517; WAN024ANW_at; Start 5; Stop 29
ataggaatctttttggcgctaagat

SEQ ID NO: 60930 - DNA, 25 bp, Artificial
  probe
  misc_feature (1)..(25): SEQ ID NO: 4517; WAN024ANW_at; Start 73; Stop 97
tagaagtctaagaagcgaatgaaga

SEQ ID NO: 60931 - DNA, 25 bp, Artificial
  probe
  misc_feature (1)..(25): SEQ ID NO: 4517; WAN024ANW_at; Start 48; Stop 72
aagaagggcttgatttatgataaaa

SEQ ID NO: 60932 - DNA, 25 bp, Artificial
  probe
  misc_feature (1)..(25): SEQ ID NO: 4517; WAN024ANW_at; Start 13; Stop 37
ctttttggcgctaagattttaagag

SEQ ID NO: 60933 - DNA, 25 bp, Artificial
  probe
  misc_feature (1)..(25): SEQ ID NO: 4517; WAN024ANW_at; Start 66; Stop 90
gataaaatagaagtctaagaagcga

SEQ ID NO: 60934 - DNA, 25 bp, Artificial
  probe
  misc_feature (1)..(25): SEQ ID NO: 4517; WAN024ANW_at; Start 47; Stop 71
caagaagggcttgatttatgataaa

SEQ ID NO: 60935 - DNA, 25 bp, Artificial
  probe
  misc_feature (1)..(25): SEQ ID NO: 4517; WAN024ANW_at; Start 80; Stop 104
ctaagaagcgaatgaagagagtaag

SEQ ID NO: 60936 - DNA, 25 bp, Artificial
  probe
  misc_feature (1)..(25): SEQ ID NO: 4517; WAN024ANW_at; Start 6; Stop 30
taggaatctttttggcgctaagatt

SEQ ID NO: 60937 - DNA, 25 bp, Artificial
  probe
  misc_feature (1)..(25): SEQ ID NO: 4517; WAN024ANW_at; Start 78; Stop 102
gtctaagaagcgaatgaagagagta

SEQ ID NO: 60938 - DNA, 25 bp, Artificial
  probe
  misc_feature (1)..(25): SEQ ID NO: 4517; WAN024ANW_at; Start 53; Stop 77
gggcttgatttatgataaaatagaa

SEQ ID NO: 60939 - DNA, 25 bp, Artificial
  probe
  misc_feature (1)..(25): SEQ ID NO: 4517; WAN024ANW_at; Start 3; Stop 27
ggataggaatctttttggcgctaag

SEQ ID NO: 60940 - DNA, 25 bp, Artificial
  probe
  misc_feature (1)..(25): SEQ ID NO: 4517; WAN024ANW_at; Start 40; Stop 64
gagactgcaagaagggcttgattta

SEQ ID NO: 60941 - DNA, 25 bp, Artificial
  probe
  misc_feature (1)..(25): SEQ ID NO: 4517; WAN024ANW_at; Start 4; Stop 28
gataggaatctttttggcgctaaga

SEQ ID NO: 60942 - DNA, 25 bp, Artificial
  probe
  misc_feature (1)..(25): SEQ ID NO: 4517; WAN024ANW_at; Start 46; Stop 70
gcaagaagggcttgatttatgataa

SEQ ID NO: 60943 - DNA, 25 bp, Artificial
  probe
  misc_feature (1)..(25): SEQ ID NO: 4517; WAN024ANW_at; Start 74; Stop 98
agaagtctaagaagcgaatgaagag

SEQ ID NO: 60944 - DNA, 25 bp, Artificial
  probe
  misc_feature (1)..(25): SEQ ID NO: 4517; WAN024ANW_at; Start 69; Stop 93
aaaatagaagtctaagaagcgaatg

SEQ ID NO: 60945 - DNA, 25 bp, Artificial
  probe
  misc_feature (1)..(25): SEQ ID NO: 4517; WAN024ANW_at; Start 49; Stop 73
agaagggcttgatttatgataaaat

SEQ ID NO: 60946 - DNA, 25 bp, Artificial
  probe
  misc_feature (1)..(25): SEQ ID NO: 4517; WAN024ANW_at; Start 77; Stop 101
agtctaagaagcgaatgaagagagt

SEQ ID NO: 60947 - DNA, 25 bp, Artificial
  probe
  misc_feature (1)..(25): SEQ ID NO: 4517; WAN024ANW_at; Start 70; Stop 94
aaatagaagtctaagaagcgaatga

SEQ ID NO: 60948 - DNA, 25 bp, Artificial
  probe
  misc_feature (1)..(25): SEQ ID NO: 4517; WAN024ANW_at; Start 39; Stop 63
agagactgcaagaagggcttgattt

SEQ ID NO: 60949 - DNA, 25 bp, Artificial
  probe
  misc_feature (1)..(25): SEQ ID NO: 4517; WAN024ANW_at; Start 65; Stop 89
tgataaaatagaagtctaagaagcg

SEQ ID NO: 60950 - DNA, 25 bp, Artificial
  probe
  misc_feature (1)..(25): SEQ ID NO: 4517; WAN024ANW_at; Start 45; Stop 69
tgcaagaagggcttgatttatgata

SEQ ID NO: 60951 - DNA, 25 bp, Artificial
  probe
  misc_feature (1)..(25): SEQ ID NO: 4517; WAN024ANW_at; Start 41; Stop 65
agactgcaagaagggcttgatttat

SEQ ID NO: 60952 - DNA, 25 bp, Artificial
  probe
  misc_feature (1)..(25): SEQ ID NO: 4517; WAN024ANW_at; Start 2; Stop 26
aggataggaatctttttggcgctaa

SEQ ID NO: 60953 - DNA, 25 bp, Artificial
  probe
  misc_feature (1)..(25): SEQ ID NO: 4517; WAN024ANW_at; Start 79; Stop 103
tctaagaagcgaatgaagagagtaa

SEQ ID NO: 60954 - DNA, 25 bp, Artificial
  probe
  misc_feature (1)..(25): SEQ ID NO: 4517; WAN024ANW_at; Start 12; Stop 36
tctttttggcgctaagattttaaga

SEQ ID NO: 60955 - DNA, 25 bp, Artificial
  probe
  misc_feature (1)..(25): SEQ ID NO: 4517; WAN024ANW_at; Start 7; Stop 31
aggaatctttttggcgctaagattt

SEQ ID NO: 60956 - DNA, 25 bp, Artificial
  probe
  misc_feature (1)..(25): SEQ ID NO: 4517; WAN024ANW_at; Start 1; Stop 25
taggataggaatctttttggcgcta

SEQ ID NO: 60957 - DNA, 25 bp, Artificial
  probe
  misc_feature (1)..(25): SEQ ID NO: 4517; WAN024ANW_at; Start 50; Stop 74
gaagggcttgatttatgataaaata

SEQ ID NO: 60958 - DNA, 25 bp, Artificial
  probe
  misc_feature (1)..(25): SEQ ID NO: 4517; WAN024ANW_at; Start 75; Stop 99
gaagtctaagaagcgaatgaagaga

SEQ ID NO: 60959 - DNA, 25 bp, Artificial
  probe
  misc_feature (1)..(25): SEQ ID NO: 348; WAN024ANX_at; Start 12; Stop 36
gagaaagtcgctaatagctatttca

SEQ ID NO: 60960 - DNA, 25 bp, Artificial
  probe
  misc_feature (1)..(25): SEQ ID NO: 348; WAN024ANX_at; Start 11; Stop 35
agagaaagtcgctaatagctatttc

SEQ ID NO: 60961 - DNA, 25 bp, Artificial
  probe
  misc_feature (1)..(25): SEQ ID NO: 348; WAN024ANX_at; Start 15; Stop 39
aaagtcgctaatagctatttcaatt

SEQ ID NO: 60962 - DNA, 25 bp, Artificial
  probe
  misc_feature (1)..(25): SEQ ID NO: 348; WAN024ANX_at; Start 17; Stop 41
agtcgctaatagctatttcaattgg

SEQ ID NO: 60963 - DNA, 25 bp, Artificial
  probe
  misc_feature (1)..(25): SEQ ID NO: 348; WAN024ANX_at; Start 1; Stop 25
accatatttcagagaaagtcgctaa

SEQ ID NO: 60964 - DNA, 25 bp, Artificial
  probe
  misc_feature (1)..(25): SEQ ID NO: 348; WAN024ANX_at; Start 25; Stop 49
atagctatttcaattggttagggta

SEQ ID NO: 60965 - DNA, 25 bp, Artificial
  probe
  misc_feature (1)..(25): SEQ ID NO: 348; WAN024ANX_at; Start 27; Stop 51
agctatttcaattggttagggtata

SEQ ID NO: 60966 - DNA, 25 bp, Artificial
  probe
  misc_feature (1)..(25): SEQ ID NO: 348; WAN024ANX_at; Start 6; Stop 30
atttcagagaaagtcgctaatagct

SEQ ID NO: 60967 - DNA, 25 bp, Artificial
  probe
  misc_feature (1)..(25): SEQ ID NO: 348; WAN024ANX_at; Start 24; Stop 48
aatagctatttcaattggttagggt

SEQ ID NO: 60968 - DNA, 25 bp, Artificial
  probe
  misc_feature (1)..(25): SEQ ID NO: 348; WAN024ANX_at; Start 16; Stop 40
aagtcgctaatagctatttcaattg

SEQ ID NO: 60969 - DNA, 25 bp, Artificial
  probe
  misc_feature (1)..(25): SEQ ID NO: 348; WAN024ANX_at; Start 13; Stop 37
agaaagtcgctaatagctatttcaa

SEQ ID NO: 60970 - DNA, 25 bp, Artificial
  probe
  misc_feature (1)..(25): SEQ ID NO: 348; WAN024ANX_at; Start 26; Stop 50
tagctatttcaattggttagggtat

SEQ ID NO: 60971 - DNA, 25 bp, Artificial
  probe
  misc_feature (1)..(25): SEQ ID NO: 348; WAN024ANX_at; Start 29; Stop 53
ctatttcaattggttagggtatagt

SEQ ID NO: 60972 - DNA, 25 bp, Artificial
  probe
  misc_feature (1)..(25): SEQ ID NO: 348; WAN024ANX_at; Start 2; Stop 26
ccatatttcagagaaagtcgctaat

SEQ ID NO: 60973 - DNA, 25 bp, Artificial
  probe
  misc_feature (1)..(25): SEQ ID NO: 348; WAN024ANX_at; Start 19; Stop 43
tcgctaatagctatttcaattggtt

SEQ ID NO: 60974 - DNA, 25 bp, Artificial
  probe
  misc_feature (1)..(25): SEQ ID NO: 348; WAN024ANX_at; Start 3; Stop 27
catatttcagagaaagtcgctaata

SEQ ID NO: 60975 - DNA, 25 bp, Artificial
  probe
  misc_feature (1)..(25): SEQ ID NO: 348; WAN024ANX_at; Start 21; Stop 45
gctaatagctatttcaattggttag

SEQ ID NO: 60976 - DNA, 25 bp, Artificial
  probe
  misc_feature (1)..(25): SEQ ID NO: 348; WAN024ANX_at; Start 9; Stop 33
tcagagaaagtcgctaatagctatt

SEQ ID NO: 60977 - DNA, 25 bp, Artificial
  probe
  misc_feature (1)..(25): SEQ ID NO: 348; WAN024ANX_at; Start 4; Stop 28
atatttcagagaaagtcgctaatag

SEQ ID NO: 60978 - DNA, 25 bp, Artificial
  probe
  misc_feature (1)..(25): SEQ ID NO: 348; WAN024ANX_at; Start 7; Stop 31
tttcagagaaagtcgctaatagcta

SEQ ID NO: 60979 - DNA, 25 bp, Artificial
  probe
  misc_feature (1)..(25): SEQ ID NO: 348; WAN024ANX_at; Start 23; Stop 47
taatagctatttcaattggttaggg

SEQ ID NO: 60980 - DNA, 25 bp, Artificial
  probe
  misc_feature (1)..(25): SEQ ID NO: 348; WAN024ANX_at; Start 10; Stop 34
cagagaaagtcgctaatagctattt

SEQ ID NO: 60981 - DNA, 25 bp, Artificial
  probe
  misc_feature (1)..(25): SEQ ID NO: 348; WAN024ANX_at; Start 28; Stop 52
gctatttcaattggttagggtatag

SEQ ID NO: 60982 - DNA, 25 bp, Artificial
  probe
  misc_feature (1)..(25): SEQ ID NO: 348; WAN024ANX_at; Start 5; Stop 29
tatttcagagaaagtcgctaatagc

SEQ ID NO: 60983 - DNA, 25 bp, Artificial
  probe
  misc_feature (1)..(25): SEQ ID NO: 348; WAN024ANX_at; Start 22; Stop 46
ctaatagctatttcaattggttagg

SEQ ID NO: 60984 - DNA, 25 bp, Artificial
  probe
  misc_feature (1)..(25): SEQ ID NO: 348; WAN024ANX_at; Start 8; Stop 32
ttcagagaaagtcgctaatagctat

SEQ ID NO: 60985 - DNA, 25 bp, Artificial
  probe
  misc_feature (1)..(25): SEQ ID NO: 348; WAN024ANX_at; Start 18; Stop 42
gtcgctaatagctatttcaattggt

SEQ ID NO: 60986 - DNA, 25 bp, Artificial
  probe
  misc_feature (1)..(25): SEQ ID NO: 348; WAN024ANX_at; Start 20; Stop 44
cgctaatagctatttcaattggtta

SEQ ID NO: 60987 - DNA, 25 bp, Artificial
  probe
  misc_feature (1)..(25): SEQ ID NO: 348; WAN024ANX_at; Start 14; Stop 38
gaaagtcgctaatagctatttcaat

SEQ ID NO: 60988 - DNA, 25 bp, Artificial
  probe
  misc_feature (1)..(25): SEQ ID NO: 3289; WAN024ANY_at; Start 85; Stop 109
ataccctaaccaattgaaatagcta

SEQ ID NO: 60989 - DNA, 25 bp, Artificial
  probe
  misc_feature (1)..(25): SEQ ID NO: 3289; WAN024ANY_at; Start 95; Stop 119
caattgaaatagctattagcgactt

SEQ ID NO: 60990 - DNA, 25 bp, Artificial
  probe
  misc_feature (1)..(25): SEQ ID NO: 3289; WAN024ANY_at; Start 110; Stop 134
ttagcgactttctctgaaatatggt

SEQ ID NO: 60991 - DNA, 25 bp, Artificial
  probe
  misc_feature (1)..(25): SEQ ID NO: 3289; WAN024ANY_at; Start 88; Stop 112
ccctaaccaattgaaatagctatta

SEQ ID NO: 60992 - DNA, 25 bp, Artificial
  probe
  misc_feature (1)..(25): SEQ ID NO: 3289; WAN024ANY_at; Start 105; Stop 129
agctattagcgactttctctgaaat

SEQ ID NO: 60993 - DNA, 25 bp, Artificial
  probe
  misc_feature (1)..(25): SEQ ID NO: 3289; WAN024ANY_at; Start 102; Stop 126
aatagctattagcgactttctctga

SEQ ID NO: 60994 - DNA, 25 bp, Artificial
  probe
  misc_feature (1)..(25): SEQ ID NO: 3289; WAN024ANY_at; Start 99; Stop 123
tgaaatagctattagcgactttctc

SEQ ID NO: 60995 - DNA, 25 bp, Artificial
  probe
  misc_feature (1)..(25): SEQ ID NO: 3289; WAN024ANY_at; Start 91; Stop 115
taaccaattgaaatagctattagcg

SEQ ID NO: 60996 - DNA, 25 bp, Artificial
  probe
  misc_feature (1)..(25): SEQ ID NO: 3289; WAN024ANY_at; Start 90; Stop 114
ctaaccaattgaaatagctattagc

SEQ ID NO: 60997 - DNA, 25 bp, Artificial
  probe
  misc_feature (1)..(25): SEQ ID NO: 3289; WAN024ANY_at; Start 97; Stop 121
attgaaatagctattagcgactttc

SEQ ID NO: 60998 - DNA, 25 bp, Artificial
  probe
  misc_feature (1)..(25): SEQ ID NO: 3289; WAN024ANY_at; Start 83; Stop 107
ctataccctaaccaattgaaatagc

SEQ ID NO: 60999 - DNA, 25 bp, Artificial
  probe
  misc_feature (1)..(25): SEQ ID NO: 3289; WAN024ANY_at; Start 109; Stop 133
attagcgactttctctgaaatatgg

SEQ ID NO: 61000 - DNA, 25 bp, Artificial
  probe
  misc_feature (1)..(25): SEQ ID NO: 3289; WAN024ANY_at; Start 100; Stop 124
gaaatagctattagcgactttctct

SEQ ID NO: 61001 - DNA, 25 bp, Artificial
  probe
  misc_feature (1)..(25): SEQ ID NO: 3289; WAN024ANY_at; Start 108; Stop 132
tattagcgactttctctgaaatatg

SEQ ID NO: 61002 - DNA, 25 bp, Artificial
  probe
  misc_feature (1)..(25): SEQ ID NO: 3289; WAN024ANY_at; Start 87; Stop 111
accctaaccaattgaaatagctatt

SEQ ID NO: 61003 - DNA, 25 bp, Artificial
  probe
  misc_feature (1)..(25): SEQ ID NO: 3289; WAN024ANY_at; Start 101; Stop 125
aaatagctattagcgactttctctg

SEQ ID NO: 61004 - DNA, 25 bp, Artificial
  probe
  misc_feature (1)..(25): SEQ ID NO: 3289; WAN024ANY_at; Start 94; Stop 118
ccaattgaaatagctattagcgact

SEQ ID NO: 61005 - DNA, 25 bp, Artificial
  probe
  misc_feature (1)..(25): SEQ ID NO: 3289; WAN024ANY_at; Start 96; Stop 120
aattgaaatagctattagcgacttt

SEQ ID NO: 61006 - DNA, 25 bp, Artificial
  probe
  misc_feature (1)..(25): SEQ ID NO: 3289; WAN024ANY_at; Start 93; Stop 117
accaattgaaatagctattagcgac

SEQ ID NO: 61007 - DNA, 25 bp, Artificial
  probe
  misc_feature (1)..(25): SEQ ID NO: 3289; WAN024ANY_at; Start 89; Stop 113
cctaaccaattgaaatagctattag

SEQ ID NO: 61008 - DNA, 25 bp, Artificial
  probe
  misc_feature (1)..(25): SEQ ID NO: 3289; WAN024ANY_at; Start 98; Stop 122
ttgaaatagctattagcgactttct

SEQ ID NO: 61009 - DNA, 25 bp, Artificial
  probe
  misc_feature (1)..(25): SEQ ID NO: 3289; WAN024ANY_at; Start 104; Stop 128
tagctattagcgactttctctgaaa

SEQ ID NO: 61010 - DNA, 25 bp, Artificial
  probe
  misc_feature (1)..(25): SEQ ID NO: 3289; WAN024ANY_at; Start 82; Stop 106
actataccctaaccaattgaaatag

SEQ ID NO: 61011 - DNA, 25 bp, Artificial
  probe
  misc_feature (1)..(25): SEQ ID NO: 3289; WAN024ANY_at; Start 86; Stop 110
taccctaaccaattgaaatagctat

SEQ ID NO: 61012 - DNA, 25 bp, Artificial
  probe
  misc_feature (1)..(25): SEQ ID NO: 3289; WAN024ANY_at; Start 84; Stop 108
tataccctaaccaattgaaatagct

SEQ ID NO: 61013 - DNA, 25 bp, Artificial
  probe
  misc_feature (1)..(25): SEQ ID NO: 3289; WAN024ANY_at; Start 92; Stop 116
aaccaattgaaatagctattagcga

SEQ ID NO: 61014 - DNA, 25 bp, Artificial
  probe
  misc_feature (1)..(25): SEQ ID NO: 3289; WAN024ANY_at; Start 107; Stop 131
ctattagcgactttctctgaaatat

SEQ ID NO: 61015 - DNA, 25 bp, Artificial
  probe
  misc_feature (1)..(25): SEQ ID NO: 3289; WAN024ANY_at; Start 106; Stop 130
gctattagcgactttctctgaaata

SEQ ID NO: 61016 - DNA, 25 bp, Artificial
  probe
  misc_feature (1)..(25): SEQ ID NO: 3289; WAN024ANY_at; Start 103; Stop 127
atagctattagcgactttctctgaa

SEQ ID NO: 61017 - DNA, 25 bp, Artificial
  probe
  misc_feature (1)..(25): SEQ ID NO: 75; WAN024AO2_at; Start 8; Stop 32
ctcctataaaaaattcaacctcata

SEQ ID NO: 61018 - DNA, 25 bp, Artificial
  probe
  misc_feature (1)..(25): SEQ ID NO: 75; WAN024AO2_at; Start 26; Stop 50
cctcatatttaaaacatattaaaca

SEQ ID NO: 61019 - DNA, 25 bp, Artificial
  probe
  misc_feature (1)..(25): SEQ ID NO: 75; WAN024AO2_at; Start 11; Stop 35
ctataaaaaattcaacctcatattt

SEQ ID NO: 61020 - DNA, 25 bp, Artificial
  probe
  misc_feature (1)..(25): SEQ ID NO: 75; WAN024AO2_at; Start 35; Stop 59
taaaacatattaaacatcagtcaaa

SEQ ID NO: 61021 - DNA, 25 bp, Artificial
  probe
  misc_feature (1)..(25): SEQ ID NO: 75; WAN024AO2_at; Start 20; Stop 44
attcaacctcatatttaaaacatat

SEQ ID NO: 61022 - DNA, 25 bp, Artificial
  probe
  misc_feature (1)..(25): SEQ ID NO: 75; WAN024AO2_at; Start 44; Stop 68
ttaaacatcagtcaaatcgctaacc

SEQ ID NO: 61023 - DNA, 25 bp, Artificial
  probe
  misc_feature (1)..(25): SEQ ID NO: 75; WAN024AO2_at; Start 38; Stop 62
aacatattaaacatcagtcaaatcg

SEQ ID NO: 61024 - DNA, 25 bp, Artificial
  probe
  misc_feature (1)..(25): SEQ ID NO: 75; WAN024AO2_at; Start 39; Stop 63
acatattaaacatcagtcaaatcgc

SEQ ID NO: 61025 - DNA, 25 bp, Artificial
  probe
  misc_feature (1)..(25): SEQ ID NO: 75; WAN024AO2_at; Start 37; Stop 61
aaacatattaaacatcagtcaaatc

SEQ ID NO: 61026 - DNA, 25 bp, Artificial
  probe
  misc_feature (1)..(25): SEQ ID NO: 75; WAN024AO2_at; Start 34; Stop 58
ttaaaacatattaaacatcagtcaa

SEQ ID NO: 61027 - DNA, 25 bp, Artificial
  probe
  misc_feature (1)..(25): SEQ ID NO: 75; WAN024AO2_at; Start 29; Stop 53
catatttaaaacatattaaacatca

SEQ ID NO: 61028 - DNA, 25 bp, Artificial
  probe
  misc_feature (1)..(25): SEQ ID NO: 75; WAN024AO2_at; Start 32; Stop 56
atttaaaacatattaaacatcagtc

SEQ ID NO: 61029 - DNA, 25 bp, Artificial
  probe
  misc_feature (1)..(25): SEQ ID NO: 75; WAN024AO2_at; Start 33; Stop 57
tttaaaacatattaaacatcagtca

SEQ ID NO: 61030 - DNA, 25 bp, Artificial
  probe
  misc_feature (1)..(25): SEQ ID NO: 75; WAN024AO2_at; Start 12; Stop 36
tataaaaaattcaacctcatattta

SEQ ID NO: 61031 - DNA, 25 bp, Artificial
  probe
  misc_feature (1)..(25): SEQ ID NO: 75; WAN024AO2_at; Start 28; Stop 52
tcatatttaaaacatattaaacatc

SEQ ID NO: 61032 - DNA, 25 bp, Artificial
  probe
  misc_feature (1)..(25): SEQ ID NO: 75; WAN024AO2_at; Start 18; Stop 42
aaattcaacctcatatttaaaacat

SEQ ID NO: 61033 - DNA, 25 bp, Artificial
  probe
  misc_feature (1)..(25): SEQ ID NO: 75; WAN024AO2_at; Start 9; Stop 33
tcctataaaaaattcaacctcatat

SEQ ID NO: 61034 - DNA, 25 bp, Artificial
  probe
  misc_feature (1)..(25): SEQ ID NO: 75; WAN024AO2_at; Start 43; Stop 67
attaaacatcagtcaaatcgctaac

SEQ ID NO: 61035 - DNA, 25 bp, Artificial
  probe
  misc_feature (1)..(25): SEQ ID NO: 75; WAN024AO2_at; Start 10; Stop 34
cctataaaaaattcaacctcatatt

SEQ ID NO: 61036 - DNA, 25 bp, Artificial
  probe
  misc_feature (1)..(25): SEQ ID NO: 75; WAN024AO2_at; Start 22; Stop 46
tcaacctcatatttaaaacatatta

SEQ ID NO: 61037 - DNA, 25 bp, Artificial
  probe
  misc_feature (1)..(25): SEQ ID NO: 75; WAN024AO2_at; Start 6; Stop 30
tcctcctataaaaaattcaacctca

SEQ ID NO: 61038 - DNA, 25 bp, Artificial
  probe
  misc_feature (1)..(25): SEQ ID NO: 75; WAN024AO2_at; Start 19; Stop 43
aattcaacctcatatttaaaacata

SEQ ID NO: 61039 - DNA, 25 bp, Artificial
  probe
  misc_feature (1)..(25): SEQ ID NO: 75; WAN024AO2_at; Start 40; Stop 64
catattaaacatcagtcaaatcgct

SEQ ID NO: 61040 - DNA, 25 bp, Artificial
  probe
  misc_feature (1)..(25): SEQ ID NO: 75; WAN024AO2_at; Start 42; Stop 66
tattaaacatcagtcaaatcgctaa

SEQ ID NO: 61041 - DNA, 25 bp, Artificial
  probe
  misc_feature (1)..(25): SEQ ID NO: 75; WAN024AO2_at; Start 23; Stop 47
caacctcatatttaaaacatattaa

SEQ ID NO: 61042 - DNA, 25 bp, Artificial
  probe
  misc_feature (1)..(25): SEQ ID NO: 75; WAN024AO2_at; Start 30; Stop 54
atatttaaaacatattaaacatcag

SEQ ID NO: 61043 - DNA, 25 bp, Artificial
  probe
  misc_feature (1)..(25): SEQ ID NO: 75; WAN024AO2_at; Start 36; Stop 60
aaaacatattaaacatcagtcaaat

SEQ ID NO: 61044 - DNA, 25 bp, Artificial
  probe
  misc_feature (1)..(25): SEQ ID NO: 75; WAN024AO2_at; Start 21; Stop 45
ttcaacctcatatttaaaacatatt

SEQ ID NO: 61045 - DNA, 25 bp, Artificial
  probe
  misc_feature (1)..(25): SEQ ID NO: 75; WAN024AO2_at; Start 31; Stop 55
tatttaaaacatattaaacatcagt

SEQ ID NO: 61046 - DNA, 25 bp, Artificial
  probe
  misc_feature (1)..(25): SEQ ID NO: 75; WAN024AO2_at; Start 41; Stop 65
atattaaacatcagtcaaatcgcta

SEQ ID NO: 61047 - DNA, 25 bp, Artificial
  probe
  misc_feature (1)..(25): SEQ ID NO: 75; WAN024AO2_at; Start 7; Stop 31
cctcctataaaaaattcaacctcat

SEQ ID NO: 61048 - DNA, 25 bp, Artificial
  probe
  misc_feature (1)..(25): SEQ ID NO: 3775; WAN024AO3_at; Start 37; Stop 61
tatgaggttgaattttttataggag

SEQ ID NO: 61049 - DNA, 25 bp, Artificial
  probe
  misc_feature (1)..(25): SEQ ID NO: 3775; WAN024AO3_at; Start 38; Stop 62
atgaggttgaattttttataggagg

SEQ ID NO: 61050 - DNA, 25 bp, Artificial
  probe
  misc_feature (1)..(25): SEQ ID NO: 3775; WAN024AO3_at; Start 6; Stop 30
gcgatttgactgatgtttaatatgt

SEQ ID NO: 61051 - DNA, 25 bp, Artificial
  probe
  misc_feature (1)..(25): SEQ ID NO: 3775; WAN024AO3_at; Start 5; Stop 29
agcgatttgactgatgtttaatatg

SEQ ID NO: 61052 - DNA, 25 bp, Artificial
  probe
  misc_feature (1)..(25): SEQ ID NO: 3775; WAN024AO3_at; Start 1; Stop 25
ggttagcgatttgactgatgtttaa

SEQ ID NO: 61053 - DNA, 25 bp, Artificial
  probe
  misc_feature (1)..(25): SEQ ID NO: 3775; WAN024AO3_at; Start 23; Stop 47
taatatgttttaaatatgaggttga

SEQ ID NO: 61054 - DNA, 25 bp, Artificial
  probe
  misc_feature (1)..(25): SEQ ID NO: 3775; WAN024AO3_at; Start 39; Stop 63
tgaggttgaattttttataggagga

SEQ ID NO: 61055 - DNA, 25 bp, Artificial
  probe
  misc_feature (1)..(25): SEQ ID NO: 3775; WAN024AO3_at; Start 2; Stop 26
gttagcgatttgactgatgtttaat

SEQ ID NO: 61056 - DNA, 25 bp, Artificial
  probe
  misc_feature (1)..(25): SEQ ID NO: 3775; WAN024AO3_at; Start 36; Stop 60
atatgaggttgaattttttatagga

SEQ ID NO: 61057 - DNA, 25 bp, Artificial
  probe
  misc_feature (1)..(25): SEQ ID NO: 3775; WAN024AO3_at; Start 10; Stop 34
tttgactgatgtttaatatgtttta

SEQ ID NO: 61058 - DNA, 25 bp, Artificial
  probe
  misc_feature (1)..(25): SEQ ID NO: 3775; WAN024AO3_at; Start 12; Stop 36
tgactgatgtttaatatgttttaaa

SEQ ID NO: 61059 - DNA, 25 bp, Artificial
  probe
  misc_feature (1)..(25): SEQ ID NO: 3775; WAN024AO3_at; Start 9; Stop 33
atttgactgatgtttaatatgtttt

SEQ ID NO: 61060 - DNA, 25 bp, Artificial
  probe
  misc_feature (1)..(25): SEQ ID NO: 3775; WAN024AO3_at; Start 35; Stop 59
aatatgaggttgaattttttatagg

SEQ ID NO: 61061 - DNA, 25 bp, Artificial
  probe
  misc_feature (1)..(25): SEQ ID NO: 3775; WAN024AO3_at; Start 11; Stop 35
ttgactgatgtttaatatgttttaa

SEQ ID NO: 61062 - DNA, 25 bp, Artificial
  probe
  misc_feature (1)..(25): SEQ ID NO: 3775; WAN024AO3_at; Start 24; Stop 48
aatatgttttaaatatgaggttgaa

SEQ ID NO: 61063 - DNA, 25 bp, Artificial
  probe
  misc_feature (1)..(25): SEQ ID NO: 3775; WAN024AO3_at; Start 22; Stop 46
ttaatatgttttaaatatgaggttg

SEQ ID NO: 61064 - DNA, 25 bp, Artificial
  probe
  misc_feature (1)..(25): SEQ ID NO: 3775; WAN024AO3_at; Start 13; Stop 37
gactgatgtttaatatgttttaaat

SEQ ID NO: 61065 - DNA, 25 bp, Artificial
  probe
  misc_feature (1)..(25): SEQ ID NO: 3775; WAN024AO3_at; Start 33; Stop 57
taaatatgaggttgaattttttata

SEQ ID NO: 61066 - DNA, 25 bp, Artificial
  probe
  misc_feature (1)..(25): SEQ ID NO: 3775; WAN024AO3_at; Start 7; Stop 31
cgatttgactgatgtttaatatgtt

SEQ ID NO: 61067 - DNA, 25 bp, Artificial
  probe
  misc_feature (1)..(25): SEQ ID NO: 3775; WAN024AO3_at; Start 4; Stop 28
tagcgatttgactgatgtttaatat

SEQ ID NO: 61068 - DNA, 25 bp, Artificial
  probe
  misc_feature (1)..(25): SEQ ID NO: 3775; WAN024AO3_at; Start 8; Stop 32
gatttgactgatgtttaatatgttt

SEQ ID NO: 61069 - DNA, 25 bp, Artificial
  probe
  misc_feature (1)..(25): SEQ ID NO: 3775; WAN024AO3_at; Start 25; Stop 49
atatgttttaaatatgaggttgaat

SEQ ID NO: 61070 - DNA, 25 bp, Artificial
  probe
  misc_feature (1)..(25): SEQ ID NO: 3775; WAN024AO3_at; Start 34; Stop 58
aaatatgaggttgaattttttatag

SEQ ID NO: 61071 - DNA, 25 bp, Artificial
  probe
  misc_feature (1)..(25): SEQ ID NO: 3775; WAN024AO3_at; Start 26; Stop 50
tatgttttaaatatgaggttgaatt

SEQ ID NO: 61072 - DNA, 25 bp, Artificial
  probe
  misc_feature (1)..(25): SEQ ID NO: 3775; WAN024AO3_at; Start 19; Stop 43
tgtttaatatgttttaaatatgagg

SEQ ID NO: 61073 - DNA, 25 bp, Artificial
  probe
  misc_feature (1)..(25): SEQ ID NO: 3775; WAN024AO3_at; Start 3; Stop 27
ttagcgatttgactgatgtttaata

SEQ ID NO: 61074 - DNA, 25 bp, Artificial
  probe
  misc_feature (1)..(25): SEQ ID NO: 3505; WAN024AO4_at; Start 125; Stop 149
caatcttctctgaataccttagttc

SEQ ID NO: 61075 - DNA, 25 bp, Artificial
  probe
  misc_feature (1)..(25): SEQ ID NO: 3505; WAN024AO4_at; Start 141; Stop 165
ccttagttcattttctatacttatg

SEQ ID NO: 61076 - DNA, 25 bp, Artificial
  probe
  misc_feature (1)..(25): SEQ ID NO: 3505; WAN024AO4_at; Start 51; Stop 75
gacttcgctacgatataaatagaaa

SEQ ID NO: 61077 - DNA, 25 bp, Artificial
  probe
  misc_feature (1)..(25): SEQ ID NO: 3505; WAN024AO4_at; Start 57; Stop 81
gctacgatataaatagaaagttgac

SEQ ID NO: 61078 - DNA, 25 bp, Artificial
  probe
  misc_feature (1)..(25): SEQ ID NO: 3505; WAN024AO4_at; Start 44; Stop 68
ttaaaatgacttcgctacgatataa

SEQ ID NO: 61079 - DNA, 25 bp, Artificial
  probe
  misc_feature (1)..(25): SEQ ID NO: 3505; WAN024AO4_at; Start 62; Stop 86
gatataaatagaaagttgaccctaa

SEQ ID NO: 61080 - DNA, 25 bp, Artificial
  probe
  misc_feature (1)..(25): SEQ ID NO: 3505; WAN024AO4_at; Start 48; Stop 72
aatgacttcgctacgatataaatag

SEQ ID NO: 61081 - DNA, 25 bp, Artificial
  probe
  misc_feature (1)..(25): SEQ ID NO: 3505; WAN024AO4_at; Start 13; Stop 37
tcaatcttgatccatcttttacaca

SEQ ID NO: 61082 - DNA, 25 bp, Artificial
  probe
  misc_feature (1)..(25): SEQ ID NO: 3505; WAN024AO4_at; Start 21; Stop 45
gatccatcttttacacatcattatt

SEQ ID NO: 61083 - DNA, 25 bp, Artificial
  probe
  misc_feature (1)..(25): SEQ ID NO: 3505; WAN024AO4_at; Start 136; Stop 160
gaataccttagttcattttctatac

SEQ ID NO: 61084 - DNA, 25 bp, Artificial
  probe
  misc_feature (1)..(25): SEQ ID NO: 3505; WAN024AO4_at; Start 118; Stop 142
ttaggatcaatcttctctgaatacc

SEQ ID NO: 61085 - DNA, 25 bp, Artificial
  probe
  misc_feature (1)..(25): SEQ ID NO: 3505; WAN024AO4_at; Start 53; Stop 77
cttcgctacgatataaatagaaagt

SEQ ID NO: 61086 - DNA, 25 bp, Artificial
  probe
  misc_feature (1)..(25): SEQ ID NO: 3505; WAN024AO4_at; Start 115; Stop 139
tatttaggatcaatcttctctgaat

SEQ ID NO: 61087 - DNA, 25 bp, Artificial
  probe
  misc_feature (1)..(25): SEQ ID NO: 3505; WAN024AO4_at; Start 68; Stop 92
aatagaaagttgaccctaaatatct

SEQ ID NO: 61088 - DNA, 25 bp, Artificial
  probe
  misc_feature (1)..(25): SEQ ID NO: 3505; WAN024AO4_at; Start 2; Stop 26
tttcttcctcctcaatcttgatcca

SEQ ID NO: 61089 - DNA, 25 bp, Artificial
  probe
  misc_feature (1)..(25): SEQ ID NO: 3505; WAN024AO4_at; Start 59; Stop 83
tacgatataaatagaaagttgaccc

SEQ ID NO: 61090 - DNA, 25 bp, Artificial
  probe
  misc_feature (1)..(25): SEQ ID NO: 3505; WAN024AO4_at; Start 60; Stop 84
acgatataaatagaaagttgaccct

SEQ ID NO: 61091 - DNA, 25 bp, Artificial
  probe
  misc_feature (1)..(25): SEQ ID NO: 3505; WAN024AO4_at; Start 46; Stop 70
aaaatgacttcgctacgatataaat

SEQ ID NO: 61092 - DNA, 25 bp, Artificial
  probe
  misc_feature (1)..(25): SEQ ID NO: 3505; WAN024AO4_at; Start 7; Stop 31
tcctcctcaatcttgatccatcttt

SEQ ID NO: 61093 - DNA, 25 bp, Artificial
  probe
  misc_feature (1)..(25): SEQ ID NO: 3505; WAN024AO4_at; Start 17; Stop 41
tcttgatccatcttttacacatcat

SEQ ID NO: 61094 - DNA, 25 bp, Artificial
  probe
  misc_feature (1)..(25): SEQ ID NO: 3505; WAN024AO4_at; Start 110; Stop 134
cataatatttaggatcaatcttctc

SEQ ID NO: 61095 - DNA, 25 bp, Artificial
  probe
  misc_feature (1)..(25): SEQ ID NO: 3505; WAN024AO4_at; Start 69; Stop 93
atagaaagttgaccctaaatatctt

SEQ ID NO: 61096 - DNA, 25 bp, Artificial
  probe
  misc_feature (1)..(25): SEQ ID NO: 3505; WAN024AO4_at; Start 42; Stop 66
tattaaaatgacttcgctacgatat

SEQ ID NO: 61097 - DNA, 25 bp, Artificial
  probe
  misc_feature (1)..(25): SEQ ID NO: 3505; WAN024AO4_at; Start 61; Stop 85
cgatataaatagaaagttgacccta

SEQ ID NO: 61098 - DNA, 25 bp, Artificial
  probe
  misc_feature (1)..(25): SEQ ID NO: 3505; WAN024AO4_at; Start 23; Stop 47
tccatcttttacacatcattattaa

SEQ ID NO: 61099 - DNA, 25 bp, Artificial
  probe
  misc_feature (1)..(25): SEQ ID NO: 3505; WAN024AO4_at; Start 121; Stop 145
ggatcaatcttctctgaatacctta

SEQ ID NO: 61100 - DNA, 25 bp, Artificial
  probe
  misc_feature (1)..(25): SEQ ID NO: 3505; WAN024AO4_at; Start 128; Stop 152
tcttctctgaataccttagttcatt

SEQ ID NO: 61101 - DNA, 25 bp, Artificial
  probe
  misc_feature (1)..(25): SEQ ID NO: 3505; WAN024AO4_at; Start 50; Stop 74
tgacttcgctacgatataaatagaa

SEQ ID NO: 61102 - DNA, 25 bp, Artificial
  probe
  misc_feature (1)..(25): SEQ ID NO: 3505; WAN024AO4_at; Start 39; Stop 63
cattattaaaatgacttcgctacga

SEQ ID NO: 61103 - DNA, 25 bp, Artificial
  probe
  misc_feature (1)..(25): SEQ ID NO: 3505; WAN024AO4_at; Start 122; Stop 146
gatcaatcttctctgaataccttag

SEQ ID NO: 61104 - DNA, 25 bp, Artificial
  probe
  misc_feature (1)..(25): SEQ ID NO: 3505; WAN024AO4_at; Start 119; Stop 143
taggatcaatcttctctgaatacct

SEQ ID NO: 61105 - DNA, 25 bp, Artificial
  probe
  misc_feature (1)..(25): SEQ ID NO: 3505; WAN024AO4_at; Start 113; Stop 137
aatatttaggatcaatcttctctga

SEQ ID NO: 61106 - DNA, 25 bp, Artificial
  probe
  misc_feature (1)..(25): SEQ ID NO: 3505; WAN024AO4_at; Start 55; Stop 79
tcgctacgatataaatagaaagttg

SEQ ID NO: 61107 - DNA, 25 bp, Artificial
  probe
  misc_feature (1)..(25): SEQ ID NO: 3505; WAN024AO4_at; Start 112; Stop 136
taatatttaggatcaatcttctctg

SEQ ID NO: 61108 - DNA, 25 bp, Artificial
  probe
  misc_feature (1)..(25): SEQ ID NO: 578; WAN024AO5_at; Start 95; Stop 119
tctatttatatcgtagcgaagtcat

SEQ ID NO: 61109 - DNA, 25 bp, Artificial
  probe
  misc_feature (1)..(25): SEQ ID NO: 578; WAN024AO5_at; Start 131; Stop 155
tgtgtaaaagatggatcaagattga

SEQ ID NO: 61110 - DNA, 25 bp, Artificial
  probe
  misc_feature (1)..(25): SEQ ID NO: 578; WAN024AO5_at; Start 13; Stop 37
gaaaatgaactaaggtattcagaga

SEQ ID NO: 61111 - DNA, 25 bp, Artificial
  probe
  misc_feature (1)..(25): SEQ ID NO: 578; WAN024AO5_at; Start 31; Stop 55
tcagagaagattgatcctaaatatt

SEQ ID NO: 61112 - DNA, 25 bp, Artificial
  probe
  misc_feature (1)..(25): SEQ ID NO: 578; WAN024AO5_at; Start 28; Stop 52
tattcagagaagattgatcctaaat

SEQ ID NO: 61113 - DNA, 25 bp, Artificial
  probe
  misc_feature (1)..(25): SEQ ID NO: 578; WAN024AO5_at; Start 8; Stop 32
gtatagaaaatgaactaaggtattc

SEQ ID NO: 61114 - DNA, 25 bp, Artificial
  probe
  misc_feature (1)..(25): SEQ ID NO: 578; WAN024AO5_at; Start 138; Stop 162
aagatggatcaagattgaggaggaa

SEQ ID NO: 61115 - DNA, 25 bp, Artificial
  probe
  misc_feature (1)..(25): SEQ ID NO: 578; WAN024AO5_at; Start 23; Stop 47
taaggtattcagagaagattgatcc

SEQ ID NO: 61116 - DNA, 25 bp, Artificial
  probe
  misc_feature (1)..(25): SEQ ID NO: 578; WAN024AO5_at; Start 75; Stop 99
aagatatttagggtcaactttctat

SEQ ID NO: 61117 - DNA, 25 bp, Artificial
  probe
  misc_feature (1)..(25): SEQ ID NO: 578; WAN024AO5_at; Start 83; Stop 107
tagggtcaactttctatttatatcg

SEQ ID NO: 61118 - DNA, 25 bp, Artificial
  probe
  misc_feature (1)..(25): SEQ ID NO: 578; WAN024AO5_at; Start 97; Stop 121
tatttatatcgtagcgaagtcattt

SEQ ID NO: 61119 - DNA, 25 bp, Artificial
  probe
  misc_feature (1)..(25): SEQ ID NO: 578; WAN024AO5_at; Start 89; Stop 113
caactttctatttatatcgtagcga

SEQ ID NO: 61120 - DNA, 25 bp, Artificial
  probe
  misc_feature (1)..(25): SEQ ID NO: 578; WAN024AO5_at; Start 106; Stop 130
cgtagcgaagtcattttaataatga

SEQ ID NO: 61121 - DNA, 25 bp, Artificial
  probe
  misc_feature (1)..(25): SEQ ID NO: 578; WAN024AO5_at; Start 19; Stop 43
gaactaaggtattcagagaagattg

SEQ ID NO: 61122 - DNA, 25 bp, Artificial
  probe
  misc_feature (1)..(25): SEQ ID NO: 578; WAN024AO5_at; Start 101; Stop 125
tatatcgtagcgaagtcattttaat

SEQ ID NO: 61123 - DNA, 25 bp, Artificial
  probe
  misc_feature (1)..(25): SEQ ID NO: 578; WAN024AO5_at; Start 85; Stop 109
gggtcaactttctatttatatcgta

SEQ ID NO: 61124 - DNA, 25 bp, Artificial
  probe
  misc_feature (1)..(25): SEQ ID NO: 578; WAN024AO5_at; Start 3; Stop 27
cataagtatagaaaatgaactaagg

SEQ ID NO: 61125 - DNA, 25 bp, Artificial
  probe
  misc_feature (1)..(25): SEQ ID NO: 578; WAN024AO5_at; Start 26; Stop 50
ggtattcagagaagattgatcctaa

SEQ ID NO: 61126 - DNA, 25 bp, Artificial
  probe
  misc_feature (1)..(25): SEQ ID NO: 578; WAN024AO5_at; Start 123; Stop 147
aataatgatgtgtaaaagatggatc

SEQ ID NO: 61127 - DNA, 25 bp, Artificial
  probe
  misc_feature (1)..(25): SEQ ID NO: 578; WAN024AO5_at; Start 43; Stop 67
gatcctaaatattatgaaatttaag

SEQ ID NO: 61128 - DNA, 25 bp, Artificial
  probe
  misc_feature (1)..(25): SEQ ID NO: 578; WAN024AO5_at; Start 34; Stop 58
gagaagattgatcctaaatattatg

SEQ ID NO: 61129 - DNA, 25 bp, Artificial
  probe
  misc_feature (1)..(25): SEQ ID NO: 578; WAN024AO5_at; Start 24; Stop 48
aaggtattcagagaagattgatcct

SEQ ID NO: 61130 - DNA, 25 bp, Artificial
  probe
  misc_feature (1)..(25): SEQ ID NO: 578; WAN024AO5_at; Start 103; Stop 127
tatcgtagcgaagtcattttaataa

SEQ ID NO: 61131 - DNA, 25 bp, Artificial
  probe
  misc_feature (1)..(25): SEQ ID NO: 578; WAN024AO5_at; Start 142; Stop 166
tggatcaagattgaggaggaagaaa

SEQ ID NO: 61132 - DNA, 25 bp, Artificial
  probe
  misc_feature (1)..(25): SEQ ID NO: 578; WAN024AO5_at; Start 91; Stop 115
actttctatttatatcgtagcgaag

SEQ ID NO: 61133 - DNA, 25 bp, Artificial
  probe
  misc_feature (1)..(25): SEQ ID NO: 578; WAN024AO5_at; Start 86; Stop 110
ggtcaactttctatttatatcgtag

SEQ ID NO: 61134 - DNA, 25 bp, Artificial
  probe
  misc_feature (1)..(25): SEQ ID NO: 578; WAN024AO5_at; Start 16; Stop 40
aatgaactaaggtattcagagaaga

SEQ ID NO: 61135 - DNA, 25 bp, Artificial
  probe
  misc_feature (1)..(25): SEQ ID NO: 578; WAN024AO5_at; Start 36; Stop 60
gaagattgatcctaaatattatgaa

SEQ ID NO: 61136 - DNA, 25 bp, Artificial
  probe
  misc_feature (1)..(25): SEQ ID NO: 578; WAN024AO5_at; Start 133; Stop 157
tgtaaaagatggatcaagattgagg

SEQ ID NO: 61137 - DNA, 25 bp, Artificial
  probe
  misc_feature (1)..(25): SEQ ID NO: 578; WAN024AO5_at; Start 105; Stop 129
tcgtagcgaagtcattttaataatg

SEQ ID NO: 61138 - DNA, 25 bp, Artificial
  probe
  misc_feature (1)..(25): SEQ ID NO: 578; WAN024AO5_at; Start 126; Stop 150
aatgatgtgtaaaagatggatcaag

SEQ ID NO: 61139 - DNA, 25 bp, Artificial
  probe
  misc_feature (1)..(25): SEQ ID NO: 578; WAN024AO5_at; Start 94; Stop 118
ttctatttatatcgtagcgaagtca

SEQ ID NO: 61140 - DNA, 25 bp, Artificial
  probe
  misc_feature (1)..(25): SEQ ID NO: 578; WAN024AO5_at; Start 135; Stop 159
taaaagatggatcaagattgaggag

SEQ ID NO: 61141 - DNA, 25 bp, Artificial
  probe
  misc_feature (1)..(25): SEQ ID NO: 578; WAN024AO5_at; Start 110; Stop 134
gcgaagtcattttaataatgatgtg

SEQ ID NO: 61142 - DNA, 25 bp, Artificial
  probe
  misc_feature (1)..(25): SEQ ID NO: 3207; WAN024AO6_at; Start 34; Stop 58
aaatataccactaacagaaagcgtt

SEQ ID NO: 61143 - DNA, 25 bp, Artificial
  probe
  misc_feature (1)..(25): SEQ ID NO: 3207; WAN024AO6_at; Start 27; Stop 51
ataaattaaatataccactaacaga

SEQ ID NO: 61144 - DNA, 25 bp, Artificial
  probe
  misc_feature (1)..(25): SEQ ID NO: 3207; WAN024AO6_at; Start 31; Stop 55
attaaatataccactaacagaaagc

SEQ ID NO: 61145 - DNA, 25 bp, Artificial
  probe
  misc_feature (1)..(25): SEQ ID NO: 3207; WAN024AO6_at; Start 39; Stop 63
taccactaacagaaagcgttgtcaa

SEQ ID NO: 61146 - DNA, 25 bp, Artificial
  probe
  misc_feature (1)..(25): SEQ ID NO: 3207; WAN024AO6_at; Start 38; Stop 62
ataccactaacagaaagcgttgtca

SEQ ID NO: 61147 - DNA, 25 bp, Artificial
  probe
  misc_feature (1)..(25): SEQ ID NO: 3207; WAN024AO6_at; Start 36; Stop 60
atataccactaacagaaagcgttgt

SEQ ID NO: 61148 - DNA, 25 bp, Artificial
  probe
  misc_feature (1)..(25): SEQ ID NO: 3207; WAN024AO6_at; Start 30; Stop 54
aattaaatataccactaacagaaag

SEQ ID NO: 61149 - DNA, 25 bp, Artificial
  probe
  misc_feature (1)..(25): SEQ ID NO: 3207; WAN024AO6_at; Start 53; Stop 77
agcgttgtcaatatattttttgttg

SEQ ID NO: 61150 - DNA, 25 bp, Artificial
  probe
  misc_feature (1)..(25): SEQ ID NO: 3207; WAN024AO6_at; Start 32; Stop 56
ttaaatataccactaacagaaagcg

SEQ ID NO: 61151 - DNA, 25 bp, Artificial
  probe
  misc_feature (1)..(25): SEQ ID NO: 3207; WAN024AO6_at; Start 84; Stop 108
caatatttttttctttgtatagaat

SEQ ID NO: 61152 - DNA, 25 bp, Artificial
  probe
  misc_feature (1)..(25): SEQ ID NO: 3207; WAN024AO6_at; Start 37; Stop 61
tataccactaacagaaagcgttgtc

SEQ ID NO: 61153 - DNA, 25 bp, Artificial
  probe
  misc_feature (1)..(25): SEQ ID NO: 3207; WAN024AO6_at; Start 26; Stop 50
tataaattaaatataccactaacag

SEQ ID NO: 61154 - DNA, 25 bp, Artificial
  probe
  misc_feature (1)..(25): SEQ ID NO: 3207; WAN024AO6_at; Start 25; Stop 49
ttataaattaaatataccactaaca

SEQ ID NO: 61155 - DNA, 25 bp, Artificial
  probe
  misc_feature (1)..(25): SEQ ID NO: 3207; WAN024AO6_at; Start 54; Stop 78
gcgttgtcaatatattttttgttgt

SEQ ID NO: 61156 - DNA, 25 bp, Artificial
  probe
  misc_feature (1)..(25): SEQ ID NO: 3207; WAN024AO6_at; Start 28; Stop 52
taaattaaatataccactaacagaa

SEQ ID NO: 61157 - DNA, 25 bp, Artificial
  probe
  misc_feature (1)..(25): SEQ ID NO: 3207; WAN024AO6_at; Start 52; Stop 76
aagcgttgtcaatatattttttgtt

SEQ ID NO: 61158 - DNA, 25 bp, Artificial
  probe
  misc_feature (1)..(25): SEQ ID NO: 3207; WAN024AO6_at; Start 50; Stop 74
gaaagcgttgtcaatatattttttg

SEQ ID NO: 61159 - DNA, 25 bp, Artificial
  probe
  misc_feature (1)..(25): SEQ ID NO: 3207; WAN024AO6_at; Start 35; Stop 59
aatataccactaacagaaagcgttg

SEQ ID NO: 61160 - DNA, 25 bp, Artificial
  probe
  misc_feature (1)..(25): SEQ ID NO: 3207; WAN024AO6_at; Start 82; Stop 106
tacaatatttttttctttgtataga

SEQ ID NO: 61161 - DNA, 25 bp, Artificial
  probe
  misc_feature (1)..(25): SEQ ID NO: 3207; WAN024AO6_at; Start 51; Stop 75
aaagcgttgtcaatatattttttgt

SEQ ID NO: 61162 - DNA, 25 bp, Artificial
  probe
  misc_feature (1)..(25): SEQ ID NO: 3207; WAN024AO6_at; Start 55; Stop 79
cgttgtcaatatattttttgttgtt

SEQ ID NO: 61163 - DNA, 25 bp, Artificial
  probe
  misc_feature (1)..(25): SEQ ID NO: 3207; WAN024AO6_at; Start 33; Stop 57
taaatataccactaacagaaagcgt

SEQ ID NO: 61164 - DNA, 25 bp, Artificial
  probe
  misc_feature (1)..(25): SEQ ID NO: 335; WAN024AO7_at; Start 77; Stop 101
acaacgctttctgttagtggtatat

SEQ ID NO: 61165 - DNA, 25 bp, Artificial
  probe
  misc_feature (1)..(25): SEQ ID NO: 335; WAN024AO7_at; Start 62; Stop 86
acaaaaaatatattgacaacgcttt

SEQ ID NO: 61166 - DNA, 25 bp, Artificial
  probe
  misc_feature (1)..(25): SEQ ID NO: 335; WAN024AO7_at; Start 59; Stop 83
acaacaaaaaatatattgacaacgc

SEQ ID NO: 61167 - DNA, 25 bp, Artificial
  probe
  misc_feature (1)..(25): SEQ ID NO: 335; WAN024AO7_at; Start 61; Stop 85
aacaaaaaatatattgacaacgctt

SEQ ID NO: 61168 - DNA, 25 bp, Artificial
  probe
  misc_feature (1)..(25): SEQ ID NO: 335; WAN024AO7_at; Start 14; Stop 38
tcaattaaaattattattctataca

SEQ ID NO: 61169 - DNA, 25 bp, Artificial
  probe
  misc_feature (1)..(25): SEQ ID NO: 335; WAN024AO7_at; Start 79; Stop 103
aacgctttctgttagtggtatattt

SEQ ID NO: 61170 - DNA, 25 bp, Artificial
  probe
  misc_feature (1)..(25): SEQ ID NO: 335; WAN024AO7_at; Start 74; Stop 98
ttgacaacgctttctgttagtggta

SEQ ID NO: 61171 - DNA, 25 bp, Artificial
  probe
  misc_feature (1)..(25): SEQ ID NO: 335; WAN024AO7_at; Start 87; Stop 111
ctgttagtggtatatttaatttata

SEQ ID NO: 61172 - DNA, 25 bp, Artificial
  probe
  misc_feature (1)..(25): SEQ ID NO: 335; WAN024AO7_at; Start 19; Stop 43
taaaattattattctatacaaagaa

SEQ ID NO: 61173 - DNA, 25 bp, Artificial
  probe
  misc_feature (1)..(25): SEQ ID NO: 335; WAN024AO7_at; Start 82; Stop 106
gctttctgttagtggtatatttaat

SEQ ID NO: 61174 - DNA, 25 bp, Artificial
  probe
  misc_feature (1)..(25): SEQ ID NO: 335; WAN024AO7_at; Start 60; Stop 84
caacaaaaaatatattgacaacgct

SEQ ID NO: 61175 - DNA, 25 bp, Artificial
  probe
  misc_feature (1)..(25): SEQ ID NO: 335; WAN024AO7_at; Start 15; Stop 39
caattaaaattattattctatacaa

SEQ ID NO: 61176 - DNA, 25 bp, Artificial
  probe
  misc_feature (1)..(25): SEQ ID NO: 335; WAN024AO7_at; Start 80; Stop 104
acgctttctgttagtggtatattta

SEQ ID NO: 61177 - DNA, 25 bp, Artificial
  probe
  misc_feature (1)..(25): SEQ ID NO: 335; WAN024AO7_at; Start 75; Stop 99
tgacaacgctttctgttagtggtat

SEQ ID NO: 61178 - DNA, 25 bp, Artificial
  probe
  misc_feature (1)..(25): SEQ ID NO: 335; WAN024AO7_at; Start 18; Stop 42
ttaaaattattattctatacaaaga

SEQ ID NO: 61179 - DNA, 25 bp, Artificial
  probe
  misc_feature (1)..(25): SEQ ID NO: 335; WAN024AO7_at; Start 58; Stop 82
aacaacaaaaaatatattgacaacg

SEQ ID NO: 61180 - DNA, 25 bp, Artificial
  probe
  misc_feature (1)..(25): SEQ ID NO: 335; WAN024AO7_at; Start 86; Stop 110
tctgttagtggtatatttaatttat

SEQ ID NO: 61181 - DNA, 25 bp, Artificial
  probe
  misc_feature (1)..(25): SEQ ID NO: 335; WAN024AO7_at; Start 76; Stop 100
gacaacgctttctgttagtggtata

SEQ ID NO: 61182 - DNA, 25 bp, Artificial
  probe
  misc_feature (1)..(25): SEQ ID NO: 335; WAN024AO7_at; Start 81; Stop 105
cgctttctgttagtggtatatttaa

SEQ ID NO: 61183 - DNA, 25 bp, Artificial
  probe
  misc_feature (1)..(25): SEQ ID NO: 335; WAN024AO7_at; Start 83; Stop 107
ctttctgttagtggtatatttaatt

SEQ ID NO: 61184 - DNA, 25 bp, Artificial
  probe
  misc_feature (1)..(25): SEQ ID NO: 335; WAN024AO7_at; Start 78; Stop 102
caacgctttctgttagtggtatatt

SEQ ID NO: 61185 - DNA, 25 bp, Artificial
  probe
  misc_feature (1)..(25): SEQ ID NO: 335; WAN024AO7_at; Start 63; Stop 87
caaaaaatatattgacaacgctttc

SEQ ID NO: 61186 - DNA, 25 bp, Artificial
  probe
  misc_feature (1)..(25): SEQ ID NO: 335; WAN024AO7_at; Start 85; Stop 109
ttctgttagtggtatatttaattta

SEQ ID NO: 61187 - DNA, 25 bp, Artificial
  probe
  misc_feature (1)..(25): SEQ ID NO: 4552; WAN024AO8_at; Start 64; Stop 88
gacaatatgaaaacaagacgacttc

SEQ ID NO: 61188 - DNA, 25 bp, Artificial
  probe
  misc_feature (1)..(25): SEQ ID NO: 4552; WAN024AO8_at; Start 101; Stop 125
cgccttctcgctatgttgagtgatt

SEQ ID NO: 61189 - DNA, 25 bp, Artificial
  probe
  misc_feature (1)..(25): SEQ ID NO: 4552; WAN024AO8_at; Start 314; Stop 338
tatttagcgccacatagtactgaac

SEQ ID NO: 61190 - DNA, 25 bp, Artificial
  probe
  misc_feature (1)..(25): SEQ ID NO: 4552; WAN024AO8_at; Start 618; Stop 642
tgctcatgaaacaacgaatacaggt

SEQ ID NO: 61191 - DNA, 25 bp, Artificial
  probe
  misc_feature (1)..(25): SEQ ID NO: 4552; WAN024AO8_at; Start 590; Stop 614
aaatgcctacatgaaaagaaacgtc

SEQ ID NO: 61192 - DNA, 25 bp, Artificial
  probe
  misc_feature (1)..(25): SEQ ID NO: 4552; WAN024AO8_at; Start 35; Stop 59
tataacctgtagtagatatctcgta

SEQ ID NO: 61193 - DNA, 25 bp, Artificial
  probe
  misc_feature (1)..(25): SEQ ID NO: 4552; WAN024AO8_at; Start 80; Stop 104
gacgacttccatataggaaaccgcc

SEQ ID NO: 61194 - DNA, 25 bp, Artificial
  probe
  misc_feature (1)..(25): SEQ ID NO: 4552; WAN024AO8_at; Start 559; Stop 583
catcctcggaaaaatatcattctaa

SEQ ID NO: 61195 - DNA, 25 bp, Artificial
  probe
  misc_feature (1)..(25): SEQ ID NO: 4552; WAN024AO8_at; Start 448; Stop 472
tacctagatgtttcggttcataaaa

SEQ ID NO: 61196 - DNA, 25 bp, Artificial
  probe
  misc_feature (1)..(25): SEQ ID NO: 4552; WAN024AO8_at; Start 351; Stop 375
cggttattcctctttgaatagggcg

SEQ ID NO: 61197 - DNA, 25 bp, Artificial
  probe
  misc_feature (1)..(25): SEQ ID NO: 4552; WAN024AO8_at; Start 523; Stop 547
ggcatcataactctaaaaagtcaca

SEQ ID NO: 61198 - DNA, 25 bp, Artificial
  probe
  misc_feature (1)..(25): SEQ ID NO: 4552; WAN024AO8_at; Start 300; Stop 324
tgttttacatatagtatttagcgcc

SEQ ID NO: 61199 - DNA, 25 bp, Artificial
  probe
  misc_feature (1)..(25): SEQ ID NO: 4552; WAN024AO8_at; Start 602; Stop 626
gaaaagaaacgtcaaatgctcatga

SEQ ID NO: 61200 - DNA, 25 bp, Artificial
  probe
  misc_feature (1)..(25): SEQ ID NO: 4552; WAN024AO8_at; Start 95; Stop 119
ggaaaccgccttctcgctatgttga

SEQ ID NO: 61201 - DNA, 25 bp, Artificial
  probe
  misc_feature (1)..(25): SEQ ID NO: 4552; WAN024AO8_at; Start 49; Stop 73
gatatctcgtatttagacaatatga

SEQ ID NO: 61202 - DNA, 25 bp, Artificial
  probe
  misc_feature (1)..(25): SEQ ID NO: 4552; WAN024AO8_at; Start 410; Stop 434
catatggctcaaaaacaatcaattg

SEQ ID NO: 61203 - DNA, 25 bp, Artificial
  probe
  misc_feature (1)..(25): SEQ ID NO: 4552; WAN024AO8_at; Start 434; Stop 458
gatgctaaaacctgtacctagatgt

SEQ ID NO: 61204 - DNA, 25 bp, Artificial
  probe
  misc_feature (1)..(25): SEQ ID NO: 4552; WAN024AO8_at; Start 131; Stop 155
taaaataacttttcttctagctgca

SEQ ID NO: 61205 - DNA, 25 bp, Artificial
  probe
  misc_feature (1)..(25): SEQ ID NO: 4552; WAN024AO8_at; Start 460; Stop 484
tcggttcataaaaccatgaaactgt

SEQ ID NO: 61206 - DNA, 25 bp, Artificial
  probe
  misc_feature (1)..(25): SEQ ID NO: 4552; WAN024AO8_at; Start 501; Stop 525
gatagcgatagtcaaatcaagaggc

SEQ ID NO: 61207 - DNA, 25 bp, Artificial
  probe
  misc_feature (1)..(25): SEQ ID NO: 4552; WAN024AO8_at; Start 544; Stop 568
cacaatatataagttcatcctcgga

SEQ ID NO: 61208 - DNA, 25 bp, Artificial
  probe
  misc_feature (1)..(25): SEQ ID NO: 4552; WAN024AO8_at; Start 208; Stop 232
tttattcaagatacatactcctaga

SEQ ID NO: 61209 - DNA, 25 bp, Artificial
  probe
  misc_feature (1)..(25): SEQ ID NO: 4552; WAN024AO8_at; Start 397; Stop 421
cacgtttcaacttcatatggctcaa

SEQ ID NO: 61210 - DNA, 25 bp, Artificial
  probe
  misc_feature (1)..(25): SEQ ID NO: 4552; WAN024AO8_at; Start 366; Stop 390
gaatagggcgttatcacaagaaaag

SEQ ID NO: 61211 - DNA, 25 bp, Artificial
  probe
  misc_feature (1)..(25): SEQ ID NO: 4552; WAN024AO8_at; Start 217; Stop 241
gatacatactcctagaataaacttt

SEQ ID NO: 61212 - DNA, 25 bp, Artificial
  probe
  misc_feature (1)..(25): SEQ ID NO: 4552; WAN024AO8_at; Start 473; Stop 497
ccatgaaactgtaaaagtggatgaa

SEQ ID NO: 61213 - DNA, 25 bp, Artificial
  probe
  misc_feature (1)..(25): SEQ ID NO: 4552; WAN024AO8_at; Start 8; Stop 32
gaaatctatagacctgtttaaatca

SEQ ID NO: 61214 - DNA, 25 bp, Artificial
  probe
  misc_feature (1)..(25): SEQ ID NO: 4552; WAN024AO8_at; Start 266; Stop 290
tacaattctccttagttaaatcttg

SEQ ID NO: 61215 - DNA, 25 bp, Artificial
  probe
  misc_feature (1)..(25): SEQ ID NO: 4552; WAN024AO8_at; Start 425; Stop 449
caatcaattgatgctaaaacctgta

SEQ ID NO: 61216 - DNA, 25 bp, Artificial
  probe
  misc_feature (1)..(25): SEQ ID NO: 4552; WAN024AO8_at; Start 509; Stop 533
tagtcaaatcaagaggcatcataac

SEQ ID NO: 61217 - DNA, 25 bp, Artificial
  probe
  misc_feature (1)..(25): SEQ ID NO: 4552; WAN024AO8_at; Start 329; Stop 353
agtactgaactctctccaaaaacgg

SEQ ID NO: 61218 - DNA, 25 bp, Artificial
  probe
  misc_feature (1)..(25): SEQ ID NO: 4552; WAN024AO8_at; Start 22; Stop 46
tgtttaaatcaactataacctgtag

SEQ ID NO: 61219 - DNA, 25 bp, Artificial
  probe
  misc_feature (1)..(25): SEQ ID NO: 4552; WAN024AO8_at; Start 484; Stop 508
taaaagtggatgaaattgatagcga

SEQ ID NO: 61220 - DNA, 25 bp, Artificial
  probe
  misc_feature (1)..(25): SEQ ID NO: 4552; WAN024AO8_at; Start 576; Stop 600
cattctaattgttgaaatgcctaca

SEQ ID NO: 61221 - DNA, 25 bp, Artificial
  probe
  misc_feature (1)..(25): SEQ ID NO: 512; WAN024AO9_at; Start 625; Stop 649
taaacaggtctatagatttctaata

SEQ ID NO: 61222 - DNA, 25 bp, Artificial
  probe
  misc_feature (1)..(25): SEQ ID NO: 512; WAN024AO9_at; Start 50; Stop 74
catgtaggcatttcaacaattagaa

SEQ ID NO: 61223 - DNA, 25 bp, Artificial
  probe
  misc_feature (1)..(25): SEQ ID NO: 512; WAN024AO9_at; Start 262; Stop 286
cttttcttgtgataacgccctattc

SEQ ID NO: 61224 - DNA, 25 bp, Artificial
  probe
  misc_feature (1)..(25): SEQ ID NO: 512; WAN024AO9_at; Start 270; Stop 294
gtgataacgccctattcaaagagga

SEQ ID NO: 61225 - DNA, 25 bp, Artificial
  probe
  misc_feature (1)..(25): SEQ ID NO: 512; WAN024AO9_at; Start 312; Stop 336
gagttcagtactatgtggcgctaaa

SEQ ID NO: 61226 - DNA, 25 bp, Artificial
  probe
  misc_feature (1)..(25): SEQ ID NO: 512; WAN024AO9_at; Start 9; Stop 33
tacctgtattcgttgtttcatgagc

SEQ ID NO: 61227 - DNA, 25 bp, Artificial
  probe
  misc_feature (1)..(25): SEQ ID NO: 512; WAN024AO9_at; Start 564; Stop 588
gaagtcgtcttgttttcatattgtc

SEQ ID NO: 61228 - DNA, 25 bp, Artificial
  probe
  misc_feature (1)..(25): SEQ ID NO: 512; WAN024AO9_at; Start 107; Stop 131
tgactttttagagttatgatgcctc

SEQ ID NO: 61229 - DNA, 25 bp, Artificial
  probe
  misc_feature (1)..(25): SEQ ID NO: 512; WAN024AO9_at; Start 22; Stop 46
tgtttcatgagcatttgacgtttct

SEQ ID NO: 61230 - DNA, 25 bp, Artificial
  probe
  misc_feature (1)..(25): SEQ ID NO: 512; WAN024AO9_at; Start 548; Stop 572
ggcggtttcctatatggaagtcgtc

SEQ ID NO: 61231 - DNA, 25 bp, Artificial
  probe
  misc_feature (1)..(25): SEQ ID NO: 512; WAN024AO9_at; Start 38; Stop 62
gacgtttcttttcatgtaggcattt

SEQ ID NO: 61232 - DNA, 25 bp, Artificial
  probe
  misc_feature (1)..(25): SEQ ID NO: 512; WAN024AO9_at; Start 86; Stop 110
cgaggatgaacttatatattgtgac

SEQ ID NO: 61233 - DNA, 25 bp, Artificial
  probe
  misc_feature (1)..(25): SEQ ID NO: 512; WAN024AO9_at; Start 169; Stop 193
cagtttcatggttttatgaaccgaa

SEQ ID NO: 61234 - DNA, 25 bp, Artificial
  probe
  misc_feature (1)..(25): SEQ ID NO: 512; WAN024AO9_at; Start 420; Stop 444
tctaggagtatgtatcttgaataaa

SEQ ID NO: 61235 - DNA, 25 bp, Artificial
  probe
  misc_feature (1)..(25): SEQ ID NO: 512; WAN024AO9_at; Start 199; Stop 223
taggtacaggttttagcatcaattg

SEQ ID NO: 61236 - DNA, 25 bp, Artificial
  probe
  misc_feature (1)..(25): SEQ ID NO: 512; WAN024AO9_at; Start 236; Stop 260
ccatatgaagttgaaacgtggagat

SEQ ID NO: 61237 - DNA, 25 bp, Artificial
  probe
  misc_feature (1)..(25): SEQ ID NO: 512; WAN024AO9_at; Start 484; Stop 508
tataataataaaatgcagctagaag

SEQ ID NO: 61238 - DNA, 25 bp, Artificial
  probe
  misc_feature (1)..(25): SEQ ID NO: 512; WAN024AO9_at; Start 497; Stop 521
tgcagctagaagaaaagttatttta

SEQ ID NO: 61239 - DNA, 25 bp, Artificial
  probe
  misc_feature (1)..(25): SEQ ID NO: 512; WAN024AO9_at; Start 229; Stop 253
ttttgagccatatgaagttgaaacg

SEQ ID NO: 61240 - DNA, 25 bp, Artificial
  probe
  misc_feature (1)..(25): SEQ ID NO: 512; WAN024AO9_at; Start 139; Stop 163
gactatcgctatcaatttcatccac

SEQ ID NO: 61241 - DNA, 25 bp, Artificial
  probe
  misc_feature (1)..(25): SEQ ID NO: 512; WAN024AO9_at; Start 533; Stop 557
tcaacatagcgagaaggcggtttcc

SEQ ID NO: 61242 - DNA, 25 bp, Artificial
  probe
  misc_feature (1)..(25): SEQ ID NO: 512; WAN024AO9_at; Start 299; Stop 323
ccgtttttggagagagttcagtact

SEQ ID NO: 61243 - DNA, 25 bp, Artificial
  probe
  misc_feature (1)..(25): SEQ ID NO: 512; WAN024AO9_at; Start 185; Stop 209
tgaaccgaaacatctaggtacaggt

SEQ ID NO: 61244 - DNA, 25 bp, Artificial
  probe
  misc_feature (1)..(25): SEQ ID NO: 512; WAN024AO9_at; Start 520; Stop 544
taatataaatcactcaacatagcga

SEQ ID NO: 61245 - DNA, 25 bp, Artificial
  probe
  misc_feature (1)..(25): SEQ ID NO: 512; WAN024AO9_at; Start 323; Stop 347
tatgtggcgctaaatactatatgta

SEQ ID NO: 61246 - DNA, 25 bp, Artificial
  probe
  misc_feature (1)..(25): SEQ ID NO: 512; WAN024AO9_at; Start 594; Stop 618
acgagatatctactacaggttatag

SEQ ID NO: 61247 - DNA, 25 bp, Artificial
  probe
  misc_feature (1)..(25): SEQ ID NO: 512; WAN024AO9_at; Start 156; Stop 180
tcatccacttttacagtttcatggt

SEQ ID NO: 61248 - DNA, 25 bp, Artificial
  probe
  misc_feature (1)..(25): SEQ ID NO: 512; WAN024AO9_at; Start 75; Stop 99
tgatatttttccgaggatgaactta

SEQ ID NO: 61249 - DNA, 25 bp, Artificial
  probe
  misc_feature (1)..(25): SEQ ID NO: 512; WAN024AO9_at; Start 579; Stop 603
tcatattgtctaaatacgagatatc

SEQ ID NO: 61250 - DNA, 25 bp, Artificial
  probe
  misc_feature (1)..(25): SEQ ID NO: 512; WAN024AO9_at; Start 277; Stop 301
cgccctattcaaagaggaataaccg

SEQ ID NO: 61251 - DNA, 25 bp, Artificial
  probe
  misc_feature (1)..(25): SEQ ID NO: 512; WAN024AO9_at; Start 609; Stop 633
caggttatagttgatttaaacaggt

SEQ ID NO: 61252 - DNA, 25 bp, Artificial
  probe
  misc_feature (1)..(25): SEQ ID NO: 512; WAN024AO9_at; Start 411; Stop 435
aaagtttattctaggagtatgtatc

SEQ ID NO: 61253 - DNA, 25 bp, Artificial
  probe
  misc_feature (1)..(25): SEQ ID NO: 512; WAN024AO9_at; Start 214; Stop 238
gcatcaattgattgtttttgagcca

SEQ ID NO: 61254 - DNA, 25 bp, Artificial
  probe
  misc_feature (1)..(25): SEQ ID NO: 512; WAN024AO9_at; Start 124; Stop 148
gatgcctcttgatttgactatcgct

SEQ ID NO: 61255 - DNA, 25 bp, Artificial
  probe
  misc_feature (1)..(25): SEQ ID NO: 552; WAN024AOA_at; Start 133; Stop 157
ctcgacgatagtacaaacattatca

SEQ ID NO: 61256 - DNA, 25 bp, Artificial
  probe
  misc_feature (1)..(25): SEQ ID NO: 552; WAN024AOA_at; Start 95; Stop 119
tcttctaaaatttatctcgttaggc

SEQ ID NO: 61257 - DNA, 25 bp, Artificial
  probe
  misc_feature (1)..(25): SEQ ID NO: 552; WAN024AOA_at; Start 24; Stop 48
tgctcattttaataaacaatactag

SEQ ID NO: 61258 - DNA, 25 bp, Artificial
  probe
  misc_feature (1)..(25): SEQ ID NO: 552; WAN024AOA_at; Start 276; Stop 300
tttaaagcaacaagaagattttcag

SEQ ID NO: 61259 - DNA, 25 bp, Artificial
  probe
  misc_feature (1)..(25): SEQ ID NO: 552; WAN024AOA_at; Start 298; Stop 322
cagtatcatcctatagatacgagct

SEQ ID NO: 61260 - DNA, 25 bp, Artificial
  probe
  misc_feature (1)..(25): SEQ ID NO: 552; WAN024AOA_at; Start 107; Stop 131
tatctcgttaggcaatcaagcaaaa

SEQ ID NO: 61261 - DNA, 25 bp, Artificial
  probe
  misc_feature (1)..(25): SEQ ID NO: 552; WAN024AOA_at; Start 263; Stop 287
ttttcgattgtgatttaaagcaaca

SEQ ID NO: 61262 - DNA, 25 bp, Artificial
  probe
  misc_feature (1)..(25): SEQ ID NO: 552; WAN024AOA_at; Start 119; Stop 143
caatcaagcaaaaactcgacgatag

SEQ ID NO: 61263 - DNA, 25 bp, Artificial
  probe
  misc_feature (1)..(25): SEQ ID NO: 552; WAN024AOA_at; Start 317; Stop 341
cgagctaattaagaaaaactacatt

SEQ ID NO: 61264 - DNA, 25 bp, Artificial
  probe
  misc_feature (1)..(25): SEQ ID NO: 552; WAN024AOA_at; Start 36; Stop 60
taaacaatactagtgtaactatcct

SEQ ID NO: 61265 - DNA, 25 bp, Artificial
  probe
  misc_feature (1)..(25): SEQ ID NO: 552; WAN024AOA_at; Start 138; Stop 162
cgatagtacaaacattatcatacag

SEQ ID NO: 61266 - DNA, 25 bp, Artificial
  probe
  misc_feature (1)..(25): SEQ ID NO: 552; WAN024AOA_at; Start 283; Stop 307
caacaagaagattttcagtatcatc

SEQ ID NO: 61267 - DNA, 25 bp, Artificial
  probe
  misc_feature (1)..(25): SEQ ID NO: 552; WAN024AOA_at; Start 115; Stop 139
taggcaatcaagcaaaaactcgacg

SEQ ID NO: 61268 - DNA, 25 bp, Artificial
  probe
  misc_feature (1)..(25): SEQ ID NO: 552; WAN024AOA_at; Start 41; Stop 65
aatactagtgtaactatccttccag

SEQ ID NO: 61269 - DNA, 25 bp, Artificial
  probe
  misc_feature (1)..(25): SEQ ID NO: 552; WAN024AOA_at; Start 235; Stop 259
cattcttttctaagatgaaaaacag

SEQ ID NO: 61270 - DNA, 25 bp, Artificial
  probe
  misc_feature (1)..(25): SEQ ID NO: 552; WAN024AOA_at; Start 268; Stop 292
gattgtgatttaaagcaacaagaag

SEQ ID NO: 61271 - DNA, 25 bp, Artificial
  probe
  misc_feature (1)..(25): SEQ ID NO: 552; WAN024AOA_at; Start 103; Stop 127
aatttatctcgttaggcaatcaagc

SEQ ID NO: 61272 - DNA, 25 bp, Artificial
  probe
  misc_feature (1)..(25): SEQ ID NO: 552; WAN024AOA_at; Start 117; Stop 141
ggcaatcaagcaaaaactcgacgat

SEQ ID NO: 61273 - DNA, 25 bp, Artificial
  probe
  misc_feature (1)..(25): SEQ ID NO: 552; WAN024AOA_at; Start 225; Stop 249
catttctaaacattcttttctaaga

SEQ ID NO: 61274 - DNA, 25 bp, Artificial
  probe
  misc_feature (1)..(25): SEQ ID NO: 552; WAN024AOA_at; Start 47; Stop 71
agtgtaactatccttccagtcagaa

SEQ ID NO: 61275 - DNA, 25 bp, Artificial
  probe
  misc_feature (1)..(25): SEQ ID NO: 552; WAN024AOA_at; Start 307; Stop 331
cctatagatacgagctaattaagaa

SEQ ID NO: 61276 - DNA, 25 bp, Artificial
  probe
  misc_feature (1)..(25): SEQ ID NO: 552; WAN024AOA_at; Start 334; Stop 358
actacatttttgaatataaactaca

SEQ ID NO: 61277 - DNA, 25 bp, Artificial
  probe
  misc_feature (1)..(25): SEQ ID NO: 552; WAN024AOA_at; Start 304; Stop 328
catcctatagatacgagctaattaa

SEQ ID NO: 61278 - DNA, 25 bp, Artificial
  probe
  misc_feature (1)..(25): SEQ ID NO: 552; WAN024AOA_at; Start 112; Stop 136
cgttaggcaatcaagcaaaaactcg

SEQ ID NO: 61279 - DNA, 25 bp, Artificial
  probe
  misc_feature (1)..(25): SEQ ID NO: 552; WAN024AOA_at; Start 4; Stop 28
gattccaaattttctctatctgctc

SEQ ID NO: 61280 - DNA, 25 bp, Artificial
  probe
  misc_feature (1)..(25): SEQ ID NO: 552; WAN024AOA_at; Start 313; Stop 337
gatacgagctaattaagaaaaacta

SEQ ID NO: 61281 - DNA, 25 bp, Artificial
  probe
  misc_feature (1)..(25): SEQ ID NO: 552; WAN024AOA_at; Start 251; Stop 275
gaaaaacagaatttttcgattgtga

SEQ ID NO: 61282 - DNA, 25 bp, Artificial
  probe
  misc_feature (1)..(25): SEQ ID NO: 552; WAN024AOA_at; Start 46; Stop 70
tagtgtaactatccttccagtcaga

SEQ ID NO: 61283 - DNA, 25 bp, Artificial
  probe
  misc_feature (1)..(25): SEQ ID NO: 552; WAN024AOA_at; Start 17; Stop 41
ctctatctgctcattttaataaaca

SEQ ID NO: 61284 - DNA, 25 bp, Artificial
  probe
  misc_feature (1)..(25): SEQ ID NO: 552; WAN024AOA_at; Start 127; Stop 151
caaaaactcgacgatagtacaaaca

SEQ ID NO: 61285 - DNA, 25 bp, Artificial
  probe
  misc_feature (1)..(25): SEQ ID NO: 552; WAN024AOA_at; Start 289; Stop 313
gaagattttcagtatcatcctatag

SEQ ID NO: 61286 - DNA, 25 bp, Artificial
  probe
  misc_feature (1)..(25): SEQ ID NO: 552; WAN024AOA_at; Start 123; Stop 147
caagcaaaaactcgacgatagtaca

SEQ ID NO: 61287 - DNA, 25 bp, Artificial
  probe
  misc_feature (1)..(25): SEQ ID NO: 552; WAN024AOA_at; Start 286; Stop 310
caagaagattttcagtatcatccta

SEQ ID NO: 61288 - DNA, 25 bp, Artificial
  probe
  misc_feature (1)..(25): SEQ ID NO: 552; WAN024AOA_at; Start 109; Stop 133
tctcgttaggcaatcaagcaaaaac

SEQ ID NO: 61289 - DNA, 25 bp, Artificial
  probe
  misc_feature (1)..(25): SEQ ID NO: 4721; WAN024AOB_at; Start 269; Stop 293
gattgcctaacgagataaattttag

SEQ ID NO: 61290 - DNA, 25 bp, Artificial
  probe
  misc_feature (1)..(25): SEQ ID NO: 4721; WAN024AOB_at; Start 111; Stop 135
tttaaatcacaatcgaaaaattctg

SEQ ID NO: 61291 - DNA, 25 bp, Artificial
  probe
  misc_feature (1)..(25): SEQ ID NO: 4721; WAN024AOB_at; Start 65; Stop 89
taattagctcgtatctataggatga

SEQ ID NO: 61292 - DNA, 25 bp, Artificial
  probe
  misc_feature (1)..(25): SEQ ID NO: 4721; WAN024AOB_at; Start 55; Stop 79
tagtttttcttaattagctcgtatc

SEQ ID NO: 61293 - DNA, 25 bp, Artificial
  probe
  misc_feature (1)..(25): SEQ ID NO: 4721; WAN024AOB_at; Start 97; Stop 121
aatcttcttgttgctttaaatcaca

SEQ ID NO: 61294 - DNA, 25 bp, Artificial
  probe
  misc_feature (1)..(25): SEQ ID NO: 4721; WAN024AOB_at; Start 79; Stop 103
ctataggatgatactgaaaatcttc

SEQ ID NO: 61295 - DNA, 25 bp, Artificial
  probe
  misc_feature (1)..(25): SEQ ID NO: 4721; WAN024AOB_at; Start 351; Stop 375
tgtttattaaaatgagcagatagag

SEQ ID NO: 61296 - DNA, 25 bp, Artificial
  probe
  misc_feature (1)..(25): SEQ ID NO: 4721; WAN024AOB_at; Start 233; Stop 257
tatgataatgtttgtactatcgtcg

SEQ ID NO: 61297 - DNA, 25 bp, Artificial
  probe
  misc_feature (1)..(25): SEQ ID NO: 4721; WAN024AOB_at; Start 71; Stop 95
gctcgtatctataggatgatactga

SEQ ID NO: 61298 - DNA, 25 bp, Artificial
  probe
  misc_feature (1)..(25): SEQ ID NO: 4721; WAN024AOB_at; Start 129; Stop 153
aattctgtttttcatcttagaaaag

SEQ ID NO: 61299 - DNA, 25 bp, Artificial
  probe
  misc_feature (1)..(25): SEQ ID NO: 4721; WAN024AOB_at; Start 329; Stop 353
ggaaggatagttacactagtattgt

SEQ ID NO: 61300 - DNA, 25 bp, Artificial
  probe
  misc_feature (1)..(25): SEQ ID NO: 4721; WAN024AOB_at; Start 118; Stop 142
cacaatcgaaaaattctgtttttca

SEQ ID NO: 61301 - DNA, 25 bp, Artificial
  probe
  misc_feature (1)..(25): SEQ ID NO: 4721; WAN024AOB_at; Start 273; Stop 297
gcctaacgagataaattttagaaga

SEQ ID NO: 61302 - DNA, 25 bp, Artificial
  probe
  misc_feature (1)..(25): SEQ ID NO: 4721; WAN024AOB_at; Start 323; Stop 347
ctgactggaaggatagttacactag

SEQ ID NO: 61303 - DNA, 25 bp, Artificial
  probe
  misc_feature (1)..(25): SEQ ID NO: 4721; WAN024AOB_at; Start 34; Stop 58
tgtagtttatattcaaaaatgtagt

SEQ ID NO: 61304 - DNA, 25 bp, Artificial
  probe
  misc_feature (1)..(25): SEQ ID NO: 4721; WAN024AOB_at; Start 141; Stop 165
catcttagaaaagaatgtttagaaa

SEQ ID NO: 61305 - DNA, 25 bp, Artificial
  probe
  misc_feature (1)..(25): SEQ ID NO: 4721; WAN024AOB_at; Start 153; Stop 177
gaatgtttagaaatgtaaaatgaac

SEQ ID NO: 61306 - DNA, 25 bp, Artificial
  probe
  misc_feature (1)..(25): SEQ ID NO: 4721; WAN024AOB_at; Start 321; Stop 345
ttctgactggaaggatagttacact

SEQ ID NO: 61307 - DNA, 25 bp, Artificial
  probe
  misc_feature (1)..(25): SEQ ID NO: 4721; WAN024AOB_at; Start 51; Stop 75
aatgtagtttttcttaattagctcg

SEQ ID NO: 61308 - DNA, 25 bp, Artificial
  probe
  misc_feature (1)..(25): SEQ ID NO: 4721; WAN024AOB_at; Start 361; Stop 385
aatgagcagatagagaaaatttgga

SEQ ID NO: 61309 - DNA, 25 bp, Artificial
  probe
  misc_feature (1)..(25): SEQ ID NO: 4721; WAN024AOB_at; Start 105; Stop 129
tgttgctttaaatcacaatcgaaaa

SEQ ID NO: 61310 - DNA, 25 bp, Artificial
  probe
  misc_feature (1)..(25): SEQ ID NO: 4721; WAN024AOB_at; Start 342; Stop 366
cactagtattgtttattaaaatgag

SEQ ID NO: 61311 - DNA, 25 bp, Artificial
  probe
  misc_feature (1)..(25): SEQ ID NO: 4721; WAN024AOB_at; Start 247; Stop 271
tactatcgtcgagtttttgcttgat

SEQ ID NO: 61312 - DNA, 25 bp, Artificial
  probe
  misc_feature (1)..(25): SEQ ID NO: 4721; WAN024AOB_at; Start 82; Stop 106
taggatgatactgaaaatcttcttg

SEQ ID NO: 61313 - DNA, 25 bp, Artificial
  probe
  misc_feature (1)..(25): SEQ ID NO: 4721; WAN024AOB_at; Start 260; Stop 284
tttttgcttgattgcctaacgagat

SEQ ID NO: 61314 - DNA, 25 bp, Artificial
  probe
  misc_feature (1)..(25): SEQ ID NO: 4721; WAN024AOB_at; Start 236; Stop 260
gataatgtttgtactatcgtcgagt

SEQ ID NO: 61315 - DNA, 25 bp, Artificial
  probe
  misc_feature (1)..(25): SEQ ID NO: 4721; WAN024AOB_at; Start 253; Stop 277
cgtcgagtttttgcttgattgccta

SEQ ID NO: 61316 - DNA, 25 bp, Artificial
  probe
  misc_feature (1)..(25): SEQ ID NO: 4721; WAN024AOB_at; Start 242; Stop 266
gtttgtactatcgtcgagtttttgc

SEQ ID NO: 61317 - DNA, 25 bp, Artificial
  probe
  misc_feature (1)..(25): SEQ ID NO: 4721; WAN024AOB_at; Start 325; Stop 349
gactggaaggatagttacactagta

SEQ ID NO: 61318 - DNA, 25 bp, Artificial
  probe
  misc_feature (1)..(25): SEQ ID NO: 4721; WAN024AOB_at; Start 263; Stop 287
ttgcttgattgcctaacgagataaa

SEQ ID NO: 61319 - DNA, 25 bp, Artificial
  probe
  misc_feature (1)..(25): SEQ ID NO: 4721; WAN024AOB_at; Start 257; Stop 281
gagtttttgcttgattgcctaacga

SEQ ID NO: 61320 - DNA, 25 bp, Artificial
  probe
  misc_feature (1)..(25): SEQ ID NO: 4721; WAN024AOB_at; Start 250; Stop 274
tatcgtcgagtttttgcttgattgc

SEQ ID NO: 61321 - DNA, 25 bp, Artificial
  probe
  misc_feature (1)..(25): SEQ ID NO: 4721; WAN024AOB_at; Start 265; Stop 289
gcttgattgcctaacgagataaatt

SEQ ID NO: 61322 - DNA, 25 bp, Artificial
  probe
  misc_feature (1)..(25): SEQ ID NO: 4721; WAN024AOB_at; Start 85; Stop 109
gatgatactgaaaatcttcttgttg

SEQ ID NO: 61323 - DNA, 25 bp, Artificial
  probe
  misc_feature (1)..(25): SEQ ID NO: 3202; WAN024AOC_at; Start 32; Stop 56
atattcccaaacagccttgaggttg

SEQ ID NO: 61324 - DNA, 25 bp, Artificial
  probe
  misc_feature (1)..(25): SEQ ID NO: 3202; WAN024AOC_at; Start 15; Stop 39
ttatttcagctcttgcaatattccc

SEQ ID NO: 61325 - DNA, 25 bp, Artificial
  probe
  misc_feature (1)..(25): SEQ ID NO: 3202; WAN024AOC_at; Start 19; Stop 43
ttcagctcttgcaatattcccaaac

SEQ ID NO: 61326 - DNA, 25 bp, Artificial
  probe
  misc_feature (1)..(25): SEQ ID NO: 3202; WAN024AOC_at; Start 21; Stop 45
cagctcttgcaatattcccaaacag

SEQ ID NO: 61327 - DNA, 25 bp, Artificial
  probe
  misc_feature (1)..(25): SEQ ID NO: 3202; WAN024AOC_at; Start 16; Stop 40
tatttcagctcttgcaatattccca

SEQ ID NO: 61328 - DNA, 25 bp, Artificial
  probe
  misc_feature (1)..(25): SEQ ID NO: 3202; WAN024AOC_at; Start 31; Stop 55
aatattcccaaacagccttgaggtt

SEQ ID NO: 61329 - DNA, 25 bp, Artificial
  probe
  misc_feature (1)..(25): SEQ ID NO: 3202; WAN024AOC_at; Start 30; Stop 54
caatattcccaaacagccttgaggt

SEQ ID NO: 61330 - DNA, 25 bp, Artificial
  probe
  misc_feature (1)..(25): SEQ ID NO: 3202; WAN024AOC_at; Start 2; Stop 26
aattcttattcctttatttcagctc

SEQ ID NO: 61331 - DNA, 25 bp, Artificial
  probe
  misc_feature (1)..(25): SEQ ID NO: 3202; WAN024AOC_at; Start 8; Stop 32
tattcctttatttcagctcttgcaa

SEQ ID NO: 61332 - DNA, 25 bp, Artificial
  probe
  misc_feature (1)..(25): SEQ ID NO: 3202; WAN024AOC_at; Start 10; Stop 34
ttcctttatttcagctcttgcaata

SEQ ID NO: 61333 - DNA, 25 bp, Artificial
  probe
  misc_feature (1)..(25): SEQ ID NO: 3202; WAN024AOC_at; Start 28; Stop 52
tgcaatattcccaaacagccttgag

SEQ ID NO: 61334 - DNA, 25 bp, Artificial
  probe
  misc_feature (1)..(25): SEQ ID NO: 3202; WAN024AOC_at; Start 22; Stop 46
agctcttgcaatattcccaaacagc

SEQ ID NO: 61335 - DNA, 25 bp, Artificial
  probe
  misc_feature (1)..(25): SEQ ID NO: 3202; WAN024AOC_at; Start 13; Stop 37
ctttatttcagctcttgcaatattc

SEQ ID NO: 61336 - DNA, 25 bp, Artificial
  probe
  misc_feature (1)..(25): SEQ ID NO: 3202; WAN024AOC_at; Start 12; Stop 36
cctttatttcagctcttgcaatatt

SEQ ID NO: 61337 - DNA, 25 bp, Artificial
  probe
  misc_feature (1)..(25): SEQ ID NO: 3202; WAN024AOC_at; Start 17; Stop 41
atttcagctcttgcaatattcccaa

SEQ ID NO: 61338 - DNA, 25 bp, Artificial
  probe
  misc_feature (1)..(25): SEQ ID NO: 3202; WAN024AOC_at; Start 25; Stop 49
tcttgcaatattcccaaacagcctt

SEQ ID NO: 61339 - DNA, 25 bp, Artificial
  probe
  misc_feature (1)..(25): SEQ ID NO: 3202; WAN024AOC_at; Start 9; Stop 33
attcctttatttcagctcttgcaat

SEQ ID NO: 61340 - DNA, 25 bp, Artificial
  probe
  misc_feature (1)..(25): SEQ ID NO: 3202; WAN024AOC_at; Start 24; Stop 48
ctcttgcaatattcccaaacagcct

SEQ ID NO: 61341 - DNA, 25 bp, Artificial
  probe
  misc_feature (1)..(25): SEQ ID NO: 3202; WAN024AOC_at; Start 11; Stop 35
tcctttatttcagctcttgcaatat

SEQ ID NO: 61342 - DNA, 25 bp, Artificial
  probe
  misc_feature (1)..(25): SEQ ID NO: 3202; WAN024AOC_at; Start 35; Stop 59
ttcccaaacagccttgaggttgtta

SEQ ID NO: 61343 - DNA, 25 bp, Artificial
  probe
  misc_feature (1)..(25): SEQ ID NO: 3202; WAN024AOC_at; Start 26; Stop 50
cttgcaatattcccaaacagccttg

SEQ ID NO: 61344 - DNA, 25 bp, Artificial
  probe
  misc_feature (1)..(25): SEQ ID NO: 3202; WAN024AOC_at; Start 7; Stop 31
ttattcctttatttcagctcttgca

SEQ ID NO: 61345 - DNA, 25 bp, Artificial
  probe
  misc_feature (1)..(25): SEQ ID NO: 3202; WAN024AOC_at; Start 14; Stop 38
tttatttcagctcttgcaatattcc

SEQ ID NO: 61346 - DNA, 25 bp, Artificial
  probe
  misc_feature (1)..(25): SEQ ID NO: 3202; WAN024AOC_at; Start 3; Stop 27
attcttattcctttatttcagctct

SEQ ID NO: 61347 - DNA, 25 bp, Artificial
  probe
  misc_feature (1)..(25): SEQ ID NO: 3202; WAN024AOC_at; Start 29; Stop 53
gcaatattcccaaacagccttgagg

SEQ ID NO: 61348 - DNA, 25 bp, Artificial
  probe
  misc_feature (1)..(25): SEQ ID NO: 3202; WAN024AOC_at; Start 27; Stop 51
ttgcaatattcccaaacagccttga

SEQ ID NO: 61349 - DNA, 25 bp, Artificial
  probe
  misc_feature (1)..(25): SEQ ID NO: 3202; WAN024AOC_at; Start 34; Stop 58
attcccaaacagccttgaggttgtt

SEQ ID NO: 61350 - DNA, 25 bp, Artificial
  probe
  misc_feature (1)..(25): SEQ ID NO: 3202; WAN024AOC_at; Start 33; Stop 57
tattcccaaacagccttgaggttgt

SEQ ID NO: 61351 - DNA, 25 bp, Artificial
  probe
  misc_feature (1)..(25): SEQ ID NO: 3202; WAN024AOC_at; Start 4; Stop 28
ttcttattcctttatttcagctctt

SEQ ID NO: 61352 - DNA, 25 bp, Artificial
  probe
  misc_feature (1)..(25): SEQ ID NO: 3202; WAN024AOC_at; Start 1; Stop 25
caattcttattcctttatttcagct

SEQ ID NO: 61353 - DNA, 25 bp, Artificial
  probe
  misc_feature (1)..(25): SEQ ID NO: 3202; WAN024AOC_at; Start 23; Stop 47
gctcttgcaatattcccaaacagcc

SEQ ID NO: 61354 - DNA, 25 bp, Artificial
  probe
  misc_feature (1)..(25): SEQ ID NO: 3202; WAN024AOC_at; Start 6; Stop 30
cttattcctttatttcagctcttgc

SEQ ID NO: 61355 - DNA, 25 bp, Artificial
  probe
  misc_feature (1)..(25): SEQ ID NO: 3202; WAN024AOC_at; Start 20; Stop 44
tcagctcttgcaatattcccaaaca

SEQ ID NO: 61356 - DNA, 25 bp, Artificial
  probe
  misc_feature (1)..(25): SEQ ID NO: 3202; WAN024AOC_at; Start 18; Stop 42
tttcagctcttgcaatattcccaaa

SEQ ID NO: 61357 - DNA, 25 bp, Artificial
  probe
  misc_feature (1)..(25): SEQ ID NO: 4426; WAN024AOD_at; Start 3; Stop 27
acaacctcaaggctgtttgggaata

SEQ ID NO: 61358 - DNA, 25 bp, Artificial
  probe
  misc_feature (1)..(25): SEQ ID NO: 4426; WAN024AOD_at; Start 18; Stop 42
tttgggaatattgcaagagctgaaa

SEQ ID NO: 61359 - DNA, 25 bp, Artificial
  probe
  misc_feature (1)..(25): SEQ ID NO: 4426; WAN024AOD_at; Start 9; Stop 33
tcaaggctgtttgggaatattgcaa

SEQ ID NO: 61360 - DNA, 25 bp, Artificial
  probe
  misc_feature (1)..(25): SEQ ID NO: 4426; WAN024AOD_at; Start 19; Stop 43
ttgggaatattgcaagagctgaaat

SEQ ID NO: 61361 - DNA, 25 bp, Artificial
  probe
  misc_feature (1)..(25): SEQ ID NO: 4426; WAN024AOD_at; Start 32; Stop 56
aagagctgaaataaaggaataagaa

SEQ ID NO: 61362 - DNA, 25 bp, Artificial
  probe
  misc_feature (1)..(25): SEQ ID NO: 4426; WAN024AOD_at; Start 28; Stop 52
ttgcaagagctgaaataaaggaata

SEQ ID NO: 61363 - DNA, 25 bp, Artificial
  probe
  misc_feature (1)..(25): SEQ ID NO: 4426; WAN024AOD_at; Start 26; Stop 50
tattgcaagagctgaaataaaggaa

SEQ ID NO: 61364 - DNA, 25 bp, Artificial
  probe
  misc_feature (1)..(25): SEQ ID NO: 4426; WAN024AOD_at; Start 25; Stop 49
atattgcaagagctgaaataaagga

SEQ ID NO: 61365 - DNA, 25 bp, Artificial
  probe
  misc_feature (1)..(25): SEQ ID NO: 4426; WAN024AOD_at; Start 17; Stop 41
gtttgggaatattgcaagagctgaa

SEQ ID NO: 61366 - DNA, 25 bp, Artificial
  probe
  misc_feature (1)..(25): SEQ ID NO: 4426; WAN024AOD_at; Start 30; Stop 54
gcaagagctgaaataaaggaataag

SEQ ID NO: 61367 - DNA, 25 bp, Artificial
  probe
  misc_feature (1)..(25): SEQ ID NO: 4426; WAN024AOD_at; Start 33; Stop 57
agagctgaaataaaggaataagaat

SEQ ID NO: 61368 - DNA, 25 bp, Artificial
  probe
  misc_feature (1)..(25): SEQ ID NO: 4426; WAN024AOD_at; Start 6; Stop 30
acctcaaggctgtttgggaatattg

SEQ ID NO: 61369 - DNA, 25 bp, Artificial
  probe
  misc_feature (1)..(25): SEQ ID NO: 4426; WAN024AOD_at; Start 35; Stop 59
agctgaaataaaggaataagaattg

SEQ ID NO: 61370 - DNA, 25 bp, Artificial
  probe
  misc_feature (1)..(25): SEQ ID NO: 4426; WAN024AOD_at; Start 34; Stop 58
gagctgaaataaaggaataagaatt

SEQ ID NO: 61371 - DNA, 25 bp, Artificial
  probe
  misc_feature (1)..(25): SEQ ID NO: 4426; WAN024AOD_at; Start 16; Stop 40
tgtttgggaatattgcaagagctga

SEQ ID NO: 61372 - DNA, 25 bp, Artificial
  probe
  misc_feature (1)..(25): SEQ ID NO: 4426; WAN024AOD_at; Start 5; Stop 29
aacctcaaggctgtttgggaatatt

SEQ ID NO: 61373 - DNA, 25 bp, Artificial
  probe
  misc_feature (1)..(25): SEQ ID NO: 4426; WAN024AOD_at; Start 11; Stop 35
aaggctgtttgggaatattgcaaga

SEQ ID NO: 61374 - DNA, 25 bp, Artificial
  probe
  misc_feature (1)..(25): SEQ ID NO: 4426; WAN024AOD_at; Start 10; Stop 34
caaggctgtttgggaatattgcaag

SEQ ID NO: 61375 - DNA, 25 bp, Artificial
  probe
  misc_feature (1)..(25): SEQ ID NO: 4426; WAN024AOD_at; Start 12; Stop 36
aggctgtttgggaatattgcaagag

SEQ ID NO: 61376 - DNA, 25 bp, Artificial
  probe
  misc_feature (1)..(25): SEQ ID NO: 4426; WAN024AOD_at; Start 23; Stop 47
gaatattgcaagagctgaaataaag

SEQ ID NO: 61377 - DNA, 25 bp, Artificial
  probe
  misc_feature (1)..(25): SEQ ID NO: 4426; WAN024AOD_at; Start 20; Stop 44
tgggaatattgcaagagctgaaata

SEQ ID NO: 61378 - DNA, 25 bp, Artificial
  probe
  misc_feature (1)..(25): SEQ ID NO: 4426; WAN024AOD_at; Start 7; Stop 31
cctcaaggctgtttgggaatattgc

SEQ ID NO: 61379 - DNA, 25 bp, Artificial
  probe
  misc_feature (1)..(25): SEQ ID NO: 4426; WAN024AOD_at; Start 14; Stop 38
gctgtttgggaatattgcaagagct

SEQ ID NO: 61380 - DNA, 25 bp, Artificial
  probe
  misc_feature (1)..(25): SEQ ID NO: 4426; WAN024AOD_at; Start 1; Stop 25
taacaacctcaaggctgtttgggaa

SEQ ID NO: 61381 - DNA, 25 bp, Artificial
  probe
  misc_feature (1)..(25): SEQ ID NO: 4426; WAN024AOD_at; Start 31; Stop 55
caagagctgaaataaaggaataaga

SEQ ID NO: 61382 - DNA, 25 bp, Artificial
  probe
  misc_feature (1)..(25): SEQ ID NO: 4426; WAN024AOD_at; Start 27; Stop 51
attgcaagagctgaaataaaggaat

SEQ ID NO: 61383 - DNA, 25 bp, Artificial
  probe
  misc_feature (1)..(25): SEQ ID NO: 4426; WAN024AOD_at; Start 4; Stop 28
caacctcaaggctgtttgggaatat

SEQ ID NO: 61384 - DNA, 25 bp, Artificial
  probe
  misc_feature (1)..(25): SEQ ID NO: 4426; WAN024AOD_at; Start 8; Stop 32
ctcaaggctgtttgggaatattgca

SEQ ID NO: 61385 - DNA, 25 bp, Artificial
  probe
  misc_feature (1)..(25): SEQ ID NO: 4426; WAN024AOD_at; Start 29; Stop 53
tgcaagagctgaaataaaggaataa

SEQ ID NO: 61386 - DNA, 25 bp, Artificial
  probe
  misc_feature (1)..(25): SEQ ID NO: 4426; WAN024AOD_at; Start 24; Stop 48
aatattgcaagagctgaaataaagg

SEQ ID NO: 61387 - DNA, 25 bp, Artificial
  probe
  misc_feature (1)..(25): SEQ ID NO: 4426; WAN024AOD_at; Start 15; Stop 39
ctgtttgggaatattgcaagagctg

SEQ ID NO: 61388 - DNA, 25 bp, Artificial
  probe
  misc_feature (1)..(25): SEQ ID NO: 4426; WAN024AOD_at; Start 22; Stop 46
ggaatattgcaagagctgaaataaa

SEQ ID NO: 61389 - DNA, 25 bp, Artificial
  probe
  misc_feature (1)..(25): SEQ ID NO: 4426; WAN024AOD_at; Start 13; Stop 37
ggctgtttgggaatattgcaagagc

SEQ ID NO: 61390 - DNA, 25 bp, Artificial
  probe
  misc_feature (1)..(25): SEQ ID NO: 4426; WAN024AOD_at; Start 21; Stop 45
gggaatattgcaagagctgaaataa

SEQ ID NO: 61391 - DNA, 25 bp, Artificial
  probe
  misc_feature (1)..(25): SEQ ID NO: 5902; WAN024AOE_at; Start 30; Stop 54
aaaacattgcatattgcgccgaagg

SEQ ID NO: 61392 - DNA, 25 bp, Artificial
  probe
  misc_feature (1)..(25): SEQ ID NO: 5902; WAN024AOE_at; Start 34; Stop 58
cattgcatattgcgccgaaggaatt

SEQ ID NO: 61393 - DNA, 25 bp, Artificial
  probe
  misc_feature (1)..(25): SEQ ID NO: 5902; WAN024AOE_at; Start 37; Stop 61
tgcatattgcgccgaaggaattgct

SEQ ID NO: 61394 - DNA, 25 bp, Artificial
  probe
  misc_feature (1)..(25): SEQ ID NO: 5902; WAN024AOE_at; Start 19; Stop 43
attccttcccaaaaacattgcatat

SEQ ID NO: 61395 - DNA, 25 bp, Artificial
  probe
  misc_feature (1)..(25): SEQ ID NO: 5902; WAN024AOE_at; Start 14; Stop 38
ccactattccttcccaaaaacattg

SEQ ID NO: 61396 - DNA, 25 bp, Artificial
  probe
  misc_feature (1)..(25): SEQ ID NO: 5902; WAN024AOE_at; Start 26; Stop 50
cccaaaaacattgcatattgcgccg

SEQ ID NO: 61397 - DNA, 25 bp, Artificial
  probe
  misc_feature (1)..(25): SEQ ID NO: 5902; WAN024AOE_at; Start 32; Stop 56
aacattgcatattgcgccgaaggaa

SEQ ID NO: 61398 - DNA, 25 bp, Artificial
  probe
  misc_feature (1)..(25): SEQ ID NO: 5902; WAN024AOE_at; Start 67; Stop 91
tatcccaagcacaaaaccctcagtc

SEQ ID NO: 61399 - DNA, 25 bp, Artificial
  probe
  misc_feature (1)..(25): SEQ ID NO: 5902; WAN024AOE_at; Start 24; Stop 48
ttcccaaaaacattgcatattgcgc

SEQ ID NO: 61400 - DNA, 25 bp, Artificial
  probe
  misc_feature (1)..(25): SEQ ID NO: 5902; WAN024AOE_at; Start 66; Stop 90
ctatcccaagcacaaaaccctcagt

SEQ ID NO: 61401 - DNA, 25 bp, Artificial
  probe
  misc_feature (1)..(25): SEQ ID NO: 5902; WAN024AOE_at; Start 17; Stop 41
ctattccttcccaaaaacattgcat

SEQ ID NO: 61402 - DNA, 25 bp, Artificial
  probe
  misc_feature (1)..(25): SEQ ID NO: 5902; WAN024AOE_at; Start 20; Stop 44
ttccttcccaaaaacattgcatatt

SEQ ID NO: 61403 - DNA, 25 bp, Artificial
  probe
  misc_feature (1)..(25): SEQ ID NO: 5902; WAN024AOE_at; Start 33; Stop 57
acattgcatattgcgccgaaggaat

SEQ ID NO: 61404 - DNA, 25 bp, Artificial
  probe
  misc_feature (1)..(25): SEQ ID NO: 5902; WAN024AOE_at; Start 6; Stop 30
gattcggtccactattccttcccaa

SEQ ID NO: 61405 - DNA, 25 bp, Artificial
  probe
  misc_feature (1)..(25): SEQ ID NO: 5902; WAN024AOE_at; Start 38; Stop 62
gcatattgcgccgaaggaattgctc

SEQ ID NO: 61406 - DNA, 25 bp, Artificial
  probe
  misc_feature (1)..(25): SEQ ID NO: 5902; WAN024AOE_at; Start 16; Stop 40
actattccttcccaaaaacattgca

SEQ ID NO: 61407 - DNA, 25 bp, Artificial
  probe
  misc_feature (1)..(25): SEQ ID NO: 5902; WAN024AOE_at; Start 5; Stop 29
agattcggtccactattccttccca

SEQ ID NO: 61408 - DNA, 25 bp, Artificial
  probe
  misc_feature (1)..(25): SEQ ID NO: 5902; WAN024AOE_at; Start 39; Stop 63
catattgcgccgaaggaattgctca

SEQ ID NO: 61409 - DNA, 25 bp, Artificial
  probe
  misc_feature (1)..(25): SEQ ID NO: 5902; WAN024AOE_at; Start 23; Stop 47
cttcccaaaaacattgcatattgcg

SEQ ID NO: 61410 - DNA, 25 bp, Artificial
  probe
  misc_feature (1)..(25): SEQ ID NO: 5902; WAN024AOE_at; Start 29; Stop 53
aaaaacattgcatattgcgccgaag

SEQ ID NO: 61411 - DNA, 25 bp, Artificial
  probe
  misc_feature (1)..(25): SEQ ID NO: 5902; WAN024AOE_at; Start 27; Stop 51
ccaaaaacattgcatattgcgccga

SEQ ID NO: 61412 - DNA, 25 bp, Artificial
  probe
  misc_feature (1)..(25): SEQ ID NO: 5902; WAN024AOE_at; Start 22; Stop 46
ccttcccaaaaacattgcatattgc

SEQ ID NO: 61413 - DNA, 25 bp, Artificial
  probe
  misc_feature (1)..(25): SEQ ID NO: 5902; WAN024AOE_at; Start 25; Stop 49
tcccaaaaacattgcatattgcgcc

SEQ ID NO: 61414 - DNA, 25 bp, Artificial
  probe
  misc_feature (1)..(25): SEQ ID NO: 5902; WAN024AOE_at; Start 68; Stop 92
atcccaagcacaaaaccctcagtcg

SEQ ID NO: 61415 - DNA, 25 bp, Artificial
  probe
  misc_feature (1)..(25): SEQ ID NO: 5902; WAN024AOE_at; Start 18; Stop 42
tattccttcccaaaaacattgcata

SEQ ID NO: 61416 - DNA, 25 bp, Artificial
  probe
  misc_feature (1)..(25): SEQ ID NO: 5902; WAN024AOE_at; Start 28; Stop 52
caaaaacattgcatattgcgccgaa

SEQ ID NO: 61417 - DNA, 25 bp, Artificial
  probe
  misc_feature (1)..(25): SEQ ID NO: 5902; WAN024AOE_at; Start 31; Stop 55
aaacattgcatattgcgccgaagga

SEQ ID NO: 61418 - DNA, 25 bp, Artificial
  probe
  misc_feature (1)..(25): SEQ ID NO: 5902; WAN024AOE_at; Start 65; Stop 89
actatcccaagcacaaaaccctcag

SEQ ID NO: 61419 - DNA, 25 bp, Artificial
  probe
  misc_feature (1)..(25): SEQ ID NO: 5902; WAN024AOE_at; Start 2; Stop 26
ttcagattcggtccactattccttc

SEQ ID NO: 61420 - DNA, 25 bp, Artificial
  probe
  misc_feature (1)..(25): SEQ ID NO: 5902; WAN024AOE_at; Start 3; Stop 27
tcagattcggtccactattccttcc

SEQ ID NO: 61421 - DNA, 25 bp, Artificial
  probe
  misc_feature (1)..(25): SEQ ID NO: 5902; WAN024AOE_at; Start 1; Stop 25
tttcagattcggtccactattcctt

SEQ ID NO: 61422 - DNA, 25 bp, Artificial
  probe
  misc_feature (1)..(25): SEQ ID NO: 5902; WAN024AOE_at; Start 36; Stop 60
ttgcatattgcgccgaaggaattgc

SEQ ID NO: 61423 - DNA, 25 bp, Artificial
  probe
  misc_feature (1)..(25): SEQ ID NO: 5902; WAN024AOE_at; Start 21; Stop 45
tccttcccaaaaacattgcatattg

SEQ ID NO: 61424 - DNA, 25 bp, Artificial
  probe
  misc_feature (1)..(25): SEQ ID NO: 5902; WAN024AOE_at; Start 35; Stop 59
attgcatattgcgccgaaggaattg

SEQ ID NO: 61425 - DNA, 25 bp, Artificial
  probe
  misc_feature (1)..(25): SEQ ID NO: 4585; WAN024AOF_at; Start 74; Stop 98
attccttcggcgcaatatgcaatgt

SEQ ID NO: 61426 - DNA, 25 bp, Artificial
  probe
  misc_feature (1)..(25): SEQ ID NO: 4585; WAN024AOF_at; Start 90; Stop 114
atgcaatgtttttgggaaggaatag

SEQ ID NO: 61427 - DNA, 25 bp, Artificial
  probe
  misc_feature (1)..(25): SEQ ID NO: 4585; WAN024AOF_at; Start 41; Stop 65
actgagggttttgtgcttgggatag

SEQ ID NO: 61428 - DNA, 25 bp, Artificial
  probe
  misc_feature (1)..(25): SEQ ID NO: 4585; WAN024AOF_at; Start 88; Stop 112
atatgcaatgtttttgggaaggaat

SEQ ID NO: 61429 - DNA, 25 bp, Artificial
  probe
  misc_feature (1)..(25): SEQ ID NO: 4585; WAN024AOF_at; Start 76; Stop 100
tccttcggcgcaatatgcaatgttt

SEQ ID NO: 61430 - DNA, 25 bp, Artificial
  probe
  misc_feature (1)..(25): SEQ ID NO: 4585; WAN024AOF_at; Start 80; Stop 104
tcggcgcaatatgcaatgtttttgg

SEQ ID NO: 61431 - DNA, 25 bp, Artificial
  probe
  misc_feature (1)..(25): SEQ ID NO: 4585; WAN024AOF_at; Start 104; Stop 128
ggaaggaatagtggaccgaatctga

SEQ ID NO: 61432 - DNA, 25 bp, Artificial
  probe
  misc_feature (1)..(25): SEQ ID NO: 4585; WAN024AOF_at; Start 79; Stop 103
ttcggcgcaatatgcaatgtttttg

SEQ ID NO: 61433 - DNA, 25 bp, Artificial
  probe
  misc_feature (1)..(25): SEQ ID NO: 4585; WAN024AOF_at; Start 91; Stop 115
tgcaatgtttttgggaaggaatagt

SEQ ID NO: 61434 - DNA, 25 bp, Artificial
  probe
  misc_feature (1)..(25): SEQ ID NO: 4585; WAN024AOF_at; Start 71; Stop 95
gcaattccttcggcgcaatatgcaa

SEQ ID NO: 61435 - DNA, 25 bp, Artificial
  probe
  misc_feature (1)..(25): SEQ ID NO: 4585; WAN024AOF_at; Start 84; Stop 108
cgcaatatgcaatgtttttgggaag

SEQ ID NO: 61436 - DNA, 25 bp, Artificial
  probe
  misc_feature (1)..(25): SEQ ID NO: 4585; WAN024AOF_at; Start 93; Stop 117
caatgtttttgggaaggaatagtgg

SEQ ID NO: 61437 - DNA, 25 bp, Artificial
  probe
  misc_feature (1)..(25): SEQ ID NO: 4585; WAN024AOF_at; Start 75; Stop 99
ttccttcggcgcaatatgcaatgtt

SEQ ID NO: 61438 - DNA, 25 bp, Artificial
  probe
  misc_feature (1)..(25): SEQ ID NO: 4585; WAN024AOF_at; Start 83; Stop 107
gcgcaatatgcaatgtttttgggaa

SEQ ID NO: 61439 - DNA, 25 bp, Artificial
  probe
  misc_feature (1)..(25): SEQ ID NO: 4585; WAN024AOF_at; Start 73; Stop 97
aattccttcggcgcaatatgcaatg

SEQ ID NO: 61440 - DNA, 25 bp, Artificial
  probe
  misc_feature (1)..(25): SEQ ID NO: 4585; WAN024AOF_at; Start 72; Stop 96
caattccttcggcgcaatatgcaat

SEQ ID NO: 61441 - DNA, 25 bp, Artificial
  probe
  misc_feature (1)..(25): SEQ ID NO: 4585; WAN024AOF_at; Start 105; Stop 129
gaaggaatagtggaccgaatctgaa

SEQ ID NO: 61442 - DNA, 25 bp, Artificial
  probe
  misc_feature (1)..(25): SEQ ID NO: 4585; WAN024AOF_at; Start 68; Stop 92
tgagcaattccttcggcgcaatatg

SEQ ID NO: 61443 - DNA, 25 bp, Artificial
  probe
  misc_feature (1)..(25): SEQ ID NO: 4585; WAN024AOF_at; Start 102; Stop 126
tgggaaggaatagtggaccgaatct

SEQ ID NO: 61444 - DNA, 25 bp, Artificial
  probe
  misc_feature (1)..(25): SEQ ID NO: 4585; WAN024AOF_at; Start 86; Stop 110
caatatgcaatgtttttgggaagga

SEQ ID NO: 61445 - DNA, 25 bp, Artificial
  probe
  misc_feature (1)..(25): SEQ ID NO: 4585; WAN024AOF_at; Start 87; Stop 111
aatatgcaatgtttttgggaaggaa

SEQ ID NO: 61446 - DNA, 25 bp, Artificial
  probe
  misc_feature (1)..(25): SEQ ID NO: 4585; WAN024AOF_at; Start 42; Stop 66
ctgagggttttgtgcttgggatagt

SEQ ID NO: 61447 - DNA, 25 bp, Artificial
  probe
  misc_feature (1)..(25): SEQ ID NO: 4585; WAN024AOF_at; Start 106; Stop 130
aaggaatagtggaccgaatctgaaa

SEQ ID NO: 61448 - DNA, 25 bp, Artificial
  probe
  misc_feature (1)..(25): SEQ ID NO: 4585; WAN024AOF_at; Start 40; Stop 64
gactgagggttttgtgcttgggata

SEQ ID NO: 61449 - DNA, 25 bp, Artificial
  probe
  misc_feature (1)..(25): SEQ ID NO: 4585; WAN024AOF_at; Start 70; Stop 94
agcaattccttcggcgcaatatgca

SEQ ID NO: 61450 - DNA, 25 bp, Artificial
  probe
  misc_feature (1)..(25): SEQ ID NO: 4585; WAN024AOF_at; Start 89; Stop 113
tatgcaatgtttttgggaaggaata

SEQ ID NO: 61451 - DNA, 25 bp, Artificial
  probe
  misc_feature (1)..(25): SEQ ID NO: 4585; WAN024AOF_at; Start 82; Stop 106
ggcgcaatatgcaatgtttttggga

SEQ ID NO: 61452 - DNA, 25 bp, Artificial
  probe
  misc_feature (1)..(25): SEQ ID NO: 4585; WAN024AOF_at; Start 81; Stop 105
cggcgcaatatgcaatgtttttggg

SEQ ID NO: 61453 - DNA, 25 bp, Artificial
  probe
  misc_feature (1)..(25): SEQ ID NO: 4585; WAN024AOF_at; Start 85; Stop 109
gcaatatgcaatgtttttgggaagg

SEQ ID NO: 61454 - DNA, 25 bp, Artificial
  probe
  misc_feature (1)..(25): SEQ ID NO: 4585; WAN024AOF_at; Start 101; Stop 125
ttgggaaggaatagtggaccgaatc

SEQ ID NO: 61455 - DNA, 25 bp, Artificial
  probe
  misc_feature (1)..(25): SEQ ID NO: 4585; WAN024AOF_at; Start 69; Stop 93
gagcaattccttcggcgcaatatgc

SEQ ID NO: 61456 - DNA, 25 bp, Artificial
  probe
  misc_feature (1)..(25): SEQ ID NO: 4585; WAN024AOF_at; Start 77; Stop 101
ccttcggcgcaatatgcaatgtttt

SEQ ID NO: 61457 - DNA, 25 bp, Artificial
  probe
  misc_feature (1)..(25): SEQ ID NO: 4585; WAN024AOF_at; Start 78; Stop 102
cttcggcgcaatatgcaatgttttt

SEQ ID NO: 61458 - DNA, 25 bp, Artificial
  probe
  misc_feature (1)..(25): SEQ ID NO: 4585; WAN024AOF_at; Start 39; Stop 63
cgactgagggttttgtgcttgggat

SEQ ID NO: 61459 - DNA, 25 bp, Artificial
  probe
  misc_feature (1)..(25): SEQ ID NO: 3134; WAN024AOG_at; Start 28; Stop 52
gtcatctgttacattcataagacaa

SEQ ID NO: 61460 - DNA, 25 bp, Artificial
  probe
  misc_feature (1)..(25): SEQ ID NO: 3134; WAN024AOG_at; Start 33; Stop 57
ctgttacattcataagacaagtata

SEQ ID NO: 61461 - DNA, 25 bp, Artificial
  probe
  misc_feature (1)..(25): SEQ ID NO: 3134; WAN024AOG_at; Start 5; Stop 29
atgtcctcttttttctagtaacagt

SEQ ID NO: 61462 - DNA, 25 bp, Artificial
  probe
  misc_feature (1)..(25): SEQ ID NO: 3134; WAN024AOG_at; Start 16; Stop 40
tttctagtaacagtcatctgttaca

SEQ ID NO: 61463 - DNA, 25 bp, Artificial
  probe
  misc_feature (1)..(25): SEQ ID NO: 3134; WAN024AOG_at; Start 25; Stop 49
acagtcatctgttacattcataaga

SEQ ID NO: 61464 - DNA, 25 bp, Artificial
  probe
  misc_feature (1)..(25): SEQ ID NO: 3134; WAN024AOG_at; Start 32; Stop 56
tctgttacattcataagacaagtat

SEQ ID NO: 61465 - DNA, 25 bp, Artificial
  probe
  misc_feature (1)..(25): SEQ ID NO: 3134; WAN024AOG_at; Start 11; Stop 35
tcttttttctagtaacagtcatctg

SEQ ID NO: 61466 - DNA, 25 bp, Artificial
  probe
  misc_feature (1)..(25): SEQ ID NO: 3134; WAN024AOG_at; Start 37; Stop 61
tacattcataagacaagtataccat

SEQ ID NO: 61467 - DNA, 25 bp, Artificial
  probe
  misc_feature (1)..(25): SEQ ID NO: 3134; WAN024AOG_at; Start 35; Stop 59
gttacattcataagacaagtatacc

SEQ ID NO: 61468 - DNA, 25 bp, Artificial
  probe
  misc_feature (1)..(25): SEQ ID NO: 3134; WAN024AOG_at; Start 29; Stop 53
tcatctgttacattcataagacaag

SEQ ID NO: 61469 - DNA, 25 bp, Artificial
  probe
  misc_feature (1)..(25): SEQ ID NO: 3134; WAN024AOG_at; Start 30; Stop 54
catctgttacattcataagacaagt

SEQ ID NO: 61470 - DNA, 25 bp, Artificial
  probe
  misc_feature (1)..(25): SEQ ID NO: 3134; WAN024AOG_at; Start 34; Stop 58
tgttacattcataagacaagtatac

SEQ ID NO: 61471 - DNA, 25 bp, Artificial
  probe
  misc_feature (1)..(25): SEQ ID NO: 3134; WAN024AOG_at; Start 38; Stop 62
acattcataagacaagtataccata

SEQ ID NO: 61472 - DNA, 25 bp, Artificial
  probe
  misc_feature (1)..(25): SEQ ID NO: 3134; WAN024AOG_at; Start 10; Stop 34
ctcttttttctagtaacagtcatct

SEQ ID NO: 61473 - DNA, 25 bp, Artificial
  probe
  misc_feature (1)..(25): SEQ ID NO: 3134; WAN024AOG_at; Start 18; Stop 42
tctagtaacagtcatctgttacatt

SEQ ID NO: 61474 - DNA, 25 bp, Artificial
  probe
  misc_feature (1)..(25): SEQ ID NO: 3134; WAN024AOG_at; Start 36; Stop 60
ttacattcataagacaagtatacca

SEQ ID NO: 61475 - DNA, 25 bp, Artificial
  probe
  misc_feature (1)..(25): SEQ ID NO: 3134; WAN024AOG_at; Start 14; Stop 38
tttttctagtaacagtcatctgtta

SEQ ID NO: 61476 - DNA, 25 bp, Artificial
  probe
  misc_feature (1)..(25): SEQ ID NO: 3134; WAN024AOG_at; Start 15; Stop 39
ttttctagtaacagtcatctgttac

SEQ ID NO: 61477 - DNA, 25 bp, Artificial
  probe
  misc_feature (1)..(25): SEQ ID NO: 3134; WAN024AOG_at; Start 22; Stop 46
gtaacagtcatctgttacattcata

SEQ ID NO: 61478 - DNA, 25 bp, Artificial
  probe
  misc_feature (1)..(25): SEQ ID NO: 3134; WAN024AOG_at; Start 19; Stop 43
ctagtaacagtcatctgttacattc

SEQ ID NO: 61479 - DNA, 25 bp, Artificial
  probe
  misc_feature (1)..(25): SEQ ID NO: 3134; WAN024AOG_at; Start 26; Stop 50
cagtcatctgttacattcataagac

SEQ ID NO: 61480 - DNA, 25 bp, Artificial
  probe
  misc_feature (1)..(25): SEQ ID NO: 3134; WAN024AOG_at; Start 27; Stop 51
agtcatctgttacattcataagaca

SEQ ID NO: 61481 - DNA, 25 bp, Artificial
  probe
  misc_feature (1)..(25): SEQ ID NO: 3134; WAN024AOG_at; Start 7; Stop 31
gtcctcttttttctagtaacagtca

SEQ ID NO: 61482 - DNA, 25 bp, Artificial
  probe
  misc_feature (1)..(25): SEQ ID NO: 3134; WAN024AOG_at; Start 6; Stop 30
tgtcctcttttttctagtaacagtc

SEQ ID NO: 61483 - DNA, 25 bp, Artificial
  probe
  misc_feature (1)..(25): SEQ ID NO: 3134; WAN024AOG_at; Start 4; Stop 28
aatgtcctcttttttctagtaacag

SEQ ID NO: 61484 - DNA, 25 bp, Artificial
  probe
  misc_feature (1)..(25): SEQ ID NO: 3134; WAN024AOG_at; Start 3; Stop 27
taatgtcctcttttttctagtaaca

SEQ ID NO: 61485 - DNA, 25 bp, Artificial
  probe
  misc_feature (1)..(25): SEQ ID NO: 3134; WAN024AOG_at; Start 17; Stop 41
ttctagtaacagtcatctgttacat

SEQ ID NO: 61486 - DNA, 25 bp, Artificial
  probe
  misc_feature (1)..(25): SEQ ID NO: 3134; WAN024AOG_at; Start 13; Stop 37
ttttttctagtaacagtcatctgtt

SEQ ID NO: 61487 - DNA, 25 bp, Artificial
  probe
  misc_feature (1)..(25): SEQ ID NO: 3134; WAN024AOG_at; Start 12; Stop 36
cttttttctagtaacagtcatctgt

SEQ ID NO: 61488 - DNA, 25 bp, Artificial
  probe
  misc_feature (1)..(25): SEQ ID NO: 3134; WAN024AOG_at; Start 31; Stop 55
atctgttacattcataagacaagta

SEQ ID NO: 61489 - DNA, 25 bp, Artificial
  probe
  misc_feature (1)..(25): SEQ ID NO: 3134; WAN024AOG_at; Start 8; Stop 32
tcctcttttttctagtaacagtcat

SEQ ID NO: 61490 - DNA, 25 bp, Artificial
  probe
  misc_feature (1)..(25): SEQ ID NO: 3134; WAN024AOG_at; Start 20; Stop 44
tagtaacagtcatctgttacattca

SEQ ID NO: 61491 - DNA, 25 bp, Artificial
  probe
  misc_feature (1)..(25): SEQ ID NO: 3134; WAN024AOG_at; Start 24; Stop 48
aacagtcatctgttacattcataag

SEQ ID NO: 61492 - DNA, 25 bp, Artificial
  probe
  misc_feature (1)..(25): SEQ ID NO: 3134; WAN024AOG_at; Start 9; Stop 33
cctcttttttctagtaacagtcatc

SEQ ID NO: 61493 - DNA, 25 bp, Artificial
  probe
  misc_feature (1)..(25): SEQ ID NO: 4478; WAN024AOH_at; Start 58; Stop 82
gtatacttgtcttatgaatgtaaca

SEQ ID NO: 61494 - DNA, 25 bp, Artificial
  probe
  misc_feature (1)..(25): SEQ ID NO: 4478; WAN024AOH_at; Start 84; Stop 108
atgactgttactagaaaaaagagga

SEQ ID NO: 61495 - DNA, 25 bp, Artificial
  probe
  misc_feature (1)..(25): SEQ ID NO: 4478; WAN024AOH_at; Start 55; Stop 79
atggtatacttgtcttatgaatgta

SEQ ID NO: 61496 - DNA, 25 bp, Artificial
  probe
  misc_feature (1)..(25): SEQ ID NO: 4478; WAN024AOH_at; Start 77; Stop 101
gtaacagatgactgttactagaaaa

SEQ ID NO: 61497 - DNA, 25 bp, Artificial
  probe
  misc_feature (1)..(25): SEQ ID NO: 4478; WAN024AOH_at; Start 70; Stop 94
tatgaatgtaacagatgactgttac

SEQ ID NO: 61498 - DNA, 25 bp, Artificial
  probe
  misc_feature (1)..(25): SEQ ID NO: 4478; WAN024AOH_at; Start 59; Stop 83
tatacttgtcttatgaatgtaacag

SEQ ID NO: 61499 - DNA, 25 bp, Artificial
  probe
  misc_feature (1)..(25): SEQ ID NO: 4478; WAN024AOH_at; Start 89; Stop 113
tgttactagaaaaaagaggacatta

SEQ ID NO: 61500 - DNA, 25 bp, Artificial
  probe
  misc_feature (1)..(25): SEQ ID NO: 4478; WAN024AOH_at; Start 62; Stop 86
acttgtcttatgaatgtaacagatg

SEQ ID NO: 61501 - DNA, 25 bp, Artificial
  probe
  misc_feature (1)..(25): SEQ ID NO: 4478; WAN024AOH_at; Start 73; Stop 97
gaatgtaacagatgactgttactag

SEQ ID NO: 61502 - DNA, 25 bp, Artificial
  probe
  misc_feature (1)..(25): SEQ ID NO: 4478; WAN024AOH_at; Start 64; Stop 88
ttgtcttatgaatgtaacagatgac

SEQ ID NO: 61503 - DNA, 25 bp, Artificial
  probe
  misc_feature (1)..(25): SEQ ID NO: 4478; WAN024AOH_at; Start 81; Stop 105
cagatgactgttactagaaaaaaga

SEQ ID NO: 61504 - DNA, 25 bp, Artificial
  probe
  misc_feature (1)..(25): SEQ ID NO: 4478; WAN024AOH_at; Start 66; Stop 90
gtcttatgaatgtaacagatgactg

SEQ ID NO: 61505 - DNA, 25 bp, Artificial
  probe
  misc_feature (1)..(25): SEQ ID NO: 4478; WAN024AOH_at; Start 68; Stop 92
cttatgaatgtaacagatgactgtt

SEQ ID NO: 61506 - DNA, 25 bp, Artificial
  probe
  misc_feature (1)..(25): SEQ ID NO: 4478; WAN024AOH_at; Start 54; Stop 78
tatggtatacttgtcttatgaatgt

SEQ ID NO: 61507 - DNA, 25 bp, Artificial
  probe
  misc_feature (1)..(25): SEQ ID NO: 4478; WAN024AOH_at; Start 71; Stop 95
atgaatgtaacagatgactgttact

SEQ ID NO: 61508 - DNA, 25 bp, Artificial
  probe
  misc_feature (1)..(25): SEQ ID NO: 4478; WAN024AOH_at; Start 61; Stop 85
tacttgtcttatgaatgtaacagat

SEQ ID NO: 61509 - DNA, 25 bp, Artificial
  probe
  misc_feature (1)..(25): SEQ ID NO: 4478; WAN024AOH_at; Start 72; Stop 96
tgaatgtaacagatgactgttacta

SEQ ID NO: 61510 - DNA, 25 bp, Artificial
  probe
  misc_feature (1)..(25): SEQ ID NO: 4478; WAN024AOH_at; Start 82; Stop 106
agatgactgttactagaaaaaagag

SEQ ID NO: 61511 - DNA, 25 bp, Artificial
  probe
  misc_feature (1)..(25): SEQ ID NO: 4478; WAN024AOH_at; Start 56; Stop 80
tggtatacttgtcttatgaatgtaa

SEQ ID NO: 61512 - DNA, 25 bp, Artificial
  probe
  misc_feature (1)..(25): SEQ ID NO: 4478; WAN024AOH_at; Start 57; Stop 81
ggtatacttgtcttatgaatgtaac

SEQ ID NO: 61513 - DNA, 25 bp, Artificial
  probe
  misc_feature (1)..(25): SEQ ID NO: 4478; WAN024AOH_at; Start 60; Stop 84
atacttgtcttatgaatgtaacaga

SEQ ID NO: 61514 - DNA, 25 bp, Artificial
  probe
  misc_feature (1)..(25): SEQ ID NO: 4478; WAN024AOH_at; Start 65; Stop 89
tgtcttatgaatgtaacagatgact

SEQ ID NO: 61515 - DNA, 25 bp, Artificial
  probe
  misc_feature (1)..(25): SEQ ID NO: 4478; WAN024AOH_at; Start 87; Stop 111
actgttactagaaaaaagaggacat

SEQ ID NO: 61516 - DNA, 25 bp, Artificial
  probe
  misc_feature (1)..(25): SEQ ID NO: 4478; WAN024AOH_at; Start 86; Stop 110
gactgttactagaaaaaagaggaca

SEQ ID NO: 61517 - DNA, 25 bp, Artificial
  probe
  misc_feature (1)..(25): SEQ ID NO: 4478; WAN024AOH_at; Start 67; Stop 91
tcttatgaatgtaacagatgactgt

SEQ ID NO: 61518 - DNA, 25 bp, Artificial
  probe
  misc_feature (1)..(25): SEQ ID NO: 4478; WAN024AOH_at; Start 63; Stop 87
cttgtcttatgaatgtaacagatga

SEQ ID NO: 61519 - DNA, 25 bp, Artificial
  probe
  misc_feature (1)..(25): SEQ ID NO: 4478; WAN024AOH_at; Start 88; Stop 112
ctgttactagaaaaaagaggacatt

SEQ ID NO: 61520 - DNA, 25 bp, Artificial
  probe
  misc_feature (1)..(25): SEQ ID NO: 4478; WAN024AOH_at; Start 85; Stop 109
tgactgttactagaaaaaagaggac

SEQ ID NO: 61521 - DNA, 25 bp, Artificial
  probe
  misc_feature (1)..(25): SEQ ID NO: 4478; WAN024AOH_at; Start 83; Stop 107
gatgactgttactagaaaaaagagg

SEQ ID NO: 61522 - DNA, 25 bp, Artificial
  probe
  misc_feature (1)..(25): SEQ ID NO: 4478; WAN024AOH_at; Start 69; Stop 93
ttatgaatgtaacagatgactgtta

SEQ ID NO: 61523 - DNA, 25 bp, Artificial
  probe
  misc_feature (1)..(25): SEQ ID NO: 3273; WAN024AOK_at; Start 20; Stop 44
ttcttatcattatagcattttttcg

SEQ ID NO: 61524 - DNA, 25 bp, Artificial
  probe
  misc_feature (1)..(25): SEQ ID NO: 3273; WAN024AOK_at; Start 77; Stop 101
gcatttttcgataaaataggagaca

SEQ ID NO: 61525 - DNA, 25 bp, Artificial
  probe
  misc_feature (1)..(25): SEQ ID NO: 3273; WAN024AOK_at; Start 15; Stop 39
tatctttcttatcattatagcattt

SEQ ID NO: 61526 - DNA, 25 bp, Artificial
  probe
  misc_feature (1)..(25): SEQ ID NO: 3273; WAN024AOK_at; Start 106; Stop 130
ttttttaatagatcagaataggaga

SEQ ID NO: 61527 - DNA, 25 bp, Artificial
  probe
  misc_feature (1)..(25): SEQ ID NO: 3273; WAN024AOK_at; Start 78; Stop 102
catttttcgataaaataggagacag

SEQ ID NO: 61528 - DNA, 25 bp, Artificial
  probe
  misc_feature (1)..(25): SEQ ID NO: 3273; WAN024AOK_at; Start 73; Stop 97
ttacgcatttttcgataaaatagga

SEQ ID NO: 61529 - DNA, 25 bp, Artificial
  probe
  misc_feature (1)..(25): SEQ ID NO: 3273; WAN024AOK_at; Start 96; Stop 120
gagacagttattttttaatagatca

SEQ ID NO: 61530 - DNA, 25 bp, Artificial
  probe
  misc_feature (1)..(25): SEQ ID NO: 3273; WAN024AOK_at; Start 82; Stop 106
tttcgataaaataggagacagttat

SEQ ID NO: 61531 - DNA, 25 bp, Artificial
  probe
  misc_feature (1)..(25): SEQ ID NO: 3273; WAN024AOK_at; Start 105; Stop 129
attttttaatagatcagaataggag

SEQ ID NO: 61532 - DNA, 25 bp, Artificial
  probe
  misc_feature (1)..(25): SEQ ID NO: 3273; WAN024AOK_at; Start 74; Stop 98
tacgcatttttcgataaaataggag

SEQ ID NO: 61533 - DNA, 25 bp, Artificial
  probe
  misc_feature (1)..(25): SEQ ID NO: 3273; WAN024AOK_at; Start 99; Stop 123
acagttattttttaatagatcagaa

SEQ ID NO: 61534 - DNA, 25 bp, Artificial
  probe
  misc_feature (1)..(25): SEQ ID NO: 3273; WAN024AOK_at; Start 83; Stop 107
ttcgataaaataggagacagttatt

SEQ ID NO: 61535 - DNA, 25 bp, Artificial
  probe
  misc_feature (1)..(25): SEQ ID NO: 3273; WAN024AOK_at; Start 110; Stop 134
ttaatagatcagaataggagaaatc

SEQ ID NO: 61536 - DNA, 25 bp, Artificial
  probe
  misc_feature (1)..(25): SEQ ID NO: 3273; WAN024AOK_at; Start 72; Stop 96
attacgcatttttcgataaaatagg

SEQ ID NO: 61537 - DNA, 25 bp, Artificial
  probe
  misc_feature (1)..(25): SEQ ID NO: 3273; WAN024AOK_at; Start 79; Stop 103
atttttcgataaaataggagacagt

SEQ ID NO: 61538 - DNA, 25 bp, Artificial
  probe
  misc_feature (1)..(25): SEQ ID NO: 3273; WAN024AOK_at; Start 104; Stop 128
tattttttaatagatcagaatagga

SEQ ID NO: 61539 - DNA, 25 bp, Artificial
  probe
  misc_feature (1)..(25): SEQ ID NO: 3273; WAN024AOK_at; Start 27; Stop 51
cattatagcattttttcgtaagtaa

SEQ ID NO: 61540 - DNA, 25 bp, Artificial
  probe
  misc_feature (1)..(25): SEQ ID NO: 3273; WAN024AOK_at; Start 63; Stop 87
tgttgaaaaattacgcatttttcga

SEQ ID NO: 61541 - DNA, 25 bp, Artificial
  probe
  misc_feature (1)..(25): SEQ ID NO: 3273; WAN024AOK_at; Start 109; Stop 133
tttaatagatcagaataggagaaat

SEQ ID NO: 61542 - DNA, 25 bp, Artificial
  probe
  misc_feature (1)..(25): SEQ ID NO: 3273; WAN024AOK_at; Start 95; Stop 119
ggagacagttattttttaatagatc

SEQ ID NO: 61543 - DNA, 25 bp, Artificial
  probe
  misc_feature (1)..(25): SEQ ID NO: 3273; WAN024AOK_at; Start 85; Stop 109
cgataaaataggagacagttatttt

SEQ ID NO: 61544 - DNA, 25 bp, Artificial
  probe
  misc_feature (1)..(25): SEQ ID NO: 3273; WAN024AOK_at; Start 107; Stop 131
tttttaatagatcagaataggagaa

SEQ ID NO: 61545 - DNA, 25 bp, Artificial
  probe
  misc_feature (1)..(25): SEQ ID NO: 3273; WAN024AOK_at; Start 12; Stop 36
ttttatctttcttatcattatagca

SEQ ID NO: 61546 - DNA, 25 bp, Artificial
  probe
  misc_feature (1)..(25): SEQ ID NO: 3273; WAN024AOK_at; Start 98; Stop 122
gacagttattttttaatagatcaga

SEQ ID NO: 61547 - DNA, 25 bp, Artificial
  probe
  misc_feature (1)..(25): SEQ ID NO: 3273; WAN024AOK_at; Start 22; Stop 46
cttatcattatagcattttttcgta

SEQ ID NO: 61548 - DNA, 25 bp, Artificial
  probe
  misc_feature (1)..(25): SEQ ID NO: 3273; WAN024AOK_at; Start 76; Stop 100
cgcatttttcgataaaataggagac

SEQ ID NO: 61549 - DNA, 25 bp, Artificial
  probe
  misc_feature (1)..(25): SEQ ID NO: 3273; WAN024AOK_at; Start 26; Stop 50
tcattatagcattttttcgtaagta

SEQ ID NO: 61550 - DNA, 25 bp, Artificial
  probe
  misc_feature (1)..(25): SEQ ID NO: 3273; WAN024AOK_at; Start 97; Stop 121
agacagttattttttaatagatcag

SEQ ID NO: 61551 - DNA, 25 bp, Artificial
  probe
  misc_feature (1)..(25): SEQ ID NO: 3273; WAN024AOK_at; Start 81; Stop 105
ttttcgataaaataggagacagtta

SEQ ID NO: 61552 - DNA, 25 bp, Artificial
  probe
  misc_feature (1)..(25): SEQ ID NO: 3273; WAN024AOK_at; Start 21; Stop 45
tcttatcattatagcattttttcgt

SEQ ID NO: 61553 - DNA, 25 bp, Artificial
  probe
  misc_feature (1)..(25): SEQ ID NO: 3273; WAN024AOK_at; Start 75; Stop 99
acgcatttttcgataaaataggaga

SEQ ID NO: 61554 - DNA, 25 bp, Artificial
  probe
  misc_feature (1)..(25): SEQ ID NO: 3273; WAN024AOK_at; Start 108; Stop 132
ttttaatagatcagaataggagaaa

SEQ ID NO: 61555 - DNA, 25 bp, Artificial
  probe
  misc_feature (1)..(25): SEQ ID NO: 3273; WAN024AOK_at; Start 71; Stop 95
aattacgcatttttcgataaaatag

SEQ ID NO: 61556 - DNA, 25 bp, Artificial
  probe
  misc_feature (1)..(25): SEQ ID NO: 3273; WAN024AOK_at; Start 84; Stop 108
tcgataaaataggagacagttattt

SEQ ID NO: 61557 - DNA, 25 bp, Artificial
  probe
  misc_feature (1)..(25): SEQ ID NO: 3658; WAN024AOL_at; Start 89; Stop 113
tacgaaaaaatgctataatgataag

SEQ ID NO: 61558 - DNA, 25 bp, Artificial
  probe
  misc_feature (1)..(25): SEQ ID NO: 3658; WAN024AOL_at; Start 54; Stop 78
aatgcgtaatttttcaacataagta

SEQ ID NO: 61559 - DNA, 25 bp, Artificial
  probe
  misc_feature (1)..(25): SEQ ID NO: 3658; WAN024AOL_at; Start 38; Stop 62
tcctattttatcgaaaaatgcgtaa

SEQ ID NO: 61560 - DNA, 25 bp, Artificial
  probe
  misc_feature (1)..(25): SEQ ID NO: 3658; WAN024AOL_at; Start 5; Stop 29
tctcctattctgatctattaaaaaa

SEQ ID NO: 61561 - DNA, 25 bp, Artificial
  probe
  misc_feature (1)..(25): SEQ ID NO: 3658; WAN024AOL_at; Start 85; Stop 109
tacttacgaaaaaatgctataatga

SEQ ID NO: 61562 - DNA, 25 bp, Artificial
  probe
  misc_feature (1)..(25): SEQ ID NO: 3658; WAN024AOL_at; Start 1; Stop 25
gatttctcctattctgatctattaa

SEQ ID NO: 61563 - DNA, 25 bp, Artificial
  probe
  misc_feature (1)..(25): SEQ ID NO: 3658; WAN024AOL_at; Start 36; Stop 60
tctcctattttatcgaaaaatgcgt

SEQ ID NO: 61564 - DNA, 25 bp, Artificial
  probe
  misc_feature (1)..(25): SEQ ID NO: 3658; WAN024AOL_at; Start 99; Stop 123
tgctataatgataagaaagataaaa

SEQ ID NO: 61565 - DNA, 25 bp, Artificial
  probe
  misc_feature (1)..(25): SEQ ID NO: 3658; WAN024AOL_at; Start 97; Stop 121
aatgctataatgataagaaagataa

SEQ ID NO: 61566 - DNA, 25 bp, Artificial
  probe
  misc_feature (1)..(25): SEQ ID NO: 3658; WAN024AOL_at; Start 91; Stop 115
cgaaaaaatgctataatgataagaa

SEQ ID NO: 61567 - DNA, 25 bp, Artificial
  probe
  misc_feature (1)..(25): SEQ ID NO: 3658; WAN024AOL_at; Start 40; Stop 64
ctattttatcgaaaaatgcgtaatt

SEQ ID NO: 61568 - DNA, 25 bp, Artificial
  probe
  misc_feature (1)..(25): SEQ ID NO: 3658; WAN024AOL_at; Start 103; Stop 127
ataatgataagaaagataaaaaggg

SEQ ID NO: 61569 - DNA, 25 bp, Artificial
  probe
  misc_feature (1)..(25): SEQ ID NO: 3658; WAN024AOL_at; Start 7; Stop 31
tcctattctgatctattaaaaaata

SEQ ID NO: 61570 - DNA, 25 bp, Artificial
  probe
  misc_feature (1)..(25): SEQ ID NO: 3658; WAN024AOL_at; Start 39; Stop 63
cctattttatcgaaaaatgcgtaat

SEQ ID NO: 61571 - DNA, 25 bp, Artificial
  probe
  misc_feature (1)..(25): SEQ ID NO: 3658; WAN024AOL_at; Start 33; Stop 57
ctgtctcctattttatcgaaaaatg

SEQ ID NO: 61572 - DNA, 25 bp, Artificial
  probe
  misc_feature (1)..(25): SEQ ID NO: 3658; WAN024AOL_at; Start 28; Stop 52
aataactgtctcctattttatcgaa

SEQ ID NO: 61573 - DNA, 25 bp, Artificial
  probe
  misc_feature (1)..(25): SEQ ID NO: 3658; WAN024AOL_at; Start 56; Stop 80
tgcgtaatttttcaacataagtaag

SEQ ID NO: 61574 - DNA, 25 bp, Artificial
  probe
  misc_feature (1)..(25): SEQ ID NO: 3658; WAN024AOL_at; Start 34; Stop 58
tgtctcctattttatcgaaaaatgc

SEQ ID NO: 61575 - DNA, 25 bp, Artificial
  probe
  misc_feature (1)..(25): SEQ ID NO: 3658; WAN024AOL_at; Start 94; Stop 118
aaaaatgctataatgataagaaaga

SEQ ID NO: 61576 - DNA, 25 bp, Artificial
  probe
  misc_feature (1)..(25): SEQ ID NO: 3658; WAN024AOL_at; Start 49; Stop 73
cgaaaaatgcgtaatttttcaacat

SEQ ID NO: 61577 - DNA, 25 bp, Artificial
  probe
  misc_feature (1)..(25): SEQ ID NO: 3658; WAN024AOL_at; Start 100; Stop 124
gctataatgataagaaagataaaaa

SEQ ID NO: 61578 - DNA, 25 bp, Artificial
  probe
  misc_feature (1)..(25): SEQ ID NO: 3658; WAN024AOL_at; Start 29; Stop 53
ataactgtctcctattttatcgaaa

SEQ ID NO: 61579 - DNA, 25 bp, Artificial
  probe
  misc_feature (1)..(25): SEQ ID NO: 3658; WAN024AOL_at; Start 37; Stop 61
ctcctattttatcgaaaaatgcgta

SEQ ID NO: 61580 - DNA, 25 bp, Artificial
  probe
  misc_feature (1)..(25): SEQ ID NO: 3658; WAN024AOL_at; Start 53; Stop 77
aaatgcgtaatttttcaacataagt

SEQ ID NO: 61581 - DNA, 25 bp, Artificial
  probe
  misc_feature (1)..(25): SEQ ID NO: 3658; WAN024AOL_at; Start 32; Stop 56
actgtctcctattttatcgaaaaat

SEQ ID NO: 61582 - DNA, 25 bp, Artificial
  probe
  misc_feature (1)..(25): SEQ ID NO: 3658; WAN024AOL_at; Start 6; Stop 30
ctcctattctgatctattaaaaaat

SEQ ID NO: 61583 - DNA, 25 bp, Artificial
  probe
  misc_feature (1)..(25): SEQ ID NO: 3658; WAN024AOL_at; Start 30; Stop 54
taactgtctcctattttatcgaaaa

SEQ ID NO: 61584 - DNA, 25 bp, Artificial
  probe
  misc_feature (1)..(25): SEQ ID NO: 3658; WAN024AOL_at; Start 35; Stop 59
gtctcctattttatcgaaaaatgcg

SEQ ID NO: 61585 - DNA, 25 bp, Artificial
  probe
  misc_feature (1)..(25): SEQ ID NO: 3658; WAN024AOL_at; Start 92; Stop 116
gaaaaaatgctataatgataagaaa

SEQ ID NO: 61586 - DNA, 25 bp, Artificial
  probe
  misc_feature (1)..(25): SEQ ID NO: 3658; WAN024AOL_at; Start 48; Stop 72
tcgaaaaatgcgtaatttttcaaca

SEQ ID NO: 61587 - DNA, 25 bp, Artificial
  probe
  misc_feature (1)..(25): SEQ ID NO: 3658; WAN024AOL_at; Start 84; Stop 108
ttacttacgaaaaaatgctataatg

SEQ ID NO: 61588 - DNA, 25 bp, Artificial
  probe
  misc_feature (1)..(25): SEQ ID NO: 3658; WAN024AOL_at; Start 86; Stop 110
acttacgaaaaaatgctataatgat

SEQ ID NO: 61589 - DNA, 25 bp, Artificial
  probe
  misc_feature (1)..(25): SEQ ID NO: 3658; WAN024AOL_at; Start 27; Stop 51
aaataactgtctcctattttatcga

SEQ ID NO: 61590 - DNA, 25 bp, Artificial
  probe
  misc_feature (1)..(25): SEQ ID NO: 3658; WAN024AOL_at; Start 52; Stop 76
aaaatgcgtaatttttcaacataag

SEQ ID NO: 61591 - DNA, 25 bp, Artificial
  probe
  misc_feature (1)..(25): SEQ ID NO: 729; WAN024AOM_at; Start 34; Stop 58
aaggtcaagaatccgccgttatcca

SEQ ID NO: 61592 - DNA, 25 bp, Artificial
  probe
  misc_feature (1)..(25): SEQ ID NO: 729; WAN024AOM_at; Start 19; Stop 43
tatctctactacttgaaggtcaaga

SEQ ID NO: 61593 - DNA, 25 bp, Artificial
  probe
  misc_feature (1)..(25): SEQ ID NO: 729; WAN024AOM_at; Start 5; Stop 29
aaaggcagattctctatctctacta

SEQ ID NO: 61594 - DNA, 25 bp, Artificial
  probe
  misc_feature (1)..(25): SEQ ID NO: 729; WAN024AOM_at; Start 38; Stop 62
tcaagaatccgccgttatccaaaga

SEQ ID NO: 61595 - DNA, 25 bp, Artificial
  probe
  misc_feature (1)..(25): SEQ ID NO: 729; WAN024AOM_at; Start 33; Stop 57
gaaggtcaagaatccgccgttatcc

SEQ ID NO: 61596 - DNA, 25 bp, Artificial
  probe
  misc_feature (1)..(25): SEQ ID NO: 729; WAN024AOM_at; Start 3; Stop 27
gaaaaggcagattctctatctctac

SEQ ID NO: 61597 - DNA, 25 bp, Artificial
  probe
  misc_feature (1)..(25): SEQ ID NO: 729; WAN024AOM_at; Start 30; Stop 54
cttgaaggtcaagaatccgccgtta

SEQ ID NO: 61598 - DNA, 25 bp, Artificial
  probe
  misc_feature (1)..(25): SEQ ID NO: 729; WAN024AOM_at; Start 12; Stop 36
gattctctatctctactacttgaag

SEQ ID NO: 61599 - DNA, 25 bp, Artificial
  probe
  misc_feature (1)..(25): SEQ ID NO: 729; WAN024AOM_at; Start 16; Stop 40
ctctatctctactacttgaaggtca

SEQ ID NO: 61600 - DNA, 25 bp, Artificial
  probe
  misc_feature (1)..(25): SEQ ID NO: 729; WAN024AOM_at; Start 24; Stop 48
ctactacttgaaggtcaagaatccg

SEQ ID NO: 61601 - DNA, 25 bp, Artificial
  probe
  misc_feature (1)..(25): SEQ ID NO: 729; WAN024AOM_at; Start 9; Stop 33
gcagattctctatctctactacttg

SEQ ID NO: 61602 - DNA, 25 bp, Artificial
  probe
  misc_feature (1)..(25): SEQ ID NO: 729; WAN024AOM_at; Start 8; Stop 32
ggcagattctctatctctactactt

SEQ ID NO: 61603 - DNA, 25 bp, Artificial
  probe
  misc_feature (1)..(25): SEQ ID NO: 729; WAN024AOM_at; Start 29; Stop 53
acttgaaggtcaagaatccgccgtt

SEQ ID NO: 61604 - DNA, 25 bp, Artificial
  probe
  misc_feature (1)..(25): SEQ ID NO: 729; WAN024AOM_at; Start 22; Stop 46
ctctactacttgaaggtcaagaatc

SEQ ID NO: 61605 - DNA, 25 bp, Artificial
  probe
  misc_feature (1)..(25): SEQ ID NO: 729; WAN024AOM_at; Start 32; Stop 56
tgaaggtcaagaatccgccgttatc

SEQ ID NO: 61606 - DNA, 25 bp, Artificial
  probe
  misc_feature (1)..(25): SEQ ID NO: 729; WAN024AOM_at; Start 37; Stop 61
gtcaagaatccgccgttatccaaag

SEQ ID NO: 61607 - DNA, 25 bp, Artificial
  probe
  misc_feature (1)..(25): SEQ ID NO: 729; WAN024AOM_at; Start 21; Stop 45
tctctactacttgaaggtcaagaat

SEQ ID NO: 61608 - DNA, 25 bp, Artificial
  probe
  misc_feature (1)..(25): SEQ ID NO: 729; WAN024AOM_at; Start 31; Stop 55
ttgaaggtcaagaatccgccgttat

SEQ ID NO: 61609 - DNA, 25 bp, Artificial
  probe
  misc_feature (1)..(25): SEQ ID NO: 729; WAN024AOM_at; Start 4; Stop 28
aaaaggcagattctctatctctact

SEQ ID NO: 61610 - DNA, 25 bp, Artificial
  probe
  misc_feature (1)..(25): SEQ ID NO: 729; WAN024AOM_at; Start 25; Stop 49
tactacttgaaggtcaagaatccgc

SEQ ID NO: 61611 - DNA, 25 bp, Artificial
  probe
  misc_feature (1)..(25): SEQ ID NO: 729; WAN024AOM_at; Start 7; Stop 31
aggcagattctctatctctactact

SEQ ID NO: 61612 - DNA, 25 bp, Artificial
  probe
  misc_feature (1)..(25): SEQ ID NO: 729; WAN024AOM_at; Start 10; Stop 34
cagattctctatctctactacttga

SEQ ID NO: 61613 - DNA, 25 bp, Artificial
  probe
  misc_feature (1)..(25): SEQ ID NO: 729; WAN024AOM_at; Start 18; Stop 42
ctatctctactacttgaaggtcaag

SEQ ID NO: 61614 - DNA, 25 bp, Artificial
  probe
  misc_feature (1)..(25): SEQ ID NO: 729; WAN024AOM_at; Start 2; Stop 26
tgaaaaggcagattctctatctcta

SEQ ID NO: 61615 - DNA, 25 bp, Artificial
  probe
  misc_feature (1)..(25): SEQ ID NO: 729; WAN024AOM_at; Start 14; Stop 38
ttctctatctctactacttgaaggt

SEQ ID NO: 61616 - DNA, 25 bp, Artificial
  probe
  misc_feature (1)..(25): SEQ ID NO: 729; WAN024AOM_at; Start 13; Stop 37
attctctatctctactacttgaagg

SEQ ID NO: 61617 - DNA, 25 bp, Artificial
  probe
  misc_feature (1)..(25): SEQ ID NO: 729; WAN024AOM_at; Start 26; Stop 50
actacttgaaggtcaagaatccgcc

SEQ ID NO: 61618 - DNA, 25 bp, Artificial
  probe
  misc_feature (1)..(25): SEQ ID NO: 729; WAN024AOM_at; Start 17; Stop 41
tctatctctactacttgaaggtcaa

SEQ ID NO: 61619 - DNA, 25 bp, Artificial
  probe
  misc_feature (1)..(25): SEQ ID NO: 729; WAN024AOM_at; Start 28; Stop 52
tacttgaaggtcaagaatccgccgt

SEQ ID NO: 61620 - DNA, 25 bp, Artificial
  probe
  misc_feature (1)..(25): SEQ ID NO: 729; WAN024AOM_at; Start 23; Stop 47
tctactacttgaaggtcaagaatcc

SEQ ID NO: 61621 - DNA, 25 bp, Artificial
  probe
  misc_feature (1)..(25): SEQ ID NO: 729; WAN024AOM_at; Start 35; Stop 59
aggtcaagaatccgccgttatccaa

SEQ ID NO: 61622 - DNA, 25 bp, Artificial
  probe
  misc_feature (1)..(25): SEQ ID NO: 729; WAN024AOM_at; Start 6; Stop 30
aaggcagattctctatctctactac

SEQ ID NO: 61623 - DNA, 25 bp, Artificial
  probe
  misc_feature (1)..(25): SEQ ID NO: 729; WAN024AOM_at; Start 27; Stop 51
ctacttgaaggtcaagaatccgccg

SEQ ID NO: 61624 - DNA, 25 bp, Artificial
  probe
  misc_feature (1)..(25): SEQ ID NO: 729; WAN024AOM_at; Start 15; Stop 39
tctctatctctactacttgaaggtc

SEQ ID NO: 61625 - DNA, 25 bp, Artificial
  probe
  misc_feature (1)..(25): SEQ ID NO: 4665; WAN024AON_at; Start 8; Stop 32
ataacggcggattcttgaccttcaa

SEQ ID NO: 61626 - DNA, 25 bp, Artificial
  probe
  misc_feature (1)..(25): SEQ ID NO: 4665; WAN024AON_at; Start 24; Stop 48
gaccttcaagtagtagagatagaga

SEQ ID NO: 61627 - DNA, 25 bp, Artificial
  probe
  misc_feature (1)..(25): SEQ ID NO: 4665; WAN024AON_at; Start 37; Stop 61
tagagatagagaatctgccttttca

SEQ ID NO: 61628 - DNA, 25 bp, Artificial
  probe
  misc_feature (1)..(25): SEQ ID NO: 4665; WAN024AON_at; Start 30; Stop 54
caagtagtagagatagagaatctgc

SEQ ID NO: 61629 - DNA, 25 bp, Artificial
  probe
  misc_feature (1)..(25): SEQ ID NO: 4665; WAN024AON_at; Start 5; Stop 29
tggataacggcggattcttgacctt

SEQ ID NO: 61630 - DNA, 25 bp, Artificial
  probe
  misc_feature (1)..(25): SEQ ID NO: 4665; WAN024AON_at; Start 32; Stop 56
agtagtagagatagagaatctgcct

SEQ ID NO: 61631 - DNA, 25 bp, Artificial
  probe
  misc_feature (1)..(25): SEQ ID NO: 4665; WAN024AON_at; Start 28; Stop 52
ttcaagtagtagagatagagaatct

SEQ ID NO: 61632 - DNA, 25 bp, Artificial
  probe
  misc_feature (1)..(25): SEQ ID NO: 4665; WAN024AON_at; Start 23; Stop 47
tgaccttcaagtagtagagatagag

SEQ ID NO: 61633 - DNA, 25 bp, Artificial
  probe
  misc_feature (1)..(25): SEQ ID NO: 4665; WAN024AON_at; Start 11; Stop 35
acggcggattcttgaccttcaagta

SEQ ID NO: 61634 - DNA, 25 bp, Artificial
  probe
  misc_feature (1)..(25): SEQ ID NO: 4665; WAN024AON_at; Start 15; Stop 39
cggattcttgaccttcaagtagtag

SEQ ID NO: 61635 - DNA, 25 bp, Artificial
  probe
  misc_feature (1)..(25): SEQ ID NO: 4665; WAN024AON_at; Start 36; Stop 60
gtagagatagagaatctgccttttc

SEQ ID NO: 61636 - DNA, 25 bp, Artificial
  probe
  misc_feature (1)..(25): SEQ ID NO: 4665; WAN024AON_at; Start 9; Stop 33
taacggcggattcttgaccttcaag

SEQ ID NO: 61637 - DNA, 25 bp, Artificial
  probe
  misc_feature (1)..(25): SEQ ID NO: 4665; WAN024AON_at; Start 17; Stop 41
gattcttgaccttcaagtagtagag

SEQ ID NO: 61638 - DNA, 25 bp, Artificial
  probe
  misc_feature (1)..(25): SEQ ID NO: 4665; WAN024AON_at; Start 21; Stop 45
cttgaccttcaagtagtagagatag

SEQ ID NO: 61639 - DNA, 25 bp, Artificial
  probe
  misc_feature (1)..(25): SEQ ID NO: 4665; WAN024AON_at; Start 16; Stop 40
ggattcttgaccttcaagtagtaga

SEQ ID NO: 61640 - DNA, 25 bp, Artificial
  probe
  misc_feature (1)..(25): SEQ ID NO: 4665; WAN024AON_at; Start 38; Stop 62
agagatagagaatctgccttttcat

SEQ ID NO: 61641 - DNA, 25 bp, Artificial
  probe
  misc_feature (1)..(25): SEQ ID NO: 4665; WAN024AON_at; Start 18; Stop 42
attcttgaccttcaagtagtagaga

SEQ ID NO: 61642 - DNA, 25 bp, Artificial
  probe
  misc_feature (1)..(25): SEQ ID NO: 4665; WAN024AON_at; Start 31; Stop 55
aagtagtagagatagagaatctgcc

SEQ ID NO: 61643 - DNA, 25 bp, Artificial
  probe
  misc_feature (1)..(25): SEQ ID NO: 4665; WAN024AON_at; Start 14; Stop 38
gcggattcttgaccttcaagtagta

SEQ ID NO: 61644 - DNA, 25 bp, Artificial
  probe
  misc_feature (1)..(25): SEQ ID NO: 4665; WAN024AON_at; Start 19; Stop 43
ttcttgaccttcaagtagtagagat

SEQ ID NO: 61645 - DNA, 25 bp, Artificial
  probe
  misc_feature (1)..(25): SEQ ID NO: 4665; WAN024AON_at; Start 20; Stop 44
tcttgaccttcaagtagtagagata

SEQ ID NO: 61646 - DNA, 25 bp, Artificial
  probe
  misc_feature (1)..(25): SEQ ID NO: 4665; WAN024AON_at; Start 34; Stop 58
tagtagagatagagaatctgccttt

SEQ ID NO: 61647 - DNA, 25 bp, Artificial
  probe
  misc_feature (1)..(25): SEQ ID NO: 4665; WAN024AON_at; Start 12; Stop 36
cggcggattcttgaccttcaagtag

SEQ ID NO: 61648 - DNA, 25 bp, Artificial
  probe
  misc_feature (1)..(25): SEQ ID NO: 4665; WAN024AON_at; Start 7; Stop 31
gataacggcggattcttgaccttca

SEQ ID NO: 61649 - DNA, 25 bp, Artificial
  probe
  misc_feature (1)..(25): SEQ ID NO: 4665; WAN024AON_at; Start 27; Stop 51
cttcaagtagtagagatagagaatc

SEQ ID NO: 61650 - DNA, 25 bp, Artificial
  probe
  misc_feature (1)..(25): SEQ ID NO: 4665; WAN024AON_at; Start 13; Stop 37
ggcggattcttgaccttcaagtagt

SEQ ID NO: 61651 - DNA, 25 bp, Artificial
  probe
  misc_feature (1)..(25): SEQ ID NO: 4665; WAN024AON_at; Start 25; Stop 49
accttcaagtagtagagatagagaa

SEQ ID NO: 61652 - DNA, 25 bp, Artificial
  probe
  misc_feature (1)..(25): SEQ ID NO: 4665; WAN024AON_at; Start 26; Stop 50
ccttcaagtagtagagatagagaat

SEQ ID NO: 61653 - DNA, 25 bp, Artificial
  probe
  misc_feature (1)..(25): SEQ ID NO: 4665; WAN024AON_at; Start 33; Stop 57
gtagtagagatagagaatctgcctt

SEQ ID NO: 61654 - DNA, 25 bp, Artificial
  probe
  misc_feature (1)..(25): SEQ ID NO: 4665; WAN024AON_at; Start 22; Stop 46
ttgaccttcaagtagtagagataga

SEQ ID NO: 61655 - DNA, 25 bp, Artificial
  probe
  misc_feature (1)..(25): SEQ ID NO: 4665; WAN024AON_at; Start 6; Stop 30
ggataacggcggattcttgaccttc

SEQ ID NO: 61656 - DNA, 25 bp, Artificial
  probe
  misc_feature (1)..(25): SEQ ID NO: 4665; WAN024AON_at; Start 29; Stop 53
tcaagtagtagagatagagaatctg

SEQ ID NO: 61657 - DNA, 25 bp, Artificial
  probe
  misc_feature (1)..(25): SEQ ID NO: 4665; WAN024AON_at; Start 10; Stop 34
aacggcggattcttgaccttcaagt

SEQ ID NO: 61658 - DNA, 25 bp, Artificial
  probe
  misc_feature (1)..(25): SEQ ID NO: 4665; WAN024AON_at; Start 35; Stop 59
agtagagatagagaatctgcctttt

SEQ ID NO: 61659 - DNA, 25 bp, Artificial
  probe
  misc_feature (1)..(25): SEQ ID NO: 4554; WAN024AOO_at; Start 341; Stop 365
tgctagcctagaagcagacacccga

SEQ ID NO: 61660 - DNA, 25 bp, Artificial
  probe
  misc_feature (1)..(25): SEQ ID NO: 4554; WAN024AOO_at; Start 318; Stop 342
catcactcctttggatattgaggtg

SEQ ID NO: 61661 - DNA, 25 bp, Artificial
  probe
  misc_feature (1)..(25): SEQ ID NO: 4554; WAN024AOO_at; Start 53; Stop 77
cgataatatataggttttgctagcc

SEQ ID NO: 61662 - DNA, 25 bp, Artificial
  probe
  misc_feature (1)..(25): SEQ ID NO: 4554; WAN024AOO_at; Start 369; Stop 393
tctaaaccatccttaatagagatga

SEQ ID NO: 61663 - DNA, 25 bp, Artificial
  probe
  misc_feature (1)..(25): SEQ ID NO: 4554; WAN024AOO_at; Start 159; Stop 183
gcttctctatttccgtaagatagct

SEQ ID NO: 61664 - DNA, 25 bp, Artificial
  probe
  misc_feature (1)..(25): SEQ ID NO: 4554; WAN024AOO_at; Start 126; Stop 150
taaggtgcgaaattattcaagttct

SEQ ID NO: 61665 - DNA, 25 bp, Artificial
  probe
  misc_feature (1)..(25): SEQ ID NO: 4554; WAN024AOO_at; Start 120; Stop 144
ccctcttaaggtgcgaaattattca

SEQ ID NO: 61666 - DNA, 25 bp, Artificial
  probe
  misc_feature (1)..(25): SEQ ID NO: 4554; WAN024AOO_at; Start 110; Stop 134
tgtattattaccctcttaaggtgcg

SEQ ID NO: 61667 - DNA, 25 bp, Artificial
  probe
  misc_feature (1)..(25): SEQ ID NO: 4554; WAN024AOO_at; Start 389; Stop 413
gatgacaagacagataagctcagtt

SEQ ID NO: 61668 - DNA, 25 bp, Artificial
  probe
  misc_feature (1)..(25): SEQ ID NO: 4554; WAN024AOO_at; Start 333; Stop 357
tattgaggtgctagcctagaagcag

SEQ ID NO: 61669 - DNA, 25 bp, Artificial
  probe
  misc_feature (1)..(25): SEQ ID NO: 4554; WAN024AOO_at; Start 70; Stop 94
tgctagcctctacaccataaatatt

SEQ ID NO: 61670 - DNA, 25 bp, Artificial
  probe
  misc_feature (1)..(25): SEQ ID NO: 4554; WAN024AOO_at; Start 266; Stop 290
tcttcctcaataaatcatctgagag

SEQ ID NO: 61671 - DNA, 25 bp, Artificial
  probe
  misc_feature (1)..(25): SEQ ID NO: 4554; WAN024AOO_at; Start 290; Stop 314
gataggtattccttatgtccttcaa

SEQ ID NO: 61672 - DNA, 25 bp, Artificial
  probe
  misc_feature (1)..(25): SEQ ID NO: 4554; WAN024AOO_at; Start 205; Stop 229
gaagatgatagttctaacctttaga

SEQ ID NO: 61673 - DNA, 25 bp, Artificial
  probe
  misc_feature (1)..(25): SEQ ID NO: 4554; WAN024AOO_at; Start 191; Stop 215
tcgatttaagaactgaagatgatag

SEQ ID NO: 61674 - DNA, 25 bp, Artificial
  probe
  misc_feature (1)..(25): SEQ ID NO: 4554; WAN024AOO_at; Start 346; Stop 370
gcctagaagcagacacccgattatc

SEQ ID NO: 61675 - DNA, 25 bp, Artificial
  probe
  misc_feature (1)..(25): SEQ ID NO: 4554; WAN024AOO_at; Start 3; Stop 27
tattcaacgaaaataattagttcag

SEQ ID NO: 61676 - DNA, 25 bp, Artificial
  probe
  misc_feature (1)..(25): SEQ ID NO: 4554; WAN024AOO_at; Start 228; Stop 252
gaaatccaagccttcactagctcaa

SEQ ID NO: 61677 - DNA, 25 bp, Artificial
  probe
  misc_feature (1)..(25): SEQ ID NO: 4554; WAN024AOO_at; Start 170; Stop 194
tccgtaagatagcttatttcttcga

SEQ ID NO: 61678 - DNA, 25 bp, Artificial
  probe
  misc_feature (1)..(25): SEQ ID NO: 4554; WAN024AOO_at; Start 154; Stop 178
aaaatgcttctctatttccgtaaga

SEQ ID NO: 61679 - DNA, 25 bp, Artificial
  probe
  misc_feature (1)..(25): SEQ ID NO: 4554; WAN024AOO_at; Start 250; Stop 274
caaaaactcctatctttcttcctca

SEQ ID NO: 61680 - DNA, 25 bp, Artificial
  probe
  misc_feature (1)..(25): SEQ ID NO: 4554; WAN024AOO_at; Start 397; Stop 421
gacagataagctcagttaattactt

SEQ ID NO: 61681 - DNA, 25 bp, Artificial
  probe
  misc_feature (1)..(25): SEQ ID NO: 4554; WAN024AOO_at; Start 446; Stop 470
ttgtcaacaaaaagaaatcaaatca

SEQ ID NO: 61682 - DNA, 25 bp, Artificial
  probe
  misc_feature (1)..(25): SEQ ID NO: 4554; WAN024AOO_at; Start 324; Stop 348
tcctttggatattgaggtgctagcc

SEQ ID NO: 61683 - DNA, 25 bp, Artificial
  probe
  misc_feature (1)..(25): SEQ ID NO: 4554; WAN024AOO_at; Start 379; Stop 403
ccttaatagagatgacaagacagat

SEQ ID NO: 61684 - DNA, 25 bp, Artificial
  probe
  misc_feature (1)..(25): SEQ ID NO: 4554; WAN024AOO_at; Start 75; Stop 99
gcctctacaccataaatatttgcta

SEQ ID NO: 61685 - DNA, 25 bp, Artificial
  probe
  misc_feature (1)..(25): SEQ ID NO: 4554; WAN024AOO_at; Start 354; Stop 378
gcagacacccgattatctaaaccat

SEQ ID NO: 61686 - DNA, 25 bp, Artificial
  probe
  misc_feature (1)..(25): SEQ ID NO: 4554; WAN024AOO_at; Start 61; Stop 85
tataggttttgctagcctctacacc

SEQ ID NO: 61687 - DNA, 25 bp, Artificial
  probe
  misc_feature (1)..(25): SEQ ID NO: 4554; WAN024AOO_at; Start 237; Stop 261
gccttcactagctcaaaaactccta

SEQ ID NO: 61688 - DNA, 25 bp, Artificial
  probe
  misc_feature (1)..(25): SEQ ID NO: 4554; WAN024AOO_at; Start 280; Stop 304
tcatctgagagataggtattcctta

SEQ ID NO: 61689 - DNA, 25 bp, Artificial
  probe
  misc_feature (1)..(25): SEQ ID NO: 4554; WAN024AOO_at; Start 303; Stop 327
tatgtccttcaaattcatcactcct

SEQ ID NO: 61690 - DNA, 25 bp, Artificial
  probe
  misc_feature (1)..(25): SEQ ID NO: 4554; WAN024AOO_at; Start 219; Stop 243
taacctttagaaatccaagccttca

SEQ ID NO: 61691 - DNA, 25 bp, Artificial
  probe
  misc_feature (1)..(25): SEQ ID NO: 4554; WAN024AOO_at; Start 141; Stop 165
ttcaagttcttaaaaaatgcttctc

SEQ ID NO: 61692 - DNA, 25 bp, Artificial
  probe
  misc_feature (1)..(25): SEQ ID NO: 4554; WAN024AOO_at; Start 184; Stop 208
tatttcttcgatttaagaactgaag

SEQ ID NO: 61693 - DNA, 25 bp, Artificial
  probe
  misc_feature (1)..(25): SEQ ID NO: 4699; WAN024AOP_at; Start 377; Stop 401
aatatttatggtgtagaggctagca

SEQ ID NO: 61694 - DNA, 25 bp, Artificial
  probe
  misc_feature (1)..(25): SEQ ID NO: 4699; WAN024AOP_at; Start 407; Stop 431
tatatattatcggatttaaaaagga

SEQ ID NO: 61695 - DNA, 25 bp, Artificial
  probe
  misc_feature (1)..(25): SEQ ID NO: 4699; WAN024AOP_at; Start 43; Stop 67
gatatataagtaattaactgagctt

SEQ ID NO: 61696 - DNA, 25 bp, Artificial
  probe
  misc_feature (1)..(25): SEQ ID NO: 4699; WAN024AOP_at; Start 141; Stop 165
caaaggagtgatgaatttgaaggac

SEQ ID NO: 61697 - DNA, 25 bp, Artificial
  probe
  misc_feature (1)..(25): SEQ ID NO: 4699; WAN024AOP_at; Start 282; Stop 306
gaaataagctatcttacggaaatag

SEQ ID NO: 61698 - DNA, 25 bp, Artificial
  probe
  misc_feature (1)..(25): SEQ ID NO: 4699; WAN024AOP_at; Start 244; Stop 268
taaaggttagaactatcatcttcag

SEQ ID NO: 61699 - DNA, 25 bp, Artificial
  probe
  misc_feature (1)..(25): SEQ ID NO: 4699; WAN024AOP_at; Start 210; Stop 234
taggagtttttgagctagtgaaggc

SEQ ID NO: 61700 - DNA, 25 bp, Artificial
  probe
  misc_feature (1)..(25): SEQ ID NO: 4699; WAN024AOP_at; Start 180; Stop 204
tctctcagatgatttattgaggaag

SEQ ID NO: 61701 - DNA, 25 bp, Artificial
  probe
  misc_feature (1)..(25): SEQ ID NO: 4699; WAN024AOP_at; Start 101; Stop 125
gataatcgggtgtctgcttctaggc

SEQ ID NO: 61702 - DNA, 25 bp, Artificial
  probe
  misc_feature (1)..(25): SEQ ID NO: 4699; WAN024AOP_at; Start 128; Stop 152
gcacctcaatatccaaaggagtgat

SEQ ID NO: 61703 - DNA, 25 bp, Artificial
  probe
  misc_feature (1)..(25): SEQ ID NO: 4699; WAN024AOP_at; Start 319; Stop 343
taagaacttgaataatttcgcacct

SEQ ID NO: 61704 - DNA, 25 bp, Artificial
  probe
  misc_feature (1)..(25): SEQ ID NO: 4699; WAN024AOP_at; Start 259; Stop 283
tcatcttcagttcttaaatcgaaga

SEQ ID NO: 61705 - DNA, 25 bp, Artificial
  probe
  misc_feature (1)..(25): SEQ ID NO: 4699; WAN024AOP_at; Start 386; Stop 410
ggtgtagaggctagcaaaacctata

SEQ ID NO: 61706 - DNA, 25 bp, Artificial
  probe
  misc_feature (1)..(25): SEQ ID NO: 4699; WAN024AOP_at; Start 69; Stop 93
tctgtcttgtcatctctattaagga

SEQ ID NO: 61707 - DNA, 25 bp, Artificial
  probe
  misc_feature (1)..(25): SEQ ID NO: 4699; WAN024AOP_at; Start 78; Stop 102
tcatctctattaaggatggtttaga

SEQ ID NO: 61708 - DNA, 25 bp, Artificial
  probe
  misc_feature (1)..(25): SEQ ID NO: 4699; WAN024AOP_at; Start 194; Stop 218
tattgaggaagaaagataggagttt

SEQ ID NO: 61709 - DNA, 25 bp, Artificial
  probe
  misc_feature (1)..(25): SEQ ID NO: 4699; WAN024AOP_at; Start 270; Stop 294
tcttaaatcgaagaaataagctatc

SEQ ID NO: 61710 - DNA, 25 bp, Artificial
  probe
  misc_feature (1)..(25): SEQ ID NO: 4699; WAN024AOP_at; Start 327; Stop 351
tgaataatttcgcaccttaagaggg

SEQ ID NO: 61711 - DNA, 25 bp, Artificial
  probe
  misc_feature (1)..(25): SEQ ID NO: 4699; WAN024AOP_at; Start 104; Stop 128
aatcgggtgtctgcttctaggctag

SEQ ID NO: 61712 - DNA, 25 bp, Artificial
  probe
  misc_feature (1)..(25): SEQ ID NO: 4699; WAN024AOP_at; Start 57; Stop 81
taactgagcttatctgtcttgtcat

SEQ ID NO: 61713 - DNA, 25 bp, Artificial
  probe
  misc_feature (1)..(25): SEQ ID NO: 4699; WAN024AOP_at; Start 395; Stop 419
gctagcaaaacctatatattatcgg

SEQ ID NO: 61714 - DNA, 25 bp, Artificial
  probe
  misc_feature (1)..(25): SEQ ID NO: 4699; WAN024AOP_at; Start 291; Stop 315
tatcttacggaaatagagaagcatt

SEQ ID NO: 61715 - DNA, 25 bp, Artificial
  probe
  misc_feature (1)..(25): SEQ ID NO: 4699; WAN024AOP_at; Start 153; Stop 177
gaatttgaaggacataaggaatacc

SEQ ID NO: 61716 - DNA, 25 bp, Artificial
  probe
  misc_feature (1)..(25): SEQ ID NO: 4699; WAN024AOP_at; Start 341; Stop 365
ccttaagagggtaataatacagtat

SEQ ID NO: 61717 - DNA, 25 bp, Artificial
  probe
  misc_feature (1)..(25): SEQ ID NO: 4699; WAN024AOP_at; Start 337; Stop 361
cgcaccttaagagggtaataataca

SEQ ID NO: 61718 - DNA, 25 bp, Artificial
  probe
  misc_feature (1)..(25): SEQ ID NO: 4699; WAN024AOP_at; Start 225; Stop 249
tagtgaaggcttggatttctaaagg

SEQ ID NO: 61719 - DNA, 25 bp, Artificial
  probe
  misc_feature (1)..(25): SEQ ID NO: 4699; WAN024AOP_at; Start 2; Stop 26
gatttgatttctttttgttgacaaa

SEQ ID NO: 61720 - DNA, 25 bp, Artificial
  probe
  misc_feature (1)..(25): SEQ ID NO: 4699; WAN024AOP_at; Start 123; Stop 147
ggctagcacctcaatatccaaagga

SEQ ID NO: 61721 - DNA, 25 bp, Artificial
  probe
  misc_feature (1)..(25): SEQ ID NO: 4699; WAN024AOP_at; Start 167; Stop 191
taaggaatacctatctctcagatga

SEQ ID NO: 61722 - DNA, 25 bp, Artificial
  probe
  misc_feature (1)..(25): SEQ ID NO: 4699; WAN024AOP_at; Start 304; Stop 328
tagagaagcattttttaagaacttg

SEQ ID NO: 61723 - DNA, 25 bp, Artificial
  probe
  misc_feature (1)..(25): SEQ ID NO: 4699; WAN024AOP_at; Start 88; Stop 112
taaggatggtttagataatcgggtg

SEQ ID NO: 61724 - DNA, 25 bp, Artificial
  probe
  misc_feature (1)..(25): SEQ ID NO: 4699; WAN024AOP_at; Start 111; Stop 135
tgtctgcttctaggctagcacctca

SEQ ID NO: 61725 - DNA, 25 bp, Artificial
  probe
  misc_feature (1)..(25): SEQ ID NO: 4699; WAN024AOP_at; Start 372; Stop 396
tagcaaatatttatggtgtagaggc

SEQ ID NO: 61726 - DNA, 25 bp, Artificial
  probe
  misc_feature (1)..(25): SEQ ID NO: 4699; WAN024AOP_at; Start 444; Stop 468
ctgaactaattattttcgttgaata

SEQ ID NO: 61727 - DNA, 25 bp, Artificial
  probe
  misc_feature (1)..(25): SEQ ID NO: 521; WAN024AOQ_at; Start 15; Stop 39
tctataaaaaacagtcactaatgac

SEQ ID NO: 61728 - DNA, 25 bp, Artificial
  probe
  misc_feature (1)..(25): SEQ ID NO: 521; WAN024AOQ_at; Start 13; Stop 37
tttctataaaaaacagtcactaatg

SEQ ID NO: 61729 - DNA, 25 bp, Artificial
  probe
  misc_feature (1)..(25): SEQ ID NO: 521; WAN024AOQ_at; Start 14; Stop 38
ttctataaaaaacagtcactaatga

SEQ ID NO: 61730 - DNA, 25 bp, Artificial
  probe
  misc_feature (1)..(25): SEQ ID NO: 521; WAN024AOQ_at; Start 17; Stop 41
tataaaaaacagtcactaatgactg

SEQ ID NO: 61731 - DNA, 25 bp, Artificial
  probe
  misc_feature (1)..(25): SEQ ID NO: 521; WAN024AOQ_at; Start 16; Stop 40
ctataaaaaacagtcactaatgact

SEQ ID NO: 61732 - DNA, 25 bp, Artificial
  probe
  misc_feature (1)..(25): SEQ ID NO: 521; WAN024AOQ_at; Start 25; Stop 49
acagtcactaatgactgttttttag

SEQ ID NO: 61733 - DNA, 25 bp, Artificial
  probe
  misc_feature (1)..(25): SEQ ID NO: 521; WAN024AOQ_at; Start 18; Stop 42
ataaaaaacagtcactaatgactgt

SEQ ID NO: 61734 - DNA, 25 bp, Artificial
  probe
  misc_feature (1)..(25): SEQ ID NO: 3266; WAN024AOR_at; Start 11; Stop 35
gtcattagtgactgttttttataga

SEQ ID NO: 61735 - DNA, 25 bp, Artificial
  probe
  misc_feature (1)..(25): SEQ ID NO: 3266; WAN024AOR_at; Start 1; Stop 25
ctaaaaaacagtcattagtgactgt

SEQ ID NO: 61736 - DNA, 25 bp, Artificial
  probe
  misc_feature (1)..(25): SEQ ID NO: 3266; WAN024AOR_at; Start 9; Stop 33
cagtcattagtgactgttttttata

SEQ ID NO: 61737 - DNA, 25 bp, Artificial
  probe
  misc_feature (1)..(25): SEQ ID NO: 3266; WAN024AOR_at; Start 12; Stop 36
tcattagtgactgttttttatagaa

SEQ ID NO: 61738 - DNA, 25 bp, Artificial
  probe
  misc_feature (1)..(25): SEQ ID NO: 3266; WAN024AOR_at; Start 13; Stop 37
cattagtgactgttttttatagaaa

SEQ ID NO: 61739 - DNA, 25 bp, Artificial
  probe
  misc_feature (1)..(25): SEQ ID NO: 3266; WAN024AOR_at; Start 8; Stop 32
acagtcattagtgactgttttttat

SEQ ID NO: 61740 - DNA, 25 bp, Artificial
  probe
  misc_feature (1)..(25): SEQ ID NO: 3266; WAN024AOR_at; Start 10; Stop 34
agtcattagtgactgttttttatag

SEQ ID NO: 61741 - DNA, 25 bp, Artificial
  probe
  misc_feature (1)..(25): SEQ ID NO: 4457; WAN024AOS_at; Start 37; Stop 61
tctcatttattctgcgaagaggacc

SEQ ID NO: 61742 - DNA, 25 bp, Artificial
  probe
  misc_feature (1)..(25): SEQ ID NO: 4457; WAN024AOS_at; Start 4; Stop 28
tttgctctatttgatataaaccgcc

SEQ ID NO: 61743 - DNA, 25 bp, Artificial
  probe
  misc_feature (1)..(25): SEQ ID NO: 4457; WAN024AOS_at; Start 40; Stop 64
catttattctgcgaagaggaccttc

SEQ ID NO: 61744 - DNA, 25 bp, Artificial
  probe
  misc_feature (1)..(25): SEQ ID NO: 4457; WAN024AOS_at; Start 9; Stop 33
tctatttgatataaaccgccatcta

SEQ ID NO: 61745 - DNA, 25 bp, Artificial
  probe
  misc_feature (1)..(25): SEQ ID NO: 4457; WAN024AOS_at; Start 81; Stop 105
tctccgaatctaacagctgatttag

SEQ ID NO: 61746 - DNA, 25 bp, Artificial
  probe
  misc_feature (1)..(25): SEQ ID NO: 4457; WAN024AOS_at; Start 44; Stop 68
tattctgcgaagaggaccttcaata

SEQ ID NO: 61747 - DNA, 25 bp, Artificial
  probe
  misc_feature (1)..(25): SEQ ID NO: 4457; WAN024AOS_at; Start 99; Stop 123
gatttaggtcctaatgatttaccaa

SEQ ID NO: 61748 - DNA, 25 bp, Artificial
  probe
  misc_feature (1)..(25): SEQ ID NO: 4457; WAN024AOS_at; Start 55; Stop 79
gaggaccttcaatataggataaagc

SEQ ID NO: 61749 - DNA, 25 bp, Artificial
  probe
  misc_feature (1)..(25): SEQ ID NO: 4457; WAN024AOS_at; Start 47; Stop 71
tctgcgaagaggaccttcaatatag

SEQ ID NO: 61750 - DNA, 25 bp, Artificial
  probe
  misc_feature (1)..(25): SEQ ID NO: 4457; WAN024AOS_at; Start 78; Stop 102
gcttctccgaatctaacagctgatt

SEQ ID NO: 61751 - DNA, 25 bp, Artificial
  probe
  misc_feature (1)..(25): SEQ ID NO: 4457; WAN024AOS_at; Start 86; Stop 110
gaatctaacagctgatttaggtcct

SEQ ID NO: 61752 - DNA, 25 bp, Artificial
  probe
  misc_feature (1)..(25): SEQ ID NO: 4457; WAN024AOS_at; Start 64; Stop 88
caatataggataaagcttctccgaa

SEQ ID NO: 61753 - DNA, 25 bp, Artificial
  probe
  misc_feature (1)..(25): SEQ ID NO: 4457; WAN024AOS_at; Start 18; Stop 42
tataaaccgccatctatcgtctcat

SEQ ID NO: 61754 - DNA, 25 bp, Artificial
  probe
  misc_feature (1)..(25): SEQ ID NO: 4457; WAN024AOS_at; Start 22; Stop 46
aaccgccatctatcgtctcatttat

SEQ ID NO: 61755 - DNA, 25 bp, Artificial
  probe
  misc_feature (1)..(25): SEQ ID NO: 4457; WAN024AOS_at; Start 69; Stop 93
taggataaagcttctccgaatctaa

SEQ ID NO: 61756 - DNA, 25 bp, Artificial
  probe
  misc_feature (1)..(25): SEQ ID NO: 4457; WAN024AOS_at; Start 28; Stop 52
catctatcgtctcatttattctgcg

SEQ ID NO: 61757 - DNA, 25 bp, Artificial
  probe
  misc_feature (1)..(25): SEQ ID NO: 4457; WAN024AOS_at; Start 52; Stop 76
gaagaggaccttcaatataggataa

SEQ ID NO: 61758 - DNA, 25 bp, Artificial
  probe
  misc_feature (1)..(25): SEQ ID NO: 4457; WAN024AOS_at; Start 72; Stop 96
gataaagcttctccgaatctaacag

SEQ ID NO: 61759 - DNA, 25 bp, Artificial
  probe
  misc_feature (1)..(25): SEQ ID NO: 4457; WAN024AOS_at; Start 34; Stop 58
tcgtctcatttattctgcgaagagg

SEQ ID NO: 61760 - DNA, 25 bp, Artificial
  probe
  misc_feature (1)..(25): SEQ ID NO: 4457; WAN024AOS_at; Start 50; Stop 74
gcgaagaggaccttcaatataggat

SEQ ID NO: 61761 - DNA, 25 bp, Artificial
  probe
  misc_feature (1)..(25): SEQ ID NO: 4457; WAN024AOS_at; Start 12; Stop 36
atttgatataaaccgccatctatcg

SEQ ID NO: 61762 - DNA, 25 bp, Artificial
  probe
  misc_feature (1)..(25): SEQ ID NO: 4457; WAN024AOS_at; Start 2; Stop 26
aatttgctctatttgatataaaccg

SEQ ID NO: 61763 - DNA, 25 bp, Artificial
  probe
  misc_feature (1)..(25): SEQ ID NO: 4457; WAN024AOS_at; Start 32; Stop 56
tatcgtctcatttattctgcgaaga

SEQ ID NO: 61764 - DNA, 25 bp, Artificial
  probe
  misc_feature (1)..(25): SEQ ID NO: 4457; WAN024AOS_at; Start 60; Stop 84
ccttcaatataggataaagcttctc

SEQ ID NO: 61765 - DNA, 25 bp, Artificial
  probe
  misc_feature (1)..(25): SEQ ID NO: 4457; WAN024AOS_at; Start 62; Stop 86
ttcaatataggataaagcttctccg

SEQ ID NO: 61766 - DNA, 25 bp, Artificial
  probe
  misc_feature (1)..(25): SEQ ID NO: 4457; WAN024AOS_at; Start 91; Stop 115
taacagctgatttaggtcctaatga

SEQ ID NO: 61767 - DNA, 25 bp, Artificial
  probe
  misc_feature (1)..(25): SEQ ID NO: 4457; WAN024AOS_at; Start 7; Stop 31
gctctatttgatataaaccgccatc

SEQ ID NO: 61768 - DNA, 25 bp, Artificial
  probe
  misc_feature (1)..(25): SEQ ID NO: 4457; WAN024AOS_at; Start 84; Stop 108
ccgaatctaacagctgatttaggtc

SEQ ID NO: 61769 - DNA, 25 bp, Artificial
  probe
  misc_feature (1)..(25): SEQ ID NO: 4457; WAN024AOS_at; Start 57; Stop 81
ggaccttcaatataggataaagctt

SEQ ID NO: 61770 - DNA, 25 bp, Artificial
  probe
  misc_feature (1)..(25): SEQ ID NO: 4457; WAN024AOS_at; Start 67; Stop 91
tataggataaagcttctccgaatct

SEQ ID NO: 61771 - DNA, 25 bp, Artificial
  probe
  misc_feature (1)..(25): SEQ ID NO: 4457; WAN024AOS_at; Start 75; Stop 99
aaagcttctccgaatctaacagctg

SEQ ID NO: 61772 - DNA, 25 bp, Artificial
  probe
  misc_feature (1)..(25): SEQ ID NO: 4457; WAN024AOS_at; Start 42; Stop 66
tttattctgcgaagaggaccttcaa

SEQ ID NO: 61773 - DNA, 25 bp, Artificial
  probe
  misc_feature (1)..(25): SEQ ID NO: 4457; WAN024AOS_at; Start 16; Stop 40
gatataaaccgccatctatcgtctc

SEQ ID NO: 61774 - DNA, 25 bp, Artificial
  probe
  misc_feature (1)..(25): SEQ ID NO: 4457; WAN024AOS_at; Start 102; Stop 126
ttaggtcctaatgatttaccaacta

SEQ ID NO: 61775 - DNA, 25 bp, Artificial
  probe
  misc_feature (1)..(25): SEQ ID NO: 3191; WAN024AOT_at; Start 65; Stop 89
tattgaaggtcctcttcgcagaata

SEQ ID NO: 61776 - DNA, 25 bp, Artificial
  probe
  misc_feature (1)..(25): SEQ ID NO: 3191; WAN024AOT_at; Start 49; Stop 73
gagaagctttatcctatattgaagg

SEQ ID NO: 61777 - DNA, 25 bp, Artificial
  probe
  misc_feature (1)..(25): SEQ ID NO: 3191; WAN024AOT_at; Start 7; Stop 31
tagttggtaaatcattaggacctaa

SEQ ID NO: 61778 - DNA, 25 bp, Artificial
  probe
  misc_feature (1)..(25): SEQ ID NO: 3191; WAN024AOT_at; Start 31; Stop 55
aatcagctgttagattcggagaagc

SEQ ID NO: 61779 - DNA, 25 bp, Artificial
  probe
  misc_feature (1)..(25): SEQ ID NO: 3191; WAN024AOT_at; Start 63; Stop 87
tatattgaaggtcctcttcgcagaa

SEQ ID NO: 61780 - DNA, 25 bp, Artificial
  probe
  misc_feature (1)..(25): SEQ ID NO: 3191; WAN024AOT_at; Start 43; Stop 67
gattcggagaagctttatcctatat

SEQ ID NO: 61781 - DNA, 25 bp, Artificial
  probe
  misc_feature (1)..(25): SEQ ID NO: 3191; WAN024AOT_at; Start 72; Stop 96
ggtcctcttcgcagaataaatgaga

SEQ ID NO: 61782 - DNA, 25 bp, Artificial
  probe
  misc_feature (1)..(25): SEQ ID NO: 3191; WAN024AOT_at; Start 69; Stop 93
gaaggtcctcttcgcagaataaatg

SEQ ID NO: 61783 - DNA, 25 bp, Artificial
  probe
  misc_feature (1)..(25): SEQ ID NO: 3191; WAN024AOT_at; Start 47; Stop 71
cggagaagctttatcctatattgaa

SEQ ID NO: 61784 - DNA, 25 bp, Artificial
  probe
  misc_feature (1)..(25): SEQ ID NO: 3191; WAN024AOT_at; Start 105; Stop 129
ggcggtttatatcaaatagagcaaa

SEQ ID NO: 61785 - DNA, 25 bp, Artificial
  probe
  misc_feature (1)..(25): SEQ ID NO: 3191; WAN024AOT_at; Start 74; Stop 98
tcctcttcgcagaataaatgagacg

SEQ ID NO: 61786 - DNA, 25 bp, Artificial
  probe
  misc_feature (1)..(25): SEQ ID NO: 3191; WAN024AOT_at; Start 93; Stop 117
gagacgatagatggcggtttatatc

SEQ ID NO: 61787 - DNA, 25 bp, Artificial
  probe
  misc_feature (1)..(25): SEQ ID NO: 3191; WAN024AOT_at; Start 29; Stop 53
taaatcagctgttagattcggagaa

SEQ ID NO: 61788 - DNA, 25 bp, Artificial
  probe
  misc_feature (1)..(25): SEQ ID NO: 3191; WAN024AOT_at; Start 77; Stop 101
tcttcgcagaataaatgagacgata

SEQ ID NO: 61789 - DNA, 25 bp, Artificial
  probe
  misc_feature (1)..(25): SEQ ID NO: 3191; WAN024AOT_at; Start 38; Stop 62
tgttagattcggagaagctttatcc

SEQ ID NO: 61790 - DNA, 25 bp, Artificial
  probe
  misc_feature (1)..(25): SEQ ID NO: 3191; WAN024AOT_at; Start 75; Stop 99
cctcttcgcagaataaatgagacga

SEQ ID NO: 61791 - DNA, 25 bp, Artificial
  probe
  misc_feature (1)..(25): SEQ ID NO: 3191; WAN024AOT_at; Start 5; Stop 29
tatagttggtaaatcattaggacct

SEQ ID NO: 61792 - DNA, 25 bp, Artificial
  probe
  misc_feature (1)..(25): SEQ ID NO: 3191; WAN024AOT_at; Start 19; Stop 43
cattaggacctaaatcagctgttag

SEQ ID NO: 61793 - DNA, 25 bp, Artificial
  probe
  misc_feature (1)..(25): SEQ ID NO: 3191; WAN024AOT_at; Start 27; Stop 51
cctaaatcagctgttagattcggag

SEQ ID NO: 61794 - DNA, 25 bp, Artificial
  probe
  misc_feature (1)..(25): SEQ ID NO: 3191; WAN024AOT_at; Start 61; Stop 85
cctatattgaaggtcctcttcgcag

SEQ ID NO: 61795 - DNA, 25 bp, Artificial
  probe
  misc_feature (1)..(25): SEQ ID NO: 3191; WAN024AOT_at; Start 97; Stop 121
cgatagatggcggtttatatcaaat

SEQ ID NO: 61796 - DNA, 25 bp, Artificial
  probe
  misc_feature (1)..(25): SEQ ID NO: 3191; WAN024AOT_at; Start 54; Stop 78
gctttatcctatattgaaggtcctc

SEQ ID NO: 61797 - DNA, 25 bp, Artificial
  probe
  misc_feature (1)..(25): SEQ ID NO: 3191; WAN024AOT_at; Start 81; Stop 105
cgcagaataaatgagacgatagatg

SEQ ID NO: 61798 - DNA, 25 bp, Artificial
  probe
  misc_feature (1)..(25): SEQ ID NO: 3191; WAN024AOT_at; Start 107; Stop 131
cggtttatatcaaatagagcaaatt

SEQ ID NO: 61799 - DNA, 25 bp, Artificial
  probe
  misc_feature (1)..(25): SEQ ID NO: 3191; WAN024AOT_at; Start 33; Stop 57
tcagctgttagattcggagaagctt

SEQ ID NO: 61800 - DNA, 25 bp, Artificial
  probe
  misc_feature (1)..(25): SEQ ID NO: 3191; WAN024AOT_at; Start 83; Stop 107
cagaataaatgagacgatagatggc

SEQ ID NO: 61801 - DNA, 25 bp, Artificial
  probe
  misc_feature (1)..(25): SEQ ID NO: 3191; WAN024AOT_at; Start 41; Stop 65
tagattcggagaagctttatcctat

SEQ ID NO: 61802 - DNA, 25 bp, Artificial
  probe
  misc_feature (1)..(25): SEQ ID NO: 3191; WAN024AOT_at; Start 25; Stop 49
gacctaaatcagctgttagattcgg

SEQ ID NO: 61803 - DNA, 25 bp, Artificial
  probe
  misc_feature (1)..(25): SEQ ID NO: 3191; WAN024AOT_at; Start 102; Stop 126
gatggcggtttatatcaaatagagc

SEQ ID NO: 61804 - DNA, 25 bp, Artificial
  probe
  misc_feature (1)..(25): SEQ ID NO: 3191; WAN024AOT_at; Start 88; Stop 112
taaatgagacgatagatggcggttt

SEQ ID NO: 61805 - DNA, 25 bp, Artificial
  probe
  misc_feature (1)..(25): SEQ ID NO: 3191; WAN024AOT_at; Start 1; Stop 25
caaatatagttggtaaatcattagg

SEQ ID NO: 61806 - DNA, 25 bp, Artificial
  probe
  misc_feature (1)..(25): SEQ ID NO: 3191; WAN024AOT_at; Start 86; Stop 110
aataaatgagacgatagatggcggt

SEQ ID NO: 61807 - DNA, 25 bp, Artificial
  probe
  misc_feature (1)..(25): SEQ ID NO: 3191; WAN024AOT_at; Start 58; Stop 82
tatcctatattgaaggtcctcttcg

SEQ ID NO: 61808 - DNA, 25 bp, Artificial
  probe
  misc_feature (1)..(25): SEQ ID NO: 3191; WAN024AOT_at; Start 12; Stop 36
ggtaaatcattaggacctaaatcag

SEQ ID NO: 61809 - DNA, 25 bp, Artificial
  probe
  misc_feature (1)..(25): SEQ ID NO: 3280; WAN024AOU_at; Start 22; Stop 46
caatttttctcataatctttttcat

SEQ ID NO: 61810 - DNA, 25 bp, Artificial
  probe
  misc_feature (1)..(25): SEQ ID NO: 3280; WAN024AOU_at; Start 2; Stop 26
tagaaccaataataacgatgcaatt

SEQ ID NO: 61811 - DNA, 25 bp, Artificial
  probe
  misc_feature (1)..(25): SEQ ID NO: 3280; WAN024AOU_at; Start 1; Stop 25
ctagaaccaataataacgatgcaat

SEQ ID NO: 61812 - DNA, 25 bp, Artificial
  probe
  misc_feature (1)..(25): SEQ ID NO: 3280; WAN024AOU_at; Start 11; Stop 35
taataacgatgcaatttttctcata

SEQ ID NO: 61813 - DNA, 25 bp, Artificial
  probe
  misc_feature (1)..(25): SEQ ID NO: 3280; WAN024AOU_at; Start 52; Stop 76
catctccagcgctatatatttctaa

SEQ ID NO: 61814 - DNA, 25 bp, Artificial
  probe
  misc_feature (1)..(25): SEQ ID NO: 3280; WAN024AOU_at; Start 21; Stop 45
gcaatttttctcataatctttttca

SEQ ID NO: 61815 - DNA, 25 bp, Artificial
  probe
  misc_feature (1)..(25): SEQ ID NO: 3280; WAN024AOU_at; Start 15; Stop 39
aacgatgcaatttttctcataatct

SEQ ID NO: 61816 - DNA, 25 bp, Artificial
  probe
  misc_feature (1)..(25): SEQ ID NO: 3280; WAN024AOU_at; Start 10; Stop 34
ataataacgatgcaatttttctcat

SEQ ID NO: 61817 - DNA, 25 bp, Artificial
  probe
  misc_feature (1)..(25): SEQ ID NO: 3280; WAN024AOU_at; Start 44; Stop 68
cataaaatcatctccagcgctatat

SEQ ID NO: 61818 - DNA, 25 bp, Artificial
  probe
  misc_feature (1)..(25): SEQ ID NO: 3280; WAN024AOU_at; Start 40; Stop 64
ttttcataaaatcatctccagcgct

SEQ ID NO: 61819 - DNA, 25 bp, Artificial
  probe
  misc_feature (1)..(25): SEQ ID NO: 3280; WAN024AOU_at; Start 4; Stop 28
gaaccaataataacgatgcaatttt

SEQ ID NO: 61820 - DNA, 25 bp, Artificial
  probe
  misc_feature (1)..(25): SEQ ID NO: 3280; WAN024AOU_at; Start 37; Stop 61
tctttttcataaaatcatctccagc

SEQ ID NO: 61821 - DNA, 25 bp, Artificial
  probe
  misc_feature (1)..(25): SEQ ID NO: 3280; WAN024AOU_at; Start 51; Stop 75
tcatctccagcgctatatatttcta

SEQ ID NO: 61822 - DNA, 25 bp, Artificial
  probe
  misc_feature (1)..(25): SEQ ID NO: 3280; WAN024AOU_at; Start 36; Stop 60
atctttttcataaaatcatctccag

SEQ ID NO: 61823 - DNA, 25 bp, Artificial
  probe
  misc_feature (1)..(25): SEQ ID NO: 3280; WAN024AOU_at; Start 48; Stop 72
aaatcatctccagcgctatatattt

SEQ ID NO: 61824 - DNA, 25 bp, Artificial
  probe
  misc_feature (1)..(25): SEQ ID NO: 3280; WAN024AOU_at; Start 29; Stop 53
tctcataatctttttcataaaatca

SEQ ID NO: 61825 - DNA, 25 bp, Artificial
  probe
  misc_feature (1)..(25): SEQ ID NO: 3280; WAN024AOU_at; Start 42; Stop 66
ttcataaaatcatctccagcgctat

SEQ ID NO: 61826 - DNA, 25 bp, Artificial
  probe
  misc_feature (1)..(25): SEQ ID NO: 3280; WAN024AOU_at; Start 14; Stop 38
taacgatgcaatttttctcataatc

SEQ ID NO: 61827 - DNA, 25 bp, Artificial
  probe
  misc_feature (1)..(25): SEQ ID NO: 3280; WAN024AOU_at; Start 31; Stop 55
tcataatctttttcataaaatcatc

SEQ ID NO: 61828 - DNA, 25 bp, Artificial
  probe
  misc_feature (1)..(25): SEQ ID NO: 3280; WAN024AOU_at; Start 9; Stop 33
aataataacgatgcaatttttctca

SEQ ID NO: 61829 - DNA, 25 bp, Artificial
  probe
  misc_feature (1)..(25): SEQ ID NO: 3280; WAN024AOU_at; Start 12; Stop 36
aataacgatgcaatttttctcataa

SEQ ID NO: 61830 - DNA, 25 bp, Artificial
  probe
  misc_feature (1)..(25): SEQ ID NO: 3280; WAN024AOU_at; Start 34; Stop 58
taatctttttcataaaatcatctcc

SEQ ID NO: 61831 - DNA, 25 bp, Artificial
  probe
  misc_feature (1)..(25): SEQ ID NO: 3280; WAN024AOU_at; Start 45; Stop 69
ataaaatcatctccagcgctatata

SEQ ID NO: 61832 - DNA, 25 bp, Artificial
  probe
  misc_feature (1)..(25): SEQ ID NO: 3280; WAN024AOU_at; Start 6; Stop 30
accaataataacgatgcaatttttc

SEQ ID NO: 61833 - DNA, 25 bp, Artificial
  probe
  misc_feature (1)..(25): SEQ ID NO: 3280; WAN024AOU_at; Start 41; Stop 65
tttcataaaatcatctccagcgcta

SEQ ID NO: 61834 - DNA, 25 bp, Artificial
  probe
  misc_feature (1)..(25): SEQ ID NO: 3280; WAN024AOU_at; Start 43; Stop 67
tcataaaatcatctccagcgctata

SEQ ID NO: 61835 - DNA, 25 bp, Artificial
  probe
  misc_feature (1)..(25): SEQ ID NO: 3280; WAN024AOU_at; Start 3; Stop 27
agaaccaataataacgatgcaattt

SEQ ID NO: 61836 - DNA, 25 bp, Artificial
  probe
  misc_feature (1)..(25): SEQ ID NO: 3280; WAN024AOU_at; Start 38; Stop 62
ctttttcataaaatcatctccagcg

SEQ ID NO: 61837 - DNA, 25 bp, Artificial
  probe
  misc_feature (1)..(25): SEQ ID NO: 3280; WAN024AOU_at; Start 7; Stop 31
ccaataataacgatgcaatttttct

SEQ ID NO: 61838 - DNA, 25 bp, Artificial
  probe
  misc_feature (1)..(25): SEQ ID NO: 3280; WAN024AOU_at; Start 47; Stop 71
aaaatcatctccagcgctatatatt

SEQ ID NO: 61839 - DNA, 25 bp, Artificial
  probe
  misc_feature (1)..(25): SEQ ID NO: 3280; WAN024AOU_at; Start 46; Stop 70
taaaatcatctccagcgctatatat

SEQ ID NO: 61840 - DNA, 25 bp, Artificial
  probe
  misc_feature (1)..(25): SEQ ID NO: 3280; WAN024AOU_at; Start 8; Stop 32
caataataacgatgcaatttttctc

SEQ ID NO: 61841 - DNA, 25 bp, Artificial
  probe
  misc_feature (1)..(25): SEQ ID NO: 3280; WAN024AOU_at; Start 39; Stop 63
tttttcataaaatcatctccagcgc

SEQ ID NO: 61842 - DNA, 25 bp, Artificial
  probe
  misc_feature (1)..(25): SEQ ID NO: 3280; WAN024AOU_at; Start 5; Stop 29
aaccaataataacgatgcaattttt

SEQ ID NO: 61843 - DNA, 25 bp, Artificial
  probe
  misc_feature (1)..(25): SEQ ID NO: 4784; WAN024AOV_at; Start 8; Stop 32
tatatagcgctggagatgattttat

SEQ ID NO: 61844 - DNA, 25 bp, Artificial
  probe
  misc_feature (1)..(25): SEQ ID NO: 4784; WAN024AOV_at; Start 5; Stop 29
aaatatatagcgctggagatgattt

SEQ ID NO: 61845 - DNA, 25 bp, Artificial
  probe
  misc_feature (1)..(25): SEQ ID NO: 4784; WAN024AOV_at; Start 11; Stop 35
atagcgctggagatgattttatgaa

SEQ ID NO: 61846 - DNA, 25 bp, Artificial
  probe
  misc_feature (1)..(25): SEQ ID NO: 4784; WAN024AOV_at; Start 52; Stop 76
attgcatcgttattattggttctag

SEQ ID NO: 61847 - DNA, 25 bp, Artificial
  probe
  misc_feature (1)..(25): SEQ ID NO: 4784; WAN024AOV_at; Start 44; Stop 68
tgagaaaaattgcatcgttattatt

SEQ ID NO: 61848 - DNA, 25 bp, Artificial
  probe
  misc_feature (1)..(25): SEQ ID NO: 4784; WAN024AOV_at; Start 45; Stop 69
gagaaaaattgcatcgttattattg

SEQ ID NO: 61849 - DNA, 25 bp, Artificial
  probe
  misc_feature (1)..(25): SEQ ID NO: 4784; WAN024AOV_at; Start 51; Stop 75
aattgcatcgttattattggttcta

SEQ ID NO: 61850 - DNA, 25 bp, Artificial
  probe
  misc_feature (1)..(25): SEQ ID NO: 4784; WAN024AOV_at; Start 17; Stop 41
ctggagatgattttatgaaaaagat

SEQ ID NO: 61851 - DNA, 25 bp, Artificial
  probe
  misc_feature (1)..(25): SEQ ID NO: 4784; WAN024AOV_at; Start 47; Stop 71
gaaaaattgcatcgttattattggt

SEQ ID NO: 61852 - DNA, 25 bp, Artificial
  probe
  misc_feature (1)..(25): SEQ ID NO: 4784; WAN024AOV_at; Start 15; Stop 39
cgctggagatgattttatgaaaaag

SEQ ID NO: 61853 - DNA, 25 bp, Artificial
  probe
  misc_feature (1)..(25): SEQ ID NO: 4784; WAN024AOV_at; Start 46; Stop 70
agaaaaattgcatcgttattattgg

SEQ ID NO: 61854 - DNA, 25 bp, Artificial
  probe
  misc_feature (1)..(25): SEQ ID NO: 4784; WAN024AOV_at; Start 14; Stop 38
gcgctggagatgattttatgaaaaa

SEQ ID NO: 61855 - DNA, 25 bp, Artificial
  probe
  misc_feature (1)..(25): SEQ ID NO: 4784; WAN024AOV_at; Start 10; Stop 34
tatagcgctggagatgattttatga

SEQ ID NO: 61856 - DNA, 25 bp, Artificial
  probe
  misc_feature (1)..(25): SEQ ID NO: 4784; WAN024AOV_at; Start 42; Stop 66
tatgagaaaaattgcatcgttatta

SEQ ID NO: 61857 - DNA, 25 bp, Artificial
  probe
  misc_feature (1)..(25): SEQ ID NO: 4784; WAN024AOV_at; Start 41; Stop 65
ttatgagaaaaattgcatcgttatt

SEQ ID NO: 61858 - DNA, 25 bp, Artificial
  probe
  misc_feature (1)..(25): SEQ ID NO: 4784; WAN024AOV_at; Start 9; Stop 33
atatagcgctggagatgattttatg

SEQ ID NO: 61859 - DNA, 25 bp, Artificial
  probe
  misc_feature (1)..(25): SEQ ID NO: 4784; WAN024AOV_at; Start 4; Stop 28
gaaatatatagcgctggagatgatt

SEQ ID NO: 61860 - DNA, 25 bp, Artificial
  probe
  misc_feature (1)..(25): SEQ ID NO: 4784; WAN024AOV_at; Start 40; Stop 64
attatgagaaaaattgcatcgttat

SEQ ID NO: 61861 - DNA, 25 bp, Artificial
  probe
  misc_feature (1)..(25): SEQ ID NO: 4784; WAN024AOV_at; Start 24; Stop 48
tgattttatgaaaaagattatgaga

SEQ ID NO: 61862 - DNA, 25 bp, Artificial
  probe
  misc_feature (1)..(25): SEQ ID NO: 4784; WAN024AOV_at; Start 39; Stop 63
gattatgagaaaaattgcatcgtta

SEQ ID NO: 61863 - DNA, 25 bp, Artificial
  probe
  misc_feature (1)..(25): SEQ ID NO: 4784; WAN024AOV_at; Start 3; Stop 27
agaaatatatagcgctggagatgat

SEQ ID NO: 61864 - DNA, 25 bp, Artificial
  probe
  misc_feature (1)..(25): SEQ ID NO: 4784; WAN024AOV_at; Start 1; Stop 25
ttagaaatatatagcgctggagatg

SEQ ID NO: 61865 - DNA, 25 bp, Artificial
  probe
  misc_feature (1)..(25): SEQ ID NO: 4784; WAN024AOV_at; Start 6; Stop 30
aatatatagcgctggagatgatttt

SEQ ID NO: 61866 - DNA, 25 bp, Artificial
  probe
  misc_feature (1)..(25): SEQ ID NO: 4784; WAN024AOV_at; Start 16; Stop 40
gctggagatgattttatgaaaaaga

SEQ ID NO: 61867 - DNA, 25 bp, Artificial
  probe
  misc_feature (1)..(25): SEQ ID NO: 4784; WAN024AOV_at; Start 19; Stop 43
ggagatgattttatgaaaaagatta

SEQ ID NO: 61868 - DNA, 25 bp, Artificial
  probe
  misc_feature (1)..(25): SEQ ID NO: 4784; WAN024AOV_at; Start 48; Stop 72
aaaaattgcatcgttattattggtt

SEQ ID NO: 61869 - DNA, 25 bp, Artificial
  probe
  misc_feature (1)..(25): SEQ ID NO: 4784; WAN024AOV_at; Start 50; Stop 74
aaattgcatcgttattattggttct

SEQ ID NO: 61870 - DNA, 25 bp, Artificial
  probe
  misc_feature (1)..(25): SEQ ID NO: 4784; WAN024AOV_at; Start 12; Stop 36
tagcgctggagatgattttatgaaa

SEQ ID NO: 61871 - DNA, 25 bp, Artificial
  probe
  misc_feature (1)..(25): SEQ ID NO: 4784; WAN024AOV_at; Start 7; Stop 31
atatatagcgctggagatgatttta

SEQ ID NO: 61872 - DNA, 25 bp, Artificial
  probe
  misc_feature (1)..(25): SEQ ID NO: 4784; WAN024AOV_at; Start 2; Stop 26
tagaaatatatagcgctggagatga

SEQ ID NO: 61873 - DNA, 25 bp, Artificial
  probe
  misc_feature (1)..(25): SEQ ID NO: 4784; WAN024AOV_at; Start 13; Stop 37
agcgctggagatgattttatgaaaa

SEQ ID NO: 61874 - DNA, 25 bp, Artificial
  probe
  misc_feature (1)..(25): SEQ ID NO: 4784; WAN024AOV_at; Start 38; Stop 62
agattatgagaaaaattgcatcgtt

SEQ ID NO: 61875 - DNA, 25 bp, Artificial
  probe
  misc_feature (1)..(25): SEQ ID NO: 4784; WAN024AOV_at; Start 49; Stop 73
aaaattgcatcgttattattggttc

SEQ ID NO: 61876 - DNA, 25 bp, Artificial
  probe
  misc_feature (1)..(25): SEQ ID NO: 4784; WAN024AOV_at; Start 25; Stop 49
gattttatgaaaaagattatgagaa

SEQ ID NO: 61877 - DNA, 25 bp, Artificial
  probe
  misc_feature (1)..(25): SEQ ID NO: 4568; WAN024AOW_at; Start 21; Stop 45
taaaaataacttgttactatcatac

SEQ ID NO: 61878 - DNA, 25 bp, Artificial
  probe
  misc_feature (1)..(25): SEQ ID NO: 4568; WAN024AOW_at; Start 33; Stop 57
gttactatcataccattttttcaaa

SEQ ID NO: 61879 - DNA, 25 bp, Artificial
  probe
  misc_feature (1)..(25): SEQ ID NO: 4568; WAN024AOW_at; Start 28; Stop 52
aacttgttactatcataccattttt

SEQ ID NO: 61880 - DNA, 25 bp, Artificial
  probe
  misc_feature (1)..(25): SEQ ID NO: 4568; WAN024AOW_at; Start 73; Stop 97
agaagaaattttctgaattttctat

SEQ ID NO: 61881 - DNA, 25 bp, Artificial
  probe
  misc_feature (1)..(25): SEQ ID NO: 4568; WAN024AOW_at; Start 18; Stop 42
tcttaaaaataacttgttactatca

SEQ ID NO: 61882 - DNA, 25 bp, Artificial
  probe
  misc_feature (1)..(25): SEQ ID NO: 4568; WAN024AOW_at; Start 30; Stop 54
cttgttactatcataccattttttc

SEQ ID NO: 61883 - DNA, 25 bp, Artificial
  probe
  misc_feature (1)..(25): SEQ ID NO: 4568; WAN024AOW_at; Start 26; Stop 50
ataacttgttactatcataccattt

SEQ ID NO: 61884 - DNA, 25 bp, Artificial
  probe
  misc_feature (1)..(25): SEQ ID NO: 4568; WAN024AOW_at; Start 20; Stop 44
ttaaaaataacttgttactatcata

SEQ ID NO: 61885 - DNA, 25 bp, Artificial
  probe
  misc_feature (1)..(25): SEQ ID NO: 4568; WAN024AOW_at; Start 19; Stop 43
cttaaaaataacttgttactatcat

SEQ ID NO: 61886 - DNA, 25 bp, Artificial
  probe
  misc_feature (1)..(25): SEQ ID NO: 4568; WAN024AOW_at; Start 36; Stop 60
actatcataccattttttcaaaatt

SEQ ID NO: 61887 - DNA, 25 bp, Artificial
  probe
  misc_feature (1)..(25): SEQ ID NO: 4568; WAN024AOW_at; Start 34; Stop 58
ttactatcataccattttttcaaaa

SEQ ID NO: 61888 - DNA, 25 bp, Artificial
  probe
  misc_feature (1)..(25): SEQ ID NO: 4568; WAN024AOW_at; Start 25; Stop 49
aataacttgttactatcataccatt

SEQ ID NO: 61889 - DNA, 25 bp, Artificial
  probe
  misc_feature (1)..(25): SEQ ID NO: 4568; WAN024AOW_at; Start 31; Stop 55
ttgttactatcataccattttttca

SEQ ID NO: 61890 - DNA, 25 bp, Artificial
  probe
  misc_feature (1)..(25): SEQ ID NO: 4568; WAN024AOW_at; Start 27; Stop 51
taacttgttactatcataccatttt

SEQ ID NO: 61891 - DNA, 25 bp, Artificial
  probe
  misc_feature (1)..(25): SEQ ID NO: 4568; WAN024AOW_at; Start 35; Stop 59
tactatcataccattttttcaaaat

SEQ ID NO: 61892 - DNA, 25 bp, Artificial
  probe
  misc_feature (1)..(25): SEQ ID NO: 4568; WAN024AOW_at; Start 32; Stop 56
tgttactatcataccattttttcaa

SEQ ID NO: 61893 - DNA, 25 bp, Artificial
  probe
  misc_feature (1)..(25): SEQ ID NO: 4568; WAN024AOW_at; Start 37; Stop 61
ctatcataccattttttcaaaattt

SEQ ID NO: 61894 - DNA, 25 bp, Artificial
  probe
  misc_feature (1)..(25): SEQ ID NO: 4568; WAN024AOW_at; Start 23; Stop 47
aaaataacttgttactatcatacca

SEQ ID NO: 61895 - DNA, 25 bp, Artificial
  probe
  misc_feature (1)..(25): SEQ ID NO: 4568; WAN024AOW_at; Start 24; Stop 48
aaataacttgttactatcataccat

SEQ ID NO: 61896 - DNA, 25 bp, Artificial
  probe
  misc_feature (1)..(25): SEQ ID NO: 4568; WAN024AOW_at; Start 29; Stop 53
acttgttactatcataccatttttt

SEQ ID NO: 61897 - DNA, 25 bp, Artificial
  probe
  misc_feature (1)..(25): SEQ ID NO: 142; WAN024AOX_at; Start 62; Stop 86
aaatggtatgatagtaacaagttat

SEQ ID NO: 61898 - DNA, 25 bp, Artificial
  probe
  misc_feature (1)..(25): SEQ ID NO: 142; WAN024AOX_at; Start 64; Stop 88
atggtatgatagtaacaagttattt

SEQ ID NO: 61899 - DNA, 25 bp, Artificial
  probe
  misc_feature (1)..(25): SEQ ID NO: 142; WAN024AOX_at; Start 54; Stop 78
ttttgaaaaaatggtatgatagtaa

SEQ ID NO: 61900 - DNA, 25 bp, Artificial
  probe
  misc_feature (1)..(25): SEQ ID NO: 142; WAN024AOX_at; Start 70; Stop 94
tgatagtaacaagttatttttaaga

SEQ ID NO: 61901 - DNA, 25 bp, Artificial
  probe
  misc_feature (1)..(25): SEQ ID NO: 142; WAN024AOX_at; Start 56; Stop 80
ttgaaaaaatggtatgatagtaaca

SEQ ID NO: 61902 - DNA, 25 bp, Artificial
  probe
  misc_feature (1)..(25): SEQ ID NO: 142; WAN024AOX_at; Start 63; Stop 87
aatggtatgatagtaacaagttatt

SEQ ID NO: 61903 - DNA, 25 bp, Artificial
  probe
  misc_feature (1)..(25): SEQ ID NO: 142; WAN024AOX_at; Start 59; Stop 83
aaaaaatggtatgatagtaacaagt

SEQ ID NO: 61904 - DNA, 25 bp, Artificial
  probe
  misc_feature (1)..(25): SEQ ID NO: 142; WAN024AOX_at; Start 67; Stop 91
gtatgatagtaacaagttattttta

SEQ ID NO: 61905 - DNA, 25 bp, Artificial
  probe
  misc_feature (1)..(25): SEQ ID NO: 142; WAN024AOX_at; Start 51; Stop 75
aaattttgaaaaaatggtatgatag

SEQ ID NO: 61906 - DNA, 25 bp, Artificial
  probe
  misc_feature (1)..(25): SEQ ID NO: 142; WAN024AOX_at; Start 68; Stop 92
tatgatagtaacaagttatttttaa

SEQ ID NO: 61907 - DNA, 25 bp, Artificial
  probe
  misc_feature (1)..(25): SEQ ID NO: 142; WAN024AOX_at; Start 25; Stop 49
cagaaaatttcttcttttatcttga

SEQ ID NO: 61908 - DNA, 25 bp, Artificial
  probe
  misc_feature (1)..(25): SEQ ID NO: 142; WAN024AOX_at; Start 69; Stop 93
atgatagtaacaagttatttttaag

SEQ ID NO: 61909 - DNA, 25 bp, Artificial
  probe
  misc_feature (1)..(25): SEQ ID NO: 142; WAN024AOX_at; Start 60; Stop 84
aaaaatggtatgatagtaacaagtt

SEQ ID NO: 61910 - DNA, 25 bp, Artificial
  probe
  misc_feature (1)..(25): SEQ ID NO: 142; WAN024AOX_at; Start 61; Stop 85
aaaatggtatgatagtaacaagtta

SEQ ID NO: 61911 - DNA, 25 bp, Artificial
  probe
  misc_feature (1)..(25): SEQ ID NO: 142; WAN024AOX_at; Start 55; Stop 79
tttgaaaaaatggtatgatagtaac

SEQ ID NO: 61912 - DNA, 25 bp, Artificial
  probe
  misc_feature (1)..(25): SEQ ID NO: 142; WAN024AOX_at; Start 57; Stop 81
tgaaaaaatggtatgatagtaacaa

SEQ ID NO: 61913 - DNA, 25 bp, Artificial
  probe
  misc_feature (1)..(25): SEQ ID NO: 142; WAN024AOX_at; Start 65; Stop 89
tggtatgatagtaacaagttatttt

SEQ ID NO: 61914 - DNA, 25 bp, Artificial
  probe
  misc_feature (1)..(25): SEQ ID NO: 142; WAN024AOX_at; Start 24; Stop 48
tcagaaaatttcttcttttatcttg

SEQ ID NO: 61915 - DNA, 25 bp, Artificial
  probe
  misc_feature (1)..(25): SEQ ID NO: 142; WAN024AOX_at; Start 58; Stop 82
gaaaaaatggtatgatagtaacaag

SEQ ID NO: 61916 - DNA, 25 bp, Artificial
  probe
  misc_feature (1)..(25): SEQ ID NO: 142; WAN024AOX_at; Start 52; Stop 76
aattttgaaaaaatggtatgatagt

SEQ ID NO: 61917 - DNA, 25 bp, Artificial
  probe
  misc_feature (1)..(25): SEQ ID NO: 142; WAN024AOX_at; Start 53; Stop 77
attttgaaaaaatggtatgatagta

SEQ ID NO: 61918 - DNA, 25 bp, Artificial
  probe
  misc_feature (1)..(25): SEQ ID NO: 3250; WAN024AOY_at; Start 43; Stop 67
cagcccaagtgtaaaagcagaatga

SEQ ID NO: 61919 - DNA, 25 bp, Artificial
  probe
  misc_feature (1)..(25): SEQ ID NO: 3250; WAN024AOY_at; Start 68; Stop 92
tgtatcagcggatatttactctatt

SEQ ID NO: 61920 - DNA, 25 bp, Artificial
  probe
  misc_feature (1)..(25): SEQ ID NO: 3250; WAN024AOY_at; Start 39; Stop 63
atttcagcccaagtgtaaaagcaga

SEQ ID NO: 61921 - DNA, 25 bp, Artificial
  probe
  misc_feature (1)..(25): SEQ ID NO: 3250; WAN024AOY_at; Start 101; Stop 125
gatgttatacccacaataaaagaaa

SEQ ID NO: 61922 - DNA, 25 bp, Artificial
  probe
  misc_feature (1)..(25): SEQ ID NO: 3250; WAN024AOY_at; Start 49; Stop 73
aagtgtaaaagcagaatgatgtatc

SEQ ID NO: 61923 - DNA, 25 bp, Artificial
  probe
  misc_feature (1)..(25): SEQ ID NO: 3250; WAN024AOY_at; Start 46; Stop 70
cccaagtgtaaaagcagaatgatgt

SEQ ID NO: 61924 - DNA, 25 bp, Artificial
  probe
  misc_feature (1)..(25): SEQ ID NO: 3250; WAN024AOY_at; Start 38; Stop 62
tatttcagcccaagtgtaaaagcag

SEQ ID NO: 61925 - DNA, 25 bp, Artificial
  probe
  misc_feature (1)..(25): SEQ ID NO: 3250; WAN024AOY_at; Start 30; Stop 54
ttttatcatatttcagcccaagtgt

SEQ ID NO: 61926 - DNA, 25 bp, Artificial
  probe
  misc_feature (1)..(25): SEQ ID NO: 3250; WAN024AOY_at; Start 31; Stop 55
tttatcatatttcagcccaagtgta

SEQ ID NO: 61927 - DNA, 25 bp, Artificial
  probe
  misc_feature (1)..(25): SEQ ID NO: 3250; WAN024AOY_at; Start 57; Stop 81
aagcagaatgatgtatcagcggata

SEQ ID NO: 61928 - DNA, 25 bp, Artificial
  probe
  misc_feature (1)..(25): SEQ ID NO: 3250; WAN024AOY_at; Start 89; Stop 113
tatttttcaaacgatgttataccca

SEQ ID NO: 61929 - DNA, 25 bp, Artificial
  probe
  misc_feature (1)..(25): SEQ ID NO: 3250; WAN024AOY_at; Start 73; Stop 97
cagcggatatttactctatttttca

SEQ ID NO: 61930 - DNA, 25 bp, Artificial
  probe
  misc_feature (1)..(25): SEQ ID NO: 3250; WAN024AOY_at; Start 91; Stop 115
tttttcaaacgatgttatacccaca

SEQ ID NO: 61931 - DNA, 25 bp, Artificial
  probe
  misc_feature (1)..(25): SEQ ID NO: 3250; WAN024AOY_at; Start 42; Stop 66
tcagcccaagtgtaaaagcagaatg

SEQ ID NO: 61932 - DNA, 25 bp, Artificial
  probe
  misc_feature (1)..(25): SEQ ID NO: 3250; WAN024AOY_at; Start 96; Stop 120
caaacgatgttatacccacaataaa

SEQ ID NO: 61933 - DNA, 25 bp, Artificial
  probe
  misc_feature (1)..(25): SEQ ID NO: 3250; WAN024AOY_at; Start 66; Stop 90
gatgtatcagcggatatttactcta

SEQ ID NO: 61934 - DNA, 25 bp, Artificial
  probe
  misc_feature (1)..(25): SEQ ID NO: 3250; WAN024AOY_at; Start 7; Stop 31
tacctcaactagttgatactctatt

SEQ ID NO: 61935 - DNA, 25 bp, Artificial
  probe
  misc_feature (1)..(25): SEQ ID NO: 3250; WAN024AOY_at; Start 33; Stop 57
tatcatatttcagcccaagtgtaaa

SEQ ID NO: 61936 - DNA, 25 bp, Artificial
  probe
  misc_feature (1)..(25): SEQ ID NO: 3250; WAN024AOY_at; Start 59; Stop 83
gcagaatgatgtatcagcggatatt

SEQ ID NO: 61937 - DNA, 25 bp, Artificial
  probe
  misc_feature (1)..(25): SEQ ID NO: 3250; WAN024AOY_at; Start 3; Stop 27
tttttacctcaactagttgatactc

SEQ ID NO: 61938 - DNA, 25 bp, Artificial
  probe
  misc_feature (1)..(25): SEQ ID NO: 3250; WAN024AOY_at; Start 36; Stop 60
catatttcagcccaagtgtaaaagc

SEQ ID NO: 61939 - DNA, 25 bp, Artificial
  probe
  misc_feature (1)..(25): SEQ ID NO: 3250; WAN024AOY_at; Start 62; Stop 86
gaatgatgtatcagcggatatttac

SEQ ID NO: 61940 - DNA, 25 bp, Artificial
  probe
  misc_feature (1)..(25): SEQ ID NO: 3250; WAN024AOY_at; Start 52; Stop 76
tgtaaaagcagaatgatgtatcagc

SEQ ID NO: 61941 - DNA, 25 bp, Artificial
  probe
  misc_feature (1)..(25): SEQ ID NO: 3250; WAN024AOY_at; Start 94; Stop 118
ttcaaacgatgttatacccacaata

SEQ ID NO: 61942 - DNA, 25 bp, Artificial
  probe
  misc_feature (1)..(25): SEQ ID NO: 3250; WAN024AOY_at; Start 75; Stop 99
gcggatatttactctatttttcaaa

SEQ ID NO: 61943 - DNA, 25 bp, Artificial
  probe
  misc_feature (1)..(25): SEQ ID NO: 3250; WAN024AOY_at; Start 45; Stop 69
gcccaagtgtaaaagcagaatgatg

SEQ ID NO: 61944 - DNA, 25 bp, Artificial
  probe
  misc_feature (1)..(25): SEQ ID NO: 3250; WAN024AOY_at; Start 40; Stop 64
tttcagcccaagtgtaaaagcagaa

SEQ ID NO: 61945 - DNA, 25 bp, Artificial
  probe
  misc_feature (1)..(25): SEQ ID NO: 3250; WAN024AOY_at; Start 12; Stop 36
caactagttgatactctattttatc

SEQ ID NO: 61946 - DNA, 25 bp, Artificial
  probe
  misc_feature (1)..(25): SEQ ID NO: 3250; WAN024AOY_at; Start 55; Stop 79
aaaagcagaatgatgtatcagcgga

SEQ ID NO: 61947 - DNA, 25 bp, Artificial
  probe
  misc_feature (1)..(25): SEQ ID NO: 3250; WAN024AOY_at; Start 28; Stop 52
tattttatcatatttcagcccaagt

SEQ ID NO: 61948 - DNA, 25 bp, Artificial
  probe
  misc_feature (1)..(25): SEQ ID NO: 3250; WAN024AOY_at; Start 98; Stop 122
aacgatgttatacccacaataaaag

SEQ ID NO: 61949 - DNA, 25 bp, Artificial
  probe
  misc_feature (1)..(25): SEQ ID NO: 3250; WAN024AOY_at; Start 80; Stop 104
tatttactctatttttcaaacgatg

SEQ ID NO: 61950 - DNA, 25 bp, Artificial
  probe
  misc_feature (1)..(25): SEQ ID NO: 3250; WAN024AOY_at; Start 47; Stop 71
ccaagtgtaaaagcagaatgatgta

SEQ ID NO: 61951 - DNA, 25 bp, Artificial
  probe
  misc_feature (1)..(25): SEQ ID NO: 3250; WAN024AOY_at; Start 54; Stop 78
taaaagcagaatgatgtatcagcgg

SEQ ID NO: 61952 - DNA, 25 bp, Artificial
  probe
  misc_feature (1)..(25): SEQ ID NO: 4446; WAN024AOZ_at; Start 86; Stop 110
tacatcattctgcttttacacttgg

SEQ ID NO: 61953 - DNA, 25 bp, Artificial
  probe
  misc_feature (1)..(25): SEQ ID NO: 4446; WAN024AOZ_at; Start 39; Stop 63
tattgtgggtataacatcgtttgaa

SEQ ID NO: 61954 - DNA, 25 bp, Artificial
  probe
  misc_feature (1)..(25): SEQ ID NO: 4446; WAN024AOZ_at; Start 104; Stop 128
cacttgggctgaaatatgataaaat

SEQ ID NO: 61955 - DNA, 25 bp, Artificial
  probe
  misc_feature (1)..(25): SEQ ID NO: 4446; WAN024AOZ_at; Start 91; Stop 115
cattctgcttttacacttgggctga

SEQ ID NO: 61956 - DNA, 25 bp, Artificial
  probe
  misc_feature (1)..(25): SEQ ID NO: 4446; WAN024AOZ_at; Start 121; Stop 145
gataaaatagagtatcaactagttg

SEQ ID NO: 61957 - DNA, 25 bp, Artificial
  probe
  misc_feature (1)..(25): SEQ ID NO: 4446; WAN024AOZ_at; Start 97; Stop 121
gcttttacacttgggctgaaatatg

SEQ ID NO: 61958 - DNA, 25 bp, Artificial
  probe
  misc_feature (1)..(25): SEQ ID NO: 4446; WAN024AOZ_at; Start 87; Stop 111
acatcattctgcttttacacttggg

SEQ ID NO: 61959 - DNA, 25 bp, Artificial
  probe
  misc_feature (1)..(25): SEQ ID NO: 4446; WAN024AOZ_at; Start 102; Stop 126
tacacttgggctgaaatatgataaa

SEQ ID NO: 61960 - DNA, 25 bp, Artificial
  probe
  misc_feature (1)..(25): SEQ ID NO: 4446; WAN024AOZ_at; Start 124; Stop 148
aaaatagagtatcaactagttgagg

SEQ ID NO: 61961 - DNA, 25 bp, Artificial
  probe
  misc_feature (1)..(25): SEQ ID NO: 4446; WAN024AOZ_at; Start 88; Stop 112
catcattctgcttttacacttgggc

SEQ ID NO: 61962 - DNA, 25 bp, Artificial
  probe
  misc_feature (1)..(25): SEQ ID NO: 4446; WAN024AOZ_at; Start 95; Stop 119
ctgcttttacacttgggctgaaata

SEQ ID NO: 61963 - DNA, 25 bp, Artificial
  probe
  misc_feature (1)..(25): SEQ ID NO: 4446; WAN024AOZ_at; Start 60; Stop 84
tgaaaaatagagtaaatatccgctg

SEQ ID NO: 61964 - DNA, 25 bp, Artificial
  probe
  misc_feature (1)..(25): SEQ ID NO: 4446; WAN024AOZ_at; Start 76; Stop 100
tatccgctgatacatcattctgctt

SEQ ID NO: 61965 - DNA, 25 bp, Artificial
  probe
  misc_feature (1)..(25): SEQ ID NO: 4446; WAN024AOZ_at; Start 94; Stop 118
tctgcttttacacttgggctgaaat

SEQ ID NO: 61966 - DNA, 25 bp, Artificial
  probe
  misc_feature (1)..(25): SEQ ID NO: 4446; WAN024AOZ_at; Start 50; Stop 74
taacatcgtttgaaaaatagagtaa

SEQ ID NO: 61967 - DNA, 25 bp, Artificial
  probe
  misc_feature (1)..(25): SEQ ID NO: 4446; WAN024AOZ_at; Start 90; Stop 114
tcattctgcttttacacttgggctg

SEQ ID NO: 61968 - DNA, 25 bp, Artificial
  probe
  misc_feature (1)..(25): SEQ ID NO: 4446; WAN024AOZ_at; Start 44; Stop 68
tgggtataacatcgtttgaaaaata

SEQ ID NO: 61969 - DNA, 25 bp, Artificial
  probe
  misc_feature (1)..(25): SEQ ID NO: 4446; WAN024AOZ_at; Start 81; Stop 105
gctgatacatcattctgcttttaca

SEQ ID NO: 61970 - DNA, 25 bp, Artificial
  probe
  misc_feature (1)..(25): SEQ ID NO: 4446; WAN024AOZ_at; Start 53; Stop 77
catcgtttgaaaaatagagtaaata

SEQ ID NO: 61971 - DNA, 25 bp, Artificial
  probe
  misc_feature (1)..(25): SEQ ID NO: 4446; WAN024AOZ_at; Start 74; Stop 98
aatatccgctgatacatcattctgc

SEQ ID NO: 61972 - DNA, 25 bp, Artificial
  probe
  misc_feature (1)..(25): SEQ ID NO: 4446; WAN024AOZ_at; Start 128; Stop 152
tagagtatcaactagttgaggtaaa

SEQ ID NO: 61973 - DNA, 25 bp, Artificial
  probe
  misc_feature (1)..(25): SEQ ID NO: 4446; WAN024AOZ_at; Start 71; Stop 95
gtaaatatccgctgatacatcattc

SEQ ID NO: 61974 - DNA, 25 bp, Artificial
  probe
  misc_feature (1)..(25): SEQ ID NO: 4446; WAN024AOZ_at; Start 64; Stop 88
aaatagagtaaatatccgctgatac

SEQ ID NO: 61975 - DNA, 25 bp, Artificial
  probe
  misc_feature (1)..(25): SEQ ID NO: 4446; WAN024AOZ_at; Start 93; Stop 117
ttctgcttttacacttgggctgaaa

SEQ ID NO: 61976 - DNA, 25 bp, Artificial
  probe
  misc_feature (1)..(25): SEQ ID NO: 4446; WAN024AOZ_at; Start 109; Stop 133
gggctgaaatatgataaaatagagt

SEQ ID NO: 61977 - DNA, 25 bp, Artificial
  probe
  misc_feature (1)..(25): SEQ ID NO: 4446; WAN024AOZ_at; Start 58; Stop 82
tttgaaaaatagagtaaatatccgc

SEQ ID NO: 61978 - DNA, 25 bp, Artificial
  probe
  misc_feature (1)..(25): SEQ ID NO: 4446; WAN024AOZ_at; Start 67; Stop 91
tagagtaaatatccgctgatacatc

SEQ ID NO: 61979 - DNA, 25 bp, Artificial
  probe
  misc_feature (1)..(25): SEQ ID NO: 4446; WAN024AOZ_at; Start 42; Stop 66
tgtgggtataacatcgtttgaaaaa

SEQ ID NO: 61980 - DNA, 25 bp, Artificial
  probe
  misc_feature (1)..(25): SEQ ID NO: 4446; WAN024AOZ_at; Start 33; Stop 57
ttcttttattgtgggtataacatcg

SEQ ID NO: 61981 - DNA, 25 bp, Artificial
  probe
  misc_feature (1)..(25): SEQ ID NO: 4446; WAN024AOZ_at; Start 106; Stop 130
cttgggctgaaatatgataaaatag

SEQ ID NO: 61982 - DNA, 25 bp, Artificial
  probe
  misc_feature (1)..(25): SEQ ID NO: 4446; WAN024AOZ_at; Start 131; Stop 155
agtatcaactagttgaggtaaaaag

SEQ ID NO: 61983 - DNA, 25 bp, Artificial
  probe
  misc_feature (1)..(25): SEQ ID NO: 4446; WAN024AOZ_at; Start 78; Stop 102
tccgctgatacatcattctgctttt

SEQ ID NO: 61984 - DNA, 25 bp, Artificial
  probe
  misc_feature (1)..(25): SEQ ID NO: 4446; WAN024AOZ_at; Start 61; Stop 85
gaaaaatagagtaaatatccgctga

SEQ ID NO: 61985 - DNA, 25 bp, Artificial
  probe
  misc_feature (1)..(25): SEQ ID NO: 4446; WAN024AOZ_at; Start 47; Stop 71
gtataacatcgtttgaaaaatagag

SEQ ID NO: 61986 - DNA, 25 bp, Artificial
  probe
  misc_feature (1)..(25): SEQ ID NO: 4734; WAN024AP2_at; Start 38; Stop 62
gctagcaccacataccgtactatgt

SEQ ID NO: 61987 - DNA, 25 bp, Artificial
  probe
  misc_feature (1)..(25): SEQ ID NO: 4734; WAN024AP2_at; Start 37; Stop 61
tgctagcaccacataccgtactatg

SEQ ID NO: 61988 - DNA, 25 bp, Artificial
  probe
  misc_feature (1)..(25): SEQ ID NO: 4734; WAN024AP2_at; Start 32; Stop 56
ggatgtgctagcaccacataccgta

SEQ ID NO: 61989 - DNA, 25 bp, Artificial
  probe
  misc_feature (1)..(25): SEQ ID NO: 4734; WAN024AP2_at; Start 29; Stop 53
agcggatgtgctagcaccacatacc

SEQ ID NO: 61990 - DNA, 25 bp, Artificial
  probe
  misc_feature (1)..(25): SEQ ID NO: 4734; WAN024AP2_at; Start 45; Stop 69
ccacataccgtactatgttatcaca

SEQ ID NO: 61991 - DNA, 25 bp, Artificial
  probe
  misc_feature (1)..(25): SEQ ID NO: 4734; WAN024AP2_at; Start 76; Stop 100
tgttttttgcaagggaattggaaga

SEQ ID NO: 61992 - DNA, 25 bp, Artificial
  probe
  misc_feature (1)..(25): SEQ ID NO: 4734; WAN024AP2_at; Start 36; Stop 60
gtgctagcaccacataccgtactat

SEQ ID NO: 61993 - DNA, 25 bp, Artificial
  probe
  misc_feature (1)..(25): SEQ ID NO: 4734; WAN024AP2_at; Start 17; Stop 41
tagatctaatatagcggatgtgcta

SEQ ID NO: 61994 - DNA, 25 bp, Artificial
  probe
  misc_feature (1)..(25): SEQ ID NO: 4734; WAN024AP2_at; Start 18; Stop 42
agatctaatatagcggatgtgctag

SEQ ID NO: 61995 - DNA, 25 bp, Artificial
  probe
  misc_feature (1)..(25): SEQ ID NO: 4734; WAN024AP2_at; Start 34; Stop 58
atgtgctagcaccacataccgtact

SEQ ID NO: 61996 - DNA, 25 bp, Artificial
  probe
  misc_feature (1)..(25): SEQ ID NO: 4734; WAN024AP2_at; Start 73; Stop 97
tcttgttttttgcaagggaattgga

SEQ ID NO: 61997 - DNA, 25 bp, Artificial
  probe
  misc_feature (1)..(25): SEQ ID NO: 4734; WAN024AP2_at; Start 12; Stop 36
cctattagatctaatatagcggatg

SEQ ID NO: 61998 - DNA, 25 bp, Artificial
  probe
  misc_feature (1)..(25): SEQ ID NO: 4734; WAN024AP2_at; Start 31; Stop 55
cggatgtgctagcaccacataccgt

SEQ ID NO: 61999 - DNA, 25 bp, Artificial
  probe
  misc_feature (1)..(25): SEQ ID NO: 4734; WAN024AP2_at; Start 28; Stop 52
tagcggatgtgctagcaccacatac

SEQ ID NO: 62000 - DNA, 25 bp, Artificial
  probe
  misc_feature (1)..(25): SEQ ID NO: 4734; WAN024AP2_at; Start 15; Stop 39
attagatctaatatagcggatgtgc

SEQ ID NO: 62001 - DNA, 25 bp, Artificial
  probe
  misc_feature (1)..(25): SEQ ID NO: 4734; WAN024AP2_at; Start 33; Stop 57
gatgtgctagcaccacataccgtac

SEQ ID NO: 62002 - DNA, 25 bp, Artificial
  probe
  misc_feature (1)..(25): SEQ ID NO: 4734; WAN024AP2_at; Start 23; Stop 47
taatatagcggatgtgctagcacca

SEQ ID NO: 62003 - DNA, 25 bp, Artificial
  probe
  misc_feature (1)..(25): SEQ ID NO: 4734; WAN024AP2_at; Start 35; Stop 59
tgtgctagcaccacataccgtacta

SEQ ID NO: 62004 - DNA, 25 bp, Artificial
  probe
  misc_feature (1)..(25): SEQ ID NO: 4734; WAN024AP2_at; Start 22; Stop 46
ctaatatagcggatgtgctagcacc

SEQ ID NO: 62005 - DNA, 25 bp, Artificial
  probe
  misc_feature (1)..(25): SEQ ID NO: 4734; WAN024AP2_at; Start 26; Stop 50
tatagcggatgtgctagcaccacat

SEQ ID NO: 62006 - DNA, 25 bp, Artificial
  probe
  misc_feature (1)..(25): SEQ ID NO: 4734; WAN024AP2_at; Start 43; Stop 67
caccacataccgtactatgttatca

SEQ ID NO: 62007 - DNA, 25 bp, Artificial
  probe
  misc_feature (1)..(25): SEQ ID NO: 4734; WAN024AP2_at; Start 42; Stop 66
gcaccacataccgtactatgttatc

SEQ ID NO: 62008 - DNA, 25 bp, Artificial
  probe
  misc_feature (1)..(25): SEQ ID NO: 4734; WAN024AP2_at; Start 9; Stop 33
cctcctattagatctaatatagcgg

SEQ ID NO: 62009 - DNA, 25 bp, Artificial
  probe
  misc_feature (1)..(25): SEQ ID NO: 4734; WAN024AP2_at; Start 27; Stop 51
atagcggatgtgctagcaccacata

SEQ ID NO: 62010 - DNA, 25 bp, Artificial
  probe
  misc_feature (1)..(25): SEQ ID NO: 4734; WAN024AP2_at; Start 40; Stop 64
tagcaccacataccgtactatgtta

SEQ ID NO: 62011 - DNA, 25 bp, Artificial
  probe
  misc_feature (1)..(25): SEQ ID NO: 4734; WAN024AP2_at; Start 83; Stop 107
tgcaagggaattggaagatttttta

SEQ ID NO: 62012 - DNA, 25 bp, Artificial
  probe
  misc_feature (1)..(25): SEQ ID NO: 4734; WAN024AP2_at; Start 25; Stop 49
atatagcggatgtgctagcaccaca

SEQ ID NO: 62013 - DNA, 25 bp, Artificial
  probe
  misc_feature (1)..(25): SEQ ID NO: 4734; WAN024AP2_at; Start 2; Stop 26
gtgttttcctcctattagatctaat

SEQ ID NO: 62014 - DNA, 25 bp, Artificial
  probe
  misc_feature (1)..(25): SEQ ID NO: 4734; WAN024AP2_at; Start 1; Stop 25
tgtgttttcctcctattagatctaa

SEQ ID NO: 62015 - DNA, 25 bp, Artificial
  probe
  misc_feature (1)..(25): SEQ ID NO: 4734; WAN024AP2_at; Start 14; Stop 38
tattagatctaatatagcggatgtg

SEQ ID NO: 62016 - DNA, 25 bp, Artificial
  probe
  misc_feature (1)..(25): SEQ ID NO: 4734; WAN024AP2_at; Start 30; Stop 54
gcggatgtgctagcaccacataccg

SEQ ID NO: 62017 - DNA, 25 bp, Artificial
  probe
  misc_feature (1)..(25): SEQ ID NO: 4734; WAN024AP2_at; Start 21; Stop 45
tctaatatagcggatgtgctagcac

SEQ ID NO: 62018 - DNA, 25 bp, Artificial
  probe
  misc_feature (1)..(25): SEQ ID NO: 4734; WAN024AP2_at; Start 16; Stop 40
ttagatctaatatagcggatgtgct

SEQ ID NO: 62019 - DNA, 25 bp, Artificial
  probe
  misc_feature (1)..(25): SEQ ID NO: 4734; WAN024AP2_at; Start 24; Stop 48
aatatagcggatgtgctagcaccac

SEQ ID NO: 62020 - DNA, 25 bp, Artificial
  probe
  misc_feature (1)..(25): SEQ ID NO: 3573; WAN024AP3_at; Start 74; Stop 98
ctagcacatccgctatattagatct

SEQ ID NO: 62021 - DNA, 25 bp, Artificial
  probe
  misc_feature (1)..(25): SEQ ID NO: 3573; WAN024AP3_at; Start 61; Stop 85
acggtatgtggtgctagcacatccg

SEQ ID NO: 62022 - DNA, 25 bp, Artificial
  probe
  misc_feature (1)..(25): SEQ ID NO: 3573; WAN024AP3_at; Start 83; Stop 107
ccgctatattagatctaataggagg

SEQ ID NO: 62023 - DNA, 25 bp, Artificial
  probe
  misc_feature (1)..(25): SEQ ID NO: 3573; WAN024AP3_at; Start 62; Stop 86
cggtatgtggtgctagcacatccgc

SEQ ID NO: 62024 - DNA, 25 bp, Artificial
  probe
  misc_feature (1)..(25): SEQ ID NO: 3573; WAN024AP3_at; Start 67; Stop 91
tgtggtgctagcacatccgctatat

SEQ ID NO: 62025 - DNA, 25 bp, Artificial
  probe
  misc_feature (1)..(25): SEQ ID NO: 3573; WAN024AP3_at; Start 71; Stop 95
gtgctagcacatccgctatattaga

SEQ ID NO: 62026 - DNA, 25 bp, Artificial
  probe
  misc_feature (1)..(25): SEQ ID NO: 3573; WAN024AP3_at; Start 50; Stop 74
gataacatagtacggtatgtggtgc

SEQ ID NO: 62027 - DNA, 25 bp, Artificial
  probe
  misc_feature (1)..(25): SEQ ID NO: 3573; WAN024AP3_at; Start 89; Stop 113
tattagatctaataggaggaaaaca

SEQ ID NO: 62028 - DNA, 25 bp, Artificial
  probe
  misc_feature (1)..(25): SEQ ID NO: 3573; WAN024AP3_at; Start 57; Stop 81
tagtacggtatgtggtgctagcaca

SEQ ID NO: 62029 - DNA, 25 bp, Artificial
  probe
  misc_feature (1)..(25): SEQ ID NO: 3573; WAN024AP3_at; Start 58; Stop 82
agtacggtatgtggtgctagcacat

SEQ ID NO: 62030 - DNA, 25 bp, Artificial
  probe
  misc_feature (1)..(25): SEQ ID NO: 3573; WAN024AP3_at; Start 69; Stop 93
tggtgctagcacatccgctatatta

SEQ ID NO: 62031 - DNA, 25 bp, Artificial
  probe
  misc_feature (1)..(25): SEQ ID NO: 3573; WAN024AP3_at; Start 9; Stop 33
taaaaaatcttccaattcccttgca

SEQ ID NO: 62032 - DNA, 25 bp, Artificial
  probe
  misc_feature (1)..(25): SEQ ID NO: 3573; WAN024AP3_at; Start 70; Stop 94
ggtgctagcacatccgctatattag

SEQ ID NO: 62033 - DNA, 25 bp, Artificial
  probe
  misc_feature (1)..(25): SEQ ID NO: 3573; WAN024AP3_at; Start 85; Stop 109
gctatattagatctaataggaggaa

SEQ ID NO: 62034 - DNA, 25 bp, Artificial
  probe
  misc_feature (1)..(25): SEQ ID NO: 3573; WAN024AP3_at; Start 52; Stop 76
taacatagtacggtatgtggtgcta

SEQ ID NO: 62035 - DNA, 25 bp, Artificial
  probe
  misc_feature (1)..(25): SEQ ID NO: 3573; WAN024AP3_at; Start 59; Stop 83
gtacggtatgtggtgctagcacatc

SEQ ID NO: 62036 - DNA, 25 bp, Artificial
  probe
  misc_feature (1)..(25): SEQ ID NO: 3573; WAN024AP3_at; Start 65; Stop 89
tatgtggtgctagcacatccgctat

SEQ ID NO: 62037 - DNA, 25 bp, Artificial
  probe
  misc_feature (1)..(25): SEQ ID NO: 3573; WAN024AP3_at; Start 54; Stop 78
acatagtacggtatgtggtgctagc

SEQ ID NO: 62038 - DNA, 25 bp, Artificial
  probe
  misc_feature (1)..(25): SEQ ID NO: 3573; WAN024AP3_at; Start 63; Stop 87
ggtatgtggtgctagcacatccgct

SEQ ID NO: 62039 - DNA, 25 bp, Artificial
  probe
  misc_feature (1)..(25): SEQ ID NO: 3573; WAN024AP3_at; Start 64; Stop 88
gtatgtggtgctagcacatccgcta

SEQ ID NO: 62040 - DNA, 25 bp, Artificial
  probe
  misc_feature (1)..(25): SEQ ID NO: 3573; WAN024AP3_at; Start 91; Stop 115
ttagatctaataggaggaaaacaca

SEQ ID NO: 62041 - DNA, 25 bp, Artificial
  probe
  misc_feature (1)..(25): SEQ ID NO: 3573; WAN024AP3_at; Start 77; Stop 101
gcacatccgctatattagatctaat

SEQ ID NO: 62042 - DNA, 25 bp, Artificial
  probe
  misc_feature (1)..(25): SEQ ID NO: 3573; WAN024AP3_at; Start 80; Stop 104
catccgctatattagatctaatagg

SEQ ID NO: 62043 - DNA, 25 bp, Artificial
  probe
  misc_feature (1)..(25): SEQ ID NO: 3573; WAN024AP3_at; Start 60; Stop 84
tacggtatgtggtgctagcacatcc

SEQ ID NO: 62044 - DNA, 25 bp, Artificial
  probe
  misc_feature (1)..(25): SEQ ID NO: 3573; WAN024AP3_at; Start 68; Stop 92
gtggtgctagcacatccgctatatt

SEQ ID NO: 62045 - DNA, 25 bp, Artificial
  probe
  misc_feature (1)..(25): SEQ ID NO: 3573; WAN024AP3_at; Start 55; Stop 79
catagtacggtatgtggtgctagca

SEQ ID NO: 62046 - DNA, 25 bp, Artificial
  probe
  misc_feature (1)..(25): SEQ ID NO: 3573; WAN024AP3_at; Start 76; Stop 100
agcacatccgctatattagatctaa

SEQ ID NO: 62047 - DNA, 25 bp, Artificial
  probe
  misc_feature (1)..(25): SEQ ID NO: 3573; WAN024AP3_at; Start 16; Stop 40
tcttccaattcccttgcaaaaaaca

SEQ ID NO: 62048 - DNA, 25 bp, Artificial
  probe
  misc_feature (1)..(25): SEQ ID NO: 3573; WAN024AP3_at; Start 78; Stop 102
cacatccgctatattagatctaata

SEQ ID NO: 62049 - DNA, 25 bp, Artificial
  probe
  misc_feature (1)..(25): SEQ ID NO: 3573; WAN024AP3_at; Start 19; Stop 43
tccaattcccttgcaaaaaacaaga

SEQ ID NO: 62050 - DNA, 25 bp, Artificial
  probe
  misc_feature (1)..(25): SEQ ID NO: 3573; WAN024AP3_at; Start 66; Stop 90
atgtggtgctagcacatccgctata

SEQ ID NO: 62051 - DNA, 25 bp, Artificial
  probe
  misc_feature (1)..(25): SEQ ID NO: 3573; WAN024AP3_at; Start 82; Stop 106
tccgctatattagatctaataggag

SEQ ID NO: 62052 - DNA, 25 bp, Artificial
  probe
  misc_feature (1)..(25): SEQ ID NO: 3573; WAN024AP3_at; Start 47; Stop 71
tgtgataacatagtacggtatgtgg

SEQ ID NO: 62053 - DNA, 25 bp, Artificial
  probe
  misc_feature (1)..(25): SEQ ID NO: 3573; WAN024AP3_at; Start 56; Stop 80
atagtacggtatgtggtgctagcac

SEQ ID NO: 62054 - DNA, 25 bp, Artificial
  probe
  misc_feature (1)..(25): SEQ ID NO: 4342; WAN024AP4_at; Start 13; Stop 37
gttagctagttcgccaaatagcgac

SEQ ID NO: 62055 - DNA, 25 bp, Artificial
  probe
  misc_feature (1)..(25): SEQ ID NO: 4342; WAN024AP4_at; Start 59; Stop 83
tttagttccaattgttggtactgag

SEQ ID NO: 62056 - DNA, 25 bp, Artificial
  probe
  misc_feature (1)..(25): SEQ ID NO: 4342; WAN024AP4_at; Start 34; Stop 58
cgactagcgtccaacaatttggaac

SEQ ID NO: 62057 - DNA, 25 bp, Artificial
  probe
  misc_feature (1)..(25): SEQ ID NO: 4342; WAN024AP4_at; Start 20; Stop 44
agttcgccaaatagcgactagcgtc

SEQ ID NO: 62058 - DNA, 25 bp, Artificial
  probe
  misc_feature (1)..(25): SEQ ID NO: 4342; WAN024AP4_at; Start 57; Stop 81
actttagttccaattgttggtactg

SEQ ID NO: 62059 - DNA, 25 bp, Artificial
  probe
  misc_feature (1)..(25): SEQ ID NO: 4342; WAN024AP4_at; Start 18; Stop 42
ctagttcgccaaatagcgactagcg

SEQ ID NO: 62060 - DNA, 25 bp, Artificial
  probe
  misc_feature (1)..(25): SEQ ID NO: 4342; WAN024AP4_at; Start 31; Stop 55
tagcgactagcgtccaacaatttgg

SEQ ID NO: 62061 - DNA, 25 bp, Artificial
  probe
  misc_feature (1)..(25): SEQ ID NO: 4342; WAN024AP4_at; Start 29; Stop 53
aatagcgactagcgtccaacaattt

SEQ ID NO: 62062 - DNA, 25 bp, Artificial
  probe
  misc_feature (1)..(25): SEQ ID NO: 4342; WAN024AP4_at; Start 32; Stop 56
agcgactagcgtccaacaatttgga

SEQ ID NO: 62063 - DNA, 25 bp, Artificial
  probe
  misc_feature (1)..(25): SEQ ID NO: 4342; WAN024AP4_at; Start 15; Stop 39
tagctagttcgccaaatagcgacta

SEQ ID NO: 62064 - DNA, 25 bp, Artificial
  probe
  misc_feature (1)..(25): SEQ ID NO: 4342; WAN024AP4_at; Start 36; Stop 60
actagcgtccaacaatttggaactt

SEQ ID NO: 62065 - DNA, 25 bp, Artificial
  probe
  misc_feature (1)..(25): SEQ ID NO: 4342; WAN024AP4_at; Start 24; Stop 48
cgccaaatagcgactagcgtccaac

SEQ ID NO: 62066 - DNA, 25 bp, Artificial
  probe
  misc_feature (1)..(25): SEQ ID NO: 4342; WAN024AP4_at; Start 30; Stop 54
atagcgactagcgtccaacaatttg

SEQ ID NO: 62067 - DNA, 25 bp, Artificial
  probe
  misc_feature (1)..(25): SEQ ID NO: 4342; WAN024AP4_at; Start 26; Stop 50
ccaaatagcgactagcgtccaacaa

SEQ ID NO: 62068 - DNA, 25 bp, Artificial
  probe
  misc_feature (1)..(25): SEQ ID NO: 4342; WAN024AP4_at; Start 12; Stop 36
agttagctagttcgccaaatagcga

SEQ ID NO: 62069 - DNA, 25 bp, Artificial
  probe
  misc_feature (1)..(25): SEQ ID NO: 4342; WAN024AP4_at; Start 16; Stop 40
agctagttcgccaaatagcgactag

SEQ ID NO: 62070 - DNA, 25 bp, Artificial
  probe
  misc_feature (1)..(25): SEQ ID NO: 4342; WAN024AP4_at; Start 28; Stop 52
aaatagcgactagcgtccaacaatt

SEQ ID NO: 62071 - DNA, 25 bp, Artificial
  probe
  misc_feature (1)..(25): SEQ ID NO: 4342; WAN024AP4_at; Start 23; Stop 47
tcgccaaatagcgactagcgtccaa

SEQ ID NO: 62072 - DNA, 25 bp, Artificial
  probe
  misc_feature (1)..(25): SEQ ID NO: 4342; WAN024AP4_at; Start 33; Stop 57
gcgactagcgtccaacaatttggaa

SEQ ID NO: 62073 - DNA, 25 bp, Artificial
  probe
  misc_feature (1)..(25): SEQ ID NO: 4342; WAN024AP4_at; Start 14; Stop 38
ttagctagttcgccaaatagcgact

SEQ ID NO: 62074 - DNA, 25 bp, Artificial
  probe
  misc_feature (1)..(25): SEQ ID NO: 4342; WAN024AP4_at; Start 17; Stop 41
gctagttcgccaaatagcgactagc

SEQ ID NO: 62075 - DNA, 25 bp, Artificial
  probe
  misc_feature (1)..(25): SEQ ID NO: 4342; WAN024AP4_at; Start 25; Stop 49
gccaaatagcgactagcgtccaaca

SEQ ID NO: 62076 - DNA, 25 bp, Artificial
  probe
  misc_feature (1)..(25): SEQ ID NO: 4342; WAN024AP4_at; Start 58; Stop 82
ctttagttccaattgttggtactga

SEQ ID NO: 62077 - DNA, 25 bp, Artificial
  probe
  misc_feature (1)..(25): SEQ ID NO: 4342; WAN024AP4_at; Start 19; Stop 43
tagttcgccaaatagcgactagcgt

SEQ ID NO: 62078 - DNA, 25 bp, Artificial
  probe
  misc_feature (1)..(25): SEQ ID NO: 4342; WAN024AP4_at; Start 22; Stop 46
ttcgccaaatagcgactagcgtcca

SEQ ID NO: 62079 - DNA, 25 bp, Artificial
  probe
  misc_feature (1)..(25): SEQ ID NO: 4342; WAN024AP4_at; Start 27; Stop 51
caaatagcgactagcgtccaacaat

SEQ ID NO: 62080 - DNA, 25 bp, Artificial
  probe
  misc_feature (1)..(25): SEQ ID NO: 4342; WAN024AP4_at; Start 21; Stop 45
gttcgccaaatagcgactagcgtcc

SEQ ID NO: 62081 - DNA, 25 bp, Artificial
  probe
  misc_feature (1)..(25): SEQ ID NO: 4342; WAN024AP4_at; Start 35; Stop 59
gactagcgtccaacaatttggaact

SEQ ID NO: 62082 - DNA, 25 bp, Artificial
  probe
  misc_feature (1)..(25): SEQ ID NO: 3304; WAN024AP5_at; Start 38; Stop 62
tggacgctagtcgctatttggcgaa

SEQ ID NO: 62083 - DNA, 25 bp, Artificial
  probe
  misc_feature (1)..(25): SEQ ID NO: 3304; WAN024AP5_at; Start 48; Stop 72
tcgctatttggcgaactagctaact

SEQ ID NO: 62084 - DNA, 25 bp, Artificial
  probe
  misc_feature (1)..(25): SEQ ID NO: 3304; WAN024AP5_at; Start 39; Stop 63
ggacgctagtcgctatttggcgaac

SEQ ID NO: 62085 - DNA, 25 bp, Artificial
  probe
  misc_feature (1)..(25): SEQ ID NO: 3304; WAN024AP5_at; Start 25; Stop 49
agttccaaattgttggacgctagtc

SEQ ID NO: 62086 - DNA, 25 bp, Artificial
  probe
  misc_feature (1)..(25): SEQ ID NO: 3304; WAN024AP5_at; Start 40; Stop 64
gacgctagtcgctatttggcgaact

SEQ ID NO: 62087 - DNA, 25 bp, Artificial
  probe
  misc_feature (1)..(25): SEQ ID NO: 3304; WAN024AP5_at; Start 35; Stop 59
tgttggacgctagtcgctatttggc

SEQ ID NO: 62088 - DNA, 25 bp, Artificial
  probe
  misc_feature (1)..(25): SEQ ID NO: 3304; WAN024AP5_at; Start 30; Stop 54
caaattgttggacgctagtcgctat

SEQ ID NO: 62089 - DNA, 25 bp, Artificial
  probe
  misc_feature (1)..(25): SEQ ID NO: 3304; WAN024AP5_at; Start 24; Stop 48
aagttccaaattgttggacgctagt

SEQ ID NO: 62090 - DNA, 25 bp, Artificial
  probe
  misc_feature (1)..(25): SEQ ID NO: 3304; WAN024AP5_at; Start 1; Stop 25
ctcagtaccaacaattggaactaaa

SEQ ID NO: 62091 - DNA, 25 bp, Artificial
  probe
  misc_feature (1)..(25): SEQ ID NO: 3304; WAN024AP5_at; Start 33; Stop 57
attgttggacgctagtcgctatttg

SEQ ID NO: 62092 - DNA, 25 bp, Artificial
  probe
  misc_feature (1)..(25): SEQ ID NO: 3304; WAN024AP5_at; Start 42; Stop 66
cgctagtcgctatttggcgaactag

SEQ ID NO: 62093 - DNA, 25 bp, Artificial
  probe
  misc_feature (1)..(25): SEQ ID NO: 3304; WAN024AP5_at; Start 41; Stop 65
acgctagtcgctatttggcgaacta

SEQ ID NO: 62094 - DNA, 25 bp, Artificial
  probe
  misc_feature (1)..(25): SEQ ID NO: 3304; WAN024AP5_at; Start 3; Stop 27
cagtaccaacaattggaactaaagt

SEQ ID NO: 62095 - DNA, 25 bp, Artificial
  probe
  misc_feature (1)..(25): SEQ ID NO: 3304; WAN024AP5_at; Start 28; Stop 52
tccaaattgttggacgctagtcgct

SEQ ID NO: 62096 - DNA, 25 bp, Artificial
  probe
  misc_feature (1)..(25): SEQ ID NO: 3304; WAN024AP5_at; Start 29; Stop 53
ccaaattgttggacgctagtcgcta

SEQ ID NO: 62097 - DNA, 25 bp, Artificial
  probe
  misc_feature (1)..(25): SEQ ID NO: 3304; WAN024AP5_at; Start 31; Stop 55
aaattgttggacgctagtcgctatt

SEQ ID NO: 62098 - DNA, 25 bp, Artificial
  probe
  misc_feature (1)..(25): SEQ ID NO: 3304; WAN024AP5_at; Start 43; Stop 67
gctagtcgctatttggcgaactagc

SEQ ID NO: 62099 - DNA, 25 bp, Artificial
  probe
  misc_feature (1)..(25): SEQ ID NO: 3304; WAN024AP5_at; Start 37; Stop 61
ttggacgctagtcgctatttggcga

SEQ ID NO: 62100 - DNA, 25 bp, Artificial
  probe
  misc_feature (1)..(25): SEQ ID NO: 3304; WAN024AP5_at; Start 45; Stop 69
tagtcgctatttggcgaactagcta

SEQ ID NO: 62101 - DNA, 25 bp, Artificial
  probe
  misc_feature (1)..(25): SEQ ID NO: 3304; WAN024AP5_at; Start 2; Stop 26
tcagtaccaacaattggaactaaag

SEQ ID NO: 62102 - DNA, 25 bp, Artificial
  probe
  misc_feature (1)..(25): SEQ ID NO: 3304; WAN024AP5_at; Start 32; Stop 56
aattgttggacgctagtcgctattt

SEQ ID NO: 62103 - DNA, 25 bp, Artificial
  probe
  misc_feature (1)..(25): SEQ ID NO: 3304; WAN024AP5_at; Start 46; Stop 70
agtcgctatttggcgaactagctaa

SEQ ID NO: 62104 - DNA, 25 bp, Artificial
  probe
  misc_feature (1)..(25): SEQ ID NO: 3304; WAN024AP5_at; Start 34; Stop 58
ttgttggacgctagtcgctatttgg

SEQ ID NO: 62105 - DNA, 25 bp, Artificial
  probe
  misc_feature (1)..(25): SEQ ID NO: 3304; WAN024AP5_at; Start 26; Stop 50
gttccaaattgttggacgctagtcg

SEQ ID NO: 62106 - DNA, 25 bp, Artificial
  probe
  misc_feature (1)..(25): SEQ ID NO: 3304; WAN024AP5_at; Start 47; Stop 71
gtcgctatttggcgaactagctaac

SEQ ID NO: 62107 - DNA, 25 bp, Artificial
  probe
  misc_feature (1)..(25): SEQ ID NO: 3304; WAN024AP5_at; Start 27; Stop 51
ttccaaattgttggacgctagtcgc

SEQ ID NO: 62108 - DNA, 25 bp, Artificial
  probe
  misc_feature (1)..(25): SEQ ID NO: 3304; WAN024AP5_at; Start 36; Stop 60
gttggacgctagtcgctatttggcg

SEQ ID NO: 62109 - DNA, 25 bp, Artificial
  probe
  misc_feature (1)..(25): SEQ ID NO: 3304; WAN024AP5_at; Start 44; Stop 68
ctagtcgctatttggcgaactagct

SEQ ID NO: 62110 - DNA, 25 bp, Artificial
  probe
  misc_feature (1)..(25): SEQ ID NO: 493; WAN024AP6_at; Start 17; Stop 41
cttgcttacgtaatagttcgatttc

SEQ ID NO: 62111 - DNA, 25 bp, Artificial
  probe
  misc_feature (1)..(25): SEQ ID NO: 493; WAN024AP6_at; Start 62; Stop 86
ctattacctaaacaagagggagtgg

SEQ ID NO: 62112 - DNA, 25 bp, Artificial
  probe
  misc_feature (1)..(25): SEQ ID NO: 493; WAN024AP6_at; Start 36; Stop 60
gatttcaccataatttgacagtcaa

SEQ ID NO: 62113 - DNA, 25 bp, Artificial
  probe
  misc_feature (1)..(25): SEQ ID NO: 493; WAN024AP6_at; Start 50; Stop 74
ttgacagtcaaactattacctaaac

SEQ ID NO: 62114 - DNA, 25 bp, Artificial
  probe
  misc_feature (1)..(25): SEQ ID NO: 493; WAN024AP6_at; Start 28; Stop 52
aatagttcgatttcaccataatttg

SEQ ID NO: 62115 - DNA, 25 bp, Artificial
  probe
  misc_feature (1)..(25): SEQ ID NO: 493; WAN024AP6_at; Start 20; Stop 44
gcttacgtaatagttcgatttcacc

SEQ ID NO: 62116 - DNA, 25 bp, Artificial
  probe
  misc_feature (1)..(25): SEQ ID NO: 493; WAN024AP6_at; Start 35; Stop 59
cgatttcaccataatttgacagtca

SEQ ID NO: 62117 - DNA, 25 bp, Artificial
  probe
  misc_feature (1)..(25): SEQ ID NO: 493; WAN024AP6_at; Start 22; Stop 46
ttacgtaatagttcgatttcaccat

SEQ ID NO: 62118 - DNA, 25 bp, Artificial
  probe
  misc_feature (1)..(25): SEQ ID NO: 493; WAN024AP6_at; Start 52; Stop 76
gacagtcaaactattacctaaacaa

SEQ ID NO: 62119 - DNA, 25 bp, Artificial
  probe
  misc_feature (1)..(25): SEQ ID NO: 493; WAN024AP6_at; Start 88; Stop 112
tttctccctactccttctactaata

SEQ ID NO: 62120 - DNA, 25 bp, Artificial
  probe
  misc_feature (1)..(25): SEQ ID NO: 493; WAN024AP6_at; Start 30; Stop 54
tagttcgatttcaccataatttgac

SEQ ID NO: 62121 - DNA, 25 bp, Artificial
  probe
  misc_feature (1)..(25): SEQ ID NO: 493; WAN024AP6_at; Start 55; Stop 79
agtcaaactattacctaaacaagag

SEQ ID NO: 62122 - DNA, 25 bp, Artificial
  probe
  misc_feature (1)..(25): SEQ ID NO: 493; WAN024AP6_at; Start 8; Stop 32
ccaaccttccttgcttacgtaatag

SEQ ID NO: 62123 - DNA, 25 bp, Artificial
  probe
  misc_feature (1)..(25): SEQ ID NO: 493; WAN024AP6_at; Start 61; Stop 85
actattacctaaacaagagggagtg

SEQ ID NO: 62124 - DNA, 25 bp, Artificial
  probe
  misc_feature (1)..(25): SEQ ID NO: 493; WAN024AP6_at; Start 13; Stop 37
cttccttgcttacgtaatagttcga

SEQ ID NO: 62125 - DNA, 25 bp, Artificial
  probe
  misc_feature (1)..(25): SEQ ID NO: 493; WAN024AP6_at; Start 94; Stop 118
cctactccttctactaatattctgc

SEQ ID NO: 62126 - DNA, 25 bp, Artificial
  probe
  misc_feature (1)..(25): SEQ ID NO: 493; WAN024AP6_at; Start 6; Stop 30
ctccaaccttccttgcttacgtaat

SEQ ID NO: 62127 - DNA, 25 bp, Artificial
  probe
  misc_feature (1)..(25): SEQ ID NO: 493; WAN024AP6_at; Start 34; Stop 58
tcgatttcaccataatttgacagtc

SEQ ID NO: 62128 - DNA, 25 bp, Artificial
  probe
  misc_feature (1)..(25): SEQ ID NO: 493; WAN024AP6_at; Start 14; Stop 38
ttccttgcttacgtaatagttcgat

SEQ ID NO: 62129 - DNA, 25 bp, Artificial
  probe
  misc_feature (1)..(25): SEQ ID NO: 493; WAN024AP6_at; Start 25; Stop 49
cgtaatagttcgatttcaccataat

SEQ ID NO: 62130 - DNA, 25 bp, Artificial
  probe
  misc_feature (1)..(25): SEQ ID NO: 493; WAN024AP6_at; Start 9; Stop 33
caaccttccttgcttacgtaatagt

SEQ ID NO: 62131 - DNA, 25 bp, Artificial
  probe
  misc_feature (1)..(25): SEQ ID NO: 493; WAN024AP6_at; Start 38; Stop 62
tttcaccataatttgacagtcaaac

SEQ ID NO: 62132 - DNA, 25 bp, Artificial
  probe
  misc_feature (1)..(25): SEQ ID NO: 493; WAN024AP6_at; Start 21; Stop 45
cttacgtaatagttcgatttcacca

SEQ ID NO: 62133 - DNA, 25 bp, Artificial
  probe
  misc_feature (1)..(25): SEQ ID NO: 493; WAN024AP6_at; Start 32; Stop 56
gttcgatttcaccataatttgacag

SEQ ID NO: 62134 - DNA, 25 bp, Artificial
  probe
  misc_feature (1)..(25): SEQ ID NO: 493; WAN024AP6_at; Start 54; Stop 78
cagtcaaactattacctaaacaaga

SEQ ID NO: 62135 - DNA, 25 bp, Artificial
  probe
  misc_feature (1)..(25): SEQ ID NO: 493; WAN024AP6_at; Start 24; Stop 48
acgtaatagttcgatttcaccataa

SEQ ID NO: 62136 - DNA, 25 bp, Artificial
  probe
  misc_feature (1)..(25): SEQ ID NO: 493; WAN024AP6_at; Start 47; Stop 71
aatttgacagtcaaactattaccta

SEQ ID NO: 62137 - DNA, 25 bp, Artificial
  probe
  misc_feature (1)..(25): SEQ ID NO: 493; WAN024AP6_at; Start 23; Stop 47
tacgtaatagttcgatttcaccata

SEQ ID NO: 62138 - DNA, 25 bp, Artificial
  probe
  misc_feature (1)..(25): SEQ ID NO: 493; WAN024AP6_at; Start 39; Stop 63
ttcaccataatttgacagtcaaact

SEQ ID NO: 62139 - DNA, 25 bp, Artificial
  probe
  misc_feature (1)..(25): SEQ ID NO: 493; WAN024AP6_at; Start 7; Stop 31
tccaaccttccttgcttacgtaata

SEQ ID NO: 62140 - DNA, 25 bp, Artificial
  probe
  misc_feature (1)..(25): SEQ ID NO: 493; WAN024AP6_at; Start 12; Stop 36
ccttccttgcttacgtaatagttcg

SEQ ID NO: 62141 - DNA, 25 bp, Artificial
  probe
  misc_feature (1)..(25): SEQ ID NO: 493; WAN024AP6_at; Start 16; Stop 40
ccttgcttacgtaatagttcgattt

SEQ ID NO: 62142 - DNA, 25 bp, Artificial
  probe
  misc_feature (1)..(25): SEQ ID NO: 493; WAN024AP6_at; Start 19; Stop 43
tgcttacgtaatagttcgatttcac

SEQ ID NO: 62143 - DNA, 25 bp, Artificial
  probe
  misc_feature (1)..(25): SEQ ID NO: 493; WAN024AP6_at; Start 15; Stop 39
tccttgcttacgtaatagttcgatt

SEQ ID NO: 62144 - DNA, 25 bp, Artificial
  probe
  misc_feature (1)..(25): SEQ ID NO: 3673; WAN024AP7_at; Start 56; Stop 80
agtttgactgtcaaattatggtgaa

SEQ ID NO: 62145 - DNA, 25 bp, Artificial
  probe
  misc_feature (1)..(25): SEQ ID NO: 3673; WAN024AP7_at; Start 87; Stop 111
ctattacgtaagcaaggaaggttgg

SEQ ID NO: 62146 - DNA, 25 bp, Artificial
  probe
  misc_feature (1)..(25): SEQ ID NO: 3673; WAN024AP7_at; Start 80; Stop 104
aatcgaactattacgtaagcaagga

SEQ ID NO: 62147 - DNA, 25 bp, Artificial
  probe
  misc_feature (1)..(25): SEQ ID NO: 3673; WAN024AP7_at; Start 5; Stop 29
aatattagtagaaggagtagggaga

SEQ ID NO: 62148 - DNA, 25 bp, Artificial
  probe
  misc_feature (1)..(25): SEQ ID NO: 3673; WAN024AP7_at; Start 63; Stop 87
ctgtcaaattatggtgaaatcgaac

SEQ ID NO: 62149 - DNA, 25 bp, Artificial
  probe
  misc_feature (1)..(25): SEQ ID NO: 3673; WAN024AP7_at; Start 76; Stop 100
gtgaaatcgaactattacgtaagca

SEQ ID NO: 62150 - DNA, 25 bp, Artificial
  probe
  misc_feature (1)..(25): SEQ ID NO: 3673; WAN024AP7_at; Start 2; Stop 26
cagaatattagtagaaggagtaggg

SEQ ID NO: 62151 - DNA, 25 bp, Artificial
  probe
  misc_feature (1)..(25): SEQ ID NO: 3673; WAN024AP7_at; Start 67; Stop 91
caaattatggtgaaatcgaactatt

SEQ ID NO: 62152 - DNA, 25 bp, Artificial
  probe
  misc_feature (1)..(25): SEQ ID NO: 3673; WAN024AP7_at; Start 34; Stop 58
cactccctcttgtttaggtaatagt

SEQ ID NO: 62153 - DNA, 25 bp, Artificial
  probe
  misc_feature (1)..(25): SEQ ID NO: 3673; WAN024AP7_at; Start 48; Stop 72
taggtaatagtttgactgtcaaatt

SEQ ID NO: 62154 - DNA, 25 bp, Artificial
  probe
  misc_feature (1)..(25): SEQ ID NO: 3673; WAN024AP7_at; Start 45; Stop 69
gtttaggtaatagtttgactgtcaa

SEQ ID NO: 62155 - DNA, 25 bp, Artificial
  probe
  misc_feature (1)..(25): SEQ ID NO: 3673; WAN024AP7_at; Start 83; Stop 107
cgaactattacgtaagcaaggaagg

SEQ ID NO: 62156 - DNA, 25 bp, Artificial
  probe
  misc_feature (1)..(25): SEQ ID NO: 3673; WAN024AP7_at; Start 79; Stop 103
aaatcgaactattacgtaagcaagg

SEQ ID NO: 62157 - DNA, 25 bp, Artificial
  probe
  misc_feature (1)..(25): SEQ ID NO: 3673; WAN024AP7_at; Start 41; Stop 65
tcttgtttaggtaatagtttgactg

SEQ ID NO: 62158 - DNA, 25 bp, Artificial
  probe
  misc_feature (1)..(25): SEQ ID NO: 3673; WAN024AP7_at; Start 60; Stop 84
tgactgtcaaattatggtgaaatcg

SEQ ID NO: 62159 - DNA, 25 bp, Artificial
  probe
  misc_feature (1)..(25): SEQ ID NO: 3673; WAN024AP7_at; Start 7; Stop 31
tattagtagaaggagtagggagaaa

SEQ ID NO: 62160 - DNA, 25 bp, Artificial
  probe
  misc_feature (1)..(25): SEQ ID NO: 3673; WAN024AP7_at; Start 33; Stop 57
ccactccctcttgtttaggtaatag

SEQ ID NO: 62161 - DNA, 25 bp, Artificial
  probe
  misc_feature (1)..(25): SEQ ID NO: 3673; WAN024AP7_at; Start 86; Stop 110
actattacgtaagcaaggaaggttg

SEQ ID NO: 62162 - DNA, 25 bp, Artificial
  probe
  misc_feature (1)..(25): SEQ ID NO: 3673; WAN024AP7_at; Start 89; Stop 113
attacgtaagcaaggaaggttggag

SEQ ID NO: 62163 - DNA, 25 bp, Artificial
  probe
  misc_feature (1)..(25): SEQ ID NO: 3673; WAN024AP7_at; Start 61; Stop 85
gactgtcaaattatggtgaaatcga

SEQ ID NO: 62164 - DNA, 25 bp, Artificial
  probe
  misc_feature (1)..(25): SEQ ID NO: 3673; WAN024AP7_at; Start 65; Stop 89
gtcaaattatggtgaaatcgaacta

SEQ ID NO: 62165 - DNA, 25 bp, Artificial
  probe
  misc_feature (1)..(25): SEQ ID NO: 3673; WAN024AP7_at; Start 78; Stop 102
gaaatcgaactattacgtaagcaag

SEQ ID NO: 62166 - DNA, 25 bp, Artificial
  probe
  misc_feature (1)..(25): SEQ ID NO: 3673; WAN024AP7_at; Start 74; Stop 98
tggtgaaatcgaactattacgtaag

SEQ ID NO: 62167 - DNA, 25 bp, Artificial
  probe
  misc_feature (1)..(25): SEQ ID NO: 3673; WAN024AP7_at; Start 1; Stop 25
gcagaatattagtagaaggagtagg

SEQ ID NO: 62168 - DNA, 25 bp, Artificial
  probe
  misc_feature (1)..(25): SEQ ID NO: 3673; WAN024AP7_at; Start 66; Stop 90
tcaaattatggtgaaatcgaactat

SEQ ID NO: 62169 - DNA, 25 bp, Artificial
  probe
  misc_feature (1)..(25): SEQ ID NO: 3673; WAN024AP7_at; Start 94; Stop 118
gtaagcaaggaaggttggaggcact

SEQ ID NO: 62170 - DNA, 25 bp, Artificial
  probe
  misc_feature (1)..(25): SEQ ID NO: 3673; WAN024AP7_at; Start 72; Stop 96
tatggtgaaatcgaactattacgta

SEQ ID NO: 62171 - DNA, 25 bp, Artificial
  probe
  misc_feature (1)..(25): SEQ ID NO: 3673; WAN024AP7_at; Start 40; Stop 64
ctcttgtttaggtaatagtttgact

SEQ ID NO: 62172 - DNA, 25 bp, Artificial
  probe
  misc_feature (1)..(25): SEQ ID NO: 3673; WAN024AP7_at; Start 88; Stop 112
tattacgtaagcaaggaaggttgga

SEQ ID NO: 62173 - DNA, 25 bp, Artificial
  probe
  misc_feature (1)..(25): SEQ ID NO: 3673; WAN024AP7_at; Start 82; Stop 106
tcgaactattacgtaagcaaggaag

SEQ ID NO: 62174 - DNA, 25 bp, Artificial
  probe
  misc_feature (1)..(25): SEQ ID NO: 3673; WAN024AP7_at; Start 70; Stop 94
attatggtgaaatcgaactattacg

SEQ ID NO: 62175 - DNA, 25 bp, Artificial
  probe
  misc_feature (1)..(25): SEQ ID NO: 3673; WAN024AP7_at; Start 64; Stop 88
tgtcaaattatggtgaaatcgaact

SEQ ID NO: 62176 - DNA, 25 bp, Artificial
  probe
  misc_feature (1)..(25): SEQ ID NO: 3673; WAN024AP7_at; Start 75; Stop 99
ggtgaaatcgaactattacgtaagc

SEQ ID NO: 62177 - DNA, 25 bp, Artificial
  probe
  misc_feature (1)..(25): SEQ ID NO: 3673; WAN024AP7_at; Start 91; Stop 115
tacgtaagcaaggaaggttggaggc

SEQ ID NO: 62178 - DNA, 25 bp, Artificial
  probe
  misc_feature (1)..(25): SEQ ID NO: 3627; WAN024AP8_at; Start 29; Stop 53
ttttataacaatgtgttcaccacat

SEQ ID NO: 62179 - DNA, 25 bp, Artificial
  probe
  misc_feature (1)..(25): SEQ ID NO: 3627; WAN024AP8_at; Start 34; Stop 58
taacaatgtgttcaccacatgatta

SEQ ID NO: 62180 - DNA, 25 bp, Artificial
  probe
  misc_feature (1)..(25): SEQ ID NO: 3627; WAN024AP8_at; Start 35; Stop 59
aacaatgtgttcaccacatgattac

SEQ ID NO: 62181 - DNA, 25 bp, Artificial
  probe
  misc_feature (1)..(25): SEQ ID NO: 3627; WAN024AP8_at; Start 32; Stop 56
tataacaatgtgttcaccacatgat

SEQ ID NO: 62182 - DNA, 25 bp, Artificial
  probe
  misc_feature (1)..(25): SEQ ID NO: 3627; WAN024AP8_at; Start 23; Stop 47
tagtttttttataacaatgtgttca

SEQ ID NO: 62183 - DNA, 25 bp, Artificial
  probe
  misc_feature (1)..(25): SEQ ID NO: 3627; WAN024AP8_at; Start 33; Stop 57
ataacaatgtgttcaccacatgatt

SEQ ID NO: 62184 - DNA, 25 bp, Artificial
  probe
  misc_feature (1)..(25): SEQ ID NO: 3627; WAN024AP8_at; Start 31; Stop 55
ttataacaatgtgttcaccacatga

SEQ ID NO: 62185 - DNA, 25 bp, Artificial
  probe
  misc_feature (1)..(25): SEQ ID NO: 3627; WAN024AP8_at; Start 27; Stop 51
ttttttataacaatgtgttcaccac

SEQ ID NO: 62186 - DNA, 25 bp, Artificial
  probe
  misc_feature (1)..(25): SEQ ID NO: 3627; WAN024AP8_at; Start 28; Stop 52
tttttataacaatgtgttcaccaca

SEQ ID NO: 62187 - DNA, 25 bp, Artificial
  probe
  misc_feature (1)..(25): SEQ ID NO: 3627; WAN024AP8_at; Start 26; Stop 50
tttttttataacaatgtgttcacca

SEQ ID NO: 62188 - DNA, 25 bp, Artificial
  probe
  misc_feature (1)..(25): SEQ ID NO: 3627; WAN024AP8_at; Start 30; Stop 54
tttataacaatgtgttcaccacatg

SEQ ID NO: 62189 - DNA, 25 bp, Artificial
  probe
  misc_feature (1)..(25): SEQ ID NO: 3791; WAN024AP9_at; Start 8; Stop 32
tgtggtgaacacattgttataaaaa

SEQ ID NO: 62190 - DNA, 25 bp, Artificial
  probe
  misc_feature (1)..(25): SEQ ID NO: 3791; WAN024AP9_at; Start 10; Stop 34
tggtgaacacattgttataaaaaaa

SEQ ID NO: 62191 - DNA, 25 bp, Artificial
  probe
  misc_feature (1)..(25): SEQ ID NO: 3791; WAN024AP9_at; Start 7; Stop 31
atgtggtgaacacattgttataaaa

SEQ ID NO: 62192 - DNA, 25 bp, Artificial
  probe
  misc_feature (1)..(25): SEQ ID NO: 3791; WAN024AP9_at; Start 3; Stop 27
aatcatgtggtgaacacattgttat

SEQ ID NO: 62193 - DNA, 25 bp, Artificial
  probe
  misc_feature (1)..(25): SEQ ID NO: 3791; WAN024AP9_at; Start 6; Stop 30
catgtggtgaacacattgttataaa

SEQ ID NO: 62194 - DNA, 25 bp, Artificial
  probe
  misc_feature (1)..(25): SEQ ID NO: 3791; WAN024AP9_at; Start 9; Stop 33
gtggtgaacacattgttataaaaaa

SEQ ID NO: 62195 - DNA, 25 bp, Artificial
  probe
  misc_feature (1)..(25): SEQ ID NO: 3791; WAN024AP9_at; Start 2; Stop 26
taatcatgtggtgaacacattgtta

SEQ ID NO: 62196 - DNA, 25 bp, Artificial
  probe
  misc_feature (1)..(25): SEQ ID NO: 3791; WAN024AP9_at; Start 5; Stop 29
tcatgtggtgaacacattgttataa

SEQ ID NO: 62197 - DNA, 25 bp, Artificial
  probe
  misc_feature (1)..(25): SEQ ID NO: 3791; WAN024AP9_at; Start 4; Stop 28
atcatgtggtgaacacattgttata

SEQ ID NO: 62198 - DNA, 25 bp, Artificial
  probe
  misc_feature (1)..(25): SEQ ID NO: 3791; WAN024AP9_at; Start 1; Stop 25
gtaatcatgtggtgaacacattgtt

SEQ ID NO: 62199 - DNA, 25 bp, Artificial
  probe
  misc_feature (1)..(25): SEQ ID NO: 5937; WAN024APA_at; Start 29; Stop 53
ttttacaatcaaaacatttgacaga

SEQ ID NO: 62200 - DNA, 25 bp, Artificial
  probe
  misc_feature (1)..(25): SEQ ID NO: 5937; WAN024APA_at; Start 3; Stop 27
ttcatatccctccttcttcaaaaaa

SEQ ID NO: 62201 - DNA, 25 bp, Artificial
  probe
  misc_feature (1)..(25): SEQ ID NO: 5937; WAN024APA_at; Start 47; Stop 71
tgacagaaagaattatatcaaaatt

SEQ ID NO: 62202 - DNA, 25 bp, Artificial
  probe
  misc_feature (1)..(25): SEQ ID NO: 5937; WAN024APA_at; Start 62; Stop 86
tatcaaaattcaaagaatgatgcaa

SEQ ID NO: 62203 - DNA, 25 bp, Artificial
  probe
  misc_feature (1)..(25): SEQ ID NO: 5937; WAN024APA_at; Start 35; Stop 59
aatcaaaacatttgacagaaagaat

SEQ ID NO: 62204 - DNA, 25 bp, Artificial
  probe
  misc_feature (1)..(25): SEQ ID NO: 5937; WAN024APA_at; Start 59; Stop 83
ttatatcaaaattcaaagaatgatg

SEQ ID NO: 62205 - DNA, 25 bp, Artificial
  probe
  misc_feature (1)..(25): SEQ ID NO: 5937; WAN024APA_at; Start 5; Stop 29
catatccctccttcttcaaaaaact

SEQ ID NO: 62206 - DNA, 25 bp, Artificial
  probe
  misc_feature (1)..(25): SEQ ID NO: 5937; WAN024APA_at; Start 32; Stop 56
tacaatcaaaacatttgacagaaag

SEQ ID NO: 62207 - DNA, 25 bp, Artificial
  probe
  misc_feature (1)..(25): SEQ ID NO: 5937; WAN024APA_at; Start 34; Stop 58
caatcaaaacatttgacagaaagaa

SEQ ID NO: 62208 - DNA, 25 bp, Artificial
  probe
  misc_feature (1)..(25): SEQ ID NO: 5937; WAN024APA_at; Start 31; Stop 55
ttacaatcaaaacatttgacagaaa

SEQ ID NO: 62209 - DNA, 25 bp, Artificial
  probe
  misc_feature (1)..(25): SEQ ID NO: 5937; WAN024APA_at; Start 33; Stop 57
acaatcaaaacatttgacagaaaga

SEQ ID NO: 62210 - DNA, 25 bp, Artificial
  probe
  misc_feature (1)..(25): SEQ ID NO: 5937; WAN024APA_at; Start 38; Stop 62
caaaacatttgacagaaagaattat

SEQ ID NO: 62211 - DNA, 25 bp, Artificial
  probe
  misc_feature (1)..(25): SEQ ID NO: 5937; WAN024APA_at; Start 61; Stop 85
atatcaaaattcaaagaatgatgca

SEQ ID NO: 62212 - DNA, 25 bp, Artificial
  probe
  misc_feature (1)..(25): SEQ ID NO: 5937; WAN024APA_at; Start 4; Stop 28
tcatatccctccttcttcaaaaaac

SEQ ID NO: 62213 - DNA, 25 bp, Artificial
  probe
  misc_feature (1)..(25): SEQ ID NO: 5937; WAN024APA_at; Start 45; Stop 69
tttgacagaaagaattatatcaaaa

SEQ ID NO: 62214 - DNA, 25 bp, Artificial
  probe
  misc_feature (1)..(25): SEQ ID NO: 5937; WAN024APA_at; Start 43; Stop 67
catttgacagaaagaattatatcaa

SEQ ID NO: 62215 - DNA, 25 bp, Artificial
  probe
  misc_feature (1)..(25): SEQ ID NO: 5937; WAN024APA_at; Start 37; Stop 61
tcaaaacatttgacagaaagaatta

SEQ ID NO: 62216 - DNA, 25 bp, Artificial
  probe
  misc_feature (1)..(25): SEQ ID NO: 5937; WAN024APA_at; Start 36; Stop 60
atcaaaacatttgacagaaagaatt

SEQ ID NO: 62217 - DNA, 25 bp, Artificial
  probe
  misc_feature (1)..(25): SEQ ID NO: 5937; WAN024APA_at; Start 39; Stop 63
aaaacatttgacagaaagaattata

SEQ ID NO: 62218 - DNA, 25 bp, Artificial
  probe
  misc_feature (1)..(25): SEQ ID NO: 5937; WAN024APA_at; Start 30; Stop 54
tttacaatcaaaacatttgacagaa

SEQ ID NO: 62219 - DNA, 25 bp, Artificial
  probe
  misc_feature (1)..(25): SEQ ID NO: 5937; WAN024APA_at; Start 46; Stop 70
ttgacagaaagaattatatcaaaat

SEQ ID NO: 62220 - DNA, 25 bp, Artificial
  probe
  misc_feature (1)..(25): SEQ ID NO: 5937; WAN024APA_at; Start 27; Stop 51
acttttacaatcaaaacatttgaca

SEQ ID NO: 62221 - DNA, 25 bp, Artificial
  probe
  misc_feature (1)..(25): SEQ ID NO: 5937; WAN024APA_at; Start 44; Stop 68
atttgacagaaagaattatatcaaa

SEQ ID NO: 62222 - DNA, 25 bp, Artificial
  probe
  misc_feature (1)..(25): SEQ ID NO: 5937; WAN024APA_at; Start 48; Stop 72
gacagaaagaattatatcaaaattc

SEQ ID NO: 62223 - DNA, 25 bp, Artificial
  probe
  misc_feature (1)..(25): SEQ ID NO: 5937; WAN024APA_at; Start 63; Stop 87
atcaaaattcaaagaatgatgcaag

SEQ ID NO: 62224 - DNA, 25 bp, Artificial
  probe
  misc_feature (1)..(25): SEQ ID NO: 5937; WAN024APA_at; Start 41; Stop 65
aacatttgacagaaagaattatatc

SEQ ID NO: 62225 - DNA, 25 bp, Artificial
  probe
  misc_feature (1)..(25): SEQ ID NO: 5937; WAN024APA_at; Start 28; Stop 52
cttttacaatcaaaacatttgacag

SEQ ID NO: 62226 - DNA, 25 bp, Artificial
  probe
  misc_feature (1)..(25): SEQ ID NO: 5937; WAN024APA_at; Start 60; Stop 84
tatatcaaaattcaaagaatgatgc

SEQ ID NO: 62227 - DNA, 25 bp, Artificial
  probe
  misc_feature (1)..(25): SEQ ID NO: 5937; WAN024APA_at; Start 40; Stop 64
aaacatttgacagaaagaattatat

SEQ ID NO: 62228 - DNA, 25 bp, Artificial
  probe
  misc_feature (1)..(25): SEQ ID NO: 5937; WAN024APA_at; Start 42; Stop 66
acatttgacagaaagaattatatca

SEQ ID NO: 62229 - DNA, 25 bp, Artificial
  probe
  misc_feature (1)..(25): SEQ ID NO: 98; WAN024APB_at; Start 36; Stop 60
ttctttctgtcaaatgttttgattg

SEQ ID NO: 62230 - DNA, 25 bp, Artificial
  probe
  misc_feature (1)..(25): SEQ ID NO: 98; WAN024APB_at; Start 67; Stop 91
ttttttgaagaaggagggatatgaa

SEQ ID NO: 62231 - DNA, 25 bp, Artificial
  probe
  misc_feature (1)..(25): SEQ ID NO: 98; WAN024APB_at; Start 33; Stop 57
taattctttctgtcaaatgttttga

SEQ ID NO: 62232 - DNA, 25 bp, Artificial
  probe
  misc_feature (1)..(25): SEQ ID NO: 98; WAN024APB_at; Start 28; Stop 52
tgatataattctttctgtcaaatgt

SEQ ID NO: 62233 - DNA, 25 bp, Artificial
  probe
  misc_feature (1)..(25): SEQ ID NO: 98; WAN024APB_at; Start 34; Stop 58
aattctttctgtcaaatgttttgat

SEQ ID NO: 62234 - DNA, 25 bp, Artificial
  probe
  misc_feature (1)..(25): SEQ ID NO: 98; WAN024APB_at; Start 69; Stop 93
ttttgaagaaggagggatatgaaaa

SEQ ID NO: 62235 - DNA, 25 bp, Artificial
  probe
  misc_feature (1)..(25): SEQ ID NO: 98; WAN024APB_at; Start 43; Stop 67
tgtcaaatgttttgattgtaaaagt

SEQ ID NO: 62236 - DNA, 25 bp, Artificial
  probe
  misc_feature (1)..(25): SEQ ID NO: 98; WAN024APB_at; Start 9; Stop 33
tgcatcattctttgaattttgatat

SEQ ID NO: 62237 - DNA, 25 bp, Artificial
  probe
  misc_feature (1)..(25): SEQ ID NO: 98; WAN024APB_at; Start 8; Stop 32
ttgcatcattctttgaattttgata

SEQ ID NO: 62238 - DNA, 25 bp, Artificial
  probe
  misc_feature (1)..(25): SEQ ID NO: 98; WAN024APB_at; Start 32; Stop 56
ataattctttctgtcaaatgttttg

SEQ ID NO: 62239 - DNA, 25 bp, Artificial
  probe
  misc_feature (1)..(25): SEQ ID NO: 98; WAN024APB_at; Start 26; Stop 50
tttgatataattctttctgtcaaat

SEQ ID NO: 62240 - DNA, 25 bp, Artificial
  probe
  misc_feature (1)..(25): SEQ ID NO: 98; WAN024APB_at; Start 22; Stop 46
gaattttgatataattctttctgtc

SEQ ID NO: 62241 - DNA, 25 bp, Artificial
  probe
  misc_feature (1)..(25): SEQ ID NO: 98; WAN024APB_at; Start 41; Stop 65
tctgtcaaatgttttgattgtaaaa

SEQ ID NO: 62242 - DNA, 25 bp, Artificial
  probe
  misc_feature (1)..(25): SEQ ID NO: 98; WAN024APB_at; Start 30; Stop 54
atataattctttctgtcaaatgttt

SEQ ID NO: 62243 - DNA, 25 bp, Artificial
  probe
  misc_feature (1)..(25): SEQ ID NO: 98; WAN024APB_at; Start 25; Stop 49
ttttgatataattctttctgtcaaa

SEQ ID NO: 62244 - DNA, 25 bp, Artificial
  probe
  misc_feature (1)..(25): SEQ ID NO: 98; WAN024APB_at; Start 42; Stop 66
ctgtcaaatgttttgattgtaaaag

SEQ ID NO: 62245 - DNA, 25 bp, Artificial
  probe
  misc_feature (1)..(25): SEQ ID NO: 98; WAN024APB_at; Start 27; Stop 51
ttgatataattctttctgtcaaatg

SEQ ID NO: 62246 - DNA, 25 bp, Artificial
  probe
  misc_feature (1)..(25): SEQ ID NO: 98; WAN024APB_at; Start 66; Stop 90
gttttttgaagaaggagggatatga

SEQ ID NO: 62247 - DNA, 25 bp, Artificial
  probe
  misc_feature (1)..(25): SEQ ID NO: 98; WAN024APB_at; Start 65; Stop 89
agttttttgaagaaggagggatatg

SEQ ID NO: 62248 - DNA, 25 bp, Artificial
  probe
  misc_feature (1)..(25): SEQ ID NO: 98; WAN024APB_at; Start 7; Stop 31
cttgcatcattctttgaattttgat

SEQ ID NO: 62249 - DNA, 25 bp, Artificial
  probe
  misc_feature (1)..(25): SEQ ID NO: 98; WAN024APB_at; Start 10; Stop 34
gcatcattctttgaattttgatata

SEQ ID NO: 62250 - DNA, 25 bp, Artificial
  probe
  misc_feature (1)..(25): SEQ ID NO: 98; WAN024APB_at; Start 37; Stop 61
tctttctgtcaaatgttttgattgt

SEQ ID NO: 62251 - DNA, 25 bp, Artificial
  probe
  misc_feature (1)..(25): SEQ ID NO: 98; WAN024APB_at; Start 40; Stop 64
ttctgtcaaatgttttgattgtaaa

SEQ ID NO: 62252 - DNA, 25 bp, Artificial
  probe
  misc_feature (1)..(25): SEQ ID NO: 98; WAN024APB_at; Start 29; Stop 53
gatataattctttctgtcaaatgtt

SEQ ID NO: 62253 - DNA, 25 bp, Artificial
  probe
  misc_feature (1)..(25): SEQ ID NO: 98; WAN024APB_at; Start 11; Stop 35
catcattctttgaattttgatataa

SEQ ID NO: 62254 - DNA, 25 bp, Artificial
  probe
  misc_feature (1)..(25): SEQ ID NO: 98; WAN024APB_at; Start 35; Stop 59
attctttctgtcaaatgttttgatt

SEQ ID NO: 62255 - DNA, 25 bp, Artificial
  probe
  misc_feature (1)..(25): SEQ ID NO: 98; WAN024APB_at; Start 38; Stop 62
ctttctgtcaaatgttttgattgta

SEQ ID NO: 62256 - DNA, 25 bp, Artificial
  probe
  misc_feature (1)..(25): SEQ ID NO: 98; WAN024APB_at; Start 23; Stop 47
aattttgatataattctttctgtca

SEQ ID NO: 62257 - DNA, 25 bp, Artificial
  probe
  misc_feature (1)..(25): SEQ ID NO: 98; WAN024APB_at; Start 24; Stop 48
attttgatataattctttctgtcaa

SEQ ID NO: 62258 - DNA, 25 bp, Artificial
  probe
  misc_feature (1)..(25): SEQ ID NO: 98; WAN024APB_at; Start 68; Stop 92
tttttgaagaaggagggatatgaaa

SEQ ID NO: 62259 - DNA, 25 bp, Artificial
  probe
  misc_feature (1)..(25): SEQ ID NO: 98; WAN024APB_at; Start 31; Stop 55
tataattctttctgtcaaatgtttt

SEQ ID NO: 62260 - DNA, 25 bp, Artificial
  probe
  misc_feature (1)..(25): SEQ ID NO: 98; WAN024APB_at; Start 39; Stop 63
tttctgtcaaatgttttgattgtaa

SEQ ID NO: 62261 - DNA, 25 bp, Artificial
  probe
  misc_feature (1)..(25): SEQ ID NO: 119; WAN024APC_at; Start 16; Stop 40
catagcaacggataagtaggttatc

SEQ ID NO: 62262 - DNA, 25 bp, Artificial
  probe
  misc_feature (1)..(25): SEQ ID NO: 119; WAN024APC_at; Start 12; Stop 36
taatcatagcaacggataagtaggt

SEQ ID NO: 62263 - DNA, 25 bp, Artificial
  probe
  misc_feature (1)..(25): SEQ ID NO: 119; WAN024APC_at; Start 29; Stop 53
aagtaggttatcttcttctttcaga

SEQ ID NO: 62264 - DNA, 25 bp, Artificial
  probe
  misc_feature (1)..(25): SEQ ID NO: 119; WAN024APC_at; Start 39; Stop 63
tcttcttctttcagaaagtctgcgg

SEQ ID NO: 62265 - DNA, 25 bp, Artificial
  probe
  misc_feature (1)..(25): SEQ ID NO: 119; WAN024APC_at; Start 119; Stop 143
tacacaatcaagtgcacacctgtga

SEQ ID NO: 62266 - DNA, 25 bp, Artificial
  probe
  misc_feature (1)..(25): SEQ ID NO: 119; WAN024APC_at; Start 104; Stop 128
ttagtgacaattacatacacaatca

SEQ ID NO: 62267 - DNA, 25 bp, Artificial
  probe
  misc_feature (1)..(25): SEQ ID NO: 119; WAN024APC_at; Start 24; Stop 48
cggataagtaggttatcttcttctt

SEQ ID NO: 62268 - DNA, 25 bp, Artificial
  probe
  misc_feature (1)..(25): SEQ ID NO: 119; WAN024APC_at; Start 97; Stop 121
tctaccgttagtgacaattacatac

SEQ ID NO: 62269 - DNA, 25 bp, Artificial
  probe
  misc_feature (1)..(25): SEQ ID NO: 119; WAN024APC_at; Start 115; Stop 139
tacatacacaatcaagtgcacacct

SEQ ID NO: 62270 - DNA, 25 bp, Artificial
  probe
  misc_feature (1)..(25): SEQ ID NO: 119; WAN024APC_at; Start 67; Stop 91
ctgcgagcagataggagggataggt

SEQ ID NO: 62271 - DNA, 25 bp, Artificial
  probe
  misc_feature (1)..(25): SEQ ID NO: 119; WAN024APC_at; Start 74; Stop 98
cagataggagggataggtgaaattc

SEQ ID NO: 62272 - DNA, 25 bp, Artificial
  probe
  misc_feature (1)..(25): SEQ ID NO: 119; WAN024APC_at; Start 111; Stop 135
caattacatacacaatcaagtgcac

SEQ ID NO: 62273 - DNA, 25 bp, Artificial
  probe
  misc_feature (1)..(25): SEQ ID NO: 119; WAN024APC_at; Start 4; Stop 28
ctttagtataatcatagcaacggat

SEQ ID NO: 62274 - DNA, 25 bp, Artificial
  probe
  misc_feature (1)..(25): SEQ ID NO: 119; WAN024APC_at; Start 108; Stop 132
tgacaattacatacacaatcaagtg

SEQ ID NO: 62275 - DNA, 25 bp, Artificial
  probe
  misc_feature (1)..(25): SEQ ID NO: 119; WAN024APC_at; Start 79; Stop 103
aggagggataggtgaaattctaccg

SEQ ID NO: 62276 - DNA, 25 bp, Artificial
  probe
  misc_feature (1)..(25): SEQ ID NO: 119; WAN024APC_at; Start 78; Stop 102
taggagggataggtgaaattctacc

SEQ ID NO: 62277 - DNA, 25 bp, Artificial
  probe
  misc_feature (1)..(25): SEQ ID NO: 119; WAN024APC_at; Start 89; Stop 113
ggtgaaattctaccgttagtgacaa

SEQ ID NO: 62278 - DNA, 25 bp, Artificial
  probe
  misc_feature (1)..(25): SEQ ID NO: 119; WAN024APC_at; Start 94; Stop 118
aattctaccgttagtgacaattaca

SEQ ID NO: 62279 - DNA, 25 bp, Artificial
  probe
  misc_feature (1)..(25): SEQ ID NO: 119; WAN024APC_at; Start 114; Stop 138
ttacatacacaatcaagtgcacacc

SEQ ID NO: 62280 - DNA, 25 bp, Artificial
  probe
  misc_feature (1)..(25): SEQ ID NO: 119; WAN024APC_at; Start 2; Stop 26
aactttagtataatcatagcaacgg

SEQ ID NO: 62281 - DNA, 25 bp, Artificial
  probe
  misc_feature (1)..(25): SEQ ID NO: 119; WAN024APC_at; Start 120; Stop 144
acacaatcaagtgcacacctgtgaa

SEQ ID NO: 62282 - DNA, 25 bp, Artificial
  probe
  misc_feature (1)..(25): SEQ ID NO: 119; WAN024APC_at; Start 32; Stop 56
taggttatcttcttctttcagaaag

SEQ ID NO: 62283 - DNA, 25 bp, Artificial
  probe
  misc_feature (1)..(25): SEQ ID NO: 119; WAN024APC_at; Start 92; Stop 116
gaaattctaccgttagtgacaatta

SEQ ID NO: 62284 - DNA, 25 bp, Artificial
  probe
  misc_feature (1)..(25): SEQ ID NO: 119; WAN024APC_at; Start 41; Stop 65
ttcttctttcagaaagtctgcgggt

SEQ ID NO: 62285 - DNA, 25 bp, Artificial
  probe
  misc_feature (1)..(25): SEQ ID NO: 119; WAN024APC_at; Start 10; Stop 34
tataatcatagcaacggataagtag

SEQ ID NO: 62286 - DNA, 25 bp, Artificial
  probe
  misc_feature (1)..(25): SEQ ID NO: 119; WAN024APC_at; Start 7; Stop 31
tagtataatcatagcaacggataag

SEQ ID NO: 62287 - DNA, 25 bp, Artificial
  probe
  misc_feature (1)..(25): SEQ ID NO: 119; WAN024APC_at; Start 101; Stop 125
ccgttagtgacaattacatacacaa

SEQ ID NO: 62288 - DNA, 25 bp, Artificial
  probe
  misc_feature (1)..(25): SEQ ID NO: 119; WAN024APC_at; Start 15; Stop 39
tcatagcaacggataagtaggttat

SEQ ID NO: 62289 - DNA, 25 bp, Artificial
  probe
  misc_feature (1)..(25): SEQ ID NO: 119; WAN024APC_at; Start 117; Stop 141
catacacaatcaagtgcacacctgt

SEQ ID NO: 62290 - DNA, 25 bp, Artificial
  probe
  misc_feature (1)..(25): SEQ ID NO: 119; WAN024APC_at; Start 99; Stop 123
taccgttagtgacaattacatacac

SEQ ID NO: 62291 - DNA, 25 bp, Artificial
  probe
  misc_feature (1)..(25): SEQ ID NO: 119; WAN024APC_at; Start 20; Stop 44
gcaacggataagtaggttatcttct

SEQ ID NO: 62292 - DNA, 25 bp, Artificial
  probe
  misc_feature (1)..(25): SEQ ID NO: 119; WAN024APC_at; Start 18; Stop 42
tagcaacggataagtaggttatctt

SEQ ID NO: 62293 - DNA, 25 bp, Artificial
  probe
  misc_feature (1)..(25): SEQ ID NO: 119; WAN024APC_at; Start 85; Stop 109
gataggtgaaattctaccgttagtg

SEQ ID NO: 62294 - DNA, 25 bp, Artificial
  probe
  misc_feature (1)..(25): SEQ ID NO: 119; WAN024APC_at; Start 87; Stop 111
taggtgaaattctaccgttagtgac

SEQ ID NO: 62295 - DNA, 25 bp, Artificial
  probe
  misc_feature (1)..(25): SEQ ID NO: 3233; WAN024APD_at; Start 92; Stop 116
gactttctgaaagaagaagataacc

SEQ ID NO: 62296 - DNA, 25 bp, Artificial
  probe
  misc_feature (1)..(25): SEQ ID NO: 3233; WAN024APD_at; Start 3; Stop 27
aacttcacaggtgtgcacttgattg

SEQ ID NO: 62297 - DNA, 25 bp, Artificial
  probe
  misc_feature (1)..(25): SEQ ID NO: 3233; WAN024APD_at; Start 10; Stop 34
caggtgtgcacttgattgtgtatgt

SEQ ID NO: 62298 - DNA, 25 bp, Artificial
  probe
  misc_feature (1)..(25): SEQ ID NO: 3233; WAN024APD_at; Start 115; Stop 139
cctacttatccgttgctatgattat

SEQ ID NO: 62299 - DNA, 25 bp, Artificial
  probe
  misc_feature (1)..(25): SEQ ID NO: 3233; WAN024APD_at; Start 123; Stop 147
tccgttgctatgattatactaaagt

SEQ ID NO: 62300 - DNA, 25 bp, Artificial
  probe
  misc_feature (1)..(25): SEQ ID NO: 3233; WAN024APD_at; Start 5; Stop 29
cttcacaggtgtgcacttgattgtg

SEQ ID NO: 62301 - DNA, 25 bp, Artificial
  probe
  misc_feature (1)..(25): SEQ ID NO: 3233; WAN024APD_at; Start 59; Stop 83
acctatccctcctatctgctcgcag

SEQ ID NO: 62302 - DNA, 25 bp, Artificial
  probe
  misc_feature (1)..(25): SEQ ID NO: 3233; WAN024APD_at; Start 18; Stop 42
cacttgattgtgtatgtaattgtca

SEQ ID NO: 62303 - DNA, 25 bp, Artificial
  probe
  misc_feature (1)..(25): SEQ ID NO: 3233; WAN024APD_at; Start 125; Stop 149
cgttgctatgattatactaaagttt

SEQ ID NO: 62304 - DNA, 25 bp, Artificial
  probe
  misc_feature (1)..(25): SEQ ID NO: 3233; WAN024APD_at; Start 48; Stop 72
ggtagaatttcacctatccctccta

SEQ ID NO: 62305 - DNA, 25 bp, Artificial
  probe
  misc_feature (1)..(25): SEQ ID NO: 3233; WAN024APD_at; Start 86; Stop 110
cccgcagactttctgaaagaagaag

SEQ ID NO: 62306 - DNA, 25 bp, Artificial
  probe
  misc_feature (1)..(25): SEQ ID NO: 3233; WAN024APD_at; Start 39; Stop 63
gtcactaacggtagaatttcaccta

SEQ ID NO: 62307 - DNA, 25 bp, Artificial
  probe
  misc_feature (1)..(25): SEQ ID NO: 3233; WAN024APD_at; Start 32; Stop 56
tgtaattgtcactaacggtagaatt

SEQ ID NO: 62308 - DNA, 25 bp, Artificial
  probe
  misc_feature (1)..(25): SEQ ID NO: 3233; WAN024APD_at; Start 102; Stop 126
aagaagaagataacctacttatccg

SEQ ID NO: 62309 - DNA, 25 bp, Artificial
  probe
  misc_feature (1)..(25): SEQ ID NO: 3233; WAN024APD_at; Start 28; Stop 52
tgtatgtaattgtcactaacggtag

SEQ ID NO: 62310 - DNA, 25 bp, Artificial
  probe
  misc_feature (1)..(25): SEQ ID NO: 3233; WAN024APD_at; Start 7; Stop 31
tcacaggtgtgcacttgattgtgta

SEQ ID NO: 62311 - DNA, 25 bp, Artificial
  probe
  misc_feature (1)..(25): SEQ ID NO: 3233; WAN024APD_at; Start 112; Stop 136
taacctacttatccgttgctatgat

SEQ ID NO: 62312 - DNA, 25 bp, Artificial
  probe
  misc_feature (1)..(25): SEQ ID NO: 3233; WAN024APD_at; Start 95; Stop 119
tttctgaaagaagaagataacctac

SEQ ID NO: 62313 - DNA, 25 bp, Artificial
  probe
  misc_feature (1)..(25): SEQ ID NO: 3233; WAN024APD_at; Start 41; Stop 65
cactaacggtagaatttcacctatc

SEQ ID NO: 62314 - DNA, 25 bp, Artificial
  probe
  misc_feature (1)..(25): SEQ ID NO: 3233; WAN024APD_at; Start 117; Stop 141
tacttatccgttgctatgattatac

SEQ ID NO: 62315 - DNA, 25 bp, Artificial
  probe
  misc_feature (1)..(25): SEQ ID NO: 3233; WAN024APD_at; Start 52; Stop 76
gaatttcacctatccctcctatctg

SEQ ID NO: 62316 - DNA, 25 bp, Artificial
  probe
  misc_feature (1)..(25): SEQ ID NO: 3233; WAN024APD_at; Start 107; Stop 131
gaagataacctacttatccgttgct

SEQ ID NO: 62317 - DNA, 25 bp, Artificial
  probe
  misc_feature (1)..(25): SEQ ID NO: 3233; WAN024APD_at; Start 88; Stop 112
cgcagactttctgaaagaagaagat

SEQ ID NO: 62318 - DNA, 25 bp, Artificial
  probe
  misc_feature (1)..(25): SEQ ID NO: 3233; WAN024APD_at; Start 8; Stop 32
cacaggtgtgcacttgattgtgtat

SEQ ID NO: 62319 - DNA, 25 bp, Artificial
  probe
  misc_feature (1)..(25): SEQ ID NO: 3233; WAN024APD_at; Start 37; Stop 61
ttgtcactaacggtagaatttcacc

SEQ ID NO: 62320 - DNA, 25 bp, Artificial
  probe
  misc_feature (1)..(25): SEQ ID NO: 3233; WAN024APD_at; Start 97; Stop 121
tctgaaagaagaagataacctactt

SEQ ID NO: 62321 - DNA, 25 bp, Artificial
  probe
  misc_feature (1)..(25): SEQ ID NO: 3233; WAN024APD_at; Start 23; Stop 47
gattgtgtatgtaattgtcactaac

SEQ ID NO: 62322 - DNA, 25 bp, Artificial
  probe
  misc_feature (1)..(25): SEQ ID NO: 3233; WAN024APD_at; Start 1; Stop 25
ccaacttcacaggtgtgcacttgat

SEQ ID NO: 62323 - DNA, 25 bp, Artificial
  probe
  misc_feature (1)..(25): SEQ ID NO: 3233; WAN024APD_at; Start 121; Stop 145
tatccgttgctatgattatactaaa

SEQ ID NO: 62324 - DNA, 25 bp, Artificial
  probe
  misc_feature (1)..(25): SEQ ID NO: 3233; WAN024APD_at; Start 30; Stop 54
tatgtaattgtcactaacggtagaa

SEQ ID NO: 62325 - DNA, 25 bp, Artificial
  probe
  misc_feature (1)..(25): SEQ ID NO: 3233; WAN024APD_at; Start 34; Stop 58
taattgtcactaacggtagaatttc

SEQ ID NO: 62326 - DNA, 25 bp, Artificial
  probe
  misc_feature (1)..(25): SEQ ID NO: 3233; WAN024APD_at; Start 110; Stop 134
gataacctacttatccgttgctatg

SEQ ID NO: 62327 - DNA, 25 bp, Artificial
  probe
  misc_feature (1)..(25): SEQ ID NO: 3233; WAN024APD_at; Start 85; Stop 109
acccgcagactttctgaaagaagaa

SEQ ID NO: 62328 - DNA, 25 bp, Artificial
  probe
  misc_feature (1)..(25): SEQ ID NO: 3233; WAN024APD_at; Start 12; Stop 36
ggtgtgcacttgattgtgtatgtaa

SEQ ID NO: 62329 - DNA, 25 bp, Artificial
  probe
  misc_feature (1)..(25): SEQ ID NO: 373; WAN024APE_at; Start 354; Stop 378
catgcgcaaaataattttgattcag

SEQ ID NO: 62330 - DNA, 25 bp, Artificial
  probe
  misc_feature (1)..(25): SEQ ID NO: 373; WAN024APE_at; Start 282; Stop 306
tagataacaccgttctaaattacga

SEQ ID NO: 62331 - DNA, 25 bp, Artificial
  probe
  misc_feature (1)..(25): SEQ ID NO: 373; WAN024APE_at; Start 46; Stop 70
aatgagcctatctccctcccaactg

SEQ ID NO: 62332 - DNA, 25 bp, Artificial
  probe
  misc_feature (1)..(25): SEQ ID NO: 373; WAN024APE_at; Start 27; Stop 51
aaactggacttccttcccaaatgag

SEQ ID NO: 62333 - DNA, 25 bp, Artificial
  probe
  misc_feature (1)..(25): SEQ ID NO: 373; WAN024APE_at; Start 372; Stop 396
gattcagattcatcatttatagttt

SEQ ID NO: 62334 - DNA, 25 bp, Artificial
  probe
  misc_feature (1)..(25): SEQ ID NO: 373; WAN024APE_at; Start 94; Stop 118
cagaacaagagtcctgcccactaaa

SEQ ID NO: 62335 - DNA, 25 bp, Artificial
  probe
  misc_feature (1)..(25): SEQ ID NO: 373; WAN024APE_at; Start 297; Stop 321
taaattacgattcatagttactcct

SEQ ID NO: 62336 - DNA, 25 bp, Artificial
  probe
  misc_feature (1)..(25): SEQ ID NO: 373; WAN024APE_at; Start 327; Stop 351
gactcgttactataagactcctctt

SEQ ID NO: 62337 - DNA, 25 bp, Artificial
  probe
  misc_feature (1)..(25): SEQ ID NO: 373; WAN024APE_at; Start 13; Stop 37
caatcactaaacaaaaactggactt

SEQ ID NO: 62338 - DNA, 25 bp, Artificial
  probe
  misc_feature (1)..(25): SEQ ID NO: 373; WAN024APE_at; Start 237; Stop 261
tgctatttctaagctacctctggta

SEQ ID NO: 62339 - DNA, 25 bp, Artificial
  probe
  misc_feature (1)..(25): SEQ ID NO: 373; WAN024APE_at; Start 339; Stop 363
taagactcctctttacatgcgcaaa

SEQ ID NO: 62340 - DNA, 25 bp, Artificial
  probe
  misc_feature (1)..(25): SEQ ID NO: 373; WAN024APE_at; Start 323; Stop 347
ttttgactcgttactataagactcc

SEQ ID NO: 62341 - DNA, 25 bp, Artificial
  probe
  misc_feature (1)..(25): SEQ ID NO: 373; WAN024APE_at; Start 32; Stop 56
ggacttccttcccaaatgagcctat

SEQ ID NO: 62342 - DNA, 25 bp, Artificial
  probe
  misc_feature (1)..(25): SEQ ID NO: 373; WAN024APE_at; Start 106; Stop 130
cctgcccactaaaaatatgctattg

SEQ ID NO: 62343 - DNA, 25 bp, Artificial
  probe
  misc_feature (1)..(25): SEQ ID NO: 373; WAN024APE_at; Start 199; Stop 223
tacgacatcctatttattacttcaa

SEQ ID NO: 62344 - DNA, 25 bp, Artificial
  probe
  misc_feature (1)..(25): SEQ ID NO: 373; WAN024APE_at; Start 309; Stop 333
catagttactccttttttgactcgt

SEQ ID NO: 62345 - DNA, 25 bp, Artificial
  probe
  misc_feature (1)..(25): SEQ ID NO: 373; WAN024APE_at; Start 3; Stop 27
tatcttaccccaatcactaaacaaa

SEQ ID NO: 62346 - DNA, 25 bp, Artificial
  probe
  misc_feature (1)..(25): SEQ ID NO: 373; WAN024APE_at; Start 112; Stop 136
cactaaaaatatgctattgaaagga

SEQ ID NO: 62347 - DNA, 25 bp, Artificial
  probe
  misc_feature (1)..(25): SEQ ID NO: 373; WAN024APE_at; Start 161; Stop 185
ggcaagcttgaaacaaataaatcat

SEQ ID NO: 62348 - DNA, 25 bp, Artificial
  probe
  misc_feature (1)..(25): SEQ ID NO: 373; WAN024APE_at; Start 342; Stop 366
gactcctctttacatgcgcaaaata

SEQ ID NO: 62349 - DNA, 25 bp, Artificial
  probe
  misc_feature (1)..(25): SEQ ID NO: 373; WAN024APE_at; Start 251; Stop 275
tacctctggtatgatctattcctag

SEQ ID NO: 62350 - DNA, 25 bp, Artificial
  probe
  misc_feature (1)..(25): SEQ ID NO: 373; WAN024APE_at; Start 226; Stop 250
tctaatgtctctgctatttctaagc

SEQ ID NO: 62351 - DNA, 25 bp, Artificial
  probe
  misc_feature (1)..(25): SEQ ID NO: 373; WAN024APE_at; Start 148; Stop 172
tactgtcaccctaggcaagcttgaa

SEQ ID NO: 62352 - DNA, 25 bp, Artificial
  probe
  misc_feature (1)..(25): SEQ ID NO: 373; WAN024APE_at; Start 270; Stop 294
tcctagtcagaatagataacaccgt

SEQ ID NO: 62353 - DNA, 25 bp, Artificial
  probe
  misc_feature (1)..(25): SEQ ID NO: 373; WAN024APE_at; Start 141; Stop 165
gattttttactgtcaccctaggcaa

SEQ ID NO: 62354 - DNA, 25 bp, Artificial
  probe
  misc_feature (1)..(25): SEQ ID NO: 373; WAN024APE_at; Start 62; Stop 86
tcccaactgcactttttggataaaa

SEQ ID NO: 62355 - DNA, 25 bp, Artificial
  probe
  misc_feature (1)..(25): SEQ ID NO: 373; WAN024APE_at; Start 216; Stop 240
tacttcaatttctaatgtctctgct

SEQ ID NO: 62356 - DNA, 25 bp, Artificial
  probe
  misc_feature (1)..(25): SEQ ID NO: 373; WAN024APE_at; Start 153; Stop 177
tcaccctaggcaagcttgaaacaaa

SEQ ID NO: 62357 - DNA, 25 bp, Artificial
  probe
  misc_feature (1)..(25): SEQ ID NO: 373; WAN024APE_at; Start 187; Stop 211
gatagtaacacttacgacatcctat

SEQ ID NO: 62358 - DNA, 25 bp, Artificial
  probe
  misc_feature (1)..(25): SEQ ID NO: 373; WAN024APE_at; Start 273; Stop 297
tagtcagaatagataacaccgttct

SEQ ID NO: 62359 - DNA, 25 bp, Artificial
  probe
  misc_feature (1)..(25): SEQ ID NO: 373; WAN024APE_at; Start 178; Stop 202
taaatcattgatagtaacacttacg

SEQ ID NO: 62360 - DNA, 25 bp, Artificial
  probe
  misc_feature (1)..(25): SEQ ID NO: 373; WAN024APE_at; Start 348; Stop 372
tctttacatgcgcaaaataattttg

SEQ ID NO: 62361 - DNA, 25 bp, Artificial
  probe
  misc_feature (1)..(25): SEQ ID NO: 373; WAN024APE_at; Start 257; Stop 281
tggtatgatctattcctagtcagaa

SEQ ID NO: 62362 - DNA, 25 bp, Artificial
  probe
  misc_feature (1)..(25): SEQ ID NO: 373; WAN024APE_at; Start 102; Stop 126
gagtcctgcccactaaaaatatgct

SEQ ID NO: 62363 - DNA, 25 bp, Artificial
  probe
  misc_feature (1)..(25): SEQ ID NO: 3727; WAN024APF_at; Start 160; Stop 184
taggaatagatcataccagaggtag

SEQ ID NO: 62364 - DNA, 25 bp, Artificial
  probe
  misc_feature (1)..(25): SEQ ID NO: 3727; WAN024APF_at; Start 397; Stop 421
aagtccagtttttgtttagtgattg

SEQ ID NO: 62365 - DNA, 25 bp, Artificial
  probe
  misc_feature (1)..(25): SEQ ID NO: 3727; WAN024APF_at; Start 87; Stop 111
ggagtcttatagtaacgagtcaaaa

SEQ ID NO: 62366 - DNA, 25 bp, Artificial
  probe
  misc_feature (1)..(25): SEQ ID NO: 3727; WAN024APF_at; Start 122; Stop 146
tatgaatcgtaatttagaacggtgt

SEQ ID NO: 62367 - DNA, 25 bp, Artificial
  probe
  misc_feature (1)..(25): SEQ ID NO: 3727; WAN024APF_at; Start 351; Stop 375
tatccaaaaagtgcagttgggaggg

SEQ ID NO: 62368 - DNA, 25 bp, Artificial
  probe
  misc_feature (1)..(25): SEQ ID NO: 3727; WAN024APF_at; Start 213; Stop 237
gaagtaataaataggatgtcgtaag

SEQ ID NO: 62369 - DNA, 25 bp, Artificial
  probe
  misc_feature (1)..(25): SEQ ID NO: 3727; WAN024APF_at; Start 166; Stop 190
tagatcataccagaggtagcttaga

SEQ ID NO: 62370 - DNA, 25 bp, Artificial
  probe
  misc_feature (1)..(25): SEQ ID NO: 3727; WAN024APF_at; Start 178; Stop 202
gaggtagcttagaaatagcagagac

SEQ ID NO: 62371 - DNA, 25 bp, Artificial
  probe
  misc_feature (1)..(25): SEQ ID NO: 3727; WAN024APF_at; Start 264; Stop 288
caagcttgcctagggtgacagtaaa

SEQ ID NO: 62372 - DNA, 25 bp, Artificial
  probe
  misc_feature (1)..(25): SEQ ID NO: 3727; WAN024APF_at; Start 309; Stop 333
gcatatttttagtgggcaggactct

SEQ ID NO: 62373 - DNA, 25 bp, Artificial
  probe
  misc_feature (1)..(25): SEQ ID NO: 3727; WAN024APF_at; Start 382; Stop 406
gctcatttgggaaggaagtccagtt

SEQ ID NO: 62374 - DNA, 25 bp, Artificial
  probe
  misc_feature (1)..(25): SEQ ID NO: 3727; WAN024APF_at; Start 173; Stop 197
taccagaggtagcttagaaatagca

SEQ ID NO: 62375 - DNA, 25 bp, Artificial
  probe
  misc_feature (1)..(25): SEQ ID NO: 3727; WAN024APF_at; Start 83; Stop 107
aagaggagtcttatagtaacgagtc

SEQ ID NO: 62376 - DNA, 25 bp, Artificial
  probe
  misc_feature (1)..(25): SEQ ID NO: 3727; WAN024APF_at; Start 184; Stop 208
gcttagaaatagcagagacattaga

SEQ ID NO: 62377 - DNA, 25 bp, Artificial
  probe
  misc_feature (1)..(25): SEQ ID NO: 3727; WAN024APF_at; Start 259; Stop 283
tgtttcaagcttgcctagggtgaca

SEQ ID NO: 62378 - DNA, 25 bp, Artificial
  probe
  misc_feature (1)..(25): SEQ ID NO: 3727; WAN024APF_at; Start 101; Stop 125
acgagtcaaaaaaggagtaactatg

SEQ ID NO: 62379 - DNA, 25 bp, Artificial
  probe
  misc_feature (1)..(25): SEQ ID NO: 3727; WAN024APF_at; Start 316; Stop 340
tttagtgggcaggactcttgttctg

SEQ ID NO: 62380 - DNA, 25 bp, Artificial
  probe
  misc_feature (1)..(25): SEQ ID NO: 3727; WAN024APF_at; Start 138; Stop 162
gaacggtgttatctattctgactag

SEQ ID NO: 62381 - DNA, 25 bp, Artificial
  probe
  misc_feature (1)..(25): SEQ ID NO: 3727; WAN024APF_at; Start 71; Stop 95
tttgcgcatgtaaagaggagtctta

SEQ ID NO: 62382 - DNA, 25 bp, Artificial
  probe
  misc_feature (1)..(25): SEQ ID NO: 3727; WAN024APF_at; Start 270; Stop 294
tgcctagggtgacagtaaaaaatca

SEQ ID NO: 62383 - DNA, 25 bp, Artificial
  probe
  misc_feature (1)..(25): SEQ ID NO: 3727; WAN024APF_at; Start 52; Stop 76
gaatctgaatcaaaattattttgcg

SEQ ID NO: 62384 - DNA, 25 bp, Artificial
  probe
  misc_feature (1)..(25): SEQ ID NO: 3727; WAN024APF_at; Start 304; Stop 328
caatagcatatttttagtgggcagg

SEQ ID NO: 62385 - DNA, 25 bp, Artificial
  probe
  misc_feature (1)..(25): SEQ ID NO: 3727; WAN024APF_at; Start 364; Stop 388
cagttgggagggagataggctcatt

SEQ ID NO: 62386 - DNA, 25 bp, Artificial
  probe
  misc_feature (1)..(25): SEQ ID NO: 3727; WAN024APF_at; Start 154; Stop 178
tctgactaggaatagatcataccag

SEQ ID NO: 62387 - DNA, 25 bp, Artificial
  probe
  misc_feature (1)..(25): SEQ ID NO: 3727; WAN024APF_at; Start 251; Stop 275
gatttatttgtttcaagcttgccta

SEQ ID NO: 62388 - DNA, 25 bp, Artificial
  probe
  misc_feature (1)..(25): SEQ ID NO: 3727; WAN024APF_at; Start 232; Stop 256
cgtaagtgttactatcaatgattta

SEQ ID NO: 62389 - DNA, 25 bp, Artificial
  probe
  misc_feature (1)..(25): SEQ ID NO: 3727; WAN024APF_at; Start 107; Stop 131
caaaaaaggagtaactatgaatcgt

SEQ ID NO: 62390 - DNA, 25 bp, Artificial
  probe
  misc_feature (1)..(25): SEQ ID NO: 3727; WAN024APF_at; Start 224; Stop 248
taggatgtcgtaagtgttactatca

SEQ ID NO: 62391 - DNA, 25 bp, Artificial
  probe
  misc_feature (1)..(25): SEQ ID NO: 3727; WAN024APF_at; Start 195; Stop 219
gcagagacattagaaattgaagtaa

SEQ ID NO: 62392 - DNA, 25 bp, Artificial
  probe
  misc_feature (1)..(25): SEQ ID NO: 3727; WAN024APF_at; Start 68; Stop 92
tattttgcgcatgtaaagaggagtc

SEQ ID NO: 62393 - DNA, 25 bp, Artificial
  probe
  misc_feature (1)..(25): SEQ ID NO: 3727; WAN024APF_at; Start 348; Stop 372
ttttatccaaaaagtgcagttggga

SEQ ID NO: 62394 - DNA, 25 bp, Artificial
  probe
  misc_feature (1)..(25): SEQ ID NO: 3727; WAN024APF_at; Start 36; Stop 60
caaaactataaatgatgaatctgaa

SEQ ID NO: 62395 - DNA, 25 bp, Artificial
  probe
  misc_feature (1)..(25): SEQ ID NO: 3727; WAN024APF_at; Start 141; Stop 165
cggtgttatctattctgactaggaa

SEQ ID NO: 62396 - DNA, 25 bp, Artificial
  probe
  misc_feature (1)..(25): SEQ ID NO: 3727; WAN024APF_at; Start 377; Stop 401
gataggctcatttgggaaggaagtc

SEQ ID NO: 62397 - DNA, 25 bp, Artificial
  probe
  misc_feature (1)..(25): SEQ ID NO: 3240; WAN024APG_at; Start 72; Stop 96
gtccgcttatttcagacttcatttt

SEQ ID NO: 62398 - DNA, 25 bp, Artificial
  probe
  misc_feature (1)..(25): SEQ ID NO: 3240; WAN024APG_at; Start 84; Stop 108
cagacttcattttactcagatatga

SEQ ID NO: 62399 - DNA, 25 bp, Artificial
  probe
  misc_feature (1)..(25): SEQ ID NO: 3240; WAN024APG_at; Start 34; Stop 58
aacataaaagcgcttaaatgaggat

SEQ ID NO: 62400 - DNA, 25 bp, Artificial
  probe
  misc_feature (1)..(25): SEQ ID NO: 3240; WAN024APG_at; Start 76; Stop 100
gcttatttcagacttcattttactc

SEQ ID NO: 62401 - DNA, 25 bp, Artificial
  probe
  misc_feature (1)..(25): SEQ ID NO: 3240; WAN024APG_at; Start 80; Stop 104
atttcagacttcattttactcagat

SEQ ID NO: 62402 - DNA, 25 bp, Artificial
  probe
  misc_feature (1)..(25): SEQ ID NO: 3240; WAN024APG_at; Start 30; Stop 54
gtataacataaaagcgcttaaatga

SEQ ID NO: 62403 - DNA, 25 bp, Artificial
  probe
  misc_feature (1)..(25): SEQ ID NO: 3240; WAN024APG_at; Start 38; Stop 62
taaaagcgcttaaatgaggatttaa

SEQ ID NO: 62404 - DNA, 25 bp, Artificial
  probe
  misc_feature (1)..(25): SEQ ID NO: 3240; WAN024APG_at; Start 28; Stop 52
cagtataacataaaagcgcttaaat

SEQ ID NO: 62405 - DNA, 25 bp, Artificial
  probe
  misc_feature (1)..(25): SEQ ID NO: 3240; WAN024APG_at; Start 24; Stop 48
gtttcagtataacataaaagcgctt

SEQ ID NO: 62406 - DNA, 25 bp, Artificial
  probe
  misc_feature (1)..(25): SEQ ID NO: 3240; WAN024APG_at; Start 29; Stop 53
agtataacataaaagcgcttaaatg

SEQ ID NO: 62407 - DNA, 25 bp, Artificial
  probe
  misc_feature (1)..(25): SEQ ID NO: 3240; WAN024APG_at; Start 79; Stop 103
tatttcagacttcattttactcaga

SEQ ID NO: 62408 - DNA, 25 bp, Artificial
  probe
  misc_feature (1)..(25): SEQ ID NO: 3240; WAN024APG_at; Start 23; Stop 47
agtttcagtataacataaaagcgct

SEQ ID NO: 62409 - DNA, 25 bp, Artificial
  probe
  misc_feature (1)..(25): SEQ ID NO: 3240; WAN024APG_at; Start 73; Stop 97
tccgcttatttcagacttcatttta

SEQ ID NO: 62410 - DNA, 25 bp, Artificial
  probe
  misc_feature (1)..(25): SEQ ID NO: 3240; WAN024APG_at; Start 68; Stop 92
cgaagtccgcttatttcagacttca

SEQ ID NO: 62411 - DNA, 25 bp, Artificial
  probe
  misc_feature (1)..(25): SEQ ID NO: 3240; WAN024APG_at; Start 35; Stop 59
acataaaagcgcttaaatgaggatt

SEQ ID NO: 62412 - DNA, 25 bp, Artificial
  probe
  misc_feature (1)..(25): SEQ ID NO: 3240; WAN024APG_at; Start 22; Stop 46
tagtttcagtataacataaaagcgc

SEQ ID NO: 62413 - DNA, 25 bp, Artificial
  probe
  misc_feature (1)..(25): SEQ ID NO: 3240; WAN024APG_at; Start 25; Stop 49
tttcagtataacataaaagcgctta

SEQ ID NO: 62414 - DNA, 25 bp, Artificial
  probe
  misc_feature (1)..(25): SEQ ID NO: 3240; WAN024APG_at; Start 83; Stop 107
tcagacttcattttactcagatatg

SEQ ID NO: 62415 - DNA, 25 bp, Artificial
  probe
  misc_feature (1)..(25): SEQ ID NO: 3240; WAN024APG_at; Start 26; Stop 50
ttcagtataacataaaagcgcttaa

SEQ ID NO: 62416 - DNA, 25 bp, Artificial
  probe
  misc_feature (1)..(25): SEQ ID NO: 3240; WAN024APG_at; Start 31; Stop 55
tataacataaaagcgcttaaatgag

SEQ ID NO: 62417 - DNA, 25 bp, Artificial
  probe
  misc_feature (1)..(25): SEQ ID NO: 3240; WAN024APG_at; Start 67; Stop 91
acgaagtccgcttatttcagacttc

SEQ ID NO: 62418 - DNA, 25 bp, Artificial
  probe
  misc_feature (1)..(25): SEQ ID NO: 3240; WAN024APG_at; Start 70; Stop 94
aagtccgcttatttcagacttcatt

SEQ ID NO: 62419 - DNA, 25 bp, Artificial
  probe
  misc_feature (1)..(25): SEQ ID NO: 3240; WAN024APG_at; Start 27; Stop 51
tcagtataacataaaagcgcttaaa

SEQ ID NO: 62420 - DNA, 25 bp, Artificial
  probe
  misc_feature (1)..(25): SEQ ID NO: 3240; WAN024APG_at; Start 75; Stop 99
cgcttatttcagacttcattttact

SEQ ID NO: 62421 - DNA, 25 bp, Artificial
  probe
  misc_feature (1)..(25): SEQ ID NO: 3240; WAN024APG_at; Start 85; Stop 109
agacttcattttactcagatatgaa

SEQ ID NO: 62422 - DNA, 25 bp, Artificial
  probe
  misc_feature (1)..(25): SEQ ID NO: 3240; WAN024APG_at; Start 81; Stop 105
tttcagacttcattttactcagata

SEQ ID NO: 62423 - DNA, 25 bp, Artificial
  probe
  misc_feature (1)..(25): SEQ ID NO: 3240; WAN024APG_at; Start 71; Stop 95
agtccgcttatttcagacttcattt

SEQ ID NO: 62424 - DNA, 25 bp, Artificial
  probe
  misc_feature (1)..(25): SEQ ID NO: 3240; WAN024APG_at; Start 37; Stop 61
ataaaagcgcttaaatgaggattta

SEQ ID NO: 62425 - DNA, 25 bp, Artificial
  probe
  misc_feature (1)..(25): SEQ ID NO: 3240; WAN024APG_at; Start 74; Stop 98
ccgcttatttcagacttcattttac

SEQ ID NO: 62426 - DNA, 25 bp, Artificial
  probe
  misc_feature (1)..(25): SEQ ID NO: 3240; WAN024APG_at; Start 69; Stop 93
gaagtccgcttatttcagacttcat

SEQ ID NO: 62427 - DNA, 25 bp, Artificial
  probe
  misc_feature (1)..(25): SEQ ID NO: 3240; WAN024APG_at; Start 65; Stop 89
aaacgaagtccgcttatttcagact

SEQ ID NO: 62428 - DNA, 25 bp, Artificial
  probe
  misc_feature (1)..(25): SEQ ID NO: 3240; WAN024APG_at; Start 36; Stop 60
cataaaagcgcttaaatgaggattt

SEQ ID NO: 62429 - DNA, 25 bp, Artificial
  probe
  misc_feature (1)..(25): SEQ ID NO: 3240; WAN024APG_at; Start 78; Stop 102
ttatttcagacttcattttactcag

SEQ ID NO: 62430 - DNA, 25 bp, Artificial
  probe
  misc_feature (1)..(25): SEQ ID NO: 3240; WAN024APG_at; Start 66; Stop 90
aacgaagtccgcttatttcagactt

SEQ ID NO: 62431 - DNA, 25 bp, Artificial
  probe
  misc_feature (1)..(25): SEQ ID NO: 4826; WAN024APH_at; Start 18; Stop 42
tgaagtctgaaataagcggacttcg

SEQ ID NO: 62432 - DNA, 25 bp, Artificial
  probe
  misc_feature (1)..(25): SEQ ID NO: 4826; WAN024APH_at; Start 55; Stop 79
ctcatttaagcgcttttatgttata

SEQ ID NO: 62433 - DNA, 25 bp, Artificial
  probe
  misc_feature (1)..(25): SEQ ID NO: 4826; WAN024APH_at; Start 56; Stop 80
tcatttaagcgcttttatgttatac

SEQ ID NO: 62434 - DNA, 25 bp, Artificial
  probe
  misc_feature (1)..(25): SEQ ID NO: 4826; WAN024APH_at; Start 3; Stop 27
catatctgagtaaaatgaagtctga

SEQ ID NO: 62435 - DNA, 25 bp, Artificial
  probe
  misc_feature (1)..(25): SEQ ID NO: 4826; WAN024APH_at; Start 58; Stop 82
atttaagcgcttttatgttatactg

SEQ ID NO: 62436 - DNA, 25 bp, Artificial
  probe
  misc_feature (1)..(25): SEQ ID NO: 4826; WAN024APH_at; Start 16; Stop 40
aatgaagtctgaaataagcggactt

SEQ ID NO: 62437 - DNA, 25 bp, Artificial
  probe
  misc_feature (1)..(25): SEQ ID NO: 4826; WAN024APH_at; Start 62; Stop 86
aagcgcttttatgttatactgaaac

SEQ ID NO: 62438 - DNA, 25 bp, Artificial
  probe
  misc_feature (1)..(25): SEQ ID NO: 4826; WAN024APH_at; Start 65; Stop 89
cgcttttatgttatactgaaactaa

SEQ ID NO: 62439 - DNA, 25 bp, Artificial
  probe
  misc_feature (1)..(25): SEQ ID NO: 4826; WAN024APH_at; Start 9; Stop 33
tgagtaaaatgaagtctgaaataag

SEQ ID NO: 62440 - DNA, 25 bp, Artificial
  probe
  misc_feature (1)..(25): SEQ ID NO: 4826; WAN024APH_at; Start 11; Stop 35
agtaaaatgaagtctgaaataagcg

SEQ ID NO: 62441 - DNA, 25 bp, Artificial
  probe
  misc_feature (1)..(25): SEQ ID NO: 4826; WAN024APH_at; Start 59; Stop 83
tttaagcgcttttatgttatactga

SEQ ID NO: 62442 - DNA, 25 bp, Artificial
  probe
  misc_feature (1)..(25): SEQ ID NO: 4826; WAN024APH_at; Start 2; Stop 26
tcatatctgagtaaaatgaagtctg

SEQ ID NO: 62443 - DNA, 25 bp, Artificial
  probe
  misc_feature (1)..(25): SEQ ID NO: 4826; WAN024APH_at; Start 19; Stop 43
gaagtctgaaataagcggacttcgt

SEQ ID NO: 62444 - DNA, 25 bp, Artificial
  probe
  misc_feature (1)..(25): SEQ ID NO: 4826; WAN024APH_at; Start 6; Stop 30
atctgagtaaaatgaagtctgaaat

SEQ ID NO: 62445 - DNA, 25 bp, Artificial
  probe
  misc_feature (1)..(25): SEQ ID NO: 4826; WAN024APH_at; Start 51; Stop 75
aatcctcatttaagcgcttttatgt

SEQ ID NO: 62446 - DNA, 25 bp, Artificial
  probe
  misc_feature (1)..(25): SEQ ID NO: 4826; WAN024APH_at; Start 17; Stop 41
atgaagtctgaaataagcggacttc

SEQ ID NO: 62447 - DNA, 25 bp, Artificial
  probe
  misc_feature (1)..(25): SEQ ID NO: 4826; WAN024APH_at; Start 52; Stop 76
atcctcatttaagcgcttttatgtt

SEQ ID NO: 62448 - DNA, 25 bp, Artificial
  probe
  misc_feature (1)..(25): SEQ ID NO: 4826; WAN024APH_at; Start 63; Stop 87
agcgcttttatgttatactgaaact

SEQ ID NO: 62449 - DNA, 25 bp, Artificial
  probe
  misc_feature (1)..(25): SEQ ID NO: 4826; WAN024APH_at; Start 13; Stop 37
taaaatgaagtctgaaataagcgga

SEQ ID NO: 62450 - DNA, 25 bp, Artificial
  probe
  misc_feature (1)..(25): SEQ ID NO: 4826; WAN024APH_at; Start 4; Stop 28
atatctgagtaaaatgaagtctgaa

SEQ ID NO: 62451 - DNA, 25 bp, Artificial
  probe
  misc_feature (1)..(25): SEQ ID NO: 4826; WAN024APH_at; Start 10; Stop 34
gagtaaaatgaagtctgaaataagc

SEQ ID NO: 62452 - DNA, 25 bp, Artificial
  probe
  misc_feature (1)..(25): SEQ ID NO: 4826; WAN024APH_at; Start 21; Stop 45
agtctgaaataagcggacttcgttt

SEQ ID NO: 62453 - DNA, 25 bp, Artificial
  probe
  misc_feature (1)..(25): SEQ ID NO: 4826; WAN024APH_at; Start 61; Stop 85
taagcgcttttatgttatactgaaa

SEQ ID NO: 62454 - DNA, 25 bp, Artificial
  probe
  misc_feature (1)..(25): SEQ ID NO: 4826; WAN024APH_at; Start 12; Stop 36
gtaaaatgaagtctgaaataagcgg

SEQ ID NO: 62455 - DNA, 25 bp, Artificial
  probe
  misc_feature (1)..(25): SEQ ID NO: 4826; WAN024APH_at; Start 20; Stop 44
aagtctgaaataagcggacttcgtt

SEQ ID NO: 62456 - DNA, 25 bp, Artificial
  probe
  misc_feature (1)..(25): SEQ ID NO: 4826; WAN024APH_at; Start 5; Stop 29
tatctgagtaaaatgaagtctgaaa

SEQ ID NO: 62457 - DNA, 25 bp, Artificial
  probe
  misc_feature (1)..(25): SEQ ID NO: 4826; WAN024APH_at; Start 64; Stop 88
gcgcttttatgttatactgaaacta

SEQ ID NO: 62458 - DNA, 25 bp, Artificial
  probe
  misc_feature (1)..(25): SEQ ID NO: 4826; WAN024APH_at; Start 14; Stop 38
aaaatgaagtctgaaataagcggac

SEQ ID NO: 62459 - DNA, 25 bp, Artificial
  probe
  misc_feature (1)..(25): SEQ ID NO: 4826; WAN024APH_at; Start 8; Stop 32
ctgagtaaaatgaagtctgaaataa

SEQ ID NO: 62460 - DNA, 25 bp, Artificial
  probe
  misc_feature (1)..(25): SEQ ID NO: 4826; WAN024APH_at; Start 15; Stop 39
aaatgaagtctgaaataagcggact

SEQ ID NO: 62461 - DNA, 25 bp, Artificial
  probe
  misc_feature (1)..(25): SEQ ID NO: 4826; WAN024APH_at; Start 60; Stop 84
ttaagcgcttttatgttatactgaa

SEQ ID NO: 62462 - DNA, 25 bp, Artificial
  probe
  misc_feature (1)..(25): SEQ ID NO: 4826; WAN024APH_at; Start 7; Stop 31
tctgagtaaaatgaagtctgaaata

SEQ ID NO: 62463 - DNA, 25 bp, Artificial
  probe
  misc_feature (1)..(25): SEQ ID NO: 4826; WAN024APH_at; Start 50; Stop 74
aaatcctcatttaagcgcttttatg

SEQ ID NO: 62464 - DNA, 25 bp, Artificial
  probe
  misc_feature (1)..(25): SEQ ID NO: 4826; WAN024APH_at; Start 57; Stop 81
catttaagcgcttttatgttatact

SEQ ID NO: 62465 - DNA, 25 bp, Artificial
  probe
  misc_feature (1)..(25): SEQ ID NO: 4707; WAN024API_at; Start 9; Stop 33
cacagctcgtgtgatttttttgcct

SEQ ID NO: 62466 - DNA, 25 bp, Artificial
  probe
  misc_feature (1)..(25): SEQ ID NO: 4707; WAN024API_at; Start 188; Stop 212
tagtgtcaataataagaaaagaggt

SEQ ID NO: 62467 - DNA, 25 bp, Artificial
  probe
  misc_feature (1)..(25): SEQ ID NO: 4707; WAN024API_at; Start 172; Stop 196
gattttccaataatattagtgtcaa

SEQ ID NO: 62468 - DNA, 25 bp, Artificial
  probe
  misc_feature (1)..(25): SEQ ID NO: 4707; WAN024API_at; Start 107; Stop 131
caacgaaaatcttatgagagaataa

SEQ ID NO: 62469 - DNA, 25 bp, Artificial
  probe
  misc_feature (1)..(25): SEQ ID NO: 4707; WAN024API_at; Start 111; Stop 135
gaaaatcttatgagagaataaagct

SEQ ID NO: 62470 - DNA, 25 bp, Artificial
  probe
  misc_feature (1)..(25): SEQ ID NO: 4707; WAN024API_at; Start 193; Stop 217
tcaataataagaaaagaggtatctt

SEQ ID NO: 62471 - DNA, 25 bp, Artificial
  probe
  misc_feature (1)..(25): SEQ ID NO: 4707; WAN024API_at; Start 104; Stop 128
taacaacgaaaatcttatgagagaa

SEQ ID NO: 62472 - DNA, 25 bp, Artificial
  probe
  misc_feature (1)..(25): SEQ ID NO: 4707; WAN024API_at; Start 80; Stop 104
gattggaagtgtgataaactaatat

SEQ ID NO: 62473 - DNA, 25 bp, Artificial
  probe
  misc_feature (1)..(25): SEQ ID NO: 4707; WAN024API_at; Start 139; Stop 163
tcttagataaacttaggaatcagga

SEQ ID NO: 62474 - DNA, 25 bp, Artificial
  probe
  misc_feature (1)..(25): SEQ ID NO: 4707; WAN024API_at; Start 75; Stop 99
caagtgattggaagtgtgataaact

SEQ ID NO: 62475 - DNA, 25 bp, Artificial
  probe
  misc_feature (1)..(25): SEQ ID NO: 4707; WAN024API_at; Start 142; Stop 166
tagataaacttaggaatcaggattt

SEQ ID NO: 62476 - DNA, 25 bp, Artificial
  probe
  misc_feature (1)..(25): SEQ ID NO: 4707; WAN024API_at; Start 117; Stop 141
cttatgagagaataaagctttatct

SEQ ID NO: 62477 - DNA, 25 bp, Artificial
  probe
  misc_feature (1)..(25): SEQ ID NO: 4707; WAN024API_at; Start 46; Stop 70
tatcagcctgatatataatatatat

SEQ ID NO: 62478 - DNA, 25 bp, Artificial
  probe
  misc_feature (1)..(25): SEQ ID NO: 4707; WAN024API_at; Start 87; Stop 111
agtgtgataaactaatataacaacg

SEQ ID NO: 62479 - DNA, 25 bp, Artificial
  probe
  misc_feature (1)..(25): SEQ ID NO: 4707; WAN024API_at; Start 29; Stop 53
tgcctataaataatttttatcagcc

SEQ ID NO: 62480 - DNA, 25 bp, Artificial
  probe
  misc_feature (1)..(25): SEQ ID NO: 4707; WAN024API_at; Start 140; Stop 164
cttagataaacttaggaatcaggat

SEQ ID NO: 62481 - DNA, 25 bp, Artificial
  probe
  misc_feature (1)..(25): SEQ ID NO: 4707; WAN024API_at; Start 159; Stop 183
caggattttataagattttccaata

SEQ ID NO: 62482 - DNA, 25 bp, Artificial
  probe
  misc_feature (1)..(25): SEQ ID NO: 4707; WAN024API_at; Start 1; Stop 25
tggaatcacacagctcgtgtgattt

SEQ ID NO: 62483 - DNA, 25 bp, Artificial
  probe
  misc_feature (1)..(25): SEQ ID NO: 4707; WAN024API_at; Start 3; Stop 27
gaatcacacagctcgtgtgattttt

SEQ ID NO: 62484 - DNA, 25 bp, Artificial
  probe
  misc_feature (1)..(25): SEQ ID NO: 4707; WAN024API_at; Start 155; Stop 179
gaatcaggattttataagattttcc

SEQ ID NO: 62485 - DNA, 25 bp, Artificial
  probe
  misc_feature (1)..(25): SEQ ID NO: 4707; WAN024API_at; Start 137; Stop 161
tatcttagataaacttaggaatcag

SEQ ID NO: 62486 - DNA, 25 bp, Artificial
  probe
  misc_feature (1)..(25): SEQ ID NO: 4707; WAN024API_at; Start 191; Stop 215
tgtcaataataagaaaagaggtatc

SEQ ID NO: 62487 - DNA, 25 bp, Artificial
  probe
  misc_feature (1)..(25): SEQ ID NO: 4707; WAN024API_at; Start 36; Stop 60
aaataatttttatcagcctgatata

SEQ ID NO: 62488 - DNA, 25 bp, Artificial
  probe
  misc_feature (1)..(25): SEQ ID NO: 4707; WAN024API_at; Start 148; Stop 172
aacttaggaatcaggattttataag

SEQ ID NO: 62489 - DNA, 25 bp, Artificial
  probe
  misc_feature (1)..(25): SEQ ID NO: 4707; WAN024API_at; Start 89; Stop 113
tgtgataaactaatataacaacgaa

SEQ ID NO: 62490 - DNA, 25 bp, Artificial
  probe
  misc_feature (1)..(25): SEQ ID NO: 4707; WAN024API_at; Start 110; Stop 134
cgaaaatcttatgagagaataaagc

SEQ ID NO: 62491 - DNA, 25 bp, Artificial
  probe
  misc_feature (1)..(25): SEQ ID NO: 4707; WAN024API_at; Start 122; Stop 146
gagagaataaagctttatcttagat

SEQ ID NO: 62492 - DNA, 25 bp, Artificial
  probe
  misc_feature (1)..(25): SEQ ID NO: 4707; WAN024API_at; Start 83; Stop 107
tggaagtgtgataaactaatataac

SEQ ID NO: 62493 - DNA, 25 bp, Artificial
  probe
  misc_feature (1)..(25): SEQ ID NO: 4707; WAN024API_at; Start 77; Stop 101
agtgattggaagtgtgataaactaa

SEQ ID NO: 62494 - DNA, 25 bp, Artificial
  probe
  misc_feature (1)..(25): SEQ ID NO: 4707; WAN024API_at; Start 116; Stop 140
tcttatgagagaataaagctttatc

SEQ ID NO: 62495 - DNA, 25 bp, Artificial
  probe
  misc_feature (1)..(25): SEQ ID NO: 4707; WAN024API_at; Start 13; Stop 37
gctcgtgtgatttttttgcctataa

SEQ ID NO: 62496 - DNA, 25 bp, Artificial
  probe
  misc_feature (1)..(25): SEQ ID NO: 4707; WAN024API_at; Start 102; Stop 126
tataacaacgaaaatcttatgagag

SEQ ID NO: 62497 - DNA, 25 bp, Artificial
  probe
  misc_feature (1)..(25): SEQ ID NO: 4707; WAN024API_at; Start 32; Stop 56
ctataaataatttttatcagcctga

SEQ ID NO: 62498 - DNA, 25 bp, Artificial
  probe
  misc_feature (1)..(25): SEQ ID NO: 4707; WAN024API_at; Start 144; Stop 168
gataaacttaggaatcaggatttta

SEQ ID NO: 62499 - DNA, 25 bp, Artificial
  probe
  misc_feature (1)..(25): SEQ ID NO: 226; WAN024APJ_at; Start 45; Stop 69
tcttataaaatcctgattcctaagt

SEQ ID NO: 62500 - DNA, 25 bp, Artificial
  probe
  misc_feature (1)..(25): SEQ ID NO: 226; WAN024APJ_at; Start 165; Stop 189
ggctgataaaaattatttataggca

SEQ ID NO: 62501 - DNA, 25 bp, Artificial
  probe
  misc_feature (1)..(25): SEQ ID NO: 226; WAN024APJ_at; Start 84; Stop 108
gctttattctctcataagattttcg

SEQ ID NO: 62502 - DNA, 25 bp, Artificial
  probe
  misc_feature (1)..(25): SEQ ID NO: 226; WAN024APJ_at; Start 119; Stop 143
agtttatcacacttccaatcacttg

SEQ ID NO: 62503 - DNA, 25 bp, Artificial
  probe
  misc_feature (1)..(25): SEQ ID NO: 226; WAN024APJ_at; Start 115; Stop 139
tattagtttatcacacttccaatca

SEQ ID NO: 62504 - DNA, 25 bp, Artificial
  probe
  misc_feature (1)..(25): SEQ ID NO: 226; WAN024APJ_at; Start 22; Stop 46
ttgacactaatattattggaaaatc

SEQ ID NO: 62505 - DNA, 25 bp, Artificial
  probe
  misc_feature (1)..(25): SEQ ID NO: 226; WAN024APJ_at; Start 3; Stop 27
gatacctcttttcttattattgaca

SEQ ID NO: 62506 - DNA, 25 bp, Artificial
  probe
  misc_feature (1)..(25): SEQ ID NO: 226; WAN024APJ_at; Start 24; Stop 48
gacactaatattattggaaaatctt

SEQ ID NO: 62507 - DNA, 25 bp, Artificial
  probe
  misc_feature (1)..(25): SEQ ID NO: 226; WAN024APJ_at; Start 50; Stop 74
taaaatcctgattcctaagtttatc

SEQ ID NO: 62508 - DNA, 25 bp, Artificial
  probe
  misc_feature (1)..(25): SEQ ID NO: 226; WAN024APJ_at; Start 184; Stop 208
taggcaaaaaaatcacacgagctgt

SEQ ID NO: 62509 - DNA, 25 bp, Artificial
  probe
  misc_feature (1)..(25): SEQ ID NO: 226; WAN024APJ_at; Start 35; Stop 59
tattggaaaatcttataaaatcctg

SEQ ID NO: 62510 - DNA, 25 bp, Artificial
  probe
  misc_feature (1)..(25): SEQ ID NO: 226; WAN024APJ_at; Start 7; Stop 31
cctcttttcttattattgacactaa

SEQ ID NO: 62511 - DNA, 25 bp, Artificial
  probe
  misc_feature (1)..(25): SEQ ID NO: 226; WAN024APJ_at; Start 55; Stop 79
tcctgattcctaagtttatctaaga

SEQ ID NO: 62512 - DNA, 25 bp, Artificial
  probe
  misc_feature (1)..(25): SEQ ID NO: 226; WAN024APJ_at; Start 111; Stop 135
gttatattagtttatcacacttcca

SEQ ID NO: 62513 - DNA, 25 bp, Artificial
  probe
  misc_feature (1)..(25): SEQ ID NO: 226; WAN024APJ_at; Start 62; Stop 86
tcctaagtttatctaagataaagct

SEQ ID NO: 62514 - DNA, 25 bp, Artificial
  probe
  misc_feature (1)..(25): SEQ ID NO: 226; WAN024APJ_at; Start 106; Stop 130
tcgttgttatattagtttatcacac

SEQ ID NO: 62515 - DNA, 25 bp, Artificial
  probe
  misc_feature (1)..(25): SEQ ID NO: 226; WAN024APJ_at; Start 58; Stop 82
tgattcctaagtttatctaagataa

SEQ ID NO: 62516 - DNA, 25 bp, Artificial
  probe
  misc_feature (1)..(25): SEQ ID NO: 226; WAN024APJ_at; Start 52; Stop 76
aaatcctgattcctaagtttatcta

SEQ ID NO: 62517 - DNA, 25 bp, Artificial
  probe
  misc_feature (1)..(25): SEQ ID NO: 226; WAN024APJ_at; Start 40; Stop 64
gaaaatcttataaaatcctgattcc

SEQ ID NO: 62518 - DNA, 25 bp, Artificial
  probe
  misc_feature (1)..(25): SEQ ID NO: 226; WAN024APJ_at; Start 78; Stop 102
gataaagctttattctctcataaga

SEQ ID NO: 62519 - DNA, 25 bp, Artificial
  probe
  misc_feature (1)..(25): SEQ ID NO: 226; WAN024APJ_at; Start 180; Stop 204
tttataggcaaaaaaatcacacgag

SEQ ID NO: 62520 - DNA, 25 bp, Artificial
  probe
  misc_feature (1)..(25): SEQ ID NO: 226; WAN024APJ_at; Start 113; Stop 137
tatattagtttatcacacttccaat

SEQ ID NO: 62521 - DNA, 25 bp, Artificial
  probe
  misc_feature (1)..(25): SEQ ID NO: 226; WAN024APJ_at; Start 37; Stop 61
ttggaaaatcttataaaatcctgat

SEQ ID NO: 62522 - DNA, 25 bp, Artificial
  probe
  misc_feature (1)..(25): SEQ ID NO: 226; WAN024APJ_at; Start 91; Stop 115
tctctcataagattttcgttgttat

SEQ ID NO: 62523 - DNA, 25 bp, Artificial
  probe
  misc_feature (1)..(25): SEQ ID NO: 226; WAN024APJ_at; Start 149; Stop 173
tatatattatatatcaggctgataa

SEQ ID NO: 62524 - DNA, 25 bp, Artificial
  probe
  misc_feature (1)..(25): SEQ ID NO: 226; WAN024APJ_at; Start 193; Stop 217
aaatcacacgagctgtgtgattcca

SEQ ID NO: 62525 - DNA, 25 bp, Artificial
  probe
  misc_feature (1)..(25): SEQ ID NO: 226; WAN024APJ_at; Start 96; Stop 120
cataagattttcgttgttatattag

SEQ ID NO: 62526 - DNA, 25 bp, Artificial
  probe
  misc_feature (1)..(25): SEQ ID NO: 226; WAN024APJ_at; Start 158; Stop 182
tatatcaggctgataaaaattattt

SEQ ID NO: 62527 - DNA, 25 bp, Artificial
  probe
  misc_feature (1)..(25): SEQ ID NO: 226; WAN024APJ_at; Start 88; Stop 112
tattctctcataagattttcgttgt

SEQ ID NO: 62528 - DNA, 25 bp, Artificial
  probe
  misc_feature (1)..(25): SEQ ID NO: 226; WAN024APJ_at; Start 56; Stop 80
cctgattcctaagtttatctaagat

SEQ ID NO: 62529 - DNA, 25 bp, Artificial
  probe
  misc_feature (1)..(25): SEQ ID NO: 226; WAN024APJ_at; Start 191; Stop 215
aaaaatcacacgagctgtgtgattc

SEQ ID NO: 62530 - DNA, 25 bp, Artificial
  probe
  misc_feature (1)..(25): SEQ ID NO: 226; WAN024APJ_at; Start 186; Stop 210
ggcaaaaaaatcacacgagctgtgt

SEQ ID NO: 62531 - DNA, 25 bp, Artificial
  probe
  misc_feature (1)..(25): SEQ ID NO: 226; WAN024APJ_at; Start 80; Stop 104
taaagctttattctctcataagatt

SEQ ID NO: 62532 - DNA, 25 bp, Artificial
  probe
  misc_feature (1)..(25): SEQ ID NO: 226; WAN024APJ_at; Start 117; Stop 141
ttagtttatcacacttccaatcact

SEQ ID NO: 62533 - DNA, 25 bp, Artificial
  probe
  misc_feature (1)..(25): SEQ ID NO: 4838; WAN024APK_at; Start 32; Stop 56
aagagcacatgcaagatacatgtac

SEQ ID NO: 62534 - DNA, 25 bp, Artificial
  probe
  misc_feature (1)..(25): SEQ ID NO: 4838; WAN024APK_at; Start 66; Stop 90
cttagataaatgctaaaaagcggtc

SEQ ID NO: 62535 - DNA, 25 bp, Artificial
  probe
  misc_feature (1)..(25): SEQ ID NO: 4838; WAN024APK_at; Start 52; Stop 76
tgtactctggaatgcttagataaat

SEQ ID NO: 62536 - DNA, 25 bp, Artificial
  probe
  misc_feature (1)..(25): SEQ ID NO: 4838; WAN024APK_at; Start 49; Stop 73
acatgtactctggaatgcttagata

SEQ ID NO: 62537 - DNA, 25 bp, Artificial
  probe
  misc_feature (1)..(25): SEQ ID NO: 4838; WAN024APK_at; Start 43; Stop 67
caagatacatgtactctggaatgct

SEQ ID NO: 62538 - DNA, 25 bp, Artificial
  probe
  misc_feature (1)..(25): SEQ ID NO: 4838; WAN024APK_at; Start 58; Stop 82
ctggaatgcttagataaatgctaaa

SEQ ID NO: 62539 - DNA, 25 bp, Artificial
  probe
  misc_feature (1)..(25): SEQ ID NO: 4838; WAN024APK_at; Start 54; Stop 78
tactctggaatgcttagataaatgc

SEQ ID NO: 62540 - DNA, 25 bp, Artificial
  probe
  misc_feature (1)..(25): SEQ ID NO: 4838; WAN024APK_at; Start 56; Stop 80
ctctggaatgcttagataaatgcta

SEQ ID NO: 62541 - DNA, 25 bp, Artificial
  probe
  misc_feature (1)..(25): SEQ ID NO: 4838; WAN024APK_at; Start 19; Stop 43
caaccccaaaagaaagagcacatgc

SEQ ID NO: 62542 - DNA, 25 bp, Artificial
  probe
  misc_feature (1)..(25): SEQ ID NO: 4838; WAN024APK_at; Start 50; Stop 74
catgtactctggaatgcttagataa

SEQ ID NO: 62543 - DNA, 25 bp, Artificial
  probe
  misc_feature (1)..(25): SEQ ID NO: 4838; WAN024APK_at; Start 20; Stop 44
aaccccaaaagaaagagcacatgca

SEQ ID NO: 62544 - DNA, 25 bp, Artificial
  probe
  misc_feature (1)..(25): SEQ ID NO: 4838; WAN024APK_at; Start 42; Stop 66
gcaagatacatgtactctggaatgc

SEQ ID NO: 62545 - DNA, 25 bp, Artificial
  probe
  misc_feature (1)..(25): SEQ ID NO: 4838; WAN024APK_at; Start 30; Stop 54
gaaagagcacatgcaagatacatgt

SEQ ID NO: 62546 - DNA, 25 bp, Artificial
  probe
  misc_feature (1)..(25): SEQ ID NO: 4838; WAN024APK_at; Start 17; Stop 41
ttcaaccccaaaagaaagagcacat

SEQ ID NO: 62547 - DNA, 25 bp, Artificial
  probe
  misc_feature (1)..(25): SEQ ID NO: 4838; WAN024APK_at; Start 48; Stop 72
tacatgtactctggaatgcttagat

SEQ ID NO: 62548 - DNA, 25 bp, Artificial
  probe
  misc_feature (1)..(25): SEQ ID NO: 4838; WAN024APK_at; Start 23; Stop 47
cccaaaagaaagagcacatgcaaga

SEQ ID NO: 62549 - DNA, 25 bp, Artificial
  probe
  misc_feature (1)..(25): SEQ ID NO: 4838; WAN024APK_at; Start 16; Stop 40
tttcaaccccaaaagaaagagcaca

SEQ ID NO: 62550 - DNA, 25 bp, Artificial
  probe
  misc_feature (1)..(25): SEQ ID NO: 4838; WAN024APK_at; Start 27; Stop 51
aaagaaagagcacatgcaagataca

SEQ ID NO: 62551 - DNA, 25 bp, Artificial
  probe
  misc_feature (1)..(25): SEQ ID NO: 4838; WAN024APK_at; Start 18; Stop 42
tcaaccccaaaagaaagagcacatg

SEQ ID NO: 62552 - DNA, 25 bp, Artificial
  probe
  misc_feature (1)..(25): SEQ ID NO: 4838; WAN024APK_at; Start 25; Stop 49
caaaagaaagagcacatgcaagata

SEQ ID NO: 62553 - DNA, 25 bp, Artificial
  probe
  misc_feature (1)..(25): SEQ ID NO: 4838; WAN024APK_at; Start 46; Stop 70
gatacatgtactctggaatgcttag

SEQ ID NO: 62554 - DNA, 25 bp, Artificial
  probe
  misc_feature (1)..(25): SEQ ID NO: 4838; WAN024APK_at; Start 68; Stop 92
tagataaatgctaaaaagcggtcta

SEQ ID NO: 62555 - DNA, 25 bp, Artificial
  probe
  misc_feature (1)..(25): SEQ ID NO: 4838; WAN024APK_at; Start 64; Stop 88
tgcttagataaatgctaaaaagcgg

SEQ ID NO: 62556 - DNA, 25 bp, Artificial
  probe
  misc_feature (1)..(25): SEQ ID NO: 4838; WAN024APK_at; Start 2; Stop 26
tccttctcctatcgtttcaacccca

SEQ ID NO: 62557 - DNA, 25 bp, Artificial
  probe
  misc_feature (1)..(25): SEQ ID NO: 4838; WAN024APK_at; Start 21; Stop 45
accccaaaagaaagagcacatgcaa

SEQ ID NO: 62558 - DNA, 25 bp, Artificial
  probe
  misc_feature (1)..(25): SEQ ID NO: 4838; WAN024APK_at; Start 39; Stop 63
catgcaagatacatgtactctggaa

SEQ ID NO: 62559 - DNA, 25 bp, Artificial
  probe
  misc_feature (1)..(25): SEQ ID NO: 4838; WAN024APK_at; Start 67; Stop 91
ttagataaatgctaaaaagcggtct

SEQ ID NO: 62560 - DNA, 25 bp, Artificial
  probe
  misc_feature (1)..(25): SEQ ID NO: 4838; WAN024APK_at; Start 22; Stop 46
ccccaaaagaaagagcacatgcaag

SEQ ID NO: 62561 - DNA, 25 bp, Artificial
  probe
  misc_feature (1)..(25): SEQ ID NO: 4838; WAN024APK_at; Start 34; Stop 58
gagcacatgcaagatacatgtactc

SEQ ID NO: 62562 - DNA, 25 bp, Artificial
  probe
  misc_feature (1)..(25): SEQ ID NO: 4838; WAN024APK_at; Start 41; Stop 65
tgcaagatacatgtactctggaatg

SEQ ID NO: 62563 - DNA, 25 bp, Artificial
  probe
  misc_feature (1)..(25): SEQ ID NO: 4838; WAN024APK_at; Start 29; Stop 53
agaaagagcacatgcaagatacatg

SEQ ID NO: 62564 - DNA, 25 bp, Artificial
  probe
  misc_feature (1)..(25): SEQ ID NO: 4838; WAN024APK_at; Start 36; Stop 60
gcacatgcaagatacatgtactctg

SEQ ID NO: 62565 - DNA, 25 bp, Artificial
  probe
  misc_feature (1)..(25): SEQ ID NO: 4838; WAN024APK_at; Start 37; Stop 61
cacatgcaagatacatgtactctgg

SEQ ID NO: 62566 - DNA, 25 bp, Artificial
  probe
  misc_feature (1)..(25): SEQ ID NO: 4838; WAN024APK_at; Start 24; Stop 48
ccaaaagaaagagcacatgcaagat

SEQ ID NO: 62567 - DNA, 25 bp, Artificial
  probe
  misc_feature (1)..(25): SEQ ID NO: 4492; WAN024APL_at; Start 24; Stop 48
taagcattccagagtacatgtatct

SEQ ID NO: 62568 - DNA, 25 bp, Artificial
  probe
  misc_feature (1)..(25): SEQ ID NO: 4492; WAN024APL_at; Start 1; Stop 25
tagaccgctttttagcatttatcta

SEQ ID NO: 62569 - DNA, 25 bp, Artificial
  probe
  misc_feature (1)..(25): SEQ ID NO: 4492; WAN024APL_at; Start 33; Stop 57
cagagtacatgtatcttgcatgtgc

SEQ ID NO: 62570 - DNA, 25 bp, Artificial
  probe
  misc_feature (1)..(25): SEQ ID NO: 4492; WAN024APL_at; Start 46; Stop 70
tcttgcatgtgctctttcttttggg

SEQ ID NO: 62571 - DNA, 25 bp, Artificial
  probe
  misc_feature (1)..(25): SEQ ID NO: 4492; WAN024APL_at; Start 16; Stop 40
catttatctaagcattccagagtac

SEQ ID NO: 62572 - DNA, 25 bp, Artificial
  probe
  misc_feature (1)..(25): SEQ ID NO: 4492; WAN024APL_at; Start 51; Stop 75
catgtgctctttcttttggggttga

SEQ ID NO: 62573 - DNA, 25 bp, Artificial
  probe
  misc_feature (1)..(25): SEQ ID NO: 4492; WAN024APL_at; Start 44; Stop 68
tatcttgcatgtgctctttcttttg

SEQ ID NO: 62574 - DNA, 25 bp, Artificial
  probe
  misc_feature (1)..(25): SEQ ID NO: 4492; WAN024APL_at; Start 21; Stop 45
atctaagcattccagagtacatgta

SEQ ID NO: 62575 - DNA, 25 bp, Artificial
  probe
  misc_feature (1)..(25): SEQ ID NO: 4492; WAN024APL_at; Start 22; Stop 46
tctaagcattccagagtacatgtat

SEQ ID NO: 62576 - DNA, 25 bp, Artificial
  probe
  misc_feature (1)..(25): SEQ ID NO: 4492; WAN024APL_at; Start 30; Stop 54
ttccagagtacatgtatcttgcatg

SEQ ID NO: 62577 - DNA, 25 bp, Artificial
  probe
  misc_feature (1)..(25): SEQ ID NO: 4492; WAN024APL_at; Start 40; Stop 64
catgtatcttgcatgtgctctttct

SEQ ID NO: 62578 - DNA, 25 bp, Artificial
  probe
  misc_feature (1)..(25): SEQ ID NO: 4492; WAN024APL_at; Start 15; Stop 39
gcatttatctaagcattccagagta

SEQ ID NO: 62579 - DNA, 25 bp, Artificial
  probe
  misc_feature (1)..(25): SEQ ID NO: 4492; WAN024APL_at; Start 35; Stop 59
gagtacatgtatcttgcatgtgctc

SEQ ID NO: 62580 - DNA, 25 bp, Artificial
  probe
  misc_feature (1)..(25): SEQ ID NO: 4492; WAN024APL_at; Start 3; Stop 27
gaccgctttttagcatttatctaag

SEQ ID NO: 62581 - DNA, 25 bp, Artificial
  probe
  misc_feature (1)..(25): SEQ ID NO: 4492; WAN024APL_at; Start 28; Stop 52
cattccagagtacatgtatcttgca

SEQ ID NO: 62582 - DNA, 25 bp, Artificial
  probe
  misc_feature (1)..(25): SEQ ID NO: 4492; WAN024APL_at; Start 37; Stop 61
gtacatgtatcttgcatgtgctctt

SEQ ID NO: 62583 - DNA, 25 bp, Artificial
  probe
  misc_feature (1)..(25): SEQ ID NO: 4492; WAN024APL_at; Start 14; Stop 38
agcatttatctaagcattccagagt

SEQ ID NO: 62584 - DNA, 25 bp, Artificial
  probe
  misc_feature (1)..(25): SEQ ID NO: 4492; WAN024APL_at; Start 27; Stop 51
gcattccagagtacatgtatcttgc

SEQ ID NO: 62585 - DNA, 25 bp, Artificial
  probe
  misc_feature (1)..(25): SEQ ID NO: 4492; WAN024APL_at; Start 38; Stop 62
tacatgtatcttgcatgtgctcttt

SEQ ID NO: 62586 - DNA, 25 bp, Artificial
  probe
  misc_feature (1)..(25): SEQ ID NO: 4492; WAN024APL_at; Start 20; Stop 44
tatctaagcattccagagtacatgt

SEQ ID NO: 62587 - DNA, 25 bp, Artificial
  probe
  misc_feature (1)..(25): SEQ ID NO: 4492; WAN024APL_at; Start 11; Stop 35
tttagcatttatctaagcattccag

SEQ ID NO: 62588 - DNA, 25 bp, Artificial
  probe
  misc_feature (1)..(25): SEQ ID NO: 4492; WAN024APL_at; Start 5; Stop 29
ccgctttttagcatttatctaagca

SEQ ID NO: 62589 - DNA, 25 bp, Artificial
  probe
  misc_feature (1)..(25): SEQ ID NO: 4492; WAN024APL_at; Start 13; Stop 37
tagcatttatctaagcattccagag

SEQ ID NO: 62590 - DNA, 25 bp, Artificial
  probe
  misc_feature (1)..(25): SEQ ID NO: 4492; WAN024APL_at; Start 19; Stop 43
ttatctaagcattccagagtacatg

SEQ ID NO: 62591 - DNA, 25 bp, Artificial
  probe
  misc_feature (1)..(25): SEQ ID NO: 4492; WAN024APL_at; Start 34; Stop 58
agagtacatgtatcttgcatgtgct

SEQ ID NO: 62592 - DNA, 25 bp, Artificial
  probe
  misc_feature (1)..(25): SEQ ID NO: 4492; WAN024APL_at; Start 23; Stop 47
ctaagcattccagagtacatgtatc

SEQ ID NO: 62593 - DNA, 25 bp, Artificial
  probe
  misc_feature (1)..(25): SEQ ID NO: 4492; WAN024APL_at; Start 25; Stop 49
aagcattccagagtacatgtatctt

SEQ ID NO: 62594 - DNA, 25 bp, Artificial
  probe
  misc_feature (1)..(25): SEQ ID NO: 4492; WAN024APL_at; Start 32; Stop 56
ccagagtacatgtatcttgcatgtg

SEQ ID NO: 62595 - DNA, 25 bp, Artificial
  probe
  misc_feature (1)..(25): SEQ ID NO: 4492; WAN024APL_at; Start 36; Stop 60
agtacatgtatcttgcatgtgctct

SEQ ID NO: 62596 - DNA, 25 bp, Artificial
  probe
  misc_feature (1)..(25): SEQ ID NO: 4492; WAN024APL_at; Start 17; Stop 41
atttatctaagcattccagagtaca

SEQ ID NO: 62597 - DNA, 25 bp, Artificial
  probe
  misc_feature (1)..(25): SEQ ID NO: 4492; WAN024APL_at; Start 67; Stop 91
tggggttgaaacgataggagaagga

SEQ ID NO: 62598 - DNA, 25 bp, Artificial
  probe
  misc_feature (1)..(25): SEQ ID NO: 4492; WAN024APL_at; Start 26; Stop 50
agcattccagagtacatgtatcttg

SEQ ID NO: 62599 - DNA, 25 bp, Artificial
  probe
  misc_feature (1)..(25): SEQ ID NO: 4492; WAN024APL_at; Start 31; Stop 55
tccagagtacatgtatcttgcatgt

SEQ ID NO: 62600 - DNA, 25 bp, Artificial
  probe
  misc_feature (1)..(25): SEQ ID NO: 4492; WAN024APL_at; Start 42; Stop 66
tgtatcttgcatgtgctctttcttt

SEQ ID NO: 62601 - DNA, 25 bp, Artificial
  probe
  misc_feature (1)..(25): SEQ ID NO: 3492; WAN024APM_at; Start 13; Stop 37
ttcattcggtgttggtatttaattg

SEQ ID NO: 62602 - DNA, 25 bp, Artificial
  probe
  misc_feature (1)..(25): SEQ ID NO: 3492; WAN024APM_at; Start 53; Stop 77
aaaatgttggcttttgtcaatgtgt

SEQ ID NO: 62603 - DNA, 25 bp, Artificial
  probe
  misc_feature (1)..(25): SEQ ID NO: 3492; WAN024APM_at; Start 56; Stop 80
atgttggcttttgtcaatgtgttta

SEQ ID NO: 62604 - DNA, 25 bp, Artificial
  probe
  misc_feature (1)..(25): SEQ ID NO: 3492; WAN024APM_at; Start 14; Stop 38
tcattcggtgttggtatttaattga

SEQ ID NO: 62605 - DNA, 25 bp, Artificial
  probe
  misc_feature (1)..(25): SEQ ID NO: 3492; WAN024APM_at; Start 2; Stop 26
ttctattaaacttcattcggtgttg

SEQ ID NO: 62606 - DNA, 25 bp, Artificial
  probe
  misc_feature (1)..(25): SEQ ID NO: 3492; WAN024APM_at; Start 58; Stop 82
gttggcttttgtcaatgtgtttatt

SEQ ID NO: 62607 - DNA, 25 bp, Artificial
  probe
  misc_feature (1)..(25): SEQ ID NO: 3492; WAN024APM_at; Start 20; Stop 44
ggtgttggtatttaattgattctaa

SEQ ID NO: 62608 - DNA, 25 bp, Artificial
  probe
  misc_feature (1)..(25): SEQ ID NO: 3492; WAN024APM_at; Start 48; Stop 72
tacaaaaaatgttggcttttgtcaa

SEQ ID NO: 62609 - DNA, 25 bp, Artificial
  probe
  misc_feature (1)..(25): SEQ ID NO: 3492; WAN024APM_at; Start 3; Stop 27
tctattaaacttcattcggtgttgg

SEQ ID NO: 62610 - DNA, 25 bp, Artificial
  probe
  misc_feature (1)..(25): SEQ ID NO: 3492; WAN024APM_at; Start 62; Stop 86
gcttttgtcaatgtgtttattagta

SEQ ID NO: 62611 - DNA, 25 bp, Artificial
  probe
  misc_feature (1)..(25): SEQ ID NO: 3492; WAN024APM_at; Start 67; Stop 91
tgtcaatgtgtttattagtaaaaat

SEQ ID NO: 62612 - DNA, 25 bp, Artificial
  probe
  misc_feature (1)..(25): SEQ ID NO: 3492; WAN024APM_at; Start 66; Stop 90
ttgtcaatgtgtttattagtaaaaa

SEQ ID NO: 62613 - DNA, 25 bp, Artificial
  probe
  misc_feature (1)..(25): SEQ ID NO: 3492; WAN024APM_at; Start 49; Stop 73
acaaaaaatgttggcttttgtcaat

SEQ ID NO: 62614 - DNA, 25 bp, Artificial
  probe
  misc_feature (1)..(25): SEQ ID NO: 3492; WAN024APM_at; Start 1; Stop 25
cttctattaaacttcattcggtgtt

SEQ ID NO: 62615 - DNA, 25 bp, Artificial
  probe
  misc_feature (1)..(25): SEQ ID NO: 3492; WAN024APM_at; Start 18; Stop 42
tcggtgttggtatttaattgattct

SEQ ID NO: 62616 - DNA, 25 bp, Artificial
  probe
  misc_feature (1)..(25): SEQ ID NO: 3492; WAN024APM_at; Start 21; Stop 45
gtgttggtatttaattgattctaat

SEQ ID NO: 62617 - DNA, 25 bp, Artificial
  probe
  misc_feature (1)..(25): SEQ ID NO: 3492; WAN024APM_at; Start 6; Stop 30
attaaacttcattcggtgttggtat

SEQ ID NO: 62618 - DNA, 25 bp, Artificial
  probe
  misc_feature (1)..(25): SEQ ID NO: 3492; WAN024APM_at; Start 60; Stop 84
tggcttttgtcaatgtgtttattag

SEQ ID NO: 62619 - DNA, 25 bp, Artificial
  probe
  misc_feature (1)..(25): SEQ ID NO: 3492; WAN024APM_at; Start 12; Stop 36
cttcattcggtgttggtatttaatt

SEQ ID NO: 62620 - DNA, 25 bp, Artificial
  probe
  misc_feature (1)..(25): SEQ ID NO: 3492; WAN024APM_at; Start 19; Stop 43
cggtgttggtatttaattgattcta

SEQ ID NO: 62621 - DNA, 25 bp, Artificial
  probe
  misc_feature (1)..(25): SEQ ID NO: 3492; WAN024APM_at; Start 11; Stop 35
acttcattcggtgttggtatttaat

SEQ ID NO: 62622 - DNA, 25 bp, Artificial
  probe
  misc_feature (1)..(25): SEQ ID NO: 3492; WAN024APM_at; Start 52; Stop 76
aaaaatgttggcttttgtcaatgtg

SEQ ID NO: 62623 - DNA, 25 bp, Artificial
  probe
  misc_feature (1)..(25): SEQ ID NO: 3492; WAN024APM_at; Start 15; Stop 39
cattcggtgttggtatttaattgat

SEQ ID NO: 62624 - DNA, 25 bp, Artificial
  probe
  misc_feature (1)..(25): SEQ ID NO: 3492; WAN024APM_at; Start 106; Stop 130
ttactttataaagtccagaatactg

SEQ ID NO: 62625 - DNA, 25 bp, Artificial
  probe
  misc_feature (1)..(25): SEQ ID NO: 3492; WAN024APM_at; Start 4; Stop 28
ctattaaacttcattcggtgttggt

SEQ ID NO: 62626 - DNA, 25 bp, Artificial
  probe
  misc_feature (1)..(25): SEQ ID NO: 3492; WAN024APM_at; Start 63; Stop 87
cttttgtcaatgtgtttattagtaa

SEQ ID NO: 62627 - DNA, 25 bp, Artificial
  probe
  misc_feature (1)..(25): SEQ ID NO: 3492; WAN024APM_at; Start 51; Stop 75
aaaaaatgttggcttttgtcaatgt

SEQ ID NO: 62628 - DNA, 25 bp, Artificial
  probe
  misc_feature (1)..(25): SEQ ID NO: 3492; WAN024APM_at; Start 70; Stop 94
caatgtgtttattagtaaaaattag

SEQ ID NO: 62629 - DNA, 25 bp, Artificial
  probe
  misc_feature (1)..(25): SEQ ID NO: 3492; WAN024APM_at; Start 5; Stop 29
tattaaacttcattcggtgttggta

SEQ ID NO: 62630 - DNA, 25 bp, Artificial
  probe
  misc_feature (1)..(25): SEQ ID NO: 3492; WAN024APM_at; Start 57; Stop 81
tgttggcttttgtcaatgtgtttat

SEQ ID NO: 62631 - DNA, 25 bp, Artificial
  probe
  misc_feature (1)..(25): SEQ ID NO: 3492; WAN024APM_at; Start 17; Stop 41
ttcggtgttggtatttaattgattc

SEQ ID NO: 62632 - DNA, 25 bp, Artificial
  probe
  misc_feature (1)..(25): SEQ ID NO: 3492; WAN024APM_at; Start 61; Stop 85
ggcttttgtcaatgtgtttattagt

SEQ ID NO: 62633 - DNA, 25 bp, Artificial
  probe
  misc_feature (1)..(25): SEQ ID NO: 3492; WAN024APM_at; Start 55; Stop 79
aatgttggcttttgtcaatgtgttt

SEQ ID NO: 62634 - DNA, 25 bp, Artificial
  probe
  misc_feature (1)..(25): SEQ ID NO: 3492; WAN024APM_at; Start 54; Stop 78
aaatgttggcttttgtcaatgtgtt

SEQ ID NO: 62635 - DNA, 25 bp, Artificial
  probe
  misc_feature (1)..(25): SEQ ID NO: 3214; WAN024APN_at; Start 93; Stop 117
tcaattaaataccaacaccgaatga

SEQ ID NO: 62636 - DNA, 25 bp, Artificial
  probe
  misc_feature (1)..(25): SEQ ID NO: 3214; WAN024APN_at; Start 48; Stop 72
taataaacacattgacaaaagccaa

SEQ ID NO: 62637 - DNA, 25 bp, Artificial
  probe
  misc_feature (1)..(25): SEQ ID NO: 3214; WAN024APN_at; Start 94; Stop 118
caattaaataccaacaccgaatgaa

SEQ ID NO: 62638 - DNA, 25 bp, Artificial
  probe
  misc_feature (1)..(25): SEQ ID NO: 3214; WAN024APN_at; Start 95; Stop 119
aattaaataccaacaccgaatgaag

SEQ ID NO: 62639 - DNA, 25 bp, Artificial
  probe
  misc_feature (1)..(25): SEQ ID NO: 3214; WAN024APN_at; Start 42; Stop 66
ttttactaataaacacattgacaaa

SEQ ID NO: 62640 - DNA, 25 bp, Artificial
  probe
  misc_feature (1)..(25): SEQ ID NO: 3214; WAN024APN_at; Start 45; Stop 69
tactaataaacacattgacaaaagc

SEQ ID NO: 62641 - DNA, 25 bp, Artificial
  probe
  misc_feature (1)..(25): SEQ ID NO: 3214; WAN024APN_at; Start 101; Stop 125
ataccaacaccgaatgaagtttaat

SEQ ID NO: 62642 - DNA, 25 bp, Artificial
  probe
  misc_feature (1)..(25): SEQ ID NO: 3214; WAN024APN_at; Start 90; Stop 114
gaatcaattaaataccaacaccgaa

SEQ ID NO: 62643 - DNA, 25 bp, Artificial
  probe
  misc_feature (1)..(25): SEQ ID NO: 3214; WAN024APN_at; Start 56; Stop 80
acattgacaaaagccaacatttttt

SEQ ID NO: 62644 - DNA, 25 bp, Artificial
  probe
  misc_feature (1)..(25): SEQ ID NO: 3214; WAN024APN_at; Start 54; Stop 78
acacattgacaaaagccaacatttt

SEQ ID NO: 62645 - DNA, 25 bp, Artificial
  probe
  misc_feature (1)..(25): SEQ ID NO: 3214; WAN024APN_at; Start 73; Stop 97
cattttttgtaaaattagaatcaat

SEQ ID NO: 62646 - DNA, 25 bp, Artificial
  probe
  misc_feature (1)..(25): SEQ ID NO: 3214; WAN024APN_at; Start 47; Stop 71
ctaataaacacattgacaaaagcca

SEQ ID NO: 62647 - DNA, 25 bp, Artificial
  probe
  misc_feature (1)..(25): SEQ ID NO: 3214; WAN024APN_at; Start 46; Stop 70
actaataaacacattgacaaaagcc

SEQ ID NO: 62648 - DNA, 25 bp, Artificial
  probe
  misc_feature (1)..(25): SEQ ID NO: 3214; WAN024APN_at; Start 58; Stop 82
attgacaaaagccaacattttttgt

SEQ ID NO: 62649 - DNA, 25 bp, Artificial
  probe
  misc_feature (1)..(25): SEQ ID NO: 3214; WAN024APN_at; Start 105; Stop 129
caacaccgaatgaagtttaatagaa

SEQ ID NO: 62650 - DNA, 25 bp, Artificial
  probe
  misc_feature (1)..(25): SEQ ID NO: 3214; WAN024APN_at; Start 60; Stop 84
tgacaaaagccaacattttttgtaa

SEQ ID NO: 62651 - DNA, 25 bp, Artificial
  probe
  misc_feature (1)..(25): SEQ ID NO: 3214; WAN024APN_at; Start 44; Stop 68
ttactaataaacacattgacaaaag

SEQ ID NO: 62652 - DNA, 25 bp, Artificial
  probe
  misc_feature (1)..(25): SEQ ID NO: 3214; WAN024APN_at; Start 103; Stop 127
accaacaccgaatgaagtttaatag

SEQ ID NO: 62653 - DNA, 25 bp, Artificial
  probe
  misc_feature (1)..(25): SEQ ID NO: 3214; WAN024APN_at; Start 92; Stop 116
atcaattaaataccaacaccgaatg

SEQ ID NO: 62654 - DNA, 25 bp, Artificial
  probe
  misc_feature (1)..(25): SEQ ID NO: 3214; WAN024APN_at; Start 55; Stop 79
cacattgacaaaagccaacattttt

SEQ ID NO: 62655 - DNA, 25 bp, Artificial
  probe
  misc_feature (1)..(25): SEQ ID NO: 3214; WAN024APN_at; Start 52; Stop 76
aaacacattgacaaaagccaacatt

SEQ ID NO: 62656 - DNA, 25 bp, Artificial
  probe
  misc_feature (1)..(25): SEQ ID NO: 3214; WAN024APN_at; Start 49; Stop 73
aataaacacattgacaaaagccaac

SEQ ID NO: 62657 - DNA, 25 bp, Artificial
  probe
  misc_feature (1)..(25): SEQ ID NO: 3214; WAN024APN_at; Start 89; Stop 113
agaatcaattaaataccaacaccga

SEQ ID NO: 62658 - DNA, 25 bp, Artificial
  probe
  misc_feature (1)..(25): SEQ ID NO: 3214; WAN024APN_at; Start 106; Stop 130
aacaccgaatgaagtttaatagaag

SEQ ID NO: 62659 - DNA, 25 bp, Artificial
  probe
  misc_feature (1)..(25): SEQ ID NO: 3214; WAN024APN_at; Start 104; Stop 128
ccaacaccgaatgaagtttaataga

SEQ ID NO: 62660 - DNA, 25 bp, Artificial
  probe
  misc_feature (1)..(25): SEQ ID NO: 3214; WAN024APN_at; Start 96; Stop 120
attaaataccaacaccgaatgaagt

SEQ ID NO: 62661 - DNA, 25 bp, Artificial
  probe
  misc_feature (1)..(25): SEQ ID NO: 3214; WAN024APN_at; Start 53; Stop 77
aacacattgacaaaagccaacattt

SEQ ID NO: 62662 - DNA, 25 bp, Artificial
  probe
  misc_feature (1)..(25): SEQ ID NO: 3214; WAN024APN_at; Start 91; Stop 115
aatcaattaaataccaacaccgaat

SEQ ID NO: 62663 - DNA, 25 bp, Artificial
  probe
  misc_feature (1)..(25): SEQ ID NO: 3214; WAN024APN_at; Start 51; Stop 75
taaacacattgacaaaagccaacat

SEQ ID NO: 62664 - DNA, 25 bp, Artificial
  probe
  misc_feature (1)..(25): SEQ ID NO: 3214; WAN024APN_at; Start 1; Stop 25
cagtattctggactttataaagtaa

SEQ ID NO: 62665 - DNA, 25 bp, Artificial
  probe
  misc_feature (1)..(25): SEQ ID NO: 3214; WAN024APN_at; Start 88; Stop 112
tagaatcaattaaataccaacaccg

SEQ ID NO: 62666 - DNA, 25 bp, Artificial
  probe
  misc_feature (1)..(25): SEQ ID NO: 3214; WAN024APN_at; Start 50; Stop 74
ataaacacattgacaaaagccaaca

SEQ ID NO: 62667 - DNA, 25 bp, Artificial
  probe
  misc_feature (1)..(25): SEQ ID NO: 3214; WAN024APN_at; Start 102; Stop 126
taccaacaccgaatgaagtttaata

SEQ ID NO: 62668 - DNA, 25 bp, Artificial
  probe
  misc_feature (1)..(25): SEQ ID NO: 3214; WAN024APN_at; Start 41; Stop 65
tttttactaataaacacattgacaa

SEQ ID NO: 62669 - DNA, 25 bp, Artificial
  probe
  misc_feature (1)..(25): SEQ ID NO: 3502; WAN024APO_at; Start 15; Stop 39
ctttgaatgtctaggtgtggtagct

SEQ ID NO: 62670 - DNA, 25 bp, Artificial
  probe
  misc_feature (1)..(25): SEQ ID NO: 3502; WAN024APO_at; Start 40; Stop 64
ttttacattctgatagattcgagtc

SEQ ID NO: 62671 - DNA, 25 bp, Artificial
  probe
  misc_feature (1)..(25): SEQ ID NO: 3502; WAN024APO_at; Start 29; Stop 53
gtgtggtagctttttacattctgat

SEQ ID NO: 62672 - DNA, 25 bp, Artificial
  probe
  misc_feature (1)..(25): SEQ ID NO: 3502; WAN024APO_at; Start 5; Stop 29
atttccttgtctttgaatgtctagg

SEQ ID NO: 62673 - DNA, 25 bp, Artificial
  probe
  misc_feature (1)..(25): SEQ ID NO: 3502; WAN024APO_at; Start 20; Stop 44
aatgtctaggtgtggtagcttttta

SEQ ID NO: 62674 - DNA, 25 bp, Artificial
  probe
  misc_feature (1)..(25): SEQ ID NO: 3502; WAN024APO_at; Start 33; Stop 57
ggtagctttttacattctgatagat

SEQ ID NO: 62675 - DNA, 25 bp, Artificial
  probe
  misc_feature (1)..(25): SEQ ID NO: 3502; WAN024APO_at; Start 30; Stop 54
tgtggtagctttttacattctgata

SEQ ID NO: 62676 - DNA, 25 bp, Artificial
  probe
  misc_feature (1)..(25): SEQ ID NO: 3502; WAN024APO_at; Start 22; Stop 46
tgtctaggtgtggtagctttttaca

SEQ ID NO: 62677 - DNA, 25 bp, Artificial
  probe
  misc_feature (1)..(25): SEQ ID NO: 3502; WAN024APO_at; Start 35; Stop 59
tagctttttacattctgatagattc

SEQ ID NO: 62678 - DNA, 25 bp, Artificial
  probe
  misc_feature (1)..(25): SEQ ID NO: 3502; WAN024APO_at; Start 26; Stop 50
taggtgtggtagctttttacattct

SEQ ID NO: 62679 - DNA, 25 bp, Artificial
  probe
  misc_feature (1)..(25): SEQ ID NO: 3502; WAN024APO_at; Start 28; Stop 52
ggtgtggtagctttttacattctga

SEQ ID NO: 62680 - DNA, 25 bp, Artificial
  probe
  misc_feature (1)..(25): SEQ ID NO: 3502; WAN024APO_at; Start 36; Stop 60
agctttttacattctgatagattcg

SEQ ID NO: 62681 - DNA, 25 bp, Artificial
  probe
  misc_feature (1)..(25): SEQ ID NO: 3502; WAN024APO_at; Start 21; Stop 45
atgtctaggtgtggtagctttttac

SEQ ID NO: 62682 - DNA, 25 bp, Artificial
  probe
  misc_feature (1)..(25): SEQ ID NO: 3502; WAN024APO_at; Start 24; Stop 48
tctaggtgtggtagctttttacatt

SEQ ID NO: 62683 - DNA, 25 bp, Artificial
  probe
  misc_feature (1)..(25): SEQ ID NO: 3502; WAN024APO_at; Start 41; Stop 65
tttacattctgatagattcgagtca

SEQ ID NO: 62684 - DNA, 25 bp, Artificial
  probe
  misc_feature (1)..(25): SEQ ID NO: 3502; WAN024APO_at; Start 27; Stop 51
aggtgtggtagctttttacattctg

SEQ ID NO: 62685 - DNA, 25 bp, Artificial
  probe
  misc_feature (1)..(25): SEQ ID NO: 3502; WAN024APO_at; Start 7; Stop 31
ttccttgtctttgaatgtctaggtg

SEQ ID NO: 62686 - DNA, 25 bp, Artificial
  probe
  misc_feature (1)..(25): SEQ ID NO: 3502; WAN024APO_at; Start 37; Stop 61
gctttttacattctgatagattcga

SEQ ID NO: 62687 - DNA, 25 bp, Artificial
  probe
  misc_feature (1)..(25): SEQ ID NO: 3502; WAN024APO_at; Start 38; Stop 62
ctttttacattctgatagattcgag

SEQ ID NO: 62688 - DNA, 25 bp, Artificial
  probe
  misc_feature (1)..(25): SEQ ID NO: 3502; WAN024APO_at; Start 14; Stop 38
tctttgaatgtctaggtgtggtagc

SEQ ID NO: 62689 - DNA, 25 bp, Artificial
  probe
  misc_feature (1)..(25): SEQ ID NO: 3502; WAN024APO_at; Start 19; Stop 43
gaatgtctaggtgtggtagcttttt

SEQ ID NO: 62690 - DNA, 25 bp, Artificial
  probe
  misc_feature (1)..(25): SEQ ID NO: 3502; WAN024APO_at; Start 9; Stop 33
ccttgtctttgaatgtctaggtgtg

SEQ ID NO: 62691 - DNA, 25 bp, Artificial
  probe
  misc_feature (1)..(25): SEQ ID NO: 3502; WAN024APO_at; Start 18; Stop 42
tgaatgtctaggtgtggtagctttt

SEQ ID NO: 62692 - DNA, 25 bp, Artificial
  probe
  misc_feature (1)..(25): SEQ ID NO: 3502; WAN024APO_at; Start 16; Stop 40
tttgaatgtctaggtgtggtagctt

SEQ ID NO: 62693 - DNA, 25 bp, Artificial
  probe
  misc_feature (1)..(25): SEQ ID NO: 3502; WAN024APO_at; Start 23; Stop 47
gtctaggtgtggtagctttttacat

SEQ ID NO: 62694 - DNA, 25 bp, Artificial
  probe
  misc_feature (1)..(25): SEQ ID NO: 3502; WAN024APO_at; Start 32; Stop 56
tggtagctttttacattctgataga

SEQ ID NO: 62695 - DNA, 25 bp, Artificial
  probe
  misc_feature (1)..(25): SEQ ID NO: 3502; WAN024APO_at; Start 8; Stop 32
tccttgtctttgaatgtctaggtgt

SEQ ID NO: 62696 - DNA, 25 bp, Artificial
  probe
  misc_feature (1)..(25): SEQ ID NO: 3502; WAN024APO_at; Start 12; Stop 36
tgtctttgaatgtctaggtgtggta

SEQ ID NO: 62697 - DNA, 25 bp, Artificial
  probe
  misc_feature (1)..(25): SEQ ID NO: 3502; WAN024APO_at; Start 17; Stop 41
ttgaatgtctaggtgtggtagcttt

SEQ ID NO: 62698 - DNA, 25 bp, Artificial
  probe
  misc_feature (1)..(25): SEQ ID NO: 3502; WAN024APO_at; Start 25; Stop 49
ctaggtgtggtagctttttacattc

SEQ ID NO: 62699 - DNA, 25 bp, Artificial
  probe
  misc_feature (1)..(25): SEQ ID NO: 3502; WAN024APO_at; Start 31; Stop 55
gtggtagctttttacattctgatag

SEQ ID NO: 62700 - DNA, 25 bp, Artificial
  probe
  misc_feature (1)..(25): SEQ ID NO: 3502; WAN024APO_at; Start 10; Stop 34
cttgtctttgaatgtctaggtgtgg

SEQ ID NO: 62701 - DNA, 25 bp, Artificial
  probe
  misc_feature (1)..(25): SEQ ID NO: 3502; WAN024APO_at; Start 11; Stop 35
ttgtctttgaatgtctaggtgtggt

SEQ ID NO: 62702 - DNA, 25 bp, Artificial
  probe
  misc_feature (1)..(25): SEQ ID NO: 3502; WAN024APO_at; Start 4; Stop 28
tatttccttgtctttgaatgtctag

SEQ ID NO: 62703 - DNA, 25 bp, Artificial
  probe
  misc_feature (1)..(25): SEQ ID NO: 4681; WAN024APP_at; Start 35; Stop 59
cacctagacattcaaagacaaggaa

SEQ ID NO: 62704 - DNA, 25 bp, Artificial
  probe
  misc_feature (1)..(25): SEQ ID NO: 4681; WAN024APP_at; Start 1; Stop 25
tgactcgaatctatcagaatgtaaa

SEQ ID NO: 62705 - DNA, 25 bp, Artificial
  probe
  misc_feature (1)..(25): SEQ ID NO: 4681; WAN024APP_at; Start 37; Stop 61
cctagacattcaaagacaaggaaat

SEQ ID NO: 62706 - DNA, 25 bp, Artificial
  probe
  misc_feature (1)..(25): SEQ ID NO: 4681; WAN024APP_at; Start 8; Stop 32
aatctatcagaatgtaaaaagctac

SEQ ID NO: 62707 - DNA, 25 bp, Artificial
  probe
  misc_feature (1)..(25): SEQ ID NO: 4681; WAN024APP_at; Start 18; Stop 42
aatgtaaaaagctaccacacctaga

SEQ ID NO: 62708 - DNA, 25 bp, Artificial
  probe
  misc_feature (1)..(25): SEQ ID NO: 4681; WAN024APP_at; Start 15; Stop 39
cagaatgtaaaaagctaccacacct

SEQ ID NO: 62709 - DNA, 25 bp, Artificial
  probe
  misc_feature (1)..(25): SEQ ID NO: 4681; WAN024APP_at; Start 23; Stop 47
aaaaagctaccacacctagacattc

SEQ ID NO: 62710 - DNA, 25 bp, Artificial
  probe
  misc_feature (1)..(25): SEQ ID NO: 4681; WAN024APP_at; Start 14; Stop 38
tcagaatgtaaaaagctaccacacc

SEQ ID NO: 62711 - DNA, 25 bp, Artificial
  probe
  misc_feature (1)..(25): SEQ ID NO: 4681; WAN024APP_at; Start 39; Stop 63
tagacattcaaagacaaggaaataa

SEQ ID NO: 62712 - DNA, 25 bp, Artificial
  probe
  misc_feature (1)..(25): SEQ ID NO: 4681; WAN024APP_at; Start 31; Stop 55
accacacctagacattcaaagacaa

SEQ ID NO: 62713 - DNA, 25 bp, Artificial
  probe
  misc_feature (1)..(25): SEQ ID NO: 4681; WAN024APP_at; Start 2; Stop 26
gactcgaatctatcagaatgtaaaa

SEQ ID NO: 62714 - DNA, 25 bp, Artificial
  probe
  misc_feature (1)..(25): SEQ ID NO: 4681; WAN024APP_at; Start 12; Stop 36
tatcagaatgtaaaaagctaccaca

SEQ ID NO: 62715 - DNA, 25 bp, Artificial
  probe
  misc_feature (1)..(25): SEQ ID NO: 4681; WAN024APP_at; Start 24; Stop 48
aaaagctaccacacctagacattca

SEQ ID NO: 62716 - DNA, 25 bp, Artificial
  probe
  misc_feature (1)..(25): SEQ ID NO: 4681; WAN024APP_at; Start 5; Stop 29
tcgaatctatcagaatgtaaaaagc

SEQ ID NO: 62717 - DNA, 25 bp, Artificial
  probe
  misc_feature (1)..(25): SEQ ID NO: 4681; WAN024APP_at; Start 30; Stop 54
taccacacctagacattcaaagaca

SEQ ID NO: 62718 - DNA, 25 bp, Artificial
  probe
  misc_feature (1)..(25): SEQ ID NO: 4681; WAN024APP_at; Start 11; Stop 35
ctatcagaatgtaaaaagctaccac

SEQ ID NO: 62719 - DNA, 25 bp, Artificial
  probe
  misc_feature (1)..(25): SEQ ID NO: 4681; WAN024APP_at; Start 7; Stop 31
gaatctatcagaatgtaaaaagcta

SEQ ID NO: 62720 - DNA, 25 bp, Artificial
  probe
  misc_feature (1)..(25): SEQ ID NO: 4681; WAN024APP_at; Start 25; Stop 49
aaagctaccacacctagacattcaa

SEQ ID NO: 62721 - DNA, 25 bp, Artificial
  probe
  misc_feature (1)..(25): SEQ ID NO: 4681; WAN024APP_at; Start 33; Stop 57
cacacctagacattcaaagacaagg

SEQ ID NO: 62722 - DNA, 25 bp, Artificial
  probe
  misc_feature (1)..(25): SEQ ID NO: 4681; WAN024APP_at; Start 34; Stop 58
acacctagacattcaaagacaagga

SEQ ID NO: 62723 - DNA, 25 bp, Artificial
  probe
  misc_feature (1)..(25): SEQ ID NO: 4681; WAN024APP_at; Start 28; Stop 52
gctaccacacctagacattcaaaga

SEQ ID NO: 62724 - DNA, 25 bp, Artificial
  probe
  misc_feature (1)..(25): SEQ ID NO: 4681; WAN024APP_at; Start 19; Stop 43
atgtaaaaagctaccacacctagac

SEQ ID NO: 62725 - DNA, 25 bp, Artificial
  probe
  misc_feature (1)..(25): SEQ ID NO: 4681; WAN024APP_at; Start 27; Stop 51
agctaccacacctagacattcaaag

SEQ ID NO: 62726 - DNA, 25 bp, Artificial
  probe
  misc_feature (1)..(25): SEQ ID NO: 4681; WAN024APP_at; Start 9; Stop 33
atctatcagaatgtaaaaagctacc

SEQ ID NO: 62727 - DNA, 25 bp, Artificial
  probe
  misc_feature (1)..(25): SEQ ID NO: 4681; WAN024APP_at; Start 26; Stop 50
aagctaccacacctagacattcaaa

SEQ ID NO: 62728 - DNA, 25 bp, Artificial
  probe
  misc_feature (1)..(25): SEQ ID NO: 4681; WAN024APP_at; Start 22; Stop 46
taaaaagctaccacacctagacatt

SEQ ID NO: 62729 - DNA, 25 bp, Artificial
  probe
  misc_feature (1)..(25): SEQ ID NO: 4681; WAN024APP_at; Start 32; Stop 56
ccacacctagacattcaaagacaag

SEQ ID NO: 62730 - DNA, 25 bp, Artificial
  probe
  misc_feature (1)..(25): SEQ ID NO: 4681; WAN024APP_at; Start 41; Stop 65
gacattcaaagacaaggaaataaag

SEQ ID NO: 62731 - DNA, 25 bp, Artificial
  probe
  misc_feature (1)..(25): SEQ ID NO: 4681; WAN024APP_at; Start 10; Stop 34
tctatcagaatgtaaaaagctacca

SEQ ID NO: 62732 - DNA, 25 bp, Artificial
  probe
  misc_feature (1)..(25): SEQ ID NO: 4681; WAN024APP_at; Start 17; Stop 41
gaatgtaaaaagctaccacacctag

SEQ ID NO: 62733 - DNA, 25 bp, Artificial
  probe
  misc_feature (1)..(25): SEQ ID NO: 4681; WAN024APP_at; Start 20; Stop 44
tgtaaaaagctaccacacctagaca

SEQ ID NO: 62734 - DNA, 25 bp, Artificial
  probe
  misc_feature (1)..(25): SEQ ID NO: 4681; WAN024APP_at; Start 38; Stop 62
ctagacattcaaagacaaggaaata

SEQ ID NO: 62735 - DNA, 25 bp, Artificial
  probe
  misc_feature (1)..(25): SEQ ID NO: 4681; WAN024APP_at; Start 6; Stop 30
cgaatctatcagaatgtaaaaagct

SEQ ID NO: 62736 - DNA, 25 bp, Artificial
  probe
  misc_feature (1)..(25): SEQ ID NO: 4681; WAN024APP_at; Start 21; Stop 45
gtaaaaagctaccacacctagacat

SEQ ID NO: 62737 - DNA, 25 bp, Artificial
  probe
  misc_feature (1)..(25): SEQ ID NO: 3301; WAN024APQ_at; Start 12; Stop 36
ataccaaaattcgctaattttgtca

SEQ ID NO: 62738 - DNA, 25 bp, Artificial
  probe
  misc_feature (1)..(25): SEQ ID NO: 3301; WAN024APQ_at; Start 15; Stop 39
ccaaaattcgctaattttgtcagtt

SEQ ID NO: 62739 - DNA, 25 bp, Artificial
  probe
  misc_feature (1)..(25): SEQ ID NO: 3301; WAN024APQ_at; Start 9; Stop 33
attataccaaaattcgctaattttg

SEQ ID NO: 62740 - DNA, 25 bp, Artificial
  probe
  misc_feature (1)..(25): SEQ ID NO: 3301; WAN024APQ_at; Start 7; Stop 31
atattataccaaaattcgctaattt

SEQ ID NO: 62741 - DNA, 25 bp, Artificial
  probe
  misc_feature (1)..(25): SEQ ID NO: 3301; WAN024APQ_at; Start 32; Stop 56
tgtcagtttttacaaattttactgc

SEQ ID NO: 62742 - DNA, 25 bp, Artificial
  probe
  misc_feature (1)..(25): SEQ ID NO: 3301; WAN024APQ_at; Start 3; Stop 27
cacgatattataccaaaattcgcta

SEQ ID NO: 62743 - DNA, 25 bp, Artificial
  probe
  misc_feature (1)..(25): SEQ ID NO: 3301; WAN024APQ_at; Start 6; Stop 30
gatattataccaaaattcgctaatt

SEQ ID NO: 62744 - DNA, 25 bp, Artificial
  probe
  misc_feature (1)..(25): SEQ ID NO: 3301; WAN024APQ_at; Start 1; Stop 25
ctcacgatattataccaaaattcgc

SEQ ID NO: 62745 - DNA, 25 bp, Artificial
  probe
  misc_feature (1)..(25): SEQ ID NO: 3301; WAN024APQ_at; Start 4; Stop 28
acgatattataccaaaattcgctaa

SEQ ID NO: 62746 - DNA, 25 bp, Artificial
  probe
  misc_feature (1)..(25): SEQ ID NO: 3301; WAN024APQ_at; Start 5; Stop 29
cgatattataccaaaattcgctaat

SEQ ID NO: 62747 - DNA, 25 bp, Artificial
  probe
  misc_feature (1)..(25): SEQ ID NO: 3301; WAN024APQ_at; Start 14; Stop 38
accaaaattcgctaattttgtcagt

SEQ ID NO: 62748 - DNA, 25 bp, Artificial
  probe
  misc_feature (1)..(25): SEQ ID NO: 3301; WAN024APQ_at; Start 42; Stop 66
tacaaattttactgcttttgtggta

SEQ ID NO: 62749 - DNA, 25 bp, Artificial
  probe
  misc_feature (1)..(25): SEQ ID NO: 3301; WAN024APQ_at; Start 21; Stop 45
ttcgctaattttgtcagtttttaca

SEQ ID NO: 62750 - DNA, 25 bp, Artificial
  probe
  misc_feature (1)..(25): SEQ ID NO: 3301; WAN024APQ_at; Start 46; Stop 70
aattttactgcttttgtggtacaat

SEQ ID NO: 62751 - DNA, 25 bp, Artificial
  probe
  misc_feature (1)..(25): SEQ ID NO: 3301; WAN024APQ_at; Start 47; Stop 71
attttactgcttttgtggtacaata

SEQ ID NO: 62752 - DNA, 25 bp, Artificial
  probe
  misc_feature (1)..(25): SEQ ID NO: 3301; WAN024APQ_at; Start 16; Stop 40
caaaattcgctaattttgtcagttt

SEQ ID NO: 62753 - DNA, 25 bp, Artificial
  probe
  misc_feature (1)..(25): SEQ ID NO: 3301; WAN024APQ_at; Start 44; Stop 68
caaattttactgcttttgtggtaca

SEQ ID NO: 62754 - DNA, 25 bp, Artificial
  probe
  misc_feature (1)..(25): SEQ ID NO: 3301; WAN024APQ_at; Start 2; Stop 26
tcacgatattataccaaaattcgct

SEQ ID NO: 62755 - DNA, 25 bp, Artificial
  probe
  misc_feature (1)..(25): SEQ ID NO: 3301; WAN024APQ_at; Start 13; Stop 37
taccaaaattcgctaattttgtcag

SEQ ID NO: 62756 - DNA, 25 bp, Artificial
  probe
  misc_feature (1)..(25): SEQ ID NO: 3301; WAN024APQ_at; Start 22; Stop 46
tcgctaattttgtcagtttttacaa

SEQ ID NO: 62757 - DNA, 25 bp, Artificial
  probe
  misc_feature (1)..(25): SEQ ID NO: 3301; WAN024APQ_at; Start 11; Stop 35
tataccaaaattcgctaattttgtc

SEQ ID NO: 62758 - DNA, 25 bp, Artificial
  probe
  misc_feature (1)..(25): SEQ ID NO: 506; WAN024APR_at; Start 50; Stop 74
ttagcgaattttggtataatatcgt

SEQ ID NO: 62759 - DNA, 25 bp, Artificial
  probe
  misc_feature (1)..(25): SEQ ID NO: 506; WAN024APR_at; Start 10; Stop 34
tgtaccacaaaagcagtaaaatttg

SEQ ID NO: 62760 - DNA, 25 bp, Artificial
  probe
  misc_feature (1)..(25): SEQ ID NO: 506; WAN024APR_at; Start 49; Stop 73
attagcgaattttggtataatatcg

SEQ ID NO: 62761 - DNA, 25 bp, Artificial
  probe
  misc_feature (1)..(25): SEQ ID NO: 506; WAN024APR_at; Start 53; Stop 77
gcgaattttggtataatatcgtgag

SEQ ID NO: 62762 - DNA, 25 bp, Artificial
  probe
  misc_feature (1)..(25): SEQ ID NO: 506; WAN024APR_at; Start 22; Stop 46
gcagtaaaatttgtaaaaactgaca

SEQ ID NO: 62763 - DNA, 25 bp, Artificial
  probe
  misc_feature (1)..(25): SEQ ID NO: 506; WAN024APR_at; Start 51; Stop 75
tagcgaattttggtataatatcgtg

SEQ ID NO: 62764 - DNA, 25 bp, Artificial
  probe
  misc_feature (1)..(25): SEQ ID NO: 506; WAN024APR_at; Start 41; Stop 65
ctgacaaaattagcgaattttggta

SEQ ID NO: 62765 - DNA, 25 bp, Artificial
  probe
  misc_feature (1)..(25): SEQ ID NO: 506; WAN024APR_at; Start 40; Stop 64
actgacaaaattagcgaattttggt

SEQ ID NO: 62766 - DNA, 25 bp, Artificial
  probe
  misc_feature (1)..(25): SEQ ID NO: 506; WAN024APR_at; Start 45; Stop 69
caaaattagcgaattttggtataat

SEQ ID NO: 62767 - DNA, 25 bp, Artificial
  probe
  misc_feature (1)..(25): SEQ ID NO: 506; WAN024APR_at; Start 12; Stop 36
taccacaaaagcagtaaaatttgta

SEQ ID NO: 62768 - DNA, 25 bp, Artificial
  probe
  misc_feature (1)..(25): SEQ ID NO: 506; WAN024APR_at; Start 42; Stop 66
tgacaaaattagcgaattttggtat

SEQ ID NO: 62769 - DNA, 25 bp, Artificial
  probe
  misc_feature (1)..(25): SEQ ID NO: 506; WAN024APR_at; Start 38; Stop 62
aaactgacaaaattagcgaattttg

SEQ ID NO: 62770 - DNA, 25 bp, Artificial
  probe
  misc_feature (1)..(25): SEQ ID NO: 506; WAN024APR_at; Start 33; Stop 57
tgtaaaaactgacaaaattagcgaa

SEQ ID NO: 62771 - DNA, 25 bp, Artificial
  probe
  misc_feature (1)..(25): SEQ ID NO: 506; WAN024APR_at; Start 47; Stop 71
aaattagcgaattttggtataatat

SEQ ID NO: 62772 - DNA, 25 bp, Artificial
  probe
  misc_feature (1)..(25): SEQ ID NO: 506; WAN024APR_at; Start 8; Stop 32
attgtaccacaaaagcagtaaaatt

SEQ ID NO: 62773 - DNA, 25 bp, Artificial
  probe
  misc_feature (1)..(25): SEQ ID NO: 506; WAN024APR_at; Start 32; Stop 56
ttgtaaaaactgacaaaattagcga

SEQ ID NO: 62774 - DNA, 25 bp, Artificial
  probe
  misc_feature (1)..(25): SEQ ID NO: 506; WAN024APR_at; Start 52; Stop 76
agcgaattttggtataatatcgtga

SEQ ID NO: 62775 - DNA, 25 bp, Artificial
  probe
  misc_feature (1)..(25): SEQ ID NO: 506; WAN024APR_at; Start 7; Stop 31
tattgtaccacaaaagcagtaaaat

SEQ ID NO: 62776 - DNA, 25 bp, Artificial
  probe
  misc_feature (1)..(25): SEQ ID NO: 506; WAN024APR_at; Start 39; Stop 63
aactgacaaaattagcgaattttgg

SEQ ID NO: 62777 - DNA, 25 bp, Artificial
  probe
  misc_feature (1)..(25): SEQ ID NO: 506; WAN024APR_at; Start 43; Stop 67
gacaaaattagcgaattttggtata

SEQ ID NO: 62778 - DNA, 25 bp, Artificial
  probe
  misc_feature (1)..(25): SEQ ID NO: 506; WAN024APR_at; Start 48; Stop 72
aattagcgaattttggtataatatc

SEQ ID NO: 62779 - DNA, 25 bp, Artificial
  probe
  misc_feature (1)..(25): SEQ ID NO: 4654; WAN024APS_at; Start 131; Stop 155
caattttagactactttggatatct

SEQ ID NO: 62780 - DNA, 25 bp, Artificial
  probe
  misc_feature (1)..(25): SEQ ID NO: 4654; WAN024APS_at; Start 142; Stop 166
tactttggatatcttttggttagtc

SEQ ID NO: 62781 - DNA, 25 bp, Artificial
  probe
  misc_feature (1)..(25): SEQ ID NO: 4654; WAN024APS_at; Start 81; Stop 105
attatagacaacaagcctttttcct

SEQ ID NO: 62782 - DNA, 25 bp, Artificial
  probe
  misc_feature (1)..(25): SEQ ID NO: 4654; WAN024APS_at; Start 126; Stop 150
atagacaattttagactactttgga

SEQ ID NO: 62783 - DNA, 25 bp, Artificial
  probe
  misc_feature (1)..(25): SEQ ID NO: 4654; WAN024APS_at; Start 151; Stop 175
tatcttttggttagtcattttccaa

SEQ ID NO: 62784 - DNA, 25 bp, Artificial
  probe
  misc_feature (1)..(25): SEQ ID NO: 4654; WAN024APS_at; Start 45; Stop 69
cattttctataaataaaatctagac

SEQ ID NO: 62785 - DNA, 25 bp, Artificial
  probe
  misc_feature (1)..(25): SEQ ID NO: 4654; WAN024APS_at; Start 102; Stop 126
tcctaactaaaacactcataaagta

SEQ ID NO: 62786 - DNA, 25 bp, Artificial
  probe
  misc_feature (1)..(25): SEQ ID NO: 4654; WAN024APS_at; Start 109; Stop 133
taaaacactcataaagtatagacaa

SEQ ID NO: 62787 - DNA, 25 bp, Artificial
  probe
  misc_feature (1)..(25): SEQ ID NO: 4654; WAN024APS_at; Start 83; Stop 107
tatagacaacaagcctttttcctaa

SEQ ID NO: 62788 - DNA, 25 bp, Artificial
  probe
  misc_feature (1)..(25): SEQ ID NO: 4654; WAN024APS_at; Start 82; Stop 106
ttatagacaacaagcctttttccta

SEQ ID NO: 62789 - DNA, 25 bp, Artificial
  probe
  misc_feature (1)..(25): SEQ ID NO: 4654; WAN024APS_at; Start 129; Stop 153
gacaattttagactactttggatat

SEQ ID NO: 62790 - DNA, 25 bp, Artificial
  probe
  misc_feature (1)..(25): SEQ ID NO: 4654; WAN024APS_at; Start 143; Stop 167
actttggatatcttttggttagtca

SEQ ID NO: 62791 - DNA, 25 bp, Artificial
  probe
  misc_feature (1)..(25): SEQ ID NO: 4654; WAN024APS_at; Start 105; Stop 129
taactaaaacactcataaagtatag

SEQ ID NO: 62792 - DNA, 25 bp, Artificial
  probe
  misc_feature (1)..(25): SEQ ID NO: 4654; WAN024APS_at; Start 149; Stop 173
gatatcttttggttagtcattttcc

SEQ ID NO: 62793 - DNA, 25 bp, Artificial
  probe
  misc_feature (1)..(25): SEQ ID NO: 4654; WAN024APS_at; Start 30; Stop 54
tacagtctattataacattttctat

SEQ ID NO: 62794 - DNA, 25 bp, Artificial
  probe
  misc_feature (1)..(25): SEQ ID NO: 4654; WAN024APS_at; Start 130; Stop 154
acaattttagactactttggatatc

SEQ ID NO: 62795 - DNA, 25 bp, Artificial
  probe
  misc_feature (1)..(25): SEQ ID NO: 4654; WAN024APS_at; Start 111; Stop 135
aaacactcataaagtatagacaatt

SEQ ID NO: 62796 - DNA, 25 bp, Artificial
  probe
  misc_feature (1)..(25): SEQ ID NO: 4654; WAN024APS_at; Start 118; Stop 142
cataaagtatagacaattttagact

SEQ ID NO: 62797 - DNA, 25 bp, Artificial
  probe
  misc_feature (1)..(25): SEQ ID NO: 4654; WAN024APS_at; Start 140; Stop 164
actactttggatatcttttggttag

SEQ ID NO: 62798 - DNA, 25 bp, Artificial
  probe
  misc_feature (1)..(25): SEQ ID NO: 4654; WAN024APS_at; Start 120; Stop 144
taaagtatagacaattttagactac

SEQ ID NO: 62799 - DNA, 25 bp, Artificial
  probe
  misc_feature (1)..(25): SEQ ID NO: 4654; WAN024APS_at; Start 137; Stop 161
tagactactttggatatcttttggt

SEQ ID NO: 62800 - DNA, 25 bp, Artificial
  probe
  misc_feature (1)..(25): SEQ ID NO: 4654; WAN024APS_at; Start 139; Stop 163
gactactttggatatcttttggtta

SEQ ID NO: 62801 - DNA, 25 bp, Artificial
  probe
  misc_feature (1)..(25): SEQ ID NO: 4654; WAN024APS_at; Start 148; Stop 172
ggatatcttttggttagtcattttc

SEQ ID NO: 62802 - DNA, 25 bp, Artificial
  probe
  misc_feature (1)..(25): SEQ ID NO: 4654; WAN024APS_at; Start 136; Stop 160
ttagactactttggatatcttttgg

SEQ ID NO: 62803 - DNA, 25 bp, Artificial
  probe
  misc_feature (1)..(25): SEQ ID NO: 4654; WAN024APS_at; Start 79; Stop 103
caattatagacaacaagcctttttc

SEQ ID NO: 62804 - DNA, 25 bp, Artificial
  probe
  misc_feature (1)..(25): SEQ ID NO: 4654; WAN024APS_at; Start 128; Stop 152
agacaattttagactactttggata

SEQ ID NO: 62805 - DNA, 25 bp, Artificial
  probe
  misc_feature (1)..(25): SEQ ID NO: 4654; WAN024APS_at; Start 107; Stop 131
actaaaacactcataaagtatagac

SEQ ID NO: 62806 - DNA, 25 bp, Artificial
  probe
  misc_feature (1)..(25): SEQ ID NO: 4654; WAN024APS_at; Start 125; Stop 149
tatagacaattttagactactttgg

SEQ ID NO: 62807 - DNA, 25 bp, Artificial
  probe
  misc_feature (1)..(25): SEQ ID NO: 4654; WAN024APS_at; Start 103; Stop 127
cctaactaaaacactcataaagtat

SEQ ID NO: 62808 - DNA, 25 bp, Artificial
  probe
  misc_feature (1)..(25): SEQ ID NO: 4654; WAN024APS_at; Start 52; Stop 76
tataaataaaatctagactaatgca

SEQ ID NO: 62809 - DNA, 25 bp, Artificial
  probe
  misc_feature (1)..(25): SEQ ID NO: 4654; WAN024APS_at; Start 144; Stop 168
ctttggatatcttttggttagtcat

SEQ ID NO: 62810 - DNA, 25 bp, Artificial
  probe
  misc_feature (1)..(25): SEQ ID NO: 4654; WAN024APS_at; Start 114; Stop 138
cactcataaagtatagacaatttta

SEQ ID NO: 62811 - DNA, 25 bp, Artificial
  probe
  misc_feature (1)..(25): SEQ ID NO: 4654; WAN024APS_at; Start 53; Stop 77
ataaataaaatctagactaatgcag

SEQ ID NO: 62812 - DNA, 25 bp, Artificial
  probe
  misc_feature (1)..(25): SEQ ID NO: 4654; WAN024APS_at; Start 127; Stop 151
tagacaattttagactactttggat

SEQ ID NO: 62813 - DNA, 25 bp, Artificial
  probe
  misc_feature (1)..(25): SEQ ID NO: 99; WAN024APT_at; Start 46; Stop 70
ccaaagtagtctaaaattgtctata

SEQ ID NO: 62814 - DNA, 25 bp, Artificial
  probe
  misc_feature (1)..(25): SEQ ID NO: 99; WAN024APT_at; Start 140; Stop 164
tatagaaaatgttataatagactgt

SEQ ID NO: 62815 - DNA, 25 bp, Artificial
  probe
  misc_feature (1)..(25): SEQ ID NO: 99; WAN024APT_at; Start 31; Stop 55
ctaaccaaaagatatccaaagtagt

SEQ ID NO: 62816 - DNA, 25 bp, Artificial
  probe
  misc_feature (1)..(25): SEQ ID NO: 99; WAN024APT_at; Start 35; Stop 59
ccaaaagatatccaaagtagtctaa

SEQ ID NO: 62817 - DNA, 25 bp, Artificial
  probe
  misc_feature (1)..(25): SEQ ID NO: 99; WAN024APT_at; Start 34; Stop 58
accaaaagatatccaaagtagtcta

SEQ ID NO: 62818 - DNA, 25 bp, Artificial
  probe
  misc_feature (1)..(25): SEQ ID NO: 99; WAN024APT_at; Start 29; Stop 53
gactaaccaaaagatatccaaagta

SEQ ID NO: 62819 - DNA, 25 bp, Artificial
  probe
  misc_feature (1)..(25): SEQ ID NO: 99; WAN024APT_at; Start 23; Stop 47
gaaaatgactaaccaaaagatatcc

SEQ ID NO: 62820 - DNA, 25 bp, Artificial
  probe
  misc_feature (1)..(25): SEQ ID NO: 99; WAN024APT_at; Start 51; Stop 75
gtagtctaaaattgtctatacttta

SEQ ID NO: 62821 - DNA, 25 bp, Artificial
  probe
  misc_feature (1)..(25): SEQ ID NO: 99; WAN024APT_at; Start 69; Stop 93
tactttatgagtgttttagttagga

SEQ ID NO: 62822 - DNA, 25 bp, Artificial
  probe
  misc_feature (1)..(25): SEQ ID NO: 99; WAN024APT_at; Start 26; Stop 50
aatgactaaccaaaagatatccaaa

SEQ ID NO: 62823 - DNA, 25 bp, Artificial
  probe
  misc_feature (1)..(25): SEQ ID NO: 99; WAN024APT_at; Start 92; Stop 116
gaaaaaggcttgttgtctataattg

SEQ ID NO: 62824 - DNA, 25 bp, Artificial
  probe
  misc_feature (1)..(25): SEQ ID NO: 99; WAN024APT_at; Start 36; Stop 60
caaaagatatccaaagtagtctaaa

SEQ ID NO: 62825 - DNA, 25 bp, Artificial
  probe
  misc_feature (1)..(25): SEQ ID NO: 99; WAN024APT_at; Start 25; Stop 49
aaatgactaaccaaaagatatccaa

SEQ ID NO: 62826 - DNA, 25 bp, Artificial
  probe
  misc_feature (1)..(25): SEQ ID NO: 99; WAN024APT_at; Start 32; Stop 56
taaccaaaagatatccaaagtagtc

SEQ ID NO: 62827 - DNA, 25 bp, Artificial
  probe
  misc_feature (1)..(25): SEQ ID NO: 99; WAN024APT_at; Start 22; Stop 46
ggaaaatgactaaccaaaagatatc

SEQ ID NO: 62828 - DNA, 25 bp, Artificial
  probe
  misc_feature (1)..(25): SEQ ID NO: 99; WAN024APT_at; Start 6; Stop 30
tagataaattagttttggaaaatga

SEQ ID NO: 62829 - DNA, 25 bp, Artificial
  probe
  misc_feature (1)..(25): SEQ ID NO: 99; WAN024APT_at; Start 89; Stop 113
taggaaaaaggcttgttgtctataa

SEQ ID NO: 62830 - DNA, 25 bp, Artificial
  probe
  misc_feature (1)..(25): SEQ ID NO: 99; WAN024APT_at; Start 28; Stop 52
tgactaaccaaaagatatccaaagt

SEQ ID NO: 62831 - DNA, 25 bp, Artificial
  probe
  misc_feature (1)..(25): SEQ ID NO: 99; WAN024APT_at; Start 58; Stop 82
aaaattgtctatactttatgagtgt

SEQ ID NO: 62832 - DNA, 25 bp, Artificial
  probe
  misc_feature (1)..(25): SEQ ID NO: 99; WAN024APT_at; Start 21; Stop 45
tggaaaatgactaaccaaaagatat

SEQ ID NO: 62833 - DNA, 25 bp, Artificial
  probe
  misc_feature (1)..(25): SEQ ID NO: 99; WAN024APT_at; Start 120; Stop 144
gcattagtctagattttatttatag

SEQ ID NO: 62834 - DNA, 25 bp, Artificial
  probe
  misc_feature (1)..(25): SEQ ID NO: 99; WAN024APT_at; Start 27; Stop 51
atgactaaccaaaagatatccaaag

SEQ ID NO: 62835 - DNA, 25 bp, Artificial
  probe
  misc_feature (1)..(25): SEQ ID NO: 99; WAN024APT_at; Start 47; Stop 71
caaagtagtctaaaattgtctatac

SEQ ID NO: 62836 - DNA, 25 bp, Artificial
  probe
  misc_feature (1)..(25): SEQ ID NO: 99; WAN024APT_at; Start 41; Stop 65
gatatccaaagtagtctaaaattgt

SEQ ID NO: 62837 - DNA, 25 bp, Artificial
  probe
  misc_feature (1)..(25): SEQ ID NO: 99; WAN024APT_at; Start 38; Stop 62
aaagatatccaaagtagtctaaaat

SEQ ID NO: 62838 - DNA, 25 bp, Artificial
  probe
  misc_feature (1)..(25): SEQ ID NO: 99; WAN024APT_at; Start 33; Stop 57
aaccaaaagatatccaaagtagtct

SEQ ID NO: 62839 - DNA, 25 bp, Artificial
  probe
  misc_feature (1)..(25): SEQ ID NO: 99; WAN024APT_at; Start 48; Stop 72
aaagtagtctaaaattgtctatact

SEQ ID NO: 62840 - DNA, 25 bp, Artificial
  probe
  misc_feature (1)..(25): SEQ ID NO: 99; WAN024APT_at; Start 57; Stop 81
taaaattgtctatactttatgagtg

SEQ ID NO: 62841 - DNA, 25 bp, Artificial
  probe
  misc_feature (1)..(25): SEQ ID NO: 99; WAN024APT_at; Start 45; Stop 69
tccaaagtagtctaaaattgtctat

SEQ ID NO: 62842 - DNA, 25 bp, Artificial
  probe
  misc_feature (1)..(25): SEQ ID NO: 99; WAN024APT_at; Start 63; Stop 87
tgtctatactttatgagtgttttag

SEQ ID NO: 62843 - DNA, 25 bp, Artificial
  probe
  misc_feature (1)..(25): SEQ ID NO: 99; WAN024APT_at; Start 24; Stop 48
aaaatgactaaccaaaagatatcca

SEQ ID NO: 62844 - DNA, 25 bp, Artificial
  probe
  misc_feature (1)..(25): SEQ ID NO: 99; WAN024APT_at; Start 40; Stop 64
agatatccaaagtagtctaaaattg

SEQ ID NO: 62845 - DNA, 25 bp, Artificial
  probe
  misc_feature (1)..(25): SEQ ID NO: 99; WAN024APT_at; Start 30; Stop 54
actaaccaaaagatatccaaagtag

SEQ ID NO: 62846 - DNA, 25 bp, Artificial
  probe
  misc_feature (1)..(25): SEQ ID NO: 99; WAN024APT_at; Start 43; Stop 67
tatccaaagtagtctaaaattgtct

SEQ ID NO: 62847 - DNA, 25 bp, Artificial
  probe
  misc_feature (1)..(25): SEQ ID NO: 4589; WAN024APU_at; Start 7; Stop 31
tctccttttcctatttgagggacat

SEQ ID NO: 62848 - DNA, 25 bp, Artificial
  probe
  misc_feature (1)..(25): SEQ ID NO: 4589; WAN024APU_at; Start 22; Stop 46
tgagggacatatatactagatgaca

SEQ ID NO: 62849 - DNA, 25 bp, Artificial
  probe
  misc_feature (1)..(25): SEQ ID NO: 4589; WAN024APU_at; Start 2; Stop 26
caatttctccttttcctatttgagg

SEQ ID NO: 62850 - DNA, 25 bp, Artificial
  probe
  misc_feature (1)..(25): SEQ ID NO: 4589; WAN024APU_at; Start 27; Stop 51
gacatatatactagatgacaaatga

SEQ ID NO: 62851 - DNA, 25 bp, Artificial
  probe
  misc_feature (1)..(25): SEQ ID NO: 4589; WAN024APU_at; Start 9; Stop 33
tccttttcctatttgagggacatat

SEQ ID NO: 62852 - DNA, 25 bp, Artificial
  probe
  misc_feature (1)..(25): SEQ ID NO: 4589; WAN024APU_at; Start 19; Stop 43
atttgagggacatatatactagatg

SEQ ID NO: 62853 - DNA, 25 bp, Artificial
  probe
  misc_feature (1)..(25): SEQ ID NO: 4589; WAN024APU_at; Start 23; Stop 47
gagggacatatatactagatgacaa

SEQ ID NO: 62854 - DNA, 25 bp, Artificial
  probe
  misc_feature (1)..(25): SEQ ID NO: 4589; WAN024APU_at; Start 10; Stop 34
ccttttcctatttgagggacatata

SEQ ID NO: 62855 - DNA, 25 bp, Artificial
  probe
  misc_feature (1)..(25): SEQ ID NO: 4589; WAN024APU_at; Start 18; Stop 42
tatttgagggacatatatactagat

SEQ ID NO: 62856 - DNA, 25 bp, Artificial
  probe
  misc_feature (1)..(25): SEQ ID NO: 4589; WAN024APU_at; Start 1; Stop 25
tcaatttctccttttcctatttgag

SEQ ID NO: 62857 - DNA, 25 bp, Artificial
  probe
  misc_feature (1)..(25): SEQ ID NO: 4589; WAN024APU_at; Start 17; Stop 41
ctatttgagggacatatatactaga

SEQ ID NO: 62858 - DNA, 25 bp, Artificial
  probe
  misc_feature (1)..(25): SEQ ID NO: 4589; WAN024APU_at; Start 16; Stop 40
cctatttgagggacatatatactag

SEQ ID NO: 62859 - DNA, 25 bp, Artificial
  probe
  misc_feature (1)..(25): SEQ ID NO: 4589; WAN024APU_at; Start 12; Stop 36
ttttcctatttgagggacatatata

SEQ ID NO: 62860 - DNA, 25 bp, Artificial
  probe
  misc_feature (1)..(25): SEQ ID NO: 4589; WAN024APU_at; Start 8; Stop 32
ctccttttcctatttgagggacata

SEQ ID NO: 62861 - DNA, 25 bp, Artificial
  probe
  misc_feature (1)..(25): SEQ ID NO: 4589; WAN024APU_at; Start 21; Stop 45
ttgagggacatatatactagatgac

SEQ ID NO: 62862 - DNA, 25 bp, Artificial
  probe
  misc_feature (1)..(25): SEQ ID NO: 4589; WAN024APU_at; Start 28; Stop 52
acatatatactagatgacaaatgac

SEQ ID NO: 62863 - DNA, 25 bp, Artificial
  probe
  misc_feature (1)..(25): SEQ ID NO: 4589; WAN024APU_at; Start 24; Stop 48
agggacatatatactagatgacaaa

SEQ ID NO: 62864 - DNA, 25 bp, Artificial
  probe
  misc_feature (1)..(25): SEQ ID NO: 4589; WAN024APU_at; Start 25; Stop 49
gggacatatatactagatgacaaat

SEQ ID NO: 62865 - DNA, 25 bp, Artificial
  probe
  misc_feature (1)..(25): SEQ ID NO: 4589; WAN024APU_at; Start 6; Stop 30
ttctccttttcctatttgagggaca

SEQ ID NO: 62866 - DNA, 25 bp, Artificial
  probe
  misc_feature (1)..(25): SEQ ID NO: 4589; WAN024APU_at; Start 15; Stop 39
tcctatttgagggacatatatacta

SEQ ID NO: 62867 - DNA, 25 bp, Artificial
  probe
  misc_feature (1)..(25): SEQ ID NO: 4589; WAN024APU_at; Start 26; Stop 50
ggacatatatactagatgacaaatg

SEQ ID NO: 62868 - DNA, 25 bp, Artificial
  probe
  misc_feature (1)..(25): SEQ ID NO: 4589; WAN024APU_at; Start 20; Stop 44
tttgagggacatatatactagatga

SEQ ID NO: 62869 - DNA, 25 bp, Artificial
  probe
  misc_feature (1)..(25): SEQ ID NO: 4589; WAN024APU_at; Start 14; Stop 38
ttcctatttgagggacatatatact

SEQ ID NO: 62870 - DNA, 25 bp, Artificial
  probe
  misc_feature (1)..(25): SEQ ID NO: 4589; WAN024APU_at; Start 13; Stop 37
tttcctatttgagggacatatatac

SEQ ID NO: 62871 - DNA, 25 bp, Artificial
  probe
  misc_feature (1)..(25): SEQ ID NO: 4589; WAN024APU_at; Start 11; Stop 35
cttttcctatttgagggacatatat

SEQ ID NO: 62872 - DNA, 25 bp, Artificial
  probe
  misc_feature (1)..(25): SEQ ID NO: 5011; WAN024APV_at; Start 17; Stop 41
gtcatctagtatatatgtccctcaa

SEQ ID NO: 62873 - DNA, 25 bp, Artificial
  probe
  misc_feature (1)..(25): SEQ ID NO: 5011; WAN024APV_at; Start 10; Stop 34
gtcatttgtcatctagtatatatgt

SEQ ID NO: 62874 - DNA, 25 bp, Artificial
  probe
  misc_feature (1)..(25): SEQ ID NO: 5011; WAN024APV_at; Start 16; Stop 40
tgtcatctagtatatatgtccctca

SEQ ID NO: 62875 - DNA, 25 bp, Artificial
  probe
  misc_feature (1)..(25): SEQ ID NO: 5011; WAN024APV_at; Start 19; Stop 43
catctagtatatatgtccctcaaat

SEQ ID NO: 62876 - DNA, 25 bp, Artificial
  probe
  misc_feature (1)..(25): SEQ ID NO: 5011; WAN024APV_at; Start 25; Stop 49
gtatatatgtccctcaaataggaaa

SEQ ID NO: 62877 - DNA, 25 bp, Artificial
  probe
  misc_feature (1)..(25): SEQ ID NO: 5011; WAN024APV_at; Start 26; Stop 50
tatatatgtccctcaaataggaaaa

SEQ ID NO: 62878 - DNA, 25 bp, Artificial
  probe
  misc_feature (1)..(25): SEQ ID NO: 5011; WAN024APV_at; Start 36; Stop 60
cctcaaataggaaaaggagaaattg

SEQ ID NO: 62879 - DNA, 25 bp, Artificial
  probe
  misc_feature (1)..(25): SEQ ID NO: 5011; WAN024APV_at; Start 24; Stop 48
agtatatatgtccctcaaataggaa

SEQ ID NO: 62880 - DNA, 25 bp, Artificial
  probe
  misc_feature (1)..(25): SEQ ID NO: 5011; WAN024APV_at; Start 15; Stop 39
ttgtcatctagtatatatgtccctc

SEQ ID NO: 62881 - DNA, 25 bp, Artificial
  probe
  misc_feature (1)..(25): SEQ ID NO: 5011; WAN024APV_at; Start 21; Stop 45
tctagtatatatgtccctcaaatag

SEQ ID NO: 62882 - DNA, 25 bp, Artificial
  probe
  misc_feature (1)..(25): SEQ ID NO: 5011; WAN024APV_at; Start 37; Stop 61
ctcaaataggaaaaggagaaattga

SEQ ID NO: 62883 - DNA, 25 bp, Artificial
  probe
  misc_feature (1)..(25): SEQ ID NO: 5011; WAN024APV_at; Start 32; Stop 56
tgtccctcaaataggaaaaggagaa

SEQ ID NO: 62884 - DNA, 25 bp, Artificial
  probe
  misc_feature (1)..(25): SEQ ID NO: 5011; WAN024APV_at; Start 23; Stop 47
tagtatatatgtccctcaaatagga

SEQ ID NO: 62885 - DNA, 25 bp, Artificial
  probe
  misc_feature (1)..(25): SEQ ID NO: 5011; WAN024APV_at; Start 28; Stop 52
tatatgtccctcaaataggaaaagg

SEQ ID NO: 62886 - DNA, 25 bp, Artificial
  probe
  misc_feature (1)..(25): SEQ ID NO: 5011; WAN024APV_at; Start 29; Stop 53
atatgtccctcaaataggaaaagga

SEQ ID NO: 62887 - DNA, 25 bp, Artificial
  probe
  misc_feature (1)..(25): SEQ ID NO: 5011; WAN024APV_at; Start 12; Stop 36
catttgtcatctagtatatatgtcc

SEQ ID NO: 62888 - DNA, 25 bp, Artificial
  probe
  misc_feature (1)..(25): SEQ ID NO: 5011; WAN024APV_at; Start 18; Stop 42
tcatctagtatatatgtccctcaaa

SEQ ID NO: 62889 - DNA, 25 bp, Artificial
  probe
  misc_feature (1)..(25): SEQ ID NO: 5011; WAN024APV_at; Start 20; Stop 44
atctagtatatatgtccctcaaata

SEQ ID NO: 62890 - DNA, 25 bp, Artificial
  probe
  misc_feature (1)..(25): SEQ ID NO: 5011; WAN024APV_at; Start 22; Stop 46
ctagtatatatgtccctcaaatagg

SEQ ID NO: 62891 - DNA, 25 bp, Artificial
  probe
  misc_feature (1)..(25): SEQ ID NO: 5011; WAN024APV_at; Start 30; Stop 54
tatgtccctcaaataggaaaaggag

SEQ ID NO: 62892 - DNA, 25 bp, Artificial
  probe
  misc_feature (1)..(25): SEQ ID NO: 5011; WAN024APV_at; Start 11; Stop 35
tcatttgtcatctagtatatatgtc

SEQ ID NO: 62893 - DNA, 25 bp, Artificial
  probe
  misc_feature (1)..(25): SEQ ID NO: 5011; WAN024APV_at; Start 14; Stop 38
tttgtcatctagtatatatgtccct

SEQ ID NO: 62894 - DNA, 25 bp, Artificial
  probe
  misc_feature (1)..(25): SEQ ID NO: 5011; WAN024APV_at; Start 13; Stop 37
atttgtcatctagtatatatgtccc

SEQ ID NO: 62895 - DNA, 25 bp, Artificial
  probe
  misc_feature (1)..(25): SEQ ID NO: 5011; WAN024APV_at; Start 31; Stop 55
atgtccctcaaataggaaaaggaga

SEQ ID NO: 62896 - DNA, 25 bp, Artificial
  probe
  misc_feature (1)..(25): SEQ ID NO: 5011; WAN024APV_at; Start 27; Stop 51
atatatgtccctcaaataggaaaag

SEQ ID NO: 62897 - DNA, 25 bp, Artificial
  probe
  misc_feature (1)..(25): SEQ ID NO: 426; WAN024APW_at; Start 68; Stop 92
tagagaatagctttccactttctat

SEQ ID NO: 62898 - DNA, 25 bp, Artificial
  probe
  misc_feature (1)..(25): SEQ ID NO: 426; WAN024APW_at; Start 54; Stop 78
ccgcaaaaatacattagagaatagc

SEQ ID NO: 62899 - DNA, 25 bp, Artificial
  probe
  misc_feature (1)..(25): SEQ ID NO: 426; WAN024APW_at; Start 13; Stop 37
ctttcaaaacgtatctctattatac

SEQ ID NO: 62900 - DNA, 25 bp, Artificial
  probe
  misc_feature (1)..(25): SEQ ID NO: 426; WAN024APW_at; Start 70; Stop 94
gagaatagctttccactttctattt

SEQ ID NO: 62901 - DNA, 25 bp, Artificial
  probe
  misc_feature (1)..(25): SEQ ID NO: 426; WAN024APW_at; Start 72; Stop 96
gaatagctttccactttctatttta

SEQ ID NO: 62902 - DNA, 25 bp, Artificial
  probe
  misc_feature (1)..(25): SEQ ID NO: 426; WAN024APW_at; Start 9; Stop 33
cctactttcaaaacgtatctctatt

SEQ ID NO: 62903 - DNA, 25 bp, Artificial
  probe
  misc_feature (1)..(25): SEQ ID NO: 426; WAN024APW_at; Start 57; Stop 81
caaaaatacattagagaatagcttt

SEQ ID NO: 62904 - DNA, 25 bp, Artificial
  probe
  misc_feature (1)..(25): SEQ ID NO: 426; WAN024APW_at; Start 58; Stop 82
aaaaatacattagagaatagctttc

SEQ ID NO: 62905 - DNA, 25 bp, Artificial
  probe
  misc_feature (1)..(25): SEQ ID NO: 426; WAN024APW_at; Start 108; Stop 132
tataggtctataatggtaatagatt

SEQ ID NO: 62906 - DNA, 25 bp, Artificial
  probe
  misc_feature (1)..(25): SEQ ID NO: 426; WAN024APW_at; Start 64; Stop 88
acattagagaatagctttccacttt

SEQ ID NO: 62907 - DNA, 25 bp, Artificial
  probe
  misc_feature (1)..(25): SEQ ID NO: 426; WAN024APW_at; Start 63; Stop 87
tacattagagaatagctttccactt

SEQ ID NO: 62908 - DNA, 25 bp, Artificial
  probe
  misc_feature (1)..(25): SEQ ID NO: 426; WAN024APW_at; Start 119; Stop 143
aatggtaatagattttatttggagg

SEQ ID NO: 62909 - DNA, 25 bp, Artificial
  probe
  misc_feature (1)..(25): SEQ ID NO: 426; WAN024APW_at; Start 74; Stop 98
atagctttccactttctattttact

SEQ ID NO: 62910 - DNA, 25 bp, Artificial
  probe
  misc_feature (1)..(25): SEQ ID NO: 426; WAN024APW_at; Start 61; Stop 85
aatacattagagaatagctttccac

SEQ ID NO: 62911 - DNA, 25 bp, Artificial
  probe
  misc_feature (1)..(25): SEQ ID NO: 426; WAN024APW_at; Start 6; Stop 30
cctcctactttcaaaacgtatctct

SEQ ID NO: 62912 - DNA, 25 bp, Artificial
  probe
  misc_feature (1)..(25): SEQ ID NO: 426; WAN024APW_at; Start 11; Stop 35
tactttcaaaacgtatctctattat

SEQ ID NO: 62913 - DNA, 25 bp, Artificial
  probe
  misc_feature (1)..(25): SEQ ID NO: 426; WAN024APW_at; Start 62; Stop 86
atacattagagaatagctttccact

SEQ ID NO: 62914 - DNA, 25 bp, Artificial
  probe
  misc_feature (1)..(25): SEQ ID NO: 426; WAN024APW_at; Start 16; Stop 40
tcaaaacgtatctctattatactac

SEQ ID NO: 62915 - DNA, 25 bp, Artificial
  probe
  misc_feature (1)..(25): SEQ ID NO: 426; WAN024APW_at; Start 59; Stop 83
aaaatacattagagaatagctttcc

SEQ ID NO: 62916 - DNA, 25 bp, Artificial
  probe
  misc_feature (1)..(25): SEQ ID NO: 426; WAN024APW_at; Start 55; Stop 79
cgcaaaaatacattagagaatagct

SEQ ID NO: 62917 - DNA, 25 bp, Artificial
  probe
  misc_feature (1)..(25): SEQ ID NO: 426; WAN024APW_at; Start 56; Stop 80
gcaaaaatacattagagaatagctt

SEQ ID NO: 62918 - DNA, 25 bp, Artificial
  probe
  misc_feature (1)..(25): SEQ ID NO: 426; WAN024APW_at; Start 17; Stop 41
caaaacgtatctctattatactaca

SEQ ID NO: 62919 - DNA, 25 bp, Artificial
  probe
  misc_feature (1)..(25): SEQ ID NO: 426; WAN024APW_at; Start 18; Stop 42
aaaacgtatctctattatactacaa

SEQ ID NO: 62920 - DNA, 25 bp, Artificial
  probe
  misc_feature (1)..(25): SEQ ID NO: 426; WAN024APW_at; Start 52; Stop 76
gaccgcaaaaatacattagagaata

SEQ ID NO: 62921 - DNA, 25 bp, Artificial
  probe
  misc_feature (1)..(25): SEQ ID NO: 426; WAN024APW_at; Start 60; Stop 84
aaatacattagagaatagctttcca

SEQ ID NO: 62922 - DNA, 25 bp, Artificial
  probe
  misc_feature (1)..(25): SEQ ID NO: 426; WAN024APW_at; Start 53; Stop 77
accgcaaaaatacattagagaatag

SEQ ID NO: 62923 - DNA, 25 bp, Artificial
  probe
  misc_feature (1)..(25): SEQ ID NO: 426; WAN024APW_at; Start 95; Stop 119
tacttttcctgtttataggtctata

SEQ ID NO: 62924 - DNA, 25 bp, Artificial
  probe
  misc_feature (1)..(25): SEQ ID NO: 426; WAN024APW_at; Start 49; Stop 73
cccgaccgcaaaaatacattagaga

SEQ ID NO: 62925 - DNA, 25 bp, Artificial
  probe
  misc_feature (1)..(25): SEQ ID NO: 426; WAN024APW_at; Start 8; Stop 32
tcctactttcaaaacgtatctctat

SEQ ID NO: 62926 - DNA, 25 bp, Artificial
  probe
  misc_feature (1)..(25): SEQ ID NO: 426; WAN024APW_at; Start 102; Stop 126
cctgtttataggtctataatggtaa

SEQ ID NO: 62927 - DNA, 25 bp, Artificial
  probe
  misc_feature (1)..(25): SEQ ID NO: 426; WAN024APW_at; Start 7; Stop 31
ctcctactttcaaaacgtatctcta

SEQ ID NO: 62928 - DNA, 25 bp, Artificial
  probe
  misc_feature (1)..(25): SEQ ID NO: 426; WAN024APW_at; Start 50; Stop 74
ccgaccgcaaaaatacattagagaa

SEQ ID NO: 62929 - DNA, 25 bp, Artificial
  probe
  misc_feature (1)..(25): SEQ ID NO: 426; WAN024APW_at; Start 105; Stop 129
gtttataggtctataatggtaatag

SEQ ID NO: 62930 - DNA, 25 bp, Artificial
  probe
  misc_feature (1)..(25): SEQ ID NO: 426; WAN024APW_at; Start 48; Stop 72
ccccgaccgcaaaaatacattagag

SEQ ID NO: 62931 - DNA, 25 bp, Artificial
  probe
  misc_feature (1)..(25): SEQ ID NO: 63; WAN024APX_at; Start 64; Stop 88
gtggaaagctattctctaatgtatt

SEQ ID NO: 62932 - DNA, 25 bp, Artificial
  probe
  misc_feature (1)..(25): SEQ ID NO: 63; WAN024APX_at; Start 70; Stop 94
agctattctctaatgtatttttgcg

SEQ ID NO: 62933 - DNA, 25 bp, Artificial
  probe
  misc_feature (1)..(25): SEQ ID NO: 63; WAN024APX_at; Start 23; Stop 47
ttaccattatagacctataaacagg

SEQ ID NO: 62934 - DNA, 25 bp, Artificial
  probe
  misc_feature (1)..(25): SEQ ID NO: 63; WAN024APX_at; Start 76; Stop 100
tctctaatgtatttttgcggtcggg

SEQ ID NO: 62935 - DNA, 25 bp, Artificial
  probe
  misc_feature (1)..(25): SEQ ID NO: 63; WAN024APX_at; Start 77; Stop 101
ctctaatgtatttttgcggtcgggg

SEQ ID NO: 62936 - DNA, 25 bp, Artificial
  probe
  misc_feature (1)..(25): SEQ ID NO: 63; WAN024APX_at; Start 57; Stop 81
atagaaagtggaaagctattctcta

SEQ ID NO: 62937 - DNA, 25 bp, Artificial
  probe
  misc_feature (1)..(25): SEQ ID NO: 63; WAN024APX_at; Start 73; Stop 97
tattctctaatgtatttttgcggtc

SEQ ID NO: 62938 - DNA, 25 bp, Artificial
  probe
  misc_feature (1)..(25): SEQ ID NO: 63; WAN024APX_at; Start 116; Stop 140
aatagagatacgttttgaaagtagg

SEQ ID NO: 62939 - DNA, 25 bp, Artificial
  probe
  misc_feature (1)..(25): SEQ ID NO: 63; WAN024APX_at; Start 56; Stop 80
aatagaaagtggaaagctattctct

SEQ ID NO: 62940 - DNA, 25 bp, Artificial
  probe
  misc_feature (1)..(25): SEQ ID NO: 63; WAN024APX_at; Start 62; Stop 86
aagtggaaagctattctctaatgta

SEQ ID NO: 62941 - DNA, 25 bp, Artificial
  probe
  misc_feature (1)..(25): SEQ ID NO: 63; WAN024APX_at; Start 6; Stop 30
cctccaaataaaatctattaccatt

SEQ ID NO: 62942 - DNA, 25 bp, Artificial
  probe
  misc_feature (1)..(25): SEQ ID NO: 63; WAN024APX_at; Start 28; Stop 52
attatagacctataaacaggaaaag

SEQ ID NO: 62943 - DNA, 25 bp, Artificial
  probe
  misc_feature (1)..(25): SEQ ID NO: 63; WAN024APX_at; Start 15; Stop 39
aaaatctattaccattatagaccta

SEQ ID NO: 62944 - DNA, 25 bp, Artificial
  probe
  misc_feature (1)..(25): SEQ ID NO: 63; WAN024APX_at; Start 26; Stop 50
ccattatagacctataaacaggaaa

SEQ ID NO: 62945 - DNA, 25 bp, Artificial
  probe
  misc_feature (1)..(25): SEQ ID NO: 63; WAN024APX_at; Start 118; Stop 142
tagagatacgttttgaaagtaggag

SEQ ID NO: 62946 - DNA, 25 bp, Artificial
  probe
  misc_feature (1)..(25): SEQ ID NO: 63; WAN024APX_at; Start 53; Stop 77
taaaatagaaagtggaaagctattc

SEQ ID NO: 62947 - DNA, 25 bp, Artificial
  probe
  misc_feature (1)..(25): SEQ ID NO: 63; WAN024APX_at; Start 113; Stop 137
tataatagagatacgttttgaaagt

SEQ ID NO: 62948 - DNA, 25 bp, Artificial
  probe
  misc_feature (1)..(25): SEQ ID NO: 63; WAN024APX_at; Start 30; Stop 54
tatagacctataaacaggaaaagta

SEQ ID NO: 62949 - DNA, 25 bp, Artificial
  probe
  misc_feature (1)..(25): SEQ ID NO: 63; WAN024APX_at; Start 55; Stop 79
aaatagaaagtggaaagctattctc

SEQ ID NO: 62950 - DNA, 25 bp, Artificial
  probe
  misc_feature (1)..(25): SEQ ID NO: 63; WAN024APX_at; Start 119; Stop 143
agagatacgttttgaaagtaggagg

SEQ ID NO: 62951 - DNA, 25 bp, Artificial
  probe
  misc_feature (1)..(25): SEQ ID NO: 63; WAN024APX_at; Start 115; Stop 139
taatagagatacgttttgaaagtag

SEQ ID NO: 62952 - DNA, 25 bp, Artificial
  probe
  misc_feature (1)..(25): SEQ ID NO: 63; WAN024APX_at; Start 27; Stop 51
cattatagacctataaacaggaaaa

SEQ ID NO: 62953 - DNA, 25 bp, Artificial
  probe
  misc_feature (1)..(25): SEQ ID NO: 63; WAN024APX_at; Start 108; Stop 132
tgtagtataatagagatacgttttg

SEQ ID NO: 62954 - DNA, 25 bp, Artificial
  probe
  misc_feature (1)..(25): SEQ ID NO: 63; WAN024APX_at; Start 14; Stop 38
taaaatctattaccattatagacct

SEQ ID NO: 62955 - DNA, 25 bp, Artificial
  probe
  misc_feature (1)..(25): SEQ ID NO: 63; WAN024APX_at; Start 109; Stop 133
gtagtataatagagatacgttttga

SEQ ID NO: 62956 - DNA, 25 bp, Artificial
  probe
  misc_feature (1)..(25): SEQ ID NO: 63; WAN024APX_at; Start 61; Stop 85
aaagtggaaagctattctctaatgt

SEQ ID NO: 62957 - DNA, 25 bp, Artificial
  probe
  misc_feature (1)..(25): SEQ ID NO: 63; WAN024APX_at; Start 71; Stop 95
gctattctctaatgtatttttgcgg

SEQ ID NO: 62958 - DNA, 25 bp, Artificial
  probe
  misc_feature (1)..(25): SEQ ID NO: 63; WAN024APX_at; Start 63; Stop 87
agtggaaagctattctctaatgtat

SEQ ID NO: 62959 - DNA, 25 bp, Artificial
  probe
  misc_feature (1)..(25): SEQ ID NO: 63; WAN024APX_at; Start 66; Stop 90
ggaaagctattctctaatgtatttt

SEQ ID NO: 62960 - DNA, 25 bp, Artificial
  probe
  misc_feature (1)..(25): SEQ ID NO: 63; WAN024APX_at; Start 75; Stop 99
ttctctaatgtatttttgcggtcgg

SEQ ID NO: 62961 - DNA, 25 bp, Artificial
  probe
  misc_feature (1)..(25): SEQ ID NO: 63; WAN024APX_at; Start 69; Stop 93
aagctattctctaatgtatttttgc

SEQ ID NO: 62962 - DNA, 25 bp, Artificial
  probe
  misc_feature (1)..(25): SEQ ID NO: 63; WAN024APX_at; Start 51; Stop 75
agtaaaatagaaagtggaaagctat

SEQ ID NO: 62963 - DNA, 25 bp, Artificial
  probe
  misc_feature (1)..(25): SEQ ID NO: 63; WAN024APX_at; Start 65; Stop 89
tggaaagctattctctaatgtattt

SEQ ID NO: 62964 - DNA, 25 bp, Artificial
  probe
  misc_feature (1)..(25): SEQ ID NO: 63; WAN024APX_at; Start 24; Stop 48
taccattatagacctataaacagga

SEQ ID NO: 62965 - DNA, 25 bp, Artificial
  probe
  misc_feature (1)..(25): SEQ ID NO: 4499; WAN024APY_at; Start 3; Stop 27
gatcatcctccttttcttaaaacta

SEQ ID NO: 62966 - DNA, 25 bp, Artificial
  probe
  misc_feature (1)..(25): SEQ ID NO: 4499; WAN024APY_at; Start 2; Stop 26
agatcatcctccttttcttaaaact

SEQ ID NO: 62967 - DNA, 25 bp, Artificial
  probe
  misc_feature (1)..(25): SEQ ID NO: 4499; WAN024APY_at; Start 4; Stop 28
atcatcctccttttcttaaaactag

SEQ ID NO: 62968 - DNA, 25 bp, Artificial
  probe
  misc_feature (1)..(25): SEQ ID NO: 4499; WAN024APY_at; Start 1; Stop 25
tagatcatcctccttttcttaaaac

SEQ ID NO: 62969 - DNA, 25 bp, Artificial
  probe
  misc_feature (1)..(25): SEQ ID NO: 208; WAN024APZ_at; Start 36; Stop 60
ctagttttaagaaaaggaggatgat

SEQ ID NO: 62970 - DNA, 25 bp, Artificial
  probe
  misc_feature (1)..(25): SEQ ID NO: 208; WAN024APZ_at; Start 39; Stop 63
gttttaagaaaaggaggatgatcta

SEQ ID NO: 62971 - DNA, 25 bp, Artificial
  probe
  misc_feature (1)..(25): SEQ ID NO: 208; WAN024APZ_at; Start 38; Stop 62
agttttaagaaaaggaggatgatct

SEQ ID NO: 62972 - DNA, 25 bp, Artificial
  probe
  misc_feature (1)..(25): SEQ ID NO: 208; WAN024APZ_at; Start 37; Stop 61
tagttttaagaaaaggaggatgatc

SEQ ID NO: 62973 - DNA, 25 bp, Artificial
  probe
  misc_feature (1)..(25): SEQ ID NO: 4570; WAN024AQ2_at; Start 11; Stop 35
tcctaatgtaattatagcgtactat

SEQ ID NO: 62974 - DNA, 25 bp, Artificial
  probe
  misc_feature (1)..(25): SEQ ID NO: 4570; WAN024AQ2_at; Start 22; Stop 46
ttatagcgtactattctaaatttct

SEQ ID NO: 62975 - DNA, 25 bp, Artificial
  probe
  misc_feature (1)..(25): SEQ ID NO: 4570; WAN024AQ2_at; Start 120; Stop 144
ttcaattaatgactgcgcttttcaa

SEQ ID NO: 62976 - DNA, 25 bp, Artificial
  probe
  misc_feature (1)..(25): SEQ ID NO: 4570; WAN024AQ2_at; Start 78; Stop 102
cttctttaaataccctccattatca

SEQ ID NO: 62977 - DNA, 25 bp, Artificial
  probe
  misc_feature (1)..(25): SEQ ID NO: 4570; WAN024AQ2_at; Start 52; Stop 76
tactatagaatcaagaaatctacca

SEQ ID NO: 62978 - DNA, 25 bp, Artificial
  probe
  misc_feature (1)..(25): SEQ ID NO: 4570; WAN024AQ2_at; Start 59; Stop 83
gaatcaagaaatctaccaccttctt

SEQ ID NO: 62979 - DNA, 25 bp, Artificial
  probe
  misc_feature (1)..(25): SEQ ID NO: 4570; WAN024AQ2_at; Start 121; Stop 145
tcaattaatgactgcgcttttcaat

SEQ ID NO: 62980 - DNA, 25 bp, Artificial
  probe
  misc_feature (1)..(25): SEQ ID NO: 4570; WAN024AQ2_at; Start 118; Stop 142
ttttcaattaatgactgcgcttttc

SEQ ID NO: 62981 - DNA, 25 bp, Artificial
  probe
  misc_feature (1)..(25): SEQ ID NO: 4570; WAN024AQ2_at; Start 5; Stop 29
gtatcctcctaatgtaattatagcg

SEQ ID NO: 62982 - DNA, 25 bp, Artificial
  probe
  misc_feature (1)..(25): SEQ ID NO: 4570; WAN024AQ2_at; Start 1; Stop 25
tattgtatcctcctaatgtaattat

SEQ ID NO: 62983 - DNA, 25 bp, Artificial
  probe
  misc_feature (1)..(25): SEQ ID NO: 4570; WAN024AQ2_at; Start 50; Stop 74
tctactatagaatcaagaaatctac

SEQ ID NO: 62984 - DNA, 25 bp, Artificial
  probe
  misc_feature (1)..(25): SEQ ID NO: 4570; WAN024AQ2_at; Start 80; Stop 104
tctttaaataccctccattatcaca

SEQ ID NO: 62985 - DNA, 25 bp, Artificial
  probe
  misc_feature (1)..(25): SEQ ID NO: 4570; WAN024AQ2_at; Start 9; Stop 33
cctcctaatgtaattatagcgtact

SEQ ID NO: 62986 - DNA, 25 bp, Artificial
  probe
  misc_feature (1)..(25): SEQ ID NO: 4570; WAN024AQ2_at; Start 116; Stop 140
acttttcaattaatgactgcgcttt

SEQ ID NO: 62987 - DNA, 25 bp, Artificial
  probe
  misc_feature (1)..(25): SEQ ID NO: 4570; WAN024AQ2_at; Start 12; Stop 36
cctaatgtaattatagcgtactatt

SEQ ID NO: 62988 - DNA, 25 bp, Artificial
  probe
  misc_feature (1)..(25): SEQ ID NO: 4570; WAN024AQ2_at; Start 51; Stop 75
ctactatagaatcaagaaatctacc

SEQ ID NO: 62989 - DNA, 25 bp, Artificial
  probe
  misc_feature (1)..(25): SEQ ID NO: 4570; WAN024AQ2_at; Start 54; Stop 78
ctatagaatcaagaaatctaccacc

SEQ ID NO: 62990 - DNA, 25 bp, Artificial
  probe
  misc_feature (1)..(25): SEQ ID NO: 4570; WAN024AQ2_at; Start 4; Stop 28
tgtatcctcctaatgtaattatagc

SEQ ID NO: 62991 - DNA, 25 bp, Artificial
  probe
  misc_feature (1)..(25): SEQ ID NO: 4570; WAN024AQ2_at; Start 17; Stop 41
tgtaattatagcgtactattctaaa

SEQ ID NO: 62992 - DNA, 25 bp, Artificial
  probe
  misc_feature (1)..(25): SEQ ID NO: 4570; WAN024AQ2_at; Start 85; Stop 109
aaataccctccattatcacataaac

SEQ ID NO: 62993 - DNA, 25 bp, Artificial
  probe
  misc_feature (1)..(25): SEQ ID NO: 4570; WAN024AQ2_at; Start 119; Stop 143
tttcaattaatgactgcgcttttca

SEQ ID NO: 62994 - DNA, 25 bp, Artificial
  probe
  misc_feature (1)..(25): SEQ ID NO: 4570; WAN024AQ2_at; Start 62; Stop 86
tcaagaaatctaccaccttctttaa

SEQ ID NO: 62995 - DNA, 25 bp, Artificial
  probe
  misc_feature (1)..(25): SEQ ID NO: 4570; WAN024AQ2_at; Start 88; Stop 112
taccctccattatcacataaacagg

SEQ ID NO: 62996 - DNA, 25 bp, Artificial
  probe
  misc_feature (1)..(25): SEQ ID NO: 4570; WAN024AQ2_at; Start 6; Stop 30
tatcctcctaatgtaattatagcgt

SEQ ID NO: 62997 - DNA, 25 bp, Artificial
  probe
  misc_feature (1)..(25): SEQ ID NO: 4570; WAN024AQ2_at; Start 125; Stop 149
ttaatgactgcgcttttcaatcacg

SEQ ID NO: 62998 - DNA, 25 bp, Artificial
  probe
  misc_feature (1)..(25): SEQ ID NO: 4570; WAN024AQ2_at; Start 115; Stop 139
aacttttcaattaatgactgcgctt

SEQ ID NO: 62999 - DNA, 25 bp, Artificial
  probe
  misc_feature (1)..(25): SEQ ID NO: 4570; WAN024AQ2_at; Start 55; Stop 79
tatagaatcaagaaatctaccacct

SEQ ID NO: 63000 - DNA, 25 bp, Artificial
  probe
  misc_feature (1)..(25): SEQ ID NO: 4570; WAN024AQ2_at; Start 122; Stop 146
caattaatgactgcgcttttcaatc

SEQ ID NO: 63001 - DNA, 25 bp, Artificial
  probe
  misc_feature (1)..(25): SEQ ID NO: 4570; WAN024AQ2_at; Start 84; Stop 108
taaataccctccattatcacataaa

SEQ ID NO: 63002 - DNA, 25 bp, Artificial
  probe
  misc_feature (1)..(25): SEQ ID NO: 4570; WAN024AQ2_at; Start 10; Stop 34
ctcctaatgtaattatagcgtacta

SEQ ID NO: 63003 - DNA, 25 bp, Artificial
  probe
  misc_feature (1)..(25): SEQ ID NO: 4570; WAN024AQ2_at; Start 114; Stop 138
aaacttttcaattaatgactgcgct

SEQ ID NO: 63004 - DNA, 25 bp, Artificial
  probe
  misc_feature (1)..(25): SEQ ID NO: 4570; WAN024AQ2_at; Start 14; Stop 38
taatgtaattatagcgtactattct

SEQ ID NO: 63005 - DNA, 25 bp, Artificial
  probe
  misc_feature (1)..(25): SEQ ID NO: 4570; WAN024AQ2_at; Start 57; Stop 81
tagaatcaagaaatctaccaccttc

SEQ ID NO: 63006 - DNA, 25 bp, Artificial
  probe
  misc_feature (1)..(25): SEQ ID NO: 4570; WAN024AQ2_at; Start 8; Stop 32
tcctcctaatgtaattatagcgtac

SEQ ID NO: 63007 - DNA, 25 bp, Artificial
  probe
  misc_feature (1)..(25): SEQ ID NO: 3264; WAN024AQ3_at; Start 10; Stop 34
aaagcgcagtcattaattgaaaagt

SEQ ID NO: 63008 - DNA, 25 bp, Artificial
  probe
  misc_feature (1)..(25): SEQ ID NO: 3264; WAN024AQ3_at; Start 123; Stop 147
ctataattacattaggaggatacaa

SEQ ID NO: 63009 - DNA, 25 bp, Artificial
  probe
  misc_feature (1)..(25): SEQ ID NO: 3264; WAN024AQ3_at; Start 39; Stop 63
ctgtttatgtgataatggagggtat

SEQ ID NO: 63010 - DNA, 25 bp, Artificial
  probe
  misc_feature (1)..(25): SEQ ID NO: 3264; WAN024AQ3_at; Start 117; Stop 141
agtacgctataattacattaggagg

SEQ ID NO: 63011 - DNA, 25 bp, Artificial
  probe
  misc_feature (1)..(25): SEQ ID NO: 3264; WAN024AQ3_at; Start 5; Stop 29
attgaaaagcgcagtcattaattga

SEQ ID NO: 63012 - DNA, 25 bp, Artificial
  probe
  misc_feature (1)..(25): SEQ ID NO: 3264; WAN024AQ3_at; Start 6; Stop 30
ttgaaaagcgcagtcattaattgaa

SEQ ID NO: 63013 - DNA, 25 bp, Artificial
  probe
  misc_feature (1)..(25): SEQ ID NO: 3264; WAN024AQ3_at; Start 121; Stop 145
cgctataattacattaggaggatac

SEQ ID NO: 63014 - DNA, 25 bp, Artificial
  probe
  misc_feature (1)..(25): SEQ ID NO: 3264; WAN024AQ3_at; Start 11; Stop 35
aagcgcagtcattaattgaaaagtt

SEQ ID NO: 63015 - DNA, 25 bp, Artificial
  probe
  misc_feature (1)..(25): SEQ ID NO: 3264; WAN024AQ3_at; Start 124; Stop 148
tataattacattaggaggatacaat

SEQ ID NO: 63016 - DNA, 25 bp, Artificial
  probe
  misc_feature (1)..(25): SEQ ID NO: 3264; WAN024AQ3_at; Start 4; Stop 28
gattgaaaagcgcagtcattaattg

SEQ ID NO: 63017 - DNA, 25 bp, Artificial
  probe
  misc_feature (1)..(25): SEQ ID NO: 3264; WAN024AQ3_at; Start 48; Stop 72
tgataatggagggtatttaaagaag

SEQ ID NO: 63018 - DNA, 25 bp, Artificial
  probe
  misc_feature (1)..(25): SEQ ID NO: 3264; WAN024AQ3_at; Start 64; Stop 88
ttaaagaaggtggtagatttcttga

SEQ ID NO: 63019 - DNA, 25 bp, Artificial
  probe
  misc_feature (1)..(25): SEQ ID NO: 3264; WAN024AQ3_at; Start 9; Stop 33
aaaagcgcagtcattaattgaaaag

SEQ ID NO: 63020 - DNA, 25 bp, Artificial
  probe
  misc_feature (1)..(25): SEQ ID NO: 3264; WAN024AQ3_at; Start 114; Stop 138
aatagtacgctataattacattagg

SEQ ID NO: 63021 - DNA, 25 bp, Artificial
  probe
  misc_feature (1)..(25): SEQ ID NO: 3264; WAN024AQ3_at; Start 77; Stop 101
tagatttcttgattctatagtagat

SEQ ID NO: 63022 - DNA, 25 bp, Artificial
  probe
  misc_feature (1)..(25): SEQ ID NO: 3264; WAN024AQ3_at; Start 118; Stop 142
gtacgctataattacattaggagga

SEQ ID NO: 63023 - DNA, 25 bp, Artificial
  probe
  misc_feature (1)..(25): SEQ ID NO: 3264; WAN024AQ3_at; Start 38; Stop 62
cctgtttatgtgataatggagggta

SEQ ID NO: 63024 - DNA, 25 bp, Artificial
  probe
  misc_feature (1)..(25): SEQ ID NO: 3264; WAN024AQ3_at; Start 104; Stop 128
agaaatttagaatagtacgctataa

SEQ ID NO: 63025 - DNA, 25 bp, Artificial
  probe
  misc_feature (1)..(25): SEQ ID NO: 3264; WAN024AQ3_at; Start 44; Stop 68
tatgtgataatggagggtatttaaa

SEQ ID NO: 63026 - DNA, 25 bp, Artificial
  probe
  misc_feature (1)..(25): SEQ ID NO: 3264; WAN024AQ3_at; Start 109; Stop 133
tttagaatagtacgctataattaca

SEQ ID NO: 63027 - DNA, 25 bp, Artificial
  probe
  misc_feature (1)..(25): SEQ ID NO: 3264; WAN024AQ3_at; Start 122; Stop 146
gctataattacattaggaggataca

SEQ ID NO: 63028 - DNA, 25 bp, Artificial
  probe
  misc_feature (1)..(25): SEQ ID NO: 3264; WAN024AQ3_at; Start 116; Stop 140
tagtacgctataattacattaggag

SEQ ID NO: 63029 - DNA, 25 bp, Artificial
  probe
  misc_feature (1)..(25): SEQ ID NO: 3264; WAN024AQ3_at; Start 75; Stop 99
ggtagatttcttgattctatagtag

SEQ ID NO: 63030 - DNA, 25 bp, Artificial
  probe
  misc_feature (1)..(25): SEQ ID NO: 3264; WAN024AQ3_at; Start 67; Stop 91
aagaaggtggtagatttcttgattc

SEQ ID NO: 63031 - DNA, 25 bp, Artificial
  probe
  misc_feature (1)..(25): SEQ ID NO: 3264; WAN024AQ3_at; Start 119; Stop 143
tacgctataattacattaggaggat

SEQ ID NO: 63032 - DNA, 25 bp, Artificial
  probe
  misc_feature (1)..(25): SEQ ID NO: 3264; WAN024AQ3_at; Start 7; Stop 31
tgaaaagcgcagtcattaattgaaa

SEQ ID NO: 63033 - DNA, 25 bp, Artificial
  probe
  misc_feature (1)..(25): SEQ ID NO: 3264; WAN024AQ3_at; Start 113; Stop 137
gaatagtacgctataattacattag

SEQ ID NO: 63034 - DNA, 25 bp, Artificial
  probe
  misc_feature (1)..(25): SEQ ID NO: 3264; WAN024AQ3_at; Start 69; Stop 93
gaaggtggtagatttcttgattcta

SEQ ID NO: 63035 - DNA, 25 bp, Artificial
  probe
  misc_feature (1)..(25): SEQ ID NO: 3264; WAN024AQ3_at; Start 8; Stop 32
gaaaagcgcagtcattaattgaaaa

SEQ ID NO: 63036 - DNA, 25 bp, Artificial
  probe
  misc_feature (1)..(25): SEQ ID NO: 3264; WAN024AQ3_at; Start 41; Stop 65
gtttatgtgataatggagggtattt

SEQ ID NO: 63037 - DNA, 25 bp, Artificial
  probe
  misc_feature (1)..(25): SEQ ID NO: 3264; WAN024AQ3_at; Start 1; Stop 25
cgtgattgaaaagcgcagtcattaa

SEQ ID NO: 63038 - DNA, 25 bp, Artificial
  probe
  misc_feature (1)..(25): SEQ ID NO: 3264; WAN024AQ3_at; Start 72; Stop 96
ggtggtagatttcttgattctatag

SEQ ID NO: 63039 - DNA, 25 bp, Artificial
  probe
  misc_feature (1)..(25): SEQ ID NO: 3264; WAN024AQ3_at; Start 125; Stop 149
ataattacattaggaggatacaata

SEQ ID NO: 63040 - DNA, 25 bp, Artificial
  probe
  misc_feature (1)..(25): SEQ ID NO: 3264; WAN024AQ3_at; Start 12; Stop 36
agcgcagtcattaattgaaaagttt

SEQ ID NO: 63041 - DNA, 25 bp, Artificial
  probe
  misc_feature (1)..(25): SEQ ID NO: 472; WAN024AQ4_at; Start 34; Stop 58
tcaaaaaagtcacctcagtctgagg

SEQ ID NO: 63042 - DNA, 25 bp, Artificial
  probe
  misc_feature (1)..(25): SEQ ID NO: 472; WAN024AQ4_at; Start 30; Stop 54
caattcaaaaaagtcacctcagtct

SEQ ID NO: 63043 - DNA, 25 bp, Artificial
  probe
  misc_feature (1)..(25): SEQ ID NO: 472; WAN024AQ4_at; Start 48; Stop 72
tcagtctgaggatggaaaaaaaggc

SEQ ID NO: 63044 - DNA, 25 bp, Artificial
  probe
  misc_feature (1)..(25): SEQ ID NO: 472; WAN024AQ4_at; Start 46; Stop 70
cctcagtctgaggatggaaaaaaag

SEQ ID NO: 63045 - DNA, 25 bp, Artificial
  probe
  misc_feature (1)..(25): SEQ ID NO: 472; WAN024AQ4_at; Start 31; Stop 55
aattcaaaaaagtcacctcagtctg

SEQ ID NO: 63046 - DNA, 25 bp, Artificial
  probe
  misc_feature (1)..(25): SEQ ID NO: 472; WAN024AQ4_at; Start 37; Stop 61
aaaaagtcacctcagtctgaggatg

SEQ ID NO: 63047 - DNA, 25 bp, Artificial
  probe
  misc_feature (1)..(25): SEQ ID NO: 472; WAN024AQ4_at; Start 27; Stop 51
tcacaattcaaaaaagtcacctcag

SEQ ID NO: 63048 - DNA, 25 bp, Artificial
  probe
  misc_feature (1)..(25): SEQ ID NO: 472; WAN024AQ4_at; Start 39; Stop 63
aaagtcacctcagtctgaggatgga

SEQ ID NO: 63049 - DNA, 25 bp, Artificial
  probe
  misc_feature (1)..(25): SEQ ID NO: 472; WAN024AQ4_at; Start 29; Stop 53
acaattcaaaaaagtcacctcagtc

SEQ ID NO: 63050 - DNA, 25 bp, Artificial
  probe
  misc_feature (1)..(25): SEQ ID NO: 472; WAN024AQ4_at; Start 25; Stop 49
tatcacaattcaaaaaagtcacctc

SEQ ID NO: 63051 - DNA, 25 bp, Artificial
  probe
  misc_feature (1)..(25): SEQ ID NO: 472; WAN024AQ4_at; Start 35; Stop 59
caaaaaagtcacctcagtctgagga

SEQ ID NO: 63052 - DNA, 25 bp, Artificial
  probe
  misc_feature (1)..(25): SEQ ID NO: 472; WAN024AQ4_at; Start 53; Stop 77
ctgaggatggaaaaaaaggcgctgg

SEQ ID NO: 63053 - DNA, 25 bp, Artificial
  probe
  misc_feature (1)..(25): SEQ ID NO: 472; WAN024AQ4_at; Start 44; Stop 68
cacctcagtctgaggatggaaaaaa

SEQ ID NO: 63054 - DNA, 25 bp, Artificial
  probe
  misc_feature (1)..(25): SEQ ID NO: 472; WAN024AQ4_at; Start 5; Stop 29
tcatcctctcccttctattttatca

SEQ ID NO: 63055 - DNA, 25 bp, Artificial
  probe
  misc_feature (1)..(25): SEQ ID NO: 472; WAN024AQ4_at; Start 50; Stop 74
agtctgaggatggaaaaaaaggcgc

SEQ ID NO: 63056 - DNA, 25 bp, Artificial
  probe
  misc_feature (1)..(25): SEQ ID NO: 472; WAN024AQ4_at; Start 52; Stop 76
tctgaggatggaaaaaaaggcgctg

SEQ ID NO: 63057 - DNA, 25 bp, Artificial
  probe
  misc_feature (1)..(25): SEQ ID NO: 472; WAN024AQ4_at; Start 23; Stop 47
tttatcacaattcaaaaaagtcacc

SEQ ID NO: 63058 - DNA, 25 bp, Artificial
  probe
  misc_feature (1)..(25): SEQ ID NO: 472; WAN024AQ4_at; Start 28; Stop 52
cacaattcaaaaaagtcacctcagt

SEQ ID NO: 63059 - DNA, 25 bp, Artificial
  probe
  misc_feature (1)..(25): SEQ ID NO: 472; WAN024AQ4_at; Start 24; Stop 48
ttatcacaattcaaaaaagtcacct

SEQ ID NO: 63060 - DNA, 25 bp, Artificial
  probe
  misc_feature (1)..(25): SEQ ID NO: 472; WAN024AQ4_at; Start 2; Stop 26
ggttcatcctctcccttctatttta

SEQ ID NO: 63061 - DNA, 25 bp, Artificial
  probe
  misc_feature (1)..(25): SEQ ID NO: 472; WAN024AQ4_at; Start 51; Stop 75
gtctgaggatggaaaaaaaggcgct

SEQ ID NO: 63062 - DNA, 25 bp, Artificial
  probe
  misc_feature (1)..(25): SEQ ID NO: 472; WAN024AQ4_at; Start 36; Stop 60
aaaaaagtcacctcagtctgaggat

SEQ ID NO: 63063 - DNA, 25 bp, Artificial
  probe
  misc_feature (1)..(25): SEQ ID NO: 472; WAN024AQ4_at; Start 42; Stop 66
gtcacctcagtctgaggatggaaaa

SEQ ID NO: 63064 - DNA, 25 bp, Artificial
  probe
  misc_feature (1)..(25): SEQ ID NO: 472; WAN024AQ4_at; Start 41; Stop 65
agtcacctcagtctgaggatggaaa

SEQ ID NO: 63065 - DNA, 25 bp, Artificial
  probe
  misc_feature (1)..(25): SEQ ID NO: 472; WAN024AQ4_at; Start 32; Stop 56
attcaaaaaagtcacctcagtctga

SEQ ID NO: 63066 - DNA, 25 bp, Artificial
  probe
  misc_feature (1)..(25): SEQ ID NO: 472; WAN024AQ4_at; Start 43; Stop 67
tcacctcagtctgaggatggaaaaa

SEQ ID NO: 63067 - DNA, 25 bp, Artificial
  probe
  misc_feature (1)..(25): SEQ ID NO: 472; WAN024AQ4_at; Start 33; Stop 57
ttcaaaaaagtcacctcagtctgag

SEQ ID NO: 63068 - DNA, 25 bp, Artificial
  probe
  misc_feature (1)..(25): SEQ ID NO: 472; WAN024AQ4_at; Start 49; Stop 73
cagtctgaggatggaaaaaaaggcg

SEQ ID NO: 63069 - DNA, 25 bp, Artificial
  probe
  misc_feature (1)..(25): SEQ ID NO: 472; WAN024AQ4_at; Start 9; Stop 33
cctctcccttctattttatcacaat

SEQ ID NO: 63070 - DNA, 25 bp, Artificial
  probe
  misc_feature (1)..(25): SEQ ID NO: 472; WAN024AQ4_at; Start 47; Stop 71
ctcagtctgaggatggaaaaaaagg

SEQ ID NO: 63071 - DNA, 25 bp, Artificial
  probe
  misc_feature (1)..(25): SEQ ID NO: 472; WAN024AQ4_at; Start 38; Stop 62
aaaagtcacctcagtctgaggatgg

SEQ ID NO: 63072 - DNA, 25 bp, Artificial
  probe
  misc_feature (1)..(25): SEQ ID NO: 472; WAN024AQ4_at; Start 8; Stop 32
tcctctcccttctattttatcacaa

SEQ ID NO: 63073 - DNA, 25 bp, Artificial
  probe
  misc_feature (1)..(25): SEQ ID NO: 472; WAN024AQ4_at; Start 40; Stop 64
aagtcacctcagtctgaggatggaa

SEQ ID NO: 63074 - DNA, 25 bp, Artificial
  probe
  misc_feature (1)..(25): SEQ ID NO: 472; WAN024AQ4_at; Start 7; Stop 31
atcctctcccttctattttatcaca

SEQ ID NO: 63075 - DNA, 25 bp, Artificial
  probe
  misc_feature (1)..(25): SEQ ID NO: 3236; WAN024AQ5_at; Start 21; Stop 45
ctcagactgaggtgacttttttgaa

SEQ ID NO: 63076 - DNA, 25 bp, Artificial
  probe
  misc_feature (1)..(25): SEQ ID NO: 3236; WAN024AQ5_at; Start 10; Stop 34
ttttttccatcctcagactgaggtg

SEQ ID NO: 63077 - DNA, 25 bp, Artificial
  probe
  misc_feature (1)..(25): SEQ ID NO: 3236; WAN024AQ5_at; Start 26; Stop 50
actgaggtgacttttttgaattgtg

SEQ ID NO: 63078 - DNA, 25 bp, Artificial
  probe
  misc_feature (1)..(25): SEQ ID NO: 3236; WAN024AQ5_at; Start 29; Stop 53
gaggtgacttttttgaattgtgata

SEQ ID NO: 63079 - DNA, 25 bp, Artificial
  probe
  misc_feature (1)..(25): SEQ ID NO: 3236; WAN024AQ5_at; Start 46; Stop 70
ttgtgataaaatagaagggagagga

SEQ ID NO: 63080 - DNA, 25 bp, Artificial
  probe
  misc_feature (1)..(25): SEQ ID NO: 3236; WAN024AQ5_at; Start 18; Stop 42
atcctcagactgaggtgactttttt

SEQ ID NO: 63081 - DNA, 25 bp, Artificial
  probe
  misc_feature (1)..(25): SEQ ID NO: 3236; WAN024AQ5_at; Start 53; Stop 77
aaaatagaagggagaggatgaacct

SEQ ID NO: 63082 - DNA, 25 bp, Artificial
  probe
  misc_feature (1)..(25): SEQ ID NO: 3236; WAN024AQ5_at; Start 2; Stop 26
cagcgcctttttttccatcctcaga

SEQ ID NO: 63083 - DNA, 25 bp, Artificial
  probe
  misc_feature (1)..(25): SEQ ID NO: 3236; WAN024AQ5_at; Start 12; Stop 36
ttttccatcctcagactgaggtgac

SEQ ID NO: 63084 - DNA, 25 bp, Artificial
  probe
  misc_feature (1)..(25): SEQ ID NO: 3236; WAN024AQ5_at; Start 27; Stop 51
ctgaggtgacttttttgaattgtga

SEQ ID NO: 63085 - DNA, 25 bp, Artificial
  probe
  misc_feature (1)..(25): SEQ ID NO: 3236; WAN024AQ5_at; Start 15; Stop 39
tccatcctcagactgaggtgacttt

SEQ ID NO: 63086 - DNA, 25 bp, Artificial
  probe
  misc_feature (1)..(25): SEQ ID NO: 3236; WAN024AQ5_at; Start 13; Stop 37
tttccatcctcagactgaggtgact

SEQ ID NO: 63087 - DNA, 25 bp, Artificial
  probe
  misc_feature (1)..(25): SEQ ID NO: 3236; WAN024AQ5_at; Start 3; Stop 27
agcgcctttttttccatcctcagac

SEQ ID NO: 63088 - DNA, 25 bp, Artificial
  probe
  misc_feature (1)..(25): SEQ ID NO: 3236; WAN024AQ5_at; Start 50; Stop 74
gataaaatagaagggagaggatgaa

SEQ ID NO: 63089 - DNA, 25 bp, Artificial
  probe
  misc_feature (1)..(25): SEQ ID NO: 3236; WAN024AQ5_at; Start 14; Stop 38
ttccatcctcagactgaggtgactt

SEQ ID NO: 63090 - DNA, 25 bp, Artificial
  probe
  misc_feature (1)..(25): SEQ ID NO: 3236; WAN024AQ5_at; Start 30; Stop 54
aggtgacttttttgaattgtgataa

SEQ ID NO: 63091 - DNA, 25 bp, Artificial
  probe
  misc_feature (1)..(25): SEQ ID NO: 3236; WAN024AQ5_at; Start 25; Stop 49
gactgaggtgacttttttgaattgt

SEQ ID NO: 63092 - DNA, 25 bp, Artificial
  probe
  misc_feature (1)..(25): SEQ ID NO: 3236; WAN024AQ5_at; Start 20; Stop 44
cctcagactgaggtgacttttttga

SEQ ID NO: 63093 - DNA, 25 bp, Artificial
  probe
  misc_feature (1)..(25): SEQ ID NO: 3236; WAN024AQ5_at; Start 17; Stop 41
catcctcagactgaggtgacttttt

SEQ ID NO: 63094 - DNA, 25 bp, Artificial
  probe
  misc_feature (1)..(25): SEQ ID NO: 3236; WAN024AQ5_at; Start 16; Stop 40
ccatcctcagactgaggtgactttt

SEQ ID NO: 63095 - DNA, 25 bp, Artificial
  probe
  misc_feature (1)..(25): SEQ ID NO: 3236; WAN024AQ5_at; Start 47; Stop 71
tgtgataaaatagaagggagaggat

SEQ ID NO: 63096 - DNA, 25 bp, Artificial
  probe
  misc_feature (1)..(25): SEQ ID NO: 3236; WAN024AQ5_at; Start 24; Stop 48
agactgaggtgacttttttgaattg

SEQ ID NO: 63097 - DNA, 25 bp, Artificial
  probe
  misc_feature (1)..(25): SEQ ID NO: 3236; WAN024AQ5_at; Start 31; Stop 55
ggtgacttttttgaattgtgataaa

SEQ ID NO: 63098 - DNA, 25 bp, Artificial
  probe
  misc_feature (1)..(25): SEQ ID NO: 3236; WAN024AQ5_at; Start 52; Stop 76
taaaatagaagggagaggatgaacc

SEQ ID NO: 63099 - DNA, 25 bp, Artificial
  probe
  misc_feature (1)..(25): SEQ ID NO: 3236; WAN024AQ5_at; Start 4; Stop 28
gcgcctttttttccatcctcagact

SEQ ID NO: 63100 - DNA, 25 bp, Artificial
  probe
  misc_feature (1)..(25): SEQ ID NO: 3236; WAN024AQ5_at; Start 28; Stop 52
tgaggtgacttttttgaattgtgat

SEQ ID NO: 63101 - DNA, 25 bp, Artificial
  probe
  misc_feature (1)..(25): SEQ ID NO: 3236; WAN024AQ5_at; Start 22; Stop 46
tcagactgaggtgacttttttgaat

SEQ ID NO: 63102 - DNA, 25 bp, Artificial
  probe
  misc_feature (1)..(25): SEQ ID NO: 3236; WAN024AQ5_at; Start 23; Stop 47
cagactgaggtgacttttttgaatt

SEQ ID NO: 63103 - DNA, 25 bp, Artificial
  probe
  misc_feature (1)..(25): SEQ ID NO: 3236; WAN024AQ5_at; Start 49; Stop 73
tgataaaatagaagggagaggatga

SEQ ID NO: 63104 - DNA, 25 bp, Artificial
  probe
  misc_feature (1)..(25): SEQ ID NO: 3236; WAN024AQ5_at; Start 32; Stop 56
gtgacttttttgaattgtgataaaa

SEQ ID NO: 63105 - DNA, 25 bp, Artificial
  probe
  misc_feature (1)..(25): SEQ ID NO: 3236; WAN024AQ5_at; Start 11; Stop 35
tttttccatcctcagactgaggtga

SEQ ID NO: 63106 - DNA, 25 bp, Artificial
  probe
  misc_feature (1)..(25): SEQ ID NO: 3236; WAN024AQ5_at; Start 6; Stop 30
gcctttttttccatcctcagactga

SEQ ID NO: 63107 - DNA, 25 bp, Artificial
  probe
  misc_feature (1)..(25): SEQ ID NO: 3236; WAN024AQ5_at; Start 7; Stop 31
cctttttttccatcctcagactgag

SEQ ID NO: 63108 - DNA, 25 bp, Artificial
  probe
  misc_feature (1)..(25): SEQ ID NO: 3236; WAN024AQ5_at; Start 19; Stop 43
tcctcagactgaggtgacttttttg

SEQ ID NO: 63109 - DNA, 25 bp, Artificial
  probe
  misc_feature (1)..(25): SEQ ID NO: 5965; WAN024AQ6_at; Start 66; Stop 90
caaaaaagcagttacacaactgcaa

SEQ ID NO: 63110 - DNA, 25 bp, Artificial
  probe
  misc_feature (1)..(25): SEQ ID NO: 5965; WAN024AQ6_at; Start 4; Stop 28
atatatcctcctaaaacgattgtag

SEQ ID NO: 63111 - DNA, 25 bp, Artificial
  probe
  misc_feature (1)..(25): SEQ ID NO: 5965; WAN024AQ6_at; Start 3; Stop 27
tatatatcctcctaaaacgattgta

SEQ ID NO: 63112 - DNA, 25 bp, Artificial
  probe
  misc_feature (1)..(25): SEQ ID NO: 5965; WAN024AQ6_at; Start 65; Stop 89
tcaaaaaagcagttacacaactgca

SEQ ID NO: 63113 - DNA, 25 bp, Artificial
  probe
  misc_feature (1)..(25): SEQ ID NO: 5965; WAN024AQ6_at; Start 70; Stop 94
aaagcagttacacaactgcaactgc

SEQ ID NO: 63114 - DNA, 25 bp, Artificial
  probe
  misc_feature (1)..(25): SEQ ID NO: 5965; WAN024AQ6_at; Start 64; Stop 88
ctcaaaaaagcagttacacaactgc

SEQ ID NO: 63115 - DNA, 25 bp, Artificial
  probe
  misc_feature (1)..(25): SEQ ID NO: 5965; WAN024AQ6_at; Start 73; Stop 97
gcagttacacaactgcaactgcttt

SEQ ID NO: 63116 - DNA, 25 bp, Artificial
  probe
  misc_feature (1)..(25): SEQ ID NO: 5965; WAN024AQ6_at; Start 47; Stop 71
tcaatatataaaaactcctcaaaaa

SEQ ID NO: 63117 - DNA, 25 bp, Artificial
  probe
  misc_feature (1)..(25): SEQ ID NO: 5965; WAN024AQ6_at; Start 67; Stop 91
aaaaaagcagttacacaactgcaac

SEQ ID NO: 63118 - DNA, 25 bp, Artificial
  probe
  misc_feature (1)..(25): SEQ ID NO: 5965; WAN024AQ6_at; Start 68; Stop 92
aaaaagcagttacacaactgcaact

SEQ ID NO: 63119 - DNA, 25 bp, Artificial
  probe
  misc_feature (1)..(25): SEQ ID NO: 5965; WAN024AQ6_at; Start 44; Stop 68
atgtcaatatataaaaactcctcaa

SEQ ID NO: 63120 - DNA, 25 bp, Artificial
  probe
  misc_feature (1)..(25): SEQ ID NO: 5965; WAN024AQ6_at; Start 74; Stop 98
cagttacacaactgcaactgctttt

SEQ ID NO: 63121 - DNA, 25 bp, Artificial
  probe
  misc_feature (1)..(25): SEQ ID NO: 5965; WAN024AQ6_at; Start 52; Stop 76
atataaaaactcctcaaaaaagcag

SEQ ID NO: 63122 - DNA, 25 bp, Artificial
  probe
  misc_feature (1)..(25): SEQ ID NO: 5965; WAN024AQ6_at; Start 61; Stop 85
ctcctcaaaaaagcagttacacaac

SEQ ID NO: 63123 - DNA, 25 bp, Artificial
  probe
  misc_feature (1)..(25): SEQ ID NO: 5965; WAN024AQ6_at; Start 72; Stop 96
agcagttacacaactgcaactgctt

SEQ ID NO: 63124 - DNA, 25 bp, Artificial
  probe
  misc_feature (1)..(25): SEQ ID NO: 5965; WAN024AQ6_at; Start 51; Stop 75
tatataaaaactcctcaaaaaagca

SEQ ID NO: 63125 - DNA, 25 bp, Artificial
  probe
  misc_feature (1)..(25): SEQ ID NO: 5965; WAN024AQ6_at; Start 59; Stop 83
aactcctcaaaaaagcagttacaca

SEQ ID NO: 63126 - DNA, 25 bp, Artificial
  probe
  misc_feature (1)..(25): SEQ ID NO: 5965; WAN024AQ6_at; Start 45; Stop 69
tgtcaatatataaaaactcctcaaa

SEQ ID NO: 63127 - DNA, 25 bp, Artificial
  probe
  misc_feature (1)..(25): SEQ ID NO: 5965; WAN024AQ6_at; Start 60; Stop 84
actcctcaaaaaagcagttacacaa

SEQ ID NO: 63128 - DNA, 25 bp, Artificial
  probe
  misc_feature (1)..(25): SEQ ID NO: 5965; WAN024AQ6_at; Start 62; Stop 86
tcctcaaaaaagcagttacacaact

SEQ ID NO: 63129 - DNA, 25 bp, Artificial
  probe
  misc_feature (1)..(25): SEQ ID NO: 5965; WAN024AQ6_at; Start 46; Stop 70
gtcaatatataaaaactcctcaaaa

SEQ ID NO: 63130 - DNA, 25 bp, Artificial
  probe
  misc_feature (1)..(25): SEQ ID NO: 5965; WAN024AQ6_at; Start 63; Stop 87
cctcaaaaaagcagttacacaactg

SEQ ID NO: 63131 - DNA, 25 bp, Artificial
  probe
  misc_feature (1)..(25): SEQ ID NO: 5965; WAN024AQ6_at; Start 69; Stop 93
aaaagcagttacacaactgcaactg

SEQ ID NO: 63132 - DNA, 25 bp, Artificial
  probe
  misc_feature (1)..(25): SEQ ID NO: 5965; WAN024AQ6_at; Start 71; Stop 95
aagcagttacacaactgcaactgct

SEQ ID NO: 63133 - DNA, 25 bp, Artificial
  probe
  misc_feature (1)..(25): SEQ ID NO: 79; WAN024AQ7_at; Start 11; Stop 35
gcagttgtgtaactgcttttttgag

SEQ ID NO: 63134 - DNA, 25 bp, Artificial
  probe
  misc_feature (1)..(25): SEQ ID NO: 79; WAN024AQ7_at; Start 23; Stop 47
ctgcttttttgaggagtttttatat

SEQ ID NO: 63135 - DNA, 25 bp, Artificial
  probe
  misc_feature (1)..(25): SEQ ID NO: 79; WAN024AQ7_at; Start 12; Stop 36
cagttgtgtaactgcttttttgagg

SEQ ID NO: 63136 - DNA, 25 bp, Artificial
  probe
  misc_feature (1)..(25): SEQ ID NO: 79; WAN024AQ7_at; Start 7; Stop 31
agttgcagttgtgtaactgcttttt

SEQ ID NO: 63137 - DNA, 25 bp, Artificial
  probe
  misc_feature (1)..(25): SEQ ID NO: 79; WAN024AQ7_at; Start 9; Stop 33
ttgcagttgtgtaactgcttttttg

SEQ ID NO: 63138 - DNA, 25 bp, Artificial
  probe
  misc_feature (1)..(25): SEQ ID NO: 79; WAN024AQ7_at; Start 6; Stop 30
cagttgcagttgtgtaactgctttt

SEQ ID NO: 63139 - DNA, 25 bp, Artificial
  probe
  misc_feature (1)..(25): SEQ ID NO: 79; WAN024AQ7_at; Start 4; Stop 28
agcagttgcagttgtgtaactgctt

SEQ ID NO: 63140 - DNA, 25 bp, Artificial
  probe
  misc_feature (1)..(25): SEQ ID NO: 79; WAN024AQ7_at; Start 28; Stop 52
tttttgaggagtttttatatattga

SEQ ID NO: 63141 - DNA, 25 bp, Artificial
  probe
  misc_feature (1)..(25): SEQ ID NO: 79; WAN024AQ7_at; Start 30; Stop 54
tttgaggagtttttatatattgaca

SEQ ID NO: 63142 - DNA, 25 bp, Artificial
  probe
  misc_feature (1)..(25): SEQ ID NO: 79; WAN024AQ7_at; Start 16; Stop 40
tgtgtaactgcttttttgaggagtt

SEQ ID NO: 63143 - DNA, 25 bp, Artificial
  probe
  misc_feature (1)..(25): SEQ ID NO: 79; WAN024AQ7_at; Start 14; Stop 38
gttgtgtaactgcttttttgaggag

SEQ ID NO: 63144 - DNA, 25 bp, Artificial
  probe
  misc_feature (1)..(25): SEQ ID NO: 79; WAN024AQ7_at; Start 13; Stop 37
agttgtgtaactgcttttttgagga

SEQ ID NO: 63145 - DNA, 25 bp, Artificial
  probe
  misc_feature (1)..(25): SEQ ID NO: 79; WAN024AQ7_at; Start 5; Stop 29
gcagttgcagttgtgtaactgcttt

SEQ ID NO: 63146 - DNA, 25 bp, Artificial
  probe
  misc_feature (1)..(25): SEQ ID NO: 79; WAN024AQ7_at; Start 3; Stop 27
aagcagttgcagttgtgtaactgct

SEQ ID NO: 63147 - DNA, 25 bp, Artificial
  probe
  misc_feature (1)..(25): SEQ ID NO: 79; WAN024AQ7_at; Start 72; Stop 96
tacaatcgttttaggaggatatata

SEQ ID NO: 63148 - DNA, 25 bp, Artificial
  probe
  misc_feature (1)..(25): SEQ ID NO: 79; WAN024AQ7_at; Start 8; Stop 32
gttgcagttgtgtaactgctttttt

SEQ ID NO: 63149 - DNA, 25 bp, Artificial
  probe
  misc_feature (1)..(25): SEQ ID NO: 79; WAN024AQ7_at; Start 1; Stop 25
aaaagcagttgcagttgtgtaactg

SEQ ID NO: 63150 - DNA, 25 bp, Artificial
  probe
  misc_feature (1)..(25): SEQ ID NO: 79; WAN024AQ7_at; Start 71; Stop 95
ctacaatcgttttaggaggatatat

SEQ ID NO: 63151 - DNA, 25 bp, Artificial
  probe
  misc_feature (1)..(25): SEQ ID NO: 79; WAN024AQ7_at; Start 31; Stop 55
ttgaggagtttttatatattgacat

SEQ ID NO: 63152 - DNA, 25 bp, Artificial
  probe
  misc_feature (1)..(25): SEQ ID NO: 79; WAN024AQ7_at; Start 10; Stop 34
tgcagttgtgtaactgcttttttga

SEQ ID NO: 63153 - DNA, 25 bp, Artificial
  probe
  misc_feature (1)..(25): SEQ ID NO: 79; WAN024AQ7_at; Start 2; Stop 26
aaagcagttgcagttgtgtaactgc

SEQ ID NO: 63154 - DNA, 25 bp, Artificial
  probe
  misc_feature (1)..(25): SEQ ID NO: 79; WAN024AQ7_at; Start 29; Stop 53
ttttgaggagtttttatatattgac

SEQ ID NO: 63155 - DNA, 25 bp, Artificial
  probe
  misc_feature (1)..(25): SEQ ID NO: 79; WAN024AQ7_at; Start 24; Stop 48
tgcttttttgaggagtttttatata

SEQ ID NO: 63156 - DNA, 25 bp, Artificial
  probe
  misc_feature (1)..(25): SEQ ID NO: 79; WAN024AQ7_at; Start 15; Stop 39
ttgtgtaactgcttttttgaggagt

SEQ ID NO: 63157 - DNA, 25 bp, Artificial
  probe
  misc_feature (1)..(25): SEQ ID NO: 4338; WAN024AQ8_at; Start 14; Stop 38
aagacctttctatatgtccacttta

SEQ ID NO: 63158 - DNA, 25 bp, Artificial
  probe
  misc_feature (1)..(25): SEQ ID NO: 4338; WAN024AQ8_at; Start 21; Stop 45
ttctatatgtccactttaaaaaatg

SEQ ID NO: 63159 - DNA, 25 bp, Artificial
  probe
  misc_feature (1)..(25): SEQ ID NO: 4338; WAN024AQ8_at; Start 16; Stop 40
gacctttctatatgtccactttaaa

SEQ ID NO: 63160 - DNA, 25 bp, Artificial
  probe
  misc_feature (1)..(25): SEQ ID NO: 4338; WAN024AQ8_at; Start 25; Stop 49
atatgtccactttaaaaaatgaggt

SEQ ID NO: 63161 - DNA, 25 bp, Artificial
  probe
  misc_feature (1)..(25): SEQ ID NO: 4338; WAN024AQ8_at; Start 30; Stop 54
tccactttaaaaaatgaggttgaga

SEQ ID NO: 63162 - DNA, 25 bp, Artificial
  probe
  misc_feature (1)..(25): SEQ ID NO: 4338; WAN024AQ8_at; Start 7; Stop 31
gtcttgcaagacctttctatatgtc

SEQ ID NO: 63163 - DNA, 25 bp, Artificial
  probe
  misc_feature (1)..(25): SEQ ID NO: 4338; WAN024AQ8_at; Start 23; Stop 47
ctatatgtccactttaaaaaatgag

SEQ ID NO: 63164 - DNA, 25 bp, Artificial
  probe
  misc_feature (1)..(25): SEQ ID NO: 4338; WAN024AQ8_at; Start 43; Stop 67
atgaggttgagaaaatttctcagcc

SEQ ID NO: 63165 - DNA, 25 bp, Artificial
  probe
  misc_feature (1)..(25): SEQ ID NO: 4338; WAN024AQ8_at; Start 27; Stop 51
atgtccactttaaaaaatgaggttg

SEQ ID NO: 63166 - DNA, 25 bp, Artificial
  probe
  misc_feature (1)..(25): SEQ ID NO: 4338; WAN024AQ8_at; Start 4; Stop 28
acagtcttgcaagacctttctatat

SEQ ID NO: 63167 - DNA, 25 bp, Artificial
  probe
  misc_feature (1)..(25): SEQ ID NO: 4338; WAN024AQ8_at; Start 28; Stop 52
tgtccactttaaaaaatgaggttga

SEQ ID NO: 63168 - DNA, 25 bp, Artificial
  probe
  misc_feature (1)..(25): SEQ ID NO: 4338; WAN024AQ8_at; Start 9; Stop 33
cttgcaagacctttctatatgtcca

SEQ ID NO: 63169 - DNA, 25 bp, Artificial
  probe
  misc_feature (1)..(25): SEQ ID NO: 4338; WAN024AQ8_at; Start 13; Stop 37
caagacctttctatatgtccacttt

SEQ ID NO: 63170 - DNA, 25 bp, Artificial
  probe
  misc_feature (1)..(25): SEQ ID NO: 4338; WAN024AQ8_at; Start 5; Stop 29
cagtcttgcaagacctttctatatg

SEQ ID NO: 63171 - DNA, 25 bp, Artificial
  probe
  misc_feature (1)..(25): SEQ ID NO: 4338; WAN024AQ8_at; Start 22; Stop 46
tctatatgtccactttaaaaaatga

SEQ ID NO: 63172 - DNA, 25 bp, Artificial
  probe
  misc_feature (1)..(25): SEQ ID NO: 4338; WAN024AQ8_at; Start 42; Stop 66
aatgaggttgagaaaatttctcagc

SEQ ID NO: 63173 - DNA, 25 bp, Artificial
  probe
  misc_feature (1)..(25): SEQ ID NO: 4338; WAN024AQ8_at; Start 3; Stop 27
tacagtcttgcaagacctttctata

SEQ ID NO: 63174 - DNA, 25 bp, Artificial
  probe
  misc_feature (1)..(25): SEQ ID NO: 4338; WAN024AQ8_at; Start 10; Stop 34
ttgcaagacctttctatatgtccac

SEQ ID NO: 63175 - DNA, 25 bp, Artificial
  probe
  misc_feature (1)..(25): SEQ ID NO: 4338; WAN024AQ8_at; Start 44; Stop 68
tgaggttgagaaaatttctcagccc

SEQ ID NO: 63176 - DNA, 25 bp, Artificial
  probe
  misc_feature (1)..(25): SEQ ID NO: 4338; WAN024AQ8_at; Start 8; Stop 32
tcttgcaagacctttctatatgtcc

SEQ ID NO: 63177 - DNA, 25 bp, Artificial
  probe
  misc_feature (1)..(25): SEQ ID NO: 4338; WAN024AQ8_at; Start 1; Stop 25
gttacagtcttgcaagacctttcta

SEQ ID NO: 63178 - DNA, 25 bp, Artificial
  probe
  misc_feature (1)..(25): SEQ ID NO: 4338; WAN024AQ8_at; Start 45; Stop 69
gaggttgagaaaatttctcagcccc

SEQ ID NO: 63179 - DNA, 25 bp, Artificial
  probe
  misc_feature (1)..(25): SEQ ID NO: 4338; WAN024AQ8_at; Start 24; Stop 48
tatatgtccactttaaaaaatgagg

SEQ ID NO: 63180 - DNA, 25 bp, Artificial
  probe
  misc_feature (1)..(25): SEQ ID NO: 4338; WAN024AQ8_at; Start 40; Stop 64
aaaatgaggttgagaaaatttctca

SEQ ID NO: 63181 - DNA, 25 bp, Artificial
  probe
  misc_feature (1)..(25): SEQ ID NO: 4338; WAN024AQ8_at; Start 11; Stop 35
tgcaagacctttctatatgtccact

SEQ ID NO: 63182 - DNA, 25 bp, Artificial
  probe
  misc_feature (1)..(25): SEQ ID NO: 4338; WAN024AQ8_at; Start 15; Stop 39
agacctttctatatgtccactttaa

SEQ ID NO: 63183 - DNA, 25 bp, Artificial
  probe
  misc_feature (1)..(25): SEQ ID NO: 4338; WAN024AQ8_at; Start 2; Stop 26
ttacagtcttgcaagacctttctat

SEQ ID NO: 63184 - DNA, 25 bp, Artificial
  probe
  misc_feature (1)..(25): SEQ ID NO: 4338; WAN024AQ8_at; Start 12; Stop 36
gcaagacctttctatatgtccactt

SEQ ID NO: 63185 - DNA, 25 bp, Artificial
  probe
  misc_feature (1)..(25): SEQ ID NO: 4338; WAN024AQ8_at; Start 41; Stop 65
aaatgaggttgagaaaatttctcag

SEQ ID NO: 63186 - DNA, 25 bp, Artificial
  probe
  misc_feature (1)..(25): SEQ ID NO: 4338; WAN024AQ8_at; Start 6; Stop 30
agtcttgcaagacctttctatatgt

SEQ ID NO: 63187 - DNA, 25 bp, Artificial
  probe
  misc_feature (1)..(25): SEQ ID NO: 3756; WAN024AQ9_at; Start 25; Stop 49
cattttttaaagtggacatatagaa

SEQ ID NO: 63188 - DNA, 25 bp, Artificial
  probe
  misc_feature (1)..(25): SEQ ID NO: 3756; WAN024AQ9_at; Start 34; Stop 58
aagtggacatatagaaaggtcttgc

SEQ ID NO: 63189 - DNA, 25 bp, Artificial
  probe
  misc_feature (1)..(25): SEQ ID NO: 3756; WAN024AQ9_at; Start 24; Stop 48
tcattttttaaagtggacatataga

SEQ ID NO: 63190 - DNA, 25 bp, Artificial
  probe
  misc_feature (1)..(25): SEQ ID NO: 3756; WAN024AQ9_at; Start 19; Stop 43
caacctcattttttaaagtggacat

SEQ ID NO: 63191 - DNA, 25 bp, Artificial
  probe
  misc_feature (1)..(25): SEQ ID NO: 3756; WAN024AQ9_at; Start 22; Stop 46
cctcattttttaaagtggacatata

SEQ ID NO: 63192 - DNA, 25 bp, Artificial
  probe
  misc_feature (1)..(25): SEQ ID NO: 3756; WAN024AQ9_at; Start 38; Stop 62
ggacatatagaaaggtcttgcaaga

SEQ ID NO: 63193 - DNA, 25 bp, Artificial
  probe
  misc_feature (1)..(25): SEQ ID NO: 3756; WAN024AQ9_at; Start 44; Stop 68
atagaaaggtcttgcaagactgtaa

SEQ ID NO: 63194 - DNA, 25 bp, Artificial
  probe
  misc_feature (1)..(25): SEQ ID NO: 3756; WAN024AQ9_at; Start 21; Stop 45
acctcattttttaaagtggacatat

SEQ ID NO: 63195 - DNA, 25 bp, Artificial
  probe
  misc_feature (1)..(25): SEQ ID NO: 3756; WAN024AQ9_at; Start 40; Stop 64
acatatagaaaggtcttgcaagact

SEQ ID NO: 63196 - DNA, 25 bp, Artificial
  probe
  misc_feature (1)..(25): SEQ ID NO: 3756; WAN024AQ9_at; Start 42; Stop 66
atatagaaaggtcttgcaagactgt

SEQ ID NO: 63197 - DNA, 25 bp, Artificial
  probe
  misc_feature (1)..(25): SEQ ID NO: 3756; WAN024AQ9_at; Start 45; Stop 69
tagaaaggtcttgcaagactgtaac

SEQ ID NO: 63198 - DNA, 25 bp, Artificial
  probe
  misc_feature (1)..(25): SEQ ID NO: 3756; WAN024AQ9_at; Start 36; Stop 60
gtggacatatagaaaggtcttgcaa

SEQ ID NO: 63199 - DNA, 25 bp, Artificial
  probe
  misc_feature (1)..(25): SEQ ID NO: 3756; WAN024AQ9_at; Start 41; Stop 65
catatagaaaggtcttgcaagactg

SEQ ID NO: 63200 - DNA, 25 bp, Artificial
  probe
  misc_feature (1)..(25): SEQ ID NO: 3756; WAN024AQ9_at; Start 4; Stop 28
gctgagaaattttctcaacctcatt

SEQ ID NO: 63201 - DNA, 25 bp, Artificial
  probe
  misc_feature (1)..(25): SEQ ID NO: 3756; WAN024AQ9_at; Start 39; Stop 63
gacatatagaaaggtcttgcaagac

SEQ ID NO: 63202 - DNA, 25 bp, Artificial
  probe
  misc_feature (1)..(25): SEQ ID NO: 3756; WAN024AQ9_at; Start 2; Stop 26
gggctgagaaattttctcaacctca

SEQ ID NO: 63203 - DNA, 25 bp, Artificial
  probe
  misc_feature (1)..(25): SEQ ID NO: 3756; WAN024AQ9_at; Start 1; Stop 25
ggggctgagaaattttctcaacctc

SEQ ID NO: 63204 - DNA, 25 bp, Artificial
  probe
  misc_feature (1)..(25): SEQ ID NO: 3756; WAN024AQ9_at; Start 18; Stop 42
tcaacctcattttttaaagtggaca

SEQ ID NO: 63205 - DNA, 25 bp, Artificial
  probe
  misc_feature (1)..(25): SEQ ID NO: 3756; WAN024AQ9_at; Start 33; Stop 57
aaagtggacatatagaaaggtcttg

SEQ ID NO: 63206 - DNA, 25 bp, Artificial
  probe
  misc_feature (1)..(25): SEQ ID NO: 3756; WAN024AQ9_at; Start 32; Stop 56
taaagtggacatatagaaaggtctt

SEQ ID NO: 63207 - DNA, 25 bp, Artificial
  probe
  misc_feature (1)..(25): SEQ ID NO: 3756; WAN024AQ9_at; Start 16; Stop 40
tctcaacctcattttttaaagtgga

SEQ ID NO: 63208 - DNA, 25 bp, Artificial
  probe
  misc_feature (1)..(25): SEQ ID NO: 3756; WAN024AQ9_at; Start 37; Stop 61
tggacatatagaaaggtcttgcaag

SEQ ID NO: 63209 - DNA, 25 bp, Artificial
  probe
  misc_feature (1)..(25): SEQ ID NO: 3756; WAN024AQ9_at; Start 31; Stop 55
ttaaagtggacatatagaaaggtct

SEQ ID NO: 63210 - DNA, 25 bp, Artificial
  probe
  misc_feature (1)..(25): SEQ ID NO: 3756; WAN024AQ9_at; Start 35; Stop 59
agtggacatatagaaaggtcttgca

SEQ ID NO: 63211 - DNA, 25 bp, Artificial
  probe
  misc_feature (1)..(25): SEQ ID NO: 3756; WAN024AQ9_at; Start 23; Stop 47
ctcattttttaaagtggacatatag

SEQ ID NO: 63212 - DNA, 25 bp, Artificial
  probe
  misc_feature (1)..(25): SEQ ID NO: 3756; WAN024AQ9_at; Start 30; Stop 54
tttaaagtggacatatagaaaggtc

SEQ ID NO: 63213 - DNA, 25 bp, Artificial
  probe
  misc_feature (1)..(25): SEQ ID NO: 3756; WAN024AQ9_at; Start 3; Stop 27
ggctgagaaattttctcaacctcat

SEQ ID NO: 63214 - DNA, 25 bp, Artificial
  probe
  misc_feature (1)..(25): SEQ ID NO: 3756; WAN024AQ9_at; Start 5; Stop 29
ctgagaaattttctcaacctcattt

SEQ ID NO: 63215 - DNA, 25 bp, Artificial
  probe
  misc_feature (1)..(25): SEQ ID NO: 3756; WAN024AQ9_at; Start 6; Stop 30
tgagaaattttctcaacctcatttt

SEQ ID NO: 63216 - DNA, 25 bp, Artificial
  probe
  misc_feature (1)..(25): SEQ ID NO: 3756; WAN024AQ9_at; Start 43; Stop 67
tatagaaaggtcttgcaagactgta

SEQ ID NO: 63217 - DNA, 25 bp, Artificial
  probe
  misc_feature (1)..(25): SEQ ID NO: 3828; WAN024AQA_at; Start 16; Stop 40
cgcttgctagtattattatataaaa

SEQ ID NO: 63218 - DNA, 25 bp, Artificial
  probe
  misc_feature (1)..(25): SEQ ID NO: 3828; WAN024AQA_at; Start 6; Stop 30
tctccattctcgcttgctagtatta

SEQ ID NO: 63219 - DNA, 25 bp, Artificial
  probe
  misc_feature (1)..(25): SEQ ID NO: 3828; WAN024AQA_at; Start 15; Stop 39
tcgcttgctagtattattatataaa

SEQ ID NO: 63220 - DNA, 25 bp, Artificial
  probe
  misc_feature (1)..(25): SEQ ID NO: 3828; WAN024AQA_at; Start 20; Stop 44
tgctagtattattatataaaaaaag

SEQ ID NO: 63221 - DNA, 25 bp, Artificial
  probe
  misc_feature (1)..(25): SEQ ID NO: 3828; WAN024AQA_at; Start 10; Stop 34
cattctcgcttgctagtattattat

SEQ ID NO: 63222 - DNA, 25 bp, Artificial
  probe
  misc_feature (1)..(25): SEQ ID NO: 3828; WAN024AQA_at; Start 5; Stop 29
ctctccattctcgcttgctagtatt

SEQ ID NO: 63223 - DNA, 25 bp, Artificial
  probe
  misc_feature (1)..(25): SEQ ID NO: 3828; WAN024AQA_at; Start 12; Stop 36
ttctcgcttgctagtattattatat

SEQ ID NO: 63224 - DNA, 25 bp, Artificial
  probe
  misc_feature (1)..(25): SEQ ID NO: 3828; WAN024AQA_at; Start 3; Stop 27
ctctctccattctcgcttgctagta

SEQ ID NO: 63225 - DNA, 25 bp, Artificial
  probe
  misc_feature (1)..(25): SEQ ID NO: 3828; WAN024AQA_at; Start 2; Stop 26
tctctctccattctcgcttgctagt

SEQ ID NO: 63226 - DNA, 25 bp, Artificial
  probe
  misc_feature (1)..(25): SEQ ID NO: 3828; WAN024AQA_at; Start 23; Stop 47
tagtattattatataaaaaaaggca

SEQ ID NO: 63227 - DNA, 25 bp, Artificial
  probe
  misc_feature (1)..(25): SEQ ID NO: 3828; WAN024AQA_at; Start 43; Stop 67
aggcaaacaaaaatcaaggtcaaag

SEQ ID NO: 63228 - DNA, 25 bp, Artificial
  probe
  misc_feature (1)..(25): SEQ ID NO: 3828; WAN024AQA_at; Start 4; Stop 28
tctctccattctcgcttgctagtat

SEQ ID NO: 63229 - DNA, 25 bp, Artificial
  probe
  misc_feature (1)..(25): SEQ ID NO: 3828; WAN024AQA_at; Start 13; Stop 37
tctcgcttgctagtattattatata

SEQ ID NO: 63230 - DNA, 25 bp, Artificial
  probe
  misc_feature (1)..(25): SEQ ID NO: 3828; WAN024AQA_at; Start 11; Stop 35
attctcgcttgctagtattattata

SEQ ID NO: 63231 - DNA, 25 bp, Artificial
  probe
  misc_feature (1)..(25): SEQ ID NO: 3828; WAN024AQA_at; Start 14; Stop 38
ctcgcttgctagtattattatataa

SEQ ID NO: 63232 - DNA, 25 bp, Artificial
  probe
  misc_feature (1)..(25): SEQ ID NO: 3828; WAN024AQA_at; Start 8; Stop 32
tccattctcgcttgctagtattatt

SEQ ID NO: 63233 - DNA, 25 bp, Artificial
  probe
  misc_feature (1)..(25): SEQ ID NO: 3828; WAN024AQA_at; Start 18; Stop 42
cttgctagtattattatataaaaaa

SEQ ID NO: 63234 - DNA, 25 bp, Artificial
  probe
  misc_feature (1)..(25): SEQ ID NO: 3828; WAN024AQA_at; Start 44; Stop 68
ggcaaacaaaaatcaaggtcaaagc

SEQ ID NO: 63235 - DNA, 25 bp, Artificial
  probe
  misc_feature (1)..(25): SEQ ID NO: 3828; WAN024AQA_at; Start 1; Stop 25
gtctctctccattctcgcttgctag

SEQ ID NO: 63236 - DNA, 25 bp, Artificial
  probe
  misc_feature (1)..(25): SEQ ID NO: 3828; WAN024AQA_at; Start 17; Stop 41
gcttgctagtattattatataaaaa

SEQ ID NO: 63237 - DNA, 25 bp, Artificial
  probe
  misc_feature (1)..(25): SEQ ID NO: 3828; WAN024AQA_at; Start 7; Stop 31
ctccattctcgcttgctagtattat

SEQ ID NO: 63238 - DNA, 25 bp, Artificial
  probe
  misc_feature (1)..(25): SEQ ID NO: 3828; WAN024AQA_at; Start 9; Stop 33
ccattctcgcttgctagtattatta

SEQ ID NO: 63239 - DNA, 25 bp, Artificial
  probe
  misc_feature (1)..(25): SEQ ID NO: 3828; WAN024AQA_at; Start 45; Stop 69
gcaaacaaaaatcaaggtcaaagct

SEQ ID NO: 63240 - DNA, 25 bp, Artificial
  probe
  misc_feature (1)..(25): SEQ ID NO: 456; WAN024AQB_at; Start 26; Stop 50
ctttttttatataataatactagca

SEQ ID NO: 63241 - DNA, 25 bp, Artificial
  probe
  misc_feature (1)..(25): SEQ ID NO: 456; WAN024AQB_at; Start 41; Stop 65
aatactagcaagcgagaatggagag

SEQ ID NO: 63242 - DNA, 25 bp, Artificial
  probe
  misc_feature (1)..(25): SEQ ID NO: 456; WAN024AQB_at; Start 32; Stop 56
ttatataataatactagcaagcgag

SEQ ID NO: 63243 - DNA, 25 bp, Artificial
  probe
  misc_feature (1)..(25): SEQ ID NO: 456; WAN024AQB_at; Start 42; Stop 66
atactagcaagcgagaatggagaga

SEQ ID NO: 63244 - DNA, 25 bp, Artificial
  probe
  misc_feature (1)..(25): SEQ ID NO: 456; WAN024AQB_at; Start 45; Stop 69
ctagcaagcgagaatggagagagac

SEQ ID NO: 63245 - DNA, 25 bp, Artificial
  probe
  misc_feature (1)..(25): SEQ ID NO: 456; WAN024AQB_at; Start 35; Stop 59
tataataatactagcaagcgagaat

SEQ ID NO: 63246 - DNA, 25 bp, Artificial
  probe
  misc_feature (1)..(25): SEQ ID NO: 456; WAN024AQB_at; Start 2; Stop 26
gctttgaccttgatttttgtttgcc

SEQ ID NO: 63247 - DNA, 25 bp, Artificial
  probe
  misc_feature (1)..(25): SEQ ID NO: 456; WAN024AQB_at; Start 28; Stop 52
ttttttatataataatactagcaag

SEQ ID NO: 63248 - DNA, 25 bp, Artificial
  probe
  misc_feature (1)..(25): SEQ ID NO: 456; WAN024AQB_at; Start 27; Stop 51
tttttttatataataatactagcaa

SEQ ID NO: 63249 - DNA, 25 bp, Artificial
  probe
  misc_feature (1)..(25): SEQ ID NO: 456; WAN024AQB_at; Start 29; Stop 53
tttttatataataatactagcaagc

SEQ ID NO: 63250 - DNA, 25 bp, Artificial
  probe
  misc_feature (1)..(25): SEQ ID NO: 456; WAN024AQB_at; Start 30; Stop 54
ttttatataataatactagcaagcg

SEQ ID NO: 63251 - DNA, 25 bp, Artificial
  probe
  misc_feature (1)..(25): SEQ ID NO: 456; WAN024AQB_at; Start 38; Stop 62
aataatactagcaagcgagaatgga

SEQ ID NO: 63252 - DNA, 25 bp, Artificial
  probe
  misc_feature (1)..(25): SEQ ID NO: 456; WAN024AQB_at; Start 34; Stop 58
atataataatactagcaagcgagaa

SEQ ID NO: 63253 - DNA, 25 bp, Artificial
  probe
  misc_feature (1)..(25): SEQ ID NO: 456; WAN024AQB_at; Start 31; Stop 55
tttatataataatactagcaagcga

SEQ ID NO: 63254 - DNA, 25 bp, Artificial
  probe
  misc_feature (1)..(25): SEQ ID NO: 456; WAN024AQB_at; Start 33; Stop 57
tatataataatactagcaagcgaga

SEQ ID NO: 63255 - DNA, 25 bp, Artificial
  probe
  misc_feature (1)..(25): SEQ ID NO: 456; WAN024AQB_at; Start 37; Stop 61
taataatactagcaagcgagaatgg

SEQ ID NO: 63256 - DNA, 25 bp, Artificial
  probe
  misc_feature (1)..(25): SEQ ID NO: 456; WAN024AQB_at; Start 23; Stop 47
tgcctttttttatataataatacta

SEQ ID NO: 63257 - DNA, 25 bp, Artificial
  probe
  misc_feature (1)..(25): SEQ ID NO: 456; WAN024AQB_at; Start 39; Stop 63
ataatactagcaagcgagaatggag

SEQ ID NO: 63258 - DNA, 25 bp, Artificial
  probe
  misc_feature (1)..(25): SEQ ID NO: 456; WAN024AQB_at; Start 40; Stop 64
taatactagcaagcgagaatggaga

SEQ ID NO: 63259 - DNA, 25 bp, Artificial
  probe
  misc_feature (1)..(25): SEQ ID NO: 456; WAN024AQB_at; Start 36; Stop 60
ataataatactagcaagcgagaatg

SEQ ID NO: 63260 - DNA, 25 bp, Artificial
  probe
  misc_feature (1)..(25): SEQ ID NO: 456; WAN024AQB_at; Start 3; Stop 27
ctttgaccttgatttttgtttgcct

SEQ ID NO: 63261 - DNA, 25 bp, Artificial
  probe
  misc_feature (1)..(25): SEQ ID NO: 456; WAN024AQB_at; Start 44; Stop 68
actagcaagcgagaatggagagaga

SEQ ID NO: 63262 - DNA, 25 bp, Artificial
  probe
  misc_feature (1)..(25): SEQ ID NO: 456; WAN024AQB_at; Start 1; Stop 25
agctttgaccttgatttttgtttgc

SEQ ID NO: 63263 - DNA, 25 bp, Artificial
  probe
  misc_feature (1)..(25): SEQ ID NO: 456; WAN024AQB_at; Start 43; Stop 67
tactagcaagcgagaatggagagag

SEQ ID NO: 63264 - DNA, 25 bp, Artificial
  probe
  misc_feature (1)..(25): SEQ ID NO: 5928; WAN024AQC_at; Start 37; Stop 61
gtgatgttattgtaccaataaggag

SEQ ID NO: 63265 - DNA, 25 bp, Artificial
  probe
  misc_feature (1)..(25): SEQ ID NO: 5928; WAN024AQC_at; Start 28; Stop 52
tataataaagtgatgttattgtacc

SEQ ID NO: 63266 - DNA, 25 bp, Artificial
  probe
  misc_feature (1)..(25): SEQ ID NO: 5928; WAN024AQC_at; Start 23; Stop 47
tatggtataataaagtgatgttatt

SEQ ID NO: 63267 - DNA, 25 bp, Artificial
  probe
  misc_feature (1)..(25): SEQ ID NO: 5928; WAN024AQC_at; Start 7; Stop 31
ccctttctgtgcaaattatggtata

SEQ ID NO: 63268 - DNA, 25 bp, Artificial
  probe
  misc_feature (1)..(25): SEQ ID NO: 5928; WAN024AQC_at; Start 3; Stop 27
ttaaccctttctgtgcaaattatgg

SEQ ID NO: 63269 - DNA, 25 bp, Artificial
  probe
  misc_feature (1)..(25): SEQ ID NO: 5928; WAN024AQC_at; Start 27; Stop 51
gtataataaagtgatgttattgtac

SEQ ID NO: 63270 - DNA, 25 bp, Artificial
  probe
  misc_feature (1)..(25): SEQ ID NO: 5928; WAN024AQC_at; Start 36; Stop 60
agtgatgttattgtaccaataagga

SEQ ID NO: 63271 - DNA, 25 bp, Artificial
  probe
  misc_feature (1)..(25): SEQ ID NO: 5928; WAN024AQC_at; Start 22; Stop 46
ttatggtataataaagtgatgttat

SEQ ID NO: 63272 - DNA, 25 bp, Artificial
  probe
  misc_feature (1)..(25): SEQ ID NO: 5928; WAN024AQC_at; Start 29; Stop 53
ataataaagtgatgttattgtacca

SEQ ID NO: 63273 - DNA, 25 bp, Artificial
  probe
  misc_feature (1)..(25): SEQ ID NO: 5928; WAN024AQC_at; Start 31; Stop 55
aataaagtgatgttattgtaccaat

SEQ ID NO: 63274 - DNA, 25 bp, Artificial
  probe
  misc_feature (1)..(25): SEQ ID NO: 5928; WAN024AQC_at; Start 6; Stop 30
accctttctgtgcaaattatggtat

SEQ ID NO: 63275 - DNA, 25 bp, Artificial
  probe
  misc_feature (1)..(25): SEQ ID NO: 5928; WAN024AQC_at; Start 2; Stop 26
tttaaccctttctgtgcaaattatg

SEQ ID NO: 63276 - DNA, 25 bp, Artificial
  probe
  misc_feature (1)..(25): SEQ ID NO: 5928; WAN024AQC_at; Start 26; Stop 50
ggtataataaagtgatgttattgta

SEQ ID NO: 63277 - DNA, 25 bp, Artificial
  probe
  misc_feature (1)..(25): SEQ ID NO: 5928; WAN024AQC_at; Start 41; Stop 65
tgttattgtaccaataaggagaatt

SEQ ID NO: 63278 - DNA, 25 bp, Artificial
  probe
  misc_feature (1)..(25): SEQ ID NO: 5928; WAN024AQC_at; Start 4; Stop 28
taaccctttctgtgcaaattatggt

SEQ ID NO: 63279 - DNA, 25 bp, Artificial
  probe
  misc_feature (1)..(25): SEQ ID NO: 5928; WAN024AQC_at; Start 39; Stop 63
gatgttattgtaccaataaggagaa

SEQ ID NO: 63280 - DNA, 25 bp, Artificial
  probe
  misc_feature (1)..(25): SEQ ID NO: 5928; WAN024AQC_at; Start 38; Stop 62
tgatgttattgtaccaataaggaga

SEQ ID NO: 63281 - DNA, 25 bp, Artificial
  probe
  misc_feature (1)..(25): SEQ ID NO: 5928; WAN024AQC_at; Start 25; Stop 49
tggtataataaagtgatgttattgt

SEQ ID NO: 63282 - DNA, 25 bp, Artificial
  probe
  misc_feature (1)..(25): SEQ ID NO: 5928; WAN024AQC_at; Start 5; Stop 29
aaccctttctgtgcaaattatggta

SEQ ID NO: 63283 - DNA, 25 bp, Artificial
  probe
  misc_feature (1)..(25): SEQ ID NO: 5928; WAN024AQC_at; Start 40; Stop 64
atgttattgtaccaataaggagaat

SEQ ID NO: 63284 - DNA, 25 bp, Artificial
  probe
  misc_feature (1)..(25): SEQ ID NO: 5928; WAN024AQC_at; Start 32; Stop 56
ataaagtgatgttattgtaccaata

SEQ ID NO: 63285 - DNA, 25 bp, Artificial
  probe
  misc_feature (1)..(25): SEQ ID NO: 5928; WAN024AQC_at; Start 34; Stop 58
aaagtgatgttattgtaccaataag

SEQ ID NO: 63286 - DNA, 25 bp, Artificial
  probe
  misc_feature (1)..(25): SEQ ID NO: 5928; WAN024AQC_at; Start 30; Stop 54
taataaagtgatgttattgtaccaa

SEQ ID NO: 63287 - DNA, 25 bp, Artificial
  probe
  misc_feature (1)..(25): SEQ ID NO: 5928; WAN024AQC_at; Start 9; Stop 33
ctttctgtgcaaattatggtataat

SEQ ID NO: 63288 - DNA, 25 bp, Artificial
  probe
  misc_feature (1)..(25): SEQ ID NO: 5928; WAN024AQC_at; Start 21; Stop 45
attatggtataataaagtgatgtta

SEQ ID NO: 63289 - DNA, 25 bp, Artificial
  probe
  misc_feature (1)..(25): SEQ ID NO: 5928; WAN024AQC_at; Start 20; Stop 44
aattatggtataataaagtgatgtt

SEQ ID NO: 63290 - DNA, 25 bp, Artificial
  probe
  misc_feature (1)..(25): SEQ ID NO: 5928; WAN024AQC_at; Start 24; Stop 48
atggtataataaagtgatgttattg

SEQ ID NO: 63291 - DNA, 25 bp, Artificial
  probe
  misc_feature (1)..(25): SEQ ID NO: 5928; WAN024AQC_at; Start 8; Stop 32
cctttctgtgcaaattatggtataa

SEQ ID NO: 63292 - DNA, 25 bp, Artificial
  probe
  misc_feature (1)..(25): SEQ ID NO: 5928; WAN024AQC_at; Start 33; Stop 57
taaagtgatgttattgtaccaataa

SEQ ID NO: 63293 - DNA, 25 bp, Artificial
  probe
  misc_feature (1)..(25): SEQ ID NO: 5928; WAN024AQC_at; Start 35; Stop 59
aagtgatgttattgtaccaataagg

SEQ ID NO: 63294 - DNA, 25 bp, Artificial
  probe
  misc_feature (1)..(25): SEQ ID NO: 298; WAN024AQD_at; Start 20; Stop 44
ataacatcactttattataccataa

SEQ ID NO: 63295 - DNA, 25 bp, Artificial
  probe
  misc_feature (1)..(25): SEQ ID NO: 298; WAN024AQD_at; Start 4; Stop 28
tctccttattggtacaataacatca

SEQ ID NO: 63296 - DNA, 25 bp, Artificial
  probe
  misc_feature (1)..(25): SEQ ID NO: 298; WAN024AQD_at; Start 34; Stop 58
ttataccataatttgcacagaaagg

SEQ ID NO: 63297 - DNA, 25 bp, Artificial
  probe
  misc_feature (1)..(25): SEQ ID NO: 298; WAN024AQD_at; Start 39; Stop 63
ccataatttgcacagaaagggttaa

SEQ ID NO: 63298 - DNA, 25 bp, Artificial
  probe
  misc_feature (1)..(25): SEQ ID NO: 298; WAN024AQD_at; Start 37; Stop 61
taccataatttgcacagaaagggtt

SEQ ID NO: 63299 - DNA, 25 bp, Artificial
  probe
  misc_feature (1)..(25): SEQ ID NO: 298; WAN024AQD_at; Start 40; Stop 64
cataatttgcacagaaagggttaaa

SEQ ID NO: 63300 - DNA, 25 bp, Artificial
  probe
  misc_feature (1)..(25): SEQ ID NO: 298; WAN024AQD_at; Start 16; Stop 40
tacaataacatcactttattatacc

SEQ ID NO: 63301 - DNA, 25 bp, Artificial
  probe
  misc_feature (1)..(25): SEQ ID NO: 298; WAN024AQD_at; Start 14; Stop 38
ggtacaataacatcactttattata

SEQ ID NO: 63302 - DNA, 25 bp, Artificial
  probe
  misc_feature (1)..(25): SEQ ID NO: 298; WAN024AQD_at; Start 12; Stop 36
ttggtacaataacatcactttatta

SEQ ID NO: 63303 - DNA, 25 bp, Artificial
  probe
  misc_feature (1)..(25): SEQ ID NO: 298; WAN024AQD_at; Start 38; Stop 62
accataatttgcacagaaagggtta

SEQ ID NO: 63304 - DNA, 25 bp, Artificial
  probe
  misc_feature (1)..(25): SEQ ID NO: 298; WAN024AQD_at; Start 36; Stop 60
ataccataatttgcacagaaagggt

SEQ ID NO: 63305 - DNA, 25 bp, Artificial
  probe
  misc_feature (1)..(25): SEQ ID NO: 298; WAN024AQD_at; Start 17; Stop 41
acaataacatcactttattatacca

SEQ ID NO: 63306 - DNA, 25 bp, Artificial
  probe
  misc_feature (1)..(25): SEQ ID NO: 298; WAN024AQD_at; Start 2; Stop 26
attctccttattggtacaataacat

SEQ ID NO: 63307 - DNA, 25 bp, Artificial
  probe
  misc_feature (1)..(25): SEQ ID NO: 298; WAN024AQD_at; Start 1; Stop 25
aattctccttattggtacaataaca

SEQ ID NO: 63308 - DNA, 25 bp, Artificial
  probe
  misc_feature (1)..(25): SEQ ID NO: 298; WAN024AQD_at; Start 35; Stop 59
tataccataatttgcacagaaaggg

SEQ ID NO: 63309 - DNA, 25 bp, Artificial
  probe
  misc_feature (1)..(25): SEQ ID NO: 298; WAN024AQD_at; Start 6; Stop 30
tccttattggtacaataacatcact

SEQ ID NO: 63310 - DNA, 25 bp, Artificial
  probe
  misc_feature (1)..(25): SEQ ID NO: 298; WAN024AQD_at; Start 8; Stop 32
cttattggtacaataacatcacttt

SEQ ID NO: 63311 - DNA, 25 bp, Artificial
  probe
  misc_feature (1)..(25): SEQ ID NO: 298; WAN024AQD_at; Start 18; Stop 42
caataacatcactttattataccat

SEQ ID NO: 63312 - DNA, 25 bp, Artificial
  probe
  misc_feature (1)..(25): SEQ ID NO: 298; WAN024AQD_at; Start 7; Stop 31
ccttattggtacaataacatcactt

SEQ ID NO: 63313 - DNA, 25 bp, Artificial
  probe
  misc_feature (1)..(25): SEQ ID NO: 298; WAN024AQD_at; Start 21; Stop 45
taacatcactttattataccataat

SEQ ID NO: 63314 - DNA, 25 bp, Artificial
  probe
  misc_feature (1)..(25): SEQ ID NO: 298; WAN024AQD_at; Start 11; Stop 35
attggtacaataacatcactttatt

SEQ ID NO: 63315 - DNA, 25 bp, Artificial
  probe
  misc_feature (1)..(25): SEQ ID NO: 298; WAN024AQD_at; Start 15; Stop 39
gtacaataacatcactttattatac

SEQ ID NO: 63316 - DNA, 25 bp, Artificial
  probe
  misc_feature (1)..(25): SEQ ID NO: 298; WAN024AQD_at; Start 33; Stop 57
attataccataatttgcacagaaag

SEQ ID NO: 63317 - DNA, 25 bp, Artificial
  probe
  misc_feature (1)..(25): SEQ ID NO: 298; WAN024AQD_at; Start 3; Stop 27
ttctccttattggtacaataacatc

SEQ ID NO: 63318 - DNA, 25 bp, Artificial
  probe
  misc_feature (1)..(25): SEQ ID NO: 298; WAN024AQD_at; Start 19; Stop 43
aataacatcactttattataccata

SEQ ID NO: 63319 - DNA, 25 bp, Artificial
  probe
  misc_feature (1)..(25): SEQ ID NO: 298; WAN024AQD_at; Start 10; Stop 34
tattggtacaataacatcactttat

SEQ ID NO: 63320 - DNA, 25 bp, Artificial
  probe
  misc_feature (1)..(25): SEQ ID NO: 298; WAN024AQD_at; Start 5; Stop 29
ctccttattggtacaataacatcac

SEQ ID NO: 63321 - DNA, 25 bp, Artificial
  probe
  misc_feature (1)..(25): SEQ ID NO: 298; WAN024AQD_at; Start 13; Stop 37
tggtacaataacatcactttattat

SEQ ID NO: 63322 - DNA, 25 bp, Artificial
  probe
  misc_feature (1)..(25): SEQ ID NO: 298; WAN024AQD_at; Start 22; Stop 46
aacatcactttattataccataatt

SEQ ID NO: 63323 - DNA, 25 bp, Artificial
  probe
  misc_feature (1)..(25): SEQ ID NO: 298; WAN024AQD_at; Start 9; Stop 33
ttattggtacaataacatcacttta

SEQ ID NO: 63324 - DNA, 25 bp, Artificial
  probe
  misc_feature (1)..(25): SEQ ID NO: 4572; WAN024AQE_at; Start 68; Stop 92
cagaaaaagcctgagaagatgtctt

SEQ ID NO: 63325 - DNA, 25 bp, Artificial
  probe
  misc_feature (1)..(25): SEQ ID NO: 4572; WAN024AQE_at; Start 82; Stop 106
gaagatgtcttctcaggcttttgtt

SEQ ID NO: 63326 - DNA, 25 bp, Artificial
  probe
  misc_feature (1)..(25): SEQ ID NO: 4572; WAN024AQE_at; Start 93; Stop 117
ctcaggcttttgttaagcacataaa

SEQ ID NO: 63327 - DNA, 25 bp, Artificial
  probe
  misc_feature (1)..(25): SEQ ID NO: 4572; WAN024AQE_at; Start 59; Stop 83
tttatagtacagaaaaagcctgaga

SEQ ID NO: 63328 - DNA, 25 bp, Artificial
  probe
  misc_feature (1)..(25): SEQ ID NO: 4572; WAN024AQE_at; Start 71; Stop 95
aaaaagcctgagaagatgtcttctc

SEQ ID NO: 63329 - DNA, 25 bp, Artificial
  probe
  misc_feature (1)..(25): SEQ ID NO: 4572; WAN024AQE_at; Start 108; Stop 132
agcacataaatacaatagtgctatg

SEQ ID NO: 63330 - DNA, 25 bp, Artificial
  probe
  misc_feature (1)..(25): SEQ ID NO: 4572; WAN024AQE_at; Start 91; Stop 115
ttctcaggcttttgttaagcacata

SEQ ID NO: 63331 - DNA, 25 bp, Artificial
  probe
  misc_feature (1)..(25): SEQ ID NO: 4572; WAN024AQE_at; Start 127; Stop 151
gctatgacaaaatcacccagaaaaa

SEQ ID NO: 63332 - DNA, 25 bp, Artificial
  probe
  misc_feature (1)..(25): SEQ ID NO: 4572; WAN024AQE_at; Start 66; Stop 90
tacagaaaaagcctgagaagatgtc

SEQ ID NO: 63333 - DNA, 25 bp, Artificial
  probe
  misc_feature (1)..(25): SEQ ID NO: 4572; WAN024AQE_at; Start 134; Stop 158
caaaatcacccagaaaaatctgggt

SEQ ID NO: 63334 - DNA, 25 bp, Artificial
  probe
  misc_feature (1)..(25): SEQ ID NO: 4572; WAN024AQE_at; Start 97; Stop 121
ggcttttgttaagcacataaataca

SEQ ID NO: 63335 - DNA, 25 bp, Artificial
  probe
  misc_feature (1)..(25): SEQ ID NO: 4572; WAN024AQE_at; Start 129; Stop 153
tatgacaaaatcacccagaaaaatc

SEQ ID NO: 63336 - DNA, 25 bp, Artificial
  probe
  misc_feature (1)..(25): SEQ ID NO: 4572; WAN024AQE_at; Start 132; Stop 156
gacaaaatcacccagaaaaatctgg

SEQ ID NO: 63337 - DNA, 25 bp, Artificial
  probe
  misc_feature (1)..(25): SEQ ID NO: 4572; WAN024AQE_at; Start 123; Stop 147
tagtgctatgacaaaatcacccaga

SEQ ID NO: 63338 - DNA, 25 bp, Artificial
  probe
  misc_feature (1)..(25): SEQ ID NO: 4572; WAN024AQE_at; Start 61; Stop 85
tatagtacagaaaaagcctgagaag

SEQ ID NO: 63339 - DNA, 25 bp, Artificial
  probe
  misc_feature (1)..(25): SEQ ID NO: 4572; WAN024AQE_at; Start 47; Stop 71
tttccaatgaggtttatagtacaga

SEQ ID NO: 63340 - DNA, 25 bp, Artificial
  probe
  misc_feature (1)..(25): SEQ ID NO: 4572; WAN024AQE_at; Start 63; Stop 87
tagtacagaaaaagcctgagaagat

SEQ ID NO: 63341 - DNA, 25 bp, Artificial
  probe
  misc_feature (1)..(25): SEQ ID NO: 4572; WAN024AQE_at; Start 89; Stop 113
tcttctcaggcttttgttaagcaca

SEQ ID NO: 63342 - DNA, 25 bp, Artificial
  probe
  misc_feature (1)..(25): SEQ ID NO: 4572; WAN024AQE_at; Start 120; Stop 144
caatagtgctatgacaaaatcaccc

SEQ ID NO: 63343 - DNA, 25 bp, Artificial
  probe
  misc_feature (1)..(25): SEQ ID NO: 4572; WAN024AQE_at; Start 70; Stop 94
gaaaaagcctgagaagatgtcttct

SEQ ID NO: 63344 - DNA, 25 bp, Artificial
  probe
  misc_feature (1)..(25): SEQ ID NO: 4572; WAN024AQE_at; Start 54; Stop 78
tgaggtttatagtacagaaaaagcc

SEQ ID NO: 63345 - DNA, 25 bp, Artificial
  probe
  misc_feature (1)..(25): SEQ ID NO: 4572; WAN024AQE_at; Start 38; Stop 62
tctctatcttttccaatgaggttta

SEQ ID NO: 63346 - DNA, 25 bp, Artificial
  probe
  misc_feature (1)..(25): SEQ ID NO: 4572; WAN024AQE_at; Start 44; Stop 68
tcttttccaatgaggtttatagtac

SEQ ID NO: 63347 - DNA, 25 bp, Artificial
  probe
  misc_feature (1)..(25): SEQ ID NO: 4572; WAN024AQE_at; Start 36; Stop 60
agtctctatcttttccaatgaggtt

SEQ ID NO: 63348 - DNA, 25 bp, Artificial
  probe
  misc_feature (1)..(25): SEQ ID NO: 4572; WAN024AQE_at; Start 95; Stop 119
caggcttttgttaagcacataaata

SEQ ID NO: 63349 - DNA, 25 bp, Artificial
  probe
  misc_feature (1)..(25): SEQ ID NO: 4572; WAN024AQE_at; Start 57; Stop 81
ggtttatagtacagaaaaagcctga

SEQ ID NO: 63350 - DNA, 25 bp, Artificial
  probe
  misc_feature (1)..(25): SEQ ID NO: 4572; WAN024AQE_at; Start 50; Stop 74
ccaatgaggtttatagtacagaaaa

SEQ ID NO: 63351 - DNA, 25 bp, Artificial
  probe
  misc_feature (1)..(25): SEQ ID NO: 4572; WAN024AQE_at; Start 49; Stop 73
tccaatgaggtttatagtacagaaa

SEQ ID NO: 63352 - DNA, 25 bp, Artificial
  probe
  misc_feature (1)..(25): SEQ ID NO: 4572; WAN024AQE_at; Start 125; Stop 149
gtgctatgacaaaatcacccagaaa

SEQ ID NO: 63353 - DNA, 25 bp, Artificial
  probe
  misc_feature (1)..(25): SEQ ID NO: 4572; WAN024AQE_at; Start 103; Stop 127
tgttaagcacataaatacaatagtg

SEQ ID NO: 63354 - DNA, 25 bp, Artificial
  probe
  misc_feature (1)..(25): SEQ ID NO: 4572; WAN024AQE_at; Start 121; Stop 145
aatagtgctatgacaaaatcaccca

SEQ ID NO: 63355 - DNA, 25 bp, Artificial
  probe
  misc_feature (1)..(25): SEQ ID NO: 4572; WAN024AQE_at; Start 124; Stop 148
agtgctatgacaaaatcacccagaa

SEQ ID NO: 63356 - DNA, 25 bp, Artificial
  probe
  misc_feature (1)..(25): SEQ ID NO: 4572; WAN024AQE_at; Start 142; Stop 166
cccagaaaaatctgggtgataaatg

SEQ ID NO: 63357 - DNA, 25 bp, Artificial
  probe
  misc_feature (1)..(25): SEQ ID NO: 4572; WAN024AQE_at; Start 85; Stop 109
gatgtcttctcaggcttttgttaag

SEQ ID NO: 63358 - DNA, 25 bp, Artificial
  probe
  misc_feature (1)..(25): SEQ ID NO: 3227; WAN024AQF_at; Start 94; Stop 118
tttctgtactataaacctcattgga

SEQ ID NO: 63359 - DNA, 25 bp, Artificial
  probe
  misc_feature (1)..(25): SEQ ID NO: 3227; WAN024AQF_at; Start 74; Stop 98
gaagacatcttctcaggctttttct

SEQ ID NO: 63360 - DNA, 25 bp, Artificial
  probe
  misc_feature (1)..(25): SEQ ID NO: 3227; WAN024AQF_at; Start 99; Stop 123
gtactataaacctcattggaaaaga

SEQ ID NO: 63361 - DNA, 25 bp, Artificial
  probe
  misc_feature (1)..(25): SEQ ID NO: 3227; WAN024AQF_at; Start 75; Stop 99
aagacatcttctcaggctttttctg

SEQ ID NO: 63362 - DNA, 25 bp, Artificial
  probe
  misc_feature (1)..(25): SEQ ID NO: 3227; WAN024AQF_at; Start 27; Stop 51
gattttgtcatagcactattgtatt

SEQ ID NO: 63363 - DNA, 25 bp, Artificial
  probe
  misc_feature (1)..(25): SEQ ID NO: 3227; WAN024AQF_at; Start 107; Stop 131
aacctcattggaaaagatagagact

SEQ ID NO: 63364 - DNA, 25 bp, Artificial
  probe
  misc_feature (1)..(25): SEQ ID NO: 3227; WAN024AQF_at; Start 79; Stop 103
catcttctcaggctttttctgtact

SEQ ID NO: 63365 - DNA, 25 bp, Artificial
  probe
  misc_feature (1)..(25): SEQ ID NO: 3227; WAN024AQF_at; Start 100; Stop 124
tactataaacctcattggaaaagat

SEQ ID NO: 63366 - DNA, 25 bp, Artificial
  probe
  misc_feature (1)..(25): SEQ ID NO: 3227; WAN024AQF_at; Start 24; Stop 48
ggtgattttgtcatagcactattgt

SEQ ID NO: 63367 - DNA, 25 bp, Artificial
  probe
  misc_feature (1)..(25): SEQ ID NO: 3227; WAN024AQF_at; Start 77; Stop 101
gacatcttctcaggctttttctgta

SEQ ID NO: 63368 - DNA, 25 bp, Artificial
  probe
  misc_feature (1)..(25): SEQ ID NO: 3227; WAN024AQF_at; Start 103; Stop 127
tataaacctcattggaaaagataga

SEQ ID NO: 63369 - DNA, 25 bp, Artificial
  probe
  misc_feature (1)..(25): SEQ ID NO: 3227; WAN024AQF_at; Start 98; Stop 122
tgtactataaacctcattggaaaag

SEQ ID NO: 63370 - DNA, 25 bp, Artificial
  probe
  misc_feature (1)..(25): SEQ ID NO: 3227; WAN024AQF_at; Start 105; Stop 129
taaacctcattggaaaagatagaga

SEQ ID NO: 63371 - DNA, 25 bp, Artificial
  probe
  misc_feature (1)..(25): SEQ ID NO: 3227; WAN024AQF_at; Start 23; Stop 47
gggtgattttgtcatagcactattg

SEQ ID NO: 63372 - DNA, 25 bp, Artificial
  probe
  misc_feature (1)..(25): SEQ ID NO: 3227; WAN024AQF_at; Start 96; Stop 120
tctgtactataaacctcattggaaa

SEQ ID NO: 63373 - DNA, 25 bp, Artificial
  probe
  misc_feature (1)..(25): SEQ ID NO: 3227; WAN024AQF_at; Start 84; Stop 108
tctcaggctttttctgtactataaa

SEQ ID NO: 63374 - DNA, 25 bp, Artificial
  probe
  misc_feature (1)..(25): SEQ ID NO: 3227; WAN024AQF_at; Start 34; Stop 58
tcatagcactattgtatttatgtgc

SEQ ID NO: 63375 - DNA, 25 bp, Artificial
  probe
  misc_feature (1)..(25): SEQ ID NO: 3227; WAN024AQF_at; Start 14; Stop 38
gatttttctgggtgattttgtcata

SEQ ID NO: 63376 - DNA, 25 bp, Artificial
  probe
  misc_feature (1)..(25): SEQ ID NO: 3227; WAN024AQF_at; Start 93; Stop 117
ttttctgtactataaacctcattgg

SEQ ID NO: 63377 - DNA, 25 bp, Artificial
  probe
  misc_feature (1)..(25): SEQ ID NO: 3227; WAN024AQF_at; Start 21; Stop 45
ctgggtgattttgtcatagcactat

SEQ ID NO: 63378 - DNA, 25 bp, Artificial
  probe
  misc_feature (1)..(25): SEQ ID NO: 3227; WAN024AQF_at; Start 46; Stop 70
tgtatttatgtgcttaacaaaagcc

SEQ ID NO: 63379 - DNA, 25 bp, Artificial
  probe
  misc_feature (1)..(25): SEQ ID NO: 3227; WAN024AQF_at; Start 48; Stop 72
tatttatgtgcttaacaaaagcctg

SEQ ID NO: 63380 - DNA, 25 bp, Artificial
  probe
  misc_feature (1)..(25): SEQ ID NO: 3227; WAN024AQF_at; Start 86; Stop 110
tcaggctttttctgtactataaacc

SEQ ID NO: 63381 - DNA, 25 bp, Artificial
  probe
  misc_feature (1)..(25): SEQ ID NO: 3227; WAN024AQF_at; Start 18; Stop 42
tttctgggtgattttgtcatagcac

SEQ ID NO: 63382 - DNA, 25 bp, Artificial
  probe
  misc_feature (1)..(25): SEQ ID NO: 3227; WAN024AQF_at; Start 20; Stop 44
tctgggtgattttgtcatagcacta

SEQ ID NO: 63383 - DNA, 25 bp, Artificial
  probe
  misc_feature (1)..(25): SEQ ID NO: 3227; WAN024AQF_at; Start 81; Stop 105
tcttctcaggctttttctgtactat

SEQ ID NO: 63384 - DNA, 25 bp, Artificial
  probe
  misc_feature (1)..(25): SEQ ID NO: 3227; WAN024AQF_at; Start 89; Stop 113
ggctttttctgtactataaacctca

SEQ ID NO: 63385 - DNA, 25 bp, Artificial
  probe
  misc_feature (1)..(25): SEQ ID NO: 3227; WAN024AQF_at; Start 50; Stop 74
tttatgtgcttaacaaaagcctgag

SEQ ID NO: 63386 - DNA, 25 bp, Artificial
  probe
  misc_feature (1)..(25): SEQ ID NO: 3227; WAN024AQF_at; Start 51; Stop 75
ttatgtgcttaacaaaagcctgaga

SEQ ID NO: 63387 - DNA, 25 bp, Artificial
  probe
  misc_feature (1)..(25): SEQ ID NO: 3227; WAN024AQF_at; Start 63; Stop 87
caaaagcctgagaagacatcttctc

SEQ ID NO: 63388 - DNA, 25 bp, Artificial
  probe
  misc_feature (1)..(25): SEQ ID NO: 3227; WAN024AQF_at; Start 90; Stop 114
gctttttctgtactataaacctcat

SEQ ID NO: 63389 - DNA, 25 bp, Artificial
  probe
  misc_feature (1)..(25): SEQ ID NO: 3227; WAN024AQF_at; Start 40; Stop 64
cactattgtatttatgtgcttaaca

SEQ ID NO: 63390 - DNA, 25 bp, Artificial
  probe
  misc_feature (1)..(25): SEQ ID NO: 3227; WAN024AQF_at; Start 62; Stop 86
acaaaagcctgagaagacatcttct

SEQ ID NO: 63391 - DNA, 25 bp, Artificial
  probe
  misc_feature (1)..(25): SEQ ID NO: 3227; WAN024AQF_at; Start 106; Stop 130
aaacctcattggaaaagatagagac

SEQ ID NO: 63392 - DNA, 25 bp, Artificial
  probe
  misc_feature (1)..(25): SEQ ID NO: 4660; WAN024AQG_at; Start 5; Stop 29
ctttctccttaatagtgggaatttg

SEQ ID NO: 63393 - DNA, 25 bp, Artificial
  probe
  misc_feature (1)..(25): SEQ ID NO: 4660; WAN024AQG_at; Start 1; Stop 25
tcttctttctccttaatagtgggaa

SEQ ID NO: 63394 - DNA, 25 bp, Artificial
  probe
  misc_feature (1)..(25): SEQ ID NO: 4660; WAN024AQG_at; Start 8; Stop 32
tctccttaatagtgggaatttgtaa

SEQ ID NO: 63395 - DNA, 25 bp, Artificial
  probe
  misc_feature (1)..(25): SEQ ID NO: 4660; WAN024AQG_at; Start 32; Stop 56
aagttaattgaatttcaagaatgaa

SEQ ID NO: 63396 - DNA, 25 bp, Artificial
  probe
  misc_feature (1)..(25): SEQ ID NO: 4660; WAN024AQG_at; Start 33; Stop 57
agttaattgaatttcaagaatgaaa

SEQ ID NO: 63397 - DNA, 25 bp, Artificial
  probe
  misc_feature (1)..(25): SEQ ID NO: 4660; WAN024AQG_at; Start 37; Stop 61
aattgaatttcaagaatgaaagttt

SEQ ID NO: 63398 - DNA, 25 bp, Artificial
  probe
  misc_feature (1)..(25): SEQ ID NO: 4660; WAN024AQG_at; Start 34; Stop 58
gttaattgaatttcaagaatgaaag

SEQ ID NO: 63399 - DNA, 25 bp, Artificial
  probe
  misc_feature (1)..(25): SEQ ID NO: 4660; WAN024AQG_at; Start 27; Stop 51
ttgtaaagttaattgaatttcaaga

SEQ ID NO: 63400 - DNA, 25 bp, Artificial
  probe
  misc_feature (1)..(25): SEQ ID NO: 4660; WAN024AQG_at; Start 7; Stop 31
ttctccttaatagtgggaatttgta

SEQ ID NO: 63401 - DNA, 25 bp, Artificial
  probe
  misc_feature (1)..(25): SEQ ID NO: 4660; WAN024AQG_at; Start 35; Stop 59
ttaattgaatttcaagaatgaaagt

SEQ ID NO: 63402 - DNA, 25 bp, Artificial
  probe
  misc_feature (1)..(25): SEQ ID NO: 4660; WAN024AQG_at; Start 31; Stop 55
aaagttaattgaatttcaagaatga

SEQ ID NO: 63403 - DNA, 25 bp, Artificial
  probe
  misc_feature (1)..(25): SEQ ID NO: 4660; WAN024AQG_at; Start 28; Stop 52
tgtaaagttaattgaatttcaagaa

SEQ ID NO: 63404 - DNA, 25 bp, Artificial
  probe
  misc_feature (1)..(25): SEQ ID NO: 4660; WAN024AQG_at; Start 36; Stop 60
taattgaatttcaagaatgaaagtt

SEQ ID NO: 63405 - DNA, 25 bp, Artificial
  probe
  misc_feature (1)..(25): SEQ ID NO: 4660; WAN024AQG_at; Start 2; Stop 26
cttctttctccttaatagtgggaat

SEQ ID NO: 63406 - DNA, 25 bp, Artificial
  probe
  misc_feature (1)..(25): SEQ ID NO: 4660; WAN024AQG_at; Start 30; Stop 54
taaagttaattgaatttcaagaatg

SEQ ID NO: 63407 - DNA, 25 bp, Artificial
  probe
  misc_feature (1)..(25): SEQ ID NO: 4411; WAN024AQH_at; Start 8; Stop 32
tcattcttgaaattcaattaacttt

SEQ ID NO: 63408 - DNA, 25 bp, Artificial
  probe
  misc_feature (1)..(25): SEQ ID NO: 4411; WAN024AQH_at; Start 6; Stop 30
tttcattcttgaaattcaattaact

SEQ ID NO: 63409 - DNA, 25 bp, Artificial
  probe
  misc_feature (1)..(25): SEQ ID NO: 4411; WAN024AQH_at; Start 31; Stop 55
ttacaaattcccactattaaggaga

SEQ ID NO: 63410 - DNA, 25 bp, Artificial
  probe
  misc_feature (1)..(25): SEQ ID NO: 4411; WAN024AQH_at; Start 12; Stop 36
tcttgaaattcaattaactttacaa

SEQ ID NO: 63411 - DNA, 25 bp, Artificial
  probe
  misc_feature (1)..(25): SEQ ID NO: 4411; WAN024AQH_at; Start 37; Stop 61
attcccactattaaggagaaagaag

SEQ ID NO: 63412 - DNA, 25 bp, Artificial
  probe
  misc_feature (1)..(25): SEQ ID NO: 4411; WAN024AQH_at; Start 32; Stop 56
tacaaattcccactattaaggagaa

SEQ ID NO: 63413 - DNA, 25 bp, Artificial
  probe
  misc_feature (1)..(25): SEQ ID NO: 4411; WAN024AQH_at; Start 7; Stop 31
ttcattcttgaaattcaattaactt

SEQ ID NO: 63414 - DNA, 25 bp, Artificial
  probe
  misc_feature (1)..(25): SEQ ID NO: 4411; WAN024AQH_at; Start 38; Stop 62
ttcccactattaaggagaaagaaga

SEQ ID NO: 63415 - DNA, 25 bp, Artificial
  probe
  misc_feature (1)..(25): SEQ ID NO: 4411; WAN024AQH_at; Start 34; Stop 58
caaattcccactattaaggagaaag

SEQ ID NO: 63416 - DNA, 25 bp, Artificial
  probe
  misc_feature (1)..(25): SEQ ID NO: 4411; WAN024AQH_at; Start 2; Stop 26
aaactttcattcttgaaattcaatt

SEQ ID NO: 63417 - DNA, 25 bp, Artificial
  probe
  misc_feature (1)..(25): SEQ ID NO: 4411; WAN024AQH_at; Start 3; Stop 27
aactttcattcttgaaattcaatta

SEQ ID NO: 63418 - DNA, 25 bp, Artificial
  probe
  misc_feature (1)..(25): SEQ ID NO: 4411; WAN024AQH_at; Start 5; Stop 29
ctttcattcttgaaattcaattaac

SEQ ID NO: 63419 - DNA, 25 bp, Artificial
  probe
  misc_feature (1)..(25): SEQ ID NO: 4411; WAN024AQH_at; Start 11; Stop 35
ttcttgaaattcaattaactttaca

SEQ ID NO: 63420 - DNA, 25 bp, Artificial
  probe
  misc_feature (1)..(25): SEQ ID NO: 4411; WAN024AQH_at; Start 1; Stop 25
taaactttcattcttgaaattcaat

SEQ ID NO: 63421 - DNA, 25 bp, Artificial
  probe
  misc_feature (1)..(25): SEQ ID NO: 4411; WAN024AQH_at; Start 4; Stop 28
actttcattcttgaaattcaattaa

SEQ ID NO: 63422 - DNA, 25 bp, Artificial
  probe
  misc_feature (1)..(25): SEQ ID NO: 4411; WAN024AQH_at; Start 9; Stop 33
cattcttgaaattcaattaacttta

SEQ ID NO: 63423 - DNA, 25 bp, Artificial
  probe
  misc_feature (1)..(25): SEQ ID NO: 3474; WAN024AQI_at; Start 16; Stop 40
ttttcataatctatagtctatgata

SEQ ID NO: 63424 - DNA, 25 bp, Artificial
  probe
  misc_feature (1)..(25): SEQ ID NO: 3474; WAN024AQI_at; Start 28; Stop 52
atagtctatgatagcactttttaaa

SEQ ID NO: 63425 - DNA, 25 bp, Artificial
  probe
  misc_feature (1)..(25): SEQ ID NO: 3474; WAN024AQI_at; Start 40; Stop 64
agcactttttaaaattttgtgcaag

SEQ ID NO: 63426 - DNA, 25 bp, Artificial
  probe
  misc_feature (1)..(25): SEQ ID NO: 3474; WAN024AQI_at; Start 17; Stop 41
tttcataatctatagtctatgatag

SEQ ID NO: 63427 - DNA, 25 bp, Artificial
  probe
  misc_feature (1)..(25): SEQ ID NO: 3474; WAN024AQI_at; Start 23; Stop 47
aatctatagtctatgatagcacttt

SEQ ID NO: 63428 - DNA, 25 bp, Artificial
  probe
  misc_feature (1)..(25): SEQ ID NO: 3474; WAN024AQI_at; Start 34; Stop 58
tatgatagcactttttaaaattttg

SEQ ID NO: 63429 - DNA, 25 bp, Artificial
  probe
  misc_feature (1)..(25): SEQ ID NO: 3474; WAN024AQI_at; Start 25; Stop 49
tctatagtctatgatagcacttttt

SEQ ID NO: 63430 - DNA, 25 bp, Artificial
  probe
  misc_feature (1)..(25): SEQ ID NO: 3474; WAN024AQI_at; Start 8; Stop 32
cctcattattttcataatctatagt

SEQ ID NO: 63431 - DNA, 25 bp, Artificial
  probe
  misc_feature (1)..(25): SEQ ID NO: 3474; WAN024AQI_at; Start 38; Stop 62
atagcactttttaaaattttgtgca

SEQ ID NO: 63432 - DNA, 25 bp, Artificial
  probe
  misc_feature (1)..(25): SEQ ID NO: 3474; WAN024AQI_at; Start 47; Stop 71
tttaaaattttgtgcaagcgtttgc

SEQ ID NO: 63433 - DNA, 25 bp, Artificial
  probe
  misc_feature (1)..(25): SEQ ID NO: 3474; WAN024AQI_at; Start 13; Stop 37
ttattttcataatctatagtctatg

SEQ ID NO: 63434 - DNA, 25 bp, Artificial
  probe
  misc_feature (1)..(25): SEQ ID NO: 3474; WAN024AQI_at; Start 9; Stop 33
ctcattattttcataatctatagtc

SEQ ID NO: 63435 - DNA, 25 bp, Artificial
  probe
  misc_feature (1)..(25): SEQ ID NO: 3474; WAN024AQI_at; Start 36; Stop 60
tgatagcactttttaaaattttgtg

SEQ ID NO: 63436 - DNA, 25 bp, Artificial
  probe
  misc_feature (1)..(25): SEQ ID NO: 3474; WAN024AQI_at; Start 39; Stop 63
tagcactttttaaaattttgtgcaa

SEQ ID NO: 63437 - DNA, 25 bp, Artificial
  probe
  misc_feature (1)..(25): SEQ ID NO: 3474; WAN024AQI_at; Start 24; Stop 48
atctatagtctatgatagcactttt

SEQ ID NO: 63438 - DNA, 25 bp, Artificial
  probe
  misc_feature (1)..(25): SEQ ID NO: 3474; WAN024AQI_at; Start 29; Stop 53
tagtctatgatagcactttttaaaa

SEQ ID NO: 63439 - DNA, 25 bp, Artificial
  probe
  misc_feature (1)..(25): SEQ ID NO: 3474; WAN024AQI_at; Start 37; Stop 61
gatagcactttttaaaattttgtgc

SEQ ID NO: 63440 - DNA, 25 bp, Artificial
  probe
  misc_feature (1)..(25): SEQ ID NO: 3474; WAN024AQI_at; Start 27; Stop 51
tatagtctatgatagcactttttaa

SEQ ID NO: 63441 - DNA, 25 bp, Artificial
  probe
  misc_feature (1)..(25): SEQ ID NO: 3474; WAN024AQI_at; Start 22; Stop 46
taatctatagtctatgatagcactt

SEQ ID NO: 63442 - DNA, 25 bp, Artificial
  probe
  misc_feature (1)..(25): SEQ ID NO: 3474; WAN024AQI_at; Start 41; Stop 65
gcactttttaaaattttgtgcaagc

SEQ ID NO: 63443 - DNA, 25 bp, Artificial
  probe
  misc_feature (1)..(25): SEQ ID NO: 3474; WAN024AQI_at; Start 42; Stop 66
cactttttaaaattttgtgcaagcg

SEQ ID NO: 63444 - DNA, 25 bp, Artificial
  probe
  misc_feature (1)..(25): SEQ ID NO: 3474; WAN024AQI_at; Start 21; Stop 45
ataatctatagtctatgatagcact

SEQ ID NO: 63445 - DNA, 25 bp, Artificial
  probe
  misc_feature (1)..(25): SEQ ID NO: 3474; WAN024AQI_at; Start 19; Stop 43
tcataatctatagtctatgatagca

SEQ ID NO: 63446 - DNA, 25 bp, Artificial
  probe
  misc_feature (1)..(25): SEQ ID NO: 3474; WAN024AQI_at; Start 18; Stop 42
ttcataatctatagtctatgatagc

SEQ ID NO: 63447 - DNA, 25 bp, Artificial
  probe
  misc_feature (1)..(25): SEQ ID NO: 3474; WAN024AQI_at; Start 33; Stop 57
ctatgatagcactttttaaaatttt

SEQ ID NO: 63448 - DNA, 25 bp, Artificial
  probe
  misc_feature (1)..(25): SEQ ID NO: 3474; WAN024AQI_at; Start 20; Stop 44
cataatctatagtctatgatagcac

SEQ ID NO: 63449 - DNA, 25 bp, Artificial
  probe
  misc_feature (1)..(25): SEQ ID NO: 3474; WAN024AQI_at; Start 11; Stop 35
cattattttcataatctatagtcta

SEQ ID NO: 63450 - DNA, 25 bp, Artificial
  probe
  misc_feature (1)..(25): SEQ ID NO: 3474; WAN024AQI_at; Start 14; Stop 38
tattttcataatctatagtctatga

SEQ ID NO: 63451 - DNA, 25 bp, Artificial
  probe
  misc_feature (1)..(25): SEQ ID NO: 3474; WAN024AQI_at; Start 10; Stop 34
tcattattttcataatctatagtct

SEQ ID NO: 63452 - DNA, 25 bp, Artificial
  probe
  misc_feature (1)..(25): SEQ ID NO: 3474; WAN024AQI_at; Start 32; Stop 56
tctatgatagcactttttaaaattt

SEQ ID NO: 63453 - DNA, 25 bp, Artificial
  probe
  misc_feature (1)..(25): SEQ ID NO: 3474; WAN024AQI_at; Start 26; Stop 50
ctatagtctatgatagcacttttta

SEQ ID NO: 63454 - DNA, 25 bp, Artificial
  probe
  misc_feature (1)..(25): SEQ ID NO: 3474; WAN024AQI_at; Start 30; Stop 54
agtctatgatagcactttttaaaat

SEQ ID NO: 63455 - DNA, 25 bp, Artificial
  probe
  misc_feature (1)..(25): SEQ ID NO: 3474; WAN024AQI_at; Start 31; Stop 55
gtctatgatagcactttttaaaatt

SEQ ID NO: 63456 - DNA, 25 bp, Artificial
  probe
  misc_feature (1)..(25): SEQ ID NO: 3474; WAN024AQI_at; Start 7; Stop 31
acctcattattttcataatctatag

SEQ ID NO: 63457 - DNA, 25 bp, Artificial
  probe
  misc_feature (1)..(25): SEQ ID NO: 5956; WAN024AQJ_at; Start 116; Stop 140
catagactatagattatgaaaataa

SEQ ID NO: 63458 - DNA, 25 bp, Artificial
  probe
  misc_feature (1)..(25): SEQ ID NO: 5956; WAN024AQJ_at; Start 99; Stop 123
attttaaaaagtgctatcatagact

SEQ ID NO: 63459 - DNA, 25 bp, Artificial
  probe
  misc_feature (1)..(25): SEQ ID NO: 5956; WAN024AQJ_at; Start 87; Stop 111
cgcttgcacaaaattttaaaaagtg

SEQ ID NO: 63460 - DNA, 25 bp, Artificial
  probe
  misc_feature (1)..(25): SEQ ID NO: 5956; WAN024AQJ_at; Start 107; Stop 131
aagtgctatcatagactatagatta

SEQ ID NO: 63461 - DNA, 25 bp, Artificial
  probe
  misc_feature (1)..(25): SEQ ID NO: 5956; WAN024AQJ_at; Start 94; Stop 118
acaaaattttaaaaagtgctatcat

SEQ ID NO: 63462 - DNA, 25 bp, Artificial
  probe
  misc_feature (1)..(25): SEQ ID NO: 5956; WAN024AQJ_at; Start 98; Stop 122
aattttaaaaagtgctatcatagac

SEQ ID NO: 63463 - DNA, 25 bp, Artificial
  probe
  misc_feature (1)..(25): SEQ ID NO: 5956; WAN024AQJ_at; Start 97; Stop 121
aaattttaaaaagtgctatcataga

SEQ ID NO: 63464 - DNA, 25 bp, Artificial
  probe
  misc_feature (1)..(25): SEQ ID NO: 5956; WAN024AQJ_at; Start 110; Stop 134
tgctatcatagactatagattatga

SEQ ID NO: 63465 - DNA, 25 bp, Artificial
  probe
  misc_feature (1)..(25): SEQ ID NO: 5956; WAN024AQJ_at; Start 106; Stop 130
aaagtgctatcatagactatagatt

SEQ ID NO: 63466 - DNA, 25 bp, Artificial
  probe
  misc_feature (1)..(25): SEQ ID NO: 5956; WAN024AQJ_at; Start 103; Stop 127
taaaaagtgctatcatagactatag

SEQ ID NO: 63467 - DNA, 25 bp, Artificial
  probe
  misc_feature (1)..(25): SEQ ID NO: 5956; WAN024AQJ_at; Start 93; Stop 117
cacaaaattttaaaaagtgctatca

SEQ ID NO: 63468 - DNA, 25 bp, Artificial
  probe
  misc_feature (1)..(25): SEQ ID NO: 5956; WAN024AQJ_at; Start 112; Stop 136
ctatcatagactatagattatgaaa

SEQ ID NO: 63469 - DNA, 25 bp, Artificial
  probe
  misc_feature (1)..(25): SEQ ID NO: 5956; WAN024AQJ_at; Start 118; Stop 142
tagactatagattatgaaaataatg

SEQ ID NO: 63470 - DNA, 25 bp, Artificial
  probe
  misc_feature (1)..(25): SEQ ID NO: 5956; WAN024AQJ_at; Start 101; Stop 125
tttaaaaagtgctatcatagactat

SEQ ID NO: 63471 - DNA, 25 bp, Artificial
  probe
  misc_feature (1)..(25): SEQ ID NO: 5956; WAN024AQJ_at; Start 123; Stop 147
tatagattatgaaaataatgaggta

SEQ ID NO: 63472 - DNA, 25 bp, Artificial
  probe
  misc_feature (1)..(25): SEQ ID NO: 5956; WAN024AQJ_at; Start 82; Stop 106
gcaaacgcttgcacaaaattttaaa

SEQ ID NO: 63473 - DNA, 25 bp, Artificial
  probe
  misc_feature (1)..(25): SEQ ID NO: 5956; WAN024AQJ_at; Start 100; Stop 124
ttttaaaaagtgctatcatagacta

SEQ ID NO: 63474 - DNA, 25 bp, Artificial
  probe
  misc_feature (1)..(25): SEQ ID NO: 5956; WAN024AQJ_at; Start 91; Stop 115
tgcacaaaattttaaaaagtgctat

SEQ ID NO: 63475 - DNA, 25 bp, Artificial
  probe
  misc_feature (1)..(25): SEQ ID NO: 5956; WAN024AQJ_at; Start 109; Stop 133
gtgctatcatagactatagattatg

SEQ ID NO: 63476 - DNA, 25 bp, Artificial
  probe
  misc_feature (1)..(25): SEQ ID NO: 5956; WAN024AQJ_at; Start 121; Stop 145
actatagattatgaaaataatgagg

SEQ ID NO: 63477 - DNA, 25 bp, Artificial
  probe
  misc_feature (1)..(25): SEQ ID NO: 5956; WAN024AQJ_at; Start 96; Stop 120
aaaattttaaaaagtgctatcatag

SEQ ID NO: 63478 - DNA, 25 bp, Artificial
  probe
  misc_feature (1)..(25): SEQ ID NO: 5956; WAN024AQJ_at; Start 120; Stop 144
gactatagattatgaaaataatgag

SEQ ID NO: 63479 - DNA, 25 bp, Artificial
  probe
  misc_feature (1)..(25): SEQ ID NO: 5956; WAN024AQJ_at; Start 102; Stop 126
ttaaaaagtgctatcatagactata

SEQ ID NO: 63480 - DNA, 25 bp, Artificial
  probe
  misc_feature (1)..(25): SEQ ID NO: 5956; WAN024AQJ_at; Start 104; Stop 128
aaaaagtgctatcatagactataga

SEQ ID NO: 63481 - DNA, 25 bp, Artificial
  probe
  misc_feature (1)..(25): SEQ ID NO: 5956; WAN024AQJ_at; Start 89; Stop 113
cttgcacaaaattttaaaaagtgct

SEQ ID NO: 63482 - DNA, 25 bp, Artificial
  probe
  misc_feature (1)..(25): SEQ ID NO: 5956; WAN024AQJ_at; Start 113; Stop 137
tatcatagactatagattatgaaaa

SEQ ID NO: 63483 - DNA, 25 bp, Artificial
  probe
  misc_feature (1)..(25): SEQ ID NO: 5956; WAN024AQJ_at; Start 108; Stop 132
agtgctatcatagactatagattat

SEQ ID NO: 63484 - DNA, 25 bp, Artificial
  probe
  misc_feature (1)..(25): SEQ ID NO: 5956; WAN024AQJ_at; Start 111; Stop 135
gctatcatagactatagattatgaa

SEQ ID NO: 63485 - DNA, 25 bp, Artificial
  probe
  misc_feature (1)..(25): SEQ ID NO: 5956; WAN024AQJ_at; Start 122; Stop 146
ctatagattatgaaaataatgaggt

SEQ ID NO: 63486 - DNA, 25 bp, Artificial
  probe
  misc_feature (1)..(25): SEQ ID NO: 5956; WAN024AQJ_at; Start 90; Stop 114
ttgcacaaaattttaaaaagtgcta

SEQ ID NO: 63487 - DNA, 25 bp, Artificial
  probe
  misc_feature (1)..(25): SEQ ID NO: 5956; WAN024AQJ_at; Start 105; Stop 129
aaaagtgctatcatagactatagat

SEQ ID NO: 63488 - DNA, 25 bp, Artificial
  probe
  misc_feature (1)..(25): SEQ ID NO: 5956; WAN024AQJ_at; Start 88; Stop 112
gcttgcacaaaattttaaaaagtgc

SEQ ID NO: 63489 - DNA, 25 bp, Artificial
  probe
  misc_feature (1)..(25): SEQ ID NO: 5956; WAN024AQJ_at; Start 95; Stop 119
caaaattttaaaaagtgctatcata

SEQ ID NO: 63490 - DNA, 25 bp, Artificial
  probe
  misc_feature (1)..(25): SEQ ID NO: 5956; WAN024AQJ_at; Start 92; Stop 116
gcacaaaattttaaaaagtgctatc

SEQ ID NO: 63491 - DNA, 25 bp, Artificial
  probe
  misc_feature (1)..(25): SEQ ID NO: 438; WAN024AQK_at; Start 15; Stop 39
ccagcctcggagaggttttctctct

SEQ ID NO: 63492 - DNA, 25 bp, Artificial
  probe
  misc_feature (1)..(25): SEQ ID NO: 438; WAN024AQK_at; Start 3; Stop 27
atttcaacctctccagcctcggaga

SEQ ID NO: 63493 - DNA, 25 bp, Artificial
  probe
  misc_feature (1)..(25): SEQ ID NO: 438; WAN024AQK_at; Start 38; Stop 62
ctgtctcaggagcaacctttatgat

SEQ ID NO: 63494 - DNA, 25 bp, Artificial
  probe
  misc_feature (1)..(25): SEQ ID NO: 438; WAN024AQK_at; Start 12; Stop 36
tctccagcctcggagaggttttctc

SEQ ID NO: 63495 - DNA, 25 bp, Artificial
  probe
  misc_feature (1)..(25): SEQ ID NO: 438; WAN024AQK_at; Start 59; Stop 83
tgatataatgagagaagaaaactga

SEQ ID NO: 63496 - DNA, 25 bp, Artificial
  probe
  misc_feature (1)..(25): SEQ ID NO: 438; WAN024AQK_at; Start 5; Stop 29
ttcaacctctccagcctcggagagg

SEQ ID NO: 63497 - DNA, 25 bp, Artificial
  probe
  misc_feature (1)..(25): SEQ ID NO: 438; WAN024AQK_at; Start 40; Stop 64
gtctcaggagcaacctttatgatat

SEQ ID NO: 63498 - DNA, 25 bp, Artificial
  probe
  misc_feature (1)..(25): SEQ ID NO: 438; WAN024AQK_at; Start 39; Stop 63
tgtctcaggagcaacctttatgata

SEQ ID NO: 63499 - DNA, 25 bp, Artificial
  probe
  misc_feature (1)..(25): SEQ ID NO: 438; WAN024AQK_at; Start 14; Stop 38
tccagcctcggagaggttttctctc

SEQ ID NO: 63500 - DNA, 25 bp, Artificial
  probe
  misc_feature (1)..(25): SEQ ID NO: 438; WAN024AQK_at; Start 27; Stop 51
aggttttctctctgtctcaggagca

SEQ ID NO: 63501 - DNA, 25 bp, Artificial
  probe
  misc_feature (1)..(25): SEQ ID NO: 438; WAN024AQK_at; Start 67; Stop 91
tgagagaagaaaactgaaaggattt

SEQ ID NO: 63502 - DNA, 25 bp, Artificial
  probe
  misc_feature (1)..(25): SEQ ID NO: 438; WAN024AQK_at; Start 24; Stop 48
gagaggttttctctctgtctcagga

SEQ ID NO: 63503 - DNA, 25 bp, Artificial
  probe
  misc_feature (1)..(25): SEQ ID NO: 438; WAN024AQK_at; Start 31; Stop 55
tttctctctgtctcaggagcaacct

SEQ ID NO: 63504 - DNA, 25 bp, Artificial
  probe
  misc_feature (1)..(25): SEQ ID NO: 438; WAN024AQK_at; Start 64; Stop 88
taatgagagaagaaaactgaaagga

SEQ ID NO: 63505 - DNA, 25 bp, Artificial
  probe
  misc_feature (1)..(25): SEQ ID NO: 438; WAN024AQK_at; Start 16; Stop 40
cagcctcggagaggttttctctctg

SEQ ID NO: 63506 - DNA, 25 bp, Artificial
  probe
  misc_feature (1)..(25): SEQ ID NO: 438; WAN024AQK_at; Start 2; Stop 26
gatttcaacctctccagcctcggag

SEQ ID NO: 63507 - DNA, 25 bp, Artificial
  probe
  misc_feature (1)..(25): SEQ ID NO: 438; WAN024AQK_at; Start 62; Stop 86
tataatgagagaagaaaactgaaag

SEQ ID NO: 63508 - DNA, 25 bp, Artificial
  probe
  misc_feature (1)..(25): SEQ ID NO: 438; WAN024AQK_at; Start 21; Stop 45
tcggagaggttttctctctgtctca

SEQ ID NO: 63509 - DNA, 25 bp, Artificial
  probe
  misc_feature (1)..(25): SEQ ID NO: 438; WAN024AQK_at; Start 33; Stop 57
tctctctgtctcaggagcaaccttt

SEQ ID NO: 63510 - DNA, 25 bp, Artificial
  probe
  misc_feature (1)..(25): SEQ ID NO: 438; WAN024AQK_at; Start 35; Stop 59
tctctgtctcaggagcaacctttat

SEQ ID NO: 63511 - DNA, 25 bp, Artificial
  probe
  misc_feature (1)..(25): SEQ ID NO: 438; WAN024AQK_at; Start 68; Stop 92
gagagaagaaaactgaaaggattta

SEQ ID NO: 63512 - DNA, 25 bp, Artificial
  probe
  misc_feature (1)..(25): SEQ ID NO: 438; WAN024AQK_at; Start 30; Stop 54
ttttctctctgtctcaggagcaacc

SEQ ID NO: 63513 - DNA, 25 bp, Artificial
  probe
  misc_feature (1)..(25): SEQ ID NO: 438; WAN024AQK_at; Start 44; Stop 68
caggagcaacctttatgatataatg

SEQ ID NO: 63514 - DNA, 25 bp, Artificial
  probe
  misc_feature (1)..(25): SEQ ID NO: 438; WAN024AQK_at; Start 19; Stop 43
cctcggagaggttttctctctgtct

SEQ ID NO: 63515 - DNA, 25 bp, Artificial
  probe
  misc_feature (1)..(25): SEQ ID NO: 438; WAN024AQK_at; Start 26; Stop 50
gaggttttctctctgtctcaggagc

SEQ ID NO: 63516 - DNA, 25 bp, Artificial
  probe
  misc_feature (1)..(25): SEQ ID NO: 438; WAN024AQK_at; Start 28; Stop 52
ggttttctctctgtctcaggagcaa

SEQ ID NO: 63517 - DNA, 25 bp, Artificial
  probe
  misc_feature (1)..(25): SEQ ID NO: 438; WAN024AQK_at; Start 42; Stop 66
ctcaggagcaacctttatgatataa

SEQ ID NO: 63518 - DNA, 25 bp, Artificial
  probe
  misc_feature (1)..(25): SEQ ID NO: 438; WAN024AQK_at; Start 25; Stop 49
agaggttttctctctgtctcaggag

SEQ ID NO: 63519 - DNA, 25 bp, Artificial
  probe
  misc_feature (1)..(25): SEQ ID NO: 438; WAN024AQK_at; Start 34; Stop 58
ctctctgtctcaggagcaaccttta

SEQ ID NO: 63520 - DNA, 25 bp, Artificial
  probe
  misc_feature (1)..(25): SEQ ID NO: 438; WAN024AQK_at; Start 13; Stop 37
ctccagcctcggagaggttttctct

SEQ ID NO: 63521 - DNA, 25 bp, Artificial
  probe
  misc_feature (1)..(25): SEQ ID NO: 438; WAN024AQK_at; Start 37; Stop 61
tctgtctcaggagcaacctttatga

SEQ ID NO: 63522 - DNA, 25 bp, Artificial
  probe
  misc_feature (1)..(25): SEQ ID NO: 438; WAN024AQK_at; Start 36; Stop 60
ctctgtctcaggagcaacctttatg

SEQ ID NO: 63523 - DNA, 25 bp, Artificial
  probe
  misc_feature (1)..(25): SEQ ID NO: 438; WAN024AQK_at; Start 18; Stop 42
gcctcggagaggttttctctctgtc

SEQ ID NO: 63524 - DNA, 25 bp, Artificial
  probe
  misc_feature (1)..(25): SEQ ID NO: 438; WAN024AQK_at; Start 1; Stop 25
agatttcaacctctccagcctcgga

SEQ ID NO: 63525 - DNA, 25 bp, Artificial
  probe
  misc_feature (1)..(25): SEQ ID NO: 3759; WAN024AQL_at; Start 52; Stop 76
agacagagagaaaacctctccgagg

SEQ ID NO: 63526 - DNA, 25 bp, Artificial
  probe
  misc_feature (1)..(25): SEQ ID NO: 3759; WAN024AQL_at; Start 57; Stop 81
gagagaaaacctctccgaggctgga

SEQ ID NO: 63527 - DNA, 25 bp, Artificial
  probe
  misc_feature (1)..(25): SEQ ID NO: 3759; WAN024AQL_at; Start 32; Stop 56
tatcataaaggttgctcctgagaca

SEQ ID NO: 63528 - DNA, 25 bp, Artificial
  probe
  misc_feature (1)..(25): SEQ ID NO: 3759; WAN024AQL_at; Start 43; Stop 67
ttgctcctgagacagagagaaaacc

SEQ ID NO: 63529 - DNA, 25 bp, Artificial
  probe
  misc_feature (1)..(25): SEQ ID NO: 3759; WAN024AQL_at; Start 58; Stop 82
agagaaaacctctccgaggctggag

SEQ ID NO: 63530 - DNA, 25 bp, Artificial
  probe
  misc_feature (1)..(25): SEQ ID NO: 3759; WAN024AQL_at; Start 56; Stop 80
agagagaaaacctctccgaggctgg

SEQ ID NO: 63531 - DNA, 25 bp, Artificial
  probe
  misc_feature (1)..(25): SEQ ID NO: 3759; WAN024AQL_at; Start 50; Stop 74
tgagacagagagaaaacctctccga

SEQ ID NO: 63532 - DNA, 25 bp, Artificial
  probe
  misc_feature (1)..(25): SEQ ID NO: 3759; WAN024AQL_at; Start 61; Stop 85
gaaaacctctccgaggctggagagg

SEQ ID NO: 63533 - DNA, 25 bp, Artificial
  probe
  misc_feature (1)..(25): SEQ ID NO: 3759; WAN024AQL_at; Start 29; Stop 53
ttatatcataaaggttgctcctgag

SEQ ID NO: 63534 - DNA, 25 bp, Artificial
  probe
  misc_feature (1)..(25): SEQ ID NO: 3759; WAN024AQL_at; Start 68; Stop 92
tctccgaggctggagaggttgaaat

SEQ ID NO: 63535 - DNA, 25 bp, Artificial
  probe
  misc_feature (1)..(25): SEQ ID NO: 3759; WAN024AQL_at; Start 48; Stop 72
cctgagacagagagaaaacctctcc

SEQ ID NO: 63536 - DNA, 25 bp, Artificial
  probe
  misc_feature (1)..(25): SEQ ID NO: 3759; WAN024AQL_at; Start 42; Stop 66
gttgctcctgagacagagagaaaac

SEQ ID NO: 63537 - DNA, 25 bp, Artificial
  probe
  misc_feature (1)..(25): SEQ ID NO: 3759; WAN024AQL_at; Start 51; Stop 75
gagacagagagaaaacctctccgag

SEQ ID NO: 63538 - DNA, 25 bp, Artificial
  probe
  misc_feature (1)..(25): SEQ ID NO: 3759; WAN024AQL_at; Start 47; Stop 71
tcctgagacagagagaaaacctctc

SEQ ID NO: 63539 - DNA, 25 bp, Artificial
  probe
  misc_feature (1)..(25): SEQ ID NO: 3759; WAN024AQL_at; Start 34; Stop 58
tcataaaggttgctcctgagacaga

SEQ ID NO: 63540 - DNA, 25 bp, Artificial
  probe
  misc_feature (1)..(25): SEQ ID NO: 3759; WAN024AQL_at; Start 37; Stop 61
taaaggttgctcctgagacagagag

SEQ ID NO: 63541 - DNA, 25 bp, Artificial
  probe
  misc_feature (1)..(25): SEQ ID NO: 3759; WAN024AQL_at; Start 38; Stop 62
aaaggttgctcctgagacagagaga

SEQ ID NO: 63542 - DNA, 25 bp, Artificial
  probe
  misc_feature (1)..(25): SEQ ID NO: 3759; WAN024AQL_at; Start 46; Stop 70
ctcctgagacagagagaaaacctct

SEQ ID NO: 63543 - DNA, 25 bp, Artificial
  probe
  misc_feature (1)..(25): SEQ ID NO: 3759; WAN024AQL_at; Start 41; Stop 65
ggttgctcctgagacagagagaaaa

SEQ ID NO: 63544 - DNA, 25 bp, Artificial
  probe
  misc_feature (1)..(25): SEQ ID NO: 3759; WAN024AQL_at; Start 59; Stop 83
gagaaaacctctccgaggctggaga

SEQ ID NO: 63545 - DNA, 25 bp, Artificial
  probe
  misc_feature (1)..(25): SEQ ID NO: 3759; WAN024AQL_at; Start 39; Stop 63
aaggttgctcctgagacagagagaa

SEQ ID NO: 63546 - DNA, 25 bp, Artificial
  probe
  misc_feature (1)..(25): SEQ ID NO: 3759; WAN024AQL_at; Start 35; Stop 59
cataaaggttgctcctgagacagag

SEQ ID NO: 63547 - DNA, 25 bp, Artificial
  probe
  misc_feature (1)..(25): SEQ ID NO: 3759; WAN024AQL_at; Start 44; Stop 68
tgctcctgagacagagagaaaacct

SEQ ID NO: 63548 - DNA, 25 bp, Artificial
  probe
  misc_feature (1)..(25): SEQ ID NO: 3759; WAN024AQL_at; Start 11; Stop 35
ttcagttttcttctctcattatatc

SEQ ID NO: 63549 - DNA, 25 bp, Artificial
  probe
  misc_feature (1)..(25): SEQ ID NO: 3759; WAN024AQL_at; Start 53; Stop 77
gacagagagaaaacctctccgaggc

SEQ ID NO: 63550 - DNA, 25 bp, Artificial
  probe
  misc_feature (1)..(25): SEQ ID NO: 3759; WAN024AQL_at; Start 4; Stop 28
aaatcctttcagttttcttctctca

SEQ ID NO: 63551 - DNA, 25 bp, Artificial
  probe
  misc_feature (1)..(25): SEQ ID NO: 3759; WAN024AQL_at; Start 55; Stop 79
cagagagaaaacctctccgaggctg

SEQ ID NO: 63552 - DNA, 25 bp, Artificial
  probe
  misc_feature (1)..(25): SEQ ID NO: 3759; WAN024AQL_at; Start 27; Stop 51
cattatatcataaaggttgctcctg

SEQ ID NO: 63553 - DNA, 25 bp, Artificial
  probe
  misc_feature (1)..(25): SEQ ID NO: 3759; WAN024AQL_at; Start 70; Stop 94
tccgaggctggagaggttgaaatct

SEQ ID NO: 63554 - DNA, 25 bp, Artificial
  probe
  misc_feature (1)..(25): SEQ ID NO: 3759; WAN024AQL_at; Start 45; Stop 69
gctcctgagacagagagaaaacctc

SEQ ID NO: 63555 - DNA, 25 bp, Artificial
  probe
  misc_feature (1)..(25): SEQ ID NO: 3759; WAN024AQL_at; Start 33; Stop 57
atcataaaggttgctcctgagacag

SEQ ID NO: 63556 - DNA, 25 bp, Artificial
  probe
  misc_feature (1)..(25): SEQ ID NO: 3759; WAN024AQL_at; Start 30; Stop 54
tatatcataaaggttgctcctgaga

SEQ ID NO: 63557 - DNA, 25 bp, Artificial
  probe
  misc_feature (1)..(25): SEQ ID NO: 3759; WAN024AQL_at; Start 69; Stop 93
ctccgaggctggagaggttgaaatc

SEQ ID NO: 63558 - DNA, 25 bp, Artificial
  probe
  misc_feature (1)..(25): SEQ ID NO: 3759; WAN024AQL_at; Start 40; Stop 64
aggttgctcctgagacagagagaaa

SEQ ID NO: 63559 - DNA, 25 bp, Artificial
  probe
  misc_feature (1)..(25): SEQ ID NO: 4544; WAN024AQM_at; Start 4; Stop 28
acgacatgcctgtcgtacctaaaaa

SEQ ID NO: 63560 - DNA, 25 bp, Artificial
  probe
  misc_feature (1)..(25): SEQ ID NO: 4544; WAN024AQM_at; Start 32; Stop 56
accagtttttttcagctggctcctt

SEQ ID NO: 63561 - DNA, 25 bp, Artificial
  probe
  misc_feature (1)..(25): SEQ ID NO: 4544; WAN024AQM_at; Start 41; Stop 65
tttcagctggctccttcttttttat

SEQ ID NO: 63562 - DNA, 25 bp, Artificial
  probe
  misc_feature (1)..(25): SEQ ID NO: 4544; WAN024AQM_at; Start 43; Stop 67
tcagctggctccttcttttttatcc

SEQ ID NO: 63563 - DNA, 25 bp, Artificial
  probe
  misc_feature (1)..(25): SEQ ID NO: 4544; WAN024AQM_at; Start 30; Stop 54
gaaccagtttttttcagctggctcc

SEQ ID NO: 63564 - DNA, 25 bp, Artificial
  probe
  misc_feature (1)..(25): SEQ ID NO: 4544; WAN024AQM_at; Start 5; Stop 29
cgacatgcctgtcgtacctaaaaag

SEQ ID NO: 63565 - DNA, 25 bp, Artificial
  probe
  misc_feature (1)..(25): SEQ ID NO: 4544; WAN024AQM_at; Start 29; Stop 53
ggaaccagtttttttcagctggctc

SEQ ID NO: 63566 - DNA, 25 bp, Artificial
  probe
  misc_feature (1)..(25): SEQ ID NO: 4544; WAN024AQM_at; Start 35; Stop 59
agtttttttcagctggctccttctt

SEQ ID NO: 63567 - DNA, 25 bp, Artificial
  probe
  misc_feature (1)..(25): SEQ ID NO: 4544; WAN024AQM_at; Start 48; Stop 72
tggctccttcttttttatcctcaaa

SEQ ID NO: 63568 - DNA, 25 bp, Artificial
  probe
  misc_feature (1)..(25): SEQ ID NO: 4544; WAN024AQM_at; Start 8; Stop 32
catgcctgtcgtacctaaaaaggaa

SEQ ID NO: 63569 - DNA, 25 bp, Artificial
  probe
  misc_feature (1)..(25): SEQ ID NO: 4544; WAN024AQM_at; Start 46; Stop 70
gctggctccttcttttttatcctca

SEQ ID NO: 63570 - DNA, 25 bp, Artificial
  probe
  misc_feature (1)..(25): SEQ ID NO: 4544; WAN024AQM_at; Start 47; Stop 71
ctggctccttcttttttatcctcaa

SEQ ID NO: 63571 - DNA, 25 bp, Artificial
  probe
  misc_feature (1)..(25): SEQ ID NO: 4544; WAN024AQM_at; Start 3; Stop 27
tacgacatgcctgtcgtacctaaaa

SEQ ID NO: 63572 - DNA, 25 bp, Artificial
  probe
  misc_feature (1)..(25): SEQ ID NO: 4544; WAN024AQM_at; Start 54; Stop 78
cttcttttttatcctcaaaattctg

SEQ ID NO: 63573 - DNA, 25 bp, Artificial
  probe
  misc_feature (1)..(25): SEQ ID NO: 4544; WAN024AQM_at; Start 40; Stop 64
ttttcagctggctccttctttttta

SEQ ID NO: 63574 - DNA, 25 bp, Artificial
  probe
  misc_feature (1)..(25): SEQ ID NO: 4544; WAN024AQM_at; Start 31; Stop 55
aaccagtttttttcagctggctcct

SEQ ID NO: 63575 - DNA, 25 bp, Artificial
  probe
  misc_feature (1)..(25): SEQ ID NO: 4544; WAN024AQM_at; Start 44; Stop 68
cagctggctccttcttttttatcct

SEQ ID NO: 63576 - DNA, 25 bp, Artificial
  probe
  misc_feature (1)..(25): SEQ ID NO: 4544; WAN024AQM_at; Start 34; Stop 58
cagtttttttcagctggctccttct

SEQ ID NO: 63577 - DNA, 25 bp, Artificial
  probe
  misc_feature (1)..(25): SEQ ID NO: 4544; WAN024AQM_at; Start 28; Stop 52
aggaaccagtttttttcagctggct

SEQ ID NO: 63578 - DNA, 25 bp, Artificial
  probe
  misc_feature (1)..(25): SEQ ID NO: 4544; WAN024AQM_at; Start 42; Stop 66
ttcagctggctccttcttttttatc

SEQ ID NO: 63579 - DNA, 25 bp, Artificial
  probe
  misc_feature (1)..(25): SEQ ID NO: 4544; WAN024AQM_at; Start 56; Stop 80
tcttttttatcctcaaaattctgtc

SEQ ID NO: 63580 - DNA, 25 bp, Artificial
  probe
  misc_feature (1)..(25): SEQ ID NO: 4544; WAN024AQM_at; Start 7; Stop 31
acatgcctgtcgtacctaaaaagga

SEQ ID NO: 63581 - DNA, 25 bp, Artificial
  probe
  misc_feature (1)..(25): SEQ ID NO: 4544; WAN024AQM_at; Start 45; Stop 69
agctggctccttcttttttatcctc

SEQ ID NO: 63582 - DNA, 25 bp, Artificial
  probe
  misc_feature (1)..(25): SEQ ID NO: 4544; WAN024AQM_at; Start 6; Stop 30
gacatgcctgtcgtacctaaaaagg

SEQ ID NO: 63583 - DNA, 25 bp, Artificial
  probe
  misc_feature (1)..(25): SEQ ID NO: 4544; WAN024AQM_at; Start 33; Stop 57
ccagtttttttcagctggctccttc

SEQ ID NO: 63584 - DNA, 25 bp, Artificial
  probe
  misc_feature (1)..(25): SEQ ID NO: 3575; WAN024AQN_at; Start 51; Stop 75
cctttttaggtacgacaggcatgtc

SEQ ID NO: 63585 - DNA, 25 bp, Artificial
  probe
  misc_feature (1)..(25): SEQ ID NO: 3575; WAN024AQN_at; Start 52; Stop 76
ctttttaggtacgacaggcatgtcg

SEQ ID NO: 63586 - DNA, 25 bp, Artificial
  probe
  misc_feature (1)..(25): SEQ ID NO: 3575; WAN024AQN_at; Start 13; Stop 37
aggataaaaaagaaggagccagctg

SEQ ID NO: 63587 - DNA, 25 bp, Artificial
  probe
  misc_feature (1)..(25): SEQ ID NO: 3575; WAN024AQN_at; Start 54; Stop 78
ttttaggtacgacaggcatgtcgta

SEQ ID NO: 63588 - DNA, 25 bp, Artificial
  probe
  misc_feature (1)..(25): SEQ ID NO: 3575; WAN024AQN_at; Start 28; Stop 52
gagccagctgaaaaaaactggttcc

SEQ ID NO: 63589 - DNA, 25 bp, Artificial
  probe
  misc_feature (1)..(25): SEQ ID NO: 3575; WAN024AQN_at; Start 15; Stop 39
gataaaaaagaaggagccagctgaa

SEQ ID NO: 63590 - DNA, 25 bp, Artificial
  probe
  misc_feature (1)..(25): SEQ ID NO: 3575; WAN024AQN_at; Start 10; Stop 34
ttgaggataaaaaagaaggagccag

SEQ ID NO: 63591 - DNA, 25 bp, Artificial
  probe
  misc_feature (1)..(25): SEQ ID NO: 3575; WAN024AQN_at; Start 50; Stop 74
tcctttttaggtacgacaggcatgt

SEQ ID NO: 63592 - DNA, 25 bp, Artificial
  probe
  misc_feature (1)..(25): SEQ ID NO: 3575; WAN024AQN_at; Start 25; Stop 49
aaggagccagctgaaaaaaactggt

SEQ ID NO: 63593 - DNA, 25 bp, Artificial
  probe
  misc_feature (1)..(25): SEQ ID NO: 3575; WAN024AQN_at; Start 29; Stop 53
agccagctgaaaaaaactggttcct

SEQ ID NO: 63594 - DNA, 25 bp, Artificial
  probe
  misc_feature (1)..(25): SEQ ID NO: 3575; WAN024AQN_at; Start 12; Stop 36
gaggataaaaaagaaggagccagct

SEQ ID NO: 63595 - DNA, 25 bp, Artificial
  probe
  misc_feature (1)..(25): SEQ ID NO: 3575; WAN024AQN_at; Start 26; Stop 50
aggagccagctgaaaaaaactggtt

SEQ ID NO: 63596 - DNA, 25 bp, Artificial
  probe
  misc_feature (1)..(25): SEQ ID NO: 3575; WAN024AQN_at; Start 53; Stop 77
tttttaggtacgacaggcatgtcgt

SEQ ID NO: 63597 - DNA, 25 bp, Artificial
  probe
  misc_feature (1)..(25): SEQ ID NO: 3575; WAN024AQN_at; Start 11; Stop 35
tgaggataaaaaagaaggagccagc

SEQ ID NO: 63598 - DNA, 25 bp, Artificial
  probe
  misc_feature (1)..(25): SEQ ID NO: 3575; WAN024AQN_at; Start 49; Stop 73
ttcctttttaggtacgacaggcatg

SEQ ID NO: 63599 - DNA, 25 bp, Artificial
  probe
  misc_feature (1)..(25): SEQ ID NO: 3575; WAN024AQN_at; Start 22; Stop 46
aagaaggagccagctgaaaaaaact

SEQ ID NO: 63600 - DNA, 25 bp, Artificial
  probe
  misc_feature (1)..(25): SEQ ID NO: 3575; WAN024AQN_at; Start 14; Stop 38
ggataaaaaagaaggagccagctga

SEQ ID NO: 63601 - DNA, 25 bp, Artificial
  probe
  misc_feature (1)..(25): SEQ ID NO: 3575; WAN024AQN_at; Start 24; Stop 48
gaaggagccagctgaaaaaaactgg

SEQ ID NO: 63602 - DNA, 25 bp, Artificial
  probe
  misc_feature (1)..(25): SEQ ID NO: 3575; WAN024AQN_at; Start 23; Stop 47
agaaggagccagctgaaaaaaactg

SEQ ID NO: 63603 - DNA, 25 bp, Artificial
  probe
  misc_feature (1)..(25): SEQ ID NO: 3575; WAN024AQN_at; Start 27; Stop 51
ggagccagctgaaaaaaactggttc

SEQ ID NO: 63604 - DNA, 25 bp, Artificial
  probe
  misc_feature (1)..(25): SEQ ID NO: 3158; WAN024AQO_at; Start 25; Stop 49
tagttatgattactgatattgacta

SEQ ID NO: 63605 - DNA, 25 bp, Artificial
  probe
  misc_feature (1)..(25): SEQ ID NO: 3158; WAN024AQO_at; Start 33; Stop 57
attactgatattgactatctttgac

SEQ ID NO: 63606 - DNA, 25 bp, Artificial
  probe
  misc_feature (1)..(25): SEQ ID NO: 3158; WAN024AQO_at; Start 29; Stop 53
tatgattactgatattgactatctt

SEQ ID NO: 63607 - DNA, 25 bp, Artificial
  probe
  misc_feature (1)..(25): SEQ ID NO: 3158; WAN024AQO_at; Start 26; Stop 50
agttatgattactgatattgactat

SEQ ID NO: 63608 - DNA, 25 bp, Artificial
  probe
  misc_feature (1)..(25): SEQ ID NO: 3158; WAN024AQO_at; Start 30; Stop 54
atgattactgatattgactatcttt

SEQ ID NO: 63609 - DNA, 25 bp, Artificial
  probe
  misc_feature (1)..(25): SEQ ID NO: 3158; WAN024AQO_at; Start 34; Stop 58
ttactgatattgactatctttgacc

SEQ ID NO: 63610 - DNA, 25 bp, Artificial
  probe
  misc_feature (1)..(25): SEQ ID NO: 3158; WAN024AQO_at; Start 28; Stop 52
ttatgattactgatattgactatct

SEQ ID NO: 63611 - DNA, 25 bp, Artificial
  probe
  misc_feature (1)..(25): SEQ ID NO: 3158; WAN024AQO_at; Start 27; Stop 51
gttatgattactgatattgactatc

SEQ ID NO: 63612 - DNA, 25 bp, Artificial
  probe
  misc_feature (1)..(25): SEQ ID NO: 3158; WAN024AQO_at; Start 32; Stop 56
gattactgatattgactatctttga

SEQ ID NO: 63613 - DNA, 25 bp, Artificial
  probe
  misc_feature (1)..(25): SEQ ID NO: 3158; WAN024AQO_at; Start 24; Stop 48
ttagttatgattactgatattgact

SEQ ID NO: 63614 - DNA, 25 bp, Artificial
  probe
  misc_feature (1)..(25): SEQ ID NO: 3158; WAN024AQO_at; Start 31; Stop 55
tgattactgatattgactatctttg

SEQ ID NO: 63615 - DNA, 25 bp, Artificial
  probe
  misc_feature (1)..(25): SEQ ID NO: 4490; WAN024AQQ_at; Start 38; Stop 62
tctagtaaggctttcatttacctta

SEQ ID NO: 63616 - DNA, 25 bp, Artificial
  probe
  misc_feature (1)..(25): SEQ ID NO: 4490; WAN024AQQ_at; Start 32; Stop 56
aagtgttctagtaaggctttcattt

SEQ ID NO: 63617 - DNA, 25 bp, Artificial
  probe
  misc_feature (1)..(25): SEQ ID NO: 4490; WAN024AQQ_at; Start 34; Stop 58
gtgttctagtaaggctttcatttac

SEQ ID NO: 63618 - DNA, 25 bp, Artificial
  probe
  misc_feature (1)..(25): SEQ ID NO: 4490; WAN024AQQ_at; Start 31; Stop 55
taagtgttctagtaaggctttcatt

SEQ ID NO: 63619 - DNA, 25 bp, Artificial
  probe
  misc_feature (1)..(25): SEQ ID NO: 4490; WAN024AQQ_at; Start 35; Stop 59
tgttctagtaaggctttcatttacc

SEQ ID NO: 63620 - DNA, 25 bp, Artificial
  probe
  misc_feature (1)..(25): SEQ ID NO: 4490; WAN024AQQ_at; Start 29; Stop 53
aataagtgttctagtaaggctttca

SEQ ID NO: 63621 - DNA, 25 bp, Artificial
  probe
  misc_feature (1)..(25): SEQ ID NO: 4490; WAN024AQQ_at; Start 33; Stop 57
agtgttctagtaaggctttcattta

SEQ ID NO: 63622 - DNA, 25 bp, Artificial
  probe
  misc_feature (1)..(25): SEQ ID NO: 4490; WAN024AQQ_at; Start 30; Stop 54
ataagtgttctagtaaggctttcat

SEQ ID NO: 63623 - DNA, 25 bp, Artificial
  probe
  misc_feature (1)..(25): SEQ ID NO: 367; WAN024AQR_at; Start 9; Stop 33
taaatgaaagccttactagaacact

SEQ ID NO: 63624 - DNA, 25 bp, Artificial
  probe
  misc_feature (1)..(25): SEQ ID NO: 367; WAN024AQR_at; Start 8; Stop 32
gtaaatgaaagccttactagaacac

SEQ ID NO: 63625 - DNA, 25 bp, Artificial
  probe
  misc_feature (1)..(25): SEQ ID NO: 367; WAN024AQR_at; Start 11; Stop 35
aatgaaagccttactagaacactta

SEQ ID NO: 63626 - DNA, 25 bp, Artificial
  probe
  misc_feature (1)..(25): SEQ ID NO: 367; WAN024AQR_at; Start 7; Stop 31
ggtaaatgaaagccttactagaaca

SEQ ID NO: 63627 - DNA, 25 bp, Artificial
  probe
  misc_feature (1)..(25): SEQ ID NO: 367; WAN024AQR_at; Start 13; Stop 37
tgaaagccttactagaacacttatt

SEQ ID NO: 63628 - DNA, 25 bp, Artificial
  probe
  misc_feature (1)..(25): SEQ ID NO: 367; WAN024AQR_at; Start 10; Stop 34
aaatgaaagccttactagaacactt

SEQ ID NO: 63629 - DNA, 25 bp, Artificial
  probe
  misc_feature (1)..(25): SEQ ID NO: 367; WAN024AQR_at; Start 4; Stop 28
taaggtaaatgaaagccttactaga

SEQ ID NO: 63630 - DNA, 25 bp, Artificial
  probe
  misc_feature (1)..(25): SEQ ID NO: 367; WAN024AQR_at; Start 12; Stop 36
atgaaagccttactagaacacttat

SEQ ID NO: 63631 - DNA, 25 bp, Artificial
  probe
  misc_feature (1)..(25): SEQ ID NO: 3725; WAN024AQS_at; Start 45; Stop 69
ttgacactttatgtttaaaagacta

SEQ ID NO: 63632 - DNA, 25 bp, Artificial
  probe
  misc_feature (1)..(25): SEQ ID NO: 3725; WAN024AQS_at; Start 42; Stop 66
tacttgacactttatgtttaaaaga

SEQ ID NO: 63633 - DNA, 25 bp, Artificial
  probe
  misc_feature (1)..(25): SEQ ID NO: 3725; WAN024AQS_at; Start 28; Stop 52
aaatatgtcaaaaatacttgacact

SEQ ID NO: 63634 - DNA, 25 bp, Artificial
  probe
  misc_feature (1)..(25): SEQ ID NO: 3725; WAN024AQS_at; Start 36; Stop 60
caaaaatacttgacactttatgttt

SEQ ID NO: 63635 - DNA, 25 bp, Artificial
  probe
  misc_feature (1)..(25): SEQ ID NO: 3725; WAN024AQS_at; Start 3; Stop 27
acaaggagactactatttcttcaaa

SEQ ID NO: 63636 - DNA, 25 bp, Artificial
  probe
  misc_feature (1)..(25): SEQ ID NO: 3725; WAN024AQS_at; Start 46; Stop 70
tgacactttatgtttaaaagactat

SEQ ID NO: 63637 - DNA, 25 bp, Artificial
  probe
  misc_feature (1)..(25): SEQ ID NO: 3725; WAN024AQS_at; Start 4; Stop 28
caaggagactactatttcttcaaaa

SEQ ID NO: 63638 - DNA, 25 bp, Artificial
  probe
  misc_feature (1)..(25): SEQ ID NO: 3725; WAN024AQS_at; Start 21; Stop 45
cttcaaaaaatatgtcaaaaatact

SEQ ID NO: 63639 - DNA, 25 bp, Artificial
  probe
  misc_feature (1)..(25): SEQ ID NO: 3725; WAN024AQS_at; Start 27; Stop 51
aaaatatgtcaaaaatacttgacac

SEQ ID NO: 63640 - DNA, 25 bp, Artificial
  probe
  misc_feature (1)..(25): SEQ ID NO: 3725; WAN024AQS_at; Start 34; Stop 58
gtcaaaaatacttgacactttatgt

SEQ ID NO: 63641 - DNA, 25 bp, Artificial
  probe
  misc_feature (1)..(25): SEQ ID NO: 3725; WAN024AQS_at; Start 16; Stop 40
tatttcttcaaaaaatatgtcaaaa

SEQ ID NO: 63642 - DNA, 25 bp, Artificial
  probe
  misc_feature (1)..(25): SEQ ID NO: 3725; WAN024AQS_at; Start 47; Stop 71
gacactttatgtttaaaagactata

SEQ ID NO: 63643 - DNA, 25 bp, Artificial
  probe
  misc_feature (1)..(25): SEQ ID NO: 3725; WAN024AQS_at; Start 19; Stop 43
ttcttcaaaaaatatgtcaaaaata

SEQ ID NO: 63644 - DNA, 25 bp, Artificial
  probe
  misc_feature (1)..(25): SEQ ID NO: 3725; WAN024AQS_at; Start 24; Stop 48
caaaaaatatgtcaaaaatacttga

SEQ ID NO: 63645 - DNA, 25 bp, Artificial
  probe
  misc_feature (1)..(25): SEQ ID NO: 3725; WAN024AQS_at; Start 49; Stop 73
cactttatgtttaaaagactataat

SEQ ID NO: 63646 - DNA, 25 bp, Artificial
  probe
  misc_feature (1)..(25): SEQ ID NO: 3725; WAN024AQS_at; Start 26; Stop 50
aaaaatatgtcaaaaatacttgaca

SEQ ID NO: 63647 - DNA, 25 bp, Artificial
  probe
  misc_feature (1)..(25): SEQ ID NO: 3725; WAN024AQS_at; Start 44; Stop 68
cttgacactttatgtttaaaagact

SEQ ID NO: 63648 - DNA, 25 bp, Artificial
  probe
  misc_feature (1)..(25): SEQ ID NO: 3725; WAN024AQS_at; Start 41; Stop 65
atacttgacactttatgtttaaaag

SEQ ID NO: 63649 - DNA, 25 bp, Artificial
  probe
  misc_feature (1)..(25): SEQ ID NO: 3725; WAN024AQS_at; Start 29; Stop 53
aatatgtcaaaaatacttgacactt

SEQ ID NO: 63650 - DNA, 25 bp, Artificial
  probe
  misc_feature (1)..(25): SEQ ID NO: 3725; WAN024AQS_at; Start 2; Stop 26
gacaaggagactactatttcttcaa

SEQ ID NO: 63651 - DNA, 25 bp, Artificial
  probe
  misc_feature (1)..(25): SEQ ID NO: 3725; WAN024AQS_at; Start 51; Stop 75
ctttatgtttaaaagactataatat

SEQ ID NO: 63652 - DNA, 25 bp, Artificial
  probe
  misc_feature (1)..(25): SEQ ID NO: 3725; WAN024AQS_at; Start 8; Stop 32
gagactactatttcttcaaaaaata

SEQ ID NO: 63653 - DNA, 25 bp, Artificial
  probe
  misc_feature (1)..(25): SEQ ID NO: 3725; WAN024AQS_at; Start 20; Stop 44
tcttcaaaaaatatgtcaaaaatac

SEQ ID NO: 63654 - DNA, 25 bp, Artificial
  probe
  misc_feature (1)..(25): SEQ ID NO: 3725; WAN024AQS_at; Start 31; Stop 55
tatgtcaaaaatacttgacacttta

SEQ ID NO: 63655 - DNA, 25 bp, Artificial
  probe
  misc_feature (1)..(25): SEQ ID NO: 3725; WAN024AQS_at; Start 35; Stop 59
tcaaaaatacttgacactttatgtt

SEQ ID NO: 63656 - DNA, 25 bp, Artificial
  probe
  misc_feature (1)..(25): SEQ ID NO: 3725; WAN024AQS_at; Start 1; Stop 25
ggacaaggagactactatttcttca

SEQ ID NO: 63657 - DNA, 25 bp, Artificial
  probe
  misc_feature (1)..(25): SEQ ID NO: 3725; WAN024AQS_at; Start 32; Stop 56
atgtcaaaaatacttgacactttat

SEQ ID NO: 63658 - DNA, 25 bp, Artificial
  probe
  misc_feature (1)..(25): SEQ ID NO: 3725; WAN024AQS_at; Start 33; Stop 57
tgtcaaaaatacttgacactttatg

SEQ ID NO: 63659 - DNA, 25 bp, Artificial
  probe
  misc_feature (1)..(25): SEQ ID NO: 3725; WAN024AQS_at; Start 53; Stop 77
ttatgtttaaaagactataatatag

SEQ ID NO: 63660 - DNA, 25 bp, Artificial
  probe
  misc_feature (1)..(25): SEQ ID NO: 3725; WAN024AQS_at; Start 30; Stop 54
atatgtcaaaaatacttgacacttt

SEQ ID NO: 63661 - DNA, 25 bp, Artificial
  probe
  misc_feature (1)..(25): SEQ ID NO: 3725; WAN024AQS_at; Start 23; Stop 47
tcaaaaaatatgtcaaaaatacttg

SEQ ID NO: 63662 - DNA, 25 bp, Artificial
  probe
  misc_feature (1)..(25): SEQ ID NO: 3287; WAN024AQT_at; Start 18; Stop 42
aaacataaagtgtcaagtatttttg

SEQ ID NO: 63663 - DNA, 25 bp, Artificial
  probe
  misc_feature (1)..(25): SEQ ID NO: 3287; WAN024AQT_at; Start 25; Stop 49
aagtgtcaagtatttttgacatatt

SEQ ID NO: 63664 - DNA, 25 bp, Artificial
  probe
  misc_feature (1)..(25): SEQ ID NO: 3287; WAN024AQT_at; Start 12; Stop 36
tcttttaaacataaagtgtcaagta

SEQ ID NO: 63665 - DNA, 25 bp, Artificial
  probe
  misc_feature (1)..(25): SEQ ID NO: 3287; WAN024AQT_at; Start 8; Stop 32
atagtcttttaaacataaagtgtca

SEQ ID NO: 63666 - DNA, 25 bp, Artificial
  probe
  misc_feature (1)..(25): SEQ ID NO: 3287; WAN024AQT_at; Start 38; Stop 62
ttttgacatattttttgaagaaata

SEQ ID NO: 63667 - DNA, 25 bp, Artificial
  probe
  misc_feature (1)..(25): SEQ ID NO: 3287; WAN024AQT_at; Start 24; Stop 48
aaagtgtcaagtatttttgacatat

SEQ ID NO: 63668 - DNA, 25 bp, Artificial
  probe
  misc_feature (1)..(25): SEQ ID NO: 3287; WAN024AQT_at; Start 22; Stop 46
ataaagtgtcaagtatttttgacat

SEQ ID NO: 63669 - DNA, 25 bp, Artificial
  probe
  misc_feature (1)..(25): SEQ ID NO: 3287; WAN024AQT_at; Start 35; Stop 59
tatttttgacatattttttgaagaa

SEQ ID NO: 63670 - DNA, 25 bp, Artificial
  probe
  misc_feature (1)..(25): SEQ ID NO: 3287; WAN024AQT_at; Start 3; Stop 27
atattatagtcttttaaacataaag

SEQ ID NO: 63671 - DNA, 25 bp, Artificial
  probe
  misc_feature (1)..(25): SEQ ID NO: 3287; WAN024AQT_at; Start 13; Stop 37
cttttaaacataaagtgtcaagtat

SEQ ID NO: 63672 - DNA, 25 bp, Artificial
  probe
  misc_feature (1)..(25): SEQ ID NO: 3287; WAN024AQT_at; Start 23; Stop 47
taaagtgtcaagtatttttgacata

SEQ ID NO: 63673 - DNA, 25 bp, Artificial
  probe
  misc_feature (1)..(25): SEQ ID NO: 3287; WAN024AQT_at; Start 21; Stop 45
cataaagtgtcaagtatttttgaca

SEQ ID NO: 63674 - DNA, 25 bp, Artificial
  probe
  misc_feature (1)..(25): SEQ ID NO: 3287; WAN024AQT_at; Start 39; Stop 63
tttgacatattttttgaagaaatag

SEQ ID NO: 63675 - DNA, 25 bp, Artificial
  probe
  misc_feature (1)..(25): SEQ ID NO: 3287; WAN024AQT_at; Start 30; Stop 54
tcaagtatttttgacatattttttg

SEQ ID NO: 63676 - DNA, 25 bp, Artificial
  probe
  misc_feature (1)..(25): SEQ ID NO: 3287; WAN024AQT_at; Start 42; Stop 66
gacatattttttgaagaaatagtag

SEQ ID NO: 63677 - DNA, 25 bp, Artificial
  probe
  misc_feature (1)..(25): SEQ ID NO: 3287; WAN024AQT_at; Start 5; Stop 29
attatagtcttttaaacataaagtg

SEQ ID NO: 63678 - DNA, 25 bp, Artificial
  probe
  misc_feature (1)..(25): SEQ ID NO: 3287; WAN024AQT_at; Start 1; Stop 25
ctatattatagtcttttaaacataa

SEQ ID NO: 63679 - DNA, 25 bp, Artificial
  probe
  misc_feature (1)..(25): SEQ ID NO: 3287; WAN024AQT_at; Start 27; Stop 51
gtgtcaagtatttttgacatatttt

SEQ ID NO: 63680 - DNA, 25 bp, Artificial
  probe
  misc_feature (1)..(25): SEQ ID NO: 3287; WAN024AQT_at; Start 33; Stop 57
agtatttttgacatattttttgaag

SEQ ID NO: 63681 - DNA, 25 bp, Artificial
  probe
  misc_feature (1)..(25): SEQ ID NO: 3287; WAN024AQT_at; Start 9; Stop 33
tagtcttttaaacataaagtgtcaa

SEQ ID NO: 63682 - DNA, 25 bp, Artificial
  probe
  misc_feature (1)..(25): SEQ ID NO: 3287; WAN024AQT_at; Start 34; Stop 58
gtatttttgacatattttttgaaga

SEQ ID NO: 63683 - DNA, 25 bp, Artificial
  probe
  misc_feature (1)..(25): SEQ ID NO: 3287; WAN024AQT_at; Start 7; Stop 31
tatagtcttttaaacataaagtgtc

SEQ ID NO: 63684 - DNA, 25 bp, Artificial
  probe
  misc_feature (1)..(25): SEQ ID NO: 3287; WAN024AQT_at; Start 53; Stop 77
tgaagaaatagtagtctccttgtcc

SEQ ID NO: 63685 - DNA, 25 bp, Artificial
  probe
  misc_feature (1)..(25): SEQ ID NO: 3287; WAN024AQT_at; Start 10; Stop 34
agtcttttaaacataaagtgtcaag

SEQ ID NO: 63686 - DNA, 25 bp, Artificial
  probe
  misc_feature (1)..(25): SEQ ID NO: 3287; WAN024AQT_at; Start 20; Stop 44
acataaagtgtcaagtatttttgac

SEQ ID NO: 63687 - DNA, 25 bp, Artificial
  probe
  misc_feature (1)..(25): SEQ ID NO: 3287; WAN024AQT_at; Start 41; Stop 65
tgacatattttttgaagaaatagta

SEQ ID NO: 63688 - DNA, 25 bp, Artificial
  probe
  misc_feature (1)..(25): SEQ ID NO: 3287; WAN024AQT_at; Start 31; Stop 55
caagtatttttgacatattttttga

SEQ ID NO: 63689 - DNA, 25 bp, Artificial
  probe
  misc_feature (1)..(25): SEQ ID NO: 3287; WAN024AQT_at; Start 2; Stop 26
tatattatagtcttttaaacataaa

SEQ ID NO: 63690 - DNA, 25 bp, Artificial
  probe
  misc_feature (1)..(25): SEQ ID NO: 3287; WAN024AQT_at; Start 40; Stop 64
ttgacatattttttgaagaaatagt

SEQ ID NO: 63691 - DNA, 25 bp, Artificial
  probe
  misc_feature (1)..(25): SEQ ID NO: 3287; WAN024AQT_at; Start 19; Stop 43
aacataaagtgtcaagtatttttga

SEQ ID NO: 63692 - DNA, 25 bp, Artificial
  probe
  misc_feature (1)..(25): SEQ ID NO: 3287; WAN024AQT_at; Start 26; Stop 50
agtgtcaagtatttttgacatattt

SEQ ID NO: 63693 - DNA, 25 bp, Artificial
  probe
  misc_feature (1)..(25): SEQ ID NO: 3731; WAN024AQU_at; Start 20; Stop 44
tctcatttcataggcaaataatccc

SEQ ID NO: 63694 - DNA, 25 bp, Artificial
  probe
  misc_feature (1)..(25): SEQ ID NO: 3731; WAN024AQU_at; Start 22; Stop 46
tcatttcataggcaaataatcccac

SEQ ID NO: 63695 - DNA, 25 bp, Artificial
  probe
  misc_feature (1)..(25): SEQ ID NO: 3731; WAN024AQU_at; Start 81; Stop 105
aacagagattgcaagtcattttcct

SEQ ID NO: 63696 - DNA, 25 bp, Artificial
  probe
  misc_feature (1)..(25): SEQ ID NO: 3731; WAN024AQU_at; Start 47; Stop 71
ctagcttgttctaggtgggattatt

SEQ ID NO: 63697 - DNA, 25 bp, Artificial
  probe
  misc_feature (1)..(25): SEQ ID NO: 3731; WAN024AQU_at; Start 77; Stop 101
tcttaacagagattgcaagtcattt

SEQ ID NO: 63698 - DNA, 25 bp, Artificial
  probe
  misc_feature (1)..(25): SEQ ID NO: 3731; WAN024AQU_at; Start 84; Stop 108
agagattgcaagtcattttccttca

SEQ ID NO: 63699 - DNA, 25 bp, Artificial
  probe
  misc_feature (1)..(25): SEQ ID NO: 3731; WAN024AQU_at; Start 80; Stop 104
taacagagattgcaagtcattttcc

SEQ ID NO: 63700 - DNA, 25 bp, Artificial
  probe
  misc_feature (1)..(25): SEQ ID NO: 3731; WAN024AQU_at; Start 2; Stop 26
gagcttgctcccataatttctcatt

SEQ ID NO: 63701 - DNA, 25 bp, Artificial
  probe
  misc_feature (1)..(25): SEQ ID NO: 3731; WAN024AQU_at; Start 44; Stop 68
cacctagcttgttctaggtgggatt

SEQ ID NO: 63702 - DNA, 25 bp, Artificial
  probe
  misc_feature (1)..(25): SEQ ID NO: 3731; WAN024AQU_at; Start 15; Stop 39
taatttctcatttcataggcaaata

SEQ ID NO: 63703 - DNA, 25 bp, Artificial
  probe
  misc_feature (1)..(25): SEQ ID NO: 3731; WAN024AQU_at; Start 23; Stop 47
catttcataggcaaataatcccacc

SEQ ID NO: 63704 - DNA, 25 bp, Artificial
  probe
  misc_feature (1)..(25): SEQ ID NO: 3731; WAN024AQU_at; Start 13; Stop 37
cataatttctcatttcataggcaaa

SEQ ID NO: 63705 - DNA, 25 bp, Artificial
  probe
  misc_feature (1)..(25): SEQ ID NO: 3731; WAN024AQU_at; Start 8; Stop 32
gctcccataatttctcatttcatag

SEQ ID NO: 63706 - DNA, 25 bp, Artificial
  probe
  misc_feature (1)..(25): SEQ ID NO: 3731; WAN024AQU_at; Start 25; Stop 49
tttcataggcaaataatcccaccta

SEQ ID NO: 63707 - DNA, 25 bp, Artificial
  probe
  misc_feature (1)..(25): SEQ ID NO: 3731; WAN024AQU_at; Start 74; Stop 98
atttcttaacagagattgcaagtca

SEQ ID NO: 63708 - DNA, 25 bp, Artificial
  probe
  misc_feature (1)..(25): SEQ ID NO: 3731; WAN024AQU_at; Start 4; Stop 28
gcttgctcccataatttctcatttc

SEQ ID NO: 63709 - DNA, 25 bp, Artificial
  probe
  misc_feature (1)..(25): SEQ ID NO: 3731; WAN024AQU_at; Start 38; Stop 62
taatcccacctagcttgttctaggt

SEQ ID NO: 63710 - DNA, 25 bp, Artificial
  probe
  misc_feature (1)..(25): SEQ ID NO: 3731; WAN024AQU_at; Start 76; Stop 100
ttcttaacagagattgcaagtcatt

SEQ ID NO: 63711 - DNA, 25 bp, Artificial
  probe
  misc_feature (1)..(25): SEQ ID NO: 3731; WAN024AQU_at; Start 39; Stop 63
aatcccacctagcttgttctaggtg

SEQ ID NO: 63712 - DNA, 25 bp, Artificial
  probe
  misc_feature (1)..(25): SEQ ID NO: 3731; WAN024AQU_at; Start 24; Stop 48
atttcataggcaaataatcccacct

SEQ ID NO: 63713 - DNA, 25 bp, Artificial
  probe
  misc_feature (1)..(25): SEQ ID NO: 3731; WAN024AQU_at; Start 75; Stop 99
tttcttaacagagattgcaagtcat

SEQ ID NO: 63714 - DNA, 25 bp, Artificial
  probe
  misc_feature (1)..(25): SEQ ID NO: 3731; WAN024AQU_at; Start 12; Stop 36
ccataatttctcatttcataggcaa

SEQ ID NO: 63715 - DNA, 25 bp, Artificial
  probe
  misc_feature (1)..(25): SEQ ID NO: 3731; WAN024AQU_at; Start 86; Stop 110
agattgcaagtcattttccttcatt

SEQ ID NO: 63716 - DNA, 25 bp, Artificial
  probe
  misc_feature (1)..(25): SEQ ID NO: 3731; WAN024AQU_at; Start 37; Stop 61
ataatcccacctagcttgttctagg

SEQ ID NO: 63717 - DNA, 25 bp, Artificial
  probe
  misc_feature (1)..(25): SEQ ID NO: 3731; WAN024AQU_at; Start 68; Stop 92
tattttatttcttaacagagattgc

SEQ ID NO: 63718 - DNA, 25 bp, Artificial
  probe
  misc_feature (1)..(25): SEQ ID NO: 3731; WAN024AQU_at; Start 11; Stop 35
cccataatttctcatttcataggca

SEQ ID NO: 63719 - DNA, 25 bp, Artificial
  probe
  misc_feature (1)..(25): SEQ ID NO: 3731; WAN024AQU_at; Start 36; Stop 60
aataatcccacctagcttgttctag

SEQ ID NO: 63720 - DNA, 25 bp, Artificial
  probe
  misc_feature (1)..(25): SEQ ID NO: 3731; WAN024AQU_at; Start 1; Stop 25
ggagcttgctcccataatttctcat

SEQ ID NO: 63721 - DNA, 25 bp, Artificial
  probe
  misc_feature (1)..(25): SEQ ID NO: 3731; WAN024AQU_at; Start 46; Stop 70
cctagcttgttctaggtgggattat

SEQ ID NO: 63722 - DNA, 25 bp, Artificial
  probe
  misc_feature (1)..(25): SEQ ID NO: 3731; WAN024AQU_at; Start 73; Stop 97
tatttcttaacagagattgcaagtc

SEQ ID NO: 63723 - DNA, 25 bp, Artificial
  probe
  misc_feature (1)..(25): SEQ ID NO: 3731; WAN024AQU_at; Start 85; Stop 109
gagattgcaagtcattttccttcat

SEQ ID NO: 63724 - DNA, 25 bp, Artificial
  probe
  misc_feature (1)..(25): SEQ ID NO: 3731; WAN024AQU_at; Start 83; Stop 107
cagagattgcaagtcattttccttc

SEQ ID NO: 63725 - DNA, 25 bp, Artificial
  probe
  misc_feature (1)..(25): SEQ ID NO: 3731; WAN024AQU_at; Start 10; Stop 34
tcccataatttctcatttcataggc

SEQ ID NO: 63726 - DNA, 25 bp, Artificial
  probe
  misc_feature (1)..(25): SEQ ID NO: 3731; WAN024AQU_at; Start 64; Stop 88
ggattattttatttcttaacagaga

SEQ ID NO: 63727 - DNA, 25 bp, Artificial
  probe
  misc_feature (1)..(25): SEQ ID NO: 283; WAN024AQV_at; Start 76; Stop 100
tgcctatgaaatgagaaattatggg

SEQ ID NO: 63728 - DNA, 25 bp, Artificial
  probe
  misc_feature (1)..(25): SEQ ID NO: 283; WAN024AQV_at; Start 64; Stop 88
ggtgggattatttgcctatgaaatg

SEQ ID NO: 63729 - DNA, 25 bp, Artificial
  probe
  misc_feature (1)..(25): SEQ ID NO: 283; WAN024AQV_at; Start 11; Stop 35
aatgacttgcaatctctgttaagaa

SEQ ID NO: 63730 - DNA, 25 bp, Artificial
  probe
  misc_feature (1)..(25): SEQ ID NO: 283; WAN024AQV_at; Start 8; Stop 32
gaaaatgacttgcaatctctgttaa

SEQ ID NO: 63731 - DNA, 25 bp, Artificial
  probe
  misc_feature (1)..(25): SEQ ID NO: 283; WAN024AQV_at; Start 67; Stop 91
gggattatttgcctatgaaatgaga

SEQ ID NO: 63732 - DNA, 25 bp, Artificial
  probe
  misc_feature (1)..(25): SEQ ID NO: 283; WAN024AQV_at; Start 51; Stop 75
ctagaacaagctaggtgggattatt

SEQ ID NO: 63733 - DNA, 25 bp, Artificial
  probe
  misc_feature (1)..(25): SEQ ID NO: 283; WAN024AQV_at; Start 77; Stop 101
gcctatgaaatgagaaattatggga

SEQ ID NO: 63734 - DNA, 25 bp, Artificial
  probe
  misc_feature (1)..(25): SEQ ID NO: 283; WAN024AQV_at; Start 50; Stop 74
cctagaacaagctaggtgggattat

SEQ ID NO: 63735 - DNA, 25 bp, Artificial
  probe
  misc_feature (1)..(25): SEQ ID NO: 283; WAN024AQV_at; Start 25; Stop 49
tctgttaagaaataaaataatccca

SEQ ID NO: 63736 - DNA, 25 bp, Artificial
  probe
  misc_feature (1)..(25): SEQ ID NO: 283; WAN024AQV_at; Start 48; Stop 72
cacctagaacaagctaggtgggatt

SEQ ID NO: 63737 - DNA, 25 bp, Artificial
  probe
  misc_feature (1)..(25): SEQ ID NO: 283; WAN024AQV_at; Start 4; Stop 28
gaaggaaaatgacttgcaatctctg

SEQ ID NO: 63738 - DNA, 25 bp, Artificial
  probe
  misc_feature (1)..(25): SEQ ID NO: 283; WAN024AQV_at; Start 85; Stop 109
aatgagaaattatgggagcaagctc

SEQ ID NO: 63739 - DNA, 25 bp, Artificial
  probe
  misc_feature (1)..(25): SEQ ID NO: 283; WAN024AQV_at; Start 43; Stop 67
aatcccacctagaacaagctaggtg

SEQ ID NO: 63740 - DNA, 25 bp, Artificial
  probe
  misc_feature (1)..(25): SEQ ID NO: 283; WAN024AQV_at; Start 3; Stop 27
tgaaggaaaatgacttgcaatctct

SEQ ID NO: 63741 - DNA, 25 bp, Artificial
  probe
  misc_feature (1)..(25): SEQ ID NO: 283; WAN024AQV_at; Start 45; Stop 69
tcccacctagaacaagctaggtggg

SEQ ID NO: 63742 - DNA, 25 bp, Artificial
  probe
  misc_feature (1)..(25): SEQ ID NO: 283; WAN024AQV_at; Start 83; Stop 107
gaaatgagaaattatgggagcaagc

SEQ ID NO: 63743 - DNA, 25 bp, Artificial
  probe
  misc_feature (1)..(25): SEQ ID NO: 283; WAN024AQV_at; Start 69; Stop 93
gattatttgcctatgaaatgagaaa

SEQ ID NO: 63744 - DNA, 25 bp, Artificial
  probe
  misc_feature (1)..(25): SEQ ID NO: 283; WAN024AQV_at; Start 86; Stop 110
atgagaaattatgggagcaagctcc

SEQ ID NO: 63745 - DNA, 25 bp, Artificial
  probe
  misc_feature (1)..(25): SEQ ID NO: 283; WAN024AQV_at; Start 10; Stop 34
aaatgacttgcaatctctgttaaga

SEQ ID NO: 63746 - DNA, 25 bp, Artificial
  probe
  misc_feature (1)..(25): SEQ ID NO: 283; WAN024AQV_at; Start 16; Stop 40
cttgcaatctctgttaagaaataaa

SEQ ID NO: 63747 - DNA, 25 bp, Artificial
  probe
  misc_feature (1)..(25): SEQ ID NO: 283; WAN024AQV_at; Start 42; Stop 66
taatcccacctagaacaagctaggt

SEQ ID NO: 63748 - DNA, 25 bp, Artificial
  probe
  misc_feature (1)..(25): SEQ ID NO: 283; WAN024AQV_at; Start 18; Stop 42
tgcaatctctgttaagaaataaaat

SEQ ID NO: 63749 - DNA, 25 bp, Artificial
  probe
  misc_feature (1)..(25): SEQ ID NO: 283; WAN024AQV_at; Start 78; Stop 102
cctatgaaatgagaaattatgggag

SEQ ID NO: 63750 - DNA, 25 bp, Artificial
  probe
  misc_feature (1)..(25): SEQ ID NO: 283; WAN024AQV_at; Start 84; Stop 108
aaatgagaaattatgggagcaagct

SEQ ID NO: 63751 - DNA, 25 bp, Artificial
  probe
  misc_feature (1)..(25): SEQ ID NO: 283; WAN024AQV_at; Start 6; Stop 30
aggaaaatgacttgcaatctctgtt

SEQ ID NO: 63752 - DNA, 25 bp, Artificial
  probe
  misc_feature (1)..(25): SEQ ID NO: 283; WAN024AQV_at; Start 7; Stop 31
ggaaaatgacttgcaatctctgtta

SEQ ID NO: 63753 - DNA, 25 bp, Artificial
  probe
  misc_feature (1)..(25): SEQ ID NO: 283; WAN024AQV_at; Start 80; Stop 104
tatgaaatgagaaattatgggagca

SEQ ID NO: 63754 - DNA, 25 bp, Artificial
  probe
  misc_feature (1)..(25): SEQ ID NO: 283; WAN024AQV_at; Start 41; Stop 65
ataatcccacctagaacaagctagg

SEQ ID NO: 63755 - DNA, 25 bp, Artificial
  probe
  misc_feature (1)..(25): SEQ ID NO: 283; WAN024AQV_at; Start 62; Stop 86
taggtgggattatttgcctatgaaa

SEQ ID NO: 63756 - DNA, 25 bp, Artificial
  probe
  misc_feature (1)..(25): SEQ ID NO: 283; WAN024AQV_at; Start 13; Stop 37
tgacttgcaatctctgttaagaaat

SEQ ID NO: 63757 - DNA, 25 bp, Artificial
  probe
  misc_feature (1)..(25): SEQ ID NO: 283; WAN024AQV_at; Start 40; Stop 64
aataatcccacctagaacaagctag

SEQ ID NO: 63758 - DNA, 25 bp, Artificial
  probe
  misc_feature (1)..(25): SEQ ID NO: 283; WAN024AQV_at; Start 14; Stop 38
gacttgcaatctctgttaagaaata

SEQ ID NO: 63759 - DNA, 25 bp, Artificial
  probe
  misc_feature (1)..(25): SEQ ID NO: 283; WAN024AQV_at; Start 5; Stop 29
aaggaaaatgacttgcaatctctgt

SEQ ID NO: 63760 - DNA, 25 bp, Artificial
  probe
  misc_feature (1)..(25): SEQ ID NO: 283; WAN024AQV_at; Start 23; Stop 47
tctctgttaagaaataaaataatcc

SEQ ID NO: 63761 - DNA, 25 bp, Artificial
  probe
  misc_feature (1)..(25): SEQ ID NO: 5185; WAN024AQW_at; Start 27; Stop 51
gacttctctataaccaaattatatt

SEQ ID NO: 63762 - DNA, 25 bp, Artificial
  probe
  misc_feature (1)..(25): SEQ ID NO: 5185; WAN024AQW_at; Start 158; Stop 182
aagataatgaaagcgctaatatttt

SEQ ID NO: 63763 - DNA, 25 bp, Artificial
  probe
  misc_feature (1)..(25): SEQ ID NO: 5185; WAN024AQW_at; Start 194; Stop 218
tattgacaagataaaaataaaggat

SEQ ID NO: 63764 - DNA, 25 bp, Artificial
  probe
  misc_feature (1)..(25): SEQ ID NO: 5185; WAN024AQW_at; Start 155; Stop 179
aaaaagataatgaaagcgctaatat

SEQ ID NO: 63765 - DNA, 25 bp, Artificial
  probe
  misc_feature (1)..(25): SEQ ID NO: 5185; WAN024AQW_at; Start 192; Stop 216
actattgacaagataaaaataaagg

SEQ ID NO: 63766 - DNA, 25 bp, Artificial
  probe
  misc_feature (1)..(25): SEQ ID NO: 5185; WAN024AQW_at; Start 35; Stop 59
tataaccaaattatattctagtaaa

SEQ ID NO: 63767 - DNA, 25 bp, Artificial
  probe
  misc_feature (1)..(25): SEQ ID NO: 5185; WAN024AQW_at; Start 21; Stop 45
tgttaagacttctctataaccaaat

SEQ ID NO: 63768 - DNA, 25 bp, Artificial
  probe
  misc_feature (1)..(25): SEQ ID NO: 5185; WAN024AQW_at; Start 15; Stop 39
caaatttgttaagacttctctataa

SEQ ID NO: 63769 - DNA, 25 bp, Artificial
  probe
  misc_feature (1)..(25): SEQ ID NO: 5185; WAN024AQW_at; Start 202; Stop 226
agataaaaataaaggattacaatgg

SEQ ID NO: 63770 - DNA, 25 bp, Artificial
  probe
  misc_feature (1)..(25): SEQ ID NO: 5185; WAN024AQW_at; Start 12; Stop 36
tttcaaatttgttaagacttctcta

SEQ ID NO: 63771 - DNA, 25 bp, Artificial
  probe
  misc_feature (1)..(25): SEQ ID NO: 5185; WAN024AQW_at; Start 33; Stop 57
tctataaccaaattatattctagta

SEQ ID NO: 63772 - DNA, 25 bp, Artificial
  probe
  misc_feature (1)..(25): SEQ ID NO: 5185; WAN024AQW_at; Start 160; Stop 184
gataatgaaagcgctaatatttttt

SEQ ID NO: 63773 - DNA, 25 bp, Artificial
  probe
  misc_feature (1)..(25): SEQ ID NO: 5185; WAN024AQW_at; Start 24; Stop 48
taagacttctctataaccaaattat

SEQ ID NO: 63774 - DNA, 25 bp, Artificial
  probe
  misc_feature (1)..(25): SEQ ID NO: 5185; WAN024AQW_at; Start 162; Stop 186
taatgaaagcgctaatattttttta

SEQ ID NO: 63775 - DNA, 25 bp, Artificial
  probe
  misc_feature (1)..(25): SEQ ID NO: 5185; WAN024AQW_at; Start 197; Stop 221
tgacaagataaaaataaaggattac

SEQ ID NO: 63776 - DNA, 25 bp, Artificial
  probe
  misc_feature (1)..(25): SEQ ID NO: 5185; WAN024AQW_at; Start 13; Stop 37
ttcaaatttgttaagacttctctat

SEQ ID NO: 63777 - DNA, 25 bp, Artificial
  probe
  misc_feature (1)..(25): SEQ ID NO: 5185; WAN024AQW_at; Start 18; Stop 42
atttgttaagacttctctataacca

SEQ ID NO: 63778 - DNA, 25 bp, Artificial
  probe
  misc_feature (1)..(25): SEQ ID NO: 5185; WAN024AQW_at; Start 11; Stop 35
ctttcaaatttgttaagacttctct

SEQ ID NO: 63779 - DNA, 25 bp, Artificial
  probe
  misc_feature (1)..(25): SEQ ID NO: 5185; WAN024AQW_at; Start 156; Stop 180
aaaagataatgaaagcgctaatatt

SEQ ID NO: 63780 - DNA, 25 bp, Artificial
  probe
  misc_feature (1)..(25): SEQ ID NO: 5185; WAN024AQW_at; Start 32; Stop 56
ctctataaccaaattatattctagt

SEQ ID NO: 63781 - DNA, 25 bp, Artificial
  probe
  misc_feature (1)..(25): SEQ ID NO: 5185; WAN024AQW_at; Start 153; Stop 177
ttaaaaagataatgaaagcgctaat

SEQ ID NO: 63782 - DNA, 25 bp, Artificial
  probe
  misc_feature (1)..(25): SEQ ID NO: 5185; WAN024AQW_at; Start 23; Stop 47
ttaagacttctctataaccaaatta

SEQ ID NO: 63783 - DNA, 25 bp, Artificial
  probe
  misc_feature (1)..(25): SEQ ID NO: 5185; WAN024AQW_at; Start 211; Stop 235
taaaggattacaatggggaatataa

SEQ ID NO: 63784 - DNA, 25 bp, Artificial
  probe
  misc_feature (1)..(25): SEQ ID NO: 5185; WAN024AQW_at; Start 154; Stop 178
taaaaagataatgaaagcgctaata

SEQ ID NO: 63785 - DNA, 25 bp, Artificial
  probe
  misc_feature (1)..(25): SEQ ID NO: 5185; WAN024AQW_at; Start 14; Stop 38
tcaaatttgttaagacttctctata

SEQ ID NO: 63786 - DNA, 25 bp, Artificial
  probe
  misc_feature (1)..(25): SEQ ID NO: 5185; WAN024AQW_at; Start 216; Stop 240
gattacaatggggaatataaagtaa

SEQ ID NO: 63787 - DNA, 25 bp, Artificial
  probe
  misc_feature (1)..(25): SEQ ID NO: 5185; WAN024AQW_at; Start 200; Stop 224
caagataaaaataaaggattacaat

SEQ ID NO: 63788 - DNA, 25 bp, Artificial
  probe
  misc_feature (1)..(25): SEQ ID NO: 5185; WAN024AQW_at; Start 19; Stop 43
tttgttaagacttctctataaccaa

SEQ ID NO: 63789 - DNA, 25 bp, Artificial
  probe
  misc_feature (1)..(25): SEQ ID NO: 5185; WAN024AQW_at; Start 20; Stop 44
ttgttaagacttctctataaccaaa

SEQ ID NO: 63790 - DNA, 25 bp, Artificial
  probe
  misc_feature (1)..(25): SEQ ID NO: 5185; WAN024AQW_at; Start 198; Stop 222
gacaagataaaaataaaggattaca

SEQ ID NO: 63791 - DNA, 25 bp, Artificial
  probe
  misc_feature (1)..(25): SEQ ID NO: 5185; WAN024AQW_at; Start 31; Stop 55
tctctataaccaaattatattctag

SEQ ID NO: 63792 - DNA, 25 bp, Artificial
  probe
  misc_feature (1)..(25): SEQ ID NO: 5185; WAN024AQW_at; Start 25; Stop 49
aagacttctctataaccaaattata

SEQ ID NO: 63793 - DNA, 25 bp, Artificial
  probe
  misc_feature (1)..(25): SEQ ID NO: 5185; WAN024AQW_at; Start 157; Stop 181
aaagataatgaaagcgctaatattt

SEQ ID NO: 63794 - DNA, 25 bp, Artificial
  probe
  misc_feature (1)..(25): SEQ ID NO: 5185; WAN024AQW_at; Start 2; Stop 26
tgatacttcctttcaaatttgttaa

SEQ ID NO: 63795 - DNA, 25 bp, Artificial
  probe
  misc_feature (1)..(25): SEQ ID NO: 3510; WAN024AQX_at; Start 38; Stop 62
tatattccccattgtaatcctttat

SEQ ID NO: 63796 - DNA, 25 bp, Artificial
  probe
  misc_feature (1)..(25): SEQ ID NO: 3510; WAN024AQX_at; Start 234; Stop 258
tatagagaagtcttaacaaatttga

SEQ ID NO: 63797 - DNA, 25 bp, Artificial
  probe
  misc_feature (1)..(25): SEQ ID NO: 3510; WAN024AQX_at; Start 94; Stop 118
tattagcgctttcattatcttttta

SEQ ID NO: 63798 - DNA, 25 bp, Artificial
  probe
  misc_feature (1)..(25): SEQ ID NO: 3510; WAN024AQX_at; Start 39; Stop 63
atattccccattgtaatcctttatt

SEQ ID NO: 63799 - DNA, 25 bp, Artificial
  probe
  misc_feature (1)..(25): SEQ ID NO: 3510; WAN024AQX_at; Start 33; Stop 57
tactttatattccccattgtaatcc

SEQ ID NO: 63800 - DNA, 25 bp, Artificial
  probe
  misc_feature (1)..(25): SEQ ID NO: 3510; WAN024AQX_at; Start 217; Stop 241
ctagaatataatttggttatagaga

SEQ ID NO: 63801 - DNA, 25 bp, Artificial
  probe
  misc_feature (1)..(25): SEQ ID NO: 3510; WAN024AQX_at; Start 35; Stop 59
ctttatattccccattgtaatcctt

SEQ ID NO: 63802 - DNA, 25 bp, Artificial
  probe
  misc_feature (1)..(25): SEQ ID NO: 3510; WAN024AQX_at; Start 91; Stop 115
aaatattagcgctttcattatcttt

SEQ ID NO: 63803 - DNA, 25 bp, Artificial
  probe
  misc_feature (1)..(25): SEQ ID NO: 3510; WAN024AQX_at; Start 216; Stop 240
actagaatataatttggttatagag

SEQ ID NO: 63804 - DNA, 25 bp, Artificial
  probe
  misc_feature (1)..(25): SEQ ID NO: 3510; WAN024AQX_at; Start 220; Stop 244
gaatataatttggttatagagaagt

SEQ ID NO: 63805 - DNA, 25 bp, Artificial
  probe
  misc_feature (1)..(25): SEQ ID NO: 3510; WAN024AQX_at; Start 236; Stop 260
tagagaagtcttaacaaatttgaaa

SEQ ID NO: 63806 - DNA, 25 bp, Artificial
  probe
  misc_feature (1)..(25): SEQ ID NO: 3510; WAN024AQX_at; Start 230; Stop 254
tggttatagagaagtcttaacaaat

SEQ ID NO: 63807 - DNA, 25 bp, Artificial
  probe
  misc_feature (1)..(25): SEQ ID NO: 3510; WAN024AQX_at; Start 224; Stop 248
ataatttggttatagagaagtctta

SEQ ID NO: 63808 - DNA, 25 bp, Artificial
  probe
  misc_feature (1)..(25): SEQ ID NO: 3510; WAN024AQX_at; Start 222; Stop 246
atataatttggttatagagaagtct

SEQ ID NO: 63809 - DNA, 25 bp, Artificial
  probe
  misc_feature (1)..(25): SEQ ID NO: 3510; WAN024AQX_at; Start 53; Stop 77
aatcctttatttttatcttgtcaat

SEQ ID NO: 63810 - DNA, 25 bp, Artificial
  probe
  misc_feature (1)..(25): SEQ ID NO: 3510; WAN024AQX_at; Start 237; Stop 261
agagaagtcttaacaaatttgaaag

SEQ ID NO: 63811 - DNA, 25 bp, Artificial
  probe
  misc_feature (1)..(25): SEQ ID NO: 3510; WAN024AQX_at; Start 246; Stop 270
ttaacaaatttgaaaggaagtatca

SEQ ID NO: 63812 - DNA, 25 bp, Artificial
  probe
  misc_feature (1)..(25): SEQ ID NO: 3510; WAN024AQX_at; Start 52; Stop 76
taatcctttatttttatcttgtcaa

SEQ ID NO: 63813 - DNA, 25 bp, Artificial
  probe
  misc_feature (1)..(25): SEQ ID NO: 3510; WAN024AQX_at; Start 225; Stop 249
taatttggttatagagaagtcttaa

SEQ ID NO: 63814 - DNA, 25 bp, Artificial
  probe
  misc_feature (1)..(25): SEQ ID NO: 3510; WAN024AQX_at; Start 233; Stop 257
ttatagagaagtcttaacaaatttg

SEQ ID NO: 63815 - DNA, 25 bp, Artificial
  probe
  misc_feature (1)..(25): SEQ ID NO: 3510; WAN024AQX_at; Start 223; Stop 247
tataatttggttatagagaagtctt

SEQ ID NO: 63816 - DNA, 25 bp, Artificial
  probe
  misc_feature (1)..(25): SEQ ID NO: 3510; WAN024AQX_at; Start 56; Stop 80
cctttatttttatcttgtcaatagt

SEQ ID NO: 63817 - DNA, 25 bp, Artificial
  probe
  misc_feature (1)..(25): SEQ ID NO: 3510; WAN024AQX_at; Start 229; Stop 253
ttggttatagagaagtcttaacaaa

SEQ ID NO: 63818 - DNA, 25 bp, Artificial
  probe
  misc_feature (1)..(25): SEQ ID NO: 3510; WAN024AQX_at; Start 221; Stop 245
aatataatttggttatagagaagtc

SEQ ID NO: 63819 - DNA, 25 bp, Artificial
  probe
  misc_feature (1)..(25): SEQ ID NO: 3510; WAN024AQX_at; Start 247; Stop 271
taacaaatttgaaaggaagtatcaa

SEQ ID NO: 63820 - DNA, 25 bp, Artificial
  probe
  misc_feature (1)..(25): SEQ ID NO: 3510; WAN024AQX_at; Start 51; Stop 75
gtaatcctttatttttatcttgtca

SEQ ID NO: 63821 - DNA, 25 bp, Artificial
  probe
  misc_feature (1)..(25): SEQ ID NO: 3510; WAN024AQX_at; Start 219; Stop 243
agaatataatttggttatagagaag

SEQ ID NO: 63822 - DNA, 25 bp, Artificial
  probe
  misc_feature (1)..(25): SEQ ID NO: 3510; WAN024AQX_at; Start 92; Stop 116
aatattagcgctttcattatctttt

SEQ ID NO: 63823 - DNA, 25 bp, Artificial
  probe
  misc_feature (1)..(25): SEQ ID NO: 3510; WAN024AQX_at; Start 90; Stop 114
aaaatattagcgctttcattatctt

SEQ ID NO: 63824 - DNA, 25 bp, Artificial
  probe
  misc_feature (1)..(25): SEQ ID NO: 3510; WAN024AQX_at; Start 227; Stop 251
atttggttatagagaagtcttaaca

SEQ ID NO: 63825 - DNA, 25 bp, Artificial
  probe
  misc_feature (1)..(25): SEQ ID NO: 3510; WAN024AQX_at; Start 95; Stop 119
attagcgctttcattatctttttaa

SEQ ID NO: 63826 - DNA, 25 bp, Artificial
  probe
  misc_feature (1)..(25): SEQ ID NO: 3510; WAN024AQX_at; Start 32; Stop 56
ttactttatattccccattgtaatc

SEQ ID NO: 63827 - DNA, 25 bp, Artificial
  probe
  misc_feature (1)..(25): SEQ ID NO: 3510; WAN024AQX_at; Start 228; Stop 252
tttggttatagagaagtcttaacaa

SEQ ID NO: 63828 - DNA, 25 bp, Artificial
  probe
  misc_feature (1)..(25): SEQ ID NO: 3510; WAN024AQX_at; Start 235; Stop 259
atagagaagtcttaacaaatttgaa

SEQ ID NO: 63829 - DNA, 25 bp, Artificial
  probe
  misc_feature (1)..(25): SEQ ID NO: 5950; WAN024AQY_at; Start 21; Stop 45
tcggatggaagatattgttgaagaa

SEQ ID NO: 63830 - DNA, 25 bp, Artificial
  probe
  misc_feature (1)..(25): SEQ ID NO: 5950; WAN024AQY_at; Start 10; Stop 34
ttttcgtcgagtcggatggaagata

SEQ ID NO: 63831 - DNA, 25 bp, Artificial
  probe
  misc_feature (1)..(25): SEQ ID NO: 5950; WAN024AQY_at; Start 75; Stop 99
caaataactttaaaaatggtatgat

SEQ ID NO: 63832 - DNA, 25 bp, Artificial
  probe
  misc_feature (1)..(25): SEQ ID NO: 5950; WAN024AQY_at; Start 14; Stop 38
cgtcgagtcggatggaagatattgt

SEQ ID NO: 63833 - DNA, 25 bp, Artificial
  probe
  misc_feature (1)..(25): SEQ ID NO: 5950; WAN024AQY_at; Start 9; Stop 33
tttttcgtcgagtcggatggaagat

SEQ ID NO: 63834 - DNA, 25 bp, Artificial
  probe
  misc_feature (1)..(25): SEQ ID NO: 5950; WAN024AQY_at; Start 17; Stop 41
cgagtcggatggaagatattgttga

SEQ ID NO: 63835 - DNA, 25 bp, Artificial
  probe
  misc_feature (1)..(25): SEQ ID NO: 5950; WAN024AQY_at; Start 22; Stop 46
cggatggaagatattgttgaagaat

SEQ ID NO: 63836 - DNA, 25 bp, Artificial
  probe
  misc_feature (1)..(25): SEQ ID NO: 5950; WAN024AQY_at; Start 131; Stop 155
atctctaatttgagatttagttcct

SEQ ID NO: 63837 - DNA, 25 bp, Artificial
  probe
  misc_feature (1)..(25): SEQ ID NO: 5950; WAN024AQY_at; Start 130; Stop 154
aatctctaatttgagatttagttcc

SEQ ID NO: 63838 - DNA, 25 bp, Artificial
  probe
  misc_feature (1)..(25): SEQ ID NO: 5950; WAN024AQY_at; Start 13; Stop 37
tcgtcgagtcggatggaagatattg

SEQ ID NO: 63839 - DNA, 25 bp, Artificial
  probe
  misc_feature (1)..(25): SEQ ID NO: 5950; WAN024AQY_at; Start 19; Stop 43
agtcggatggaagatattgttgaag

SEQ ID NO: 63840 - DNA, 25 bp, Artificial
  probe
  misc_feature (1)..(25): SEQ ID NO: 5950; WAN024AQY_at; Start 123; Stop 147
tgctataaatctctaatttgagatt

SEQ ID NO: 63841 - DNA, 25 bp, Artificial
  probe
  misc_feature (1)..(25): SEQ ID NO: 5950; WAN024AQY_at; Start 24; Stop 48
gatggaagatattgttgaagaataa

SEQ ID NO: 63842 - DNA, 25 bp, Artificial
  probe
  misc_feature (1)..(25): SEQ ID NO: 5950; WAN024AQY_at; Start 132; Stop 156
tctctaatttgagatttagttccta

SEQ ID NO: 63843 - DNA, 25 bp, Artificial
  probe
  misc_feature (1)..(25): SEQ ID NO: 5950; WAN024AQY_at; Start 54; Stop 78
caatatgatagaaaccgtttacaaa

SEQ ID NO: 63844 - DNA, 25 bp, Artificial
  probe
  misc_feature (1)..(25): SEQ ID NO: 5950; WAN024AQY_at; Start 15; Stop 39
gtcgagtcggatggaagatattgtt

SEQ ID NO: 63845 - DNA, 25 bp, Artificial
  probe
  misc_feature (1)..(25): SEQ ID NO: 5950; WAN024AQY_at; Start 12; Stop 36
ttcgtcgagtcggatggaagatatt

SEQ ID NO: 63846 - DNA, 25 bp, Artificial
  probe
  misc_feature (1)..(25): SEQ ID NO: 5950; WAN024AQY_at; Start 57; Stop 81
tatgatagaaaccgtttacaaataa

SEQ ID NO: 63847 - DNA, 25 bp, Artificial
  probe
  misc_feature (1)..(25): SEQ ID NO: 5950; WAN024AQY_at; Start 26; Stop 50
tggaagatattgttgaagaataagc

SEQ ID NO: 63848 - DNA, 25 bp, Artificial
  probe
  misc_feature (1)..(25): SEQ ID NO: 5950; WAN024AQY_at; Start 55; Stop 79
aatatgatagaaaccgtttacaaat

SEQ ID NO: 63849 - DNA, 25 bp, Artificial
  probe
  misc_feature (1)..(25): SEQ ID NO: 5950; WAN024AQY_at; Start 122; Stop 146
ttgctataaatctctaatttgagat

SEQ ID NO: 63850 - DNA, 25 bp, Artificial
  probe
  misc_feature (1)..(25): SEQ ID NO: 5950; WAN024AQY_at; Start 121; Stop 145
gttgctataaatctctaatttgaga

SEQ ID NO: 63851 - DNA, 25 bp, Artificial
  probe
  misc_feature (1)..(25): SEQ ID NO: 5950; WAN024AQY_at; Start 16; Stop 40
tcgagtcggatggaagatattgttg

SEQ ID NO: 63852 - DNA, 25 bp, Artificial
  probe
  misc_feature (1)..(25): SEQ ID NO: 5950; WAN024AQY_at; Start 56; Stop 80
atatgatagaaaccgtttacaaata

SEQ ID NO: 63853 - DNA, 25 bp, Artificial
  probe
  misc_feature (1)..(25): SEQ ID NO: 5950; WAN024AQY_at; Start 8; Stop 32
ttttttcgtcgagtcggatggaaga

SEQ ID NO: 63854 - DNA, 25 bp, Artificial
  probe
  misc_feature (1)..(25): SEQ ID NO: 5950; WAN024AQY_at; Start 18; Stop 42
gagtcggatggaagatattgttgaa

SEQ ID NO: 63855 - DNA, 25 bp, Artificial
  probe
  misc_feature (1)..(25): SEQ ID NO: 5950; WAN024AQY_at; Start 7; Stop 31
cttttttcgtcgagtcggatggaag

SEQ ID NO: 63856 - DNA, 25 bp, Artificial
  probe
  misc_feature (1)..(25): SEQ ID NO: 5950; WAN024AQY_at; Start 27; Stop 51
ggaagatattgttgaagaataagcc

SEQ ID NO: 63857 - DNA, 25 bp, Artificial
  probe
  misc_feature (1)..(25): SEQ ID NO: 5950; WAN024AQY_at; Start 133; Stop 157
ctctaatttgagatttagttcctat

SEQ ID NO: 63858 - DNA, 25 bp, Artificial
  probe
  misc_feature (1)..(25): SEQ ID NO: 5950; WAN024AQY_at; Start 20; Stop 44
gtcggatggaagatattgttgaaga

SEQ ID NO: 63859 - DNA, 25 bp, Artificial
  probe
  misc_feature (1)..(25): SEQ ID NO: 5950; WAN024AQY_at; Start 11; Stop 35
tttcgtcgagtcggatggaagatat

SEQ ID NO: 63860 - DNA, 25 bp, Artificial
  probe
  misc_feature (1)..(25): SEQ ID NO: 5950; WAN024AQY_at; Start 23; Stop 47
ggatggaagatattgttgaagaata

SEQ ID NO: 63861 - DNA, 25 bp, Artificial
  probe
  misc_feature (1)..(25): SEQ ID NO: 5950; WAN024AQY_at; Start 53; Stop 77
tcaatatgatagaaaccgtttacaa

SEQ ID NO: 63862 - DNA, 25 bp, Artificial
  probe
  misc_feature (1)..(25): SEQ ID NO: 5950; WAN024AQY_at; Start 5; Stop 29
tacttttttcgtcgagtcggatgga

SEQ ID NO: 63863 - DNA, 25 bp, Artificial
  probe
  misc_feature (1)..(25): SEQ ID NO: 558; WAN024AQZ_at; Start 119; Stop 143
aacaatatcttccatccgactcgac

SEQ ID NO: 63864 - DNA, 25 bp, Artificial
  probe
  misc_feature (1)..(25): SEQ ID NO: 558; WAN024AQZ_at; Start 1; Stop 25
ataggaactaaatctcaaattagag

SEQ ID NO: 63865 - DNA, 25 bp, Artificial
  probe
  misc_feature (1)..(25): SEQ ID NO: 558; WAN024AQZ_at; Start 4; Stop 28
ggaactaaatctcaaattagagatt

SEQ ID NO: 63866 - DNA, 25 bp, Artificial
  probe
  misc_feature (1)..(25): SEQ ID NO: 558; WAN024AQZ_at; Start 107; Stop 131
ggcttattcttcaacaatatcttcc

SEQ ID NO: 63867 - DNA, 25 bp, Artificial
  probe
  misc_feature (1)..(25): SEQ ID NO: 558; WAN024AQZ_at; Start 121; Stop 145
caatatcttccatccgactcgacga

SEQ ID NO: 63868 - DNA, 25 bp, Artificial
  probe
  misc_feature (1)..(25): SEQ ID NO: 558; WAN024AQZ_at; Start 11; Stop 35
aatctcaaattagagatttatagca

SEQ ID NO: 63869 - DNA, 25 bp, Artificial
  probe
  misc_feature (1)..(25): SEQ ID NO: 558; WAN024AQZ_at; Start 116; Stop 140
ttcaacaatatcttccatccgactc

SEQ ID NO: 63870 - DNA, 25 bp, Artificial
  probe
  misc_feature (1)..(25): SEQ ID NO: 558; WAN024AQZ_at; Start 129; Stop 153
tccatccgactcgacgaaaaaagta

SEQ ID NO: 63871 - DNA, 25 bp, Artificial
  probe
  misc_feature (1)..(25): SEQ ID NO: 558; WAN024AQZ_at; Start 110; Stop 134
ttattcttcaacaatatcttccatc

SEQ ID NO: 63872 - DNA, 25 bp, Artificial
  probe
  misc_feature (1)..(25): SEQ ID NO: 558; WAN024AQZ_at; Start 2; Stop 26
taggaactaaatctcaaattagaga

SEQ ID NO: 63873 - DNA, 25 bp, Artificial
  probe
  misc_feature (1)..(25): SEQ ID NO: 558; WAN024AQZ_at; Start 78; Stop 102
tatttgtaaacggtttctatcatat

SEQ ID NO: 63874 - DNA, 25 bp, Artificial
  probe
  misc_feature (1)..(25): SEQ ID NO: 558; WAN024AQZ_at; Start 109; Stop 133
cttattcttcaacaatatcttccat

SEQ ID NO: 63875 - DNA, 25 bp, Artificial
  probe
  misc_feature (1)..(25): SEQ ID NO: 558; WAN024AQZ_at; Start 111; Stop 135
tattcttcaacaatatcttccatcc

SEQ ID NO: 63876 - DNA, 25 bp, Artificial
  probe
  misc_feature (1)..(25): SEQ ID NO: 558; WAN024AQZ_at; Start 3; Stop 27
aggaactaaatctcaaattagagat

SEQ ID NO: 63877 - DNA, 25 bp, Artificial
  probe
  misc_feature (1)..(25): SEQ ID NO: 558; WAN024AQZ_at; Start 127; Stop 151
cttccatccgactcgacgaaaaaag

SEQ ID NO: 63878 - DNA, 25 bp, Artificial
  probe
  misc_feature (1)..(25): SEQ ID NO: 558; WAN024AQZ_at; Start 125; Stop 149
atcttccatccgactcgacgaaaaa

SEQ ID NO: 63879 - DNA, 25 bp, Artificial
  probe
  misc_feature (1)..(25): SEQ ID NO: 558; WAN024AQZ_at; Start 124; Stop 148
tatcttccatccgactcgacgaaaa

SEQ ID NO: 63880 - DNA, 25 bp, Artificial
  probe
  misc_feature (1)..(25): SEQ ID NO: 558; WAN024AQZ_at; Start 80; Stop 104
tttgtaaacggtttctatcatattg

SEQ ID NO: 63881 - DNA, 25 bp, Artificial
  probe
  misc_feature (1)..(25): SEQ ID NO: 558; WAN024AQZ_at; Start 108; Stop 132
gcttattcttcaacaatatcttcca

SEQ ID NO: 63882 - DNA, 25 bp, Artificial
  probe
  misc_feature (1)..(25): SEQ ID NO: 558; WAN024AQZ_at; Start 12; Stop 36
atctcaaattagagatttatagcaa

SEQ ID NO: 63883 - DNA, 25 bp, Artificial
  probe
  misc_feature (1)..(25): SEQ ID NO: 558; WAN024AQZ_at; Start 79; Stop 103
atttgtaaacggtttctatcatatt

SEQ ID NO: 63884 - DNA, 25 bp, Artificial
  probe
  misc_feature (1)..(25): SEQ ID NO: 558; WAN024AQZ_at; Start 122; Stop 146
aatatcttccatccgactcgacgaa

SEQ ID NO: 63885 - DNA, 25 bp, Artificial
  probe
  misc_feature (1)..(25): SEQ ID NO: 558; WAN024AQZ_at; Start 81; Stop 105
ttgtaaacggtttctatcatattga

SEQ ID NO: 63886 - DNA, 25 bp, Artificial
  probe
  misc_feature (1)..(25): SEQ ID NO: 558; WAN024AQZ_at; Start 120; Stop 144
acaatatcttccatccgactcgacg

SEQ ID NO: 63887 - DNA, 25 bp, Artificial
  probe
  misc_feature (1)..(25): SEQ ID NO: 558; WAN024AQZ_at; Start 118; Stop 142
caacaatatcttccatccgactcga

SEQ ID NO: 63888 - DNA, 25 bp, Artificial
  probe
  misc_feature (1)..(25): SEQ ID NO: 558; WAN024AQZ_at; Start 5; Stop 29
gaactaaatctcaaattagagattt

SEQ ID NO: 63889 - DNA, 25 bp, Artificial
  probe
  misc_feature (1)..(25): SEQ ID NO: 558; WAN024AQZ_at; Start 113; Stop 137
ttcttcaacaatatcttccatccga

SEQ ID NO: 63890 - DNA, 25 bp, Artificial
  probe
  misc_feature (1)..(25): SEQ ID NO: 558; WAN024AQZ_at; Start 13; Stop 37
tctcaaattagagatttatagcaac

SEQ ID NO: 63891 - DNA, 25 bp, Artificial
  probe
  misc_feature (1)..(25): SEQ ID NO: 558; WAN024AQZ_at; Start 112; Stop 136
attcttcaacaatatcttccatccg

SEQ ID NO: 63892 - DNA, 25 bp, Artificial
  probe
  misc_feature (1)..(25): SEQ ID NO: 558; WAN024AQZ_at; Start 123; Stop 147
atatcttccatccgactcgacgaaa

SEQ ID NO: 63893 - DNA, 25 bp, Artificial
  probe
  misc_feature (1)..(25): SEQ ID NO: 558; WAN024AQZ_at; Start 117; Stop 141
tcaacaatatcttccatccgactcg

SEQ ID NO: 63894 - DNA, 25 bp, Artificial
  probe
  misc_feature (1)..(25): SEQ ID NO: 558; WAN024AQZ_at; Start 115; Stop 139
cttcaacaatatcttccatccgact

SEQ ID NO: 63895 - DNA, 25 bp, Artificial
  probe
  misc_feature (1)..(25): SEQ ID NO: 558; WAN024AQZ_at; Start 114; Stop 138
tcttcaacaatatcttccatccgac

SEQ ID NO: 63896 - DNA, 25 bp, Artificial
  probe
  misc_feature (1)..(25): SEQ ID NO: 558; WAN024AQZ_at; Start 126; Stop 150
tcttccatccgactcgacgaaaaaa

SEQ ID NO: 63897 - DNA, 25 bp, Artificial
  probe
  misc_feature (1)..(25): SEQ ID NO: 4819; WAN024AR2_at; Start 165; Stop 189
cgaataccatacagaatcttcatat

SEQ ID NO: 63898 - DNA, 25 bp, Artificial
  probe
  misc_feature (1)..(25): SEQ ID NO: 4819; WAN024AR2_at; Start 162; Stop 186
taacgaataccatacagaatcttca

SEQ ID NO: 63899 - DNA, 25 bp, Artificial
  probe
  misc_feature (1)..(25): SEQ ID NO: 4819; WAN024AR2_at; Start 26; Stop 50
tcctttaacctgatgaatagtgaga

SEQ ID NO: 63900 - DNA, 25 bp, Artificial
  probe
  misc_feature (1)..(25): SEQ ID NO: 4819; WAN024AR2_at; Start 185; Stop 209
catatacactaaacaaatgactttc

SEQ ID NO: 63901 - DNA, 25 bp, Artificial
  probe
  misc_feature (1)..(25): SEQ ID NO: 4819; WAN024AR2_at; Start 176; Stop 200
cagaatcttcatatacactaaacaa

SEQ ID NO: 63902 - DNA, 25 bp, Artificial
  probe
  misc_feature (1)..(25): SEQ ID NO: 4819; WAN024AR2_at; Start 155; Stop 179
ccagtgataacgaataccatacaga

SEQ ID NO: 63903 - DNA, 25 bp, Artificial
  probe
  misc_feature (1)..(25): SEQ ID NO: 4819; WAN024AR2_at; Start 144; Stop 168
tttcaatgtgaccagtgataacgaa

SEQ ID NO: 63904 - DNA, 25 bp, Artificial
  probe
  misc_feature (1)..(25): SEQ ID NO: 4819; WAN024AR2_at; Start 69; Stop 93
cttaaatagaaaaacaccccatgat

SEQ ID NO: 63905 - DNA, 25 bp, Artificial
  probe
  misc_feature (1)..(25): SEQ ID NO: 4819; WAN024AR2_at; Start 10; Stop 34
tcactatgattaggtttcctttaac

SEQ ID NO: 63906 - DNA, 25 bp, Artificial
  probe
  misc_feature (1)..(25): SEQ ID NO: 4819; WAN024AR2_at; Start 153; Stop 177
gaccagtgataacgaataccataca

SEQ ID NO: 63907 - DNA, 25 bp, Artificial
  probe
  misc_feature (1)..(25): SEQ ID NO: 4819; WAN024AR2_at; Start 5; Stop 29
caatctcactatgattaggtttcct

SEQ ID NO: 63908 - DNA, 25 bp, Artificial
  probe
  misc_feature (1)..(25): SEQ ID NO: 4819; WAN024AR2_at; Start 147; Stop 171
caatgtgaccagtgataacgaatac

SEQ ID NO: 63909 - DNA, 25 bp, Artificial
  probe
  misc_feature (1)..(25): SEQ ID NO: 4819; WAN024AR2_at; Start 156; Stop 180
cagtgataacgaataccatacagaa

SEQ ID NO: 63910 - DNA, 25 bp, Artificial
  probe
  misc_feature (1)..(25): SEQ ID NO: 4819; WAN024AR2_at; Start 85; Stop 109
ccccatgatatgaaacatgaagtgt

SEQ ID NO: 63911 - DNA, 25 bp, Artificial
  probe
  misc_feature (1)..(25): SEQ ID NO: 4819; WAN024AR2_at; Start 17; Stop 41
gattaggtttcctttaacctgatga

SEQ ID NO: 63912 - DNA, 25 bp, Artificial
  probe
  misc_feature (1)..(25): SEQ ID NO: 4819; WAN024AR2_at; Start 174; Stop 198
tacagaatcttcatatacactaaac

SEQ ID NO: 63913 - DNA, 25 bp, Artificial
  probe
  misc_feature (1)..(25): SEQ ID NO: 4819; WAN024AR2_at; Start 88; Stop 112
catgatatgaaacatgaagtgttgt

SEQ ID NO: 63914 - DNA, 25 bp, Artificial
  probe
  misc_feature (1)..(25): SEQ ID NO: 4819; WAN024AR2_at; Start 28; Stop 52
ctttaacctgatgaatagtgagatt

SEQ ID NO: 63915 - DNA, 25 bp, Artificial
  probe
  misc_feature (1)..(25): SEQ ID NO: 4819; WAN024AR2_at; Start 73; Stop 97
aatagaaaaacaccccatgatatga

SEQ ID NO: 63916 - DNA, 25 bp, Artificial
  probe
  misc_feature (1)..(25): SEQ ID NO: 4819; WAN024AR2_at; Start 159; Stop 183
tgataacgaataccatacagaatct

SEQ ID NO: 63917 - DNA, 25 bp, Artificial
  probe
  misc_feature (1)..(25): SEQ ID NO: 4819; WAN024AR2_at; Start 83; Stop 107
caccccatgatatgaaacatgaagt

SEQ ID NO: 63918 - DNA, 25 bp, Artificial
  probe
  misc_feature (1)..(25): SEQ ID NO: 4819; WAN024AR2_at; Start 1; Stop 25
ttcacaatctcactatgattaggtt

SEQ ID NO: 63919 - DNA, 25 bp, Artificial
  probe
  misc_feature (1)..(25): SEQ ID NO: 4819; WAN024AR2_at; Start 118; Stop 142
ctatgttgtaggtgcttatttcaca

SEQ ID NO: 63920 - DNA, 25 bp, Artificial
  probe
  misc_feature (1)..(25): SEQ ID NO: 4819; WAN024AR2_at; Start 80; Stop 104
aaacaccccatgatatgaaacatga

SEQ ID NO: 63921 - DNA, 25 bp, Artificial
  probe
  misc_feature (1)..(25): SEQ ID NO: 4819; WAN024AR2_at; Start 23; Stop 47
gtttcctttaacctgatgaatagtg

SEQ ID NO: 63922 - DNA, 25 bp, Artificial
  probe
  misc_feature (1)..(25): SEQ ID NO: 4819; WAN024AR2_at; Start 103; Stop 127
gaagtgttgtaaagtctatgttgta

SEQ ID NO: 63923 - DNA, 25 bp, Artificial
  probe
  misc_feature (1)..(25): SEQ ID NO: 4819; WAN024AR2_at; Start 77; Stop 101
gaaaaacaccccatgatatgaaaca

SEQ ID NO: 63924 - DNA, 25 bp, Artificial
  probe
  misc_feature (1)..(25): SEQ ID NO: 4819; WAN024AR2_at; Start 112; Stop 136
taaagtctatgttgtaggtgcttat

SEQ ID NO: 63925 - DNA, 25 bp, Artificial
  probe
  misc_feature (1)..(25): SEQ ID NO: 4819; WAN024AR2_at; Start 189; Stop 213
tacactaaacaaatgactttctaat

SEQ ID NO: 63926 - DNA, 25 bp, Artificial
  probe
  misc_feature (1)..(25): SEQ ID NO: 4819; WAN024AR2_at; Start 34; Stop 58
cctgatgaatagtgagattttttga

SEQ ID NO: 63927 - DNA, 25 bp, Artificial
  probe
  misc_feature (1)..(25): SEQ ID NO: 4819; WAN024AR2_at; Start 197; Stop 221
acaaatgactttctaattatttcaa

SEQ ID NO: 63928 - DNA, 25 bp, Artificial
  probe
  misc_feature (1)..(25): SEQ ID NO: 4819; WAN024AR2_at; Start 152; Stop 176
tgaccagtgataacgaataccatac

SEQ ID NO: 63929 - DNA, 25 bp, Artificial
  probe
  misc_feature (1)..(25): SEQ ID NO: 4819; WAN024AR2_at; Start 108; Stop 132
gttgtaaagtctatgttgtaggtgc

SEQ ID NO: 63930 - DNA, 25 bp, Artificial
  probe
  misc_feature (1)..(25): SEQ ID NO: 4819; WAN024AR2_at; Start 150; Stop 174
tgtgaccagtgataacgaataccat

SEQ ID NO: 63931 - DNA, 25 bp, Artificial
  probe
  misc_feature (1)..(25): SEQ ID NO: 4907; WAN024AR3_at; Start 54; Stop 78
ttcgttatcactggtcacattgaaa

SEQ ID NO: 63932 - DNA, 25 bp, Artificial
  probe
  misc_feature (1)..(25): SEQ ID NO: 4907; WAN024AR3_at; Start 97; Stop 121
caacatagactttacaacacttcat

SEQ ID NO: 63933 - DNA, 25 bp, Artificial
  probe
  misc_feature (1)..(25): SEQ ID NO: 4907; WAN024AR3_at; Start 52; Stop 76
tattcgttatcactggtcacattga

SEQ ID NO: 63934 - DNA, 25 bp, Artificial
  probe
  misc_feature (1)..(25): SEQ ID NO: 4907; WAN024AR3_at; Start 178; Stop 202
tattcatcaggttaaaggaaaccta

SEQ ID NO: 63935 - DNA, 25 bp, Artificial
  probe
  misc_feature (1)..(25): SEQ ID NO: 4907; WAN024AR3_at; Start 170; Stop 194
aatctcactattcatcaggttaaag

SEQ ID NO: 63936 - DNA, 25 bp, Artificial
  probe
  misc_feature (1)..(25): SEQ ID NO: 4907; WAN024AR3_at; Start 50; Stop 74
ggtattcgttatcactggtcacatt

SEQ ID NO: 63937 - DNA, 25 bp, Artificial
  probe
  misc_feature (1)..(25): SEQ ID NO: 4907; WAN024AR3_at; Start 7; Stop 31
taattagaaagtcatttgtttagtg

SEQ ID NO: 63938 - DNA, 25 bp, Artificial
  probe
  misc_feature (1)..(25): SEQ ID NO: 4907; WAN024AR3_at; Start 181; Stop 205
tcatcaggttaaaggaaacctaatc

SEQ ID NO: 63939 - DNA, 25 bp, Artificial
  probe
  misc_feature (1)..(25): SEQ ID NO: 4907; WAN024AR3_at; Start 90; Stop 114
gcacctacaacatagactttacaac

SEQ ID NO: 63940 - DNA, 25 bp, Artificial
  probe
  misc_feature (1)..(25): SEQ ID NO: 4907; WAN024AR3_at; Start 196; Stop 220
aaacctaatcatagtgagattgtga

SEQ ID NO: 63941 - DNA, 25 bp, Artificial
  probe
  misc_feature (1)..(25): SEQ ID NO: 4907; WAN024AR3_at; Start 43; Stop 67
tctgtatggtattcgttatcactgg

SEQ ID NO: 63942 - DNA, 25 bp, Artificial
  probe
  misc_feature (1)..(25): SEQ ID NO: 4907; WAN024AR3_at; Start 13; Stop 37
gaaagtcatttgtttagtgtatatg

SEQ ID NO: 63943 - DNA, 25 bp, Artificial
  probe
  misc_feature (1)..(25): SEQ ID NO: 4907; WAN024AR3_at; Start 95; Stop 119
tacaacatagactttacaacacttc

SEQ ID NO: 63944 - DNA, 25 bp, Artificial
  probe
  misc_feature (1)..(25): SEQ ID NO: 4907; WAN024AR3_at; Start 129; Stop 153
atcatggggtgtttttctatttaag

SEQ ID NO: 63945 - DNA, 25 bp, Artificial
  probe
  misc_feature (1)..(25): SEQ ID NO: 4907; WAN024AR3_at; Start 165; Stop 189
caaaaaatctcactattcatcaggt

SEQ ID NO: 63946 - DNA, 25 bp, Artificial
  probe
  misc_feature (1)..(25): SEQ ID NO: 4907; WAN024AR3_at; Start 40; Stop 64
gattctgtatggtattcgttatcac

SEQ ID NO: 63947 - DNA, 25 bp, Artificial
  probe
  misc_feature (1)..(25): SEQ ID NO: 4907; WAN024AR3_at; Start 45; Stop 69
tgtatggtattcgttatcactggtc

SEQ ID NO: 63948 - DNA, 25 bp, Artificial
  probe
  misc_feature (1)..(25): SEQ ID NO: 4907; WAN024AR3_at; Start 112; Stop 136
aacacttcatgtttcatatcatggg

SEQ ID NO: 63949 - DNA, 25 bp, Artificial
  probe
  misc_feature (1)..(25): SEQ ID NO: 4907; WAN024AR3_at; Start 49; Stop 73
tggtattcgttatcactggtcacat

SEQ ID NO: 63950 - DNA, 25 bp, Artificial
  probe
  misc_feature (1)..(25): SEQ ID NO: 4907; WAN024AR3_at; Start 80; Stop 104
tgtgaaataagcacctacaacatag

SEQ ID NO: 63951 - DNA, 25 bp, Artificial
  probe
  misc_feature (1)..(25): SEQ ID NO: 4907; WAN024AR3_at; Start 175; Stop 199
cactattcatcaggttaaaggaaac

SEQ ID NO: 63952 - DNA, 25 bp, Artificial
  probe
  misc_feature (1)..(25): SEQ ID NO: 4907; WAN024AR3_at; Start 87; Stop 111
taagcacctacaacatagactttac

SEQ ID NO: 63953 - DNA, 25 bp, Artificial
  probe
  misc_feature (1)..(25): SEQ ID NO: 4907; WAN024AR3_at; Start 190; Stop 214
taaaggaaacctaatcatagtgaga

SEQ ID NO: 63954 - DNA, 25 bp, Artificial
  probe
  misc_feature (1)..(25): SEQ ID NO: 4907; WAN024AR3_at; Start 83; Stop 107
gaaataagcacctacaacatagact

SEQ ID NO: 63955 - DNA, 25 bp, Artificial
  probe
  misc_feature (1)..(25): SEQ ID NO: 4907; WAN024AR3_at; Start 185; Stop 209
caggttaaaggaaacctaatcatag

SEQ ID NO: 63956 - DNA, 25 bp, Artificial
  probe
  misc_feature (1)..(25): SEQ ID NO: 4907; WAN024AR3_at; Start 82; Stop 106
tgaaataagcacctacaacatagac

SEQ ID NO: 63957 - DNA, 25 bp, Artificial
  probe
  misc_feature (1)..(25): SEQ ID NO: 4907; WAN024AR3_at; Start 172; Stop 196
tctcactattcatcaggttaaagga

SEQ ID NO: 63958 - DNA, 25 bp, Artificial
  probe
  misc_feature (1)..(25): SEQ ID NO: 4907; WAN024AR3_at; Start 195; Stop 219
gaaacctaatcatagtgagattgtg

SEQ ID NO: 63959 - DNA, 25 bp, Artificial
  probe
  misc_feature (1)..(25): SEQ ID NO: 4907; WAN024AR3_at; Start 27; Stop 51
tagtgtatatgaagattctgtatgg

SEQ ID NO: 63960 - DNA, 25 bp, Artificial
  probe
  misc_feature (1)..(25): SEQ ID NO: 4907; WAN024AR3_at; Start 164; Stop 188
tcaaaaaatctcactattcatcagg

SEQ ID NO: 63961 - DNA, 25 bp, Artificial
  probe
  misc_feature (1)..(25): SEQ ID NO: 4907; WAN024AR3_at; Start 93; Stop 117
cctacaacatagactttacaacact

SEQ ID NO: 63962 - DNA, 25 bp, Artificial
  probe
  misc_feature (1)..(25): SEQ ID NO: 4907; WAN024AR3_at; Start 23; Stop 47
tgtttagtgtatatgaagattctgt

SEQ ID NO: 63963 - DNA, 25 bp, Artificial
  probe
  misc_feature (1)..(25): SEQ ID NO: 4907; WAN024AR3_at; Start 47; Stop 71
tatggtattcgttatcactggtcac

SEQ ID NO: 63964 - DNA, 25 bp, Artificial
  probe
  misc_feature (1)..(25): SEQ ID NO: 4907; WAN024AR3_at; Start 34; Stop 58
tatgaagattctgtatggtattcgt

SEQ ID NO: 63965 - DNA, 25 bp, Artificial
  probe
  misc_feature (1)..(25): SEQ ID NO: 3172; WAN024AR4_at; Start 18; Stop 42
tatggtagcataaaaacagaacgca

SEQ ID NO: 63966 - DNA, 25 bp, Artificial
  probe
  misc_feature (1)..(25): SEQ ID NO: 3172; WAN024AR4_at; Start 27; Stop 51
ataaaaacagaacgcaccatttttg

SEQ ID NO: 63967 - DNA, 25 bp, Artificial
  probe
  misc_feature (1)..(25): SEQ ID NO: 3172; WAN024AR4_at; Start 32; Stop 56
aacagaacgcaccatttttgatgcg

SEQ ID NO: 63968 - DNA, 25 bp, Artificial
  probe
  misc_feature (1)..(25): SEQ ID NO: 3172; WAN024AR4_at; Start 62; Stop 86
cattattctgaatgcaatgttctat

SEQ ID NO: 63969 - DNA, 25 bp, Artificial
  probe
  misc_feature (1)..(25): SEQ ID NO: 3172; WAN024AR4_at; Start 19; Stop 43
atggtagcataaaaacagaacgcac

SEQ ID NO: 63970 - DNA, 25 bp, Artificial
  probe
  misc_feature (1)..(25): SEQ ID NO: 3172; WAN024AR4_at; Start 23; Stop 47
tagcataaaaacagaacgcaccatt

SEQ ID NO: 63971 - DNA, 25 bp, Artificial
  probe
  misc_feature (1)..(25): SEQ ID NO: 3172; WAN024AR4_at; Start 17; Stop 41
ttatggtagcataaaaacagaacgc

SEQ ID NO: 63972 - DNA, 25 bp, Artificial
  probe
  misc_feature (1)..(25): SEQ ID NO: 3172; WAN024AR4_at; Start 22; Stop 46
gtagcataaaaacagaacgcaccat

SEQ ID NO: 63973 - DNA, 25 bp, Artificial
  probe
  misc_feature (1)..(25): SEQ ID NO: 3172; WAN024AR4_at; Start 24; Stop 48
agcataaaaacagaacgcaccattt

SEQ ID NO: 63974 - DNA, 25 bp, Artificial
  probe
  misc_feature (1)..(25): SEQ ID NO: 3172; WAN024AR4_at; Start 8; Stop 32
ttcctccttttatggtagcataaaa

SEQ ID NO: 63975 - DNA, 25 bp, Artificial
  probe
  misc_feature (1)..(25): SEQ ID NO: 3172; WAN024AR4_at; Start 3; Stop 27
ttgttttcctccttttatggtagca

SEQ ID NO: 63976 - DNA, 25 bp, Artificial
  probe
  misc_feature (1)..(25): SEQ ID NO: 3172; WAN024AR4_at; Start 33; Stop 57
acagaacgcaccatttttgatgcgt

SEQ ID NO: 63977 - DNA, 25 bp, Artificial
  probe
  misc_feature (1)..(25): SEQ ID NO: 3172; WAN024AR4_at; Start 80; Stop 104
gttctatctgttatatctatgacaa

SEQ ID NO: 63978 - DNA, 25 bp, Artificial
  probe
  misc_feature (1)..(25): SEQ ID NO: 3172; WAN024AR4_at; Start 100; Stop 124
gacaaataatagtcaattgaaaaaa

SEQ ID NO: 63979 - DNA, 25 bp, Artificial
  probe
  misc_feature (1)..(25): SEQ ID NO: 3172; WAN024AR4_at; Start 54; Stop 78
gcgtttttcattattctgaatgcaa

SEQ ID NO: 63980 - DNA, 25 bp, Artificial
  probe
  misc_feature (1)..(25): SEQ ID NO: 3172; WAN024AR4_at; Start 30; Stop 54
aaaacagaacgcaccatttttgatg

SEQ ID NO: 63981 - DNA, 25 bp, Artificial
  probe
  misc_feature (1)..(25): SEQ ID NO: 3172; WAN024AR4_at; Start 70; Stop 94
tgaatgcaatgttctatctgttata

SEQ ID NO: 63982 - DNA, 25 bp, Artificial
  probe
  misc_feature (1)..(25): SEQ ID NO: 3172; WAN024AR4_at; Start 34; Stop 58
cagaacgcaccatttttgatgcgtt

SEQ ID NO: 63983 - DNA, 25 bp, Artificial
  probe
  misc_feature (1)..(25): SEQ ID NO: 3172; WAN024AR4_at; Start 76; Stop 100
caatgttctatctgttatatctatg

SEQ ID NO: 63984 - DNA, 25 bp, Artificial
  probe
  misc_feature (1)..(25): SEQ ID NO: 3172; WAN024AR4_at; Start 39; Stop 63
cgcaccatttttgatgcgtttttca

SEQ ID NO: 63985 - DNA, 25 bp, Artificial
  probe
  misc_feature (1)..(25): SEQ ID NO: 3172; WAN024AR4_at; Start 65; Stop 89
tattctgaatgcaatgttctatctg

SEQ ID NO: 63986 - DNA, 25 bp, Artificial
  probe
  misc_feature (1)..(25): SEQ ID NO: 3172; WAN024AR4_at; Start 20; Stop 44
tggtagcataaaaacagaacgcacc

SEQ ID NO: 63987 - DNA, 25 bp, Artificial
  probe
  misc_feature (1)..(25): SEQ ID NO: 3172; WAN024AR4_at; Start 41; Stop 65
caccatttttgatgcgtttttcatt

SEQ ID NO: 63988 - DNA, 25 bp, Artificial
  probe
  misc_feature (1)..(25): SEQ ID NO: 3172; WAN024AR4_at; Start 25; Stop 49
gcataaaaacagaacgcaccatttt

SEQ ID NO: 63989 - DNA, 25 bp, Artificial
  probe
  misc_feature (1)..(25): SEQ ID NO: 3172; WAN024AR4_at; Start 68; Stop 92
tctgaatgcaatgttctatctgtta

SEQ ID NO: 63990 - DNA, 25 bp, Artificial
  probe
  misc_feature (1)..(25): SEQ ID NO: 3172; WAN024AR4_at; Start 89; Stop 113
gttatatctatgacaaataatagtc

SEQ ID NO: 63991 - DNA, 25 bp, Artificial
  probe
  misc_feature (1)..(25): SEQ ID NO: 3172; WAN024AR4_at; Start 82; Stop 106
tctatctgttatatctatgacaaat

SEQ ID NO: 63992 - DNA, 25 bp, Artificial
  probe
  misc_feature (1)..(25): SEQ ID NO: 3172; WAN024AR4_at; Start 21; Stop 45
ggtagcataaaaacagaacgcacca

SEQ ID NO: 63993 - DNA, 25 bp, Artificial
  probe
  misc_feature (1)..(25): SEQ ID NO: 3172; WAN024AR4_at; Start 5; Stop 29
gttttcctccttttatggtagcata

SEQ ID NO: 63994 - DNA, 25 bp, Artificial
  probe
  misc_feature (1)..(25): SEQ ID NO: 3172; WAN024AR4_at; Start 95; Stop 119
tctatgacaaataatagtcaattga

SEQ ID NO: 63995 - DNA, 25 bp, Artificial
  probe
  misc_feature (1)..(25): SEQ ID NO: 3172; WAN024AR4_at; Start 36; Stop 60
gaacgcaccatttttgatgcgtttt

SEQ ID NO: 63996 - DNA, 25 bp, Artificial
  probe
  misc_feature (1)..(25): SEQ ID NO: 3172; WAN024AR4_at; Start 74; Stop 98
tgcaatgttctatctgttatatcta

SEQ ID NO: 63997 - DNA, 25 bp, Artificial
  probe
  misc_feature (1)..(25): SEQ ID NO: 3172; WAN024AR4_at; Start 51; Stop 75
gatgcgtttttcattattctgaatg

SEQ ID NO: 63998 - DNA, 25 bp, Artificial
  probe
  misc_feature (1)..(25): SEQ ID NO: 3172; WAN024AR4_at; Start 31; Stop 55
aaacagaacgcaccatttttgatgc

SEQ ID NO: 63999 - DNA, 25 bp, Artificial
  probe
  misc_feature (1)..(25): SEQ ID NO: 343; WAN024AR5_at; Start 67; Stop 91
gaaaaacgcatcaaaaatggtgcgt

SEQ ID NO: 64000 - DNA, 25 bp, Artificial
  probe
  misc_feature (1)..(25): SEQ ID NO: 343; WAN024AR5_at; Start 33; Stop 57
gatataacagatagaacattgcatt

SEQ ID NO: 64001 - DNA, 25 bp, Artificial
  probe
  misc_feature (1)..(25): SEQ ID NO: 343; WAN024AR5_at; Start 102; Stop 126
tgctaccataaaaggaggaaaacaa

SEQ ID NO: 64002 - DNA, 25 bp, Artificial
  probe
  misc_feature (1)..(25): SEQ ID NO: 343; WAN024AR5_at; Start 74; Stop 98
gcatcaaaaatggtgcgttctgttt

SEQ ID NO: 64003 - DNA, 25 bp, Artificial
  probe
  misc_feature (1)..(25): SEQ ID NO: 343; WAN024AR5_at; Start 54; Stop 78
cattcagaataatgaaaaacgcatc

SEQ ID NO: 64004 - DNA, 25 bp, Artificial
  probe
  misc_feature (1)..(25): SEQ ID NO: 343; WAN024AR5_at; Start 64; Stop 88
aatgaaaaacgcatcaaaaatggtg

SEQ ID NO: 64005 - DNA, 25 bp, Artificial
  probe
  misc_feature (1)..(25): SEQ ID NO: 343; WAN024AR5_at; Start 87; Stop 111
tgcgttctgtttttatgctaccata

SEQ ID NO: 64006 - DNA, 25 bp, Artificial
  probe
  misc_feature (1)..(25): SEQ ID NO: 343; WAN024AR5_at; Start 29; Stop 53
catagatataacagatagaacattg

SEQ ID NO: 64007 - DNA, 25 bp, Artificial
  probe
  misc_feature (1)..(25): SEQ ID NO: 343; WAN024AR5_at; Start 57; Stop 81
tcagaataatgaaaaacgcatcaaa

SEQ ID NO: 64008 - DNA, 25 bp, Artificial
  probe
  misc_feature (1)..(25): SEQ ID NO: 343; WAN024AR5_at; Start 66; Stop 90
tgaaaaacgcatcaaaaatggtgcg

SEQ ID NO: 64009 - DNA, 25 bp, Artificial
  probe
  misc_feature (1)..(25): SEQ ID NO: 343; WAN024AR5_at; Start 46; Stop 70
gaacattgcattcagaataatgaaa

SEQ ID NO: 64010 - DNA, 25 bp, Artificial
  probe
  misc_feature (1)..(25): SEQ ID NO: 343; WAN024AR5_at; Start 85; Stop 109
ggtgcgttctgtttttatgctacca

SEQ ID NO: 64011 - DNA, 25 bp, Artificial
  probe
  misc_feature (1)..(25): SEQ ID NO: 343; WAN024AR5_at; Start 88; Stop 112
gcgttctgtttttatgctaccataa

SEQ ID NO: 64012 - DNA, 25 bp, Artificial
  probe
  misc_feature (1)..(25): SEQ ID NO: 343; WAN024AR5_at; Start 100; Stop 124
tatgctaccataaaaggaggaaaac

SEQ ID NO: 64013 - DNA, 25 bp, Artificial
  probe
  misc_feature (1)..(25): SEQ ID NO: 343; WAN024AR5_at; Start 25; Stop 49
ttgtcatagatataacagatagaac

SEQ ID NO: 64014 - DNA, 25 bp, Artificial
  probe
  misc_feature (1)..(25): SEQ ID NO: 343; WAN024AR5_at; Start 58; Stop 82
cagaataatgaaaaacgcatcaaaa

SEQ ID NO: 64015 - DNA, 25 bp, Artificial
  probe
  misc_feature (1)..(25): SEQ ID NO: 343; WAN024AR5_at; Start 51; Stop 75
ttgcattcagaataatgaaaaacgc

SEQ ID NO: 64016 - DNA, 25 bp, Artificial
  probe
  misc_feature (1)..(25): SEQ ID NO: 343; WAN024AR5_at; Start 31; Stop 55
tagatataacagatagaacattgca

SEQ ID NO: 64017 - DNA, 25 bp, Artificial
  probe
  misc_feature (1)..(25): SEQ ID NO: 343; WAN024AR5_at; Start 11; Stop 35
caattgactattatttgtcatagat

SEQ ID NO: 64018 - DNA, 25 bp, Artificial
  probe
  misc_feature (1)..(25): SEQ ID NO: 343; WAN024AR5_at; Start 97; Stop 121
ttttatgctaccataaaaggaggaa

SEQ ID NO: 64019 - DNA, 25 bp, Artificial
  probe
  misc_feature (1)..(25): SEQ ID NO: 343; WAN024AR5_at; Start 63; Stop 87
taatgaaaaacgcatcaaaaatggt

SEQ ID NO: 64020 - DNA, 25 bp, Artificial
  probe
  misc_feature (1)..(25): SEQ ID NO: 343; WAN024AR5_at; Start 80; Stop 104
aaaatggtgcgttctgtttttatgc

SEQ ID NO: 64021 - DNA, 25 bp, Artificial
  probe
  misc_feature (1)..(25): SEQ ID NO: 343; WAN024AR5_at; Start 75; Stop 99
catcaaaaatggtgcgttctgtttt

SEQ ID NO: 64022 - DNA, 25 bp, Artificial
  probe
  misc_feature (1)..(25): SEQ ID NO: 343; WAN024AR5_at; Start 73; Stop 97
cgcatcaaaaatggtgcgttctgtt

SEQ ID NO: 64023 - DNA, 25 bp, Artificial
  probe
  misc_feature (1)..(25): SEQ ID NO: 343; WAN024AR5_at; Start 37; Stop 61
taacagatagaacattgcattcaga

SEQ ID NO: 64024 - DNA, 25 bp, Artificial
  probe
  misc_feature (1)..(25): SEQ ID NO: 343; WAN024AR5_at; Start 40; Stop 64
cagatagaacattgcattcagaata

SEQ ID NO: 64025 - DNA, 25 bp, Artificial
  probe
  misc_feature (1)..(25): SEQ ID NO: 343; WAN024AR5_at; Start 71; Stop 95
aacgcatcaaaaatggtgcgttctg

SEQ ID NO: 64026 - DNA, 25 bp, Artificial
  probe
  misc_feature (1)..(25): SEQ ID NO: 343; WAN024AR5_at; Start 69; Stop 93
aaaacgcatcaaaaatggtgcgttc

SEQ ID NO: 64027 - DNA, 25 bp, Artificial
  probe
  misc_feature (1)..(25): SEQ ID NO: 343; WAN024AR5_at; Start 35; Stop 59
tataacagatagaacattgcattca

SEQ ID NO: 64028 - DNA, 25 bp, Artificial
  probe
  misc_feature (1)..(25): SEQ ID NO: 343; WAN024AR5_at; Start 42; Stop 66
gatagaacattgcattcagaataat

SEQ ID NO: 64029 - DNA, 25 bp, Artificial
  probe
  misc_feature (1)..(25): SEQ ID NO: 343; WAN024AR5_at; Start 38; Stop 62
aacagatagaacattgcattcagaa

SEQ ID NO: 64030 - DNA, 25 bp, Artificial
  probe
  misc_feature (1)..(25): SEQ ID NO: 343; WAN024AR5_at; Start 94; Stop 118
tgtttttatgctaccataaaaggag

SEQ ID NO: 64031 - DNA, 25 bp, Artificial
  probe
  misc_feature (1)..(25): SEQ ID NO: 343; WAN024AR5_at; Start 82; Stop 106
aatggtgcgttctgtttttatgcta

SEQ ID NO: 64032 - DNA, 25 bp, Artificial
  probe
  misc_feature (1)..(25): SEQ ID NO: 343; WAN024AR5_at; Start 27; Stop 51
gtcatagatataacagatagaacat

SEQ ID NO: 64033 - DNA, 25 bp, Artificial
  probe
  misc_feature (1)..(25): SEQ ID NO: 256; WAN024AR6_at; Start 9; Stop 33
cagttccctgtttatcaactattcg

SEQ ID NO: 64034 - DNA, 25 bp, Artificial
  probe
  misc_feature (1)..(25): SEQ ID NO: 256; WAN024AR6_at; Start 4; Stop 28
aacagcagttccctgtttatcaact

SEQ ID NO: 64035 - DNA, 25 bp, Artificial
  probe
  misc_feature (1)..(25): SEQ ID NO: 256; WAN024AR6_at; Start 35; Stop 59
actactttctattttgcttcatacc

SEQ ID NO: 64036 - DNA, 25 bp, Artificial
  probe
  misc_feature (1)..(25): SEQ ID NO: 256; WAN024AR6_at; Start 16; Stop 40
ctgtttatcaactattcgaactact

SEQ ID NO: 64037 - DNA, 25 bp, Artificial
  probe
  misc_feature (1)..(25): SEQ ID NO: 256; WAN024AR6_at; Start 42; Stop 66
tctattttgcttcataccctacata

SEQ ID NO: 64038 - DNA, 25 bp, Artificial
  probe
  misc_feature (1)..(25): SEQ ID NO: 256; WAN024AR6_at; Start 84; Stop 108
aaaagcagagaagaatatcttaaaa

SEQ ID NO: 64039 - DNA, 25 bp, Artificial
  probe
  misc_feature (1)..(25): SEQ ID NO: 256; WAN024AR6_at; Start 38; Stop 62
actttctattttgcttcatacccta

SEQ ID NO: 64040 - DNA, 25 bp, Artificial
  probe
  misc_feature (1)..(25): SEQ ID NO: 256; WAN024AR6_at; Start 5; Stop 29
acagcagttccctgtttatcaacta

SEQ ID NO: 64041 - DNA, 25 bp, Artificial
  probe
  misc_feature (1)..(25): SEQ ID NO: 256; WAN024AR6_at; Start 6; Stop 30
cagcagttccctgtttatcaactat

SEQ ID NO: 64042 - DNA, 25 bp, Artificial
  probe
  misc_feature (1)..(25): SEQ ID NO: 256; WAN024AR6_at; Start 79; Stop 103
aatgaaaaagcagagaagaatatct

SEQ ID NO: 64043 - DNA, 25 bp, Artificial
  probe
  misc_feature (1)..(25): SEQ ID NO: 256; WAN024AR6_at; Start 13; Stop 37
tccctgtttatcaactattcgaact

SEQ ID NO: 64044 - DNA, 25 bp, Artificial
  probe
  misc_feature (1)..(25): SEQ ID NO: 256; WAN024AR6_at; Start 87; Stop 111
agcagagaagaatatcttaaaaaga

SEQ ID NO: 64045 - DNA, 25 bp, Artificial
  probe
  misc_feature (1)..(25): SEQ ID NO: 256; WAN024AR6_at; Start 10; Stop 34
agttccctgtttatcaactattcga

SEQ ID NO: 64046 - DNA, 25 bp, Artificial
  probe
  misc_feature (1)..(25): SEQ ID NO: 256; WAN024AR6_at; Start 40; Stop 64
tttctattttgcttcataccctaca

SEQ ID NO: 64047 - DNA, 25 bp, Artificial
  probe
  misc_feature (1)..(25): SEQ ID NO: 256; WAN024AR6_at; Start 81; Stop 105
tgaaaaagcagagaagaatatctta

SEQ ID NO: 64048 - DNA, 25 bp, Artificial
  probe
  misc_feature (1)..(25): SEQ ID NO: 256; WAN024AR6_at; Start 14; Stop 38
ccctgtttatcaactattcgaacta

SEQ ID NO: 64049 - DNA, 25 bp, Artificial
  probe
  misc_feature (1)..(25): SEQ ID NO: 256; WAN024AR6_at; Start 33; Stop 57
gaactactttctattttgcttcata

SEQ ID NO: 64050 - DNA, 25 bp, Artificial
  probe
  misc_feature (1)..(25): SEQ ID NO: 256; WAN024AR6_at; Start 37; Stop 61
tactttctattttgcttcataccct

SEQ ID NO: 64051 - DNA, 25 bp, Artificial
  probe
  misc_feature (1)..(25): SEQ ID NO: 256; WAN024AR6_at; Start 72; Stop 96
aaaataaaatgaaaaagcagagaag

SEQ ID NO: 64052 - DNA, 25 bp, Artificial
  probe
  misc_feature (1)..(25): SEQ ID NO: 256; WAN024AR6_at; Start 17; Stop 41
tgtttatcaactattcgaactactt

SEQ ID NO: 64053 - DNA, 25 bp, Artificial
  probe
  misc_feature (1)..(25): SEQ ID NO: 256; WAN024AR6_at; Start 31; Stop 55
tcgaactactttctattttgcttca

SEQ ID NO: 64054 - DNA, 25 bp, Artificial
  probe
  misc_feature (1)..(25): SEQ ID NO: 256; WAN024AR6_at; Start 76; Stop 100
taaaatgaaaaagcagagaagaata

SEQ ID NO: 64055 - DNA, 25 bp, Artificial
  probe
  misc_feature (1)..(25): SEQ ID NO: 256; WAN024AR6_at; Start 2; Stop 26
ataacagcagttccctgtttatcaa

SEQ ID NO: 64056 - DNA, 25 bp, Artificial
  probe
  misc_feature (1)..(25): SEQ ID NO: 256; WAN024AR6_at; Start 23; Stop 47
tcaactattcgaactactttctatt

SEQ ID NO: 64057 - DNA, 25 bp, Artificial
  probe
  misc_feature (1)..(25): SEQ ID NO: 256; WAN024AR6_at; Start 1; Stop 25
aataacagcagttccctgtttatca

SEQ ID NO: 64058 - DNA, 25 bp, Artificial
  probe
  misc_feature (1)..(25): SEQ ID NO: 256; WAN024AR6_at; Start 11; Stop 35
gttccctgtttatcaactattcgaa

SEQ ID NO: 64059 - DNA, 25 bp, Artificial
  probe
  misc_feature (1)..(25): SEQ ID NO: 256; WAN024AR6_at; Start 44; Stop 68
tattttgcttcataccctacatagc

SEQ ID NO: 64060 - DNA, 25 bp, Artificial
  probe
  misc_feature (1)..(25): SEQ ID NO: 256; WAN024AR6_at; Start 21; Stop 45
tatcaactattcgaactactttcta

SEQ ID NO: 64061 - DNA, 25 bp, Artificial
  probe
  misc_feature (1)..(25): SEQ ID NO: 256; WAN024AR6_at; Start 19; Stop 43
tttatcaactattcgaactactttc

SEQ ID NO: 64062 - DNA, 25 bp, Artificial
  probe
  misc_feature (1)..(25): SEQ ID NO: 256; WAN024AR6_at; Start 28; Stop 52
tattcgaactactttctattttgct

SEQ ID NO: 64063 - DNA, 25 bp, Artificial
  probe
  misc_feature (1)..(25): SEQ ID NO: 256; WAN024AR6_at; Start 78; Stop 102
aaatgaaaaagcagagaagaatatc

SEQ ID NO: 64064 - DNA, 25 bp, Artificial
  probe
  misc_feature (1)..(25): SEQ ID NO: 256; WAN024AR6_at; Start 8; Stop 32
gcagttccctgtttatcaactattc

SEQ ID NO: 64065 - DNA, 25 bp, Artificial
  probe
  misc_feature (1)..(25): SEQ ID NO: 256; WAN024AR6_at; Start 15; Stop 39
cctgtttatcaactattcgaactac

SEQ ID NO: 64066 - DNA, 25 bp, Artificial
  probe
  misc_feature (1)..(25): SEQ ID NO: 256; WAN024AR6_at; Start 82; Stop 106
gaaaaagcagagaagaatatcttaa

SEQ ID NO: 64067 - DNA, 25 bp, Artificial
  probe
  misc_feature (1)..(25): SEQ ID NO: 4532; WAN024AR7_at; Start 107; Stop 131
agaaagtagttcgaatagttgataa

SEQ ID NO: 64068 - DNA, 25 bp, Artificial
  probe
  misc_feature (1)..(25): SEQ ID NO: 4532; WAN024AR7_at; Start 122; Stop 146
tagttgataaacagggaactgctgt

SEQ ID NO: 64069 - DNA, 25 bp, Artificial
  probe
  misc_feature (1)..(25): SEQ ID NO: 4532; WAN024AR7_at; Start 98; Stop 122
aagcaaaatagaaagtagttcgaat

SEQ ID NO: 64070 - DNA, 25 bp, Artificial
  probe
  misc_feature (1)..(25): SEQ ID NO: 4532; WAN024AR7_at; Start 113; Stop 137
tagttcgaatagttgataaacaggg

SEQ ID NO: 64071 - DNA, 25 bp, Artificial
  probe
  misc_feature (1)..(25): SEQ ID NO: 4532; WAN024AR7_at; Start 110; Stop 134
aagtagttcgaatagttgataaaca

SEQ ID NO: 64072 - DNA, 25 bp, Artificial
  probe
  misc_feature (1)..(25): SEQ ID NO: 4532; WAN024AR7_at; Start 95; Stop 119
atgaagcaaaatagaaagtagttcg

SEQ ID NO: 64073 - DNA, 25 bp, Artificial
  probe
  misc_feature (1)..(25): SEQ ID NO: 4532; WAN024AR7_at; Start 104; Stop 128
aatagaaagtagttcgaatagttga

SEQ ID NO: 64074 - DNA, 25 bp, Artificial
  probe
  misc_feature (1)..(25): SEQ ID NO: 4532; WAN024AR7_at; Start 112; Stop 136
gtagttcgaatagttgataaacagg

SEQ ID NO: 64075 - DNA, 25 bp, Artificial
  probe
  misc_feature (1)..(25): SEQ ID NO: 4532; WAN024AR7_at; Start 101; Stop 125
caaaatagaaagtagttcgaatagt

SEQ ID NO: 64076 - DNA, 25 bp, Artificial
  probe
  misc_feature (1)..(25): SEQ ID NO: 4532; WAN024AR7_at; Start 106; Stop 130
tagaaagtagttcgaatagttgata

SEQ ID NO: 64077 - DNA, 25 bp, Artificial
  probe
  misc_feature (1)..(25): SEQ ID NO: 4532; WAN024AR7_at; Start 40; Stop 64
tctttttaagatattcttctctgct

SEQ ID NO: 64078 - DNA, 25 bp, Artificial
  probe
  misc_feature (1)..(25): SEQ ID NO: 4532; WAN024AR7_at; Start 47; Stop 71
aagatattcttctctgctttttcat

SEQ ID NO: 64079 - DNA, 25 bp, Artificial
  probe
  misc_feature (1)..(25): SEQ ID NO: 4532; WAN024AR7_at; Start 111; Stop 135
agtagttcgaatagttgataaacag

SEQ ID NO: 64080 - DNA, 25 bp, Artificial
  probe
  misc_feature (1)..(25): SEQ ID NO: 4532; WAN024AR7_at; Start 100; Stop 124
gcaaaatagaaagtagttcgaatag

SEQ ID NO: 64081 - DNA, 25 bp, Artificial
  probe
  misc_feature (1)..(25): SEQ ID NO: 4532; WAN024AR7_at; Start 96; Stop 120
tgaagcaaaatagaaagtagttcga

SEQ ID NO: 64082 - DNA, 25 bp, Artificial
  probe
  misc_feature (1)..(25): SEQ ID NO: 4532; WAN024AR7_at; Start 120; Stop 144
aatagttgataaacagggaactgct

SEQ ID NO: 64083 - DNA, 25 bp, Artificial
  probe
  misc_feature (1)..(25): SEQ ID NO: 4532; WAN024AR7_at; Start 49; Stop 73
gatattcttctctgctttttcattt

SEQ ID NO: 64084 - DNA, 25 bp, Artificial
  probe
  misc_feature (1)..(25): SEQ ID NO: 4532; WAN024AR7_at; Start 46; Stop 70
taagatattcttctctgctttttca

SEQ ID NO: 64085 - DNA, 25 bp, Artificial
  probe
  misc_feature (1)..(25): SEQ ID NO: 4532; WAN024AR7_at; Start 93; Stop 117
gtatgaagcaaaatagaaagtagtt

SEQ ID NO: 64086 - DNA, 25 bp, Artificial
  probe
  misc_feature (1)..(25): SEQ ID NO: 4532; WAN024AR7_at; Start 117; Stop 141
tcgaatagttgataaacagggaact

SEQ ID NO: 64087 - DNA, 25 bp, Artificial
  probe
  misc_feature (1)..(25): SEQ ID NO: 4532; WAN024AR7_at; Start 116; Stop 140
ttcgaatagttgataaacagggaac

SEQ ID NO: 64088 - DNA, 25 bp, Artificial
  probe
  misc_feature (1)..(25): SEQ ID NO: 4532; WAN024AR7_at; Start 94; Stop 118
tatgaagcaaaatagaaagtagttc

SEQ ID NO: 64089 - DNA, 25 bp, Artificial
  probe
  misc_feature (1)..(25): SEQ ID NO: 4532; WAN024AR7_at; Start 119; Stop 143
gaatagttgataaacagggaactgc

SEQ ID NO: 64090 - DNA, 25 bp, Artificial
  probe
  misc_feature (1)..(25): SEQ ID NO: 4532; WAN024AR7_at; Start 97; Stop 121
gaagcaaaatagaaagtagttcgaa

SEQ ID NO: 64091 - DNA, 25 bp, Artificial
  probe
  misc_feature (1)..(25): SEQ ID NO: 4532; WAN024AR7_at; Start 114; Stop 138
agttcgaatagttgataaacaggga

SEQ ID NO: 64092 - DNA, 25 bp, Artificial
  probe
  misc_feature (1)..(25): SEQ ID NO: 4532; WAN024AR7_at; Start 51; Stop 75
tattcttctctgctttttcatttta

SEQ ID NO: 64093 - DNA, 25 bp, Artificial
  probe
  misc_feature (1)..(25): SEQ ID NO: 4532; WAN024AR7_at; Start 115; Stop 139
gttcgaatagttgataaacagggaa

SEQ ID NO: 64094 - DNA, 25 bp, Artificial
  probe
  misc_feature (1)..(25): SEQ ID NO: 4532; WAN024AR7_at; Start 121; Stop 145
atagttgataaacagggaactgctg

SEQ ID NO: 64095 - DNA, 25 bp, Artificial
  probe
  misc_feature (1)..(25): SEQ ID NO: 4532; WAN024AR7_at; Start 123; Stop 147
agttgataaacagggaactgctgtt

SEQ ID NO: 64096 - DNA, 25 bp, Artificial
  probe
  misc_feature (1)..(25): SEQ ID NO: 4532; WAN024AR7_at; Start 118; Stop 142
cgaatagttgataaacagggaactg

SEQ ID NO: 64097 - DNA, 25 bp, Artificial
  probe
  misc_feature (1)..(25): SEQ ID NO: 4532; WAN024AR7_at; Start 108; Stop 132
gaaagtagttcgaatagttgataaa

SEQ ID NO: 64098 - DNA, 25 bp, Artificial
  probe
  misc_feature (1)..(25): SEQ ID NO: 4532; WAN024AR7_at; Start 125; Stop 149
ttgataaacagggaactgctgttat

SEQ ID NO: 64099 - DNA, 25 bp, Artificial
  probe
  misc_feature (1)..(25): SEQ ID NO: 4532; WAN024AR7_at; Start 92; Stop 116
ggtatgaagcaaaatagaaagtagt

SEQ ID NO: 64100 - DNA, 25 bp, Artificial
  probe
  misc_feature (1)..(25): SEQ ID NO: 4532; WAN024AR7_at; Start 126; Stop 150
tgataaacagggaactgctgttatt

SEQ ID NO: 64101 - DNA, 25 bp, Artificial
  probe
  misc_feature (1)..(25): SEQ ID NO: 4617; WAN024ARA_at; Start 5; Stop 29
tcctaaaacgtatgttttcatatat

SEQ ID NO: 64102 - DNA, 25 bp, Artificial
  probe
  misc_feature (1)..(25): SEQ ID NO: 4617; WAN024ARA_at; Start 30; Stop 54
tgaagcatattatacacttaaatca

SEQ ID NO: 64103 - DNA, 25 bp, Artificial
  probe
  misc_feature (1)..(25): SEQ ID NO: 4617; WAN024ARA_at; Start 35; Stop 59
catattatacacttaaatcagttta

SEQ ID NO: 64104 - DNA, 25 bp, Artificial
  probe
  misc_feature (1)..(25): SEQ ID NO: 4617; WAN024ARA_at; Start 60; Stop 84
tatcaaactcaaaacaatttatctt

SEQ ID NO: 64105 - DNA, 25 bp, Artificial
  probe
  misc_feature (1)..(25): SEQ ID NO: 4617; WAN024ARA_at; Start 14; Stop 38
gtatgttttcatatattgaagcata

SEQ ID NO: 64106 - DNA, 25 bp, Artificial
  probe
  misc_feature (1)..(25): SEQ ID NO: 4617; WAN024ARA_at; Start 25; Stop 49
tatattgaagcatattatacactta

SEQ ID NO: 64107 - DNA, 25 bp, Artificial
  probe
  misc_feature (1)..(25): SEQ ID NO: 4617; WAN024ARA_at; Start 12; Stop 36
acgtatgttttcatatattgaagca

SEQ ID NO: 64108 - DNA, 25 bp, Artificial
  probe
  misc_feature (1)..(25): SEQ ID NO: 4617; WAN024ARA_at; Start 42; Stop 66
tacacttaaatcagtttatatcaaa

SEQ ID NO: 64109 - DNA, 25 bp, Artificial
  probe
  misc_feature (1)..(25): SEQ ID NO: 4617; WAN024ARA_at; Start 31; Stop 55
gaagcatattatacacttaaatcag

SEQ ID NO: 64110 - DNA, 25 bp, Artificial
  probe
  misc_feature (1)..(25): SEQ ID NO: 4617; WAN024ARA_at; Start 48; Stop 72
taaatcagtttatatcaaactcaaa

SEQ ID NO: 64111 - DNA, 25 bp, Artificial
  probe
  misc_feature (1)..(25): SEQ ID NO: 4617; WAN024ARA_at; Start 79; Stop 103
tatcttaacctaaatatttattgac

SEQ ID NO: 64112 - DNA, 25 bp, Artificial
  probe
  misc_feature (1)..(25): SEQ ID NO: 4617; WAN024ARA_at; Start 23; Stop 47
catatattgaagcatattatacact

SEQ ID NO: 64113 - DNA, 25 bp, Artificial
  probe
  misc_feature (1)..(25): SEQ ID NO: 4617; WAN024ARA_at; Start 27; Stop 51
tattgaagcatattatacacttaaa

SEQ ID NO: 64114 - DNA, 25 bp, Artificial
  probe
  misc_feature (1)..(25): SEQ ID NO: 4617; WAN024ARA_at; Start 93; Stop 117
tatttattgacatttcatgtgttca

SEQ ID NO: 64115 - DNA, 25 bp, Artificial
  probe
  misc_feature (1)..(25): SEQ ID NO: 4617; WAN024ARA_at; Start 89; Stop 113
taaatatttattgacatttcatgtg

SEQ ID NO: 64116 - DNA, 25 bp, Artificial
  probe
  misc_feature (1)..(25): SEQ ID NO: 4617; WAN024ARA_at; Start 34; Stop 58
gcatattatacacttaaatcagttt

SEQ ID NO: 64117 - DNA, 25 bp, Artificial
  probe
  misc_feature (1)..(25): SEQ ID NO: 4617; WAN024ARA_at; Start 32; Stop 56
aagcatattatacacttaaatcagt

SEQ ID NO: 64118 - DNA, 25 bp, Artificial
  probe
  misc_feature (1)..(25): SEQ ID NO: 4617; WAN024ARA_at; Start 29; Stop 53
ttgaagcatattatacacttaaatc

SEQ ID NO: 64119 - DNA, 25 bp, Artificial
  probe
  misc_feature (1)..(25): SEQ ID NO: 4617; WAN024ARA_at; Start 3; Stop 27
cctcctaaaacgtatgttttcatat

SEQ ID NO: 64120 - DNA, 25 bp, Artificial
  probe
  misc_feature (1)..(25): SEQ ID NO: 4617; WAN024ARA_at; Start 44; Stop 68
cacttaaatcagtttatatcaaact

SEQ ID NO: 64121 - DNA, 25 bp, Artificial
  probe
  misc_feature (1)..(25): SEQ ID NO: 4617; WAN024ARA_at; Start 46; Stop 70
cttaaatcagtttatatcaaactca

SEQ ID NO: 64122 - DNA, 25 bp, Artificial
  probe
  misc_feature (1)..(25): SEQ ID NO: 4617; WAN024ARA_at; Start 4; Stop 28
ctcctaaaacgtatgttttcatata

SEQ ID NO: 64123 - DNA, 25 bp, Artificial
  probe
  misc_feature (1)..(25): SEQ ID NO: 4617; WAN024ARA_at; Start 50; Stop 74
aatcagtttatatcaaactcaaaac

SEQ ID NO: 64124 - DNA, 25 bp, Artificial
  probe
  misc_feature (1)..(25): SEQ ID NO: 4617; WAN024ARA_at; Start 11; Stop 35
aacgtatgttttcatatattgaagc

SEQ ID NO: 64125 - DNA, 25 bp, Artificial
  probe
  misc_feature (1)..(25): SEQ ID NO: 4617; WAN024ARA_at; Start 43; Stop 67
acacttaaatcagtttatatcaaac

SEQ ID NO: 64126 - DNA, 25 bp, Artificial
  probe
  misc_feature (1)..(25): SEQ ID NO: 4617; WAN024ARA_at; Start 62; Stop 86
tcaaactcaaaacaatttatcttaa

SEQ ID NO: 64127 - DNA, 25 bp, Artificial
  probe
  misc_feature (1)..(25): SEQ ID NO: 4617; WAN024ARA_at; Start 84; Stop 108
taacctaaatatttattgacatttc

SEQ ID NO: 64128 - DNA, 25 bp, Artificial
  probe
  misc_feature (1)..(25): SEQ ID NO: 4617; WAN024ARA_at; Start 40; Stop 64
tatacacttaaatcagtttatatca

SEQ ID NO: 64129 - DNA, 25 bp, Artificial
  probe
  misc_feature (1)..(25): SEQ ID NO: 4617; WAN024ARA_at; Start 22; Stop 46
tcatatattgaagcatattatacac

SEQ ID NO: 64130 - DNA, 25 bp, Artificial
  probe
  misc_feature (1)..(25): SEQ ID NO: 4617; WAN024ARA_at; Start 87; Stop 111
cctaaatatttattgacatttcatg

SEQ ID NO: 64131 - DNA, 25 bp, Artificial
  probe
  misc_feature (1)..(25): SEQ ID NO: 4617; WAN024ARA_at; Start 52; Stop 76
tcagtttatatcaaactcaaaacaa

SEQ ID NO: 64132 - DNA, 25 bp, Artificial
  probe
  misc_feature (1)..(25): SEQ ID NO: 4617; WAN024ARA_at; Start 58; Stop 82
tatatcaaactcaaaacaatttatc

SEQ ID NO: 64133 - DNA, 25 bp, Artificial
  probe
  misc_feature (1)..(25): SEQ ID NO: 4617; WAN024ARA_at; Start 13; Stop 37
cgtatgttttcatatattgaagcat

SEQ ID NO: 64134 - DNA, 25 bp, Artificial
  probe
  misc_feature (1)..(25): SEQ ID NO: 4617; WAN024ARA_at; Start 53; Stop 77
cagtttatatcaaactcaaaacaat

SEQ ID NO: 64135 - DNA, 25 bp, Artificial
  probe
  misc_feature (1)..(25): SEQ ID NO: 4675; WAN024ARB_at; Start 80; Stop 104
tatgcttcaatatatgaaaacatac

SEQ ID NO: 64136 - DNA, 25 bp, Artificial
  probe
  misc_feature (1)..(25): SEQ ID NO: 4675; WAN024ARB_at; Start 72; Stop 96
gtgtataatatgcttcaatatatga

SEQ ID NO: 64137 - DNA, 25 bp, Artificial
  probe
  misc_feature (1)..(25): SEQ ID NO: 4675; WAN024ARB_at; Start 90; Stop 114
tatatgaaaacatacgttttaggag

SEQ ID NO: 64138 - DNA, 25 bp, Artificial
  probe
  misc_feature (1)..(25): SEQ ID NO: 4675; WAN024ARB_at; Start 43; Stop 67
tgttttgagtttgatataaactgat

SEQ ID NO: 64139 - DNA, 25 bp, Artificial
  probe
  misc_feature (1)..(25): SEQ ID NO: 4675; WAN024ARB_at; Start 63; Stop 87
ctgatttaagtgtataatatgcttc

SEQ ID NO: 64140 - DNA, 25 bp, Artificial
  probe
  misc_feature (1)..(25): SEQ ID NO: 4675; WAN024ARB_at; Start 48; Stop 72
tgagtttgatataaactgatttaag

SEQ ID NO: 64141 - DNA, 25 bp, Artificial
  probe
  misc_feature (1)..(25): SEQ ID NO: 4675; WAN024ARB_at; Start 81; Stop 105
atgcttcaatatatgaaaacatacg

SEQ ID NO: 64142 - DNA, 25 bp, Artificial
  probe
  misc_feature (1)..(25): SEQ ID NO: 4675; WAN024ARB_at; Start 2; Stop 26
gaacacatgaaatgtcaataaatat

SEQ ID NO: 64143 - DNA, 25 bp, Artificial
  probe
  misc_feature (1)..(25): SEQ ID NO: 4675; WAN024ARB_at; Start 16; Stop 40
tcaataaatatttaggttaagataa

SEQ ID NO: 64144 - DNA, 25 bp, Artificial
  probe
  misc_feature (1)..(25): SEQ ID NO: 4675; WAN024ARB_at; Start 5; Stop 29
cacatgaaatgtcaataaatattta

SEQ ID NO: 64145 - DNA, 25 bp, Artificial
  probe
  misc_feature (1)..(25): SEQ ID NO: 4675; WAN024ARB_at; Start 55; Stop 79
gatataaactgatttaagtgtataa

SEQ ID NO: 64146 - DNA, 25 bp, Artificial
  probe
  misc_feature (1)..(25): SEQ ID NO: 4675; WAN024ARB_at; Start 14; Stop 38
tgtcaataaatatttaggttaagat

SEQ ID NO: 64147 - DNA, 25 bp, Artificial
  probe
  misc_feature (1)..(25): SEQ ID NO: 4675; WAN024ARB_at; Start 61; Stop 85
aactgatttaagtgtataatatgct

SEQ ID NO: 64148 - DNA, 25 bp, Artificial
  probe
  misc_feature (1)..(25): SEQ ID NO: 4675; WAN024ARB_at; Start 38; Stop 62
taaattgttttgagtttgatataaa

SEQ ID NO: 64149 - DNA, 25 bp, Artificial
  probe
  misc_feature (1)..(25): SEQ ID NO: 4675; WAN024ARB_at; Start 84; Stop 108
cttcaatatatgaaaacatacgttt

SEQ ID NO: 64150 - DNA, 25 bp, Artificial
  probe
  misc_feature (1)..(25): SEQ ID NO: 4675; WAN024ARB_at; Start 67; Stop 91
tttaagtgtataatatgcttcaata

SEQ ID NO: 64151 - DNA, 25 bp, Artificial
  probe
  misc_feature (1)..(25): SEQ ID NO: 4675; WAN024ARB_at; Start 64; Stop 88
tgatttaagtgtataatatgcttca

SEQ ID NO: 64152 - DNA, 25 bp, Artificial
  probe
  misc_feature (1)..(25): SEQ ID NO: 4675; WAN024ARB_at; Start 69; Stop 93
taagtgtataatatgcttcaatata

SEQ ID NO: 64153 - DNA, 25 bp, Artificial
  probe
  misc_feature (1)..(25): SEQ ID NO: 4675; WAN024ARB_at; Start 65; Stop 89
gatttaagtgtataatatgcttcaa

SEQ ID NO: 64154 - DNA, 25 bp, Artificial
  probe
  misc_feature (1)..(25): SEQ ID NO: 4675; WAN024ARB_at; Start 49; Stop 73
gagtttgatataaactgatttaagt

SEQ ID NO: 64155 - DNA, 25 bp, Artificial
  probe
  misc_feature (1)..(25): SEQ ID NO: 4675; WAN024ARB_at; Start 82; Stop 106
tgcttcaatatatgaaaacatacgt

SEQ ID NO: 64156 - DNA, 25 bp, Artificial
  probe
  misc_feature (1)..(25): SEQ ID NO: 4675; WAN024ARB_at; Start 10; Stop 34
gaaatgtcaataaatatttaggtta

SEQ ID NO: 64157 - DNA, 25 bp, Artificial
  probe
  misc_feature (1)..(25): SEQ ID NO: 4675; WAN024ARB_at; Start 91; Stop 115
atatgaaaacatacgttttaggagg

SEQ ID NO: 64158 - DNA, 25 bp, Artificial
  probe
  misc_feature (1)..(25): SEQ ID NO: 4675; WAN024ARB_at; Start 7; Stop 31
catgaaatgtcaataaatatttagg

SEQ ID NO: 64159 - DNA, 25 bp, Artificial
  probe
  misc_feature (1)..(25): SEQ ID NO: 4675; WAN024ARB_at; Start 51; Stop 75
gtttgatataaactgatttaagtgt

SEQ ID NO: 64160 - DNA, 25 bp, Artificial
  probe
  misc_feature (1)..(25): SEQ ID NO: 4675; WAN024ARB_at; Start 1; Stop 25
tgaacacatgaaatgtcaataaata

SEQ ID NO: 64161 - DNA, 25 bp, Artificial
  probe
  misc_feature (1)..(25): SEQ ID NO: 4675; WAN024ARB_at; Start 77; Stop 101
taatatgcttcaatatatgaaaaca

SEQ ID NO: 64162 - DNA, 25 bp, Artificial
  probe
  misc_feature (1)..(25): SEQ ID NO: 4675; WAN024ARB_at; Start 12; Stop 36
aatgtcaataaatatttaggttaag

SEQ ID NO: 64163 - DNA, 25 bp, Artificial
  probe
  misc_feature (1)..(25): SEQ ID NO: 4675; WAN024ARB_at; Start 83; Stop 107
gcttcaatatatgaaaacatacgtt

SEQ ID NO: 64164 - DNA, 25 bp, Artificial
  probe
  misc_feature (1)..(25): SEQ ID NO: 4675; WAN024ARB_at; Start 36; Stop 60
gataaattgttttgagtttgatata

SEQ ID NO: 64165 - DNA, 25 bp, Artificial
  probe
  misc_feature (1)..(25): SEQ ID NO: 4675; WAN024ARB_at; Start 73; Stop 97
tgtataatatgcttcaatatatgaa

SEQ ID NO: 64166 - DNA, 25 bp, Artificial
  probe
  misc_feature (1)..(25): SEQ ID NO: 4675; WAN024ARB_at; Start 60; Stop 84
aaactgatttaagtgtataatatgc

SEQ ID NO: 64167 - DNA, 25 bp, Artificial
  probe
  misc_feature (1)..(25): SEQ ID NO: 4675; WAN024ARB_at; Start 9; Stop 33
tgaaatgtcaataaatatttaggtt

SEQ ID NO: 64168 - DNA, 25 bp, Artificial
  probe
  misc_feature (1)..(25): SEQ ID NO: 4675; WAN024ARB_at; Start 71; Stop 95
agtgtataatatgcttcaatatatg

SEQ ID NO: 64169 - DNA, 25 bp, Artificial
  probe
  misc_feature (1)..(25): SEQ ID NO: 573; WAN024ARC_at; Start 46; Stop 70
taaaataaagcgtttccaatgacaa

SEQ ID NO: 64170 - DNA, 25 bp, Artificial
  probe
  misc_feature (1)..(25): SEQ ID NO: 573; WAN024ARC_at; Start 77; Stop 101
cattttcctaaatgatatggaaaaa

SEQ ID NO: 64171 - DNA, 25 bp, Artificial
  probe
  misc_feature (1)..(25): SEQ ID NO: 573; WAN024ARC_at; Start 55; Stop 79
gcgtttccaatgacaattccctcat

SEQ ID NO: 64172 - DNA, 25 bp, Artificial
  probe
  misc_feature (1)..(25): SEQ ID NO: 573; WAN024ARC_at; Start 60; Stop 84
tccaatgacaattccctcattttcc

SEQ ID NO: 64173 - DNA, 25 bp, Artificial
  probe
  misc_feature (1)..(25): SEQ ID NO: 573; WAN024ARC_at; Start 47; Stop 71
aaaataaagcgtttccaatgacaat

SEQ ID NO: 64174 - DNA, 25 bp, Artificial
  probe
  misc_feature (1)..(25): SEQ ID NO: 573; WAN024ARC_at; Start 75; Stop 99
ctcattttcctaaatgatatggaaa

SEQ ID NO: 64175 - DNA, 25 bp, Artificial
  probe
  misc_feature (1)..(25): SEQ ID NO: 573; WAN024ARC_at; Start 42; Stop 66
attataaaataaagcgtttccaatg

SEQ ID NO: 64176 - DNA, 25 bp, Artificial
  probe
  misc_feature (1)..(25): SEQ ID NO: 573; WAN024ARC_at; Start 51; Stop 75
taaagcgtttccaatgacaattccc

SEQ ID NO: 64177 - DNA, 25 bp, Artificial
  probe
  misc_feature (1)..(25): SEQ ID NO: 573; WAN024ARC_at; Start 74; Stop 98
cctcattttcctaaatgatatggaa

SEQ ID NO: 64178 - DNA, 25 bp, Artificial
  probe
  misc_feature (1)..(25): SEQ ID NO: 573; WAN024ARC_at; Start 53; Stop 77
aagcgtttccaatgacaattccctc

SEQ ID NO: 64179 - DNA, 25 bp, Artificial
  probe
  misc_feature (1)..(25): SEQ ID NO: 573; WAN024ARC_at; Start 48; Stop 72
aaataaagcgtttccaatgacaatt

SEQ ID NO: 64180 - DNA, 25 bp, Artificial
  probe
  misc_feature (1)..(25): SEQ ID NO: 573; WAN024ARC_at; Start 52; Stop 76
aaagcgtttccaatgacaattccct

SEQ ID NO: 64181 - DNA, 25 bp, Artificial
  probe
  misc_feature (1)..(25): SEQ ID NO: 573; WAN024ARC_at; Start 73; Stop 97
ccctcattttcctaaatgatatgga

SEQ ID NO: 64182 - DNA, 25 bp, Artificial
  probe
  misc_feature (1)..(25): SEQ ID NO: 573; WAN024ARC_at; Start 61; Stop 85
ccaatgacaattccctcattttcct

SEQ ID NO: 64183 - DNA, 25 bp, Artificial
  probe
  misc_feature (1)..(25): SEQ ID NO: 573; WAN024ARC_at; Start 64; Stop 88
atgacaattccctcattttcctaaa

SEQ ID NO: 64184 - DNA, 25 bp, Artificial
  probe
  misc_feature (1)..(25): SEQ ID NO: 573; WAN024ARC_at; Start 13; Stop 37
ctaagttggcttatttgttatctat

SEQ ID NO: 64185 - DNA, 25 bp, Artificial
  probe
  misc_feature (1)..(25): SEQ ID NO: 573; WAN024ARC_at; Start 63; Stop 87
aatgacaattccctcattttcctaa

SEQ ID NO: 64186 - DNA, 25 bp, Artificial
  probe
  misc_feature (1)..(25): SEQ ID NO: 573; WAN024ARC_at; Start 67; Stop 91
acaattccctcattttcctaaatga

SEQ ID NO: 64187 - DNA, 25 bp, Artificial
  probe
  misc_feature (1)..(25): SEQ ID NO: 573; WAN024ARC_at; Start 58; Stop 82
tttccaatgacaattccctcatttt

SEQ ID NO: 64188 - DNA, 25 bp, Artificial
  probe
  misc_feature (1)..(25): SEQ ID NO: 573; WAN024ARC_at; Start 50; Stop 74
ataaagcgtttccaatgacaattcc

SEQ ID NO: 64189 - DNA, 25 bp, Artificial
  probe
  misc_feature (1)..(25): SEQ ID NO: 573; WAN024ARC_at; Start 10; Stop 34
gtgctaagttggcttatttgttatc

SEQ ID NO: 64190 - DNA, 25 bp, Artificial
  probe
  misc_feature (1)..(25): SEQ ID NO: 573; WAN024ARC_at; Start 43; Stop 67
ttataaaataaagcgtttccaatga

SEQ ID NO: 64191 - DNA, 25 bp, Artificial
  probe
  misc_feature (1)..(25): SEQ ID NO: 573; WAN024ARC_at; Start 68; Stop 92
caattccctcattttcctaaatgat

SEQ ID NO: 64192 - DNA, 25 bp, Artificial
  probe
  misc_feature (1)..(25): SEQ ID NO: 573; WAN024ARC_at; Start 57; Stop 81
gtttccaatgacaattccctcattt

SEQ ID NO: 64193 - DNA, 25 bp, Artificial
  probe
  misc_feature (1)..(25): SEQ ID NO: 573; WAN024ARC_at; Start 56; Stop 80
cgtttccaatgacaattccctcatt

SEQ ID NO: 64194 - DNA, 25 bp, Artificial
  probe
  misc_feature (1)..(25): SEQ ID NO: 573; WAN024ARC_at; Start 65; Stop 89
tgacaattccctcattttcctaaat

SEQ ID NO: 64195 - DNA, 25 bp, Artificial
  probe
  misc_feature (1)..(25): SEQ ID NO: 573; WAN024ARC_at; Start 54; Stop 78
agcgtttccaatgacaattccctca

SEQ ID NO: 64196 - DNA, 25 bp, Artificial
  probe
  misc_feature (1)..(25): SEQ ID NO: 573; WAN024ARC_at; Start 11; Stop 35
tgctaagttggcttatttgttatct

SEQ ID NO: 64197 - DNA, 25 bp, Artificial
  probe
  misc_feature (1)..(25): SEQ ID NO: 573; WAN024ARC_at; Start 66; Stop 90
gacaattccctcattttcctaaatg

SEQ ID NO: 64198 - DNA, 25 bp, Artificial
  probe
  misc_feature (1)..(25): SEQ ID NO: 573; WAN024ARC_at; Start 12; Stop 36
gctaagttggcttatttgttatcta

SEQ ID NO: 64199 - DNA, 25 bp, Artificial
  probe
  misc_feature (1)..(25): SEQ ID NO: 573; WAN024ARC_at; Start 45; Stop 69
ataaaataaagcgtttccaatgaca

SEQ ID NO: 64200 - DNA, 25 bp, Artificial
  probe
  misc_feature (1)..(25): SEQ ID NO: 573; WAN024ARC_at; Start 49; Stop 73
aataaagcgtttccaatgacaattc

SEQ ID NO: 64201 - DNA, 25 bp, Artificial
  probe
  misc_feature (1)..(25): SEQ ID NO: 573; WAN024ARC_at; Start 72; Stop 96
tccctcattttcctaaatgatatgg

SEQ ID NO: 64202 - DNA, 25 bp, Artificial
  probe
  misc_feature (1)..(25): SEQ ID NO: 573; WAN024ARC_at; Start 15; Stop 39
aagttggcttatttgttatctattt

SEQ ID NO: 64203 - DNA, 25 bp, Artificial
  probe
  misc_feature (1)..(25): SEQ ID NO: 5960; WAN024ARD_at; Start 65; Stop 89
aaatagataacaaataagccaactt

SEQ ID NO: 64204 - DNA, 25 bp, Artificial
  probe
  misc_feature (1)..(25): SEQ ID NO: 5960; WAN024ARD_at; Start 17; Stop 41
ttaggaaaatgagggaattgtcatt

SEQ ID NO: 64205 - DNA, 25 bp, Artificial
  probe
  misc_feature (1)..(25): SEQ ID NO: 5960; WAN024ARD_at; Start 21; Stop 45
gaaaatgagggaattgtcattggaa

SEQ ID NO: 64206 - DNA, 25 bp, Artificial
  probe
  misc_feature (1)..(25): SEQ ID NO: 5960; WAN024ARD_at; Start 31; Stop 55
gaattgtcattggaaacgctttatt

SEQ ID NO: 64207 - DNA, 25 bp, Artificial
  probe
  misc_feature (1)..(25): SEQ ID NO: 5960; WAN024ARD_at; Start 26; Stop 50
tgagggaattgtcattggaaacgct

SEQ ID NO: 64208 - DNA, 25 bp, Artificial
  probe
  misc_feature (1)..(25): SEQ ID NO: 5960; WAN024ARD_at; Start 24; Stop 48
aatgagggaattgtcattggaaacg

SEQ ID NO: 64209 - DNA, 25 bp, Artificial
  probe
  misc_feature (1)..(25): SEQ ID NO: 5960; WAN024ARD_at; Start 25; Stop 49
atgagggaattgtcattggaaacgc

SEQ ID NO: 64210 - DNA, 25 bp, Artificial
  probe
  misc_feature (1)..(25): SEQ ID NO: 5960; WAN024ARD_at; Start 19; Stop 43
aggaaaatgagggaattgtcattgg

SEQ ID NO: 64211 - DNA, 25 bp, Artificial
  probe
  misc_feature (1)..(25): SEQ ID NO: 5960; WAN024ARD_at; Start 15; Stop 39
atttaggaaaatgagggaattgtca

SEQ ID NO: 64212 - DNA, 25 bp, Artificial
  probe
  misc_feature (1)..(25): SEQ ID NO: 5960; WAN024ARD_at; Start 23; Stop 47
aaatgagggaattgtcattggaaac

SEQ ID NO: 64213 - DNA, 25 bp, Artificial
  probe
  misc_feature (1)..(25): SEQ ID NO: 5960; WAN024ARD_at; Start 68; Stop 92
tagataacaaataagccaacttagc

SEQ ID NO: 64214 - DNA, 25 bp, Artificial
  probe
  misc_feature (1)..(25): SEQ ID NO: 5960; WAN024ARD_at; Start 28; Stop 52
agggaattgtcattggaaacgcttt

SEQ ID NO: 64215 - DNA, 25 bp, Artificial
  probe
  misc_feature (1)..(25): SEQ ID NO: 5960; WAN024ARD_at; Start 8; Stop 32
ccatatcatttaggaaaatgaggga

SEQ ID NO: 64216 - DNA, 25 bp, Artificial
  probe
  misc_feature (1)..(25): SEQ ID NO: 5960; WAN024ARD_at; Start 69; Stop 93
agataacaaataagccaacttagca

SEQ ID NO: 64217 - DNA, 25 bp, Artificial
  probe
  misc_feature (1)..(25): SEQ ID NO: 5960; WAN024ARD_at; Start 64; Stop 88
aaaatagataacaaataagccaact

SEQ ID NO: 64218 - DNA, 25 bp, Artificial
  probe
  misc_feature (1)..(25): SEQ ID NO: 5960; WAN024ARD_at; Start 38; Stop 62
cattggaaacgctttattttataat

SEQ ID NO: 64219 - DNA, 25 bp, Artificial
  probe
  misc_feature (1)..(25): SEQ ID NO: 5960; WAN024ARD_at; Start 34; Stop 58
ttgtcattggaaacgctttatttta

SEQ ID NO: 64220 - DNA, 25 bp, Artificial
  probe
  misc_feature (1)..(25): SEQ ID NO: 5960; WAN024ARD_at; Start 30; Stop 54
ggaattgtcattggaaacgctttat

SEQ ID NO: 64221 - DNA, 25 bp, Artificial
  probe
  misc_feature (1)..(25): SEQ ID NO: 5960; WAN024ARD_at; Start 11; Stop 35
tatcatttaggaaaatgagggaatt

SEQ ID NO: 64222 - DNA, 25 bp, Artificial
  probe
  misc_feature (1)..(25): SEQ ID NO: 5960; WAN024ARD_at; Start 37; Stop 61
tcattggaaacgctttattttataa

SEQ ID NO: 64223 - DNA, 25 bp, Artificial
  probe
  misc_feature (1)..(25): SEQ ID NO: 5960; WAN024ARD_at; Start 32; Stop 56
aattgtcattggaaacgctttattt

SEQ ID NO: 64224 - DNA, 25 bp, Artificial
  probe
  misc_feature (1)..(25): SEQ ID NO: 5960; WAN024ARD_at; Start 20; Stop 44
ggaaaatgagggaattgtcattgga

SEQ ID NO: 64225 - DNA, 25 bp, Artificial
  probe
  misc_feature (1)..(25): SEQ ID NO: 5960; WAN024ARD_at; Start 35; Stop 59
tgtcattggaaacgctttattttat

SEQ ID NO: 64226 - DNA, 25 bp, Artificial
  probe
  misc_feature (1)..(25): SEQ ID NO: 5960; WAN024ARD_at; Start 14; Stop 38
catttaggaaaatgagggaattgtc

SEQ ID NO: 64227 - DNA, 25 bp, Artificial
  probe
  misc_feature (1)..(25): SEQ ID NO: 5960; WAN024ARD_at; Start 16; Stop 40
tttaggaaaatgagggaattgtcat

SEQ ID NO: 64228 - DNA, 25 bp, Artificial
  probe
  misc_feature (1)..(25): SEQ ID NO: 5960; WAN024ARD_at; Start 70; Stop 94
gataacaaataagccaacttagcac

SEQ ID NO: 64229 - DNA, 25 bp, Artificial
  probe
  misc_feature (1)..(25): SEQ ID NO: 5960; WAN024ARD_at; Start 7; Stop 31
tccatatcatttaggaaaatgaggg

SEQ ID NO: 64230 - DNA, 25 bp, Artificial
  probe
  misc_feature (1)..(25): SEQ ID NO: 5960; WAN024ARD_at; Start 29; Stop 53
gggaattgtcattggaaacgcttta

SEQ ID NO: 64231 - DNA, 25 bp, Artificial
  probe
  misc_feature (1)..(25): SEQ ID NO: 5960; WAN024ARD_at; Start 62; Stop 86
taaaaatagataacaaataagccaa

SEQ ID NO: 64232 - DNA, 25 bp, Artificial
  probe
  misc_feature (1)..(25): SEQ ID NO: 5960; WAN024ARD_at; Start 66; Stop 90
aatagataacaaataagccaactta

SEQ ID NO: 64233 - DNA, 25 bp, Artificial
  probe
  misc_feature (1)..(25): SEQ ID NO: 5960; WAN024ARD_at; Start 27; Stop 51
gagggaattgtcattggaaacgctt

SEQ ID NO: 64234 - DNA, 25 bp, Artificial
  probe
  misc_feature (1)..(25): SEQ ID NO: 5960; WAN024ARD_at; Start 9; Stop 33
catatcatttaggaaaatgagggaa

SEQ ID NO: 64235 - DNA, 25 bp, Artificial
  probe
  misc_feature (1)..(25): SEQ ID NO: 5960; WAN024ARD_at; Start 67; Stop 91
atagataacaaataagccaacttag

SEQ ID NO: 64236 - DNA, 25 bp, Artificial
  probe
  misc_feature (1)..(25): SEQ ID NO: 5960; WAN024ARD_at; Start 22; Stop 46
aaaatgagggaattgtcattggaaa

SEQ ID NO: 64237 - DNA, 25 bp, Artificial
  probe
  misc_feature (1)..(25): SEQ ID NO: 2851; WAN024ARE_at; Start 5; Stop 29
cacctcaatatgctaaacaaactga

SEQ ID NO: 64238 - DNA, 25 bp, Artificial
  probe
  misc_feature (1)..(25): SEQ ID NO: 2851; WAN024ARE_at; Start 16; Stop 40
gctaaacaaactgagaataatctca

SEQ ID NO: 64239 - DNA, 25 bp, Artificial
  probe
  misc_feature (1)..(25): SEQ ID NO: 2851; WAN024ARE_at; Start 17; Stop 41
ctaaacaaactgagaataatctcag

SEQ ID NO: 64240 - DNA, 25 bp, Artificial
  probe
  misc_feature (1)..(25): SEQ ID NO: 2851; WAN024ARE_at; Start 1; Stop 25
atgtcacctcaatatgctaaacaaa

SEQ ID NO: 64241 - DNA, 25 bp, Artificial
  probe
  misc_feature (1)..(25): SEQ ID NO: 2851; WAN024ARE_at; Start 13; Stop 37
tatgctaaacaaactgagaataatc

SEQ ID NO: 64242 - DNA, 25 bp, Artificial
  probe
  misc_feature (1)..(25): SEQ ID NO: 2851; WAN024ARE_at; Start 12; Stop 36
atatgctaaacaaactgagaataat

SEQ ID NO: 64243 - DNA, 25 bp, Artificial
  probe
  misc_feature (1)..(25): SEQ ID NO: 2851; WAN024ARE_at; Start 7; Stop 31
cctcaatatgctaaacaaactgaga

SEQ ID NO: 64244 - DNA, 25 bp, Artificial
  probe
  misc_feature (1)..(25): SEQ ID NO: 2851; WAN024ARE_at; Start 10; Stop 34
caatatgctaaacaaactgagaata

SEQ ID NO: 64245 - DNA, 25 bp, Artificial
  probe
  misc_feature (1)..(25): SEQ ID NO: 2851; WAN024ARE_at; Start 15; Stop 39
tgctaaacaaactgagaataatctc

SEQ ID NO: 64246 - DNA, 25 bp, Artificial
  probe
  misc_feature (1)..(25): SEQ ID NO: 2851; WAN024ARE_at; Start 9; Stop 33
tcaatatgctaaacaaactgagaat

SEQ ID NO: 64247 - DNA, 25 bp, Artificial
  probe
  misc_feature (1)..(25): SEQ ID NO: 2851; WAN024ARE_at; Start 11; Stop 35
aatatgctaaacaaactgagaataa

SEQ ID NO: 64248 - DNA, 25 bp, Artificial
  probe
  misc_feature (1)..(25): SEQ ID NO: 2851; WAN024ARE_at; Start 14; Stop 38
atgctaaacaaactgagaataatct

SEQ ID NO: 64249 - DNA, 25 bp, Artificial
  probe
  misc_feature (1)..(25): SEQ ID NO: 2851; WAN024ARE_at; Start 4; Stop 28
tcacctcaatatgctaaacaaactg

SEQ ID NO: 64250 - DNA, 25 bp, Artificial
  probe
  misc_feature (1)..(25): SEQ ID NO: 2851; WAN024ARE_at; Start 3; Stop 27
gtcacctcaatatgctaaacaaact

SEQ ID NO: 64251 - DNA, 25 bp, Artificial
  probe
  misc_feature (1)..(25): SEQ ID NO: 2851; WAN024ARE_at; Start 8; Stop 32
ctcaatatgctaaacaaactgagaa

SEQ ID NO: 64252 - DNA, 25 bp, Artificial
  probe
  misc_feature (1)..(25): SEQ ID NO: 2851; WAN024ARE_at; Start 6; Stop 30
acctcaatatgctaaacaaactgag

SEQ ID NO: 64253 - DNA, 25 bp, Artificial
  probe
  misc_feature (1)..(25): SEQ ID NO: 2851; WAN024ARE_at; Start 27; Stop 51
tgagaataatctcagtttgtttata

SEQ ID NO: 64254 - DNA, 25 bp, Artificial
  probe
  misc_feature (1)..(25): SEQ ID NO: 2851; WAN024ARE_at; Start 2; Stop 26
tgtcacctcaatatgctaaacaaac

SEQ ID NO: 64255 - DNA, 25 bp, Artificial
  probe
  misc_feature (1)..(25): SEQ ID NO: 2851; WAN024ARE_at; Start 26; Stop 50
ctgagaataatctcagtttgtttat

SEQ ID NO: 64256 - DNA, 25 bp, Artificial
  probe
  misc_feature (1)..(25): SEQ ID NO: 4536; WAN024ARF_at; Start 2; Stop 26
ataaacaaactgagattattctcag

SEQ ID NO: 64257 - DNA, 25 bp, Artificial
  probe
  misc_feature (1)..(25): SEQ ID NO: 4536; WAN024ARF_at; Start 21; Stop 45
tctcagtttgtttagcatattgagg

SEQ ID NO: 64258 - DNA, 25 bp, Artificial
  probe
  misc_feature (1)..(25): SEQ ID NO: 4536; WAN024ARF_at; Start 26; Stop 50
gtttgtttagcatattgaggtgaca

SEQ ID NO: 64259 - DNA, 25 bp, Artificial
  probe
  misc_feature (1)..(25): SEQ ID NO: 4536; WAN024ARF_at; Start 27; Stop 51
tttgtttagcatattgaggtgacat

SEQ ID NO: 64260 - DNA, 25 bp, Artificial
  probe
  misc_feature (1)..(25): SEQ ID NO: 4536; WAN024ARF_at; Start 23; Stop 47
tcagtttgtttagcatattgaggtg

SEQ ID NO: 64261 - DNA, 25 bp, Artificial
  probe
  misc_feature (1)..(25): SEQ ID NO: 4536; WAN024ARF_at; Start 12; Stop 36
tgagattattctcagtttgtttagc

SEQ ID NO: 64262 - DNA, 25 bp, Artificial
  probe
  misc_feature (1)..(25): SEQ ID NO: 4536; WAN024ARF_at; Start 19; Stop 43
attctcagtttgtttagcatattga

SEQ ID NO: 64263 - DNA, 25 bp, Artificial
  probe
  misc_feature (1)..(25): SEQ ID NO: 4536; WAN024ARF_at; Start 18; Stop 42
tattctcagtttgtttagcatattg

SEQ ID NO: 64264 - DNA, 25 bp, Artificial
  probe
  misc_feature (1)..(25): SEQ ID NO: 4536; WAN024ARF_at; Start 15; Stop 39
gattattctcagtttgtttagcata

SEQ ID NO: 64265 - DNA, 25 bp, Artificial
  probe
  misc_feature (1)..(25): SEQ ID NO: 4536; WAN024ARF_at; Start 1; Stop 25
tataaacaaactgagattattctca

SEQ ID NO: 64266 - DNA, 25 bp, Artificial
  probe
  misc_feature (1)..(25): SEQ ID NO: 4536; WAN024ARF_at; Start 13; Stop 37
gagattattctcagtttgtttagca

SEQ ID NO: 64267 - DNA, 25 bp, Artificial
  probe
  misc_feature (1)..(25): SEQ ID NO: 4536; WAN024ARF_at; Start 16; Stop 40
attattctcagtttgtttagcatat

SEQ ID NO: 64268 - DNA, 25 bp, Artificial
  probe
  misc_feature (1)..(25): SEQ ID NO: 4536; WAN024ARF_at; Start 14; Stop 38
agattattctcagtttgtttagcat

SEQ ID NO: 64269 - DNA, 25 bp, Artificial
  probe
  misc_feature (1)..(25): SEQ ID NO: 4536; WAN024ARF_at; Start 24; Stop 48
cagtttgtttagcatattgaggtga

SEQ ID NO: 64270 - DNA, 25 bp, Artificial
  probe
  misc_feature (1)..(25): SEQ ID NO: 4536; WAN024ARF_at; Start 20; Stop 44
ttctcagtttgtttagcatattgag

SEQ ID NO: 64271 - DNA, 25 bp, Artificial
  probe
  misc_feature (1)..(25): SEQ ID NO: 4536; WAN024ARF_at; Start 17; Stop 41
ttattctcagtttgtttagcatatt

SEQ ID NO: 64272 - DNA, 25 bp, Artificial
  probe
  misc_feature (1)..(25): SEQ ID NO: 4536; WAN024ARF_at; Start 22; Stop 46
ctcagtttgtttagcatattgaggt

SEQ ID NO: 64273 - DNA, 25 bp, Artificial
  probe
  misc_feature (1)..(25): SEQ ID NO: 4536; WAN024ARF_at; Start 11; Stop 35
ctgagattattctcagtttgtttag

SEQ ID NO: 64274 - DNA, 25 bp, Artificial
  probe
  misc_feature (1)..(25): SEQ ID NO: 4536; WAN024ARF_at; Start 25; Stop 49
agtttgtttagcatattgaggtgac

SEQ ID NO: 64275 - DNA, 25 bp, Artificial
  probe
  misc_feature (1)..(25): SEQ ID NO: 523; WAN024ARG_at; Start 1; Stop 25
ataaaagaagggcaccatatttgta

SEQ ID NO: 64276 - DNA, 25 bp, Artificial
  probe
  misc_feature (1)..(25): SEQ ID NO: 523; WAN024ARG_at; Start 11; Stop 35
ggcaccatatttgtacccttgcatc

SEQ ID NO: 64277 - DNA, 25 bp, Artificial
  probe
  misc_feature (1)..(25): SEQ ID NO: 523; WAN024ARG_at; Start 18; Stop 42
tatttgtacccttgcatcattcttt

SEQ ID NO: 64278 - DNA, 25 bp, Artificial
  probe
  misc_feature (1)..(25): SEQ ID NO: 523; WAN024ARG_at; Start 6; Stop 30
agaagggcaccatatttgtaccctt

SEQ ID NO: 64279 - DNA, 25 bp, Artificial
  probe
  misc_feature (1)..(25): SEQ ID NO: 523; WAN024ARG_at; Start 20; Stop 44
tttgtacccttgcatcattcttttg

SEQ ID NO: 64280 - DNA, 25 bp, Artificial
  probe
  misc_feature (1)..(25): SEQ ID NO: 523; WAN024ARG_at; Start 16; Stop 40
catatttgtacccttgcatcattct

SEQ ID NO: 64281 - DNA, 25 bp, Artificial
  probe
  misc_feature (1)..(25): SEQ ID NO: 523; WAN024ARG_at; Start 9; Stop 33
agggcaccatatttgtacccttgca

SEQ ID NO: 64282 - DNA, 25 bp, Artificial
  probe
  misc_feature (1)..(25): SEQ ID NO: 523; WAN024ARG_at; Start 13; Stop 37
caccatatttgtacccttgcatcat

SEQ ID NO: 64283 - DNA, 25 bp, Artificial
  probe
  misc_feature (1)..(25): SEQ ID NO: 523; WAN024ARG_at; Start 12; Stop 36
gcaccatatttgtacccttgcatca

SEQ ID NO: 64284 - DNA, 25 bp, Artificial
  probe
  misc_feature (1)..(25): SEQ ID NO: 523; WAN024ARG_at; Start 7; Stop 31
gaagggcaccatatttgtacccttg

SEQ ID NO: 64285 - DNA, 25 bp, Artificial
  probe
  misc_feature (1)..(25): SEQ ID NO: 523; WAN024ARG_at; Start 8; Stop 32
aagggcaccatatttgtacccttgc

SEQ ID NO: 64286 - DNA, 25 bp, Artificial
  probe
  misc_feature (1)..(25): SEQ ID NO: 523; WAN024ARG_at; Start 10; Stop 34
gggcaccatatttgtacccttgcat

SEQ ID NO: 64287 - DNA, 25 bp, Artificial
  probe
  misc_feature (1)..(25): SEQ ID NO: 523; WAN024ARG_at; Start 5; Stop 29
aagaagggcaccatatttgtaccct

SEQ ID NO: 64288 - DNA, 25 bp, Artificial
  probe
  misc_feature (1)..(25): SEQ ID NO: 523; WAN024ARG_at; Start 17; Stop 41
atatttgtacccttgcatcattctt

SEQ ID NO: 64289 - DNA, 25 bp, Artificial
  probe
  misc_feature (1)..(25): SEQ ID NO: 523; WAN024ARG_at; Start 19; Stop 43
atttgtacccttgcatcattctttt

SEQ ID NO: 64290 - DNA, 25 bp, Artificial
  probe
  misc_feature (1)..(25): SEQ ID NO: 523; WAN024ARG_at; Start 14; Stop 38
accatatttgtacccttgcatcatt

SEQ ID NO: 64291 - DNA, 25 bp, Artificial
  probe
  misc_feature (1)..(25): SEQ ID NO: 523; WAN024ARG_at; Start 21; Stop 45
ttgtacccttgcatcattcttttga

SEQ ID NO: 64292 - DNA, 25 bp, Artificial
  probe
  misc_feature (1)..(25): SEQ ID NO: 523; WAN024ARG_at; Start 22; Stop 46
tgtacccttgcatcattcttttgaa

SEQ ID NO: 64293 - DNA, 25 bp, Artificial
  probe
  misc_feature (1)..(25): SEQ ID NO: 523; WAN024ARG_at; Start 2; Stop 26
taaaagaagggcaccatatttgtac

SEQ ID NO: 64294 - DNA, 25 bp, Artificial
  probe
  misc_feature (1)..(25): SEQ ID NO: 523; WAN024ARG_at; Start 15; Stop 39
ccatatttgtacccttgcatcattc

SEQ ID NO: 64295 - DNA, 25 bp, Artificial
  probe
  misc_feature (1)..(25): SEQ ID NO: 523; WAN024ARG_at; Start 23; Stop 47
gtacccttgcatcattcttttgaaa

SEQ ID NO: 64296 - DNA, 25 bp, Artificial
  probe
  misc_feature (1)..(25): SEQ ID NO: 4488; WAN024ARH_at; Start 10; Stop 34
tttcaaaagaatgatgcaagggtac

SEQ ID NO: 64297 - DNA, 25 bp, Artificial
  probe
  misc_feature (1)..(25): SEQ ID NO: 4488; WAN024ARH_at; Start 1; Stop 25
tagaatatttttcaaaagaatgatg

SEQ ID NO: 64298 - DNA, 25 bp, Artificial
  probe
  misc_feature (1)..(25): SEQ ID NO: 4488; WAN024ARH_at; Start 20; Stop 44
atgatgcaagggtacaaatatggtg

SEQ ID NO: 64299 - DNA, 25 bp, Artificial
  probe
  misc_feature (1)..(25): SEQ ID NO: 4488; WAN024ARH_at; Start 16; Stop 40
aagaatgatgcaagggtacaaatat

SEQ ID NO: 64300 - DNA, 25 bp, Artificial
  probe
  misc_feature (1)..(25): SEQ ID NO: 4488; WAN024ARH_at; Start 28; Stop 52
agggtacaaatatggtgcccttctt

SEQ ID NO: 64301 - DNA, 25 bp, Artificial
  probe
  misc_feature (1)..(25): SEQ ID NO: 4488; WAN024ARH_at; Start 13; Stop 37
caaaagaatgatgcaagggtacaaa

SEQ ID NO: 64302 - DNA, 25 bp, Artificial
  probe
  misc_feature (1)..(25): SEQ ID NO: 4488; WAN024ARH_at; Start 5; Stop 29
atatttttcaaaagaatgatgcaag

SEQ ID NO: 64303 - DNA, 25 bp, Artificial
  probe
  misc_feature (1)..(25): SEQ ID NO: 4488; WAN024ARH_at; Start 8; Stop 32
tttttcaaaagaatgatgcaagggt

SEQ ID NO: 64304 - DNA, 25 bp, Artificial
  probe
  misc_feature (1)..(25): SEQ ID NO: 4488; WAN024ARH_at; Start 6; Stop 30
tatttttcaaaagaatgatgcaagg

SEQ ID NO: 64305 - DNA, 25 bp, Artificial
  probe
  misc_feature (1)..(25): SEQ ID NO: 4488; WAN024ARH_at; Start 11; Stop 35
ttcaaaagaatgatgcaagggtaca

SEQ ID NO: 64306 - DNA, 25 bp, Artificial
  probe
  misc_feature (1)..(25): SEQ ID NO: 4488; WAN024ARH_at; Start 31; Stop 55
gtacaaatatggtgcccttctttta

SEQ ID NO: 64307 - DNA, 25 bp, Artificial
  probe
  misc_feature (1)..(25): SEQ ID NO: 4488; WAN024ARH_at; Start 23; Stop 47
atgcaagggtacaaatatggtgccc

SEQ ID NO: 64308 - DNA, 25 bp, Artificial
  probe
  misc_feature (1)..(25): SEQ ID NO: 4488; WAN024ARH_at; Start 22; Stop 46
gatgcaagggtacaaatatggtgcc

SEQ ID NO: 64309 - DNA, 25 bp, Artificial
  probe
  misc_feature (1)..(25): SEQ ID NO: 4488; WAN024ARH_at; Start 25; Stop 49
gcaagggtacaaatatggtgccctt

SEQ ID NO: 64310 - DNA, 25 bp, Artificial
  probe
  misc_feature (1)..(25): SEQ ID NO: 4488; WAN024ARH_at; Start 32; Stop 56
tacaaatatggtgcccttcttttat

SEQ ID NO: 64311 - DNA, 25 bp, Artificial
  probe
  misc_feature (1)..(25): SEQ ID NO: 4488; WAN024ARH_at; Start 19; Stop 43
aatgatgcaagggtacaaatatggt

SEQ ID NO: 64312 - DNA, 25 bp, Artificial
  probe
  misc_feature (1)..(25): SEQ ID NO: 4488; WAN024ARH_at; Start 3; Stop 27
gaatatttttcaaaagaatgatgca

SEQ ID NO: 64313 - DNA, 25 bp, Artificial
  probe
  misc_feature (1)..(25): SEQ ID NO: 4488; WAN024ARH_at; Start 18; Stop 42
gaatgatgcaagggtacaaatatgg

SEQ ID NO: 64314 - DNA, 25 bp, Artificial
  probe
  misc_feature (1)..(25): SEQ ID NO: 4488; WAN024ARH_at; Start 27; Stop 51
aagggtacaaatatggtgcccttct

SEQ ID NO: 64315 - DNA, 25 bp, Artificial
  probe
  misc_feature (1)..(25): SEQ ID NO: 4488; WAN024ARH_at; Start 24; Stop 48
tgcaagggtacaaatatggtgccct

SEQ ID NO: 64316 - DNA, 25 bp, Artificial
  probe
  misc_feature (1)..(25): SEQ ID NO: 4488; WAN024ARH_at; Start 2; Stop 26
agaatatttttcaaaagaatgatgc

SEQ ID NO: 64317 - DNA, 25 bp, Artificial
  probe
  misc_feature (1)..(25): SEQ ID NO: 4488; WAN024ARH_at; Start 14; Stop 38
aaaagaatgatgcaagggtacaaat

SEQ ID NO: 64318 - DNA, 25 bp, Artificial
  probe
  misc_feature (1)..(25): SEQ ID NO: 4488; WAN024ARH_at; Start 4; Stop 28
aatatttttcaaaagaatgatgcaa

SEQ ID NO: 64319 - DNA, 25 bp, Artificial
  probe
  misc_feature (1)..(25): SEQ ID NO: 4488; WAN024ARH_at; Start 26; Stop 50
caagggtacaaatatggtgcccttc

SEQ ID NO: 64320 - DNA, 25 bp, Artificial
  probe
  misc_feature (1)..(25): SEQ ID NO: 4488; WAN024ARH_at; Start 12; Stop 36
tcaaaagaatgatgcaagggtacaa

SEQ ID NO: 64321 - DNA, 25 bp, Artificial
  probe
  misc_feature (1)..(25): SEQ ID NO: 4488; WAN024ARH_at; Start 15; Stop 39
aaagaatgatgcaagggtacaaata

SEQ ID NO: 64322 - DNA, 25 bp, Artificial
  probe
  misc_feature (1)..(25): SEQ ID NO: 4488; WAN024ARH_at; Start 17; Stop 41
agaatgatgcaagggtacaaatatg

SEQ ID NO: 64323 - DNA, 25 bp, Artificial
  probe
  misc_feature (1)..(25): SEQ ID NO: 4488; WAN024ARH_at; Start 21; Stop 45
tgatgcaagggtacaaatatggtgc

SEQ ID NO: 64324 - DNA, 25 bp, Artificial
  probe
  misc_feature (1)..(25): SEQ ID NO: 4488; WAN024ARH_at; Start 9; Stop 33
ttttcaaaagaatgatgcaagggta

SEQ ID NO: 64325 - DNA, 25 bp, Artificial
  probe
  misc_feature (1)..(25): SEQ ID NO: 4488; WAN024ARH_at; Start 7; Stop 31
atttttcaaaagaatgatgcaaggg

SEQ ID NO: 64326 - DNA, 25 bp, Artificial
  probe
  misc_feature (1)..(25): SEQ ID NO: 3517; WAN024ARI_at; Start 148; Stop 172
gattttcaatactttcaaactacaa

SEQ ID NO: 64327 - DNA, 25 bp, Artificial
  probe
  misc_feature (1)..(25): SEQ ID NO: 3517; WAN024ARI_at; Start 109; Stop 133
gaacaatatcttcttgtattctcgt

SEQ ID NO: 64328 - DNA, 25 bp, Artificial
  probe
  misc_feature (1)..(25): SEQ ID NO: 3517; WAN024ARI_at; Start 11; Stop 35
cctgactttgatactcttattataa

SEQ ID NO: 64329 - DNA, 25 bp, Artificial
  probe
  misc_feature (1)..(25): SEQ ID NO: 3517; WAN024ARI_at; Start 136; Stop 160
tgatatctttacgattttcaatact

SEQ ID NO: 64330 - DNA, 25 bp, Artificial
  probe
  misc_feature (1)..(25): SEQ ID NO: 3517; WAN024ARI_at; Start 123; Stop 147
tgtattctcgtaatgatatctttac

SEQ ID NO: 64331 - DNA, 25 bp, Artificial
  probe
  misc_feature (1)..(25): SEQ ID NO: 3517; WAN024ARI_at; Start 165; Stop 189
aactacaaaaactctcacaataatt

SEQ ID NO: 64332 - DNA, 25 bp, Artificial
  probe
  misc_feature (1)..(25): SEQ ID NO: 3517; WAN024ARI_at; Start 108; Stop 132
agaacaatatcttcttgtattctcg

SEQ ID NO: 64333 - DNA, 25 bp, Artificial
  probe
  misc_feature (1)..(25): SEQ ID NO: 3517; WAN024ARI_at; Start 101; Stop 125
tggaaatagaacaatatcttcttgt

SEQ ID NO: 64334 - DNA, 25 bp, Artificial
  probe
  misc_feature (1)..(25): SEQ ID NO: 3517; WAN024ARI_at; Start 161; Stop 185
ttcaaactacaaaaactctcacaat

SEQ ID NO: 64335 - DNA, 25 bp, Artificial
  probe
  misc_feature (1)..(25): SEQ ID NO: 3517; WAN024ARI_at; Start 114; Stop 138
atatcttcttgtattctcgtaatga

SEQ ID NO: 64336 - DNA, 25 bp, Artificial
  probe
  misc_feature (1)..(25): SEQ ID NO: 3517; WAN024ARI_at; Start 110; Stop 134
aacaatatcttcttgtattctcgta

SEQ ID NO: 64337 - DNA, 25 bp, Artificial
  probe
  misc_feature (1)..(25): SEQ ID NO: 3517; WAN024ARI_at; Start 95; Stop 119
ttttaatggaaatagaacaatatct

SEQ ID NO: 64338 - DNA, 25 bp, Artificial
  probe
  misc_feature (1)..(25): SEQ ID NO: 3517; WAN024ARI_at; Start 141; Stop 165
tctttacgattttcaatactttcaa

SEQ ID NO: 64339 - DNA, 25 bp, Artificial
  probe
  misc_feature (1)..(25): SEQ ID NO: 3517; WAN024ARI_at; Start 118; Stop 142
cttcttgtattctcgtaatgatatc

SEQ ID NO: 64340 - DNA, 25 bp, Artificial
  probe
  misc_feature (1)..(25): SEQ ID NO: 3517; WAN024ARI_at; Start 147; Stop 171
cgattttcaatactttcaaactaca

SEQ ID NO: 64341 - DNA, 25 bp, Artificial
  probe
  misc_feature (1)..(25): SEQ ID NO: 3517; WAN024ARI_at; Start 163; Stop 187
caaactacaaaaactctcacaataa

SEQ ID NO: 64342 - DNA, 25 bp, Artificial
  probe
  misc_feature (1)..(25): SEQ ID NO: 3517; WAN024ARI_at; Start 112; Stop 136
caatatcttcttgtattctcgtaat

SEQ ID NO: 64343 - DNA, 25 bp, Artificial
  probe
  misc_feature (1)..(25): SEQ ID NO: 3517; WAN024ARI_at; Start 8; Stop 32
cctcctgactttgatactcttatta

SEQ ID NO: 64344 - DNA, 25 bp, Artificial
  probe
  misc_feature (1)..(25): SEQ ID NO: 3517; WAN024ARI_at; Start 7; Stop 31
tcctcctgactttgatactcttatt

SEQ ID NO: 64345 - DNA, 25 bp, Artificial
  probe
  misc_feature (1)..(25): SEQ ID NO: 3517; WAN024ARI_at; Start 102; Stop 126
ggaaatagaacaatatcttcttgta

SEQ ID NO: 64346 - DNA, 25 bp, Artificial
  probe
  misc_feature (1)..(25): SEQ ID NO: 3517; WAN024ARI_at; Start 159; Stop 183
ctttcaaactacaaaaactctcaca

SEQ ID NO: 64347 - DNA, 25 bp, Artificial
  probe
  misc_feature (1)..(25): SEQ ID NO: 3517; WAN024ARI_at; Start 98; Stop 122
taatggaaatagaacaatatcttct

SEQ ID NO: 64348 - DNA, 25 bp, Artificial
  probe
  misc_feature (1)..(25): SEQ ID NO: 3517; WAN024ARI_at; Start 14; Stop 38
gactttgatactcttattataaacc

SEQ ID NO: 64349 - DNA, 25 bp, Artificial
  probe
  misc_feature (1)..(25): SEQ ID NO: 3517; WAN024ARI_at; Start 6; Stop 30
ttcctcctgactttgatactcttat

SEQ ID NO: 64350 - DNA, 25 bp, Artificial
  probe
  misc_feature (1)..(25): SEQ ID NO: 3517; WAN024ARI_at; Start 125; Stop 149
tattctcgtaatgatatctttacga

SEQ ID NO: 64351 - DNA, 25 bp, Artificial
  probe
  misc_feature (1)..(25): SEQ ID NO: 3517; WAN024ARI_at; Start 131; Stop 155
cgtaatgatatctttacgattttca

SEQ ID NO: 64352 - DNA, 25 bp, Artificial
  probe
  misc_feature (1)..(25): SEQ ID NO: 3517; WAN024ARI_at; Start 58; Stop 82
cgcattctttttccttattgttaag

SEQ ID NO: 64353 - DNA, 25 bp, Artificial
  probe
  misc_feature (1)..(25): SEQ ID NO: 3517; WAN024ARI_at; Start 3; Stop 27
tttttcctcctgactttgatactct

SEQ ID NO: 64354 - DNA, 25 bp, Artificial
  probe
  misc_feature (1)..(25): SEQ ID NO: 3517; WAN024ARI_at; Start 157; Stop 181
tactttcaaactacaaaaactctca

SEQ ID NO: 64355 - DNA, 25 bp, Artificial
  probe
  misc_feature (1)..(25): SEQ ID NO: 3517; WAN024ARI_at; Start 1; Stop 25
cttttttcctcctgactttgatact

SEQ ID NO: 64356 - DNA, 25 bp, Artificial
  probe
  misc_feature (1)..(25): SEQ ID NO: 3517; WAN024ARI_at; Start 97; Stop 121
ttaatggaaatagaacaatatcttc

SEQ ID NO: 64357 - DNA, 25 bp, Artificial
  probe
  misc_feature (1)..(25): SEQ ID NO: 3517; WAN024ARI_at; Start 5; Stop 29
tttcctcctgactttgatactctta

SEQ ID NO: 64358 - DNA, 25 bp, Artificial
  probe
  misc_feature (1)..(25): SEQ ID NO: 3517; WAN024ARI_at; Start 19; Stop 43
tgatactcttattataaaccttaaa

SEQ ID NO: 64359 - DNA, 25 bp, Artificial
  probe
  misc_feature (1)..(25): SEQ ID NO: 3517; WAN024ARI_at; Start 120; Stop 144
tcttgtattctcgtaatgatatctt

SEQ ID NO: 64360 - DNA, 25 bp, Artificial
  probe
  misc_feature (1)..(25): SEQ ID NO: 296; WAN024ARJ_at; Start 56; Stop 80
tacgagaatacaagaagatattgtt

SEQ ID NO: 64361 - DNA, 25 bp, Artificial
  probe
  misc_feature (1)..(25): SEQ ID NO: 296; WAN024ARJ_at; Start 54; Stop 78
attacgagaatacaagaagatattg

SEQ ID NO: 64362 - DNA, 25 bp, Artificial
  probe
  misc_feature (1)..(25): SEQ ID NO: 296; WAN024ARJ_at; Start 38; Stop 62
aaatcgtaaagatatcattacgaga

SEQ ID NO: 64363 - DNA, 25 bp, Artificial
  probe
  misc_feature (1)..(25): SEQ ID NO: 296; WAN024ARJ_at; Start 156; Stop 180
tataataagagtatcaaagtcagga

SEQ ID NO: 64364 - DNA, 25 bp, Artificial
  probe
  misc_feature (1)..(25): SEQ ID NO: 296; WAN024ARJ_at; Start 158; Stop 182
taataagagtatcaaagtcaggagg

SEQ ID NO: 64365 - DNA, 25 bp, Artificial
  probe
  misc_feature (1)..(25): SEQ ID NO: 296; WAN024ARJ_at; Start 7; Stop 31
tgtgagagtttttgtagtttgaaag

SEQ ID NO: 64366 - DNA, 25 bp, Artificial
  probe
  misc_feature (1)..(25): SEQ ID NO: 296; WAN024ARJ_at; Start 160; Stop 184
ataagagtatcaaagtcaggaggaa

SEQ ID NO: 64367 - DNA, 25 bp, Artificial
  probe
  misc_feature (1)..(25): SEQ ID NO: 296; WAN024ARJ_at; Start 66; Stop 90
caagaagatattgttctatttccat

SEQ ID NO: 64368 - DNA, 25 bp, Artificial
  probe
  misc_feature (1)..(25): SEQ ID NO: 296; WAN024ARJ_at; Start 159; Stop 183
aataagagtatcaaagtcaggagga

SEQ ID NO: 64369 - DNA, 25 bp, Artificial
  probe
  misc_feature (1)..(25): SEQ ID NO: 296; WAN024ARJ_at; Start 161; Stop 185
taagagtatcaaagtcaggaggaaa

SEQ ID NO: 64370 - DNA, 25 bp, Artificial
  probe
  misc_feature (1)..(25): SEQ ID NO: 296; WAN024ARJ_at; Start 44; Stop 68
taaagatatcattacgagaatacaa

SEQ ID NO: 64371 - DNA, 25 bp, Artificial
  probe
  misc_feature (1)..(25): SEQ ID NO: 296; WAN024ARJ_at; Start 59; Stop 83
gagaatacaagaagatattgttcta

SEQ ID NO: 64372 - DNA, 25 bp, Artificial
  probe
  misc_feature (1)..(25): SEQ ID NO: 296; WAN024ARJ_at; Start 57; Stop 81
acgagaatacaagaagatattgttc

SEQ ID NO: 64373 - DNA, 25 bp, Artificial
  probe
  misc_feature (1)..(25): SEQ ID NO: 296; WAN024ARJ_at; Start 69; Stop 93
gaagatattgttctatttccattaa

SEQ ID NO: 64374 - DNA, 25 bp, Artificial
  probe
  misc_feature (1)..(25): SEQ ID NO: 296; WAN024ARJ_at; Start 72; Stop 96
gatattgttctatttccattaaaaa

SEQ ID NO: 64375 - DNA, 25 bp, Artificial
  probe
  misc_feature (1)..(25): SEQ ID NO: 296; WAN024ARJ_at; Start 164; Stop 188
gagtatcaaagtcaggaggaaaaaa

SEQ ID NO: 64376 - DNA, 25 bp, Artificial
  probe
  misc_feature (1)..(25): SEQ ID NO: 296; WAN024ARJ_at; Start 162; Stop 186
aagagtatcaaagtcaggaggaaaa

SEQ ID NO: 64377 - DNA, 25 bp, Artificial
  probe
  misc_feature (1)..(25): SEQ ID NO: 296; WAN024ARJ_at; Start 155; Stop 179
ttataataagagtatcaaagtcagg

SEQ ID NO: 64378 - DNA, 25 bp, Artificial
  probe
  misc_feature (1)..(25): SEQ ID NO: 296; WAN024ARJ_at; Start 48; Stop 72
gatatcattacgagaatacaagaag

SEQ ID NO: 64379 - DNA, 25 bp, Artificial
  probe
  misc_feature (1)..(25): SEQ ID NO: 296; WAN024ARJ_at; Start 50; Stop 74
tatcattacgagaatacaagaagat

SEQ ID NO: 64380 - DNA, 25 bp, Artificial
  probe
  misc_feature (1)..(25): SEQ ID NO: 296; WAN024ARJ_at; Start 64; Stop 88
tacaagaagatattgttctatttcc

SEQ ID NO: 64381 - DNA, 25 bp, Artificial
  probe
  misc_feature (1)..(25): SEQ ID NO: 296; WAN024ARJ_at; Start 152; Stop 176
ggtttataataagagtatcaaagtc

SEQ ID NO: 64382 - DNA, 25 bp, Artificial
  probe
  misc_feature (1)..(25): SEQ ID NO: 296; WAN024ARJ_at; Start 35; Stop 59
tgaaaatcgtaaagatatcattacg

SEQ ID NO: 64383 - DNA, 25 bp, Artificial
  probe
  misc_feature (1)..(25): SEQ ID NO: 296; WAN024ARJ_at; Start 108; Stop 132
cttaacaataaggaaaaagaatgcg

SEQ ID NO: 64384 - DNA, 25 bp, Artificial
  probe
  misc_feature (1)..(25): SEQ ID NO: 296; WAN024ARJ_at; Start 46; Stop 70
aagatatcattacgagaatacaaga

SEQ ID NO: 64385 - DNA, 25 bp, Artificial
  probe
  misc_feature (1)..(25): SEQ ID NO: 296; WAN024ARJ_at; Start 58; Stop 82
cgagaatacaagaagatattgttct

SEQ ID NO: 64386 - DNA, 25 bp, Artificial
  probe
  misc_feature (1)..(25): SEQ ID NO: 296; WAN024ARJ_at; Start 52; Stop 76
tcattacgagaatacaagaagatat

SEQ ID NO: 64387 - DNA, 25 bp, Artificial
  probe
  misc_feature (1)..(25): SEQ ID NO: 296; WAN024ARJ_at; Start 4; Stop 28
tattgtgagagtttttgtagtttga

SEQ ID NO: 64388 - DNA, 25 bp, Artificial
  probe
  misc_feature (1)..(25): SEQ ID NO: 296; WAN024ARJ_at; Start 53; Stop 77
cattacgagaatacaagaagatatt

SEQ ID NO: 64389 - DNA, 25 bp, Artificial
  probe
  misc_feature (1)..(25): SEQ ID NO: 296; WAN024ARJ_at; Start 9; Stop 33
tgagagtttttgtagtttgaaagta

SEQ ID NO: 64390 - DNA, 25 bp, Artificial
  probe
  misc_feature (1)..(25): SEQ ID NO: 296; WAN024ARJ_at; Start 42; Stop 66
cgtaaagatatcattacgagaatac

SEQ ID NO: 64391 - DNA, 25 bp, Artificial
  probe
  misc_feature (1)..(25): SEQ ID NO: 296; WAN024ARJ_at; Start 45; Stop 69
aaagatatcattacgagaatacaag

SEQ ID NO: 64392 - DNA, 25 bp, Artificial
  probe
  misc_feature (1)..(25): SEQ ID NO: 296; WAN024ARJ_at; Start 30; Stop 54
agtattgaaaatcgtaaagatatca

SEQ ID NO: 64393 - DNA, 25 bp, Artificial
  probe
  misc_feature (1)..(25): SEQ ID NO: 296; WAN024ARJ_at; Start 163; Stop 187
agagtatcaaagtcaggaggaaaaa

SEQ ID NO: 64394 - DNA, 25 bp, Artificial
  probe
  misc_feature (1)..(25): SEQ ID NO: 4591; WAN024ARK_at; Start 106; Stop 130
cttatctgaaaacacactagaaagg

SEQ ID NO: 64395 - DNA, 25 bp, Artificial
  probe
  misc_feature (1)..(25): SEQ ID NO: 4591; WAN024ARK_at; Start 103; Stop 127
catcttatctgaaaacacactagaa

SEQ ID NO: 64396 - DNA, 25 bp, Artificial
  probe
  misc_feature (1)..(25): SEQ ID NO: 4591; WAN024ARK_at; Start 86; Stop 110
tctgttataatagaagacatcttat

SEQ ID NO: 64397 - DNA, 25 bp, Artificial
  probe
  misc_feature (1)..(25): SEQ ID NO: 4591; WAN024ARK_at; Start 77; Stop 101
tgcctgctttctgttataatagaag

SEQ ID NO: 64398 - DNA, 25 bp, Artificial
  probe
  misc_feature (1)..(25): SEQ ID NO: 4591; WAN024ARK_at; Start 79; Stop 103
cctgctttctgttataatagaagac

SEQ ID NO: 64399 - DNA, 25 bp, Artificial
  probe
  misc_feature (1)..(25): SEQ ID NO: 4591; WAN024ARK_at; Start 89; Stop 113
gttataatagaagacatcttatctg

SEQ ID NO: 64400 - DNA, 25 bp, Artificial
  probe
  misc_feature (1)..(25): SEQ ID NO: 4591; WAN024ARK_at; Start 80; Stop 104
ctgctttctgttataatagaagaca

SEQ ID NO: 64401 - DNA, 25 bp, Artificial
  probe
  misc_feature (1)..(25): SEQ ID NO: 4591; WAN024ARK_at; Start 68; Stop 92
ctgcttttctgcctgctttctgtta

SEQ ID NO: 64402 - DNA, 25 bp, Artificial
  probe
  misc_feature (1)..(25): SEQ ID NO: 4591; WAN024ARK_at; Start 96; Stop 120
tagaagacatcttatctgaaaacac

SEQ ID NO: 64403 - DNA, 25 bp, Artificial
  probe
  misc_feature (1)..(25): SEQ ID NO: 4591; WAN024ARK_at; Start 109; Stop 133
atctgaaaacacactagaaaggtcc

SEQ ID NO: 64404 - DNA, 25 bp, Artificial
  probe
  misc_feature (1)..(25): SEQ ID NO: 4591; WAN024ARK_at; Start 47; Stop 71
atttcattttttgtttggaatctgc

SEQ ID NO: 64405 - DNA, 25 bp, Artificial
  probe
  misc_feature (1)..(25): SEQ ID NO: 4591; WAN024ARK_at; Start 101; Stop 125
gacatcttatctgaaaacacactag

SEQ ID NO: 64406 - DNA, 25 bp, Artificial
  probe
  misc_feature (1)..(25): SEQ ID NO: 4591; WAN024ARK_at; Start 66; Stop 90
atctgcttttctgcctgctttctgt

SEQ ID NO: 64407 - DNA, 25 bp, Artificial
  probe
  misc_feature (1)..(25): SEQ ID NO: 4591; WAN024ARK_at; Start 107; Stop 131
ttatctgaaaacacactagaaaggt

SEQ ID NO: 64408 - DNA, 25 bp, Artificial
  probe
  misc_feature (1)..(25): SEQ ID NO: 4591; WAN024ARK_at; Start 63; Stop 87
ggaatctgcttttctgcctgctttc

SEQ ID NO: 64409 - DNA, 25 bp, Artificial
  probe
  misc_feature (1)..(25): SEQ ID NO: 4591; WAN024ARK_at; Start 70; Stop 94
gcttttctgcctgctttctgttata

SEQ ID NO: 64410 - DNA, 25 bp, Artificial
  probe
  misc_feature (1)..(25): SEQ ID NO: 4591; WAN024ARK_at; Start 65; Stop 89
aatctgcttttctgcctgctttctg

SEQ ID NO: 64411 - DNA, 25 bp, Artificial
  probe
  misc_feature (1)..(25): SEQ ID NO: 4591; WAN024ARK_at; Start 64; Stop 88
gaatctgcttttctgcctgctttct

SEQ ID NO: 64412 - DNA, 25 bp, Artificial
  probe
  misc_feature (1)..(25): SEQ ID NO: 4591; WAN024ARK_at; Start 23; Stop 47
tgatttgtttaagaaattaatccaa

SEQ ID NO: 64413 - DNA, 25 bp, Artificial
  probe
  misc_feature (1)..(25): SEQ ID NO: 4591; WAN024ARK_at; Start 75; Stop 99
tctgcctgctttctgttataataga

SEQ ID NO: 64414 - DNA, 25 bp, Artificial
  probe
  misc_feature (1)..(25): SEQ ID NO: 4591; WAN024ARK_at; Start 105; Stop 129
tcttatctgaaaacacactagaaag

SEQ ID NO: 64415 - DNA, 25 bp, Artificial
  probe
  misc_feature (1)..(25): SEQ ID NO: 4591; WAN024ARK_at; Start 74; Stop 98
ttctgcctgctttctgttataatag

SEQ ID NO: 64416 - DNA, 25 bp, Artificial
  probe
  misc_feature (1)..(25): SEQ ID NO: 4591; WAN024ARK_at; Start 10; Stop 34
caatgtctttgtttgatttgtttaa

SEQ ID NO: 64417 - DNA, 25 bp, Artificial
  probe
  misc_feature (1)..(25): SEQ ID NO: 4591; WAN024ARK_at; Start 99; Stop 123
aagacatcttatctgaaaacacact

SEQ ID NO: 64418 - DNA, 25 bp, Artificial
  probe
  misc_feature (1)..(25): SEQ ID NO: 4591; WAN024ARK_at; Start 102; Stop 126
acatcttatctgaaaacacactaga

SEQ ID NO: 64419 - DNA, 25 bp, Artificial
  probe
  misc_feature (1)..(25): SEQ ID NO: 4591; WAN024ARK_at; Start 2; Stop 26
cactttttcaatgtctttgtttgat

SEQ ID NO: 64420 - DNA, 25 bp, Artificial
  probe
  misc_feature (1)..(25): SEQ ID NO: 4591; WAN024ARK_at; Start 98; Stop 122
gaagacatcttatctgaaaacacac

SEQ ID NO: 64421 - DNA, 25 bp, Artificial
  probe
  misc_feature (1)..(25): SEQ ID NO: 4591; WAN024ARK_at; Start 108; Stop 132
tatctgaaaacacactagaaaggtc

SEQ ID NO: 64422 - DNA, 25 bp, Artificial
  probe
  misc_feature (1)..(25): SEQ ID NO: 4591; WAN024ARK_at; Start 111; Stop 135
ctgaaaacacactagaaaggtccat

SEQ ID NO: 64423 - DNA, 25 bp, Artificial
  probe
  misc_feature (1)..(25): SEQ ID NO: 4591; WAN024ARK_at; Start 28; Stop 52
tgtttaagaaattaatccaatttca

SEQ ID NO: 64424 - DNA, 25 bp, Artificial
  probe
  misc_feature (1)..(25): SEQ ID NO: 4591; WAN024ARK_at; Start 78; Stop 102
gcctgctttctgttataatagaaga

SEQ ID NO: 64425 - DNA, 25 bp, Artificial
  probe
  misc_feature (1)..(25): SEQ ID NO: 4591; WAN024ARK_at; Start 82; Stop 106
gctttctgttataatagaagacatc

SEQ ID NO: 64426 - DNA, 25 bp, Artificial
  probe
  misc_feature (1)..(25): SEQ ID NO: 4591; WAN024ARK_at; Start 62; Stop 86
tggaatctgcttttctgcctgcttt

SEQ ID NO: 64427 - DNA, 25 bp, Artificial
  probe
  misc_feature (1)..(25): SEQ ID NO: 4591; WAN024ARK_at; Start 110; Stop 134
tctgaaaacacactagaaaggtcca

SEQ ID NO: 64428 - DNA, 25 bp, Artificial
  probe
  misc_feature (1)..(25): SEQ ID NO: 2256; WAN024ARL_at; Start 3; Stop 27
ggacctttctagtgtgttttcagat

SEQ ID NO: 64429 - DNA, 25 bp, Artificial
  probe
  misc_feature (1)..(25): SEQ ID NO: 2256; WAN024ARL_at; Start 30; Stop 54
gatgtcttctattataacagaaagc

SEQ ID NO: 64430 - DNA, 25 bp, Artificial
  probe
  misc_feature (1)..(25): SEQ ID NO: 2256; WAN024ARL_at; Start 1; Stop 25
atggacctttctagtgtgttttcag

SEQ ID NO: 64431 - DNA, 25 bp, Artificial
  probe
  misc_feature (1)..(25): SEQ ID NO: 2256; WAN024ARL_at; Start 25; Stop 49
gataagatgtcttctattataacag

SEQ ID NO: 64432 - DNA, 25 bp, Artificial
  probe
  misc_feature (1)..(25): SEQ ID NO: 2256; WAN024ARL_at; Start 37; Stop 61
tctattataacagaaagcaggcaga

SEQ ID NO: 64433 - DNA, 25 bp, Artificial
  probe
  misc_feature (1)..(25): SEQ ID NO: 2256; WAN024ARL_at; Start 111; Stop 135
tcaaacaaagacattgaaaaagtga

SEQ ID NO: 64434 - DNA, 25 bp, Artificial
  probe
  misc_feature (1)..(25): SEQ ID NO: 2256; WAN024ARL_at; Start 14; Stop 38
gtgtgttttcagataagatgtcttc

SEQ ID NO: 64435 - DNA, 25 bp, Artificial
  probe
  misc_feature (1)..(25): SEQ ID NO: 2256; WAN024ARL_at; Start 58; Stop 82
cagaaaagcagattccaaacaaaaa

SEQ ID NO: 64436 - DNA, 25 bp, Artificial
  probe
  misc_feature (1)..(25): SEQ ID NO: 2256; WAN024ARL_at; Start 47; Stop 71
cagaaagcaggcagaaaagcagatt

SEQ ID NO: 64437 - DNA, 25 bp, Artificial
  probe
  misc_feature (1)..(25): SEQ ID NO: 2256; WAN024ARL_at; Start 52; Stop 76
agcaggcagaaaagcagattccaaa

SEQ ID NO: 64438 - DNA, 25 bp, Artificial
  probe
  misc_feature (1)..(25): SEQ ID NO: 2256; WAN024ARL_at; Start 39; Stop 63
tattataacagaaagcaggcagaaa

SEQ ID NO: 64439 - DNA, 25 bp, Artificial
  probe
  misc_feature (1)..(25): SEQ ID NO: 2256; WAN024ARL_at; Start 35; Stop 59
cttctattataacagaaagcaggca

SEQ ID NO: 64440 - DNA, 25 bp, Artificial
  probe
  misc_feature (1)..(25): SEQ ID NO: 2256; WAN024ARL_at; Start 46; Stop 70
acagaaagcaggcagaaaagcagat

SEQ ID NO: 64441 - DNA, 25 bp, Artificial
  probe
  misc_feature (1)..(25): SEQ ID NO: 2256; WAN024ARL_at; Start 50; Stop 74
aaagcaggcagaaaagcagattcca

SEQ ID NO: 64442 - DNA, 25 bp, Artificial
  probe
  misc_feature (1)..(25): SEQ ID NO: 2256; WAN024ARL_at; Start 57; Stop 81
gcagaaaagcagattccaaacaaaa

SEQ ID NO: 64443 - DNA, 25 bp, Artificial
  probe
  misc_feature (1)..(25): SEQ ID NO: 2256; WAN024ARL_at; Start 11; Stop 35
ctagtgtgttttcagataagatgtc

SEQ ID NO: 64444 - DNA, 25 bp, Artificial
  probe
  misc_feature (1)..(25): SEQ ID NO: 2256; WAN024ARL_at; Start 62; Stop 86
aaagcagattccaaacaaaaaatga

SEQ ID NO: 64445 - DNA, 25 bp, Artificial
  probe
  misc_feature (1)..(25): SEQ ID NO: 2256; WAN024ARL_at; Start 51; Stop 75
aagcaggcagaaaagcagattccaa

SEQ ID NO: 64446 - DNA, 25 bp, Artificial
  probe
  misc_feature (1)..(25): SEQ ID NO: 2256; WAN024ARL_at; Start 67; Stop 91
agattccaaacaaaaaatgaaattg

SEQ ID NO: 64447 - DNA, 25 bp, Artificial
  probe
  misc_feature (1)..(25): SEQ ID NO: 2256; WAN024ARL_at; Start 38; Stop 62
ctattataacagaaagcaggcagaa

SEQ ID NO: 64448 - DNA, 25 bp, Artificial
  probe
  misc_feature (1)..(25): SEQ ID NO: 2256; WAN024ARL_at; Start 34; Stop 58
tcttctattataacagaaagcaggc

SEQ ID NO: 64449 - DNA, 25 bp, Artificial
  probe
  misc_feature (1)..(25): SEQ ID NO: 2256; WAN024ARL_at; Start 4; Stop 28
gacctttctagtgtgttttcagata

SEQ ID NO: 64450 - DNA, 25 bp, Artificial
  probe
  misc_feature (1)..(25): SEQ ID NO: 2256; WAN024ARL_at; Start 90; Stop 114
tggattaatttcttaaacaaatcaa

SEQ ID NO: 64451 - DNA, 25 bp, Artificial
  probe
  misc_feature (1)..(25): SEQ ID NO: 2256; WAN024ARL_at; Start 44; Stop 68
taacagaaagcaggcagaaaagcag

SEQ ID NO: 64452 - DNA, 25 bp, Artificial
  probe
  misc_feature (1)..(25): SEQ ID NO: 2256; WAN024ARL_at; Start 16; Stop 40
gtgttttcagataagatgtcttcta

SEQ ID NO: 64453 - DNA, 25 bp, Artificial
  probe
  misc_feature (1)..(25): SEQ ID NO: 2256; WAN024ARL_at; Start 53; Stop 77
gcaggcagaaaagcagattccaaac

SEQ ID NO: 64454 - DNA, 25 bp, Artificial
  probe
  misc_feature (1)..(25): SEQ ID NO: 2256; WAN024ARL_at; Start 102; Stop 126
ttaaacaaatcaaacaaagacattg

SEQ ID NO: 64455 - DNA, 25 bp, Artificial
  probe
  misc_feature (1)..(25): SEQ ID NO: 2256; WAN024ARL_at; Start 54; Stop 78
caggcagaaaagcagattccaaaca

SEQ ID NO: 64456 - DNA, 25 bp, Artificial
  probe
  misc_feature (1)..(25): SEQ ID NO: 2256; WAN024ARL_at; Start 42; Stop 66
tataacagaaagcaggcagaaaagc

SEQ ID NO: 64457 - DNA, 25 bp, Artificial
  probe
  misc_feature (1)..(25): SEQ ID NO: 2256; WAN024ARL_at; Start 6; Stop 30
cctttctagtgtgttttcagataag

SEQ ID NO: 64458 - DNA, 25 bp, Artificial
  probe
  misc_feature (1)..(25): SEQ ID NO: 2256; WAN024ARL_at; Start 65; Stop 89
gcagattccaaacaaaaaatgaaat

SEQ ID NO: 64459 - DNA, 25 bp, Artificial
  probe
  misc_feature (1)..(25): SEQ ID NO: 2256; WAN024ARL_at; Start 56; Stop 80
ggcagaaaagcagattccaaacaaa

SEQ ID NO: 64460 - DNA, 25 bp, Artificial
  probe
  misc_feature (1)..(25): SEQ ID NO: 2256; WAN024ARL_at; Start 49; Stop 73
gaaagcaggcagaaaagcagattcc

SEQ ID NO: 64461 - DNA, 25 bp, Artificial
  probe
  misc_feature (1)..(25): SEQ ID NO: 2256; WAN024ARL_at; Start 36; Stop 60
ttctattataacagaaagcaggcag

SEQ ID NO: 64462 - DNA, 25 bp, Artificial
  probe
  misc_feature (1)..(25): SEQ ID NO: 4644; WAN024ARM_at; Start 136; Stop 160
gataaatagttgctttttttatgaa

SEQ ID NO: 64463 - DNA, 25 bp, Artificial
  probe
  misc_feature (1)..(25): SEQ ID NO: 4644; WAN024ARM_at; Start 83; Stop 107
ctcaaaaactcaacatatcaacata

SEQ ID NO: 64464 - DNA, 25 bp, Artificial
  probe
  misc_feature (1)..(25): SEQ ID NO: 4644; WAN024ARM_at; Start 135; Stop 159
tgataaatagttgctttttttatga

SEQ ID NO: 64465 - DNA, 25 bp, Artificial
  probe
  misc_feature (1)..(25): SEQ ID NO: 4623; WAN024ARN_at; Start 76; Stop 100
gcaactatttatcataaaaaattaa

SEQ ID NO: 64466 - DNA, 25 bp, Artificial
  probe
  misc_feature (1)..(25): SEQ ID NO: 4623; WAN024ARN_at; Start 64; Stop 88
ttcataaaaaaagcaactatttatc

SEQ ID NO: 64467 - DNA, 25 bp, Artificial
  probe
  misc_feature (1)..(25): SEQ ID NO: 4623; WAN024ARN_at; Start 74; Stop 98
aagcaactatttatcataaaaaatt

SEQ ID NO: 64468 - DNA, 25 bp, Artificial
  probe
  misc_feature (1)..(25): SEQ ID NO: 4623; WAN024ARN_at; Start 117; Stop 141
tatgttgatatgttgagtttttgag

SEQ ID NO: 64469 - DNA, 25 bp, Artificial
  probe
  misc_feature (1)..(25): SEQ ID NO: 4623; WAN024ARN_at; Start 68; Stop 92
taaaaaaagcaactatttatcataa

SEQ ID NO: 64470 - DNA, 25 bp, Artificial
  probe
  misc_feature (1)..(25): SEQ ID NO: 4623; WAN024ARN_at; Start 66; Stop 90
cataaaaaaagcaactatttatcat

SEQ ID NO: 64471 - DNA, 25 bp, Artificial
  probe
  misc_feature (1)..(25): SEQ ID NO: 4623; WAN024ARN_at; Start 73; Stop 97
aaagcaactatttatcataaaaaat

SEQ ID NO: 64472 - DNA, 25 bp, Artificial
  probe
  misc_feature (1)..(25): SEQ ID NO: 4623; WAN024ARN_at; Start 75; Stop 99
agcaactatttatcataaaaaatta

SEQ ID NO: 64473 - DNA, 25 bp, Artificial
  probe
  misc_feature (1)..(25): SEQ ID NO: 4623; WAN024ARN_at; Start 65; Stop 89
tcataaaaaaagcaactatttatca

SEQ ID NO: 64474 - DNA, 25 bp, Artificial
  probe
  misc_feature (1)..(25): SEQ ID NO: 4582; WAN024ARO_at; Start 21; Stop 45
caggttctaaaatctgattcctttt

SEQ ID NO: 64475 - DNA, 25 bp, Artificial
  probe
  misc_feature (1)..(25): SEQ ID NO: 4582; WAN024ARO_at; Start 29; Stop 53
aaaatctgattccttttttctatgc

SEQ ID NO: 64476 - DNA, 25 bp, Artificial
  probe
  misc_feature (1)..(25): SEQ ID NO: 4582; WAN024ARO_at; Start 27; Stop 51
ctaaaatctgattccttttttctat

SEQ ID NO: 64477 - DNA, 25 bp, Artificial
  probe
  misc_feature (1)..(25): SEQ ID NO: 4582; WAN024ARO_at; Start 30; Stop 54
aaatctgattccttttttctatgct

SEQ ID NO: 64478 - DNA, 25 bp, Artificial
  probe
  misc_feature (1)..(25): SEQ ID NO: 4582; WAN024ARO_at; Start 15; Stop 39
aggaaccaggttctaaaatctgatt

SEQ ID NO: 64479 - DNA, 25 bp, Artificial
  probe
  misc_feature (1)..(25): SEQ ID NO: 4582; WAN024ARO_at; Start 17; Stop 41
gaaccaggttctaaaatctgattcc

SEQ ID NO: 64480 - DNA, 25 bp, Artificial
  probe
  misc_feature (1)..(25): SEQ ID NO: 4582; WAN024ARO_at; Start 14; Stop 38
aaggaaccaggttctaaaatctgat

SEQ ID NO: 64481 - DNA, 25 bp, Artificial
  probe
  misc_feature (1)..(25): SEQ ID NO: 4582; WAN024ARO_at; Start 28; Stop 52
taaaatctgattccttttttctatg

SEQ ID NO: 64482 - DNA, 25 bp, Artificial
  probe
  misc_feature (1)..(25): SEQ ID NO: 4582; WAN024ARO_at; Start 18; Stop 42
aaccaggttctaaaatctgattcct

SEQ ID NO: 64483 - DNA, 25 bp, Artificial
  probe
  misc_feature (1)..(25): SEQ ID NO: 4582; WAN024ARO_at; Start 31; Stop 55
aatctgattccttttttctatgctt

SEQ ID NO: 64484 - DNA, 25 bp, Artificial
  probe
  misc_feature (1)..(25): SEQ ID NO: 4582; WAN024ARO_at; Start 16; Stop 40
ggaaccaggttctaaaatctgattc

SEQ ID NO: 64485 - DNA, 25 bp, Artificial
  probe
  misc_feature (1)..(25): SEQ ID NO: 4582; WAN024ARO_at; Start 20; Stop 44
ccaggttctaaaatctgattccttt

SEQ ID NO: 64486 - DNA, 25 bp, Artificial
  probe
  misc_feature (1)..(25): SEQ ID NO: 4582; WAN024ARO_at; Start 19; Stop 43
accaggttctaaaatctgattcctt

SEQ ID NO: 64487 - DNA, 25 bp, Artificial
  probe
  misc_feature (1)..(25): SEQ ID NO: 4582; WAN024ARO_at; Start 26; Stop 50
tctaaaatctgattccttttttcta

SEQ ID NO: 64488 - DNA, 25 bp, Artificial
  probe
  misc_feature (1)..(25): SEQ ID NO: 231; WAN024ARP_at; Start 5; Stop 29
atagaaaaaaggaatcagattttag

SEQ ID NO: 64489 - DNA, 25 bp, Artificial
  probe
  misc_feature (1)..(25): SEQ ID NO: 231; WAN024ARP_at; Start 12; Stop 36
aaaggaatcagattttagaacctgg

SEQ ID NO: 64490 - DNA, 25 bp, Artificial
  probe
  misc_feature (1)..(25): SEQ ID NO: 231; WAN024ARP_at; Start 13; Stop 37
aaggaatcagattttagaacctggt

SEQ ID NO: 64491 - DNA, 25 bp, Artificial
  probe
  misc_feature (1)..(25): SEQ ID NO: 231; WAN024ARP_at; Start 16; Stop 40
gaatcagattttagaacctggttcc

SEQ ID NO: 64492 - DNA, 25 bp, Artificial
  probe
  misc_feature (1)..(25): SEQ ID NO: 231; WAN024ARP_at; Start 2; Stop 26
agcatagaaaaaaggaatcagattt

SEQ ID NO: 64493 - DNA, 25 bp, Artificial
  probe
  misc_feature (1)..(25): SEQ ID NO: 231; WAN024ARP_at; Start 1; Stop 25
aagcatagaaaaaaggaatcagatt

SEQ ID NO: 64494 - DNA, 25 bp, Artificial
  probe
  misc_feature (1)..(25): SEQ ID NO: 231; WAN024ARP_at; Start 4; Stop 28
catagaaaaaaggaatcagatttta

SEQ ID NO: 64495 - DNA, 25 bp, Artificial
  probe
  misc_feature (1)..(25): SEQ ID NO: 231; WAN024ARP_at; Start 15; Stop 39
ggaatcagattttagaacctggttc

SEQ ID NO: 64496 - DNA, 25 bp, Artificial
  probe
  misc_feature (1)..(25): SEQ ID NO: 231; WAN024ARP_at; Start 6; Stop 30
tagaaaaaaggaatcagattttaga

SEQ ID NO: 64497 - DNA, 25 bp, Artificial
  probe
  misc_feature (1)..(25): SEQ ID NO: 231; WAN024ARP_at; Start 3; Stop 27
gcatagaaaaaaggaatcagatttt

SEQ ID NO: 64498 - DNA, 25 bp, Artificial
  probe
  misc_feature (1)..(25): SEQ ID NO: 231; WAN024ARP_at; Start 14; Stop 38
aggaatcagattttagaacctggtt

SEQ ID NO: 64499 - DNA, 25 bp, Artificial
  probe
  misc_feature (1)..(25): SEQ ID NO: 231; WAN024ARP_at; Start 18; Stop 42
atcagattttagaacctggttcctt

SEQ ID NO: 64500 - DNA, 25 bp, Artificial
  probe
  misc_feature (1)..(25): SEQ ID NO: 231; WAN024ARP_at; Start 11; Stop 35
aaaaggaatcagattttagaacctg

SEQ ID NO: 64501 - DNA, 25 bp, Artificial
  probe
  misc_feature (1)..(25): SEQ ID NO: 231; WAN024ARP_at; Start 17; Stop 41
aatcagattttagaacctggttcct

SEQ ID NO: 64502 - DNA, 25 bp, Artificial
  probe
  misc_feature (1)..(25): SEQ ID NO: 6256; WAN024ARQ_at; Start 54; Stop 78
tactcatttgcgtgtctttataaaa

SEQ ID NO: 64503 - DNA, 25 bp, Artificial
  probe
  misc_feature (1)..(25): SEQ ID NO: 6256; WAN024ARQ_at; Start 57; Stop 81
tcatttgcgtgtctttataaaaaac

SEQ ID NO: 64504 - DNA, 25 bp, Artificial
  probe
  misc_feature (1)..(25): SEQ ID NO: 6256; WAN024ARQ_at; Start 49; Stop 73
atttatactcatttgcgtgtcttta

SEQ ID NO: 64505 - DNA, 25 bp, Artificial
  probe
  misc_feature (1)..(25): SEQ ID NO: 6256; WAN024ARQ_at; Start 56; Stop 80
ctcatttgcgtgtctttataaaaaa

SEQ ID NO: 64506 - DNA, 25 bp, Artificial
  probe
  misc_feature (1)..(25): SEQ ID NO: 6256; WAN024ARQ_at; Start 46; Stop 70
ctgatttatactcatttgcgtgtct

SEQ ID NO: 64507 - DNA, 25 bp, Artificial
  probe
  misc_feature (1)..(25): SEQ ID NO: 6256; WAN024ARQ_at; Start 42; Stop 66
ttagctgatttatactcatttgcgt

SEQ ID NO: 64508 - DNA, 25 bp, Artificial
  probe
  misc_feature (1)..(25): SEQ ID NO: 6256; WAN024ARQ_at; Start 13; Stop 37
tgcataaaaataggaatataaacca

SEQ ID NO: 64509 - DNA, 25 bp, Artificial
  probe
  misc_feature (1)..(25): SEQ ID NO: 6256; WAN024ARQ_at; Start 140; Stop 164
caaaaatacctcaagtttcttgcta

SEQ ID NO: 64510 - DNA, 25 bp, Artificial
  probe
  misc_feature (1)..(25): SEQ ID NO: 6256; WAN024ARQ_at; Start 45; Stop 69
gctgatttatactcatttgcgtgtc

SEQ ID NO: 64511 - DNA, 25 bp, Artificial
  probe
  misc_feature (1)..(25): SEQ ID NO: 6256; WAN024ARQ_at; Start 44; Stop 68
agctgatttatactcatttgcgtgt

SEQ ID NO: 64512 - DNA, 25 bp, Artificial
  probe
  misc_feature (1)..(25): SEQ ID NO: 6256; WAN024ARQ_at; Start 40; Stop 64
aattagctgatttatactcatttgc

SEQ ID NO: 64513 - DNA, 25 bp, Artificial
  probe
  misc_feature (1)..(25): SEQ ID NO: 6256; WAN024ARQ_at; Start 47; Stop 71
tgatttatactcatttgcgtgtctt

SEQ ID NO: 64514 - DNA, 25 bp, Artificial
  probe
  misc_feature (1)..(25): SEQ ID NO: 6256; WAN024ARQ_at; Start 35; Stop 59
ccaaaaattagctgatttatactca

SEQ ID NO: 64515 - DNA, 25 bp, Artificial
  probe
  misc_feature (1)..(25): SEQ ID NO: 6256; WAN024ARQ_at; Start 41; Stop 65
attagctgatttatactcatttgcg

SEQ ID NO: 64516 - DNA, 25 bp, Artificial
  probe
  misc_feature (1)..(25): SEQ ID NO: 6256; WAN024ARQ_at; Start 29; Stop 53
tataaaccaaaaattagctgattta

SEQ ID NO: 64517 - DNA, 25 bp, Artificial
  probe
  misc_feature (1)..(25): SEQ ID NO: 6256; WAN024ARQ_at; Start 55; Stop 79
actcatttgcgtgtctttataaaaa

SEQ ID NO: 64518 - DNA, 25 bp, Artificial
  probe
  misc_feature (1)..(25): SEQ ID NO: 6256; WAN024ARQ_at; Start 36; Stop 60
caaaaattagctgatttatactcat

SEQ ID NO: 64519 - DNA, 25 bp, Artificial
  probe
  misc_feature (1)..(25): SEQ ID NO: 6256; WAN024ARQ_at; Start 43; Stop 67
tagctgatttatactcatttgcgtg

SEQ ID NO: 64520 - DNA, 25 bp, Artificial
  probe
  misc_feature (1)..(25): SEQ ID NO: 6256; WAN024ARQ_at; Start 53; Stop 77
atactcatttgcgtgtctttataaa

SEQ ID NO: 64521 - DNA, 25 bp, Artificial
  probe
  misc_feature (1)..(25): SEQ ID NO: 6256; WAN024ARQ_at; Start 27; Stop 51
aatataaaccaaaaattagctgatt

SEQ ID NO: 64522 - DNA, 25 bp, Artificial
  probe
  misc_feature (1)..(25): SEQ ID NO: 6256; WAN024ARQ_at; Start 31; Stop 55
taaaccaaaaattagctgatttata

SEQ ID NO: 64523 - DNA, 25 bp, Artificial
  probe
  misc_feature (1)..(25): SEQ ID NO: 6256; WAN024ARQ_at; Start 50; Stop 74
tttatactcatttgcgtgtctttat

SEQ ID NO: 64524 - DNA, 25 bp, Artificial
  probe
  misc_feature (1)..(25): SEQ ID NO: 6256; WAN024ARQ_at; Start 34; Stop 58
accaaaaattagctgatttatactc

SEQ ID NO: 64525 - DNA, 25 bp, Artificial
  probe
  misc_feature (1)..(25): SEQ ID NO: 6256; WAN024ARQ_at; Start 25; Stop 49
ggaatataaaccaaaaattagctga

SEQ ID NO: 64526 - DNA, 25 bp, Artificial
  probe
  misc_feature (1)..(25): SEQ ID NO: 6256; WAN024ARQ_at; Start 4; Stop 28
gaataattatgcataaaaataggaa

SEQ ID NO: 64527 - DNA, 25 bp, Artificial
  probe
  misc_feature (1)..(25): SEQ ID NO: 6256; WAN024ARQ_at; Start 14; Stop 38
gcataaaaataggaatataaaccaa

SEQ ID NO: 64528 - DNA, 25 bp, Artificial
  probe
  misc_feature (1)..(25): SEQ ID NO: 6256; WAN024ARQ_at; Start 26; Stop 50
gaatataaaccaaaaattagctgat

SEQ ID NO: 64529 - DNA, 25 bp, Artificial
  probe
  misc_feature (1)..(25): SEQ ID NO: 6256; WAN024ARQ_at; Start 137; Stop 161
tagcaaaaatacctcaagtttcttg

SEQ ID NO: 64530 - DNA, 25 bp, Artificial
  probe
  misc_feature (1)..(25): SEQ ID NO: 6256; WAN024ARQ_at; Start 58; Stop 82
catttgcgtgtctttataaaaaact

SEQ ID NO: 64531 - DNA, 25 bp, Artificial
  probe
  misc_feature (1)..(25): SEQ ID NO: 6256; WAN024ARQ_at; Start 62; Stop 86
tgcgtgtctttataaaaaacttatc

SEQ ID NO: 64532 - DNA, 25 bp, Artificial
  probe
  misc_feature (1)..(25): SEQ ID NO: 6256; WAN024ARQ_at; Start 48; Stop 72
gatttatactcatttgcgtgtcttt

SEQ ID NO: 64533 - DNA, 25 bp, Artificial
  probe
  misc_feature (1)..(25): SEQ ID NO: 6256; WAN024ARQ_at; Start 138; Stop 162
agcaaaaatacctcaagtttcttgc

SEQ ID NO: 64534 - DNA, 25 bp, Artificial
  probe
  misc_feature (1)..(25): SEQ ID NO: 6256; WAN024ARQ_at; Start 105; Stop 129
tatatacaaaatagtaaaatgcttt

SEQ ID NO: 64535 - DNA, 25 bp, Artificial
  probe
  misc_feature (1)..(25): SEQ ID NO: 6256; WAN024ARQ_at; Start 139; Stop 163
gcaaaaatacctcaagtttcttgct

SEQ ID NO: 64536 - DNA, 25 bp, Artificial
  probe
  misc_feature (1)..(25): SEQ ID NO: 6284; WAN024ARR_at; Start 50; Stop 74
tggttggaaactggcttaaactata

SEQ ID NO: 64537 - DNA, 25 bp, Artificial
  probe
  misc_feature (1)..(25): SEQ ID NO: 6284; WAN024ARR_at; Start 159; Stop 183
ataaattcaataccgatttcgccat

SEQ ID NO: 64538 - DNA, 25 bp, Artificial
  probe
  misc_feature (1)..(25): SEQ ID NO: 6284; WAN024ARR_at; Start 134; Stop 158
aaaagagttataatcagcactactg

SEQ ID NO: 64539 - DNA, 25 bp, Artificial
  probe
  misc_feature (1)..(25): SEQ ID NO: 6284; WAN024ARR_at; Start 31; Stop 55
taccagtaaatcacgaaattggttg

SEQ ID NO: 64540 - DNA, 25 bp, Artificial
  probe
  misc_feature (1)..(25): SEQ ID NO: 6284; WAN024ARR_at; Start 135; Stop 159
aaagagttataatcagcactactga

SEQ ID NO: 64541 - DNA, 25 bp, Artificial
  probe
  misc_feature (1)..(25): SEQ ID NO: 6284; WAN024ARR_at; Start 142; Stop 166
tataatcagcactactgataaattc

SEQ ID NO: 64542 - DNA, 25 bp, Artificial
  probe
  misc_feature (1)..(25): SEQ ID NO: 6284; WAN024ARR_at; Start 39; Stop 63
aatcacgaaattggttggaaactgg

SEQ ID NO: 64543 - DNA, 25 bp, Artificial
  probe
  misc_feature (1)..(25): SEQ ID NO: 6284; WAN024ARR_at; Start 138; Stop 162
gagttataatcagcactactgataa

SEQ ID NO: 64544 - DNA, 25 bp, Artificial
  probe
  misc_feature (1)..(25): SEQ ID NO: 6284; WAN024ARR_at; Start 161; Stop 185
aaattcaataccgatttcgccatct

SEQ ID NO: 64545 - DNA, 25 bp, Artificial
  probe
  misc_feature (1)..(25): SEQ ID NO: 6284; WAN024ARR_at; Start 41; Stop 65
tcacgaaattggttggaaactggct

SEQ ID NO: 64546 - DNA, 25 bp, Artificial
  probe
  misc_feature (1)..(25): SEQ ID NO: 6284; WAN024ARR_at; Start 162; Stop 186
aattcaataccgatttcgccatctt

SEQ ID NO: 64547 - DNA, 25 bp, Artificial
  probe
  misc_feature (1)..(25): SEQ ID NO: 6284; WAN024ARR_at; Start 33; Stop 57
ccagtaaatcacgaaattggttgga

SEQ ID NO: 64548 - DNA, 25 bp, Artificial
  probe
  misc_feature (1)..(25): SEQ ID NO: 6284; WAN024ARR_at; Start 158; Stop 182
gataaattcaataccgatttcgcca

SEQ ID NO: 64549 - DNA, 25 bp, Artificial
  probe
  misc_feature (1)..(25): SEQ ID NO: 6284; WAN024ARR_at; Start 40; Stop 64
atcacgaaattggttggaaactggc

SEQ ID NO: 64550 - DNA, 25 bp, Artificial
  probe
  misc_feature (1)..(25): SEQ ID NO: 6284; WAN024ARR_at; Start 144; Stop 168
taatcagcactactgataaattcaa

SEQ ID NO: 64551 - DNA, 25 bp, Artificial
  probe
  misc_feature (1)..(25): SEQ ID NO: 6284; WAN024ARR_at; Start 24; Stop 48
tcttcattaccagtaaatcacgaaa

SEQ ID NO: 64552 - DNA, 25 bp, Artificial
  probe
  misc_feature (1)..(25): SEQ ID NO: 6284; WAN024ARR_at; Start 63; Stop 87
gcttaaactataaaaagtcctcaca

SEQ ID NO: 64553 - DNA, 25 bp, Artificial
  probe
  misc_feature (1)..(25): SEQ ID NO: 6284; WAN024ARR_at; Start 38; Stop 62
aaatcacgaaattggttggaaactg

SEQ ID NO: 64554 - DNA, 25 bp, Artificial
  probe
  misc_feature (1)..(25): SEQ ID NO: 6284; WAN024ARR_at; Start 163; Stop 187
attcaataccgatttcgccatctta

SEQ ID NO: 64555 - DNA, 25 bp, Artificial
  probe
  misc_feature (1)..(25): SEQ ID NO: 6284; WAN024ARR_at; Start 157; Stop 181
tgataaattcaataccgatttcgcc

SEQ ID NO: 64556 - DNA, 25 bp, Artificial
  probe
  misc_feature (1)..(25): SEQ ID NO: 6284; WAN024ARR_at; Start 133; Stop 157
taaaagagttataatcagcactact

SEQ ID NO: 64557 - DNA, 25 bp, Artificial
  probe
  misc_feature (1)..(25): SEQ ID NO: 6284; WAN024ARR_at; Start 18; Stop 42
tgtttttcttcattaccagtaaatc

SEQ ID NO: 64558 - DNA, 25 bp, Artificial
  probe
  misc_feature (1)..(25): SEQ ID NO: 6284; WAN024ARR_at; Start 32; Stop 56
accagtaaatcacgaaattggttgg

SEQ ID NO: 64559 - DNA, 25 bp, Artificial
  probe
  misc_feature (1)..(25): SEQ ID NO: 6284; WAN024ARR_at; Start 28; Stop 52
cattaccagtaaatcacgaaattgg

SEQ ID NO: 64560 - DNA, 25 bp, Artificial
  probe
  misc_feature (1)..(25): SEQ ID NO: 6284; WAN024ARR_at; Start 42; Stop 66
cacgaaattggttggaaactggctt

SEQ ID NO: 64561 - DNA, 25 bp, Artificial
  probe
  misc_feature (1)..(25): SEQ ID NO: 6284; WAN024ARR_at; Start 117; Stop 141
tacttcatgtaaataataaaagagt

SEQ ID NO: 64562 - DNA, 25 bp, Artificial
  probe
  misc_feature (1)..(25): SEQ ID NO: 6284; WAN024ARR_at; Start 130; Stop 154
taataaaagagttataatcagcact

SEQ ID NO: 64563 - DNA, 25 bp, Artificial
  probe
  misc_feature (1)..(25): SEQ ID NO: 6284; WAN024ARR_at; Start 22; Stop 46
tttcttcattaccagtaaatcacga

SEQ ID NO: 64564 - DNA, 25 bp, Artificial
  probe
  misc_feature (1)..(25): SEQ ID NO: 6284; WAN024ARR_at; Start 137; Stop 161
agagttataatcagcactactgata

SEQ ID NO: 64565 - DNA, 25 bp, Artificial
  probe
  misc_feature (1)..(25): SEQ ID NO: 6284; WAN024ARR_at; Start 29; Stop 53
attaccagtaaatcacgaaattggt

SEQ ID NO: 64566 - DNA, 25 bp, Artificial
  probe
  misc_feature (1)..(25): SEQ ID NO: 6284; WAN024ARR_at; Start 34; Stop 58
cagtaaatcacgaaattggttggaa

SEQ ID NO: 64567 - DNA, 25 bp, Artificial
  probe
  misc_feature (1)..(25): SEQ ID NO: 6284; WAN024ARR_at; Start 27; Stop 51
tcattaccagtaaatcacgaaattg

SEQ ID NO: 64568 - DNA, 25 bp, Artificial
  probe
  misc_feature (1)..(25): SEQ ID NO: 6284; WAN024ARR_at; Start 21; Stop 45
ttttcttcattaccagtaaatcacg

SEQ ID NO: 64569 - DNA, 25 bp, Artificial
  probe
  misc_feature (1)..(25): SEQ ID NO: 6284; WAN024ARR_at; Start 14; Stop 38
caattgtttttcttcattaccagta

SEQ ID NO: 64570 - DNA, 25 bp, Artificial
  probe
  misc_feature (1)..(25): SEQ ID NO: 382; WAN024ARS_at; Start 32; Stop 56
caaaaaagaaagctaatgtaaatct

SEQ ID NO: 64571 - DNA, 25 bp, Artificial
  probe
  misc_feature (1)..(25): SEQ ID NO: 382; WAN024ARS_at; Start 46; Stop 70
aatgtaaatctattggatatacgtt

SEQ ID NO: 64572 - DNA, 25 bp, Artificial
  probe
  misc_feature (1)..(25): SEQ ID NO: 382; WAN024ARS_at; Start 41; Stop 65
aagctaatgtaaatctattggatat

SEQ ID NO: 64573 - DNA, 25 bp, Artificial
  probe
  misc_feature (1)..(25): SEQ ID NO: 382; WAN024ARS_at; Start 6; Stop 30
caccctctttccatagactatttta

SEQ ID NO: 64574 - DNA, 25 bp, Artificial
  probe
  misc_feature (1)..(25): SEQ ID NO: 382; WAN024ARS_at; Start 1; Stop 25
actctcaccctctttccatagacta

SEQ ID NO: 64575 - DNA, 25 bp, Artificial
  probe
  misc_feature (1)..(25): SEQ ID NO: 382; WAN024ARS_at; Start 44; Stop 68
ctaatgtaaatctattggatatacg

SEQ ID NO: 64576 - DNA, 25 bp, Artificial
  probe
  misc_feature (1)..(25): SEQ ID NO: 382; WAN024ARS_at; Start 9; Stop 33
cctctttccatagactattttaaca

SEQ ID NO: 64577 - DNA, 25 bp, Artificial
  probe
  misc_feature (1)..(25): SEQ ID NO: 382; WAN024ARS_at; Start 42; Stop 66
agctaatgtaaatctattggatata

SEQ ID NO: 64578 - DNA, 25 bp, Artificial
  probe
  misc_feature (1)..(25): SEQ ID NO: 382; WAN024ARS_at; Start 35; Stop 59
aaaagaaagctaatgtaaatctatt

SEQ ID NO: 64579 - DNA, 25 bp, Artificial
  probe
  misc_feature (1)..(25): SEQ ID NO: 382; WAN024ARS_at; Start 50; Stop 74
taaatctattggatatacgttagcc

SEQ ID NO: 64580 - DNA, 25 bp, Artificial
  probe
  misc_feature (1)..(25): SEQ ID NO: 382; WAN024ARS_at; Start 53; Stop 77
atctattggatatacgttagcctct

SEQ ID NO: 64581 - DNA, 25 bp, Artificial
  probe
  misc_feature (1)..(25): SEQ ID NO: 382; WAN024ARS_at; Start 39; Stop 63
gaaagctaatgtaaatctattggat

SEQ ID NO: 64582 - DNA, 25 bp, Artificial
  probe
  misc_feature (1)..(25): SEQ ID NO: 382; WAN024ARS_at; Start 10; Stop 34
ctctttccatagactattttaacaa

SEQ ID NO: 64583 - DNA, 25 bp, Artificial
  probe
  misc_feature (1)..(25): SEQ ID NO: 382; WAN024ARS_at; Start 5; Stop 29
tcaccctctttccatagactatttt

SEQ ID NO: 64584 - DNA, 25 bp, Artificial
  probe
  misc_feature (1)..(25): SEQ ID NO: 382; WAN024ARS_at; Start 3; Stop 27
tctcaccctctttccatagactatt

SEQ ID NO: 64585 - DNA, 25 bp, Artificial
  probe
  misc_feature (1)..(25): SEQ ID NO: 382; WAN024ARS_at; Start 45; Stop 69
taatgtaaatctattggatatacgt

SEQ ID NO: 64586 - DNA, 25 bp, Artificial
  probe
  misc_feature (1)..(25): SEQ ID NO: 382; WAN024ARS_at; Start 36; Stop 60
aaagaaagctaatgtaaatctattg

SEQ ID NO: 64587 - DNA, 25 bp, Artificial
  probe
  misc_feature (1)..(25): SEQ ID NO: 382; WAN024ARS_at; Start 4; Stop 28
ctcaccctctttccatagactattt

SEQ ID NO: 64588 - DNA, 25 bp, Artificial
  probe
  misc_feature (1)..(25): SEQ ID NO: 382; WAN024ARS_at; Start 49; Stop 73
gtaaatctattggatatacgttagc

SEQ ID NO: 64589 - DNA, 25 bp, Artificial
  probe
  misc_feature (1)..(25): SEQ ID NO: 382; WAN024ARS_at; Start 40; Stop 64
aaagctaatgtaaatctattggata

SEQ ID NO: 64590 - DNA, 25 bp, Artificial
  probe
  misc_feature (1)..(25): SEQ ID NO: 382; WAN024ARS_at; Start 48; Stop 72
tgtaaatctattggatatacgttag

SEQ ID NO: 64591 - DNA, 25 bp, Artificial
  probe
  misc_feature (1)..(25): SEQ ID NO: 382; WAN024ARS_at; Start 52; Stop 76
aatctattggatatacgttagcctc

SEQ ID NO: 64592 - DNA, 25 bp, Artificial
  probe
  misc_feature (1)..(25): SEQ ID NO: 382; WAN024ARS_at; Start 47; Stop 71
atgtaaatctattggatatacgtta

SEQ ID NO: 64593 - DNA, 25 bp, Artificial
  probe
  misc_feature (1)..(25): SEQ ID NO: 382; WAN024ARS_at; Start 43; Stop 67
gctaatgtaaatctattggatatac

SEQ ID NO: 64594 - DNA, 25 bp, Artificial
  probe
  misc_feature (1)..(25): SEQ ID NO: 382; WAN024ARS_at; Start 34; Stop 58
aaaaagaaagctaatgtaaatctat

SEQ ID NO: 64595 - DNA, 25 bp, Artificial
  probe
  misc_feature (1)..(25): SEQ ID NO: 382; WAN024ARS_at; Start 38; Stop 62
agaaagctaatgtaaatctattgga

SEQ ID NO: 64596 - DNA, 25 bp, Artificial
  probe
  misc_feature (1)..(25): SEQ ID NO: 382; WAN024ARS_at; Start 11; Stop 35
tctttccatagactattttaacaaa

SEQ ID NO: 64597 - DNA, 25 bp, Artificial
  probe
  misc_feature (1)..(25): SEQ ID NO: 382; WAN024ARS_at; Start 37; Stop 61
aagaaagctaatgtaaatctattgg

SEQ ID NO: 64598 - DNA, 25 bp, Artificial
  probe
  misc_feature (1)..(25): SEQ ID NO: 382; WAN024ARS_at; Start 2; Stop 26
ctctcaccctctttccatagactat

SEQ ID NO: 64599 - DNA, 25 bp, Artificial
  probe
  misc_feature (1)..(25): SEQ ID NO: 382; WAN024ARS_at; Start 54; Stop 78
tctattggatatacgttagcctctt

SEQ ID NO: 64600 - DNA, 25 bp, Artificial
  probe
  misc_feature (1)..(25): SEQ ID NO: 382; WAN024ARS_at; Start 51; Stop 75
aaatctattggatatacgttagcct

SEQ ID NO: 64601 - DNA, 25 bp, Artificial
  probe
  misc_feature (1)..(25): SEQ ID NO: 102; WAN024ART_at; Start 36; Stop 60
tatatccaatagatttacattagct

SEQ ID NO: 64602 - DNA, 25 bp, Artificial
  probe
  misc_feature (1)..(25): SEQ ID NO: 102; WAN024ART_at; Start 68; Stop 92
ttgttaaaatagtctatggaaagag

SEQ ID NO: 64603 - DNA, 25 bp, Artificial
  probe
  misc_feature (1)..(25): SEQ ID NO: 102; WAN024ART_at; Start 39; Stop 63
atccaatagatttacattagctttc

SEQ ID NO: 64604 - DNA, 25 bp, Artificial
  probe
  misc_feature (1)..(25): SEQ ID NO: 102; WAN024ART_at; Start 28; Stop 52
ggctaacgtatatccaatagattta

SEQ ID NO: 64605 - DNA, 25 bp, Artificial
  probe
  misc_feature (1)..(25): SEQ ID NO: 102; WAN024ART_at; Start 46; Stop 70
agatttacattagctttcttttttg

SEQ ID NO: 64606 - DNA, 25 bp, Artificial
  probe
  misc_feature (1)..(25): SEQ ID NO: 102; WAN024ART_at; Start 35; Stop 59
gtatatccaatagatttacattagc

SEQ ID NO: 64607 - DNA, 25 bp, Artificial
  probe
  misc_feature (1)..(25): SEQ ID NO: 102; WAN024ART_at; Start 43; Stop 67
aatagatttacattagctttctttt

SEQ ID NO: 64608 - DNA, 25 bp, Artificial
  probe
  misc_feature (1)..(25): SEQ ID NO: 102; WAN024ART_at; Start 42; Stop 66
caatagatttacattagctttcttt

SEQ ID NO: 64609 - DNA, 25 bp, Artificial
  probe
  misc_feature (1)..(25): SEQ ID NO: 102; WAN024ART_at; Start 34; Stop 58
cgtatatccaatagatttacattag

SEQ ID NO: 64610 - DNA, 25 bp, Artificial
  probe
  misc_feature (1)..(25): SEQ ID NO: 102; WAN024ART_at; Start 29; Stop 53
gctaacgtatatccaatagatttac

SEQ ID NO: 64611 - DNA, 25 bp, Artificial
  probe
  misc_feature (1)..(25): SEQ ID NO: 102; WAN024ART_at; Start 72; Stop 96
taaaatagtctatggaaagagggtg

SEQ ID NO: 64612 - DNA, 25 bp, Artificial
  probe
  misc_feature (1)..(25): SEQ ID NO: 102; WAN024ART_at; Start 40; Stop 64
tccaatagatttacattagctttct

SEQ ID NO: 64613 - DNA, 25 bp, Artificial
  probe
  misc_feature (1)..(25): SEQ ID NO: 102; WAN024ART_at; Start 24; Stop 48
aagaggctaacgtatatccaataga

SEQ ID NO: 64614 - DNA, 25 bp, Artificial
  probe
  misc_feature (1)..(25): SEQ ID NO: 102; WAN024ART_at; Start 26; Stop 50
gaggctaacgtatatccaatagatt

SEQ ID NO: 64615 - DNA, 25 bp, Artificial
  probe
  misc_feature (1)..(25): SEQ ID NO: 102; WAN024ART_at; Start 73; Stop 97
aaaatagtctatggaaagagggtga

SEQ ID NO: 64616 - DNA, 25 bp, Artificial
  probe
  misc_feature (1)..(25): SEQ ID NO: 102; WAN024ART_at; Start 25; Stop 49
agaggctaacgtatatccaatagat

SEQ ID NO: 64617 - DNA, 25 bp, Artificial
  probe
  misc_feature (1)..(25): SEQ ID NO: 102; WAN024ART_at; Start 27; Stop 51
aggctaacgtatatccaatagattt

SEQ ID NO: 64618 - DNA, 25 bp, Artificial
  probe
  misc_feature (1)..(25): SEQ ID NO: 102; WAN024ART_at; Start 37; Stop 61
atatccaatagatttacattagctt

SEQ ID NO: 64619 - DNA, 25 bp, Artificial
  probe
  misc_feature (1)..(25): SEQ ID NO: 102; WAN024ART_at; Start 74; Stop 98
aaatagtctatggaaagagggtgag

SEQ ID NO: 64620 - DNA, 25 bp, Artificial
  probe
  misc_feature (1)..(25): SEQ ID NO: 102; WAN024ART_at; Start 75; Stop 99
aatagtctatggaaagagggtgaga

SEQ ID NO: 64621 - DNA, 25 bp, Artificial
  probe
  misc_feature (1)..(25): SEQ ID NO: 102; WAN024ART_at; Start 44; Stop 68
atagatttacattagctttcttttt

SEQ ID NO: 64622 - DNA, 25 bp, Artificial
  probe
  misc_feature (1)..(25): SEQ ID NO: 102; WAN024ART_at; Start 31; Stop 55
taacgtatatccaatagatttacat

SEQ ID NO: 64623 - DNA, 25 bp, Artificial
  probe
  misc_feature (1)..(25): SEQ ID NO: 102; WAN024ART_at; Start 41; Stop 65
ccaatagatttacattagctttctt

SEQ ID NO: 64624 - DNA, 25 bp, Artificial
  probe
  misc_feature (1)..(25): SEQ ID NO: 102; WAN024ART_at; Start 69; Stop 93
tgttaaaatagtctatggaaagagg

SEQ ID NO: 64625 - DNA, 25 bp, Artificial
  probe
  misc_feature (1)..(25): SEQ ID NO: 102; WAN024ART_at; Start 33; Stop 57
acgtatatccaatagatttacatta

SEQ ID NO: 64626 - DNA, 25 bp, Artificial
  probe
  misc_feature (1)..(25): SEQ ID NO: 102; WAN024ART_at; Start 32; Stop 56
aacgtatatccaatagatttacatt

SEQ ID NO: 64627 - DNA, 25 bp, Artificial
  probe
  misc_feature (1)..(25): SEQ ID NO: 102; WAN024ART_at; Start 67; Stop 91
tttgttaaaatagtctatggaaaga

SEQ ID NO: 64628 - DNA, 25 bp, Artificial
  probe
  misc_feature (1)..(25): SEQ ID NO: 102; WAN024ART_at; Start 30; Stop 54
ctaacgtatatccaatagatttaca

SEQ ID NO: 64629 - DNA, 25 bp, Artificial
  probe
  misc_feature (1)..(25): SEQ ID NO: 102; WAN024ART_at; Start 38; Stop 62
tatccaatagatttacattagcttt

SEQ ID NO: 64630 - DNA, 25 bp, Artificial
  probe
  misc_feature (1)..(25): SEQ ID NO: 102; WAN024ART_at; Start 77; Stop 101
tagtctatggaaagagggtgagagt

SEQ ID NO: 64631 - DNA, 25 bp, Artificial
  probe
  misc_feature (1)..(25): SEQ ID NO: 102; WAN024ART_at; Start 76; Stop 100
atagtctatggaaagagggtgagag

SEQ ID NO: 64632 - DNA, 25 bp, Artificial
  probe
  misc_feature (1)..(25): SEQ ID NO: 4609; WAN024ARU_at; Start 76; Stop 100
agtgacttccttctagagtgaggac

SEQ ID NO: 64633 - DNA, 25 bp, Artificial
  probe
  misc_feature (1)..(25): SEQ ID NO: 4609; WAN024ARU_at; Start 71; Stop 95
cactaagtgacttccttctagagtg

SEQ ID NO: 64634 - DNA, 25 bp, Artificial
  probe
  misc_feature (1)..(25): SEQ ID NO: 4609; WAN024ARU_at; Start 65; Stop 89
ggaagccactaagtgacttccttct

SEQ ID NO: 64635 - DNA, 25 bp, Artificial
  probe
  misc_feature (1)..(25): SEQ ID NO: 4609; WAN024ARU_at; Start 66; Stop 90
gaagccactaagtgacttccttcta

SEQ ID NO: 64636 - DNA, 25 bp, Artificial
  probe
  misc_feature (1)..(25): SEQ ID NO: 4609; WAN024ARU_at; Start 32; Stop 56
taccatatttagaggtattttctaa

SEQ ID NO: 64637 - DNA, 25 bp, Artificial
  probe
  misc_feature (1)..(25): SEQ ID NO: 4609; WAN024ARU_at; Start 56; Stop 80
aagacaaaaggaagccactaagtga

SEQ ID NO: 64638 - DNA, 25 bp, Artificial
  probe
  misc_feature (1)..(25): SEQ ID NO: 4609; WAN024ARU_at; Start 59; Stop 83
acaaaaggaagccactaagtgactt

SEQ ID NO: 64639 - DNA, 25 bp, Artificial
  probe
  misc_feature (1)..(25): SEQ ID NO: 4609; WAN024ARU_at; Start 75; Stop 99
aagtgacttccttctagagtgagga

SEQ ID NO: 64640 - DNA, 25 bp, Artificial
  probe
  misc_feature (1)..(25): SEQ ID NO: 4609; WAN024ARU_at; Start 4; Stop 28
ttttcctcacattattcttctacta

SEQ ID NO: 64641 - DNA, 25 bp, Artificial
  probe
  misc_feature (1)..(25): SEQ ID NO: 4609; WAN024ARU_at; Start 74; Stop 98
taagtgacttccttctagagtgagg

SEQ ID NO: 64642 - DNA, 25 bp, Artificial
  probe
  misc_feature (1)..(25): SEQ ID NO: 4609; WAN024ARU_at; Start 60; Stop 84
caaaaggaagccactaagtgacttc

SEQ ID NO: 64643 - DNA, 25 bp, Artificial
  probe
  misc_feature (1)..(25): SEQ ID NO: 4609; WAN024ARU_at; Start 52; Stop 76
tctaaagacaaaaggaagccactaa

SEQ ID NO: 64644 - DNA, 25 bp, Artificial
  probe
  misc_feature (1)..(25): SEQ ID NO: 4609; WAN024ARU_at; Start 57; Stop 81
agacaaaaggaagccactaagtgac

SEQ ID NO: 64645 - DNA, 25 bp, Artificial
  probe
  misc_feature (1)..(25): SEQ ID NO: 4609; WAN024ARU_at; Start 68; Stop 92
agccactaagtgacttccttctaga

SEQ ID NO: 64646 - DNA, 25 bp, Artificial
  probe
  misc_feature (1)..(25): SEQ ID NO: 4609; WAN024ARU_at; Start 51; Stop 75
ttctaaagacaaaaggaagccacta

SEQ ID NO: 64647 - DNA, 25 bp, Artificial
  probe
  misc_feature (1)..(25): SEQ ID NO: 4609; WAN024ARU_at; Start 79; Stop 103
gacttccttctagagtgaggacgga

SEQ ID NO: 64648 - DNA, 25 bp, Artificial
  probe
  misc_feature (1)..(25): SEQ ID NO: 4609; WAN024ARU_at; Start 64; Stop 88
aggaagccactaagtgacttccttc

SEQ ID NO: 64649 - DNA, 25 bp, Artificial
  probe
  misc_feature (1)..(25): SEQ ID NO: 4609; WAN024ARU_at; Start 37; Stop 61
tatttagaggtattttctaaagaca

SEQ ID NO: 64650 - DNA, 25 bp, Artificial
  probe
  misc_feature (1)..(25): SEQ ID NO: 4609; WAN024ARU_at; Start 72; Stop 96
actaagtgacttccttctagagtga

SEQ ID NO: 64651 - DNA, 25 bp, Artificial
  probe
  misc_feature (1)..(25): SEQ ID NO: 4609; WAN024ARU_at; Start 70; Stop 94
ccactaagtgacttccttctagagt

SEQ ID NO: 64652 - DNA, 25 bp, Artificial
  probe
  misc_feature (1)..(25): SEQ ID NO: 4609; WAN024ARU_at; Start 34; Stop 58
ccatatttagaggtattttctaaag

SEQ ID NO: 64653 - DNA, 25 bp, Artificial
  probe
  misc_feature (1)..(25): SEQ ID NO: 4609; WAN024ARU_at; Start 22; Stop 46
tctactattttaccatatttagagg

SEQ ID NO: 64654 - DNA, 25 bp, Artificial
  probe
  misc_feature (1)..(25): SEQ ID NO: 4609; WAN024ARU_at; Start 12; Stop 36
acattattcttctactattttacca

SEQ ID NO: 64655 - DNA, 25 bp, Artificial
  probe
  misc_feature (1)..(25): SEQ ID NO: 4609; WAN024ARU_at; Start 2; Stop 26
cattttcctcacattattcttctac

SEQ ID NO: 64656 - DNA, 25 bp, Artificial
  probe
  misc_feature (1)..(25): SEQ ID NO: 4609; WAN024ARU_at; Start 53; Stop 77
ctaaagacaaaaggaagccactaag

SEQ ID NO: 64657 - DNA, 25 bp, Artificial
  probe
  misc_feature (1)..(25): SEQ ID NO: 4609; WAN024ARU_at; Start 24; Stop 48
tactattttaccatatttagaggta

SEQ ID NO: 64658 - DNA, 25 bp, Artificial
  probe
  misc_feature (1)..(25): SEQ ID NO: 4609; WAN024ARU_at; Start 55; Stop 79
aaagacaaaaggaagccactaagtg

SEQ ID NO: 64659 - DNA, 25 bp, Artificial
  probe
  misc_feature (1)..(25): SEQ ID NO: 4609; WAN024ARU_at; Start 67; Stop 91
aagccactaagtgacttccttctag

SEQ ID NO: 64660 - DNA, 25 bp, Artificial
  probe
  misc_feature (1)..(25): SEQ ID NO: 4609; WAN024ARU_at; Start 78; Stop 102
tgacttccttctagagtgaggacgg

SEQ ID NO: 64661 - DNA, 25 bp, Artificial
  probe
  misc_feature (1)..(25): SEQ ID NO: 4609; WAN024ARU_at; Start 77; Stop 101
gtgacttccttctagagtgaggacg

SEQ ID NO: 64662 - DNA, 25 bp, Artificial
  probe
  misc_feature (1)..(25): SEQ ID NO: 4609; WAN024ARU_at; Start 69; Stop 93
gccactaagtgacttccttctagag

SEQ ID NO: 64663 - DNA, 25 bp, Artificial
  probe
  misc_feature (1)..(25): SEQ ID NO: 4609; WAN024ARU_at; Start 62; Stop 86
aaaggaagccactaagtgacttcct

SEQ ID NO: 64664 - DNA, 25 bp, Artificial
  probe
  misc_feature (1)..(25): SEQ ID NO: 4609; WAN024ARU_at; Start 73; Stop 97
ctaagtgacttccttctagagtgag

SEQ ID NO: 64665 - DNA, 25 bp, Artificial
  probe
  misc_feature (1)..(25): SEQ ID NO: 4609; WAN024ARU_at; Start 11; Stop 35
cacattattcttctactattttacc

SEQ ID NO: 64666 - DNA, 25 bp, Artificial
  probe
  misc_feature (1)..(25): SEQ ID NO: 4620; WAN024ARV_at; Start 12; Stop 36
tctagaaggaagtcacttagtggct

SEQ ID NO: 64667 - DNA, 25 bp, Artificial
  probe
  misc_feature (1)..(25): SEQ ID NO: 4620; WAN024ARV_at; Start 11; Stop 35
ctctagaaggaagtcacttagtggc

SEQ ID NO: 64668 - DNA, 25 bp, Artificial
  probe
  misc_feature (1)..(25): SEQ ID NO: 4620; WAN024ARV_at; Start 3; Stop 27
cgtcctcactctagaaggaagtcac

SEQ ID NO: 64669 - DNA, 25 bp, Artificial
  probe
  misc_feature (1)..(25): SEQ ID NO: 4620; WAN024ARV_at; Start 74; Stop 98
aatagtagaagaataatgtgaggaa

SEQ ID NO: 64670 - DNA, 25 bp, Artificial
  probe
  misc_feature (1)..(25): SEQ ID NO: 4620; WAN024ARV_at; Start 69; Stop 93
ggtaaaatagtagaagaataatgtg

SEQ ID NO: 64671 - DNA, 25 bp, Artificial
  probe
  misc_feature (1)..(25): SEQ ID NO: 4620; WAN024ARV_at; Start 27; Stop 51
cttagtggcttccttttgtctttag

SEQ ID NO: 64672 - DNA, 25 bp, Artificial
  probe
  misc_feature (1)..(25): SEQ ID NO: 4620; WAN024ARV_at; Start 78; Stop 102
gtagaagaataatgtgaggaaaatg

SEQ ID NO: 64673 - DNA, 25 bp, Artificial
  probe
  misc_feature (1)..(25): SEQ ID NO: 4620; WAN024ARV_at; Start 15; Stop 39
agaaggaagtcacttagtggcttcc

SEQ ID NO: 64674 - DNA, 25 bp, Artificial
  probe
  misc_feature (1)..(25): SEQ ID NO: 4620; WAN024ARV_at; Start 13; Stop 37
ctagaaggaagtcacttagtggctt

SEQ ID NO: 64675 - DNA, 25 bp, Artificial
  probe
  misc_feature (1)..(25): SEQ ID NO: 4620; WAN024ARV_at; Start 10; Stop 34
actctagaaggaagtcacttagtgg

SEQ ID NO: 64676 - DNA, 25 bp, Artificial
  probe
  misc_feature (1)..(25): SEQ ID NO: 4620; WAN024ARV_at; Start 4; Stop 28
gtcctcactctagaaggaagtcact

SEQ ID NO: 64677 - DNA, 25 bp, Artificial
  probe
  misc_feature (1)..(25): SEQ ID NO: 4620; WAN024ARV_at; Start 9; Stop 33
cactctagaaggaagtcacttagtg

SEQ ID NO: 64678 - DNA, 25 bp, Artificial
  probe
  misc_feature (1)..(25): SEQ ID NO: 4620; WAN024ARV_at; Start 25; Stop 49
cacttagtggcttccttttgtcttt

SEQ ID NO: 64679 - DNA, 25 bp, Artificial
  probe
  misc_feature (1)..(25): SEQ ID NO: 4620; WAN024ARV_at; Start 8; Stop 32
tcactctagaaggaagtcacttagt

SEQ ID NO: 64680 - DNA, 25 bp, Artificial
  probe
  misc_feature (1)..(25): SEQ ID NO: 4620; WAN024ARV_at; Start 29; Stop 53
tagtggcttccttttgtctttagaa

SEQ ID NO: 64681 - DNA, 25 bp, Artificial
  probe
  misc_feature (1)..(25): SEQ ID NO: 4620; WAN024ARV_at; Start 79; Stop 103
tagaagaataatgtgaggaaaatga

SEQ ID NO: 64682 - DNA, 25 bp, Artificial
  probe
  misc_feature (1)..(25): SEQ ID NO: 4620; WAN024ARV_at; Start 20; Stop 44
gaagtcacttagtggcttccttttg

SEQ ID NO: 64683 - DNA, 25 bp, Artificial
  probe
  misc_feature (1)..(25): SEQ ID NO: 4620; WAN024ARV_at; Start 21; Stop 45
aagtcacttagtggcttccttttgt

SEQ ID NO: 64684 - DNA, 25 bp, Artificial
  probe
  misc_feature (1)..(25): SEQ ID NO: 4620; WAN024ARV_at; Start 14; Stop 38
tagaaggaagtcacttagtggcttc

SEQ ID NO: 64685 - DNA, 25 bp, Artificial
  probe
  misc_feature (1)..(25): SEQ ID NO: 4620; WAN024ARV_at; Start 6; Stop 30
cctcactctagaaggaagtcactta

SEQ ID NO: 64686 - DNA, 25 bp, Artificial
  probe
  misc_feature (1)..(25): SEQ ID NO: 4620; WAN024ARV_at; Start 76; Stop 100
tagtagaagaataatgtgaggaaaa

SEQ ID NO: 64687 - DNA, 25 bp, Artificial
  probe
  misc_feature (1)..(25): SEQ ID NO: 4620; WAN024ARV_at; Start 2; Stop 26
ccgtcctcactctagaaggaagtca

SEQ ID NO: 64688 - DNA, 25 bp, Artificial
  probe
  misc_feature (1)..(25): SEQ ID NO: 4620; WAN024ARV_at; Start 49; Stop 73
tagaaaatacctctaaatatggtaa

SEQ ID NO: 64689 - DNA, 25 bp, Artificial
  probe
  misc_feature (1)..(25): SEQ ID NO: 4620; WAN024ARV_at; Start 58; Stop 82
cctctaaatatggtaaaatagtaga

SEQ ID NO: 64690 - DNA, 25 bp, Artificial
  probe
  misc_feature (1)..(25): SEQ ID NO: 4620; WAN024ARV_at; Start 16; Stop 40
gaaggaagtcacttagtggcttcct

SEQ ID NO: 64691 - DNA, 25 bp, Artificial
  probe
  misc_feature (1)..(25): SEQ ID NO: 4620; WAN024ARV_at; Start 61; Stop 85
ctaaatatggtaaaatagtagaaga

SEQ ID NO: 64692 - DNA, 25 bp, Artificial
  probe
  misc_feature (1)..(25): SEQ ID NO: 4620; WAN024ARV_at; Start 72; Stop 96
aaaatagtagaagaataatgtgagg

SEQ ID NO: 64693 - DNA, 25 bp, Artificial
  probe
  misc_feature (1)..(25): SEQ ID NO: 4620; WAN024ARV_at; Start 24; Stop 48
tcacttagtggcttccttttgtctt

SEQ ID NO: 64694 - DNA, 25 bp, Artificial
  probe
  misc_feature (1)..(25): SEQ ID NO: 4620; WAN024ARV_at; Start 23; Stop 47
gtcacttagtggcttccttttgtct

SEQ ID NO: 64695 - DNA, 25 bp, Artificial
  probe
  misc_feature (1)..(25): SEQ ID NO: 4620; WAN024ARV_at; Start 5; Stop 29
tcctcactctagaaggaagtcactt

SEQ ID NO: 64696 - DNA, 25 bp, Artificial
  probe
  misc_feature (1)..(25): SEQ ID NO: 4620; WAN024ARV_at; Start 7; Stop 31
ctcactctagaaggaagtcacttag

SEQ ID NO: 64697 - DNA, 25 bp, Artificial
  probe
  misc_feature (1)..(25): SEQ ID NO: 4620; WAN024ARV_at; Start 43; Stop 67
tgtctttagaaaatacctctaaata

SEQ ID NO: 64698 - DNA, 25 bp, Artificial
  probe
  misc_feature (1)..(25): SEQ ID NO: 4620; WAN024ARV_at; Start 1; Stop 25
tccgtcctcactctagaaggaagtc

SEQ ID NO: 64699 - DNA, 25 bp, Artificial
  probe
  misc_feature (1)..(25): SEQ ID NO: 4620; WAN024ARV_at; Start 56; Stop 80
tacctctaaatatggtaaaatagta

SEQ ID NO: 64700 - DNA, 25 bp, Artificial
  probe
  misc_feature (1)..(25): SEQ ID NO: 5921; WAN024ARW_at; Start 23; Stop 47
ctcttgagagaccaaaagtaaaaag

SEQ ID NO: 64701 - DNA, 25 bp, Artificial
  probe
  misc_feature (1)..(25): SEQ ID NO: 5921; WAN024ARW_at; Start 21; Stop 45
cactcttgagagaccaaaagtaaaa

SEQ ID NO: 64702 - DNA, 25 bp, Artificial
  probe
  misc_feature (1)..(25): SEQ ID NO: 5921; WAN024ARW_at; Start 5; Stop 29
tcagcacgtccctgtacactcttga

SEQ ID NO: 64703 - DNA, 25 bp, Artificial
  probe
  misc_feature (1)..(25): SEQ ID NO: 5921; WAN024ARW_at; Start 2; Stop 26
ttgtcagcacgtccctgtacactct

SEQ ID NO: 64704 - DNA, 25 bp, Artificial
  probe
  misc_feature (1)..(25): SEQ ID NO: 5921; WAN024ARW_at; Start 12; Stop 36
gtccctgtacactcttgagagacca

SEQ ID NO: 64705 - DNA, 25 bp, Artificial
  probe
  misc_feature (1)..(25): SEQ ID NO: 5921; WAN024ARW_at; Start 3; Stop 27
tgtcagcacgtccctgtacactctt

SEQ ID NO: 64706 - DNA, 25 bp, Artificial
  probe
  misc_feature (1)..(25): SEQ ID NO: 5921; WAN024ARW_at; Start 14; Stop 38
ccctgtacactcttgagagaccaaa

SEQ ID NO: 64707 - DNA, 25 bp, Artificial
  probe
  misc_feature (1)..(25): SEQ ID NO: 5921; WAN024ARW_at; Start 1; Stop 25
tttgtcagcacgtccctgtacactc

SEQ ID NO: 64708 - DNA, 25 bp, Artificial
  probe
  misc_feature (1)..(25): SEQ ID NO: 5921; WAN024ARW_at; Start 20; Stop 44
acactcttgagagaccaaaagtaaa

SEQ ID NO: 64709 - DNA, 25 bp, Artificial
  probe
  misc_feature (1)..(25): SEQ ID NO: 5921; WAN024ARW_at; Start 8; Stop 32
gcacgtccctgtacactcttgagag

SEQ ID NO: 64710 - DNA, 25 bp, Artificial
  probe
  misc_feature (1)..(25): SEQ ID NO: 5921; WAN024ARW_at; Start 6; Stop 30
cagcacgtccctgtacactcttgag

SEQ ID NO: 64711 - DNA, 25 bp, Artificial
  probe
  misc_feature (1)..(25): SEQ ID NO: 5921; WAN024ARW_at; Start 13; Stop 37
tccctgtacactcttgagagaccaa

SEQ ID NO: 64712 - DNA, 25 bp, Artificial
  probe
  misc_feature (1)..(25): SEQ ID NO: 5921; WAN024ARW_at; Start 18; Stop 42
gtacactcttgagagaccaaaagta

SEQ ID NO: 64713 - DNA, 25 bp, Artificial
  probe
  misc_feature (1)..(25): SEQ ID NO: 5921; WAN024ARW_at; Start 10; Stop 34
acgtccctgtacactcttgagagac

SEQ ID NO: 64714 - DNA, 25 bp, Artificial
  probe
  misc_feature (1)..(25): SEQ ID NO: 5921; WAN024ARW_at; Start 11; Stop 35
cgtccctgtacactcttgagagacc

SEQ ID NO: 64715 - DNA, 25 bp, Artificial
  probe
  misc_feature (1)..(25): SEQ ID NO: 5921; WAN024ARW_at; Start 9; Stop 33
cacgtccctgtacactcttgagaga

SEQ ID NO: 64716 - DNA, 25 bp, Artificial
  probe
  misc_feature (1)..(25): SEQ ID NO: 5921; WAN024ARW_at; Start 7; Stop 31
agcacgtccctgtacactcttgaga

SEQ ID NO: 64717 - DNA, 25 bp, Artificial
  probe
  misc_feature (1)..(25): SEQ ID NO: 5921; WAN024ARW_at; Start 15; Stop 39
cctgtacactcttgagagaccaaaa

SEQ ID NO: 64718 - DNA, 25 bp, Artificial
  probe
  misc_feature (1)..(25): SEQ ID NO: 5921; WAN024ARW_at; Start 16; Stop 40
ctgtacactcttgagagaccaaaag

SEQ ID NO: 64719 - DNA, 25 bp, Artificial
  probe
  misc_feature (1)..(25): SEQ ID NO: 5921; WAN024ARW_at; Start 19; Stop 43
tacactcttgagagaccaaaagtaa

SEQ ID NO: 64720 - DNA, 25 bp, Artificial
  probe
  misc_feature (1)..(25): SEQ ID NO: 5921; WAN024ARW_at; Start 17; Stop 41
tgtacactcttgagagaccaaaagt

SEQ ID NO: 64721 - DNA, 25 bp, Artificial
  probe
  misc_feature (1)..(25): SEQ ID NO: 5921; WAN024ARW_at; Start 4; Stop 28
gtcagcacgtccctgtacactcttg

SEQ ID NO: 64722 - DNA, 25 bp, Artificial
  probe
  misc_feature (1)..(25): SEQ ID NO: 4450; WAN024ARX_at; Start 35; Stop 59
gagtgtacagggacgtgctgacaaa

SEQ ID NO: 64723 - DNA, 25 bp, Artificial
  probe
  misc_feature (1)..(25): SEQ ID NO: 4450; WAN024ARX_at; Start 21; Stop 45
ttttggtctctcaagagtgtacagg

SEQ ID NO: 64724 - DNA, 25 bp, Artificial
  probe
  misc_feature (1)..(25): SEQ ID NO: 4450; WAN024ARX_at; Start 16; Stop 40
tttacttttggtctctcaagagtgt

SEQ ID NO: 64725 - DNA, 25 bp, Artificial
  probe
  misc_feature (1)..(25): SEQ ID NO: 4450; WAN024ARX_at; Start 30; Stop 54
ctcaagagtgtacagggacgtgctg

SEQ ID NO: 64726 - DNA, 25 bp, Artificial
  probe
  misc_feature (1)..(25): SEQ ID NO: 4450; WAN024ARX_at; Start 31; Stop 55
tcaagagtgtacagggacgtgctga

SEQ ID NO: 64727 - DNA, 25 bp, Artificial
  probe
  misc_feature (1)..(25): SEQ ID NO: 4450; WAN024ARX_at; Start 20; Stop 44
cttttggtctctcaagagtgtacag

SEQ ID NO: 64728 - DNA, 25 bp, Artificial
  probe
  misc_feature (1)..(25): SEQ ID NO: 4450; WAN024ARX_at; Start 22; Stop 46
tttggtctctcaagagtgtacaggg

SEQ ID NO: 64729 - DNA, 25 bp, Artificial
  probe
  misc_feature (1)..(25): SEQ ID NO: 4450; WAN024ARX_at; Start 32; Stop 56
caagagtgtacagggacgtgctgac

SEQ ID NO: 64730 - DNA, 25 bp, Artificial
  probe
  misc_feature (1)..(25): SEQ ID NO: 4450; WAN024ARX_at; Start 15; Stop 39
ttttacttttggtctctcaagagtg

SEQ ID NO: 64731 - DNA, 25 bp, Artificial
  probe
  misc_feature (1)..(25): SEQ ID NO: 4450; WAN024ARX_at; Start 13; Stop 37
ctttttacttttggtctctcaagag

SEQ ID NO: 64732 - DNA, 25 bp, Artificial
  probe
  misc_feature (1)..(25): SEQ ID NO: 4450; WAN024ARX_at; Start 25; Stop 49
ggtctctcaagagtgtacagggacg

SEQ ID NO: 64733 - DNA, 25 bp, Artificial
  probe
  misc_feature (1)..(25): SEQ ID NO: 4450; WAN024ARX_at; Start 33; Stop 57
aagagtgtacagggacgtgctgaca

SEQ ID NO: 64734 - DNA, 25 bp, Artificial
  probe
  misc_feature (1)..(25): SEQ ID NO: 4450; WAN024ARX_at; Start 27; Stop 51
tctctcaagagtgtacagggacgtg

SEQ ID NO: 64735 - DNA, 25 bp, Artificial
  probe
  misc_feature (1)..(25): SEQ ID NO: 4450; WAN024ARX_at; Start 17; Stop 41
ttacttttggtctctcaagagtgta

SEQ ID NO: 64736 - DNA, 25 bp, Artificial
  probe
  misc_feature (1)..(25): SEQ ID NO: 4450; WAN024ARX_at; Start 28; Stop 52
ctctcaagagtgtacagggacgtgc

SEQ ID NO: 64737 - DNA, 25 bp, Artificial
  probe
  misc_feature (1)..(25): SEQ ID NO: 4450; WAN024ARX_at; Start 19; Stop 43
acttttggtctctcaagagtgtaca

SEQ ID NO: 64738 - DNA, 25 bp, Artificial
  probe
  misc_feature (1)..(25): SEQ ID NO: 4450; WAN024ARX_at; Start 24; Stop 48
tggtctctcaagagtgtacagggac

SEQ ID NO: 64739 - DNA, 25 bp, Artificial
  probe
  misc_feature (1)..(25): SEQ ID NO: 4450; WAN024ARX_at; Start 23; Stop 47
ttggtctctcaagagtgtacaggga

SEQ ID NO: 64740 - DNA, 25 bp, Artificial
  probe
  misc_feature (1)..(25): SEQ ID NO: 4450; WAN024ARX_at; Start 34; Stop 58
agagtgtacagggacgtgctgacaa

SEQ ID NO: 64741 - DNA, 25 bp, Artificial
  probe
  misc_feature (1)..(25): SEQ ID NO: 4450; WAN024ARX_at; Start 29; Stop 53
tctcaagagtgtacagggacgtgct

SEQ ID NO: 64742 - DNA, 25 bp, Artificial
  probe
  misc_feature (1)..(25): SEQ ID NO: 4450; WAN024ARX_at; Start 18; Stop 42
tacttttggtctctcaagagtgtac

SEQ ID NO: 64743 - DNA, 25 bp, Artificial
  probe
  misc_feature (1)..(25): SEQ ID NO: 4450; WAN024ARX_at; Start 26; Stop 50
gtctctcaagagtgtacagggacgt

SEQ ID NO: 64744 - DNA, 25 bp, Artificial
  probe
  misc_feature (1)..(25): SEQ ID NO: 3633; WAN024ARY_at; Start 44; Stop 68
cgcttttttctttgcgatgacaaac

SEQ ID NO: 64745 - DNA, 25 bp, Artificial
  probe
  misc_feature (1)..(25): SEQ ID NO: 3633; WAN024ARY_at; Start 29; Stop 53
ttgacatacaaatgtcgcttttttc

SEQ ID NO: 64746 - DNA, 25 bp, Artificial
  probe
  misc_feature (1)..(25): SEQ ID NO: 3633; WAN024ARY_at; Start 23; Stop 47
acaattttgacatacaaatgtcgct

SEQ ID NO: 64747 - DNA, 25 bp, Artificial
  probe
  misc_feature (1)..(25): SEQ ID NO: 3633; WAN024ARY_at; Start 21; Stop 45
ccacaattttgacatacaaatgtcg

SEQ ID NO: 64748 - DNA, 25 bp, Artificial
  probe
  misc_feature (1)..(25): SEQ ID NO: 3633; WAN024ARY_at; Start 49; Stop 73
ttttctttgcgatgacaaacctctt

SEQ ID NO: 64749 - DNA, 25 bp, Artificial
  probe
  misc_feature (1)..(25): SEQ ID NO: 3633; WAN024ARY_at; Start 50; Stop 74
tttctttgcgatgacaaacctcttt

SEQ ID NO: 64750 - DNA, 25 bp, Artificial
  probe
  misc_feature (1)..(25): SEQ ID NO: 3633; WAN024ARY_at; Start 19; Stop 43
acccacaattttgacatacaaatgt

SEQ ID NO: 64751 - DNA, 25 bp, Artificial
  probe
  misc_feature (1)..(25): SEQ ID NO: 3633; WAN024ARY_at; Start 14; Stop 38
attatacccacaattttgacataca

SEQ ID NO: 64752 - DNA, 25 bp, Artificial
  probe
  misc_feature (1)..(25): SEQ ID NO: 3633; WAN024ARY_at; Start 11; Stop 35
ggaattatacccacaattttgacat

SEQ ID NO: 64753 - DNA, 25 bp, Artificial
  probe
  misc_feature (1)..(25): SEQ ID NO: 3633; WAN024ARY_at; Start 40; Stop 64
atgtcgcttttttctttgcgatgac

SEQ ID NO: 64754 - DNA, 25 bp, Artificial
  probe
  misc_feature (1)..(25): SEQ ID NO: 3633; WAN024ARY_at; Start 20; Stop 44
cccacaattttgacatacaaatgtc

SEQ ID NO: 64755 - DNA, 25 bp, Artificial
  probe
  misc_feature (1)..(25): SEQ ID NO: 3633; WAN024ARY_at; Start 47; Stop 71
ttttttctttgcgatgacaaacctc

SEQ ID NO: 64756 - DNA, 25 bp, Artificial
  probe
  misc_feature (1)..(25): SEQ ID NO: 3633; WAN024ARY_at; Start 35; Stop 59
tacaaatgtcgcttttttctttgcg

SEQ ID NO: 64757 - DNA, 25 bp, Artificial
  probe
  misc_feature (1)..(25): SEQ ID NO: 3633; WAN024ARY_at; Start 16; Stop 40
tatacccacaattttgacatacaaa

SEQ ID NO: 64758 - DNA, 25 bp, Artificial
  probe
  misc_feature (1)..(25): SEQ ID NO: 3633; WAN024ARY_at; Start 41; Stop 65
tgtcgcttttttctttgcgatgaca

SEQ ID NO: 64759 - DNA, 25 bp, Artificial
  probe
  misc_feature (1)..(25): SEQ ID NO: 3633; WAN024ARY_at; Start 18; Stop 42
tacccacaattttgacatacaaatg

SEQ ID NO: 64760 - DNA, 25 bp, Artificial
  probe
  misc_feature (1)..(25): SEQ ID NO: 3633; WAN024ARY_at; Start 15; Stop 39
ttatacccacaattttgacatacaa

SEQ ID NO: 64761 - DNA, 25 bp, Artificial
  probe
  misc_feature (1)..(25): SEQ ID NO: 3633; WAN024ARY_at; Start 22; Stop 46
cacaattttgacatacaaatgtcgc

SEQ ID NO: 64762 - DNA, 25 bp, Artificial
  probe
  misc_feature (1)..(25): SEQ ID NO: 3633; WAN024ARY_at; Start 48; Stop 72
tttttctttgcgatgacaaacctct

SEQ ID NO: 64763 - DNA, 25 bp, Artificial
  probe
  misc_feature (1)..(25): SEQ ID NO: 3633; WAN024ARY_at; Start 12; Stop 36
gaattatacccacaattttgacata

SEQ ID NO: 64764 - DNA, 25 bp, Artificial
  probe
  misc_feature (1)..(25): SEQ ID NO: 3633; WAN024ARY_at; Start 39; Stop 63
aatgtcgcttttttctttgcgatga

SEQ ID NO: 64765 - DNA, 25 bp, Artificial
  probe
  misc_feature (1)..(25): SEQ ID NO: 3633; WAN024ARY_at; Start 43; Stop 67
tcgcttttttctttgcgatgacaaa

SEQ ID NO: 64766 - DNA, 25 bp, Artificial
  probe
  misc_feature (1)..(25): SEQ ID NO: 3633; WAN024ARY_at; Start 36; Stop 60
acaaatgtcgcttttttctttgcga

SEQ ID NO: 64767 - DNA, 25 bp, Artificial
  probe
  misc_feature (1)..(25): SEQ ID NO: 3633; WAN024ARY_at; Start 45; Stop 69
gcttttttctttgcgatgacaaacc

SEQ ID NO: 64768 - DNA, 25 bp, Artificial
  probe
  misc_feature (1)..(25): SEQ ID NO: 3633; WAN024ARY_at; Start 31; Stop 55
gacatacaaatgtcgcttttttctt

SEQ ID NO: 64769 - DNA, 25 bp, Artificial
  probe
  misc_feature (1)..(25): SEQ ID NO: 3633; WAN024ARY_at; Start 13; Stop 37
aattatacccacaattttgacatac

SEQ ID NO: 64770 - DNA, 25 bp, Artificial
  probe
  misc_feature (1)..(25): SEQ ID NO: 3633; WAN024ARY_at; Start 42; Stop 66
gtcgcttttttctttgcgatgacaa

SEQ ID NO: 64771 - DNA, 25 bp, Artificial
  probe
  misc_feature (1)..(25): SEQ ID NO: 3633; WAN024ARY_at; Start 38; Stop 62
aaatgtcgcttttttctttgcgatg

SEQ ID NO: 64772 - DNA, 25 bp, Artificial
  probe
  misc_feature (1)..(25): SEQ ID NO: 3633; WAN024ARY_at; Start 24; Stop 48
caattttgacatacaaatgtcgctt

SEQ ID NO: 64773 - DNA, 25 bp, Artificial
  probe
  misc_feature (1)..(25): SEQ ID NO: 3633; WAN024ARY_at; Start 27; Stop 51
ttttgacatacaaatgtcgcttttt

SEQ ID NO: 64774 - DNA, 25 bp, Artificial
  probe
  misc_feature (1)..(25): SEQ ID NO: 3633; WAN024ARY_at; Start 25; Stop 49
aattttgacatacaaatgtcgcttt

SEQ ID NO: 64775 - DNA, 25 bp, Artificial
  probe
  misc_feature (1)..(25): SEQ ID NO: 3633; WAN024ARY_at; Start 37; Stop 61
caaatgtcgcttttttctttgcgat

SEQ ID NO: 64776 - DNA, 25 bp, Artificial
  probe
  misc_feature (1)..(25): SEQ ID NO: 3633; WAN024ARY_at; Start 10; Stop 34
gggaattatacccacaattttgaca

SEQ ID NO: 64777 - DNA, 25 bp, Artificial
  probe
  misc_feature (1)..(25): SEQ ID NO: 3633; WAN024ARY_at; Start 1; Stop 25
gatatttaggggaattatacccaca

SEQ ID NO: 64778 - DNA, 25 bp, Artificial
  probe
  misc_feature (1)..(25): SEQ ID NO: 126; WAN024ARZ_at; Start 24; Stop 48
aaaaagcgacatttgtatgtcaaaa

SEQ ID NO: 64779 - DNA, 25 bp, Artificial
  probe
  misc_feature (1)..(25): SEQ ID NO: 126; WAN024ARZ_at; Start 27; Stop 51
aagcgacatttgtatgtcaaaattg

SEQ ID NO: 64780 - DNA, 25 bp, Artificial
  probe
  misc_feature (1)..(25): SEQ ID NO: 126; WAN024ARZ_at; Start 22; Stop 46
gaaaaaagcgacatttgtatgtcaa

SEQ ID NO: 64781 - DNA, 25 bp, Artificial
  probe
  misc_feature (1)..(25): SEQ ID NO: 126; WAN024ARZ_at; Start 21; Stop 45
agaaaaaagcgacatttgtatgtca

SEQ ID NO: 64782 - DNA, 25 bp, Artificial
  probe
  misc_feature (1)..(25): SEQ ID NO: 126; WAN024ARZ_at; Start 26; Stop 50
aaagcgacatttgtatgtcaaaatt

SEQ ID NO: 64783 - DNA, 25 bp, Artificial
  probe
  misc_feature (1)..(25): SEQ ID NO: 126; WAN024ARZ_at; Start 3; Stop 27
agaggtttgtcatcgcaaagaaaaa

SEQ ID NO: 64784 - DNA, 25 bp, Artificial
  probe
  misc_feature (1)..(25): SEQ ID NO: 126; WAN024ARZ_at; Start 2; Stop 26
aagaggtttgtcatcgcaaagaaaa

SEQ ID NO: 64785 - DNA, 25 bp, Artificial
  probe
  misc_feature (1)..(25): SEQ ID NO: 126; WAN024ARZ_at; Start 1; Stop 25
aaagaggtttgtcatcgcaaagaaa

SEQ ID NO: 64786 - DNA, 25 bp, Artificial
  probe
  misc_feature (1)..(25): SEQ ID NO: 126; WAN024ARZ_at; Start 15; Stop 39
tcgcaaagaaaaaagcgacatttgt

SEQ ID NO: 64787 - DNA, 25 bp, Artificial
  probe
  misc_feature (1)..(25): SEQ ID NO: 126; WAN024ARZ_at; Start 11; Stop 35
gtcatcgcaaagaaaaaagcgacat

SEQ ID NO: 64788 - DNA, 25 bp, Artificial
  probe
  misc_feature (1)..(25): SEQ ID NO: 126; WAN024ARZ_at; Start 30; Stop 54
cgacatttgtatgtcaaaattgtgg

SEQ ID NO: 64789 - DNA, 25 bp, Artificial
  probe
  misc_feature (1)..(25): SEQ ID NO: 126; WAN024ARZ_at; Start 31; Stop 55
gacatttgtatgtcaaaattgtggg

SEQ ID NO: 64790 - DNA, 25 bp, Artificial
  probe
  misc_feature (1)..(25): SEQ ID NO: 126; WAN024ARZ_at; Start 20; Stop 44
aagaaaaaagcgacatttgtatgtc

SEQ ID NO: 64791 - DNA, 25 bp, Artificial
  probe
  misc_feature (1)..(25): SEQ ID NO: 126; WAN024ARZ_at; Start 6; Stop 30
ggtttgtcatcgcaaagaaaaaagc

SEQ ID NO: 64792 - DNA, 25 bp, Artificial
  probe
  misc_feature (1)..(25): SEQ ID NO: 126; WAN024ARZ_at; Start 19; Stop 43
aaagaaaaaagcgacatttgtatgt

SEQ ID NO: 64793 - DNA, 25 bp, Artificial
  probe
  misc_feature (1)..(25): SEQ ID NO: 126; WAN024ARZ_at; Start 35; Stop 59
tttgtatgtcaaaattgtgggtata

SEQ ID NO: 64794 - DNA, 25 bp, Artificial
  probe
  misc_feature (1)..(25): SEQ ID NO: 126; WAN024ARZ_at; Start 4; Stop 28
gaggtttgtcatcgcaaagaaaaaa

SEQ ID NO: 64795 - DNA, 25 bp, Artificial
  probe
  misc_feature (1)..(25): SEQ ID NO: 126; WAN024ARZ_at; Start 33; Stop 57
catttgtatgtcaaaattgtgggta

SEQ ID NO: 64796 - DNA, 25 bp, Artificial
  probe
  misc_feature (1)..(25): SEQ ID NO: 126; WAN024ARZ_at; Start 7; Stop 31
gtttgtcatcgcaaagaaaaaagcg

SEQ ID NO: 64797 - DNA, 25 bp, Artificial
  probe
  misc_feature (1)..(25): SEQ ID NO: 126; WAN024ARZ_at; Start 41; Stop 65
tgtcaaaattgtgggtataattccc

SEQ ID NO: 64798 - DNA, 25 bp, Artificial
  probe
  misc_feature (1)..(25): SEQ ID NO: 126; WAN024ARZ_at; Start 39; Stop 63
tatgtcaaaattgtgggtataattc

SEQ ID NO: 64799 - DNA, 25 bp, Artificial
  probe
  misc_feature (1)..(25): SEQ ID NO: 126; WAN024ARZ_at; Start 8; Stop 32
tttgtcatcgcaaagaaaaaagcga

SEQ ID NO: 64800 - DNA, 25 bp, Artificial
  probe
  misc_feature (1)..(25): SEQ ID NO: 126; WAN024ARZ_at; Start 10; Stop 34
tgtcatcgcaaagaaaaaagcgaca

SEQ ID NO: 64801 - DNA, 25 bp, Artificial
  probe
  misc_feature (1)..(25): SEQ ID NO: 126; WAN024ARZ_at; Start 14; Stop 38
atcgcaaagaaaaaagcgacatttg

SEQ ID NO: 64802 - DNA, 25 bp, Artificial
  probe
  misc_feature (1)..(25): SEQ ID NO: 126; WAN024ARZ_at; Start 37; Stop 61
tgtatgtcaaaattgtgggtataat

SEQ ID NO: 64803 - DNA, 25 bp, Artificial
  probe
  misc_feature (1)..(25): SEQ ID NO: 126; WAN024ARZ_at; Start 25; Stop 49
aaaagcgacatttgtatgtcaaaat

SEQ ID NO: 64804 - DNA, 25 bp, Artificial
  probe
  misc_feature (1)..(25): SEQ ID NO: 126; WAN024ARZ_at; Start 29; Stop 53
gcgacatttgtatgtcaaaattgtg

SEQ ID NO: 64805 - DNA, 25 bp, Artificial
  probe
  misc_feature (1)..(25): SEQ ID NO: 126; WAN024ARZ_at; Start 13; Stop 37
catcgcaaagaaaaaagcgacattt

SEQ ID NO: 64806 - DNA, 25 bp, Artificial
  probe
  misc_feature (1)..(25): SEQ ID NO: 126; WAN024ARZ_at; Start 9; Stop 33
ttgtcatcgcaaagaaaaaagcgac

SEQ ID NO: 64807 - DNA, 25 bp, Artificial
  probe
  misc_feature (1)..(25): SEQ ID NO: 126; WAN024ARZ_at; Start 50; Stop 74
tgtgggtataattcccctaaatatc

SEQ ID NO: 64808 - DNA, 25 bp, Artificial
  probe
  misc_feature (1)..(25): SEQ ID NO: 126; WAN024ARZ_at; Start 23; Stop 47
aaaaaagcgacatttgtatgtcaaa

SEQ ID NO: 64809 - DNA, 25 bp, Artificial
  probe
  misc_feature (1)..(25): SEQ ID NO: 126; WAN024ARZ_at; Start 16; Stop 40
cgcaaagaaaaaagcgacatttgta

SEQ ID NO: 64810 - DNA, 25 bp, Artificial
  probe
  misc_feature (1)..(25): SEQ ID NO: 126; WAN024ARZ_at; Start 17; Stop 41
gcaaagaaaaaagcgacatttgtat

SEQ ID NO: 64811 - DNA, 25 bp, Artificial
  probe
  misc_feature (1)..(25): SEQ ID NO: 126; WAN024ARZ_at; Start 12; Stop 36
tcatcgcaaagaaaaaagcgacatt

SEQ ID NO: 64812 - DNA, 25 bp, Artificial
  probe
  misc_feature (1)..(25): SEQ ID NO: 3222; WAN024AS2_at; Start 35; Stop 59
gacatttttatctccgtcatttata

SEQ ID NO: 64813 - DNA, 25 bp, Artificial
  probe
  misc_feature (1)..(25): SEQ ID NO: 3222; WAN024AS2_at; Start 146; Stop 170
catgctatactgatatagaaattta

SEQ ID NO: 64814 - DNA, 25 bp, Artificial
  probe
  misc_feature (1)..(25): SEQ ID NO: 3222; WAN024AS2_at; Start 48; Stop 72
ccgtcatttatactgatatataaaa

SEQ ID NO: 64815 - DNA, 25 bp, Artificial
  probe
  misc_feature (1)..(25): SEQ ID NO: 3222; WAN024AS2_at; Start 109; Stop 133
cacaaatcaaagaaaacgcttgcat

SEQ ID NO: 64816 - DNA, 25 bp, Artificial
  probe
  misc_feature (1)..(25): SEQ ID NO: 3222; WAN024AS2_at; Start 115; Stop 139
tcaaagaaaacgcttgcatattgtt

SEQ ID NO: 64817 - DNA, 25 bp, Artificial
  probe
  misc_feature (1)..(25): SEQ ID NO: 3222; WAN024AS2_at; Start 139; Stop 163
tttactacatgctatactgatatag

SEQ ID NO: 64818 - DNA, 25 bp, Artificial
  probe
  misc_feature (1)..(25): SEQ ID NO: 3222; WAN024AS2_at; Start 108; Stop 132
tcacaaatcaaagaaaacgcttgca

SEQ ID NO: 64819 - DNA, 25 bp, Artificial
  probe
  misc_feature (1)..(25): SEQ ID NO: 3222; WAN024AS2_at; Start 123; Stop 147
aacgcttgcatattgttttactaca

SEQ ID NO: 64820 - DNA, 25 bp, Artificial
  probe
  misc_feature (1)..(25): SEQ ID NO: 3222; WAN024AS2_at; Start 45; Stop 69
tctccgtcatttatactgatatata

SEQ ID NO: 64821 - DNA, 25 bp, Artificial
  probe
  misc_feature (1)..(25): SEQ ID NO: 3222; WAN024AS2_at; Start 122; Stop 146
aaacgcttgcatattgttttactac

SEQ ID NO: 64822 - DNA, 25 bp, Artificial
  probe
  misc_feature (1)..(25): SEQ ID NO: 3222; WAN024AS2_at; Start 33; Stop 57
gtgacatttttatctccgtcattta

SEQ ID NO: 64823 - DNA, 25 bp, Artificial
  probe
  misc_feature (1)..(25): SEQ ID NO: 3222; WAN024AS2_at; Start 133; Stop 157
tattgttttactacatgctatactg

SEQ ID NO: 64824 - DNA, 25 bp, Artificial
  probe
  misc_feature (1)..(25): SEQ ID NO: 3222; WAN024AS2_at; Start 36; Stop 60
acatttttatctccgtcatttatac

SEQ ID NO: 64825 - DNA, 25 bp, Artificial
  probe
  misc_feature (1)..(25): SEQ ID NO: 3222; WAN024AS2_at; Start 137; Stop 161
gttttactacatgctatactgatat

SEQ ID NO: 64826 - DNA, 25 bp, Artificial
  probe
  misc_feature (1)..(25): SEQ ID NO: 3222; WAN024AS2_at; Start 116; Stop 140
caaagaaaacgcttgcatattgttt

SEQ ID NO: 64827 - DNA, 25 bp, Artificial
  probe
  misc_feature (1)..(25): SEQ ID NO: 3222; WAN024AS2_at; Start 131; Stop 155
catattgttttactacatgctatac

SEQ ID NO: 64828 - DNA, 25 bp, Artificial
  probe
  misc_feature (1)..(25): SEQ ID NO: 3222; WAN024AS2_at; Start 126; Stop 150
gcttgcatattgttttactacatgc

SEQ ID NO: 64829 - DNA, 25 bp, Artificial
  probe
  misc_feature (1)..(25): SEQ ID NO: 3222; WAN024AS2_at; Start 107; Stop 131
ttcacaaatcaaagaaaacgcttgc

SEQ ID NO: 64830 - DNA, 25 bp, Artificial
  probe
  misc_feature (1)..(25): SEQ ID NO: 3222; WAN024AS2_at; Start 149; Stop 173
gctatactgatatagaaatttattg

SEQ ID NO: 64831 - DNA, 25 bp, Artificial
  probe
  misc_feature (1)..(25): SEQ ID NO: 3222; WAN024AS2_at; Start 120; Stop 144
gaaaacgcttgcatattgttttact

SEQ ID NO: 64832 - DNA, 25 bp, Artificial
  probe
  misc_feature (1)..(25): SEQ ID NO: 3222; WAN024AS2_at; Start 113; Stop 137
aatcaaagaaaacgcttgcatattg

SEQ ID NO: 64833 - DNA, 25 bp, Artificial
  probe
  misc_feature (1)..(25): SEQ ID NO: 3222; WAN024AS2_at; Start 143; Stop 167
ctacatgctatactgatatagaaat

SEQ ID NO: 64834 - DNA, 25 bp, Artificial
  probe
  misc_feature (1)..(25): SEQ ID NO: 3222; WAN024AS2_at; Start 111; Stop 135
caaatcaaagaaaacgcttgcatat

SEQ ID NO: 64835 - DNA, 25 bp, Artificial
  probe
  misc_feature (1)..(25): SEQ ID NO: 3222; WAN024AS2_at; Start 106; Stop 130
tttcacaaatcaaagaaaacgcttg

SEQ ID NO: 64836 - DNA, 25 bp, Artificial
  probe
  misc_feature (1)..(25): SEQ ID NO: 3222; WAN024AS2_at; Start 110; Stop 134
acaaatcaaagaaaacgcttgcata

SEQ ID NO: 64837 - DNA, 25 bp, Artificial
  probe
  misc_feature (1)..(25): SEQ ID NO: 3222; WAN024AS2_at; Start 136; Stop 160
tgttttactacatgctatactgata

SEQ ID NO: 64838 - DNA, 25 bp, Artificial
  probe
  misc_feature (1)..(25): SEQ ID NO: 3222; WAN024AS2_at; Start 141; Stop 165
tactacatgctatactgatatagaa

SEQ ID NO: 64839 - DNA, 25 bp, Artificial
  probe
  misc_feature (1)..(25): SEQ ID NO: 3222; WAN024AS2_at; Start 163; Stop 187
gaaatttattgattggagaatcatt

SEQ ID NO: 64840 - DNA, 25 bp, Artificial
  probe
  misc_feature (1)..(25): SEQ ID NO: 3222; WAN024AS2_at; Start 39; Stop 63
tttttatctccgtcatttatactga

SEQ ID NO: 64841 - DNA, 25 bp, Artificial
  probe
  misc_feature (1)..(25): SEQ ID NO: 3222; WAN024AS2_at; Start 161; Stop 185
tagaaatttattgattggagaatca

SEQ ID NO: 64842 - DNA, 25 bp, Artificial
  probe
  misc_feature (1)..(25): SEQ ID NO: 3222; WAN024AS2_at; Start 119; Stop 143
agaaaacgcttgcatattgttttac

SEQ ID NO: 64843 - DNA, 25 bp, Artificial
  probe
  misc_feature (1)..(25): SEQ ID NO: 3222; WAN024AS2_at; Start 157; Stop 181
gatatagaaatttattgattggaga

SEQ ID NO: 64844 - DNA, 25 bp, Artificial
  probe
  misc_feature (1)..(25): SEQ ID NO: 3222; WAN024AS2_at; Start 125; Stop 149
cgcttgcatattgttttactacatg

SEQ ID NO: 64845 - DNA, 25 bp, Artificial
  probe
  misc_feature (1)..(25): SEQ ID NO: 3222; WAN024AS2_at; Start 43; Stop 67
tatctccgtcatttatactgatata

SEQ ID NO: 64846 - DNA, 25 bp, Artificial
  probe
  misc_feature (1)..(25): SEQ ID NO: 285; WAN024AS3_at; Start 27; Stop 51
atatcagtatagcatgtagtaaaac

SEQ ID NO: 64847 - DNA, 25 bp, Artificial
  probe
  misc_feature (1)..(25): SEQ ID NO: 285; WAN024AS3_at; Start 126; Stop 150
cagtataaatgacggagataaaaat

SEQ ID NO: 64848 - DNA, 25 bp, Artificial
  probe
  misc_feature (1)..(25): SEQ ID NO: 285; WAN024AS3_at; Start 39; Stop 63
catgtagtaaaacaatatgcaagcg

SEQ ID NO: 64849 - DNA, 25 bp, Artificial
  probe
  misc_feature (1)..(25): SEQ ID NO: 285; WAN024AS3_at; Start 31; Stop 55
cagtatagcatgtagtaaaacaata

SEQ ID NO: 64850 - DNA, 25 bp, Artificial
  probe
  misc_feature (1)..(25): SEQ ID NO: 285; WAN024AS3_at; Start 119; Stop 143
tatatatcagtataaatgacggaga

SEQ ID NO: 64851 - DNA, 25 bp, Artificial
  probe
  misc_feature (1)..(25): SEQ ID NO: 285; WAN024AS3_at; Start 58; Stop 82
caagcgttttctttgatttgtgaaa

SEQ ID NO: 64852 - DNA, 25 bp, Artificial
  probe
  misc_feature (1)..(25): SEQ ID NO: 285; WAN024AS3_at; Start 36; Stop 60
tagcatgtagtaaaacaatatgcaa

SEQ ID NO: 64853 - DNA, 25 bp, Artificial
  probe
  misc_feature (1)..(25): SEQ ID NO: 285; WAN024AS3_at; Start 125; Stop 149
tcagtataaatgacggagataaaaa

SEQ ID NO: 64854 - DNA, 25 bp, Artificial
  probe
  misc_feature (1)..(25): SEQ ID NO: 285; WAN024AS3_at; Start 46; Stop 70
taaaacaatatgcaagcgttttctt

SEQ ID NO: 64855 - DNA, 25 bp, Artificial
  probe
  misc_feature (1)..(25): SEQ ID NO: 285; WAN024AS3_at; Start 121; Stop 145
tatatcagtataaatgacggagata

SEQ ID NO: 64856 - DNA, 25 bp, Artificial
  probe
  misc_feature (1)..(25): SEQ ID NO: 285; WAN024AS3_at; Start 38; Stop 62
gcatgtagtaaaacaatatgcaagc

SEQ ID NO: 64857 - DNA, 25 bp, Artificial
  probe
  misc_feature (1)..(25): SEQ ID NO: 285; WAN024AS3_at; Start 41; Stop 65
tgtagtaaaacaatatgcaagcgtt

SEQ ID NO: 64858 - DNA, 25 bp, Artificial
  probe
  misc_feature (1)..(25): SEQ ID NO: 285; WAN024AS3_at; Start 129; Stop 153
tataaatgacggagataaaaatgtc

SEQ ID NO: 64859 - DNA, 25 bp, Artificial
  probe
  misc_feature (1)..(25): SEQ ID NO: 285; WAN024AS3_at; Start 57; Stop 81
gcaagcgttttctttgatttgtgaa

SEQ ID NO: 64860 - DNA, 25 bp, Artificial
  probe
  misc_feature (1)..(25): SEQ ID NO: 285; WAN024AS3_at; Start 131; Stop 155
taaatgacggagataaaaatgtcac

SEQ ID NO: 64861 - DNA, 25 bp, Artificial
  probe
  misc_feature (1)..(25): SEQ ID NO: 285; WAN024AS3_at; Start 56; Stop 80
tgcaagcgttttctttgatttgtga

SEQ ID NO: 64862 - DNA, 25 bp, Artificial
  probe
  misc_feature (1)..(25): SEQ ID NO: 285; WAN024AS3_at; Start 23; Stop 47
ttctatatcagtatagcatgtagta

SEQ ID NO: 64863 - DNA, 25 bp, Artificial
  probe
  misc_feature (1)..(25): SEQ ID NO: 285; WAN024AS3_at; Start 4; Stop 28
gattctccaatcaataaatttctat

SEQ ID NO: 64864 - DNA, 25 bp, Artificial
  probe
  misc_feature (1)..(25): SEQ ID NO: 285; WAN024AS3_at; Start 21; Stop 45
atttctatatcagtatagcatgtag

SEQ ID NO: 64865 - DNA, 25 bp, Artificial
  probe
  misc_feature (1)..(25): SEQ ID NO: 285; WAN024AS3_at; Start 15; Stop 39
caataaatttctatatcagtatagc

SEQ ID NO: 64866 - DNA, 25 bp, Artificial
  probe
  misc_feature (1)..(25): SEQ ID NO: 285; WAN024AS3_at; Start 123; Stop 147
tatcagtataaatgacggagataaa

SEQ ID NO: 64867 - DNA, 25 bp, Artificial
  probe
  misc_feature (1)..(25): SEQ ID NO: 285; WAN024AS3_at; Start 51; Stop 75
caatatgcaagcgttttctttgatt

SEQ ID NO: 64868 - DNA, 25 bp, Artificial
  probe
  misc_feature (1)..(25): SEQ ID NO: 285; WAN024AS3_at; Start 18; Stop 42
taaatttctatatcagtatagcatg

SEQ ID NO: 64869 - DNA, 25 bp, Artificial
  probe
  misc_feature (1)..(25): SEQ ID NO: 285; WAN024AS3_at; Start 45; Stop 69
gtaaaacaatatgcaagcgttttct

SEQ ID NO: 64870 - DNA, 25 bp, Artificial
  probe
  misc_feature (1)..(25): SEQ ID NO: 285; WAN024AS3_at; Start 30; Stop 54
tcagtatagcatgtagtaaaacaat

SEQ ID NO: 64871 - DNA, 25 bp, Artificial
  probe
  misc_feature (1)..(25): SEQ ID NO: 285; WAN024AS3_at; Start 42; Stop 66
gtagtaaaacaatatgcaagcgttt

SEQ ID NO: 64872 - DNA, 25 bp, Artificial
  probe
  misc_feature (1)..(25): SEQ ID NO: 285; WAN024AS3_at; Start 25; Stop 49
ctatatcagtatagcatgtagtaaa

SEQ ID NO: 64873 - DNA, 25 bp, Artificial
  probe
  misc_feature (1)..(25): SEQ ID NO: 285; WAN024AS3_at; Start 49; Stop 73
aacaatatgcaagcgttttctttga

SEQ ID NO: 64874 - DNA, 25 bp, Artificial
  probe
  misc_feature (1)..(25): SEQ ID NO: 285; WAN024AS3_at; Start 43; Stop 67
tagtaaaacaatatgcaagcgtttt

SEQ ID NO: 64875 - DNA, 25 bp, Artificial
  probe
  misc_feature (1)..(25): SEQ ID NO: 285; WAN024AS3_at; Start 34; Stop 58
tatagcatgtagtaaaacaatatgc

SEQ ID NO: 64876 - DNA, 25 bp, Artificial
  probe
  misc_feature (1)..(25): SEQ ID NO: 285; WAN024AS3_at; Start 9; Stop 33
tccaatcaataaatttctatatcag

SEQ ID NO: 64877 - DNA, 25 bp, Artificial
  probe
  misc_feature (1)..(25): SEQ ID NO: 285; WAN024AS3_at; Start 44; Stop 68
agtaaaacaatatgcaagcgttttc

SEQ ID NO: 64878 - DNA, 25 bp, Artificial
  probe
  misc_feature (1)..(25): SEQ ID NO: 285; WAN024AS3_at; Start 28; Stop 52
tatcagtatagcatgtagtaaaaca

SEQ ID NO: 64879 - DNA, 25 bp, Artificial
  probe
  misc_feature (1)..(25): SEQ ID NO: 285; WAN024AS3_at; Start 54; Stop 78
tatgcaagcgttttctttgatttgt

SEQ ID NO: 64880 - DNA, 25 bp, Artificial
  probe
  misc_feature (1)..(25): SEQ ID NO: 371; WAN024AS4_at; Start 65; Stop 89
tttgttgtcctaataaacttgatta

SEQ ID NO: 64881 - DNA, 25 bp, Artificial
  probe
  misc_feature (1)..(25): SEQ ID NO: 371; WAN024AS4_at; Start 59; Stop 83
acaatatttgttgtcctaataaact

SEQ ID NO: 64882 - DNA, 25 bp, Artificial
  probe
  misc_feature (1)..(25): SEQ ID NO: 371; WAN024AS4_at; Start 9; Stop 33
tcctatagaaaaatcccccaagcat

SEQ ID NO: 64883 - DNA, 25 bp, Artificial
  probe
  misc_feature (1)..(25): SEQ ID NO: 371; WAN024AS4_at; Start 26; Stop 50
ccaagcattatagctcgggggatta

SEQ ID NO: 64884 - DNA, 25 bp, Artificial
  probe
  misc_feature (1)..(25): SEQ ID NO: 371; WAN024AS4_at; Start 18; Stop 42
aaaatcccccaagcattatagctcg

SEQ ID NO: 64885 - DNA, 25 bp, Artificial
  probe
  misc_feature (1)..(25): SEQ ID NO: 371; WAN024AS4_at; Start 15; Stop 39
agaaaaatcccccaagcattatagc

SEQ ID NO: 64886 - DNA, 25 bp, Artificial
  probe
  misc_feature (1)..(25): SEQ ID NO: 371; WAN024AS4_at; Start 27; Stop 51
caagcattatagctcgggggattaa

SEQ ID NO: 64887 - DNA, 25 bp, Artificial
  probe
  misc_feature (1)..(25): SEQ ID NO: 371; WAN024AS4_at; Start 66; Stop 90
ttgttgtcctaataaacttgattag

SEQ ID NO: 64888 - DNA, 25 bp, Artificial
  probe
  misc_feature (1)..(25): SEQ ID NO: 371; WAN024AS4_at; Start 68; Stop 92
gttgtcctaataaacttgattagga

SEQ ID NO: 64889 - DNA, 25 bp, Artificial
  probe
  misc_feature (1)..(25): SEQ ID NO: 371; WAN024AS4_at; Start 57; Stop 81
gtacaatatttgttgtcctaataaa

SEQ ID NO: 64890 - DNA, 25 bp, Artificial
  probe
  misc_feature (1)..(25): SEQ ID NO: 371; WAN024AS4_at; Start 70; Stop 94
tgtcctaataaacttgattaggatt

SEQ ID NO: 64891 - DNA, 25 bp, Artificial
  probe
  misc_feature (1)..(25): SEQ ID NO: 371; WAN024AS4_at; Start 17; Stop 41
aaaaatcccccaagcattatagctc

SEQ ID NO: 64892 - DNA, 25 bp, Artificial
  probe
  misc_feature (1)..(25): SEQ ID NO: 371; WAN024AS4_at; Start 60; Stop 84
caatatttgttgtcctaataaactt

SEQ ID NO: 64893 - DNA, 25 bp, Artificial
  probe
  misc_feature (1)..(25): SEQ ID NO: 371; WAN024AS4_at; Start 63; Stop 87
tatttgttgtcctaataaacttgat

SEQ ID NO: 64894 - DNA, 25 bp, Artificial
  probe
  misc_feature (1)..(25): SEQ ID NO: 371; WAN024AS4_at; Start 10; Stop 34
cctatagaaaaatcccccaagcatt

SEQ ID NO: 64895 - DNA, 25 bp, Artificial
  probe
  misc_feature (1)..(25): SEQ ID NO: 371; WAN024AS4_at; Start 8; Stop 32
ctcctatagaaaaatcccccaagca

SEQ ID NO: 64896 - DNA, 25 bp, Artificial
  probe
  misc_feature (1)..(25): SEQ ID NO: 371; WAN024AS4_at; Start 14; Stop 38
tagaaaaatcccccaagcattatag

SEQ ID NO: 64897 - DNA, 25 bp, Artificial
  probe
  misc_feature (1)..(25): SEQ ID NO: 371; WAN024AS4_at; Start 12; Stop 36
tatagaaaaatcccccaagcattat

SEQ ID NO: 64898 - DNA, 25 bp, Artificial
  probe
  misc_feature (1)..(25): SEQ ID NO: 371; WAN024AS4_at; Start 67; Stop 91
tgttgtcctaataaacttgattagg

SEQ ID NO: 64899 - DNA, 25 bp, Artificial
  probe
  misc_feature (1)..(25): SEQ ID NO: 371; WAN024AS4_at; Start 19; Stop 43
aaatcccccaagcattatagctcgg

SEQ ID NO: 64900 - DNA, 25 bp, Artificial
  probe
  misc_feature (1)..(25): SEQ ID NO: 371; WAN024AS4_at; Start 30; Stop 54
gcattatagctcgggggattaattt

SEQ ID NO: 64901 - DNA, 25 bp, Artificial
  probe
  misc_feature (1)..(25): SEQ ID NO: 371; WAN024AS4_at; Start 20; Stop 44
aatcccccaagcattatagctcggg

SEQ ID NO: 64902 - DNA, 25 bp, Artificial
  probe
  misc_feature (1)..(25): SEQ ID NO: 371; WAN024AS4_at; Start 64; Stop 88
atttgttgtcctaataaacttgatt

SEQ ID NO: 64903 - DNA, 25 bp, Artificial
  probe
  misc_feature (1)..(25): SEQ ID NO: 371; WAN024AS4_at; Start 13; Stop 37
atagaaaaatcccccaagcattata

SEQ ID NO: 64904 - DNA, 25 bp, Artificial
  probe
  misc_feature (1)..(25): SEQ ID NO: 371; WAN024AS4_at; Start 16; Stop 40
gaaaaatcccccaagcattatagct

SEQ ID NO: 64905 - DNA, 25 bp, Artificial
  probe
  misc_feature (1)..(25): SEQ ID NO: 371; WAN024AS4_at; Start 29; Stop 53
agcattatagctcgggggattaatt

SEQ ID NO: 64906 - DNA, 25 bp, Artificial
  probe
  misc_feature (1)..(25): SEQ ID NO: 371; WAN024AS4_at; Start 24; Stop 48
ccccaagcattatagctcgggggat

SEQ ID NO: 64907 - DNA, 25 bp, Artificial
  probe
  misc_feature (1)..(25): SEQ ID NO: 371; WAN024AS4_at; Start 69; Stop 93
ttgtcctaataaacttgattaggat

SEQ ID NO: 64908 - DNA, 25 bp, Artificial
  probe
  misc_feature (1)..(25): SEQ ID NO: 371; WAN024AS4_at; Start 31; Stop 55
cattatagctcgggggattaatttt

SEQ ID NO: 64909 - DNA, 25 bp, Artificial
  probe
  misc_feature (1)..(25): SEQ ID NO: 371; WAN024AS4_at; Start 58; Stop 82
tacaatatttgttgtcctaataaac

SEQ ID NO: 64910 - DNA, 25 bp, Artificial
  probe
  misc_feature (1)..(25): SEQ ID NO: 371; WAN024AS4_at; Start 62; Stop 86
atatttgttgtcctaataaacttga

SEQ ID NO: 64911 - DNA, 25 bp, Artificial
  probe
  misc_feature (1)..(25): SEQ ID NO: 371; WAN024AS4_at; Start 61; Stop 85
aatatttgttgtcctaataaacttg

SEQ ID NO: 64912 - DNA, 25 bp, Artificial
  probe
  misc_feature (1)..(25): SEQ ID NO: 371; WAN024AS4_at; Start 25; Stop 49
cccaagcattatagctcgggggatt

SEQ ID NO: 64913 - DNA, 25 bp, Artificial
  probe
  misc_feature (1)..(25): SEQ ID NO: 371; WAN024AS4_at; Start 11; Stop 35
ctatagaaaaatcccccaagcatta

SEQ ID NO: 64914 - DNA, 25 bp, Artificial
  probe
  misc_feature (1)..(25): SEQ ID NO: 4394; WAN024AS5_at; Start 67; Stop 91
atgcttgggggatttttctatagga

SEQ ID NO: 64915 - DNA, 25 bp, Artificial
  probe
  misc_feature (1)..(25): SEQ ID NO: 4394; WAN024AS5_at; Start 62; Stop 86
ctataatgcttgggggatttttcta

SEQ ID NO: 64916 - DNA, 25 bp, Artificial
  probe
  misc_feature (1)..(25): SEQ ID NO: 4394; WAN024AS5_at; Start 7; Stop 31
atcctaatcaagtttattaggacaa

SEQ ID NO: 64917 - DNA, 25 bp, Artificial
  probe
  misc_feature (1)..(25): SEQ ID NO: 4394; WAN024AS5_at; Start 57; Stop 81
ccgagctataatgcttgggggattt

SEQ ID NO: 64918 - DNA, 25 bp, Artificial
  probe
  misc_feature (1)..(25): SEQ ID NO: 4394; WAN024AS5_at; Start 14; Stop 38
tcaagtttattaggacaacaaatat

SEQ ID NO: 64919 - DNA, 25 bp, Artificial
  probe
  misc_feature (1)..(25): SEQ ID NO: 4394; WAN024AS5_at; Start 12; Stop 36
aatcaagtttattaggacaacaaat

SEQ ID NO: 64920 - DNA, 25 bp, Artificial
  probe
  misc_feature (1)..(25): SEQ ID NO: 4394; WAN024AS5_at; Start 51; Stop 75
aatcccccgagctataatgcttggg

SEQ ID NO: 64921 - DNA, 25 bp, Artificial
  probe
  misc_feature (1)..(25): SEQ ID NO: 4394; WAN024AS5_at; Start 47; Stop 71
aattaatcccccgagctataatgct

SEQ ID NO: 64922 - DNA, 25 bp, Artificial
  probe
  misc_feature (1)..(25): SEQ ID NO: 4394; WAN024AS5_at; Start 61; Stop 85
gctataatgcttgggggatttttct

SEQ ID NO: 64923 - DNA, 25 bp, Artificial
  probe
  misc_feature (1)..(25): SEQ ID NO: 4394; WAN024AS5_at; Start 9; Stop 33
cctaatcaagtttattaggacaaca

SEQ ID NO: 64924 - DNA, 25 bp, Artificial
  probe
  misc_feature (1)..(25): SEQ ID NO: 4394; WAN024AS5_at; Start 55; Stop 79
ccccgagctataatgcttgggggat

SEQ ID NO: 64925 - DNA, 25 bp, Artificial
  probe
  misc_feature (1)..(25): SEQ ID NO: 4394; WAN024AS5_at; Start 56; Stop 80
cccgagctataatgcttgggggatt

SEQ ID NO: 64926 - DNA, 25 bp, Artificial
  probe
  misc_feature (1)..(25): SEQ ID NO: 4394; WAN024AS5_at; Start 16; Stop 40
aagtttattaggacaacaaatattg

SEQ ID NO: 64927 - DNA, 25 bp, Artificial
  probe
  misc_feature (1)..(25): SEQ ID NO: 4394; WAN024AS5_at; Start 11; Stop 35
taatcaagtttattaggacaacaaa

SEQ ID NO: 64928 - DNA, 25 bp, Artificial
  probe
  misc_feature (1)..(25): SEQ ID NO: 4394; WAN024AS5_at; Start 19; Stop 43
tttattaggacaacaaatattgtac

SEQ ID NO: 64929 - DNA, 25 bp, Artificial
  probe
  misc_feature (1)..(25): SEQ ID NO: 4394; WAN024AS5_at; Start 53; Stop 77
tcccccgagctataatgcttggggg

SEQ ID NO: 64930 - DNA, 25 bp, Artificial
  probe
  misc_feature (1)..(25): SEQ ID NO: 4394; WAN024AS5_at; Start 63; Stop 87
tataatgcttgggggatttttctat

SEQ ID NO: 64931 - DNA, 25 bp, Artificial
  probe
  misc_feature (1)..(25): SEQ ID NO: 4394; WAN024AS5_at; Start 52; Stop 76
atcccccgagctataatgcttgggg

SEQ ID NO: 64932 - DNA, 25 bp, Artificial
  probe
  misc_feature (1)..(25): SEQ ID NO: 4394; WAN024AS5_at; Start 10; Stop 34
ctaatcaagtttattaggacaacaa

SEQ ID NO: 64933 - DNA, 25 bp, Artificial
  probe
  misc_feature (1)..(25): SEQ ID NO: 4394; WAN024AS5_at; Start 66; Stop 90
aatgcttgggggatttttctatagg

SEQ ID NO: 64934 - DNA, 25 bp, Artificial
  probe
  misc_feature (1)..(25): SEQ ID NO: 4394; WAN024AS5_at; Start 15; Stop 39
caagtttattaggacaacaaatatt

SEQ ID NO: 64935 - DNA, 25 bp, Artificial
  probe
  misc_feature (1)..(25): SEQ ID NO: 4394; WAN024AS5_at; Start 8; Stop 32
tcctaatcaagtttattaggacaac

SEQ ID NO: 64936 - DNA, 25 bp, Artificial
  probe
  misc_feature (1)..(25): SEQ ID NO: 4394; WAN024AS5_at; Start 50; Stop 74
taatcccccgagctataatgcttgg

SEQ ID NO: 64937 - DNA, 25 bp, Artificial
  probe
  misc_feature (1)..(25): SEQ ID NO: 4394; WAN024AS5_at; Start 65; Stop 89
taatgcttgggggatttttctatag

SEQ ID NO: 64938 - DNA, 25 bp, Artificial
  probe
  misc_feature (1)..(25): SEQ ID NO: 4394; WAN024AS5_at; Start 18; Stop 42
gtttattaggacaacaaatattgta

SEQ ID NO: 64939 - DNA, 25 bp, Artificial
  probe
  misc_feature (1)..(25): SEQ ID NO: 4394; WAN024AS5_at; Start 60; Stop 84
agctataatgcttgggggatttttc

SEQ ID NO: 64940 - DNA, 25 bp, Artificial
  probe
  misc_feature (1)..(25): SEQ ID NO: 4394; WAN024AS5_at; Start 54; Stop 78
cccccgagctataatgcttggggga

SEQ ID NO: 64941 - DNA, 25 bp, Artificial
  probe
  misc_feature (1)..(25): SEQ ID NO: 4394; WAN024AS5_at; Start 48; Stop 72
attaatcccccgagctataatgctt

SEQ ID NO: 64942 - DNA, 25 bp, Artificial
  probe
  misc_feature (1)..(25): SEQ ID NO: 4394; WAN024AS5_at; Start 13; Stop 37
atcaagtttattaggacaacaaata

SEQ ID NO: 64943 - DNA, 25 bp, Artificial
  probe
  misc_feature (1)..(25): SEQ ID NO: 4394; WAN024AS5_at; Start 68; Stop 92
tgcttgggggatttttctataggag

SEQ ID NO: 64944 - DNA, 25 bp, Artificial
  probe
  misc_feature (1)..(25): SEQ ID NO: 4394; WAN024AS5_at; Start 17; Stop 41
agtttattaggacaacaaatattgt

SEQ ID NO: 64945 - DNA, 25 bp, Artificial
  probe
  misc_feature (1)..(25): SEQ ID NO: 4394; WAN024AS5_at; Start 58; Stop 82
cgagctataatgcttgggggatttt

SEQ ID NO: 64946 - DNA, 25 bp, Artificial
  probe
  misc_feature (1)..(25): SEQ ID NO: 4394; WAN024AS5_at; Start 49; Stop 73
ttaatcccccgagctataatgcttg

SEQ ID NO: 64947 - DNA, 25 bp, Artificial
  probe
  misc_feature (1)..(25): SEQ ID NO: 4394; WAN024AS5_at; Start 6; Stop 30
aatcctaatcaagtttattaggaca

SEQ ID NO: 64948 - DNA, 25 bp, Artificial
  probe
  misc_feature (1)..(25): SEQ ID NO: 482; WAN024AS6_at; Start 3; Stop 27
tatatacgacacaggcaagctgtgc

SEQ ID NO: 64949 - DNA, 25 bp, Artificial
  probe
  misc_feature (1)..(25): SEQ ID NO: 482; WAN024AS6_at; Start 108; Stop 132
caagagtaaaaattggtatagttca

SEQ ID NO: 64950 - DNA, 25 bp, Artificial
  probe
  misc_feature (1)..(25): SEQ ID NO: 482; WAN024AS6_at; Start 25; Stop 49
tgctttctccttaaaattggtatag

SEQ ID NO: 64951 - DNA, 25 bp, Artificial
  probe
  misc_feature (1)..(25): SEQ ID NO: 482; WAN024AS6_at; Start 144; Stop 168
tgtaagcataaaaactctgaccgat

SEQ ID NO: 64952 - DNA, 25 bp, Artificial
  probe
  misc_feature (1)..(25): SEQ ID NO: 482; WAN024AS6_at; Start 101; Stop 125
cacttgtcaagagtaaaaattggta

SEQ ID NO: 64953 - DNA, 25 bp, Artificial
  probe
  misc_feature (1)..(25): SEQ ID NO: 482; WAN024AS6_at; Start 149; Stop 173
gcataaaaactctgaccgattggga

SEQ ID NO: 64954 - DNA, 25 bp, Artificial
  probe
  misc_feature (1)..(25): SEQ ID NO: 482; WAN024AS6_at; Start 142; Stop 166
cctgtaagcataaaaactctgaccg

SEQ ID NO: 64955 - DNA, 25 bp, Artificial
  probe
  misc_feature (1)..(25): SEQ ID NO: 482; WAN024AS6_at; Start 17; Stop 41
gcaagctgtgctttctccttaaaat

SEQ ID NO: 64956 - DNA, 25 bp, Artificial
  probe
  misc_feature (1)..(25): SEQ ID NO: 482; WAN024AS6_at; Start 1; Stop 25
agtatatacgacacaggcaagctgt

SEQ ID NO: 64957 - DNA, 25 bp, Artificial
  probe
  misc_feature (1)..(25): SEQ ID NO: 482; WAN024AS6_at; Start 136; Stop 160
taagctcctgtaagcataaaaactc

SEQ ID NO: 64958 - DNA, 25 bp, Artificial
  probe
  misc_feature (1)..(25): SEQ ID NO: 482; WAN024AS6_at; Start 84; Stop 108
tatatacttgtttctttcacttgtc

SEQ ID NO: 64959 - DNA, 25 bp, Artificial
  probe
  misc_feature (1)..(25): SEQ ID NO: 482; WAN024AS6_at; Start 156; Stop 180
aactctgaccgattgggataatcag

SEQ ID NO: 64960 - DNA, 25 bp, Artificial
  probe
  misc_feature (1)..(25): SEQ ID NO: 482; WAN024AS6_at; Start 165; Stop 189
cgattgggataatcagtcagagtcc

SEQ ID NO: 64961 - DNA, 25 bp, Artificial
  probe
  misc_feature (1)..(25): SEQ ID NO: 482; WAN024AS6_at; Start 146; Stop 170
taagcataaaaactctgaccgattg

SEQ ID NO: 64962 - DNA, 25 bp, Artificial
  probe
  misc_feature (1)..(25): SEQ ID NO: 482; WAN024AS6_at; Start 66; Stop 90
tagaatcagcaaaaacagtatatac

SEQ ID NO: 64963 - DNA, 25 bp, Artificial
  probe
  misc_feature (1)..(25): SEQ ID NO: 482; WAN024AS6_at; Start 59; Stop 83
tcttttatagaatcagcaaaaacag

SEQ ID NO: 64964 - DNA, 25 bp, Artificial
  probe
  misc_feature (1)..(25): SEQ ID NO: 482; WAN024AS6_at; Start 7; Stop 31
tacgacacaggcaagctgtgctttc

SEQ ID NO: 64965 - DNA, 25 bp, Artificial
  probe
  misc_feature (1)..(25): SEQ ID NO: 482; WAN024AS6_at; Start 71; Stop 95
tcagcaaaaacagtatatacttgtt

SEQ ID NO: 64966 - DNA, 25 bp, Artificial
  probe
  misc_feature (1)..(25): SEQ ID NO: 482; WAN024AS6_at; Start 158; Stop 182
ctctgaccgattgggataatcagtc

SEQ ID NO: 64967 - DNA, 25 bp, Artificial
  probe
  misc_feature (1)..(25): SEQ ID NO: 482; WAN024AS6_at; Start 130; Stop 154
tcaaattaagctcctgtaagcataa

SEQ ID NO: 64968 - DNA, 25 bp, Artificial
  probe
  misc_feature (1)..(25): SEQ ID NO: 482; WAN024AS6_at; Start 14; Stop 38
caggcaagctgtgctttctccttaa

SEQ ID NO: 64969 - DNA, 25 bp, Artificial
  probe
  misc_feature (1)..(25): SEQ ID NO: 482; WAN024AS6_at; Start 121; Stop 145
tggtatagttcaaattaagctcctg

SEQ ID NO: 64970 - DNA, 25 bp, Artificial
  probe
  misc_feature (1)..(25): SEQ ID NO: 482; WAN024AS6_at; Start 30; Stop 54
tctccttaaaattggtatagtctaa

SEQ ID NO: 64971 - DNA, 25 bp, Artificial
  probe
  misc_feature (1)..(25): SEQ ID NO: 482; WAN024AS6_at; Start 10; Stop 34
gacacaggcaagctgtgctttctcc

SEQ ID NO: 64972 - DNA, 25 bp, Artificial
  probe
  misc_feature (1)..(25): SEQ ID NO: 482; WAN024AS6_at; Start 168; Stop 192
ttgggataatcagtcagagtccttt

SEQ ID NO: 64973 - DNA, 25 bp, Artificial
  probe
  misc_feature (1)..(25): SEQ ID NO: 482; WAN024AS6_at; Start 21; Stop 45
gctgtgctttctccttaaaattggt

SEQ ID NO: 64974 - DNA, 25 bp, Artificial
  probe
  misc_feature (1)..(25): SEQ ID NO: 482; WAN024AS6_at; Start 139; Stop 163
gctcctgtaagcataaaaactctga

SEQ ID NO: 64975 - DNA, 25 bp, Artificial
  probe
  misc_feature (1)..(25): SEQ ID NO: 482; WAN024AS6_at; Start 126; Stop 150
tagttcaaattaagctcctgtaagc

SEQ ID NO: 64976 - DNA, 25 bp, Artificial
  probe
  misc_feature (1)..(25): SEQ ID NO: 482; WAN024AS6_at; Start 162; Stop 186
gaccgattgggataatcagtcagag

SEQ ID NO: 64977 - DNA, 25 bp, Artificial
  probe
  misc_feature (1)..(25): SEQ ID NO: 482; WAN024AS6_at; Start 152; Stop 176
taaaaactctgaccgattgggataa

SEQ ID NO: 64978 - DNA, 25 bp, Artificial
  probe
  misc_feature (1)..(25): SEQ ID NO: 482; WAN024AS6_at; Start 89; Stop 113
acttgtttctttcacttgtcaagag

SEQ ID NO: 64979 - DNA, 25 bp, Artificial
  probe
  misc_feature (1)..(25): SEQ ID NO: 482; WAN024AS6_at; Start 154; Stop 178
aaaactctgaccgattgggataatc

SEQ ID NO: 64980 - DNA, 25 bp, Artificial
  probe
  misc_feature (1)..(25): SEQ ID NO: 482; WAN024AS6_at; Start 36; Stop 60
taaaattggtatagtctaattcatc

SEQ ID NO: 64981 - DNA, 25 bp, Artificial
  probe
  misc_feature (1)..(25): SEQ ID NO: 482; WAN024AS6_at; Start 52; Stop 76
taattcatcttttatagaatcagca

SEQ ID NO: 64982 - DNA, 25 bp, Artificial
  probe
  misc_feature (1)..(25): SEQ ID NO: 133; WAN024AS7_at; Start 168; Stop 192
acagcttgcctgtgtcgtatatact

SEQ ID NO: 64983 - DNA, 25 bp, Artificial
  probe
  misc_feature (1)..(25): SEQ ID NO: 133; WAN024AS7_at; Start 149; Stop 173
ccaattttaaggagaaagcacagct

SEQ ID NO: 64984 - DNA, 25 bp, Artificial
  probe
  misc_feature (1)..(25): SEQ ID NO: 133; WAN024AS7_at; Start 78; Stop 102
tactcttgacaagtgaaagaaacaa

SEQ ID NO: 64985 - DNA, 25 bp, Artificial
  probe
  misc_feature (1)..(25): SEQ ID NO: 133; WAN024AS7_at; Start 160; Stop 184
gagaaagcacagcttgcctgtgtcg

SEQ ID NO: 64986 - DNA, 25 bp, Artificial
  probe
  misc_feature (1)..(25): SEQ ID NO: 133; WAN024AS7_at; Start 15; Stop 39
gattatcccaatcggtcagagtttt

SEQ ID NO: 64987 - DNA, 25 bp, Artificial
  probe
  misc_feature (1)..(25): SEQ ID NO: 133; WAN024AS7_at; Start 156; Stop 180
taaggagaaagcacagcttgcctgt

SEQ ID NO: 64988 - DNA, 25 bp, Artificial
  probe
  misc_feature (1)..(25): SEQ ID NO: 133; WAN024AS7_at; Start 30; Stop 54
tcagagtttttatgcttacaggagc

SEQ ID NO: 64989 - DNA, 25 bp, Artificial
  probe
  misc_feature (1)..(25): SEQ ID NO: 133; WAN024AS7_at; Start 70; Stop 94
ccaatttttactcttgacaagtgaa

SEQ ID NO: 64990 - DNA, 25 bp, Artificial
  probe
  misc_feature (1)..(25): SEQ ID NO: 133; WAN024AS7_at; Start 103; Stop 127
gtatatactgtttttgctgattcta

SEQ ID NO: 64991 - DNA, 25 bp, Artificial
  probe
  misc_feature (1)..(25): SEQ ID NO: 133; WAN024AS7_at; Start 8; Stop 32
tctgactgattatcccaatcggtca

SEQ ID NO: 64992 - DNA, 25 bp, Artificial
  probe
  misc_feature (1)..(25): SEQ ID NO: 133; WAN024AS7_at; Start 11; Stop 35
gactgattatcccaatcggtcagag

SEQ ID NO: 64993 - DNA, 25 bp, Artificial
  probe
  misc_feature (1)..(25): SEQ ID NO: 133; WAN024AS7_at; Start 23; Stop 47
caatcggtcagagtttttatgctta

SEQ ID NO: 64994 - DNA, 25 bp, Artificial
  probe
  misc_feature (1)..(25): SEQ ID NO: 133; WAN024AS7_at; Start 89; Stop 113
agtgaaagaaacaagtatatactgt

SEQ ID NO: 64995 - DNA, 25 bp, Artificial
  probe
  misc_feature (1)..(25): SEQ ID NO: 133; WAN024AS7_at; Start 27; Stop 51
cggtcagagtttttatgcttacagg

SEQ ID NO: 64996 - DNA, 25 bp, Artificial
  probe
  misc_feature (1)..(25): SEQ ID NO: 133; WAN024AS7_at; Start 62; Stop 86
gaactataccaatttttactcttga

SEQ ID NO: 64997 - DNA, 25 bp, Artificial
  probe
  misc_feature (1)..(25): SEQ ID NO: 133; WAN024AS7_at; Start 84; Stop 108
tgacaagtgaaagaaacaagtatat

SEQ ID NO: 64998 - DNA, 25 bp, Artificial
  probe
  misc_feature (1)..(25): SEQ ID NO: 133; WAN024AS7_at; Start 33; Stop 57
gagtttttatgcttacaggagctta

SEQ ID NO: 64999 - DNA, 25 bp, Artificial
  probe
  misc_feature (1)..(25): SEQ ID NO: 133; WAN024AS7_at; Start 5; Stop 29
gactctgactgattatcccaatcgg

SEQ ID NO: 65000 - DNA, 25 bp, Artificial
  probe
  misc_feature (1)..(25): SEQ ID NO: 133; WAN024AS7_at; Start 48; Stop 72
caggagcttaatttgaactatacca

SEQ ID NO: 65001 - DNA, 25 bp, Artificial
  probe
  misc_feature (1)..(25): SEQ ID NO: 133; WAN024AS7_at; Start 50; Stop 74
ggagcttaatttgaactataccaat

SEQ ID NO: 65002 - DNA, 25 bp, Artificial
  probe
  misc_feature (1)..(25): SEQ ID NO: 133; WAN024AS7_at; Start 162; Stop 186
gaaagcacagcttgcctgtgtcgta

SEQ ID NO: 65003 - DNA, 25 bp, Artificial
  probe
  misc_feature (1)..(25): SEQ ID NO: 133; WAN024AS7_at; Start 154; Stop 178
tttaaggagaaagcacagcttgcct

SEQ ID NO: 65004 - DNA, 25 bp, Artificial
  probe
  misc_feature (1)..(25): SEQ ID NO: 133; WAN024AS7_at; Start 128; Stop 152
taaaagatgaattagactataccaa

SEQ ID NO: 65005 - DNA, 25 bp, Artificial
  probe
  misc_feature (1)..(25): SEQ ID NO: 133; WAN024AS7_at; Start 68; Stop 92
taccaatttttactcttgacaagtg

SEQ ID NO: 65006 - DNA, 25 bp, Artificial
  probe
  misc_feature (1)..(25): SEQ ID NO: 133; WAN024AS7_at; Start 145; Stop 169
tataccaattttaaggagaaagcac

SEQ ID NO: 65007 - DNA, 25 bp, Artificial
  probe
  misc_feature (1)..(25): SEQ ID NO: 133; WAN024AS7_at; Start 40; Stop 64
tatgcttacaggagcttaatttgaa

SEQ ID NO: 65008 - DNA, 25 bp, Artificial
  probe
  misc_feature (1)..(25): SEQ ID NO: 133; WAN024AS7_at; Start 166; Stop 190
gcacagcttgcctgtgtcgtatata

SEQ ID NO: 65009 - DNA, 25 bp, Artificial
  probe
  misc_feature (1)..(25): SEQ ID NO: 133; WAN024AS7_at; Start 140; Stop 164
tagactataccaattttaaggagaa

SEQ ID NO: 65010 - DNA, 25 bp, Artificial
  probe
  misc_feature (1)..(25): SEQ ID NO: 133; WAN024AS7_at; Start 1; Stop 25
aaaggactctgactgattatcccaa

SEQ ID NO: 65011 - DNA, 25 bp, Artificial
  probe
  misc_feature (1)..(25): SEQ ID NO: 133; WAN024AS7_at; Start 147; Stop 171
taccaattttaaggagaaagcacag

SEQ ID NO: 65012 - DNA, 25 bp, Artificial
  probe
  misc_feature (1)..(25): SEQ ID NO: 133; WAN024AS7_at; Start 43; Stop 67
gcttacaggagcttaatttgaacta

SEQ ID NO: 65013 - DNA, 25 bp, Artificial
  probe
  misc_feature (1)..(25): SEQ ID NO: 133; WAN024AS7_at; Start 20; Stop 44
tcccaatcggtcagagtttttatgc

SEQ ID NO: 65014 - DNA, 25 bp, Artificial
  probe
  misc_feature (1)..(25): SEQ ID NO: 133; WAN024AS7_at; Start 114; Stop 138
ttttgctgattctataaaagatgaa

SEQ ID NO: 65015 - DNA, 25 bp, Artificial
  probe
  misc_feature (1)..(25): SEQ ID NO: 133; WAN024AS7_at; Start 152; Stop 176
attttaaggagaaagcacagcttgc

SEQ ID NO: 65016 - DNA, 25 bp, Artificial
  probe
  misc_feature (1)..(25): SEQ ID NO: 192; WAN024AS8_at; Start 21; Stop 45
ctcatttctcccattatacagaaaa

SEQ ID NO: 65017 - DNA, 25 bp, Artificial
  probe
  misc_feature (1)..(25): SEQ ID NO: 192; WAN024AS8_at; Start 8; Stop 32
acctctttatctactcatttctccc

SEQ ID NO: 65018 - DNA, 25 bp, Artificial
  probe
  misc_feature (1)..(25): SEQ ID NO: 192; WAN024AS8_at; Start 15; Stop 39
tatctactcatttctcccattatac

SEQ ID NO: 65019 - DNA, 25 bp, Artificial
  probe
  misc_feature (1)..(25): SEQ ID NO: 192; WAN024AS8_at; Start 75; Stop 99
cttgtttttcttctgattatagttt

SEQ ID NO: 65020 - DNA, 25 bp, Artificial
  probe
  misc_feature (1)..(25): SEQ ID NO: 192; WAN024AS8_at; Start 6; Stop 30
ttacctctttatctactcatttctc

SEQ ID NO: 65021 - DNA, 25 bp, Artificial
  probe
  misc_feature (1)..(25): SEQ ID NO: 192; WAN024AS8_at; Start 74; Stop 98
ccttgtttttcttctgattatagtt

SEQ ID NO: 65022 - DNA, 25 bp, Artificial
  probe
  misc_feature (1)..(25): SEQ ID NO: 192; WAN024AS8_at; Start 11; Stop 35
tctttatctactcatttctcccatt

SEQ ID NO: 65023 - DNA, 25 bp, Artificial
  probe
  misc_feature (1)..(25): SEQ ID NO: 192; WAN024AS8_at; Start 10; Stop 34
ctctttatctactcatttctcccat

SEQ ID NO: 65024 - DNA, 25 bp, Artificial
  probe
  misc_feature (1)..(25): SEQ ID NO: 192; WAN024AS8_at; Start 2; Stop 26
acatttacctctttatctactcatt

SEQ ID NO: 65025 - DNA, 25 bp, Artificial
  probe
  misc_feature (1)..(25): SEQ ID NO: 192; WAN024AS8_at; Start 71; Stop 95
tttccttgtttttcttctgattata

SEQ ID NO: 65026 - DNA, 25 bp, Artificial
  probe
  misc_feature (1)..(25): SEQ ID NO: 192; WAN024AS8_at; Start 12; Stop 36
ctttatctactcatttctcccatta

SEQ ID NO: 65027 - DNA, 25 bp, Artificial
  probe
  misc_feature (1)..(25): SEQ ID NO: 192; WAN024AS8_at; Start 4; Stop 28
atttacctctttatctactcatttc

SEQ ID NO: 65028 - DNA, 25 bp, Artificial
  probe
  misc_feature (1)..(25): SEQ ID NO: 192; WAN024AS8_at; Start 9; Stop 33
cctctttatctactcatttctccca

SEQ ID NO: 65029 - DNA, 25 bp, Artificial
  probe
  misc_feature (1)..(25): SEQ ID NO: 192; WAN024AS8_at; Start 22; Stop 46
tcatttctcccattatacagaaaaa

SEQ ID NO: 65030 - DNA, 25 bp, Artificial
  probe
  misc_feature (1)..(25): SEQ ID NO: 192; WAN024AS8_at; Start 3; Stop 27
catttacctctttatctactcattt

SEQ ID NO: 65031 - DNA, 25 bp, Artificial
  probe
  misc_feature (1)..(25): SEQ ID NO: 192; WAN024AS8_at; Start 7; Stop 31
tacctctttatctactcatttctcc

SEQ ID NO: 65032 - DNA, 25 bp, Artificial
  probe
  misc_feature (1)..(25): SEQ ID NO: 192; WAN024AS8_at; Start 16; Stop 40
atctactcatttctcccattataca

SEQ ID NO: 65033 - DNA, 25 bp, Artificial
  probe
  misc_feature (1)..(25): SEQ ID NO: 192; WAN024AS8_at; Start 17; Stop 41
tctactcatttctcccattatacag

SEQ ID NO: 65034 - DNA, 25 bp, Artificial
  probe
  misc_feature (1)..(25): SEQ ID NO: 192; WAN024AS8_at; Start 26; Stop 50
ttctcccattatacagaaaaaacaa

SEQ ID NO: 65035 - DNA, 25 bp, Artificial
  probe
  misc_feature (1)..(25): SEQ ID NO: 192; WAN024AS8_at; Start 18; Stop 42
ctactcatttctcccattatacaga

SEQ ID NO: 65036 - DNA, 25 bp, Artificial
  probe
  misc_feature (1)..(25): SEQ ID NO: 192; WAN024AS8_at; Start 19; Stop 43
tactcatttctcccattatacagaa

SEQ ID NO: 65037 - DNA, 25 bp, Artificial
  probe
  misc_feature (1)..(25): SEQ ID NO: 192; WAN024AS8_at; Start 23; Stop 47
catttctcccattatacagaaaaaa

SEQ ID NO: 65038 - DNA, 25 bp, Artificial
  probe
  misc_feature (1)..(25): SEQ ID NO: 192; WAN024AS8_at; Start 20; Stop 44
actcatttctcccattatacagaaa

SEQ ID NO: 65039 - DNA, 25 bp, Artificial
  probe
  misc_feature (1)..(25): SEQ ID NO: 192; WAN024AS8_at; Start 73; Stop 97
tccttgtttttcttctgattatagt

SEQ ID NO: 65040 - DNA, 25 bp, Artificial
  probe
  misc_feature (1)..(25): SEQ ID NO: 192; WAN024AS8_at; Start 25; Stop 49
tttctcccattatacagaaaaaaca

SEQ ID NO: 65041 - DNA, 25 bp, Artificial
  probe
  misc_feature (1)..(25): SEQ ID NO: 192; WAN024AS8_at; Start 1; Stop 25
aacatttacctctttatctactcat

SEQ ID NO: 65042 - DNA, 25 bp, Artificial
  probe
  misc_feature (1)..(25): SEQ ID NO: 192; WAN024AS8_at; Start 14; Stop 38
ttatctactcatttctcccattata

SEQ ID NO: 65043 - DNA, 25 bp, Artificial
  probe
  misc_feature (1)..(25): SEQ ID NO: 192; WAN024AS8_at; Start 5; Stop 29
tttacctctttatctactcatttct

SEQ ID NO: 65044 - DNA, 25 bp, Artificial
  probe
  misc_feature (1)..(25): SEQ ID NO: 192; WAN024AS8_at; Start 28; Stop 52
ctcccattatacagaaaaaacaagg

SEQ ID NO: 65045 - DNA, 25 bp, Artificial
  probe
  misc_feature (1)..(25): SEQ ID NO: 192; WAN024AS8_at; Start 27; Stop 51
tctcccattatacagaaaaaacaag

SEQ ID NO: 65046 - DNA, 25 bp, Artificial
  probe
  misc_feature (1)..(25): SEQ ID NO: 192; WAN024AS8_at; Start 13; Stop 37
tttatctactcatttctcccattat

SEQ ID NO: 65047 - DNA, 25 bp, Artificial
  probe
  misc_feature (1)..(25): SEQ ID NO: 192; WAN024AS8_at; Start 72; Stop 96
ttccttgtttttcttctgattatag

SEQ ID NO: 65048 - DNA, 25 bp, Artificial
  probe
  misc_feature (1)..(25): SEQ ID NO: 115; WAN024AS9_at; Start 64; Stop 88
taatgggagaaatgagtagataaag

SEQ ID NO: 65049 - DNA, 25 bp, Artificial
  probe
  misc_feature (1)..(25): SEQ ID NO: 115; WAN024AS9_at; Start 65; Stop 89
aatgggagaaatgagtagataaaga

SEQ ID NO: 65050 - DNA, 25 bp, Artificial
  probe
  misc_feature (1)..(25): SEQ ID NO: 115; WAN024AS9_at; Start 49; Stop 73
cttgttttttctgtataatgggaga

SEQ ID NO: 65051 - DNA, 25 bp, Artificial
  probe
  misc_feature (1)..(25): SEQ ID NO: 115; WAN024AS9_at; Start 75; Stop 99
atgagtagataaagaggtaaatgtt

SEQ ID NO: 65052 - DNA, 25 bp, Artificial
  probe
  misc_feature (1)..(25): SEQ ID NO: 115; WAN024AS9_at; Start 48; Stop 72
ccttgttttttctgtataatgggag

SEQ ID NO: 65053 - DNA, 25 bp, Artificial
  probe
  misc_feature (1)..(25): SEQ ID NO: 115; WAN024AS9_at; Start 60; Stop 84
tgtataatgggagaaatgagtagat

SEQ ID NO: 65054 - DNA, 25 bp, Artificial
  probe
  misc_feature (1)..(25): SEQ ID NO: 115; WAN024AS9_at; Start 5; Stop 29
tataatcagaagaaaaacaaggaaa

SEQ ID NO: 65055 - DNA, 25 bp, Artificial
  probe
  misc_feature (1)..(25): SEQ ID NO: 115; WAN024AS9_at; Start 51; Stop 75
tgttttttctgtataatgggagaaa

SEQ ID NO: 65056 - DNA, 25 bp, Artificial
  probe
  misc_feature (1)..(25): SEQ ID NO: 115; WAN024AS9_at; Start 62; Stop 86
tataatgggagaaatgagtagataa

SEQ ID NO: 65057 - DNA, 25 bp, Artificial
  probe
  misc_feature (1)..(25): SEQ ID NO: 115; WAN024AS9_at; Start 50; Stop 74
ttgttttttctgtataatgggagaa

SEQ ID NO: 65058 - DNA, 25 bp, Artificial
  probe
  misc_feature (1)..(25): SEQ ID NO: 115; WAN024AS9_at; Start 61; Stop 85
gtataatgggagaaatgagtagata

SEQ ID NO: 65059 - DNA, 25 bp, Artificial
  probe
  misc_feature (1)..(25): SEQ ID NO: 115; WAN024AS9_at; Start 67; Stop 91
tgggagaaatgagtagataaagagg

SEQ ID NO: 65060 - DNA, 25 bp, Artificial
  probe
  misc_feature (1)..(25): SEQ ID NO: 115; WAN024AS9_at; Start 1; Stop 25
aaactataatcagaagaaaaacaag

SEQ ID NO: 65061 - DNA, 25 bp, Artificial
  probe
  misc_feature (1)..(25): SEQ ID NO: 115; WAN024AS9_at; Start 70; Stop 94
gagaaatgagtagataaagaggtaa

SEQ ID NO: 65062 - DNA, 25 bp, Artificial
  probe
  misc_feature (1)..(25): SEQ ID NO: 115; WAN024AS9_at; Start 63; Stop 87
ataatgggagaaatgagtagataaa

SEQ ID NO: 65063 - DNA, 25 bp, Artificial
  probe
  misc_feature (1)..(25): SEQ ID NO: 115; WAN024AS9_at; Start 71; Stop 95
agaaatgagtagataaagaggtaaa

SEQ ID NO: 65064 - DNA, 25 bp, Artificial
  probe
  misc_feature (1)..(25): SEQ ID NO: 115; WAN024AS9_at; Start 3; Stop 27
actataatcagaagaaaaacaagga

SEQ ID NO: 65065 - DNA, 25 bp, Artificial
  probe
  misc_feature (1)..(25): SEQ ID NO: 115; WAN024AS9_at; Start 55; Stop 79
ttttctgtataatgggagaaatgag

SEQ ID NO: 65066 - DNA, 25 bp, Artificial
  probe
  misc_feature (1)..(25): SEQ ID NO: 115; WAN024AS9_at; Start 53; Stop 77
ttttttctgtataatgggagaaatg

SEQ ID NO: 65067 - DNA, 25 bp, Artificial
  probe
  misc_feature (1)..(25): SEQ ID NO: 115; WAN024AS9_at; Start 68; Stop 92
gggagaaatgagtagataaagaggt

SEQ ID NO: 65068 - DNA, 25 bp, Artificial
  probe
  misc_feature (1)..(25): SEQ ID NO: 115; WAN024AS9_at; Start 56; Stop 80
tttctgtataatgggagaaatgagt

SEQ ID NO: 65069 - DNA, 25 bp, Artificial
  probe
  misc_feature (1)..(25): SEQ ID NO: 115; WAN024AS9_at; Start 2; Stop 26
aactataatcagaagaaaaacaagg

SEQ ID NO: 65070 - DNA, 25 bp, Artificial
  probe
  misc_feature (1)..(25): SEQ ID NO: 115; WAN024AS9_at; Start 72; Stop 96
gaaatgagtagataaagaggtaaat

SEQ ID NO: 65071 - DNA, 25 bp, Artificial
  probe
  misc_feature (1)..(25): SEQ ID NO: 115; WAN024AS9_at; Start 74; Stop 98
aatgagtagataaagaggtaaatgt

SEQ ID NO: 65072 - DNA, 25 bp, Artificial
  probe
  misc_feature (1)..(25): SEQ ID NO: 115; WAN024AS9_at; Start 59; Stop 83
ctgtataatgggagaaatgagtaga

SEQ ID NO: 65073 - DNA, 25 bp, Artificial
  probe
  misc_feature (1)..(25): SEQ ID NO: 115; WAN024AS9_at; Start 57; Stop 81
ttctgtataatgggagaaatgagta

SEQ ID NO: 65074 - DNA, 25 bp, Artificial
  probe
  misc_feature (1)..(25): SEQ ID NO: 115; WAN024AS9_at; Start 69; Stop 93
ggagaaatgagtagataaagaggta

SEQ ID NO: 65075 - DNA, 25 bp, Artificial
  probe
  misc_feature (1)..(25): SEQ ID NO: 115; WAN024AS9_at; Start 66; Stop 90
atgggagaaatgagtagataaagag

SEQ ID NO: 65076 - DNA, 25 bp, Artificial
  probe
  misc_feature (1)..(25): SEQ ID NO: 115; WAN024AS9_at; Start 58; Stop 82
tctgtataatgggagaaatgagtag

SEQ ID NO: 65077 - DNA, 25 bp, Artificial
  probe
  misc_feature (1)..(25): SEQ ID NO: 115; WAN024AS9_at; Start 73; Stop 97
aaatgagtagataaagaggtaaatg

SEQ ID NO: 65078 - DNA, 25 bp, Artificial
  probe
  misc_feature (1)..(25): SEQ ID NO: 115; WAN024AS9_at; Start 54; Stop 78
tttttctgtataatgggagaaatga

SEQ ID NO: 65079 - DNA, 25 bp, Artificial
  probe
  misc_feature (1)..(25): SEQ ID NO: 115; WAN024AS9_at; Start 4; Stop 28
ctataatcagaagaaaaacaaggaa

SEQ ID NO: 65080 - DNA, 25 bp, Artificial
  probe
  misc_feature (1)..(25): SEQ ID NO: 7074; WAN024ASA_s_at; Start 115; Stop 139
aatagagctaaaaaactccacctga

SEQ ID NO: 65081 - DNA, 25 bp, Artificial
  probe
  misc_feature (1)..(25): SEQ ID NO: 7074; WAN024ASA_s_at; Start 112; Stop 136
tgaaatagagctaaaaaactccacc

SEQ ID NO: 65082 - DNA, 25 bp, Artificial
  probe
  misc_feature (1)..(25): SEQ ID NO: 7074; WAN024ASA_s_at; Start 110; Stop 134
cctgaaatagagctaaaaaactcca

SEQ ID NO: 65083 - DNA, 25 bp, Artificial
  probe
  misc_feature (1)..(25): SEQ ID NO: 7074; WAN024ASA_s_at; Start 111; Stop 135
ctgaaatagagctaaaaaactccac

SEQ ID NO: 65084 - DNA, 25 bp, Artificial
  probe
  misc_feature (1)..(25): SEQ ID NO: 7074; WAN024ASA_s_at; Start 114; Stop 138
aaatagagctaaaaaactccacctg

SEQ ID NO: 65085 - DNA, 25 bp, Artificial
  probe
  misc_feature (1)..(25): SEQ ID NO: 7186; WAN024ASB_s_at; Start 8; Stop 32
gtggagttttttagctctatttcag

SEQ ID NO: 65086 - DNA, 25 bp, Artificial
  probe
  misc_feature (1)..(25): SEQ ID NO: 7186; WAN024ASB_s_at; Start 5; Stop 29
caggtggagttttttagctctattt

SEQ ID NO: 65087 - DNA, 25 bp, Artificial
  probe
  misc_feature (1)..(25): SEQ ID NO: 7186; WAN024ASB_s_at; Start 7; Stop 31
ggtggagttttttagctctatttca

SEQ ID NO: 65088 - DNA, 25 bp, Artificial
  probe
  misc_feature (1)..(25): SEQ ID NO: 7186; WAN024ASB_s_at; Start 9; Stop 33
tggagttttttagctctatttcagg

SEQ ID NO: 65089 - DNA, 25 bp, Artificial
  probe
  misc_feature (1)..(25): SEQ ID NO: 7186; WAN024ASB_s_at; Start 4; Stop 28
tcaggtggagttttttagctctatt

SEQ ID NO: 65090 - DNA, 25 bp, Artificial
  probe
  misc_feature (1)..(25): SEQ ID NO: 4595; WAN024ASC_at; Start 124; Stop 148
taactaagaaataggtctgtggtcg

SEQ ID NO: 65091 - DNA, 25 bp, Artificial
  probe
  misc_feature (1)..(25): SEQ ID NO: 4595; WAN024ASC_at; Start 202; Stop 226
ggaactactgtaataatgattttgc

SEQ ID NO: 65092 - DNA, 25 bp, Artificial
  probe
  misc_feature (1)..(25): SEQ ID NO: 4595; WAN024ASC_at; Start 322; Stop 346
cgttctcttaatcttaaccgtcttg

SEQ ID NO: 65093 - DNA, 25 bp, Artificial
  probe
  misc_feature (1)..(25): SEQ ID NO: 4595; WAN024ASC_at; Start 161; Stop 185
caaactcaatttgattgtaagtgac

SEQ ID NO: 65094 - DNA, 25 bp, Artificial
  probe
  misc_feature (1)..(25): SEQ ID NO: 4595; WAN024ASC_at; Start 135; Stop 159
taggtctgtggtcgcttcagctagt

SEQ ID NO: 65095 - DNA, 25 bp, Artificial
  probe
  misc_feature (1)..(25): SEQ ID NO: 4595; WAN024ASC_at; Start 278; Stop 302
cgtttacgaaatcaaaatttctatg

SEQ ID NO: 65096 - DNA, 25 bp, Artificial
  probe
  misc_feature (1)..(25): SEQ ID NO: 4595; WAN024ASC_at; Start 231; Stop 255
ctagtagtggcgtattaaatgagaa

SEQ ID NO: 65097 - DNA, 25 bp, Artificial
  probe
  misc_feature (1)..(25): SEQ ID NO: 4595; WAN024ASC_at; Start 330; Stop 354
taatcttaaccgtcttgtcgtacag

SEQ ID NO: 65098 - DNA, 25 bp, Artificial
  probe
  misc_feature (1)..(25): SEQ ID NO: 4595; WAN024ASC_at; Start 333; Stop 357
tcttaaccgtcttgtcgtacagcgg

SEQ ID NO: 65099 - DNA, 25 bp, Artificial
  probe
  misc_feature (1)..(25): SEQ ID NO: 4595; WAN024ASC_at; Start 348; Stop 372
cgtacagcggttgaagaaaatgtaa

SEQ ID NO: 65100 - DNA, 25 bp, Artificial
  probe
  misc_feature (1)..(25): SEQ ID NO: 4595; WAN024ASC_at; Start 411; Stop 435
ggaattgagtactagttctatatca

SEQ ID NO: 65101 - DNA, 25 bp, Artificial
  probe
  misc_feature (1)..(25): SEQ ID NO: 4595; WAN024ASC_at; Start 395; Stop 419
tatgggataataaaaaggaattgag

SEQ ID NO: 65102 - DNA, 25 bp, Artificial
  probe
  misc_feature (1)..(25): SEQ ID NO: 4595; WAN024ASC_at; Start 302; Stop 326
gaaattgatagaatccctaacgttc

SEQ ID NO: 65103 - DNA, 25 bp, Artificial
  probe
  misc_feature (1)..(25): SEQ ID NO: 4595; WAN024ASC_at; Start 218; Stop 242
tgattttgcttgtctagtagtggcg

SEQ ID NO: 65104 - DNA, 25 bp, Artificial
  probe
  misc_feature (1)..(25): SEQ ID NO: 4595; WAN024ASC_at; Start 270; Stop 294
tgtctcttcgtttacgaaatcaaaa

SEQ ID NO: 65105 - DNA, 25 bp, Artificial
  probe
  misc_feature (1)..(25): SEQ ID NO: 4595; WAN024ASC_at; Start 139; Stop 163
tctgtggtcgcttcagctagttcaa

SEQ ID NO: 65106 - DNA, 25 bp, Artificial
  probe
  misc_feature (1)..(25): SEQ ID NO: 4595; WAN024ASC_at; Start 148; Stop 172
gcttcagctagttcaaactcaattt

SEQ ID NO: 65107 - DNA, 25 bp, Artificial
  probe
  misc_feature (1)..(25): SEQ ID NO: 4595; WAN024ASC_at; Start 339; Stop 363
ccgtcttgtcgtacagcggttgaag

SEQ ID NO: 65108 - DNA, 25 bp, Artificial
  probe
  misc_feature (1)..(25): SEQ ID NO: 4595; WAN024ASC_at; Start 264; Stop 288
taagattgtctcttcgtttacgaaa

SEQ ID NO: 65109 - DNA, 25 bp, Artificial
  probe
  misc_feature (1)..(25): SEQ ID NO: 4595; WAN024ASC_at; Start 381; Stop 405
caaaattcgtgaactatgggataat

SEQ ID NO: 65110 - DNA, 25 bp, Artificial
  probe
  misc_feature (1)..(25): SEQ ID NO: 4595; WAN024ASC_at; Start 308; Stop 332
gatagaatccctaacgttctcttaa

SEQ ID NO: 65111 - DNA, 25 bp, Artificial
  probe
  misc_feature (1)..(25): SEQ ID NO: 4595; WAN024ASC_at; Start 388; Stop 412
cgtgaactatgggataataaaaagg

SEQ ID NO: 65112 - DNA, 25 bp, Artificial
  probe
  misc_feature (1)..(25): SEQ ID NO: 4595; WAN024ASC_at; Start 225; Stop 249
gcttgtctagtagtggcgtattaaa

SEQ ID NO: 65113 - DNA, 25 bp, Artificial
  probe
  misc_feature (1)..(25): SEQ ID NO: 4595; WAN024ASC_at; Start 117; Stop 141
gcgaatataactaagaaataggtct

SEQ ID NO: 65114 - DNA, 25 bp, Artificial
  probe
  misc_feature (1)..(25): SEQ ID NO: 4595; WAN024ASC_at; Start 144; Stop 168
ggtcgcttcagctagttcaaactca

SEQ ID NO: 65115 - DNA, 25 bp, Artificial
  probe
  misc_feature (1)..(25): SEQ ID NO: 4595; WAN024ASC_at; Start 167; Stop 191
caatttgattgtaagtgactgttaa

SEQ ID NO: 65116 - DNA, 25 bp, Artificial
  probe
  misc_feature (1)..(25): SEQ ID NO: 4595; WAN024ASC_at; Start 345; Stop 369
tgtcgtacagcggttgaagaaaatg

SEQ ID NO: 65117 - DNA, 25 bp, Artificial
  probe
  misc_feature (1)..(25): SEQ ID NO: 4595; WAN024ASC_at; Start 299; Stop 323
tatgaaattgatagaatccctaacg

SEQ ID NO: 65118 - DNA, 25 bp, Artificial
  probe
  misc_feature (1)..(25): SEQ ID NO: 4595; WAN024ASC_at; Start 128; Stop 152
taagaaataggtctgtggtcgcttc

SEQ ID NO: 65119 - DNA, 25 bp, Artificial
  probe
  misc_feature (1)..(25): SEQ ID NO: 4595; WAN024ASC_at; Start 251; Stop 275
gagaagtgacatgtaagattgtctc

SEQ ID NO: 65120 - DNA, 25 bp, Artificial
  probe
  misc_feature (1)..(25): SEQ ID NO: 4595; WAN024ASC_at; Start 173; Stop 197
gattgtaagtgactgttaattgaag

SEQ ID NO: 65121 - DNA, 25 bp, Artificial
  probe
  misc_feature (1)..(25): SEQ ID NO: 4595; WAN024ASC_at; Start 237; Stop 261
gtggcgtattaaatgagaagtgaca

SEQ ID NO: 65122 - DNA, 25 bp, Artificial
  probe
  misc_feature (1)..(25): SEQ ID NO: 4595; WAN024ASC_at; Start 131; Stop 155
gaaataggtctgtggtcgcttcagc

SEQ ID NO: 65123 - DNA, 25 bp, Artificial
  probe
  misc_feature (1)..(25): SEQ ID NO: 4595; WAN024ASC_at; Start 376; Stop 400
tttgacaaaattcgtgaactatggg

SEQ ID NO: 65124 - DNA, 25 bp, Artificial
  probe
  misc_feature (1)..(25): SEQ ID NO: 1712; WAN024ASD_at; Start 86; Stop 110
tacgacaagacggttaagattaaga

SEQ ID NO: 65125 - DNA, 25 bp, Artificial
  probe
  misc_feature (1)..(25): SEQ ID NO: 1712; WAN024ASD_at; Start 115; Stop 139
gttagggattctatcaatttcatag

SEQ ID NO: 65126 - DNA, 25 bp, Artificial
  probe
  misc_feature (1)..(25): SEQ ID NO: 1712; WAN024ASD_at; Start 204; Stop 228
tagacaagcaaaatcattattacag

SEQ ID NO: 65127 - DNA, 25 bp, Artificial
  probe
  misc_feature (1)..(25): SEQ ID NO: 1712; WAN024ASD_at; Start 193; Stop 217
tacgccactactagacaagcaaaat

SEQ ID NO: 65128 - DNA, 25 bp, Artificial
  probe
  misc_feature (1)..(25): SEQ ID NO: 1712; WAN024ASD_at; Start 275; Stop 299
tgaactagctgaagcgaccacagac

SEQ ID NO: 65129 - DNA, 25 bp, Artificial
  probe
  misc_feature (1)..(25): SEQ ID NO: 1712; WAN024ASD_at; Start 75; Stop 99
ttcaaccgctgtacgacaagacggt

SEQ ID NO: 65130 - DNA, 25 bp, Artificial
  probe
  misc_feature (1)..(25): SEQ ID NO: 1712; WAN024ASD_at; Start 260; Stop 284
caatcaaattgagtttgaactagct

SEQ ID NO: 65131 - DNA, 25 bp, Artificial
  probe
  misc_feature (1)..(25): SEQ ID NO: 1712; WAN024ASD_at; Start 248; Stop 272
aacagtcacttacaatcaaattgag

SEQ ID NO: 65132 - DNA, 25 bp, Artificial
  probe
  misc_feature (1)..(25): SEQ ID NO: 1712; WAN024ASD_at; Start 135; Stop 159
catagaaattttgatttcgtaaacg

SEQ ID NO: 65133 - DNA, 25 bp, Artificial
  probe
  misc_feature (1)..(25): SEQ ID NO: 1712; WAN024ASD_at; Start 182; Stop 206
ttctcatttaatacgccactactag

SEQ ID NO: 65134 - DNA, 25 bp, Artificial
  probe
  misc_feature (1)..(25): SEQ ID NO: 1712; WAN024ASD_at; Start 176; Stop 200
tgtcacttctcatttaatacgccac

SEQ ID NO: 65135 - DNA, 25 bp, Artificial
  probe
  misc_feature (1)..(25): SEQ ID NO: 1712; WAN024ASD_at; Start 158; Stop 182
cgaagagacaatcttacatgtcact

SEQ ID NO: 65136 - DNA, 25 bp, Artificial
  probe
  misc_feature (1)..(25): SEQ ID NO: 1712; WAN024ASD_at; Start 214; Stop 238
aaatcattattacagtagttccagt

SEQ ID NO: 65137 - DNA, 25 bp, Artificial
  probe
  misc_feature (1)..(25): SEQ ID NO: 1712; WAN024ASD_at; Start 25; Stop 49
cctttttattatcccatagttcacg

SEQ ID NO: 65138 - DNA, 25 bp, Artificial
  probe
  misc_feature (1)..(25): SEQ ID NO: 1712; WAN024ASD_at; Start 81; Stop 105
cgctgtacgacaagacggttaagat

SEQ ID NO: 65139 - DNA, 25 bp, Artificial
  probe
  misc_feature (1)..(25): SEQ ID NO: 1712; WAN024ASD_at; Start 111; Stop 135
gaacgttagggattctatcaatttc

SEQ ID NO: 65140 - DNA, 25 bp, Artificial
  probe
  misc_feature (1)..(25): SEQ ID NO: 1712; WAN024ASD_at; Start 19; Stop 43
tcaattcctttttattatcccatag

SEQ ID NO: 65141 - DNA, 25 bp, Artificial
  probe
  misc_feature (1)..(25): SEQ ID NO: 1712; WAN024ASD_at; Start 162; Stop 186
gagacaatcttacatgtcacttctc

SEQ ID NO: 65142 - DNA, 25 bp, Artificial
  probe
  misc_feature (1)..(25): SEQ ID NO: 1712; WAN024ASD_at; Start 3; Stop 27
gatatagaactagtactcaattcct

SEQ ID NO: 65143 - DNA, 25 bp, Artificial
  probe
  misc_feature (1)..(25): SEQ ID NO: 1712; WAN024ASD_at; Start 106; Stop 130
taagagaacgttagggattctatca

SEQ ID NO: 65144 - DNA, 25 bp, Artificial
  probe
  misc_feature (1)..(25): SEQ ID NO: 1712; WAN024ASD_at; Start 91; Stop 115
caagacggttaagattaagagaacg

SEQ ID NO: 65145 - DNA, 25 bp, Artificial
  probe
  misc_feature (1)..(25): SEQ ID NO: 1712; WAN024ASD_at; Start 269; Stop 293
tgagtttgaactagctgaagcgacc

SEQ ID NO: 65146 - DNA, 25 bp, Artificial
  probe
  misc_feature (1)..(25): SEQ ID NO: 1712; WAN024ASD_at; Start 186; Stop 210
catttaatacgccactactagacaa

SEQ ID NO: 65147 - DNA, 25 bp, Artificial
  probe
  misc_feature (1)..(25): SEQ ID NO: 1712; WAN024ASD_at; Start 37; Stop 61
cccatagttcacgaattttgtcaaa

SEQ ID NO: 65148 - DNA, 25 bp, Artificial
  probe
  misc_feature (1)..(25): SEQ ID NO: 1712; WAN024ASD_at; Start 73; Stop 97
tcttcaaccgctgtacgacaagacg

SEQ ID NO: 65149 - DNA, 25 bp, Artificial
  probe
  misc_feature (1)..(25): SEQ ID NO: 1712; WAN024ASD_at; Start 150; Stop 174
ttcgtaaacgaagagacaatcttac

SEQ ID NO: 65150 - DNA, 25 bp, Artificial
  probe
  misc_feature (1)..(25): SEQ ID NO: 1712; WAN024ASD_at; Start 34; Stop 58
tatcccatagttcacgaattttgtc

SEQ ID NO: 65151 - DNA, 25 bp, Artificial
  probe
  misc_feature (1)..(25): SEQ ID NO: 1712; WAN024ASD_at; Start 211; Stop 235
gcaaaatcattattacagtagttcc

SEQ ID NO: 65152 - DNA, 25 bp, Artificial
  probe
  misc_feature (1)..(25): SEQ ID NO: 1712; WAN024ASD_at; Start 146; Stop 170
tgatttcgtaaacgaagagacaatc

SEQ ID NO: 65153 - DNA, 25 bp, Artificial
  probe
  misc_feature (1)..(25): SEQ ID NO: 1712; WAN024ASD_at; Start 272; Stop 296
gtttgaactagctgaagcgaccaca

SEQ ID NO: 65154 - DNA, 25 bp, Artificial
  probe
  misc_feature (1)..(25): SEQ ID NO: 1712; WAN024ASD_at; Start 66; Stop 90
tacattttcttcaaccgctgtacga

SEQ ID NO: 65155 - DNA, 25 bp, Artificial
  probe
  misc_feature (1)..(25): SEQ ID NO: 1712; WAN024ASD_at; Start 190; Stop 214
taatacgccactactagacaagcaa

SEQ ID NO: 65156 - DNA, 25 bp, Artificial
  probe
  misc_feature (1)..(25): SEQ ID NO: 1712; WAN024ASD_at; Start 240; Stop 264
cttcaattaacagtcacttacaatc

SEQ ID NO: 65157 - DNA, 25 bp, Artificial
  probe
  misc_feature (1)..(25): SEQ ID NO: 1712; WAN024ASD_at; Start 196; Stop 220
gccactactagacaagcaaaatcat

SEQ ID NO: 65158 - DNA, 25 bp, Artificial
  probe
  misc_feature (1)..(25): SEQ ID NO: 7177; WAN024ASE_at; Start 170; Stop 194
gtggcagatagagctaataaactcg

SEQ ID NO: 65159 - DNA, 25 bp, Artificial
  probe
  misc_feature (1)..(25): SEQ ID NO: 7177; WAN024ASE_at; Start 134; Stop 158
tttagttggcttcaatagtccagtg

SEQ ID NO: 65160 - DNA, 25 bp, Artificial
  probe
  misc_feature (1)..(25): SEQ ID NO: 7177; WAN024ASE_at; Start 168; Stop 192
aggtggcagatagagctaataaact

SEQ ID NO: 65161 - DNA, 25 bp, Artificial
  probe
  misc_feature (1)..(25): SEQ ID NO: 7177; WAN024ASE_at; Start 154; Stop 178
cagtggactattgaaggtggcagat

SEQ ID NO: 65162 - DNA, 25 bp, Artificial
  probe
  misc_feature (1)..(25): SEQ ID NO: 7177; WAN024ASE_at; Start 101; Stop 125
actcctatcttatttcacaacaatg

SEQ ID NO: 65163 - DNA, 25 bp, Artificial
  probe
  misc_feature (1)..(25): SEQ ID NO: 7177; WAN024ASE_at; Start 167; Stop 191
aaggtggcagatagagctaataaac

SEQ ID NO: 65164 - DNA, 25 bp, Artificial
  probe
  misc_feature (1)..(25): SEQ ID NO: 7177; WAN024ASE_at; Start 131; Stop 155
taatttagttggcttcaatagtcca

SEQ ID NO: 65165 - DNA, 25 bp, Artificial
  probe
  misc_feature (1)..(25): SEQ ID NO: 7177; WAN024ASE_at; Start 152; Stop 176
tccagtggactattgaaggtggcag

SEQ ID NO: 65166 - DNA, 25 bp, Artificial
  probe
  misc_feature (1)..(25): SEQ ID NO: 7177; WAN024ASE_at; Start 164; Stop 188
ttgaaggtggcagatagagctaata

SEQ ID NO: 65167 - DNA, 25 bp, Artificial
  probe
  misc_feature (1)..(25): SEQ ID NO: 7177; WAN024ASE_at; Start 138; Stop 162
gttggcttcaatagtccagtggact

SEQ ID NO: 65168 - DNA, 25 bp, Artificial
  probe
  misc_feature (1)..(25): SEQ ID NO: 7177; WAN024ASE_at; Start 106; Stop 130
tatcttatttcacaacaatgttaac

SEQ ID NO: 65169 - DNA, 25 bp, Artificial
  probe
  misc_feature (1)..(25): SEQ ID NO: 7177; WAN024ASE_at; Start 153; Stop 177
ccagtggactattgaaggtggcaga

SEQ ID NO: 65170 - DNA, 25 bp, Artificial
  probe
  misc_feature (1)..(25): SEQ ID NO: 7177; WAN024ASE_at; Start 151; Stop 175
gtccagtggactattgaaggtggca

SEQ ID NO: 65171 - DNA, 25 bp, Artificial
  probe
  misc_feature (1)..(25): SEQ ID NO: 7177; WAN024ASE_at; Start 150; Stop 174
agtccagtggactattgaaggtggc

SEQ ID NO: 65172 - DNA, 25 bp, Artificial
  probe
  misc_feature (1)..(25): SEQ ID NO: 7177; WAN024ASE_at; Start 135; Stop 159
ttagttggcttcaatagtccagtgg

SEQ ID NO: 65173 - DNA, 25 bp, Artificial
  probe
  misc_feature (1)..(25): SEQ ID NO: 7177; WAN024ASE_at; Start 162; Stop 186
tattgaaggtggcagatagagctaa

SEQ ID NO: 65174 - DNA, 25 bp, Artificial
  probe
  misc_feature (1)..(25): SEQ ID NO: 7177; WAN024ASE_at; Start 157; Stop 181
tggactattgaaggtggcagataga

SEQ ID NO: 65175 - DNA, 25 bp, Artificial
  probe
  misc_feature (1)..(25): SEQ ID NO: 7177; WAN024ASE_at; Start 99; Stop 123
ggactcctatcttatttcacaacaa

SEQ ID NO: 65176 - DNA, 25 bp, Artificial
  probe
  misc_feature (1)..(25): SEQ ID NO: 7177; WAN024ASE_at; Start 136; Stop 160
tagttggcttcaatagtccagtgga

SEQ ID NO: 65177 - DNA, 25 bp, Artificial
  probe
  misc_feature (1)..(25): SEQ ID NO: 7177; WAN024ASE_at; Start 160; Stop 184
actattgaaggtggcagatagagct

SEQ ID NO: 65178 - DNA, 25 bp, Artificial
  probe
  misc_feature (1)..(25): SEQ ID NO: 7177; WAN024ASE_at; Start 155; Stop 179
agtggactattgaaggtggcagata

SEQ ID NO: 65179 - DNA, 25 bp, Artificial
  probe
  misc_feature (1)..(25): SEQ ID NO: 7177; WAN024ASE_at; Start 137; Stop 161
agttggcttcaatagtccagtggac

SEQ ID NO: 65180 - DNA, 25 bp, Artificial
  probe
  misc_feature (1)..(25): SEQ ID NO: 7177; WAN024ASE_at; Start 98; Stop 122
aggactcctatcttatttcacaaca

SEQ ID NO: 65181 - DNA, 25 bp, Artificial
  probe
  misc_feature (1)..(25): SEQ ID NO: 7177; WAN024ASE_at; Start 118; Stop 142
caacaatgttaactaatttagttgg

SEQ ID NO: 65182 - DNA, 25 bp, Artificial
  probe
  misc_feature (1)..(25): SEQ ID NO: 7177; WAN024ASE_at; Start 159; Stop 183
gactattgaaggtggcagatagagc

SEQ ID NO: 65183 - DNA, 25 bp, Artificial
  probe
  misc_feature (1)..(25): SEQ ID NO: 7177; WAN024ASE_at; Start 169; Stop 193
ggtggcagatagagctaataaactc

SEQ ID NO: 65184 - DNA, 25 bp, Artificial
  probe
  misc_feature (1)..(25): SEQ ID NO: 7177; WAN024ASE_at; Start 165; Stop 189
tgaaggtggcagatagagctaataa

SEQ ID NO: 65185 - DNA, 25 bp, Artificial
  probe
  misc_feature (1)..(25): SEQ ID NO: 7177; WAN024ASE_at; Start 139; Stop 163
ttggcttcaatagtccagtggacta

SEQ ID NO: 65186 - DNA, 25 bp, Artificial
  probe
  misc_feature (1)..(25): SEQ ID NO: 7177; WAN024ASE_at; Start 115; Stop 139
tcacaacaatgttaactaatttagt

SEQ ID NO: 65187 - DNA, 25 bp, Artificial
  probe
  misc_feature (1)..(25): SEQ ID NO: 7177; WAN024ASE_at; Start 166; Stop 190
gaaggtggcagatagagctaataaa

SEQ ID NO: 65188 - DNA, 25 bp, Artificial
  probe
  misc_feature (1)..(25): SEQ ID NO: 7177; WAN024ASE_at; Start 127; Stop 151
taactaatttagttggcttcaatag

SEQ ID NO: 65189 - DNA, 25 bp, Artificial
  probe
  misc_feature (1)..(25): SEQ ID NO: 7177; WAN024ASE_at; Start 133; Stop 157
atttagttggcttcaatagtccagt

SEQ ID NO: 65190 - DNA, 25 bp, Artificial
  probe
  misc_feature (1)..(25): SEQ ID NO: 7177; WAN024ASE_at; Start 103; Stop 127
tcctatcttatttcacaacaatgtt

SEQ ID NO: 65191 - DNA, 25 bp, Artificial
  probe
  misc_feature (1)..(25): SEQ ID NO: 7177; WAN024ASE_at; Start 132; Stop 156
aatttagttggcttcaatagtccag

SEQ ID NO: 65192 - DNA, 25 bp, Artificial
  probe
  misc_feature (1)..(25): SEQ ID NO: 6289; WAN024ASF_at; Start 157; Stop 181
gaaactgtttgaggttggaaatcag

SEQ ID NO: 65193 - DNA, 25 bp, Artificial
  probe
  misc_feature (1)..(25): SEQ ID NO: 6289; WAN024ASF_at; Start 163; Stop 187
gtttgaggttggaaatcagcaaata

SEQ ID NO: 65194 - DNA, 25 bp, Artificial
  probe
  misc_feature (1)..(25): SEQ ID NO: 6289; WAN024ASF_at; Start 139; Stop 163
ttggctcaaacagtttgggaaactg

SEQ ID NO: 65195 - DNA, 25 bp, Artificial
  probe
  misc_feature (1)..(25): SEQ ID NO: 6289; WAN024ASF_at; Start 136; Stop 160
tagttggctcaaacagtttgggaaa

SEQ ID NO: 65196 - DNA, 25 bp, Artificial
  probe
  misc_feature (1)..(25): SEQ ID NO: 6289; WAN024ASF_at; Start 109; Stop 133
cttatttcacaacgatattaacgag

SEQ ID NO: 65197 - DNA, 25 bp, Artificial
  probe
  misc_feature (1)..(25): SEQ ID NO: 6289; WAN024ASF_at; Start 140; Stop 164
tggctcaaacagtttgggaaactgt

SEQ ID NO: 65198 - DNA, 25 bp, Artificial
  probe
  misc_feature (1)..(25): SEQ ID NO: 6289; WAN024ASF_at; Start 134; Stop 158
tttagttggctcaaacagtttggga

SEQ ID NO: 65199 - DNA, 25 bp, Artificial
  probe
  misc_feature (1)..(25): SEQ ID NO: 6289; WAN024ASF_at; Start 161; Stop 185
ctgtttgaggttggaaatcagcaaa

SEQ ID NO: 65200 - DNA, 25 bp, Artificial
  probe
  misc_feature (1)..(25): SEQ ID NO: 6289; WAN024ASF_at; Start 121; Stop 145
cgatattaacgagtttagttggctc

SEQ ID NO: 65201 - DNA, 25 bp, Artificial
  probe
  misc_feature (1)..(25): SEQ ID NO: 6289; WAN024ASF_at; Start 122; Stop 146
gatattaacgagtttagttggctca

SEQ ID NO: 65202 - DNA, 25 bp, Artificial
  probe
  misc_feature (1)..(25): SEQ ID NO: 6289; WAN024ASF_at; Start 126; Stop 150
ttaacgagtttagttggctcaaaca

SEQ ID NO: 65203 - DNA, 25 bp, Artificial
  probe
  misc_feature (1)..(25): SEQ ID NO: 6289; WAN024ASF_at; Start 103; Stop 127
tcctaccttatttcacaacgatatt

SEQ ID NO: 65204 - DNA, 25 bp, Artificial
  probe
  misc_feature (1)..(25): SEQ ID NO: 6289; WAN024ASF_at; Start 162; Stop 186
tgtttgaggttggaaatcagcaaat

SEQ ID NO: 65205 - DNA, 25 bp, Artificial
  probe
  misc_feature (1)..(25): SEQ ID NO: 6289; WAN024ASF_at; Start 110; Stop 134
ttatttcacaacgatattaacgagt

SEQ ID NO: 65206 - DNA, 25 bp, Artificial
  probe
  misc_feature (1)..(25): SEQ ID NO: 6289; WAN024ASF_at; Start 158; Stop 182
aaactgtttgaggttggaaatcagc

SEQ ID NO: 65207 - DNA, 25 bp, Artificial
  probe
  misc_feature (1)..(25): SEQ ID NO: 6289; WAN024ASF_at; Start 135; Stop 159
ttagttggctcaaacagtttgggaa

SEQ ID NO: 65208 - DNA, 25 bp, Artificial
  probe
  misc_feature (1)..(25): SEQ ID NO: 6289; WAN024ASF_at; Start 111; Stop 135
tatttcacaacgatattaacgagtt

SEQ ID NO: 65209 - DNA, 25 bp, Artificial
  probe
  misc_feature (1)..(25): SEQ ID NO: 6289; WAN024ASF_at; Start 160; Stop 184
actgtttgaggttggaaatcagcaa

SEQ ID NO: 65210 - DNA, 25 bp, Artificial
  probe
  misc_feature (1)..(25): SEQ ID NO: 6289; WAN024ASF_at; Start 131; Stop 155
gagtttagttggctcaaacagtttg

SEQ ID NO: 65211 - DNA, 25 bp, Artificial
  probe
  misc_feature (1)..(25): SEQ ID NO: 6289; WAN024ASF_at; Start 118; Stop 142
caacgatattaacgagtttagttgg

SEQ ID NO: 65212 - DNA, 25 bp, Artificial
  probe
  misc_feature (1)..(25): SEQ ID NO: 6289; WAN024ASF_at; Start 129; Stop 153
acgagtttagttggctcaaacagtt

SEQ ID NO: 65213 - DNA, 25 bp, Artificial
  probe
  misc_feature (1)..(25): SEQ ID NO: 6289; WAN024ASF_at; Start 132; Stop 156
agtttagttggctcaaacagtttgg

SEQ ID NO: 65214 - DNA, 25 bp, Artificial
  probe
  misc_feature (1)..(25): SEQ ID NO: 6289; WAN024ASF_at; Start 156; Stop 180
ggaaactgtttgaggttggaaatca

SEQ ID NO: 65215 - DNA, 25 bp, Artificial
  probe
  misc_feature (1)..(25): SEQ ID NO: 6289; WAN024ASF_at; Start 164; Stop 188
tttgaggttggaaatcagcaaataa

SEQ ID NO: 65216 - DNA, 25 bp, Artificial
  probe
  misc_feature (1)..(25): SEQ ID NO: 6289; WAN024ASF_at; Start 114; Stop 138
ttcacaacgatattaacgagtttag

SEQ ID NO: 65217 - DNA, 25 bp, Artificial
  probe
  misc_feature (1)..(25): SEQ ID NO: 6289; WAN024ASF_at; Start 99; Stop 123
ggattcctaccttatttcacaacga

SEQ ID NO: 65218 - DNA, 25 bp, Artificial
  probe
  misc_feature (1)..(25): SEQ ID NO: 6289; WAN024ASF_at; Start 115; Stop 139
tcacaacgatattaacgagtttagt

SEQ ID NO: 65219 - DNA, 25 bp, Artificial
  probe
  misc_feature (1)..(25): SEQ ID NO: 6289; WAN024ASF_at; Start 116; Stop 140
cacaacgatattaacgagtttagtt

SEQ ID NO: 65220 - DNA, 25 bp, Artificial
  probe
  misc_feature (1)..(25): SEQ ID NO: 6289; WAN024ASF_at; Start 128; Stop 152
aacgagtttagttggctcaaacagt

SEQ ID NO: 65221 - DNA, 25 bp, Artificial
  probe
  misc_feature (1)..(25): SEQ ID NO: 6289; WAN024ASF_at; Start 127; Stop 151
taacgagtttagttggctcaaacag

SEQ ID NO: 65222 - DNA, 25 bp, Artificial
  probe
  misc_feature (1)..(25): SEQ ID NO: 6289; WAN024ASF_at; Start 107; Stop 131
accttatttcacaacgatattaacg

SEQ ID NO: 65223 - DNA, 25 bp, Artificial
  probe
  misc_feature (1)..(25): SEQ ID NO: 6289; WAN024ASF_at; Start 100; Stop 124
gattcctaccttatttcacaacgat

SEQ ID NO: 65224 - DNA, 25 bp, Artificial
  probe
  misc_feature (1)..(25): SEQ ID NO: 6289; WAN024ASF_at; Start 159; Stop 183
aactgtttgaggttggaaatcagca

SEQ ID NO: 65225 - DNA, 25 bp, Artificial
  probe
  misc_feature (1)..(25): SEQ ID NO: 6289; WAN024ASF_at; Start 124; Stop 148
tattaacgagtttagttggctcaaa

SEQ ID NO: 65226 - DNA, 25 bp, Artificial
  probe
  misc_feature (1)..(25): SEQ ID NO: 7062; WAN024ASG_at; Start 52; Stop 76
ccaactaaactcgttaatatcgttg

SEQ ID NO: 65227 - DNA, 25 bp, Artificial
  probe
  misc_feature (1)..(25): SEQ ID NO: 7062; WAN024ASG_at; Start 56; Stop 80
ctaaactcgttaatatcgttgtgaa

SEQ ID NO: 65228 - DNA, 25 bp, Artificial
  probe
  misc_feature (1)..(25): SEQ ID NO: 7062; WAN024ASG_at; Start 1; Stop 25
ccaatttatttgctgatttccaacc

SEQ ID NO: 65229 - DNA, 25 bp, Artificial
  probe
  misc_feature (1)..(25): SEQ ID NO: 7062; WAN024ASG_at; Start 49; Stop 73
gagccaactaaactcgttaatatcg

SEQ ID NO: 65230 - DNA, 25 bp, Artificial
  probe
  misc_feature (1)..(25): SEQ ID NO: 7062; WAN024ASG_at; Start 38; Stop 62
ccaaactgtttgagccaactaaact

SEQ ID NO: 65231 - DNA, 25 bp, Artificial
  probe
  misc_feature (1)..(25): SEQ ID NO: 7062; WAN024ASG_at; Start 14; Stop 38
tgatttccaacctcaaacagtttcc

SEQ ID NO: 65232 - DNA, 25 bp, Artificial
  probe
  misc_feature (1)..(25): SEQ ID NO: 7062; WAN024ASG_at; Start 43; Stop 67
ctgtttgagccaactaaactcgtta

SEQ ID NO: 65233 - DNA, 25 bp, Artificial
  probe
  misc_feature (1)..(25): SEQ ID NO: 7062; WAN024ASG_at; Start 3; Stop 27
aatttatttgctgatttccaacctc

SEQ ID NO: 65234 - DNA, 25 bp, Artificial
  probe
  misc_feature (1)..(25): SEQ ID NO: 7062; WAN024ASG_at; Start 11; Stop 35
tgctgatttccaacctcaaacagtt

SEQ ID NO: 65235 - DNA, 25 bp, Artificial
  probe
  misc_feature (1)..(25): SEQ ID NO: 7062; WAN024ASG_at; Start 55; Stop 79
actaaactcgttaatatcgttgtga

SEQ ID NO: 65236 - DNA, 25 bp, Artificial
  probe
  misc_feature (1)..(25): SEQ ID NO: 7062; WAN024ASG_at; Start 72; Stop 96
cgttgtgaaataaggtaggaatcct

SEQ ID NO: 65237 - DNA, 25 bp, Artificial
  probe
  misc_feature (1)..(25): SEQ ID NO: 7062; WAN024ASG_at; Start 54; Stop 78
aactaaactcgttaatatcgttgtg

SEQ ID NO: 65238 - DNA, 25 bp, Artificial
  probe
  misc_feature (1)..(25): SEQ ID NO: 7062; WAN024ASG_at; Start 71; Stop 95
tcgttgtgaaataaggtaggaatcc

SEQ ID NO: 65239 - DNA, 25 bp, Artificial
  probe
  misc_feature (1)..(25): SEQ ID NO: 7062; WAN024ASG_at; Start 10; Stop 34
ttgctgatttccaacctcaaacagt

SEQ ID NO: 65240 - DNA, 25 bp, Artificial
  probe
  misc_feature (1)..(25): SEQ ID NO: 7062; WAN024ASG_at; Start 44; Stop 68
tgtttgagccaactaaactcgttaa

SEQ ID NO: 65241 - DNA, 25 bp, Artificial
  probe
  misc_feature (1)..(25): SEQ ID NO: 7062; WAN024ASG_at; Start 5; Stop 29
tttatttgctgatttccaacctcaa

SEQ ID NO: 65242 - DNA, 25 bp, Artificial
  probe
  misc_feature (1)..(25): SEQ ID NO: 7062; WAN024ASG_at; Start 61; Stop 85
ctcgttaatatcgttgtgaaataag

SEQ ID NO: 65243 - DNA, 25 bp, Artificial
  probe
  misc_feature (1)..(25): SEQ ID NO: 7062; WAN024ASG_at; Start 36; Stop 60
tcccaaactgtttgagccaactaaa

SEQ ID NO: 65244 - DNA, 25 bp, Artificial
  probe
  misc_feature (1)..(25): SEQ ID NO: 7062; WAN024ASG_at; Start 66; Stop 90
taatatcgttgtgaaataaggtagg

SEQ ID NO: 65245 - DNA, 25 bp, Artificial
  probe
  misc_feature (1)..(25): SEQ ID NO: 7062; WAN024ASG_at; Start 42; Stop 66
actgtttgagccaactaaactcgtt

SEQ ID NO: 65246 - DNA, 25 bp, Artificial
  probe
  misc_feature (1)..(25): SEQ ID NO: 7062; WAN024ASG_at; Start 39; Stop 63
caaactgtttgagccaactaaactc

SEQ ID NO: 65247 - DNA, 25 bp, Artificial
  probe
  misc_feature (1)..(25): SEQ ID NO: 7062; WAN024ASG_at; Start 48; Stop 72
tgagccaactaaactcgttaatatc

SEQ ID NO: 65248 - DNA, 25 bp, Artificial
  probe
  misc_feature (1)..(25): SEQ ID NO: 7062; WAN024ASG_at; Start 31; Stop 55
cagtttcccaaactgtttgagccaa

SEQ ID NO: 65249 - DNA, 25 bp, Artificial
  probe
  misc_feature (1)..(25): SEQ ID NO: 7062; WAN024ASG_at; Start 57; Stop 81
taaactcgttaatatcgttgtgaaa

SEQ ID NO: 65250 - DNA, 25 bp, Artificial
  probe
  misc_feature (1)..(25): SEQ ID NO: 7062; WAN024ASG_at; Start 30; Stop 54
acagtttcccaaactgtttgagcca

SEQ ID NO: 65251 - DNA, 25 bp, Artificial
  probe
  misc_feature (1)..(25): SEQ ID NO: 7062; WAN024ASG_at; Start 12; Stop 36
gctgatttccaacctcaaacagttt

SEQ ID NO: 65252 - DNA, 25 bp, Artificial
  probe
  misc_feature (1)..(25): SEQ ID NO: 7062; WAN024ASG_at; Start 46; Stop 70
tttgagccaactaaactcgttaata

SEQ ID NO: 65253 - DNA, 25 bp, Artificial
  probe
  misc_feature (1)..(25): SEQ ID NO: 7062; WAN024ASG_at; Start 63; Stop 87
cgttaatatcgttgtgaaataaggt

SEQ ID NO: 65254 - DNA, 25 bp, Artificial
  probe
  misc_feature (1)..(25): SEQ ID NO: 7062; WAN024ASG_at; Start 7; Stop 31
tatttgctgatttccaacctcaaac

SEQ ID NO: 65255 - DNA, 25 bp, Artificial
  probe
  misc_feature (1)..(25): SEQ ID NO: 7062; WAN024ASG_at; Start 59; Stop 83
aactcgttaatatcgttgtgaaata

SEQ ID NO: 65256 - DNA, 25 bp, Artificial
  probe
  misc_feature (1)..(25): SEQ ID NO: 7062; WAN024ASG_at; Start 9; Stop 33
tttgctgatttccaacctcaaacag

SEQ ID NO: 65257 - DNA, 25 bp, Artificial
  probe
  misc_feature (1)..(25): SEQ ID NO: 7062; WAN024ASG_at; Start 67; Stop 91
aatatcgttgtgaaataaggtagga

SEQ ID NO: 65258 - DNA, 25 bp, Artificial
  probe
  misc_feature (1)..(25): SEQ ID NO: 7062; WAN024ASG_at; Start 41; Stop 65
aactgtttgagccaactaaactcgt

SEQ ID NO: 65259 - DNA, 25 bp, Artificial
  probe
  misc_feature (1)..(25): SEQ ID NO: 7062; WAN024ASG_at; Start 50; Stop 74
agccaactaaactcgttaatatcgt

SEQ ID NO: 65260 - DNA, 25 bp, Artificial
  probe
  misc_feature (1)..(25): SEQ ID NO: 7069; WAN024ASH_at; Start 53; Stop 77
ccaactaaattagttaacattgttg

SEQ ID NO: 65261 - DNA, 25 bp, Artificial
  probe
  misc_feature (1)..(25): SEQ ID NO: 7069; WAN024ASH_at; Start 12; Stop 36
gctctatctgccaccttcaatagtc

SEQ ID NO: 65262 - DNA, 25 bp, Artificial
  probe
  misc_feature (1)..(25): SEQ ID NO: 7069; WAN024ASH_at; Start 48; Stop 72
tgaagccaactaaattagttaacat

SEQ ID NO: 65263 - DNA, 25 bp, Artificial
  probe
  misc_feature (1)..(25): SEQ ID NO: 7069; WAN024ASH_at; Start 18; Stop 42
tctgccaccttcaatagtccactgg

SEQ ID NO: 65264 - DNA, 25 bp, Artificial
  probe
  misc_feature (1)..(25): SEQ ID NO: 7069; WAN024ASH_at; Start 40; Stop 64
tggactattgaagccaactaaatta

SEQ ID NO: 65265 - DNA, 25 bp, Artificial
  probe
  misc_feature (1)..(25): SEQ ID NO: 7069; WAN024ASH_at; Start 20; Stop 44
tgccaccttcaatagtccactggac

SEQ ID NO: 65266 - DNA, 25 bp, Artificial
  probe
  misc_feature (1)..(25): SEQ ID NO: 7069; WAN024ASH_at; Start 19; Stop 43
ctgccaccttcaatagtccactgga

SEQ ID NO: 65267 - DNA, 25 bp, Artificial
  probe
  misc_feature (1)..(25): SEQ ID NO: 7069; WAN024ASH_at; Start 36; Stop 60
ccactggactattgaagccaactaa

SEQ ID NO: 65268 - DNA, 25 bp, Artificial
  probe
  misc_feature (1)..(25): SEQ ID NO: 7069; WAN024ASH_at; Start 70; Stop 94
cattgttgtgaaataagataggagt

SEQ ID NO: 65269 - DNA, 25 bp, Artificial
  probe
  misc_feature (1)..(25): SEQ ID NO: 7069; WAN024ASH_at; Start 38; Stop 62
actggactattgaagccaactaaat

SEQ ID NO: 65270 - DNA, 25 bp, Artificial
  probe
  misc_feature (1)..(25): SEQ ID NO: 7069; WAN024ASH_at; Start 17; Stop 41
atctgccaccttcaatagtccactg

SEQ ID NO: 65271 - DNA, 25 bp, Artificial
  probe
  misc_feature (1)..(25): SEQ ID NO: 7069; WAN024ASH_at; Start 44; Stop 68
ctattgaagccaactaaattagtta

SEQ ID NO: 65272 - DNA, 25 bp, Artificial
  probe
  misc_feature (1)..(25): SEQ ID NO: 7069; WAN024ASH_at; Start 34; Stop 58
gtccactggactattgaagccaact

SEQ ID NO: 65273 - DNA, 25 bp, Artificial
  probe
  misc_feature (1)..(25): SEQ ID NO: 7069; WAN024ASH_at; Start 9; Stop 33
ttagctctatctgccaccttcaata

SEQ ID NO: 65274 - DNA, 25 bp, Artificial
  probe
  misc_feature (1)..(25): SEQ ID NO: 7069; WAN024ASH_at; Start 32; Stop 56
tagtccactggactattgaagccaa

SEQ ID NO: 65275 - DNA, 25 bp, Artificial
  probe
  misc_feature (1)..(25): SEQ ID NO: 7069; WAN024ASH_at; Start 2; Stop 26
gagtttattagctctatctgccacc

SEQ ID NO: 65276 - DNA, 25 bp, Artificial
  probe
  misc_feature (1)..(25): SEQ ID NO: 7069; WAN024ASH_at; Start 33; Stop 57
agtccactggactattgaagccaac

SEQ ID NO: 65277 - DNA, 25 bp, Artificial
  probe
  misc_feature (1)..(25): SEQ ID NO: 7069; WAN024ASH_at; Start 4; Stop 28
gtttattagctctatctgccacctt

SEQ ID NO: 65278 - DNA, 25 bp, Artificial
  probe
  misc_feature (1)..(25): SEQ ID NO: 7069; WAN024ASH_at; Start 42; Stop 66
gactattgaagccaactaaattagt

SEQ ID NO: 65279 - DNA, 25 bp, Artificial
  probe
  misc_feature (1)..(25): SEQ ID NO: 7069; WAN024ASH_at; Start 14; Stop 38
tctatctgccaccttcaatagtcca

SEQ ID NO: 65280 - DNA, 25 bp, Artificial
  probe
  misc_feature (1)..(25): SEQ ID NO: 7069; WAN024ASH_at; Start 67; Stop 91
taacattgttgtgaaataagatagg

SEQ ID NO: 65281 - DNA, 25 bp, Artificial
  probe
  misc_feature (1)..(25): SEQ ID NO: 7069; WAN024ASH_at; Start 1; Stop 25
cgagtttattagctctatctgccac

SEQ ID NO: 65282 - DNA, 25 bp, Artificial
  probe
  misc_feature (1)..(25): SEQ ID NO: 7069; WAN024ASH_at; Start 16; Stop 40
tatctgccaccttcaatagtccact

SEQ ID NO: 65283 - DNA, 25 bp, Artificial
  probe
  misc_feature (1)..(25): SEQ ID NO: 7069; WAN024ASH_at; Start 35; Stop 59
tccactggactattgaagccaacta

SEQ ID NO: 65284 - DNA, 25 bp, Artificial
  probe
  misc_feature (1)..(25): SEQ ID NO: 7069; WAN024ASH_at; Start 57; Stop 81
ctaaattagttaacattgttgtgaa

SEQ ID NO: 65285 - DNA, 25 bp, Artificial
  probe
  misc_feature (1)..(25): SEQ ID NO: 7069; WAN024ASH_at; Start 11; Stop 35
agctctatctgccaccttcaatagt

SEQ ID NO: 65286 - DNA, 25 bp, Artificial
  probe
  misc_feature (1)..(25): SEQ ID NO: 7069; WAN024ASH_at; Start 37; Stop 61
cactggactattgaagccaactaaa

SEQ ID NO: 65287 - DNA, 25 bp, Artificial
  probe
  misc_feature (1)..(25): SEQ ID NO: 7069; WAN024ASH_at; Start 7; Stop 31
tattagctctatctgccaccttcaa

SEQ ID NO: 65288 - DNA, 25 bp, Artificial
  probe
  misc_feature (1)..(25): SEQ ID NO: 7069; WAN024ASH_at; Start 72; Stop 96
ttgttgtgaaataagataggagtcc

SEQ ID NO: 65289 - DNA, 25 bp, Artificial
  probe
  misc_feature (1)..(25): SEQ ID NO: 7069; WAN024ASH_at; Start 21; Stop 45
gccaccttcaatagtccactggact

SEQ ID NO: 65290 - DNA, 25 bp, Artificial
  probe
  misc_feature (1)..(25): SEQ ID NO: 7069; WAN024ASH_at; Start 39; Stop 63
ctggactattgaagccaactaaatt

SEQ ID NO: 65291 - DNA, 25 bp, Artificial
  probe
  misc_feature (1)..(25): SEQ ID NO: 7069; WAN024ASH_at; Start 3; Stop 27
agtttattagctctatctgccacct

SEQ ID NO: 65292 - DNA, 25 bp, Artificial
  probe
  misc_feature (1)..(25): SEQ ID NO: 7069; WAN024ASH_at; Start 73; Stop 97
tgttgtgaaataagataggagtcct

SEQ ID NO: 65293 - DNA, 25 bp, Artificial
  probe
  misc_feature (1)..(25): SEQ ID NO: 7069; WAN024ASH_at; Start 6; Stop 30
ttattagctctatctgccaccttca

SEQ ID NO: 65294 - DNA, 25 bp, Artificial
  probe
  misc_feature (1)..(25): SEQ ID NO: 449; WAN024ASI_at; Start 2; Stop 26
gccgcctgattgggcgactttattt

SEQ ID NO: 65295 - DNA, 25 bp, Artificial
  probe
  misc_feature (1)..(25): SEQ ID NO: 449; WAN024ASI_at; Start 5; Stop 29
gcctgattgggcgactttattttta

SEQ ID NO: 65296 - DNA, 25 bp, Artificial
  probe
  misc_feature (1)..(25): SEQ ID NO: 449; WAN024ASI_at; Start 74; Stop 98
cttcttaacttatgaacttagtgta

SEQ ID NO: 65297 - DNA, 25 bp, Artificial
  probe
  misc_feature (1)..(25): SEQ ID NO: 449; WAN024ASI_at; Start 80; Stop 104
aacttatgaacttagtgtacactcc

SEQ ID NO: 65298 - DNA, 25 bp, Artificial
  probe
  misc_feature (1)..(25): SEQ ID NO: 449; WAN024ASI_at; Start 90; Stop 114
cttagtgtacactccctagcttaaa

SEQ ID NO: 65299 - DNA, 25 bp, Artificial
  probe
  misc_feature (1)..(25): SEQ ID NO: 449; WAN024ASI_at; Start 3; Stop 27
ccgcctgattgggcgactttatttt

SEQ ID NO: 65300 - DNA, 25 bp, Artificial
  probe
  misc_feature (1)..(25): SEQ ID NO: 449; WAN024ASI_at; Start 87; Stop 111
gaacttagtgtacactccctagctt

SEQ ID NO: 65301 - DNA, 25 bp, Artificial
  probe
  misc_feature (1)..(25): SEQ ID NO: 449; WAN024ASI_at; Start 76; Stop 100
tcttaacttatgaacttagtgtaca

SEQ ID NO: 65302 - DNA, 25 bp, Artificial
  probe
  misc_feature (1)..(25): SEQ ID NO: 449; WAN024ASI_at; Start 1; Stop 25
agccgcctgattgggcgactttatt

SEQ ID NO: 65303 - DNA, 25 bp, Artificial
  probe
  misc_feature (1)..(25): SEQ ID NO: 449; WAN024ASI_at; Start 6; Stop 30
cctgattgggcgactttatttttat

SEQ ID NO: 65304 - DNA, 25 bp, Artificial
  probe
  misc_feature (1)..(25): SEQ ID NO: 449; WAN024ASI_at; Start 79; Stop 103
taacttatgaacttagtgtacactc

SEQ ID NO: 65305 - DNA, 25 bp, Artificial
  probe
  misc_feature (1)..(25): SEQ ID NO: 449; WAN024ASI_at; Start 88; Stop 112
aacttagtgtacactccctagctta

SEQ ID NO: 65306 - DNA, 25 bp, Artificial
  probe
  misc_feature (1)..(25): SEQ ID NO: 449; WAN024ASI_at; Start 91; Stop 115
ttagtgtacactccctagcttaaag

SEQ ID NO: 65307 - DNA, 25 bp, Artificial
  probe
  misc_feature (1)..(25): SEQ ID NO: 449; WAN024ASI_at; Start 73; Stop 97
tcttcttaacttatgaacttagtgt

SEQ ID NO: 65308 - DNA, 25 bp, Artificial
  probe
  misc_feature (1)..(25): SEQ ID NO: 449; WAN024ASI_at; Start 92; Stop 116
tagtgtacactccctagcttaaagt

SEQ ID NO: 65309 - DNA, 25 bp, Artificial
  probe
  misc_feature (1)..(25): SEQ ID NO: 449; WAN024ASI_at; Start 93; Stop 117
agtgtacactccctagcttaaagtt

SEQ ID NO: 65310 - DNA, 25 bp, Artificial
  probe
  misc_feature (1)..(25): SEQ ID NO: 449; WAN024ASI_at; Start 4; Stop 28
cgcctgattgggcgactttattttt

SEQ ID NO: 65311 - DNA, 25 bp, Artificial
  probe
  misc_feature (1)..(25): SEQ ID NO: 449; WAN024ASI_at; Start 85; Stop 109
atgaacttagtgtacactccctagc

SEQ ID NO: 65312 - DNA, 25 bp, Artificial
  probe
  misc_feature (1)..(25): SEQ ID NO: 449; WAN024ASI_at; Start 82; Stop 106
cttatgaacttagtgtacactccct

SEQ ID NO: 65313 - DNA, 25 bp, Artificial
  probe
  misc_feature (1)..(25): SEQ ID NO: 449; WAN024ASI_at; Start 86; Stop 110
tgaacttagtgtacactccctagct

SEQ ID NO: 65314 - DNA, 25 bp, Artificial
  probe
  misc_feature (1)..(25): SEQ ID NO: 449; WAN024ASI_at; Start 78; Stop 102
ttaacttatgaacttagtgtacact

SEQ ID NO: 65315 - DNA, 25 bp, Artificial
  probe
  misc_feature (1)..(25): SEQ ID NO: 449; WAN024ASI_at; Start 8; Stop 32
tgattgggcgactttatttttatag

SEQ ID NO: 65316 - DNA, 25 bp, Artificial
  probe
  misc_feature (1)..(25): SEQ ID NO: 449; WAN024ASI_at; Start 89; Stop 113
acttagtgtacactccctagcttaa

SEQ ID NO: 65317 - DNA, 25 bp, Artificial
  probe
  misc_feature (1)..(25): SEQ ID NO: 449; WAN024ASI_at; Start 7; Stop 31
ctgattgggcgactttatttttata

SEQ ID NO: 65318 - DNA, 25 bp, Artificial
  probe
  misc_feature (1)..(25): SEQ ID NO: 449; WAN024ASI_at; Start 81; Stop 105
acttatgaacttagtgtacactccc

SEQ ID NO: 65319 - DNA, 25 bp, Artificial
  probe
  misc_feature (1)..(25): SEQ ID NO: 449; WAN024ASI_at; Start 77; Stop 101
cttaacttatgaacttagtgtacac

SEQ ID NO: 65320 - DNA, 25 bp, Artificial
  probe
  misc_feature (1)..(25): SEQ ID NO: 449; WAN024ASI_at; Start 84; Stop 108
tatgaacttagtgtacactccctag

SEQ ID NO: 65321 - DNA, 25 bp, Artificial
  probe
  misc_feature (1)..(25): SEQ ID NO: 449; WAN024ASI_at; Start 75; Stop 99
ttcttaacttatgaacttagtgtac

SEQ ID NO: 65322 - DNA, 25 bp, Artificial
  probe
  misc_feature (1)..(25): SEQ ID NO: 449; WAN024ASI_at; Start 70; Stop 94
aggtcttcttaacttatgaacttag

SEQ ID NO: 65323 - DNA, 25 bp, Artificial
  probe
  misc_feature (1)..(25): SEQ ID NO: 449; WAN024ASI_at; Start 83; Stop 107
ttatgaacttagtgtacactcccta

SEQ ID NO: 65324 - DNA, 25 bp, Artificial
  probe
  misc_feature (1)..(25): SEQ ID NO: 449; WAN024ASI_at; Start 95; Stop 119
tgtacactccctagcttaaagtttc

SEQ ID NO: 65325 - DNA, 25 bp, Artificial
  probe
  misc_feature (1)..(25): SEQ ID NO: 449; WAN024ASI_at; Start 72; Stop 96
gtcttcttaacttatgaacttagtg

SEQ ID NO: 65326 - DNA, 25 bp, Artificial
  probe
  misc_feature (1)..(25): SEQ ID NO: 3319; WAN024ASJ_at; Start 146; Stop 170
tcttgtaaccgtctatagtataccc

SEQ ID NO: 65327 - DNA, 25 bp, Artificial
  probe
  misc_feature (1)..(25): SEQ ID NO: 3319; WAN024ASJ_at; Start 33; Stop 57
tattatatcatgaatcccaacacaa

SEQ ID NO: 65328 - DNA, 25 bp, Artificial
  probe
  misc_feature (1)..(25): SEQ ID NO: 3319; WAN024ASJ_at; Start 139; Stop 163
gaggtcttcttgtaaccgtctatag

SEQ ID NO: 65329 - DNA, 25 bp, Artificial
  probe
  misc_feature (1)..(25): SEQ ID NO: 3319; WAN024ASJ_at; Start 110; Stop 134
agtttaggatatttgttacaacaag

SEQ ID NO: 65330 - DNA, 25 bp, Artificial
  probe
  misc_feature (1)..(25): SEQ ID NO: 3319; WAN024ASJ_at; Start 73; Stop 97
gcggtgactctatagggagattatt

SEQ ID NO: 65331 - DNA, 25 bp, Artificial
  probe
  misc_feature (1)..(25): SEQ ID NO: 3319; WAN024ASJ_at; Start 57; Stop 81
aaaaaagccaccgaatgcggtgact

SEQ ID NO: 65332 - DNA, 25 bp, Artificial
  probe
  misc_feature (1)..(25): SEQ ID NO: 3319; WAN024ASJ_at; Start 149; Stop 173
tgtaaccgtctatagtatacccgac

SEQ ID NO: 65333 - DNA, 25 bp, Artificial
  probe
  misc_feature (1)..(25): SEQ ID NO: 3319; WAN024ASJ_at; Start 43; Stop 67
tgaatcccaacacaaaaaaagccac

SEQ ID NO: 65334 - DNA, 25 bp, Artificial
  probe
  misc_feature (1)..(25): SEQ ID NO: 3319; WAN024ASJ_at; Start 136; Stop 160
taggaggtcttcttgtaaccgtcta

SEQ ID NO: 65335 - DNA, 25 bp, Artificial
  probe
  misc_feature (1)..(25): SEQ ID NO: 3319; WAN024ASJ_at; Start 156; Stop 180
gtctatagtatacccgacctatctt

SEQ ID NO: 65336 - DNA, 25 bp, Artificial
  probe
  misc_feature (1)..(25): SEQ ID NO: 3319; WAN024ASJ_at; Start 153; Stop 177
accgtctatagtatacccgacctat

SEQ ID NO: 65337 - DNA, 25 bp, Artificial
  probe
  misc_feature (1)..(25): SEQ ID NO: 3319; WAN024ASJ_at; Start 2; Stop 26
tcttttctcttttcctacttatcga

SEQ ID NO: 65338 - DNA, 25 bp, Artificial
  probe
  misc_feature (1)..(25): SEQ ID NO: 3319; WAN024ASJ_at; Start 148; Stop 172
ttgtaaccgtctatagtatacccga

SEQ ID NO: 65339 - DNA, 25 bp, Artificial
  probe
  misc_feature (1)..(25): SEQ ID NO: 3319; WAN024ASJ_at; Start 66; Stop 90
accgaatgcggtgactctataggga

SEQ ID NO: 65340 - DNA, 25 bp, Artificial
  probe
  misc_feature (1)..(25): SEQ ID NO: 3319; WAN024ASJ_at; Start 64; Stop 88
ccaccgaatgcggtgactctatagg

SEQ ID NO: 65341 - DNA, 25 bp, Artificial
  probe
  misc_feature (1)..(25): SEQ ID NO: 3319; WAN024ASJ_at; Start 142; Stop 166
gtcttcttgtaaccgtctatagtat

SEQ ID NO: 65342 - DNA, 25 bp, Artificial
  probe
  misc_feature (1)..(25): SEQ ID NO: 3319; WAN024ASJ_at; Start 155; Stop 179
cgtctatagtatacccgacctatct

SEQ ID NO: 65343 - DNA, 25 bp, Artificial
  probe
  misc_feature (1)..(25): SEQ ID NO: 3319; WAN024ASJ_at; Start 61; Stop 85
aagccaccgaatgcggtgactctat

SEQ ID NO: 65344 - DNA, 25 bp, Artificial
  probe
  misc_feature (1)..(25): SEQ ID NO: 3319; WAN024ASJ_at; Start 30; Stop 54
tattattatatcatgaatcccaaca

SEQ ID NO: 65345 - DNA, 25 bp, Artificial
  probe
  misc_feature (1)..(25): SEQ ID NO: 3319; WAN024ASJ_at; Start 141; Stop 165
ggtcttcttgtaaccgtctatagta

SEQ ID NO: 65346 - DNA, 25 bp, Artificial
  probe
  misc_feature (1)..(25): SEQ ID NO: 3319; WAN024ASJ_at; Start 123; Stop 147
tgttacaacaagttaggaggtcttc

SEQ ID NO: 65347 - DNA, 25 bp, Artificial
  probe
  misc_feature (1)..(25): SEQ ID NO: 3319; WAN024ASJ_at; Start 138; Stop 162
ggaggtcttcttgtaaccgtctata

SEQ ID NO: 65348 - DNA, 25 bp, Artificial
  probe
  misc_feature (1)..(25): SEQ ID NO: 3319; WAN024ASJ_at; Start 70; Stop 94
aatgcggtgactctatagggagatt

SEQ ID NO: 65349 - DNA, 25 bp, Artificial
  probe
  misc_feature (1)..(25): SEQ ID NO: 3319; WAN024ASJ_at; Start 72; Stop 96
tgcggtgactctatagggagattat

SEQ ID NO: 65350 - DNA, 25 bp, Artificial
  probe
  misc_feature (1)..(25): SEQ ID NO: 3319; WAN024ASJ_at; Start 7; Stop 31
tctcttttcctacttatcgatttta

SEQ ID NO: 65351 - DNA, 25 bp, Artificial
  probe
  misc_feature (1)..(25): SEQ ID NO: 3319; WAN024ASJ_at; Start 128; Stop 152
caacaagttaggaggtcttcttgta

SEQ ID NO: 65352 - DNA, 25 bp, Artificial
  probe
  misc_feature (1)..(25): SEQ ID NO: 3319; WAN024ASJ_at; Start 161; Stop 185
tagtatacccgacctatcttaaaca

SEQ ID NO: 65353 - DNA, 25 bp, Artificial
  probe
  misc_feature (1)..(25): SEQ ID NO: 3319; WAN024ASJ_at; Start 117; Stop 141
gatatttgttacaacaagttaggag

SEQ ID NO: 65354 - DNA, 25 bp, Artificial
  probe
  misc_feature (1)..(25): SEQ ID NO: 3319; WAN024ASJ_at; Start 36; Stop 60
tatatcatgaatcccaacacaaaaa

SEQ ID NO: 65355 - DNA, 25 bp, Artificial
  probe
  misc_feature (1)..(25): SEQ ID NO: 3319; WAN024ASJ_at; Start 59; Stop 83
aaaagccaccgaatgcggtgactct

SEQ ID NO: 65356 - DNA, 25 bp, Artificial
  probe
  misc_feature (1)..(25): SEQ ID NO: 3319; WAN024ASJ_at; Start 147; Stop 171
cttgtaaccgtctatagtatacccg

SEQ ID NO: 65357 - DNA, 25 bp, Artificial
  probe
  misc_feature (1)..(25): SEQ ID NO: 3319; WAN024ASJ_at; Start 69; Stop 93
gaatgcggtgactctatagggagat

SEQ ID NO: 65358 - DNA, 25 bp, Artificial
  probe
  misc_feature (1)..(25): SEQ ID NO: 3319; WAN024ASJ_at; Start 67; Stop 91
ccgaatgcggtgactctatagggag

SEQ ID NO: 65359 - DNA, 25 bp, Artificial
  probe
  misc_feature (1)..(25): SEQ ID NO: 3319; WAN024ASJ_at; Start 126; Stop 150
tacaacaagttaggaggtcttcttg

SEQ ID NO: 65360 - DNA, 25 bp, Artificial
  probe
  misc_feature (1)..(25): SEQ ID NO: 4462; WAN024ASK_at; Start 38; Stop 62
ttaggagttcattaaataaagatat

SEQ ID NO: 65361 - DNA, 25 bp, Artificial
  probe
  misc_feature (1)..(25): SEQ ID NO: 4462; WAN024ASK_at; Start 85; Stop 109
taattcagtgttatctgtttcaaat

SEQ ID NO: 65362 - DNA, 25 bp, Artificial
  probe
  misc_feature (1)..(25): SEQ ID NO: 4462; WAN024ASK_at; Start 73; Stop 97
tcaaattcaaactaattcagtgtta

SEQ ID NO: 65363 - DNA, 25 bp, Artificial
  probe
  misc_feature (1)..(25): SEQ ID NO: 4462; WAN024ASK_at; Start 4; Stop 28
aggcgacttttgaaggagattatta

SEQ ID NO: 65364 - DNA, 25 bp, Artificial
  probe
  misc_feature (1)..(25): SEQ ID NO: 4462; WAN024ASK_at; Start 5; Stop 29
ggcgacttttgaaggagattattat

SEQ ID NO: 65365 - DNA, 25 bp, Artificial
  probe
  misc_feature (1)..(25): SEQ ID NO: 4462; WAN024ASK_at; Start 90; Stop 114
cagtgttatctgtttcaaataatat

SEQ ID NO: 65366 - DNA, 25 bp, Artificial
  probe
  misc_feature (1)..(25): SEQ ID NO: 4462; WAN024ASK_at; Start 50; Stop 74
taaataaagatattagatgaaaatc

SEQ ID NO: 65367 - DNA, 25 bp, Artificial
  probe
  misc_feature (1)..(25): SEQ ID NO: 4462; WAN024ASK_at; Start 75; Stop 99
aaattcaaactaattcagtgttatc

SEQ ID NO: 65368 - DNA, 25 bp, Artificial
  probe
  misc_feature (1)..(25): SEQ ID NO: 4462; WAN024ASK_at; Start 82; Stop 106
aactaattcagtgttatctgtttca

SEQ ID NO: 65369 - DNA, 25 bp, Artificial
  probe
  misc_feature (1)..(25): SEQ ID NO: 4462; WAN024ASK_at; Start 58; Stop 82
gatattagatgaaaatcaaattcaa

SEQ ID NO: 65370 - DNA, 25 bp, Artificial
  probe
  misc_feature (1)..(25): SEQ ID NO: 4462; WAN024ASK_at; Start 99; Stop 123
ctgtttcaaataatattaggaggtc

SEQ ID NO: 65371 - DNA, 25 bp, Artificial
  probe
  misc_feature (1)..(25): SEQ ID NO: 4462; WAN024ASK_at; Start 86; Stop 110
aattcagtgttatctgtttcaaata

SEQ ID NO: 65372 - DNA, 25 bp, Artificial
  probe
  misc_feature (1)..(25): SEQ ID NO: 4462; WAN024ASK_at; Start 84; Stop 108
ctaattcagtgttatctgtttcaaa

SEQ ID NO: 65373 - DNA, 25 bp, Artificial
  probe
  misc_feature (1)..(25): SEQ ID NO: 4462; WAN024ASK_at; Start 103; Stop 127
ttcaaataatattaggaggtcttta

SEQ ID NO: 65374 - DNA, 25 bp, Artificial
  probe
  misc_feature (1)..(25): SEQ ID NO: 4462; WAN024ASK_at; Start 74; Stop 98
caaattcaaactaattcagtgttat

SEQ ID NO: 65375 - DNA, 25 bp, Artificial
  probe
  misc_feature (1)..(25): SEQ ID NO: 4462; WAN024ASK_at; Start 1; Stop 25
tacaggcgacttttgaaggagatta

SEQ ID NO: 65376 - DNA, 25 bp, Artificial
  probe
  misc_feature (1)..(25): SEQ ID NO: 4462; WAN024ASK_at; Start 80; Stop 104
caaactaattcagtgttatctgttt

SEQ ID NO: 65377 - DNA, 25 bp, Artificial
  probe
  misc_feature (1)..(25): SEQ ID NO: 4462; WAN024ASK_at; Start 78; Stop 102
ttcaaactaattcagtgttatctgt

SEQ ID NO: 65378 - DNA, 25 bp, Artificial
  probe
  misc_feature (1)..(25): SEQ ID NO: 4462; WAN024ASK_at; Start 89; Stop 113
tcagtgttatctgtttcaaataata

SEQ ID NO: 65379 - DNA, 25 bp, Artificial
  probe
  misc_feature (1)..(25): SEQ ID NO: 4462; WAN024ASK_at; Start 124; Stop 148
tttatttaatgattatagtatacac

SEQ ID NO: 65380 - DNA, 25 bp, Artificial
  probe
  misc_feature (1)..(25): SEQ ID NO: 4462; WAN024ASK_at; Start 71; Stop 95
aatcaaattcaaactaattcagtgt

SEQ ID NO: 65381 - DNA, 25 bp, Artificial
  probe
  misc_feature (1)..(25): SEQ ID NO: 4462; WAN024ASK_at; Start 79; Stop 103
tcaaactaattcagtgttatctgtt

SEQ ID NO: 65382 - DNA, 25 bp, Artificial
  probe
  misc_feature (1)..(25): SEQ ID NO: 4462; WAN024ASK_at; Start 77; Stop 101
attcaaactaattcagtgttatctg

SEQ ID NO: 65383 - DNA, 25 bp, Artificial
  probe
  misc_feature (1)..(25): SEQ ID NO: 4462; WAN024ASK_at; Start 98; Stop 122
tctgtttcaaataatattaggaggt

SEQ ID NO: 65384 - DNA, 25 bp, Artificial
  probe
  misc_feature (1)..(25): SEQ ID NO: 4462; WAN024ASK_at; Start 3; Stop 27
caggcgacttttgaaggagattatt

SEQ ID NO: 65385 - DNA, 25 bp, Artificial
  probe
  misc_feature (1)..(25): SEQ ID NO: 4462; WAN024ASK_at; Start 41; Stop 65
ggagttcattaaataaagatattag

SEQ ID NO: 65386 - DNA, 25 bp, Artificial
  probe
  misc_feature (1)..(25): SEQ ID NO: 4462; WAN024ASK_at; Start 100; Stop 124
tgtttcaaataatattaggaggtct

SEQ ID NO: 65387 - DNA, 25 bp, Artificial
  probe
  misc_feature (1)..(25): SEQ ID NO: 4462; WAN024ASK_at; Start 39; Stop 63
taggagttcattaaataaagatatt

SEQ ID NO: 65388 - DNA, 25 bp, Artificial
  probe
  misc_feature (1)..(25): SEQ ID NO: 4462; WAN024ASK_at; Start 96; Stop 120
tatctgtttcaaataatattaggag

SEQ ID NO: 65389 - DNA, 25 bp, Artificial
  probe
  misc_feature (1)..(25): SEQ ID NO: 4462; WAN024ASK_at; Start 6; Stop 30
gcgacttttgaaggagattattatg

SEQ ID NO: 65390 - DNA, 25 bp, Artificial
  probe
  misc_feature (1)..(25): SEQ ID NO: 4462; WAN024ASK_at; Start 104; Stop 128
tcaaataatattaggaggtctttat

SEQ ID NO: 65391 - DNA, 25 bp, Artificial
  probe
  misc_feature (1)..(25): SEQ ID NO: 4462; WAN024ASK_at; Start 2; Stop 26
acaggcgacttttgaaggagattat

SEQ ID NO: 65392 - DNA, 25 bp, Artificial
  probe
  misc_feature (1)..(25): SEQ ID NO: 4462; WAN024ASK_at; Start 83; Stop 107
actaattcagtgttatctgtttcaa

SEQ ID NO: 65393 - DNA, 25 bp, Artificial
  probe
  misc_feature (1)..(25): SEQ ID NO: 4462; WAN024ASK_at; Start 97; Stop 121
atctgtttcaaataatattaggagg

SEQ ID NO: 65394 - DNA, 25 bp, Artificial
  probe
  misc_feature (1)..(25): SEQ ID NO: 3527; WAN024ASL_at; Start 90; Stop 114
ataacactgaattagtttgaatttg

SEQ ID NO: 65395 - DNA, 25 bp, Artificial
  probe
  misc_feature (1)..(25): SEQ ID NO: 3527; WAN024ASL_at; Start 66; Stop 90
acctcctaatattatttgaaacaga

SEQ ID NO: 65396 - DNA, 25 bp, Artificial
  probe
  misc_feature (1)..(25): SEQ ID NO: 3527; WAN024ASL_at; Start 92; Stop 116
aacactgaattagtttgaatttgat

SEQ ID NO: 65397 - DNA, 25 bp, Artificial
  probe
  misc_feature (1)..(25): SEQ ID NO: 3527; WAN024ASL_at; Start 127; Stop 151
tatctttatttaatgaactcctaaa

SEQ ID NO: 65398 - DNA, 25 bp, Artificial
  probe
  misc_feature (1)..(25): SEQ ID NO: 3527; WAN024ASL_at; Start 123; Stop 147
ctaatatctttatttaatgaactcc

SEQ ID NO: 65399 - DNA, 25 bp, Artificial
  probe
  misc_feature (1)..(25): SEQ ID NO: 3527; WAN024ASL_at; Start 88; Stop 112
agataacactgaattagtttgaatt

SEQ ID NO: 65400 - DNA, 25 bp, Artificial
  probe
  misc_feature (1)..(25): SEQ ID NO: 3527; WAN024ASL_at; Start 82; Stop 106
tgaaacagataacactgaattagtt

SEQ ID NO: 65401 - DNA, 25 bp, Artificial
  probe
  misc_feature (1)..(25): SEQ ID NO: 3527; WAN024ASL_at; Start 162; Stop 186
ataatctccttcaaaagtcgcctgt

SEQ ID NO: 65402 - DNA, 25 bp, Artificial
  probe
  misc_feature (1)..(25): SEQ ID NO: 3527; WAN024ASL_at; Start 120; Stop 144
catctaatatctttatttaatgaac

SEQ ID NO: 65403 - DNA, 25 bp, Artificial
  probe
  misc_feature (1)..(25): SEQ ID NO: 3527; WAN024ASL_at; Start 84; Stop 108
aaacagataacactgaattagtttg

SEQ ID NO: 65404 - DNA, 25 bp, Artificial
  probe
  misc_feature (1)..(25): SEQ ID NO: 3527; WAN024ASL_at; Start 159; Stop 183
ataataatctccttcaaaagtcgcc

SEQ ID NO: 65405 - DNA, 25 bp, Artificial
  probe
  misc_feature (1)..(25): SEQ ID NO: 3527; WAN024ASL_at; Start 65; Stop 89
gacctcctaatattatttgaaacag

SEQ ID NO: 65406 - DNA, 25 bp, Artificial
  probe
  misc_feature (1)..(25): SEQ ID NO: 3527; WAN024ASL_at; Start 124; Stop 148
taatatctttatttaatgaactcct

SEQ ID NO: 65407 - DNA, 25 bp, Artificial
  probe
  misc_feature (1)..(25): SEQ ID NO: 3527; WAN024ASL_at; Start 89; Stop 113
gataacactgaattagtttgaattt

SEQ ID NO: 65408 - DNA, 25 bp, Artificial
  probe
  misc_feature (1)..(25): SEQ ID NO: 3527; WAN024ASL_at; Start 163; Stop 187
taatctccttcaaaagtcgcctgta

SEQ ID NO: 65409 - DNA, 25 bp, Artificial
  probe
  misc_feature (1)..(25): SEQ ID NO: 3527; WAN024ASL_at; Start 81; Stop 105
ttgaaacagataacactgaattagt

SEQ ID NO: 65410 - DNA, 25 bp, Artificial
  probe
  misc_feature (1)..(25): SEQ ID NO: 3527; WAN024ASL_at; Start 94; Stop 118
cactgaattagtttgaatttgattt

SEQ ID NO: 65411 - DNA, 25 bp, Artificial
  probe
  misc_feature (1)..(25): SEQ ID NO: 3527; WAN024ASL_at; Start 160; Stop 184
taataatctccttcaaaagtcgcct

SEQ ID NO: 65412 - DNA, 25 bp, Artificial
  probe
  misc_feature (1)..(25): SEQ ID NO: 3527; WAN024ASL_at; Start 64; Stop 88
agacctcctaatattatttgaaaca

SEQ ID NO: 65413 - DNA, 25 bp, Artificial
  probe
  misc_feature (1)..(25): SEQ ID NO: 3527; WAN024ASL_at; Start 86; Stop 110
acagataacactgaattagtttgaa

SEQ ID NO: 65414 - DNA, 25 bp, Artificial
  probe
  misc_feature (1)..(25): SEQ ID NO: 3527; WAN024ASL_at; Start 87; Stop 111
cagataacactgaattagtttgaat

SEQ ID NO: 65415 - DNA, 25 bp, Artificial
  probe
  misc_feature (1)..(25): SEQ ID NO: 3527; WAN024ASL_at; Start 80; Stop 104
tttgaaacagataacactgaattag

SEQ ID NO: 65416 - DNA, 25 bp, Artificial
  probe
  misc_feature (1)..(25): SEQ ID NO: 3527; WAN024ASL_at; Start 43; Stop 67
tatactataatcattaaataaagac

SEQ ID NO: 65417 - DNA, 25 bp, Artificial
  probe
  misc_feature (1)..(25): SEQ ID NO: 3527; WAN024ASL_at; Start 126; Stop 150
atatctttatttaatgaactcctaa

SEQ ID NO: 65418 - DNA, 25 bp, Artificial
  probe
  misc_feature (1)..(25): SEQ ID NO: 3527; WAN024ASL_at; Start 125; Stop 149
aatatctttatttaatgaactccta

SEQ ID NO: 65419 - DNA, 25 bp, Artificial
  probe
  misc_feature (1)..(25): SEQ ID NO: 3527; WAN024ASL_at; Start 67; Stop 91
cctcctaatattatttgaaacagat

SEQ ID NO: 65420 - DNA, 25 bp, Artificial
  probe
  misc_feature (1)..(25): SEQ ID NO: 3527; WAN024ASL_at; Start 93; Stop 117
acactgaattagtttgaatttgatt

SEQ ID NO: 65421 - DNA, 25 bp, Artificial
  probe
  misc_feature (1)..(25): SEQ ID NO: 3527; WAN024ASL_at; Start 161; Stop 185
aataatctccttcaaaagtcgcctg

SEQ ID NO: 65422 - DNA, 25 bp, Artificial
  probe
  misc_feature (1)..(25): SEQ ID NO: 3527; WAN024ASL_at; Start 83; Stop 107
gaaacagataacactgaattagttt

SEQ ID NO: 65423 - DNA, 25 bp, Artificial
  probe
  misc_feature (1)..(25): SEQ ID NO: 3527; WAN024ASL_at; Start 91; Stop 115
taacactgaattagtttgaatttga

SEQ ID NO: 65424 - DNA, 25 bp, Artificial
  probe
  misc_feature (1)..(25): SEQ ID NO: 3527; WAN024ASL_at; Start 68; Stop 92
ctcctaatattatttgaaacagata

SEQ ID NO: 65425 - DNA, 25 bp, Artificial
  probe
  misc_feature (1)..(25): SEQ ID NO: 3527; WAN024ASL_at; Start 85; Stop 109
aacagataacactgaattagtttga

SEQ ID NO: 65426 - DNA, 25 bp, Artificial
  probe
  misc_feature (1)..(25): SEQ ID NO: 3527; WAN024ASL_at; Start 158; Stop 182
cataataatctccttcaaaagtcgc

SEQ ID NO: 65427 - DNA, 25 bp, Artificial
  probe
  misc_feature (1)..(25): SEQ ID NO: 3527; WAN024ASL_at; Start 61; Stop 85
taaagacctcctaatattatttgaa

SEQ ID NO: 65428 - DNA, 25 bp, Artificial
  probe
  misc_feature (1)..(25): SEQ ID NO: 3600; WAN024ASM_at; Start 49; Stop 73
tacaagaagacctcctaacttgttg

SEQ ID NO: 65429 - DNA, 25 bp, Artificial
  probe
  misc_feature (1)..(25): SEQ ID NO: 3600; WAN024ASM_at; Start 110; Stop 134
ctccctatagagtcaccgcattcgg

SEQ ID NO: 65430 - DNA, 25 bp, Artificial
  probe
  misc_feature (1)..(25): SEQ ID NO: 3600; WAN024ASM_at; Start 29; Stop 53
tcgggtatactatagacggttacaa

SEQ ID NO: 65431 - DNA, 25 bp, Artificial
  probe
  misc_feature (1)..(25): SEQ ID NO: 3600; WAN024ASM_at; Start 164; Stop 188
taataataaaatcgataagtaggaa

SEQ ID NO: 65432 - DNA, 25 bp, Artificial
  probe
  misc_feature (1)..(25): SEQ ID NO: 3600; WAN024ASM_at; Start 176; Stop 200
cgataagtaggaaaagagaaaagag

SEQ ID NO: 65433 - DNA, 25 bp, Artificial
  probe
  misc_feature (1)..(25): SEQ ID NO: 3600; WAN024ASM_at; Start 104; Stop 128
aataatctccctatagagtcaccgc

SEQ ID NO: 65434 - DNA, 25 bp, Artificial
  probe
  misc_feature (1)..(25): SEQ ID NO: 3600; WAN024ASM_at; Start 112; Stop 136
ccctatagagtcaccgcattcggtg

SEQ ID NO: 65435 - DNA, 25 bp, Artificial
  probe
  misc_feature (1)..(25): SEQ ID NO: 3600; WAN024ASM_at; Start 36; Stop 60
tactatagacggttacaagaagacc

SEQ ID NO: 65436 - DNA, 25 bp, Artificial
  probe
  misc_feature (1)..(25): SEQ ID NO: 3600; WAN024ASM_at; Start 32; Stop 56
ggtatactatagacggttacaagaa

SEQ ID NO: 65437 - DNA, 25 bp, Artificial
  probe
  misc_feature (1)..(25): SEQ ID NO: 3600; WAN024ASM_at; Start 128; Stop 152
cattcggtggctttttttgtgttgg

SEQ ID NO: 65438 - DNA, 25 bp, Artificial
  probe
  misc_feature (1)..(25): SEQ ID NO: 3600; WAN024ASM_at; Start 24; Stop 48
ataggtcgggtatactatagacggt

SEQ ID NO: 65439 - DNA, 25 bp, Artificial
  probe
  misc_feature (1)..(25): SEQ ID NO: 3600; WAN024ASM_at; Start 61; Stop 85
tcctaacttgttgtaacaaatatcc

SEQ ID NO: 65440 - DNA, 25 bp, Artificial
  probe
  misc_feature (1)..(25): SEQ ID NO: 3600; WAN024ASM_at; Start 142; Stop 166
ttttgtgttgggattcatgatataa

SEQ ID NO: 65441 - DNA, 25 bp, Artificial
  probe
  misc_feature (1)..(25): SEQ ID NO: 3600; WAN024ASM_at; Start 170; Stop 194
taaaatcgataagtaggaaaagaga

SEQ ID NO: 65442 - DNA, 25 bp, Artificial
  probe
  misc_feature (1)..(25): SEQ ID NO: 3600; WAN024ASM_at; Start 21; Stop 45
aagataggtcgggtatactatagac

SEQ ID NO: 65443 - DNA, 25 bp, Artificial
  probe
  misc_feature (1)..(25): SEQ ID NO: 3600; WAN024ASM_at; Start 148; Stop 172
gttgggattcatgatataataataa

SEQ ID NO: 65444 - DNA, 25 bp, Artificial
  probe
  misc_feature (1)..(25): SEQ ID NO: 3600; WAN024ASM_at; Start 119; Stop 143
gagtcaccgcattcggtggcttttt

SEQ ID NO: 65445 - DNA, 25 bp, Artificial
  probe
  misc_feature (1)..(25): SEQ ID NO: 3600; WAN024ASM_at; Start 113; Stop 137
cctatagagtcaccgcattcggtgg

SEQ ID NO: 65446 - DNA, 25 bp, Artificial
  probe
  misc_feature (1)..(25): SEQ ID NO: 3600; WAN024ASM_at; Start 16; Stop 40
tgtttaagataggtcgggtatacta

SEQ ID NO: 65447 - DNA, 25 bp, Artificial
  probe
  misc_feature (1)..(25): SEQ ID NO: 3600; WAN024ASM_at; Start 107; Stop 131
aatctccctatagagtcaccgcatt

SEQ ID NO: 65448 - DNA, 25 bp, Artificial
  probe
  misc_feature (1)..(25): SEQ ID NO: 3600; WAN024ASM_at; Start 54; Stop 78
gaagacctcctaacttgttgtaaca

SEQ ID NO: 65449 - DNA, 25 bp, Artificial
  probe
  misc_feature (1)..(25): SEQ ID NO: 3600; WAN024ASM_at; Start 28; Stop 52
gtcgggtatactatagacggttaca

SEQ ID NO: 65450 - DNA, 25 bp, Artificial
  probe
  misc_feature (1)..(25): SEQ ID NO: 3600; WAN024ASM_at; Start 145; Stop 169
tgtgttgggattcatgatataataa

SEQ ID NO: 65451 - DNA, 25 bp, Artificial
  probe
  misc_feature (1)..(25): SEQ ID NO: 3600; WAN024ASM_at; Start 106; Stop 130
taatctccctatagagtcaccgcat

SEQ ID NO: 65452 - DNA, 25 bp, Artificial
  probe
  misc_feature (1)..(25): SEQ ID NO: 3600; WAN024ASM_at; Start 111; Stop 135
tccctatagagtcaccgcattcggt

SEQ ID NO: 65453 - DNA, 25 bp, Artificial
  probe
  misc_feature (1)..(25): SEQ ID NO: 3600; WAN024ASM_at; Start 51; Stop 75
caagaagacctcctaacttgttgta

SEQ ID NO: 65454 - DNA, 25 bp, Artificial
  probe
  misc_feature (1)..(25): SEQ ID NO: 3600; WAN024ASM_at; Start 23; Stop 47
gataggtcgggtatactatagacgg

SEQ ID NO: 65455 - DNA, 25 bp, Artificial
  probe
  misc_feature (1)..(25): SEQ ID NO: 3600; WAN024ASM_at; Start 124; Stop 148
accgcattcggtggctttttttgtg

SEQ ID NO: 65456 - DNA, 25 bp, Artificial
  probe
  misc_feature (1)..(25): SEQ ID NO: 3600; WAN024ASM_at; Start 41; Stop 65
tagacggttacaagaagacctccta

SEQ ID NO: 65457 - DNA, 25 bp, Artificial
  probe
  misc_feature (1)..(25): SEQ ID NO: 3600; WAN024ASM_at; Start 117; Stop 141
tagagtcaccgcattcggtggcttt

SEQ ID NO: 65458 - DNA, 25 bp, Artificial
  probe
  misc_feature (1)..(25): SEQ ID NO: 3600; WAN024ASM_at; Start 39; Stop 63
tatagacggttacaagaagacctcc

SEQ ID NO: 65459 - DNA, 25 bp, Artificial
  probe
  misc_feature (1)..(25): SEQ ID NO: 3600; WAN024ASM_at; Start 67; Stop 91
cttgttgtaacaaatatcctaaact

SEQ ID NO: 65460 - DNA, 25 bp, Artificial
  probe
  misc_feature (1)..(25): SEQ ID NO: 3600; WAN024ASM_at; Start 38; Stop 62
ctatagacggttacaagaagacctc

SEQ ID NO: 65461 - DNA, 25 bp, Artificial
  probe
  misc_feature (1)..(25): SEQ ID NO: 3600; WAN024ASM_at; Start 30; Stop 54
cgggtatactatagacggttacaag

SEQ ID NO: 65462 - DNA, 25 bp, Artificial
  probe
  misc_feature (1)..(25): SEQ ID NO: 3720; WAN024ASN_at; Start 17; Stop 41
ggagtgtacactaagttcataagtt

SEQ ID NO: 65463 - DNA, 25 bp, Artificial
  probe
  misc_feature (1)..(25): SEQ ID NO: 3720; WAN024ASN_at; Start 25; Stop 49
cactaagttcataagttaagaagac

SEQ ID NO: 65464 - DNA, 25 bp, Artificial
  probe
  misc_feature (1)..(25): SEQ ID NO: 3720; WAN024ASN_at; Start 6; Stop 30
ctttaagctagggagtgtacactaa

SEQ ID NO: 65465 - DNA, 25 bp, Artificial
  probe
  misc_feature (1)..(25): SEQ ID NO: 3720; WAN024ASN_at; Start 19; Stop 43
agtgtacactaagttcataagttaa

SEQ ID NO: 65466 - DNA, 25 bp, Artificial
  probe
  misc_feature (1)..(25): SEQ ID NO: 3720; WAN024ASN_at; Start 91; Stop 115
ataaaaataaagtcgcccaatcagg

SEQ ID NO: 65467 - DNA, 25 bp, Artificial
  probe
  misc_feature (1)..(25): SEQ ID NO: 3720; WAN024ASN_at; Start 27; Stop 51
ctaagttcataagttaagaagacct

SEQ ID NO: 65468 - DNA, 25 bp, Artificial
  probe
  misc_feature (1)..(25): SEQ ID NO: 3720; WAN024ASN_at; Start 4; Stop 28
aactttaagctagggagtgtacact

SEQ ID NO: 65469 - DNA, 25 bp, Artificial
  probe
  misc_feature (1)..(25): SEQ ID NO: 3720; WAN024ASN_at; Start 94; Stop 118
aaaataaagtcgcccaatcaggcgg

SEQ ID NO: 65470 - DNA, 25 bp, Artificial
  probe
  misc_feature (1)..(25): SEQ ID NO: 3720; WAN024ASN_at; Start 12; Stop 36
gctagggagtgtacactaagttcat

SEQ ID NO: 65471 - DNA, 25 bp, Artificial
  probe
  misc_feature (1)..(25): SEQ ID NO: 3720; WAN024ASN_at; Start 96; Stop 120
aataaagtcgcccaatcaggcggct

SEQ ID NO: 65472 - DNA, 25 bp, Artificial
  probe
  misc_feature (1)..(25): SEQ ID NO: 3720; WAN024ASN_at; Start 7; Stop 31
tttaagctagggagtgtacactaag

SEQ ID NO: 65473 - DNA, 25 bp, Artificial
  probe
  misc_feature (1)..(25): SEQ ID NO: 3720; WAN024ASN_at; Start 15; Stop 39
agggagtgtacactaagttcataag

SEQ ID NO: 65474 - DNA, 25 bp, Artificial
  probe
  misc_feature (1)..(25): SEQ ID NO: 3720; WAN024ASN_at; Start 95; Stop 119
aaataaagtcgcccaatcaggcggc

SEQ ID NO: 65475 - DNA, 25 bp, Artificial
  probe
  misc_feature (1)..(25): SEQ ID NO: 3720; WAN024ASN_at; Start 13; Stop 37
ctagggagtgtacactaagttcata

SEQ ID NO: 65476 - DNA, 25 bp, Artificial
  probe
  misc_feature (1)..(25): SEQ ID NO: 3720; WAN024ASN_at; Start 24; Stop 48
acactaagttcataagttaagaaga

SEQ ID NO: 65477 - DNA, 25 bp, Artificial
  probe
  misc_feature (1)..(25): SEQ ID NO: 3720; WAN024ASN_at; Start 93; Stop 117
aaaaataaagtcgcccaatcaggcg

SEQ ID NO: 65478 - DNA, 25 bp, Artificial
  probe
  misc_feature (1)..(25): SEQ ID NO: 3720; WAN024ASN_at; Start 11; Stop 35
agctagggagtgtacactaagttca

SEQ ID NO: 65479 - DNA, 25 bp, Artificial
  probe
  misc_feature (1)..(25): SEQ ID NO: 3720; WAN024ASN_at; Start 8; Stop 32
ttaagctagggagtgtacactaagt

SEQ ID NO: 65480 - DNA, 25 bp, Artificial
  probe
  misc_feature (1)..(25): SEQ ID NO: 3720; WAN024ASN_at; Start 10; Stop 34
aagctagggagtgtacactaagttc

SEQ ID NO: 65481 - DNA, 25 bp, Artificial
  probe
  misc_feature (1)..(25): SEQ ID NO: 3720; WAN024ASN_at; Start 18; Stop 42
gagtgtacactaagttcataagtta

SEQ ID NO: 65482 - DNA, 25 bp, Artificial
  probe
  misc_feature (1)..(25): SEQ ID NO: 3720; WAN024ASN_at; Start 2; Stop 26
gaaactttaagctagggagtgtaca

SEQ ID NO: 65483 - DNA, 25 bp, Artificial
  probe
  misc_feature (1)..(25): SEQ ID NO: 3720; WAN024ASN_at; Start 20; Stop 44
gtgtacactaagttcataagttaag

SEQ ID NO: 65484 - DNA, 25 bp, Artificial
  probe
  misc_feature (1)..(25): SEQ ID NO: 3720; WAN024ASN_at; Start 14; Stop 38
tagggagtgtacactaagttcataa

SEQ ID NO: 65485 - DNA, 25 bp, Artificial
  probe
  misc_feature (1)..(25): SEQ ID NO: 3720; WAN024ASN_at; Start 22; Stop 46
gtacactaagttcataagttaagaa

SEQ ID NO: 65486 - DNA, 25 bp, Artificial
  probe
  misc_feature (1)..(25): SEQ ID NO: 3720; WAN024ASN_at; Start 16; Stop 40
gggagtgtacactaagttcataagt

SEQ ID NO: 65487 - DNA, 25 bp, Artificial
  probe
  misc_feature (1)..(25): SEQ ID NO: 3720; WAN024ASN_at; Start 92; Stop 116
taaaaataaagtcgcccaatcaggc

SEQ ID NO: 65488 - DNA, 25 bp, Artificial
  probe
  misc_feature (1)..(25): SEQ ID NO: 3720; WAN024ASN_at; Start 89; Stop 113
ctataaaaataaagtcgcccaatca

SEQ ID NO: 65489 - DNA, 25 bp, Artificial
  probe
  misc_feature (1)..(25): SEQ ID NO: 3720; WAN024ASN_at; Start 23; Stop 47
tacactaagttcataagttaagaag

SEQ ID NO: 65490 - DNA, 25 bp, Artificial
  probe
  misc_feature (1)..(25): SEQ ID NO: 3720; WAN024ASN_at; Start 21; Stop 45
tgtacactaagttcataagttaaga

SEQ ID NO: 65491 - DNA, 25 bp, Artificial
  probe
  misc_feature (1)..(25): SEQ ID NO: 3720; WAN024ASN_at; Start 9; Stop 33
taagctagggagtgtacactaagtt

SEQ ID NO: 65492 - DNA, 25 bp, Artificial
  probe
  misc_feature (1)..(25): SEQ ID NO: 3720; WAN024ASN_at; Start 5; Stop 29
actttaagctagggagtgtacacta

SEQ ID NO: 65493 - DNA, 25 bp, Artificial
  probe
  misc_feature (1)..(25): SEQ ID NO: 3720; WAN024ASN_at; Start 90; Stop 114
tataaaaataaagtcgcccaatcag

SEQ ID NO: 65494 - DNA, 25 bp, Artificial
  probe
  misc_feature (1)..(25): SEQ ID NO: 4811; WAN024ASO_at; Start 42; Stop 66
ccaacctaattgacaccatttatta

SEQ ID NO: 65495 - DNA, 25 bp, Artificial
  probe
  misc_feature (1)..(25): SEQ ID NO: 4811; WAN024ASO_at; Start 46; Stop 70
cctaattgacaccatttattaattt

SEQ ID NO: 65496 - DNA, 25 bp, Artificial
  probe
  misc_feature (1)..(25): SEQ ID NO: 4811; WAN024ASO_at; Start 39; Stop 63
tttccaacctaattgacaccattta

SEQ ID NO: 65497 - DNA, 25 bp, Artificial
  probe
  misc_feature (1)..(25): SEQ ID NO: 4811; WAN024ASO_at; Start 45; Stop 69
acctaattgacaccatttattaatt

SEQ ID NO: 65498 - DNA, 25 bp, Artificial
  probe
  misc_feature (1)..(25): SEQ ID NO: 4811; WAN024ASO_at; Start 41; Stop 65
tccaacctaattgacaccatttatt

SEQ ID NO: 65499 - DNA, 25 bp, Artificial
  probe
  misc_feature (1)..(25): SEQ ID NO: 4811; WAN024ASO_at; Start 40; Stop 64
ttccaacctaattgacaccatttat

SEQ ID NO: 65500 - DNA, 25 bp, Artificial
  probe
  misc_feature (1)..(25): SEQ ID NO: 4811; WAN024ASO_at; Start 44; Stop 68
aacctaattgacaccatttattaat

SEQ ID NO: 65501 - DNA, 25 bp, Artificial
  probe
  misc_feature (1)..(25): SEQ ID NO: 4811; WAN024ASO_at; Start 43; Stop 67
caacctaattgacaccatttattaa

SEQ ID NO: 65502 - DNA, 25 bp, Artificial
  probe
  misc_feature (1)..(25): SEQ ID NO: 167; WAN024ASP_at; Start 7; Stop 31
ataaatggtgtcaattaggttggaa

SEQ ID NO: 65503 - DNA, 25 bp, Artificial
  probe
  misc_feature (1)..(25): SEQ ID NO: 167; WAN024ASP_at; Start 3; Stop 27
attaataaatggtgtcaattaggtt

SEQ ID NO: 65504 - DNA, 25 bp, Artificial
  probe
  misc_feature (1)..(25): SEQ ID NO: 167; WAN024ASP_at; Start 6; Stop 30
aataaatggtgtcaattaggttgga

SEQ ID NO: 65505 - DNA, 25 bp, Artificial
  probe
  misc_feature (1)..(25): SEQ ID NO: 167; WAN024ASP_at; Start 2; Stop 26
aattaataaatggtgtcaattaggt

SEQ ID NO: 65506 - DNA, 25 bp, Artificial
  probe
  misc_feature (1)..(25): SEQ ID NO: 167; WAN024ASP_at; Start 5; Stop 29
taataaatggtgtcaattaggttgg

SEQ ID NO: 65507 - DNA, 25 bp, Artificial
  probe
  misc_feature (1)..(25): SEQ ID NO: 167; WAN024ASP_at; Start 4; Stop 28
ttaataaatggtgtcaattaggttg

SEQ ID NO: 65508 - DNA, 25 bp, Artificial
  probe
  misc_feature (1)..(25): SEQ ID NO: 167; WAN024ASP_at; Start 8; Stop 32
taaatggtgtcaattaggttggaaa

SEQ ID NO: 65509 - DNA, 25 bp, Artificial
  probe
  misc_feature (1)..(25): SEQ ID NO: 3168; WAN024ASQ_at; Start 40; Stop 64
taacacaaaaagggataaagtgcta

SEQ ID NO: 65510 - DNA, 25 bp, Artificial
  probe
  misc_feature (1)..(25): SEQ ID NO: 3168; WAN024ASQ_at; Start 54; Stop 78
ataaagtgctaaccctctaactaag

SEQ ID NO: 65511 - DNA, 25 bp, Artificial
  probe
  misc_feature (1)..(25): SEQ ID NO: 3168; WAN024ASQ_at; Start 22; Stop 46
tttcaatccctaatattataacaca

SEQ ID NO: 65512 - DNA, 25 bp, Artificial
  probe
  misc_feature (1)..(25): SEQ ID NO: 3168; WAN024ASQ_at; Start 23; Stop 47
ttcaatccctaatattataacacaa

SEQ ID NO: 65513 - DNA, 25 bp, Artificial
  probe
  misc_feature (1)..(25): SEQ ID NO: 3168; WAN024ASQ_at; Start 3; Stop 27
ttctcattctccgttttcatttcaa

SEQ ID NO: 65514 - DNA, 25 bp, Artificial
  probe
  misc_feature (1)..(25): SEQ ID NO: 3168; WAN024ASQ_at; Start 16; Stop 40
ttttcatttcaatccctaatattat

SEQ ID NO: 65515 - DNA, 25 bp, Artificial
  probe
  misc_feature (1)..(25): SEQ ID NO: 3168; WAN024ASQ_at; Start 7; Stop 31
cattctccgttttcatttcaatccc

SEQ ID NO: 65516 - DNA, 25 bp, Artificial
  probe
  misc_feature (1)..(25): SEQ ID NO: 3168; WAN024ASQ_at; Start 1; Stop 25
atttctcattctccgttttcatttc

SEQ ID NO: 65517 - DNA, 25 bp, Artificial
  probe
  misc_feature (1)..(25): SEQ ID NO: 3168; WAN024ASQ_at; Start 6; Stop 30
tcattctccgttttcatttcaatcc

SEQ ID NO: 65518 - DNA, 25 bp, Artificial
  probe
  misc_feature (1)..(25): SEQ ID NO: 3168; WAN024ASQ_at; Start 5; Stop 29
ctcattctccgttttcatttcaatc

SEQ ID NO: 65519 - DNA, 25 bp, Artificial
  probe
  misc_feature (1)..(25): SEQ ID NO: 3168; WAN024ASQ_at; Start 11; Stop 35
ctccgttttcatttcaatccctaat

SEQ ID NO: 65520 - DNA, 25 bp, Artificial
  probe
  misc_feature (1)..(25): SEQ ID NO: 3168; WAN024ASQ_at; Start 21; Stop 45
atttcaatccctaatattataacac

SEQ ID NO: 65521 - DNA, 25 bp, Artificial
  probe
  misc_feature (1)..(25): SEQ ID NO: 3168; WAN024ASQ_at; Start 10; Stop 34
tctccgttttcatttcaatccctaa

SEQ ID NO: 65522 - DNA, 25 bp, Artificial
  probe
  misc_feature (1)..(25): SEQ ID NO: 3168; WAN024ASQ_at; Start 4; Stop 28
tctcattctccgttttcatttcaat

SEQ ID NO: 65523 - DNA, 25 bp, Artificial
  probe
  misc_feature (1)..(25): SEQ ID NO: 3168; WAN024ASQ_at; Start 15; Stop 39
gttttcatttcaatccctaatatta

SEQ ID NO: 65524 - DNA, 25 bp, Artificial
  probe
  misc_feature (1)..(25): SEQ ID NO: 3168; WAN024ASQ_at; Start 19; Stop 43
tcatttcaatccctaatattataac

SEQ ID NO: 65525 - DNA, 25 bp, Artificial
  probe
  misc_feature (1)..(25): SEQ ID NO: 3168; WAN024ASQ_at; Start 38; Stop 62
tataacacaaaaagggataaagtgc

SEQ ID NO: 65526 - DNA, 25 bp, Artificial
  probe
  misc_feature (1)..(25): SEQ ID NO: 3168; WAN024ASQ_at; Start 52; Stop 76
ggataaagtgctaaccctctaacta

SEQ ID NO: 65527 - DNA, 25 bp, Artificial
  probe
  misc_feature (1)..(25): SEQ ID NO: 3168; WAN024ASQ_at; Start 2; Stop 26
tttctcattctccgttttcatttca

SEQ ID NO: 65528 - DNA, 25 bp, Artificial
  probe
  misc_feature (1)..(25): SEQ ID NO: 3168; WAN024ASQ_at; Start 53; Stop 77
gataaagtgctaaccctctaactaa

SEQ ID NO: 65529 - DNA, 25 bp, Artificial
  probe
  misc_feature (1)..(25): SEQ ID NO: 3168; WAN024ASQ_at; Start 9; Stop 33
ttctccgttttcatttcaatcccta

SEQ ID NO: 65530 - DNA, 25 bp, Artificial
  probe
  misc_feature (1)..(25): SEQ ID NO: 3168; WAN024ASQ_at; Start 12; Stop 36
tccgttttcatttcaatccctaata

SEQ ID NO: 65531 - DNA, 25 bp, Artificial
  probe
  misc_feature (1)..(25): SEQ ID NO: 3168; WAN024ASQ_at; Start 8; Stop 32
attctccgttttcatttcaatccct

SEQ ID NO: 65532 - DNA, 25 bp, Artificial
  probe
  misc_feature (1)..(25): SEQ ID NO: 3168; WAN024ASQ_at; Start 39; Stop 63
ataacacaaaaagggataaagtgct

SEQ ID NO: 65533 - DNA, 25 bp, Artificial
  probe
  misc_feature (1)..(25): SEQ ID NO: 3168; WAN024ASQ_at; Start 17; Stop 41
tttcatttcaatccctaatattata

SEQ ID NO: 65534 - DNA, 25 bp, Artificial
  probe
  misc_feature (1)..(25): SEQ ID NO: 3168; WAN024ASQ_at; Start 13; Stop 37
ccgttttcatttcaatccctaatat

SEQ ID NO: 65535 - DNA, 25 bp, Artificial
  probe
  misc_feature (1)..(25): SEQ ID NO: 3168; WAN024ASQ_at; Start 20; Stop 44
catttcaatccctaatattataaca

SEQ ID NO: 65536 - DNA, 25 bp, Artificial
  probe
  misc_feature (1)..(25): SEQ ID NO: 3168; WAN024ASQ_at; Start 18; Stop 42
ttcatttcaatccctaatattataa

SEQ ID NO: 65537 - DNA, 25 bp, Artificial
  probe
  misc_feature (1)..(25): SEQ ID NO: 3168; WAN024ASQ_at; Start 14; Stop 38
cgttttcatttcaatccctaatatt

SEQ ID NO: 65538 - DNA, 25 bp, Artificial
  probe
  misc_feature (1)..(25): SEQ ID NO: 3546; WAN024ASR_at; Start 46; Stop 70
aatattagggattgaaatgaaaacg

SEQ ID NO: 65539 - DNA, 25 bp, Artificial
  probe
  misc_feature (1)..(25): SEQ ID NO: 3546; WAN024ASR_at; Start 6; Stop 30
cttagttagagggttagcactttat

SEQ ID NO: 65540 - DNA, 25 bp, Artificial
  probe
  misc_feature (1)..(25): SEQ ID NO: 3546; WAN024ASR_at; Start 52; Stop 76
agggattgaaatgaaaacggagaat

SEQ ID NO: 65541 - DNA, 25 bp, Artificial
  probe
  misc_feature (1)..(25): SEQ ID NO: 3546; WAN024ASR_at; Start 56; Stop 80
attgaaatgaaaacggagaatgaga

SEQ ID NO: 65542 - DNA, 25 bp, Artificial
  probe
  misc_feature (1)..(25): SEQ ID NO: 3546; WAN024ASR_at; Start 53; Stop 77
gggattgaaatgaaaacggagaatg

SEQ ID NO: 65543 - DNA, 25 bp, Artificial
  probe
  misc_feature (1)..(25): SEQ ID NO: 3546; WAN024ASR_at; Start 7; Stop 31
ttagttagagggttagcactttatc

SEQ ID NO: 65544 - DNA, 25 bp, Artificial
  probe
  misc_feature (1)..(25): SEQ ID NO: 3546; WAN024ASR_at; Start 41; Stop 65
gttataatattagggattgaaatga

SEQ ID NO: 65545 - DNA, 25 bp, Artificial
  probe
  misc_feature (1)..(25): SEQ ID NO: 3546; WAN024ASR_at; Start 42; Stop 66
ttataatattagggattgaaatgaa

SEQ ID NO: 65546 - DNA, 25 bp, Artificial
  probe
  misc_feature (1)..(25): SEQ ID NO: 3546; WAN024ASR_at; Start 40; Stop 64
tgttataatattagggattgaaatg

SEQ ID NO: 65547 - DNA, 25 bp, Artificial
  probe
  misc_feature (1)..(25): SEQ ID NO: 3546; WAN024ASR_at; Start 45; Stop 69
taatattagggattgaaatgaaaac

SEQ ID NO: 65548 - DNA, 25 bp, Artificial
  probe
  misc_feature (1)..(25): SEQ ID NO: 3546; WAN024ASR_at; Start 43; Stop 67
tataatattagggattgaaatgaaa

SEQ ID NO: 65549 - DNA, 25 bp, Artificial
  probe
  misc_feature (1)..(25): SEQ ID NO: 3546; WAN024ASR_at; Start 55; Stop 79
gattgaaatgaaaacggagaatgag

SEQ ID NO: 65550 - DNA, 25 bp, Artificial
  probe
  misc_feature (1)..(25): SEQ ID NO: 3546; WAN024ASR_at; Start 44; Stop 68
ataatattagggattgaaatgaaaa

SEQ ID NO: 65551 - DNA, 25 bp, Artificial
  probe
  misc_feature (1)..(25): SEQ ID NO: 3546; WAN024ASR_at; Start 47; Stop 71
atattagggattgaaatgaaaacgg

SEQ ID NO: 65552 - DNA, 25 bp, Artificial
  probe
  misc_feature (1)..(25): SEQ ID NO: 3546; WAN024ASR_at; Start 49; Stop 73
attagggattgaaatgaaaacggag

SEQ ID NO: 65553 - DNA, 25 bp, Artificial
  probe
  misc_feature (1)..(25): SEQ ID NO: 3546; WAN024ASR_at; Start 21; Stop 45
agcactttatccctttttgtgttat

SEQ ID NO: 65554 - DNA, 25 bp, Artificial
  probe
  misc_feature (1)..(25): SEQ ID NO: 3546; WAN024ASR_at; Start 39; Stop 63
gtgttataatattagggattgaaat

SEQ ID NO: 65555 - DNA, 25 bp, Artificial
  probe
  misc_feature (1)..(25): SEQ ID NO: 3546; WAN024ASR_at; Start 59; Stop 83
gaaatgaaaacggagaatgagaaat

SEQ ID NO: 65556 - DNA, 25 bp, Artificial
  probe
  misc_feature (1)..(25): SEQ ID NO: 3546; WAN024ASR_at; Start 37; Stop 61
ttgtgttataatattagggattgaa

SEQ ID NO: 65557 - DNA, 25 bp, Artificial
  probe
  misc_feature (1)..(25): SEQ ID NO: 3546; WAN024ASR_at; Start 22; Stop 46
gcactttatccctttttgtgttata

SEQ ID NO: 65558 - DNA, 25 bp, Artificial
  probe
  misc_feature (1)..(25): SEQ ID NO: 3546; WAN024ASR_at; Start 38; Stop 62
tgtgttataatattagggattgaaa

SEQ ID NO: 65559 - DNA, 25 bp, Artificial
  probe
  misc_feature (1)..(25): SEQ ID NO: 3546; WAN024ASR_at; Start 50; Stop 74
ttagggattgaaatgaaaacggaga

SEQ ID NO: 65560 - DNA, 25 bp, Artificial
  probe
  misc_feature (1)..(25): SEQ ID NO: 3546; WAN024ASR_at; Start 20; Stop 44
tagcactttatccctttttgtgtta

SEQ ID NO: 65561 - DNA, 25 bp, Artificial
  probe
  misc_feature (1)..(25): SEQ ID NO: 3546; WAN024ASR_at; Start 8; Stop 32
tagttagagggttagcactttatcc

SEQ ID NO: 65562 - DNA, 25 bp, Artificial
  probe
  misc_feature (1)..(25): SEQ ID NO: 3546; WAN024ASR_at; Start 58; Stop 82
tgaaatgaaaacggagaatgagaaa

SEQ ID NO: 65563 - DNA, 25 bp, Artificial
  probe
  misc_feature (1)..(25): SEQ ID NO: 3546; WAN024ASR_at; Start 51; Stop 75
tagggattgaaatgaaaacggagaa

SEQ ID NO: 65564 - DNA, 25 bp, Artificial
  probe
  misc_feature (1)..(25): SEQ ID NO: 3546; WAN024ASR_at; Start 57; Stop 81
ttgaaatgaaaacggagaatgagaa

SEQ ID NO: 65565 - DNA, 25 bp, Artificial
  probe
  misc_feature (1)..(25): SEQ ID NO: 3546; WAN024ASR_at; Start 48; Stop 72
tattagggattgaaatgaaaacgga

SEQ ID NO: 65566 - DNA, 25 bp, Artificial
  probe
  misc_feature (1)..(25): SEQ ID NO: 3546; WAN024ASR_at; Start 54; Stop 78
ggattgaaatgaaaacggagaatga

SEQ ID NO: 65567 - DNA, 25 bp, Artificial
  probe
  misc_feature (1)..(25): SEQ ID NO: 7620; WAN024ASS_at; Start 130; Stop 154
gctgtgcctcgtgaaggctacgata

SEQ ID NO: 65568 - DNA, 25 bp, Artificial
  probe
  misc_feature (1)..(25): SEQ ID NO: 7620; WAN024ASS_at; Start 155; Stop 179
aacttccaggtatctttaaggatag

SEQ ID NO: 65569 - DNA, 25 bp, Artificial
  probe
  misc_feature (1)..(25): SEQ ID NO: 7620; WAN024ASS_at; Start 676; Stop 700
aaagttcccacggagtatgaccgct

SEQ ID NO: 65570 - DNA, 25 bp, Artificial
  probe
  misc_feature (1)..(25): SEQ ID NO: 7620; WAN024ASS_at; Start 142; Stop 166
gaaggctacgataaacttccaggta

SEQ ID NO: 65571 - DNA, 25 bp, Artificial
  probe
  misc_feature (1)..(25): SEQ ID NO: 7620; WAN024ASS_at; Start 213; Stop 237
tcaatattgcgatactttacattgc

SEQ ID NO: 65572 - DNA, 25 bp, Artificial
  probe
  misc_feature (1)..(25): SEQ ID NO: 7620; WAN024ASS_at; Start 225; Stop 249
tactttacattgctactttcctcgc

SEQ ID NO: 65573 - DNA, 25 bp, Artificial
  probe
  misc_feature (1)..(25): SEQ ID NO: 7620; WAN024ASS_at; Start 299; Stop 323
ccaatttaggtttgcatttgattga

SEQ ID NO: 65574 - DNA, 25 bp, Artificial
  probe
  misc_feature (1)..(25): SEQ ID NO: 7620; WAN024ASS_at; Start 759; Stop 783
gaaatcgcatttaggaggacaataa

SEQ ID NO: 65575 - DNA, 25 bp, Artificial
  probe
  misc_feature (1)..(25): SEQ ID NO: 7620; WAN024ASS_at; Start 235; Stop 259
tgctactttcctcgcttattccttt

SEQ ID NO: 65576 - DNA, 25 bp, Artificial
  probe
  misc_feature (1)..(25): SEQ ID NO: 7620; WAN024ASS_at; Start 199; Stop 223
caggttcttgcttatcaatattgcg

SEQ ID NO: 65577 - DNA, 25 bp, Artificial
  probe
  misc_feature (1)..(25): SEQ ID NO: 7620; WAN024ASS_at; Start 42; Stop 66
caatatagatttcttccttcgtggg

SEQ ID NO: 65578 - DNA, 25 bp, Artificial
  probe
  misc_feature (1)..(25): SEQ ID NO: 7620; WAN024ASS_at; Start 290; Stop 314
cacgaaataccaatttaggtttgca

SEQ ID NO: 65579 - DNA, 25 bp, Artificial
  probe
  misc_feature (1)..(25): SEQ ID NO: 7620; WAN024ASS_at; Start 250; Stop 274
ttattccttttagaagatgaaagaa

SEQ ID NO: 65580 - DNA, 25 bp, Artificial
  probe
  misc_feature (1)..(25): SEQ ID NO: 7620; WAN024ASS_at; Start 112; Stop 136
gatgatgacatggatattgctgtgc

SEQ ID NO: 65581 - DNA, 25 bp, Artificial
  probe
  misc_feature (1)..(25): SEQ ID NO: 7620; WAN024ASS_at; Start 346; Stop 370
ccaaatcattcatttttaagaaagc

SEQ ID NO: 65582 - DNA, 25 bp, Artificial
  probe
  misc_feature (1)..(25): SEQ ID NO: 7620; WAN024ASS_at; Start 330; Stop 354
tcctttggatggtgccccaaatcat

SEQ ID NO: 65583 - DNA, 25 bp, Artificial
  probe
  misc_feature (1)..(25): SEQ ID NO: 7620; WAN024ASS_at; Start 413; Stop 437
taggaactacctatgttggagacca

SEQ ID NO: 65584 - DNA, 25 bp, Artificial
  probe
  misc_feature (1)..(25): SEQ ID NO: 7620; WAN024ASS_at; Start 579; Stop 603
tgctgggacaattaatgcatctctg

SEQ ID NO: 65585 - DNA, 25 bp, Artificial
  probe
  misc_feature (1)..(25): SEQ ID NO: 7620; WAN024ASS_at; Start 184; Stop 208
atcgcaggcaaatatcaggttcttg

SEQ ID NO: 65586 - DNA, 25 bp, Artificial
  probe
  misc_feature (1)..(25): SEQ ID NO: 7620; WAN024ASS_at; Start 368; Stop 392
agctttacttcggtaaagtatactg

SEQ ID NO: 65587 - DNA, 25 bp, Artificial
  probe
  misc_feature (1)..(25): SEQ ID NO: 7620; WAN024ASS_at; Start 592; Stop 616
aatgcatctctgtttgccaaagaag

SEQ ID NO: 65588 - DNA, 25 bp, Artificial
  probe
  misc_feature (1)..(25): SEQ ID NO: 7620; WAN024ASS_at; Start 322; Stop 346
gatatcattcctttggatggtgccc

SEQ ID NO: 65589 - DNA, 25 bp, Artificial
  probe
  misc_feature (1)..(25): SEQ ID NO: 7620; WAN024ASS_at; Start 600; Stop 624
tctgtttgccaaagaagtcatgcca

SEQ ID NO: 65590 - DNA, 25 bp, Artificial
  probe
  misc_feature (1)..(25): SEQ ID NO: 7620; WAN024ASS_at; Start 661; Stop 685
gaggatgccttctttaaagttccca

SEQ ID NO: 65591 - DNA, 25 bp, Artificial
  probe
  misc_feature (1)..(25): SEQ ID NO: 7620; WAN024ASS_at; Start 30; Stop 54
ttgtaaagagaacaatatagatttc

SEQ ID NO: 65592 - DNA, 25 bp, Artificial
  probe
  misc_feature (1)..(25): SEQ ID NO: 7620; WAN024ASS_at; Start 403; Stop 427
ttagcaagtttaggaactacctatg

SEQ ID NO: 65593 - DNA, 25 bp, Artificial
  probe
  misc_feature (1)..(25): SEQ ID NO: 7620; WAN024ASS_at; Start 171; Stop 195
taaggatagaattatcgcaggcaaa

SEQ ID NO: 65594 - DNA, 25 bp, Artificial
  probe
  misc_feature (1)..(25): SEQ ID NO: 7620; WAN024ASS_at; Start 120; Stop 144
catggatattgctgtgcctcgtgaa

SEQ ID NO: 65595 - DNA, 25 bp, Artificial
  probe
  misc_feature (1)..(25): SEQ ID NO: 7620; WAN024ASS_at; Start 509; Stop 533
tccctcaaaattatgtgtacagacg

SEQ ID NO: 65596 - DNA, 25 bp, Artificial
  probe
  misc_feature (1)..(25): SEQ ID NO: 7620; WAN024ASS_at; Start 419; Stop 443
ctacctatgttggagaccatgtgga

SEQ ID NO: 65597 - DNA, 25 bp, Artificial
  probe
  misc_feature (1)..(25): SEQ ID NO: 7620; WAN024ASS_at; Start 80; Stop 104
gggcagtcaaatatgatggctttat

SEQ ID NO: 65598 - DNA, 25 bp, Artificial
  probe
  misc_feature (1)..(25): SEQ ID NO: 7620; WAN024ASS_at; Start 688; Stop 712
gagtatgaccgctatctgaaaagac

SEQ ID NO: 65599 - DNA, 25 bp, Artificial
  probe
  misc_feature (1)..(25): SEQ ID NO: 7620; WAN024ASS_at; Start 567; Stop 591
aaagcagaagtatgctgggacaatt

SEQ ID NO: 65600 - DNA, 25 bp, Artificial
  probe
  misc_feature (1)..(25): SEQ ID NO: 7620; WAN024ASS_at; Start 603; Stop 627
gtttgccaaagaagtcatgccagta

SEQ ID NO: 65601 - DNA, 25 bp, Artificial
  probe
  misc_feature (1)..(25): SEQ ID NO: 6446; WAN024AST_at; Start 172; Stop 196
ctctggcaaactagcgtaggtatgg

SEQ ID NO: 65602 - DNA, 25 bp, Artificial
  probe
  misc_feature (1)..(25): SEQ ID NO: 6446; WAN024AST_at; Start 178; Stop 202
caaactagcgtaggtatggatatcc

SEQ ID NO: 65603 - DNA, 25 bp, Artificial
  probe
  misc_feature (1)..(25): SEQ ID NO: 6446; WAN024AST_at; Start 30; Stop 54
tgactttatcggttcctttgacgac

SEQ ID NO: 65604 - DNA, 25 bp, Artificial
  probe
  misc_feature (1)..(25): SEQ ID NO: 6446; WAN024AST_at; Start 18; Stop 42
caacagaaccaatgactttatcggt

SEQ ID NO: 65605 - DNA, 25 bp, Artificial
  probe
  misc_feature (1)..(25): SEQ ID NO: 6446; WAN024AST_at; Start 180; Stop 204
aactagcgtaggtatggatatcctc

SEQ ID NO: 65606 - DNA, 25 bp, Artificial
  probe
  misc_feature (1)..(25): SEQ ID NO: 6446; WAN024AST_at; Start 31; Stop 55
gactttatcggttcctttgacgaca

SEQ ID NO: 65607 - DNA, 25 bp, Artificial
  probe
  misc_feature (1)..(25): SEQ ID NO: 6446; WAN024AST_at; Start 13; Stop 37
gaagtcaacagaaccaatgacttta

SEQ ID NO: 65608 - DNA, 25 bp, Artificial
  probe
  misc_feature (1)..(25): SEQ ID NO: 6446; WAN024AST_at; Start 175; Stop 199
tggcaaactagcgtaggtatggata

SEQ ID NO: 65609 - DNA, 25 bp, Artificial
  probe
  misc_feature (1)..(25): SEQ ID NO: 6446; WAN024AST_at; Start 25; Stop 49
accaatgactttatcggttcctttg

SEQ ID NO: 65610 - DNA, 25 bp, Artificial
  probe
  misc_feature (1)..(25): SEQ ID NO: 6446; WAN024AST_at; Start 205; Stop 229
agcatccaccactgtgcggactcgt

SEQ ID NO: 65611 - DNA, 25 bp, Artificial
  probe
  misc_feature (1)..(25): SEQ ID NO: 6446; WAN024AST_at; Start 181; Stop 205
actagcgtaggtatggatatcctca

SEQ ID NO: 65612 - DNA, 25 bp, Artificial
  probe
  misc_feature (1)..(25): SEQ ID NO: 6446; WAN024AST_at; Start 27; Stop 51
caatgactttatcggttcctttgac

SEQ ID NO: 65613 - DNA, 25 bp, Artificial
  probe
  misc_feature (1)..(25): SEQ ID NO: 6446; WAN024AST_at; Start 173; Stop 197
tctggcaaactagcgtaggtatgga

SEQ ID NO: 65614 - DNA, 25 bp, Artificial
  probe
  misc_feature (1)..(25): SEQ ID NO: 6446; WAN024AST_at; Start 184; Stop 208
agcgtaggtatggatatcctcagca

SEQ ID NO: 65615 - DNA, 25 bp, Artificial
  probe
  misc_feature (1)..(25): SEQ ID NO: 6446; WAN024AST_at; Start 176; Stop 200
ggcaaactagcgtaggtatggatat

SEQ ID NO: 65616 - DNA, 25 bp, Artificial
  probe
  misc_feature (1)..(25): SEQ ID NO: 6446; WAN024AST_at; Start 179; Stop 203
aaactagcgtaggtatggatatcct

SEQ ID NO: 65617 - DNA, 25 bp, Artificial
  probe
  misc_feature (1)..(25): SEQ ID NO: 6446; WAN024AST_at; Start 4; Stop 28
aagatggttgaagtcaacagaacca

SEQ ID NO: 65618 - DNA, 25 bp, Artificial
  probe
  misc_feature (1)..(25): SEQ ID NO: 6446; WAN024AST_at; Start 185; Stop 209
gcgtaggtatggatatcctcagcat

SEQ ID NO: 65619 - DNA, 25 bp, Artificial
  probe
  misc_feature (1)..(25): SEQ ID NO: 6446; WAN024AST_at; Start 207; Stop 231
catccaccactgtgcggactcgtaa

SEQ ID NO: 65620 - DNA, 25 bp, Artificial
  probe
  misc_feature (1)..(25): SEQ ID NO: 6446; WAN024AST_at; Start 197; Stop 221
atatcctcagcatccaccactgtgc

SEQ ID NO: 65621 - DNA, 25 bp, Artificial
  probe
  misc_feature (1)..(25): SEQ ID NO: 6446; WAN024AST_at; Start 10; Stop 34
gttgaagtcaacagaaccaatgact

SEQ ID NO: 65622 - DNA, 25 bp, Artificial
  probe
  misc_feature (1)..(25): SEQ ID NO: 6446; WAN024AST_at; Start 8; Stop 32
tggttgaagtcaacagaaccaatga

SEQ ID NO: 65623 - DNA, 25 bp, Artificial
  probe
  misc_feature (1)..(25): SEQ ID NO: 6446; WAN024AST_at; Start 3; Stop 27
gaagatggttgaagtcaacagaacc

SEQ ID NO: 65624 - DNA, 25 bp, Artificial
  probe
  misc_feature (1)..(25): SEQ ID NO: 6446; WAN024AST_at; Start 21; Stop 45
cagaaccaatgactttatcggttcc

SEQ ID NO: 65625 - DNA, 25 bp, Artificial
  probe
  misc_feature (1)..(25): SEQ ID NO: 6446; WAN024AST_at; Start 183; Stop 207
tagcgtaggtatggatatcctcagc

SEQ ID NO: 65626 - DNA, 25 bp, Artificial
  probe
  misc_feature (1)..(25): SEQ ID NO: 6446; WAN024AST_at; Start 186; Stop 210
cgtaggtatggatatcctcagcatc

SEQ ID NO: 65627 - DNA, 25 bp, Artificial
  probe
  misc_feature (1)..(25): SEQ ID NO: 6446; WAN024AST_at; Start 12; Stop 36
tgaagtcaacagaaccaatgacttt

SEQ ID NO: 65628 - DNA, 25 bp, Artificial
  probe
  misc_feature (1)..(25): SEQ ID NO: 6446; WAN024AST_at; Start 26; Stop 50
ccaatgactttatcggttcctttga

SEQ ID NO: 65629 - DNA, 25 bp, Artificial
  probe
  misc_feature (1)..(25): SEQ ID NO: 6446; WAN024AST_at; Start 6; Stop 30
gatggttgaagtcaacagaaccaat

SEQ ID NO: 65630 - DNA, 25 bp, Artificial
  probe
  misc_feature (1)..(25): SEQ ID NO: 6446; WAN024AST_at; Start 177; Stop 201
gcaaactagcgtaggtatggatatc

SEQ ID NO: 65631 - DNA, 25 bp, Artificial
  probe
  misc_feature (1)..(25): SEQ ID NO: 6446; WAN024AST_at; Start 17; Stop 41
tcaacagaaccaatgactttatcgg

SEQ ID NO: 65632 - DNA, 25 bp, Artificial
  probe
  misc_feature (1)..(25): SEQ ID NO: 6446; WAN024AST_at; Start 9; Stop 33
ggttgaagtcaacagaaccaatgac

SEQ ID NO: 65633 - DNA, 25 bp, Artificial
  probe
  misc_feature (1)..(25): SEQ ID NO: 6446; WAN024AST_at; Start 182; Stop 206
ctagcgtaggtatggatatcctcag

SEQ ID NO: 65634 - DNA, 25 bp, Artificial
  probe
  misc_feature (1)..(25): SEQ ID NO: 6446; WAN024AST_at; Start 2; Stop 26
tgaagatggttgaagtcaacagaac

SEQ ID NO: 65635 - DNA, 25 bp, Artificial
  probe
  misc_feature (1)..(25): SEQ ID NO: 7288; WAN024ASU_at; Start 38; Stop 62
ccaaaattcaattactcaagatgct

SEQ ID NO: 65636 - DNA, 25 bp, Artificial
  probe
  misc_feature (1)..(25): SEQ ID NO: 7288; WAN024ASU_at; Start 49; Stop 73
ttactcaagatgctaagccgtcaag

SEQ ID NO: 65637 - DNA, 25 bp, Artificial
  probe
  misc_feature (1)..(25): SEQ ID NO: 7288; WAN024ASU_at; Start 43; Stop 67
attcaattactcaagatgctaagcc

SEQ ID NO: 65638 - DNA, 25 bp, Artificial
  probe
  misc_feature (1)..(25): SEQ ID NO: 7288; WAN024ASU_at; Start 41; Stop 65
aaattcaattactcaagatgctaag

SEQ ID NO: 65639 - DNA, 25 bp, Artificial
  probe
  misc_feature (1)..(25): SEQ ID NO: 7288; WAN024ASU_at; Start 52; Stop 76
ctcaagatgctaagccgtcaagcaa

SEQ ID NO: 65640 - DNA, 25 bp, Artificial
  probe
  misc_feature (1)..(25): SEQ ID NO: 7288; WAN024ASU_at; Start 45; Stop 69
tcaattactcaagatgctaagccgt

SEQ ID NO: 65641 - DNA, 25 bp, Artificial
  probe
  misc_feature (1)..(25): SEQ ID NO: 7288; WAN024ASU_at; Start 44; Stop 68
ttcaattactcaagatgctaagccg

SEQ ID NO: 65642 - DNA, 25 bp, Artificial
  probe
  misc_feature (1)..(25): SEQ ID NO: 7288; WAN024ASU_at; Start 34; Stop 58
gagaccaaaattcaattactcaaga

SEQ ID NO: 65643 - DNA, 25 bp, Artificial
  probe
  misc_feature (1)..(25): SEQ ID NO: 7288; WAN024ASU_at; Start 50; Stop 74
tactcaagatgctaagccgtcaagc

SEQ ID NO: 65644 - DNA, 25 bp, Artificial
  probe
  misc_feature (1)..(25): SEQ ID NO: 7288; WAN024ASU_at; Start 46; Stop 70
caattactcaagatgctaagccgtc

SEQ ID NO: 65645 - DNA, 25 bp, Artificial
  probe
  misc_feature (1)..(25): SEQ ID NO: 7288; WAN024ASU_at; Start 35; Stop 59
agaccaaaattcaattactcaagat

SEQ ID NO: 65646 - DNA, 25 bp, Artificial
  probe
  misc_feature (1)..(25): SEQ ID NO: 7288; WAN024ASU_at; Start 48; Stop 72
attactcaagatgctaagccgtcaa

SEQ ID NO: 65647 - DNA, 25 bp, Artificial
  probe
  misc_feature (1)..(25): SEQ ID NO: 7288; WAN024ASU_at; Start 36; Stop 60
gaccaaaattcaattactcaagatg

SEQ ID NO: 65648 - DNA, 25 bp, Artificial
  probe
  misc_feature (1)..(25): SEQ ID NO: 7288; WAN024ASU_at; Start 40; Stop 64
aaaattcaattactcaagatgctaa

SEQ ID NO: 65649 - DNA, 25 bp, Artificial
  probe
  misc_feature (1)..(25): SEQ ID NO: 7288; WAN024ASU_at; Start 39; Stop 63
caaaattcaattactcaagatgcta

SEQ ID NO: 65650 - DNA, 25 bp, Artificial
  probe
  misc_feature (1)..(25): SEQ ID NO: 7288; WAN024ASU_at; Start 47; Stop 71
aattactcaagatgctaagccgtca

SEQ ID NO: 65651 - DNA, 25 bp, Artificial
  probe
  misc_feature (1)..(25): SEQ ID NO: 7288; WAN024ASU_at; Start 42; Stop 66
aattcaattactcaagatgctaagc

SEQ ID NO: 65652 - DNA, 25 bp, Artificial
  probe
  misc_feature (1)..(25): SEQ ID NO: 7288; WAN024ASU_at; Start 51; Stop 75
actcaagatgctaagccgtcaagca

SEQ ID NO: 65653 - DNA, 25 bp, Artificial
  probe
  misc_feature (1)..(25): SEQ ID NO: 7288; WAN024ASU_at; Start 37; Stop 61
accaaaattcaattactcaagatgc

SEQ ID NO: 65654 - DNA, 25 bp, Artificial
  probe
  misc_feature (1)..(25): SEQ ID NO: 6133; WAN024ASV_x_at; Start 19; Stop 43
cactgttttaaggttgtagatggaa

SEQ ID NO: 65655 - DNA, 25 bp, Artificial
  probe
  misc_feature (1)..(25): SEQ ID NO: 6133; WAN024ASV_x_at; Start 10; Stop 34
agctcaaaacactgttttaaggttg

SEQ ID NO: 65656 - DNA, 25 bp, Artificial
  probe
  misc_feature (1)..(25): SEQ ID NO: 6133; WAN024ASV_x_at; Start 25; Stop 49
tttaaggttgtagatggaactgacg

SEQ ID NO: 65657 - DNA, 25 bp, Artificial
  probe
  misc_feature (1)..(25): SEQ ID NO: 6133; WAN024ASV_x_at; Start 22; Stop 46
tgttttaaggttgtagatggaactg

SEQ ID NO: 65658 - DNA, 25 bp, Artificial
  probe
  misc_feature (1)..(25): SEQ ID NO: 6133; WAN024ASV_x_at; Start 24; Stop 48
ttttaaggttgtagatggaactgac

SEQ ID NO: 65659 - DNA, 25 bp, Artificial
  probe
  misc_feature (1)..(25): SEQ ID NO: 6133; WAN024ASV_x_at; Start 9; Stop 33
cagctcaaaacactgttttaaggtt

SEQ ID NO: 65660 - DNA, 25 bp, Artificial
  probe
  misc_feature (1)..(25): SEQ ID NO: 6133; WAN024ASV_x_at; Start 27; Stop 51
taaggttgtagatggaactgacgaa

SEQ ID NO: 65661 - DNA, 25 bp, Artificial
  probe
  misc_feature (1)..(25): SEQ ID NO: 6133; WAN024ASV_x_at; Start 1; Stop 25
gctgcgggcagctcaaaacactgtt

SEQ ID NO: 65662 - DNA, 25 bp, Artificial
  probe
  misc_feature (1)..(25): SEQ ID NO: 6133; WAN024ASV_x_at; Start 21; Stop 45
ctgttttaaggttgtagatggaact

SEQ ID NO: 65663 - DNA, 25 bp, Artificial
  probe
  misc_feature (1)..(25): SEQ ID NO: 6133; WAN024ASV_x_at; Start 23; Stop 47
gttttaaggttgtagatggaactga

SEQ ID NO: 65664 - DNA, 25 bp, Artificial
  probe
  misc_feature (1)..(25): SEQ ID NO: 6133; WAN024ASV_x_at; Start 7; Stop 31
ggcagctcaaaacactgttttaagg

SEQ ID NO: 65665 - DNA, 25 bp, Artificial
  probe
  misc_feature (1)..(25): SEQ ID NO: 6133; WAN024ASV_x_at; Start 8; Stop 32
gcagctcaaaacactgttttaaggt

SEQ ID NO: 65666 - DNA, 25 bp, Artificial
  probe
  misc_feature (1)..(25): SEQ ID NO: 6133; WAN024ASV_x_at; Start 17; Stop 41
aacactgttttaaggttgtagatgg

SEQ ID NO: 65667 - DNA, 25 bp, Artificial
  probe
  misc_feature (1)..(25): SEQ ID NO: 6133; WAN024ASV_x_at; Start 6; Stop 30
gggcagctcaaaacactgttttaag

SEQ ID NO: 65668 - DNA, 25 bp, Artificial
  probe
  misc_feature (1)..(25): SEQ ID NO: 6133; WAN024ASV_x_at; Start 18; Stop 42
acactgttttaaggttgtagatgga

SEQ ID NO: 65669 - DNA, 25 bp, Artificial
  probe
  misc_feature (1)..(25): SEQ ID NO: 6133; WAN024ASV_x_at; Start 3; Stop 27
tgcgggcagctcaaaacactgtttt

SEQ ID NO: 65670 - DNA, 25 bp, Artificial
  probe
  misc_feature (1)..(25): SEQ ID NO: 6133; WAN024ASV_x_at; Start 26; Stop 50
ttaaggttgtagatggaactgacga

SEQ ID NO: 65671 - DNA, 25 bp, Artificial
  probe
  misc_feature (1)..(25): SEQ ID NO: 6133; WAN024ASV_x_at; Start 4; Stop 28
gcgggcagctcaaaacactgtttta

SEQ ID NO: 65672 - DNA, 25 bp, Artificial
  probe
  misc_feature (1)..(25): SEQ ID NO: 6133; WAN024ASV_x_at; Start 2; Stop 26
ctgcgggcagctcaaaacactgttt

SEQ ID NO: 65673 - DNA, 25 bp, Artificial
  probe
  misc_feature (1)..(25): SEQ ID NO: 6133; WAN024ASV_x_at; Start 5; Stop 29
cgggcagctcaaaacactgttttaa

SEQ ID NO: 65674 - DNA, 25 bp, Artificial
  probe
  misc_feature (1)..(25): SEQ ID NO: 6133; WAN024ASV_x_at; Start 16; Stop 40
aaacactgttttaaggttgtagatg

SEQ ID NO: 65675 - DNA, 25 bp, Artificial
  probe
  misc_feature (1)..(25): SEQ ID NO: 6869; WAN024ASW_at; Start 17; Stop 41
tcgacagagccaacgatcttatccg

SEQ ID NO: 65676 - DNA, 25 bp, Artificial
  probe
  misc_feature (1)..(25): SEQ ID NO: 6869; WAN024ASW_at; Start 15; Stop 39
aatcgacagagccaacgatcttatc

SEQ ID NO: 65677 - DNA, 25 bp, Artificial
  probe
  misc_feature (1)..(25): SEQ ID NO: 6869; WAN024ASW_at; Start 29; Stop 53
acgatcttatccgttcctttgacga

SEQ ID NO: 65678 - DNA, 25 bp, Artificial
  probe
  misc_feature (1)..(25): SEQ ID NO: 6869; WAN024ASW_at; Start 31; Stop 55
gatcttatccgttcctttgacgaca

SEQ ID NO: 65679 - DNA, 25 bp, Artificial
  probe
  misc_feature (1)..(25): SEQ ID NO: 6869; WAN024ASW_at; Start 180; Stop 204
aactagcatagtcaaagatatcctc

SEQ ID NO: 65680 - DNA, 25 bp, Artificial
  probe
  misc_feature (1)..(25): SEQ ID NO: 6869; WAN024ASW_at; Start 172; Stop 196
ctctggcaaactagcatagtcaaag

SEQ ID NO: 65681 - DNA, 25 bp, Artificial
  probe
  misc_feature (1)..(25): SEQ ID NO: 6869; WAN024ASW_at; Start 184; Stop 208
agcatagtcaaagatatcctcagca

SEQ ID NO: 65682 - DNA, 25 bp, Artificial
  probe
  misc_feature (1)..(25): SEQ ID NO: 6869; WAN024ASW_at; Start 13; Stop 37
gaaatcgacagagccaacgatctta

SEQ ID NO: 65683 - DNA, 25 bp, Artificial
  probe
  misc_feature (1)..(25): SEQ ID NO: 6869; WAN024ASW_at; Start 4; Stop 28
gcgatggttgaaatcgacagagcca

SEQ ID NO: 65684 - DNA, 25 bp, Artificial
  probe
  misc_feature (1)..(25): SEQ ID NO: 6869; WAN024ASW_at; Start 5; Stop 29
cgatggttgaaatcgacagagccaa

SEQ ID NO: 65685 - DNA, 25 bp, Artificial
  probe
  misc_feature (1)..(25): SEQ ID NO: 6869; WAN024ASW_at; Start 10; Stop 34
gttgaaatcgacagagccaacgatc

SEQ ID NO: 65686 - DNA, 25 bp, Artificial
  probe
  misc_feature (1)..(25): SEQ ID NO: 6869; WAN024ASW_at; Start 186; Stop 210
catagtcaaagatatcctcagcatc

SEQ ID NO: 65687 - DNA, 25 bp, Artificial
  probe
  misc_feature (1)..(25): SEQ ID NO: 6869; WAN024ASW_at; Start 18; Stop 42
cgacagagccaacgatcttatccgt

SEQ ID NO: 65688 - DNA, 25 bp, Artificial
  probe
  misc_feature (1)..(25): SEQ ID NO: 6869; WAN024ASW_at; Start 175; Stop 199
tggcaaactagcatagtcaaagata

SEQ ID NO: 65689 - DNA, 25 bp, Artificial
  probe
  misc_feature (1)..(25): SEQ ID NO: 6869; WAN024ASW_at; Start 11; Stop 35
ttgaaatcgacagagccaacgatct

SEQ ID NO: 65690 - DNA, 25 bp, Artificial
  probe
  misc_feature (1)..(25): SEQ ID NO: 6869; WAN024ASW_at; Start 205; Stop 229
agcatccgccacagtacggactcgt

SEQ ID NO: 65691 - DNA, 25 bp, Artificial
  probe
  misc_feature (1)..(25): SEQ ID NO: 6869; WAN024ASW_at; Start 23; Stop 47
gagccaacgatcttatccgttcctt

SEQ ID NO: 65692 - DNA, 25 bp, Artificial
  probe
  misc_feature (1)..(25): SEQ ID NO: 6869; WAN024ASW_at; Start 185; Stop 209
gcatagtcaaagatatcctcagcat

SEQ ID NO: 65693 - DNA, 25 bp, Artificial
  probe
  misc_feature (1)..(25): SEQ ID NO: 6869; WAN024ASW_at; Start 176; Stop 200
ggcaaactagcatagtcaaagatat

SEQ ID NO: 65694 - DNA, 25 bp, Artificial
  probe
  misc_feature (1)..(25): SEQ ID NO: 6869; WAN024ASW_at; Start 7; Stop 31
atggttgaaatcgacagagccaacg

SEQ ID NO: 65695 - DNA, 25 bp, Artificial
  probe
  misc_feature (1)..(25): SEQ ID NO: 6869; WAN024ASW_at; Start 27; Stop 51
caacgatcttatccgttcctttgac

SEQ ID NO: 65696 - DNA, 25 bp, Artificial
  probe
  misc_feature (1)..(25): SEQ ID NO: 6869; WAN024ASW_at; Start 207; Stop 231
catccgccacagtacggactcgtaa

SEQ ID NO: 65697 - DNA, 25 bp, Artificial
  probe
  misc_feature (1)..(25): SEQ ID NO: 6869; WAN024ASW_at; Start 8; Stop 32
tggttgaaatcgacagagccaacga

SEQ ID NO: 65698 - DNA, 25 bp, Artificial
  probe
  misc_feature (1)..(25): SEQ ID NO: 6869; WAN024ASW_at; Start 25; Stop 49
gccaacgatcttatccgttcctttg

SEQ ID NO: 65699 - DNA, 25 bp, Artificial
  probe
  misc_feature (1)..(25): SEQ ID NO: 6869; WAN024ASW_at; Start 21; Stop 45
cagagccaacgatcttatccgttcc

SEQ ID NO: 65700 - DNA, 25 bp, Artificial
  probe
  misc_feature (1)..(25): SEQ ID NO: 6869; WAN024ASW_at; Start 19; Stop 43
gacagagccaacgatcttatccgtt

SEQ ID NO: 65701 - DNA, 25 bp, Artificial
  probe
  misc_feature (1)..(25): SEQ ID NO: 6869; WAN024ASW_at; Start 6; Stop 30
gatggttgaaatcgacagagccaac

SEQ ID NO: 65702 - DNA, 25 bp, Artificial
  probe
  misc_feature (1)..(25): SEQ ID NO: 6869; WAN024ASW_at; Start 9; Stop 33
ggttgaaatcgacagagccaacgat

SEQ ID NO: 65703 - DNA, 25 bp, Artificial
  probe
  misc_feature (1)..(25): SEQ ID NO: 6869; WAN024ASW_at; Start 178; Stop 202
caaactagcatagtcaaagatatcc

SEQ ID NO: 65704 - DNA, 25 bp, Artificial
  probe
  misc_feature (1)..(25): SEQ ID NO: 6869; WAN024ASW_at; Start 12; Stop 36
tgaaatcgacagagccaacgatctt

SEQ ID NO: 65705 - DNA, 25 bp, Artificial
  probe
  misc_feature (1)..(25): SEQ ID NO: 6869; WAN024ASW_at; Start 2; Stop 26
tggcgatggttgaaatcgacagagc

SEQ ID NO: 65706 - DNA, 25 bp, Artificial
  probe
  misc_feature (1)..(25): SEQ ID NO: 6869; WAN024ASW_at; Start 183; Stop 207
tagcatagtcaaagatatcctcagc

SEQ ID NO: 65707 - DNA, 25 bp, Artificial
  probe
  misc_feature (1)..(25): SEQ ID NO: 6869; WAN024ASW_at; Start 3; Stop 27
ggcgatggttgaaatcgacagagcc

SEQ ID NO: 65708 - DNA, 25 bp, Artificial
  probe
  misc_feature (1)..(25): SEQ ID NO: 6869; WAN024ASW_at; Start 173; Stop 197
tctggcaaactagcatagtcaaaga

SEQ ID NO: 65709 - DNA, 25 bp, Artificial
  probe
  misc_feature (1)..(25): SEQ ID NO: 6434; WAN024ASX_at; Start 66; Stop 90
tagggagagtatttggtataatcta

SEQ ID NO: 65710 - DNA, 25 bp, Artificial
  probe
  misc_feature (1)..(25): SEQ ID NO: 6434; WAN024ASX_at; Start 116; Stop 140
cggttatgatctatttttctttaat

SEQ ID NO: 65711 - DNA, 25 bp, Artificial
  probe
  misc_feature (1)..(25): SEQ ID NO: 6434; WAN024ASX_at; Start 109; Stop 133
atgattgcggttatgatctattttt

SEQ ID NO: 65712 - DNA, 25 bp, Artificial
  probe
  misc_feature (1)..(25): SEQ ID NO: 6434; WAN024ASX_at; Start 65; Stop 89
ttagggagagtatttggtataatct

SEQ ID NO: 65713 - DNA, 25 bp, Artificial
  probe
  misc_feature (1)..(25): SEQ ID NO: 6434; WAN024ASX_at; Start 68; Stop 92
gggagagtatttggtataatctatt

SEQ ID NO: 65714 - DNA, 25 bp, Artificial
  probe
  misc_feature (1)..(25): SEQ ID NO: 6434; WAN024ASX_at; Start 67; Stop 91
agggagagtatttggtataatctat

SEQ ID NO: 65715 - DNA, 25 bp, Artificial
  probe
  misc_feature (1)..(25): SEQ ID NO: 6434; WAN024ASX_at; Start 69; Stop 93
ggagagtatttggtataatctattt

SEQ ID NO: 65716 - DNA, 25 bp, Artificial
  probe
  misc_feature (1)..(25): SEQ ID NO: 6434; WAN024ASX_at; Start 70; Stop 94
gagagtatttggtataatctatttt

SEQ ID NO: 65717 - DNA, 25 bp, Artificial
  probe
  misc_feature (1)..(25): SEQ ID NO: 1054; WAN024ASY_at; Start 6; Stop 30
gaaaaaaatacttatcattttcatc

SEQ ID NO: 65718 - DNA, 25 bp, Artificial
  probe
  misc_feature (1)..(25): SEQ ID NO: 1054; WAN024ASY_at; Start 12; Stop 36
aatacttatcattttcatcttgtat

SEQ ID NO: 65719 - DNA, 25 bp, Artificial
  probe
  misc_feature (1)..(25): SEQ ID NO: 1054; WAN024ASY_at; Start 21; Stop 45
cattttcatcttgtatctaatcatg

SEQ ID NO: 65720 - DNA, 25 bp, Artificial
  probe
  misc_feature (1)..(25): SEQ ID NO: 1054; WAN024ASY_at; Start 17; Stop 41
ttatcattttcatcttgtatctaat

SEQ ID NO: 65721 - DNA, 25 bp, Artificial
  probe
  misc_feature (1)..(25): SEQ ID NO: 1054; WAN024ASY_at; Start 67; Stop 91
agggaaagtatttggtatcagctat

SEQ ID NO: 65722 - DNA, 25 bp, Artificial
  probe
  misc_feature (1)..(25): SEQ ID NO: 1054; WAN024ASY_at; Start 65; Stop 89
ttagggaaagtatttggtatcagct

SEQ ID NO: 65723 - DNA, 25 bp, Artificial
  probe
  misc_feature (1)..(25): SEQ ID NO: 1054; WAN024ASY_at; Start 132; Stop 156
tgctttaactaaaaagaaaggagca

SEQ ID NO: 65724 - DNA, 25 bp, Artificial
  probe
  misc_feature (1)..(25): SEQ ID NO: 1054; WAN024ASY_at; Start 10; Stop 34
aaaatacttatcattttcatcttgt

SEQ ID NO: 65725 - DNA, 25 bp, Artificial
  probe
  misc_feature (1)..(25): SEQ ID NO: 1054; WAN024ASY_at; Start 13; Stop 37
atacttatcattttcatcttgtatc

SEQ ID NO: 65726 - DNA, 25 bp, Artificial
  probe
  misc_feature (1)..(25): SEQ ID NO: 1054; WAN024ASY_at; Start 15; Stop 39
acttatcattttcatcttgtatcta

SEQ ID NO: 65727 - DNA, 25 bp, Artificial
  probe
  misc_feature (1)..(25): SEQ ID NO: 1054; WAN024ASY_at; Start 20; Stop 44
tcattttcatcttgtatctaatcat

SEQ ID NO: 65728 - DNA, 25 bp, Artificial
  probe
  misc_feature (1)..(25): SEQ ID NO: 1054; WAN024ASY_at; Start 11; Stop 35
aaatacttatcattttcatcttgta

SEQ ID NO: 65729 - DNA, 25 bp, Artificial
  probe
  misc_feature (1)..(25): SEQ ID NO: 1054; WAN024ASY_at; Start 14; Stop 38
tacttatcattttcatcttgtatct

SEQ ID NO: 65730 - DNA, 25 bp, Artificial
  probe
  misc_feature (1)..(25): SEQ ID NO: 1054; WAN024ASY_at; Start 68; Stop 92
gggaaagtatttggtatcagctatt

SEQ ID NO: 65731 - DNA, 25 bp, Artificial
  probe
  misc_feature (1)..(25): SEQ ID NO: 1054; WAN024ASY_at; Start 19; Stop 43
atcattttcatcttgtatctaatca

SEQ ID NO: 65732 - DNA, 25 bp, Artificial
  probe
  misc_feature (1)..(25): SEQ ID NO: 1054; WAN024ASY_at; Start 22; Stop 46
attttcatcttgtatctaatcatgt

SEQ ID NO: 65733 - DNA, 25 bp, Artificial
  probe
  misc_feature (1)..(25): SEQ ID NO: 1054; WAN024ASY_at; Start 9; Stop 33
aaaaatacttatcattttcatcttg

SEQ ID NO: 65734 - DNA, 25 bp, Artificial
  probe
  misc_feature (1)..(25): SEQ ID NO: 1054; WAN024ASY_at; Start 18; Stop 42
tatcattttcatcttgtatctaatc

SEQ ID NO: 65735 - DNA, 25 bp, Artificial
  probe
  misc_feature (1)..(25): SEQ ID NO: 1054; WAN024ASY_at; Start 16; Stop 40
cttatcattttcatcttgtatctaa

SEQ ID NO: 65736 - DNA, 25 bp, Artificial
  probe
  misc_feature (1)..(25): SEQ ID NO: 1054; WAN024ASY_at; Start 66; Stop 90
tagggaaagtatttggtatcagcta

SEQ ID NO: 65737 - DNA, 25 bp, Artificial
  probe
  misc_feature (1)..(25): SEQ ID NO: 1053; WAN024ASZ_at; Start 121; Stop 145
atgatctattttgctatcaataaaa

SEQ ID NO: 65738 - DNA, 25 bp, Artificial
  probe
  misc_feature (1)..(25): SEQ ID NO: 1053; WAN024ASZ_at; Start 125; Stop 149
tctattttgctatcaataaaaagaa

SEQ ID NO: 65739 - DNA, 25 bp, Artificial
  probe
  misc_feature (1)..(25): SEQ ID NO: 1053; WAN024ASZ_at; Start 66; Stop 90
tagggagagtgcttggtatcagcta

SEQ ID NO: 65740 - DNA, 25 bp, Artificial
  probe
  misc_feature (1)..(25): SEQ ID NO: 1053; WAN024ASZ_at; Start 67; Stop 91
agggagagtgcttggtatcagctat

SEQ ID NO: 65741 - DNA, 25 bp, Artificial
  probe
  misc_feature (1)..(25): SEQ ID NO: 1053; WAN024ASZ_at; Start 68; Stop 92
gggagagtgcttggtatcagctatt

SEQ ID NO: 65742 - DNA, 25 bp, Artificial
  probe
  misc_feature (1)..(25): SEQ ID NO: 1053; WAN024ASZ_at; Start 65; Stop 89
ttagggagagtgcttggtatcagct

SEQ ID NO: 65743 - DNA, 25 bp, Artificial
  probe
  misc_feature (1)..(25): SEQ ID NO: 1053; WAN024ASZ_at; Start 64; Stop 88
cttagggagagtgcttggtatcagc

SEQ ID NO: 65744 - DNA, 25 bp, Artificial
  probe
  misc_feature (1)..(25): SEQ ID NO: 1053; WAN024ASZ_at; Start 61; Stop 85
ccgcttagggagagtgcttggtatc

SEQ ID NO: 65745 - DNA, 25 bp, Artificial
  probe
  misc_feature (1)..(25): SEQ ID NO: 1053; WAN024ASZ_at; Start 62; Stop 86
cgcttagggagagtgcttggtatca

SEQ ID NO: 65746 - DNA, 25 bp, Artificial
  probe
  misc_feature (1)..(25): SEQ ID NO: 1053; WAN024ASZ_at; Start 63; Stop 87
gcttagggagagtgcttggtatcag

SEQ ID NO: 65747 - DNA, 25 bp, Artificial
  probe
  misc_feature (1)..(25): SEQ ID NO: 1053; WAN024ASZ_at; Start 122; Stop 146
tgatctattttgctatcaataaaaa

SEQ ID NO: 65748 - DNA, 25 bp, Artificial
  probe
  misc_feature (1)..(25): SEQ ID NO: 1053; WAN024ASZ_at; Start 123; Stop 147
gatctattttgctatcaataaaaag

SEQ ID NO: 65749 - DNA, 25 bp, Artificial
  probe
  misc_feature (1)..(25): SEQ ID NO: 7414; WAN024AT5_at; Start 4; Stop 28
aacaagaatctttacactgctagta

SEQ ID NO: 65750 - DNA, 25 bp, Artificial
  probe
  misc_feature (1)..(25): SEQ ID NO: 7414; WAN024AT5_at; Start 3; Stop 27
gaacaagaatctttacactgctagt

SEQ ID NO: 65751 - DNA, 25 bp, Artificial
  probe
  misc_feature (1)..(25): SEQ ID NO: 7414; WAN024AT5_at; Start 1; Stop 25
ttgaacaagaatctttacactgcta

SEQ ID NO: 65752 - DNA, 25 bp, Artificial
  probe
  misc_feature (1)..(25): SEQ ID NO: 7414; WAN024AT5_at; Start 2; Stop 26
tgaacaagaatctttacactgctag

SEQ ID NO: 65753 - DNA, 25 bp, Artificial
  probe
  misc_feature (1)..(25): SEQ ID NO: 31; WAN024AT6_s_at; Start 4; Stop 28
agcaagaacatttacactgctagta

SEQ ID NO: 65754 - DNA, 25 bp, Artificial
  probe
  misc_feature (1)..(25): SEQ ID NO: 31; WAN024AT6_s_at; Start 64; Stop 88
aaatggtcatcaaaacctcttgaat

SEQ ID NO: 65755 - DNA, 25 bp, Artificial
  probe
  misc_feature (1)..(25): SEQ ID NO: 31; WAN024AT6_s_at; Start 65; Stop 89
aatggtcatcaaaacctcttgaatt

SEQ ID NO: 65756 - DNA, 25 bp, Artificial
  probe
  misc_feature (1)..(25): SEQ ID NO: 31; WAN024AT6_s_at; Start 2; Stop 26
tgagcaagaacatttacactgctag

SEQ ID NO: 65757 - DNA, 25 bp, Artificial
  probe
  misc_feature (1)..(25): SEQ ID NO: 31; WAN024AT6_s_at; Start 3; Stop 27
gagcaagaacatttacactgctagt

SEQ ID NO: 65758 - DNA, 25 bp, Artificial
  probe
  misc_feature (1)..(25): SEQ ID NO: 31; WAN024AT6_s_at; Start 1; Stop 25
ttgagcaagaacatttacactgcta

SEQ ID NO: 65759 - DNA, 25 bp, Artificial
  probe
  misc_feature (1)..(25): SEQ ID NO: 31; WAN024AT6_s_at; Start 66; Stop 90
atggtcatcaaaacctcttgaattg

SEQ ID NO: 65760 - DNA, 25 bp, Artificial
  probe
  misc_feature (1)..(25): SEQ ID NO: 747; WAN024AT7_at; Start 41; Stop 65
cagtgacaaactttgagaaaaacgg

SEQ ID NO: 65761 - DNA, 25 bp, Artificial
  probe
  misc_feature (1)..(25): SEQ ID NO: 747; WAN024AT7_at; Start 35; Stop 59
tacctccagtgacaaactttgagaa

SEQ ID NO: 65762 - DNA, 25 bp, Artificial
  probe
  misc_feature (1)..(25): SEQ ID NO: 747; WAN024AT7_at; Start 54; Stop 78
tgagaaaaacggtagtagagctaaa

SEQ ID NO: 65763 - DNA, 25 bp, Artificial
  probe
  misc_feature (1)..(25): SEQ ID NO: 747; WAN024AT7_at; Start 40; Stop 64
ccagtgacaaactttgagaaaaacg

SEQ ID NO: 65764 - DNA, 25 bp, Artificial
  probe
  misc_feature (1)..(25): SEQ ID NO: 747; WAN024AT7_at; Start 88; Stop 112
aaaataggaagcatccgcattgtta

SEQ ID NO: 65765 - DNA, 25 bp, Artificial
  probe
  misc_feature (1)..(25): SEQ ID NO: 747; WAN024AT7_at; Start 28; Stop 52
aaagaactacctccagtgacaaact

SEQ ID NO: 65766 - DNA, 25 bp, Artificial
  probe
  misc_feature (1)..(25): SEQ ID NO: 747; WAN024AT7_at; Start 89; Stop 113
aaataggaagcatccgcattgttaa

SEQ ID NO: 65767 - DNA, 25 bp, Artificial
  probe
  misc_feature (1)..(25): SEQ ID NO: 747; WAN024AT7_at; Start 34; Stop 58
ctacctccagtgacaaactttgaga

SEQ ID NO: 65768 - DNA, 25 bp, Artificial
  probe
  misc_feature (1)..(25): SEQ ID NO: 747; WAN024AT7_at; Start 23; Stop 47
aactgaaagaactacctccagtgac

SEQ ID NO: 65769 - DNA, 25 bp, Artificial
  probe
  misc_feature (1)..(25): SEQ ID NO: 747; WAN024AT7_at; Start 51; Stop 75
ctttgagaaaaacggtagtagagct

SEQ ID NO: 65770 - DNA, 25 bp, Artificial
  probe
  misc_feature (1)..(25): SEQ ID NO: 747; WAN024AT7_at; Start 22; Stop 46
caactgaaagaactacctccagtga

SEQ ID NO: 65771 - DNA, 25 bp, Artificial
  probe
  misc_feature (1)..(25): SEQ ID NO: 747; WAN024AT7_at; Start 32; Stop 56
aactacctccagtgacaaactttga

SEQ ID NO: 65772 - DNA, 25 bp, Artificial
  probe
  misc_feature (1)..(25): SEQ ID NO: 747; WAN024AT7_at; Start 52; Stop 76
tttgagaaaaacggtagtagagcta

SEQ ID NO: 65773 - DNA, 25 bp, Artificial
  probe
  misc_feature (1)..(25): SEQ ID NO: 747; WAN024AT7_at; Start 29; Stop 53
aagaactacctccagtgacaaactt

SEQ ID NO: 65774 - DNA, 25 bp, Artificial
  probe
  misc_feature (1)..(25): SEQ ID NO: 747; WAN024AT7_at; Start 90; Stop 114
aataggaagcatccgcattgttaaa

SEQ ID NO: 65775 - DNA, 25 bp, Artificial
  probe
  misc_feature (1)..(25): SEQ ID NO: 747; WAN024AT7_at; Start 27; Stop 51
gaaagaactacctccagtgacaaac

SEQ ID NO: 65776 - DNA, 25 bp, Artificial
  probe
  misc_feature (1)..(25): SEQ ID NO: 747; WAN024AT7_at; Start 26; Stop 50
tgaaagaactacctccagtgacaaa

SEQ ID NO: 65777 - DNA, 25 bp, Artificial
  probe
  misc_feature (1)..(25): SEQ ID NO: 747; WAN024AT7_at; Start 93; Stop 117
aggaagcatccgcattgttaaaatc

SEQ ID NO: 65778 - DNA, 25 bp, Artificial
  probe
  misc_feature (1)..(25): SEQ ID NO: 747; WAN024AT7_at; Start 37; Stop 61
cctccagtgacaaactttgagaaaa

SEQ ID NO: 65779 - DNA, 25 bp, Artificial
  probe
  misc_feature (1)..(25): SEQ ID NO: 747; WAN024AT7_at; Start 33; Stop 57
actacctccagtgacaaactttgag

SEQ ID NO: 65780 - DNA, 25 bp, Artificial
  probe
  misc_feature (1)..(25): SEQ ID NO: 747; WAN024AT7_at; Start 31; Stop 55
gaactacctccagtgacaaactttg

SEQ ID NO: 65781 - DNA, 25 bp, Artificial
  probe
  misc_feature (1)..(25): SEQ ID NO: 747; WAN024AT7_at; Start 91; Stop 115
ataggaagcatccgcattgttaaaa

SEQ ID NO: 65782 - DNA, 25 bp, Artificial
  probe
  misc_feature (1)..(25): SEQ ID NO: 747; WAN024AT7_at; Start 94; Stop 118
ggaagcatccgcattgttaaaatcc

SEQ ID NO: 65783 - DNA, 25 bp, Artificial
  probe
  misc_feature (1)..(25): SEQ ID NO: 747; WAN024AT7_at; Start 25; Stop 49
ctgaaagaactacctccagtgacaa

SEQ ID NO: 65784 - DNA, 25 bp, Artificial
  probe
  misc_feature (1)..(25): SEQ ID NO: 747; WAN024AT7_at; Start 38; Stop 62
ctccagtgacaaactttgagaaaaa

SEQ ID NO: 65785 - DNA, 25 bp, Artificial
  probe
  misc_feature (1)..(25): SEQ ID NO: 747; WAN024AT7_at; Start 36; Stop 60
acctccagtgacaaactttgagaaa

SEQ ID NO: 65786 - DNA, 25 bp, Artificial
  probe
  misc_feature (1)..(25): SEQ ID NO: 747; WAN024AT7_at; Start 39; Stop 63
tccagtgacaaactttgagaaaaac

SEQ ID NO: 65787 - DNA, 25 bp, Artificial
  probe
  misc_feature (1)..(25): SEQ ID NO: 747; WAN024AT7_at; Start 53; Stop 77
ttgagaaaaacggtagtagagctaa

SEQ ID NO: 65788 - DNA, 25 bp, Artificial
  probe
  misc_feature (1)..(25): SEQ ID NO: 747; WAN024AT7_at; Start 21; Stop 45
ccaactgaaagaactacctccagtg

SEQ ID NO: 65789 - DNA, 25 bp, Artificial
  probe
  misc_feature (1)..(25): SEQ ID NO: 747; WAN024AT7_at; Start 24; Stop 48
actgaaagaactacctccagtgaca

SEQ ID NO: 65790 - DNA, 25 bp, Artificial
  probe
  misc_feature (1)..(25): SEQ ID NO: 747; WAN024AT7_at; Start 92; Stop 116
taggaagcatccgcattgttaaaat

SEQ ID NO: 65791 - DNA, 25 bp, Artificial
  probe
  misc_feature (1)..(25): SEQ ID NO: 747; WAN024AT7_at; Start 30; Stop 54
agaactacctccagtgacaaacttt

SEQ ID NO: 65792 - DNA, 25 bp, Artificial
  probe
  misc_feature (1)..(25): SEQ ID NO: 6305; WAN024AT8_at; Start 510; Stop 534
aacatatgttgtacaaactttcaga

SEQ ID NO: 65793 - DNA, 25 bp, Artificial
  probe
  misc_feature (1)..(25): SEQ ID NO: 6305; WAN024AT8_at; Start 444; Stop 468
gtctttattgctgattattggtttg

SEQ ID NO: 65794 - DNA, 25 bp, Artificial
  probe
  misc_feature (1)..(25): SEQ ID NO: 6305; WAN024AT8_at; Start 82; Stop 106
gccggatttaaagagaccgactcat

SEQ ID NO: 65795 - DNA, 25 bp, Artificial
  probe
  misc_feature (1)..(25): SEQ ID NO: 6305; WAN024AT8_at; Start 83; Stop 107
ccggatttaaagagaccgactcatg

SEQ ID NO: 65796 - DNA, 25 bp, Artificial
  probe
  misc_feature (1)..(25): SEQ ID NO: 6305; WAN024AT8_at; Start 433; Stop 457
ttatacagtctgtctttattgctga

SEQ ID NO: 65797 - DNA, 25 bp, Artificial
  probe
  misc_feature (1)..(25): SEQ ID NO: 6305; WAN024AT8_at; Start 508; Stop 532
caaacatatgttgtacaaactttca

SEQ ID NO: 65798 - DNA, 25 bp, Artificial
  probe
  misc_feature (1)..(25): SEQ ID NO: 6305; WAN024AT8_at; Start 81; Stop 105
ggccggatttaaagagaccgactca

SEQ ID NO: 65799 - DNA, 25 bp, Artificial
  probe
  misc_feature (1)..(25): SEQ ID NO: 6305; WAN024AT8_at; Start 80; Stop 104
tggccggatttaaagagaccgactc

SEQ ID NO: 65800 - DNA, 25 bp, Artificial
  probe
  misc_feature (1)..(25): SEQ ID NO: 6305; WAN024AT8_at; Start 509; Stop 533
aaacatatgttgtacaaactttcag

SEQ ID NO: 65801 - DNA, 25 bp, Artificial
  probe
  misc_feature (1)..(25): SEQ ID NO: 6305; WAN024AT8_at; Start 79; Stop 103
atggccggatttaaagagaccgact

SEQ ID NO: 65802 - DNA, 25 bp, Artificial
  probe
  misc_feature (1)..(25): SEQ ID NO: 6305; WAN024AT8_at; Start 518; Stop 542
ttgtacaaactttcagattatggac

SEQ ID NO: 65803 - DNA, 25 bp, Artificial
  probe
  misc_feature (1)..(25): SEQ ID NO: 6305; WAN024AT8_at; Start 434; Stop 458
tatacagtctgtctttattgctgat

SEQ ID NO: 65804 - DNA, 25 bp, Artificial
  probe
  misc_feature (1)..(25): SEQ ID NO: 6305; WAN024AT8_at; Start 517; Stop 541
gttgtacaaactttcagattatgga

SEQ ID NO: 65805 - DNA, 25 bp, Artificial
  probe
  misc_feature (1)..(25): SEQ ID NO: 6305; WAN024AT8_at; Start 511; Stop 535
acatatgttgtacaaactttcagat

SEQ ID NO: 65806 - DNA, 25 bp, Artificial
  probe
  misc_feature (1)..(25): SEQ ID NO: 6305; WAN024AT8_at; Start 441; Stop 465
tctgtctttattgctgattattggt

SEQ ID NO: 65807 - DNA, 25 bp, Artificial
  probe
  misc_feature (1)..(25): SEQ ID NO: 6305; WAN024AT8_at; Start 431; Stop 455
atttatacagtctgtctttattgct

SEQ ID NO: 65808 - DNA, 25 bp, Artificial
  probe
  misc_feature (1)..(25): SEQ ID NO: 6305; WAN024AT8_at; Start 514; Stop 538
tatgttgtacaaactttcagattat

SEQ ID NO: 65809 - DNA, 25 bp, Artificial
  probe
  misc_feature (1)..(25): SEQ ID NO: 6305; WAN024AT8_at; Start 440; Stop 464
gtctgtctttattgctgattattgg

SEQ ID NO: 65810 - DNA, 25 bp, Artificial
  probe
  misc_feature (1)..(25): SEQ ID NO: 6305; WAN024AT8_at; Start 513; Stop 537
atatgttgtacaaactttcagatta

SEQ ID NO: 65811 - DNA, 25 bp, Artificial
  probe
  misc_feature (1)..(25): SEQ ID NO: 6305; WAN024AT8_at; Start 516; Stop 540
tgttgtacaaactttcagattatgg

SEQ ID NO: 65812 - DNA, 25 bp, Artificial
  probe
  misc_feature (1)..(25): SEQ ID NO: 6305; WAN024AT8_at; Start 515; Stop 539
atgttgtacaaactttcagattatg

SEQ ID NO: 65813 - DNA, 25 bp, Artificial
  probe
  misc_feature (1)..(25): SEQ ID NO: 6305; WAN024AT8_at; Start 443; Stop 467
tgtctttattgctgattattggttt

SEQ ID NO: 65814 - DNA, 25 bp, Artificial
  probe
  misc_feature (1)..(25): SEQ ID NO: 6305; WAN024AT8_at; Start 442; Stop 466
ctgtctttattgctgattattggtt

SEQ ID NO: 65815 - DNA, 25 bp, Artificial
  probe
  misc_feature (1)..(25): SEQ ID NO: 6305; WAN024AT8_at; Start 439; Stop 463
agtctgtctttattgctgattattg

SEQ ID NO: 65816 - DNA, 25 bp, Artificial
  probe
  misc_feature (1)..(25): SEQ ID NO: 6305; WAN024AT8_at; Start 512; Stop 536
catatgttgtacaaactttcagatt

SEQ ID NO: 65817 - DNA, 25 bp, Artificial
  probe
  misc_feature (1)..(25): SEQ ID NO: 6305; WAN024AT8_at; Start 438; Stop 462
cagtctgtctttattgctgattatt

SEQ ID NO: 65818 - DNA, 25 bp, Artificial
  probe
  misc_feature (1)..(25): SEQ ID NO: 6305; WAN024AT8_at; Start 437; Stop 461
acagtctgtctttattgctgattat

SEQ ID NO: 65819 - DNA, 25 bp, Artificial
  probe
  misc_feature (1)..(25): SEQ ID NO: 6305; WAN024AT8_at; Start 436; Stop 460
tacagtctgtctttattgctgatta

SEQ ID NO: 65820 - DNA, 25 bp, Artificial
  probe
  misc_feature (1)..(25): SEQ ID NO: 6305; WAN024AT8_at; Start 435; Stop 459
atacagtctgtctttattgctgatt

SEQ ID NO: 65821 - DNA, 25 bp, Artificial
  probe
  misc_feature (1)..(25): SEQ ID NO: 6305; WAN024AT8_at; Start 77; Stop 101
caatggccggatttaaagagaccga

SEQ ID NO: 65822 - DNA, 25 bp, Artificial
  probe
  misc_feature (1)..(25): SEQ ID NO: 6305; WAN024AT8_at; Start 432; Stop 456
tttatacagtctgtctttattgctg

SEQ ID NO: 65823 - DNA, 25 bp, Artificial
  probe
  misc_feature (1)..(25): SEQ ID NO: 1555; WAN024AT9_s_at; Start 246; Stop 270
agtgtcgtcatggacttttatcgtt

SEQ ID NO: 65824 - DNA, 25 bp, Artificial
  probe
  misc_feature (1)..(25): SEQ ID NO: 1555; WAN024AT9_s_at; Start 232; Stop 256
tggctcctaataacagtgtcgtcat

SEQ ID NO: 65825 - DNA, 25 bp, Artificial
  probe
  misc_feature (1)..(25): SEQ ID NO: 1555; WAN024AT9_s_at; Start 233; Stop 257
ggctcctaataacagtgtcgtcatg

SEQ ID NO: 65826 - DNA, 25 bp, Artificial
  probe
  misc_feature (1)..(25): SEQ ID NO: 1555; WAN024AT9_s_at; Start 251; Stop 275
cgtcatggacttttatcgtttggct

SEQ ID NO: 65827 - DNA, 25 bp, Artificial
  probe
  misc_feature (1)..(25): SEQ ID NO: 1555; WAN024AT9_s_at; Start 219; Stop 243
gcaaaaaataaaatggctcctaata

SEQ ID NO: 65828 - DNA, 25 bp, Artificial
  probe
  misc_feature (1)..(25): SEQ ID NO: 1555; WAN024AT9_s_at; Start 223; Stop 247
aaaataaaatggctcctaataacag

SEQ ID NO: 65829 - DNA, 25 bp, Artificial
  probe
  misc_feature (1)..(25): SEQ ID NO: 1555; WAN024AT9_s_at; Start 230; Stop 254
aatggctcctaataacagtgtcgtc

SEQ ID NO: 65830 - DNA, 25 bp, Artificial
  probe
  misc_feature (1)..(25): SEQ ID NO: 1555; WAN024AT9_s_at; Start 253; Stop 277
tcatggacttttatcgtttggctgt

SEQ ID NO: 65831 - DNA, 25 bp, Artificial
  probe
  misc_feature (1)..(25): SEQ ID NO: 1555; WAN024AT9_s_at; Start 211; Stop 235
tacatattgcaaaaaataaaatggc

SEQ ID NO: 65832 - DNA, 25 bp, Artificial
  probe
  misc_feature (1)..(25): SEQ ID NO: 1555; WAN024AT9_s_at; Start 1; Stop 25
atgagcaaatttcgaaatattaact

SEQ ID NO: 65833 - DNA, 25 bp, Artificial
  probe
  misc_feature (1)..(25): SEQ ID NO: 1555; WAN024AT9_s_at; Start 256; Stop 280
tggacttttatcgtttggctgttta

SEQ ID NO: 65834 - DNA, 25 bp, Artificial
  probe
  misc_feature (1)..(25): SEQ ID NO: 1555; WAN024AT9_s_at; Start 250; Stop 274
tcgtcatggacttttatcgtttggc

SEQ ID NO: 65835 - DNA, 25 bp, Artificial
  probe
  misc_feature (1)..(25): SEQ ID NO: 1555; WAN024AT9_s_at; Start 231; Stop 255
atggctcctaataacagtgtcgtca

SEQ ID NO: 65836 - DNA, 25 bp, Artificial
  probe
  misc_feature (1)..(25): SEQ ID NO: 1555; WAN024AT9_s_at; Start 229; Stop 253
aaatggctcctaataacagtgtcgt

SEQ ID NO: 65837 - DNA, 25 bp, Artificial
  probe
  misc_feature (1)..(25): SEQ ID NO: 1555; WAN024AT9_s_at; Start 218; Stop 242
tgcaaaaaataaaatggctcctaat

SEQ ID NO: 65838 - DNA, 25 bp, Artificial
  probe
  misc_feature (1)..(25): SEQ ID NO: 1555; WAN024AT9_s_at; Start 216; Stop 240
attgcaaaaaataaaatggctccta

SEQ ID NO: 65839 - DNA, 25 bp, Artificial
  probe
  misc_feature (1)..(25): SEQ ID NO: 1555; WAN024AT9_s_at; Start 182; Stop 206
tgttggggaagagagaaattaccta

SEQ ID NO: 65840 - DNA, 25 bp, Artificial
  probe
  misc_feature (1)..(25): SEQ ID NO: 1555; WAN024AT9_s_at; Start 234; Stop 258
gctcctaataacagtgtcgtcatgg

SEQ ID NO: 65841 - DNA, 25 bp, Artificial
  probe
  misc_feature (1)..(25): SEQ ID NO: 1555; WAN024AT9_s_at; Start 252; Stop 276
gtcatggacttttatcgtttggctg

SEQ ID NO: 65842 - DNA, 25 bp, Artificial
  probe
  misc_feature (1)..(25): SEQ ID NO: 1555; WAN024AT9_s_at; Start 254; Stop 278
catggacttttatcgtttggctgtt

SEQ ID NO: 65843 - DNA, 25 bp, Artificial
  probe
  misc_feature (1)..(25): SEQ ID NO: 1555; WAN024AT9_s_at; Start 204; Stop 228
ctattcctacatattgcaaaaaata

SEQ ID NO: 65844 - DNA, 25 bp, Artificial
  probe
  misc_feature (1)..(25): SEQ ID NO: 1555; WAN024AT9_s_at; Start 281; Stop 305
aaagagactttacagagaacttaat

SEQ ID NO: 65845 - DNA, 25 bp, Artificial
  probe
  misc_feature (1)..(25): SEQ ID NO: 1555; WAN024AT9_s_at; Start 271; Stop 295
tggctgtttaaaagagactttacag

SEQ ID NO: 65846 - DNA, 25 bp, Artificial
  probe
  misc_feature (1)..(25): SEQ ID NO: 1555; WAN024AT9_s_at; Start 224; Stop 248
aaataaaatggctcctaataacagt

SEQ ID NO: 65847 - DNA, 25 bp, Artificial
  probe
  misc_feature (1)..(25): SEQ ID NO: 1555; WAN024AT9_s_at; Start 275; Stop 299
tgtttaaaagagactttacagagaa

SEQ ID NO: 65848 - DNA, 25 bp, Artificial
  probe
  misc_feature (1)..(25): SEQ ID NO: 1555; WAN024AT9_s_at; Start 213; Stop 237
catattgcaaaaaataaaatggctc

SEQ ID NO: 65849 - DNA, 25 bp, Artificial
  probe
  misc_feature (1)..(25): SEQ ID NO: 1555; WAN024AT9_s_at; Start 185; Stop 209
tggggaagagagaaattacctattc

SEQ ID NO: 65850 - DNA, 25 bp, Artificial
  probe
  misc_feature (1)..(25): SEQ ID NO: 1555; WAN024AT9_s_at; Start 326; Stop 350
tgatacaaaaggggtatttcttcca

SEQ ID NO: 65851 - DNA, 25 bp, Artificial
  probe
  misc_feature (1)..(25): SEQ ID NO: 1555; WAN024AT9_s_at; Start 279; Stop 303
taaaagagactttacagagaactta

SEQ ID NO: 65852 - DNA, 25 bp, Artificial
  probe
  misc_feature (1)..(25): SEQ ID NO: 1555; WAN024AT9_s_at; Start 284; Stop 308
gagactttacagagaacttaattaa

SEQ ID NO: 65853 - DNA, 25 bp, Artificial
  probe
  misc_feature (1)..(25): SEQ ID NO: 1555; WAN024AT9_s_at; Start 248; Stop 272
tgtcgtcatggacttttatcgtttg

SEQ ID NO: 65854 - DNA, 25 bp, Artificial
  probe
  misc_feature (1)..(25): SEQ ID NO: 1555; WAN024AT9_s_at; Start 273; Stop 297
gctgtttaaaagagactttacagag

SEQ ID NO: 65855 - DNA, 25 bp, Artificial
  probe
  misc_feature (1)..(25): SEQ ID NO: 1555; WAN024AT9_s_at; Start 214; Stop 238
atattgcaaaaaataaaatggctcc

SEQ ID NO: 65856 - DNA, 25 bp, Artificial
  probe
  misc_feature (1)..(25): SEQ ID NO: 1555; WAN024AT9_s_at; Start 228; Stop 252
aaaatggctcctaataacagtgtcg

SEQ ID NO: 65857 - DNA, 25 bp, Artificial
  probe
  misc_feature (1)..(25): SEQ ID NO: 1494; WAN024ATA_at; Start 968; Stop 992
ttccgtattttaatcgaatcgtcaa

SEQ ID NO: 65858 - DNA, 25 bp, Artificial
  probe
  misc_feature (1)..(25): SEQ ID NO: 1494; WAN024ATA_at; Start 969; Stop 993
tccgtattttaatcgaatcgtcaaa

SEQ ID NO: 65859 - DNA, 25 bp, Artificial
  probe
  misc_feature (1)..(25): SEQ ID NO: 1494; WAN024ATA_at; Start 967; Stop 991
attccgtattttaatcgaatcgtca

SEQ ID NO: 65860 - DNA, 25 bp, Artificial
  probe
  misc_feature (1)..(25): SEQ ID NO: 1491; WAN024ATB_s_at; Start 793; Stop 817
cgaagagaatcgattgtttcccttt

SEQ ID NO: 65861 - DNA, 25 bp, Artificial
  probe
  misc_feature (1)..(25): SEQ ID NO: 1491; WAN024ATB_s_at; Start 795; Stop 819
aagagaatcgattgtttccctttct

SEQ ID NO: 65862 - DNA, 25 bp, Artificial
  probe
  misc_feature (1)..(25): SEQ ID NO: 1491; WAN024ATB_s_at; Start 792; Stop 816
ccgaagagaatcgattgtttccctt

SEQ ID NO: 65863 - DNA, 25 bp, Artificial
  probe
  misc_feature (1)..(25): SEQ ID NO: 1491; WAN024ATB_s_at; Start 794; Stop 818
gaagagaatcgattgtttccctttc

SEQ ID NO: 65864 - DNA, 25 bp, Artificial
  probe
  misc_feature (1)..(25): SEQ ID NO: 7019; WAN024ATC_at; Start 46; Stop 70
caagaatatgttgcaaaaacaatct

SEQ ID NO: 65865 - DNA, 25 bp, Artificial
  probe
  misc_feature (1)..(25): SEQ ID NO: 7019; WAN024ATC_at; Start 112; Stop 136
accaggttaatctctatagatgacc

SEQ ID NO: 65866 - DNA, 25 bp, Artificial
  probe
  misc_feature (1)..(25): SEQ ID NO: 7019; WAN024ATC_at; Start 102; Stop 126
ggaatcaggtaccaggttaatctct

SEQ ID NO: 65867 - DNA, 25 bp, Artificial
  probe
  misc_feature (1)..(25): SEQ ID NO: 7019; WAN024ATC_at; Start 148; Stop 172
gcagatttttataatgtaagtttag

SEQ ID NO: 65868 - DNA, 25 bp, Artificial
  probe
  misc_feature (1)..(25): SEQ ID NO: 7019; WAN024ATC_at; Start 113; Stop 137
ccaggttaatctctatagatgacct

SEQ ID NO: 65869 - DNA, 25 bp, Artificial
  probe
  misc_feature (1)..(25): SEQ ID NO: 7019; WAN024ATC_at; Start 157; Stop 181
tataatgtaagtttagattaccttg

SEQ ID NO: 65870 - DNA, 25 bp, Artificial
  probe
  misc_feature (1)..(25): SEQ ID NO: 7019; WAN024ATC_at; Start 72; Stop 96
aaattgtacaagatcagcgtattct

SEQ ID NO: 65871 - DNA, 25 bp, Artificial
  probe
  misc_feature (1)..(25): SEQ ID NO: 7019; WAN024ATC_at; Start 107; Stop 131
caggtaccaggttaatctctataga

SEQ ID NO: 65872 - DNA, 25 bp, Artificial
  probe
  misc_feature (1)..(25): SEQ ID NO: 7019; WAN024ATC_at; Start 41; Stop 65
tgacacaagaatatgttgcaaaaac

SEQ ID NO: 65873 - DNA, 25 bp, Artificial
  probe
  misc_feature (1)..(25): SEQ ID NO: 7019; WAN024ATC_at; Start 42; Stop 66
gacacaagaatatgttgcaaaaaca

SEQ ID NO: 65874 - DNA, 25 bp, Artificial
  probe
  misc_feature (1)..(25): SEQ ID NO: 7019; WAN024ATC_at; Start 66; Stop 90
aatcttaaattgtacaagatcagcg

SEQ ID NO: 65875 - DNA, 25 bp, Artificial
  probe
  misc_feature (1)..(25): SEQ ID NO: 7019; WAN024ATC_at; Start 111; Stop 135
taccaggttaatctctatagatgac

SEQ ID NO: 65876 - DNA, 25 bp, Artificial
  probe
  misc_feature (1)..(25): SEQ ID NO: 7019; WAN024ATC_at; Start 86; Stop 110
cagcgtattctaaaatggaatcagg

SEQ ID NO: 65877 - DNA, 25 bp, Artificial
  probe
  misc_feature (1)..(25): SEQ ID NO: 7019; WAN024ATC_at; Start 161; Stop 185
atgtaagtttagattaccttgtagg

SEQ ID NO: 65878 - DNA, 25 bp, Artificial
  probe
  misc_feature (1)..(25): SEQ ID NO: 7019; WAN024ATC_at; Start 88; Stop 112
gcgtattctaaaatggaatcaggta

SEQ ID NO: 65879 - DNA, 25 bp, Artificial
  probe
  misc_feature (1)..(25): SEQ ID NO: 7019; WAN024ATC_at; Start 109; Stop 133
ggtaccaggttaatctctatagatg

SEQ ID NO: 65880 - DNA, 25 bp, Artificial
  probe
  misc_feature (1)..(25): SEQ ID NO: 7019; WAN024ATC_at; Start 85; Stop 109
tcagcgtattctaaaatggaatcag

SEQ ID NO: 65881 - DNA, 25 bp, Artificial
  probe
  misc_feature (1)..(25): SEQ ID NO: 7019; WAN024ATC_at; Start 93; Stop 117
ttctaaaatggaatcaggtaccagg

SEQ ID NO: 65882 - DNA, 25 bp, Artificial
  probe
  misc_feature (1)..(25): SEQ ID NO: 7019; WAN024ATC_at; Start 103; Stop 127
gaatcaggtaccaggttaatctcta

SEQ ID NO: 65883 - DNA, 25 bp, Artificial
  probe
  misc_feature (1)..(25): SEQ ID NO: 7019; WAN024ATC_at; Start 106; Stop 130
tcaggtaccaggttaatctctatag

SEQ ID NO: 65884 - DNA, 25 bp, Artificial
  probe
  misc_feature (1)..(25): SEQ ID NO: 7019; WAN024ATC_at; Start 96; Stop 120
taaaatggaatcaggtaccaggtta

SEQ ID NO: 65885 - DNA, 25 bp, Artificial
  probe
  misc_feature (1)..(25): SEQ ID NO: 7019; WAN024ATC_at; Start 71; Stop 95
taaattgtacaagatcagcgtattc

SEQ ID NO: 65886 - DNA, 25 bp, Artificial
  probe
  misc_feature (1)..(25): SEQ ID NO: 7019; WAN024ATC_at; Start 68; Stop 92
tcttaaattgtacaagatcagcgta

SEQ ID NO: 65887 - DNA, 25 bp, Artificial
  probe
  misc_feature (1)..(25): SEQ ID NO: 7019; WAN024ATC_at; Start 83; Stop 107
gatcagcgtattctaaaatggaatc

SEQ ID NO: 65888 - DNA, 25 bp, Artificial
  probe
  misc_feature (1)..(25): SEQ ID NO: 7019; WAN024ATC_at; Start 54; Stop 78
tgttgcaaaaacaatcttaaattgt

SEQ ID NO: 65889 - DNA, 25 bp, Artificial
  probe
  misc_feature (1)..(25): SEQ ID NO: 7019; WAN024ATC_at; Start 91; Stop 115
tattctaaaatggaatcaggtacca

SEQ ID NO: 65890 - DNA, 25 bp, Artificial
  probe
  misc_feature (1)..(25): SEQ ID NO: 7019; WAN024ATC_at; Start 99; Stop 123
aatggaatcaggtaccaggttaatc

SEQ ID NO: 65891 - DNA, 25 bp, Artificial
  probe
  misc_feature (1)..(25): SEQ ID NO: 7019; WAN024ATC_at; Start 44; Stop 68
cacaagaatatgttgcaaaaacaat

SEQ ID NO: 65892 - DNA, 25 bp, Artificial
  probe
  misc_feature (1)..(25): SEQ ID NO: 7019; WAN024ATC_at; Start 94; Stop 118
tctaaaatggaatcaggtaccaggt

SEQ ID NO: 65893 - DNA, 25 bp, Artificial
  probe
  misc_feature (1)..(25): SEQ ID NO: 7019; WAN024ATC_at; Start 69; Stop 93
cttaaattgtacaagatcagcgtat

SEQ ID NO: 65894 - DNA, 25 bp, Artificial
  probe
  misc_feature (1)..(25): SEQ ID NO: 7019; WAN024ATC_at; Start 49; Stop 73
gaatatgttgcaaaaacaatcttaa

SEQ ID NO: 65895 - DNA, 25 bp, Artificial
  probe
  misc_feature (1)..(25): SEQ ID NO: 7019; WAN024ATC_at; Start 89; Stop 113
cgtattctaaaatggaatcaggtac

SEQ ID NO: 65896 - DNA, 25 bp, Artificial
  probe
  misc_feature (1)..(25): SEQ ID NO: 7019; WAN024ATC_at; Start 95; Stop 119
ctaaaatggaatcaggtaccaggtt

SEQ ID NO: 65897 - DNA, 25 bp, Artificial
  probe
  misc_feature (1)..(25): SEQ ID NO: 7019; WAN024ATC_at; Start 101; Stop 125
tggaatcaggtaccaggttaatctc

SEQ ID NO: 65898 - DNA, 25 bp, Artificial
  probe
  misc_feature (1)..(25): SEQ ID NO: 7018; WAN024ATD_at; Start 46; Stop 70
caagaatatattgcgaaaatcgttt

SEQ ID NO: 65899 - DNA, 25 bp, Artificial
  probe
  misc_feature (1)..(25): SEQ ID NO: 7018; WAN024ATD_at; Start 157; Stop 181
tataaggtgagtctagactaccttg

SEQ ID NO: 65900 - DNA, 25 bp, Artificial
  probe
  misc_feature (1)..(25): SEQ ID NO: 7018; WAN024ATD_at; Start 63; Stop 87
aatcgttttgaattgtacaagatca

SEQ ID NO: 65901 - DNA, 25 bp, Artificial
  probe
  misc_feature (1)..(25): SEQ ID NO: 7018; WAN024ATD_at; Start 99; Stop 123
aatggaagctggtagcaggctaatc

SEQ ID NO: 65902 - DNA, 25 bp, Artificial
  probe
  misc_feature (1)..(25): SEQ ID NO: 7018; WAN024ATD_at; Start 86; Stop 110
catcttattctaaaatggaagctgg

SEQ ID NO: 65903 - DNA, 25 bp, Artificial
  probe
  misc_feature (1)..(25): SEQ ID NO: 7018; WAN024ATD_at; Start 89; Stop 113
cttattctaaaatggaagctggtag

SEQ ID NO: 65904 - DNA, 25 bp, Artificial
  probe
  misc_feature (1)..(25): SEQ ID NO: 7018; WAN024ATD_at; Start 101; Stop 125
tggaagctggtagcaggctaatctc

SEQ ID NO: 65905 - DNA, 25 bp, Artificial
  probe
  misc_feature (1)..(25): SEQ ID NO: 7018; WAN024ATD_at; Start 42; Stop 66
gacacaagaatatattgcgaaaatc

SEQ ID NO: 65906 - DNA, 25 bp, Artificial
  probe
  misc_feature (1)..(25): SEQ ID NO: 7018; WAN024ATD_at; Start 159; Stop 183
taaggtgagtctagactaccttgta

SEQ ID NO: 65907 - DNA, 25 bp, Artificial
  probe
  misc_feature (1)..(25): SEQ ID NO: 7018; WAN024ATD_at; Start 102; Stop 126
ggaagctggtagcaggctaatctct

SEQ ID NO: 65908 - DNA, 25 bp, Artificial
  probe
  misc_feature (1)..(25): SEQ ID NO: 7018; WAN024ATD_at; Start 165; Stop 189
gagtctagactaccttgtaggtcga

SEQ ID NO: 65909 - DNA, 25 bp, Artificial
  probe
  misc_feature (1)..(25): SEQ ID NO: 7018; WAN024ATD_at; Start 113; Stop 137
gcaggctaatctctataaatgacct

SEQ ID NO: 65910 - DNA, 25 bp, Artificial
  probe
  misc_feature (1)..(25): SEQ ID NO: 7018; WAN024ATD_at; Start 164; Stop 188
tgagtctagactaccttgtaggtcg

SEQ ID NO: 65911 - DNA, 25 bp, Artificial
  probe
  misc_feature (1)..(25): SEQ ID NO: 7018; WAN024ATD_at; Start 93; Stop 117
ttctaaaatggaagctggtagcagg

SEQ ID NO: 65912 - DNA, 25 bp, Artificial
  probe
  misc_feature (1)..(25): SEQ ID NO: 7018; WAN024ATD_at; Start 111; Stop 135
tagcaggctaatctctataaatgac

SEQ ID NO: 65913 - DNA, 25 bp, Artificial
  probe
  misc_feature (1)..(25): SEQ ID NO: 7018; WAN024ATD_at; Start 106; Stop 130
gctggtagcaggctaatctctataa

SEQ ID NO: 65914 - DNA, 25 bp, Artificial
  probe
  misc_feature (1)..(25): SEQ ID NO: 7018; WAN024ATD_at; Start 69; Stop 93
tttgaattgtacaagatcatcttat

SEQ ID NO: 65915 - DNA, 25 bp, Artificial
  probe
  misc_feature (1)..(25): SEQ ID NO: 7018; WAN024ATD_at; Start 162; Stop 186
ggtgagtctagactaccttgtaggt

SEQ ID NO: 65916 - DNA, 25 bp, Artificial
  probe
  misc_feature (1)..(25): SEQ ID NO: 7018; WAN024ATD_at; Start 96; Stop 120
taaaatggaagctggtagcaggcta

SEQ ID NO: 65917 - DNA, 25 bp, Artificial
  probe
  misc_feature (1)..(25): SEQ ID NO: 7018; WAN024ATD_at; Start 59; Stop 83
cgaaaatcgttttgaattgtacaag

SEQ ID NO: 65918 - DNA, 25 bp, Artificial
  probe
  misc_feature (1)..(25): SEQ ID NO: 7018; WAN024ATD_at; Start 66; Stop 90
cgttttgaattgtacaagatcatct

SEQ ID NO: 65919 - DNA, 25 bp, Artificial
  probe
  misc_feature (1)..(25): SEQ ID NO: 7018; WAN024ATD_at; Start 112; Stop 136
agcaggctaatctctataaatgacc

SEQ ID NO: 65920 - DNA, 25 bp, Artificial
  probe
  misc_feature (1)..(25): SEQ ID NO: 7018; WAN024ATD_at; Start 83; Stop 107
gatcatcttattctaaaatggaagc

SEQ ID NO: 65921 - DNA, 25 bp, Artificial
  probe
  misc_feature (1)..(25): SEQ ID NO: 7018; WAN024ATD_at; Start 109; Stop 133
ggtagcaggctaatctctataaatg

SEQ ID NO: 65922 - DNA, 25 bp, Artificial
  probe
  misc_feature (1)..(25): SEQ ID NO: 7018; WAN024ATD_at; Start 154; Stop 178
ttttataaggtgagtctagactacc

SEQ ID NO: 65923 - DNA, 25 bp, Artificial
  probe
  misc_feature (1)..(25): SEQ ID NO: 7018; WAN024ATD_at; Start 151; Stop 175
gatttttataaggtgagtctagact

SEQ ID NO: 65924 - DNA, 25 bp, Artificial
  probe
  misc_feature (1)..(25): SEQ ID NO: 7018; WAN024ATD_at; Start 91; Stop 115
tattctaaaatggaagctggtagca

SEQ ID NO: 65925 - DNA, 25 bp, Artificial
  probe
  misc_feature (1)..(25): SEQ ID NO: 7018; WAN024ATD_at; Start 104; Stop 128
aagctggtagcaggctaatctctat

SEQ ID NO: 65926 - DNA, 25 bp, Artificial
  probe
  misc_feature (1)..(25): SEQ ID NO: 7018; WAN024ATD_at; Start 44; Stop 68
cacaagaatatattgcgaaaatcgt

SEQ ID NO: 65927 - DNA, 25 bp, Artificial
  probe
  misc_feature (1)..(25): SEQ ID NO: 7018; WAN024ATD_at; Start 97; Stop 121
aaaatggaagctggtagcaggctaa

SEQ ID NO: 65928 - DNA, 25 bp, Artificial
  probe
  misc_feature (1)..(25): SEQ ID NO: 7018; WAN024ATD_at; Start 103; Stop 127
gaagctggtagcaggctaatctcta

SEQ ID NO: 65929 - DNA, 25 bp, Artificial
  probe
  misc_feature (1)..(25): SEQ ID NO: 7018; WAN024ATD_at; Start 94; Stop 118
tctaaaatggaagctggtagcaggc

SEQ ID NO: 65930 - DNA, 25 bp, Artificial
  probe
  misc_feature (1)..(25): SEQ ID NO: 7018; WAN024ATD_at; Start 147; Stop 171
tgcagatttttataaggtgagtcta

SEQ ID NO: 65931 - DNA, 25 bp, Artificial
  probe
  misc_feature (1)..(25): SEQ ID NO: 7018; WAN024ATD_at; Start 95; Stop 119
ctaaaatggaagctggtagcaggct

SEQ ID NO: 65932 - DNA, 25 bp, Artificial
  probe
  misc_feature (1)..(25): SEQ ID NO: 7208; WAN024ATE_at; Start 1560; Stop 1584
taatccaatccttgagagagcttca

SEQ ID NO: 65933 - DNA, 25 bp, Artificial
  probe
  misc_feature (1)..(25): SEQ ID NO: 7208; WAN024ATE_at; Start 1654; Stop 1678
tatacaatgcctagtatcaaggaca

SEQ ID NO: 65934 - DNA, 25 bp, Artificial
  probe
  misc_feature (1)..(25): SEQ ID NO: 7208; WAN024ATE_at; Start 1387; Stop 1411
aagtccggtacggccgagattgccg

SEQ ID NO: 65935 - DNA, 25 bp, Artificial
  probe
  misc_feature (1)..(25): SEQ ID NO: 7208; WAN024ATE_at; Start 1389; Stop 1413
gtccggtacggccgagattgccgat

SEQ ID NO: 65936 - DNA, 25 bp, Artificial
  probe
  misc_feature (1)..(25): SEQ ID NO: 7208; WAN024ATE_at; Start 1555; Stop 1579
tttactaatccaatccttgagagag

SEQ ID NO: 65937 - DNA, 25 bp, Artificial
  probe
  misc_feature (1)..(25): SEQ ID NO: 7208; WAN024ATE_at; Start 1659; Stop 1683
aatgcctagtatcaaggacatatcc

SEQ ID NO: 65938 - DNA, 25 bp, Artificial
  probe
  misc_feature (1)..(25): SEQ ID NO: 7208; WAN024ATE_at; Start 1383; Stop 1407
cctcaagtccggtacggccgagatt

SEQ ID NO: 65939 - DNA, 25 bp, Artificial
  probe
  misc_feature (1)..(25): SEQ ID NO: 7208; WAN024ATE_at; Start 1534; Stop 1558
tcaggaattccgcttggggagttta

SEQ ID NO: 65940 - DNA, 25 bp, Artificial
  probe
  misc_feature (1)..(25): SEQ ID NO: 7208; WAN024ATE_at; Start 1550; Stop 1574
gggagtttactaatccaatccttga

SEQ ID NO: 65941 - DNA, 25 bp, Artificial
  probe
  misc_feature (1)..(25): SEQ ID NO: 7208; WAN024ATE_at; Start 1556; Stop 1580
ttactaatccaatccttgagagagc

SEQ ID NO: 65942 - DNA, 25 bp, Artificial
  probe
  misc_feature (1)..(25): SEQ ID NO: 7208; WAN024ATE_at; Start 1385; Stop 1409
tcaagtccggtacggccgagattgc

SEQ ID NO: 65943 - DNA, 25 bp, Artificial
  probe
  misc_feature (1)..(25): SEQ ID NO: 7208; WAN024ATE_at; Start 1552; Stop 1576
gagtttactaatccaatccttgaga

SEQ ID NO: 65944 - DNA, 25 bp, Artificial
  probe
  misc_feature (1)..(25): SEQ ID NO: 7208; WAN024ATE_at; Start 1526; Stop 1550
aacattattcaggaattccgcttgg

SEQ ID NO: 65945 - DNA, 25 bp, Artificial
  probe
  misc_feature (1)..(25): SEQ ID NO: 7208; WAN024ATE_at; Start 1653; Stop 1677
ttatacaatgcctagtatcaaggac

SEQ ID NO: 65946 - DNA, 25 bp, Artificial
  probe
  misc_feature (1)..(25): SEQ ID NO: 7208; WAN024ATE_at; Start 1528; Stop 1552
cattattcaggaattccgcttgggg

SEQ ID NO: 65947 - DNA, 25 bp, Artificial
  probe
  misc_feature (1)..(25): SEQ ID NO: 7208; WAN024ATE_at; Start 1558; Stop 1582
actaatccaatccttgagagagctt

SEQ ID NO: 65948 - DNA, 25 bp, Artificial
  probe
  misc_feature (1)..(25): SEQ ID NO: 7208; WAN024ATE_at; Start 1655; Stop 1679
atacaatgcctagtatcaaggacat

SEQ ID NO: 65949 - DNA, 25 bp, Artificial
  probe
  misc_feature (1)..(25): SEQ ID NO: 7208; WAN024ATE_at; Start 1525; Stop 1549
gaacattattcaggaattccgcttg

SEQ ID NO: 65950 - DNA, 25 bp, Artificial
  probe
  misc_feature (1)..(25): SEQ ID NO: 7208; WAN024ATE_at; Start 1386; Stop 1410
caagtccggtacggccgagattgcc

SEQ ID NO: 65951 - DNA, 25 bp, Artificial
  probe
  misc_feature (1)..(25): SEQ ID NO: 7208; WAN024ATE_at; Start 1531; Stop 1555
tattcaggaattccgcttggggagt

SEQ ID NO: 65952 - DNA, 25 bp, Artificial
  probe
  misc_feature (1)..(25): SEQ ID NO: 7208; WAN024ATE_at; Start 1561; Stop 1585
aatccaatccttgagagagcttcag

SEQ ID NO: 65953 - DNA, 25 bp, Artificial
  probe
  misc_feature (1)..(25): SEQ ID NO: 7208; WAN024ATE_at; Start 1527; Stop 1551
acattattcaggaattccgcttggg

SEQ ID NO: 65954 - DNA, 25 bp, Artificial
  probe
  misc_feature (1)..(25): SEQ ID NO: 7208; WAN024ATE_at; Start 1559; Stop 1583
ctaatccaatccttgagagagcttc

SEQ ID NO: 65955 - DNA, 25 bp, Artificial
  probe
  misc_feature (1)..(25): SEQ ID NO: 7208; WAN024ATE_at; Start 1557; Stop 1581
tactaatccaatccttgagagagct

SEQ ID NO: 65956 - DNA, 25 bp, Artificial
  probe
  misc_feature (1)..(25): SEQ ID NO: 7208; WAN024ATE_at; Start 1657; Stop 1681
acaatgcctagtatcaaggacatat

SEQ ID NO: 65957 - DNA, 25 bp, Artificial
  probe
  misc_feature (1)..(25): SEQ ID NO: 7208; WAN024ATE_at; Start 1551; Stop 1575
ggagtttactaatccaatccttgag

SEQ ID NO: 65958 - DNA, 25 bp, Artificial
  probe
  misc_feature (1)..(25): SEQ ID NO: 7208; WAN024ATE_at; Start 1554; Stop 1578
gtttactaatccaatccttgagaga

SEQ ID NO: 65959 - DNA, 25 bp, Artificial
  probe
  misc_feature (1)..(25): SEQ ID NO: 7208; WAN024ATE_at; Start 1553; Stop 1577
agtttactaatccaatccttgagag

SEQ ID NO: 65960 - DNA, 25 bp, Artificial
  probe
  misc_feature (1)..(25): SEQ ID NO: 7208; WAN024ATE_at; Start 1562; Stop 1586
atccaatccttgagagagcttcagc

SEQ ID NO: 65961 - DNA, 25 bp, Artificial
  probe
  misc_feature (1)..(25): SEQ ID NO: 7208; WAN024ATE_at; Start 1656; Stop 1680
tacaatgcctagtatcaaggacata

SEQ ID NO: 65962 - DNA, 25 bp, Artificial
  probe
  misc_feature (1)..(25): SEQ ID NO: 7208; WAN024ATE_at; Start 1524; Stop 1548
tgaacattattcaggaattccgctt

SEQ ID NO: 65963 - DNA, 25 bp, Artificial
  probe
  misc_feature (1)..(25): SEQ ID NO: 7208; WAN024ATE_at; Start 1563; Stop 1587
tccaatccttgagagagcttcagct

SEQ ID NO: 65964 - DNA, 25 bp, Artificial
  probe
  misc_feature (1)..(25): SEQ ID NO: 7208; WAN024ATE_at; Start 1530; Stop 1554
ttattcaggaattccgcttggggag

SEQ ID NO: 65965 - DNA, 25 bp, Artificial
  probe
  misc_feature (1)..(25): SEQ ID NO: 7208; WAN024ATE_at; Start 1384; Stop 1408
ctcaagtccggtacggccgagattg

SEQ ID NO: 65966 - DNA, 25 bp, Artificial
  probe
  misc_feature (1)..(25): SEQ ID NO: 7300; WAN024ATF_s_at; Start 758; Stop 782
caagcacaactcgaaatcacatgat

SEQ ID NO: 65967 - DNA, 25 bp, Artificial
  probe
  misc_feature (1)..(25): SEQ ID NO: 7300; WAN024ATF_s_at; Start 754; Stop 778
gcagcaagcacaactcgaaatcaca

SEQ ID NO: 65968 - DNA, 25 bp, Artificial
  probe
  misc_feature (1)..(25): SEQ ID NO: 7300; WAN024ATF_s_at; Start 728; Stop 752
tagtaggaaatcctgtttccaaaga

SEQ ID NO: 65969 - DNA, 25 bp, Artificial
  probe
  misc_feature (1)..(25): SEQ ID NO: 7300; WAN024ATF_s_at; Start 753; Stop 777
ggcagcaagcacaactcgaaatcac

SEQ ID NO: 65970 - DNA, 25 bp, Artificial
  probe
  misc_feature (1)..(25): SEQ ID NO: 7300; WAN024ATF_s_at; Start 724; Stop 748
gaaatagtaggaaatcctgtttcca

SEQ ID NO: 65971 - DNA, 25 bp, Artificial
  probe
  misc_feature (1)..(25): SEQ ID NO: 7300; WAN024ATF_s_at; Start 745; Stop 769
tccaaagaggcagcaagcacaactc

SEQ ID NO: 65972 - DNA, 25 bp, Artificial
  probe
  misc_feature (1)..(25): SEQ ID NO: 7300; WAN024ATF_s_at; Start 763; Stop 787
acaactcgaaatcacatgatcttag

SEQ ID NO: 65973 - DNA, 25 bp, Artificial
  probe
  misc_feature (1)..(25): SEQ ID NO: 7300; WAN024ATF_s_at; Start 705; Stop 729
tgtacgtaagtcacaaaaagaaata

SEQ ID NO: 65974 - DNA, 25 bp, Artificial
  probe
  misc_feature (1)..(25): SEQ ID NO: 7300; WAN024ATF_s_at; Start 748; Stop 772
aaagaggcagcaagcacaactcgaa

SEQ ID NO: 65975 - DNA, 25 bp, Artificial
  probe
  misc_feature (1)..(25): SEQ ID NO: 7300; WAN024ATF_s_at; Start 747; Stop 771
caaagaggcagcaagcacaactcga

SEQ ID NO: 65976 - DNA, 25 bp, Artificial
  probe
  misc_feature (1)..(25): SEQ ID NO: 7300; WAN024ATF_s_at; Start 771; Stop 795
aaatcacatgatcttagttgggacg

SEQ ID NO: 65977 - DNA, 25 bp, Artificial
  probe
  misc_feature (1)..(25): SEQ ID NO: 7300; WAN024ATF_s_at; Start 738; Stop 762
tcctgtttccaaagaggcagcaagc

SEQ ID NO: 65978 - DNA, 25 bp, Artificial
  probe
  misc_feature (1)..(25): SEQ ID NO: 7300; WAN024ATF_s_at; Start 749; Stop 773
aagaggcagcaagcacaactcgaaa

SEQ ID NO: 65979 - DNA, 25 bp, Artificial
  probe
  misc_feature (1)..(25): SEQ ID NO: 7300; WAN024ATF_s_at; Start 731; Stop 755
taggaaatcctgtttccaaagaggc

SEQ ID NO: 65980 - DNA, 25 bp, Artificial
  probe
  misc_feature (1)..(25): SEQ ID NO: 7300; WAN024ATF_s_at; Start 736; Stop 760
aatcctgtttccaaagaggcagcaa

SEQ ID NO: 65981 - DNA, 25 bp, Artificial
  probe
  misc_feature (1)..(25): SEQ ID NO: 7300; WAN024ATF_s_at; Start 770; Stop 794
gaaatcacatgatcttagttgggac

SEQ ID NO: 65982 - DNA, 25 bp, Artificial
  probe
  misc_feature (1)..(25): SEQ ID NO: 7300; WAN024ATF_s_at; Start 768; Stop 792
tcgaaatcacatgatcttagttggg

SEQ ID NO: 65983 - DNA, 25 bp, Artificial
  probe
  misc_feature (1)..(25): SEQ ID NO: 7300; WAN024ATF_s_at; Start 739; Stop 763
cctgtttccaaagaggcagcaagca

SEQ ID NO: 65984 - DNA, 25 bp, Artificial
  probe
  misc_feature (1)..(25): SEQ ID NO: 7300; WAN024ATF_s_at; Start 702; Stop 726
gtctgtacgtaagtcacaaaaagaa

SEQ ID NO: 65985 - DNA, 25 bp, Artificial
  probe
  misc_feature (1)..(25): SEQ ID NO: 7300; WAN024ATF_s_at; Start 751; Stop 775
gaggcagcaagcacaactcgaaatc

SEQ ID NO: 65986 - DNA, 25 bp, Artificial
  probe
  misc_feature (1)..(25): SEQ ID NO: 7300; WAN024ATF_s_at; Start 735; Stop 759
aaatcctgtttccaaagaggcagca

SEQ ID NO: 65987 - DNA, 25 bp, Artificial
  probe
  misc_feature (1)..(25): SEQ ID NO: 7300; WAN024ATF_s_at; Start 752; Stop 776
aggcagcaagcacaactcgaaatca

SEQ ID NO: 65988 - DNA, 25 bp, Artificial
  probe
  misc_feature (1)..(25): SEQ ID NO: 7300; WAN024ATF_s_at; Start 743; Stop 767
tttccaaagaggcagcaagcacaac

SEQ ID NO: 65989 - DNA, 25 bp, Artificial
  probe
  misc_feature (1)..(25): SEQ ID NO: 7300; WAN024ATF_s_at; Start 772; Stop 796
aatcacatgatcttagttgggacgg

SEQ ID NO: 65990 - DNA, 25 bp, Artificial
  probe
  misc_feature (1)..(25): SEQ ID NO: 7300; WAN024ATF_s_at; Start 711; Stop 735
taagtcacaaaaagaaatagtagga

SEQ ID NO: 65991 - DNA, 25 bp, Artificial
  probe
  misc_feature (1)..(25): SEQ ID NO: 7300; WAN024ATF_s_at; Start 732; Stop 756
aggaaatcctgtttccaaagaggca

SEQ ID NO: 65992 - DNA, 25 bp, Artificial
  probe
  misc_feature (1)..(25): SEQ ID NO: 7300; WAN024ATF_s_at; Start 709; Stop 733
cgtaagtcacaaaaagaaatagtag

SEQ ID NO: 65993 - DNA, 25 bp, Artificial
  probe
  misc_feature (1)..(25): SEQ ID NO: 7300; WAN024ATF_s_at; Start 761; Stop 785
gcacaactcgaaatcacatgatctt

SEQ ID NO: 65994 - DNA, 25 bp, Artificial
  probe
  misc_feature (1)..(25): SEQ ID NO: 7300; WAN024ATF_s_at; Start 740; Stop 764
ctgtttccaaagaggcagcaagcac

SEQ ID NO: 65995 - DNA, 25 bp, Artificial
  probe
  misc_feature (1)..(25): SEQ ID NO: 7300; WAN024ATF_s_at; Start 744; Stop 768
ttccaaagaggcagcaagcacaact

SEQ ID NO: 65996 - DNA, 25 bp, Artificial
  probe
  misc_feature (1)..(25): SEQ ID NO: 7300; WAN024ATF_s_at; Start 741; Stop 765
tgtttccaaagaggcagcaagcaca

SEQ ID NO: 65997 - DNA, 25 bp, Artificial
  probe
  misc_feature (1)..(25): SEQ ID NO: 7300; WAN024ATF_s_at; Start 757; Stop 781
gcaagcacaactcgaaatcacatga

SEQ ID NO: 65998 - DNA, 25 bp, Artificial
  probe
  misc_feature (1)..(25): SEQ ID NO: 7300; WAN024ATF_s_at; Start 756; Stop 780
agcaagcacaactcgaaatcacatg

SEQ ID NO: 65999 - DNA, 25 bp, Artificial
  probe
  misc_feature (1)..(25): SEQ ID NO: 7300; WAN024ATF_s_at; Start 773; Stop 797
atcacatgatcttagttgggacgga

SEQ ID NO: 66000 - DNA, 25 bp, Artificial
  probe
  misc_feature (1)..(25): SEQ ID NO: 7209; WAN024ATG_at; Start 1559; Stop 1583
ccaacccaattcttgaaagagcttc

SEQ ID NO: 66001 - DNA, 25 bp, Artificial
  probe
  misc_feature (1)..(25): SEQ ID NO: 7209; WAN024ATG_at; Start 1562; Stop 1586
acccaattcttgaaagagcttcagc

SEQ ID NO: 66002 - DNA, 25 bp, Artificial
  probe
  misc_feature (1)..(25): SEQ ID NO: 7209; WAN024ATG_at; Start 765; Stop 789
gaaggtcatgacgctagcagcatct

SEQ ID NO: 66003 - DNA, 25 bp, Artificial
  probe
  misc_feature (1)..(25): SEQ ID NO: 7209; WAN024ATG_at; Start 776; Stop 800
cgctagcagcatctattgataataa

SEQ ID NO: 66004 - DNA, 25 bp, Artificial
  probe
  misc_feature (1)..(25): SEQ ID NO: 7209; WAN024ATG_at; Start 1557; Stop 1581
tgccaacccaattcttgaaagagct

SEQ ID NO: 66005 - DNA, 25 bp, Artificial
  probe
  misc_feature (1)..(25): SEQ ID NO: 7209; WAN024ATG_at; Start 1555; Stop 1579
tttgccaacccaattcttgaaagag

SEQ ID NO: 66006 - DNA, 25 bp, Artificial
  probe
  misc_feature (1)..(25): SEQ ID NO: 7209; WAN024ATG_at; Start 767; Stop 791
aggtcatgacgctagcagcatctat

SEQ ID NO: 66007 - DNA, 25 bp, Artificial
  probe
  misc_feature (1)..(25): SEQ ID NO: 7209; WAN024ATG_at; Start 777; Stop 801
gctagcagcatctattgataataat

SEQ ID NO: 66008 - DNA, 25 bp, Artificial
  probe
  misc_feature (1)..(25): SEQ ID NO: 7209; WAN024ATG_at; Start 772; Stop 796
atgacgctagcagcatctattgata

SEQ ID NO: 66009 - DNA, 25 bp, Artificial
  probe
  misc_feature (1)..(25): SEQ ID NO: 7209; WAN024ATG_at; Start 774; Stop 798
gacgctagcagcatctattgataat

SEQ ID NO: 66010 - DNA, 25 bp, Artificial
  probe
  misc_feature (1)..(25): SEQ ID NO: 7209; WAN024ATG_at; Start 775; Stop 799
acgctagcagcatctattgataata

SEQ ID NO: 66011 - DNA, 25 bp, Artificial
  probe
  misc_feature (1)..(25): SEQ ID NO: 7209; WAN024ATG_at; Start 766; Stop 790
aaggtcatgacgctagcagcatcta

SEQ ID NO: 66012 - DNA, 25 bp, Artificial
  probe
  misc_feature (1)..(25): SEQ ID NO: 7209; WAN024ATG_at; Start 1560; Stop 1584
caacccaattcttgaaagagcttca

SEQ ID NO: 66013 - DNA, 25 bp, Artificial
  probe
  misc_feature (1)..(25): SEQ ID NO: 7209; WAN024ATG_at; Start 1561; Stop 1585
aacccaattcttgaaagagcttcag

SEQ ID NO: 66014 - DNA, 25 bp, Artificial
  probe
  misc_feature (1)..(25): SEQ ID NO: 7209; WAN024ATG_at; Start 769; Stop 793
gtcatgacgctagcagcatctattg

SEQ ID NO: 66015 - DNA, 25 bp, Artificial
  probe
  misc_feature (1)..(25): SEQ ID NO: 7209; WAN024ATG_at; Start 1558; Stop 1582
gccaacccaattcttgaaagagctt

SEQ ID NO: 66016 - DNA, 25 bp, Artificial
  probe
  misc_feature (1)..(25): SEQ ID NO: 7209; WAN024ATG_at; Start 771; Stop 795
catgacgctagcagcatctattgat

SEQ ID NO: 66017 - DNA, 25 bp, Artificial
  probe
  misc_feature (1)..(25): SEQ ID NO: 7209; WAN024ATG_at; Start 773; Stop 797
tgacgctagcagcatctattgataa

SEQ ID NO: 66018 - DNA, 25 bp, Artificial
  probe
  misc_feature (1)..(25): SEQ ID NO: 7209; WAN024ATG_at; Start 1554; Stop 1578
atttgccaacccaattcttgaaaga

SEQ ID NO: 66019 - DNA, 25 bp, Artificial
  probe
  misc_feature (1)..(25): SEQ ID NO: 7209; WAN024ATG_at; Start 1390; Stop 1414
tctggtacagcagaaatcgctgatg

SEQ ID NO: 66020 - DNA, 25 bp, Artificial
  probe
  misc_feature (1)..(25): SEQ ID NO: 7209; WAN024ATG_at; Start 1563; Stop 1587
cccaattcttgaaagagcttcagct

SEQ ID NO: 66021 - DNA, 25 bp, Artificial
  probe
  misc_feature (1)..(25): SEQ ID NO: 7209; WAN024ATG_at; Start 1391; Stop 1415
ctggtacagcagaaatcgctgatga

SEQ ID NO: 66022 - DNA, 25 bp, Artificial
  probe
  misc_feature (1)..(25): SEQ ID NO: 7209; WAN024ATG_at; Start 768; Stop 792
ggtcatgacgctagcagcatctatt

SEQ ID NO: 66023 - DNA, 25 bp, Artificial
  probe
  misc_feature (1)..(25): SEQ ID NO: 7209; WAN024ATG_at; Start 770; Stop 794
tcatgacgctagcagcatctattga

SEQ ID NO: 66024 - DNA, 25 bp, Artificial
  probe
  misc_feature (1)..(25): SEQ ID NO: 7209; WAN024ATG_at; Start 1556; Stop 1580
ttgccaacccaattcttgaaagagc

SEQ ID NO: 66025 - DNA, 25 bp, Artificial
  probe
  misc_feature (1)..(25): SEQ ID NO: 6820; WAN024ATH_at; Start 1369; Stop 1393
gaagaagggacggatcttgcaccta

SEQ ID NO: 66026 - DNA, 25 bp, Artificial
  probe
  misc_feature (1)..(25): SEQ ID NO: 6820; WAN024ATH_at; Start 869; Stop 893
cgagcttgacgcgaacgcatatggt

SEQ ID NO: 66027 - DNA, 25 bp, Artificial
  probe
  misc_feature (1)..(25): SEQ ID NO: 6820; WAN024ATH_at; Start 878; Stop 902
cgcgaacgcatatggttttagtcgg

SEQ ID NO: 66028 - DNA, 25 bp, Artificial
  probe
  misc_feature (1)..(25): SEQ ID NO: 6820; WAN024ATH_at; Start 858; Stop 882
taaagatgcagcgagcttgacgcga

SEQ ID NO: 66029 - DNA, 25 bp, Artificial
  probe
  misc_feature (1)..(25): SEQ ID NO: 6820; WAN024ATH_at; Start 852; Stop 876
tgtgtctaaagatgcagcgagcttg

SEQ ID NO: 66030 - DNA, 25 bp, Artificial
  probe
  misc_feature (1)..(25): SEQ ID NO: 6820; WAN024ATH_at; Start 888; Stop 912
tatggttttagtcggtaccgatcca

SEQ ID NO: 66031 - DNA, 25 bp, Artificial
  probe
  misc_feature (1)..(25): SEQ ID NO: 6820; WAN024ATH_at; Start 886; Stop 910
catatggttttagtcggtaccgatc

SEQ ID NO: 66032 - DNA, 25 bp, Artificial
  probe
  misc_feature (1)..(25): SEQ ID NO: 6820; WAN024ATH_at; Start 860; Stop 884
aagatgcagcgagcttgacgcgaac

SEQ ID NO: 66033 - DNA, 25 bp, Artificial
  probe
  misc_feature (1)..(25): SEQ ID NO: 6820; WAN024ATH_at; Start 856; Stop 880
tctaaagatgcagcgagcttgacgc

SEQ ID NO: 66034 - DNA, 25 bp, Artificial
  probe
  misc_feature (1)..(25): SEQ ID NO: 6820; WAN024ATH_at; Start 897; Stop 921
agtcggtaccgatccagtatatgga

SEQ ID NO: 66035 - DNA, 25 bp, Artificial
  probe
  misc_feature (1)..(25): SEQ ID NO: 6820; WAN024ATH_at; Start 881; Stop 905
gaacgcatatggttttagtcggtac

SEQ ID NO: 66036 - DNA, 25 bp, Artificial
  probe
  misc_feature (1)..(25): SEQ ID NO: 6820; WAN024ATH_at; Start 896; Stop 920
tagtcggtaccgatccagtatatgg

SEQ ID NO: 66037 - DNA, 25 bp, Artificial
  probe
  misc_feature (1)..(25): SEQ ID NO: 6820; WAN024ATH_at; Start 933; Stop 957
tcataagacagggaaaccaactgta

SEQ ID NO: 66038 - DNA, 25 bp, Artificial
  probe
  misc_feature (1)..(25): SEQ ID NO: 6820; WAN024ATH_at; Start 901; Stop 925
ggtaccgatccagtatatggaacta

SEQ ID NO: 66039 - DNA, 25 bp, Artificial
  probe
  misc_feature (1)..(25): SEQ ID NO: 6820; WAN024ATH_at; Start 923; Stop 947
ctatgtataatcataagacagggaa

SEQ ID NO: 66040 - DNA, 25 bp, Artificial
  probe
  misc_feature (1)..(25): SEQ ID NO: 6820; WAN024ATH_at; Start 876; Stop 900
gacgcgaacgcatatggttttagtc

SEQ ID NO: 66041 - DNA, 25 bp, Artificial
  probe
  misc_feature (1)..(25): SEQ ID NO: 6820; WAN024ATH_at; Start 854; Stop 878
tgtctaaagatgcagcgagcttgac

SEQ ID NO: 66042 - DNA, 25 bp, Artificial
  probe
  misc_feature (1)..(25): SEQ ID NO: 6820; WAN024ATH_at; Start 1373; Stop 1397
aagggacggatcttgcacctaacca

SEQ ID NO: 66043 - DNA, 25 bp, Artificial
  probe
  misc_feature (1)..(25): SEQ ID NO: 6820; WAN024ATH_at; Start 884; Stop 908
cgcatatggttttagtcggtaccga

SEQ ID NO: 66044 - DNA, 25 bp, Artificial
  probe
  misc_feature (1)..(25): SEQ ID NO: 6820; WAN024ATH_at; Start 938; Stop 962
agacagggaaaccaactgtaactgt

SEQ ID NO: 66045 - DNA, 25 bp, Artificial
  probe
  misc_feature (1)..(25): SEQ ID NO: 6820; WAN024ATH_at; Start 899; Stop 923
tcggtaccgatccagtatatggaac

SEQ ID NO: 66046 - DNA, 25 bp, Artificial
  probe
  misc_feature (1)..(25): SEQ ID NO: 6820; WAN024ATH_at; Start 903; Stop 927
taccgatccagtatatggaactatg

SEQ ID NO: 66047 - DNA, 25 bp, Artificial
  probe
  misc_feature (1)..(25): SEQ ID NO: 6820; WAN024ATH_at; Start 872; Stop 896
gcttgacgcgaacgcatatggtttt

SEQ ID NO: 66048 - DNA, 25 bp, Artificial
  probe
  misc_feature (1)..(25): SEQ ID NO: 6820; WAN024ATH_at; Start 926; Stop 950
tgtataatcataagacagggaaacc

SEQ ID NO: 66049 - DNA, 25 bp, Artificial
  probe
  misc_feature (1)..(25): SEQ ID NO: 6820; WAN024ATH_at; Start 870; Stop 894
gagcttgacgcgaacgcatatggtt

SEQ ID NO: 66050 - DNA, 25 bp, Artificial
  probe
  misc_feature (1)..(25): SEQ ID NO: 6820; WAN024ATH_at; Start 864; Stop 888
tgcagcgagcttgacgcgaacgcat

SEQ ID NO: 66051 - DNA, 25 bp, Artificial
  probe
  misc_feature (1)..(25): SEQ ID NO: 6820; WAN024ATH_at; Start 850; Stop 874
cctgtgtctaaagatgcagcgagct

SEQ ID NO: 66052 - DNA, 25 bp, Artificial
  probe
  misc_feature (1)..(25): SEQ ID NO: 6820; WAN024ATH_at; Start 893; Stop 917
ttttagtcggtaccgatccagtata

SEQ ID NO: 66053 - DNA, 25 bp, Artificial
  probe
  misc_feature (1)..(25): SEQ ID NO: 6820; WAN024ATH_at; Start 849; Stop 873
tcctgtgtctaaagatgcagcgagc

SEQ ID NO: 66054 - DNA, 25 bp, Artificial
  probe
  misc_feature (1)..(25): SEQ ID NO: 6820; WAN024ATH_at; Start 866; Stop 890
cagcgagcttgacgcgaacgcatat

SEQ ID NO: 66055 - DNA, 25 bp, Artificial
  probe
  misc_feature (1)..(25): SEQ ID NO: 6820; WAN024ATH_at; Start 862; Stop 886
gatgcagcgagcttgacgcgaacgc

SEQ ID NO: 66056 - DNA, 25 bp, Artificial
  probe
  misc_feature (1)..(25): SEQ ID NO: 6820; WAN024ATH_at; Start 928; Stop 952
tataatcataagacagggaaaccaa

SEQ ID NO: 66057 - DNA, 25 bp, Artificial
  probe
  misc_feature (1)..(25): SEQ ID NO: 6820; WAN024ATH_at; Start 904; Stop 928
accgatccagtatatggaactatgt

SEQ ID NO: 66058 - DNA, 25 bp, Artificial
  probe
  misc_feature (1)..(25): SEQ ID NO: 6820; WAN024ATH_at; Start 930; Stop 954
taatcataagacagggaaaccaact

SEQ ID NO: 66059 - DNA, 25 bp, Artificial
  probe
  misc_feature (1)..(25): SEQ ID NO: 6458; WAN024ATI_at; Start 2023; Stop 2047
gaagaaggggccaatcttacaccta

SEQ ID NO: 66060 - DNA, 25 bp, Artificial
  probe
  misc_feature (1)..(25): SEQ ID NO: 6458; WAN024ATI_at; Start 1101; Stop 1125
agatgctactatccgagattgggat

SEQ ID NO: 66061 - DNA, 25 bp, Artificial
  probe
  misc_feature (1)..(25): SEQ ID NO: 6458; WAN024ATI_at; Start 1092; Stop 1116
aaaaattgcagatgctactatccga

SEQ ID NO: 66062 - DNA, 25 bp, Artificial
  probe
  misc_feature (1)..(25): SEQ ID NO: 6458; WAN024ATI_at; Start 1098; Stop 1122
tgcagatgctactatccgagattgg

SEQ ID NO: 66063 - DNA, 25 bp, Artificial
  probe
  misc_feature (1)..(25): SEQ ID NO: 6458; WAN024ATI_at; Start 2028; Stop 2052
aggggccaatcttacacctaaccag

SEQ ID NO: 66064 - DNA, 25 bp, Artificial
  probe
  misc_feature (1)..(25): SEQ ID NO: 6458; WAN024ATI_at; Start 1094; Stop 1118
aaattgcagatgctactatccgaga

SEQ ID NO: 66065 - DNA, 25 bp, Artificial
  probe
  misc_feature (1)..(25): SEQ ID NO: 6458; WAN024ATI_at; Start 757; Stop 781
caacgaacgatggacggtaaggatg

SEQ ID NO: 66066 - DNA, 25 bp, Artificial
  probe
  misc_feature (1)..(25): SEQ ID NO: 6458; WAN024ATI_at; Start 1100; Stop 1124
cagatgctactatccgagattggga

SEQ ID NO: 66067 - DNA, 25 bp, Artificial
  probe
  misc_feature (1)..(25): SEQ ID NO: 6458; WAN024ATI_at; Start 763; Stop 787
acgatggacggtaaggatgtttata

SEQ ID NO: 66068 - DNA, 25 bp, Artificial
  probe
  misc_feature (1)..(25): SEQ ID NO: 6458; WAN024ATI_at; Start 2045; Stop 2069
ctaaccagcaagtcctgatcttatc

SEQ ID NO: 66069 - DNA, 25 bp, Artificial
  probe
  misc_feature (1)..(25): SEQ ID NO: 6458; WAN024ATI_at; Start 760; Stop 784
cgaacgatggacggtaaggatgttt

SEQ ID NO: 66070 - DNA, 25 bp, Artificial
  probe
  misc_feature (1)..(25): SEQ ID NO: 6458; WAN024ATI_at; Start 1104; Stop 1128
tgctactatccgagattgggatgtt

SEQ ID NO: 66071 - DNA, 25 bp, Artificial
  probe
  misc_feature (1)..(25): SEQ ID NO: 6458; WAN024ATI_at; Start 756; Stop 780
ccaacgaacgatggacggtaaggat

SEQ ID NO: 66072 - DNA, 25 bp, Artificial
  probe
  misc_feature (1)..(25): SEQ ID NO: 6458; WAN024ATI_at; Start 2044; Stop 2068
cctaaccagcaagtcctgatcttat

SEQ ID NO: 66073 - DNA, 25 bp, Artificial
  probe
  misc_feature (1)..(25): SEQ ID NO: 6458; WAN024ATI_at; Start 1099; Stop 1123
gcagatgctactatccgagattggg

SEQ ID NO: 66074 - DNA, 25 bp, Artificial
  probe
  misc_feature (1)..(25): SEQ ID NO: 6458; WAN024ATI_at; Start 1093; Stop 1117
aaaattgcagatgctactatccgag

SEQ ID NO: 66075 - DNA, 25 bp, Artificial
  probe
  misc_feature (1)..(25): SEQ ID NO: 6458; WAN024ATI_at; Start 1095; Stop 1119
aattgcagatgctactatccgagat

SEQ ID NO: 66076 - DNA, 25 bp, Artificial
  probe
  misc_feature (1)..(25): SEQ ID NO: 6458; WAN024ATI_at; Start 762; Stop 786
aacgatggacggtaaggatgtttat

SEQ ID NO: 66077 - DNA, 25 bp, Artificial
  probe
  misc_feature (1)..(25): SEQ ID NO: 6458; WAN024ATI_at; Start 2030; Stop 2054
gggccaatcttacacctaaccagca

SEQ ID NO: 66078 - DNA, 25 bp, Artificial
  probe
  misc_feature (1)..(25): SEQ ID NO: 6458; WAN024ATI_at; Start 1097; Stop 1121
ttgcagatgctactatccgagattg

SEQ ID NO: 66079 - DNA, 25 bp, Artificial
  probe
  misc_feature (1)..(25): SEQ ID NO: 6458; WAN024ATI_at; Start 2029; Stop 2053
ggggccaatcttacacctaaccagc

SEQ ID NO: 66080 - DNA, 25 bp, Artificial
  probe
  misc_feature (1)..(25): SEQ ID NO: 6458; WAN024ATI_at; Start 1103; Stop 1127
atgctactatccgagattgggatgt

SEQ ID NO: 66081 - DNA, 25 bp, Artificial
  probe
  misc_feature (1)..(25): SEQ ID NO: 6458; WAN024ATI_at; Start 759; Stop 783
acgaacgatggacggtaaggatgtt

SEQ ID NO: 66082 - DNA, 25 bp, Artificial
  probe
  misc_feature (1)..(25): SEQ ID NO: 6458; WAN024ATI_at; Start 1102; Stop 1126
gatgctactatccgagattgggatg

SEQ ID NO: 66083 - DNA, 25 bp, Artificial
  probe
  misc_feature (1)..(25): SEQ ID NO: 6458; WAN024ATI_at; Start 2022; Stop 2046
agaagaaggggccaatcttacacct

SEQ ID NO: 66084 - DNA, 25 bp, Artificial
  probe
  misc_feature (1)..(25): SEQ ID NO: 6458; WAN024ATI_at; Start 2043; Stop 2067
acctaaccagcaagtcctgatctta

SEQ ID NO: 66085 - DNA, 25 bp, Artificial
  probe
  misc_feature (1)..(25): SEQ ID NO: 6458; WAN024ATI_at; Start 748; Stop 772
caagtttcccaacgaacgatggacg

SEQ ID NO: 66086 - DNA, 25 bp, Artificial
  probe
  misc_feature (1)..(25): SEQ ID NO: 6458; WAN024ATI_at; Start 1096; Stop 1120
attgcagatgctactatccgagatt

SEQ ID NO: 66087 - DNA, 25 bp, Artificial
  probe
  misc_feature (1)..(25): SEQ ID NO: 6458; WAN024ATI_at; Start 758; Stop 782
aacgaacgatggacggtaaggatgt

SEQ ID NO: 66088 - DNA, 25 bp, Artificial
  probe
  misc_feature (1)..(25): SEQ ID NO: 6458; WAN024ATI_at; Start 764; Stop 788
cgatggacggtaaggatgtttatac

SEQ ID NO: 66089 - DNA, 25 bp, Artificial
  probe
  misc_feature (1)..(25): SEQ ID NO: 6458; WAN024ATI_at; Start 765; Stop 789
gatggacggtaaggatgtttataca

SEQ ID NO: 66090 - DNA, 25 bp, Artificial
  probe
  misc_feature (1)..(25): SEQ ID NO: 6458; WAN024ATI_at; Start 761; Stop 785
gaacgatggacggtaaggatgttta

SEQ ID NO: 66091 - DNA, 25 bp, Artificial
  probe
  misc_feature (1)..(25): SEQ ID NO: 6459; WAN024ATJ_at; Start 896; Stop 920
gagagattctcgctacaactcaaag

SEQ ID NO: 66092 - DNA, 25 bp, Artificial
  probe
  misc_feature (1)..(25): SEQ ID NO: 6459; WAN024ATJ_at; Start 586; Stop 610
tctttcatcggactagcgcagttgc

SEQ ID NO: 66093 - DNA, 25 bp, Artificial
  probe
  misc_feature (1)..(25): SEQ ID NO: 6459; WAN024ATJ_at; Start 884; Stop 908
gtgccaagacgggagagattctcgc

SEQ ID NO: 66094 - DNA, 25 bp, Artificial
  probe
  misc_feature (1)..(25): SEQ ID NO: 6459; WAN024ATJ_at; Start 905; Stop 929
tcgctacaactcaaagaccaacctt

SEQ ID NO: 66095 - DNA, 25 bp, Artificial
  probe
  misc_feature (1)..(25): SEQ ID NO: 6459; WAN024ATJ_at; Start 481; Stop 505
gccaacatgatgtccataaaaaagg

SEQ ID NO: 66096 - DNA, 25 bp, Artificial
  probe
  misc_feature (1)..(25): SEQ ID NO: 6459; WAN024ATJ_at; Start 599; Stop 623
tagcgcagttgcatgaaaatgagga

SEQ ID NO: 66097 - DNA, 25 bp, Artificial
  probe
  misc_feature (1)..(25): SEQ ID NO: 6459; WAN024ATJ_at; Start 786; Stop 810
tacgaccctatctagtcctttgcag

SEQ ID NO: 66098 - DNA, 25 bp, Artificial
  probe
  misc_feature (1)..(25): SEQ ID NO: 6459; WAN024ATJ_at; Start 626; Stop 650
gttcaaagagtctcattgggacgtc

SEQ ID NO: 66099 - DNA, 25 bp, Artificial
  probe
  misc_feature (1)..(25): SEQ ID NO: 6459; WAN024ATJ_at; Start 613; Stop 637
gaaaatgaggatggttcaaagagtc

SEQ ID NO: 66100 - DNA, 25 bp, Artificial
  probe
  misc_feature (1)..(25): SEQ ID NO: 6459; WAN024ATJ_at; Start 826; Stop 850
caaatggatgccttccaagaaaaac

SEQ ID NO: 66101 - DNA, 25 bp, Artificial
  probe
  misc_feature (1)..(25): SEQ ID NO: 6459; WAN024ATJ_at; Start 515; Stop 539
cagctaaggttgagggaattgattt

SEQ ID NO: 66102 - DNA, 25 bp, Artificial
  probe
  misc_feature (1)..(25): SEQ ID NO: 6459; WAN024ATJ_at; Start 741; Stop 765
tacggagcaagttacccgacagact

SEQ ID NO: 66103 - DNA, 25 bp, Artificial
  probe
  misc_feature (1)..(25): SEQ ID NO: 6459; WAN024ATJ_at; Start 813; Stop 837
ctttatggaaagtcaaatggatgcc

SEQ ID NO: 66104 - DNA, 25 bp, Artificial
  probe
  misc_feature (1)..(25): SEQ ID NO: 6459; WAN024ATJ_at; Start 647; Stop 671
cgtctggtgtcgaaagttccttgaa

SEQ ID NO: 66105 - DNA, 25 bp, Artificial
  probe
  misc_feature (1)..(25): SEQ ID NO: 6459; WAN024ATJ_at; Start 936; Stop 960
tgataccaaagaagggattacagag

SEQ ID NO: 66106 - DNA, 25 bp, Artificial
  probe
  misc_feature (1)..(25): SEQ ID NO: 6459; WAN024ATJ_at; Start 715; Stop 739
gaccgcttaggaaatattgttccag

SEQ ID NO: 66107 - DNA, 25 bp, Artificial
  probe
  misc_feature (1)..(25): SEQ ID NO: 6459; WAN024ATJ_at; Start 636; Stop 660
tctcattgggacgtctggtgtcgaa

SEQ ID NO: 66108 - DNA, 25 bp, Artificial
  probe
  misc_feature (1)..(25): SEQ ID NO: 6459; WAN024ATJ_at; Start 680; Stop 704
tagcgggaacagatggtatcattac

SEQ ID NO: 66109 - DNA, 25 bp, Artificial
  probe
  misc_feature (1)..(25): SEQ ID NO: 6459; WAN024ATJ_at; Start 873; Stop 897
gaccttggttagtgccaagacggga

SEQ ID NO: 66110 - DNA, 25 bp, Artificial
  probe
  misc_feature (1)..(25): SEQ ID NO: 6459; WAN024ATJ_at; Start 526; Stop 550
gagggaattgattttacaacaagcc

SEQ ID NO: 66111 - DNA, 25 bp, Artificial
  probe
  misc_feature (1)..(25): SEQ ID NO: 6459; WAN024ATJ_at; Start 729; Stop 753
tattgttccaggtacggagcaagtt

SEQ ID NO: 66112 - DNA, 25 bp, Artificial
  probe
  misc_feature (1)..(25): SEQ ID NO: 6459; WAN024ATJ_at; Start 564; Stop 588
tcctaacgggaaatttgcttcatct

SEQ ID NO: 66113 - DNA, 25 bp, Artificial
  probe
  misc_feature (1)..(25): SEQ ID NO: 6459; WAN024ATJ_at; Start 551; Stop 575
caaatcgaagctatcctaacgggaa

SEQ ID NO: 66114 - DNA, 25 bp, Artificial
  probe
  misc_feature (1)..(25): SEQ ID NO: 6459; WAN024ATJ_at; Start 505; Stop 529
gatttggaaacagctaaggttgagg

SEQ ID NO: 66115 - DNA, 25 bp, Artificial
  probe
  misc_feature (1)..(25): SEQ ID NO: 6459; WAN024ATJ_at; Start 536; Stop 560
attttacaacaagcccaaatcgaag

SEQ ID NO: 66116 - DNA, 25 bp, Artificial
  probe
  misc_feature (1)..(25): SEQ ID NO: 6459; WAN024ATJ_at; Start 665; Stop 689
ccttgaatagcttgttagcgggaac

SEQ ID NO: 66117 - DNA, 25 bp, Artificial
  probe
  misc_feature (1)..(25): SEQ ID NO: 6459; WAN024ATJ_at; Start 864; Stop 888
tatgactgcgaccttggttagtgcc

SEQ ID NO: 66118 - DNA, 25 bp, Artificial
  probe
  misc_feature (1)..(25): SEQ ID NO: 6459; WAN024ATJ_at; Start 771; Stop 795
cgggaaagatgtctatacgacccta

SEQ ID NO: 66119 - DNA, 25 bp, Artificial
  probe
  misc_feature (1)..(25): SEQ ID NO: 6459; WAN024ATJ_at; Start 654; Stop 678
tgtcgaaagttccttgaatagcttg

SEQ ID NO: 66120 - DNA, 25 bp, Artificial
  probe
  misc_feature (1)..(25): SEQ ID NO: 6459; WAN024ATJ_at; Start 579; Stop 603
tgcttcatctttcatcggactagcg

SEQ ID NO: 66121 - DNA, 25 bp, Artificial
  probe
  misc_feature (1)..(25): SEQ ID NO: 6459; WAN024ATJ_at; Start 757; Stop 781
cgacagactgtaaacgggaaagatg

SEQ ID NO: 66122 - DNA, 25 bp, Artificial
  probe
  misc_feature (1)..(25): SEQ ID NO: 6459; WAN024ATJ_at; Start 495; Stop 519
cataaaaaaggatttggaaacagct

SEQ ID NO: 66123 - DNA, 25 bp, Artificial
  probe
  misc_feature (1)..(25): SEQ ID NO: 6459; WAN024ATJ_at; Start 921; Stop 945
accaacctttgatgctgataccaaa

SEQ ID NO: 66124 - DNA, 25 bp, Artificial
  probe
  misc_feature (1)..(25): SEQ ID NO: 6459; WAN024ATJ_at; Start 258; Stop 282
gattgctgaggatgcgacatcttat

SEQ ID NO: 66125 - DNA, 25 bp, Artificial
  probe
  misc_feature (1)..(25): SEQ ID NO: 5589; WAN024ATK_at; Start 98; Stop 122
gttttagcactgaccaaagtcgctg

SEQ ID NO: 66126 - DNA, 25 bp, Artificial
  probe
  misc_feature (1)..(25): SEQ ID NO: 5589; WAN024ATK_at; Start 87; Stop 111
gaatttcccctgttttagcactgac

SEQ ID NO: 66127 - DNA, 25 bp, Artificial
  probe
  misc_feature (1)..(25): SEQ ID NO: 5589; WAN024ATK_at; Start 224; Stop 248
atcgttcgttgggaaacttgttctg

SEQ ID NO: 66128 - DNA, 25 bp, Artificial
  probe
  misc_feature (1)..(25): SEQ ID NO: 5589; WAN024ATK_at; Start 20; Stop 44
caaacaaagtcctctgtaatgcctt

SEQ ID NO: 66129 - DNA, 25 bp, Artificial
  probe
  misc_feature (1)..(25): SEQ ID NO: 5589; WAN024ATK_at; Start 136; Stop 160
ttttaccttctcttgaaaagcatcc

SEQ ID NO: 66130 - DNA, 25 bp, Artificial
  probe
  misc_feature (1)..(25): SEQ ID NO: 5589; WAN024ATK_at; Start 239; Stop 263
acttgttctgttccgggtacaatat

SEQ ID NO: 66131 - DNA, 25 bp, Artificial
  probe
  misc_feature (1)..(25): SEQ ID NO: 5589; WAN024ATK_at; Start 281; Stop 305
tcataggtaataatgccgtctgtcc

SEQ ID NO: 66132 - DNA, 25 bp, Artificial
  probe
  misc_feature (1)..(25): SEQ ID NO: 5589; WAN024ATK_at; Start 333; Stop 357
ccattccagaggttcccagcaagct

SEQ ID NO: 66133 - DNA, 25 bp, Artificial
  probe
  misc_feature (1)..(25): SEQ ID NO: 5589; WAN024ATK_at; Start 351; Stop 375
gcaagctcttgcttccatcttcatt

SEQ ID NO: 66134 - DNA, 25 bp, Artificial
  probe
  misc_feature (1)..(25): SEQ ID NO: 5589; WAN024ATK_at; Start 339; Stop 363
cagaggttcccagcaagctcttgct

SEQ ID NO: 66135 - DNA, 25 bp, Artificial
  probe
  misc_feature (1)..(25): SEQ ID NO: 5589; WAN024ATK_at; Start 366; Stop 390
catcttcattttcatggagctgagc

SEQ ID NO: 66136 - DNA, 25 bp, Artificial
  probe
  misc_feature (1)..(25): SEQ ID NO: 5589; WAN024ATK_at; Start 55; Stop 79
tgcatcaaaggtcggtcgttgcgtt

SEQ ID NO: 66137 - DNA, 25 bp, Artificial
  probe
  misc_feature (1)..(25): SEQ ID NO: 5589; WAN024ATK_at; Start 254; Stop 278
ggtacaatattacccagacgatcct

SEQ ID NO: 66138 - DNA, 25 bp, Artificial
  probe
  misc_feature (1)..(25): SEQ ID NO: 5589; WAN024ATK_at; Start 116; Stop 140
gtcgctgtcatgtactttcctttta

SEQ ID NO: 66139 - DNA, 25 bp, Artificial
  probe
  misc_feature (1)..(25): SEQ ID NO: 5589; WAN024ATK_at; Start 74; Stop 98
tgcgttgttgccagaatttcccctg

SEQ ID NO: 66140 - DNA, 25 bp, Artificial
  probe
  misc_feature (1)..(25): SEQ ID NO: 5589; WAN024ATK_at; Start 162; Stop 186
tctgggtttccataaaggactggag

SEQ ID NO: 66141 - DNA, 25 bp, Artificial
  probe
  misc_feature (1)..(25): SEQ ID NO: 5589; WAN024ATK_at; Start 369; Stop 393
cttcattttcatggagctgagctag

SEQ ID NO: 66142 - DNA, 25 bp, Artificial
  probe
  misc_feature (1)..(25): SEQ ID NO: 5589; WAN024ATK_at; Start 266; Stop 290
cccagacgatccttttcataggtaa

SEQ ID NO: 66143 - DNA, 25 bp, Artificial
  probe
  misc_feature (1)..(25): SEQ ID NO: 5589; WAN024ATK_at; Start 34; Stop 58
tgtaatgccttcttttgtatctgca

SEQ ID NO: 66144 - DNA, 25 bp, Artificial
  probe
  misc_feature (1)..(25): SEQ ID NO: 5589; WAN024ATK_at; Start 2; Stop 26
tggtaaaggatatcacgccaaacaa

SEQ ID NO: 66145 - DNA, 25 bp, Artificial
  probe
  misc_feature (1)..(25): SEQ ID NO: 5589; WAN024ATK_at; Start 321; Stop 345
tcaaggaactctccattccagaggt

SEQ ID NO: 66146 - DNA, 25 bp, Artificial
  probe
  misc_feature (1)..(25): SEQ ID NO: 5589; WAN024ATK_at; Start 288; Stop 312
taataatgccgtctgtccctgcaag

SEQ ID NO: 66147 - DNA, 25 bp, Artificial
  probe
  misc_feature (1)..(25): SEQ ID NO: 5589; WAN024ATK_at; Start 10; Stop 34
gatatcacgccaaacaaagtcctct

SEQ ID NO: 66148 - DNA, 25 bp, Artificial
  probe
  misc_feature (1)..(25): SEQ ID NO: 5589; WAN024ATK_at; Start 219; Stop 243
cgtccatcgttcgttgggaaacttg

SEQ ID NO: 66149 - DNA, 25 bp, Artificial
  probe
  misc_feature (1)..(25): SEQ ID NO: 5589; WAN024ATK_at; Start 108; Stop 132
tgaccaaagtcgctgtcatgtactt

SEQ ID NO: 66150 - DNA, 25 bp, Artificial
  probe
  misc_feature (1)..(25): SEQ ID NO: 5589; WAN024ATK_at; Start 49; Stop 73
tgtatctgcatcaaaggtcggtcgt

SEQ ID NO: 66151 - DNA, 25 bp, Artificial
  probe
  misc_feature (1)..(25): SEQ ID NO: 5589; WAN024ATK_at; Start 144; Stop 168
tctcttgaaaagcatccatctgggt

SEQ ID NO: 66152 - DNA, 25 bp, Artificial
  probe
  misc_feature (1)..(25): SEQ ID NO: 5589; WAN024ATK_at; Start 307; Stop 331
tgcaagaatactgttcaaggaactc

SEQ ID NO: 66153 - DNA, 25 bp, Artificial
  probe
  misc_feature (1)..(25): SEQ ID NO: 5589; WAN024ATK_at; Start 294; Stop 318
tgccgtctgtccctgcaagaatact

SEQ ID NO: 66154 - DNA, 25 bp, Artificial
  probe
  misc_feature (1)..(25): SEQ ID NO: 5589; WAN024ATK_at; Start 62; Stop 86
aaggtcggtcgttgcgttgttgcca

SEQ ID NO: 66155 - DNA, 25 bp, Artificial
  probe
  misc_feature (1)..(25): SEQ ID NO: 5589; WAN024ATK_at; Start 301; Stop 325
tgtccctgcaagaatactgttcaag

SEQ ID NO: 66156 - DNA, 25 bp, Artificial
  probe
  misc_feature (1)..(25): SEQ ID NO: 5589; WAN024ATK_at; Start 204; Stop 228
tataaacatccttaccgtccatcgt

SEQ ID NO: 66157 - DNA, 25 bp, Artificial
  probe
  misc_feature (1)..(25): SEQ ID NO: 5589; WAN024ATK_at; Start 189; Stop 213
ggctggaaatggttgtataaacatc

SEQ ID NO: 66158 - DNA, 25 bp, Artificial
  probe
  misc_feature (1)..(25): SEQ ID NO: 5589; WAN024ATK_at; Start 155; Stop 179
gcatccatctgggtttccataaagg

SEQ ID NO: 66159 - DNA, 25 bp, Artificial
  probe
  misc_feature (1)..(25): SEQ ID NO: 1140; WAN024ATL_at; Start 513; Stop 537
agacgctagtgttgaaggaattgac

SEQ ID NO: 66160 - DNA, 25 bp, Artificial
  probe
  misc_feature (1)..(25): SEQ ID NO: 1140; WAN024ATL_at; Start 176; Stop 200
tcaaagaggctaagaaagttcacca

SEQ ID NO: 66161 - DNA, 25 bp, Artificial
  probe
  misc_feature (1)..(25): SEQ ID NO: 1140; WAN024ATL_at; Start 139; Stop 163
ataatcgggagtggtagtaaatttg

SEQ ID NO: 66162 - DNA, 25 bp, Artificial
  probe
  misc_feature (1)..(25): SEQ ID NO: 1140; WAN024ATL_at; Start 104; Stop 128
tacttttcgctgtctttttggtcaa

SEQ ID NO: 66163 - DNA, 25 bp, Artificial
  probe
  misc_feature (1)..(25): SEQ ID NO: 1140; WAN024ATL_at; Start 570; Stop 594
tggacaattcgcttccagttttatt

SEQ ID NO: 66164 - DNA, 25 bp, Artificial
  probe
  misc_feature (1)..(25): SEQ ID NO: 1140; WAN024ATL_at; Start 164; Stop 188
gaacggatctagtcaaagaggctaa

SEQ ID NO: 66165 - DNA, 25 bp, Artificial
  probe
  misc_feature (1)..(25): SEQ ID NO: 1140; WAN024ATL_at; Start 66; Stop 90
taaaatagtagggaagtacatcagc

SEQ ID NO: 66166 - DNA, 25 bp, Artificial
  probe
  misc_feature (1)..(25): SEQ ID NO: 1140; WAN024ATL_at; Start 341; Stop 365
tagaagatgcccagtttaataaggt

SEQ ID NO: 66167 - DNA, 25 bp, Artificial
  probe
  misc_feature (1)..(25): SEQ ID NO: 1140; WAN024ATL_at; Start 25; Stop 49
cgatttgcgattagaaaccgtaaat

SEQ ID NO: 66168 - DNA, 25 bp, Artificial
  probe
  misc_feature (1)..(25): SEQ ID NO: 1140; WAN024ATL_at; Start 2030; Stop 2054
gaaccaatcttgctcctaaccagca

SEQ ID NO: 66169 - DNA, 25 bp, Artificial
  probe
  misc_feature (1)..(25): SEQ ID NO: 1140; WAN024ATL_at; Start 564; Stop 588
tccaaatggacaattcgcttccagt

SEQ ID NO: 66170 - DNA, 25 bp, Artificial
  probe
  misc_feature (1)..(25): SEQ ID NO: 1140; WAN024ATL_at; Start 489; Stop 513
gatggctattaaaaaggatctaaaa

SEQ ID NO: 66171 - DNA, 25 bp, Artificial
  probe
  misc_feature (1)..(25): SEQ ID NO: 1140; WAN024ATL_at; Start 525; Stop 549
tgaaggaattgacttcacaactagc

SEQ ID NO: 66172 - DNA, 25 bp, Artificial
  probe
  misc_feature (1)..(25): SEQ ID NO: 1140; WAN024ATL_at; Start 504; Stop 528
ggatctaaaagacgctagtgttgaa

SEQ ID NO: 66173 - DNA, 25 bp, Artificial
  probe
  misc_feature (1)..(25): SEQ ID NO: 1140; WAN024ATL_at; Start 53; Stop 77
cagcagaaaaccgtaaaatagtagg

SEQ ID NO: 66174 - DNA, 25 bp, Artificial
  probe
  misc_feature (1)..(25): SEQ ID NO: 1140; WAN024ATL_at; Start 153; Stop 177
tagtaaatttggaacggatctagtc

SEQ ID NO: 66175 - DNA, 25 bp, Artificial
  probe
  misc_feature (1)..(25): SEQ ID NO: 1140; WAN024ATL_at; Start 363; Stop 387
ggtagcagaggttttccataagtat

SEQ ID NO: 66176 - DNA, 25 bp, Artificial
  probe
  misc_feature (1)..(25): SEQ ID NO: 1140; WAN024ATL_at; Start 131; Stop 155
ttgctgttataatcgggagtggtag

SEQ ID NO: 66177 - DNA, 25 bp, Artificial
  probe
  misc_feature (1)..(25): SEQ ID NO: 1140; WAN024ATL_at; Start 74; Stop 98
tagggaagtacatcagcttgttagc

SEQ ID NO: 66178 - DNA, 25 bp, Artificial
  probe
  misc_feature (1)..(25): SEQ ID NO: 1140; WAN024ATL_at; Start 2024; Stop 2048
aagaaggaaccaatcttgctcctaa

SEQ ID NO: 66179 - DNA, 25 bp, Artificial
  probe
  misc_feature (1)..(25): SEQ ID NO: 1140; WAN024ATL_at; Start 181; Stop 205
gaggctaagaaagttcaccaaataa

SEQ ID NO: 66180 - DNA, 25 bp, Artificial
  probe
  misc_feature (1)..(25): SEQ ID NO: 1140; WAN024ATL_at; Start 330; Stop 354
aattctttatgtagaagatgcccag

SEQ ID NO: 66181 - DNA, 25 bp, Artificial
  probe
  misc_feature (1)..(25): SEQ ID NO: 1140; WAN024ATL_at; Start 681; Stop 705
tgcagggaaagacggtatcattacc

SEQ ID NO: 66182 - DNA, 25 bp, Artificial
  probe
  misc_feature (1)..(25): SEQ ID NO: 1140; WAN024ATL_at; Start 89; Stop 113
gcttgttagctgtcgtacttttcgc

SEQ ID NO: 66183 - DNA, 25 bp, Artificial
  probe
  misc_feature (1)..(25): SEQ ID NO: 1140; WAN024ATL_at; Start 900; Stop 924
gattcttgcaacgacgcagagacca

SEQ ID NO: 66184 - DNA, 25 bp, Artificial
  probe
  misc_feature (1)..(25): SEQ ID NO: 1140; WAN024ATL_at; Start 909; Stop 933
aacgacgcagagaccaacctttgat

SEQ ID NO: 66185 - DNA, 25 bp, Artificial
  probe
  misc_feature (1)..(25): SEQ ID NO: 1140; WAN024ATL_at; Start 123; Stop 147
ggtcaattttgctgttataatcggg

SEQ ID NO: 66186 - DNA, 25 bp, Artificial
  probe
  misc_feature (1)..(25): SEQ ID NO: 1140; WAN024ATL_at; Start 1754; Stop 1778
tgtatgtaacggtacagcaacctga

SEQ ID NO: 66187 - DNA, 25 bp, Artificial
  probe
  misc_feature (1)..(25): SEQ ID NO: 1140; WAN024ATL_at; Start 675; Stop 699
tattcttgcagggaaagacggtatc

SEQ ID NO: 66188 - DNA, 25 bp, Artificial
  probe
  misc_feature (1)..(25): SEQ ID NO: 1140; WAN024ATL_at; Start 583; Stop 607
tccagttttattggtttagctcaac

SEQ ID NO: 66189 - DNA, 25 bp, Artificial
  probe
  misc_feature (1)..(25): SEQ ID NO: 1140; WAN024ATL_at; Start 36; Stop 60
tagaaaccgtaaatctccagcagaa

SEQ ID NO: 66190 - DNA, 25 bp, Artificial
  probe
  misc_feature (1)..(25): SEQ ID NO: 1140; WAN024ATL_at; Start 897; Stop 921
ggagattcttgcaacgacgcagaga

SEQ ID NO: 66191 - DNA, 25 bp, Artificial
  probe
  misc_feature (1)..(25): SEQ ID NO: 1140; WAN024ATL_at; Start 356; Stop 380
ttaataaggtagcagaggttttcca

SEQ ID NO: 66192 - DNA, 25 bp, Artificial
  probe
  misc_feature (1)..(25): SEQ ID NO: 1140; WAN024ATL_at; Start 49; Stop 73
tctccagcagaaaaccgtaaaatag

SEQ ID NO: 66193 - DNA, 25 bp, Artificial
  probe
  misc_feature (1)..(25): SEQ ID NO: 3820; WAN024ATN_at; Start 1449; Stop 1473
ctacattttctcggttgtagctatg

SEQ ID NO: 66194 - DNA, 25 bp, Artificial
  probe
  misc_feature (1)..(25): SEQ ID NO: 3820; WAN024ATN_at; Start 1458; Stop 1482
ctcggttgtagctatgaaccctgct

SEQ ID NO: 66195 - DNA, 25 bp, Artificial
  probe
  misc_feature (1)..(25): SEQ ID NO: 3820; WAN024ATN_at; Start 1460; Stop 1484
cggttgtagctatgaaccctgctga

SEQ ID NO: 66196 - DNA, 25 bp, Artificial
  probe
  misc_feature (1)..(25): SEQ ID NO: 3820; WAN024ATN_at; Start 1446; Stop 1470
caactacattttctcggttgtagct

SEQ ID NO: 66197 - DNA, 25 bp, Artificial
  probe
  misc_feature (1)..(25): SEQ ID NO: 3820; WAN024ATN_at; Start 1444; Stop 1468
accaactacattttctcggttgtag

SEQ ID NO: 66198 - DNA, 25 bp, Artificial
  probe
  misc_feature (1)..(25): SEQ ID NO: 3820; WAN024ATN_at; Start 1447; Stop 1471
aactacattttctcggttgtagcta

SEQ ID NO: 66199 - DNA, 25 bp, Artificial
  probe
  misc_feature (1)..(25): SEQ ID NO: 3820; WAN024ATN_at; Start 1443; Stop 1467
taccaactacattttctcggttgta

SEQ ID NO: 66200 - DNA, 25 bp, Artificial
  probe
  misc_feature (1)..(25): SEQ ID NO: 3820; WAN024ATN_at; Start 1450; Stop 1474
tacattttctcggttgtagctatga

SEQ ID NO: 66201 - DNA, 25 bp, Artificial
  probe
  misc_feature (1)..(25): SEQ ID NO: 3820; WAN024ATN_at; Start 1459; Stop 1483
tcggttgtagctatgaaccctgctg

SEQ ID NO: 66202 - DNA, 25 bp, Artificial
  probe
  misc_feature (1)..(25): SEQ ID NO: 3820; WAN024ATN_at; Start 1448; Stop 1472
actacattttctcggttgtagctat

SEQ ID NO: 66203 - DNA, 25 bp, Artificial
  probe
  misc_feature (1)..(25): SEQ ID NO: 3820; WAN024ATN_at; Start 1445; Stop 1469
ccaactacattttctcggttgtagc

SEQ ID NO: 66204 - DNA, 25 bp, Artificial
  probe
  misc_feature (1)..(25): SEQ ID NO: 3820; WAN024ATN_at; Start 1461; Stop 1485
ggttgtagctatgaaccctgctgaa

SEQ ID NO: 66205 - DNA, 25 bp, Artificial
  probe
  misc_feature (1)..(25): SEQ ID NO: 5108; WAN024ATO_at; Start 180; Stop 204
gcgacgcaattcttctgctaaatca

SEQ ID NO: 66206 - DNA, 25 bp, Artificial
  probe
  misc_feature (1)..(25): SEQ ID NO: 5108; WAN024ATO_at; Start 9; Stop 33
cttagcaagggtctcagcagtctcc

SEQ ID NO: 66207 - DNA, 25 bp, Artificial
  probe
  misc_feature (1)..(25): SEQ ID NO: 5108; WAN024ATO_at; Start 55; Stop 79
ggaacctcctctgctttatcagata

SEQ ID NO: 66208 - DNA, 25 bp, Artificial
  probe
  misc_feature (1)..(25): SEQ ID NO: 5108; WAN024ATO_at; Start 24; Stop 48
agcagtctcctttgtccaaccatac

SEQ ID NO: 66209 - DNA, 25 bp, Artificial
  probe
  misc_feature (1)..(25): SEQ ID NO: 5108; WAN024ATO_at; Start 5; Stop 29
gccacttagcaagggtctcagcagt

SEQ ID NO: 66210 - DNA, 25 bp, Artificial
  probe
  misc_feature (1)..(25): SEQ ID NO: 5108; WAN024ATO_at; Start 162; Stop 186
gatgggttgtacaagattgcgacgc

SEQ ID NO: 66211 - DNA, 25 bp, Artificial
  probe
  misc_feature (1)..(25): SEQ ID NO: 5108; WAN024ATO_at; Start 101; Stop 125
gggcaagattcttcccttcttcagc

SEQ ID NO: 66212 - DNA, 25 bp, Artificial
  probe
  misc_feature (1)..(25): SEQ ID NO: 5108; WAN024ATO_at; Start 17; Stop 41
gggtctcagcagtctcctttgtcca

SEQ ID NO: 66213 - DNA, 25 bp, Artificial
  probe
  misc_feature (1)..(25): SEQ ID NO: 5108; WAN024ATO_at; Start 158; Stop 182
caacgatgggttgtacaagattgcg

SEQ ID NO: 66214 - DNA, 25 bp, Artificial
  probe
  misc_feature (1)..(25): SEQ ID NO: 5108; WAN024ATO_at; Start 121; Stop 145
tcagcagaactgtttttaatcttcg

SEQ ID NO: 66215 - DNA, 25 bp, Artificial
  probe
  misc_feature (1)..(25): SEQ ID NO: 5108; WAN024ATO_at; Start 59; Stop 83
cctcctctgctttatcagataagat

SEQ ID NO: 66216 - DNA, 25 bp, Artificial
  probe
  misc_feature (1)..(25): SEQ ID NO: 5108; WAN024ATO_at; Start 1; Stop 25
ttgagccacttagcaagggtctcag

SEQ ID NO: 66217 - DNA, 25 bp, Artificial
  probe
  misc_feature (1)..(25): SEQ ID NO: 5108; WAN024ATO_at; Start 114; Stop 138
cccttcttcagcagaactgttttta

SEQ ID NO: 66218 - DNA, 25 bp, Artificial
  probe
  misc_feature (1)..(25): SEQ ID NO: 5108; WAN024ATO_at; Start 11; Stop 35
tagcaagggtctcagcagtctcctt

SEQ ID NO: 66219 - DNA, 25 bp, Artificial
  probe
  misc_feature (1)..(25): SEQ ID NO: 5108; WAN024ATO_at; Start 52; Stop 76
tctggaacctcctctgctttatcag

SEQ ID NO: 66220 - DNA, 25 bp, Artificial
  probe
  misc_feature (1)..(25): SEQ ID NO: 5108; WAN024ATO_at; Start 137; Stop 161
taatcttcgttcctgttcccacaac

SEQ ID NO: 66221 - DNA, 25 bp, Artificial
  probe
  misc_feature (1)..(25): SEQ ID NO: 5108; WAN024ATO_at; Start 185; Stop 209
gcaattcttctgctaaatcaccagg

SEQ ID NO: 66222 - DNA, 25 bp, Artificial
  probe
  misc_feature (1)..(25): SEQ ID NO: 5108; WAN024ATO_at; Start 203; Stop 227
caccaggtgaaatatccttgacact

SEQ ID NO: 66223 - DNA, 25 bp, Artificial
  probe
  misc_feature (1)..(25): SEQ ID NO: 5108; WAN024ATO_at; Start 148; Stop 172
cctgttcccacaacgatgggttgta

SEQ ID NO: 66224 - DNA, 25 bp, Artificial
  probe
  misc_feature (1)..(25): SEQ ID NO: 5108; WAN024ATO_at; Start 7; Stop 31
cacttagcaagggtctcagcagtct

SEQ ID NO: 66225 - DNA, 25 bp, Artificial
  probe
  misc_feature (1)..(25): SEQ ID NO: 5108; WAN024ATO_at; Start 153; Stop 177
tcccacaacgatgggttgtacaaga

SEQ ID NO: 66226 - DNA, 25 bp, Artificial
  probe
  misc_feature (1)..(25): SEQ ID NO: 5108; WAN024ATO_at; Start 32; Stop 56
cctttgtccaaccatacatatctgg

SEQ ID NO: 66227 - DNA, 25 bp, Artificial
  probe
  misc_feature (1)..(25): SEQ ID NO: 5108; WAN024ATO_at; Start 190; Stop 214
tcttctgctaaatcaccaggtgaaa

SEQ ID NO: 66228 - DNA, 25 bp, Artificial
  probe
  misc_feature (1)..(25): SEQ ID NO: 5108; WAN024ATO_at; Start 78; Stop 102
taagataaggacttgctggttcggg

SEQ ID NO: 66229 - DNA, 25 bp, Artificial
  probe
  misc_feature (1)..(25): SEQ ID NO: 5108; WAN024ATO_at; Start 46; Stop 70
tacatatctggaacctcctctgctt

SEQ ID NO: 66230 - DNA, 25 bp, Artificial
  probe
  misc_feature (1)..(25): SEQ ID NO: 5108; WAN024ATO_at; Start 73; Stop 97
tcagataagataaggacttgctggt

SEQ ID NO: 66231 - DNA, 25 bp, Artificial
  probe
  misc_feature (1)..(25): SEQ ID NO: 5108; WAN024ATO_at; Start 22; Stop 46
tcagcagtctcctttgtccaaccat

SEQ ID NO: 66232 - DNA, 25 bp, Artificial
  probe
  misc_feature (1)..(25): SEQ ID NO: 5108; WAN024ATO_at; Start 165; Stop 189
gggttgtacaagattgcgacgcaat

SEQ ID NO: 66233 - DNA, 25 bp, Artificial
  probe
  misc_feature (1)..(25): SEQ ID NO: 5108; WAN024ATO_at; Start 176; Stop 200
gattgcgacgcaattcttctgctaa

SEQ ID NO: 66234 - DNA, 25 bp, Artificial
  probe
  misc_feature (1)..(25): SEQ ID NO: 5108; WAN024ATO_at; Start 107; Stop 131
gattcttcccttcttcagcagaact

SEQ ID NO: 66235 - DNA, 25 bp, Artificial
  probe
  misc_feature (1)..(25): SEQ ID NO: 5108; WAN024ATO_at; Start 104; Stop 128
caagattcttcccttcttcagcaga

SEQ ID NO: 66236 - DNA, 25 bp, Artificial
  probe
  misc_feature (1)..(25): SEQ ID NO: 5108; WAN024ATO_at; Start 144; Stop 168
cgttcctgttcccacaacgatgggt

SEQ ID NO: 66237 - DNA, 25 bp, Artificial
  probe
  misc_feature (1)..(25): SEQ ID NO: 5108; WAN024ATO_at; Start 36; Stop 60
tgtccaaccatacatatctggaacc

SEQ ID NO: 66238 - DNA, 25 bp, Artificial
  probe
  misc_feature (1)..(25): SEQ ID NO: 5108; WAN024ATO_at; Start 200; Stop 224
aatcaccaggtgaaatatccttgac

SEQ ID NO: 66239 - DNA, 25 bp, Artificial
  probe
  misc_feature (1)..(25): SEQ ID NO: 3638; WAN024ATP_at; Start 1254; Stop 1278
cagctagtctaactcggactaacat

SEQ ID NO: 66240 - DNA, 25 bp, Artificial
  probe
  misc_feature (1)..(25): SEQ ID NO: 3638; WAN024ATP_at; Start 1268; Stop 1292
cggactaacatgattttggtaggga

SEQ ID NO: 66241 - DNA, 25 bp, Artificial
  probe
  misc_feature (1)..(25): SEQ ID NO: 3638; WAN024ATP_at; Start 782; Stop 806
ataacactttcccaggaggagaagt

SEQ ID NO: 66242 - DNA, 25 bp, Artificial
  probe
  misc_feature (1)..(25): SEQ ID NO: 3638; WAN024ATP_at; Start 1255; Stop 1279
agctagtctaactcggactaacatg

SEQ ID NO: 66243 - DNA, 25 bp, Artificial
  probe
  misc_feature (1)..(25): SEQ ID NO: 3638; WAN024ATP_at; Start 1415; Stop 1439
tatctagtcgggttaaccaactata

SEQ ID NO: 66244 - DNA, 25 bp, Artificial
  probe
  misc_feature (1)..(25): SEQ ID NO: 3638; WAN024ATP_at; Start 1237; Stop 1261
tcctgtttctaaagatgcagctagt

SEQ ID NO: 66245 - DNA, 25 bp, Artificial
  probe
  misc_feature (1)..(25): SEQ ID NO: 3638; WAN024ATP_at; Start 1252; Stop 1276
tgcagctagtctaactcggactaac

SEQ ID NO: 66246 - DNA, 25 bp, Artificial
  probe
  misc_feature (1)..(25): SEQ ID NO: 3638; WAN024ATP_at; Start 1239; Stop 1263
ctgtttctaaagatgcagctagtct

SEQ ID NO: 66247 - DNA, 25 bp, Artificial
  probe
  misc_feature (1)..(25): SEQ ID NO: 3638; WAN024ATP_at; Start 1432; Stop 1456
caactatattttctcggctgtatcg

SEQ ID NO: 66248 - DNA, 25 bp, Artificial
  probe
  misc_feature (1)..(25): SEQ ID NO: 3638; WAN024ATP_at; Start 1430; Stop 1454
accaactatattttctcggctgtat

SEQ ID NO: 66249 - DNA, 25 bp, Artificial
  probe
  misc_feature (1)..(25): SEQ ID NO: 3638; WAN024ATP_at; Start 1433; Stop 1457
aactatattttctcggctgtatcga

SEQ ID NO: 66250 - DNA, 25 bp, Artificial
  probe
  misc_feature (1)..(25): SEQ ID NO: 3638; WAN024ATP_at; Start 1427; Stop 1451
ttaaccaactatattttctcggctg

SEQ ID NO: 66251 - DNA, 25 bp, Artificial
  probe
  misc_feature (1)..(25): SEQ ID NO: 3638; WAN024ATP_at; Start 1253; Stop 1277
gcagctagtctaactcggactaaca

SEQ ID NO: 66252 - DNA, 25 bp, Artificial
  probe
  misc_feature (1)..(25): SEQ ID NO: 3638; WAN024ATP_at; Start 1416; Stop 1440
atctagtcgggttaaccaactatat

SEQ ID NO: 66253 - DNA, 25 bp, Artificial
  probe
  misc_feature (1)..(25): SEQ ID NO: 3638; WAN024ATP_at; Start 781; Stop 805
aataacactttcccaggaggagaag

SEQ ID NO: 66254 - DNA, 25 bp, Artificial
  probe
  misc_feature (1)..(25): SEQ ID NO: 3638; WAN024ATP_at; Start 1267; Stop 1291
tcggactaacatgattttggtaggg

SEQ ID NO: 66255 - DNA, 25 bp, Artificial
  probe
  misc_feature (1)..(25): SEQ ID NO: 3638; WAN024ATP_at; Start 1434; Stop 1458
actatattttctcggctgtatcgat

SEQ ID NO: 66256 - DNA, 25 bp, Artificial
  probe
  misc_feature (1)..(25): SEQ ID NO: 3638; WAN024ATP_at; Start 1240; Stop 1264
tgtttctaaagatgcagctagtcta

SEQ ID NO: 66257 - DNA, 25 bp, Artificial
  probe
  misc_feature (1)..(25): SEQ ID NO: 3638; WAN024ATP_at; Start 1428; Stop 1452
taaccaactatattttctcggctgt

SEQ ID NO: 66258 - DNA, 25 bp, Artificial
  probe
  misc_feature (1)..(25): SEQ ID NO: 3638; WAN024ATP_at; Start 1435; Stop 1459
ctatattttctcggctgtatcgatg

SEQ ID NO: 66259 - DNA, 25 bp, Artificial
  probe
  misc_feature (1)..(25): SEQ ID NO: 3638; WAN024ATP_at; Start 1272; Stop 1296
ctaacatgattttggtagggacgga

SEQ ID NO: 66260 - DNA, 25 bp, Artificial
  probe
  misc_feature (1)..(25): SEQ ID NO: 3638; WAN024ATP_at; Start 1271; Stop 1295
actaacatgattttggtagggacgg

SEQ ID NO: 66261 - DNA, 25 bp, Artificial
  probe
  misc_feature (1)..(25): SEQ ID NO: 3638; WAN024ATP_at; Start 1250; Stop 1274
gatgcagctagtctaactcggacta

SEQ ID NO: 66262 - DNA, 25 bp, Artificial
  probe
  misc_feature (1)..(25): SEQ ID NO: 3638; WAN024ATP_at; Start 1273; Stop 1297
taacatgattttggtagggacggat

SEQ ID NO: 66263 - DNA, 25 bp, Artificial
  probe
  misc_feature (1)..(25): SEQ ID NO: 3638; WAN024ATP_at; Start 1251; Stop 1275
atgcagctagtctaactcggactaa

SEQ ID NO: 66264 - DNA, 25 bp, Artificial
  probe
  misc_feature (1)..(25): SEQ ID NO: 3638; WAN024ATP_at; Start 1270; Stop 1294
gactaacatgattttggtagggacg

SEQ ID NO: 66265 - DNA, 25 bp, Artificial
  probe
  misc_feature (1)..(25): SEQ ID NO: 3638; WAN024ATP_at; Start 1429; Stop 1453
aaccaactatattttctcggctgta

SEQ ID NO: 66266 - DNA, 25 bp, Artificial
  probe
  misc_feature (1)..(25): SEQ ID NO: 3638; WAN024ATP_at; Start 1431; Stop 1455
ccaactatattttctcggctgtatc

SEQ ID NO: 66267 - DNA, 25 bp, Artificial
  probe
  misc_feature (1)..(25): SEQ ID NO: 3638; WAN024ATP_at; Start 1269; Stop 1293
ggactaacatgattttggtagggac

SEQ ID NO: 66268 - DNA, 25 bp, Artificial
  probe
  misc_feature (1)..(25): SEQ ID NO: 3638; WAN024ATP_at; Start 1238; Stop 1262
cctgtttctaaagatgcagctagtc

SEQ ID NO: 66269 - DNA, 25 bp, Artificial
  probe
  misc_feature (1)..(25): SEQ ID NO: 6317; WAN024ATR_at; Start 63; Stop 87
tcaaggtggggaaagtaggctacca

SEQ ID NO: 66270 - DNA, 25 bp, Artificial
  probe
  misc_feature (1)..(25): SEQ ID NO: 6317; WAN024ATR_at; Start 50; Stop 74
acttgcaggagattcaaggtgggga

SEQ ID NO: 66271 - DNA, 25 bp, Artificial
  probe
  misc_feature (1)..(25): SEQ ID NO: 6317; WAN024ATR_at; Start 47; Stop 71
aagacttgcaggagattcaaggtgg

SEQ ID NO: 66272 - DNA, 25 bp, Artificial
  probe
  misc_feature (1)..(25): SEQ ID NO: 6317; WAN024ATR_at; Start 78; Stop 102
taggctaccaaaaatcctccttgat

SEQ ID NO: 66273 - DNA, 25 bp, Artificial
  probe
  misc_feature (1)..(25): SEQ ID NO: 6317; WAN024ATR_at; Start 58; Stop 82
gagattcaaggtggggaaagtaggc

SEQ ID NO: 66274 - DNA, 25 bp, Artificial
  probe
  misc_feature (1)..(25): SEQ ID NO: 6317; WAN024ATR_at; Start 53; Stop 77
tgcaggagattcaaggtggggaaag

SEQ ID NO: 66275 - DNA, 25 bp, Artificial
  probe
  misc_feature (1)..(25): SEQ ID NO: 6317; WAN024ATR_at; Start 46; Stop 70
aaagacttgcaggagattcaaggtg

SEQ ID NO: 66276 - DNA, 25 bp, Artificial
  probe
  misc_feature (1)..(25): SEQ ID NO: 6317; WAN024ATR_at; Start 60; Stop 84
gattcaaggtggggaaagtaggcta

SEQ ID NO: 66277 - DNA, 25 bp, Artificial
  probe
  misc_feature (1)..(25): SEQ ID NO: 6317; WAN024ATR_at; Start 79; Stop 103
aggctaccaaaaatcctccttgatt

SEQ ID NO: 66278 - DNA, 25 bp, Artificial
  probe
  misc_feature (1)..(25): SEQ ID NO: 6317; WAN024ATR_at; Start 59; Stop 83
agattcaaggtggggaaagtaggct

SEQ ID NO: 66279 - DNA, 25 bp, Artificial
  probe
  misc_feature (1)..(25): SEQ ID NO: 6317; WAN024ATR_at; Start 55; Stop 79
caggagattcaaggtggggaaagta

SEQ ID NO: 66280 - DNA, 25 bp, Artificial
  probe
  misc_feature (1)..(25): SEQ ID NO: 6317; WAN024ATR_at; Start 52; Stop 76
ttgcaggagattcaaggtggggaaa

SEQ ID NO: 66281 - DNA, 25 bp, Artificial
  probe
  misc_feature (1)..(25): SEQ ID NO: 6317; WAN024ATR_at; Start 76; Stop 100
agtaggctaccaaaaatcctccttg

SEQ ID NO: 66282 - DNA, 25 bp, Artificial
  probe
  misc_feature (1)..(25): SEQ ID NO: 6317; WAN024ATR_at; Start 42; Stop 66
ggaaaaagacttgcaggagattcaa

SEQ ID NO: 66283 - DNA, 25 bp, Artificial
  probe
  misc_feature (1)..(25): SEQ ID NO: 6317; WAN024ATR_at; Start 77; Stop 101
gtaggctaccaaaaatcctccttga

SEQ ID NO: 66284 - DNA, 25 bp, Artificial
  probe
  misc_feature (1)..(25): SEQ ID NO: 6317; WAN024ATR_at; Start 51; Stop 75
cttgcaggagattcaaggtggggaa

SEQ ID NO: 66285 - DNA, 25 bp, Artificial
  probe
  misc_feature (1)..(25): SEQ ID NO: 6317; WAN024ATR_at; Start 54; Stop 78
gcaggagattcaaggtggggaaagt

SEQ ID NO: 66286 - DNA, 25 bp, Artificial
  probe
  misc_feature (1)..(25): SEQ ID NO: 6317; WAN024ATR_at; Start 43; Stop 67
gaaaaagacttgcaggagattcaag

SEQ ID NO: 66287 - DNA, 25 bp, Artificial
  probe
  misc_feature (1)..(25): SEQ ID NO: 6317; WAN024ATR_at; Start 56; Stop 80
aggagattcaaggtggggaaagtag

SEQ ID NO: 66288 - DNA, 25 bp, Artificial
  probe
  misc_feature (1)..(25): SEQ ID NO: 6318; WAN024ATS_at; Start 72; Stop 96
ggaaatgagacttccaaaaatcctc

SEQ ID NO: 66289 - DNA, 25 bp, Artificial
  probe
  misc_feature (1)..(25): SEQ ID NO: 6318; WAN024ATS_at; Start 69; Stop 93
tggggaaatgagacttccaaaaatc

SEQ ID NO: 66290 - DNA, 25 bp, Artificial
  probe
  misc_feature (1)..(25): SEQ ID NO: 6318; WAN024ATS_at; Start 75; Stop 99
aatgagacttccaaaaatcctccgt

SEQ ID NO: 66291 - DNA, 25 bp, Artificial
  probe
  misc_feature (1)..(25): SEQ ID NO: 6318; WAN024ATS_at; Start 79; Stop 103
agacttccaaaaatcctccgtgatt

SEQ ID NO: 66292 - DNA, 25 bp, Artificial
  probe
  misc_feature (1)..(25): SEQ ID NO: 6318; WAN024ATS_at; Start 74; Stop 98
aaatgagacttccaaaaatcctccg

SEQ ID NO: 66293 - DNA, 25 bp, Artificial
  probe
  misc_feature (1)..(25): SEQ ID NO: 6318; WAN024ATS_at; Start 73; Stop 97
gaaatgagacttccaaaaatcctcc

SEQ ID NO: 66294 - DNA, 25 bp, Artificial
  probe
  misc_feature (1)..(25): SEQ ID NO: 6318; WAN024ATS_at; Start 63; Stop 87
taaaggtggggaaatgagacttcca

SEQ ID NO: 66295 - DNA, 25 bp, Artificial
  probe
  misc_feature (1)..(25): SEQ ID NO: 6318; WAN024ATS_at; Start 76; Stop 100
atgagacttccaaaaatcctccgtg

SEQ ID NO: 66296 - DNA, 25 bp, Artificial
  probe
  misc_feature (1)..(25): SEQ ID NO: 6318; WAN024ATS_at; Start 78; Stop 102
gagacttccaaaaatcctccgtgat

SEQ ID NO: 66297 - DNA, 25 bp, Artificial
  probe
  misc_feature (1)..(25): SEQ ID NO: 6318; WAN024ATS_at; Start 77; Stop 101
tgagacttccaaaaatcctccgtga

SEQ ID NO: 66298 - DNA, 25 bp, Artificial
  probe
  misc_feature (1)..(25): SEQ ID NO: 667; WAN024ATT_at; Start 69; Stop 93
tggggagatgaggatttcaagaatc

SEQ ID NO: 66299 - DNA, 25 bp, Artificial
  probe
  misc_feature (1)..(25): SEQ ID NO: 667; WAN024ATT_at; Start 75; Stop 99
gatgaggatttcaagaatcatcctt

SEQ ID NO: 66300 - DNA, 25 bp, Artificial
  probe
  misc_feature (1)..(25): SEQ ID NO: 667; WAN024ATT_at; Start 82; Stop 106
atttcaagaatcatccttgattttc

SEQ ID NO: 66301 - DNA, 25 bp, Artificial
  probe
  misc_feature (1)..(25): SEQ ID NO: 667; WAN024ATT_at; Start 78; Stop 102
gaggatttcaagaatcatccttgat

SEQ ID NO: 66302 - DNA, 25 bp, Artificial
  probe
  misc_feature (1)..(25): SEQ ID NO: 667; WAN024ATT_at; Start 80; Stop 104
ggatttcaagaatcatccttgattt

SEQ ID NO: 66303 - DNA, 25 bp, Artificial
  probe
  misc_feature (1)..(25): SEQ ID NO: 667; WAN024ATT_at; Start 73; Stop 97
gagatgaggatttcaagaatcatcc

SEQ ID NO: 66304 - DNA, 25 bp, Artificial
  probe
  misc_feature (1)..(25): SEQ ID NO: 667; WAN024ATT_at; Start 76; Stop 100
atgaggatttcaagaatcatccttg

SEQ ID NO: 66305 - DNA, 25 bp, Artificial
  probe
  misc_feature (1)..(25): SEQ ID NO: 667; WAN024ATT_at; Start 68; Stop 92
gtggggagatgaggatttcaagaat

SEQ ID NO: 66306 - DNA, 25 bp, Artificial
  probe
  misc_feature (1)..(25): SEQ ID NO: 667; WAN024ATT_at; Start 83; Stop 107
tttcaagaatcatccttgattttct

SEQ ID NO: 66307 - DNA, 25 bp, Artificial
  probe
  misc_feature (1)..(25): SEQ ID NO: 667; WAN024ATT_at; Start 70; Stop 94
ggggagatgaggatttcaagaatca

SEQ ID NO: 66308 - DNA, 25 bp, Artificial
  probe
  misc_feature (1)..(25): SEQ ID NO: 667; WAN024ATT_at; Start 79; Stop 103
aggatttcaagaatcatccttgatt

SEQ ID NO: 66309 - DNA, 25 bp, Artificial
  probe
  misc_feature (1)..(25): SEQ ID NO: 667; WAN024ATT_at; Start 74; Stop 98
agatgaggatttcaagaatcatcct

SEQ ID NO: 66310 - DNA, 25 bp, Artificial
  probe
  misc_feature (1)..(25): SEQ ID NO: 667; WAN024ATT_at; Start 81; Stop 105
gatttcaagaatcatccttgatttt

SEQ ID NO: 66311 - DNA, 25 bp, Artificial
  probe
  misc_feature (1)..(25): SEQ ID NO: 667; WAN024ATT_at; Start 71; Stop 95
gggagatgaggatttcaagaatcat

SEQ ID NO: 66312 - DNA, 25 bp, Artificial
  probe
  misc_feature (1)..(25): SEQ ID NO: 667; WAN024ATT_at; Start 85; Stop 109
tcaagaatcatccttgattttcttt

SEQ ID NO: 66313 - DNA, 25 bp, Artificial
  probe
  misc_feature (1)..(25): SEQ ID NO: 667; WAN024ATT_at; Start 72; Stop 96
ggagatgaggatttcaagaatcatc

SEQ ID NO: 66314 - DNA, 25 bp, Artificial
  probe
  misc_feature (1)..(25): SEQ ID NO: 667; WAN024ATT_at; Start 77; Stop 101
tgaggatttcaagaatcatccttga

SEQ ID NO: 66315 - DNA, 25 bp, Artificial
  probe
  misc_feature (1)..(25): SEQ ID NO: 667; WAN024ATT_at; Start 84; Stop 108
ttcaagaatcatccttgattttctt

SEQ ID NO: 66316 - DNA, 25 bp, Artificial
  probe
  misc_feature (1)..(25): SEQ ID NO: 666; WAN024ATU_s_at; Start 8; Stop 32
acacagttaaattggaacagtttgt

SEQ ID NO: 66317 - DNA, 25 bp, Artificial
  probe
  misc_feature (1)..(25): SEQ ID NO: 666; WAN024ATU_s_at; Start 7; Stop 31
aacacagttaaattggaacagtttg

SEQ ID NO: 66318 - DNA, 25 bp, Artificial
  probe
  misc_feature (1)..(25): SEQ ID NO: 666; WAN024ATU_s_at; Start 9; Stop 33
cacagttaaattggaacagtttgta

SEQ ID NO: 66319 - DNA, 25 bp, Artificial
  probe
  misc_feature (1)..(25): SEQ ID NO: 666; WAN024ATU_s_at; Start 2; Stop 26
tgaaaaacacagttaaattggaaca

SEQ ID NO: 66320 - DNA, 25 bp, Artificial
  probe
  misc_feature (1)..(25): SEQ ID NO: 666; WAN024ATU_s_at; Start 10; Stop 34
acagttaaattggaacagtttgtag

SEQ ID NO: 66321 - DNA, 25 bp, Artificial
  probe
  misc_feature (1)..(25): SEQ ID NO: 6412; WAN024ATV_at; Start 60; Stop 84
ttttgcagatgctcagttagaaaag

SEQ ID NO: 66322 - DNA, 25 bp, Artificial
  probe
  misc_feature (1)..(25): SEQ ID NO: 6412; WAN024ATV_at; Start 61; Stop 85
tttgcagatgctcagttagaaaagg

SEQ ID NO: 66323 - DNA, 25 bp, Artificial
  probe
  misc_feature (1)..(25): SEQ ID NO: 6412; WAN024ATV_at; Start 57; Stop 81
tctttttgcagatgctcagttagaa

SEQ ID NO: 66324 - DNA, 25 bp, Artificial
  probe
  misc_feature (1)..(25): SEQ ID NO: 6412; WAN024ATV_at; Start 56; Stop 80
gtctttttgcagatgctcagttaga

SEQ ID NO: 66325 - DNA, 25 bp, Artificial
  probe
  misc_feature (1)..(25): SEQ ID NO: 6412; WAN024ATV_at; Start 58; Stop 82
ctttttgcagatgctcagttagaaa

SEQ ID NO: 66326 - DNA, 25 bp, Artificial
  probe
  misc_feature (1)..(25): SEQ ID NO: 6412; WAN024ATV_at; Start 51; Stop 75
tgttagtctttttgcagatgctcag

SEQ ID NO: 66327 - DNA, 25 bp, Artificial
  probe
  misc_feature (1)..(25): SEQ ID NO: 6412; WAN024ATV_at; Start 54; Stop 78
tagtctttttgcagatgctcagtta

SEQ ID NO: 66328 - DNA, 25 bp, Artificial
  probe
  misc_feature (1)..(25): SEQ ID NO: 6412; WAN024ATV_at; Start 52; Stop 76
gttagtctttttgcagatgctcagt

SEQ ID NO: 66329 - DNA, 25 bp, Artificial
  probe
  misc_feature (1)..(25): SEQ ID NO: 6412; WAN024ATV_at; Start 129; Stop 153
gccactcaagggtgcgcgtgatggc

SEQ ID NO: 66330 - DNA, 25 bp, Artificial
  probe
  misc_feature (1)..(25): SEQ ID NO: 6412; WAN024ATV_at; Start 59; Stop 83
tttttgcagatgctcagttagaaaa

SEQ ID NO: 66331 - DNA, 25 bp, Artificial
  probe
  misc_feature (1)..(25): SEQ ID NO: 6412; WAN024ATV_at; Start 53; Stop 77
ttagtctttttgcagatgctcagtt

SEQ ID NO: 66332 - DNA, 25 bp, Artificial
  probe
  misc_feature (1)..(25): SEQ ID NO: 6412; WAN024ATV_at; Start 55; Stop 79
agtctttttgcagatgctcagttag

SEQ ID NO: 66333 - DNA, 25 bp, Artificial
  probe
  misc_feature (1)..(25): SEQ ID NO: 6413; WAN024ATW_s_at; Start 174; Stop 198
ctttgaaaatggtgcagcagtaacc

SEQ ID NO: 66334 - DNA, 25 bp, Artificial
  probe
  misc_feature (1)..(25): SEQ ID NO: 6413; WAN024ATW_s_at; Start 171; Stop 195
agcctttgaaaatggtgcagcagta

SEQ ID NO: 66335 - DNA, 25 bp, Artificial
  probe
  misc_feature (1)..(25): SEQ ID NO: 6413; WAN024ATW_s_at; Start 172; Stop 196
gcctttgaaaatggtgcagcagtaa

SEQ ID NO: 66336 - DNA, 25 bp, Artificial
  probe
  misc_feature (1)..(25): SEQ ID NO: 6413; WAN024ATW_s_at; Start 170; Stop 194
gagcctttgaaaatggtgcagcagt

SEQ ID NO: 66337 - DNA, 25 bp, Artificial
  probe
  misc_feature (1)..(25): SEQ ID NO: 6413; WAN024ATW_s_at; Start 173; Stop 197
cctttgaaaatggtgcagcagtaac

SEQ ID NO: 66338 - DNA, 25 bp, Artificial
  probe
  misc_feature (1)..(25): SEQ ID NO: 967; WAN024ATX_x_at; Start 90; Stop 114
gtttgacagtcgattgattgggact

SEQ ID NO: 66339 - DNA, 25 bp, Artificial
  probe
  misc_feature (1)..(25): SEQ ID NO: 967; WAN024ATX_x_at; Start 89; Stop 113
agtttgacagtcgattgattgggac

SEQ ID NO: 66340 - DNA, 25 bp, Artificial
  probe
  misc_feature (1)..(25): SEQ ID NO: 967; WAN024ATX_x_at; Start 82; Stop 106
aaggctgagtttgacagtcgattga

SEQ ID NO: 66341 - DNA, 25 bp, Artificial
  probe
  misc_feature (1)..(25): SEQ ID NO: 967; WAN024ATX_x_at; Start 109; Stop 133
gggactggagatttatttgtgccac

SEQ ID NO: 66342 - DNA, 25 bp, Artificial
  probe
  misc_feature (1)..(25): SEQ ID NO: 967; WAN024ATX_x_at; Start 137; Stop 161
aaggtgcgcgtgacggtcatgactt

SEQ ID NO: 66343 - DNA, 25 bp, Artificial
  probe
  misc_feature (1)..(25): SEQ ID NO: 967; WAN024ATX_x_at; Start 106; Stop 130
attgggactggagatttatttgtgc

SEQ ID NO: 66344 - DNA, 25 bp, Artificial
  probe
  misc_feature (1)..(25): SEQ ID NO: 967; WAN024ATX_x_at; Start 81; Stop 105
aaaggctgagtttgacagtcgattg

SEQ ID NO: 66345 - DNA, 25 bp, Artificial
  probe
  misc_feature (1)..(25): SEQ ID NO: 967; WAN024ATX_x_at; Start 97; Stop 121
agtcgattgattgggactggagatt

SEQ ID NO: 66346 - DNA, 25 bp, Artificial
  probe
  misc_feature (1)..(25): SEQ ID NO: 967; WAN024ATX_x_at; Start 47; Stop 71
atgatgttagtctttttgcggacgc

SEQ ID NO: 66347 - DNA, 25 bp, Artificial
  probe
  misc_feature (1)..(25): SEQ ID NO: 967; WAN024ATX_x_at; Start 138; Stop 162
aggtgcgcgtgacggtcatgacttt

SEQ ID NO: 66348 - DNA, 25 bp, Artificial
  probe
  misc_feature (1)..(25): SEQ ID NO: 967; WAN024ATX_x_at; Start 100; Stop 124
cgattgattgggactggagatttat

SEQ ID NO: 66349 - DNA, 25 bp, Artificial
  probe
  misc_feature (1)..(25): SEQ ID NO: 967; WAN024ATX_x_at; Start 140; Stop 164
gtgcgcgtgacggtcatgactttat

SEQ ID NO: 66350 - DNA, 25 bp, Artificial
  probe
  misc_feature (1)..(25): SEQ ID NO: 967; WAN024ATX_x_at; Start 46; Stop 70
aatgatgttagtctttttgcggacg

SEQ ID NO: 66351 - DNA, 25 bp, Artificial
  probe
  misc_feature (1)..(25): SEQ ID NO: 967; WAN024ATX_x_at; Start 101; Stop 125
gattgattgggactggagatttatt

SEQ ID NO: 66352 - DNA, 25 bp, Artificial
  probe
  misc_feature (1)..(25): SEQ ID NO: 967; WAN024ATX_x_at; Start 136; Stop 160
aaaggtgcgcgtgacggtcatgact

SEQ ID NO: 66353 - DNA, 25 bp, Artificial
  probe
  misc_feature (1)..(25): SEQ ID NO: 967; WAN024ATX_x_at; Start 87; Stop 111
tgagtttgacagtcgattgattggg

SEQ ID NO: 66354 - DNA, 25 bp, Artificial
  probe
  misc_feature (1)..(25): SEQ ID NO: 967; WAN024ATX_x_at; Start 99; Stop 123
tcgattgattgggactggagattta

SEQ ID NO: 66355 - DNA, 25 bp, Artificial
  probe
  misc_feature (1)..(25): SEQ ID NO: 967; WAN024ATX_x_at; Start 110; Stop 134
ggactggagatttatttgtgccact

SEQ ID NO: 66356 - DNA, 25 bp, Artificial
  probe
  misc_feature (1)..(25): SEQ ID NO: 967; WAN024ATX_x_at; Start 78; Stop 102
agaaaaggctgagtttgacagtcga

SEQ ID NO: 66357 - DNA, 25 bp, Artificial
  probe
  misc_feature (1)..(25): SEQ ID NO: 967; WAN024ATX_x_at; Start 105; Stop 129
gattgggactggagatttatttgtg

SEQ ID NO: 66358 - DNA, 25 bp, Artificial
  probe
  misc_feature (1)..(25): SEQ ID NO: 967; WAN024ATX_x_at; Start 84; Stop 108
ggctgagtttgacagtcgattgatt

SEQ ID NO: 66359 - DNA, 25 bp, Artificial
  probe
  misc_feature (1)..(25): SEQ ID NO: 967; WAN024ATX_x_at; Start 96; Stop 120
cagtcgattgattgggactggagat

SEQ ID NO: 66360 - DNA, 25 bp, Artificial
  probe
  misc_feature (1)..(25): SEQ ID NO: 967; WAN024ATX_x_at; Start 95; Stop 119
acagtcgattgattgggactggaga

SEQ ID NO: 66361 - DNA, 25 bp, Artificial
  probe
  misc_feature (1)..(25): SEQ ID NO: 967; WAN024ATX_x_at; Start 93; Stop 117
tgacagtcgattgattgggactgga

SEQ ID NO: 66362 - DNA, 25 bp, Artificial
  probe
  misc_feature (1)..(25): SEQ ID NO: 967; WAN024ATX_x_at; Start 45; Stop 69
aaatgatgttagtctttttgcggac

SEQ ID NO: 66363 - DNA, 25 bp, Artificial
  probe
  misc_feature (1)..(25): SEQ ID NO: 967; WAN024ATX_x_at; Start 107; Stop 131
ttgggactggagatttatttgtgcc

SEQ ID NO: 66364 - DNA, 25 bp, Artificial
  probe
  misc_feature (1)..(25): SEQ ID NO: 967; WAN024ATX_x_at; Start 79; Stop 103
gaaaaggctgagtttgacagtcgat

SEQ ID NO: 66365 - DNA, 25 bp, Artificial
  probe
  misc_feature (1)..(25): SEQ ID NO: 967; WAN024ATX_x_at; Start 83; Stop 107
aggctgagtttgacagtcgattgat

SEQ ID NO: 66366 - DNA, 25 bp, Artificial
  probe
  misc_feature (1)..(25): SEQ ID NO: 967; WAN024ATX_x_at; Start 91; Stop 115
tttgacagtcgattgattgggactg

SEQ ID NO: 66367 - DNA, 25 bp, Artificial
  probe
  misc_feature (1)..(25): SEQ ID NO: 967; WAN024ATX_x_at; Start 108; Stop 132
tgggactggagatttatttgtgcca

SEQ ID NO: 66368 - DNA, 25 bp, Artificial
  probe
  misc_feature (1)..(25): SEQ ID NO: 967; WAN024ATX_x_at; Start 92; Stop 116
ttgacagtcgattgattgggactgg

SEQ ID NO: 66369 - DNA, 25 bp, Artificial
  probe
  misc_feature (1)..(25): SEQ ID NO: 967; WAN024ATX_x_at; Start 102; Stop 126
attgattgggactggagatttattt

SEQ ID NO: 66370 - DNA, 25 bp, Artificial
  probe
  misc_feature (1)..(25): SEQ ID NO: 967; WAN024ATX_x_at; Start 94; Stop 118
gacagtcgattgattgggactggag

SEQ ID NO: 66371 - DNA, 25 bp, Artificial
  probe
  misc_feature (1)..(25): SEQ ID NO: 967; WAN024ATX_x_at; Start 80; Stop 104
aaaaggctgagtttgacagtcgatt

SEQ ID NO: 66372 - DNA, 25 bp, Artificial
  probe
  misc_feature (1)..(25): SEQ ID NO: 977; WAN024ATY_at; Start 109; Stop 133
acgacaggggacttatttgtgcctc

SEQ ID NO: 66373 - DNA, 25 bp, Artificial
  probe
  misc_feature (1)..(25): SEQ ID NO: 977; WAN024ATY_at; Start 52; Stop 76
gtcagtatctttgaggacactcagt

SEQ ID NO: 66374 - DNA, 25 bp, Artificial
  probe
  misc_feature (1)..(25): SEQ ID NO: 977; WAN024ATY_at; Start 103; Stop 127
ttgattacgacaggggacttatttg

SEQ ID NO: 66375 - DNA, 25 bp, Artificial
  probe
  misc_feature (1)..(25): SEQ ID NO: 977; WAN024ATY_at; Start 100; Stop 124
cgtttgattacgacaggggacttat

SEQ ID NO: 66376 - DNA, 25 bp, Artificial
  probe
  misc_feature (1)..(25): SEQ ID NO: 977; WAN024ATY_at; Start 99; Stop 123
tcgtttgattacgacaggggactta

SEQ ID NO: 66377 - DNA, 25 bp, Artificial
  probe
  misc_feature (1)..(25): SEQ ID NO: 977; WAN024ATY_at; Start 106; Stop 130
attacgacaggggacttatttgtgc

SEQ ID NO: 66378 - DNA, 25 bp, Artificial
  probe
  misc_feature (1)..(25): SEQ ID NO: 977; WAN024ATY_at; Start 113; Stop 137
caggggacttatttgtgcctctaaa

SEQ ID NO: 66379 - DNA, 25 bp, Artificial
  probe
  misc_feature (1)..(25): SEQ ID NO: 977; WAN024ATY_at; Start 104; Stop 128
tgattacgacaggggacttatttgt

SEQ ID NO: 66380 - DNA, 25 bp, Artificial
  probe
  misc_feature (1)..(25): SEQ ID NO: 977; WAN024ATY_at; Start 126; Stop 150
tgtgcctctaaaaggtgcgcgtgat

SEQ ID NO: 66381 - DNA, 25 bp, Artificial
  probe
  misc_feature (1)..(25): SEQ ID NO: 977; WAN024ATY_at; Start 48; Stop 72
tgatgtcagtatctttgaggacact

SEQ ID NO: 66382 - DNA, 25 bp, Artificial
  probe
  misc_feature (1)..(25): SEQ ID NO: 977; WAN024ATY_at; Start 111; Stop 135
gacaggggacttatttgtgcctcta

SEQ ID NO: 66383 - DNA, 25 bp, Artificial
  probe
  misc_feature (1)..(25): SEQ ID NO: 977; WAN024ATY_at; Start 50; Stop 74
atgtcagtatctttgaggacactca

SEQ ID NO: 66384 - DNA, 25 bp, Artificial
  probe
  misc_feature (1)..(25): SEQ ID NO: 977; WAN024ATY_at; Start 51; Stop 75
tgtcagtatctttgaggacactcag

SEQ ID NO: 66385 - DNA, 25 bp, Artificial
  probe
  misc_feature (1)..(25): SEQ ID NO: 977; WAN024ATY_at; Start 96; Stop 120
cagtcgtttgattacgacaggggac

SEQ ID NO: 66386 - DNA, 25 bp, Artificial
  probe
  misc_feature (1)..(25): SEQ ID NO: 977; WAN024ATY_at; Start 108; Stop 132
tacgacaggggacttatttgtgcct

SEQ ID NO: 66387 - DNA, 25 bp, Artificial
  probe
  misc_feature (1)..(25): SEQ ID NO: 977; WAN024ATY_at; Start 120; Stop 144
cttatttgtgcctctaaaaggtgcg

SEQ ID NO: 66388 - DNA, 25 bp, Artificial
  probe
  misc_feature (1)..(25): SEQ ID NO: 977; WAN024ATY_at; Start 112; Stop 136
acaggggacttatttgtgcctctaa

SEQ ID NO: 66389 - DNA, 25 bp, Artificial
  probe
  misc_feature (1)..(25): SEQ ID NO: 977; WAN024ATY_at; Start 94; Stop 118
gacagtcgtttgattacgacagggg

SEQ ID NO: 66390 - DNA, 25 bp, Artificial
  probe
  misc_feature (1)..(25): SEQ ID NO: 977; WAN024ATY_at; Start 118; Stop 142
gacttatttgtgcctctaaaaggtg

SEQ ID NO: 66391 - DNA, 25 bp, Artificial
  probe
  misc_feature (1)..(25): SEQ ID NO: 977; WAN024ATY_at; Start 105; Stop 129
gattacgacaggggacttatttgtg

SEQ ID NO: 66392 - DNA, 25 bp, Artificial
  probe
  misc_feature (1)..(25): SEQ ID NO: 977; WAN024ATY_at; Start 97; Stop 121
agtcgtttgattacgacaggggact

SEQ ID NO: 66393 - DNA, 25 bp, Artificial
  probe
  misc_feature (1)..(25): SEQ ID NO: 977; WAN024ATY_at; Start 119; Stop 143
acttatttgtgcctctaaaaggtgc

SEQ ID NO: 66394 - DNA, 25 bp, Artificial
  probe
  misc_feature (1)..(25): SEQ ID NO: 977; WAN024ATY_at; Start 110; Stop 134
cgacaggggacttatttgtgcctct

SEQ ID NO: 66395 - DNA, 25 bp, Artificial
  probe
  misc_feature (1)..(25): SEQ ID NO: 977; WAN024ATY_at; Start 49; Stop 73
gatgtcagtatctttgaggacactc

SEQ ID NO: 66396 - DNA, 25 bp, Artificial
  probe
  misc_feature (1)..(25): SEQ ID NO: 977; WAN024ATY_at; Start 95; Stop 119
acagtcgtttgattacgacagggga

SEQ ID NO: 66397 - DNA, 25 bp, Artificial
  probe
  misc_feature (1)..(25): SEQ ID NO: 977; WAN024ATY_at; Start 107; Stop 131
ttacgacaggggacttatttgtgcc

SEQ ID NO: 66398 - DNA, 25 bp, Artificial
  probe
  misc_feature (1)..(25): SEQ ID NO: 968; WAN024ATZ_x_at; Start 71; Stop 95
cccagttagaaaaggctgagtttga

SEQ ID NO: 66399 - DNA, 25 bp, Artificial
  probe
  misc_feature (1)..(25): SEQ ID NO: 968; WAN024ATZ_x_at; Start 90; Stop 114
gtttgacagtcgattgattgggact

SEQ ID NO: 66400 - DNA, 25 bp, Artificial
  probe
  misc_feature (1)..(25): SEQ ID NO: 968; WAN024ATZ_x_at; Start 89; Stop 113
agtttgacagtcgattgattgggac

SEQ ID NO: 66401 - DNA, 25 bp, Artificial
  probe
  misc_feature (1)..(25): SEQ ID NO: 968; WAN024ATZ_x_at; Start 29; Stop 53
aagctgttggagctaaaaatgatgt

SEQ ID NO: 66402 - DNA, 25 bp, Artificial
  probe
  misc_feature (1)..(25): SEQ ID NO: 968; WAN024ATZ_x_at; Start 32; Stop 56
ctgttggagctaaaaatgatgttag

SEQ ID NO: 66403 - DNA, 25 bp, Artificial
  probe
  misc_feature (1)..(25): SEQ ID NO: 968; WAN024ATZ_x_at; Start 31; Stop 55
gctgttggagctaaaaatgatgtta

SEQ ID NO: 66404 - DNA, 25 bp, Artificial
  probe
  misc_feature (1)..(25): SEQ ID NO: 968; WAN024ATZ_x_at; Start 25; Stop 49
gcccaagctgttggagctaaaaatg

SEQ ID NO: 66405 - DNA, 25 bp, Artificial
  probe
  misc_feature (1)..(25): SEQ ID NO: 968; WAN024ATZ_x_at; Start 26; Stop 50
cccaagctgttggagctaaaaatga

SEQ ID NO: 66406 - DNA, 25 bp, Artificial
  probe
  misc_feature (1)..(25): SEQ ID NO: 968; WAN024ATZ_x_at; Start 100; Stop 124
cgattgattgggactggagatttat

SEQ ID NO: 66407 - DNA, 25 bp, Artificial
  probe
  misc_feature (1)..(25): SEQ ID NO: 968; WAN024ATZ_x_at; Start 101; Stop 125
gattgattgggactggagatttatt

SEQ ID NO: 66408 - DNA, 25 bp, Artificial
  probe
  misc_feature (1)..(25): SEQ ID NO: 968; WAN024ATZ_x_at; Start 154; Stop 178
catgactttatcgaaagagcttttg

SEQ ID NO: 66409 - DNA, 25 bp, Artificial
  probe
  misc_feature (1)..(25): SEQ ID NO: 968; WAN024ATZ_x_at; Start 87; Stop 111
tgagtttgacagtcgattgattggg

SEQ ID NO: 66410 - DNA, 25 bp, Artificial
  probe
  misc_feature (1)..(25): SEQ ID NO: 968; WAN024ATZ_x_at; Start 34; Stop 58
gttggagctaaaaatgatgttagtc

SEQ ID NO: 66411 - DNA, 25 bp, Artificial
  probe
  misc_feature (1)..(25): SEQ ID NO: 968; WAN024ATZ_x_at; Start 42; Stop 66
taaaaatgatgttagtctttttgcg

SEQ ID NO: 66412 - DNA, 25 bp, Artificial
  probe
  misc_feature (1)..(25): SEQ ID NO: 968; WAN024ATZ_x_at; Start 99; Stop 123
tcgattgattgggactggagattta

SEQ ID NO: 66413 - DNA, 25 bp, Artificial
  probe
  misc_feature (1)..(25): SEQ ID NO: 968; WAN024ATZ_x_at; Start 36; Stop 60
tggagctaaaaatgatgttagtctt

SEQ ID NO: 66414 - DNA, 25 bp, Artificial
  probe
  misc_feature (1)..(25): SEQ ID NO: 968; WAN024ATZ_x_at; Start 156; Stop 180
tgactttatcgaaagagcttttgaa

SEQ ID NO: 66415 - DNA, 25 bp, Artificial
  probe
  misc_feature (1)..(25): SEQ ID NO: 968; WAN024ATZ_x_at; Start 33; Stop 57
tgttggagctaaaaatgatgttagt

SEQ ID NO: 66416 - DNA, 25 bp, Artificial
  probe
  misc_feature (1)..(25): SEQ ID NO: 968; WAN024ATZ_x_at; Start 162; Stop 186
tatcgaaagagcttttgaaaatggt

SEQ ID NO: 66417 - DNA, 25 bp, Artificial
  probe
  misc_feature (1)..(25): SEQ ID NO: 968; WAN024ATZ_x_at; Start 72; Stop 96
ccagttagaaaaggctgagtttgac

SEQ ID NO: 66418 - DNA, 25 bp, Artificial
  probe
  misc_feature (1)..(25): SEQ ID NO: 968; WAN024ATZ_x_at; Start 157; Stop 181
gactttatcgaaagagcttttgaaa

SEQ ID NO: 66419 - DNA, 25 bp, Artificial
  probe
  misc_feature (1)..(25): SEQ ID NO: 968; WAN024ATZ_x_at; Start 35; Stop 59
ttggagctaaaaatgatgttagtct

SEQ ID NO: 66420 - DNA, 25 bp, Artificial
  probe
  misc_feature (1)..(25): SEQ ID NO: 968; WAN024ATZ_x_at; Start 96; Stop 120
cagtcgattgattgggactggagat

SEQ ID NO: 66421 - DNA, 25 bp, Artificial
  probe
  misc_feature (1)..(25): SEQ ID NO: 968; WAN024ATZ_x_at; Start 27; Stop 51
ccaagctgttggagctaaaaatgat

SEQ ID NO: 66422 - DNA, 25 bp, Artificial
  probe
  misc_feature (1)..(25): SEQ ID NO: 968; WAN024ATZ_x_at; Start 95; Stop 119
acagtcgattgattgggactggaga

SEQ ID NO: 66423 - DNA, 25 bp, Artificial
  probe
  misc_feature (1)..(25): SEQ ID NO: 968; WAN024ATZ_x_at; Start 93; Stop 117
tgacagtcgattgattgggactgga

SEQ ID NO: 66424 - DNA, 25 bp, Artificial
  probe
  misc_feature (1)..(25): SEQ ID NO: 968; WAN024ATZ_x_at; Start 30; Stop 54
agctgttggagctaaaaatgatgtt

SEQ ID NO: 66425 - DNA, 25 bp, Artificial
  probe
  misc_feature (1)..(25): SEQ ID NO: 968; WAN024ATZ_x_at; Start 164; Stop 188
tcgaaagagcttttgaaaatggtgc

SEQ ID NO: 66426 - DNA, 25 bp, Artificial
  probe
  misc_feature (1)..(25): SEQ ID NO: 968; WAN024ATZ_x_at; Start 43; Stop 67
aaaaatgatgttagtctttttgcgg

SEQ ID NO: 66427 - DNA, 25 bp, Artificial
  probe
  misc_feature (1)..(25): SEQ ID NO: 968; WAN024ATZ_x_at; Start 92; Stop 116
ttgacagtcgattgattgggactgg

SEQ ID NO: 66428 - DNA, 25 bp, Artificial
  probe
  misc_feature (1)..(25): SEQ ID NO: 968; WAN024ATZ_x_at; Start 102; Stop 126
attgattgggactggagatttattt

SEQ ID NO: 66429 - DNA, 25 bp, Artificial
  probe
  misc_feature (1)..(25): SEQ ID NO: 968; WAN024ATZ_x_at; Start 28; Stop 52
caagctgttggagctaaaaatgatg

SEQ ID NO: 66430 - DNA, 25 bp, Artificial
  probe
  misc_feature (1)..(25): SEQ ID NO: 968; WAN024ATZ_x_at; Start 44; Stop 68
aaaatgatgttagtctttttgcgga

SEQ ID NO: 66431 - DNA, 25 bp, Artificial
  probe
  misc_feature (1)..(25): SEQ ID NO: 968; WAN024ATZ_x_at; Start 70; Stop 94
gcccagttagaaaaggctgagtttg

SEQ ID NO: 66432 - DNA, 25 bp, Artificial
  probe
  misc_feature (1)..(25): SEQ ID NO: 3770; WAN024AU3_at; Start 100; Stop 124
gctggcattactaaggttgtgacca

SEQ ID NO: 66433 - DNA, 25 bp, Artificial
  probe
  misc_feature (1)..(25): SEQ ID NO: 3770; WAN024AU3_at; Start 146; Stop 170
cagccatttttacagcggaatcctt

SEQ ID NO: 66434 - DNA, 25 bp, Artificial
  probe
  misc_feature (1)..(25): SEQ ID NO: 3770; WAN024AU3_at; Start 43; Stop 67
gttgactttagcctaatgagagaaa

SEQ ID NO: 66435 - DNA, 25 bp, Artificial
  probe
  misc_feature (1)..(25): SEQ ID NO: 3770; WAN024AU3_at; Start 321; Stop 345
tattgacgattttcttgctaacggc

SEQ ID NO: 66436 - DNA, 25 bp, Artificial
  probe
  misc_feature (1)..(25): SEQ ID NO: 3770; WAN024AU3_at; Start 219; Stop 243
cgaaggaatcttaactgccgaagtt

SEQ ID NO: 66437 - DNA, 25 bp, Artificial
  probe
  misc_feature (1)..(25): SEQ ID NO: 3770; WAN024AU3_at; Start 55; Stop 79
ctaatgagagaaatcggtaaggttt

SEQ ID NO: 66438 - DNA, 25 bp, Artificial
  probe
  misc_feature (1)..(25): SEQ ID NO: 3770; WAN024AU3_at; Start 148; Stop 172
gccatttttacagcggaatccttaa

SEQ ID NO: 66439 - DNA, 25 bp, Artificial
  probe
  misc_feature (1)..(25): SEQ ID NO: 3770; WAN024AU3_at; Start 323; Stop 347
ttgacgattttcttgctaacggcca

SEQ ID NO: 66440 - DNA, 25 bp, Artificial
  probe
  misc_feature (1)..(25): SEQ ID NO: 3770; WAN024AU3_at; Start 103; Stop 127
ggcattactaaggttgtgaccattg

SEQ ID NO: 66441 - DNA, 25 bp, Artificial
  probe
  misc_feature (1)..(25): SEQ ID NO: 3770; WAN024AU3_at; Start 99; Stop 123
tgctggcattactaaggttgtgacc

SEQ ID NO: 66442 - DNA, 25 bp, Artificial
  probe
  misc_feature (1)..(25): SEQ ID NO: 3770; WAN024AU3_at; Start 324; Stop 348
tgacgattttcttgctaacggccaa

SEQ ID NO: 66443 - DNA, 25 bp, Artificial
  probe
  misc_feature (1)..(25): SEQ ID NO: 3770; WAN024AU3_at; Start 51; Stop 75
tagcctaatgagagaaatcggtaag

SEQ ID NO: 66444 - DNA, 25 bp, Artificial
  probe
  misc_feature (1)..(25): SEQ ID NO: 3770; WAN024AU3_at; Start 217; Stop 241
aacgaaggaatcttaactgccgaag

SEQ ID NO: 66445 - DNA, 25 bp, Artificial
  probe
  misc_feature (1)..(25): SEQ ID NO: 3770; WAN024AU3_at; Start 144; Stop 168
cccagccatttttacagcggaatcc

SEQ ID NO: 66446 - DNA, 25 bp, Artificial
  probe
  misc_feature (1)..(25): SEQ ID NO: 3770; WAN024AU3_at; Start 48; Stop 72
ctttagcctaatgagagaaatcggt

SEQ ID NO: 66447 - DNA, 25 bp, Artificial
  probe
  misc_feature (1)..(25): SEQ ID NO: 3770; WAN024AU3_at; Start 40; Stop 64
caagttgactttagcctaatgagag

SEQ ID NO: 66448 - DNA, 25 bp, Artificial
  probe
  misc_feature (1)..(25): SEQ ID NO: 3770; WAN024AU3_at; Start 49; Stop 73
tttagcctaatgagagaaatcggta

SEQ ID NO: 66449 - DNA, 25 bp, Artificial
  probe
  misc_feature (1)..(25): SEQ ID NO: 3770; WAN024AU3_at; Start 108; Stop 132
tactaaggttgtgaccattgaagcg

SEQ ID NO: 66450 - DNA, 25 bp, Artificial
  probe
  misc_feature (1)..(25): SEQ ID NO: 3770; WAN024AU3_at; Start 46; Stop 70
gactttagcctaatgagagaaatcg

SEQ ID NO: 66451 - DNA, 25 bp, Artificial
  probe
  misc_feature (1)..(25): SEQ ID NO: 3770; WAN024AU3_at; Start 96; Stop 120
ttctgctggcattactaaggttgtg

SEQ ID NO: 66452 - DNA, 25 bp, Artificial
  probe
  misc_feature (1)..(25): SEQ ID NO: 3770; WAN024AU3_at; Start 59; Stop 83
tgagagaaatcggtaaggtttttgc

SEQ ID NO: 66453 - DNA, 25 bp, Artificial
  probe
  misc_feature (1)..(25): SEQ ID NO: 3770; WAN024AU3_at; Start 110; Stop 134
ctaaggttgtgaccattgaagcgtc

SEQ ID NO: 66454 - DNA, 25 bp, Artificial
  probe
  misc_feature (1)..(25): SEQ ID NO: 3770; WAN024AU3_at; Start 322; Stop 346
attgacgattttcttgctaacggcc

SEQ ID NO: 66455 - DNA, 25 bp, Artificial
  probe
  misc_feature (1)..(25): SEQ ID NO: 3770; WAN024AU3_at; Start 224; Stop 248
gaatcttaactgccgaagtttactc

SEQ ID NO: 66456 - DNA, 25 bp, Artificial
  probe
  misc_feature (1)..(25): SEQ ID NO: 3770; WAN024AU3_at; Start 105; Stop 129
cattactaaggttgtgaccattgaa

SEQ ID NO: 66457 - DNA, 25 bp, Artificial
  probe
  misc_feature (1)..(25): SEQ ID NO: 3770; WAN024AU3_at; Start 215; Stop 239
tgaacgaaggaatcttaactgccga

SEQ ID NO: 66458 - DNA, 25 bp, Artificial
  probe
  misc_feature (1)..(25): SEQ ID NO: 3770; WAN024AU3_at; Start 145; Stop 169
ccagccatttttacagcggaatcct

SEQ ID NO: 66459 - DNA, 25 bp, Artificial
  probe
  misc_feature (1)..(25): SEQ ID NO: 3770; WAN024AU3_at; Start 111; Stop 135
taaggttgtgaccattgaagcgtca

SEQ ID NO: 66460 - DNA, 25 bp, Artificial
  probe
  misc_feature (1)..(25): SEQ ID NO: 3770; WAN024AU3_at; Start 216; Stop 240
gaacgaaggaatcttaactgccgaa

SEQ ID NO: 66461 - DNA, 25 bp, Artificial
  probe
  misc_feature (1)..(25): SEQ ID NO: 3770; WAN024AU3_at; Start 97; Stop 121
tctgctggcattactaaggttgtga

SEQ ID NO: 66462 - DNA, 25 bp, Artificial
  probe
  misc_feature (1)..(25): SEQ ID NO: 3770; WAN024AU3_at; Start 142; Stop 166
gccccagccatttttacagcggaat

SEQ ID NO: 66463 - DNA, 25 bp, Artificial
  probe
  misc_feature (1)..(25): SEQ ID NO: 3770; WAN024AU3_at; Start 101; Stop 125
ctggcattactaaggttgtgaccat

SEQ ID NO: 66464 - DNA, 25 bp, Artificial
  probe
  misc_feature (1)..(25): SEQ ID NO: 3770; WAN024AU3_at; Start 53; Stop 77
gcctaatgagagaaatcggtaaggt

SEQ ID NO: 66465 - DNA, 25 bp, Artificial
  probe
  misc_feature (1)..(25): SEQ ID NO: 3770; WAN024AU3_at; Start 214; Stop 238
atgaacgaaggaatcttaactgccg

SEQ ID NO: 66466 - DNA, 25 bp, Artificial
  probe
  misc_feature (1)..(25): SEQ ID NO: 3768; WAN024AU4_s_at; Start 52; Stop 76
agcttgatgcgagagattggtaagg

SEQ ID NO: 66467 - DNA, 25 bp, Artificial
  probe
  misc_feature (1)..(25): SEQ ID NO: 3768; WAN024AU4_s_at; Start 51; Stop 75
tagcttgatgcgagagattggtaag

SEQ ID NO: 66468 - DNA, 25 bp, Artificial
  probe
  misc_feature (1)..(25): SEQ ID NO: 3768; WAN024AU4_s_at; Start 55; Stop 79
ttgatgcgagagattggtaaggttt

SEQ ID NO: 66469 - DNA, 25 bp, Artificial
  probe
  misc_feature (1)..(25): SEQ ID NO: 3768; WAN024AU4_s_at; Start 57; Stop 81
gatgcgagagattggtaaggttttt

SEQ ID NO: 66470 - DNA, 25 bp, Artificial
  probe
  misc_feature (1)..(25): SEQ ID NO: 3768; WAN024AU4_s_at; Start 59; Stop 83
tgcgagagattggtaaggtttttgc

SEQ ID NO: 66471 - DNA, 25 bp, Artificial
  probe
  misc_feature (1)..(25): SEQ ID NO: 3768; WAN024AU4_s_at; Start 56; Stop 80
tgatgcgagagattggtaaggtttt

SEQ ID NO: 66472 - DNA, 25 bp, Artificial
  probe
  misc_feature (1)..(25): SEQ ID NO: 3768; WAN024AU4_s_at; Start 50; Stop 74
ttagcttgatgcgagagattggtaa

SEQ ID NO: 66473 - DNA, 25 bp, Artificial
  probe
  misc_feature (1)..(25): SEQ ID NO: 3768; WAN024AU4_s_at; Start 54; Stop 78
cttgatgcgagagattggtaaggtt

SEQ ID NO: 66474 - DNA, 25 bp, Artificial
  probe
  misc_feature (1)..(25): SEQ ID NO: 3768; WAN024AU4_s_at; Start 58; Stop 82
atgcgagagattggtaaggtttttg

SEQ ID NO: 66475 - DNA, 25 bp, Artificial
  probe
  misc_feature (1)..(25): SEQ ID NO: 3768; WAN024AU4_s_at; Start 60; Stop 84
gcgagagattggtaaggtttttgcg

SEQ ID NO: 66476 - DNA, 25 bp, Artificial
  probe
  misc_feature (1)..(25): SEQ ID NO: 3768; WAN024AU4_s_at; Start 53; Stop 77
gcttgatgcgagagattggtaaggt

SEQ ID NO: 66477 - DNA, 25 bp, Artificial
  probe
  misc_feature (1)..(25): SEQ ID NO: 3771; WAN024AU5_x_at; Start 282; Stop 306
cgctggaaaattcctctcaccagag

SEQ ID NO: 66478 - DNA, 25 bp, Artificial
  probe
  misc_feature (1)..(25): SEQ ID NO: 3771; WAN024AU5_x_at; Start 286; Stop 310
ggaaaattcctctcaccagaggaca

SEQ ID NO: 66479 - DNA, 25 bp, Artificial
  probe
  misc_feature (1)..(25): SEQ ID NO: 3771; WAN024AU5_x_at; Start 156; Stop 180
tacagctgaagccttaaacgttccc

SEQ ID NO: 66480 - DNA, 25 bp, Artificial
  probe
  misc_feature (1)..(25): SEQ ID NO: 3771; WAN024AU5_x_at; Start 159; Stop 183
agctgaagccttaaacgttcccatg

SEQ ID NO: 66481 - DNA, 25 bp, Artificial
  probe
  misc_feature (1)..(25): SEQ ID NO: 3771; WAN024AU5_x_at; Start 281; Stop 305
tcgctggaaaattcctctcaccaga

SEQ ID NO: 66482 - DNA, 25 bp, Artificial
  probe
  misc_feature (1)..(25): SEQ ID NO: 3771; WAN024AU5_x_at; Start 162; Stop 186
tgaagccttaaacgttcccatgatt

SEQ ID NO: 66483 - DNA, 25 bp, Artificial
  probe
  misc_feature (1)..(25): SEQ ID NO: 3771; WAN024AU5_x_at; Start 288; Stop 312
aaaattcctctcaccagaggacaag

SEQ ID NO: 66484 - DNA, 25 bp, Artificial
  probe
  misc_feature (1)..(25): SEQ ID NO: 3771; WAN024AU5_x_at; Start 290; Stop 314
aattcctctcaccagaggacaaggt

SEQ ID NO: 66485 - DNA, 25 bp, Artificial
  probe
  misc_feature (1)..(25): SEQ ID NO: 3771; WAN024AU5_x_at; Start 283; Stop 307
gctggaaaattcctctcaccagagg

SEQ ID NO: 66486 - DNA, 25 bp, Artificial
  probe
  misc_feature (1)..(25): SEQ ID NO: 3771; WAN024AU5_x_at; Start 158; Stop 182
cagctgaagccttaaacgttcccat

SEQ ID NO: 66487 - DNA, 25 bp, Artificial
  probe
  misc_feature (1)..(25): SEQ ID NO: 3771; WAN024AU5_x_at; Start 161; Stop 185
ctgaagccttaaacgttcccatgat

SEQ ID NO: 66488 - DNA, 25 bp, Artificial
  probe
  misc_feature (1)..(25): SEQ ID NO: 3771; WAN024AU5_x_at; Start 287; Stop 311
gaaaattcctctcaccagaggacaa

SEQ ID NO: 66489 - DNA, 25 bp, Artificial
  probe
  misc_feature (1)..(25): SEQ ID NO: 3771; WAN024AU5_x_at; Start 157; Stop 181
acagctgaagccttaaacgttccca

SEQ ID NO: 66490 - DNA, 25 bp, Artificial
  probe
  misc_feature (1)..(25): SEQ ID NO: 3771; WAN024AU5_x_at; Start 285; Stop 309
tggaaaattcctctcaccagaggac

SEQ ID NO: 66491 - DNA, 25 bp, Artificial
  probe
  misc_feature (1)..(25): SEQ ID NO: 3771; WAN024AU5_x_at; Start 155; Stop 179
ttacagctgaagccttaaacgttcc

SEQ ID NO: 66492 - DNA, 25 bp, Artificial
  probe
  misc_feature (1)..(25): SEQ ID NO: 3771; WAN024AU5_x_at; Start 284; Stop 308
ctggaaaattcctctcaccagagga

SEQ ID NO: 66493 - DNA, 25 bp, Artificial
  probe
  misc_feature (1)..(25): SEQ ID NO: 3771; WAN024AU5_x_at; Start 289; Stop 313
aaattcctctcaccagaggacaagg

SEQ ID NO: 66494 - DNA, 25 bp, Artificial
  probe
  misc_feature (1)..(25): SEQ ID NO: 3771; WAN024AU5_x_at; Start 160; Stop 184
gctgaagccttaaacgttcccatga

SEQ ID NO: 66495 - DNA, 25 bp, Artificial
  probe
  misc_feature (1)..(25): SEQ ID NO: 980; WAN024AU6_at; Start 15; Stop 39
agagcgcatcctcaaggatgggcat

SEQ ID NO: 66496 - DNA, 25 bp, Artificial
  probe
  misc_feature (1)..(25): SEQ ID NO: 980; WAN024AU6_at; Start 558; Stop 582
cgtatttaaggaggcagatctctaa

SEQ ID NO: 66497 - DNA, 25 bp, Artificial
  probe
  misc_feature (1)..(25): SEQ ID NO: 980; WAN024AU6_at; Start 561; Stop 585
atttaaggaggcagatctctaacta

SEQ ID NO: 66498 - DNA, 25 bp, Artificial
  probe
  misc_feature (1)..(25): SEQ ID NO: 980; WAN024AU6_at; Start 4; Stop 28
aaattattagaagagcgcatcctca

SEQ ID NO: 66499 - DNA, 25 bp, Artificial
  probe
  misc_feature (1)..(25): SEQ ID NO: 980; WAN024AU6_at; Start 8; Stop 32
tattagaagagcgcatcctcaagga

SEQ ID NO: 66500 - DNA, 25 bp, Artificial
  probe
  misc_feature (1)..(25): SEQ ID NO: 980; WAN024AU6_at; Start 560; Stop 584
tatttaaggaggcagatctctaact

SEQ ID NO: 66501 - DNA, 25 bp, Artificial
  probe
  misc_feature (1)..(25): SEQ ID NO: 980; WAN024AU6_at; Start 556; Stop 580
gtcgtatttaaggaggcagatctct

SEQ ID NO: 66502 - DNA, 25 bp, Artificial
  probe
  misc_feature (1)..(25): SEQ ID NO: 980; WAN024AU6_at; Start 9; Stop 33
attagaagagcgcatcctcaaggat

SEQ ID NO: 66503 - DNA, 25 bp, Artificial
  probe
  misc_feature (1)..(25): SEQ ID NO: 980; WAN024AU6_at; Start 13; Stop 37
gaagagcgcatcctcaaggatgggc

SEQ ID NO: 66504 - DNA, 25 bp, Artificial
  probe
  misc_feature (1)..(25): SEQ ID NO: 980; WAN024AU6_at; Start 18; Stop 42
gcgcatcctcaaggatgggcatatc

SEQ ID NO: 66505 - DNA, 25 bp, Artificial
  probe
  misc_feature (1)..(25): SEQ ID NO: 980; WAN024AU6_at; Start 21; Stop 45
catcctcaaggatgggcatatcttg

SEQ ID NO: 66506 - DNA, 25 bp, Artificial
  probe
  misc_feature (1)..(25): SEQ ID NO: 980; WAN024AU6_at; Start 7; Stop 31
ttattagaagagcgcatcctcaagg

SEQ ID NO: 66507 - DNA, 25 bp, Artificial
  probe
  misc_feature (1)..(25): SEQ ID NO: 980; WAN024AU6_at; Start 16; Stop 40
gagcgcatcctcaaggatgggcata

SEQ ID NO: 66508 - DNA, 25 bp, Artificial
  probe
  misc_feature (1)..(25): SEQ ID NO: 980; WAN024AU6_at; Start 20; Stop 44
gcatcctcaaggatgggcatatctt

SEQ ID NO: 66509 - DNA, 25 bp, Artificial
  probe
  misc_feature (1)..(25): SEQ ID NO: 980; WAN024AU6_at; Start 3; Stop 27
gaaattattagaagagcgcatcctc

SEQ ID NO: 66510 - DNA, 25 bp, Artificial
  probe
  misc_feature (1)..(25): SEQ ID NO: 980; WAN024AU6_at; Start 12; Stop 36
agaagagcgcatcctcaaggatggg

SEQ ID NO: 66511 - DNA, 25 bp, Artificial
  probe
  misc_feature (1)..(25): SEQ ID NO: 980; WAN024AU6_at; Start 562; Stop 586
tttaaggaggcagatctctaactaa

SEQ ID NO: 66512 - DNA, 25 bp, Artificial
  probe
  misc_feature (1)..(25): SEQ ID NO: 980; WAN024AU6_at; Start 11; Stop 35
tagaagagcgcatcctcaaggatgg

SEQ ID NO: 66513 - DNA, 25 bp, Artificial
  probe
  misc_feature (1)..(25): SEQ ID NO: 980; WAN024AU6_at; Start 559; Stop 583
gtatttaaggaggcagatctctaac

SEQ ID NO: 66514 - DNA, 25 bp, Artificial
  probe
  misc_feature (1)..(25): SEQ ID NO: 980; WAN024AU6_at; Start 17; Stop 41
agcgcatcctcaaggatgggcatat

SEQ ID NO: 66515 - DNA, 25 bp, Artificial
  probe
  misc_feature (1)..(25): SEQ ID NO: 980; WAN024AU6_at; Start 19; Stop 43
cgcatcctcaaggatgggcatatct

SEQ ID NO: 66516 - DNA, 25 bp, Artificial
  probe
  misc_feature (1)..(25): SEQ ID NO: 980; WAN024AU6_at; Start 10; Stop 34
ttagaagagcgcatcctcaaggatg

SEQ ID NO: 66517 - DNA, 25 bp, Artificial
  probe
  misc_feature (1)..(25): SEQ ID NO: 980; WAN024AU6_at; Start 6; Stop 30
attattagaagagcgcatcctcaag

SEQ ID NO: 66518 - DNA, 25 bp, Artificial
  probe
  misc_feature (1)..(25): SEQ ID NO: 980; WAN024AU6_at; Start 22; Stop 46
atcctcaaggatgggcatatcttgg

SEQ ID NO: 66519 - DNA, 25 bp, Artificial
  probe
  misc_feature (1)..(25): SEQ ID NO: 980; WAN024AU6_at; Start 5; Stop 29
aattattagaagagcgcatcctcaa

SEQ ID NO: 66520 - DNA, 25 bp, Artificial
  probe
  misc_feature (1)..(25): SEQ ID NO: 980; WAN024AU6_at; Start 14; Stop 38
aagagcgcatcctcaaggatgggca

SEQ ID NO: 66521 - DNA, 25 bp, Artificial
  probe
  misc_feature (1)..(25): SEQ ID NO: 980; WAN024AU6_at; Start 563; Stop 587
ttaaggaggcagatctctaactaat

SEQ ID NO: 66522 - DNA, 25 bp, Artificial
  probe
  misc_feature (1)..(25): SEQ ID NO: 980; WAN024AU6_at; Start 557; Stop 581
tcgtatttaaggaggcagatctcta

SEQ ID NO: 66523 - DNA, 25 bp, Artificial
  probe
  misc_feature (1)..(25): SEQ ID NO: 3012; WAN024AU7_at; Start 86; Stop 110
atgtttcaaaactctatctaactaa

SEQ ID NO: 66524 - DNA, 25 bp, Artificial
  probe
  misc_feature (1)..(25): SEQ ID NO: 3012; WAN024AU7_at; Start 84; Stop 108
ggatgtttcaaaactctatctaact

SEQ ID NO: 66525 - DNA, 25 bp, Artificial
  probe
  misc_feature (1)..(25): SEQ ID NO: 3012; WAN024AU7_at; Start 85; Stop 109
gatgtttcaaaactctatctaacta

SEQ ID NO: 66526 - DNA, 25 bp, Artificial
  probe
  misc_feature (1)..(25): SEQ ID NO: 3012; WAN024AU7_at; Start 87; Stop 111
tgtttcaaaactctatctaactaat

SEQ ID NO: 66527 - DNA, 25 bp, Artificial
  probe
  misc_feature (1)..(25): SEQ ID NO: 3011; WAN024AU8_at; Start 86; Stop 110
atgttccaaaactctatcaaaaagt

SEQ ID NO: 66528 - DNA, 25 bp, Artificial
  probe
  misc_feature (1)..(25): SEQ ID NO: 3011; WAN024AU8_at; Start 90; Stop 114
tccaaaactctatcaaaaagtgatg

SEQ ID NO: 66529 - DNA, 25 bp, Artificial
  probe
  misc_feature (1)..(25): SEQ ID NO: 3011; WAN024AU8_at; Start 213; Stop 237
tggctattttttaagatttagcgag

SEQ ID NO: 66530 - DNA, 25 bp, Artificial
  probe
  misc_feature (1)..(25): SEQ ID NO: 3011; WAN024AU8_at; Start 214; Stop 238
ggctattttttaagatttagcgagc

SEQ ID NO: 66531 - DNA, 25 bp, Artificial
  probe
  misc_feature (1)..(25): SEQ ID NO: 3011; WAN024AU8_at; Start 212; Stop 236
atggctattttttaagatttagcga

SEQ ID NO: 66532 - DNA, 25 bp, Artificial
  probe
  misc_feature (1)..(25): SEQ ID NO: 3011; WAN024AU8_at; Start 84; Stop 108
ggatgttccaaaactctatcaaaaa

SEQ ID NO: 66533 - DNA, 25 bp, Artificial
  probe
  misc_feature (1)..(25): SEQ ID NO: 3011; WAN024AU8_at; Start 85; Stop 109
gatgttccaaaactctatcaaaaag

SEQ ID NO: 66534 - DNA, 25 bp, Artificial
  probe
  misc_feature (1)..(25): SEQ ID NO: 3011; WAN024AU8_at; Start 216; Stop 240
ctattttttaagatttagcgagcta

SEQ ID NO: 66535 - DNA, 25 bp, Artificial
  probe
  misc_feature (1)..(25): SEQ ID NO: 3011; WAN024AU8_at; Start 215; Stop 239
gctattttttaagatttagcgagct

SEQ ID NO: 66536 - DNA, 25 bp, Artificial
  probe
  misc_feature (1)..(25): SEQ ID NO: 3011; WAN024AU8_at; Start 89; Stop 113
ttccaaaactctatcaaaaagtgat

SEQ ID NO: 66537 - DNA, 25 bp, Artificial
  probe
  misc_feature (1)..(25): SEQ ID NO: 3011; WAN024AU8_at; Start 87; Stop 111
tgttccaaaactctatcaaaaagtg

SEQ ID NO: 66538 - DNA, 25 bp, Artificial
  probe
  misc_feature (1)..(25): SEQ ID NO: 3011; WAN024AU8_at; Start 88; Stop 112
gttccaaaactctatcaaaaagtga

SEQ ID NO: 66539 - DNA, 25 bp, Artificial
  probe
  misc_feature (1)..(25): SEQ ID NO: 7195; WAN024AU9_at; Start 39; Stop 63
agatactggactaacctttacagag

SEQ ID NO: 66540 - DNA, 25 bp, Artificial
  probe
  misc_feature (1)..(25): SEQ ID NO: 7195; WAN024AU9_at; Start 26; Stop 50
tgattgctcttacagatactggact

SEQ ID NO: 66541 - DNA, 25 bp, Artificial
  probe
  misc_feature (1)..(25): SEQ ID NO: 7195; WAN024AU9_at; Start 44; Stop 68
ctggactaacctttacagaggatcc

SEQ ID NO: 66542 - DNA, 25 bp, Artificial
  probe
  misc_feature (1)..(25): SEQ ID NO: 7195; WAN024AU9_at; Start 45; Stop 69
tggactaacctttacagaggatccg

SEQ ID NO: 66543 - DNA, 25 bp, Artificial
  probe
  misc_feature (1)..(25): SEQ ID NO: 7195; WAN024AU9_at; Start 30; Stop 54
tgctcttacagatactggactaacc

SEQ ID NO: 66544 - DNA, 25 bp, Artificial
  probe
  misc_feature (1)..(25): SEQ ID NO: 7195; WAN024AU9_at; Start 43; Stop 67
actggactaacctttacagaggatc

SEQ ID NO: 66545 - DNA, 25 bp, Artificial
  probe
  misc_feature (1)..(25): SEQ ID NO: 7195; WAN024AU9_at; Start 42; Stop 66
tactggactaacctttacagaggat

SEQ ID NO: 66546 - DNA, 25 bp, Artificial
  probe
  misc_feature (1)..(25): SEQ ID NO: 7195; WAN024AU9_at; Start 41; Stop 65
atactggactaacctttacagagga

SEQ ID NO: 66547 - DNA, 25 bp, Artificial
  probe
  misc_feature (1)..(25): SEQ ID NO: 7195; WAN024AU9_at; Start 37; Stop 61
acagatactggactaacctttacag

SEQ ID NO: 66548 - DNA, 25 bp, Artificial
  probe
  misc_feature (1)..(25): SEQ ID NO: 7195; WAN024AU9_at; Start 27; Stop 51
gattgctcttacagatactggacta

SEQ ID NO: 66549 - DNA, 25 bp, Artificial
  probe
  misc_feature (1)..(25): SEQ ID NO: 7195; WAN024AU9_at; Start 38; Stop 62
cagatactggactaacctttacaga

SEQ ID NO: 66550 - DNA, 25 bp, Artificial
  probe
  misc_feature (1)..(25): SEQ ID NO: 7195; WAN024AU9_at; Start 29; Stop 53
ttgctcttacagatactggactaac

SEQ ID NO: 66551 - DNA, 25 bp, Artificial
  probe
  misc_feature (1)..(25): SEQ ID NO: 7195; WAN024AU9_at; Start 31; Stop 55
gctcttacagatactggactaacct

SEQ ID NO: 66552 - DNA, 25 bp, Artificial
  probe
  misc_feature (1)..(25): SEQ ID NO: 7195; WAN024AU9_at; Start 28; Stop 52
attgctcttacagatactggactaa

SEQ ID NO: 66553 - DNA, 25 bp, Artificial
  probe
  misc_feature (1)..(25): SEQ ID NO: 7195; WAN024AU9_at; Start 32; Stop 56
ctcttacagatactggactaacctt

SEQ ID NO: 66554 - DNA, 25 bp, Artificial
  probe
  misc_feature (1)..(25): SEQ ID NO: 7195; WAN024AU9_at; Start 40; Stop 64
gatactggactaacctttacagagg

SEQ ID NO: 66555 - DNA, 25 bp, Artificial
  probe
  misc_feature (1)..(25): SEQ ID NO: 1150; WAN024AUA_at; Start 176; Stop 200
tgaaaccgacctccgcttatgcgac

SEQ ID NO: 66556 - DNA, 25 bp, Artificial
  probe
  misc_feature (1)..(25): SEQ ID NO: 1150; WAN024AUA_at; Start 264; Stop 288
aggagagaatgattgggctttgcca

SEQ ID NO: 66557 - DNA, 25 bp, Artificial
  probe
  misc_feature (1)..(25): SEQ ID NO: 1150; WAN024AUA_at; Start 286; Stop 310
ccaggtggctttggcgaggtcggtt

SEQ ID NO: 66558 - DNA, 25 bp, Artificial
  probe
  misc_feature (1)..(25): SEQ ID NO: 1150; WAN024AUA_at; Start 262; Stop 286
caaggagagaatgattgggctttgc

SEQ ID NO: 66559 - DNA, 25 bp, Artificial
  probe
  misc_feature (1)..(25): SEQ ID NO: 1150; WAN024AUA_at; Start 219; Stop 243
tgcttggatagttgaggatgaaaaa

SEQ ID NO: 66560 - DNA, 25 bp, Artificial
  probe
  misc_feature (1)..(25): SEQ ID NO: 1150; WAN024AUA_at; Start 300; Stop 324
cgaggtcggttattcaccaactgaa

SEQ ID NO: 66561 - DNA, 25 bp, Artificial
  probe
  misc_feature (1)..(25): SEQ ID NO: 1150; WAN024AUA_at; Start 226; Stop 250
atagttgaggatgaaaaaatttgtc

SEQ ID NO: 66562 - DNA, 25 bp, Artificial
  probe
  misc_feature (1)..(25): SEQ ID NO: 1150; WAN024AUA_at; Start 177; Stop 201
gaaaccgacctccgcttatgcgact

SEQ ID NO: 66563 - DNA, 25 bp, Artificial
  probe
  misc_feature (1)..(25): SEQ ID NO: 1150; WAN024AUA_at; Start 220; Stop 244
gcttggatagttgaggatgaaaaaa

SEQ ID NO: 66564 - DNA, 25 bp, Artificial
  probe
  misc_feature (1)..(25): SEQ ID NO: 1150; WAN024AUA_at; Start 301; Stop 325
gaggtcggttattcaccaactgaaa

SEQ ID NO: 66565 - DNA, 25 bp, Artificial
  probe
  misc_feature (1)..(25): SEQ ID NO: 1150; WAN024AUA_at; Start 183; Stop 207
gacctccgcttatgcgactccttta

SEQ ID NO: 66566 - DNA, 25 bp, Artificial
  probe
  misc_feature (1)..(25): SEQ ID NO: 1150; WAN024AUA_at; Start 227; Stop 251
tagttgaggatgaaaaaatttgtct

SEQ ID NO: 66567 - DNA, 25 bp, Artificial
  probe
  misc_feature (1)..(25): SEQ ID NO: 1150; WAN024AUA_at; Start 225; Stop 249
gatagttgaggatgaaaaaatttgt

SEQ ID NO: 66568 - DNA, 25 bp, Artificial
  probe
  misc_feature (1)..(25): SEQ ID NO: 1150; WAN024AUA_at; Start 174; Stop 198
cttgaaaccgacctccgcttatgcg

SEQ ID NO: 66569 - DNA, 25 bp, Artificial
  probe
  misc_feature (1)..(25): SEQ ID NO: 1150; WAN024AUA_at; Start 173; Stop 197
tcttgaaaccgacctccgcttatgc

SEQ ID NO: 66570 - DNA, 25 bp, Artificial
  probe
  misc_feature (1)..(25): SEQ ID NO: 1150; WAN024AUA_at; Start 228; Stop 252
agttgaggatgaaaaaatttgtctg

SEQ ID NO: 66571 - DNA, 25 bp, Artificial
  probe
  misc_feature (1)..(25): SEQ ID NO: 1150; WAN024AUA_at; Start 297; Stop 321
tggcgaggtcggttattcaccaact

SEQ ID NO: 66572 - DNA, 25 bp, Artificial
  probe
  misc_feature (1)..(25): SEQ ID NO: 1150; WAN024AUA_at; Start 298; Stop 322
ggcgaggtcggttattcaccaactg

SEQ ID NO: 66573 - DNA, 25 bp, Artificial
  probe
  misc_feature (1)..(25): SEQ ID NO: 1150; WAN024AUA_at; Start 260; Stop 284
gacaaggagagaatgattgggcttt

SEQ ID NO: 66574 - DNA, 25 bp, Artificial
  probe
  misc_feature (1)..(25): SEQ ID NO: 1150; WAN024AUA_at; Start 299; Stop 323
gcgaggtcggttattcaccaactga

SEQ ID NO: 66575 - DNA, 25 bp, Artificial
  probe
  misc_feature (1)..(25): SEQ ID NO: 1150; WAN024AUA_at; Start 223; Stop 247
tggatagttgaggatgaaaaaattt

SEQ ID NO: 66576 - DNA, 25 bp, Artificial
  probe
  misc_feature (1)..(25): SEQ ID NO: 1150; WAN024AUA_at; Start 266; Stop 290
gagagaatgattgggctttgccagg

SEQ ID NO: 66577 - DNA, 25 bp, Artificial
  probe
  misc_feature (1)..(25): SEQ ID NO: 1150; WAN024AUA_at; Start 261; Stop 285
acaaggagagaatgattgggctttg

SEQ ID NO: 66578 - DNA, 25 bp, Artificial
  probe
  misc_feature (1)..(25): SEQ ID NO: 1150; WAN024AUA_at; Start 221; Stop 245
cttggatagttgaggatgaaaaaat

SEQ ID NO: 66579 - DNA, 25 bp, Artificial
  probe
  misc_feature (1)..(25): SEQ ID NO: 1150; WAN024AUA_at; Start 168; Stop 192
agaactcttgaaaccgacctccgct

SEQ ID NO: 66580 - DNA, 25 bp, Artificial
  probe
  misc_feature (1)..(25): SEQ ID NO: 1150; WAN024AUA_at; Start 175; Stop 199
ttgaaaccgacctccgcttatgcga

SEQ ID NO: 66581 - DNA, 25 bp, Artificial
  probe
  misc_feature (1)..(25): SEQ ID NO: 1150; WAN024AUA_at; Start 294; Stop 318
ctttggcgaggtcggttattcacca

SEQ ID NO: 66582 - DNA, 25 bp, Artificial
  probe
  misc_feature (1)..(25): SEQ ID NO: 1150; WAN024AUA_at; Start 172; Stop 196
ctcttgaaaccgacctccgcttatg

SEQ ID NO: 66583 - DNA, 25 bp, Artificial
  probe
  misc_feature (1)..(25): SEQ ID NO: 1150; WAN024AUA_at; Start 186; Stop 210
ctccgcttatgcgactcctttaatg

SEQ ID NO: 66584 - DNA, 25 bp, Artificial
  probe
  misc_feature (1)..(25): SEQ ID NO: 1150; WAN024AUA_at; Start 166; Stop 190
gcagaactcttgaaaccgacctccg

SEQ ID NO: 66585 - DNA, 25 bp, Artificial
  probe
  misc_feature (1)..(25): SEQ ID NO: 1150; WAN024AUA_at; Start 293; Stop 317
gctttggcgaggtcggttattcacc

SEQ ID NO: 66586 - DNA, 25 bp, Artificial
  probe
  misc_feature (1)..(25): SEQ ID NO: 1150; WAN024AUA_at; Start 292; Stop 316
ggctttggcgaggtcggttattcac

SEQ ID NO: 66587 - DNA, 25 bp, Artificial
  probe
  misc_feature (1)..(25): SEQ ID NO: 1150; WAN024AUA_at; Start 291; Stop 315
tggctttggcgaggtcggttattca

SEQ ID NO: 66588 - DNA, 25 bp, Artificial
  probe
  misc_feature (1)..(25): SEQ ID NO: 1150; WAN024AUA_at; Start 296; Stop 320
ttggcgaggtcggttattcaccaac

SEQ ID NO: 66589 - DNA, 25 bp, Artificial
  probe
  misc_feature (1)..(25): SEQ ID NO: 828; WAN024AUB_at; Start 511; Stop 535
attgatcaactgccagtcttatctg

SEQ ID NO: 66590 - DNA, 25 bp, Artificial
  probe
  misc_feature (1)..(25): SEQ ID NO: 828; WAN024AUB_at; Start 144; Stop 168
agacctggatgcagaagaagtagca

SEQ ID NO: 66591 - DNA, 25 bp, Artificial
  probe
  misc_feature (1)..(25): SEQ ID NO: 828; WAN024AUB_at; Start 138; Stop 162
gggatcagacctggatgcagaagaa

SEQ ID NO: 66592 - DNA, 25 bp, Artificial
  probe
  misc_feature (1)..(25): SEQ ID NO: 828; WAN024AUB_at; Start 137; Stop 161
agggatcagacctggatgcagaaga

SEQ ID NO: 66593 - DNA, 25 bp, Artificial
  probe
  misc_feature (1)..(25): SEQ ID NO: 828; WAN024AUB_at; Start 518; Stop 542
aactgccagtcttatctgaaaaacg

SEQ ID NO: 66594 - DNA, 25 bp, Artificial
  probe
  misc_feature (1)..(25): SEQ ID NO: 828; WAN024AUB_at; Start 136; Stop 160
cagggatcagacctggatgcagaag

SEQ ID NO: 66595 - DNA, 25 bp, Artificial
  probe
  misc_feature (1)..(25): SEQ ID NO: 828; WAN024AUB_at; Start 512; Stop 536
ttgatcaactgccagtcttatctga

SEQ ID NO: 66596 - DNA, 25 bp, Artificial
  probe
  misc_feature (1)..(25): SEQ ID NO: 828; WAN024AUB_at; Start 149; Stop 173
tggatgcagaagaagtagcagaagt

SEQ ID NO: 66597 - DNA, 25 bp, Artificial
  probe
  misc_feature (1)..(25): SEQ ID NO: 828; WAN024AUB_at; Start 6; Stop 30
accaagtgattttgttaagtatctg

SEQ ID NO: 66598 - DNA, 25 bp, Artificial
  probe
  misc_feature (1)..(25): SEQ ID NO: 828; WAN024AUB_at; Start 146; Stop 170
acctggatgcagaagaagtagcaga

SEQ ID NO: 66599 - DNA, 25 bp, Artificial
  probe
  misc_feature (1)..(25): SEQ ID NO: 828; WAN024AUB_at; Start 152; Stop 176
atgcagaagaagtagcagaagtctt

SEQ ID NO: 66600 - DNA, 25 bp, Artificial
  probe
  misc_feature (1)..(25): SEQ ID NO: 828; WAN024AUB_at; Start 148; Stop 172
ctggatgcagaagaagtagcagaag

SEQ ID NO: 66601 - DNA, 25 bp, Artificial
  probe
  misc_feature (1)..(25): SEQ ID NO: 828; WAN024AUB_at; Start 2; Stop 26
tgaaaccaagtgattttgttaagta

SEQ ID NO: 66602 - DNA, 25 bp, Artificial
  probe
  misc_feature (1)..(25): SEQ ID NO: 828; WAN024AUB_at; Start 139; Stop 163
ggatcagacctggatgcagaagaag

SEQ ID NO: 66603 - DNA, 25 bp, Artificial
  probe
  misc_feature (1)..(25): SEQ ID NO: 828; WAN024AUB_at; Start 514; Stop 538
gatcaactgccagtcttatctgaaa

SEQ ID NO: 66604 - DNA, 25 bp, Artificial
  probe
  misc_feature (1)..(25): SEQ ID NO: 828; WAN024AUB_at; Start 147; Stop 171
cctggatgcagaagaagtagcagaa

SEQ ID NO: 66605 - DNA, 25 bp, Artificial
  probe
  misc_feature (1)..(25): SEQ ID NO: 828; WAN024AUB_at; Start 509; Stop 533
ccattgatcaactgccagtcttatc

SEQ ID NO: 66606 - DNA, 25 bp, Artificial
  probe
  misc_feature (1)..(25): SEQ ID NO: 828; WAN024AUB_at; Start 505; Stop 529
tttgccattgatcaactgccagtct

SEQ ID NO: 66607 - DNA, 25 bp, Artificial
  probe
  misc_feature (1)..(25): SEQ ID NO: 828; WAN024AUB_at; Start 513; Stop 537
tgatcaactgccagtcttatctgaa

SEQ ID NO: 66608 - DNA, 25 bp, Artificial
  probe
  misc_feature (1)..(25): SEQ ID NO: 828; WAN024AUB_at; Start 150; Stop 174
ggatgcagaagaagtagcagaagtc

SEQ ID NO: 66609 - DNA, 25 bp, Artificial
  probe
  misc_feature (1)..(25): SEQ ID NO: 828; WAN024AUB_at; Start 508; Stop 532
gccattgatcaactgccagtcttat

SEQ ID NO: 66610 - DNA, 25 bp, Artificial
  probe
  misc_feature (1)..(25): SEQ ID NO: 828; WAN024AUB_at; Start 510; Stop 534
cattgatcaactgccagtcttatct

SEQ ID NO: 66611 - DNA, 25 bp, Artificial
  probe
  misc_feature (1)..(25): SEQ ID NO: 828; WAN024AUB_at; Start 143; Stop 167
cagacctggatgcagaagaagtagc

SEQ ID NO: 66612 - DNA, 25 bp, Artificial
  probe
  misc_feature (1)..(25): SEQ ID NO: 828; WAN024AUB_at; Start 7; Stop 31
ccaagtgattttgttaagtatctgc

SEQ ID NO: 66613 - DNA, 25 bp, Artificial
  probe
  misc_feature (1)..(25): SEQ ID NO: 828; WAN024AUB_at; Start 142; Stop 166
tcagacctggatgcagaagaagtag

SEQ ID NO: 66614 - DNA, 25 bp, Artificial
  probe
  misc_feature (1)..(25): SEQ ID NO: 828; WAN024AUB_at; Start 145; Stop 169
gacctggatgcagaagaagtagcag

SEQ ID NO: 66615 - DNA, 25 bp, Artificial
  probe
  misc_feature (1)..(25): SEQ ID NO: 828; WAN024AUB_at; Start 5; Stop 29
aaccaagtgattttgttaagtatct

SEQ ID NO: 66616 - DNA, 25 bp, Artificial
  probe
  misc_feature (1)..(25): SEQ ID NO: 828; WAN024AUB_at; Start 151; Stop 175
gatgcagaagaagtagcagaagtct

SEQ ID NO: 66617 - DNA, 25 bp, Artificial
  probe
  misc_feature (1)..(25): SEQ ID NO: 828; WAN024AUB_at; Start 140; Stop 164
gatcagacctggatgcagaagaagt

SEQ ID NO: 66618 - DNA, 25 bp, Artificial
  probe
  misc_feature (1)..(25): SEQ ID NO: 828; WAN024AUB_at; Start 141; Stop 165
atcagacctggatgcagaagaagta

SEQ ID NO: 66619 - DNA, 25 bp, Artificial
  probe
  misc_feature (1)..(25): SEQ ID NO: 828; WAN024AUB_at; Start 1; Stop 25
atgaaaccaagtgattttgttaagt

SEQ ID NO: 66620 - DNA, 25 bp, Artificial
  probe
  misc_feature (1)..(25): SEQ ID NO: 828; WAN024AUB_at; Start 506; Stop 530
ttgccattgatcaactgccagtctt

SEQ ID NO: 66621 - DNA, 25 bp, Artificial
  probe
  misc_feature (1)..(25): SEQ ID NO: 828; WAN024AUB_at; Start 507; Stop 531
tgccattgatcaactgccagtctta

SEQ ID NO: 66622 - DNA, 25 bp, Artificial
  probe
  misc_feature (1)..(25): SEQ ID NO: 828; WAN024AUB_at; Start 135; Stop 159
tcagggatcagacctggatgcagaa

SEQ ID NO: 66623 - DNA, 25 bp, Artificial
  probe
  misc_feature (1)..(25): SEQ ID NO: 1083; WAN024AUC_at; Start 4; Stop 28
aagacaagtgattttgtcaagtatt

SEQ ID NO: 66624 - DNA, 25 bp, Artificial
  probe
  misc_feature (1)..(25): SEQ ID NO: 1083; WAN024AUC_at; Start 7; Stop 31
acaagtgattttgtcaagtatttgc

SEQ ID NO: 66625 - DNA, 25 bp, Artificial
  probe
  misc_feature (1)..(25): SEQ ID NO: 1083; WAN024AUC_at; Start 1; Stop 25
atgaagacaagtgattttgtcaagt

SEQ ID NO: 66626 - DNA, 25 bp, Artificial
  probe
  misc_feature (1)..(25): SEQ ID NO: 1083; WAN024AUC_at; Start 3; Stop 27
gaagacaagtgattttgtcaagtat

SEQ ID NO: 66627 - DNA, 25 bp, Artificial
  probe
  misc_feature (1)..(25): SEQ ID NO: 1083; WAN024AUC_at; Start 6; Stop 30
gacaagtgattttgtcaagtatttg

SEQ ID NO: 66628 - DNA, 25 bp, Artificial
  probe
  misc_feature (1)..(25): SEQ ID NO: 1083; WAN024AUC_at; Start 5; Stop 29
agacaagtgattttgtcaagtattt

SEQ ID NO: 66629 - DNA, 25 bp, Artificial
  probe
  misc_feature (1)..(25): SEQ ID NO: 1083; WAN024AUC_at; Start 2; Stop 26
tgaagacaagtgattttgtcaagta

SEQ ID NO: 66630 - DNA, 25 bp, Artificial
  probe
  misc_feature (1)..(25): SEQ ID NO: 6316; WAN024AUD_at; Start 228; Stop 252
taagaaaacttctcaagctgatttg

SEQ ID NO: 66631 - DNA, 25 bp, Artificial
  probe
  misc_feature (1)..(25): SEQ ID NO: 6316; WAN024AUD_at; Start 480; Stop 504
taaagaccctagcaacaaggaattc

SEQ ID NO: 66632 - DNA, 25 bp, Artificial
  probe
  misc_feature (1)..(25): SEQ ID NO: 6316; WAN024AUD_at; Start 570; Stop 594
atttaacaacatccctgctgagaaa

SEQ ID NO: 66633 - DNA, 25 bp, Artificial
  probe
  misc_feature (1)..(25): SEQ ID NO: 6316; WAN024AUD_at; Start 576; Stop 600
caacatccctgctgagaaaaaactc

SEQ ID NO: 66634 - DNA, 25 bp, Artificial
  probe
  misc_feature (1)..(25): SEQ ID NO: 6316; WAN024AUD_at; Start 486; Stop 510
ccctagcaacaaggaattctacgaa

SEQ ID NO: 66635 - DNA, 25 bp, Artificial
  probe
  misc_feature (1)..(25): SEQ ID NO: 6316; WAN024AUD_at; Start 471; Stop 495
attgagcgctaaagaccctagcaac

SEQ ID NO: 66636 - DNA, 25 bp, Artificial
  probe
  misc_feature (1)..(25): SEQ ID NO: 6316; WAN024AUD_at; Start 478; Stop 502
gctaaagaccctagcaacaaggaat

SEQ ID NO: 66637 - DNA, 25 bp, Artificial
  probe
  misc_feature (1)..(25): SEQ ID NO: 6316; WAN024AUD_at; Start 171; Stop 195
cagtatcgttcctgttggtcaagac

SEQ ID NO: 66638 - DNA, 25 bp, Artificial
  probe
  misc_feature (1)..(25): SEQ ID NO: 6316; WAN024AUD_at; Start 242; Stop 266
aagctgatttgattttctacaacgg

SEQ ID NO: 66639 - DNA, 25 bp, Artificial
  probe
  misc_feature (1)..(25): SEQ ID NO: 6316; WAN024AUD_at; Start 590; Stop 614
agaaaaaactcatcgtaaccagcga

SEQ ID NO: 66640 - DNA, 25 bp, Artificial
  probe
  misc_feature (1)..(25): SEQ ID NO: 6316; WAN024AUD_at; Start 549; Stop 573
tgacaaggaagctaaagagaaattt

SEQ ID NO: 66641 - DNA, 25 bp, Artificial
  probe
  misc_feature (1)..(25): SEQ ID NO: 6316; WAN024AUD_at; Start 543; Stop 567
caaacttgacaaggaagctaaagag

SEQ ID NO: 66642 - DNA, 25 bp, Artificial
  probe
  misc_feature (1)..(25): SEQ ID NO: 6316; WAN024AUD_at; Start 585; Stop 609
tgctgagaaaaaactcatcgtaacc

SEQ ID NO: 66643 - DNA, 25 bp, Artificial
  probe
  misc_feature (1)..(25): SEQ ID NO: 6316; WAN024AUD_at; Start 612; Stop 636
cgaaggatgcttcaaatacttctct

SEQ ID NO: 66644 - DNA, 25 bp, Artificial
  probe
  misc_feature (1)..(25): SEQ ID NO: 6316; WAN024AUD_at; Start 489; Stop 513
tagcaacaaggaattctacgaaaaa

SEQ ID NO: 66645 - DNA, 25 bp, Artificial
  probe
  misc_feature (1)..(25): SEQ ID NO: 6316; WAN024AUD_at; Start 38; Stop 62
ccgtcattgctcttgtagcgtgtgc

SEQ ID NO: 66646 - DNA, 25 bp, Artificial
  probe
  misc_feature (1)..(25): SEQ ID NO: 6316; WAN024AUD_at; Start 42; Stop 66
cattgctcttgtagcgtgtgctagc

SEQ ID NO: 66647 - DNA, 25 bp, Artificial
  probe
  misc_feature (1)..(25): SEQ ID NO: 6316; WAN024AUD_at; Start 547; Stop 571
cttgacaaggaagctaaagagaaat

SEQ ID NO: 66648 - DNA, 25 bp, Artificial
  probe
  misc_feature (1)..(25): SEQ ID NO: 6316; WAN024AUD_at; Start 581; Stop 605
tccctgctgagaaaaaactcatcgt

SEQ ID NO: 66649 - DNA, 25 bp, Artificial
  probe
  misc_feature (1)..(25): SEQ ID NO: 6316; WAN024AUD_at; Start 484; Stop 508
gaccctagcaacaaggaattctacg

SEQ ID NO: 66650 - DNA, 25 bp, Artificial
  probe
  misc_feature (1)..(25): SEQ ID NO: 6316; WAN024AUD_at; Start 169; Stop 193
cacagtatcgttcctgttggtcaag

SEQ ID NO: 66651 - DNA, 25 bp, Artificial
  probe
  misc_feature (1)..(25): SEQ ID NO: 6316; WAN024AUD_at; Start 163; Stop 187
gatcttcacagtatcgttcctgttg

SEQ ID NO: 66652 - DNA, 25 bp, Artificial
  probe
  misc_feature (1)..(25): SEQ ID NO: 6316; WAN024AUD_at; Start 174; Stop 198
tatcgttcctgttggtcaagaccca

SEQ ID NO: 66653 - DNA, 25 bp, Artificial
  probe
  misc_feature (1)..(25): SEQ ID NO: 6316; WAN024AUD_at; Start 474; Stop 498
gagcgctaaagaccctagcaacaag

SEQ ID NO: 66654 - DNA, 25 bp, Artificial
  probe
  misc_feature (1)..(25): SEQ ID NO: 6316; WAN024AUD_at; Start 178; Stop 202
gttcctgttggtcaagacccacacg

SEQ ID NO: 66655 - DNA, 25 bp, Artificial
  probe
  misc_feature (1)..(25): SEQ ID NO: 6316; WAN024AUD_at; Start 537; Stop 561
gctagacaaacttgacaaggaagct

SEQ ID NO: 66656 - DNA, 25 bp, Artificial
  probe
  misc_feature (1)..(25): SEQ ID NO: 6316; WAN024AUD_at; Start 563; Stop 587
aagagaaatttaacaacatccctgc

SEQ ID NO: 66657 - DNA, 25 bp, Artificial
  probe
  misc_feature (1)..(25): SEQ ID NO: 6316; WAN024AUD_at; Start 159; Stop 183
gattgatcttcacagtatcgttcct

SEQ ID NO: 66658 - DNA, 25 bp, Artificial
  probe
  misc_feature (1)..(25): SEQ ID NO: 6316; WAN024AUD_at; Start 180; Stop 204
tcctgttggtcaagacccacacgaa

SEQ ID NO: 66659 - DNA, 25 bp, Artificial
  probe
  misc_feature (1)..(25): SEQ ID NO: 6316; WAN024AUD_at; Start 532; Stop 556
gataagctagacaaacttgacaagg

SEQ ID NO: 66660 - DNA, 25 bp, Artificial
  probe
  misc_feature (1)..(25): SEQ ID NO: 6316; WAN024AUD_at; Start 534; Stop 558
taagctagacaaacttgacaaggaa

SEQ ID NO: 66661 - DNA, 25 bp, Artificial
  probe
  misc_feature (1)..(25): SEQ ID NO: 6316; WAN024AUD_at; Start 33; Stop 57
tctttccgtcattgctcttgtagcg

SEQ ID NO: 66662 - DNA, 25 bp, Artificial
  probe
  misc_feature (1)..(25): SEQ ID NO: 6316; WAN024AUD_at; Start 589; Stop 613
gagaaaaaactcatcgtaaccagcg

SEQ ID NO: 66663 - DNA, 25 bp, Artificial
  probe
  misc_feature (1)..(25): SEQ ID NO: 6316; WAN024AUD_at; Start 573; Stop 597
taacaacatccctgctgagaaaaaa

SEQ ID NO: 66664 - DNA, 25 bp, Artificial
  probe
  misc_feature (1)..(25): SEQ ID NO: 659; WAN024AUE_s_at; Start 533; Stop 557
ataagttagacaaacttgataaaga

SEQ ID NO: 66665 - DNA, 25 bp, Artificial
  probe
  misc_feature (1)..(25): SEQ ID NO: 659; WAN024AUE_s_at; Start 608; Stop 632
ccagcgaaggagcattcaaatactt

SEQ ID NO: 66666 - DNA, 25 bp, Artificial
  probe
  misc_feature (1)..(25): SEQ ID NO: 659; WAN024AUE_s_at; Start 540; Stop 564
agacaaacttgataaagaaagtaag

SEQ ID NO: 66667 - DNA, 25 bp, Artificial
  probe
  misc_feature (1)..(25): SEQ ID NO: 659; WAN024AUE_s_at; Start 543; Stop 567
caaacttgataaagaaagtaaggat

SEQ ID NO: 66668 - DNA, 25 bp, Artificial
  probe
  misc_feature (1)..(25): SEQ ID NO: 659; WAN024AUE_s_at; Start 612; Stop 636
cgaaggagcattcaaatacttctct

SEQ ID NO: 66669 - DNA, 25 bp, Artificial
  probe
  misc_feature (1)..(25): SEQ ID NO: 659; WAN024AUE_s_at; Start 547; Stop 571
cttgataaagaaagtaaggataaat

SEQ ID NO: 66670 - DNA, 25 bp, Artificial
  probe
  misc_feature (1)..(25): SEQ ID NO: 659; WAN024AUE_s_at; Start 538; Stop 562
ttagacaaacttgataaagaaagta

SEQ ID NO: 66671 - DNA, 25 bp, Artificial
  probe
  misc_feature (1)..(25): SEQ ID NO: 659; WAN024AUE_s_at; Start 534; Stop 558
taagttagacaaacttgataaagaa

SEQ ID NO: 66672 - DNA, 25 bp, Artificial
  probe
  misc_feature (1)..(25): SEQ ID NO: 659; WAN024AUE_s_at; Start 604; Stop 628
gtaaccagcgaaggagcattcaaat

SEQ ID NO: 66673 - DNA, 25 bp, Artificial
  probe
  misc_feature (1)..(25): SEQ ID NO: 659; WAN024AUE_s_at; Start 532; Stop 556
gataagttagacaaacttgataaag

SEQ ID NO: 66674 - DNA, 25 bp, Artificial
  probe
  misc_feature (1)..(25): SEQ ID NO: 659; WAN024AUE_s_at; Start 536; Stop 560
agttagacaaacttgataaagaaag

SEQ ID NO: 66675 - DNA, 25 bp, Artificial
  probe
  misc_feature (1)..(25): SEQ ID NO: 659; WAN024AUE_s_at; Start 539; Stop 563
tagacaaacttgataaagaaagtaa

SEQ ID NO: 66676 - DNA, 25 bp, Artificial
  probe
  misc_feature (1)..(25): SEQ ID NO: 658; WAN024AUF_at; Start 31; Stop 55
tttctttctgcaatcattcttgtag

SEQ ID NO: 66677 - DNA, 25 bp, Artificial
  probe
  misc_feature (1)..(25): SEQ ID NO: 658; WAN024AUF_at; Start 149; Stop 173
ctggtgacaaaattgaccttcatag

SEQ ID NO: 66678 - DNA, 25 bp, Artificial
  probe
  misc_feature (1)..(25): SEQ ID NO: 658; WAN024AUF_at; Start 153; Stop 177
tgacaaaattgaccttcatagtatc

SEQ ID NO: 66679 - DNA, 25 bp, Artificial
  probe
  misc_feature (1)..(25): SEQ ID NO: 658; WAN024AUF_at; Start 471; Stop 495
attgagcgccaaagaccctaacaat

SEQ ID NO: 66680 - DNA, 25 bp, Artificial
  probe
  misc_feature (1)..(25): SEQ ID NO: 658; WAN024AUF_at; Start 25; Stop 49
gttctctttctttctgcaatcattc

SEQ ID NO: 66681 - DNA, 25 bp, Artificial
  probe
  misc_feature (1)..(25): SEQ ID NO: 658; WAN024AUF_at; Start 34; Stop 58
ctttctgcaatcattcttgtagcat

SEQ ID NO: 66682 - DNA, 25 bp, Artificial
  probe
  misc_feature (1)..(25): SEQ ID NO: 658; WAN024AUF_at; Start 159; Stop 183
aattgaccttcatagtatcgttccg

SEQ ID NO: 66683 - DNA, 25 bp, Artificial
  probe
  misc_feature (1)..(25): SEQ ID NO: 658; WAN024AUF_at; Start 150; Stop 174
tggtgacaaaattgaccttcatagt

SEQ ID NO: 66684 - DNA, 25 bp, Artificial
  probe
  misc_feature (1)..(25): SEQ ID NO: 658; WAN024AUF_at; Start 152; Stop 176
gtgacaaaattgaccttcatagtat

SEQ ID NO: 66685 - DNA, 25 bp, Artificial
  probe
  misc_feature (1)..(25): SEQ ID NO: 658; WAN024AUF_at; Start 37; Stop 61
tctgcaatcattcttgtagcatgtg

SEQ ID NO: 66686 - DNA, 25 bp, Artificial
  probe
  misc_feature (1)..(25): SEQ ID NO: 658; WAN024AUF_at; Start 32; Stop 56
ttctttctgcaatcattcttgtagc

SEQ ID NO: 66687 - DNA, 25 bp, Artificial
  probe
  misc_feature (1)..(25): SEQ ID NO: 658; WAN024AUF_at; Start 158; Stop 182
aaattgaccttcatagtatcgttcc

SEQ ID NO: 66688 - DNA, 25 bp, Artificial
  probe
  misc_feature (1)..(25): SEQ ID NO: 658; WAN024AUF_at; Start 472; Stop 496
ttgagcgccaaagaccctaacaata

SEQ ID NO: 66689 - DNA, 25 bp, Artificial
  probe
  misc_feature (1)..(25): SEQ ID NO: 658; WAN024AUF_at; Start 151; Stop 175
ggtgacaaaattgaccttcatagta

SEQ ID NO: 66690 - DNA, 25 bp, Artificial
  probe
  misc_feature (1)..(25): SEQ ID NO: 658; WAN024AUF_at; Start 38; Stop 62
ctgcaatcattcttgtagcatgtgc

SEQ ID NO: 66691 - DNA, 25 bp, Artificial
  probe
  misc_feature (1)..(25): SEQ ID NO: 658; WAN024AUF_at; Start 156; Stop 180
caaaattgaccttcatagtatcgtt

SEQ ID NO: 66692 - DNA, 25 bp, Artificial
  probe
  misc_feature (1)..(25): SEQ ID NO: 658; WAN024AUF_at; Start 24; Stop 48
cgttctctttctttctgcaatcatt

SEQ ID NO: 66693 - DNA, 25 bp, Artificial
  probe
  misc_feature (1)..(25): SEQ ID NO: 658; WAN024AUF_at; Start 147; Stop 171
tgctggtgacaaaattgaccttcat

SEQ ID NO: 66694 - DNA, 25 bp, Artificial
  probe
  misc_feature (1)..(25): SEQ ID NO: 658; WAN024AUF_at; Start 485; Stop 509
accctaacaataaagaattctatga

SEQ ID NO: 66695 - DNA, 25 bp, Artificial
  probe
  misc_feature (1)..(25): SEQ ID NO: 658; WAN024AUF_at; Start 154; Stop 178
gacaaaattgaccttcatagtatcg

SEQ ID NO: 66696 - DNA, 25 bp, Artificial
  probe
  misc_feature (1)..(25): SEQ ID NO: 658; WAN024AUF_at; Start 484; Stop 508
gaccctaacaataaagaattctatg

SEQ ID NO: 66697 - DNA, 25 bp, Artificial
  probe
  misc_feature (1)..(25): SEQ ID NO: 658; WAN024AUF_at; Start 473; Stop 497
tgagcgccaaagaccctaacaataa

SEQ ID NO: 66698 - DNA, 25 bp, Artificial
  probe
  misc_feature (1)..(25): SEQ ID NO: 658; WAN024AUF_at; Start 476; Stop 500
gcgccaaagaccctaacaataaaga

SEQ ID NO: 66699 - DNA, 25 bp, Artificial
  probe
  misc_feature (1)..(25): SEQ ID NO: 658; WAN024AUF_at; Start 474; Stop 498
gagcgccaaagaccctaacaataaa

SEQ ID NO: 66700 - DNA, 25 bp, Artificial
  probe
  misc_feature (1)..(25): SEQ ID NO: 658; WAN024AUF_at; Start 30; Stop 54
ctttctttctgcaatcattcttgta

SEQ ID NO: 66701 - DNA, 25 bp, Artificial
  probe
  misc_feature (1)..(25): SEQ ID NO: 658; WAN024AUF_at; Start 155; Stop 179
acaaaattgaccttcatagtatcgt

SEQ ID NO: 66702 - DNA, 25 bp, Artificial
  probe
  misc_feature (1)..(25): SEQ ID NO: 658; WAN024AUF_at; Start 28; Stop 52
ctctttctttctgcaatcattcttg

SEQ ID NO: 66703 - DNA, 25 bp, Artificial
  probe
  misc_feature (1)..(25): SEQ ID NO: 658; WAN024AUF_at; Start 29; Stop 53
tctttctttctgcaatcattcttgt

SEQ ID NO: 66704 - DNA, 25 bp, Artificial
  probe
  misc_feature (1)..(25): SEQ ID NO: 658; WAN024AUF_at; Start 148; Stop 172
gctggtgacaaaattgaccttcata

SEQ ID NO: 66705 - DNA, 25 bp, Artificial
  probe
  misc_feature (1)..(25): SEQ ID NO: 658; WAN024AUF_at; Start 26; Stop 50
ttctctttctttctgcaatcattct

SEQ ID NO: 66706 - DNA, 25 bp, Artificial
  probe
  misc_feature (1)..(25): SEQ ID NO: 658; WAN024AUF_at; Start 157; Stop 181
aaaattgaccttcatagtatcgttc

SEQ ID NO: 66707 - DNA, 25 bp, Artificial
  probe
  misc_feature (1)..(25): SEQ ID NO: 658; WAN024AUF_at; Start 36; Stop 60
ttctgcaatcattcttgtagcatgt

SEQ ID NO: 66708 - DNA, 25 bp, Artificial
  probe
  misc_feature (1)..(25): SEQ ID NO: 658; WAN024AUF_at; Start 35; Stop 59
tttctgcaatcattcttgtagcatg

SEQ ID NO: 66709 - DNA, 25 bp, Artificial
  probe
  misc_feature (1)..(25): SEQ ID NO: 658; WAN024AUF_at; Start 33; Stop 57
tctttctgcaatcattcttgtagca

SEQ ID NO: 66710 - DNA, 25 bp, Artificial
  probe
  misc_feature (1)..(25): SEQ ID NO: 6815; WAN024AUG_at; Start 106; Stop 130
catgtttaccagcttaaacgtcgac

SEQ ID NO: 66711 - DNA, 25 bp, Artificial
  probe
  misc_feature (1)..(25): SEQ ID NO: 6815; WAN024AUG_at; Start 521; Stop 545
tgaaaatcttacgtcaaggggccat

SEQ ID NO: 66712 - DNA, 25 bp, Artificial
  probe
  misc_feature (1)..(25): SEQ ID NO: 6815; WAN024AUG_at; Start 339; Stop 363
ccttgatttgattcgagagacaggt

SEQ ID NO: 66713 - DNA, 25 bp, Artificial
  probe
  misc_feature (1)..(25): SEQ ID NO: 6815; WAN024AUG_at; Start 188; Stop 212
caaagaatcagccaacttatcttca

SEQ ID NO: 66714 - DNA, 25 bp, Artificial
  probe
  misc_feature (1)..(25): SEQ ID NO: 6815; WAN024AUG_at; Start 169; Stop 193
gaggacatcttgtacttttcaaaga

SEQ ID NO: 66715 - DNA, 25 bp, Artificial
  probe
  misc_feature (1)..(25): SEQ ID NO: 6815; WAN024AUG_at; Start 64; Stop 88
tacggtctctttgctaaggcgctag

SEQ ID NO: 66716 - DNA, 25 bp, Artificial
  probe
  misc_feature (1)..(25): SEQ ID NO: 6815; WAN024AUG_at; Start 321; Stop 345
gcctagtcatcccattacccttgat

SEQ ID NO: 66717 - DNA, 25 bp, Artificial
  probe
  misc_feature (1)..(25): SEQ ID NO: 6815; WAN024AUG_at; Start 136; Stop 160
gacaaggcgctcaatctcaatgttg

SEQ ID NO: 66718 - DNA, 25 bp, Artificial
  probe
  misc_feature (1)..(25): SEQ ID NO: 6815; WAN024AUG_at; Start 331; Stop 355
cccattacccttgatttgattcgag

SEQ ID NO: 66719 - DNA, 25 bp, Artificial
  probe
  misc_feature (1)..(25): SEQ ID NO: 6815; WAN024AUG_at; Start 141; Stop 165
ggcgctcaatctcaatgttgcctct

SEQ ID NO: 66720 - DNA, 25 bp, Artificial
  probe
  misc_feature (1)..(25): SEQ ID NO: 6815; WAN024AUG_at; Start 336; Stop 360
tacccttgatttgattcgagagaca

SEQ ID NO: 66721 - DNA, 25 bp, Artificial
  probe
  misc_feature (1)..(25): SEQ ID NO: 6815; WAN024AUG_at; Start 491; Stop 515
caactattttgaatttgtcgggaga

SEQ ID NO: 66722 - DNA, 25 bp, Artificial
  probe
  misc_feature (1)..(25): SEQ ID NO: 6815; WAN024AUG_at; Start 81; Stop 105
ggcgctagacgaaaaagcagttgac

SEQ ID NO: 66723 - DNA, 25 bp, Artificial
  probe
  misc_feature (1)..(25): SEQ ID NO: 6815; WAN024AUG_at; Start 44; Stop 68
ttttgcctacagagacagtttacgg

SEQ ID NO: 66724 - DNA, 25 bp, Artificial
  probe
  misc_feature (1)..(25): SEQ ID NO: 6815; WAN024AUG_at; Start 539; Stop 563
gggccattaagcgagaagatattct

SEQ ID NO: 66725 - DNA, 25 bp, Artificial
  probe
  misc_feature (1)..(25): SEQ ID NO: 6815; WAN024AUG_at; Start 417; Stop 441
taatcaaattctagaggattttgac

SEQ ID NO: 66726 - DNA, 25 bp, Artificial
  probe
  misc_feature (1)..(25): SEQ ID NO: 6815; WAN024AUG_at; Start 283; Stop 307
tgggtcaattctggccttgcaactg

SEQ ID NO: 66727 - DNA, 25 bp, Artificial
  probe
  misc_feature (1)..(25): SEQ ID NO: 6815; WAN024AUG_at; Start 160; Stop 184
gcctctttagaggacatcttgtact

SEQ ID NO: 66728 - DNA, 25 bp, Artificial
  probe
  misc_feature (1)..(25): SEQ ID NO: 6815; WAN024AUG_at; Start 120; Stop 144
taaacgtcgacgtagagacaaggcg

SEQ ID NO: 66729 - DNA, 25 bp, Artificial
  probe
  misc_feature (1)..(25): SEQ ID NO: 6815; WAN024AUG_at; Start 34; Stop 58
ggagctgtcgttttgcctacagaga

SEQ ID NO: 66730 - DNA, 25 bp, Artificial
  probe
  misc_feature (1)..(25): SEQ ID NO: 6815; WAN024AUG_at; Start 148; Stop 172
aatctcaatgttgcctctttagagg

SEQ ID NO: 66731 - DNA, 25 bp, Artificial
  probe
  misc_feature (1)..(25): SEQ ID NO: 6815; WAN024AUG_at; Start 57; Stop 81
gacagtttacggtctctttgctaag

SEQ ID NO: 66732 - DNA, 25 bp, Artificial
  probe
  misc_feature (1)..(25): SEQ ID NO: 6815; WAN024AUG_at; Start 397; Stop 421
caggcgagtggagtgacctttaatc

SEQ ID NO: 66733 - DNA, 25 bp, Artificial
  probe
  misc_feature (1)..(25): SEQ ID NO: 6815; WAN024AUG_at; Start 112; Stop 136
taccagcttaaacgtcgacgtagag

SEQ ID NO: 66734 - DNA, 25 bp, Artificial
  probe
  misc_feature (1)..(25): SEQ ID NO: 6815; WAN024AUG_at; Start 309; Stop 333
tggatttcggatgcctagtcatccc

SEQ ID NO: 66735 - DNA, 25 bp, Artificial
  probe
  misc_feature (1)..(25): SEQ ID NO: 6815; WAN024AUG_at; Start 26; Stop 50
aaaatggtggagctgtcgttttgcc

SEQ ID NO: 66736 - DNA, 25 bp, Artificial
  probe
  misc_feature (1)..(25): SEQ ID NO: 6815; WAN024AUG_at; Start 406; Stop 430
ggagtgacctttaatcaaattctag

SEQ ID NO: 66737 - DNA, 25 bp, Artificial
  probe
  misc_feature (1)..(25): SEQ ID NO: 6815; WAN024AUG_at; Start 76; Stop 100
gctaaggcgctagacgaaaaagcag

SEQ ID NO: 66738 - DNA, 25 bp, Artificial
  probe
  misc_feature (1)..(25): SEQ ID NO: 6815; WAN024AUG_at; Start 69; Stop 93
tctctttgctaaggcgctagacgaa

SEQ ID NO: 66739 - DNA, 25 bp, Artificial
  probe
  misc_feature (1)..(25): SEQ ID NO: 6815; WAN024AUG_at; Start 400; Stop 424
gcgagtggagtgacctttaatcaaa

SEQ ID NO: 66740 - DNA, 25 bp, Artificial
  probe
  misc_feature (1)..(25): SEQ ID NO: 6815; WAN024AUG_at; Start 495; Stop 519
tattttgaatttgtcgggagacaag

SEQ ID NO: 66741 - DNA, 25 bp, Artificial
  probe
  misc_feature (1)..(25): SEQ ID NO: 6815; WAN024AUG_at; Start 180; Stop 204
gtacttttcaaagaatcagccaact

SEQ ID NO: 66742 - DNA, 25 bp, Artificial
  probe
  misc_feature (1)..(25): SEQ ID NO: 6815; WAN024AUG_at; Start 124; Stop 148
cgtcgacgtagagacaaggcgctca

SEQ ID NO: 66743 - DNA, 25 bp, Artificial
  probe
  misc_feature (1)..(25): SEQ ID NO: 6815; WAN024AUG_at; Start 128; Stop 152
gacgtagagacaaggcgctcaatct

SEQ ID NO: 66744 - DNA, 25 bp, Artificial
  probe
  misc_feature (1)..(25): SEQ ID NO: 5613; WAN024AUH_at; Start 313; Stop 337
tgggtaaattctgaccttgcaacta

SEQ ID NO: 66745 - DNA, 25 bp, Artificial
  probe
  misc_feature (1)..(25): SEQ ID NO: 5613; WAN024AUH_at; Start 318; Stop 342
aaattctgaccttgcaactattgga

SEQ ID NO: 66746 - DNA, 25 bp, Artificial
  probe
  misc_feature (1)..(25): SEQ ID NO: 5613; WAN024AUH_at; Start 356; Stop 380
gtcaccctatcacactggatttaat

SEQ ID NO: 66747 - DNA, 25 bp, Artificial
  probe
  misc_feature (1)..(25): SEQ ID NO: 5613; WAN024AUH_at; Start 424; Stop 448
ggtcaggcaagtggtgtaacctttg

SEQ ID NO: 66748 - DNA, 25 bp, Artificial
  probe
  misc_feature (1)..(25): SEQ ID NO: 5613; WAN024AUH_at; Start 366; Stop 390
cacactggatttaattcgagagaca

SEQ ID NO: 66749 - DNA, 25 bp, Artificial
  probe
  misc_feature (1)..(25): SEQ ID NO: 5613; WAN024AUH_at; Start 438; Stop 462
tgtaacctttgaacaaattctgaag

SEQ ID NO: 66750 - DNA, 25 bp, Artificial
  probe
  misc_feature (1)..(25): SEQ ID NO: 5613; WAN024AUH_at; Start 365; Stop 389
tcacactggatttaattcgagagac

SEQ ID NO: 66751 - DNA, 25 bp, Artificial
  probe
  misc_feature (1)..(25): SEQ ID NO: 5613; WAN024AUH_at; Start 360; Stop 384
ccctatcacactggatttaattcga

SEQ ID NO: 66752 - DNA, 25 bp, Artificial
  probe
  misc_feature (1)..(25): SEQ ID NO: 5613; WAN024AUH_at; Start 419; Stop 443
tctcaggtcaggcaagtggtgtaac

SEQ ID NO: 66753 - DNA, 25 bp, Artificial
  probe
  misc_feature (1)..(25): SEQ ID NO: 5613; WAN024AUH_at; Start 342; Stop 366
atttcggatgcccagtcaccctatc

SEQ ID NO: 66754 - DNA, 25 bp, Artificial
  probe
  misc_feature (1)..(25): SEQ ID NO: 5613; WAN024AUH_at; Start 422; Stop 446
caggtcaggcaagtggtgtaacctt

SEQ ID NO: 66755 - DNA, 25 bp, Artificial
  probe
  misc_feature (1)..(25): SEQ ID NO: 5613; WAN024AUH_at; Start 354; Stop 378
cagtcaccctatcacactggattta

SEQ ID NO: 66756 - DNA, 25 bp, Artificial
  probe
  misc_feature (1)..(25): SEQ ID NO: 5613; WAN024AUH_at; Start 343; Stop 367
tttcggatgcccagtcaccctatca

SEQ ID NO: 66757 - DNA, 25 bp, Artificial
  probe
  misc_feature (1)..(25): SEQ ID NO: 5613; WAN024AUH_at; Start 420; Stop 444
ctcaggtcaggcaagtggtgtaacc

SEQ ID NO: 66758 - DNA, 25 bp, Artificial
  probe
  misc_feature (1)..(25): SEQ ID NO: 5613; WAN024AUH_at; Start 521; Stop 545
caactattgtggatttgtctggaga

SEQ ID NO: 66759 - DNA, 25 bp, Artificial
  probe
  misc_feature (1)..(25): SEQ ID NO: 5613; WAN024AUH_at; Start 435; Stop 459
tggtgtaacctttgaacaaattctg

SEQ ID NO: 66760 - DNA, 25 bp, Artificial
  probe
  misc_feature (1)..(25): SEQ ID NO: 5613; WAN024AUH_at; Start 417; Stop 441
tatctcaggtcaggcaagtggtgta

SEQ ID NO: 66761 - DNA, 25 bp, Artificial
  probe
  misc_feature (1)..(25): SEQ ID NO: 5613; WAN024AUH_at; Start 317; Stop 341
taaattctgaccttgcaactattgg

SEQ ID NO: 66762 - DNA, 25 bp, Artificial
  probe
  misc_feature (1)..(25): SEQ ID NO: 5613; WAN024AUH_at; Start 314; Stop 338
gggtaaattctgaccttgcaactat

SEQ ID NO: 66763 - DNA, 25 bp, Artificial
  probe
  misc_feature (1)..(25): SEQ ID NO: 5613; WAN024AUH_at; Start 526; Stop 550
attgtggatttgtctggagacaagg

SEQ ID NO: 66764 - DNA, 25 bp, Artificial
  probe
  misc_feature (1)..(25): SEQ ID NO: 5613; WAN024AUH_at; Start 447; Stop 471
tgaacaaattctgaaggattttgac

SEQ ID NO: 66765 - DNA, 25 bp, Artificial
  probe
  misc_feature (1)..(25): SEQ ID NO: 5613; WAN024AUH_at; Start 369; Stop 393
actggatttaattcgagagacaggt

SEQ ID NO: 66766 - DNA, 25 bp, Artificial
  probe
  misc_feature (1)..(25): SEQ ID NO: 5613; WAN024AUH_at; Start 429; Stop 453
ggcaagtggtgtaacctttgaacaa

SEQ ID NO: 66767 - DNA, 25 bp, Artificial
  probe
  misc_feature (1)..(25): SEQ ID NO: 5613; WAN024AUH_at; Start 339; Stop 363
tggatttcggatgcccagtcaccct

SEQ ID NO: 66768 - DNA, 25 bp, Artificial
  probe
  misc_feature (1)..(25): SEQ ID NO: 5613; WAN024AUH_at; Start 368; Stop 392
cactggatttaattcgagagacagg

SEQ ID NO: 66769 - DNA, 25 bp, Artificial
  probe
  misc_feature (1)..(25): SEQ ID NO: 5613; WAN024AUH_at; Start 431; Stop 455
caagtggtgtaacctttgaacaaat

SEQ ID NO: 66770 - DNA, 25 bp, Artificial
  probe
  misc_feature (1)..(25): SEQ ID NO: 5613; WAN024AUH_at; Start 363; Stop 387
tatcacactggatttaattcgagag

SEQ ID NO: 66771 - DNA, 25 bp, Artificial
  probe
  misc_feature (1)..(25): SEQ ID NO: 5613; WAN024AUH_at; Start 421; Stop 445
tcaggtcaggcaagtggtgtaacct

SEQ ID NO: 66772 - DNA, 25 bp, Artificial
  probe
  misc_feature (1)..(25): SEQ ID NO: 5613; WAN024AUH_at; Start 427; Stop 451
caggcaagtggtgtaacctttgaac

SEQ ID NO: 66773 - DNA, 25 bp, Artificial
  probe
  misc_feature (1)..(25): SEQ ID NO: 5613; WAN024AUH_at; Start 516; Stop 540
ggattcaactattgtggatttgtct

SEQ ID NO: 66774 - DNA, 25 bp, Artificial
  probe
  misc_feature (1)..(25): SEQ ID NO: 5613; WAN024AUH_at; Start 443; Stop 467
cctttgaacaaattctgaaggattt

SEQ ID NO: 66775 - DNA, 25 bp, Artificial
  probe
  misc_feature (1)..(25): SEQ ID NO: 5613; WAN024AUH_at; Start 522; Stop 546
aactattgtggatttgtctggagac

SEQ ID NO: 66776 - DNA, 25 bp, Artificial
  probe
  misc_feature (1)..(25): SEQ ID NO: 5613; WAN024AUH_at; Start 524; Stop 548
ctattgtggatttgtctggagacaa

SEQ ID NO: 66777 - DNA, 25 bp, Artificial
  probe
  misc_feature (1)..(25): SEQ ID NO: 5613; WAN024AUH_at; Start 440; Stop 464
taacctttgaacaaattctgaagga

SEQ ID NO: 66778 - DNA, 25 bp, Artificial
  probe
  misc_feature (1)..(25): SEQ ID NO: 6322; WAN024AUI_at; Start 694; Stop 718
aactatgaggctatgatacgtgggt

SEQ ID NO: 66779 - DNA, 25 bp, Artificial
  probe
  misc_feature (1)..(25): SEQ ID NO: 6322; WAN024AUI_at; Start 715; Stop 739
gggtttttagcatctaattctaaga

SEQ ID NO: 66780 - DNA, 25 bp, Artificial
  probe
  misc_feature (1)..(25): SEQ ID NO: 6322; WAN024AUI_at; Start 697; Stop 721
tatgaggctatgatacgtgggtttt

SEQ ID NO: 66781 - DNA, 25 bp, Artificial
  probe
  misc_feature (1)..(25): SEQ ID NO: 6322; WAN024AUI_at; Start 714; Stop 738
tgggtttttagcatctaattctaag

SEQ ID NO: 66782 - DNA, 25 bp, Artificial
  probe
  misc_feature (1)..(25): SEQ ID NO: 6322; WAN024AUI_at; Start 899; Stop 923
atggacatgaagttggaggaaccaa

SEQ ID NO: 66783 - DNA, 25 bp, Artificial
  probe
  misc_feature (1)..(25): SEQ ID NO: 6322; WAN024AUI_at; Start 898; Stop 922
catggacatgaagttggaggaacca

SEQ ID NO: 66784 - DNA, 25 bp, Artificial
  probe
  misc_feature (1)..(25): SEQ ID NO: 6322; WAN024AUI_at; Start 708; Stop 732
gatacgtgggtttttagcatctaat

SEQ ID NO: 66785 - DNA, 25 bp, Artificial
  probe
  misc_feature (1)..(25): SEQ ID NO: 6322; WAN024AUI_at; Start 712; Stop 736
cgtgggtttttagcatctaattcta

SEQ ID NO: 66786 - DNA, 25 bp, Artificial
  probe
  misc_feature (1)..(25): SEQ ID NO: 6322; WAN024AUI_at; Start 701; Stop 725
aggctatgatacgtgggtttttagc

SEQ ID NO: 66787 - DNA, 25 bp, Artificial
  probe
  misc_feature (1)..(25): SEQ ID NO: 6322; WAN024AUI_at; Start 695; Stop 719
actatgaggctatgatacgtgggtt

SEQ ID NO: 66788 - DNA, 25 bp, Artificial
  probe
  misc_feature (1)..(25): SEQ ID NO: 6322; WAN024AUI_at; Start 702; Stop 726
ggctatgatacgtgggtttttagca

SEQ ID NO: 66789 - DNA, 25 bp, Artificial
  probe
  misc_feature (1)..(25): SEQ ID NO: 6322; WAN024AUI_at; Start 711; Stop 735
acgtgggtttttagcatctaattct

SEQ ID NO: 66790 - DNA, 25 bp, Artificial
  probe
  misc_feature (1)..(25): SEQ ID NO: 6322; WAN024AUI_at; Start 707; Stop 731
tgatacgtgggtttttagcatctaa

SEQ ID NO: 66791 - DNA, 25 bp, Artificial
  probe
  misc_feature (1)..(25): SEQ ID NO: 6322; WAN024AUI_at; Start 716; Stop 740
ggtttttagcatctaattctaagaa

SEQ ID NO: 66792 - DNA, 25 bp, Artificial
  probe
  misc_feature (1)..(25): SEQ ID NO: 6322; WAN024AUI_at; Start 699; Stop 723
tgaggctatgatacgtgggttttta

SEQ ID NO: 66793 - DNA, 25 bp, Artificial
  probe
  misc_feature (1)..(25): SEQ ID NO: 6322; WAN024AUI_at; Start 710; Stop 734
tacgtgggtttttagcatctaattc

SEQ ID NO: 66794 - DNA, 25 bp, Artificial
  probe
  misc_feature (1)..(25): SEQ ID NO: 6322; WAN024AUI_at; Start 698; Stop 722
atgaggctatgatacgtgggttttt

SEQ ID NO: 66795 - DNA, 25 bp, Artificial
  probe
  misc_feature (1)..(25): SEQ ID NO: 6322; WAN024AUI_at; Start 717; Stop 741
gtttttagcatctaattctaagaag

SEQ ID NO: 66796 - DNA, 25 bp, Artificial
  probe
  misc_feature (1)..(25): SEQ ID NO: 6322; WAN024AUI_at; Start 709; Stop 733
atacgtgggtttttagcatctaatt

SEQ ID NO: 66797 - DNA, 25 bp, Artificial
  probe
  misc_feature (1)..(25): SEQ ID NO: 6322; WAN024AUI_at; Start 703; Stop 727
gctatgatacgtgggtttttagcat

SEQ ID NO: 66798 - DNA, 25 bp, Artificial
  probe
  misc_feature (1)..(25): SEQ ID NO: 6322; WAN024AUI_at; Start 723; Stop 747
agcatctaattctaagaaggacttt

SEQ ID NO: 66799 - DNA, 25 bp, Artificial
  probe
  misc_feature (1)..(25): SEQ ID NO: 6322; WAN024AUI_at; Start 720; Stop 744
tttagcatctaattctaagaaggac

SEQ ID NO: 66800 - DNA, 25 bp, Artificial
  probe
  misc_feature (1)..(25): SEQ ID NO: 6322; WAN024AUI_at; Start 721; Stop 745
ttagcatctaattctaagaaggact

SEQ ID NO: 66801 - DNA, 25 bp, Artificial
  probe
  misc_feature (1)..(25): SEQ ID NO: 6322; WAN024AUI_at; Start 713; Stop 737
gtgggtttttagcatctaattctaa

SEQ ID NO: 66802 - DNA, 25 bp, Artificial
  probe
  misc_feature (1)..(25): SEQ ID NO: 6322; WAN024AUI_at; Start 693; Stop 717
taactatgaggctatgatacgtggg

SEQ ID NO: 66803 - DNA, 25 bp, Artificial
  probe
  misc_feature (1)..(25): SEQ ID NO: 6322; WAN024AUI_at; Start 900; Stop 924
tggacatgaagttggaggaaccaat

SEQ ID NO: 66804 - DNA, 25 bp, Artificial
  probe
  misc_feature (1)..(25): SEQ ID NO: 6322; WAN024AUI_at; Start 867; Stop 891
gtatattcgagaaaacacctttgct

SEQ ID NO: 66805 - DNA, 25 bp, Artificial
  probe
  misc_feature (1)..(25): SEQ ID NO: 6322; WAN024AUI_at; Start 718; Stop 742
tttttagcatctaattctaagaagg

SEQ ID NO: 66806 - DNA, 25 bp, Artificial
  probe
  misc_feature (1)..(25): SEQ ID NO: 6322; WAN024AUI_at; Start 696; Stop 720
ctatgaggctatgatacgtgggttt

SEQ ID NO: 66807 - DNA, 25 bp, Artificial
  probe
  misc_feature (1)..(25): SEQ ID NO: 6322; WAN024AUI_at; Start 722; Stop 746
tagcatctaattctaagaaggactt

SEQ ID NO: 66808 - DNA, 25 bp, Artificial
  probe
  misc_feature (1)..(25): SEQ ID NO: 6322; WAN024AUI_at; Start 705; Stop 729
tatgatacgtgggtttttagcatct

SEQ ID NO: 66809 - DNA, 25 bp, Artificial
  probe
  misc_feature (1)..(25): SEQ ID NO: 6322; WAN024AUI_at; Start 897; Stop 921
ccatggacatgaagttggaggaacc

SEQ ID NO: 66810 - DNA, 25 bp, Artificial
  probe
  misc_feature (1)..(25): SEQ ID NO: 6322; WAN024AUI_at; Start 719; Stop 743
ttttagcatctaattctaagaagga

SEQ ID NO: 66811 - DNA, 25 bp, Artificial
  probe
  misc_feature (1)..(25): SEQ ID NO: 6322; WAN024AUI_at; Start 706; Stop 730
atgatacgtgggtttttagcatcta

SEQ ID NO: 66812 - DNA, 25 bp, Artificial
  probe
  misc_feature (1)..(25): SEQ ID NO: 3442; WAN024AUJ_at; Start 894; Stop 918
atatattcgtgaaaacgcctttgct

SEQ ID NO: 66813 - DNA, 25 bp, Artificial
  probe
  misc_feature (1)..(25): SEQ ID NO: 3442; WAN024AUJ_at; Start 738; Stop 762
tcgtggctttttggcgtctaactct

SEQ ID NO: 66814 - DNA, 25 bp, Artificial
  probe
  misc_feature (1)..(25): SEQ ID NO: 3442; WAN024AUJ_at; Start 888; Stop 912
tcttaaatatattcgtgaaaacgcc

SEQ ID NO: 66815 - DNA, 25 bp, Artificial
  probe
  misc_feature (1)..(25): SEQ ID NO: 3442; WAN024AUJ_at; Start 18; Stop 42
taggagagaaatgaaaaagtcagtt

SEQ ID NO: 66816 - DNA, 25 bp, Artificial
  probe
  misc_feature (1)..(25): SEQ ID NO: 3442; WAN024AUJ_at; Start 1042; Stop 1066
tactggaagaaagataatcttcatg

SEQ ID NO: 66817 - DNA, 25 bp, Artificial
  probe
  misc_feature (1)..(25): SEQ ID NO: 3442; WAN024AUJ_at; Start 1019; Stop 1043
aagttgctgaagatggtgccattta

SEQ ID NO: 66818 - DNA, 25 bp, Artificial
  probe
  misc_feature (1)..(25): SEQ ID NO: 3442; WAN024AUJ_at; Start 6; Stop 30
tatccatcatattaggagagaaatg

SEQ ID NO: 66819 - DNA, 25 bp, Artificial
  probe
  misc_feature (1)..(25): SEQ ID NO: 3442; WAN024AUJ_at; Start 435; Stop 459
gttgcgagctaagtggagtgctcct

SEQ ID NO: 66820 - DNA, 25 bp, Artificial
  probe
  misc_feature (1)..(25): SEQ ID NO: 3442; WAN024AUJ_at; Start 1124; Stop 1148
tttcaataaaacaagtgacggagcg

SEQ ID NO: 66821 - DNA, 25 bp, Artificial
  probe
  misc_feature (1)..(25): SEQ ID NO: 3442; WAN024AUJ_at; Start 708; Stop 732
tgtaccagaaaacaactatgaatct

SEQ ID NO: 66822 - DNA, 25 bp, Artificial
  probe
  misc_feature (1)..(25): SEQ ID NO: 3442; WAN024AUJ_at; Start 729; Stop 753
atctatgattcgtggctttttggcg

SEQ ID NO: 66823 - DNA, 25 bp, Artificial
  probe
  misc_feature (1)..(25): SEQ ID NO: 3442; WAN024AUJ_at; Start 2; Stop 26
tgtatatccatcatattaggagaga

SEQ ID NO: 66824 - DNA, 25 bp, Artificial
  probe
  misc_feature (1)..(25): SEQ ID NO: 3442; WAN024AUJ_at; Start 1126; Stop 1150
tcaataaaacaagtgacggagcggt

SEQ ID NO: 66825 - DNA, 25 bp, Artificial
  probe
  misc_feature (1)..(25): SEQ ID NO: 3442; WAN024AUJ_at; Start 437; Stop 461
tgcgagctaagtggagtgctcctgt

SEQ ID NO: 66826 - DNA, 25 bp, Artificial
  probe
  misc_feature (1)..(25): SEQ ID NO: 3442; WAN024AUJ_at; Start 1104; Stop 1128
gattgatgagaaagatatactttca

SEQ ID NO: 66827 - DNA, 25 bp, Artificial
  probe
  misc_feature (1)..(25): SEQ ID NO: 3442; WAN024AUJ_at; Start 446; Stop 470
agtggagtgctcctgttcgtcgcta

SEQ ID NO: 66828 - DNA, 25 bp, Artificial
  probe
  misc_feature (1)..(25): SEQ ID NO: 3442; WAN024AUJ_at; Start 1127; Stop 1151
caataaaacaagtgacggagcggtt

SEQ ID NO: 66829 - DNA, 25 bp, Artificial
  probe
  misc_feature (1)..(25): SEQ ID NO: 3442; WAN024AUJ_at; Start 15; Stop 39
tattaggagagaaatgaaaaagtca

SEQ ID NO: 66830 - DNA, 25 bp, Artificial
  probe
  misc_feature (1)..(25): SEQ ID NO: 3442; WAN024AUJ_at; Start 880; Stop 904
caagagcttcttaaatatattcgtg

SEQ ID NO: 66831 - DNA, 25 bp, Artificial
  probe
  misc_feature (1)..(25): SEQ ID NO: 3442; WAN024AUJ_at; Start 9; Stop 33
ccatcatattaggagagaaatgaaa

SEQ ID NO: 66832 - DNA, 25 bp, Artificial
  probe
  misc_feature (1)..(25): SEQ ID NO: 3442; WAN024AUJ_at; Start 1033; Stop 1057
ggtgccatttactggaagaaagata

SEQ ID NO: 66833 - DNA, 25 bp, Artificial
  probe
  misc_feature (1)..(25): SEQ ID NO: 3442; WAN024AUJ_at; Start 1056; Stop 1080
taatcttcatgagattattgaaacg

SEQ ID NO: 66834 - DNA, 25 bp, Artificial
  probe
  misc_feature (1)..(25): SEQ ID NO: 3442; WAN024AUJ_at; Start 1065; Stop 1089
tgagattattgaaacgagtgaacaa

SEQ ID NO: 66835 - DNA, 25 bp, Artificial
  probe
  misc_feature (1)..(25): SEQ ID NO: 3442; WAN024AUJ_at; Start 1063; Stop 1087
catgagattattgaaacgagtgaac

SEQ ID NO: 66836 - DNA, 25 bp, Artificial
  probe
  misc_feature (1)..(25): SEQ ID NO: 3442; WAN024AUJ_at; Start 444; Stop 468
taagtggagtgctcctgttcgtcgc

SEQ ID NO: 66837 - DNA, 25 bp, Artificial
  probe
  misc_feature (1)..(25): SEQ ID NO: 3442; WAN024AUJ_at; Start 711; Stop 735
accagaaaacaactatgaatctatg

SEQ ID NO: 66838 - DNA, 25 bp, Artificial
  probe
  misc_feature (1)..(25): SEQ ID NO: 3442; WAN024AUJ_at; Start 1028; Stop 1052
aagatggtgccatttactggaagaa

SEQ ID NO: 66839 - DNA, 25 bp, Artificial
  probe
  misc_feature (1)..(25): SEQ ID NO: 3442; WAN024AUJ_at; Start 735; Stop 759
gattcgtggctttttggcgtctaac

SEQ ID NO: 66840 - DNA, 25 bp, Artificial
  probe
  misc_feature (1)..(25): SEQ ID NO: 3442; WAN024AUJ_at; Start 1179; Stop 1203
tgagaaactttttttatgtgagaaa

SEQ ID NO: 66841 - DNA, 25 bp, Artificial
  probe
  misc_feature (1)..(25): SEQ ID NO: 3442; WAN024AUJ_at; Start 705; Stop 729
ttttgtaccagaaaacaactatgaa

SEQ ID NO: 66842 - DNA, 25 bp, Artificial
  probe
  misc_feature (1)..(25): SEQ ID NO: 3442; WAN024AUJ_at; Start 1024; Stop 1048
gctgaagatggtgccatttactgga

SEQ ID NO: 66843 - DNA, 25 bp, Artificial
  probe
  misc_feature (1)..(25): SEQ ID NO: 3442; WAN024AUJ_at; Start 1037; Stop 1061
ccatttactggaagaaagataatct

SEQ ID NO: 66844 - DNA, 25 bp, Artificial
  probe
  misc_feature (1)..(25): SEQ ID NO: 3442; WAN024AUJ_at; Start 1119; Stop 1143
tatactttcaataaaacaagtgacg

SEQ ID NO: 66845 - DNA, 25 bp, Artificial
  probe
  misc_feature (1)..(25): SEQ ID NO: 3442; WAN024AUJ_at; Start 1099; Stop 1123
aaagagattgatgagaaagatatac

SEQ ID NO: 66846 - DNA, 25 bp, Artificial
  probe
  misc_feature (1)..(25): SEQ ID NO: 684; WAN024AUK_at; Start 610; Stop 634
gaaaaagtgcgtgcttggttcaagg

SEQ ID NO: 66847 - DNA, 25 bp, Artificial
  probe
  misc_feature (1)..(25): SEQ ID NO: 684; WAN024AUK_at; Start 697; Stop 721
tatgagtctatgatacgtggtttct

SEQ ID NO: 66848 - DNA, 25 bp, Artificial
  probe
  misc_feature (1)..(25): SEQ ID NO: 684; WAN024AUK_at; Start 619; Stop 643
cgtgcttggttcaaggagaaaaatg

SEQ ID NO: 66849 - DNA, 25 bp, Artificial
  probe
  misc_feature (1)..(25): SEQ ID NO: 684; WAN024AUK_at; Start 722; Stop 746
tggcgtctagctctaagaaggattt

SEQ ID NO: 66850 - DNA, 25 bp, Artificial
  probe
  misc_feature (1)..(25): SEQ ID NO: 684; WAN024AUK_at; Start 621; Stop 645
tgcttggttcaaggagaaaaatgtt

SEQ ID NO: 66851 - DNA, 25 bp, Artificial
  probe
  misc_feature (1)..(25): SEQ ID NO: 684; WAN024AUK_at; Start 603; Stop 627
cagtgatgaaaaagtgcgtgcttgg

SEQ ID NO: 66852 - DNA, 25 bp, Artificial
  probe
  misc_feature (1)..(25): SEQ ID NO: 684; WAN024AUK_at; Start 627; Stop 651
gttcaaggagaaaaatgtttctgaa

SEQ ID NO: 66853 - DNA, 25 bp, Artificial
  probe
  misc_feature (1)..(25): SEQ ID NO: 684; WAN024AUK_at; Start 727; Stop 751
tctagctctaagaaggattttgtcc

SEQ ID NO: 66854 - DNA, 25 bp, Artificial
  probe
  misc_feature (1)..(25): SEQ ID NO: 684; WAN024AUK_at; Start 579; Stop 603
tacaacacgctccacattaaatagc

SEQ ID NO: 66855 - DNA, 25 bp, Artificial
  probe
  misc_feature (1)..(25): SEQ ID NO: 684; WAN024AUK_at; Start 703; Stop 727
tctatgatacgtggtttcttggcgt

SEQ ID NO: 66856 - DNA, 25 bp, Artificial
  probe
  misc_feature (1)..(25): SEQ ID NO: 684; WAN024AUK_at; Start 711; Stop 735
acgtggtttcttggcgtctagctct

SEQ ID NO: 66857 - DNA, 25 bp, Artificial
  probe
  misc_feature (1)..(25): SEQ ID NO: 684; WAN024AUK_at; Start 596; Stop 620
taaatagcagtgatgaaaaagtgcg

SEQ ID NO: 66858 - DNA, 25 bp, Artificial
  probe
  misc_feature (1)..(25): SEQ ID NO: 684; WAN024AUK_at; Start 693; Stop 717
taattatgagtctatgatacgtggt

SEQ ID NO: 66859 - DNA, 25 bp, Artificial
  probe
  misc_feature (1)..(25): SEQ ID NO: 684; WAN024AUK_at; Start 587; Stop 611
gctccacattaaatagcagtgatga

SEQ ID NO: 66860 - DNA, 25 bp, Artificial
  probe
  misc_feature (1)..(25): SEQ ID NO: 684; WAN024AUK_at; Start 589; Stop 613
tccacattaaatagcagtgatgaaa

SEQ ID NO: 66861 - DNA, 25 bp, Artificial
  probe
  misc_feature (1)..(25): SEQ ID NO: 684; WAN024AUK_at; Start 729; Stop 753
tagctctaagaaggattttgtccta

SEQ ID NO: 66862 - DNA, 25 bp, Artificial
  probe
  misc_feature (1)..(25): SEQ ID NO: 684; WAN024AUK_at; Start 617; Stop 641
tgcgtgcttggttcaaggagaaaaa

SEQ ID NO: 66863 - DNA, 25 bp, Artificial
  probe
  misc_feature (1)..(25): SEQ ID NO: 684; WAN024AUK_at; Start 613; Stop 637
aaagtgcgtgcttggttcaaggaga

SEQ ID NO: 66864 - DNA, 25 bp, Artificial
  probe
  misc_feature (1)..(25): SEQ ID NO: 684; WAN024AUK_at; Start 611; Stop 635
aaaaagtgcgtgcttggttcaagga

SEQ ID NO: 66865 - DNA, 25 bp, Artificial
  probe
  misc_feature (1)..(25): SEQ ID NO: 684; WAN024AUK_at; Start 600; Stop 624
tagcagtgatgaaaaagtgcgtgct

SEQ ID NO: 66866 - DNA, 25 bp, Artificial
  probe
  misc_feature (1)..(25): SEQ ID NO: 684; WAN024AUK_at; Start 720; Stop 744
cttggcgtctagctctaagaaggat

SEQ ID NO: 66867 - DNA, 25 bp, Artificial
  probe
  misc_feature (1)..(25): SEQ ID NO: 684; WAN024AUK_at; Start 715; Stop 739
ggtttcttggcgtctagctctaaga

SEQ ID NO: 66868 - DNA, 25 bp, Artificial
  probe
  misc_feature (1)..(25): SEQ ID NO: 684; WAN024AUK_at; Start 700; Stop 724
gagtctatgatacgtggtttcttgg

SEQ ID NO: 66869 - DNA, 25 bp, Artificial
  probe
  misc_feature (1)..(25): SEQ ID NO: 684; WAN024AUK_at; Start 714; Stop 738
tggtttcttggcgtctagctctaag

SEQ ID NO: 66870 - DNA, 25 bp, Artificial
  probe
  misc_feature (1)..(25): SEQ ID NO: 684; WAN024AUK_at; Start 732; Stop 756
ctctaagaaggattttgtcctaatc

SEQ ID NO: 66871 - DNA, 25 bp, Artificial
  probe
  misc_feature (1)..(25): SEQ ID NO: 684; WAN024AUK_at; Start 584; Stop 608
cacgctccacattaaatagcagtga

SEQ ID NO: 66872 - DNA, 25 bp, Artificial
  probe
  misc_feature (1)..(25): SEQ ID NO: 684; WAN024AUK_at; Start 581; Stop 605
caacacgctccacattaaatagcag

SEQ ID NO: 66873 - DNA, 25 bp, Artificial
  probe
  misc_feature (1)..(25): SEQ ID NO: 684; WAN024AUK_at; Start 705; Stop 729
tatgatacgtggtttcttggcgtct

SEQ ID NO: 66874 - DNA, 25 bp, Artificial
  probe
  misc_feature (1)..(25): SEQ ID NO: 684; WAN024AUK_at; Start 708; Stop 732
gatacgtggtttcttggcgtctagc

SEQ ID NO: 66875 - DNA, 25 bp, Artificial
  probe
  misc_feature (1)..(25): SEQ ID NO: 684; WAN024AUK_at; Start 717; Stop 741
tttcttggcgtctagctctaagaag

SEQ ID NO: 66876 - DNA, 25 bp, Artificial
  probe
  misc_feature (1)..(25): SEQ ID NO: 684; WAN024AUK_at; Start 710; Stop 734
tacgtggtttcttggcgtctagctc

SEQ ID NO: 66877 - DNA, 25 bp, Artificial
  probe
  misc_feature (1)..(25): SEQ ID NO: 684; WAN024AUK_at; Start 615; Stop 639
agtgcgtgcttggttcaaggagaaa

SEQ ID NO: 66878 - DNA, 25 bp, Artificial
  probe
  misc_feature (1)..(25): SEQ ID NO: 684; WAN024AUK_at; Start 724; Stop 748
gcgtctagctctaagaaggattttg

SEQ ID NO: 66879 - DNA, 25 bp, Artificial
  probe
  misc_feature (1)..(25): SEQ ID NO: 684; WAN024AUK_at; Start 599; Stop 623
atagcagtgatgaaaaagtgcgtgc

SEQ ID NO: 66880 - DNA, 25 bp, Artificial
  probe
  misc_feature (1)..(25): SEQ ID NO: 683; WAN024AUL_s_at; Start 236; Stop 260
cgtatgatatcgctgcaattaacag

SEQ ID NO: 66881 - DNA, 25 bp, Artificial
  probe
  misc_feature (1)..(25): SEQ ID NO: 683; WAN024AUL_s_at; Start 837; Stop 861
aggtacagtctatgagcaagagctt

SEQ ID NO: 66882 - DNA, 25 bp, Artificial
  probe
  misc_feature (1)..(25): SEQ ID NO: 683; WAN024AUL_s_at; Start 838; Stop 862
ggtacagtctatgagcaagagcttc

SEQ ID NO: 66883 - DNA, 25 bp, Artificial
  probe
  misc_feature (1)..(25): SEQ ID NO: 683; WAN024AUL_s_at; Start 839; Stop 863
gtacagtctatgagcaagagcttct

SEQ ID NO: 66884 - DNA, 25 bp, Artificial
  probe
  misc_feature (1)..(25): SEQ ID NO: 683; WAN024AUL_s_at; Start 835; Stop 859
gtaggtacagtctatgagcaagagc

SEQ ID NO: 66885 - DNA, 25 bp, Artificial
  probe
  misc_feature (1)..(25): SEQ ID NO: 683; WAN024AUL_s_at; Start 220; Stop 244
ccagcgcgagctatagcgtatgata

SEQ ID NO: 66886 - DNA, 25 bp, Artificial
  probe
  misc_feature (1)..(25): SEQ ID NO: 683; WAN024AUL_s_at; Start 836; Stop 860
taggtacagtctatgagcaagagct

SEQ ID NO: 66887 - DNA, 25 bp, Artificial
  probe
  misc_feature (1)..(25): SEQ ID NO: 683; WAN024AUL_s_at; Start 216; Stop 240
tggtccagcgcgagctatagcgtat

SEQ ID NO: 66888 - DNA, 25 bp, Artificial
  probe
  misc_feature (1)..(25): SEQ ID NO: 683; WAN024AUL_s_at; Start 222; Stop 246
agcgcgagctatagcgtatgatatc

SEQ ID NO: 66889 - DNA, 25 bp, Artificial
  probe
  misc_feature (1)..(25): SEQ ID NO: 683; WAN024AUL_s_at; Start 224; Stop 248
cgcgagctatagcgtatgatatcgc

SEQ ID NO: 66890 - DNA, 25 bp, Artificial
  probe
  misc_feature (1)..(25): SEQ ID NO: 683; WAN024AUL_s_at; Start 226; Stop 250
cgagctatagcgtatgatatcgctg

SEQ ID NO: 66891 - DNA, 25 bp, Artificial
  probe
  misc_feature (1)..(25): SEQ ID NO: 683; WAN024AUL_s_at; Start 235; Stop 259
gcgtatgatatcgctgcaattaaca

SEQ ID NO: 66892 - DNA, 25 bp, Artificial
  probe
  misc_feature (1)..(25): SEQ ID NO: 683; WAN024AUL_s_at; Start 219; Stop 243
tccagcgcgagctatagcgtatgat

SEQ ID NO: 66893 - DNA, 25 bp, Artificial
  probe
  misc_feature (1)..(25): SEQ ID NO: 683; WAN024AUL_s_at; Start 234; Stop 258
agcgtatgatatcgctgcaattaac

SEQ ID NO: 66894 - DNA, 25 bp, Artificial
  probe
  misc_feature (1)..(25): SEQ ID NO: 683; WAN024AUL_s_at; Start 233; Stop 257
tagcgtatgatatcgctgcaattaa

SEQ ID NO: 66895 - DNA, 25 bp, Artificial
  probe
  misc_feature (1)..(25): SEQ ID NO: 683; WAN024AUL_s_at; Start 232; Stop 256
atagcgtatgatatcgctgcaatta

SEQ ID NO: 66896 - DNA, 25 bp, Artificial
  probe
  misc_feature (1)..(25): SEQ ID NO: 683; WAN024AUL_s_at; Start 229; Stop 253
gctatagcgtatgatatcgctgcaa

SEQ ID NO: 66897 - DNA, 25 bp, Artificial
  probe
  misc_feature (1)..(25): SEQ ID NO: 683; WAN024AUL_s_at; Start 218; Stop 242
gtccagcgcgagctatagcgtatga

SEQ ID NO: 66898 - DNA, 25 bp, Artificial
  probe
  misc_feature (1)..(25): SEQ ID NO: 683; WAN024AUL_s_at; Start 217; Stop 241
ggtccagcgcgagctatagcgtatg

SEQ ID NO: 66899 - DNA, 25 bp, Artificial
  probe
  misc_feature (1)..(25): SEQ ID NO: 683; WAN024AUL_s_at; Start 228; Stop 252
agctatagcgtatgatatcgctgca

SEQ ID NO: 66900 - DNA, 25 bp, Artificial
  probe
  misc_feature (1)..(25): SEQ ID NO: 683; WAN024AUL_s_at; Start 834; Stop 858
tgtaggtacagtctatgagcaagag

SEQ ID NO: 66901 - DNA, 25 bp, Artificial
  probe
  misc_feature (1)..(25): SEQ ID NO: 683; WAN024AUL_s_at; Start 230; Stop 254
ctatagcgtatgatatcgctgcaat

SEQ ID NO: 66902 - DNA, 25 bp, Artificial
  probe
  misc_feature (1)..(25): SEQ ID NO: 683; WAN024AUL_s_at; Start 227; Stop 251
gagctatagcgtatgatatcgctgc

SEQ ID NO: 66903 - DNA, 25 bp, Artificial
  probe
  misc_feature (1)..(25): SEQ ID NO: 683; WAN024AUL_s_at; Start 225; Stop 249
gcgagctatagcgtatgatatcgct

SEQ ID NO: 66904 - DNA, 25 bp, Artificial
  probe
  misc_feature (1)..(25): SEQ ID NO: 683; WAN024AUL_s_at; Start 231; Stop 255
tatagcgtatgatatcgctgcaatt

SEQ ID NO: 66905 - DNA, 25 bp, Artificial
  probe
  misc_feature (1)..(25): SEQ ID NO: 683; WAN024AUL_s_at; Start 221; Stop 245
cagcgcgagctatagcgtatgatat

SEQ ID NO: 66906 - DNA, 25 bp, Artificial
  probe
  misc_feature (1)..(25): SEQ ID NO: 683; WAN024AUL_s_at; Start 223; Stop 247
gcgcgagctatagcgtatgatatcg

SEQ ID NO: 66907 - DNA, 25 bp, Artificial
  probe
  misc_feature (1)..(25): SEQ ID NO: 6548; WAN024AUM_at; Start 280; Stop 304
gataagaatctttatattttaggtg

SEQ ID NO: 66908 - DNA, 25 bp, Artificial
  probe
  misc_feature (1)..(25): SEQ ID NO: 6548; WAN024AUM_at; Start 228; Stop 252
ggttactacttttcagaatatccag

SEQ ID NO: 66909 - DNA, 25 bp, Artificial
  probe
  misc_feature (1)..(25): SEQ ID NO: 6548; WAN024AUM_at; Start 390; Stop 414
tttccctggagagcttgacttgtct

SEQ ID NO: 66910 - DNA, 25 bp, Artificial
  probe
  misc_feature (1)..(25): SEQ ID NO: 6548; WAN024AUM_at; Start 233; Stop 257
ctacttttcagaatatccagtctgt

SEQ ID NO: 66911 - DNA, 25 bp, Artificial
  probe
  misc_feature (1)..(25): SEQ ID NO: 6548; WAN024AUM_at; Start 393; Stop 417
ccctggagagcttgacttgtctctt

SEQ ID NO: 66912 - DNA, 25 bp, Artificial
  probe
  misc_feature (1)..(25): SEQ ID NO: 6548; WAN024AUM_at; Start 230; Stop 254
ttactacttttcagaatatccagtc

SEQ ID NO: 66913 - DNA, 25 bp, Artificial
  probe
  misc_feature (1)..(25): SEQ ID NO: 6548; WAN024AUM_at; Start 279; Stop 303
agataagaatctttatattttaggt

SEQ ID NO: 66914 - DNA, 25 bp, Artificial
  probe
  misc_feature (1)..(25): SEQ ID NO: 6548; WAN024AUM_at; Start 391; Stop 415
ttccctggagagcttgacttgtctc

SEQ ID NO: 66915 - DNA, 25 bp, Artificial
  probe
  misc_feature (1)..(25): SEQ ID NO: 6548; WAN024AUM_at; Start 232; Stop 256
actacttttcagaatatccagtctg

SEQ ID NO: 66916 - DNA, 25 bp, Artificial
  probe
  misc_feature (1)..(25): SEQ ID NO: 6548; WAN024AUM_at; Start 278; Stop 302
aagataagaatctttatattttagg

SEQ ID NO: 66917 - DNA, 25 bp, Artificial
  probe
  misc_feature (1)..(25): SEQ ID NO: 6548; WAN024AUM_at; Start 227; Stop 251
gggttactacttttcagaatatcca

SEQ ID NO: 66918 - DNA, 25 bp, Artificial
  probe
  misc_feature (1)..(25): SEQ ID NO: 6548; WAN024AUM_at; Start 277; Stop 301
caagataagaatctttatattttag

SEQ ID NO: 66919 - DNA, 25 bp, Artificial
  probe
  misc_feature (1)..(25): SEQ ID NO: 6548; WAN024AUM_at; Start 229; Stop 253
gttactacttttcagaatatccagt

SEQ ID NO: 66920 - DNA, 25 bp, Artificial
  probe
  misc_feature (1)..(25): SEQ ID NO: 6548; WAN024AUM_at; Start 231; Stop 255
tactacttttcagaatatccagtct

SEQ ID NO: 66921 - DNA, 25 bp, Artificial
  probe
  misc_feature (1)..(25): SEQ ID NO: 6548; WAN024AUM_at; Start 392; Stop 416
tccctggagagcttgacttgtctct

SEQ ID NO: 66922 - DNA, 25 bp, Artificial
  probe
  misc_feature (1)..(25): SEQ ID NO: 6549; WAN024AUN_x_at; Start 228; Stop 252
ggttactactttttatgatgttcag

SEQ ID NO: 66923 - DNA, 25 bp, Artificial
  probe
  misc_feature (1)..(25): SEQ ID NO: 6549; WAN024AUN_x_at; Start 236; Stop 260
ctttttatgatgttcagtctgttct

SEQ ID NO: 66924 - DNA, 25 bp, Artificial
  probe
  misc_feature (1)..(25): SEQ ID NO: 6549; WAN024AUN_x_at; Start 138; Stop 162
acgcgtgacctttgatgggatggga

SEQ ID NO: 66925 - DNA, 25 bp, Artificial
  probe
  misc_feature (1)..(25): SEQ ID NO: 6549; WAN024AUN_x_at; Start 239; Stop 263
tttatgatgttcagtctgttctcga

SEQ ID NO: 66926 - DNA, 25 bp, Artificial
  probe
  misc_feature (1)..(25): SEQ ID NO: 6549; WAN024AUN_x_at; Start 442; Stop 466
tatagcaaagatgagaaaaatcctt

SEQ ID NO: 66927 - DNA, 25 bp, Artificial
  probe
  misc_feature (1)..(25): SEQ ID NO: 6549; WAN024AUN_x_at; Start 288; Stop 312
tctttatattctcggtggaaagcaa

SEQ ID NO: 66928 - DNA, 25 bp, Artificial
  probe
  misc_feature (1)..(25): SEQ ID NO: 6549; WAN024AUN_x_at; Start 282; Stop 306
caagaatctttatattctcggtgga

SEQ ID NO: 66929 - DNA, 25 bp, Artificial
  probe
  misc_feature (1)..(25): SEQ ID NO: 6549; WAN024AUN_x_at; Start 434; Stop 458
gcaaatcctatagcaaagatgagaa

SEQ ID NO: 66930 - DNA, 25 bp, Artificial
  probe
  misc_feature (1)..(25): SEQ ID NO: 6549; WAN024AUN_x_at; Start 186; Stop 210
gaccttgattttgacgcgtaattct

SEQ ID NO: 66931 - DNA, 25 bp, Artificial
  probe
  misc_feature (1)..(25): SEQ ID NO: 6549; WAN024AUN_x_at; Start 240; Stop 264
ttatgatgttcagtctgttctcgac

SEQ ID NO: 66932 - DNA, 25 bp, Artificial
  probe
  misc_feature (1)..(25): SEQ ID NO: 6549; WAN024AUN_x_at; Start 238; Stop 262
ttttatgatgttcagtctgttctcg

SEQ ID NO: 66933 - DNA, 25 bp, Artificial
  probe
  misc_feature (1)..(25): SEQ ID NO: 6549; WAN024AUN_x_at; Start 244; Stop 268
gatgttcagtctgttctcgactggt

SEQ ID NO: 66934 - DNA, 25 bp, Artificial
  probe
  misc_feature (1)..(25): SEQ ID NO: 6549; WAN024AUN_x_at; Start 261; Stop 285
cgactggtatcagtctcaagacaag

SEQ ID NO: 66935 - DNA, 25 bp, Artificial
  probe
  misc_feature (1)..(25): SEQ ID NO: 6549; WAN024AUN_x_at; Start 201; Stop 225
gcgtaattctgaagaaaagatagat

SEQ ID NO: 66936 - DNA, 25 bp, Artificial
  probe
  misc_feature (1)..(25): SEQ ID NO: 6549; WAN024AUN_x_at; Start 426; Stop 450
agtttcaagcaaatcctatagcaaa

SEQ ID NO: 66937 - DNA, 25 bp, Artificial
  probe
  misc_feature (1)..(25): SEQ ID NO: 6549; WAN024AUN_x_at; Start 440; Stop 464
cctatagcaaagatgagaaaaatcc

SEQ ID NO: 66938 - DNA, 25 bp, Artificial
  probe
  misc_feature (1)..(25): SEQ ID NO: 6549; WAN024AUN_x_at; Start 259; Stop 283
ctcgactggtatcagtctcaagaca

SEQ ID NO: 66939 - DNA, 25 bp, Artificial
  probe
  misc_feature (1)..(25): SEQ ID NO: 6549; WAN024AUN_x_at; Start 291; Stop 315
ttatattctcggtggaaagcaaatt

SEQ ID NO: 66940 - DNA, 25 bp, Artificial
  probe
  misc_feature (1)..(25): SEQ ID NO: 6549; WAN024AUN_x_at; Start 290; Stop 314
tttatattctcggtggaaagcaaat

SEQ ID NO: 66941 - DNA, 25 bp, Artificial
  probe
  misc_feature (1)..(25): SEQ ID NO: 6549; WAN024AUN_x_at; Start 441; Stop 465
ctatagcaaagatgagaaaaatcct

SEQ ID NO: 66942 - DNA, 25 bp, Artificial
  probe
  misc_feature (1)..(25): SEQ ID NO: 6549; WAN024AUN_x_at; Start 439; Stop 463
tcctatagcaaagatgagaaaaatc

SEQ ID NO: 66943 - DNA, 25 bp, Artificial
  probe
  misc_feature (1)..(25): SEQ ID NO: 6549; WAN024AUN_x_at; Start 425; Stop 449
cagtttcaagcaaatcctatagcaa

SEQ ID NO: 66944 - DNA, 25 bp, Artificial
  probe
  misc_feature (1)..(25): SEQ ID NO: 6549; WAN024AUN_x_at; Start 430; Stop 454
tcaagcaaatcctatagcaaagatg

SEQ ID NO: 66945 - DNA, 25 bp, Artificial
  probe
  misc_feature (1)..(25): SEQ ID NO: 6549; WAN024AUN_x_at; Start 234; Stop 258
tactttttatgatgttcagtctgtt

SEQ ID NO: 66946 - DNA, 25 bp, Artificial
  probe
  misc_feature (1)..(25): SEQ ID NO: 6549; WAN024AUN_x_at; Start 156; Stop 180
gatgggacgtcgcttgcttccaaaa

SEQ ID NO: 66947 - DNA, 25 bp, Artificial
  probe
  misc_feature (1)..(25): SEQ ID NO: 6549; WAN024AUN_x_at; Start 235; Stop 259
actttttatgatgttcagtctgttc

SEQ ID NO: 66948 - DNA, 25 bp, Artificial
  probe
  misc_feature (1)..(25): SEQ ID NO: 6549; WAN024AUN_x_at; Start 227; Stop 251
gggttactactttttatgatgttca

SEQ ID NO: 66949 - DNA, 25 bp, Artificial
  probe
  misc_feature (1)..(25): SEQ ID NO: 6549; WAN024AUN_x_at; Start 435; Stop 459
caaatcctatagcaaagatgagaaa

SEQ ID NO: 66950 - DNA, 25 bp, Artificial
  probe
  misc_feature (1)..(25): SEQ ID NO: 6549; WAN024AUN_x_at; Start 229; Stop 253
gttactactttttatgatgttcagt

SEQ ID NO: 66951 - DNA, 25 bp, Artificial
  probe
  misc_feature (1)..(25): SEQ ID NO: 6549; WAN024AUN_x_at; Start 232; Stop 256
actactttttatgatgttcagtctg

SEQ ID NO: 66952 - DNA, 25 bp, Artificial
  probe
  misc_feature (1)..(25): SEQ ID NO: 6549; WAN024AUN_x_at; Start 231; Stop 255
tactactttttatgatgttcagtct

SEQ ID NO: 66953 - DNA, 25 bp, Artificial
  probe
  misc_feature (1)..(25): SEQ ID NO: 6549; WAN024AUN_x_at; Start 274; Stop 298
tctcaagacaagaatctttatattc

SEQ ID NO: 66954 - DNA, 25 bp, Artificial
  probe
  misc_feature (1)..(25): SEQ ID NO: 6549; WAN024AUN_x_at; Start 237; Stop 261
tttttatgatgttcagtctgttctc

SEQ ID NO: 66955 - DNA, 25 bp, Artificial
  probe
  misc_feature (1)..(25): SEQ ID NO: 6549; WAN024AUN_x_at; Start 243; Stop 267
tgatgttcagtctgttctcgactgg

SEQ ID NO: 66956 - DNA, 25 bp, Artificial
  probe
  misc_feature (1)..(25): SEQ ID NO: 6550; WAN024AUO_at; Start 443; Stop 467
atgctaaagatgagaaaaattctta

SEQ ID NO: 66957 - DNA, 25 bp, Artificial
  probe
  misc_feature (1)..(25): SEQ ID NO: 6550; WAN024AUO_at; Start 440; Stop 464
cctatgctaaagatgagaaaaattc

SEQ ID NO: 66958 - DNA, 25 bp, Artificial
  probe
  misc_feature (1)..(25): SEQ ID NO: 6550; WAN024AUO_at; Start 444; Stop 468
tgctaaagatgagaaaaattcttat

SEQ ID NO: 66959 - DNA, 25 bp, Artificial
  probe
  misc_feature (1)..(25): SEQ ID NO: 6550; WAN024AUO_at; Start 442; Stop 466
tatgctaaagatgagaaaaattctt

SEQ ID NO: 66960 - DNA, 25 bp, Artificial
  probe
  misc_feature (1)..(25): SEQ ID NO: 6550; WAN024AUO_at; Start 441; Stop 465
ctatgctaaagatgagaaaaattct

SEQ ID NO: 66961 - DNA, 25 bp, Artificial
  probe
  misc_feature (1)..(25): SEQ ID NO: 6550; WAN024AUO_at; Start 267; Stop 291
gtatcagggccaagacaagaatctc

SEQ ID NO: 66962 - DNA, 25 bp, Artificial
  probe
  misc_feature (1)..(25): SEQ ID NO: 6550; WAN024AUO_at; Start 263; Stop 287
actggtatcagggccaagacaagaa

SEQ ID NO: 66963 - DNA, 25 bp, Artificial
  probe
  misc_feature (1)..(25): SEQ ID NO: 6550; WAN024AUO_at; Start 439; Stop 463
tcctatgctaaagatgagaaaaatt

SEQ ID NO: 66964 - DNA, 25 bp, Artificial
  probe
  misc_feature (1)..(25): SEQ ID NO: 6547; WAN024AUP_at; Start 331; Stop 355
ccctatttagatgaagtaattgtca

SEQ ID NO: 66965 - DNA, 25 bp, Artificial
  probe
  misc_feature (1)..(25): SEQ ID NO: 6547; WAN024AUP_at; Start 223; Stop 247
gatggggctgttacttttcaggatg

SEQ ID NO: 66966 - DNA, 25 bp, Artificial
  probe
  misc_feature (1)..(25): SEQ ID NO: 6547; WAN024AUP_at; Start 218; Stop 242
agatagatggggctgttacttttca

SEQ ID NO: 66967 - DNA, 25 bp, Artificial
  probe
  misc_feature (1)..(25): SEQ ID NO: 6547; WAN024AUP_at; Start 324; Stop 348
ttttgagccctatttagatgaagta

SEQ ID NO: 66968 - DNA, 25 bp, Artificial
  probe
  misc_feature (1)..(25): SEQ ID NO: 6547; WAN024AUP_at; Start 329; Stop 353
agccctatttagatgaagtaattgt

SEQ ID NO: 66969 - DNA, 25 bp, Artificial
  probe
  misc_feature (1)..(25): SEQ ID NO: 6547; WAN024AUP_at; Start 224; Stop 248
atggggctgttacttttcaggatgt

SEQ ID NO: 66970 - DNA, 25 bp, Artificial
  probe
  misc_feature (1)..(25): SEQ ID NO: 6547; WAN024AUP_at; Start 325; Stop 349
tttgagccctatttagatgaagtaa

SEQ ID NO: 66971 - DNA, 25 bp, Artificial
  probe
  misc_feature (1)..(25): SEQ ID NO: 6547; WAN024AUP_at; Start 328; Stop 352
gagccctatttagatgaagtaattg

SEQ ID NO: 66972 - DNA, 25 bp, Artificial
  probe
  misc_feature (1)..(25): SEQ ID NO: 6547; WAN024AUP_at; Start 216; Stop 240
aaagatagatggggctgttactttt

SEQ ID NO: 66973 - DNA, 25 bp, Artificial
  probe
  misc_feature (1)..(25): SEQ ID NO: 6547; WAN024AUP_at; Start 217; Stop 241
aagatagatggggctgttacttttc

SEQ ID NO: 66974 - DNA, 25 bp, Artificial
  probe
  misc_feature (1)..(25): SEQ ID NO: 6547; WAN024AUP_at; Start 215; Stop 239
aaaagatagatggggctgttacttt

SEQ ID NO: 66975 - DNA, 25 bp, Artificial
  probe
  misc_feature (1)..(25): SEQ ID NO: 6547; WAN024AUP_at; Start 327; Stop 351
tgagccctatttagatgaagtaatt

SEQ ID NO: 66976 - DNA, 25 bp, Artificial
  probe
  misc_feature (1)..(25): SEQ ID NO: 6547; WAN024AUP_at; Start 225; Stop 249
tggggctgttacttttcaggatgtc

SEQ ID NO: 66977 - DNA, 25 bp, Artificial
  probe
  misc_feature (1)..(25): SEQ ID NO: 6547; WAN024AUP_at; Start 226; Stop 250
ggggctgttacttttcaggatgtcc

SEQ ID NO: 66978 - DNA, 25 bp, Artificial
  probe
  misc_feature (1)..(25): SEQ ID NO: 6547; WAN024AUP_at; Start 330; Stop 354
gccctatttagatgaagtaattgtc

SEQ ID NO: 66979 - DNA, 25 bp, Artificial
  probe
  misc_feature (1)..(25): SEQ ID NO: 6547; WAN024AUP_at; Start 228; Stop 252
ggctgttacttttcaggatgtccag

SEQ ID NO: 66980 - DNA, 25 bp, Artificial
  probe
  misc_feature (1)..(25): SEQ ID NO: 6547; WAN024AUP_at; Start 229; Stop 253
gctgttacttttcaggatgtccagt

SEQ ID NO: 66981 - DNA, 25 bp, Artificial
  probe
  misc_feature (1)..(25): SEQ ID NO: 6547; WAN024AUP_at; Start 326; Stop 350
ttgagccctatttagatgaagtaat

SEQ ID NO: 66982 - DNA, 25 bp, Artificial
  probe
  misc_feature (1)..(25): SEQ ID NO: 6547; WAN024AUP_at; Start 227; Stop 251
gggctgttacttttcaggatgtcca

SEQ ID NO: 66983 - DNA, 25 bp, Artificial
  probe
  misc_feature (1)..(25): SEQ ID NO: 6542; WAN024AUQ_at; Start 170; Stop 194
tgcttccaaaacgtgaaatcttgat

SEQ ID NO: 66984 - DNA, 25 bp, Artificial
  probe
  misc_feature (1)..(25): SEQ ID NO: 6542; WAN024AUQ_at; Start 177; Stop 201
aaaacgtgaaatcttgattttgaca

SEQ ID NO: 66985 - DNA, 25 bp, Artificial
  probe
  misc_feature (1)..(25): SEQ ID NO: 6542; WAN024AUQ_at; Start 171; Stop 195
gcttccaaaacgtgaaatcttgatt

SEQ ID NO: 66986 - DNA, 25 bp, Artificial
  probe
  misc_feature (1)..(25): SEQ ID NO: 6542; WAN024AUQ_at; Start 168; Stop 192
cttgcttccaaaacgtgaaatcttg

SEQ ID NO: 66987 - DNA, 25 bp, Artificial
  probe
  misc_feature (1)..(25): SEQ ID NO: 6542; WAN024AUQ_at; Start 174; Stop 198
tccaaaacgtgaaatcttgattttg

SEQ ID NO: 66988 - DNA, 25 bp, Artificial
  probe
  misc_feature (1)..(25): SEQ ID NO: 6542; WAN024AUQ_at; Start 179; Stop 203
aacgtgaaatcttgattttgacacg

SEQ ID NO: 66989 - DNA, 25 bp, Artificial
  probe
  misc_feature (1)..(25): SEQ ID NO: 6542; WAN024AUQ_at; Start 172; Stop 196
cttccaaaacgtgaaatcttgattt

SEQ ID NO: 66990 - DNA, 25 bp, Artificial
  probe
  misc_feature (1)..(25): SEQ ID NO: 6542; WAN024AUQ_at; Start 178; Stop 202
aaacgtgaaatcttgattttgacac

SEQ ID NO: 66991 - DNA, 25 bp, Artificial
  probe
  misc_feature (1)..(25): SEQ ID NO: 6542; WAN024AUQ_at; Start 169; Stop 193
ttgcttccaaaacgtgaaatcttga

SEQ ID NO: 66992 - DNA, 25 bp, Artificial
  probe
  misc_feature (1)..(25): SEQ ID NO: 6542; WAN024AUQ_at; Start 176; Stop 200
caaaacgtgaaatcttgattttgac

SEQ ID NO: 66993 - DNA, 25 bp, Artificial
  probe
  misc_feature (1)..(25): SEQ ID NO: 6542; WAN024AUQ_at; Start 175; Stop 199
ccaaaacgtgaaatcttgattttga

SEQ ID NO: 66994 - DNA, 25 bp, Artificial
  probe
  misc_feature (1)..(25): SEQ ID NO: 6546; WAN024AUR_at; Start 50; Stop 74
ttgggaaagacaatcgtctaccttg

SEQ ID NO: 66995 - DNA, 25 bp, Artificial
  probe
  misc_feature (1)..(25): SEQ ID NO: 6546; WAN024AUR_at; Start 47; Stop 71
tgattgggaaagacaatcgtctacc

SEQ ID NO: 66996 - DNA, 25 bp, Artificial
  probe
  misc_feature (1)..(25): SEQ ID NO: 6546; WAN024AUR_at; Start 51; Stop 75
tgggaaagacaatcgtctaccttgg

SEQ ID NO: 66997 - DNA, 25 bp, Artificial
  probe
  misc_feature (1)..(25): SEQ ID NO: 6546; WAN024AUR_at; Start 49; Stop 73
attgggaaagacaatcgtctacctt

SEQ ID NO: 66998 - DNA, 25 bp, Artificial
  probe
  misc_feature (1)..(25): SEQ ID NO: 6546; WAN024AUR_at; Start 52; Stop 76
gggaaagacaatcgtctaccttggc

SEQ ID NO: 66999 - DNA, 25 bp, Artificial
  probe
  misc_feature (1)..(25): SEQ ID NO: 6546; WAN024AUR_at; Start 48; Stop 72
gattgggaaagacaatcgtctacct

SEQ ID NO: 67000 - DNA, 25 bp, Artificial
  probe
  misc_feature (1)..(25): SEQ ID NO: 6546; WAN024AUR_at; Start 196; Stop 220
ttgacacgtaacctagaagaaacga

SEQ ID NO: 67001 - DNA, 25 bp, Artificial
  probe
  misc_feature (1)..(25): SEQ ID NO: 6546; WAN024AUR_at; Start 46; Stop 70
gtgattgggaaagacaatcgtctac

SEQ ID NO: 67002 - DNA, 25 bp, Artificial
  probe
  misc_feature (1)..(25): SEQ ID NO: 6546; WAN024AUR_at; Start 45; Stop 69
tgtgattgggaaagacaatcgtcta

SEQ ID NO: 67003 - DNA, 25 bp, Artificial
  probe
  misc_feature (1)..(25): SEQ ID NO: 6546; WAN024AUR_at; Start 198; Stop 222
gacacgtaacctagaagaaacgata

SEQ ID NO: 67004 - DNA, 25 bp, Artificial
  probe
  misc_feature (1)..(25): SEQ ID NO: 6546; WAN024AUR_at; Start 201; Stop 225
acgtaacctagaagaaacgatagat

SEQ ID NO: 67005 - DNA, 25 bp, Artificial
  probe
  misc_feature (1)..(25): SEQ ID NO: 6546; WAN024AUR_at; Start 200; Stop 224
cacgtaacctagaagaaacgataga

SEQ ID NO: 67006 - DNA, 25 bp, Artificial
  probe
  misc_feature (1)..(25): SEQ ID NO: 6546; WAN024AUR_at; Start 197; Stop 221
tgacacgtaacctagaagaaacgat

SEQ ID NO: 67007 - DNA, 25 bp, Artificial
  probe
  misc_feature (1)..(25): SEQ ID NO: 6546; WAN024AUR_at; Start 199; Stop 223
acacgtaacctagaagaaacgatag

SEQ ID NO: 67008 - DNA, 25 bp, Artificial
  probe
  misc_feature (1)..(25): SEQ ID NO: 6546; WAN024AUR_at; Start 54; Stop 78
gaaagacaatcgtctaccttggcat

SEQ ID NO: 67009 - DNA, 25 bp, Artificial
  probe
  misc_feature (1)..(25): SEQ ID NO: 6546; WAN024AUR_at; Start 53; Stop 77
ggaaagacaatcgtctaccttggca

SEQ ID NO: 67010 - DNA, 25 bp, Artificial
  probe
  misc_feature (1)..(25): SEQ ID NO: 1439; WAN024AUS_at; Start 330; Stop 354
gtcctatttggatgaagtgattgtc

SEQ ID NO: 67011 - DNA, 25 bp, Artificial
  probe
  misc_feature (1)..(25): SEQ ID NO: 1439; WAN024AUS_at; Start 324; Stop 348
ttttgagtcctatttggatgaagtg

SEQ ID NO: 67012 - DNA, 25 bp, Artificial
  probe
  misc_feature (1)..(25): SEQ ID NO: 1439; WAN024AUS_at; Start 325; Stop 349
tttgagtcctatttggatgaagtga

SEQ ID NO: 67013 - DNA, 25 bp, Artificial
  probe
  misc_feature (1)..(25): SEQ ID NO: 1439; WAN024AUS_at; Start 327; Stop 351
tgagtcctatttggatgaagtgatt

SEQ ID NO: 67014 - DNA, 25 bp, Artificial
  probe
  misc_feature (1)..(25): SEQ ID NO: 1439; WAN024AUS_at; Start 326; Stop 350
ttgagtcctatttggatgaagtgat

SEQ ID NO: 67015 - DNA, 25 bp, Artificial
  probe
  misc_feature (1)..(25): SEQ ID NO: 1439; WAN024AUS_at; Start 328; Stop 352
gagtcctatttggatgaagtgattg

SEQ ID NO: 67016 - DNA, 25 bp, Artificial
  probe
  misc_feature (1)..(25): SEQ ID NO: 1439; WAN024AUS_at; Start 329; Stop 353
agtcctatttggatgaagtgattgt

SEQ ID NO: 67017 - DNA, 25 bp, Artificial
  probe
  misc_feature (1)..(25): SEQ ID NO: 1441; WAN024AUT_x_at; Start 427; Stop 451
gtttcaagcaaatcttataccaaag

SEQ ID NO: 67018 - DNA, 25 bp, Artificial
  probe
  misc_feature (1)..(25): SEQ ID NO: 1441; WAN024AUT_x_at; Start 156; Stop 180
aatgggacgtcgtctgcttccaaaa

SEQ ID NO: 67019 - DNA, 25 bp, Artificial
  probe
  misc_feature (1)..(25): SEQ ID NO: 1441; WAN024AUT_x_at; Start 432; Stop 456
aagcaaatcttataccaaagatgag

SEQ ID NO: 67020 - DNA, 25 bp, Artificial
  probe
  misc_feature (1)..(25): SEQ ID NO: 1441; WAN024AUT_x_at; Start 441; Stop 465
ttataccaaagatgagaaaaatcct

SEQ ID NO: 67021 - DNA, 25 bp, Artificial
  probe
  misc_feature (1)..(25): SEQ ID NO: 1441; WAN024AUT_x_at; Start 155; Stop 179
gaatgggacgtcgtctgcttccaaa

SEQ ID NO: 67022 - DNA, 25 bp, Artificial
  probe
  misc_feature (1)..(25): SEQ ID NO: 1441; WAN024AUT_x_at; Start 425; Stop 449
cggtttcaagcaaatcttataccaa

SEQ ID NO: 67023 - DNA, 25 bp, Artificial
  probe
  misc_feature (1)..(25): SEQ ID NO: 1441; WAN024AUT_x_at; Start 220; Stop 244
ctagacggagttgctacttttcatg

SEQ ID NO: 67024 - DNA, 25 bp, Artificial
  probe
  misc_feature (1)..(25): SEQ ID NO: 1441; WAN024AUT_x_at; Start 152; Stop 176
atggaatgggacgtcgtctgcttcc

SEQ ID NO: 67025 - DNA, 25 bp, Artificial
  probe
  misc_feature (1)..(25): SEQ ID NO: 1441; WAN024AUT_x_at; Start 196; Stop 220
ttgacacgtaattcggaagaaaagc

SEQ ID NO: 67026 - DNA, 25 bp, Artificial
  probe
  misc_feature (1)..(25): SEQ ID NO: 1441; WAN024AUT_x_at; Start 434; Stop 458
gcaaatcttataccaaagatgagaa

SEQ ID NO: 67027 - DNA, 25 bp, Artificial
  probe
  misc_feature (1)..(25): SEQ ID NO: 1441; WAN024AUT_x_at; Start 431; Stop 455
caagcaaatcttataccaaagatga

SEQ ID NO: 67028 - DNA, 25 bp, Artificial
  probe
  misc_feature (1)..(25): SEQ ID NO: 1441; WAN024AUT_x_at; Start 424; Stop 448
acggtttcaagcaaatcttatacca

SEQ ID NO: 67029 - DNA, 25 bp, Artificial
  probe
  misc_feature (1)..(25): SEQ ID NO: 1441; WAN024AUT_x_at; Start 153; Stop 177
tggaatgggacgtcgtctgcttcca

SEQ ID NO: 67030 - DNA, 25 bp, Artificial
  probe
  misc_feature (1)..(25): SEQ ID NO: 1441; WAN024AUT_x_at; Start 148; Stop 172
tttgatggaatgggacgtcgtctgc

SEQ ID NO: 67031 - DNA, 25 bp, Artificial
  probe
  misc_feature (1)..(25): SEQ ID NO: 1441; WAN024AUT_x_at; Start 209; Stop 233
cggaagaaaagctagacggagttgc

SEQ ID NO: 67032 - DNA, 25 bp, Artificial
  probe
  misc_feature (1)..(25): SEQ ID NO: 1441; WAN024AUT_x_at; Start 158; Stop 182
tgggacgtcgtctgcttccaaaacg

SEQ ID NO: 67033 - DNA, 25 bp, Artificial
  probe
  misc_feature (1)..(25): SEQ ID NO: 1441; WAN024AUT_x_at; Start 435; Stop 459
caaatcttataccaaagatgagaaa

SEQ ID NO: 67034 - DNA, 25 bp, Artificial
  probe
  misc_feature (1)..(25): SEQ ID NO: 1441; WAN024AUT_x_at; Start 210; Stop 234
ggaagaaaagctagacggagttgct

SEQ ID NO: 67035 - DNA, 25 bp, Artificial
  probe
  misc_feature (1)..(25): SEQ ID NO: 1441; WAN024AUT_x_at; Start 228; Stop 252
agttgctacttttcatgatgtccag

SEQ ID NO: 67036 - DNA, 25 bp, Artificial
  probe
  misc_feature (1)..(25): SEQ ID NO: 1441; WAN024AUT_x_at; Start 147; Stop 171
ctttgatggaatgggacgtcgtctg

SEQ ID NO: 67037 - DNA, 25 bp, Artificial
  probe
  misc_feature (1)..(25): SEQ ID NO: 1441; WAN024AUT_x_at; Start 422; Stop 446
agacggtttcaagcaaatcttatac

SEQ ID NO: 67038 - DNA, 25 bp, Artificial
  probe
  misc_feature (1)..(25): SEQ ID NO: 1441; WAN024AUT_x_at; Start 426; Stop 450
ggtttcaagcaaatcttataccaaa

SEQ ID NO: 67039 - DNA, 25 bp, Artificial
  probe
  misc_feature (1)..(25): SEQ ID NO: 1441; WAN024AUT_x_at; Start 430; Stop 454
tcaagcaaatcttataccaaagatg

SEQ ID NO: 67040 - DNA, 25 bp, Artificial
  probe
  misc_feature (1)..(25): SEQ ID NO: 1441; WAN024AUT_x_at; Start 253; Stop 277
tctgtcttggactggtatcatgctc

SEQ ID NO: 67041 - DNA, 25 bp, Artificial
  probe
  misc_feature (1)..(25): SEQ ID NO: 1441; WAN024AUT_x_at; Start 423; Stop 447
gacggtttcaagcaaatcttatacc

SEQ ID NO: 67042 - DNA, 25 bp, Artificial
  probe
  misc_feature (1)..(25): SEQ ID NO: 1441; WAN024AUT_x_at; Start 151; Stop 175
gatggaatgggacgtcgtctgcttc

SEQ ID NO: 67043 - DNA, 25 bp, Artificial
  probe
  misc_feature (1)..(25): SEQ ID NO: 1441; WAN024AUT_x_at; Start 150; Stop 174
tgatggaatgggacgtcgtctgctt

SEQ ID NO: 67044 - DNA, 25 bp, Artificial
  probe
  misc_feature (1)..(25): SEQ ID NO: 1441; WAN024AUT_x_at; Start 208; Stop 232
tcggaagaaaagctagacggagttg

SEQ ID NO: 67045 - DNA, 25 bp, Artificial
  probe
  misc_feature (1)..(25): SEQ ID NO: 1441; WAN024AUT_x_at; Start 154; Stop 178
ggaatgggacgtcgtctgcttccaa

SEQ ID NO: 67046 - DNA, 25 bp, Artificial
  probe
  misc_feature (1)..(25): SEQ ID NO: 1441; WAN024AUT_x_at; Start 261; Stop 285
ggactggtatcatgctcaagacaag

SEQ ID NO: 67047 - DNA, 25 bp, Artificial
  probe
  misc_feature (1)..(25): SEQ ID NO: 1441; WAN024AUT_x_at; Start 282; Stop 306
caagaatctctatattcttggtggg

SEQ ID NO: 67048 - DNA, 25 bp, Artificial
  probe
  misc_feature (1)..(25): SEQ ID NO: 1441; WAN024AUT_x_at; Start 219; Stop 243
gctagacggagttgctacttttcat

SEQ ID NO: 67049 - DNA, 25 bp, Artificial
  probe
  misc_feature (1)..(25): SEQ ID NO: 1441; WAN024AUT_x_at; Start 149; Stop 173
ttgatggaatgggacgtcgtctgct

SEQ ID NO: 67050 - DNA, 25 bp, Artificial
  probe
  misc_feature (1)..(25): SEQ ID NO: 1441; WAN024AUT_x_at; Start 428; Stop 452
tttcaagcaaatcttataccaaaga

SEQ ID NO: 67051 - DNA, 25 bp, Artificial
  probe
  misc_feature (1)..(25): SEQ ID NO: 1442; WAN024AUU_x_at; Start 427; Stop 451
gtttcaagcaaatcctataccaaag

SEQ ID NO: 67052 - DNA, 25 bp, Artificial
  probe
  misc_feature (1)..(25): SEQ ID NO: 1442; WAN024AUU_x_at; Start 332; Stop 356
cctaccttgacgaagtgattgtgac

SEQ ID NO: 67053 - DNA, 25 bp, Artificial
  probe
  misc_feature (1)..(25): SEQ ID NO: 1442; WAN024AUU_x_at; Start 439; Stop 463
tcctataccaaagatgagaaaaatc

SEQ ID NO: 67054 - DNA, 25 bp, Artificial
  probe
  misc_feature (1)..(25): SEQ ID NO: 1442; WAN024AUU_x_at; Start 432; Stop 456
aagcaaatcctataccaaagatgag

SEQ ID NO: 67055 - DNA, 25 bp, Artificial
  probe
  misc_feature (1)..(25): SEQ ID NO: 1442; WAN024AUU_x_at; Start 328; Stop 352
gaaccctaccttgacgaagtgattg

SEQ ID NO: 67056 - DNA, 25 bp, Artificial
  probe
  misc_feature (1)..(25): SEQ ID NO: 1442; WAN024AUU_x_at; Start 205; Stop 229
aattctgaagaaaagatagacgggg

SEQ ID NO: 67057 - DNA, 25 bp, Artificial
  probe
  misc_feature (1)..(25): SEQ ID NO: 1442; WAN024AUU_x_at; Start 338; Stop 362
ttgacgaagtgattgtgactcaaat

SEQ ID NO: 67058 - DNA, 25 bp, Artificial
  probe
  misc_feature (1)..(25): SEQ ID NO: 1442; WAN024AUU_x_at; Start 298; Stop 322
ctcggtgggaagcaaatttttcagg

SEQ ID NO: 67059 - DNA, 25 bp, Artificial
  probe
  misc_feature (1)..(25): SEQ ID NO: 1442; WAN024AUU_x_at; Start 433; Stop 457
agcaaatcctataccaaagatgaga

SEQ ID NO: 67060 - DNA, 25 bp, Artificial
  probe
  misc_feature (1)..(25): SEQ ID NO: 1442; WAN024AUU_x_at; Start 436; Stop 460
aaatcctataccaaagatgagaaaa

SEQ ID NO: 67061 - DNA, 25 bp, Artificial
  probe
  misc_feature (1)..(25): SEQ ID NO: 1442; WAN024AUU_x_at; Start 429; Stop 453
ttcaagcaaatcctataccaaagat

SEQ ID NO: 67062 - DNA, 25 bp, Artificial
  probe
  misc_feature (1)..(25): SEQ ID NO: 1442; WAN024AUU_x_at; Start 198; Stop 222
gacgcgtaattctgaagaaaagata

SEQ ID NO: 67063 - DNA, 25 bp, Artificial
  probe
  misc_feature (1)..(25): SEQ ID NO: 1442; WAN024AUU_x_at; Start 283; Stop 307
aagaatctttatattctcggtggga

SEQ ID NO: 67064 - DNA, 25 bp, Artificial
  probe
  misc_feature (1)..(25): SEQ ID NO: 1442; WAN024AUU_x_at; Start 196; Stop 220
ttgacgcgtaattctgaagaaaaga

SEQ ID NO: 67065 - DNA, 25 bp, Artificial
  probe
  misc_feature (1)..(25): SEQ ID NO: 1442; WAN024AUU_x_at; Start 434; Stop 458
gcaaatcctataccaaagatgagaa

SEQ ID NO: 67066 - DNA, 25 bp, Artificial
  probe
  misc_feature (1)..(25): SEQ ID NO: 1442; WAN024AUU_x_at; Start 330; Stop 354
accctaccttgacgaagtgattgtg

SEQ ID NO: 67067 - DNA, 25 bp, Artificial
  probe
  misc_feature (1)..(25): SEQ ID NO: 1442; WAN024AUU_x_at; Start 431; Stop 455
caagcaaatcctataccaaagatga

SEQ ID NO: 67068 - DNA, 25 bp, Artificial
  probe
  misc_feature (1)..(25): SEQ ID NO: 1442; WAN024AUU_x_at; Start 204; Stop 228
taattctgaagaaaagatagacggg

SEQ ID NO: 67069 - DNA, 25 bp, Artificial
  probe
  misc_feature (1)..(25): SEQ ID NO: 1442; WAN024AUU_x_at; Start 336; Stop 360
ccttgacgaagtgattgtgactcaa

SEQ ID NO: 67070 - DNA, 25 bp, Artificial
  probe
  misc_feature (1)..(25): SEQ ID NO: 1442; WAN024AUU_x_at; Start 201; Stop 225
gcgtaattctgaagaaaagatagac

SEQ ID NO: 67071 - DNA, 25 bp, Artificial
  probe
  misc_feature (1)..(25): SEQ ID NO: 1442; WAN024AUU_x_at; Start 426; Stop 450
agtttcaagcaaatcctataccaaa

SEQ ID NO: 67072 - DNA, 25 bp, Artificial
  probe
  misc_feature (1)..(25): SEQ ID NO: 1442; WAN024AUU_x_at; Start 206; Stop 230
attctgaagaaaagatagacggggt

SEQ ID NO: 67073 - DNA, 25 bp, Artificial
  probe
  misc_feature (1)..(25): SEQ ID NO: 1442; WAN024AUU_x_at; Start 440; Stop 464
cctataccaaagatgagaaaaatcc

SEQ ID NO: 67074 - DNA, 25 bp, Artificial
  probe
  misc_feature (1)..(25): SEQ ID NO: 1442; WAN024AUU_x_at; Start 197; Stop 221
tgacgcgtaattctgaagaaaagat

SEQ ID NO: 67075 - DNA, 25 bp, Artificial
  probe
  misc_feature (1)..(25): SEQ ID NO: 1442; WAN024AUU_x_at; Start 425; Stop 449
cagtttcaagcaaatcctataccaa

SEQ ID NO: 67076 - DNA, 25 bp, Artificial
  probe
  misc_feature (1)..(25): SEQ ID NO: 1442; WAN024AUU_x_at; Start 430; Stop 454
tcaagcaaatcctataccaaagatg

SEQ ID NO: 67077 - DNA, 25 bp, Artificial
  probe
  misc_feature (1)..(25): SEQ ID NO: 1442; WAN024AUU_x_at; Start 441; Stop 465
ctataccaaagatgagaaaaatcct

SEQ ID NO: 67078 - DNA, 25 bp, Artificial
  probe
  misc_feature (1)..(25): SEQ ID NO: 1442; WAN024AUU_x_at; Start 200; Stop 224
cgcgtaattctgaagaaaagataga

SEQ ID NO: 67079 - DNA, 25 bp, Artificial
  probe
  misc_feature (1)..(25): SEQ ID NO: 1442; WAN024AUU_x_at; Start 199; Stop 223
acgcgtaattctgaagaaaagatag

SEQ ID NO: 67080 - DNA, 25 bp, Artificial
  probe
  misc_feature (1)..(25): SEQ ID NO: 1442; WAN024AUU_x_at; Start 297; Stop 321
tctcggtgggaagcaaatttttcag

SEQ ID NO: 67081 - DNA, 25 bp, Artificial
  probe
  misc_feature (1)..(25): SEQ ID NO: 1442; WAN024AUU_x_at; Start 435; Stop 459
caaatcctataccaaagatgagaaa

SEQ ID NO: 67082 - DNA, 25 bp, Artificial
  probe
  misc_feature (1)..(25): SEQ ID NO: 1442; WAN024AUU_x_at; Start 442; Stop 466
tataccaaagatgagaaaaatcctt

SEQ ID NO: 67083 - DNA, 25 bp, Artificial
  probe
  misc_feature (1)..(25): SEQ ID NO: 1442; WAN024AUU_x_at; Start 325; Stop 349
tttgaaccctaccttgacgaagtga

SEQ ID NO: 67084 - DNA, 25 bp, Artificial
  probe
  misc_feature (1)..(25): SEQ ID NO: 1442; WAN024AUU_x_at; Start 428; Stop 452
tttcaagcaaatcctataccaaaga

SEQ ID NO: 67085 - DNA, 25 bp, Artificial
  probe
  misc_feature (1)..(25): SEQ ID NO: 1440; WAN024AUV_x_at; Start 432; Stop 456
aagcaaattttacgccaaagatgag

SEQ ID NO: 67086 - DNA, 25 bp, Artificial
  probe
  misc_feature (1)..(25): SEQ ID NO: 1440; WAN024AUV_x_at; Start 94; Stop 118
cagcactttaaagaaacaactctga

SEQ ID NO: 67087 - DNA, 25 bp, Artificial
  probe
  misc_feature (1)..(25): SEQ ID NO: 1440; WAN024AUV_x_at; Start 14; Stop 38
tcgtagctatttgggcccaggatga

SEQ ID NO: 67088 - DNA, 25 bp, Artificial
  probe
  misc_feature (1)..(25): SEQ ID NO: 1440; WAN024AUV_x_at; Start 487; Stop 511
cgcaagagaaaggaagtctaactaa

SEQ ID NO: 67089 - DNA, 25 bp, Artificial
  probe
  misc_feature (1)..(25): SEQ ID NO: 1440; WAN024AUV_x_at; Start 434; Stop 458
gcaaattttacgccaaagatgagaa

SEQ ID NO: 67090 - DNA, 25 bp, Artificial
  probe
  misc_feature (1)..(25): SEQ ID NO: 1440; WAN024AUV_x_at; Start 227; Stop 251
gggttgctacttttcaggacgtcca

SEQ ID NO: 67091 - DNA, 25 bp, Artificial
  probe
  misc_feature (1)..(25): SEQ ID NO: 1440; WAN024AUV_x_at; Start 96; Stop 120
gcactttaaagaaacaactctgaat

SEQ ID NO: 67092 - DNA, 25 bp, Artificial
  probe
  misc_feature (1)..(25): SEQ ID NO: 1440; WAN024AUV_x_at; Start 101; Stop 125
ttaaagaaacaactctgaatcatgc

SEQ ID NO: 67093 - DNA, 25 bp, Artificial
  probe
  misc_feature (1)..(25): SEQ ID NO: 1440; WAN024AUV_x_at; Start 229; Stop 253
gttgctacttttcaggacgtccagt

SEQ ID NO: 67094 - DNA, 25 bp, Artificial
  probe
  misc_feature (1)..(25): SEQ ID NO: 1440; WAN024AUV_x_at; Start 404; Stop 428
ttgacttgtctctttttgagacagt

SEQ ID NO: 67095 - DNA, 25 bp, Artificial
  probe
  misc_feature (1)..(25): SEQ ID NO: 1440; WAN024AUV_x_at; Start 9; Stop 33
gaaaatcgtagctatttgggcccag

SEQ ID NO: 67096 - DNA, 25 bp, Artificial
  probe
  misc_feature (1)..(25): SEQ ID NO: 1440; WAN024AUV_x_at; Start 433; Stop 457
agcaaattttacgccaaagatgaga

SEQ ID NO: 67097 - DNA, 25 bp, Artificial
  probe
  misc_feature (1)..(25): SEQ ID NO: 1440; WAN024AUV_x_at; Start 431; Stop 455
caagcaaattttacgccaaagatga

SEQ ID NO: 67098 - DNA, 25 bp, Artificial
  probe
  misc_feature (1)..(25): SEQ ID NO: 1440; WAN024AUV_x_at; Start 161; Stop 185
ggcgtcgcttgcttccaaaacggga

SEQ ID NO: 67099 - DNA, 25 bp, Artificial
  probe
  misc_feature (1)..(25): SEQ ID NO: 1440; WAN024AUV_x_at; Start 231; Stop 255
tgctacttttcaggacgtccagtct

SEQ ID NO: 67100 - DNA, 25 bp, Artificial
  probe
  misc_feature (1)..(25): SEQ ID NO: 1440; WAN024AUV_x_at; Start 230; Stop 254
ttgctacttttcaggacgtccagtc

SEQ ID NO: 67101 - DNA, 25 bp, Artificial
  probe
  misc_feature (1)..(25): SEQ ID NO: 1440; WAN024AUV_x_at; Start 97; Stop 121
cactttaaagaaacaactctgaatc

SEQ ID NO: 67102 - DNA, 25 bp, Artificial
  probe
  misc_feature (1)..(25): SEQ ID NO: 1440; WAN024AUV_x_at; Start 484; Stop 508
taccgcaagagaaaggaagtctaac

SEQ ID NO: 67103 - DNA, 25 bp, Artificial
  probe
  misc_feature (1)..(25): SEQ ID NO: 1440; WAN024AUV_x_at; Start 488; Stop 512
gcaagagaaaggaagtctaactaat

SEQ ID NO: 67104 - DNA, 25 bp, Artificial
  probe
  misc_feature (1)..(25): SEQ ID NO: 1440; WAN024AUV_x_at; Start 486; Stop 510
ccgcaagagaaaggaagtctaacta

SEQ ID NO: 67105 - DNA, 25 bp, Artificial
  probe
  misc_feature (1)..(25): SEQ ID NO: 1440; WAN024AUV_x_at; Start 429; Stop 453
ttcaagcaaattttacgccaaagat

SEQ ID NO: 67106 - DNA, 25 bp, Artificial
  probe
  misc_feature (1)..(25): SEQ ID NO: 1440; WAN024AUV_x_at; Start 3; Stop 27
gactaagaaaatcgtagctatttgg

SEQ ID NO: 67107 - DNA, 25 bp, Artificial
  probe
  misc_feature (1)..(25): SEQ ID NO: 1440; WAN024AUV_x_at; Start 469; Stop 493
gattttaccatccaataccgcaaga

SEQ ID NO: 67108 - DNA, 25 bp, Artificial
  probe
  misc_feature (1)..(25): SEQ ID NO: 1440; WAN024AUV_x_at; Start 425; Stop 449
cagtttcaagcaaattttacgccaa

SEQ ID NO: 67109 - DNA, 25 bp, Artificial
  probe
  misc_feature (1)..(25): SEQ ID NO: 1440; WAN024AUV_x_at; Start 430; Stop 454
tcaagcaaattttacgccaaagatg

SEQ ID NO: 67110 - DNA, 25 bp, Artificial
  probe
  misc_feature (1)..(25): SEQ ID NO: 1440; WAN024AUV_x_at; Start 158; Stop 182
tggggcgtcgcttgcttccaaaacg

SEQ ID NO: 67111 - DNA, 25 bp, Artificial
  probe
  misc_feature (1)..(25): SEQ ID NO: 1440; WAN024AUV_x_at; Start 228; Stop 252
ggttgctacttttcaggacgtccag

SEQ ID NO: 67112 - DNA, 25 bp, Artificial
  probe
  misc_feature (1)..(25): SEQ ID NO: 1440; WAN024AUV_x_at; Start 466; Stop 490
tatgattttaccatccaataccgca

SEQ ID NO: 67113 - DNA, 25 bp, Artificial
  probe
  misc_feature (1)..(25): SEQ ID NO: 1440; WAN024AUV_x_at; Start 408; Stop 432
cttgtctctttttgagacagtttca

SEQ ID NO: 67114 - DNA, 25 bp, Artificial
  probe
  misc_feature (1)..(25): SEQ ID NO: 1440; WAN024AUV_x_at; Start 95; Stop 119
agcactttaaagaaacaactctgaa

SEQ ID NO: 67115 - DNA, 25 bp, Artificial
  probe
  misc_feature (1)..(25): SEQ ID NO: 1440; WAN024AUV_x_at; Start 67; Stop 91
ctgccttggcatttgccagcagaat

SEQ ID NO: 67116 - DNA, 25 bp, Artificial
  probe
  misc_feature (1)..(25): SEQ ID NO: 1440; WAN024AUV_x_at; Start 428; Stop 452
tttcaagcaaattttacgccaaaga

SEQ ID NO: 67117 - DNA, 25 bp, Artificial
  probe
  misc_feature (1)..(25): SEQ ID NO: 1440; WAN024AUV_x_at; Start 485; Stop 509
accgcaagagaaaggaagtctaact

SEQ ID NO: 67118 - DNA, 25 bp, Artificial
  probe
  misc_feature (1)..(25): SEQ ID NO: 1440; WAN024AUV_x_at; Start 68; Stop 92
tgccttggcatttgccagcagaatt

SEQ ID NO: 67119 - DNA, 25 bp, Artificial
  probe
  misc_feature (1)..(25): SEQ ID NO: 2191; WAN024AUW_s_at; Start 130; Stop 154
ctggtcaatagtattcatgcttttt

SEQ ID NO: 67120 - DNA, 25 bp, Artificial
  probe
  misc_feature (1)..(25): SEQ ID NO: 2191; WAN024AUW_s_at; Start 132; Stop 156
ggtcaatagtattcatgctttttac

SEQ ID NO: 67121 - DNA, 25 bp, Artificial
  probe
  misc_feature (1)..(25): SEQ ID NO: 2191; WAN024AUW_s_at; Start 126; Stop 150
caatctggtcaatagtattcatgct

SEQ ID NO: 67122 - DNA, 25 bp, Artificial
  probe
  misc_feature (1)..(25): SEQ ID NO: 2191; WAN024AUW_s_at; Start 121; Stop 145
tttaccaatctggtcaatagtattc

SEQ ID NO: 67123 - DNA, 25 bp, Artificial
  probe
  misc_feature (1)..(25): SEQ ID NO: 2191; WAN024AUW_s_at; Start 117; Stop 141
tgcctttaccaatctggtcaatagt

SEQ ID NO: 67124 - DNA, 25 bp, Artificial
  probe
  misc_feature (1)..(25): SEQ ID NO: 2191; WAN024AUW_s_at; Start 112; Stop 136
ttaaatgcctttaccaatctggtca

SEQ ID NO: 67125 - DNA, 25 bp, Artificial
  probe
  misc_feature (1)..(25): SEQ ID NO: 2191; WAN024AUW_s_at; Start 120; Stop 144
ctttaccaatctggtcaatagtatt

SEQ ID NO: 67126 - DNA, 25 bp, Artificial
  probe
  misc_feature (1)..(25): SEQ ID NO: 2191; WAN024AUW_s_at; Start 125; Stop 149
ccaatctggtcaatagtattcatgc

SEQ ID NO: 67127 - DNA, 25 bp, Artificial
  probe
  misc_feature (1)..(25): SEQ ID NO: 2191; WAN024AUW_s_at; Start 133; Stop 157
gtcaatagtattcatgctttttaca

SEQ ID NO: 67128 - DNA, 25 bp, Artificial
  probe
  misc_feature (1)..(25): SEQ ID NO: 2191; WAN024AUW_s_at; Start 114; Stop 138
aaatgcctttaccaatctggtcaat

SEQ ID NO: 67129 - DNA, 25 bp, Artificial
  probe
  misc_feature (1)..(25): SEQ ID NO: 2191; WAN024AUW_s_at; Start 118; Stop 142
gcctttaccaatctggtcaatagta

SEQ ID NO: 67130 - DNA, 25 bp, Artificial
  probe
  misc_feature (1)..(25): SEQ ID NO: 2191; WAN024AUW_s_at; Start 129; Stop 153
tctggtcaatagtattcatgctttt

SEQ ID NO: 67131 - DNA, 25 bp, Artificial
  probe
  misc_feature (1)..(25): SEQ ID NO: 2191; WAN024AUW_s_at; Start 111; Stop 135
gttaaatgcctttaccaatctggtc

SEQ ID NO: 67132 - DNA, 25 bp, Artificial
  probe
  misc_feature (1)..(25): SEQ ID NO: 2191; WAN024AUW_s_at; Start 124; Stop 148
accaatctggtcaatagtattcatg

SEQ ID NO: 67133 - DNA, 25 bp, Artificial
  probe
  misc_feature (1)..(25): SEQ ID NO: 2191; WAN024AUW_s_at; Start 134; Stop 158
tcaatagtattcatgctttttacat

SEQ ID NO: 67134 - DNA, 25 bp, Artificial
  probe
  misc_feature (1)..(25): SEQ ID NO: 2191; WAN024AUW_s_at; Start 119; Stop 143
cctttaccaatctggtcaatagtat

SEQ ID NO: 67135 - DNA, 25 bp, Artificial
  probe
  misc_feature (1)..(25): SEQ ID NO: 2191; WAN024AUW_s_at; Start 115; Stop 139
aatgcctttaccaatctggtcaata

SEQ ID NO: 67136 - DNA, 25 bp, Artificial
  probe
  misc_feature (1)..(25): SEQ ID NO: 2191; WAN024AUW_s_at; Start 136; Stop 160
aatagtattcatgctttttacatga

SEQ ID NO: 67137 - DNA, 25 bp, Artificial
  probe
  misc_feature (1)..(25): SEQ ID NO: 2191; WAN024AUW_s_at; Start 128; Stop 152
atctggtcaatagtattcatgcttt

SEQ ID NO: 67138 - DNA, 25 bp, Artificial
  probe
  misc_feature (1)..(25): SEQ ID NO: 2191; WAN024AUW_s_at; Start 113; Stop 137
taaatgcctttaccaatctggtcaa

SEQ ID NO: 67139 - DNA, 25 bp, Artificial
  probe
  misc_feature (1)..(25): SEQ ID NO: 2191; WAN024AUW_s_at; Start 123; Stop 147
taccaatctggtcaatagtattcat

SEQ ID NO: 67140 - DNA, 25 bp, Artificial
  probe
  misc_feature (1)..(25): SEQ ID NO: 2191; WAN024AUW_s_at; Start 138; Stop 162
tagtattcatgctttttacatgacc

SEQ ID NO: 67141 - DNA, 25 bp, Artificial
  probe
  misc_feature (1)..(25): SEQ ID NO: 2191; WAN024AUW_s_at; Start 127; Stop 151
aatctggtcaatagtattcatgctt

SEQ ID NO: 67142 - DNA, 25 bp, Artificial
  probe
  misc_feature (1)..(25): SEQ ID NO: 2191; WAN024AUW_s_at; Start 135; Stop 159
caatagtattcatgctttttacatg

SEQ ID NO: 67143 - DNA, 25 bp, Artificial
  probe
  misc_feature (1)..(25): SEQ ID NO: 2191; WAN024AUW_s_at; Start 140; Stop 164
gtattcatgctttttacatgacctt

SEQ ID NO: 67144 - DNA, 25 bp, Artificial
  probe
  misc_feature (1)..(25): SEQ ID NO: 2191; WAN024AUW_s_at; Start 109; Stop 133
tggttaaatgcctttaccaatctgg

SEQ ID NO: 67145 - DNA, 25 bp, Artificial
  probe
  misc_feature (1)..(25): SEQ ID NO: 2191; WAN024AUW_s_at; Start 131; Stop 155
tggtcaatagtattcatgcttttta

SEQ ID NO: 67146 - DNA, 25 bp, Artificial
  probe
  misc_feature (1)..(25): SEQ ID NO: 2191; WAN024AUW_s_at; Start 139; Stop 163
agtattcatgctttttacatgacct

SEQ ID NO: 67147 - DNA, 25 bp, Artificial
  probe
  misc_feature (1)..(25): SEQ ID NO: 2191; WAN024AUW_s_at; Start 116; Stop 140
atgcctttaccaatctggtcaatag

SEQ ID NO: 67148 - DNA, 25 bp, Artificial
  probe
  misc_feature (1)..(25): SEQ ID NO: 2191; WAN024AUW_s_at; Start 137; Stop 161
atagtattcatgctttttacatgac

SEQ ID NO: 67149 - DNA, 25 bp, Artificial
  probe
  misc_feature (1)..(25): SEQ ID NO: 2191; WAN024AUW_s_at; Start 122; Stop 146
ttaccaatctggtcaatagtattca

SEQ ID NO: 67150 - DNA, 25 bp, Artificial
  probe
  misc_feature (1)..(25): SEQ ID NO: 2192; WAN024AUX_at; Start 43; Stop 67
ttcatctgctttctggcaggagcac

SEQ ID NO: 67151 - DNA, 25 bp, Artificial
  probe
  misc_feature (1)..(25): SEQ ID NO: 2192; WAN024AUX_at; Start 35; Stop 59
ttctgtgtttcatctgctttctggc

SEQ ID NO: 67152 - DNA, 25 bp, Artificial
  probe
  misc_feature (1)..(25): SEQ ID NO: 2192; WAN024AUX_at; Start 36; Stop 60
tctgtgtttcatctgctttctggca

SEQ ID NO: 67153 - DNA, 25 bp, Artificial
  probe
  misc_feature (1)..(25): SEQ ID NO: 2192; WAN024AUX_at; Start 39; Stop 63
gtgtttcatctgctttctggcagga

SEQ ID NO: 67154 - DNA, 25 bp, Artificial
  probe
  misc_feature (1)..(25): SEQ ID NO: 2192; WAN024AUX_at; Start 44; Stop 68
tcatctgctttctggcaggagcaca

SEQ ID NO: 67155 - DNA, 25 bp, Artificial
  probe
  misc_feature (1)..(25): SEQ ID NO: 2192; WAN024AUX_at; Start 31; Stop 55
gcttttctgtgtttcatctgctttc

SEQ ID NO: 67156 - DNA, 25 bp, Artificial
  probe
  misc_feature (1)..(25): SEQ ID NO: 2192; WAN024AUX_at; Start 38; Stop 62
tgtgtttcatctgctttctggcagg

SEQ ID NO: 67157 - DNA, 25 bp, Artificial
  probe
  misc_feature (1)..(25): SEQ ID NO: 2192; WAN024AUX_at; Start 37; Stop 61
ctgtgtttcatctgctttctggcag

SEQ ID NO: 67158 - DNA, 25 bp, Artificial
  probe
  misc_feature (1)..(25): SEQ ID NO: 2192; WAN024AUX_at; Start 40; Stop 64
tgtttcatctgctttctggcaggag

SEQ ID NO: 67159 - DNA, 25 bp, Artificial
  probe
  misc_feature (1)..(25): SEQ ID NO: 2192; WAN024AUX_at; Start 34; Stop 58
tttctgtgtttcatctgctttctgg

SEQ ID NO: 67160 - DNA, 25 bp, Artificial
  probe
  misc_feature (1)..(25): SEQ ID NO: 2192; WAN024AUX_at; Start 42; Stop 66
tttcatctgctttctggcaggagca

SEQ ID NO: 67161 - DNA, 25 bp, Artificial
  probe
  misc_feature (1)..(25): SEQ ID NO: 2192; WAN024AUX_at; Start 32; Stop 56
cttttctgtgtttcatctgctttct

SEQ ID NO: 67162 - DNA, 25 bp, Artificial
  probe
  misc_feature (1)..(25): SEQ ID NO: 2192; WAN024AUX_at; Start 33; Stop 57
ttttctgtgtttcatctgctttctg

SEQ ID NO: 67163 - DNA, 25 bp, Artificial
  probe
  misc_feature (1)..(25): SEQ ID NO: 1278; WAN024AUY_at; Start 86; Stop 110
cagtagcacgccaaccagatatgct

SEQ ID NO: 67164 - DNA, 25 bp, Artificial
  probe
  misc_feature (1)..(25): SEQ ID NO: 1278; WAN024AUY_at; Start 174; Stop 198
tcttgtcttctcatttattatcaaa

SEQ ID NO: 67165 - DNA, 25 bp, Artificial
  probe
  misc_feature (1)..(25): SEQ ID NO: 1278; WAN024AUY_at; Start 97; Stop 121
caaccagatatgctttctgagtttc

SEQ ID NO: 67166 - DNA, 25 bp, Artificial
  probe
  misc_feature (1)..(25): SEQ ID NO: 1278; WAN024AUY_at; Start 89; Stop 113
tagcacgccaaccagatatgctttc

SEQ ID NO: 67167 - DNA, 25 bp, Artificial
  probe
  misc_feature (1)..(25): SEQ ID NO: 1278; WAN024AUY_at; Start 82; Stop 106
aaatcagtagcacgccaaccagata

SEQ ID NO: 67168 - DNA, 25 bp, Artificial
  probe
  misc_feature (1)..(25): SEQ ID NO: 1278; WAN024AUY_at; Start 80; Stop 104
ttaaatcagtagcacgccaaccaga

SEQ ID NO: 67169 - DNA, 25 bp, Artificial
  probe
  misc_feature (1)..(25): SEQ ID NO: 1278; WAN024AUY_at; Start 102; Stop 126
agatatgctttctgagtttcgtagt

SEQ ID NO: 67170 - DNA, 25 bp, Artificial
  probe
  misc_feature (1)..(25): SEQ ID NO: 1278; WAN024AUY_at; Start 81; Stop 105
taaatcagtagcacgccaaccagat

SEQ ID NO: 67171 - DNA, 25 bp, Artificial
  probe
  misc_feature (1)..(25): SEQ ID NO: 1278; WAN024AUY_at; Start 76; Stop 100
ctgtttaaatcagtagcacgccaac

SEQ ID NO: 67172 - DNA, 25 bp, Artificial
  probe
  misc_feature (1)..(25): SEQ ID NO: 1278; WAN024AUY_at; Start 103; Stop 127
gatatgctttctgagtttcgtagtt

SEQ ID NO: 67173 - DNA, 25 bp, Artificial
  probe
  misc_feature (1)..(25): SEQ ID NO: 1278; WAN024AUY_at; Start 94; Stop 118
cgccaaccagatatgctttctgagt

SEQ ID NO: 67174 - DNA, 25 bp, Artificial
  probe
  misc_feature (1)..(25): SEQ ID NO: 1278; WAN024AUY_at; Start 95; Stop 119
gccaaccagatatgctttctgagtt

SEQ ID NO: 67175 - DNA, 25 bp, Artificial
  probe
  misc_feature (1)..(25): SEQ ID NO: 1278; WAN024AUY_at; Start 105; Stop 129
tatgctttctgagtttcgtagtttg

SEQ ID NO: 67176 - DNA, 25 bp, Artificial
  probe
  misc_feature (1)..(25): SEQ ID NO: 1278; WAN024AUY_at; Start 99; Stop 123
accagatatgctttctgagtttcgt

SEQ ID NO: 67177 - DNA, 25 bp, Artificial
  probe
  misc_feature (1)..(25): SEQ ID NO: 1278; WAN024AUY_at; Start 91; Stop 115
gcacgccaaccagatatgctttctg

SEQ ID NO: 67178 - DNA, 25 bp, Artificial
  probe
  misc_feature (1)..(25): SEQ ID NO: 1278; WAN024AUY_at; Start 92; Stop 116
cacgccaaccagatatgctttctga

SEQ ID NO: 67179 - DNA, 25 bp, Artificial
  probe
  misc_feature (1)..(25): SEQ ID NO: 1278; WAN024AUY_at; Start 73; Stop 97
ggactgtttaaatcagtagcacgcc

SEQ ID NO: 67180 - DNA, 25 bp, Artificial
  probe
  misc_feature (1)..(25): SEQ ID NO: 1278; WAN024AUY_at; Start 96; Stop 120
ccaaccagatatgctttctgagttt

SEQ ID NO: 67181 - DNA, 25 bp, Artificial
  probe
  misc_feature (1)..(25): SEQ ID NO: 1278; WAN024AUY_at; Start 90; Stop 114
agcacgccaaccagatatgctttct

SEQ ID NO: 67182 - DNA, 25 bp, Artificial
  probe
  misc_feature (1)..(25): SEQ ID NO: 1278; WAN024AUY_at; Start 74; Stop 98
gactgtttaaatcagtagcacgcca

SEQ ID NO: 67183 - DNA, 25 bp, Artificial
  probe
  misc_feature (1)..(25): SEQ ID NO: 1278; WAN024AUY_at; Start 171; Stop 195
aactcttgtcttctcatttattatc

SEQ ID NO: 67184 - DNA, 25 bp, Artificial
  probe
  misc_feature (1)..(25): SEQ ID NO: 1278; WAN024AUY_at; Start 177; Stop 201
tgtcttctcatttattatcaaataa

SEQ ID NO: 67185 - DNA, 25 bp, Artificial
  probe
  misc_feature (1)..(25): SEQ ID NO: 1278; WAN024AUY_at; Start 85; Stop 109
tcagtagcacgccaaccagatatgc

SEQ ID NO: 67186 - DNA, 25 bp, Artificial
  probe
  misc_feature (1)..(25): SEQ ID NO: 1278; WAN024AUY_at; Start 77; Stop 101
tgtttaaatcagtagcacgccaacc

SEQ ID NO: 67187 - DNA, 25 bp, Artificial
  probe
  misc_feature (1)..(25): SEQ ID NO: 1278; WAN024AUY_at; Start 98; Stop 122
aaccagatatgctttctgagtttcg

SEQ ID NO: 67188 - DNA, 25 bp, Artificial
  probe
  misc_feature (1)..(25): SEQ ID NO: 1278; WAN024AUY_at; Start 87; Stop 111
agtagcacgccaaccagatatgctt

SEQ ID NO: 67189 - DNA, 25 bp, Artificial
  probe
  misc_feature (1)..(25): SEQ ID NO: 1278; WAN024AUY_at; Start 78; Stop 102
gtttaaatcagtagcacgccaacca

SEQ ID NO: 67190 - DNA, 25 bp, Artificial
  probe
  misc_feature (1)..(25): SEQ ID NO: 1278; WAN024AUY_at; Start 75; Stop 99
actgtttaaatcagtagcacgccaa

SEQ ID NO: 67191 - DNA, 25 bp, Artificial
  probe
  misc_feature (1)..(25): SEQ ID NO: 1278; WAN024AUY_at; Start 79; Stop 103
tttaaatcagtagcacgccaaccag

SEQ ID NO: 67192 - DNA, 25 bp, Artificial
  probe
  misc_feature (1)..(25): SEQ ID NO: 1278; WAN024AUY_at; Start 101; Stop 125
cagatatgctttctgagtttcgtag

SEQ ID NO: 67193 - DNA, 25 bp, Artificial
  probe
  misc_feature (1)..(25): SEQ ID NO: 1278; WAN024AUY_at; Start 93; Stop 117
acgccaaccagatatgctttctgag

SEQ ID NO: 67194 - DNA, 25 bp, Artificial
  probe
  misc_feature (1)..(25): SEQ ID NO: 1278; WAN024AUY_at; Start 88; Stop 112
gtagcacgccaaccagatatgcttt

SEQ ID NO: 67195 - DNA, 25 bp, Artificial
  probe
  misc_feature (1)..(25): SEQ ID NO: 1278; WAN024AUY_at; Start 72; Stop 96
tggactgtttaaatcagtagcacgc

SEQ ID NO: 67196 - DNA, 25 bp, Artificial
  probe
  misc_feature (1)..(25): SEQ ID NO: 1278; WAN024AUY_at; Start 100; Stop 124
ccagatatgctttctgagtttcgta

SEQ ID NO: 67197 - DNA, 25 bp, Artificial
  probe
  misc_feature (1)..(25): SEQ ID NO: 896; WAN024AUZ_s_at; Start 384; Stop 408
attagattccttaatcgtctcagaa

SEQ ID NO: 67198 - DNA, 25 bp, Artificial
  probe
  misc_feature (1)..(25): SEQ ID NO: 896; WAN024AUZ_s_at; Start 398; Stop 422
tcgtctcagaatatcaaatggaacc

SEQ ID NO: 67199 - DNA, 25 bp, Artificial
  probe
  misc_feature (1)..(25): SEQ ID NO: 896; WAN024AUZ_s_at; Start 403; Stop 427
tcagaatatcaaatggaaccgaatc

SEQ ID NO: 67200 - DNA, 25 bp, Artificial
  probe
  misc_feature (1)..(25): SEQ ID NO: 896; WAN024AUZ_s_at; Start 399; Stop 423
cgtctcagaatatcaaatggaaccg

SEQ ID NO: 67201 - DNA, 25 bp, Artificial
  probe
  misc_feature (1)..(25): SEQ ID NO: 896; WAN024AUZ_s_at; Start 408; Stop 432
atatcaaatggaaccgaatctttgg

SEQ ID NO: 67202 - DNA, 25 bp, Artificial
  probe
  misc_feature (1)..(25): SEQ ID NO: 896; WAN024AUZ_s_at; Start 411; Stop 435
tcaaatggaaccgaatctttgggag

SEQ ID NO: 67203 - DNA, 25 bp, Artificial
  probe
  misc_feature (1)..(25): SEQ ID NO: 896; WAN024AUZ_s_at; Start 385; Stop 409
ttagattccttaatcgtctcagaat

SEQ ID NO: 67204 - DNA, 25 bp, Artificial
  probe
  misc_feature (1)..(25): SEQ ID NO: 896; WAN024AUZ_s_at; Start 415; Stop 439
atggaaccgaatctttgggaggtct

SEQ ID NO: 67205 - DNA, 25 bp, Artificial
  probe
  misc_feature (1)..(25): SEQ ID NO: 896; WAN024AUZ_s_at; Start 402; Stop 426
ctcagaatatcaaatggaaccgaat

SEQ ID NO: 67206 - DNA, 25 bp, Artificial
  probe
  misc_feature (1)..(25): SEQ ID NO: 896; WAN024AUZ_s_at; Start 404; Stop 428
cagaatatcaaatggaaccgaatct

SEQ ID NO: 67207 - DNA, 25 bp, Artificial
  probe
  misc_feature (1)..(25): SEQ ID NO: 896; WAN024AUZ_s_at; Start 409; Stop 433
tatcaaatggaaccgaatctttggg

SEQ ID NO: 67208 - DNA, 25 bp, Artificial
  probe
  misc_feature (1)..(25): SEQ ID NO: 896; WAN024AUZ_s_at; Start 412; Stop 436
caaatggaaccgaatctttgggagg

SEQ ID NO: 67209 - DNA, 25 bp, Artificial
  probe
  misc_feature (1)..(25): SEQ ID NO: 896; WAN024AUZ_s_at; Start 396; Stop 420
aatcgtctcagaatatcaaatggaa

SEQ ID NO: 67210 - DNA, 25 bp, Artificial
  probe
  misc_feature (1)..(25): SEQ ID NO: 896; WAN024AUZ_s_at; Start 395; Stop 419
taatcgtctcagaatatcaaatgga

SEQ ID NO: 67211 - DNA, 25 bp, Artificial
  probe
  misc_feature (1)..(25): SEQ ID NO: 896; WAN024AUZ_s_at; Start 422; Stop 446
cgaatctttgggaggtctcccatga

SEQ ID NO: 67212 - DNA, 25 bp, Artificial
  probe
  misc_feature (1)..(25): SEQ ID NO: 896; WAN024AUZ_s_at; Start 392; Stop 416
ccttaatcgtctcagaatatcaaat

SEQ ID NO: 67213 - DNA, 25 bp, Artificial
  probe
  misc_feature (1)..(25): SEQ ID NO: 896; WAN024AUZ_s_at; Start 400; Stop 424
gtctcagaatatcaaatggaaccga

SEQ ID NO: 67214 - DNA, 25 bp, Artificial
  probe
  misc_feature (1)..(25): SEQ ID NO: 896; WAN024AUZ_s_at; Start 407; Stop 431
aatatcaaatggaaccgaatctttg

SEQ ID NO: 67215 - DNA, 25 bp, Artificial
  probe
  misc_feature (1)..(25): SEQ ID NO: 896; WAN024AUZ_s_at; Start 405; Stop 429
agaatatcaaatggaaccgaatctt

SEQ ID NO: 67216 - DNA, 25 bp, Artificial
  probe
  misc_feature (1)..(25): SEQ ID NO: 896; WAN024AUZ_s_at; Start 393; Stop 417
cttaatcgtctcagaatatcaaatg

SEQ ID NO: 67217 - DNA, 25 bp, Artificial
  probe
  misc_feature (1)..(25): SEQ ID NO: 896; WAN024AUZ_s_at; Start 386; Stop 410
tagattccttaatcgtctcagaata

SEQ ID NO: 67218 - DNA, 25 bp, Artificial
  probe
  misc_feature (1)..(25): SEQ ID NO: 896; WAN024AUZ_s_at; Start 423; Stop 447
gaatctttgggaggtctcccatgat

SEQ ID NO: 67219 - DNA, 25 bp, Artificial
  probe
  misc_feature (1)..(25): SEQ ID NO: 896; WAN024AUZ_s_at; Start 394; Stop 418
ttaatcgtctcagaatatcaaatgg

SEQ ID NO: 67220 - DNA, 25 bp, Artificial
  probe
  misc_feature (1)..(25): SEQ ID NO: 896; WAN024AUZ_s_at; Start 421; Stop 445
ccgaatctttgggaggtctcccatg

SEQ ID NO: 67221 - DNA, 25 bp, Artificial
  probe
  misc_feature (1)..(25): SEQ ID NO: 896; WAN024AUZ_s_at; Start 410; Stop 434
atcaaatggaaccgaatctttggga

SEQ ID NO: 67222 - DNA, 25 bp, Artificial
  probe
  misc_feature (1)..(25): SEQ ID NO: 896; WAN024AUZ_s_at; Start 416; Stop 440
tggaaccgaatctttgggaggtctc

SEQ ID NO: 67223 - DNA, 25 bp, Artificial
  probe
  misc_feature (1)..(25): SEQ ID NO: 896; WAN024AUZ_s_at; Start 401; Stop 425
tctcagaatatcaaatggaaccgaa

SEQ ID NO: 67224 - DNA, 25 bp, Artificial
  probe
  misc_feature (1)..(25): SEQ ID NO: 896; WAN024AUZ_s_at; Start 387; Stop 411
agattccttaatcgtctcagaatat

SEQ ID NO: 67225 - DNA, 25 bp, Artificial
  probe
  misc_feature (1)..(25): SEQ ID NO: 896; WAN024AUZ_s_at; Start 406; Stop 430
gaatatcaaatggaaccgaatcttt

SEQ ID NO: 67226 - DNA, 25 bp, Artificial
  probe
  misc_feature (1)..(25): SEQ ID NO: 896; WAN024AUZ_s_at; Start 397; Stop 421
atcgtctcagaatatcaaatggaac

SEQ ID NO: 67227 - DNA, 25 bp, Artificial
  probe
  misc_feature (1)..(25): SEQ ID NO: 5222; WAN024AV2_at; Start 133; Stop 157
aacggagttaatgcctttgtagatg

SEQ ID NO: 67228 - DNA, 25 bp, Artificial
  probe
  misc_feature (1)..(25): SEQ ID NO: 5222; WAN024AV2_at; Start 132; Stop 156
gaacggagttaatgcctttgtagat

SEQ ID NO: 67229 - DNA, 25 bp, Artificial
  probe
  misc_feature (1)..(25): SEQ ID NO: 5222; WAN024AV2_at; Start 130; Stop 154
aagaacggagttaatgcctttgtag

SEQ ID NO: 67230 - DNA, 25 bp, Artificial
  probe
  misc_feature (1)..(25): SEQ ID NO: 5222; WAN024AV2_at; Start 131; Stop 155
agaacggagttaatgcctttgtaga

SEQ ID NO: 67231 - DNA, 25 bp, Artificial
  probe
  misc_feature (1)..(25): SEQ ID NO: 900; WAN024AV3_at; Start 2; Stop 26
tgaaagctttaaataaagagtcaat

SEQ ID NO: 67232 - DNA, 25 bp, Artificial
  probe
  misc_feature (1)..(25): SEQ ID NO: 900; WAN024AV3_at; Start 372; Stop 396
cttctcagatctattagattcctta

SEQ ID NO: 67233 - DNA, 25 bp, Artificial
  probe
  misc_feature (1)..(25): SEQ ID NO: 900; WAN024AV3_at; Start 361; Stop 385
aaatcaattaacttctcagatctat

SEQ ID NO: 67234 - DNA, 25 bp, Artificial
  probe
  misc_feature (1)..(25): SEQ ID NO: 900; WAN024AV3_at; Start 5; Stop 29
aagctttaaataaagagtcaatact

SEQ ID NO: 67235 - DNA, 25 bp, Artificial
  probe
  misc_feature (1)..(25): SEQ ID NO: 900; WAN024AV3_at; Start 369; Stop 393
taacttctcagatctattagattcc

SEQ ID NO: 67236 - DNA, 25 bp, Artificial
  probe
  misc_feature (1)..(25): SEQ ID NO: 900; WAN024AV3_at; Start 362; Stop 386
aatcaattaacttctcagatctatt

SEQ ID NO: 67237 - DNA, 25 bp, Artificial
  probe
  misc_feature (1)..(25): SEQ ID NO: 900; WAN024AV3_at; Start 364; Stop 388
tcaattaacttctcagatctattag

SEQ ID NO: 67238 - DNA, 25 bp, Artificial
  probe
  misc_feature (1)..(25): SEQ ID NO: 900; WAN024AV3_at; Start 366; Stop 390
aattaacttctcagatctattagat

SEQ ID NO: 67239 - DNA, 25 bp, Artificial
  probe
  misc_feature (1)..(25): SEQ ID NO: 900; WAN024AV3_at; Start 368; Stop 392
ttaacttctcagatctattagattc

SEQ ID NO: 67240 - DNA, 25 bp, Artificial
  probe
  misc_feature (1)..(25): SEQ ID NO: 900; WAN024AV3_at; Start 353; Stop 377
aagacaagaaatcaattaacttctc

SEQ ID NO: 67241 - DNA, 25 bp, Artificial
  probe
  misc_feature (1)..(25): SEQ ID NO: 900; WAN024AV3_at; Start 360; Stop 384
gaaatcaattaacttctcagatcta

SEQ ID NO: 67242 - DNA, 25 bp, Artificial
  probe
  misc_feature (1)..(25): SEQ ID NO: 900; WAN024AV3_at; Start 363; Stop 387
atcaattaacttctcagatctatta

SEQ ID NO: 67243 - DNA, 25 bp, Artificial
  probe
  misc_feature (1)..(25): SEQ ID NO: 900; WAN024AV3_at; Start 373; Stop 397
ttctcagatctattagattccttaa

SEQ ID NO: 67244 - DNA, 25 bp, Artificial
  probe
  misc_feature (1)..(25): SEQ ID NO: 900; WAN024AV3_at; Start 356; Stop 380
acaagaaatcaattaacttctcaga

SEQ ID NO: 67245 - DNA, 25 bp, Artificial
  probe
  misc_feature (1)..(25): SEQ ID NO: 900; WAN024AV3_at; Start 354; Stop 378
agacaagaaatcaattaacttctca

SEQ ID NO: 67246 - DNA, 25 bp, Artificial
  probe
  misc_feature (1)..(25): SEQ ID NO: 900; WAN024AV3_at; Start 358; Stop 382
aagaaatcaattaacttctcagatc

SEQ ID NO: 67247 - DNA, 25 bp, Artificial
  probe
  misc_feature (1)..(25): SEQ ID NO: 900; WAN024AV3_at; Start 8; Stop 32
ctttaaataaagagtcaatactaga

SEQ ID NO: 67248 - DNA, 25 bp, Artificial
  probe
  misc_feature (1)..(25): SEQ ID NO: 900; WAN024AV3_at; Start 357; Stop 381
caagaaatcaattaacttctcagat

SEQ ID NO: 67249 - DNA, 25 bp, Artificial
  probe
  misc_feature (1)..(25): SEQ ID NO: 900; WAN024AV3_at; Start 355; Stop 379
gacaagaaatcaattaacttctcag

SEQ ID NO: 67250 - DNA, 25 bp, Artificial
  probe
  misc_feature (1)..(25): SEQ ID NO: 900; WAN024AV3_at; Start 6; Stop 30
agctttaaataaagagtcaatacta

SEQ ID NO: 67251 - DNA, 25 bp, Artificial
  probe
  misc_feature (1)..(25): SEQ ID NO: 900; WAN024AV3_at; Start 3; Stop 27
gaaagctttaaataaagagtcaata

SEQ ID NO: 67252 - DNA, 25 bp, Artificial
  probe
  misc_feature (1)..(25): SEQ ID NO: 900; WAN024AV3_at; Start 359; Stop 383
agaaatcaattaacttctcagatct

SEQ ID NO: 67253 - DNA, 25 bp, Artificial
  probe
  misc_feature (1)..(25): SEQ ID NO: 900; WAN024AV3_at; Start 7; Stop 31
gctttaaataaagagtcaatactag

SEQ ID NO: 67254 - DNA, 25 bp, Artificial
  probe
  misc_feature (1)..(25): SEQ ID NO: 900; WAN024AV3_at; Start 365; Stop 389
caattaacttctcagatctattaga

SEQ ID NO: 67255 - DNA, 25 bp, Artificial
  probe
  misc_feature (1)..(25): SEQ ID NO: 900; WAN024AV3_at; Start 367; Stop 391
attaacttctcagatctattagatt

SEQ ID NO: 67256 - DNA, 25 bp, Artificial
  probe
  misc_feature (1)..(25): SEQ ID NO: 900; WAN024AV3_at; Start 371; Stop 395
acttctcagatctattagattcctt

SEQ ID NO: 67257 - DNA, 25 bp, Artificial
  probe
  misc_feature (1)..(25): SEQ ID NO: 900; WAN024AV3_at; Start 370; Stop 394
aacttctcagatctattagattcct

SEQ ID NO: 67258 - DNA, 25 bp, Artificial
  probe
  misc_feature (1)..(25): SEQ ID NO: 900; WAN024AV3_at; Start 1; Stop 25
atgaaagctttaaataaagagtcaa

SEQ ID NO: 67259 - DNA, 25 bp, Artificial
  probe
  misc_feature (1)..(25): SEQ ID NO: 895; WAN024AV4_at; Start 216; Stop 240
tcaagacataaagaatggggttgat

SEQ ID NO: 67260 - DNA, 25 bp, Artificial
  probe
  misc_feature (1)..(25): SEQ ID NO: 895; WAN024AV4_at; Start 215; Stop 239
gtcaagacataaagaatggggttga

SEQ ID NO: 67261 - DNA, 25 bp, Artificial
  probe
  misc_feature (1)..(25): SEQ ID NO: 895; WAN024AV4_at; Start 228; Stop 252
gaatggggttgatgcctttgtagat

SEQ ID NO: 67262 - DNA, 25 bp, Artificial
  probe
  misc_feature (1)..(25): SEQ ID NO: 895; WAN024AV4_at; Start 224; Stop 248
taaagaatggggttgatgcctttgt

SEQ ID NO: 67263 - DNA, 25 bp, Artificial
  probe
  misc_feature (1)..(25): SEQ ID NO: 895; WAN024AV4_at; Start 222; Stop 246
cataaagaatggggttgatgccttt

SEQ ID NO: 67264 - DNA, 25 bp, Artificial
  probe
  misc_feature (1)..(25): SEQ ID NO: 895; WAN024AV4_at; Start 212; Stop 236
aaagtcaagacataaagaatggggt

SEQ ID NO: 67265 - DNA, 25 bp, Artificial
  probe
  misc_feature (1)..(25): SEQ ID NO: 895; WAN024AV4_at; Start 213; Stop 237
aagtcaagacataaagaatggggtt

SEQ ID NO: 67266 - DNA, 25 bp, Artificial
  probe
  misc_feature (1)..(25): SEQ ID NO: 895; WAN024AV4_at; Start 221; Stop 245
acataaagaatggggttgatgcctt

SEQ ID NO: 67267 - DNA, 25 bp, Artificial
  probe
  misc_feature (1)..(25): SEQ ID NO: 895; WAN024AV4_at; Start 210; Stop 234
tgaaagtcaagacataaagaatggg

SEQ ID NO: 67268 - DNA, 25 bp, Artificial
  probe
  misc_feature (1)..(25): SEQ ID NO: 895; WAN024AV4_at; Start 225; Stop 249
aaagaatggggttgatgcctttgta

SEQ ID NO: 67269 - DNA, 25 bp, Artificial
  probe
  misc_feature (1)..(25): SEQ ID NO: 895; WAN024AV4_at; Start 219; Stop 243
agacataaagaatggggttgatgcc

SEQ ID NO: 67270 - DNA, 25 bp, Artificial
  probe
  misc_feature (1)..(25): SEQ ID NO: 895; WAN024AV4_at; Start 217; Stop 241
caagacataaagaatggggttgatg

SEQ ID NO: 67271 - DNA, 25 bp, Artificial
  probe
  misc_feature (1)..(25): SEQ ID NO: 895; WAN024AV4_at; Start 211; Stop 235
gaaagtcaagacataaagaatgggg

SEQ ID NO: 67272 - DNA, 25 bp, Artificial
  probe
  misc_feature (1)..(25): SEQ ID NO: 895; WAN024AV4_at; Start 218; Stop 242
aagacataaagaatggggttgatgc

SEQ ID NO: 67273 - DNA, 25 bp, Artificial
  probe
  misc_feature (1)..(25): SEQ ID NO: 895; WAN024AV4_at; Start 220; Stop 244
gacataaagaatggggttgatgcct

SEQ ID NO: 67274 - DNA, 25 bp, Artificial
  probe
  misc_feature (1)..(25): SEQ ID NO: 895; WAN024AV4_at; Start 209; Stop 233
ttgaaagtcaagacataaagaatgg

SEQ ID NO: 67275 - DNA, 25 bp, Artificial
  probe
  misc_feature (1)..(25): SEQ ID NO: 895; WAN024AV4_at; Start 226; Stop 250
aagaatggggttgatgcctttgtag

SEQ ID NO: 67276 - DNA, 25 bp, Artificial
  probe
  misc_feature (1)..(25): SEQ ID NO: 895; WAN024AV4_at; Start 208; Stop 232
cttgaaagtcaagacataaagaatg

SEQ ID NO: 67277 - DNA, 25 bp, Artificial
  probe
  misc_feature (1)..(25): SEQ ID NO: 895; WAN024AV4_at; Start 227; Stop 251
agaatggggttgatgcctttgtaga

SEQ ID NO: 67278 - DNA, 25 bp, Artificial
  probe
  misc_feature (1)..(25): SEQ ID NO: 895; WAN024AV4_at; Start 214; Stop 238
agtcaagacataaagaatggggttg

SEQ ID NO: 67279 - DNA, 25 bp, Artificial
  probe
  misc_feature (1)..(25): SEQ ID NO: 895; WAN024AV4_at; Start 223; Stop 247
ataaagaatggggttgatgcctttg

SEQ ID NO: 67280 - DNA, 25 bp, Artificial
  probe
  misc_feature (1)..(25): SEQ ID NO: 895; WAN024AV4_at; Start 229; Stop 253
aatggggttgatgcctttgtagatg

SEQ ID NO: 67281 - DNA, 25 bp, Artificial
  probe
  misc_feature (1)..(25): SEQ ID NO: 6681; WAN024AV5_at; Start 30; Stop 54
ccatagaaatcaaattcttttagat

SEQ ID NO: 67282 - DNA, 25 bp, Artificial
  probe
  misc_feature (1)..(25): SEQ ID NO: 6681; WAN024AV5_at; Start 24; Stop 48
aaataaccatagaaatcaaattctt

SEQ ID NO: 67283 - DNA, 25 bp, Artificial
  probe
  misc_feature (1)..(25): SEQ ID NO: 6681; WAN024AV5_at; Start 23; Stop 47
aaaataaccatagaaatcaaattct

SEQ ID NO: 67284 - DNA, 25 bp, Artificial
  probe
  misc_feature (1)..(25): SEQ ID NO: 6681; WAN024AV5_at; Start 31; Stop 55
catagaaatcaaattcttttagatt

SEQ ID NO: 67285 - DNA, 25 bp, Artificial
  probe
  misc_feature (1)..(25): SEQ ID NO: 6681; WAN024AV5_at; Start 61; Stop 85
caaaactacggaatagaggtatctt

SEQ ID NO: 67286 - DNA, 25 bp, Artificial
  probe
  misc_feature (1)..(25): SEQ ID NO: 6681; WAN024AV5_at; Start 66; Stop 90
ctacggaatagaggtatcttgtcat

SEQ ID NO: 67287 - DNA, 25 bp, Artificial
  probe
  misc_feature (1)..(25): SEQ ID NO: 6681; WAN024AV5_at; Start 26; Stop 50
ataaccatagaaatcaaattctttt

SEQ ID NO: 67288 - DNA, 25 bp, Artificial
  probe
  misc_feature (1)..(25): SEQ ID NO: 6681; WAN024AV5_at; Start 29; Stop 53
accatagaaatcaaattcttttaga

SEQ ID NO: 67289 - DNA, 25 bp, Artificial
  probe
  misc_feature (1)..(25): SEQ ID NO: 6681; WAN024AV5_at; Start 60; Stop 84
tcaaaactacggaatagaggtatct

SEQ ID NO: 67290 - DNA, 25 bp, Artificial
  probe
  misc_feature (1)..(25): SEQ ID NO: 6681; WAN024AV5_at; Start 63; Stop 87
aaactacggaatagaggtatcttgt

SEQ ID NO: 67291 - DNA, 25 bp, Artificial
  probe
  misc_feature (1)..(25): SEQ ID NO: 6681; WAN024AV5_at; Start 27; Stop 51
taaccatagaaatcaaattctttta

SEQ ID NO: 67292 - DNA, 25 bp, Artificial
  probe
  misc_feature (1)..(25): SEQ ID NO: 6681; WAN024AV5_at; Start 62; Stop 86
aaaactacggaatagaggtatcttg

SEQ ID NO: 67293 - DNA, 25 bp, Artificial
  probe
  misc_feature (1)..(25): SEQ ID NO: 6681; WAN024AV5_at; Start 38; Stop 62
atcaaattcttttagatttctttca

SEQ ID NO: 67294 - DNA, 25 bp, Artificial
  probe
  misc_feature (1)..(25): SEQ ID NO: 6681; WAN024AV5_at; Start 59; Stop 83
ttcaaaactacggaatagaggtatc

SEQ ID NO: 67295 - DNA, 25 bp, Artificial
  probe
  misc_feature (1)..(25): SEQ ID NO: 6681; WAN024AV5_at; Start 64; Stop 88
aactacggaatagaggtatcttgtc

SEQ ID NO: 67296 - DNA, 25 bp, Artificial
  probe
  misc_feature (1)..(25): SEQ ID NO: 6681; WAN024AV5_at; Start 25; Stop 49
aataaccatagaaatcaaattcttt

SEQ ID NO: 67297 - DNA, 25 bp, Artificial
  probe
  misc_feature (1)..(25): SEQ ID NO: 6681; WAN024AV5_at; Start 39; Stop 63
tcaaattcttttagatttctttcaa

SEQ ID NO: 67298 - DNA, 25 bp, Artificial
  probe
  misc_feature (1)..(25): SEQ ID NO: 6681; WAN024AV5_at; Start 28; Stop 52
aaccatagaaatcaaattcttttag

SEQ ID NO: 67299 - DNA, 25 bp, Artificial
  probe
  misc_feature (1)..(25): SEQ ID NO: 6681; WAN024AV5_at; Start 33; Stop 57
tagaaatcaaattcttttagatttc

SEQ ID NO: 67300 - DNA, 25 bp, Artificial
  probe
  misc_feature (1)..(25): SEQ ID NO: 6681; WAN024AV5_at; Start 65; Stop 89
actacggaatagaggtatcttgtca

SEQ ID NO: 67301 - DNA, 25 bp, Artificial
  probe
  misc_feature (1)..(25): SEQ ID NO: 6648; WAN024AV6_at; Start 150; Stop 174
taagcgagtttatccaaatttgaat

SEQ ID NO: 67302 - DNA, 25 bp, Artificial
  probe
  misc_feature (1)..(25): SEQ ID NO: 6648; WAN024AV6_at; Start 153; Stop 177
gcgagtttatccaaatttgaatctg

SEQ ID NO: 67303 - DNA, 25 bp, Artificial
  probe
  misc_feature (1)..(25): SEQ ID NO: 6648; WAN024AV6_at; Start 158; Stop 182
tttatccaaatttgaatctggagga

SEQ ID NO: 67304 - DNA, 25 bp, Artificial
  probe
  misc_feature (1)..(25): SEQ ID NO: 6648; WAN024AV6_at; Start 72; Stop 96
cctaaaattaacagatttcatcgaa

SEQ ID NO: 67305 - DNA, 25 bp, Artificial
  probe
  misc_feature (1)..(25): SEQ ID NO: 6648; WAN024AV6_at; Start 157; Stop 181
gtttatccaaatttgaatctggagg

SEQ ID NO: 67306 - DNA, 25 bp, Artificial
  probe
  misc_feature (1)..(25): SEQ ID NO: 6648; WAN024AV6_at; Start 160; Stop 184
tatccaaatttgaatctggaggagg

SEQ ID NO: 67307 - DNA, 25 bp, Artificial
  probe
  misc_feature (1)..(25): SEQ ID NO: 6648; WAN024AV6_at; Start 67; Stop 91
gataacctaaaattaacagatttca

SEQ ID NO: 67308 - DNA, 25 bp, Artificial
  probe
  misc_feature (1)..(25): SEQ ID NO: 6648; WAN024AV6_at; Start 147; Stop 171
aaataagcgagtttatccaaatttg

SEQ ID NO: 67309 - DNA, 25 bp, Artificial
  probe
  misc_feature (1)..(25): SEQ ID NO: 6648; WAN024AV6_at; Start 163; Stop 187
ccaaatttgaatctggaggaggcta

SEQ ID NO: 67310 - DNA, 25 bp, Artificial
  probe
  misc_feature (1)..(25): SEQ ID NO: 6648; WAN024AV6_at; Start 64; Stop 88
cgagataacctaaaattaacagatt

SEQ ID NO: 67311 - DNA, 25 bp, Artificial
  probe
  misc_feature (1)..(25): SEQ ID NO: 6648; WAN024AV6_at; Start 166; Stop 190
aatttgaatctggaggaggctagag

SEQ ID NO: 67312 - DNA, 25 bp, Artificial
  probe
  misc_feature (1)..(25): SEQ ID NO: 6648; WAN024AV6_at; Start 171; Stop 195
gaatctggaggaggctagagcttta

SEQ ID NO: 67313 - DNA, 25 bp, Artificial
  probe
  misc_feature (1)..(25): SEQ ID NO: 6648; WAN024AV6_at; Start 57; Stop 81
taagaatcgagataacctaaaatta

SEQ ID NO: 67314 - DNA, 25 bp, Artificial
  probe
  misc_feature (1)..(25): SEQ ID NO: 6648; WAN024AV6_at; Start 165; Stop 189
aaatttgaatctggaggaggctaga

SEQ ID NO: 67315 - DNA, 25 bp, Artificial
  probe
  misc_feature (1)..(25): SEQ ID NO: 6648; WAN024AV6_at; Start 47; Stop 71
tattacgttttaagaatcgagataa

SEQ ID NO: 67316 - DNA, 25 bp, Artificial
  probe
  misc_feature (1)..(25): SEQ ID NO: 6648; WAN024AV6_at; Start 175; Stop 199
ctggaggaggctagagctttattgc

SEQ ID NO: 67317 - DNA, 25 bp, Artificial
  probe
  misc_feature (1)..(25): SEQ ID NO: 6648; WAN024AV6_at; Start 173; Stop 197
atctggaggaggctagagctttatt

SEQ ID NO: 67318 - DNA, 25 bp, Artificial
  probe
  misc_feature (1)..(25): SEQ ID NO: 6648; WAN024AV6_at; Start 155; Stop 179
gagtttatccaaatttgaatctgga

SEQ ID NO: 67319 - DNA, 25 bp, Artificial
  probe
  misc_feature (1)..(25): SEQ ID NO: 6648; WAN024AV6_at; Start 60; Stop 84
gaatcgagataacctaaaattaaca

SEQ ID NO: 67320 - DNA, 25 bp, Artificial
  probe
  misc_feature (1)..(25): SEQ ID NO: 6648; WAN024AV6_at; Start 61; Stop 85
aatcgagataacctaaaattaacag

SEQ ID NO: 67321 - DNA, 25 bp, Artificial
  probe
  misc_feature (1)..(25): SEQ ID NO: 6648; WAN024AV6_at; Start 154; Stop 178
cgagtttatccaaatttgaatctgg

SEQ ID NO: 67322 - DNA, 25 bp, Artificial
  probe
  misc_feature (1)..(25): SEQ ID NO: 6648; WAN024AV6_at; Start 162; Stop 186
tccaaatttgaatctggaggaggct

SEQ ID NO: 67323 - DNA, 25 bp, Artificial
  probe
  misc_feature (1)..(25): SEQ ID NO: 6648; WAN024AV6_at; Start 63; Stop 87
tcgagataacctaaaattaacagat

SEQ ID NO: 67324 - DNA, 25 bp, Artificial
  probe
  misc_feature (1)..(25): SEQ ID NO: 6648; WAN024AV6_at; Start 168; Stop 192
tttgaatctggaggaggctagagct

SEQ ID NO: 67325 - DNA, 25 bp, Artificial
  probe
  misc_feature (1)..(25): SEQ ID NO: 6648; WAN024AV6_at; Start 159; Stop 183
ttatccaaatttgaatctggaggag

SEQ ID NO: 67326 - DNA, 25 bp, Artificial
  probe
  misc_feature (1)..(25): SEQ ID NO: 6648; WAN024AV6_at; Start 174; Stop 198
tctggaggaggctagagctttattg

SEQ ID NO: 67327 - DNA, 25 bp, Artificial
  probe
  misc_feature (1)..(25): SEQ ID NO: 6648; WAN024AV6_at; Start 169; Stop 193
ttgaatctggaggaggctagagctt

SEQ ID NO: 67328 - DNA, 25 bp, Artificial
  probe
  misc_feature (1)..(25): SEQ ID NO: 6648; WAN024AV6_at; Start 151; Stop 175
aagcgagtttatccaaatttgaatc

SEQ ID NO: 67329 - DNA, 25 bp, Artificial
  probe
  misc_feature (1)..(25): SEQ ID NO: 6648; WAN024AV6_at; Start 161; Stop 185
atccaaatttgaatctggaggaggc

SEQ ID NO: 67330 - DNA, 25 bp, Artificial
  probe
  misc_feature (1)..(25): SEQ ID NO: 6648; WAN024AV6_at; Start 70; Stop 94
aacctaaaattaacagatttcatcg

SEQ ID NO: 67331 - DNA, 25 bp, Artificial
  probe
  misc_feature (1)..(25): SEQ ID NO: 6648; WAN024AV6_at; Start 164; Stop 188
caaatttgaatctggaggaggctag

SEQ ID NO: 67332 - DNA, 25 bp, Artificial
  probe
  misc_feature (1)..(25): SEQ ID NO: 6648; WAN024AV6_at; Start 170; Stop 194
tgaatctggaggaggctagagcttt

SEQ ID NO: 67333 - DNA, 25 bp, Artificial
  probe
  misc_feature (1)..(25): SEQ ID NO: 6648; WAN024AV6_at; Start 148; Stop 172
aataagcgagtttatccaaatttga

SEQ ID NO: 67334 - DNA, 25 bp, Artificial
  probe
  misc_feature (1)..(25): SEQ ID NO: 6648; WAN024AV6_at; Start 167; Stop 191
atttgaatctggaggaggctagagc

SEQ ID NO: 67335 - DNA, 25 bp, Artificial
  probe
  misc_feature (1)..(25): SEQ ID NO: 1844; WAN024AV7_s_at; Start 128; Stop 152
tgatgagctattcttcagattgttt

SEQ ID NO: 67336 - DNA, 25 bp, Artificial
  probe
  misc_feature (1)..(25): SEQ ID NO: 1844; WAN024AV7_s_at; Start 330; Stop 354
agatacgaaacaattgatttacatg

SEQ ID NO: 67337 - DNA, 25 bp, Artificial
  probe
  misc_feature (1)..(25): SEQ ID NO: 1844; WAN024AV7_s_at; Start 322; Stop 346
ttgccaagagatacgaaacaattga

SEQ ID NO: 67338 - DNA, 25 bp, Artificial
  probe
  misc_feature (1)..(25): SEQ ID NO: 1844; WAN024AV7_s_at; Start 321; Stop 345
attgccaagagatacgaaacaattg

SEQ ID NO: 67339 - DNA, 25 bp, Artificial
  probe
  misc_feature (1)..(25): SEQ ID NO: 1844; WAN024AV7_s_at; Start 127; Stop 151
atgatgagctattcttcagattgtt

SEQ ID NO: 67340 - DNA, 25 bp, Artificial
  probe
  misc_feature (1)..(25): SEQ ID NO: 1844; WAN024AV7_s_at; Start 327; Stop 351
aagagatacgaaacaattgatttac

SEQ ID NO: 67341 - DNA, 25 bp, Artificial
  probe
  misc_feature (1)..(25): SEQ ID NO: 1844; WAN024AV7_s_at; Start 326; Stop 350
caagagatacgaaacaattgattta

SEQ ID NO: 67342 - DNA, 25 bp, Artificial
  probe
  misc_feature (1)..(25): SEQ ID NO: 1844; WAN024AV7_s_at; Start 323; Stop 347
tgccaagagatacgaaacaattgat

SEQ ID NO: 67343 - DNA, 25 bp, Artificial
  probe
  misc_feature (1)..(25): SEQ ID NO: 1844; WAN024AV7_s_at; Start 328; Stop 352
agagatacgaaacaattgatttaca

SEQ ID NO: 67344 - DNA, 25 bp, Artificial
  probe
  misc_feature (1)..(25): SEQ ID NO: 1844; WAN024AV7_s_at; Start 331; Stop 355
gatacgaaacaattgatttacatgg

SEQ ID NO: 67345 - DNA, 25 bp, Artificial
  probe
  misc_feature (1)..(25): SEQ ID NO: 1844; WAN024AV7_s_at; Start 329; Stop 353
gagatacgaaacaattgatttacat

SEQ ID NO: 67346 - DNA, 25 bp, Artificial
  probe
  misc_feature (1)..(25): SEQ ID NO: 1844; WAN024AV7_s_at; Start 325; Stop 349
ccaagagatacgaaacaattgattt

SEQ ID NO: 67347 - DNA, 25 bp, Artificial
  probe
  misc_feature (1)..(25): SEQ ID NO: 1844; WAN024AV7_s_at; Start 320; Stop 344
tattgccaagagatacgaaacaatt

SEQ ID NO: 67348 - DNA, 25 bp, Artificial
  probe
  misc_feature (1)..(25): SEQ ID NO: 1844; WAN024AV7_s_at; Start 332; Stop 356
atacgaaacaattgatttacatggc

SEQ ID NO: 67349 - DNA, 25 bp, Artificial
  probe
  misc_feature (1)..(25): SEQ ID NO: 1844; WAN024AV7_s_at; Start 324; Stop 348
gccaagagatacgaaacaattgatt

SEQ ID NO: 67350 - DNA, 25 bp, Artificial
  probe
  misc_feature (1)..(25): SEQ ID NO: 1071; WAN024AV8_at; Start 116; Stop 140
tgttgaatggaatagtattgggttc

SEQ ID NO: 67351 - DNA, 25 bp, Artificial
  probe
  misc_feature (1)..(25): SEQ ID NO: 1071; WAN024AV8_at; Start 122; Stop 146
atggaatagtattgggttcgctgat

SEQ ID NO: 67352 - DNA, 25 bp, Artificial
  probe
  misc_feature (1)..(25): SEQ ID NO: 1071; WAN024AV8_at; Start 39; Stop 63
ctcactaggggtgatgattggaata

SEQ ID NO: 67353 - DNA, 25 bp, Artificial
  probe
  misc_feature (1)..(25): SEQ ID NO: 1071; WAN024AV8_at; Start 41; Stop 65
cactaggggtgatgattggaatagt

SEQ ID NO: 67354 - DNA, 25 bp, Artificial
  probe
  misc_feature (1)..(25): SEQ ID NO: 1071; WAN024AV8_at; Start 121; Stop 145
aatggaatagtattgggttcgctga

SEQ ID NO: 67355 - DNA, 25 bp, Artificial
  probe
  misc_feature (1)..(25): SEQ ID NO: 1071; WAN024AV8_at; Start 119; Stop 143
tgaatggaatagtattgggttcgct

SEQ ID NO: 67356 - DNA, 25 bp, Artificial
  probe
  misc_feature (1)..(25): SEQ ID NO: 1071; WAN024AV8_at; Start 37; Stop 61
gcctcactaggggtgatgattggaa

SEQ ID NO: 67357 - DNA, 25 bp, Artificial
  probe
  misc_feature (1)..(25): SEQ ID NO: 1071; WAN024AV8_at; Start 115; Stop 139
ttgttgaatggaatagtattgggtt

SEQ ID NO: 67358 - DNA, 25 bp, Artificial
  probe
  misc_feature (1)..(25): SEQ ID NO: 1071; WAN024AV8_at; Start 123; Stop 147
tggaatagtattgggttcgctgatt

SEQ ID NO: 67359 - DNA, 25 bp, Artificial
  probe
  misc_feature (1)..(25): SEQ ID NO: 1071; WAN024AV8_at; Start 120; Stop 144
gaatggaatagtattgggttcgctg

SEQ ID NO: 67360 - DNA, 25 bp, Artificial
  probe
  misc_feature (1)..(25): SEQ ID NO: 1071; WAN024AV8_at; Start 40; Stop 64
tcactaggggtgatgattggaatag

SEQ ID NO: 67361 - DNA, 25 bp, Artificial
  probe
  misc_feature (1)..(25): SEQ ID NO: 1071; WAN024AV8_at; Start 36; Stop 60
agcctcactaggggtgatgattgga

SEQ ID NO: 67362 - DNA, 25 bp, Artificial
  probe
  misc_feature (1)..(25): SEQ ID NO: 1071; WAN024AV8_at; Start 118; Stop 142
ttgaatggaatagtattgggttcgc

SEQ ID NO: 67363 - DNA, 25 bp, Artificial
  probe
  misc_feature (1)..(25): SEQ ID NO: 1071; WAN024AV8_at; Start 117; Stop 141
gttgaatggaatagtattgggttcg

SEQ ID NO: 67364 - DNA, 25 bp, Artificial
  probe
  misc_feature (1)..(25): SEQ ID NO: 1071; WAN024AV8_at; Start 76; Stop 100
tttttagattttccagttgaatatg

SEQ ID NO: 67365 - DNA, 25 bp, Artificial
  probe
  misc_feature (1)..(25): SEQ ID NO: 1071; WAN024AV8_at; Start 38; Stop 62
cctcactaggggtgatgattggaat

SEQ ID NO: 67366 - DNA, 25 bp, Artificial
  probe
  misc_feature (1)..(25): SEQ ID NO: 7662; WAN024AV9_at; Start 212; Stop 236
tatccatttacattttgatggggat

SEQ ID NO: 67367 - DNA, 25 bp, Artificial
  probe
  misc_feature (1)..(25): SEQ ID NO: 7662; WAN024AV9_at; Start 10; Stop 34
tatgcactggccttggctattgttg

SEQ ID NO: 67368 - DNA, 25 bp, Artificial
  probe
  misc_feature (1)..(25): SEQ ID NO: 7662; WAN024AV9_at; Start 161; Stop 185
attttcgcgagactaagtctattac

SEQ ID NO: 67369 - DNA, 25 bp, Artificial
  probe
  misc_feature (1)..(25): SEQ ID NO: 7662; WAN024AV9_at; Start 211; Stop 235
gtatccatttacattttgatgggga

SEQ ID NO: 67370 - DNA, 25 bp, Artificial
  probe
  misc_feature (1)..(25): SEQ ID NO: 7662; WAN024AV9_at; Start 202; Stop 226
aaaatcatcgtatccatttacattt

SEQ ID NO: 67371 - DNA, 25 bp, Artificial
  probe
  misc_feature (1)..(25): SEQ ID NO: 7662; WAN024AV9_at; Start 165; Stop 189
tcgcgagactaagtctattacgcgt

SEQ ID NO: 67372 - DNA, 25 bp, Artificial
  probe
  misc_feature (1)..(25): SEQ ID NO: 7662; WAN024AV9_at; Start 206; Stop 230
tcatcgtatccatttacattttgat

SEQ ID NO: 67373 - DNA, 25 bp, Artificial
  probe
  misc_feature (1)..(25): SEQ ID NO: 7662; WAN024AV9_at; Start 201; Stop 225
aaaaatcatcgtatccatttacatt

SEQ ID NO: 67374 - DNA, 25 bp, Artificial
  probe
  misc_feature (1)..(25): SEQ ID NO: 7662; WAN024AV9_at; Start 200; Stop 224
aaaaaatcatcgtatccatttacat

SEQ ID NO: 67375 - DNA, 25 bp, Artificial
  probe
  misc_feature (1)..(25): SEQ ID NO: 7662; WAN024AV9_at; Start 164; Stop 188
ttcgcgagactaagtctattacgcg

SEQ ID NO: 67376 - DNA, 25 bp, Artificial
  probe
  misc_feature (1)..(25): SEQ ID NO: 7662; WAN024AV9_at; Start 221; Stop 245
acattttgatggggatttctattta

SEQ ID NO: 67377 - DNA, 25 bp, Artificial
  probe
  misc_feature (1)..(25): SEQ ID NO: 7662; WAN024AV9_at; Start 9; Stop 33
ttatgcactggccttggctattgtt

SEQ ID NO: 67378 - DNA, 25 bp, Artificial
  probe
  misc_feature (1)..(25): SEQ ID NO: 7662; WAN024AV9_at; Start 205; Stop 229
atcatcgtatccatttacattttga

SEQ ID NO: 67379 - DNA, 25 bp, Artificial
  probe
  misc_feature (1)..(25): SEQ ID NO: 7662; WAN024AV9_at; Start 204; Stop 228
aatcatcgtatccatttacattttg

SEQ ID NO: 67380 - DNA, 25 bp, Artificial
  probe
  misc_feature (1)..(25): SEQ ID NO: 7662; WAN024AV9_at; Start 6; Stop 30
tttttatgcactggccttggctatt

SEQ ID NO: 67381 - DNA, 25 bp, Artificial
  probe
  misc_feature (1)..(25): SEQ ID NO: 7662; WAN024AV9_at; Start 162; Stop 186
ttttcgcgagactaagtctattacg

SEQ ID NO: 67382 - DNA, 25 bp, Artificial
  probe
  misc_feature (1)..(25): SEQ ID NO: 7662; WAN024AV9_at; Start 209; Stop 233
tcgtatccatttacattttgatggg

SEQ ID NO: 67383 - DNA, 25 bp, Artificial
  probe
  misc_feature (1)..(25): SEQ ID NO: 7662; WAN024AV9_at; Start 163; Stop 187
tttcgcgagactaagtctattacgc

SEQ ID NO: 67384 - DNA, 25 bp, Artificial
  probe
  misc_feature (1)..(25): SEQ ID NO: 7662; WAN024AV9_at; Start 168; Stop 192
cgagactaagtctattacgcgtgaa

SEQ ID NO: 67385 - DNA, 25 bp, Artificial
  probe
  misc_feature (1)..(25): SEQ ID NO: 7662; WAN024AV9_at; Start 167; Stop 191
gcgagactaagtctattacgcgtga

SEQ ID NO: 67386 - DNA, 25 bp, Artificial
  probe
  misc_feature (1)..(25): SEQ ID NO: 7662; WAN024AV9_at; Start 2; Stop 26
tggttttttatgcactggccttggc

SEQ ID NO: 67387 - DNA, 25 bp, Artificial
  probe
  misc_feature (1)..(25): SEQ ID NO: 7662; WAN024AV9_at; Start 215; Stop 239
ccatttacattttgatggggatttc

SEQ ID NO: 67388 - DNA, 25 bp, Artificial
  probe
  misc_feature (1)..(25): SEQ ID NO: 7662; WAN024AV9_at; Start 7; Stop 31
ttttatgcactggccttggctattg

SEQ ID NO: 67389 - DNA, 25 bp, Artificial
  probe
  misc_feature (1)..(25): SEQ ID NO: 7662; WAN024AV9_at; Start 207; Stop 231
catcgtatccatttacattttgatg

SEQ ID NO: 67390 - DNA, 25 bp, Artificial
  probe
  misc_feature (1)..(25): SEQ ID NO: 7662; WAN024AV9_at; Start 216; Stop 240
catttacattttgatggggatttct

SEQ ID NO: 67391 - DNA, 25 bp, Artificial
  probe
  misc_feature (1)..(25): SEQ ID NO: 7662; WAN024AV9_at; Start 160; Stop 184
gattttcgcgagactaagtctatta

SEQ ID NO: 67392 - DNA, 25 bp, Artificial
  probe
  misc_feature (1)..(25): SEQ ID NO: 7662; WAN024AV9_at; Start 5; Stop 29
ttttttatgcactggccttggctat

SEQ ID NO: 67393 - DNA, 25 bp, Artificial
  probe
  misc_feature (1)..(25): SEQ ID NO: 7662; WAN024AV9_at; Start 208; Stop 232
atcgtatccatttacattttgatgg

SEQ ID NO: 67394 - DNA, 25 bp, Artificial
  probe
  misc_feature (1)..(25): SEQ ID NO: 7662; WAN024AV9_at; Start 4; Stop 28
gttttttatgcactggccttggcta

SEQ ID NO: 67395 - DNA, 25 bp, Artificial
  probe
  misc_feature (1)..(25): SEQ ID NO: 7662; WAN024AV9_at; Start 218; Stop 242
tttacattttgatggggatttctat

SEQ ID NO: 67396 - DNA, 25 bp, Artificial
  probe
  misc_feature (1)..(25): SEQ ID NO: 7662; WAN024AV9_at; Start 1; Stop 25
ttggttttttatgcactggccttgg

SEQ ID NO: 67397 - DNA, 25 bp, Artificial
  probe
  misc_feature (1)..(25): SEQ ID NO: 7662; WAN024AV9_at; Start 166; Stop 190
cgcgagactaagtctattacgcgtg

SEQ ID NO: 67398 - DNA, 25 bp, Artificial
  probe
  misc_feature (1)..(25): SEQ ID NO: 7662; WAN024AV9_at; Start 3; Stop 27
ggttttttatgcactggccttggct

SEQ ID NO: 67399 - DNA, 25 bp, Artificial
  probe
  misc_feature (1)..(25): SEQ ID NO: 7662; WAN024AV9_at; Start 210; Stop 234
cgtatccatttacattttgatgggg

SEQ ID NO: 67400 - DNA, 25 bp, Artificial
  probe
  misc_feature (1)..(25): SEQ ID NO: 2050; WAN024AVA_at; Start 230; Stop 254
tcgtctctatctacgtcttgatggg

SEQ ID NO: 67401 - DNA, 25 bp, Artificial
  probe
  misc_feature (1)..(25): SEQ ID NO: 2050; WAN024AVA_at; Start 231; Stop 255
cgtctctatctacgtcttgatggga

SEQ ID NO: 67402 - DNA, 25 bp, Artificial
  probe
  misc_feature (1)..(25): SEQ ID NO: 2050; WAN024AVA_at; Start 229; Stop 253
atcgtctctatctacgtcttgatgg

SEQ ID NO: 67403 - DNA, 25 bp, Artificial
  probe
  misc_feature (1)..(25): SEQ ID NO: 2050; WAN024AVA_at; Start 238; Stop 262
atctacgtcttgatgggaatttcta

SEQ ID NO: 67404 - DNA, 25 bp, Artificial
  probe
  misc_feature (1)..(25): SEQ ID NO: 2050; WAN024AVA_at; Start 236; Stop 260
ctatctacgtcttgatgggaatttc

SEQ ID NO: 67405 - DNA, 25 bp, Artificial
  probe
  misc_feature (1)..(25): SEQ ID NO: 2050; WAN024AVA_at; Start 242; Stop 266
acgtcttgatgggaatttctattta

SEQ ID NO: 67406 - DNA, 25 bp, Artificial
  probe
  misc_feature (1)..(25): SEQ ID NO: 2050; WAN024AVA_at; Start 227; Stop 251
tcatcgtctctatctacgtcttgat

SEQ ID NO: 67407 - DNA, 25 bp, Artificial
  probe
  misc_feature (1)..(25): SEQ ID NO: 2050; WAN024AVA_at; Start 237; Stop 261
tatctacgtcttgatgggaatttct

SEQ ID NO: 67408 - DNA, 25 bp, Artificial
  probe
  misc_feature (1)..(25): SEQ ID NO: 2050; WAN024AVA_at; Start 234; Stop 258
ctctatctacgtcttgatgggaatt

SEQ ID NO: 67409 - DNA, 25 bp, Artificial
  probe
  misc_feature (1)..(25): SEQ ID NO: 2050; WAN024AVA_at; Start 240; Stop 264
ctacgtcttgatgggaatttctatt

SEQ ID NO: 67410 - DNA, 25 bp, Artificial
  probe
  misc_feature (1)..(25): SEQ ID NO: 2050; WAN024AVA_at; Start 226; Stop 250
atcatcgtctctatctacgtcttga

SEQ ID NO: 67411 - DNA, 25 bp, Artificial
  probe
  misc_feature (1)..(25): SEQ ID NO: 2050; WAN024AVA_at; Start 225; Stop 249
aatcatcgtctctatctacgtcttg

SEQ ID NO: 67412 - DNA, 25 bp, Artificial
  probe
  misc_feature (1)..(25): SEQ ID NO: 2050; WAN024AVA_at; Start 228; Stop 252
catcgtctctatctacgtcttgatg

SEQ ID NO: 67413 - DNA, 25 bp, Artificial
  probe
  misc_feature (1)..(25): SEQ ID NO: 2050; WAN024AVA_at; Start 235; Stop 259
tctatctacgtcttgatgggaattt

SEQ ID NO: 67414 - DNA, 25 bp, Artificial
  probe
  misc_feature (1)..(25): SEQ ID NO: 2050; WAN024AVA_at; Start 232; Stop 256
gtctctatctacgtcttgatgggaa

SEQ ID NO: 67415 - DNA, 25 bp, Artificial
  probe
  misc_feature (1)..(25): SEQ ID NO: 2050; WAN024AVA_at; Start 241; Stop 265
tacgtcttgatgggaatttctattt

SEQ ID NO: 67416 - DNA, 25 bp, Artificial
  probe
  misc_feature (1)..(25): SEQ ID NO: 2050; WAN024AVA_at; Start 233; Stop 257
tctctatctacgtcttgatgggaat

SEQ ID NO: 67417 - DNA, 25 bp, Artificial
  probe
  misc_feature (1)..(25): SEQ ID NO: 2050; WAN024AVA_at; Start 239; Stop 263
tctacgtcttgatgggaatttctat

SEQ ID NO: 67418 - DNA, 25 bp, Artificial
  probe
  misc_feature (1)..(25): SEQ ID NO: 6565; WAN024AVB_at; Start 47; Stop 71
aagttgtggctccagctactctaac

SEQ ID NO: 67419 - DNA, 25 bp, Artificial
  probe
  misc_feature (1)..(25): SEQ ID NO: 6565; WAN024AVB_at; Start 50; Stop 74
ttgtggctccagctactctaactaa

SEQ ID NO: 67420 - DNA, 25 bp, Artificial
  probe
  misc_feature (1)..(25): SEQ ID NO: 6565; WAN024AVB_at; Start 45; Stop 69
tcaagttgtggctccagctactcta

SEQ ID NO: 67421 - DNA, 25 bp, Artificial
  probe
  misc_feature (1)..(25): SEQ ID NO: 6565; WAN024AVB_at; Start 51; Stop 75
tgtggctccagctactctaactaat

SEQ ID NO: 67422 - DNA, 25 bp, Artificial
  probe
  misc_feature (1)..(25): SEQ ID NO: 6565; WAN024AVB_at; Start 48; Stop 72
agttgtggctccagctactctaact

SEQ ID NO: 67423 - DNA, 25 bp, Artificial
  probe
  misc_feature (1)..(25): SEQ ID NO: 6565; WAN024AVB_at; Start 46; Stop 70
caagttgtggctccagctactctaa

SEQ ID NO: 67424 - DNA, 25 bp, Artificial
  probe
  misc_feature (1)..(25): SEQ ID NO: 6565; WAN024AVB_at; Start 49; Stop 73
gttgtggctccagctactctaacta

SEQ ID NO: 67425 - DNA, 25 bp, Artificial
  probe
  misc_feature (1)..(25): SEQ ID NO: 6565; WAN024AVB_at; Start 44; Stop 68
gtcaagttgtggctccagctactct

SEQ ID NO: 67426 - DNA, 25 bp, Artificial
  probe
  misc_feature (1)..(25): SEQ ID NO: 357; WAN024AVC_at; Start 62; Stop 86
tccagctactaagtctcgtgcagtg

SEQ ID NO: 67427 - DNA, 25 bp, Artificial
  probe
  misc_feature (1)..(25): SEQ ID NO: 357; WAN024AVC_at; Start 63; Stop 87
ccagctactaagtctcgtgcagtgc

SEQ ID NO: 67428 - DNA, 25 bp, Artificial
  probe
  misc_feature (1)..(25): SEQ ID NO: 357; WAN024AVC_at; Start 70; Stop 94
ctaagtctcgtgcagtgccgattta

SEQ ID NO: 67429 - DNA, 25 bp, Artificial
  probe
  misc_feature (1)..(25): SEQ ID NO: 357; WAN024AVC_at; Start 74; Stop 98
gtctcgtgcagtgccgatttatcaa

SEQ ID NO: 67430 - DNA, 25 bp, Artificial
  probe
  misc_feature (1)..(25): SEQ ID NO: 357; WAN024AVC_at; Start 80; Stop 104
tgcagtgccgatttatcaaacaaca

SEQ ID NO: 67431 - DNA, 25 bp, Artificial
  probe
  misc_feature (1)..(25): SEQ ID NO: 357; WAN024AVC_at; Start 69; Stop 93
actaagtctcgtgcagtgccgattt

SEQ ID NO: 67432 - DNA, 25 bp, Artificial
  probe
  misc_feature (1)..(25): SEQ ID NO: 357; WAN024AVC_at; Start 75; Stop 99
tctcgtgcagtgccgatttatcaaa

SEQ ID NO: 67433 - DNA, 25 bp, Artificial
  probe
  misc_feature (1)..(25): SEQ ID NO: 357; WAN024AVC_at; Start 72; Stop 96
aagtctcgtgcagtgccgatttatc

SEQ ID NO: 67434 - DNA, 25 bp, Artificial
  probe
  misc_feature (1)..(25): SEQ ID NO: 357; WAN024AVC_at; Start 66; Stop 90
gctactaagtctcgtgcagtgccga

SEQ ID NO: 67435 - DNA, 25 bp, Artificial
  probe
  misc_feature (1)..(25): SEQ ID NO: 357; WAN024AVC_at; Start 61; Stop 85
ctccagctactaagtctcgtgcagt

SEQ ID NO: 67436 - DNA, 25 bp, Artificial
  probe
  misc_feature (1)..(25): SEQ ID NO: 357; WAN024AVC_at; Start 65; Stop 89
agctactaagtctcgtgcagtgccg

SEQ ID NO: 67437 - DNA, 25 bp, Artificial
  probe
  misc_feature (1)..(25): SEQ ID NO: 357; WAN024AVC_at; Start 77; Stop 101
tcgtgcagtgccgatttatcaaaca

SEQ ID NO: 67438 - DNA, 25 bp, Artificial
  probe
  misc_feature (1)..(25): SEQ ID NO: 357; WAN024AVC_at; Start 71; Stop 95
taagtctcgtgcagtgccgatttat

SEQ ID NO: 67439 - DNA, 25 bp, Artificial
  probe
  misc_feature (1)..(25): SEQ ID NO: 357; WAN024AVC_at; Start 81; Stop 105
gcagtgccgatttatcaaacaacat

SEQ ID NO: 67440 - DNA, 25 bp, Artificial
  probe
  misc_feature (1)..(25): SEQ ID NO: 357; WAN024AVC_at; Start 79; Stop 103
gtgcagtgccgatttatcaaacaac

SEQ ID NO: 67441 - DNA, 25 bp, Artificial
  probe
  misc_feature (1)..(25): SEQ ID NO: 357; WAN024AVC_at; Start 67; Stop 91
ctactaagtctcgtgcagtgccgat

SEQ ID NO: 67442 - DNA, 25 bp, Artificial
  probe
  misc_feature (1)..(25): SEQ ID NO: 357; WAN024AVC_at; Start 68; Stop 92
tactaagtctcgtgcagtgccgatt

SEQ ID NO: 67443 - DNA, 25 bp, Artificial
  probe
  misc_feature (1)..(25): SEQ ID NO: 357; WAN024AVC_at; Start 76; Stop 100
ctcgtgcagtgccgatttatcaaac

SEQ ID NO: 67444 - DNA, 25 bp, Artificial
  probe
  misc_feature (1)..(25): SEQ ID NO: 357; WAN024AVC_at; Start 78; Stop 102
cgtgcagtgccgatttatcaaacaa

SEQ ID NO: 67445 - DNA, 25 bp, Artificial
  probe
  misc_feature (1)..(25): SEQ ID NO: 357; WAN024AVC_at; Start 64; Stop 88
cagctactaagtctcgtgcagtgcc

SEQ ID NO: 67446 - DNA, 25 bp, Artificial
  probe
  misc_feature (1)..(25): SEQ ID NO: 357; WAN024AVC_at; Start 73; Stop 97
agtctcgtgcagtgccgatttatca

SEQ ID NO: 67447 - DNA, 25 bp, Artificial
  probe
  misc_feature (1)..(25): SEQ ID NO: 7143; WAN024AVD_s_at; Start 13; Stop 37
acctggctaacagctcacttgtata

SEQ ID NO: 67448 - DNA, 25 bp, Artificial
  probe
  misc_feature (1)..(25): SEQ ID NO: 7143; WAN024AVD_s_at; Start 20; Stop 44
taacagctcacttgtatagaaaatt

SEQ ID NO: 67449 - DNA, 25 bp, Artificial
  probe
  misc_feature (1)..(25): SEQ ID NO: 7143; WAN024AVD_s_at; Start 21; Stop 45
aacagctcacttgtatagaaaattt

SEQ ID NO: 67450 - DNA, 25 bp, Artificial
  probe
  misc_feature (1)..(25): SEQ ID NO: 7143; WAN024AVD_s_at; Start 15; Stop 39
ctggctaacagctcacttgtataga

SEQ ID NO: 67451 - DNA, 25 bp, Artificial
  probe
  misc_feature (1)..(25): SEQ ID NO: 7143; WAN024AVD_s_at; Start 17; Stop 41
ggctaacagctcacttgtatagaaa

SEQ ID NO: 67452 - DNA, 25 bp, Artificial
  probe
  misc_feature (1)..(25): SEQ ID NO: 7143; WAN024AVD_s_at; Start 14; Stop 38
cctggctaacagctcacttgtatag

SEQ ID NO: 67453 - DNA, 25 bp, Artificial
  probe
  misc_feature (1)..(25): SEQ ID NO: 7143; WAN024AVD_s_at; Start 10; Stop 34
agaacctggctaacagctcacttgt

SEQ ID NO: 67454 - DNA, 25 bp, Artificial
  probe
  misc_feature (1)..(25): SEQ ID NO: 7143; WAN024AVD_s_at; Start 11; Stop 35
gaacctggctaacagctcacttgta

SEQ ID NO: 67455 - DNA, 25 bp, Artificial
  probe
  misc_feature (1)..(25): SEQ ID NO: 7143; WAN024AVD_s_at; Start 18; Stop 42
gctaacagctcacttgtatagaaaa

SEQ ID NO: 67456 - DNA, 25 bp, Artificial
  probe
  misc_feature (1)..(25): SEQ ID NO: 7143; WAN024AVD_s_at; Start 12; Stop 36
aacctggctaacagctcacttgtat

SEQ ID NO: 67457 - DNA, 25 bp, Artificial
  probe
  misc_feature (1)..(25): SEQ ID NO: 7143; WAN024AVD_s_at; Start 16; Stop 40
tggctaacagctcacttgtatagaa

SEQ ID NO: 67458 - DNA, 25 bp, Artificial
  probe
  misc_feature (1)..(25): SEQ ID NO: 7143; WAN024AVD_s_at; Start 8; Stop 32
aaagaacctggctaacagctcactt

SEQ ID NO: 67459 - DNA, 25 bp, Artificial
  probe
  misc_feature (1)..(25): SEQ ID NO: 7143; WAN024AVD_s_at; Start 19; Stop 43
ctaacagctcacttgtatagaaaat

SEQ ID NO: 67460 - DNA, 25 bp, Artificial
  probe
  misc_feature (1)..(25): SEQ ID NO: 7143; WAN024AVD_s_at; Start 9; Stop 33
aagaacctggctaacagctcacttg

SEQ ID NO: 67461 - DNA, 25 bp, Artificial
  probe
  misc_feature (1)..(25): SEQ ID NO: 7671; WAN024AVE_s_at; Start 35; Stop 59
caagacctcctatcaaagtttttga

SEQ ID NO: 67462 - DNA, 25 bp, Artificial
  probe
  misc_feature (1)..(25): SEQ ID NO: 7671; WAN024AVE_s_at; Start 38; Stop 62
gacctcctatcaaagtttttgaaca

SEQ ID NO: 67463 - DNA, 25 bp, Artificial
  probe
  misc_feature (1)..(25): SEQ ID NO: 7671; WAN024AVE_s_at; Start 34; Stop 58
acaagacctcctatcaaagtttttg

SEQ ID NO: 67464 - DNA, 25 bp, Artificial
  probe
  misc_feature (1)..(25): SEQ ID NO: 5667; WAN024AVF_at; Start 8; Stop 32
aaaatccattcattgaaattgaaag

SEQ ID NO: 67465 - DNA, 25 bp, Artificial
  probe
  misc_feature (1)..(25): SEQ ID NO: 5667; WAN024AVF_at; Start 26; Stop 50
ttgaaagaatagaaagaacctggct

SEQ ID NO: 67466 - DNA, 25 bp, Artificial
  probe
  misc_feature (1)..(25): SEQ ID NO: 5667; WAN024AVF_at; Start 25; Stop 49
attgaaagaatagaaagaacctggc

SEQ ID NO: 67467 - DNA, 25 bp, Artificial
  probe
  misc_feature (1)..(25): SEQ ID NO: 5667; WAN024AVF_at; Start 9; Stop 33
aaatccattcattgaaattgaaaga

SEQ ID NO: 67468 - DNA, 25 bp, Artificial
  probe
  misc_feature (1)..(25): SEQ ID NO: 5667; WAN024AVF_at; Start 6; Stop 30
aaaaaatccattcattgaaattgaa

SEQ ID NO: 67469 - DNA, 25 bp, Artificial
  probe
  misc_feature (1)..(25): SEQ ID NO: 5667; WAN024AVF_at; Start 12; Stop 36
tccattcattgaaattgaaagaata

SEQ ID NO: 67470 - DNA, 25 bp, Artificial
  probe
  misc_feature (1)..(25): SEQ ID NO: 5667; WAN024AVF_at; Start 17; Stop 41
tcattgaaattgaaagaatagaaag

SEQ ID NO: 67471 - DNA, 25 bp, Artificial
  probe
  misc_feature (1)..(25): SEQ ID NO: 5667; WAN024AVF_at; Start 27; Stop 51
tgaaagaatagaaagaacctggcta

SEQ ID NO: 67472 - DNA, 25 bp, Artificial
  probe
  misc_feature (1)..(25): SEQ ID NO: 5667; WAN024AVF_at; Start 13; Stop 37
ccattcattgaaattgaaagaatag

SEQ ID NO: 67473 - DNA, 25 bp, Artificial
  probe
  misc_feature (1)..(25): SEQ ID NO: 5667; WAN024AVF_at; Start 10; Stop 34
aatccattcattgaaattgaaagaa

SEQ ID NO: 67474 - DNA, 25 bp, Artificial
  probe
  misc_feature (1)..(25): SEQ ID NO: 5667; WAN024AVF_at; Start 24; Stop 48
aattgaaagaatagaaagaacctgg

SEQ ID NO: 67475 - DNA, 25 bp, Artificial
  probe
  misc_feature (1)..(25): SEQ ID NO: 5667; WAN024AVF_at; Start 16; Stop 40
ttcattgaaattgaaagaatagaaa

SEQ ID NO: 67476 - DNA, 25 bp, Artificial
  probe
  misc_feature (1)..(25): SEQ ID NO: 5667; WAN024AVF_at; Start 14; Stop 38
cattcattgaaattgaaagaataga

SEQ ID NO: 67477 - DNA, 25 bp, Artificial
  probe
  misc_feature (1)..(25): SEQ ID NO: 5667; WAN024AVF_at; Start 28; Stop 52
gaaagaatagaaagaacctggctaa

SEQ ID NO: 67478 - DNA, 25 bp, Artificial
  probe
  misc_feature (1)..(25): SEQ ID NO: 5667; WAN024AVF_at; Start 15; Stop 39
attcattgaaattgaaagaatagaa

SEQ ID NO: 67479 - DNA, 25 bp, Artificial
  probe
  misc_feature (1)..(25): SEQ ID NO: 5667; WAN024AVF_at; Start 18; Stop 42
cattgaaattgaaagaatagaaaga

SEQ ID NO: 67480 - DNA, 25 bp, Artificial
  probe
  misc_feature (1)..(25): SEQ ID NO: 5667; WAN024AVF_at; Start 7; Stop 31
aaaaatccattcattgaaattgaaa

SEQ ID NO: 67481 - DNA, 25 bp, Artificial
  probe
  misc_feature (1)..(25): SEQ ID NO: 5667; WAN024AVF_at; Start 11; Stop 35
atccattcattgaaattgaaagaat

SEQ ID NO: 67482 - DNA, 25 bp, Artificial
  probe
  misc_feature (1)..(25): SEQ ID NO: 1851; WAN024AVG_at; Start 259; Stop 283
gctaatctattatctcgactctatc

SEQ ID NO: 67483 - DNA, 25 bp, Artificial
  probe
  misc_feature (1)..(25): SEQ ID NO: 1851; WAN024AVG_at; Start 253; Stop 277
agaggtgctaatctattatctcgac

SEQ ID NO: 67484 - DNA, 25 bp, Artificial
  probe
  misc_feature (1)..(25): SEQ ID NO: 1851; WAN024AVG_at; Start 245; Stop 269
tgaaagaaagaggtgctaatctatt

SEQ ID NO: 67485 - DNA, 25 bp, Artificial
  probe
  misc_feature (1)..(25): SEQ ID NO: 1851; WAN024AVG_at; Start 257; Stop 281
gtgctaatctattatctcgactcta

SEQ ID NO: 67486 - DNA, 25 bp, Artificial
  probe
  misc_feature (1)..(25): SEQ ID NO: 1851; WAN024AVG_at; Start 388; Stop 412
gaaacttttgatgaaatagagagat

SEQ ID NO: 67487 - DNA, 25 bp, Artificial
  probe
  misc_feature (1)..(25): SEQ ID NO: 1851; WAN024AVG_at; Start 191; Stop 215
ataaaatgctcaatcctgttgaaga

SEQ ID NO: 67488 - DNA, 25 bp, Artificial
  probe
  misc_feature (1)..(25): SEQ ID NO: 1851; WAN024AVG_at; Start 206; Stop 230
ctgttgaagattatgaattgacttt

SEQ ID NO: 67489 - DNA, 25 bp, Artificial
  probe
  misc_feature (1)..(25): SEQ ID NO: 1851; WAN024AVG_at; Start 237; Stop 261
tgaaattgtgaaagaaagaggtgct

SEQ ID NO: 67490 - DNA, 25 bp, Artificial
  probe
  misc_feature (1)..(25): SEQ ID NO: 1851; WAN024AVG_at; Start 251; Stop 275
aaagaggtgctaatctattatctcg

SEQ ID NO: 67491 - DNA, 25 bp, Artificial
  probe
  misc_feature (1)..(25): SEQ ID NO: 1851; WAN024AVG_at; Start 250; Stop 274
gaaagaggtgctaatctattatctc

SEQ ID NO: 67492 - DNA, 25 bp, Artificial
  probe
  misc_feature (1)..(25): SEQ ID NO: 1851; WAN024AVG_at; Start 260; Stop 284
ctaatctattatctcgactctatcg

SEQ ID NO: 67493 - DNA, 25 bp, Artificial
  probe
  misc_feature (1)..(25): SEQ ID NO: 1851; WAN024AVG_at; Start 239; Stop 263
aaattgtgaaagaaagaggtgctaa

SEQ ID NO: 67494 - DNA, 25 bp, Artificial
  probe
  misc_feature (1)..(25): SEQ ID NO: 1851; WAN024AVG_at; Start 192; Stop 216
taaaatgctcaatcctgttgaagat

SEQ ID NO: 67495 - DNA, 25 bp, Artificial
  probe
  misc_feature (1)..(25): SEQ ID NO: 1851; WAN024AVG_at; Start 242; Stop 266
ttgtgaaagaaagaggtgctaatct

SEQ ID NO: 67496 - DNA, 25 bp, Artificial
  probe
  misc_feature (1)..(25): SEQ ID NO: 1851; WAN024AVG_at; Start 241; Stop 265
attgtgaaagaaagaggtgctaatc

SEQ ID NO: 67497 - DNA, 25 bp, Artificial
  probe
  misc_feature (1)..(25): SEQ ID NO: 1851; WAN024AVG_at; Start 252; Stop 276
aagaggtgctaatctattatctcga

SEQ ID NO: 67498 - DNA, 25 bp, Artificial
  probe
  misc_feature (1)..(25): SEQ ID NO: 1851; WAN024AVG_at; Start 238; Stop 262
gaaattgtgaaagaaagaggtgcta

SEQ ID NO: 67499 - DNA, 25 bp, Artificial
  probe
  misc_feature (1)..(25): SEQ ID NO: 1851; WAN024AVG_at; Start 248; Stop 272
aagaaagaggtgctaatctattatc

SEQ ID NO: 67500 - DNA, 25 bp, Artificial
  probe
  misc_feature (1)..(25): SEQ ID NO: 1851; WAN024AVG_at; Start 386; Stop 410
tagaaacttttgatgaaatagagag

SEQ ID NO: 67501 - DNA, 25 bp, Artificial
  probe
  misc_feature (1)..(25): SEQ ID NO: 1851; WAN024AVG_at; Start 391; Stop 415
acttttgatgaaatagagagatata

SEQ ID NO: 67502 - DNA, 25 bp, Artificial
  probe
  misc_feature (1)..(25): SEQ ID NO: 1851; WAN024AVG_at; Start 151; Stop 175
cagaagtttaatgtatcttatgtcg

SEQ ID NO: 67503 - DNA, 25 bp, Artificial
  probe
  misc_feature (1)..(25): SEQ ID NO: 1851; WAN024AVG_at; Start 201; Stop 225
caatcctgttgaagattatgaattg

SEQ ID NO: 67504 - DNA, 25 bp, Artificial
  probe
  misc_feature (1)..(25): SEQ ID NO: 1851; WAN024AVG_at; Start 194; Stop 218
aaatgctcaatcctgttgaagatta

SEQ ID NO: 67505 - DNA, 25 bp, Artificial
  probe
  misc_feature (1)..(25): SEQ ID NO: 1851; WAN024AVG_at; Start 153; Stop 177
gaagtttaatgtatcttatgtcgat

SEQ ID NO: 67506 - DNA, 25 bp, Artificial
  probe
  misc_feature (1)..(25): SEQ ID NO: 1851; WAN024AVG_at; Start 383; Stop 407
tagtagaaacttttgatgaaataga

SEQ ID NO: 67507 - DNA, 25 bp, Artificial
  probe
  misc_feature (1)..(25): SEQ ID NO: 1851; WAN024AVG_at; Start 236; Stop 260
ttgaaattgtgaaagaaagaggtgc

SEQ ID NO: 67508 - DNA, 25 bp, Artificial
  probe
  misc_feature (1)..(25): SEQ ID NO: 1851; WAN024AVG_at; Start 204; Stop 228
tcctgttgaagattatgaattgact

SEQ ID NO: 67509 - DNA, 25 bp, Artificial
  probe
  misc_feature (1)..(25): SEQ ID NO: 1851; WAN024AVG_at; Start 197; Stop 221
tgctcaatcctgttgaagattatga

SEQ ID NO: 67510 - DNA, 25 bp, Artificial
  probe
  misc_feature (1)..(25): SEQ ID NO: 1851; WAN024AVG_at; Start 243; Stop 267
tgtgaaagaaagaggtgctaatcta

SEQ ID NO: 67511 - DNA, 25 bp, Artificial
  probe
  misc_feature (1)..(25): SEQ ID NO: 1851; WAN024AVG_at; Start 256; Stop 280
ggtgctaatctattatctcgactct

SEQ ID NO: 67512 - DNA, 25 bp, Artificial
  probe
  misc_feature (1)..(25): SEQ ID NO: 1851; WAN024AVG_at; Start 198; Stop 222
gctcaatcctgttgaagattatgaa

SEQ ID NO: 67513 - DNA, 25 bp, Artificial
  probe
  misc_feature (1)..(25): SEQ ID NO: 1851; WAN024AVG_at; Start 254; Stop 278
gaggtgctaatctattatctcgact

SEQ ID NO: 67514 - DNA, 25 bp, Artificial
  probe
  misc_feature (1)..(25): SEQ ID NO: 1851; WAN024AVG_at; Start 205; Stop 229
cctgttgaagattatgaattgactt

SEQ ID NO: 67515 - DNA, 25 bp, Artificial
  probe
  misc_feature (1)..(25): SEQ ID NO: 1851; WAN024AVG_at; Start 323; Stop 347
ctaatccttggattttaatgagtga

SEQ ID NO: 67516 - DNA, 25 bp, Artificial
  probe
  misc_feature (1)..(25): SEQ ID NO: 6691; WAN024AVH_at; Start 96; Stop 120
ttatccttggcaaatggaaccagta

SEQ ID NO: 67517 - DNA, 25 bp, Artificial
  probe
  misc_feature (1)..(25): SEQ ID NO: 6691; WAN024AVH_at; Start 138; Stop 162
tggattttgtcccagaggaaccgat

SEQ ID NO: 67518 - DNA, 25 bp, Artificial
  probe
  misc_feature (1)..(25): SEQ ID NO: 6691; WAN024AVH_at; Start 72; Stop 96
ctatggtaaagaacctaatggttat

SEQ ID NO: 67519 - DNA, 25 bp, Artificial
  probe
  misc_feature (1)..(25): SEQ ID NO: 6691; WAN024AVH_at; Start 103; Stop 127
tggcaaatggaaccagtattaacta

SEQ ID NO: 67520 - DNA, 25 bp, Artificial
  probe
  misc_feature (1)..(25): SEQ ID NO: 6691; WAN024AVH_at; Start 148; Stop 172
cccagaggaaccgatgatttaggat

SEQ ID NO: 67521 - DNA, 25 bp, Artificial
  probe
  misc_feature (1)..(25): SEQ ID NO: 6691; WAN024AVH_at; Start 94; Stop 118
tattatccttggcaaatggaaccag

SEQ ID NO: 67522 - DNA, 25 bp, Artificial
  probe
  misc_feature (1)..(25): SEQ ID NO: 6691; WAN024AVH_at; Start 106; Stop 130
caaatggaaccagtattaactatgc

SEQ ID NO: 67523 - DNA, 25 bp, Artificial
  probe
  misc_feature (1)..(25): SEQ ID NO: 6691; WAN024AVH_at; Start 144; Stop 168
ttgtcccagaggaaccgatgattta

SEQ ID NO: 67524 - DNA, 25 bp, Artificial
  probe
  misc_feature (1)..(25): SEQ ID NO: 6691; WAN024AVH_at; Start 139; Stop 163
ggattttgtcccagaggaaccgatg

SEQ ID NO: 67525 - DNA, 25 bp, Artificial
  probe
  misc_feature (1)..(25): SEQ ID NO: 6691; WAN024AVH_at; Start 143; Stop 167
tttgtcccagaggaaccgatgattt

SEQ ID NO: 67526 - DNA, 25 bp, Artificial
  probe
  misc_feature (1)..(25): SEQ ID NO: 6691; WAN024AVH_at; Start 110; Stop 134
tggaaccagtattaactatgccggt

SEQ ID NO: 67527 - DNA, 25 bp, Artificial
  probe
  misc_feature (1)..(25): SEQ ID NO: 6691; WAN024AVH_at; Start 108; Stop 132
aatggaaccagtattaactatgccg

SEQ ID NO: 67528 - DNA, 25 bp, Artificial
  probe
  misc_feature (1)..(25): SEQ ID NO: 6691; WAN024AVH_at; Start 61; Stop 85
ggagcagatccctatggtaaagaac

SEQ ID NO: 67529 - DNA, 25 bp, Artificial
  probe
  misc_feature (1)..(25): SEQ ID NO: 6691; WAN024AVH_at; Start 97; Stop 121
tatccttggcaaatggaaccagtat

SEQ ID NO: 67530 - DNA, 25 bp, Artificial
  probe
  misc_feature (1)..(25): SEQ ID NO: 6691; WAN024AVH_at; Start 140; Stop 164
gattttgtcccagaggaaccgatga

SEQ ID NO: 67531 - DNA, 25 bp, Artificial
  probe
  misc_feature (1)..(25): SEQ ID NO: 6691; WAN024AVH_at; Start 67; Stop 91
gatccctatggtaaagaacctaatg

SEQ ID NO: 67532 - DNA, 25 bp, Artificial
  probe
  misc_feature (1)..(25): SEQ ID NO: 6691; WAN024AVH_at; Start 149; Stop 173
ccagaggaaccgatgatttaggata

SEQ ID NO: 67533 - DNA, 25 bp, Artificial
  probe
  misc_feature (1)..(25): SEQ ID NO: 6691; WAN024AVH_at; Start 60; Stop 84
tggagcagatccctatggtaaagaa

SEQ ID NO: 67534 - DNA, 25 bp, Artificial
  probe
  misc_feature (1)..(25): SEQ ID NO: 6691; WAN024AVH_at; Start 152; Stop 176
gaggaaccgatgatttaggatatat

SEQ ID NO: 67535 - DNA, 25 bp, Artificial
  probe
  misc_feature (1)..(25): SEQ ID NO: 6691; WAN024AVH_at; Start 62; Stop 86
gagcagatccctatggtaaagaacc

SEQ ID NO: 67536 - DNA, 25 bp, Artificial
  probe
  misc_feature (1)..(25): SEQ ID NO: 6691; WAN024AVH_at; Start 145; Stop 169
tgtcccagaggaaccgatgatttag

SEQ ID NO: 67537 - DNA, 25 bp, Artificial
  probe
  misc_feature (1)..(25): SEQ ID NO: 6691; WAN024AVH_at; Start 101; Stop 125
cttggcaaatggaaccagtattaac

SEQ ID NO: 67538 - DNA, 25 bp, Artificial
  probe
  misc_feature (1)..(25): SEQ ID NO: 6691; WAN024AVH_at; Start 156; Stop 180
aaccgatgatttaggatatattgga

SEQ ID NO: 67539 - DNA, 25 bp, Artificial
  probe
  misc_feature (1)..(25): SEQ ID NO: 6691; WAN024AVH_at; Start 155; Stop 179
gaaccgatgatttaggatatattgg

SEQ ID NO: 67540 - DNA, 25 bp, Artificial
  probe
  misc_feature (1)..(25): SEQ ID NO: 6691; WAN024AVH_at; Start 142; Stop 166
ttttgtcccagaggaaccgatgatt

SEQ ID NO: 67541 - DNA, 25 bp, Artificial
  probe
  misc_feature (1)..(25): SEQ ID NO: 6691; WAN024AVH_at; Start 146; Stop 170
gtcccagaggaaccgatgatttagg

SEQ ID NO: 67542 - DNA, 25 bp, Artificial
  probe
  misc_feature (1)..(25): SEQ ID NO: 6691; WAN024AVH_at; Start 99; Stop 123
tccttggcaaatggaaccagtatta

SEQ ID NO: 67543 - DNA, 25 bp, Artificial
  probe
  misc_feature (1)..(25): SEQ ID NO: 6691; WAN024AVH_at; Start 68; Stop 92
atccctatggtaaagaacctaatgg

SEQ ID NO: 67544 - DNA, 25 bp, Artificial
  probe
  misc_feature (1)..(25): SEQ ID NO: 6691; WAN024AVH_at; Start 65; Stop 89
cagatccctatggtaaagaacctaa

SEQ ID NO: 67545 - DNA, 25 bp, Artificial
  probe
  misc_feature (1)..(25): SEQ ID NO: 6691; WAN024AVH_at; Start 91; Stop 115
ggttattatccttggcaaatggaac

SEQ ID NO: 67546 - DNA, 25 bp, Artificial
  probe
  misc_feature (1)..(25): SEQ ID NO: 6691; WAN024AVH_at; Start 136; Stop 160
catggattttgtcccagaggaaccg

SEQ ID NO: 67547 - DNA, 25 bp, Artificial
  probe
  misc_feature (1)..(25): SEQ ID NO: 6691; WAN024AVH_at; Start 150; Stop 174
cagaggaaccgatgatttaggatat

SEQ ID NO: 67548 - DNA, 25 bp, Artificial
  probe
  misc_feature (1)..(25): SEQ ID NO: 6691; WAN024AVH_at; Start 80; Stop 104
aagaacctaatggttattatccttg

SEQ ID NO: 67549 - DNA, 25 bp, Artificial
  probe
  misc_feature (1)..(25): SEQ ID NO: 6691; WAN024AVH_at; Start 64; Stop 88
gcagatccctatggtaaagaaccta

SEQ ID NO: 67550 - DNA, 25 bp, Artificial
  probe
  misc_feature (1)..(25): SEQ ID NO: 1871; WAN024AVI_at; Start 80; Stop 104
aaaatcctaatggtaggtacgattg

SEQ ID NO: 67551 - DNA, 25 bp, Artificial
  probe
  misc_feature (1)..(25): SEQ ID NO: 1871; WAN024AVI_at; Start 96; Stop 120
gtacgattgggaaatagaaccagta

SEQ ID NO: 67552 - DNA, 25 bp, Artificial
  probe
  misc_feature (1)..(25): SEQ ID NO: 1871; WAN024AVI_at; Start 82; Stop 106
aatcctaatggtaggtacgattggg

SEQ ID NO: 67553 - DNA, 25 bp, Artificial
  probe
  misc_feature (1)..(25): SEQ ID NO: 1871; WAN024AVI_at; Start 99; Stop 123
cgattgggaaatagaaccagtatta

SEQ ID NO: 67554 - DNA, 25 bp, Artificial
  probe
  misc_feature (1)..(25): SEQ ID NO: 1871; WAN024AVI_at; Start 106; Stop 130
gaaatagaaccagtattaactctgc

SEQ ID NO: 67555 - DNA, 25 bp, Artificial
  probe
  misc_feature (1)..(25): SEQ ID NO: 1871; WAN024AVI_at; Start 81; Stop 105
aaatcctaatggtaggtacgattgg

SEQ ID NO: 67556 - DNA, 25 bp, Artificial
  probe
  misc_feature (1)..(25): SEQ ID NO: 1871; WAN024AVI_at; Start 103; Stop 127
tgggaaatagaaccagtattaactc

SEQ ID NO: 67557 - DNA, 25 bp, Artificial
  probe
  misc_feature (1)..(25): SEQ ID NO: 1871; WAN024AVI_at; Start 88; Stop 112
aatggtaggtacgattgggaaatag

SEQ ID NO: 67558 - DNA, 25 bp, Artificial
  probe
  misc_feature (1)..(25): SEQ ID NO: 1871; WAN024AVI_at; Start 83; Stop 107
atcctaatggtaggtacgattggga

SEQ ID NO: 67559 - DNA, 25 bp, Artificial
  probe
  misc_feature (1)..(25): SEQ ID NO: 1871; WAN024AVI_at; Start 71; Stop 95
catatggtaaaaatcctaatggtag

SEQ ID NO: 67560 - DNA, 25 bp, Artificial
  probe
  misc_feature (1)..(25): SEQ ID NO: 1871; WAN024AVI_at; Start 97; Stop 121
tacgattgggaaatagaaccagtat

SEQ ID NO: 67561 - DNA, 25 bp, Artificial
  probe
  misc_feature (1)..(25): SEQ ID NO: 1871; WAN024AVI_at; Start 89; Stop 113
atggtaggtacgattgggaaataga

SEQ ID NO: 67562 - DNA, 25 bp, Artificial
  probe
  misc_feature (1)..(25): SEQ ID NO: 1871; WAN024AVI_at; Start 72; Stop 96
atatggtaaaaatcctaatggtagg

SEQ ID NO: 67563 - DNA, 25 bp, Artificial
  probe
  misc_feature (1)..(25): SEQ ID NO: 1871; WAN024AVI_at; Start 100; Stop 124
gattgggaaatagaaccagtattaa

SEQ ID NO: 67564 - DNA, 25 bp, Artificial
  probe
  misc_feature (1)..(25): SEQ ID NO: 1871; WAN024AVI_at; Start 94; Stop 118
aggtacgattgggaaatagaaccag

SEQ ID NO: 67565 - DNA, 25 bp, Artificial
  probe
  misc_feature (1)..(25): SEQ ID NO: 1871; WAN024AVI_at; Start 87; Stop 111
taatggtaggtacgattgggaaata

SEQ ID NO: 67566 - DNA, 25 bp, Artificial
  probe
  misc_feature (1)..(25): SEQ ID NO: 1871; WAN024AVI_at; Start 105; Stop 129
ggaaatagaaccagtattaactctg

SEQ ID NO: 67567 - DNA, 25 bp, Artificial
  probe
  misc_feature (1)..(25): SEQ ID NO: 1871; WAN024AVI_at; Start 98; Stop 122
acgattgggaaatagaaccagtatt

SEQ ID NO: 67568 - DNA, 25 bp, Artificial
  probe
  misc_feature (1)..(25): SEQ ID NO: 1871; WAN024AVI_at; Start 86; Stop 110
ctaatggtaggtacgattgggaaat

SEQ ID NO: 67569 - DNA, 25 bp, Artificial
  probe
  misc_feature (1)..(25): SEQ ID NO: 1871; WAN024AVI_at; Start 90; Stop 114
tggtaggtacgattgggaaatagaa

SEQ ID NO: 67570 - DNA, 25 bp, Artificial
  probe
  misc_feature (1)..(25): SEQ ID NO: 1871; WAN024AVI_at; Start 84; Stop 108
tcctaatggtaggtacgattgggaa

SEQ ID NO: 67571 - DNA, 25 bp, Artificial
  probe
  misc_feature (1)..(25): SEQ ID NO: 1871; WAN024AVI_at; Start 93; Stop 117
taggtacgattgggaaatagaacca

SEQ ID NO: 67572 - DNA, 25 bp, Artificial
  probe
  misc_feature (1)..(25): SEQ ID NO: 4057; WAN024AVJ_at; Start 32; Stop 56
agtacactgtgactgctaaaacatt

SEQ ID NO: 67573 - DNA, 25 bp, Artificial
  probe
  misc_feature (1)..(25): SEQ ID NO: 4057; WAN024AVJ_at; Start 21; Stop 45
gatgctgggaaagtacactgtgact

SEQ ID NO: 67574 - DNA, 25 bp, Artificial
  probe
  misc_feature (1)..(25): SEQ ID NO: 4057; WAN024AVJ_at; Start 29; Stop 53
gaaagtacactgtgactgctaaaac

SEQ ID NO: 67575 - DNA, 25 bp, Artificial
  probe
  misc_feature (1)..(25): SEQ ID NO: 4057; WAN024AVJ_at; Start 9; Stop 33
ttatagtggcttgatgctgggaaag

SEQ ID NO: 67576 - DNA, 25 bp, Artificial
  probe
  misc_feature (1)..(25): SEQ ID NO: 4057; WAN024AVJ_at; Start 4; Stop 28
cagagttatagtggcttgatgctgg

SEQ ID NO: 67577 - DNA, 25 bp, Artificial
  probe
  misc_feature (1)..(25): SEQ ID NO: 4057; WAN024AVJ_at; Start 2; Stop 26
tgcagagttatagtggcttgatgct

SEQ ID NO: 67578 - DNA, 25 bp, Artificial
  probe
  misc_feature (1)..(25): SEQ ID NO: 4057; WAN024AVJ_at; Start 24; Stop 48
gctgggaaagtacactgtgactgct

SEQ ID NO: 67579 - DNA, 25 bp, Artificial
  probe
  misc_feature (1)..(25): SEQ ID NO: 4057; WAN024AVJ_at; Start 15; Stop 39
tggcttgatgctgggaaagtacact

SEQ ID NO: 67580 - DNA, 25 bp, Artificial
  probe
  misc_feature (1)..(25): SEQ ID NO: 4057; WAN024AVJ_at; Start 35; Stop 59
acactgtgactgctaaaacattcct

SEQ ID NO: 67581 - DNA, 25 bp, Artificial
  probe
  misc_feature (1)..(25): SEQ ID NO: 4057; WAN024AVJ_at; Start 19; Stop 43
ttgatgctgggaaagtacactgtga

SEQ ID NO: 67582 - DNA, 25 bp, Artificial
  probe
  misc_feature (1)..(25): SEQ ID NO: 4057; WAN024AVJ_at; Start 28; Stop 52
ggaaagtacactgtgactgctaaaa

SEQ ID NO: 67583 - DNA, 25 bp, Artificial
  probe
  misc_feature (1)..(25): SEQ ID NO: 4057; WAN024AVJ_at; Start 31; Stop 55
aagtacactgtgactgctaaaacat

SEQ ID NO: 67584 - DNA, 25 bp, Artificial
  probe
  misc_feature (1)..(25): SEQ ID NO: 4057; WAN024AVJ_at; Start 26; Stop 50
tgggaaagtacactgtgactgctaa

SEQ ID NO: 67585 - DNA, 25 bp, Artificial
  probe
  misc_feature (1)..(25): SEQ ID NO: 4057; WAN024AVJ_at; Start 12; Stop 36
tagtggcttgatgctgggaaagtac

SEQ ID NO: 67586 - DNA, 25 bp, Artificial
  probe
  misc_feature (1)..(25): SEQ ID NO: 4057; WAN024AVJ_at; Start 36; Stop 60
cactgtgactgctaaaacattccta

SEQ ID NO: 67587 - DNA, 25 bp, Artificial
  probe
  misc_feature (1)..(25): SEQ ID NO: 4057; WAN024AVJ_at; Start 25; Stop 49
ctgggaaagtacactgtgactgcta

SEQ ID NO: 67588 - DNA, 25 bp, Artificial
  probe
  misc_feature (1)..(25): SEQ ID NO: 4057; WAN024AVJ_at; Start 30; Stop 54
aaagtacactgtgactgctaaaaca

SEQ ID NO: 67589 - DNA, 25 bp, Artificial
  probe
  misc_feature (1)..(25): SEQ ID NO: 4057; WAN024AVJ_at; Start 40; Stop 64
gtgactgctaaaacattcctagaag

SEQ ID NO: 67590 - DNA, 25 bp, Artificial
  probe
  misc_feature (1)..(25): SEQ ID NO: 4057; WAN024AVJ_at; Start 34; Stop 58
tacactgtgactgctaaaacattcc

SEQ ID NO: 67591 - DNA, 25 bp, Artificial
  probe
  misc_feature (1)..(25): SEQ ID NO: 4057; WAN024AVJ_at; Start 7; Stop 31
agttatagtggcttgatgctgggaa

SEQ ID NO: 67592 - DNA, 25 bp, Artificial
  probe
  misc_feature (1)..(25): SEQ ID NO: 4057; WAN024AVJ_at; Start 37; Stop 61
actgtgactgctaaaacattcctag

SEQ ID NO: 67593 - DNA, 25 bp, Artificial
  probe
  misc_feature (1)..(25): SEQ ID NO: 4057; WAN024AVJ_at; Start 23; Stop 47
tgctgggaaagtacactgtgactgc

SEQ ID NO: 67594 - DNA, 25 bp, Artificial
  probe
  misc_feature (1)..(25): SEQ ID NO: 4057; WAN024AVJ_at; Start 33; Stop 57
gtacactgtgactgctaaaacattc

SEQ ID NO: 67595 - DNA, 25 bp, Artificial
  probe
  misc_feature (1)..(25): SEQ ID NO: 4057; WAN024AVJ_at; Start 27; Stop 51
gggaaagtacactgtgactgctaaa

SEQ ID NO: 67596 - DNA, 25 bp, Artificial
  probe
  misc_feature (1)..(25): SEQ ID NO: 4057; WAN024AVJ_at; Start 17; Stop 41
gcttgatgctgggaaagtacactgt

SEQ ID NO: 67597 - DNA, 25 bp, Artificial
  probe
  misc_feature (1)..(25): SEQ ID NO: 4057; WAN024AVJ_at; Start 1; Stop 25
gtgcagagttatagtggcttgatgc

SEQ ID NO: 67598 - DNA, 25 bp, Artificial
  probe
  misc_feature (1)..(25): SEQ ID NO: 4057; WAN024AVJ_at; Start 14; Stop 38
gtggcttgatgctgggaaagtacac

SEQ ID NO: 67599 - DNA, 25 bp, Artificial
  probe
  misc_feature (1)..(25): SEQ ID NO: 4057; WAN024AVJ_at; Start 20; Stop 44
tgatgctgggaaagtacactgtgac

SEQ ID NO: 67600 - DNA, 25 bp, Artificial
  probe
  misc_feature (1)..(25): SEQ ID NO: 4057; WAN024AVJ_at; Start 10; Stop 34
tatagtggcttgatgctgggaaagt

SEQ ID NO: 67601 - DNA, 25 bp, Artificial
  probe
  misc_feature (1)..(25): SEQ ID NO: 4057; WAN024AVJ_at; Start 38; Stop 62
ctgtgactgctaaaacattcctaga

SEQ ID NO: 67602 - DNA, 25 bp, Artificial
  probe
  misc_feature (1)..(25): SEQ ID NO: 4057; WAN024AVJ_at; Start 8; Stop 32
gttatagtggcttgatgctgggaaa

SEQ ID NO: 67603 - DNA, 25 bp, Artificial
  probe
  misc_feature (1)..(25): SEQ ID NO: 4057; WAN024AVJ_at; Start 18; Stop 42
cttgatgctgggaaagtacactgtg

SEQ ID NO: 67604 - DNA, 25 bp, Artificial
  probe
  misc_feature (1)..(25): SEQ ID NO: 4057; WAN024AVJ_at; Start 39; Stop 63
tgtgactgctaaaacattcctagaa

SEQ ID NO: 67605 - DNA, 25 bp, Artificial
  probe
  misc_feature (1)..(25): SEQ ID NO: 4057; WAN024AVJ_at; Start 22; Stop 46
atgctgggaaagtacactgtgactg

SEQ ID NO: 67606 - DNA, 25 bp, Artificial
  probe
  misc_feature (1)..(25): SEQ ID NO: 1596; WAN024AVK_at; Start 319; Stop 343
gcgacgattttccagtccaacatct

SEQ ID NO: 67607 - DNA, 25 bp, Artificial
  probe
  misc_feature (1)..(25): SEQ ID NO: 1596; WAN024AVK_at; Start 153; Stop 177
gtgtcttgaggtcaaccaaggagaa

SEQ ID NO: 67608 - DNA, 25 bp, Artificial
  probe
  misc_feature (1)..(25): SEQ ID NO: 1596; WAN024AVK_at; Start 237; Stop 261
tggagttcaggctactatggttgat

SEQ ID NO: 67609 - DNA, 25 bp, Artificial
  probe
  misc_feature (1)..(25): SEQ ID NO: 1596; WAN024AVK_at; Start 497; Stop 521
caagtgctaagtccaagatggagga

SEQ ID NO: 67610 - DNA, 25 bp, Artificial
  probe
  misc_feature (1)..(25): SEQ ID NO: 1596; WAN024AVK_at; Start 493; Stop 517
gctccaagtgctaagtccaagatgg

SEQ ID NO: 67611 - DNA, 25 bp, Artificial
  probe
  misc_feature (1)..(25): SEQ ID NO: 1596; WAN024AVK_at; Start 491; Stop 515
gggctccaagtgctaagtccaagat

SEQ ID NO: 67612 - DNA, 25 bp, Artificial
  probe
  misc_feature (1)..(25): SEQ ID NO: 1596; WAN024AVK_at; Start 316; Stop 340
aaagcgacgattttccagtccaaca

SEQ ID NO: 67613 - DNA, 25 bp, Artificial
  probe
  misc_feature (1)..(25): SEQ ID NO: 1596; WAN024AVK_at; Start 173; Stop 197
gagaaactgtccttgatgtaggctg

SEQ ID NO: 67614 - DNA, 25 bp, Artificial
  probe
  misc_feature (1)..(25): SEQ ID NO: 1596; WAN024AVK_at; Start 244; Stop 268
caggctactatggttgatatcaaca

SEQ ID NO: 67615 - DNA, 25 bp, Artificial
  probe
  misc_feature (1)..(25): SEQ ID NO: 1596; WAN024AVK_at; Start 227; Stop 251
ctaaggcttatggagttcaggctac

SEQ ID NO: 67616 - DNA, 25 bp, Artificial
  probe
  misc_feature (1)..(25): SEQ ID NO: 1596; WAN024AVK_at; Start 504; Stop 528
taagtccaagatggaggatgtgttt

SEQ ID NO: 67617 - DNA, 25 bp, Artificial
  probe
  misc_feature (1)..(25): SEQ ID NO: 1596; WAN024AVK_at; Start 329; Stop 353
tccagtccaacatctatgaacaagt

SEQ ID NO: 67618 - DNA, 25 bp, Artificial
  probe
  misc_feature (1)..(25): SEQ ID NO: 1596; WAN024AVK_at; Start 346; Stop 370
gaacaagttgaaggacattttgatc

SEQ ID NO: 67619 - DNA, 25 bp, Artificial
  probe
  misc_feature (1)..(25): SEQ ID NO: 1596; WAN024AVK_at; Start 176; Stop 200
aaactgtccttgatgtaggctgtgg

SEQ ID NO: 67620 - DNA, 25 bp, Artificial
  probe
  misc_feature (1)..(25): SEQ ID NO: 1596; WAN024AVK_at; Start 366; Stop 390
tgatcatgtcatttccaatcctcct

SEQ ID NO: 67621 - DNA, 25 bp, Artificial
  probe
  misc_feature (1)..(25): SEQ ID NO: 1596; WAN024AVK_at; Start 139; Stop 163
caactattgctcaagtgtcttgagg

SEQ ID NO: 67622 - DNA, 25 bp, Artificial
  probe
  misc_feature (1)..(25): SEQ ID NO: 1596; WAN024AVK_at; Start 160; Stop 184
gaggtcaaccaaggagaaactgtcc

SEQ ID NO: 67623 - DNA, 25 bp, Artificial
  probe
  misc_feature (1)..(25): SEQ ID NO: 1596; WAN024AVK_at; Start 231; Stop 255
ggcttatggagttcaggctactatg

SEQ ID NO: 67624 - DNA, 25 bp, Artificial
  probe
  misc_feature (1)..(25): SEQ ID NO: 1596; WAN024AVK_at; Start 212; Stop 236
tgggtttgtccttagctaaggctta

SEQ ID NO: 67625 - DNA, 25 bp, Artificial
  probe
  misc_feature (1)..(25): SEQ ID NO: 1596; WAN024AVK_at; Start 82; Stop 106
atgacctttttaacggatgcgggtg

SEQ ID NO: 67626 - DNA, 25 bp, Artificial
  probe
  misc_feature (1)..(25): SEQ ID NO: 1596; WAN024AVK_at; Start 510; Stop 534
caagatggaggatgtgtttggtaat

SEQ ID NO: 67627 - DNA, 25 bp, Artificial
  probe
  misc_feature (1)..(25): SEQ ID NO: 1596; WAN024AVK_at; Start 349; Stop 373
caagttgaaggacattttgatcatg

SEQ ID NO: 67628 - DNA, 25 bp, Artificial
  probe
  misc_feature (1)..(25): SEQ ID NO: 1596; WAN024AVK_at; Start 221; Stop 245
ccttagctaaggcttatggagttca

SEQ ID NO: 67629 - DNA, 25 bp, Artificial
  probe
  misc_feature (1)..(25): SEQ ID NO: 1596; WAN024AVK_at; Start 249; Stop 273
tactatggttgatatcaacactcgt

SEQ ID NO: 67630 - DNA, 25 bp, Artificial
  probe
  misc_feature (1)..(25): SEQ ID NO: 1596; WAN024AVK_at; Start 163; Stop 187
gtcaaccaaggagaaactgtccttg

SEQ ID NO: 67631 - DNA, 25 bp, Artificial
  probe
  misc_feature (1)..(25): SEQ ID NO: 1596; WAN024AVK_at; Start 189; Stop 213
tgtaggctgtggttacggacctttg

SEQ ID NO: 67632 - DNA, 25 bp, Artificial
  probe
  misc_feature (1)..(25): SEQ ID NO: 1596; WAN024AVK_at; Start 324; Stop 348
gattttccagtccaacatctatgaa

SEQ ID NO: 67633 - DNA, 25 bp, Artificial
  probe
  misc_feature (1)..(25): SEQ ID NO: 1596; WAN024AVK_at; Start 359; Stop 383
gacattttgatcatgtcatttccaa

SEQ ID NO: 67634 - DNA, 25 bp, Artificial
  probe
  misc_feature (1)..(25): SEQ ID NO: 1596; WAN024AVK_at; Start 156; Stop 180
tcttgaggtcaaccaaggagaaact

SEQ ID NO: 67635 - DNA, 25 bp, Artificial
  probe
  misc_feature (1)..(25): SEQ ID NO: 1596; WAN024AVK_at; Start 339; Stop 363
catctatgaacaagttgaaggacat

SEQ ID NO: 67636 - DNA, 25 bp, Artificial
  probe
  misc_feature (1)..(25): SEQ ID NO: 1596; WAN024AVK_at; Start 312; Stop 336
tgcaaaagcgacgattttccagtcc

SEQ ID NO: 67637 - DNA, 25 bp, Artificial
  probe
  misc_feature (1)..(25): SEQ ID NO: 1596; WAN024AVK_at; Start 224; Stop 248
tagctaaggcttatggagttcaggc

SEQ ID NO: 67638 - DNA, 25 bp, Artificial
  probe
  misc_feature (1)..(25): SEQ ID NO: 1596; WAN024AVK_at; Start 335; Stop 359
ccaacatctatgaacaagttgaagg

SEQ ID NO: 67639 - DNA, 25 bp, Artificial
  probe
  misc_feature (1)..(25): SEQ ID NO: 1596; WAN024AVK_at; Start 501; Stop 525
tgctaagtccaagatggaggatgtg

SEQ ID NO: 67640 - DNA, 25 bp, Artificial
  probe
  misc_feature (1)..(25): SEQ ID NO: 1595; WAN024AVL_at; Start 248; Stop 272
cgaccatggttgatattaacactcg

SEQ ID NO: 67641 - DNA, 25 bp, Artificial
  probe
  misc_feature (1)..(25): SEQ ID NO: 1595; WAN024AVL_at; Start 259; Stop 283
gatattaacactcgtgccctggatt

SEQ ID NO: 67642 - DNA, 25 bp, Artificial
  probe
  misc_feature (1)..(25): SEQ ID NO: 1595; WAN024AVL_at; Start 267; Stop 291
cactcgtgccctggatttagctcag

SEQ ID NO: 67643 - DNA, 25 bp, Artificial
  probe
  misc_feature (1)..(25): SEQ ID NO: 1595; WAN024AVL_at; Start 237; Stop 261
cggagttcaggcgaccatggttgat

SEQ ID NO: 67644 - DNA, 25 bp, Artificial
  probe
  misc_feature (1)..(25): SEQ ID NO: 1595; WAN024AVL_at; Start 173; Stop 197
gagagacagtcctagatgtaggctg

SEQ ID NO: 67645 - DNA, 25 bp, Artificial
  probe
  misc_feature (1)..(25): SEQ ID NO: 1595; WAN024AVL_at; Start 509; Stop 533
ctaagatggaagatgtgtttggcaa

SEQ ID NO: 67646 - DNA, 25 bp, Artificial
  probe
  misc_feature (1)..(25): SEQ ID NO: 1595; WAN024AVL_at; Start 331; Stop 355
caatctaatatttatgcaagagttc

SEQ ID NO: 67647 - DNA, 25 bp, Artificial
  probe
  misc_feature (1)..(25): SEQ ID NO: 1595; WAN024AVL_at; Start 316; Stop 340
aaagcgacgatatttcaatctaata

SEQ ID NO: 67648 - DNA, 25 bp, Artificial
  probe
  misc_feature (1)..(25): SEQ ID NO: 1595; WAN024AVL_at; Start 86; Stop 110
cttttttgacagatgcgggtgtttt

SEQ ID NO: 67649 - DNA, 25 bp, Artificial
  probe
  misc_feature (1)..(25): SEQ ID NO: 1595; WAN024AVL_at; Start 244; Stop 268
caggcgaccatggttgatattaaca

SEQ ID NO: 67650 - DNA, 25 bp, Artificial
  probe
  misc_feature (1)..(25): SEQ ID NO: 1595; WAN024AVL_at; Start 276; Stop 300
cctggatttagctcagagaaatgct

SEQ ID NO: 67651 - DNA, 25 bp, Artificial
  probe
  misc_feature (1)..(25): SEQ ID NO: 1595; WAN024AVL_at; Start 227; Stop 251
tcaaggtttacggagttcaggcgac

SEQ ID NO: 67652 - DNA, 25 bp, Artificial
  probe
  misc_feature (1)..(25): SEQ ID NO: 1595; WAN024AVL_at; Start 257; Stop 281
ttgatattaacactcgtgccctgga

SEQ ID NO: 67653 - DNA, 25 bp, Artificial
  probe
  misc_feature (1)..(25): SEQ ID NO: 1595; WAN024AVL_at; Start 139; Stop 163
caactcttgctcaagtgtctggatg

SEQ ID NO: 67654 - DNA, 25 bp, Artificial
  probe
  misc_feature (1)..(25): SEQ ID NO: 1595; WAN024AVL_at; Start 454; Stop 478
ggtggagatttgaccatcgtcatcc

SEQ ID NO: 67655 - DNA, 25 bp, Artificial
  probe
  misc_feature (1)..(25): SEQ ID NO: 1595; WAN024AVL_at; Start 156; Stop 180
tctggatgtcaaccaaggagagaca

SEQ ID NO: 67656 - DNA, 25 bp, Artificial
  probe
  misc_feature (1)..(25): SEQ ID NO: 1595; WAN024AVL_at; Start 202; Stop 226
tatggtccattaggtttgtccttgg

SEQ ID NO: 67657 - DNA, 25 bp, Artificial
  probe
  misc_feature (1)..(25): SEQ ID NO: 1595; WAN024AVL_at; Start 144; Stop 168
cttgctcaagtgtctggatgtcaac

SEQ ID NO: 67658 - DNA, 25 bp, Artificial
  probe
  misc_feature (1)..(25): SEQ ID NO: 1595; WAN024AVL_at; Start 444; Stop 468
cttggaaattggtggagatttgacc

SEQ ID NO: 67659 - DNA, 25 bp, Artificial
  probe
  misc_feature (1)..(25): SEQ ID NO: 1595; WAN024AVL_at; Start 191; Stop 215
taggctgtggttatggtccattagg

SEQ ID NO: 67660 - DNA, 25 bp, Artificial
  probe
  misc_feature (1)..(25): SEQ ID NO: 1595; WAN024AVL_at; Start 450; Stop 474
aattggtggagatttgaccatcgtc

SEQ ID NO: 67661 - DNA, 25 bp, Artificial
  probe
  misc_feature (1)..(25): SEQ ID NO: 1595; WAN024AVL_at; Start 341; Stop 365
tttatgcaagagttcaagggcgatt

SEQ ID NO: 67662 - DNA, 25 bp, Artificial
  probe
  misc_feature (1)..(25): SEQ ID NO: 1595; WAN024AVL_at; Start 168; Stop 192
ccaaggagagacagtcctagatgta

SEQ ID NO: 67663 - DNA, 25 bp, Artificial
  probe
  misc_feature (1)..(25): SEQ ID NO: 1595; WAN024AVL_at; Start 339; Stop 363
tatttatgcaagagttcaagggcga

SEQ ID NO: 67664 - DNA, 25 bp, Artificial
  probe
  misc_feature (1)..(25): SEQ ID NO: 1595; WAN024AVL_at; Start 233; Stop 257
tttacggagttcaggcgaccatggt

SEQ ID NO: 67665 - DNA, 25 bp, Artificial
  probe
  misc_feature (1)..(25): SEQ ID NO: 1595; WAN024AVL_at; Start 177; Stop 201
gacagtcctagatgtaggctgtggt

SEQ ID NO: 67666 - DNA, 25 bp, Artificial
  probe
  misc_feature (1)..(25): SEQ ID NO: 1595; WAN024AVL_at; Start 80; Stop 104
aaatgacttttttgacagatgcggg

SEQ ID NO: 67667 - DNA, 25 bp, Artificial
  probe
  misc_feature (1)..(25): SEQ ID NO: 1595; WAN024AVL_at; Start 224; Stop 248
tggtcaaggtttacggagttcaggc

SEQ ID NO: 67668 - DNA, 25 bp, Artificial
  probe
  misc_feature (1)..(25): SEQ ID NO: 1595; WAN024AVL_at; Start 312; Stop 336
tgcaaaagcgacgatatttcaatct

SEQ ID NO: 67669 - DNA, 25 bp, Artificial
  probe
  misc_feature (1)..(25): SEQ ID NO: 1595; WAN024AVL_at; Start 209; Stop 233
cattaggtttgtccttggtcaaggt

SEQ ID NO: 67670 - DNA, 25 bp, Artificial
  probe
  misc_feature (1)..(25): SEQ ID NO: 1595; WAN024AVL_at; Start 84; Stop 108
gacttttttgacagatgcgggtgtt

SEQ ID NO: 67671 - DNA, 25 bp, Artificial
  probe
  misc_feature (1)..(25): SEQ ID NO: 1595; WAN024AVL_at; Start 60; Stop 84
agtggacttgttgggagaaaaaatg

SEQ ID NO: 67672 - DNA, 25 bp, Artificial
  probe
  misc_feature (1)..(25): SEQ ID NO: 1595; WAN024AVL_at; Start 271; Stop 295
cgtgccctggatttagctcagagaa

SEQ ID NO: 67673 - DNA, 25 bp, Artificial
  probe
  misc_feature (1)..(25): SEQ ID NO: 1595; WAN024AVL_at; Start 162; Stop 186
tgtcaaccaaggagagacagtccta

SEQ ID NO: 67674 - DNA, 25 bp, Artificial
  probe
  misc_feature (1)..(25): SEQ ID NO: 6651; WAN024AVM_at; Start 50; Stop 74
agacagatatgatacaaggaatcga

SEQ ID NO: 67675 - DNA, 25 bp, Artificial
  probe
  misc_feature (1)..(25): SEQ ID NO: 6651; WAN024AVM_at; Start 47; Stop 71
gcaagacagatatgatacaaggaat

SEQ ID NO: 67676 - DNA, 25 bp, Artificial
  probe
  misc_feature (1)..(25): SEQ ID NO: 6651; WAN024AVM_at; Start 48; Stop 72
caagacagatatgatacaaggaatc

SEQ ID NO: 67677 - DNA, 25 bp, Artificial
  probe
  misc_feature (1)..(25): SEQ ID NO: 6651; WAN024AVM_at; Start 51; Stop 75
gacagatatgatacaaggaatcgat

SEQ ID NO: 67678 - DNA, 25 bp, Artificial
  probe
  misc_feature (1)..(25): SEQ ID NO: 6651; WAN024AVM_at; Start 49; Stop 73
aagacagatatgatacaaggaatcg

SEQ ID NO: 67679 - DNA, 25 bp, Artificial
  probe
  misc_feature (1)..(25): SEQ ID NO: 1683; WAN024AVN_s_at; Start 66; Stop 90
gggaatagactcattagcctatgta

SEQ ID NO: 67680 - DNA, 25 bp, Artificial
  probe
  misc_feature (1)..(25): SEQ ID NO: 1683; WAN024AVN_s_at; Start 70; Stop 94
atagactcattagcctatgtagtta

SEQ ID NO: 67681 - DNA, 25 bp, Artificial
  probe
  misc_feature (1)..(25): SEQ ID NO: 1683; WAN024AVN_s_at; Start 68; Stop 92
gaatagactcattagcctatgtagt

SEQ ID NO: 67682 - DNA, 25 bp, Artificial
  probe
  misc_feature (1)..(25): SEQ ID NO: 1683; WAN024AVN_s_at; Start 60; Stop 84
gaggcagggaatagactcattagcc

SEQ ID NO: 67683 - DNA, 25 bp, Artificial
  probe
  misc_feature (1)..(25): SEQ ID NO: 1683; WAN024AVN_s_at; Start 71; Stop 95
tagactcattagcctatgtagttaa

SEQ ID NO: 67684 - DNA, 25 bp, Artificial
  probe
  misc_feature (1)..(25): SEQ ID NO: 1683; WAN024AVN_s_at; Start 54; Stop 78
agatatgaggcagggaatagactca

SEQ ID NO: 67685 - DNA, 25 bp, Artificial
  probe
  misc_feature (1)..(25): SEQ ID NO: 1683; WAN024AVN_s_at; Start 69; Stop 93
aatagactcattagcctatgtagtt

SEQ ID NO: 67686 - DNA, 25 bp, Artificial
  probe
  misc_feature (1)..(25): SEQ ID NO: 1683; WAN024AVN_s_at; Start 63; Stop 87
gcagggaatagactcattagcctat

SEQ ID NO: 67687 - DNA, 25 bp, Artificial
  probe
  misc_feature (1)..(25): SEQ ID NO: 1683; WAN024AVN_s_at; Start 72; Stop 96
agactcattagcctatgtagttaaa

SEQ ID NO: 67688 - DNA, 25 bp, Artificial
  probe
  misc_feature (1)..(25): SEQ ID NO: 1683; WAN024AVN_s_at; Start 65; Stop 89
agggaatagactcattagcctatgt

SEQ ID NO: 67689 - DNA, 25 bp, Artificial
  probe
  misc_feature (1)..(25): SEQ ID NO: 1683; WAN024AVN_s_at; Start 62; Stop 86
ggcagggaatagactcattagccta

SEQ ID NO: 67690 - DNA, 25 bp, Artificial
  probe
  misc_feature (1)..(25): SEQ ID NO: 1683; WAN024AVN_s_at; Start 58; Stop 82
atgaggcagggaatagactcattag

SEQ ID NO: 67691 - DNA, 25 bp, Artificial
  probe
  misc_feature (1)..(25): SEQ ID NO: 1683; WAN024AVN_s_at; Start 56; Stop 80
atatgaggcagggaatagactcatt

SEQ ID NO: 67692 - DNA, 25 bp, Artificial
  probe
  misc_feature (1)..(25): SEQ ID NO: 1683; WAN024AVN_s_at; Start 74; Stop 98
actcattagcctatgtagttaaaac

SEQ ID NO: 67693 - DNA, 25 bp, Artificial
  probe
  misc_feature (1)..(25): SEQ ID NO: 1683; WAN024AVN_s_at; Start 73; Stop 97
gactcattagcctatgtagttaaaa

SEQ ID NO: 67694 - DNA, 25 bp, Artificial
  probe
  misc_feature (1)..(25): SEQ ID NO: 1683; WAN024AVN_s_at; Start 61; Stop 85
aggcagggaatagactcattagcct

SEQ ID NO: 67695 - DNA, 25 bp, Artificial
  probe
  misc_feature (1)..(25): SEQ ID NO: 1683; WAN024AVN_s_at; Start 64; Stop 88
cagggaatagactcattagcctatg

SEQ ID NO: 67696 - DNA, 25 bp, Artificial
  probe
  misc_feature (1)..(25): SEQ ID NO: 1683; WAN024AVN_s_at; Start 75; Stop 99
ctcattagcctatgtagttaaaacc

SEQ ID NO: 67697 - DNA, 25 bp, Artificial
  probe
  misc_feature (1)..(25): SEQ ID NO: 1683; WAN024AVN_s_at; Start 76; Stop 100
tcattagcctatgtagttaaaaccc

SEQ ID NO: 67698 - DNA, 25 bp, Artificial
  probe
  misc_feature (1)..(25): SEQ ID NO: 1683; WAN024AVN_s_at; Start 77; Stop 101
cattagcctatgtagttaaaaccca

SEQ ID NO: 67699 - DNA, 25 bp, Artificial
  probe
  misc_feature (1)..(25): SEQ ID NO: 1683; WAN024AVN_s_at; Start 67; Stop 91
ggaatagactcattagcctatgtag

SEQ ID NO: 67700 - DNA, 25 bp, Artificial
  probe
  misc_feature (1)..(25): SEQ ID NO: 1683; WAN024AVN_s_at; Start 57; Stop 81
tatgaggcagggaatagactcatta

SEQ ID NO: 67701 - DNA, 25 bp, Artificial
  probe
  misc_feature (1)..(25): SEQ ID NO: 1683; WAN024AVN_s_at; Start 55; Stop 79
gatatgaggcagggaatagactcat

SEQ ID NO: 67702 - DNA, 25 bp, Artificial
  probe
  misc_feature (1)..(25): SEQ ID NO: 1683; WAN024AVN_s_at; Start 59; Stop 83
tgaggcagggaatagactcattagc

SEQ ID NO: 67703 - DNA, 25 bp, Artificial
  probe
  misc_feature (1)..(25): SEQ ID NO: 1335; WAN024AVP_s_at; Start 65; Stop 89
aaggaatcgattcactggcttatct

SEQ ID NO: 67704 - DNA, 25 bp, Artificial
  probe
  misc_feature (1)..(25): SEQ ID NO: 1335; WAN024AVP_s_at; Start 63; Stop 87
acaaggaatcgattcactggcttat

SEQ ID NO: 67705 - DNA, 25 bp, Artificial
  probe
  misc_feature (1)..(25): SEQ ID NO: 1335; WAN024AVP_s_at; Start 64; Stop 88
caaggaatcgattcactggcttatc

SEQ ID NO: 67706 - DNA, 25 bp, Artificial
  probe
  misc_feature (1)..(25): SEQ ID NO: 1336; WAN024AVQ_x_at; Start 242; Stop 266
gtacagaaaaggatgtcaaagctct

SEQ ID NO: 67707 - DNA, 25 bp, Artificial
  probe
  misc_feature (1)..(25): SEQ ID NO: 1336; WAN024AVQ_x_at; Start 175; Stop 199
tactgggatggtcaaggattttggc

SEQ ID NO: 67708 - DNA, 25 bp, Artificial
  probe
  misc_feature (1)..(25): SEQ ID NO: 1336; WAN024AVQ_x_at; Start 135; Stop 159
tctcttttgtggtggacgtaaagac

SEQ ID NO: 67709 - DNA, 25 bp, Artificial
  probe
  misc_feature (1)..(25): SEQ ID NO: 1336; WAN024AVQ_x_at; Start 173; Stop 197
tttactgggatggtcaaggattttg

SEQ ID NO: 67710 - DNA, 25 bp, Artificial
  probe
  misc_feature (1)..(25): SEQ ID NO: 1336; WAN024AVQ_x_at; Start 243; Stop 267
tacagaaaaggatgtcaaagctctc

SEQ ID NO: 67711 - DNA, 25 bp, Artificial
  probe
  misc_feature (1)..(25): SEQ ID NO: 1336; WAN024AVQ_x_at; Start 177; Stop 201
ctgggatggtcaaggattttggcta

SEQ ID NO: 67712 - DNA, 25 bp, Artificial
  probe
  misc_feature (1)..(25): SEQ ID NO: 1336; WAN024AVQ_x_at; Start 176; Stop 200
actgggatggtcaaggattttggct

SEQ ID NO: 67713 - DNA, 25 bp, Artificial
  probe
  misc_feature (1)..(25): SEQ ID NO: 1336; WAN024AVQ_x_at; Start 241; Stop 265
agtacagaaaaggatgtcaaagctc

SEQ ID NO: 67714 - DNA, 25 bp, Artificial
  probe
  misc_feature (1)..(25): SEQ ID NO: 1336; WAN024AVQ_x_at; Start 142; Stop 166
tgtggtggacgtaaagaccgcttta

SEQ ID NO: 67715 - DNA, 25 bp, Artificial
  probe
  misc_feature (1)..(25): SEQ ID NO: 1336; WAN024AVQ_x_at; Start 174; Stop 198
ttactgggatggtcaaggattttgg

SEQ ID NO: 67716 - DNA, 25 bp, Artificial
  probe
  misc_feature (1)..(25): SEQ ID NO: 1336; WAN024AVQ_x_at; Start 134; Stop 158
ttctcttttgtggtggacgtaaaga

SEQ ID NO: 67717 - DNA, 25 bp, Artificial
  probe
  misc_feature (1)..(25): SEQ ID NO: 6786; WAN024AVR_s_at; Start 25; Stop 49
gtattagattatttctttgacaaaa

SEQ ID NO: 67718 - DNA, 25 bp, Artificial
  probe
  misc_feature (1)..(25): SEQ ID NO: 6786; WAN024AVR_s_at; Start 26; Stop 50
tattagattatttctttgacaaaaa

SEQ ID NO: 67719 - DNA, 25 bp, Artificial
  probe
  misc_feature (1)..(25): SEQ ID NO: 6786; WAN024AVR_s_at; Start 50; Stop 74
accttgtgttttgcttagaagcgga

SEQ ID NO: 67720 - DNA, 25 bp, Artificial
  probe
  misc_feature (1)..(25): SEQ ID NO: 6786; WAN024AVR_s_at; Start 24; Stop 48
ggtattagattatttctttgacaaa

SEQ ID NO: 67721 - DNA, 25 bp, Artificial
  probe
  misc_feature (1)..(25): SEQ ID NO: 6786; WAN024AVR_s_at; Start 23; Stop 47
tggtattagattatttctttgacaa

SEQ ID NO: 67722 - DNA, 25 bp, Artificial
  probe
  misc_feature (1)..(25): SEQ ID NO: 6786; WAN024AVR_s_at; Start 42; Stop 66
tgacaaaaaccttgtgttttgctta

SEQ ID NO: 67723 - DNA, 25 bp, Artificial
  probe
  misc_feature (1)..(25): SEQ ID NO: 6786; WAN024AVR_s_at; Start 51; Stop 75
ccttgtgttttgcttagaagcggat

SEQ ID NO: 67724 - DNA, 25 bp, Artificial
  probe
  misc_feature (1)..(25): SEQ ID NO: 6786; WAN024AVR_s_at; Start 48; Stop 72
aaaccttgtgttttgcttagaagcg

SEQ ID NO: 67725 - DNA, 25 bp, Artificial
  probe
  misc_feature (1)..(25): SEQ ID NO: 6786; WAN024AVR_s_at; Start 52; Stop 76
cttgtgttttgcttagaagcggata

SEQ ID NO: 67726 - DNA, 25 bp, Artificial
  probe
  misc_feature (1)..(25): SEQ ID NO: 6786; WAN024AVR_s_at; Start 49; Stop 73
aaccttgtgttttgcttagaagcgg

SEQ ID NO: 67727 - DNA, 25 bp, Artificial
  probe
  misc_feature (1)..(25): SEQ ID NO: 6786; WAN024AVR_s_at; Start 21; Stop 45
tatggtattagattatttctttgac

SEQ ID NO: 67728 - DNA, 25 bp, Artificial
  probe
  misc_feature (1)..(25): SEQ ID NO: 6786; WAN024AVR_s_at; Start 22; Stop 46
atggtattagattatttctttgaca

SEQ ID NO: 67729 - DNA, 25 bp, Artificial
  probe
  misc_feature (1)..(25): SEQ ID NO: 2241; WAN024AVS_at; Start 108; Stop 132
tttccacaatatgatagctcctgat

SEQ ID NO: 67730 - DNA, 25 bp, Artificial
  probe
  misc_feature (1)..(25): SEQ ID NO: 2241; WAN024AVS_at; Start 84; Stop 108
tgttcgattagaaaaaccagtcact

SEQ ID NO: 67731 - DNA, 25 bp, Artificial
  probe
  misc_feature (1)..(25): SEQ ID NO: 2241; WAN024AVS_at; Start 22; Stop 46
ttgcataacgtagcgattcctcaca

SEQ ID NO: 67732 - DNA, 25 bp, Artificial
  probe
  misc_feature (1)..(25): SEQ ID NO: 2241; WAN024AVS_at; Start 87; Stop 111
tcgattagaaaaaccagtcactttc

SEQ ID NO: 67733 - DNA, 25 bp, Artificial
  probe
  misc_feature (1)..(25): SEQ ID NO: 2241; WAN024AVS_at; Start 20; Stop 44
acttgcataacgtagcgattcctca

SEQ ID NO: 67734 - DNA, 25 bp, Artificial
  probe
  misc_feature (1)..(25): SEQ ID NO: 2241; WAN024AVS_at; Start 92; Stop 116
tagaaaaaccagtcactttccacaa

SEQ ID NO: 67735 - DNA, 25 bp, Artificial
  probe
  misc_feature (1)..(25): SEQ ID NO: 2241; WAN024AVS_at; Start 271; Stop 295
aaactttatgcttacattgctgaag

SEQ ID NO: 67736 - DNA, 25 bp, Artificial
  probe
  misc_feature (1)..(25): SEQ ID NO: 2241; WAN024AVS_at; Start 97; Stop 121
aaaccagtcactttccacaatatga

SEQ ID NO: 67737 - DNA, 25 bp, Artificial
  probe
  misc_feature (1)..(25): SEQ ID NO: 2241; WAN024AVS_at; Start 112; Stop 136
cacaatatgatagctcctgataagg

SEQ ID NO: 67738 - DNA, 25 bp, Artificial
  probe
  misc_feature (1)..(25): SEQ ID NO: 2241; WAN024AVS_at; Start 16; Stop 40
aaggacttgcataacgtagcgattc

SEQ ID NO: 67739 - DNA, 25 bp, Artificial
  probe
  misc_feature (1)..(25): SEQ ID NO: 2241; WAN024AVS_at; Start 9; Stop 33
tctaggaaaggacttgcataacgta

SEQ ID NO: 67740 - DNA, 25 bp, Artificial
  probe
  misc_feature (1)..(25): SEQ ID NO: 2241; WAN024AVS_at; Start 148; Stop 172
tctctactcttctttatcattaaca

SEQ ID NO: 67741 - DNA, 25 bp, Artificial
  probe
  misc_feature (1)..(25): SEQ ID NO: 2241; WAN024AVS_at; Start 106; Stop 130
actttccacaatatgatagctcctg

SEQ ID NO: 67742 - DNA, 25 bp, Artificial
  probe
  misc_feature (1)..(25): SEQ ID NO: 2241; WAN024AVS_at; Start 24; Stop 48
gcataacgtagcgattcctcacaca

SEQ ID NO: 67743 - DNA, 25 bp, Artificial
  probe
  misc_feature (1)..(25): SEQ ID NO: 2241; WAN024AVS_at; Start 117; Stop 141
tatgatagctcctgataaggaagta

SEQ ID NO: 67744 - DNA, 25 bp, Artificial
  probe
  misc_feature (1)..(25): SEQ ID NO: 2241; WAN024AVS_at; Start 103; Stop 127
gtcactttccacaatatgatagctc

SEQ ID NO: 67745 - DNA, 25 bp, Artificial
  probe
  misc_feature (1)..(25): SEQ ID NO: 2241; WAN024AVS_at; Start 14; Stop 38
gaaaggacttgcataacgtagcgat

SEQ ID NO: 67746 - DNA, 25 bp, Artificial
  probe
  misc_feature (1)..(25): SEQ ID NO: 2241; WAN024AVS_at; Start 120; Stop 144
gatagctcctgataaggaagtagaa

SEQ ID NO: 67747 - DNA, 25 bp, Artificial
  probe
  misc_feature (1)..(25): SEQ ID NO: 2241; WAN024AVS_at; Start 13; Stop 37
ggaaaggacttgcataacgtagcga

SEQ ID NO: 67748 - DNA, 25 bp, Artificial
  probe
  misc_feature (1)..(25): SEQ ID NO: 2241; WAN024AVS_at; Start 7; Stop 31
tttctaggaaaggacttgcataacg

SEQ ID NO: 67749 - DNA, 25 bp, Artificial
  probe
  misc_feature (1)..(25): SEQ ID NO: 2241; WAN024AVS_at; Start 94; Stop 118
gaaaaaccagtcactttccacaata

SEQ ID NO: 67750 - DNA, 25 bp, Artificial
  probe
  misc_feature (1)..(25): SEQ ID NO: 2241; WAN024AVS_at; Start 4; Stop 28
gaatttctaggaaaggacttgcata

SEQ ID NO: 67751 - DNA, 25 bp, Artificial
  probe
  misc_feature (1)..(25): SEQ ID NO: 2241; WAN024AVS_at; Start 26; Stop 50
ataacgtagcgattcctcacacaga

SEQ ID NO: 67752 - DNA, 25 bp, Artificial
  probe
  misc_feature (1)..(25): SEQ ID NO: 2241; WAN024AVS_at; Start 101; Stop 125
cagtcactttccacaatatgatagc

SEQ ID NO: 67753 - DNA, 25 bp, Artificial
  probe
  misc_feature (1)..(25): SEQ ID NO: 2241; WAN024AVS_at; Start 11; Stop 35
taggaaaggacttgcataacgtagc

SEQ ID NO: 67754 - DNA, 25 bp, Artificial
  probe
  misc_feature (1)..(25): SEQ ID NO: 2241; WAN024AVS_at; Start 19; Stop 43
gacttgcataacgtagcgattcctc

SEQ ID NO: 67755 - DNA, 25 bp, Artificial
  probe
  misc_feature (1)..(25): SEQ ID NO: 2241; WAN024AVS_at; Start 262; Stop 286
gaaccagaaaaactttatgcttaca

SEQ ID NO: 67756 - DNA, 25 bp, Artificial
  probe
  misc_feature (1)..(25): SEQ ID NO: 2241; WAN024AVS_at; Start 89; Stop 113
gattagaaaaaccagtcactttcca

SEQ ID NO: 67757 - DNA, 25 bp, Artificial
  probe
  misc_feature (1)..(25): SEQ ID NO: 2241; WAN024AVS_at; Start 258; Stop 282
ttctgaaccagaaaaactttatgct

SEQ ID NO: 67758 - DNA, 25 bp, Artificial
  probe
  misc_feature (1)..(25): SEQ ID NO: 2241; WAN024AVS_at; Start 268; Stop 292
gaaaaactttatgcttacattgctg

SEQ ID NO: 67759 - DNA, 25 bp, Artificial
  probe
  misc_feature (1)..(25): SEQ ID NO: 2241; WAN024AVS_at; Start 82; Stop 106
gttgttcgattagaaaaaccagtca

SEQ ID NO: 67760 - DNA, 25 bp, Artificial
  probe
  misc_feature (1)..(25): SEQ ID NO: 2241; WAN024AVS_at; Start 135; Stop 159
ggaagtagaagtatctctactcttc

SEQ ID NO: 67761 - DNA, 25 bp, Artificial
  probe
  misc_feature (1)..(25): SEQ ID NO: 2241; WAN024AVS_at; Start 143; Stop 167
aagtatctctactcttctttatcat

SEQ ID NO: 67762 - DNA, 25 bp, Artificial
  probe
  misc_feature (1)..(25): SEQ ID NO: 2241; WAN024AVS_at; Start 114; Stop 138
caatatgatagctcctgataaggaa

SEQ ID NO: 67763 - DNA, 25 bp, Artificial
  probe
  misc_feature (1)..(25): SEQ ID NO: 1823; WAN024AVT_at; Start 51; Stop 75
tgttcgattagagaaaccggtgact

SEQ ID NO: 67764 - DNA, 25 bp, Artificial
  probe
  misc_feature (1)..(25): SEQ ID NO: 1823; WAN024AVT_at; Start 54; Stop 78
tcgattagagaaaccggtgactttc

SEQ ID NO: 67765 - DNA, 25 bp, Artificial
  probe
  misc_feature (1)..(25): SEQ ID NO: 1823; WAN024AVT_at; Start 83; Stop 107
atatgattgcgccaggtaaggaagt

SEQ ID NO: 67766 - DNA, 25 bp, Artificial
  probe
  misc_feature (1)..(25): SEQ ID NO: 1823; WAN024AVT_at; Start 77; Stop 101
tccataatatgattgcgccaggtaa

SEQ ID NO: 67767 - DNA, 25 bp, Artificial
  probe
  misc_feature (1)..(25): SEQ ID NO: 1823; WAN024AVT_at; Start 64; Stop 88
aaaccggtgactttccataatatga

SEQ ID NO: 67768 - DNA, 25 bp, Artificial
  probe
  misc_feature (1)..(25): SEQ ID NO: 1823; WAN024AVT_at; Start 63; Stop 87
gaaaccggtgactttccataatatg

SEQ ID NO: 67769 - DNA, 25 bp, Artificial
  probe
  misc_feature (1)..(25): SEQ ID NO: 1823; WAN024AVT_at; Start 132; Stop 156
catcaataattcaagttcaagtcaa

SEQ ID NO: 67770 - DNA, 25 bp, Artificial
  probe
  misc_feature (1)..(25): SEQ ID NO: 1823; WAN024AVT_at; Start 116; Stop 140
ccttgctcttctttatcatcaataa

SEQ ID NO: 67771 - DNA, 25 bp, Artificial
  probe
  misc_feature (1)..(25): SEQ ID NO: 1823; WAN024AVT_at; Start 86; Stop 110
tgattgcgccaggtaaggaagtaga

SEQ ID NO: 67772 - DNA, 25 bp, Artificial
  probe
  misc_feature (1)..(25): SEQ ID NO: 1823; WAN024AVT_at; Start 78; Stop 102
ccataatatgattgcgccaggtaag

SEQ ID NO: 67773 - DNA, 25 bp, Artificial
  probe
  misc_feature (1)..(25): SEQ ID NO: 1823; WAN024AVT_at; Start 67; Stop 91
ccggtgactttccataatatgattg

SEQ ID NO: 67774 - DNA, 25 bp, Artificial
  probe
  misc_feature (1)..(25): SEQ ID NO: 1823; WAN024AVT_at; Start 58; Stop 82
ttagagaaaccggtgactttccata

SEQ ID NO: 67775 - DNA, 25 bp, Artificial
  probe
  misc_feature (1)..(25): SEQ ID NO: 1823; WAN024AVT_at; Start 112; Stop 136
gtatccttgctcttctttatcatca

SEQ ID NO: 67776 - DNA, 25 bp, Artificial
  probe
  misc_feature (1)..(25): SEQ ID NO: 1823; WAN024AVT_at; Start 73; Stop 97
actttccataatatgattgcgccag

SEQ ID NO: 67777 - DNA, 25 bp, Artificial
  probe
  misc_feature (1)..(25): SEQ ID NO: 1823; WAN024AVT_at; Start 84; Stop 108
tatgattgcgccaggtaaggaagta

SEQ ID NO: 67778 - DNA, 25 bp, Artificial
  probe
  misc_feature (1)..(25): SEQ ID NO: 1823; WAN024AVT_at; Start 72; Stop 96
gactttccataatatgattgcgcca

SEQ ID NO: 67779 - DNA, 25 bp, Artificial
  probe
  misc_feature (1)..(25): SEQ ID NO: 1823; WAN024AVT_at; Start 69; Stop 93
ggtgactttccataatatgattgcg

SEQ ID NO: 67780 - DNA, 25 bp, Artificial
  probe
  misc_feature (1)..(25): SEQ ID NO: 1823; WAN024AVT_at; Start 79; Stop 103
cataatatgattgcgccaggtaagg

SEQ ID NO: 67781 - DNA, 25 bp, Artificial
  probe
  misc_feature (1)..(25): SEQ ID NO: 1823; WAN024AVT_at; Start 61; Stop 85
gagaaaccggtgactttccataata

SEQ ID NO: 67782 - DNA, 25 bp, Artificial
  probe
  misc_feature (1)..(25): SEQ ID NO: 1823; WAN024AVT_at; Start 65; Stop 89
aaccggtgactttccataatatgat

SEQ ID NO: 67783 - DNA, 25 bp, Artificial
  probe
  misc_feature (1)..(25): SEQ ID NO: 1823; WAN024AVT_at; Start 75; Stop 99
tttccataatatgattgcgccaggt

SEQ ID NO: 67784 - DNA, 25 bp, Artificial
  probe
  misc_feature (1)..(25): SEQ ID NO: 1823; WAN024AVT_at; Start 74; Stop 98
ctttccataatatgattgcgccagg

SEQ ID NO: 67785 - DNA, 25 bp, Artificial
  probe
  misc_feature (1)..(25): SEQ ID NO: 1823; WAN024AVT_at; Start 131; Stop 155
tcatcaataattcaagttcaagtca

SEQ ID NO: 67786 - DNA, 25 bp, Artificial
  probe
  misc_feature (1)..(25): SEQ ID NO: 1823; WAN024AVT_at; Start 87; Stop 111
gattgcgccaggtaaggaagtagaa

SEQ ID NO: 67787 - DNA, 25 bp, Artificial
  probe
  misc_feature (1)..(25): SEQ ID NO: 1823; WAN024AVT_at; Start 59; Stop 83
tagagaaaccggtgactttccataa

SEQ ID NO: 67788 - DNA, 25 bp, Artificial
  probe
  misc_feature (1)..(25): SEQ ID NO: 1823; WAN024AVT_at; Start 88; Stop 112
attgcgccaggtaaggaagtagaag

SEQ ID NO: 67789 - DNA, 25 bp, Artificial
  probe
  misc_feature (1)..(25): SEQ ID NO: 1823; WAN024AVT_at; Start 71; Stop 95
tgactttccataatatgattgcgcc

SEQ ID NO: 67790 - DNA, 25 bp, Artificial
  probe
  misc_feature (1)..(25): SEQ ID NO: 1823; WAN024AVT_at; Start 49; Stop 73
gttgttcgattagagaaaccggtga

SEQ ID NO: 67791 - DNA, 25 bp, Artificial
  probe
  misc_feature (1)..(25): SEQ ID NO: 1823; WAN024AVT_at; Start 89; Stop 113
ttgcgccaggtaaggaagtagaagt

SEQ ID NO: 67792 - DNA, 25 bp, Artificial
  probe
  misc_feature (1)..(25): SEQ ID NO: 1823; WAN024AVT_at; Start 76; Stop 100
ttccataatatgattgcgccaggta

SEQ ID NO: 67793 - DNA, 25 bp, Artificial
  probe
  misc_feature (1)..(25): SEQ ID NO: 1823; WAN024AVT_at; Start 68; Stop 92
cggtgactttccataatatgattgc

SEQ ID NO: 67794 - DNA, 25 bp, Artificial
  probe
  misc_feature (1)..(25): SEQ ID NO: 1823; WAN024AVT_at; Start 85; Stop 109
atgattgcgccaggtaaggaagtag

SEQ ID NO: 67795 - DNA, 25 bp, Artificial
  probe
  misc_feature (1)..(25): SEQ ID NO: 1823; WAN024AVT_at; Start 50; Stop 74
ttgttcgattagagaaaccggtgac

SEQ ID NO: 67796 - DNA, 25 bp, Artificial
  probe
  misc_feature (1)..(25): SEQ ID NO: 1823; WAN024AVT_at; Start 110; Stop 134
aagtatccttgctcttctttatcat

SEQ ID NO: 67797 - DNA, 25 bp, Artificial
  probe
  misc_feature (1)..(25): SEQ ID NO: 2151; WAN024AVU_at; Start 113; Stop 137
tggaagaacgagaaattgtcactcc

SEQ ID NO: 67798 - DNA, 25 bp, Artificial
  probe
  misc_feature (1)..(25): SEQ ID NO: 2151; WAN024AVU_at; Start 148; Stop 172
gaagccttgatcacgcgtgaaaagt

SEQ ID NO: 67799 - DNA, 25 bp, Artificial
  probe
  misc_feature (1)..(25): SEQ ID NO: 2151; WAN024AVU_at; Start 155; Stop 179
tgatcacgcgtgaaaagtcatttcc

SEQ ID NO: 67800 - DNA, 25 bp, Artificial
  probe
  misc_feature (1)..(25): SEQ ID NO: 2151; WAN024AVU_at; Start 156; Stop 180
gatcacgcgtgaaaagtcatttcca

SEQ ID NO: 67801 - DNA, 25 bp, Artificial
  probe
  misc_feature (1)..(25): SEQ ID NO: 2151; WAN024AVU_at; Start 163; Stop 187
cgtgaaaagtcatttccaactggtt

SEQ ID NO: 67802 - DNA, 25 bp, Artificial
  probe
  misc_feature (1)..(25): SEQ ID NO: 2151; WAN024AVU_at; Start 159; Stop 183
cacgcgtgaaaagtcatttccaact

SEQ ID NO: 67803 - DNA, 25 bp, Artificial
  probe
  misc_feature (1)..(25): SEQ ID NO: 2151; WAN024AVU_at; Start 136; Stop 160
ccaacttatcgtgaagccttgatca

SEQ ID NO: 67804 - DNA, 25 bp, Artificial
  probe
  misc_feature (1)..(25): SEQ ID NO: 2151; WAN024AVU_at; Start 141; Stop 165
ttatcgtgaagccttgatcacgcgt

SEQ ID NO: 67805 - DNA, 25 bp, Artificial
  probe
  misc_feature (1)..(25): SEQ ID NO: 2151; WAN024AVU_at; Start 139; Stop 163
acttatcgtgaagccttgatcacgc

SEQ ID NO: 67806 - DNA, 25 bp, Artificial
  probe
  misc_feature (1)..(25): SEQ ID NO: 2151; WAN024AVU_at; Start 153; Stop 177
cttgatcacgcgtgaaaagtcattt

SEQ ID NO: 67807 - DNA, 25 bp, Artificial
  probe
  misc_feature (1)..(25): SEQ ID NO: 2151; WAN024AVU_at; Start 147; Stop 171
tgaagccttgatcacgcgtgaaaag

SEQ ID NO: 67808 - DNA, 25 bp, Artificial
  probe
  misc_feature (1)..(25): SEQ ID NO: 2151; WAN024AVU_at; Start 165; Stop 189
tgaaaagtcatttccaactggttta

SEQ ID NO: 67809 - DNA, 25 bp, Artificial
  probe
  misc_feature (1)..(25): SEQ ID NO: 2151; WAN024AVU_at; Start 145; Stop 169
cgtgaagccttgatcacgcgtgaaa

SEQ ID NO: 67810 - DNA, 25 bp, Artificial
  probe
  misc_feature (1)..(25): SEQ ID NO: 2151; WAN024AVU_at; Start 149; Stop 173
aagccttgatcacgcgtgaaaagtc

SEQ ID NO: 67811 - DNA, 25 bp, Artificial
  probe
  misc_feature (1)..(25): SEQ ID NO: 2151; WAN024AVU_at; Start 138; Stop 162
aacttatcgtgaagccttgatcacg

SEQ ID NO: 67812 - DNA, 25 bp, Artificial
  probe
  misc_feature (1)..(25): SEQ ID NO: 2151; WAN024AVU_at; Start 117; Stop 141
agaacgagaaattgtcactccaact

SEQ ID NO: 67813 - DNA, 25 bp, Artificial
  probe
  misc_feature (1)..(25): SEQ ID NO: 2151; WAN024AVU_at; Start 162; Stop 186
gcgtgaaaagtcatttccaactggt

SEQ ID NO: 67814 - DNA, 25 bp, Artificial
  probe
  misc_feature (1)..(25): SEQ ID NO: 2151; WAN024AVU_at; Start 119; Stop 143
aacgagaaattgtcactccaactta

SEQ ID NO: 67815 - DNA, 25 bp, Artificial
  probe
  misc_feature (1)..(25): SEQ ID NO: 2151; WAN024AVU_at; Start 137; Stop 161
caacttatcgtgaagccttgatcac

SEQ ID NO: 67816 - DNA, 25 bp, Artificial
  probe
  misc_feature (1)..(25): SEQ ID NO: 2151; WAN024AVU_at; Start 116; Stop 140
aagaacgagaaattgtcactccaac

SEQ ID NO: 67817 - DNA, 25 bp, Artificial
  probe
  misc_feature (1)..(25): SEQ ID NO: 2151; WAN024AVU_at; Start 161; Stop 185
cgcgtgaaaagtcatttccaactgg

SEQ ID NO: 67818 - DNA, 25 bp, Artificial
  probe
  misc_feature (1)..(25): SEQ ID NO: 2151; WAN024AVU_at; Start 142; Stop 166
tatcgtgaagccttgatcacgcgtg

SEQ ID NO: 67819 - DNA, 25 bp, Artificial
  probe
  misc_feature (1)..(25): SEQ ID NO: 2151; WAN024AVU_at; Start 152; Stop 176
ccttgatcacgcgtgaaaagtcatt

SEQ ID NO: 67820 - DNA, 25 bp, Artificial
  probe
  misc_feature (1)..(25): SEQ ID NO: 2151; WAN024AVU_at; Start 112; Stop 136
ttggaagaacgagaaattgtcactc

SEQ ID NO: 67821 - DNA, 25 bp, Artificial
  probe
  misc_feature (1)..(25): SEQ ID NO: 2151; WAN024AVU_at; Start 146; Stop 170
gtgaagccttgatcacgcgtgaaaa

SEQ ID NO: 67822 - DNA, 25 bp, Artificial
  probe
  misc_feature (1)..(25): SEQ ID NO: 2151; WAN024AVU_at; Start 118; Stop 142
gaacgagaaattgtcactccaactt

SEQ ID NO: 67823 - DNA, 25 bp, Artificial
  probe
  misc_feature (1)..(25): SEQ ID NO: 2151; WAN024AVU_at; Start 114; Stop 138
ggaagaacgagaaattgtcactcca

SEQ ID NO: 67824 - DNA, 25 bp, Artificial
  probe
  misc_feature (1)..(25): SEQ ID NO: 2151; WAN024AVU_at; Start 135; Stop 159
tccaacttatcgtgaagccttgatc

SEQ ID NO: 67825 - DNA, 25 bp, Artificial
  probe
  misc_feature (1)..(25): SEQ ID NO: 2151; WAN024AVU_at; Start 134; Stop 158
ctccaacttatcgtgaagccttgat

SEQ ID NO: 67826 - DNA, 25 bp, Artificial
  probe
  misc_feature (1)..(25): SEQ ID NO: 2151; WAN024AVU_at; Start 158; Stop 182
tcacgcgtgaaaagtcatttccaac

SEQ ID NO: 67827 - DNA, 25 bp, Artificial
  probe
  misc_feature (1)..(25): SEQ ID NO: 2151; WAN024AVU_at; Start 132; Stop 156
cactccaacttatcgtgaagccttg

SEQ ID NO: 67828 - DNA, 25 bp, Artificial
  probe
  misc_feature (1)..(25): SEQ ID NO: 2151; WAN024AVU_at; Start 115; Stop 139
gaagaacgagaaattgtcactccaa

SEQ ID NO: 67829 - DNA, 25 bp, Artificial
  probe
  misc_feature (1)..(25): SEQ ID NO: 2151; WAN024AVU_at; Start 133; Stop 157
actccaacttatcgtgaagccttga

SEQ ID NO: 67830 - DNA, 25 bp, Artificial
  probe
  misc_feature (1)..(25): SEQ ID NO: 2151; WAN024AVU_at; Start 144; Stop 168
tcgtgaagccttgatcacgcgtgaa

SEQ ID NO: 67831 - DNA, 25 bp, Artificial
  probe
  misc_feature (1)..(25): SEQ ID NO: 987; WAN024AVV_at; Start 436; Stop 460
caaggaattggttccaatattatcc

SEQ ID NO: 67832 - DNA, 25 bp, Artificial
  probe
  misc_feature (1)..(25): SEQ ID NO: 987; WAN024AVV_at; Start 233; Stop 257
tatttacagatacagaccttgccaa

SEQ ID NO: 67833 - DNA, 25 bp, Artificial
  probe
  misc_feature (1)..(25): SEQ ID NO: 987; WAN024AVV_at; Start 214; Stop 238
gcacctgtaaccattgccctattta

SEQ ID NO: 67834 - DNA, 25 bp, Artificial
  probe
  misc_feature (1)..(25): SEQ ID NO: 987; WAN024AVV_at; Start 440; Stop 464
gaattggttccaatattatccttgg

SEQ ID NO: 67835 - DNA, 25 bp, Artificial
  probe
  misc_feature (1)..(25): SEQ ID NO: 987; WAN024AVV_at; Start 177; Stop 201
gttggcttatggttcaaactttgag

SEQ ID NO: 67836 - DNA, 25 bp, Artificial
  probe
  misc_feature (1)..(25): SEQ ID NO: 987; WAN024AVV_at; Start 237; Stop 261
tacagatacagaccttgccaaacgc

SEQ ID NO: 67837 - DNA, 25 bp, Artificial
  probe
  misc_feature (1)..(25): SEQ ID NO: 987; WAN024AVV_at; Start 333; Stop 357
tttgccagctgaatttgcacgctac

SEQ ID NO: 67838 - DNA, 25 bp, Artificial
  probe
  misc_feature (1)..(25): SEQ ID NO: 987; WAN024AVV_at; Start 282; Stop 306
tggtggtgctaacaatttctcagaa

SEQ ID NO: 67839 - DNA, 25 bp, Artificial
  probe
  misc_feature (1)..(25): SEQ ID NO: 987; WAN024AVV_at; Start 240; Stop 264
agatacagaccttgccaaacgcgct

SEQ ID NO: 67840 - DNA, 25 bp, Artificial
  probe
  misc_feature (1)..(25): SEQ ID NO: 987; WAN024AVV_at; Start 229; Stop 253
gccctatttacagatacagaccttg

SEQ ID NO: 67841 - DNA, 25 bp, Artificial
  probe
  misc_feature (1)..(25): SEQ ID NO: 987; WAN024AVV_at; Start 48; Stop 72
cactgataagcctgttgatccaaaa

SEQ ID NO: 67842 - DNA, 25 bp, Artificial
  probe
  misc_feature (1)..(25): SEQ ID NO: 987; WAN024AVV_at; Start 338; Stop 362
cagctgaatttgcacgctacaatga

SEQ ID NO: 67843 - DNA, 25 bp, Artificial
  probe
  misc_feature (1)..(25): SEQ ID NO: 987; WAN024AVV_at; Start 273; Stop 297
tgcccgagttggtggtgctaacaat

SEQ ID NO: 67844 - DNA, 25 bp, Artificial
  probe
  misc_feature (1)..(25): SEQ ID NO: 987; WAN024AVV_at; Start 224; Stop 248
ccattgccctatttacagatacaga

SEQ ID NO: 67845 - DNA, 25 bp, Artificial
  probe
  misc_feature (1)..(25): SEQ ID NO: 987; WAN024AVV_at; Start 450; Stop 474
caatattatccttggttttgacaaa

SEQ ID NO: 67846 - DNA, 25 bp, Artificial
  probe
  misc_feature (1)..(25): SEQ ID NO: 987; WAN024AVV_at; Start 417; Stop 441
ggttctcgctcttacagaccaagga

SEQ ID NO: 67847 - DNA, 25 bp, Artificial
  probe
  misc_feature (1)..(25): SEQ ID NO: 987; WAN024AVV_at; Start 141; Stop 165
tgtagttgttcgtgagaaaaatgct

SEQ ID NO: 67848 - DNA, 25 bp, Artificial
  probe
  misc_feature (1)..(25): SEQ ID NO: 987; WAN024AVV_at; Start 247; Stop 271
gaccttgccaaacgcgctcgtaaga

SEQ ID NO: 67849 - DNA, 25 bp, Artificial
  probe
  misc_feature (1)..(25): SEQ ID NO: 987; WAN024AVV_at; Start 276; Stop 300
ccgagttggtggtgctaacaatttc

SEQ ID NO: 67850 - DNA, 25 bp, Artificial
  probe
  misc_feature (1)..(25): SEQ ID NO: 987; WAN024AVV_at; Start 354; Stop 378
ctacaatgaacaacaagtcagcgac

SEQ ID NO: 67851 - DNA, 25 bp, Artificial
  probe
  misc_feature (1)..(25): SEQ ID NO: 987; WAN024AVV_at; Start 35; Stop 59
cgaccaagcatttcactgataagcc

SEQ ID NO: 67852 - DNA, 25 bp, Artificial
  probe
  misc_feature (1)..(25): SEQ ID NO: 987; WAN024AVV_at; Start 330; Stop 354
aaatttgccagctgaatttgcacgc

SEQ ID NO: 67853 - DNA, 25 bp, Artificial
  probe
  misc_feature (1)..(25): SEQ ID NO: 987; WAN024AVV_at; Start 348; Stop 372
tgcacgctacaatgaacaacaagtc

SEQ ID NO: 67854 - DNA, 25 bp, Artificial
  probe
  misc_feature (1)..(25): SEQ ID NO: 987; WAN024AVV_at; Start 130; Stop 154
ccttggaaatttgtagttgttcgtg

SEQ ID NO: 67855 - DNA, 25 bp, Artificial
  probe
  misc_feature (1)..(25): SEQ ID NO: 987; WAN024AVV_at; Start 286; Stop 310
ggtgctaacaatttctcagaagaac

SEQ ID NO: 67856 - DNA, 25 bp, Artificial
  probe
  misc_feature (1)..(25): SEQ ID NO: 987; WAN024AVV_at; Start 39; Stop 63
caagcatttcactgataagcctgtt

SEQ ID NO: 67857 - DNA, 25 bp, Artificial
  probe
  misc_feature (1)..(25): SEQ ID NO: 987; WAN024AVV_at; Start 191; Stop 215
caaactttgagcaggtatcatcagc

SEQ ID NO: 67858 - DNA, 25 bp, Artificial
  probe
  misc_feature (1)..(25): SEQ ID NO: 987; WAN024AVV_at; Start 343; Stop 367
gaatttgcacgctacaatgaacaac

SEQ ID NO: 67859 - DNA, 25 bp, Artificial
  probe
  misc_feature (1)..(25): SEQ ID NO: 987; WAN024AVV_at; Start 304; Stop 328
gaagaacaacttcaatacttcatga

SEQ ID NO: 67860 - DNA, 25 bp, Artificial
  probe
  misc_feature (1)..(25): SEQ ID NO: 987; WAN024AVV_at; Start 187; Stop 211
ggttcaaactttgagcaggtatcat

SEQ ID NO: 67861 - DNA, 25 bp, Artificial
  probe
  misc_feature (1)..(25): SEQ ID NO: 987; WAN024AVV_at; Start 319; Stop 343
tacttcatgaaaaatttgccagctg

SEQ ID NO: 67862 - DNA, 25 bp, Artificial
  probe
  misc_feature (1)..(25): SEQ ID NO: 987; WAN024AVV_at; Start 211; Stop 235
tcagcacctgtaaccattgccctat

SEQ ID NO: 67863 - DNA, 25 bp, Artificial
  probe
  misc_feature (1)..(25): SEQ ID NO: 987; WAN024AVV_at; Start 294; Stop 318
caatttctcagaagaacaacttcaa

SEQ ID NO: 67864 - DNA, 25 bp, Artificial
  probe
  misc_feature (1)..(25): SEQ ID NO: 987; WAN024AVV_at; Start 195; Stop 219
ctttgagcaggtatcatcagcacct

SEQ ID NO: 67865 - DNA, 25 bp, Artificial
  probe
  misc_feature (1)..(25): SEQ ID NO: 988; WAN024AVW_at; Start 233; Stop 257
tgtttacagatacggacttagccaa

SEQ ID NO: 67866 - DNA, 25 bp, Artificial
  probe
  misc_feature (1)..(25): SEQ ID NO: 988; WAN024AVW_at; Start 330; Stop 354
aaatctgccagctgagtttgcccgt

SEQ ID NO: 67867 - DNA, 25 bp, Artificial
  probe
  misc_feature (1)..(25): SEQ ID NO: 988; WAN024AVW_at; Start 289; Stop 313
gctaataacttttctgaagagcaac

SEQ ID NO: 67868 - DNA, 25 bp, Artificial
  probe
  misc_feature (1)..(25): SEQ ID NO: 988; WAN024AVW_at; Start 195; Stop 219
ttttgaacaggtatcatcagcgcct

SEQ ID NO: 67869 - DNA, 25 bp, Artificial
  probe
  misc_feature (1)..(25): SEQ ID NO: 988; WAN024AVW_at; Start 192; Stop 216
caattttgaacaggtatcatcagcg

SEQ ID NO: 67870 - DNA, 25 bp, Artificial
  probe
  misc_feature (1)..(25): SEQ ID NO: 988; WAN024AVW_at; Start 327; Stop 351
gaaaaatctgccagctgagtttgcc

SEQ ID NO: 67871 - DNA, 25 bp, Artificial
  probe
  misc_feature (1)..(25): SEQ ID NO: 988; WAN024AVW_at; Start 304; Stop 328
gaagagcaacttcaatattttatga

SEQ ID NO: 67872 - DNA, 25 bp, Artificial
  probe
  misc_feature (1)..(25): SEQ ID NO: 988; WAN024AVW_at; Start 141; Stop 165
tgtggtggtacgtgagaaaaatgct

SEQ ID NO: 67873 - DNA, 25 bp, Artificial
  probe
  misc_feature (1)..(25): SEQ ID NO: 988; WAN024AVW_at; Start 321; Stop 345
ttttatgaaaaatctgccagctgag

SEQ ID NO: 67874 - DNA, 25 bp, Artificial
  probe
  misc_feature (1)..(25): SEQ ID NO: 988; WAN024AVW_at; Start 341; Stop 365
ctgagtttgcccgttacagtgagca

SEQ ID NO: 67875 - DNA, 25 bp, Artificial
  probe
  misc_feature (1)..(25): SEQ ID NO: 988; WAN024AVW_at; Start 275; Stop 299
cccgtgttggtggtgctaataactt

SEQ ID NO: 67876 - DNA, 25 bp, Artificial
  probe
  misc_feature (1)..(25): SEQ ID NO: 988; WAN024AVW_at; Start 273; Stop 297
tgcccgtgttggtggtgctaataac

SEQ ID NO: 67877 - DNA, 25 bp, Artificial
  probe
  misc_feature (1)..(25): SEQ ID NO: 988; WAN024AVW_at; Start 354; Stop 378
ttacagtgagcaacaagtcagcgac

SEQ ID NO: 67878 - DNA, 25 bp, Artificial
  probe
  misc_feature (1)..(25): SEQ ID NO: 988; WAN024AVW_at; Start 248; Stop 272
acttagccaaacgtgctcgtaagat

SEQ ID NO: 67879 - DNA, 25 bp, Artificial
  probe
  misc_feature (1)..(25): SEQ ID NO: 988; WAN024AVW_at; Start 236; Stop 260
ttacagatacggacttagccaaacg

SEQ ID NO: 67880 - DNA, 25 bp, Artificial
  probe
  misc_feature (1)..(25): SEQ ID NO: 988; WAN024AVW_at; Start 335; Stop 359
tgccagctgagtttgcccgttacag

SEQ ID NO: 67881 - DNA, 25 bp, Artificial
  probe
  misc_feature (1)..(25): SEQ ID NO: 988; WAN024AVW_at; Start 181; Stop 205
gcttatggttccaattttgaacagg

SEQ ID NO: 67882 - DNA, 25 bp, Artificial
  probe
  misc_feature (1)..(25): SEQ ID NO: 988; WAN024AVW_at; Start 135; Stop 159
gaaatttgtggtggtacgtgagaaa

SEQ ID NO: 67883 - DNA, 25 bp, Artificial
  probe
  misc_feature (1)..(25): SEQ ID NO: 988; WAN024AVW_at; Start 246; Stop 270
ggacttagccaaacgtgctcgtaag

SEQ ID NO: 67884 - DNA, 25 bp, Artificial
  probe
  misc_feature (1)..(25): SEQ ID NO: 988; WAN024AVW_at; Start 229; Stop 253
gccttgtttacagatacggacttag

SEQ ID NO: 67885 - DNA, 25 bp, Artificial
  probe
  misc_feature (1)..(25): SEQ ID NO: 988; WAN024AVW_at; Start 239; Stop 263
cagatacggacttagccaaacgtgc

SEQ ID NO: 67886 - DNA, 25 bp, Artificial
  probe
  misc_feature (1)..(25): SEQ ID NO: 988; WAN024AVW_at; Start 243; Stop 267
tacggacttagccaaacgtgctcgt

SEQ ID NO: 67887 - DNA, 25 bp, Artificial
  probe
  misc_feature (1)..(25): SEQ ID NO: 988; WAN024AVW_at; Start 337; Stop 361
ccagctgagtttgcccgttacagtg

SEQ ID NO: 67888 - DNA, 25 bp, Artificial
  probe
  misc_feature (1)..(25): SEQ ID NO: 988; WAN024AVW_at; Start 225; Stop 249
cattgccttgtttacagatacggac

SEQ ID NO: 67889 - DNA, 25 bp, Artificial
  probe
  misc_feature (1)..(25): SEQ ID NO: 988; WAN024AVW_at; Start 130; Stop 154
ccttggaaatttgtggtggtacgtg

SEQ ID NO: 67890 - DNA, 25 bp, Artificial
  probe
  misc_feature (1)..(25): SEQ ID NO: 988; WAN024AVW_at; Start 214; Stop 238
gcgcctgtaaccattgccttgttta

SEQ ID NO: 67891 - DNA, 25 bp, Artificial
  probe
  misc_feature (1)..(25): SEQ ID NO: 988; WAN024AVW_at; Start 351; Stop 375
ccgttacagtgagcaacaagtcagc

SEQ ID NO: 67892 - DNA, 25 bp, Artificial
  probe
  misc_feature (1)..(25): SEQ ID NO: 988; WAN024AVW_at; Start 171; Stop 195
ggcaaagttagcttatggttccaat

SEQ ID NO: 67893 - DNA, 25 bp, Artificial
  probe
  misc_feature (1)..(25): SEQ ID NO: 988; WAN024AVW_at; Start 294; Stop 318
taacttttctgaagagcaacttcaa

SEQ ID NO: 67894 - DNA, 25 bp, Artificial
  probe
  misc_feature (1)..(25): SEQ ID NO: 988; WAN024AVW_at; Start 241; Stop 265
gatacggacttagccaaacgtgctc

SEQ ID NO: 67895 - DNA, 25 bp, Artificial
  probe
  misc_feature (1)..(25): SEQ ID NO: 988; WAN024AVW_at; Start 283; Stop 307
ggtggtgctaataacttttctgaag

SEQ ID NO: 67896 - DNA, 25 bp, Artificial
  probe
  misc_feature (1)..(25): SEQ ID NO: 988; WAN024AVW_at; Start 211; Stop 235
tcagcgcctgtaaccattgccttgt

SEQ ID NO: 67897 - DNA, 25 bp, Artificial
  probe
  misc_feature (1)..(25): SEQ ID NO: 988; WAN024AVW_at; Start 348; Stop 372
tgcccgttacagtgagcaacaagtc

SEQ ID NO: 67898 - DNA, 25 bp, Artificial
  probe
  misc_feature (1)..(25): SEQ ID NO: 988; WAN024AVW_at; Start 343; Stop 367
gagtttgcccgttacagtgagcaac

SEQ ID NO: 67899 - DNA, 25 bp, Artificial
  probe
  misc_feature (1)..(25): SEQ ID NO: 2170; WAN024AVX_at; Start 678; Stop 702
caactggtactggtttgatcagtca

SEQ ID NO: 67900 - DNA, 25 bp, Artificial
  probe
  misc_feature (1)..(25): SEQ ID NO: 2170; WAN024AVX_at; Start 349; Stop 373
gggatacctaaaacgcttgatactg

SEQ ID NO: 67901 - DNA, 25 bp, Artificial
  probe
  misc_feature (1)..(25): SEQ ID NO: 2170; WAN024AVX_at; Start 621; Stop 645
ttactttgacggttcaggatatatg

SEQ ID NO: 67902 - DNA, 25 bp, Artificial
  probe
  misc_feature (1)..(25): SEQ ID NO: 2170; WAN024AVX_at; Start 908; Stop 932
cagaatttacagtcgagcctgaagg

SEQ ID NO: 67903 - DNA, 25 bp, Artificial
  probe
  misc_feature (1)..(25): SEQ ID NO: 2170; WAN024AVX_at; Start 685; Stop 709
tactggtttgatcagtcaggcgaaa

SEQ ID NO: 67904 - DNA, 25 bp, Artificial
  probe
  misc_feature (1)..(25): SEQ ID NO: 2170; WAN024AVX_at; Start 519; Stop 543
gattgaagcaggatggcaacagaac

SEQ ID NO: 67905 - DNA, 25 bp, Artificial
  probe
  misc_feature (1)..(25): SEQ ID NO: 2170; WAN024AVX_at; Start 524; Stop 548
aagcaggatggcaacagaacgatac

SEQ ID NO: 67906 - DNA, 25 bp, Artificial
  probe
  misc_feature (1)..(25): SEQ ID NO: 2170; WAN024AVX_at; Start 667; Stop 691
cacatagacggcaactggtactggt

SEQ ID NO: 67907 - DNA, 25 bp, Artificial
  probe
  misc_feature (1)..(25): SEQ ID NO: 2170; WAN024AVX_at; Start 412; Stop 436
aataaccaacccgataataactcag

SEQ ID NO: 67908 - DNA, 25 bp, Artificial
  probe
  misc_feature (1)..(25): SEQ ID NO: 2170; WAN024AVX_at; Start 547; Stop 571
actggcacctggtatgtacactcag

SEQ ID NO: 67909 - DNA, 25 bp, Artificial
  probe
  misc_feature (1)..(25): SEQ ID NO: 2170; WAN024AVX_at; Start 353; Stop 377
tacctaaaacgcttgatactgctga

SEQ ID NO: 67910 - DNA, 25 bp, Artificial
  probe
  misc_feature (1)..(25): SEQ ID NO: 2170; WAN024AVX_at; Start 529; Stop 553
ggatggcaacagaacgatactggca

SEQ ID NO: 67911 - DNA, 25 bp, Artificial
  probe
  misc_feature (1)..(25): SEQ ID NO: 2170; WAN024AVX_at; Start 544; Stop 568
gatactggcacctggtatgtacact

SEQ ID NO: 67912 - DNA, 25 bp, Artificial
  probe
  misc_feature (1)..(25): SEQ ID NO: 2170; WAN024AVX_at; Start 658; Stop 682
tggaagaagcacatagacggcaact

SEQ ID NO: 67913 - DNA, 25 bp, Artificial
  probe
  misc_feature (1)..(25): SEQ ID NO: 2170; WAN024AVX_at; Start 345; Stop 369
ggctgggatacctaaaacgcttgat

SEQ ID NO: 67914 - DNA, 25 bp, Artificial
  probe
  misc_feature (1)..(25): SEQ ID NO: 2170; WAN024AVX_at; Start 421; Stop 445
cccgataataactcagatcacattg

SEQ ID NO: 67915 - DNA, 25 bp, Artificial
  probe
  misc_feature (1)..(25): SEQ ID NO: 2170; WAN024AVX_at; Start 673; Stop 697
gacggcaactggtactggtttgatc

SEQ ID NO: 67916 - DNA, 25 bp, Artificial
  probe
  misc_feature (1)..(25): SEQ ID NO: 2170; WAN024AVX_at; Start 534; Stop 558
gcaacagaacgatactggcacctgg

SEQ ID NO: 67917 - DNA, 25 bp, Artificial
  probe
  misc_feature (1)..(25): SEQ ID NO: 2170; WAN024AVX_at; Start 337; Stop 361
gcagacgaggctgggatacctaaaa

SEQ ID NO: 67918 - DNA, 25 bp, Artificial
  probe
  misc_feature (1)..(25): SEQ ID NO: 2170; WAN024AVX_at; Start 323; Stop 347
tcttgcgcaatctagcagacgaggc

SEQ ID NO: 67919 - DNA, 25 bp, Artificial
  probe
  misc_feature (1)..(25): SEQ ID NO: 2170; WAN024AVX_at; Start 342; Stop 366
cgaggctgggatacctaaaacgctt

SEQ ID NO: 67920 - DNA, 25 bp, Artificial
  probe
  misc_feature (1)..(25): SEQ ID NO: 2170; WAN024AVX_at; Start 904; Stop 928
aaaccagaatttacagtcgagcctg

SEQ ID NO: 67921 - DNA, 25 bp, Artificial
  probe
  misc_feature (1)..(25): SEQ ID NO: 2170; WAN024AVX_at; Start 538; Stop 562
cagaacgatactggcacctggtatg

SEQ ID NO: 67922 - DNA, 25 bp, Artificial
  probe
  misc_feature (1)..(25): SEQ ID NO: 2170; WAN024AVX_at; Start 286; Stop 310
gaagagtttctgattgactatcgcc

SEQ ID NO: 67923 - DNA, 25 bp, Artificial
  probe
  misc_feature (1)..(25): SEQ ID NO: 2170; WAN024AVX_at; Start 357; Stop 381
taaaacgcttgatactgctgattta

SEQ ID NO: 67924 - DNA, 25 bp, Artificial
  probe
  misc_feature (1)..(25): SEQ ID NO: 2170; WAN024AVX_at; Start 616; Stop 640
tggtattactttgacggttcaggat

SEQ ID NO: 67925 - DNA, 25 bp, Artificial
  probe
  misc_feature (1)..(25): SEQ ID NO: 2170; WAN024AVX_at; Start 295; Stop 319
ctgattgactatcgcctctatatcg

SEQ ID NO: 67926 - DNA, 25 bp, Artificial
  probe
  misc_feature (1)..(25): SEQ ID NO: 2170; WAN024AVX_at; Start 696; Stop 720
tcagtcaggcgaaatggctacaggc

SEQ ID NO: 67927 - DNA, 25 bp, Artificial
  probe
  misc_feature (1)..(25): SEQ ID NO: 2170; WAN024AVX_at; Start 691; Stop 715
tttgatcagtcaggcgaaatggcta

SEQ ID NO: 67928 - DNA, 25 bp, Artificial
  probe
  misc_feature (1)..(25): SEQ ID NO: 2170; WAN024AVX_at; Start 660; Stop 684
gaagaagcacatagacggcaactgg

SEQ ID NO: 67929 - DNA, 25 bp, Artificial
  probe
  misc_feature (1)..(25): SEQ ID NO: 2170; WAN024AVX_at; Start 440; Stop 464
acattgacccctatccttatcttgc

SEQ ID NO: 67930 - DNA, 25 bp, Artificial
  probe
  misc_feature (1)..(25): SEQ ID NO: 2170; WAN024AVX_at; Start 333; Stop 357
tctagcagacgaggctgggatacct

SEQ ID NO: 67931 - DNA, 25 bp, Artificial
  probe
  misc_feature (1)..(25): SEQ ID NO: 2170; WAN024AVX_at; Start 328; Stop 352
cgcaatctagcagacgaggctggga

SEQ ID NO: 67932 - DNA, 25 bp, Artificial
  probe
  misc_feature (1)..(25): SEQ ID NO: 2170; WAN024AVX_at; Start 429; Stop 453
taactcagatcacattgacccctat

SEQ ID NO: 67933 - DNA, 25 bp, Artificial
  probe
  misc_feature (1)..(25): SEQ ID NO: 2171; WAN024AVY_s_at; Start 106; Stop 130
caaaatgaggctgactaccattaca

SEQ ID NO: 67934 - DNA, 25 bp, Artificial
  probe
  misc_feature (1)..(25): SEQ ID NO: 2171; WAN024AVY_s_at; Start 173; Stop 197
atggtcgtgttatgcaggtaggacc

SEQ ID NO: 67935 - DNA, 25 bp, Artificial
  probe
  misc_feature (1)..(25): SEQ ID NO: 2171; WAN024AVY_s_at; Start 235; Stop 259
aatgcagaaggttatgcacaagttg

SEQ ID NO: 67936 - DNA, 25 bp, Artificial
  probe
  misc_feature (1)..(25): SEQ ID NO: 2171; WAN024AVY_s_at; Start 231; Stop 255
ttggaatgcagaaggttatgcacaa

SEQ ID NO: 67937 - DNA, 25 bp, Artificial
  probe
  misc_feature (1)..(25): SEQ ID NO: 2171; WAN024AVY_s_at; Start 451; Stop 475
tatccttatcttgccaaatggggta

SEQ ID NO: 67938 - DNA, 25 bp, Artificial
  probe
  misc_feature (1)..(25): SEQ ID NO: 2171; WAN024AVY_s_at; Start 453; Stop 477
tccttatcttgccaaatggggtatt

SEQ ID NO: 67939 - DNA, 25 bp, Artificial
  probe
  misc_feature (1)..(25): SEQ ID NO: 2171; WAN024AVY_s_at; Start 236; Stop 260
atgcagaaggttatgcacaagttga

SEQ ID NO: 67940 - DNA, 25 bp, Artificial
  probe
  misc_feature (1)..(25): SEQ ID NO: 2171; WAN024AVY_s_at; Start 454; Stop 478
ccttatcttgccaaatggggtatta

SEQ ID NO: 67941 - DNA, 25 bp, Artificial
  probe
  misc_feature (1)..(25): SEQ ID NO: 2171; WAN024AVY_s_at; Start 174; Stop 198
tggtcgtgttatgcaggtaggacct

SEQ ID NO: 67942 - DNA, 25 bp, Artificial
  probe
  misc_feature (1)..(25): SEQ ID NO: 2171; WAN024AVY_s_at; Start 234; Stop 258
gaatgcagaaggttatgcacaagtt

SEQ ID NO: 67943 - DNA, 25 bp, Artificial
  probe
  misc_feature (1)..(25): SEQ ID NO: 2171; WAN024AVY_s_at; Start 229; Stop 253
ggttggaatgcagaaggttatgcac

SEQ ID NO: 67944 - DNA, 25 bp, Artificial
  probe
  misc_feature (1)..(25): SEQ ID NO: 2171; WAN024AVY_s_at; Start 172; Stop 196
aatggtcgtgttatgcaggtaggac

SEQ ID NO: 67945 - DNA, 25 bp, Artificial
  probe
  misc_feature (1)..(25): SEQ ID NO: 2171; WAN024AVY_s_at; Start 233; Stop 257
ggaatgcagaaggttatgcacaagt

SEQ ID NO: 67946 - DNA, 25 bp, Artificial
  probe
  misc_feature (1)..(25): SEQ ID NO: 2171; WAN024AVY_s_at; Start 230; Stop 254
gttggaatgcagaaggttatgcaca

SEQ ID NO: 67947 - DNA, 25 bp, Artificial
  probe
  misc_feature (1)..(25): SEQ ID NO: 2171; WAN024AVY_s_at; Start 107; Stop 131
aaaatgaggctgactaccattacag

SEQ ID NO: 67948 - DNA, 25 bp, Artificial
  probe
  misc_feature (1)..(25): SEQ ID NO: 2171; WAN024AVY_s_at; Start 232; Stop 256
tggaatgcagaaggttatgcacaag

SEQ ID NO: 67949 - DNA, 25 bp, Artificial
  probe
  misc_feature (1)..(25): SEQ ID NO: 2171; WAN024AVY_s_at; Start 237; Stop 261
tgcagaaggttatgcacaagttgaa

SEQ ID NO: 67950 - DNA, 25 bp, Artificial
  probe
  misc_feature (1)..(25): SEQ ID NO: 2171; WAN024AVY_s_at; Start 452; Stop 476
atccttatcttgccaaatggggtat

SEQ ID NO: 67951 - DNA, 25 bp, Artificial
  probe
  misc_feature (1)..(25): SEQ ID NO: 6680; WAN024AVZ_at; Start 192; Stop 216
actgaacacgcgcattcatgttgtt

SEQ ID NO: 67952 - DNA, 25 bp, Artificial
  probe
  misc_feature (1)..(25): SEQ ID NO: 6680; WAN024AVZ_at; Start 303; Stop 327
taatttgaaattgaaagacattgtt

SEQ ID NO: 67953 - DNA, 25 bp, Artificial
  probe
  misc_feature (1)..(25): SEQ ID NO: 6680; WAN024AVZ_at; Start 186; Stop 210
tgggcaactgaacacgcgcattcat

SEQ ID NO: 67954 - DNA, 25 bp, Artificial
  probe
  misc_feature (1)..(25): SEQ ID NO: 6680; WAN024AVZ_at; Start 170; Stop 194
tcagtcaggtgtatgctgggcaact

SEQ ID NO: 67955 - DNA, 25 bp, Artificial
  probe
  misc_feature (1)..(25): SEQ ID NO: 6680; WAN024AVZ_at; Start 179; Stop 203
tgtatgctgggcaactgaacacgcg

SEQ ID NO: 67956 - DNA, 25 bp, Artificial
  probe
  misc_feature (1)..(25): SEQ ID NO: 6680; WAN024AVZ_at; Start 88; Stop 112
gagcatacatcagcactcactgacg

SEQ ID NO: 67957 - DNA, 25 bp, Artificial
  probe
  misc_feature (1)..(25): SEQ ID NO: 6680; WAN024AVZ_at; Start 183; Stop 207
tgctgggcaactgaacacgcgcatt

SEQ ID NO: 67958 - DNA, 25 bp, Artificial
  probe
  misc_feature (1)..(25): SEQ ID NO: 6680; WAN024AVZ_at; Start 227; Stop 251
atcaagtttcctatactggaacaat

SEQ ID NO: 67959 - DNA, 25 bp, Artificial
  probe
  misc_feature (1)..(25): SEQ ID NO: 6680; WAN024AVZ_at; Start 141; Stop 165
tttgtcactggagaagaaattatta

SEQ ID NO: 67960 - DNA, 25 bp, Artificial
  probe
  misc_feature (1)..(25): SEQ ID NO: 6680; WAN024AVZ_at; Start 2; Stop 26
tgattgatcgttcatacttgccatt

SEQ ID NO: 67961 - DNA, 25 bp, Artificial
  probe
  misc_feature (1)..(25): SEQ ID NO: 6680; WAN024AVZ_at; Start 128; Stop 152
cgtatatgtcagatttgtcactgga

SEQ ID NO: 67962 - DNA, 25 bp, Artificial
  probe
  misc_feature (1)..(25): SEQ ID NO: 6680; WAN024AVZ_at; Start 175; Stop 199
caggtgtatgctgggcaactgaaca

SEQ ID NO: 67963 - DNA, 25 bp, Artificial
  probe
  misc_feature (1)..(25): SEQ ID NO: 6680; WAN024AVZ_at; Start 120; Stop 144
caaagtaacgtatatgtcagatttg

SEQ ID NO: 67964 - DNA, 25 bp, Artificial
  probe
  misc_feature (1)..(25): SEQ ID NO: 6680; WAN024AVZ_at; Start 105; Stop 129
cactgacgatgcaaacaaagtaacg

SEQ ID NO: 67965 - DNA, 25 bp, Artificial
  probe
  misc_feature (1)..(25): SEQ ID NO: 6680; WAN024AVZ_at; Start 93; Stop 117
tacatcagcactcactgacgatgca

SEQ ID NO: 67966 - DNA, 25 bp, Artificial
  probe
  misc_feature (1)..(25): SEQ ID NO: 6680; WAN024AVZ_at; Start 135; Stop 159
gtcagatttgtcactggagaagaaa

SEQ ID NO: 67967 - DNA, 25 bp, Artificial
  probe
  misc_feature (1)..(25): SEQ ID NO: 6680; WAN024AVZ_at; Start 222; Stop 246
aaacaatcaagtttcctatactgga

SEQ ID NO: 67968 - DNA, 25 bp, Artificial
  probe
  misc_feature (1)..(25): SEQ ID NO: 6680; WAN024AVZ_at; Start 132; Stop 156
tatgtcagatttgtcactggagaag

SEQ ID NO: 67969 - DNA, 25 bp, Artificial
  probe
  misc_feature (1)..(25): SEQ ID NO: 6680; WAN024AVZ_at; Start 97; Stop 121
tcagcactcactgacgatgcaaaca

SEQ ID NO: 67970 - DNA, 25 bp, Artificial
  probe
  misc_feature (1)..(25): SEQ ID NO: 6680; WAN024AVZ_at; Start 225; Stop 249
caatcaagtttcctatactggaaca

SEQ ID NO: 67971 - DNA, 25 bp, Artificial
  probe
  misc_feature (1)..(25): SEQ ID NO: 6680; WAN024AVZ_at; Start 14; Stop 38
catacttgccatttcagtcagcaag

SEQ ID NO: 67972 - DNA, 25 bp, Artificial
  probe
  misc_feature (1)..(25): SEQ ID NO: 6680; WAN024AVZ_at; Start 167; Stop 191
tcctcagtcaggtgtatgctgggca

SEQ ID NO: 67973 - DNA, 25 bp, Artificial
  probe
  misc_feature (1)..(25): SEQ ID NO: 6680; WAN024AVZ_at; Start 195; Stop 219
gaacacgcgcattcatgttgttaaa

SEQ ID NO: 67974 - DNA, 25 bp, Artificial
  probe
  misc_feature (1)..(25): SEQ ID NO: 6680; WAN024AVZ_at; Start 17; Stop 41
acttgccatttcagtcagcaagaga

SEQ ID NO: 67975 - DNA, 25 bp, Artificial
  probe
  misc_feature (1)..(25): SEQ ID NO: 6680; WAN024AVZ_at; Start 180; Stop 204
gtatgctgggcaactgaacacgcgc

SEQ ID NO: 67976 - DNA, 25 bp, Artificial
  probe
  misc_feature (1)..(25): SEQ ID NO: 6680; WAN024AVZ_at; Start 125; Stop 149
taacgtatatgtcagatttgtcact

SEQ ID NO: 67977 - DNA, 25 bp, Artificial
  probe
  misc_feature (1)..(25): SEQ ID NO: 6680; WAN024AVZ_at; Start 188; Stop 212
ggcaactgaacacgcgcattcatgt

SEQ ID NO: 67978 - DNA, 25 bp, Artificial
  probe
  misc_feature (1)..(25): SEQ ID NO: 6680; WAN024AVZ_at; Start 100; Stop 124
gcactcactgacgatgcaaacaaag

SEQ ID NO: 67979 - DNA, 25 bp, Artificial
  probe
  misc_feature (1)..(25): SEQ ID NO: 6680; WAN024AVZ_at; Start 164; Stop 188
tactcctcagtcaggtgtatgctgg

SEQ ID NO: 67980 - DNA, 25 bp, Artificial
  probe
  misc_feature (1)..(25): SEQ ID NO: 6680; WAN024AVZ_at; Start 7; Stop 31
gatcgttcatacttgccatttcagt

SEQ ID NO: 67981 - DNA, 25 bp, Artificial
  probe
  misc_feature (1)..(25): SEQ ID NO: 6680; WAN024AVZ_at; Start 83; Stop 107
tatctgagcatacatcagcactcac

SEQ ID NO: 67982 - DNA, 25 bp, Artificial
  probe
  misc_feature (1)..(25): SEQ ID NO: 6680; WAN024AVZ_at; Start 198; Stop 222
cacgcgcattcatgttgttaaaaaa

SEQ ID NO: 67983 - DNA, 25 bp, Artificial
  probe
  misc_feature (1)..(25): SEQ ID NO: 6680; WAN024AVZ_at; Start 11; Stop 35
gttcatacttgccatttcagtcagc

SEQ ID NO: 67984 - DNA, 25 bp, Artificial
  probe
  misc_feature (1)..(25): SEQ ID NO: 6680; WAN024AVZ_at; Start 137; Stop 161
cagatttgtcactggagaagaaatt

SEQ ID NO: 67985 - DNA, 25 bp, Artificial
  probe
  misc_feature (1)..(25): SEQ ID NO: 1837; WAN024AW2_at; Start 124; Stop 148
gtaacgtacatgtctgacttatcac

SEQ ID NO: 67986 - DNA, 25 bp, Artificial
  probe
  misc_feature (1)..(25): SEQ ID NO: 1837; WAN024AW2_at; Start 188; Stop 212
ggcagctacgcacacgcattcaagt

SEQ ID NO: 67987 - DNA, 25 bp, Artificial
  probe
  misc_feature (1)..(25): SEQ ID NO: 1837; WAN024AW2_at; Start 170; Stop 194
tcagtcaagtatacgccgggcagct

SEQ ID NO: 67988 - DNA, 25 bp, Artificial
  probe
  misc_feature (1)..(25): SEQ ID NO: 1837; WAN024AW2_at; Start 223; Stop 247
aacaagcgtgtttcctacactggaa

SEQ ID NO: 67989 - DNA, 25 bp, Artificial
  probe
  misc_feature (1)..(25): SEQ ID NO: 1837; WAN024AW2_at; Start 190; Stop 214
cagctacgcacacgcattcaagtga

SEQ ID NO: 67990 - DNA, 25 bp, Artificial
  probe
  misc_feature (1)..(25): SEQ ID NO: 1837; WAN024AW2_at; Start 207; Stop 231
tcaagtgattgaaaaaaacaagcgt

SEQ ID NO: 67991 - DNA, 25 bp, Artificial
  probe
  misc_feature (1)..(25): SEQ ID NO: 1837; WAN024AW2_at; Start 16; Stop 40
tatttaccatttcaatcagcaagag

SEQ ID NO: 67992 - DNA, 25 bp, Artificial
  probe
  misc_feature (1)..(25): SEQ ID NO: 1837; WAN024AW2_at; Start 100; Stop 124
gcactctctgatgatacaaacaaag

SEQ ID NO: 67993 - DNA, 25 bp, Artificial
  probe
  misc_feature (1)..(25): SEQ ID NO: 1837; WAN024AW2_at; Start 98; Stop 122
cagcactctctgatgatacaaacaa

SEQ ID NO: 67994 - DNA, 25 bp, Artificial
  probe
  misc_feature (1)..(25): SEQ ID NO: 1837; WAN024AW2_at; Start 120; Stop 144
caaagtaacgtacatgtctgactta

SEQ ID NO: 67995 - DNA, 25 bp, Artificial
  probe
  misc_feature (1)..(25): SEQ ID NO: 1837; WAN024AW2_at; Start 303; Stop 327
caatttgaaattaaaagacattatt

SEQ ID NO: 67996 - DNA, 25 bp, Artificial
  probe
  misc_feature (1)..(25): SEQ ID NO: 1837; WAN024AW2_at; Start 132; Stop 156
catgtctgacttatcactagagaag

SEQ ID NO: 67997 - DNA, 25 bp, Artificial
  probe
  misc_feature (1)..(25): SEQ ID NO: 1837; WAN024AW2_at; Start 139; Stop 163
gacttatcactagagaagaaattat

SEQ ID NO: 67998 - DNA, 25 bp, Artificial
  probe
  misc_feature (1)..(25): SEQ ID NO: 1837; WAN024AW2_at; Start 130; Stop 154
tacatgtctgacttatcactagaga

SEQ ID NO: 67999 - DNA, 25 bp, Artificial
  probe
  misc_feature (1)..(25): SEQ ID NO: 1837; WAN024AW2_at; Start 117; Stop 141
aaacaaagtaacgtacatgtctgac

SEQ ID NO: 68000 - DNA, 25 bp, Artificial
  probe
  misc_feature (1)..(25): SEQ ID NO: 1837; WAN024AW2_at; Start 179; Stop 203
tatacgccgggcagctacgcacacg

SEQ ID NO: 68001 - DNA, 25 bp, Artificial
  probe
  misc_feature (1)..(25): SEQ ID NO: 1837; WAN024AW2_at; Start 194; Stop 218
tacgcacacgcattcaagtgattga

SEQ ID NO: 68002 - DNA, 25 bp, Artificial
  probe
  misc_feature (1)..(25): SEQ ID NO: 1837; WAN024AW2_at; Start 128; Stop 152
cgtacatgtctgacttatcactaga

SEQ ID NO: 68003 - DNA, 25 bp, Artificial
  probe
  misc_feature (1)..(25): SEQ ID NO: 1837; WAN024AW2_at; Start 10; Stop 34
cgttcatatttaccatttcaatcag

SEQ ID NO: 68004 - DNA, 25 bp, Artificial
  probe
  misc_feature (1)..(25): SEQ ID NO: 1837; WAN024AW2_at; Start 167; Stop 191
tcctcagtcaagtatacgccgggca

SEQ ID NO: 68005 - DNA, 25 bp, Artificial
  probe
  misc_feature (1)..(25): SEQ ID NO: 1837; WAN024AW2_at; Start 227; Stop 251
agcgtgtttcctacactggaacaat

SEQ ID NO: 68006 - DNA, 25 bp, Artificial
  probe
  misc_feature (1)..(25): SEQ ID NO: 1837; WAN024AW2_at; Start 192; Stop 216
gctacgcacacgcattcaagtgatt

SEQ ID NO: 68007 - DNA, 25 bp, Artificial
  probe
  misc_feature (1)..(25): SEQ ID NO: 1837; WAN024AW2_at; Start 221; Stop 245
aaaacaagcgtgtttcctacactgg

SEQ ID NO: 68008 - DNA, 25 bp, Artificial
  probe
  misc_feature (1)..(25): SEQ ID NO: 1837; WAN024AW2_at; Start 88; Stop 112
gaacatgcatcagcactctctgatg

SEQ ID NO: 68009 - DNA, 25 bp, Artificial
  probe
  misc_feature (1)..(25): SEQ ID NO: 1837; WAN024AW2_at; Start 17; Stop 41
atttaccatttcaatcagcaagaga

SEQ ID NO: 68010 - DNA, 25 bp, Artificial
  probe
  misc_feature (1)..(25): SEQ ID NO: 1837; WAN024AW2_at; Start 225; Stop 249
caagcgtgtttcctacactggaaca

SEQ ID NO: 68011 - DNA, 25 bp, Artificial
  probe
  misc_feature (1)..(25): SEQ ID NO: 1837; WAN024AW2_at; Start 135; Stop 159
gtctgacttatcactagagaagaaa

SEQ ID NO: 68012 - DNA, 25 bp, Artificial
  probe
  misc_feature (1)..(25): SEQ ID NO: 1837; WAN024AW2_at; Start 196; Stop 220
cgcacacgcattcaagtgattgaaa

SEQ ID NO: 68013 - DNA, 25 bp, Artificial
  probe
  misc_feature (1)..(25): SEQ ID NO: 1837; WAN024AW2_at; Start 85; Stop 109
tctgaacatgcatcagcactctctg

SEQ ID NO: 68014 - DNA, 25 bp, Artificial
  probe
  misc_feature (1)..(25): SEQ ID NO: 1837; WAN024AW2_at; Start 106; Stop 130
tctgatgatacaaacaaagtaacgt

SEQ ID NO: 68015 - DNA, 25 bp, Artificial
  probe
  misc_feature (1)..(25): SEQ ID NO: 1837; WAN024AW2_at; Start 164; Stop 188
tactcctcagtcaagtatacgccgg

SEQ ID NO: 68016 - DNA, 25 bp, Artificial
  probe
  misc_feature (1)..(25): SEQ ID NO: 1837; WAN024AW2_at; Start 83; Stop 107
tatctgaacatgcatcagcactctc

SEQ ID NO: 68017 - DNA, 25 bp, Artificial
  probe
  misc_feature (1)..(25): SEQ ID NO: 1837; WAN024AW2_at; Start 198; Stop 222
cacacgcattcaagtgattgaaaaa

SEQ ID NO: 68018 - DNA, 25 bp, Artificial
  probe
  misc_feature (1)..(25): SEQ ID NO: 1837; WAN024AW2_at; Start 171; Stop 195
cagtcaagtatacgccgggcagcta

SEQ ID NO: 68019 - DNA, 25 bp, Artificial
  probe
  misc_feature (1)..(25): SEQ ID NO: 6321; WAN024AW3_at; Start 515; Stop 539
tttcaagcctgcctagtttgttaga

SEQ ID NO: 68020 - DNA, 25 bp, Artificial
  probe
  misc_feature (1)..(25): SEQ ID NO: 6321; WAN024AW3_at; Start 394; Stop 418
tttctgactccacttatggaagagc

SEQ ID NO: 68021 - DNA, 25 bp, Artificial
  probe
  misc_feature (1)..(25): SEQ ID NO: 6321; WAN024AW3_at; Start 650; Stop 674
taccatttttgctgacttttttaca

SEQ ID NO: 68022 - DNA, 25 bp, Artificial
  probe
  misc_feature (1)..(25): SEQ ID NO: 6321; WAN024AW3_at; Start 504; Stop 528
tcttcctcatttttcaagcctgcct

SEQ ID NO: 68023 - DNA, 25 bp, Artificial
  probe
  misc_feature (1)..(25): SEQ ID NO: 6321; WAN024AW3_at; Start 630; Stop 654
caataatattttcgcaacattacca

SEQ ID NO: 68024 - DNA, 25 bp, Artificial
  probe
  misc_feature (1)..(25): SEQ ID NO: 6321; WAN024AW3_at; Start 71; Stop 95
ctcagatgacgcttattattcaaaa

SEQ ID NO: 68025 - DNA, 25 bp, Artificial
  probe
  misc_feature (1)..(25): SEQ ID NO: 6321; WAN024AW3_at; Start 519; Stop 543
aagcctgcctagtttgttagatatc

SEQ ID NO: 68026 - DNA, 25 bp, Artificial
  probe
  misc_feature (1)..(25): SEQ ID NO: 6321; WAN024AW3_at; Start 381; Stop 405
tataactttgttctttctgactcca

SEQ ID NO: 68027 - DNA, 25 bp, Artificial
  probe
  misc_feature (1)..(25): SEQ ID NO: 6321; WAN024AW3_at; Start 507; Stop 531
tcctcatttttcaagcctgcctagt

SEQ ID NO: 68028 - DNA, 25 bp, Artificial
  probe
  misc_feature (1)..(25): SEQ ID NO: 6321; WAN024AW3_at; Start 563; Stop 587
gcatcatctttgctagtttgacccg

SEQ ID NO: 68029 - DNA, 25 bp, Artificial
  probe
  misc_feature (1)..(25): SEQ ID NO: 6321; WAN024AW3_at; Start 412; Stop 436
gaagagctaatctatagaggattac

SEQ ID NO: 68030 - DNA, 25 bp, Artificial
  probe
  misc_feature (1)..(25): SEQ ID NO: 6321; WAN024AW3_at; Start 654; Stop 678
atttttgctgacttttttacatagg

SEQ ID NO: 68031 - DNA, 25 bp, Artificial
  probe
  misc_feature (1)..(25): SEQ ID NO: 6321; WAN024AW3_at; Start 192; Stop 216
gacaggtcatggttatctctttcac

SEQ ID NO: 68032 - DNA, 25 bp, Artificial
  probe
  misc_feature (1)..(25): SEQ ID NO: 6321; WAN024AW3_at; Start 488; Stop 512
cgtcaattttatttgctcttcctca

SEQ ID NO: 68033 - DNA, 25 bp, Artificial
  probe
  misc_feature (1)..(25): SEQ ID NO: 6321; WAN024AW3_at; Start 65; Stop 89
gtctttctcagatgacgcttattat

SEQ ID NO: 68034 - DNA, 25 bp, Artificial
  probe
  misc_feature (1)..(25): SEQ ID NO: 6321; WAN024AW3_at; Start 625; Stop 649
gtgatcaataatattttcgcaacat

SEQ ID NO: 68035 - DNA, 25 bp, Artificial
  probe
  misc_feature (1)..(25): SEQ ID NO: 6321; WAN024AW3_at; Start 511; Stop 535
catttttcaagcctgcctagtttgt

SEQ ID NO: 68036 - DNA, 25 bp, Artificial
  probe
  misc_feature (1)..(25): SEQ ID NO: 6321; WAN024AW3_at; Start 564; Stop 588
catcatctttgctagtttgacccgc

SEQ ID NO: 68037 - DNA, 25 bp, Artificial
  probe
  misc_feature (1)..(25): SEQ ID NO: 6321; WAN024AW3_at; Start 636; Stop 660
tattttcgcaacattaccatttttg

SEQ ID NO: 68038 - DNA, 25 bp, Artificial
  probe
  misc_feature (1)..(25): SEQ ID NO: 6321; WAN024AW3_at; Start 414; Stop 438
agagctaatctatagaggattactg

SEQ ID NO: 68039 - DNA, 25 bp, Artificial
  probe
  misc_feature (1)..(25): SEQ ID NO: 6321; WAN024AW3_at; Start 389; Stop 413
tgttctttctgactccacttatgga

SEQ ID NO: 68040 - DNA, 25 bp, Artificial
  probe
  misc_feature (1)..(25): SEQ ID NO: 6321; WAN024AW3_at; Start 545; Stop 569
tcatctttgcaacatctggcatcat

SEQ ID NO: 68041 - DNA, 25 bp, Artificial
  probe
  misc_feature (1)..(25): SEQ ID NO: 6321; WAN024AW3_at; Start 540; Stop 564
tatcttcatctttgcaacatctggc

SEQ ID NO: 68042 - DNA, 25 bp, Artificial
  probe
  misc_feature (1)..(25): SEQ ID NO: 6321; WAN024AW3_at; Start 474; Stop 498
tgatttgcttcttccgtcaatttta

SEQ ID NO: 68043 - DNA, 25 bp, Artificial
  probe
  misc_feature (1)..(25): SEQ ID NO: 6321; WAN024AW3_at; Start 404; Stop 428
cacttatggaagagctaatctatag

SEQ ID NO: 68044 - DNA, 25 bp, Artificial
  probe
  misc_feature (1)..(25): SEQ ID NO: 6321; WAN024AW3_at; Start 429; Stop 453
aggattactgcaacacgcctttttt

SEQ ID NO: 68045 - DNA, 25 bp, Artificial
  probe
  misc_feature (1)..(25): SEQ ID NO: 6321; WAN024AW3_at; Start 408; Stop 432
tatggaagagctaatctatagagga

SEQ ID NO: 68046 - DNA, 25 bp, Artificial
  probe
  misc_feature (1)..(25): SEQ ID NO: 6321; WAN024AW3_at; Start 397; Stop 421
ctgactccacttatggaagagctaa

SEQ ID NO: 68047 - DNA, 25 bp, Artificial
  probe
  misc_feature (1)..(25): SEQ ID NO: 6321; WAN024AW3_at; Start 198; Stop 222
tcatggttatctctttcacattcca

SEQ ID NO: 68048 - DNA, 25 bp, Artificial
  probe
  misc_feature (1)..(25): SEQ ID NO: 6321; WAN024AW3_at; Start 367; Stop 391
gagctaggtatctatataactttgt

SEQ ID NO: 68049 - DNA, 25 bp, Artificial
  probe
  misc_feature (1)..(25): SEQ ID NO: 6321; WAN024AW3_at; Start 401; Stop 425
ctccacttatggaagagctaatcta

SEQ ID NO: 68050 - DNA, 25 bp, Artificial
  probe
  misc_feature (1)..(25): SEQ ID NO: 6321; WAN024AW3_at; Start 80; Stop 104
cgcttattattcaaaattattggca

SEQ ID NO: 68051 - DNA, 25 bp, Artificial
  probe
  misc_feature (1)..(25): SEQ ID NO: 6321; WAN024AW3_at; Start 642; Stop 666
cgcaacattaccatttttgctgact

SEQ ID NO: 68052 - DNA, 25 bp, Artificial
  probe
  misc_feature (1)..(25): SEQ ID NO: 6321; WAN024AW3_at; Start 554; Stop 578
caacatctggcatcatctttgctag

SEQ ID NO: 68053 - DNA, 25 bp, Artificial
  probe
  misc_feature (1)..(25): SEQ ID NO: 682; WAN024AW4_at; Start 513; Stop 537
ttttttgagtctgcctagtctgtta

SEQ ID NO: 68054 - DNA, 25 bp, Artificial
  probe
  misc_feature (1)..(25): SEQ ID NO: 682; WAN024AW4_at; Start 377; Stop 401
tctatgtaaccctgtttttcctgac

SEQ ID NO: 68055 - DNA, 25 bp, Artificial
  probe
  misc_feature (1)..(25): SEQ ID NO: 682; WAN024AW4_at; Start 318; Stop 342
tgctgagggttggaacgtattgatt

SEQ ID NO: 68056 - DNA, 25 bp, Artificial
  probe
  misc_feature (1)..(25): SEQ ID NO: 682; WAN024AW4_at; Start 317; Stop 341
ctgctgagggttggaacgtattgat

SEQ ID NO: 68057 - DNA, 25 bp, Artificial
  probe
  misc_feature (1)..(25): SEQ ID NO: 682; WAN024AW4_at; Start 316; Stop 340
actgctgagggttggaacgtattga

SEQ ID NO: 68058 - DNA, 25 bp, Artificial
  probe
  misc_feature (1)..(25): SEQ ID NO: 682; WAN024AW4_at; Start 370; Stop 394
ctaggtatctatgtaaccctgtttt

SEQ ID NO: 68059 - DNA, 25 bp, Artificial
  probe
  misc_feature (1)..(25): SEQ ID NO: 682; WAN024AW4_at; Start 511; Stop 535
cattttttgagtctgcctagtctgt

SEQ ID NO: 68060 - DNA, 25 bp, Artificial
  probe
  misc_feature (1)..(25): SEQ ID NO: 682; WAN024AW4_at; Start 310; Stop 334
cagtcaactgctgagggttggaacg

SEQ ID NO: 68061 - DNA, 25 bp, Artificial
  probe
  misc_feature (1)..(25): SEQ ID NO: 682; WAN024AW4_at; Start 396; Stop 420
cctgactccactaatggaagagttg

SEQ ID NO: 68062 - DNA, 25 bp, Artificial
  probe
  misc_feature (1)..(25): SEQ ID NO: 682; WAN024AW4_at; Start 312; Stop 336
gtcaactgctgagggttggaacgta

SEQ ID NO: 68063 - DNA, 25 bp, Artificial
  probe
  misc_feature (1)..(25): SEQ ID NO: 682; WAN024AW4_at; Start 427; Stop 451
aggggattacttcaacacgccttct

SEQ ID NO: 68064 - DNA, 25 bp, Artificial
  probe
  misc_feature (1)..(25): SEQ ID NO: 682; WAN024AW4_at; Start 379; Stop 403
tatgtaaccctgtttttcctgactc

SEQ ID NO: 68065 - DNA, 25 bp, Artificial
  probe
  misc_feature (1)..(25): SEQ ID NO: 682; WAN024AW4_at; Start 483; Stop 507
tcttccttccattttgtttgctctt

SEQ ID NO: 68066 - DNA, 25 bp, Artificial
  probe
  misc_feature (1)..(25): SEQ ID NO: 682; WAN024AW4_at; Start 508; Stop 532
cctcattttttgagtctgcctagtc

SEQ ID NO: 68067 - DNA, 25 bp, Artificial
  probe
  misc_feature (1)..(25): SEQ ID NO: 682; WAN024AW4_at; Start 315; Stop 339
aactgctgagggttggaacgtattg

SEQ ID NO: 68068 - DNA, 25 bp, Artificial
  probe
  misc_feature (1)..(25): SEQ ID NO: 682; WAN024AW4_at; Start 503; Stop 527
ctcttcctcattttttgagtctgcc

SEQ ID NO: 68069 - DNA, 25 bp, Artificial
  probe
  misc_feature (1)..(25): SEQ ID NO: 682; WAN024AW4_at; Start 389; Stop 413
tgtttttcctgactccactaatgga

SEQ ID NO: 68070 - DNA, 25 bp, Artificial
  probe
  misc_feature (1)..(25): SEQ ID NO: 682; WAN024AW4_at; Start 314; Stop 338
caactgctgagggttggaacgtatt

SEQ ID NO: 68071 - DNA, 25 bp, Artificial
  probe
  misc_feature (1)..(25): SEQ ID NO: 682; WAN024AW4_at; Start 321; Stop 345
tgagggttggaacgtattgattggt

SEQ ID NO: 68072 - DNA, 25 bp, Artificial
  probe
  misc_feature (1)..(25): SEQ ID NO: 682; WAN024AW4_at; Start 399; Stop 423
gactccactaatggaagagttgatt

SEQ ID NO: 68073 - DNA, 25 bp, Artificial
  probe
  misc_feature (1)..(25): SEQ ID NO: 682; WAN024AW4_at; Start 406; Stop 430
ctaatggaagagttgatttataggg

SEQ ID NO: 68074 - DNA, 25 bp, Artificial
  probe
  misc_feature (1)..(25): SEQ ID NO: 682; WAN024AW4_at; Start 393; Stop 417
tttcctgactccactaatggaagag

SEQ ID NO: 68075 - DNA, 25 bp, Artificial
  probe
  misc_feature (1)..(25): SEQ ID NO: 682; WAN024AW4_at; Start 381; Stop 405
tgtaaccctgtttttcctgactcca

SEQ ID NO: 68076 - DNA, 25 bp, Artificial
  probe
  misc_feature (1)..(25): SEQ ID NO: 682; WAN024AW4_at; Start 391; Stop 415
tttttcctgactccactaatggaag

SEQ ID NO: 68077 - DNA, 25 bp, Artificial
  probe
  misc_feature (1)..(25): SEQ ID NO: 682; WAN024AW4_at; Start 387; Stop 411
cctgtttttcctgactccactaatg

SEQ ID NO: 68078 - DNA, 25 bp, Artificial
  probe
  misc_feature (1)..(25): SEQ ID NO: 682; WAN024AW4_at; Start 395; Stop 419
tcctgactccactaatggaagagtt

SEQ ID NO: 68079 - DNA, 25 bp, Artificial
  probe
  misc_feature (1)..(25): SEQ ID NO: 682; WAN024AW4_at; Start 394; Stop 418
ttcctgactccactaatggaagagt

SEQ ID NO: 68080 - DNA, 25 bp, Artificial
  probe
  misc_feature (1)..(25): SEQ ID NO: 682; WAN024AW4_at; Start 423; Stop 447
ttataggggattacttcaacacgcc

SEQ ID NO: 68081 - DNA, 25 bp, Artificial
  probe
  misc_feature (1)..(25): SEQ ID NO: 682; WAN024AW4_at; Start 397; Stop 421
ctgactccactaatggaagagttga

SEQ ID NO: 68082 - DNA, 25 bp, Artificial
  probe
  misc_feature (1)..(25): SEQ ID NO: 682; WAN024AW4_at; Start 367; Stop 391
gagctaggtatctatgtaaccctgt

SEQ ID NO: 68083 - DNA, 25 bp, Artificial
  probe
  misc_feature (1)..(25): SEQ ID NO: 682; WAN024AW4_at; Start 401; Stop 425
ctccactaatggaagagttgattta

SEQ ID NO: 68084 - DNA, 25 bp, Artificial
  probe
  misc_feature (1)..(25): SEQ ID NO: 682; WAN024AW4_at; Start 488; Stop 512
cttccattttgtttgctcttcctca

SEQ ID NO: 68085 - DNA, 25 bp, Artificial
  probe
  misc_feature (1)..(25): SEQ ID NO: 682; WAN024AW4_at; Start 309; Stop 333
tcagtcaactgctgagggttggaac

SEQ ID NO: 68086 - DNA, 25 bp, Artificial
  probe
  misc_feature (1)..(25): SEQ ID NO: 682; WAN024AW4_at; Start 369; Stop 393
gctaggtatctatgtaaccctgttt

SEQ ID NO: 68087 - DNA, 25 bp, Artificial
  probe
  misc_feature (1)..(25): SEQ ID NO: 1585; WAN024AW5_at; Start 407; Stop 431
ttctttctggttccactgatggaag

SEQ ID NO: 68088 - DNA, 25 bp, Artificial
  probe
  misc_feature (1)..(25): SEQ ID NO: 1585; WAN024AW5_at; Start 5; Stop 29
gggaggatttctatgaaaaagtatc

SEQ ID NO: 68089 - DNA, 25 bp, Artificial
  probe
  misc_feature (1)..(25): SEQ ID NO: 1585; WAN024AW5_at; Start 446; Stop 470
ggattactgcaacatgctttcttta

SEQ ID NO: 68090 - DNA, 25 bp, Artificial
  probe
  misc_feature (1)..(25): SEQ ID NO: 1585; WAN024AW5_at; Start 450; Stop 474
tactgcaacatgctttctttaagca

SEQ ID NO: 68091 - DNA, 25 bp, Artificial
  probe
  misc_feature (1)..(25): SEQ ID NO: 1585; WAN024AW5_at; Start 190; Stop 214
gattgtggttcttgttaagacaggc

SEQ ID NO: 68092 - DNA, 25 bp, Artificial
  probe
  misc_feature (1)..(25): SEQ ID NO: 1585; WAN024AW5_at; Start 2; Stop 26
tgagggaggatttctatgaaaaagt

SEQ ID NO: 68093 - DNA, 25 bp, Artificial
  probe
  misc_feature (1)..(25): SEQ ID NO: 1585; WAN024AW5_at; Start 417; Stop 441
ttccactgatggaagaattgattta

SEQ ID NO: 68094 - DNA, 25 bp, Artificial
  probe
  misc_feature (1)..(25): SEQ ID NO: 1585; WAN024AW5_at; Start 412; Stop 436
tctggttccactgatggaagaattg

SEQ ID NO: 68095 - DNA, 25 bp, Artificial
  probe
  misc_feature (1)..(25): SEQ ID NO: 1585; WAN024AW5_at; Start 389; Stop 413
ggtatttatatagccctgttctttc

SEQ ID NO: 68096 - DNA, 25 bp, Artificial
  probe
  misc_feature (1)..(25): SEQ ID NO: 1585; WAN024AW5_at; Start 395; Stop 419
tatatagccctgttctttctggttc

SEQ ID NO: 68097 - DNA, 25 bp, Artificial
  probe
  misc_feature (1)..(25): SEQ ID NO: 1585; WAN024AW5_at; Start 192; Stop 216
ttgtggttcttgttaagacaggcca

SEQ ID NO: 68098 - DNA, 25 bp, Artificial
  probe
  misc_feature (1)..(25): SEQ ID NO: 1585; WAN024AW5_at; Start 424; Stop 448
gatggaagaattgatttatagagga

SEQ ID NO: 68099 - DNA, 25 bp, Artificial
  probe
  misc_feature (1)..(25): SEQ ID NO: 1585; WAN024AW5_at; Start 182; Stop 206
ggagtcatgattgtggttcttgtta

SEQ ID NO: 68100 - DNA, 25 bp, Artificial
  probe
  misc_feature (1)..(25): SEQ ID NO: 1585; WAN024AW5_at; Start 7; Stop 31
gaggatttctatgaaaaagtatcaa

SEQ ID NO: 68101 - DNA, 25 bp, Artificial
  probe
  misc_feature (1)..(25): SEQ ID NO: 1585; WAN024AW5_at; Start 397; Stop 421
tatagccctgttctttctggttcca

SEQ ID NO: 68102 - DNA, 25 bp, Artificial
  probe
  misc_feature (1)..(25): SEQ ID NO: 1585; WAN024AW5_at; Start 193; Stop 217
tgtggttcttgttaagacaggccat

SEQ ID NO: 68103 - DNA, 25 bp, Artificial
  probe
  misc_feature (1)..(25): SEQ ID NO: 1585; WAN024AW5_at; Start 373; Stop 397
taactttgcagagctaggtatttat

SEQ ID NO: 68104 - DNA, 25 bp, Artificial
  probe
  misc_feature (1)..(25): SEQ ID NO: 1585; WAN024AW5_at; Start 399; Stop 423
tagccctgttctttctggttccact

SEQ ID NO: 68105 - DNA, 25 bp, Artificial
  probe
  misc_feature (1)..(25): SEQ ID NO: 1585; WAN024AW5_at; Start 187; Stop 211
catgattgtggttcttgttaagaca

SEQ ID NO: 68106 - DNA, 25 bp, Artificial
  probe
  misc_feature (1)..(25): SEQ ID NO: 1585; WAN024AW5_at; Start 398; Stop 422
atagccctgttctttctggttccac

SEQ ID NO: 68107 - DNA, 25 bp, Artificial
  probe
  misc_feature (1)..(25): SEQ ID NO: 1585; WAN024AW5_at; Start 409; Stop 433
ctttctggttccactgatggaagaa

SEQ ID NO: 68108 - DNA, 25 bp, Artificial
  probe
  misc_feature (1)..(25): SEQ ID NO: 1585; WAN024AW5_at; Start 186; Stop 210
tcatgattgtggttcttgttaagac

SEQ ID NO: 68109 - DNA, 25 bp, Artificial
  probe
  misc_feature (1)..(25): SEQ ID NO: 1585; WAN024AW5_at; Start 372; Stop 396
ctaactttgcagagctaggtattta

SEQ ID NO: 68110 - DNA, 25 bp, Artificial
  probe
  misc_feature (1)..(25): SEQ ID NO: 1585; WAN024AW5_at; Start 430; Stop 454
agaattgatttatagaggattactg

SEQ ID NO: 68111 - DNA, 25 bp, Artificial
  probe
  misc_feature (1)..(25): SEQ ID NO: 1585; WAN024AW5_at; Start 415; Stop 439
ggttccactgatggaagaattgatt

SEQ ID NO: 68112 - DNA, 25 bp, Artificial
  probe
  misc_feature (1)..(25): SEQ ID NO: 1585; WAN024AW5_at; Start 403; Stop 427
cctgttctttctggttccactgatg

SEQ ID NO: 68113 - DNA, 25 bp, Artificial
  probe
  misc_feature (1)..(25): SEQ ID NO: 1585; WAN024AW5_at; Start 405; Stop 429
tgttctttctggttccactgatgga

SEQ ID NO: 68114 - DNA, 25 bp, Artificial
  probe
  misc_feature (1)..(25): SEQ ID NO: 1585; WAN024AW5_at; Start 401; Stop 425
gccctgttctttctggttccactga

SEQ ID NO: 68115 - DNA, 25 bp, Artificial
  probe
  misc_feature (1)..(25): SEQ ID NO: 1585; WAN024AW5_at; Start 370; Stop 394
gactaactttgcagagctaggtatt

SEQ ID NO: 68116 - DNA, 25 bp, Artificial
  probe
  misc_feature (1)..(25): SEQ ID NO: 1585; WAN024AW5_at; Start 454; Stop 478
gcaacatgctttctttaagcattcg

SEQ ID NO: 68117 - DNA, 25 bp, Artificial
  probe
  misc_feature (1)..(25): SEQ ID NO: 1585; WAN024AW5_at; Start 379; Stop 403
tgcagagctaggtatttatatagcc

SEQ ID NO: 68118 - DNA, 25 bp, Artificial
  probe
  misc_feature (1)..(25): SEQ ID NO: 1585; WAN024AW5_at; Start 383; Stop 407
gagctaggtatttatatagccctgt

SEQ ID NO: 68119 - DNA, 25 bp, Artificial
  probe
  misc_feature (1)..(25): SEQ ID NO: 1585; WAN024AW5_at; Start 381; Stop 405
cagagctaggtatttatatagccct

SEQ ID NO: 68120 - DNA, 25 bp, Artificial
  probe
  misc_feature (1)..(25): SEQ ID NO: 1585; WAN024AW5_at; Start 385; Stop 409
gctaggtatttatatagccctgttc

SEQ ID NO: 68121 - DNA, 25 bp, Artificial
  probe
  misc_feature (1)..(25): SEQ ID NO: 1515; WAN024AW6_at; Start 82; Stop 106
catatcactctgagttcttttgaag

SEQ ID NO: 68122 - DNA, 25 bp, Artificial
  probe
  misc_feature (1)..(25): SEQ ID NO: 1515; WAN024AW6_at; Start 325; Stop 349
attgataaggccctttcggcagagg

SEQ ID NO: 68123 - DNA, 25 bp, Artificial
  probe
  misc_feature (1)..(25): SEQ ID NO: 1515; WAN024AW6_at; Start 103; Stop 127
gaagtttttggtaagccagatcaat

SEQ ID NO: 68124 - DNA, 25 bp, Artificial
  probe
  misc_feature (1)..(25): SEQ ID NO: 1515; WAN024AW6_at; Start 329; Stop 353
ataaggccctttcggcagaggagtt

SEQ ID NO: 68125 - DNA, 25 bp, Artificial
  probe
  misc_feature (1)..(25): SEQ ID NO: 1515; WAN024AW6_at; Start 114; Stop 138
taagccagatcaattgctggcagag

SEQ ID NO: 68126 - DNA, 25 bp, Artificial
  probe
  misc_feature (1)..(25): SEQ ID NO: 1515; WAN024AW6_at; Start 333; Stop 357
ggccctttcggcagaggagtttgaa

SEQ ID NO: 68127 - DNA, 25 bp, Artificial
  probe
  misc_feature (1)..(25): SEQ ID NO: 1515; WAN024AW6_at; Start 327; Stop 351
tgataaggccctttcggcagaggag

SEQ ID NO: 68128 - DNA, 25 bp, Artificial
  probe
  misc_feature (1)..(25): SEQ ID NO: 1515; WAN024AW6_at; Start 100; Stop 124
tttgaagtttttggtaagccagatc

SEQ ID NO: 68129 - DNA, 25 bp, Artificial
  probe
  misc_feature (1)..(25): SEQ ID NO: 1515; WAN024AW6_at; Start 75; Stop 99
ggaacatcatatcactctgagttct

SEQ ID NO: 68130 - DNA, 25 bp, Artificial
  probe
  misc_feature (1)..(25): SEQ ID NO: 1515; WAN024AW6_at; Start 61; Stop 85
gagaaactcttgaaggaacatcata

SEQ ID NO: 68131 - DNA, 25 bp, Artificial
  probe
  misc_feature (1)..(25): SEQ ID NO: 1515; WAN024AW6_at; Start 709; Stop 733
gtgtctgaggctattaataacttac

SEQ ID NO: 68132 - DNA, 25 bp, Artificial
  probe
  misc_feature (1)..(25): SEQ ID NO: 1515; WAN024AW6_at; Start 125; Stop 149
aattgctggcagaggtgcatgagaa

SEQ ID NO: 68133 - DNA, 25 bp, Artificial
  probe
  misc_feature (1)..(25): SEQ ID NO: 1515; WAN024AW6_at; Start 124; Stop 148
caattgctggcagaggtgcatgaga

SEQ ID NO: 68134 - DNA, 25 bp, Artificial
  probe
  misc_feature (1)..(25): SEQ ID NO: 1515; WAN024AW6_at; Start 711; Stop 735
gtctgaggctattaataacttacac

SEQ ID NO: 68135 - DNA, 25 bp, Artificial
  probe
  misc_feature (1)..(25): SEQ ID NO: 1515; WAN024AW6_at; Start 120; Stop 144
agatcaattgctggcagaggtgcat

SEQ ID NO: 68136 - DNA, 25 bp, Artificial
  probe
  misc_feature (1)..(25): SEQ ID NO: 1515; WAN024AW6_at; Start 119; Stop 143
cagatcaattgctggcagaggtgca

SEQ ID NO: 68137 - DNA, 25 bp, Artificial
  probe
  misc_feature (1)..(25): SEQ ID NO: 1515; WAN024AW6_at; Start 118; Stop 142
ccagatcaattgctggcagaggtgc

SEQ ID NO: 68138 - DNA, 25 bp, Artificial
  probe
  misc_feature (1)..(25): SEQ ID NO: 1515; WAN024AW6_at; Start 109; Stop 133
tttggtaagccagatcaattgctgg

SEQ ID NO: 68139 - DNA, 25 bp, Artificial
  probe
  misc_feature (1)..(25): SEQ ID NO: 1515; WAN024AW6_at; Start 123; Stop 147
tcaattgctggcagaggtgcatgag

SEQ ID NO: 68140 - DNA, 25 bp, Artificial
  probe
  misc_feature (1)..(25): SEQ ID NO: 1515; WAN024AW6_at; Start 65; Stop 89
aactcttgaaggaacatcatatcac

SEQ ID NO: 68141 - DNA, 25 bp, Artificial
  probe
  misc_feature (1)..(25): SEQ ID NO: 1515; WAN024AW6_at; Start 56; Stop 80
cgattgagaaactcttgaaggaaca

SEQ ID NO: 68142 - DNA, 25 bp, Artificial
  probe
  misc_feature (1)..(25): SEQ ID NO: 1515; WAN024AW6_at; Start 111; Stop 135
tggtaagccagatcaattgctggca

SEQ ID NO: 68143 - DNA, 25 bp, Artificial
  probe
  misc_feature (1)..(25): SEQ ID NO: 1515; WAN024AW6_at; Start 108; Stop 132
ttttggtaagccagatcaattgctg

SEQ ID NO: 68144 - DNA, 25 bp, Artificial
  probe
  misc_feature (1)..(25): SEQ ID NO: 1515; WAN024AW6_at; Start 59; Stop 83
ttgagaaactcttgaaggaacatca

SEQ ID NO: 68145 - DNA, 25 bp, Artificial
  probe
  misc_feature (1)..(25): SEQ ID NO: 1515; WAN024AW6_at; Start 71; Stop 95
tgaaggaacatcatatcactctgag

SEQ ID NO: 68146 - DNA, 25 bp, Artificial
  probe
  misc_feature (1)..(25): SEQ ID NO: 1515; WAN024AW6_at; Start 68; Stop 92
tcttgaaggaacatcatatcactct

SEQ ID NO: 68147 - DNA, 25 bp, Artificial
  probe
  misc_feature (1)..(25): SEQ ID NO: 1515; WAN024AW6_at; Start 705; Stop 729
ggaagtgtctgaggctattaataac

SEQ ID NO: 68148 - DNA, 25 bp, Artificial
  probe
  misc_feature (1)..(25): SEQ ID NO: 1515; WAN024AW6_at; Start 51; Stop 75
aacgacgattgagaaactcttgaag

SEQ ID NO: 68149 - DNA, 25 bp, Artificial
  probe
  misc_feature (1)..(25): SEQ ID NO: 1515; WAN024AW6_at; Start 72; Stop 96
gaaggaacatcatatcactctgagt

SEQ ID NO: 68150 - DNA, 25 bp, Artificial
  probe
  misc_feature (1)..(25): SEQ ID NO: 1515; WAN024AW6_at; Start 63; Stop 87
gaaactcttgaaggaacatcatatc

SEQ ID NO: 68151 - DNA, 25 bp, Artificial
  probe
  misc_feature (1)..(25): SEQ ID NO: 1515; WAN024AW6_at; Start 714; Stop 738
tgaggctattaataacttacactga

SEQ ID NO: 68152 - DNA, 25 bp, Artificial
  probe
  misc_feature (1)..(25): SEQ ID NO: 1515; WAN024AW6_at; Start 87; Stop 111
cactctgagttcttttgaagttttt

SEQ ID NO: 68153 - DNA, 25 bp, Artificial
  probe
  misc_feature (1)..(25): SEQ ID NO: 1515; WAN024AW6_at; Start 328; Stop 352
gataaggccctttcggcagaggagt

SEQ ID NO: 68154 - DNA, 25 bp, Artificial
  probe
  misc_feature (1)..(25): SEQ ID NO: 1515; WAN024AW6_at; Start 53; Stop 77
cgacgattgagaaactcttgaagga

SEQ ID NO: 68155 - DNA, 25 bp, Artificial
  probe
  misc_feature (1)..(25): SEQ ID NO: 1516; WAN024AW7_at; Start 448; Stop 472
caatttcagtatccttttaaagagg

SEQ ID NO: 68156 - DNA, 25 bp, Artificial
  probe
  misc_feature (1)..(25): SEQ ID NO: 1516; WAN024AW7_at; Start 301; Stop 325
taccaagtgtctgctttggactaca

SEQ ID NO: 68157 - DNA, 25 bp, Artificial
  probe
  misc_feature (1)..(25): SEQ ID NO: 1516; WAN024AW7_at; Start 319; Stop 343
gactacattgataaggccttgtcag

SEQ ID NO: 68158 - DNA, 25 bp, Artificial
  probe
  misc_feature (1)..(25): SEQ ID NO: 1516; WAN024AW7_at; Start 671; Stop 695
gtggaagttgtctaatcgcccgtta

SEQ ID NO: 68159 - DNA, 25 bp, Artificial
  probe
  misc_feature (1)..(25): SEQ ID NO: 1516; WAN024AW7_at; Start 220; Stop 244
agaaagattcgggatcgggatcctt

SEQ ID NO: 68160 - DNA, 25 bp, Artificial
  probe
  misc_feature (1)..(25): SEQ ID NO: 1516; WAN024AW7_at; Start 109; Stop 133
tttggcaagccggaccaactgctgg

SEQ ID NO: 68161 - DNA, 25 bp, Artificial
  probe
  misc_feature (1)..(25): SEQ ID NO: 1516; WAN024AW7_at; Start 124; Stop 148
caactgctggctgaagtgcatgaga

SEQ ID NO: 68162 - DNA, 25 bp, Artificial
  probe
  misc_feature (1)..(25): SEQ ID NO: 1516; WAN024AW7_at; Start 560; Stop 584
aggttttcaagcaggagccccgtct

SEQ ID NO: 68163 - DNA, 25 bp, Artificial
  probe
  misc_feature (1)..(25): SEQ ID NO: 1516; WAN024AW7_at; Start 103; Stop 127
gaggtatttggcaagccggaccaac

SEQ ID NO: 68164 - DNA, 25 bp, Artificial
  probe
  misc_feature (1)..(25): SEQ ID NO: 1516; WAN024AW7_at; Start 675; Stop 699
aagttgtctaatcgcccgttataag

SEQ ID NO: 68165 - DNA, 25 bp, Artificial
  probe
  misc_feature (1)..(25): SEQ ID NO: 1516; WAN024AW7_at; Start 525; Stop 549
gacagacaggctggaatttacagcg

SEQ ID NO: 68166 - DNA, 25 bp, Artificial
  probe
  misc_feature (1)..(25): SEQ ID NO: 1516; WAN024AW7_at; Start 390; Stop 414
tagtcaagatagtaaaagtctggcg

SEQ ID NO: 68167 - DNA, 25 bp, Artificial
  probe
  misc_feature (1)..(25): SEQ ID NO: 1516; WAN024AW7_at; Start 312; Stop 336
tgctttggactacattgataaggcc

SEQ ID NO: 68168 - DNA, 25 bp, Artificial
  probe
  misc_feature (1)..(25): SEQ ID NO: 1516; WAN024AW7_at; Start 61; Stop 85
gagaaacttttgaaagcacatcata

SEQ ID NO: 68169 - DNA, 25 bp, Artificial
  probe
  misc_feature (1)..(25): SEQ ID NO: 1516; WAN024AW7_at; Start 327; Stop 351
tgataaggccttgtcagcagaggag

SEQ ID NO: 68170 - DNA, 25 bp, Artificial
  probe
  misc_feature (1)..(25): SEQ ID NO: 1516; WAN024AW7_at; Start 554; Stop 578
tagaggaggttttcaagcaggagcc

SEQ ID NO: 68171 - DNA, 25 bp, Artificial
  probe
  misc_feature (1)..(25): SEQ ID NO: 1516; WAN024AW7_at; Start 235; Stop 259
cgggatccttatgccctgattgtct

SEQ ID NO: 68172 - DNA, 25 bp, Artificial
  probe
  misc_feature (1)..(25): SEQ ID NO: 1516; WAN024AW7_at; Start 437; Stop 461
caaaatttgcccaatttcagtatcc

SEQ ID NO: 68173 - DNA, 25 bp, Artificial
  probe
  misc_feature (1)..(25): SEQ ID NO: 1516; WAN024AW7_at; Start 475; Stop 499
tactatctcgaaacgtcgcccagag

SEQ ID NO: 68174 - DNA, 25 bp, Artificial
  probe
  misc_feature (1)..(25): SEQ ID NO: 1516; WAN024AW7_at; Start 119; Stop 143
cggaccaactgctggctgaagtgca

SEQ ID NO: 68175 - DNA, 25 bp, Artificial
  probe
  misc_feature (1)..(25): SEQ ID NO: 1516; WAN024AW7_at; Start 572; Stop 596
aggagccccgtctcttgcagtgcca

SEQ ID NO: 68176 - DNA, 25 bp, Artificial
  probe
  misc_feature (1)..(25): SEQ ID NO: 1516; WAN024AW7_at; Start 490; Stop 514
tcgcccagagcccatcgtgttattc

SEQ ID NO: 68177 - DNA, 25 bp, Artificial
  probe
  misc_feature (1)..(25): SEQ ID NO: 1516; WAN024AW7_at; Start 543; Stop 567
tacagcgagtttagaggaggttttc

SEQ ID NO: 68178 - DNA, 25 bp, Artificial
  probe
  misc_feature (1)..(25): SEQ ID NO: 1516; WAN024AW7_at; Start 242; Stop 266
cttatgccctgattgtctttgtgac

SEQ ID NO: 68179 - DNA, 25 bp, Artificial
  probe
  misc_feature (1)..(25): SEQ ID NO: 1516; WAN024AW7_at; Start 563; Stop 587
ttttcaagcaggagccccgtctctt

SEQ ID NO: 68180 - DNA, 25 bp, Artificial
  probe
  misc_feature (1)..(25): SEQ ID NO: 1516; WAN024AW7_at; Start 333; Stop 357
ggccttgtcagcagaggagtttgaa

SEQ ID NO: 68181 - DNA, 25 bp, Artificial
  probe
  misc_feature (1)..(25): SEQ ID NO: 1516; WAN024AW7_at; Start 82; Stop 106
catatcattcctagctcttttgagg

SEQ ID NO: 68182 - DNA, 25 bp, Artificial
  probe
  misc_feature (1)..(25): SEQ ID NO: 1516; WAN024AW7_at; Start 531; Stop 555
caggctggaatttacagcgagttta

SEQ ID NO: 68183 - DNA, 25 bp, Artificial
  probe
  misc_feature (1)..(25): SEQ ID NO: 1516; WAN024AW7_at; Start 72; Stop 96
gaaagcacatcatatcattcctagc

SEQ ID NO: 68184 - DNA, 25 bp, Artificial
  probe
  misc_feature (1)..(25): SEQ ID NO: 1516; WAN024AW7_at; Start 97; Stop 121
tcttttgaggtatttggcaagccgg

SEQ ID NO: 68185 - DNA, 25 bp, Artificial
  probe
  misc_feature (1)..(25): SEQ ID NO: 1516; WAN024AW7_at; Start 666; Stop 690
caatggtggaagttgtctaatcgcc

SEQ ID NO: 68186 - DNA, 25 bp, Artificial
  probe
  misc_feature (1)..(25): SEQ ID NO: 1516; WAN024AW7_at; Start 229; Stop 253
cgggatcgggatccttatgccctga

SEQ ID NO: 68187 - DNA, 25 bp, Artificial
  probe
  misc_feature (1)..(25): SEQ ID NO: 1516; WAN024AW7_at; Start 126; Stop 150
actgctggctgaagtgcatgagaag

SEQ ID NO: 68188 - DNA, 25 bp, Artificial
  probe
  misc_feature (1)..(25): SEQ ID NO: 1516; WAN024AW7_at; Start 297; Stop 321
tcgctaccaagtgtctgctttggac

SEQ ID NO: 68189 - DNA, 25 bp, Artificial
  probe
  misc_feature (1)..(25): SEQ ID NO: 1365; WAN024AW8_at; Start 328; Stop 352
cagacaataattgatgcaagcaagg

SEQ ID NO: 68190 - DNA, 25 bp, Artificial
  probe
  misc_feature (1)..(25): SEQ ID NO: 1365; WAN024AW8_at; Start 332; Stop 356
caataattgatgcaagcaagggaat

SEQ ID NO: 68191 - DNA, 25 bp, Artificial
  probe
  misc_feature (1)..(25): SEQ ID NO: 1365; WAN024AW8_at; Start 135; Stop 159
ggagccacttggctttcctgaaagc

SEQ ID NO: 68192 - DNA, 25 bp, Artificial
  probe
  misc_feature (1)..(25): SEQ ID NO: 1365; WAN024AW8_at; Start 316; Stop 340
gggaatacctatcagacaataattg

SEQ ID NO: 68193 - DNA, 25 bp, Artificial
  probe
  misc_feature (1)..(25): SEQ ID NO: 1365; WAN024AW8_at; Start 28; Stop 52
cttgcggtgcgtaaaattgatgcca

SEQ ID NO: 68194 - DNA, 25 bp, Artificial
  probe
  misc_feature (1)..(25): SEQ ID NO: 1365; WAN024AW8_at; Start 125; Stop 149
aggaaaagatggagccacttggctt

SEQ ID NO: 68195 - DNA, 25 bp, Artificial
  probe
  misc_feature (1)..(25): SEQ ID NO: 1365; WAN024AW8_at; Start 204; Stop 228
caaaaatgtccttcgaggcctccac

SEQ ID NO: 68196 - DNA, 25 bp, Artificial
  probe
  misc_feature (1)..(25): SEQ ID NO: 1365; WAN024AW8_at; Start 136; Stop 160
gagccacttggctttcctgaaagct

SEQ ID NO: 68197 - DNA, 25 bp, Artificial
  probe
  misc_feature (1)..(25): SEQ ID NO: 1365; WAN024AW8_at; Start 16; Stop 40
ttcggaaaaatacttgcggtgcgta

SEQ ID NO: 68198 - DNA, 25 bp, Artificial
  probe
  misc_feature (1)..(25): SEQ ID NO: 1365; WAN024AW8_at; Start 65; Stop 89
tagagtttgatatcccagttcatgg

SEQ ID NO: 68199 - DNA, 25 bp, Artificial
  probe
  misc_feature (1)..(25): SEQ ID NO: 1365; WAN024AW8_at; Start 77; Stop 101
tcccagttcatggtgacaatcgtgg

SEQ ID NO: 68200 - DNA, 25 bp, Artificial
  probe
  misc_feature (1)..(25): SEQ ID NO: 1365; WAN024AW8_at; Start 22; Stop 46
aaaatacttgcggtgcgtaaaattg

SEQ ID NO: 68201 - DNA, 25 bp, Artificial
  probe
  misc_feature (1)..(25): SEQ ID NO: 1365; WAN024AW8_at; Start 80; Stop 104
cagttcatggtgacaatcgtggctg

SEQ ID NO: 68202 - DNA, 25 bp, Artificial
  probe
  misc_feature (1)..(25): SEQ ID NO: 1365; WAN024AW8_at; Start 330; Stop 354
gacaataattgatgcaagcaaggga

SEQ ID NO: 68203 - DNA, 25 bp, Artificial
  probe
  misc_feature (1)..(25): SEQ ID NO: 1365; WAN024AW8_at; Start 50; Stop 74
ccattccaggtatgttagagtttga

SEQ ID NO: 68204 - DNA, 25 bp, Artificial
  probe
  misc_feature (1)..(25): SEQ ID NO: 1365; WAN024AW8_at; Start 128; Stop 152
aaaagatggagccacttggctttcc

SEQ ID NO: 68205 - DNA, 25 bp, Artificial
  probe
  misc_feature (1)..(25): SEQ ID NO: 1365; WAN024AW8_at; Start 78; Stop 102
cccagttcatggtgacaatcgtggc

SEQ ID NO: 68206 - DNA, 25 bp, Artificial
  probe
  misc_feature (1)..(25): SEQ ID NO: 1365; WAN024AW8_at; Start 138; Stop 162
gccacttggctttcctgaaagcttc

SEQ ID NO: 68207 - DNA, 25 bp, Artificial
  probe
  misc_feature (1)..(25): SEQ ID NO: 1365; WAN024AW8_at; Start 121; Stop 145
cagaaggaaaagatggagccacttg

SEQ ID NO: 68208 - DNA, 25 bp, Artificial
  probe
  misc_feature (1)..(25): SEQ ID NO: 1365; WAN024AW8_at; Start 26; Stop 50
tacttgcggtgcgtaaaattgatgc

SEQ ID NO: 68209 - DNA, 25 bp, Artificial
  probe
  misc_feature (1)..(25): SEQ ID NO: 1365; WAN024AW8_at; Start 58; Stop 82
ggtatgttagagtttgatatcccag

SEQ ID NO: 68210 - DNA, 25 bp, Artificial
  probe
  misc_feature (1)..(25): SEQ ID NO: 1365; WAN024AW8_at; Start 55; Stop 79
ccaggtatgttagagtttgatatcc

SEQ ID NO: 68211 - DNA, 25 bp, Artificial
  probe
  misc_feature (1)..(25): SEQ ID NO: 1365; WAN024AW8_at; Start 17; Stop 41
tcggaaaaatacttgcggtgcgtaa

SEQ ID NO: 68212 - DNA, 25 bp, Artificial
  probe
  misc_feature (1)..(25): SEQ ID NO: 1365; WAN024AW8_at; Start 314; Stop 338
ttgggaatacctatcagacaataat

SEQ ID NO: 68213 - DNA, 25 bp, Artificial
  probe
  misc_feature (1)..(25): SEQ ID NO: 1365; WAN024AW8_at; Start 335; Stop 359
taattgatgcaagcaagggaatctt

SEQ ID NO: 68214 - DNA, 25 bp, Artificial
  probe
  misc_feature (1)..(25): SEQ ID NO: 1365; WAN024AW8_at; Start 75; Stop 99
tatcccagttcatggtgacaatcgt

SEQ ID NO: 68215 - DNA, 25 bp, Artificial
  probe
  misc_feature (1)..(25): SEQ ID NO: 1365; WAN024AW8_at; Start 33; Stop 57
ggtgcgtaaaattgatgccattcca

SEQ ID NO: 68216 - DNA, 25 bp, Artificial
  probe
  misc_feature (1)..(25): SEQ ID NO: 1365; WAN024AW8_at; Start 69; Stop 93
gtttgatatcccagttcatggtgac

SEQ ID NO: 68217 - DNA, 25 bp, Artificial
  probe
  misc_feature (1)..(25): SEQ ID NO: 1365; WAN024AW8_at; Start 31; Stop 55
gcggtgcgtaaaattgatgccattc

SEQ ID NO: 68218 - DNA, 25 bp, Artificial
  probe
  misc_feature (1)..(25): SEQ ID NO: 1365; WAN024AW8_at; Start 35; Stop 59
tgcgtaaaattgatgccattccagg

SEQ ID NO: 68219 - DNA, 25 bp, Artificial
  probe
  misc_feature (1)..(25): SEQ ID NO: 1365; WAN024AW8_at; Start 72; Stop 96
tgatatcccagttcatggtgacaat

SEQ ID NO: 68220 - DNA, 25 bp, Artificial
  probe
  misc_feature (1)..(25): SEQ ID NO: 1365; WAN024AW8_at; Start 49; Stop 73
gccattccaggtatgttagagtttg

SEQ ID NO: 68221 - DNA, 25 bp, Artificial
  probe
  misc_feature (1)..(25): SEQ ID NO: 1365; WAN024AW8_at; Start 132; Stop 156
gatggagccacttggctttcctgaa

SEQ ID NO: 68222 - DNA, 25 bp, Artificial
  probe
  misc_feature (1)..(25): SEQ ID NO: 1365; WAN024AW8_at; Start 123; Stop 147
gaaggaaaagatggagccacttggc

SEQ ID NO: 68223 - DNA, 25 bp, Artificial
  probe
  misc_feature (1)..(25): SEQ ID NO: 1364; WAN024AW9_at; Start 13; Stop 37
tttttcggtaagacgcttgcggcac

SEQ ID NO: 68224 - DNA, 25 bp, Artificial
  probe
  misc_feature (1)..(25): SEQ ID NO: 1364; WAN024AW9_at; Start 184; Stop 208
aacaatgtatccttctcacgtaaaa

SEQ ID NO: 68225 - DNA, 25 bp, Artificial
  probe
  misc_feature (1)..(25): SEQ ID NO: 1364; WAN024AW9_at; Start 185; Stop 209
acaatgtatccttctcacgtaaaaa

SEQ ID NO: 68226 - DNA, 25 bp, Artificial
  probe
  misc_feature (1)..(25): SEQ ID NO: 1364; WAN024AW9_at; Start 190; Stop 214
gtatccttctcacgtaaaaatgtcc

SEQ ID NO: 68227 - DNA, 25 bp, Artificial
  probe
  misc_feature (1)..(25): SEQ ID NO: 1364; WAN024AW9_at; Start 33; Stop 57
ggcacgcaaggttgaagctattcca

SEQ ID NO: 68228 - DNA, 25 bp, Artificial
  probe
  misc_feature (1)..(25): SEQ ID NO: 1364; WAN024AW9_at; Start 29; Stop 53
ttgcggcacgcaaggttgaagctat

SEQ ID NO: 68229 - DNA, 25 bp, Artificial
  probe
  misc_feature (1)..(25): SEQ ID NO: 1364; WAN024AW9_at; Start 191; Stop 215
tatccttctcacgtaaaaatgtcct

SEQ ID NO: 68230 - DNA, 25 bp, Artificial
  probe
  misc_feature (1)..(25): SEQ ID NO: 1364; WAN024AW9_at; Start 182; Stop 206
aaaacaatgtatccttctcacgtaa

SEQ ID NO: 68231 - DNA, 25 bp, Artificial
  probe
  misc_feature (1)..(25): SEQ ID NO: 1364; WAN024AW9_at; Start 31; Stop 55
gcggcacgcaaggttgaagctattc

SEQ ID NO: 68232 - DNA, 25 bp, Artificial
  probe
  misc_feature (1)..(25): SEQ ID NO: 1364; WAN024AW9_at; Start 189; Stop 213
tgtatccttctcacgtaaaaatgtc

SEQ ID NO: 68233 - DNA, 25 bp, Artificial
  probe
  misc_feature (1)..(25): SEQ ID NO: 1364; WAN024AW9_at; Start 194; Stop 218
ccttctcacgtaaaaatgtccttcg

SEQ ID NO: 68234 - DNA, 25 bp, Artificial
  probe
  misc_feature (1)..(25): SEQ ID NO: 1364; WAN024AW9_at; Start 192; Stop 216
atccttctcacgtaaaaatgtcctt

SEQ ID NO: 68235 - DNA, 25 bp, Artificial
  probe
  misc_feature (1)..(25): SEQ ID NO: 1364; WAN024AW9_at; Start 177; Stop 201
attgcaaaacaatgtatccttctca

SEQ ID NO: 68236 - DNA, 25 bp, Artificial
  probe
  misc_feature (1)..(25): SEQ ID NO: 1364; WAN024AW9_at; Start 173; Stop 197
gaaaattgcaaaacaatgtatcctt

SEQ ID NO: 68237 - DNA, 25 bp, Artificial
  probe
  misc_feature (1)..(25): SEQ ID NO: 1364; WAN024AW9_at; Start 16; Stop 40
ttcggtaagacgcttgcggcacgca

SEQ ID NO: 68238 - DNA, 25 bp, Artificial
  probe
  misc_feature (1)..(25): SEQ ID NO: 1364; WAN024AW9_at; Start 169; Stop 193
gaaggaaaattgcaaaacaatgtat

SEQ ID NO: 68239 - DNA, 25 bp, Artificial
  probe
  misc_feature (1)..(25): SEQ ID NO: 1364; WAN024AW9_at; Start 186; Stop 210
caatgtatccttctcacgtaaaaat

SEQ ID NO: 68240 - DNA, 25 bp, Artificial
  probe
  misc_feature (1)..(25): SEQ ID NO: 1364; WAN024AW9_at; Start 167; Stop 191
cagaaggaaaattgcaaaacaatgt

SEQ ID NO: 68241 - DNA, 25 bp, Artificial
  probe
  misc_feature (1)..(25): SEQ ID NO: 1364; WAN024AW9_at; Start 18; Stop 42
cggtaagacgcttgcggcacgcaag

SEQ ID NO: 68242 - DNA, 25 bp, Artificial
  probe
  misc_feature (1)..(25): SEQ ID NO: 1364; WAN024AW9_at; Start 24; Stop 48
gacgcttgcggcacgcaaggttgaa

SEQ ID NO: 68243 - DNA, 25 bp, Artificial
  probe
  misc_feature (1)..(25): SEQ ID NO: 1364; WAN024AW9_at; Start 28; Stop 52
cttgcggcacgcaaggttgaagcta

SEQ ID NO: 68244 - DNA, 25 bp, Artificial
  probe
  misc_feature (1)..(25): SEQ ID NO: 1364; WAN024AW9_at; Start 179; Stop 203
tgcaaaacaatgtatccttctcacg

SEQ ID NO: 68245 - DNA, 25 bp, Artificial
  probe
  misc_feature (1)..(25): SEQ ID NO: 1364; WAN024AW9_at; Start 32; Stop 56
cggcacgcaaggttgaagctattcc

SEQ ID NO: 68246 - DNA, 25 bp, Artificial
  probe
  misc_feature (1)..(25): SEQ ID NO: 1364; WAN024AW9_at; Start 187; Stop 211
aatgtatccttctcacgtaaaaatg

SEQ ID NO: 68247 - DNA, 25 bp, Artificial
  probe
  misc_feature (1)..(25): SEQ ID NO: 1364; WAN024AW9_at; Start 180; Stop 204
gcaaaacaatgtatccttctcacgt

SEQ ID NO: 68248 - DNA, 25 bp, Artificial
  probe
  misc_feature (1)..(25): SEQ ID NO: 1364; WAN024AW9_at; Start 14; Stop 38
ttttcggtaagacgcttgcggcacg

SEQ ID NO: 68249 - DNA, 25 bp, Artificial
  probe
  misc_feature (1)..(25): SEQ ID NO: 1364; WAN024AW9_at; Start 181; Stop 205
caaaacaatgtatccttctcacgta

SEQ ID NO: 68250 - DNA, 25 bp, Artificial
  probe
  misc_feature (1)..(25): SEQ ID NO: 1364; WAN024AW9_at; Start 193; Stop 217
tccttctcacgtaaaaatgtccttc

SEQ ID NO: 68251 - DNA, 25 bp, Artificial
  probe
  misc_feature (1)..(25): SEQ ID NO: 1364; WAN024AW9_at; Start 17; Stop 41
tcggtaagacgcttgcggcacgcaa

SEQ ID NO: 68252 - DNA, 25 bp, Artificial
  probe
  misc_feature (1)..(25): SEQ ID NO: 1364; WAN024AW9_at; Start 183; Stop 207
aaacaatgtatccttctcacgtaaa

SEQ ID NO: 68253 - DNA, 25 bp, Artificial
  probe
  misc_feature (1)..(25): SEQ ID NO: 1364; WAN024AW9_at; Start 174; Stop 198
aaaattgcaaaacaatgtatccttc

SEQ ID NO: 68254 - DNA, 25 bp, Artificial
  probe
  misc_feature (1)..(25): SEQ ID NO: 1364; WAN024AW9_at; Start 176; Stop 200
aattgcaaaacaatgtatccttctc

SEQ ID NO: 68255 - DNA, 25 bp, Artificial
  probe
  misc_feature (1)..(25): SEQ ID NO: 1364; WAN024AW9_at; Start 172; Stop 196
ggaaaattgcaaaacaatgtatcct

SEQ ID NO: 68256 - DNA, 25 bp, Artificial
  probe
  misc_feature (1)..(25): SEQ ID NO: 1364; WAN024AW9_at; Start 30; Stop 54
tgcggcacgcaaggttgaagctatt

SEQ ID NO: 68257 - DNA, 25 bp, Artificial
  probe
  misc_feature (1)..(25): SEQ ID NO: 6606; WAN024AWB_s_at; Start 29; Stop 53
cacagaaagtgaagcgaagtgttaa

SEQ ID NO: 68258 - DNA, 25 bp, Artificial
  probe
  misc_feature (1)..(25): SEQ ID NO: 6606; WAN024AWB_s_at; Start 27; Stop 51
ttcacagaaagtgaagcgaagtgtt

SEQ ID NO: 68259 - DNA, 25 bp, Artificial
  probe
  misc_feature (1)..(25): SEQ ID NO: 6606; WAN024AWB_s_at; Start 32; Stop 56
agaaagtgaagcgaagtgttaatat

SEQ ID NO: 68260 - DNA, 25 bp, Artificial
  probe
  misc_feature (1)..(25): SEQ ID NO: 6606; WAN024AWB_s_at; Start 26; Stop 50
gttcacagaaagtgaagcgaagtgt

SEQ ID NO: 68261 - DNA, 25 bp, Artificial
  probe
  misc_feature (1)..(25): SEQ ID NO: 6606; WAN024AWB_s_at; Start 28; Stop 52
tcacagaaagtgaagcgaagtgtta

SEQ ID NO: 68262 - DNA, 25 bp, Artificial
  probe
  misc_feature (1)..(25): SEQ ID NO: 6606; WAN024AWB_s_at; Start 31; Stop 55
cagaaagtgaagcgaagtgttaata

SEQ ID NO: 68263 - DNA, 25 bp, Artificial
  probe
  misc_feature (1)..(25): SEQ ID NO: 6606; WAN024AWB_s_at; Start 30; Stop 54
acagaaagtgaagcgaagtgttaat

SEQ ID NO: 68264 - DNA, 25 bp, Artificial
  probe
  misc_feature (1)..(25): SEQ ID NO: 54; WAN024AWC_at; Start 122; Stop 146
taggttttgtacgtgaacgctactc

SEQ ID NO: 68265 - DNA, 25 bp, Artificial
  probe
  misc_feature (1)..(25): SEQ ID NO: 54; WAN024AWC_at; Start 137; Stop 161
aacgctactcactagccgatggaga

SEQ ID NO: 68266 - DNA, 25 bp, Artificial
  probe
  misc_feature (1)..(25): SEQ ID NO: 54; WAN024AWC_at; Start 89; Stop 113
tagggaatgcccatctagactctga

SEQ ID NO: 68267 - DNA, 25 bp, Artificial
  probe
  misc_feature (1)..(25): SEQ ID NO: 54; WAN024AWC_at; Start 67; Stop 91
catgggaagttccatttcccagtag

SEQ ID NO: 68268 - DNA, 25 bp, Artificial
  probe
  misc_feature (1)..(25): SEQ ID NO: 54; WAN024AWC_at; Start 90; Stop 114
agggaatgcccatctagactctgag

SEQ ID NO: 68269 - DNA, 25 bp, Artificial
  probe
  misc_feature (1)..(25): SEQ ID NO: 54; WAN024AWC_at; Start 3; Stop 27
cttgaaaatgattgacttattggga

SEQ ID NO: 68270 - DNA, 25 bp, Artificial
  probe
  misc_feature (1)..(25): SEQ ID NO: 54; WAN024AWC_at; Start 135; Stop 159
tgaacgctactcactagccgatgga

SEQ ID NO: 68271 - DNA, 25 bp, Artificial
  probe
  misc_feature (1)..(25): SEQ ID NO: 54; WAN024AWC_at; Start 142; Stop 166
tactcactagccgatggagaccgtg

SEQ ID NO: 68272 - DNA, 25 bp, Artificial
  probe
  misc_feature (1)..(25): SEQ ID NO: 54; WAN024AWC_at; Start 312; Stop 336
agtgaatacccagttggaaagcgga

SEQ ID NO: 68273 - DNA, 25 bp, Artificial
  probe
  misc_feature (1)..(25): SEQ ID NO: 54; WAN024AWC_at; Start 147; Stop 171
actagccgatggagaccgtgaccgt

SEQ ID NO: 68274 - DNA, 25 bp, Artificial
  probe
  misc_feature (1)..(25): SEQ ID NO: 54; WAN024AWC_at; Start 143; Stop 167
actcactagccgatggagaccgtga

SEQ ID NO: 68275 - DNA, 25 bp, Artificial
  probe
  misc_feature (1)..(25): SEQ ID NO: 54; WAN024AWC_at; Start 82; Stop 106
ttcccagtagggaatgcccatctag

SEQ ID NO: 68276 - DNA, 25 bp, Artificial
  probe
  misc_feature (1)..(25): SEQ ID NO: 54; WAN024AWC_at; Start 65; Stop 89
tacatgggaagttccatttcccagt

SEQ ID NO: 68277 - DNA, 25 bp, Artificial
  probe
  misc_feature (1)..(25): SEQ ID NO: 54; WAN024AWC_at; Start 138; Stop 162
acgctactcactagccgatggagac

SEQ ID NO: 68278 - DNA, 25 bp, Artificial
  probe
  misc_feature (1)..(25): SEQ ID NO: 54; WAN024AWC_at; Start 37; Stop 61
gttcataatgatcaagagttttcag

SEQ ID NO: 68279 - DNA, 25 bp, Artificial
  probe
  misc_feature (1)..(25): SEQ ID NO: 54; WAN024AWC_at; Start 314; Stop 338
tgaatacccagttggaaagcggagg

SEQ ID NO: 68280 - DNA, 25 bp, Artificial
  probe
  misc_feature (1)..(25): SEQ ID NO: 54; WAN024AWC_at; Start 29; Stop 53
gggtagatgttcataatgatcaaga

SEQ ID NO: 68281 - DNA, 25 bp, Artificial
  probe
  misc_feature (1)..(25): SEQ ID NO: 54; WAN024AWC_at; Start 132; Stop 156
acgtgaacgctactcactagccgat

SEQ ID NO: 68282 - DNA, 25 bp, Artificial
  probe
  misc_feature (1)..(25): SEQ ID NO: 54; WAN024AWC_at; Start 136; Stop 160
gaacgctactcactagccgatggag

SEQ ID NO: 68283 - DNA, 25 bp, Artificial
  probe
  misc_feature (1)..(25): SEQ ID NO: 54; WAN024AWC_at; Start 83; Stop 107
tcccagtagggaatgcccatctaga

SEQ ID NO: 68284 - DNA, 25 bp, Artificial
  probe
  misc_feature (1)..(25): SEQ ID NO: 54; WAN024AWC_at; Start 145; Stop 169
tcactagccgatggagaccgtgacc

SEQ ID NO: 68285 - DNA, 25 bp, Artificial
  probe
  misc_feature (1)..(25): SEQ ID NO: 54; WAN024AWC_at; Start 85; Stop 109
ccagtagggaatgcccatctagact

SEQ ID NO: 68286 - DNA, 25 bp, Artificial
  probe
  misc_feature (1)..(25): SEQ ID NO: 54; WAN024AWC_at; Start 63; Stop 87
tctacatgggaagttccatttccca

SEQ ID NO: 68287 - DNA, 25 bp, Artificial
  probe
  misc_feature (1)..(25): SEQ ID NO: 54; WAN024AWC_at; Start 77; Stop 101
tccatttcccagtagggaatgccca

SEQ ID NO: 68288 - DNA, 25 bp, Artificial
  probe
  misc_feature (1)..(25): SEQ ID NO: 54; WAN024AWC_at; Start 5; Stop 29
tgaaaatgattgacttattgggagg

SEQ ID NO: 68289 - DNA, 25 bp, Artificial
  probe
  misc_feature (1)..(25): SEQ ID NO: 54; WAN024AWC_at; Start 131; Stop 155
tacgtgaacgctactcactagccga

SEQ ID NO: 68290 - DNA, 25 bp, Artificial
  probe
  misc_feature (1)..(25): SEQ ID NO: 54; WAN024AWC_at; Start 31; Stop 55
gtagatgttcataatgatcaagagt

SEQ ID NO: 68291 - DNA, 25 bp, Artificial
  probe
  misc_feature (1)..(25): SEQ ID NO: 54; WAN024AWC_at; Start 74; Stop 98
agttccatttcccagtagggaatgc

SEQ ID NO: 68292 - DNA, 25 bp, Artificial
  probe
  misc_feature (1)..(25): SEQ ID NO: 54; WAN024AWC_at; Start 153; Stop 177
cgatggagaccgtgaccgtggtcgc

SEQ ID NO: 68293 - DNA, 25 bp, Artificial
  probe
  misc_feature (1)..(25): SEQ ID NO: 54; WAN024AWC_at; Start 129; Stop 153
tgtacgtgaacgctactcactagcc

SEQ ID NO: 68294 - DNA, 25 bp, Artificial
  probe
  misc_feature (1)..(25): SEQ ID NO: 54; WAN024AWC_at; Start 79; Stop 103
catttcccagtagggaatgcccatc

SEQ ID NO: 68295 - DNA, 25 bp, Artificial
  probe
  misc_feature (1)..(25): SEQ ID NO: 54; WAN024AWC_at; Start 148; Stop 172
ctagccgatggagaccgtgaccgtg

SEQ ID NO: 68296 - DNA, 25 bp, Artificial
  probe
  misc_feature (1)..(25): SEQ ID NO: 54; WAN024AWC_at; Start 88; Stop 112
gtagggaatgcccatctagactctg

SEQ ID NO: 68297 - DNA, 25 bp, Artificial
  probe
  misc_feature (1)..(25): SEQ ID NO: 54; WAN024AWC_at; Start 123; Stop 147
aggttttgtacgtgaacgctactca

SEQ ID NO: 68298 - DNA, 25 bp, Artificial
  probe
  misc_feature (1)..(25): SEQ ID NO: 1611; WAN024AWD_at; Start 355; Stop 379
ttagcagatagtgagatcgaaaatg

SEQ ID NO: 68299 - DNA, 25 bp, Artificial
  probe
  misc_feature (1)..(25): SEQ ID NO: 1611; WAN024AWD_at; Start 1099; Stop 1123
ctagcagatggcgatcgtgaccgtg

SEQ ID NO: 68300 - DNA, 25 bp, Artificial
  probe
  misc_feature (1)..(25): SEQ ID NO: 1611; WAN024AWD_at; Start 700; Stop 724
gacacctatggtcctattagttcgg

SEQ ID NO: 68301 - DNA, 25 bp, Artificial
  probe
  misc_feature (1)..(25): SEQ ID NO: 1611; WAN024AWD_at; Start 1040; Stop 1064
taggcaatgttcatcttgattcaga

SEQ ID NO: 68302 - DNA, 25 bp, Artificial
  probe
  misc_feature (1)..(25): SEQ ID NO: 1611; WAN024AWD_at; Start 1080; Stop 1104
tgttcgtgagcgctactcactagca

SEQ ID NO: 68303 - DNA, 25 bp, Artificial
  probe
  misc_feature (1)..(25): SEQ ID NO: 1611; WAN024AWD_at; Start 225; Stop 249
tatttttctgttggtgttctctatc

SEQ ID NO: 68304 - DNA, 25 bp, Artificial
  probe
  misc_feature (1)..(25): SEQ ID NO: 1611; WAN024AWD_at; Start 731; Stop 755
gatcagatgtcaatatcctgatgac

SEQ ID NO: 68305 - DNA, 25 bp, Artificial
  probe
  misc_feature (1)..(25): SEQ ID NO: 1611; WAN024AWD_at; Start 338; Stop 362
caatcagtgtcgctgttttagcaga

SEQ ID NO: 68306 - DNA, 25 bp, Artificial
  probe
  misc_feature (1)..(25): SEQ ID NO: 1611; WAN024AWD_at; Start 463; Stop 487
cagaataccgatttgacggtcgacc

SEQ ID NO: 68307 - DNA, 25 bp, Artificial
  probe
  misc_feature (1)..(25): SEQ ID NO: 1611; WAN024AWD_at; Start 1065; Stop 1089
acaggctctcggttttgttcgtgag

SEQ ID NO: 68308 - DNA, 25 bp, Artificial
  probe
  misc_feature (1)..(25): SEQ ID NO: 1611; WAN024AWD_at; Start 1093; Stop 1117
tactcactagcagatggcgatcgtg

SEQ ID NO: 68309 - DNA, 25 bp, Artificial
  probe
  misc_feature (1)..(25): SEQ ID NO: 1611; WAN024AWD_at; Start 1053; Stop 1077
tcttgattcagaacaggctctcggt

SEQ ID NO: 68310 - DNA, 25 bp, Artificial
  probe
  misc_feature (1)..(25): SEQ ID NO: 1611; WAN024AWD_at; Start 1025; Stop 1049
gaaagtattaccctgtaggcaatgt

SEQ ID NO: 68311 - DNA, 25 bp, Artificial
  probe
  misc_feature (1)..(25): SEQ ID NO: 1611; WAN024AWD_at; Start 1263; Stop 1287
agtgaatactcagttggaaagtggg

SEQ ID NO: 68312 - DNA, 25 bp, Artificial
  probe
  misc_feature (1)..(25): SEQ ID NO: 1611; WAN024AWD_at; Start 844; Stop 868
gataaattaacccatgcgggcattt

SEQ ID NO: 68313 - DNA, 25 bp, Artificial
  probe
  misc_feature (1)..(25): SEQ ID NO: 1611; WAN024AWD_at; Start 170; Stop 194
tagttgccttggtagggctactcct

SEQ ID NO: 68314 - DNA, 25 bp, Artificial
  probe
  misc_feature (1)..(25): SEQ ID NO: 1611; WAN024AWD_at; Start 325; Stop 349
tactcagaatattcaatcagtgtcg

SEQ ID NO: 68315 - DNA, 25 bp, Artificial
  probe
  misc_feature (1)..(25): SEQ ID NO: 1611; WAN024AWD_at; Start 491; Stop 515
gttcgtcttacttggcagcttacaa

SEQ ID NO: 68316 - DNA, 25 bp, Artificial
  probe
  misc_feature (1)..(25): SEQ ID NO: 1611; WAN024AWD_at; Start 507; Stop 531
agcttacaagagtttgattgcaggg

SEQ ID NO: 68317 - DNA, 25 bp, Artificial
  probe
  misc_feature (1)..(25): SEQ ID NO: 1611; WAN024AWD_at; Start 912; Stop 936
agtggatatcaattactatgtgcga

SEQ ID NO: 68318 - DNA, 25 bp, Artificial
  probe
  misc_feature (1)..(25): SEQ ID NO: 1611; WAN024AWD_at; Start 180; Stop 204
ggtagggctactcctgattatctat

SEQ ID NO: 68319 - DNA, 25 bp, Artificial
  probe
  misc_feature (1)..(25): SEQ ID NO: 1611; WAN024AWD_at; Start 477; Stop 501
gacggtcgaccagagttcgtcttac

SEQ ID NO: 68320 - DNA, 25 bp, Artificial
  probe
  misc_feature (1)..(25): SEQ ID NO: 1611; WAN024AWD_at; Start 575; Stop 599
tcgagtcagagtatccagactatgc

SEQ ID NO: 68321 - DNA, 25 bp, Artificial
  probe
  misc_feature (1)..(25): SEQ ID NO: 1611; WAN024AWD_at; Start 997; Stop 1021
gatcaagaatttactgcccatacga

SEQ ID NO: 68322 - DNA, 25 bp, Artificial
  probe
  misc_feature (1)..(25): SEQ ID NO: 1611; WAN024AWD_at; Start 691; Stop 715
agtggaattgacacctatggtccta

SEQ ID NO: 68323 - DNA, 25 bp, Artificial
  probe
  misc_feature (1)..(25): SEQ ID NO: 1611; WAN024AWD_at; Start 142; Stop 166
aatctagtggtaactgcgttagtcc

SEQ ID NO: 68324 - DNA, 25 bp, Artificial
  probe
  misc_feature (1)..(25): SEQ ID NO: 1611; WAN024AWD_at; Start 928; Stop 952
tatgtgcgattgaacttcacttcgt

SEQ ID NO: 68325 - DNA, 25 bp, Artificial
  probe
  misc_feature (1)..(25): SEQ ID NO: 1611; WAN024AWD_at; Start 561; Stop 585
ctttgaaaatatcatcgagtcagag

SEQ ID NO: 68326 - DNA, 25 bp, Artificial
  probe
  misc_feature (1)..(25): SEQ ID NO: 1611; WAN024AWD_at; Start 134; Stop 158
gatatcttaatctagtggtaactgc

SEQ ID NO: 68327 - DNA, 25 bp, Artificial
  probe
  misc_feature (1)..(25): SEQ ID NO: 1611; WAN024AWD_at; Start 1012; Stop 1036
gcccatacgaatggaaagtattacc

SEQ ID NO: 68328 - DNA, 25 bp, Artificial
  probe
  misc_feature (1)..(25): SEQ ID NO: 1611; WAN024AWD_at; Start 366; Stop 390
tgagatcgaaaatgttacgcaactg

SEQ ID NO: 68329 - DNA, 25 bp, Artificial
  probe
  misc_feature (1)..(25): SEQ ID NO: 1611; WAN024AWD_at; Start 157; Stop 181
gcgttagtcctactagttgccttgg

SEQ ID NO: 68330 - DNA, 25 bp, Artificial
  probe
  misc_feature (1)..(25): SEQ ID NO: 1611; WAN024AWD_at; Start 588; Stop 612
tccagactatgcatcgaagataaaa

SEQ ID NO: 68331 - DNA, 25 bp, Artificial
  probe
  misc_feature (1)..(25): SEQ ID NO: 1611; WAN024AWD_at; Start 240; Stop 264
gttctctatccttgtcagctctgtg

SEQ ID NO: 68332 - DNA, 25 bp, Artificial
  probe
  misc_feature (1)..(25): SEQ ID NO: 4290; WAN024AWE_x_at; Start 298; Stop 322
gttggactgaccaatcgtttaaatg

SEQ ID NO: 68333 - DNA, 25 bp, Artificial
  probe
  misc_feature (1)..(25): SEQ ID NO: 4290; WAN024AWE_x_at; Start 289; Stop 313
cagcagtttgttggactgaccaatc

SEQ ID NO: 68334 - DNA, 25 bp, Artificial
  probe
  misc_feature (1)..(25): SEQ ID NO: 4290; WAN024AWE_x_at; Start 293; Stop 317
agtttgttggactgaccaatcgttt

SEQ ID NO: 68335 - DNA, 25 bp, Artificial
  probe
  misc_feature (1)..(25): SEQ ID NO: 4290; WAN024AWE_x_at; Start 295; Stop 319
tttgttggactgaccaatcgtttaa

SEQ ID NO: 68336 - DNA, 25 bp, Artificial
  probe
  misc_feature (1)..(25): SEQ ID NO: 4290; WAN024AWE_x_at; Start 296; Stop 320
ttgttggactgaccaatcgtttaaa

SEQ ID NO: 68337 - DNA, 25 bp, Artificial
  probe
  misc_feature (1)..(25): SEQ ID NO: 4290; WAN024AWE_x_at; Start 294; Stop 318
gtttgttggactgaccaatcgttta

SEQ ID NO: 68338 - DNA, 25 bp, Artificial
  probe
  misc_feature (1)..(25): SEQ ID NO: 4290; WAN024AWE_x_at; Start 297; Stop 321
tgttggactgaccaatcgtttaaat

SEQ ID NO: 68339 - DNA, 25 bp, Artificial
  probe
  misc_feature (1)..(25): SEQ ID NO: 4290; WAN024AWE_x_at; Start 291; Stop 315
gcagtttgttggactgaccaatcgt

SEQ ID NO: 68340 - DNA, 25 bp, Artificial
  probe
  misc_feature (1)..(25): SEQ ID NO: 4290; WAN024AWE_x_at; Start 292; Stop 316
cagtttgttggactgaccaatcgtt

SEQ ID NO: 68341 - DNA, 25 bp, Artificial
  probe
  misc_feature (1)..(25): SEQ ID NO: 4290; WAN024AWE_x_at; Start 290; Stop 314
agcagtttgttggactgaccaatcg

SEQ ID NO: 68342 - DNA, 25 bp, Artificial
  probe
  misc_feature (1)..(25): SEQ ID NO: 1236; WAN024AWF_at; Start 59; Stop 83
aggatatcggtgtctcgagacagac

SEQ ID NO: 68343 - DNA, 25 bp, Artificial
  probe
  misc_feature (1)..(25): SEQ ID NO: 1236; WAN024AWF_at; Start 92; Stop 116
tgattgaaaacgacaagtacaatcc

SEQ ID NO: 68344 - DNA, 25 bp, Artificial
  probe
  misc_feature (1)..(25): SEQ ID NO: 1236; WAN024AWF_at; Start 95; Stop 119
ttgaaaacgacaagtacaatccaac

SEQ ID NO: 68345 - DNA, 25 bp, Artificial
  probe
  misc_feature (1)..(25): SEQ ID NO: 1236; WAN024AWF_at; Start 94; Stop 118
attgaaaacgacaagtacaatccaa

SEQ ID NO: 68346 - DNA, 25 bp, Artificial
  probe
  misc_feature (1)..(25): SEQ ID NO: 1236; WAN024AWF_at; Start 87; Stop 111
caatatgattgaaaacgacaagtac

SEQ ID NO: 68347 - DNA, 25 bp, Artificial
  probe
  misc_feature (1)..(25): SEQ ID NO: 1236; WAN024AWF_at; Start 54; Stop 78
cgccaaggatatcggtgtctcgaga

SEQ ID NO: 68348 - DNA, 25 bp, Artificial
  probe
  misc_feature (1)..(25): SEQ ID NO: 1236; WAN024AWF_at; Start 146; Stop 170
gcagcctccaaactgacctcaacag

SEQ ID NO: 68349 - DNA, 25 bp, Artificial
  probe
  misc_feature (1)..(25): SEQ ID NO: 1236; WAN024AWF_at; Start 5; Stop 29
atcgtgtgaaagaatttcgcaagga

SEQ ID NO: 68350 - DNA, 25 bp, Artificial
  probe
  misc_feature (1)..(25): SEQ ID NO: 1236; WAN024AWF_at; Start 149; Stop 173
gcctccaaactgacctcaacagtct

SEQ ID NO: 68351 - DNA, 25 bp, Artificial
  probe
  misc_feature (1)..(25): SEQ ID NO: 1236; WAN024AWF_at; Start 53; Stop 77
tcgccaaggatatcggtgtctcgag

SEQ ID NO: 68352 - DNA, 25 bp, Artificial
  probe
  misc_feature (1)..(25): SEQ ID NO: 1236; WAN024AWF_at; Start 93; Stop 117
gattgaaaacgacaagtacaatcca

SEQ ID NO: 68353 - DNA, 25 bp, Artificial
  probe
  misc_feature (1)..(25): SEQ ID NO: 1236; WAN024AWF_at; Start 4; Stop 28
aatcgtgtgaaagaatttcgcaagg

SEQ ID NO: 68354 - DNA, 25 bp, Artificial
  probe
  misc_feature (1)..(25): SEQ ID NO: 1236; WAN024AWF_at; Start 6; Stop 30
tcgtgtgaaagaatttcgcaaggaa

SEQ ID NO: 68355 - DNA, 25 bp, Artificial
  probe
  misc_feature (1)..(25): SEQ ID NO: 1236; WAN024AWF_at; Start 58; Stop 82
aaggatatcggtgtctcgagacaga

SEQ ID NO: 68356 - DNA, 25 bp, Artificial
  probe
  misc_feature (1)..(25): SEQ ID NO: 1236; WAN024AWF_at; Start 3; Stop 27
gaatcgtgtgaaagaatttcgcaag

SEQ ID NO: 68357 - DNA, 25 bp, Artificial
  probe
  misc_feature (1)..(25): SEQ ID NO: 1236; WAN024AWF_at; Start 2; Stop 26
tgaatcgtgtgaaagaatttcgcaa

SEQ ID NO: 68358 - DNA, 25 bp, Artificial
  probe
  misc_feature (1)..(25): SEQ ID NO: 1236; WAN024AWF_at; Start 153; Stop 177
ccaaactgacctcaacagtctcttt

SEQ ID NO: 68359 - DNA, 25 bp, Artificial
  probe
  misc_feature (1)..(25): SEQ ID NO: 1236; WAN024AWF_at; Start 90; Stop 114
tatgattgaaaacgacaagtacaat

SEQ ID NO: 68360 - DNA, 25 bp, Artificial
  probe
  misc_feature (1)..(25): SEQ ID NO: 1236; WAN024AWF_at; Start 85; Stop 109
atcaatatgattgaaaacgacaagt

SEQ ID NO: 68361 - DNA, 25 bp, Artificial
  probe
  misc_feature (1)..(25): SEQ ID NO: 1236; WAN024AWF_at; Start 152; Stop 176
tccaaactgacctcaacagtctctt

SEQ ID NO: 68362 - DNA, 25 bp, Artificial
  probe
  misc_feature (1)..(25): SEQ ID NO: 1236; WAN024AWF_at; Start 52; Stop 76
ctcgccaaggatatcggtgtctcga

SEQ ID NO: 68363 - DNA, 25 bp, Artificial
  probe
  misc_feature (1)..(25): SEQ ID NO: 1236; WAN024AWF_at; Start 91; Stop 115
atgattgaaaacgacaagtacaatc

SEQ ID NO: 68364 - DNA, 25 bp, Artificial
  probe
  misc_feature (1)..(25): SEQ ID NO: 1236; WAN024AWF_at; Start 56; Stop 80
ccaaggatatcggtgtctcgagaca

SEQ ID NO: 68365 - DNA, 25 bp, Artificial
  probe
  misc_feature (1)..(25): SEQ ID NO: 1236; WAN024AWF_at; Start 155; Stop 179
aaactgacctcaacagtctcttttg

SEQ ID NO: 68366 - DNA, 25 bp, Artificial
  probe
  misc_feature (1)..(25): SEQ ID NO: 1236; WAN024AWF_at; Start 148; Stop 172
agcctccaaactgacctcaacagtc

SEQ ID NO: 68367 - DNA, 25 bp, Artificial
  probe
  misc_feature (1)..(25): SEQ ID NO: 1236; WAN024AWF_at; Start 1; Stop 25
atgaatcgtgtgaaagaatttcgca

SEQ ID NO: 68368 - DNA, 25 bp, Artificial
  probe
  misc_feature (1)..(25): SEQ ID NO: 1236; WAN024AWF_at; Start 156; Stop 180
aactgacctcaacagtctcttttgg

SEQ ID NO: 68369 - DNA, 25 bp, Artificial
  probe
  misc_feature (1)..(25): SEQ ID NO: 1236; WAN024AWF_at; Start 147; Stop 171
cagcctccaaactgacctcaacagt

SEQ ID NO: 68370 - DNA, 25 bp, Artificial
  probe
  misc_feature (1)..(25): SEQ ID NO: 1236; WAN024AWF_at; Start 145; Stop 169
cgcagcctccaaactgacctcaaca

SEQ ID NO: 68371 - DNA, 25 bp, Artificial
  probe
  misc_feature (1)..(25): SEQ ID NO: 1236; WAN024AWF_at; Start 88; Stop 112
aatatgattgaaaacgacaagtaca

SEQ ID NO: 68372 - DNA, 25 bp, Artificial
  probe
  misc_feature (1)..(25): SEQ ID NO: 1236; WAN024AWF_at; Start 89; Stop 113
atatgattgaaaacgacaagtacaa

SEQ ID NO: 68373 - DNA, 25 bp, Artificial
  probe
  misc_feature (1)..(25): SEQ ID NO: 1236; WAN024AWF_at; Start 86; Stop 110
tcaatatgattgaaaacgacaagta

SEQ ID NO: 68374 - DNA, 25 bp, Artificial
  probe
  misc_feature (1)..(25): SEQ ID NO: 1236; WAN024AWF_at; Start 57; Stop 81
caaggatatcggtgtctcgagacag

SEQ ID NO: 68375 - DNA, 25 bp, Artificial
  probe
  misc_feature (1)..(25): SEQ ID NO: 1236; WAN024AWF_at; Start 154; Stop 178
caaactgacctcaacagtctctttt

SEQ ID NO: 68376 - DNA, 25 bp, Artificial
  probe
  misc_feature (1)..(25): SEQ ID NO: 6663; WAN024AWG_at; Start 461; Stop 485
tagatggttctctttctgacctcat

SEQ ID NO: 68377 - DNA, 25 bp, Artificial
  probe
  misc_feature (1)..(25): SEQ ID NO: 6663; WAN024AWG_at; Start 315; Stop 339
ccgtgaaggagctcgattggctgaa

SEQ ID NO: 68378 - DNA, 25 bp, Artificial
  probe
  misc_feature (1)..(25): SEQ ID NO: 6663; WAN024AWG_at; Start 678; Stop 702
tgccatcatcggacgtcccaacgtt

SEQ ID NO: 68379 - DNA, 25 bp, Artificial
  probe
  misc_feature (1)..(25): SEQ ID NO: 6663; WAN024AWG_at; Start 600; Stop 624
tatggaatttgaacaattgctaacc

SEQ ID NO: 68380 - DNA, 25 bp, Artificial
  probe
  misc_feature (1)..(25): SEQ ID NO: 6663; WAN024AWG_at; Start 627; Stop 651
tctccttaggacagcccgtcgcggt

SEQ ID NO: 68381 - DNA, 25 bp, Artificial
  probe
  misc_feature (1)..(25): SEQ ID NO: 6663; WAN024AWG_at; Start 711; Stop 735
tagcctcctcaacaatctcttgcgt

SEQ ID NO: 68382 - DNA, 25 bp, Artificial
  probe
  misc_feature (1)..(25): SEQ ID NO: 6663; WAN024AWG_at; Start 387; Stop 411
gactcaggctgaggcagtaatggat

SEQ ID NO: 68383 - DNA, 25 bp, Artificial
  probe
  misc_feature (1)..(25): SEQ ID NO: 6663; WAN024AWG_at; Start 759; Stop 783
tattgctggtaccacacgtgatgtc

SEQ ID NO: 68384 - DNA, 25 bp, Artificial
  probe
  misc_feature (1)..(25): SEQ ID NO: 6663; WAN024AWG_at; Start 664; Stop 688
gaaggaatttccactgccatcatcg

SEQ ID NO: 68385 - DNA, 25 bp, Artificial
  probe
  misc_feature (1)..(25): SEQ ID NO: 6663; WAN024AWG_at; Start 374; Stop 398
gacgtgttgacttgactcaggctga

SEQ ID NO: 68386 - DNA, 25 bp, Artificial
  probe
  misc_feature (1)..(25): SEQ ID NO: 6663; WAN024AWG_at; Start 515; Stop 539
cacttgcccaagtcgaagttaatat

SEQ ID NO: 68387 - DNA, 25 bp, Artificial
  probe
  misc_feature (1)..(25): SEQ ID NO: 6663; WAN024AWG_at; Start 394; Stop 418
gctgaggcagtaatggatatcatcc

SEQ ID NO: 68388 - DNA, 25 bp, Artificial
  probe
  misc_feature (1)..(25): SEQ ID NO: 6663; WAN024AWG_at; Start 768; Stop 792
taccacacgtgatgtcatcgaagag

SEQ ID NO: 68389 - DNA, 25 bp, Artificial
  probe
  misc_feature (1)..(25): SEQ ID NO: 6663; WAN024AWG_at; Start 588; Stop 612
ccgcgagaaaactatggaatttgaa

SEQ ID NO: 68390 - DNA, 25 bp, Artificial
  probe
  misc_feature (1)..(25): SEQ ID NO: 6663; WAN024AWG_at; Start 853; Stop 877
gatgacatagtggaacaaatcggtg

SEQ ID NO: 68391 - DNA, 25 bp, Artificial
  probe
  misc_feature (1)..(25): SEQ ID NO: 6663; WAN024AWG_at; Start 703; Stop 727
gggaaatctagcctcctcaacaatc

SEQ ID NO: 68392 - DNA, 25 bp, Artificial
  probe
  misc_feature (1)..(25): SEQ ID NO: 6663; WAN024AWG_at; Start 306; Stop 330
gctagctatccgtgaaggagctcga

SEQ ID NO: 68393 - DNA, 25 bp, Artificial
  probe
  misc_feature (1)..(25): SEQ ID NO: 6663; WAN024AWG_at; Start 837; Stop 861
cggtattcgtgaaacagatgacata

SEQ ID NO: 68394 - DNA, 25 bp, Artificial
  probe
  misc_feature (1)..(25): SEQ ID NO: 6663; WAN024AWG_at; Start 168; Stop 192
catcgttgaccctctgactggtaaa

SEQ ID NO: 68395 - DNA, 25 bp, Artificial
  probe
  misc_feature (1)..(25): SEQ ID NO: 6663; WAN024AWG_at; Start 408; Stop 432
ggatatcatccgtgctaagacagat

SEQ ID NO: 68396 - DNA, 25 bp, Artificial
  probe
  misc_feature (1)..(25): SEQ ID NO: 6663; WAN024AWG_at; Start 576; Stop 600
tactgctgttgtccgcgagaaaact

SEQ ID NO: 68397 - DNA, 25 bp, Artificial
  probe
  misc_feature (1)..(25): SEQ ID NO: 6663; WAN024AWG_at; Start 141; Stop 165
tgctagccatacacttaactacggt

SEQ ID NO: 68398 - DNA, 25 bp, Artificial
  probe
  misc_feature (1)..(25): SEQ ID NO: 6663; WAN024AWG_at; Start 447; Stop 471
tgcggtcaaacaactagatggttct

SEQ ID NO: 68399 - DNA, 25 bp, Artificial
  probe
  misc_feature (1)..(25): SEQ ID NO: 6663; WAN024AWG_at; Start 345; Stop 369
tgaatttactaaacgtgccttccta

SEQ ID NO: 68400 - DNA, 25 bp, Artificial
  probe
  misc_feature (1)..(25): SEQ ID NO: 6663; WAN024AWG_at; Start 747; Stop 771
tatcgttacagatattgctggtacc

SEQ ID NO: 68401 - DNA, 25 bp, Artificial
  probe
  misc_feature (1)..(25): SEQ ID NO: 6663; WAN024AWG_at; Start 130; Stop 154
ttgagtcaggttgctagccatacac

SEQ ID NO: 68402 - DNA, 25 bp, Artificial
  probe
  misc_feature (1)..(25): SEQ ID NO: 6663; WAN024AWG_at; Start 324; Stop 348
agctcgattggctgaacctggtgaa

SEQ ID NO: 68403 - DNA, 25 bp, Artificial
  probe
  misc_feature (1)..(25): SEQ ID NO: 6663; WAN024AWG_at; Start 612; Stop 636
acaattgctaaccaatctccttagg

SEQ ID NO: 68404 - DNA, 25 bp, Artificial
  probe
  misc_feature (1)..(25): SEQ ID NO: 6663; WAN024AWG_at; Start 366; Stop 390
cctaaatggacgtgttgacttgact

SEQ ID NO: 68405 - DNA, 25 bp, Artificial
  probe
  misc_feature (1)..(25): SEQ ID NO: 6663; WAN024AWG_at; Start 124; Stop 148
aaagacttgagtcaggttgctagcc

SEQ ID NO: 68406 - DNA, 25 bp, Artificial
  probe
  misc_feature (1)..(25): SEQ ID NO: 6663; WAN024AWG_at; Start 416; Stop 440
tccgtgctaagacagataaagccat

SEQ ID NO: 68407 - DNA, 25 bp, Artificial
  probe
  misc_feature (1)..(25): SEQ ID NO: 6663; WAN024AWG_at; Start 156; Stop 180
taactacggtcacatcgttgaccct

SEQ ID NO: 68408 - DNA, 25 bp, Artificial
  probe
  misc_feature (1)..(25): SEQ ID NO: 6663; WAN024AWG_at; Start 353; Stop 377
ctaaacgtgccttcctaaatggacg

SEQ ID NO: 68409 - DNA, 25 bp, Artificial
  probe
  misc_feature (1)..(25): SEQ ID NO: 6663; WAN024AWG_at; Start 426; Stop 450
gacagataaagccatgaacattgcg

SEQ ID NO: 68410 - DNA, 25 bp, Artificial
  probe
  misc_feature (1)..(25): SEQ ID NO: 191; WAN024AWH_at; Start 467; Stop 491
tagacggctccctttctgacctcat

SEQ ID NO: 68411 - DNA, 25 bp, Artificial
  probe
  misc_feature (1)..(25): SEQ ID NO: 191; WAN024AWH_at; Start 585; Stop 609
tgctgttgtccgagagaagacaatg

SEQ ID NO: 68412 - DNA, 25 bp, Artificial
  probe
  misc_feature (1)..(25): SEQ ID NO: 191; WAN024AWH_at; Start 613; Stop 637
tttgagcaattactaaccaaactcc

SEQ ID NO: 68413 - DNA, 25 bp, Artificial
  probe
  misc_feature (1)..(25): SEQ ID NO: 191; WAN024AWH_at; Start 468; Stop 492
agacggctccctttctgacctcatt

SEQ ID NO: 68414 - DNA, 25 bp, Artificial
  probe
  misc_feature (1)..(25): SEQ ID NO: 191; WAN024AWH_at; Start 588; Stop 612
tgttgtccgagagaagacaatggag

SEQ ID NO: 68415 - DNA, 25 bp, Artificial
  probe
  misc_feature (1)..(25): SEQ ID NO: 191; WAN024AWH_at; Start 390; Stop 414
cttgacacaggcagaggctgtgatg

SEQ ID NO: 68416 - DNA, 25 bp, Artificial
  probe
  misc_feature (1)..(25): SEQ ID NO: 191; WAN024AWH_at; Start 466; Stop 490
ttagacggctccctttctgacctca

SEQ ID NO: 68417 - DNA, 25 bp, Artificial
  probe
  misc_feature (1)..(25): SEQ ID NO: 191; WAN024AWH_at; Start 386; Stop 410
tagacttgacacaggcagaggctgt

SEQ ID NO: 68418 - DNA, 25 bp, Artificial
  probe
  misc_feature (1)..(25): SEQ ID NO: 191; WAN024AWH_at; Start 454; Stop 478
gcggtcaaacaattagacggctccc

SEQ ID NO: 68419 - DNA, 25 bp, Artificial
  probe
  misc_feature (1)..(25): SEQ ID NO: 191; WAN024AWH_at; Start 452; Stop 476
ttgcggtcaaacaattagacggctc

SEQ ID NO: 68420 - DNA, 25 bp, Artificial
  probe
  misc_feature (1)..(25): SEQ ID NO: 191; WAN024AWH_at; Start 459; Stop 483
caaacaattagacggctccctttct

SEQ ID NO: 68421 - DNA, 25 bp, Artificial
  probe
  misc_feature (1)..(25): SEQ ID NO: 191; WAN024AWH_at; Start 632; Stop 656
aactccttaggacagcacgtcgtgg

SEQ ID NO: 68422 - DNA, 25 bp, Artificial
  probe
  misc_feature (1)..(25): SEQ ID NO: 191; WAN024AWH_at; Start 384; Stop 408
cgtagacttgacacaggcagaggct

SEQ ID NO: 68423 - DNA, 25 bp, Artificial
  probe
  misc_feature (1)..(25): SEQ ID NO: 191; WAN024AWH_at; Start 630; Stop 654
caaactccttaggacagcacgtcgt

SEQ ID NO: 68424 - DNA, 25 bp, Artificial
  probe
  misc_feature (1)..(25): SEQ ID NO: 191; WAN024AWH_at; Start 387; Stop 411
agacttgacacaggcagaggctgtg

SEQ ID NO: 68425 - DNA, 25 bp, Artificial
  probe
  misc_feature (1)..(25): SEQ ID NO: 191; WAN024AWH_at; Start 615; Stop 639
tgagcaattactaaccaaactcctt

SEQ ID NO: 68426 - DNA, 25 bp, Artificial
  probe
  misc_feature (1)..(25): SEQ ID NO: 191; WAN024AWH_at; Start 458; Stop 482
tcaaacaattagacggctccctttc

SEQ ID NO: 68427 - DNA, 25 bp, Artificial
  probe
  misc_feature (1)..(25): SEQ ID NO: 191; WAN024AWH_at; Start 633; Stop 657
actccttaggacagcacgtcgtggt

SEQ ID NO: 68428 - DNA, 25 bp, Artificial
  probe
  misc_feature (1)..(25): SEQ ID NO: 191; WAN024AWH_at; Start 464; Stop 488
aattagacggctccctttctgacct

SEQ ID NO: 68429 - DNA, 25 bp, Artificial
  probe
  misc_feature (1)..(25): SEQ ID NO: 191; WAN024AWH_at; Start 463; Stop 487
caattagacggctccctttctgacc

SEQ ID NO: 68430 - DNA, 25 bp, Artificial
  probe
  misc_feature (1)..(25): SEQ ID NO: 191; WAN024AWH_at; Start 587; Stop 611
ctgttgtccgagagaagacaatgga

SEQ ID NO: 68431 - DNA, 25 bp, Artificial
  probe
  misc_feature (1)..(25): SEQ ID NO: 191; WAN024AWH_at; Start 462; Stop 486
acaattagacggctccctttctgac

SEQ ID NO: 68432 - DNA, 25 bp, Artificial
  probe
  misc_feature (1)..(25): SEQ ID NO: 191; WAN024AWH_at; Start 616; Stop 640
gagcaattactaaccaaactcctta

SEQ ID NO: 68433 - DNA, 25 bp, Artificial
  probe
  misc_feature (1)..(25): SEQ ID NO: 191; WAN024AWH_at; Start 586; Stop 610
gctgttgtccgagagaagacaatgg

SEQ ID NO: 68434 - DNA, 25 bp, Artificial
  probe
  misc_feature (1)..(25): SEQ ID NO: 191; WAN024AWH_at; Start 617; Stop 641
agcaattactaaccaaactccttag

SEQ ID NO: 68435 - DNA, 25 bp, Artificial
  probe
  misc_feature (1)..(25): SEQ ID NO: 191; WAN024AWH_at; Start 451; Stop 475
attgcggtcaaacaattagacggct

SEQ ID NO: 68436 - DNA, 25 bp, Artificial
  probe
  misc_feature (1)..(25): SEQ ID NO: 191; WAN024AWH_at; Start 582; Stop 606
tactgctgttgtccgagagaagaca

SEQ ID NO: 68437 - DNA, 25 bp, Artificial
  probe
  misc_feature (1)..(25): SEQ ID NO: 191; WAN024AWH_at; Start 614; Stop 638
ttgagcaattactaaccaaactcct

SEQ ID NO: 68438 - DNA, 25 bp, Artificial
  probe
  misc_feature (1)..(25): SEQ ID NO: 191; WAN024AWH_at; Start 389; Stop 413
acttgacacaggcagaggctgtgat

SEQ ID NO: 68439 - DNA, 25 bp, Artificial
  probe
  misc_feature (1)..(25): SEQ ID NO: 191; WAN024AWH_at; Start 584; Stop 608
ctgctgttgtccgagagaagacaat

SEQ ID NO: 68440 - DNA, 25 bp, Artificial
  probe
  misc_feature (1)..(25): SEQ ID NO: 191; WAN024AWH_at; Start 453; Stop 477
tgcggtcaaacaattagacggctcc

SEQ ID NO: 68441 - DNA, 25 bp, Artificial
  probe
  misc_feature (1)..(25): SEQ ID NO: 191; WAN024AWH_at; Start 455; Stop 479
cggtcaaacaattagacggctccct

SEQ ID NO: 68442 - DNA, 25 bp, Artificial
  probe
  misc_feature (1)..(25): SEQ ID NO: 191; WAN024AWH_at; Start 631; Stop 655
aaactccttaggacagcacgtcgtg

SEQ ID NO: 68443 - DNA, 25 bp, Artificial
  probe
  misc_feature (1)..(25): SEQ ID NO: 191; WAN024AWH_at; Start 460; Stop 484
aaacaattagacggctccctttctg

SEQ ID NO: 68444 - DNA, 25 bp, Artificial
  probe
  misc_feature (1)..(25): SEQ ID NO: 1793; WAN024AWI_s_at; Start 1057; Stop 1081
gacgttatccgtatttcagtcctta

SEQ ID NO: 68445 - DNA, 25 bp, Artificial
  probe
  misc_feature (1)..(25): SEQ ID NO: 1793; WAN024AWI_s_at; Start 1081; Stop 1105
aaaaaccaaaacatcgacaagattg

SEQ ID NO: 68446 - DNA, 25 bp, Artificial
  probe
  misc_feature (1)..(25): SEQ ID NO: 1793; WAN024AWI_s_at; Start 1010; Stop 1034
ataaaaccgacctgccagaaacgat

SEQ ID NO: 68447 - DNA, 25 bp, Artificial
  probe
  misc_feature (1)..(25): SEQ ID NO: 1793; WAN024AWI_s_at; Start 1042; Stop 1066
tcgaaactacctgaagacgttatcc

SEQ ID NO: 68448 - DNA, 25 bp, Artificial
  probe
  misc_feature (1)..(25): SEQ ID NO: 1793; WAN024AWI_s_at; Start 958; Stop 982
gacagacaacttcttgaaattagcc

SEQ ID NO: 68449 - DNA, 25 bp, Artificial
  probe
  misc_feature (1)..(25): SEQ ID NO: 1793; WAN024AWI_s_at; Start 1095; Stop 1119
cgacaagattgaagagcgaatcaac

SEQ ID NO: 68450 - DNA, 25 bp, Artificial
  probe
  misc_feature (1)..(25): SEQ ID NO: 1793; WAN024AWI_s_at; Start 1087; Stop 1111
caaaacatcgacaagattgaagagc

SEQ ID NO: 68451 - DNA, 25 bp, Artificial
  probe
  misc_feature (1)..(25): SEQ ID NO: 1793; WAN024AWI_s_at; Start 911; Stop 935
acttggttctactagtgctaaatgc

SEQ ID NO: 68452 - DNA, 25 bp, Artificial
  probe
  misc_feature (1)..(25): SEQ ID NO: 1793; WAN024AWI_s_at; Start 972; Stop 996
tgaaattagccaagataccaatcgc

SEQ ID NO: 68453 - DNA, 25 bp, Artificial
  probe
  misc_feature (1)..(25): SEQ ID NO: 1793; WAN024AWI_s_at; Start 915; Stop 939
ggttctactagtgctaaatgccagt

SEQ ID NO: 68454 - DNA, 25 bp, Artificial
  probe
  misc_feature (1)..(25): SEQ ID NO: 1793; WAN024AWI_s_at; Start 1230; Stop 1254
tcaaggtcttgagctggggatgcca

SEQ ID NO: 68455 - DNA, 25 bp, Artificial
  probe
  misc_feature (1)..(25): SEQ ID NO: 1793; WAN024AWI_s_at; Start 1299; Stop 1323
cggagaaatcactggggatgctgct

SEQ ID NO: 68456 - DNA, 25 bp, Artificial
  probe
  misc_feature (1)..(25): SEQ ID NO: 1793; WAN024AWI_s_at; Start 1281; Stop 1305
tcgtacttgggaaatcctcggagaa

SEQ ID NO: 68457 - DNA, 25 bp, Artificial
  probe
  misc_feature (1)..(25): SEQ ID NO: 1793; WAN024AWI_s_at; Start 1275; Stop 1299
cttgactcgtacttgggaaatcctc

SEQ ID NO: 68458 - DNA, 25 bp, Artificial
  probe
  misc_feature (1)..(25): SEQ ID NO: 1793; WAN024AWI_s_at; Start 1223; Stop 1247
ccgttaatcaaggtcttgagctggg

SEQ ID NO: 68459 - DNA, 25 bp, Artificial
  probe
  misc_feature (1)..(25): SEQ ID NO: 1793; WAN024AWI_s_at; Start 919; Stop 943
ctactagtgctaaatgccagtgaac

SEQ ID NO: 68460 - DNA, 25 bp, Artificial
  probe
  misc_feature (1)..(25): SEQ ID NO: 1793; WAN024AWI_s_at; Start 1180; Stop 1204
cgtcacatttccctgattgaaaaag

SEQ ID NO: 68461 - DNA, 25 bp, Artificial
  probe
  misc_feature (1)..(25): SEQ ID NO: 1793; WAN024AWI_s_at; Start 1197; Stop 1221
tgaaaaagcagttgaaagcctacaa

SEQ ID NO: 68462 - DNA, 25 bp, Artificial
  probe
  misc_feature (1)..(25): SEQ ID NO: 1793; WAN024AWI_s_at; Start 1101; Stop 1125
gattgaagagcgaatcaacaacctc

SEQ ID NO: 68463 - DNA, 25 bp, Artificial
  probe
  misc_feature (1)..(25): SEQ ID NO: 1793; WAN024AWI_s_at; Start 1049; Stop 1073
tacctgaagacgttatccgtatttc

SEQ ID NO: 68464 - DNA, 25 bp, Artificial
  probe
  misc_feature (1)..(25): SEQ ID NO: 1793; WAN024AWI_s_at; Start 951; Stop 975
tgcgcaagacagacaacttcttgaa

SEQ ID NO: 68465 - DNA, 25 bp, Artificial
  probe
  misc_feature (1)..(25): SEQ ID NO: 1793; WAN024AWI_s_at; Start 1183; Stop 1207
cacatttccctgattgaaaaagcag

SEQ ID NO: 68466 - DNA, 25 bp, Artificial
  probe
  misc_feature (1)..(25): SEQ ID NO: 1793; WAN024AWI_s_at; Start 1219; Stop 1243
caagccgttaatcaaggtcttgagc

SEQ ID NO: 68467 - DNA, 25 bp, Artificial
  probe
  misc_feature (1)..(25): SEQ ID NO: 1793; WAN024AWI_s_at; Start 1191; Stop 1215
cctgattgaaaaagcagttgaaagc

SEQ ID NO: 68468 - DNA, 25 bp, Artificial
  probe
  misc_feature (1)..(25): SEQ ID NO: 1793; WAN024AWI_s_at; Start 1242; Stop 1266
gctggggatgccagttgatttgctt

SEQ ID NO: 68469 - DNA, 25 bp, Artificial
  probe
  misc_feature (1)..(25): SEQ ID NO: 1793; WAN024AWI_s_at; Start 948; Stop 972
gactgcgcaagacagacaacttctt

SEQ ID NO: 68470 - DNA, 25 bp, Artificial
  probe
  misc_feature (1)..(25): SEQ ID NO: 1793; WAN024AWI_s_at; Start 1290; Stop 1314
ggaaatcctcggagaaatcactggg

SEQ ID NO: 68471 - DNA, 25 bp, Artificial
  probe
  misc_feature (1)..(25): SEQ ID NO: 1793; WAN024AWI_s_at; Start 980; Stop 1004
gccaagataccaatcgcattattct

SEQ ID NO: 68472 - DNA, 25 bp, Artificial
  probe
  misc_feature (1)..(25): SEQ ID NO: 1793; WAN024AWI_s_at; Start 1277; Stop 1301
tgactcgtacttgggaaatcctcgg

SEQ ID NO: 68473 - DNA, 25 bp, Artificial
  probe
  misc_feature (1)..(25): SEQ ID NO: 1793; WAN024AWI_s_at; Start 1092; Stop 1116
catcgacaagattgaagagcgaatc

SEQ ID NO: 68474 - DNA, 25 bp, Artificial
  probe
  misc_feature (1)..(25): SEQ ID NO: 1793; WAN024AWI_s_at; Start 1004; Stop 1028
tacttaataaaaccgacctgccaga

SEQ ID NO: 68475 - DNA, 25 bp, Artificial
  probe
  misc_feature (1)..(25): SEQ ID NO: 1793; WAN024AWI_s_at; Start 1187; Stop 1211
tttccctgattgaaaaagcagttga

SEQ ID NO: 68476 - DNA, 25 bp, Artificial
  probe
  misc_feature (1)..(25): SEQ ID NO: 1793; WAN024AWI_s_at; Start 985; Stop 1009
gataccaatcgcattattctactta

SEQ ID NO: 68477 - DNA, 25 bp, Artificial
  probe
  misc_feature (1)..(25): SEQ ID NO: 1793; WAN024AWI_s_at; Start 945; Stop 969
actgactgcgcaagacagacaactt

SEQ ID NO: 68478 - DNA, 25 bp, Artificial
  probe
  misc_feature (1)..(25): SEQ ID NO: 7253; WAN024AWJ_at; Start 361; Stop 385
gaaaacatcctgctggatccgggaa

SEQ ID NO: 68479 - DNA, 25 bp, Artificial
  probe
  misc_feature (1)..(25): SEQ ID NO: 7253; WAN024AWJ_at; Start 378; Stop 402
tccgggaatcggctttggtctgact

SEQ ID NO: 68480 - DNA, 25 bp, Artificial
  probe
  misc_feature (1)..(25): SEQ ID NO: 7253; WAN024AWJ_at; Start 358; Stop 382
caagaaaacatcctgctggatccgg

SEQ ID NO: 68481 - DNA, 25 bp, Artificial
  probe
  misc_feature (1)..(25): SEQ ID NO: 7253; WAN024AWJ_at; Start 271; Stop 295
gctgactttgaaacaaggtcaatcg

SEQ ID NO: 68482 - DNA, 25 bp, Artificial
  probe
  misc_feature (1)..(25): SEQ ID NO: 7253; WAN024AWJ_at; Start 359; Stop 383
aagaaaacatcctgctggatccggg

SEQ ID NO: 68483 - DNA, 25 bp, Artificial
  probe
  misc_feature (1)..(25): SEQ ID NO: 7253; WAN024AWJ_at; Start 355; Stop 379
gctcaagaaaacatcctgctggatc

SEQ ID NO: 68484 - DNA, 25 bp, Artificial
  probe
  misc_feature (1)..(25): SEQ ID NO: 7253; WAN024AWJ_at; Start 363; Stop 387
aaacatcctgctggatccgggaatc

SEQ ID NO: 68485 - DNA, 25 bp, Artificial
  probe
  misc_feature (1)..(25): SEQ ID NO: 7253; WAN024AWJ_at; Start 149; Stop 173
ttgctaaggctggagcgaaagtggt

SEQ ID NO: 68486 - DNA, 25 bp, Artificial
  probe
  misc_feature (1)..(25): SEQ ID NO: 7253; WAN024AWJ_at; Start 272; Stop 296
ctgactttgaaacaaggtcaatcga

SEQ ID NO: 68487 - DNA, 25 bp, Artificial
  probe
  misc_feature (1)..(25): SEQ ID NO: 7253; WAN024AWJ_at; Start 280; Stop 304
gaaacaaggtcaatcgaagacttga

SEQ ID NO: 68488 - DNA, 25 bp, Artificial
  probe
  misc_feature (1)..(25): SEQ ID NO: 7253; WAN024AWJ_at; Start 136; Stop 160
atggcccatgtggttgctaaggctg

SEQ ID NO: 68489 - DNA, 25 bp, Artificial
  probe
  misc_feature (1)..(25): SEQ ID NO: 7253; WAN024AWJ_at; Start 366; Stop 390
catcctgctggatccgggaatcggc

SEQ ID NO: 68490 - DNA, 25 bp, Artificial
  probe
  misc_feature (1)..(25): SEQ ID NO: 7253; WAN024AWJ_at; Start 243; Stop 267
tggacaagcttttacaggggaagag

SEQ ID NO: 68491 - DNA, 25 bp, Artificial
  probe
  misc_feature (1)..(25): SEQ ID NO: 7253; WAN024AWJ_at; Start 364; Stop 388
aacatcctgctggatccgggaatcg

SEQ ID NO: 68492 - DNA, 25 bp, Artificial
  probe
  misc_feature (1)..(25): SEQ ID NO: 7253; WAN024AWJ_at; Start 336; Stop 360
agcagaggaagctgggattgctcaa

SEQ ID NO: 68493 - DNA, 25 bp, Artificial
  probe
  misc_feature (1)..(25): SEQ ID NO: 7253; WAN024AWJ_at; Start 279; Stop 303
tgaaacaaggtcaatcgaagacttg

SEQ ID NO: 68494 - DNA, 25 bp, Artificial
  probe
  misc_feature (1)..(25): SEQ ID NO: 7253; WAN024AWJ_at; Start 343; Stop 367
gaagctgggattgctcaagaaaaca

SEQ ID NO: 68495 - DNA, 25 bp, Artificial
  probe
  misc_feature (1)..(25): SEQ ID NO: 7253; WAN024AWJ_at; Start 380; Stop 404
cgggaatcggctttggtctgactaa

SEQ ID NO: 68496 - DNA, 25 bp, Artificial
  probe
  misc_feature (1)..(25): SEQ ID NO: 7253; WAN024AWJ_at; Start 342; Stop 366
ggaagctgggattgctcaagaaaac

SEQ ID NO: 68497 - DNA, 25 bp, Artificial
  probe
  misc_feature (1)..(25): SEQ ID NO: 7253; WAN024AWJ_at; Start 362; Stop 386
aaaacatcctgctggatccgggaat

SEQ ID NO: 68498 - DNA, 25 bp, Artificial
  probe
  misc_feature (1)..(25): SEQ ID NO: 7253; WAN024AWJ_at; Start 340; Stop 364
gaggaagctgggattgctcaagaaa

SEQ ID NO: 68499 - DNA, 25 bp, Artificial
  probe
  misc_feature (1)..(25): SEQ ID NO: 7253; WAN024AWJ_at; Start 344; Stop 368
aagctgggattgctcaagaaaacat

SEQ ID NO: 68500 - DNA, 25 bp, Artificial
  probe
  misc_feature (1)..(25): SEQ ID NO: 7253; WAN024AWJ_at; Start 360; Stop 384
agaaaacatcctgctggatccggga

SEQ ID NO: 68501 - DNA, 25 bp, Artificial
  probe
  misc_feature (1)..(25): SEQ ID NO: 7253; WAN024AWJ_at; Start 339; Stop 363
agaggaagctgggattgctcaagaa

SEQ ID NO: 68502 - DNA, 25 bp, Artificial
  probe
  misc_feature (1)..(25): SEQ ID NO: 7253; WAN024AWJ_at; Start 275; Stop 299
actttgaaacaaggtcaatcgaaga

SEQ ID NO: 68503 - DNA, 25 bp, Artificial
  probe
  misc_feature (1)..(25): SEQ ID NO: 7253; WAN024AWJ_at; Start 381; Stop 405
gggaatcggctttggtctgactaag

SEQ ID NO: 68504 - DNA, 25 bp, Artificial
  probe
  misc_feature (1)..(25): SEQ ID NO: 7253; WAN024AWJ_at; Start 276; Stop 300
ctttgaaacaaggtcaatcgaagac

SEQ ID NO: 68505 - DNA, 25 bp, Artificial
  probe
  misc_feature (1)..(25): SEQ ID NO: 7253; WAN024AWJ_at; Start 379; Stop 403
ccgggaatcggctttggtctgacta

SEQ ID NO: 68506 - DNA, 25 bp, Artificial
  probe
  misc_feature (1)..(25): SEQ ID NO: 7253; WAN024AWJ_at; Start 140; Stop 164
cccatgtggttgctaaggctggagc

SEQ ID NO: 68507 - DNA, 25 bp, Artificial
  probe
  misc_feature (1)..(25): SEQ ID NO: 7253; WAN024AWJ_at; Start 357; Stop 381
tcaagaaaacatcctgctggatccg

SEQ ID NO: 68508 - DNA, 25 bp, Artificial
  probe
  misc_feature (1)..(25): SEQ ID NO: 7253; WAN024AWJ_at; Start 135; Stop 159
aatggcccatgtggttgctaaggct

SEQ ID NO: 68509 - DNA, 25 bp, Artificial
  probe
  misc_feature (1)..(25): SEQ ID NO: 7253; WAN024AWJ_at; Start 373; Stop 397
ctggatccgggaatcggctttggtc

SEQ ID NO: 68510 - DNA, 25 bp, Artificial
  probe
  misc_feature (1)..(25): SEQ ID NO: 7253; WAN024AWJ_at; Start 365; Stop 389
acatcctgctggatccgggaatcgg

SEQ ID NO: 68511 - DNA, 25 bp, Artificial
  probe
  misc_feature (1)..(25): SEQ ID NO: 7253; WAN024AWJ_at; Start 142; Stop 166
catgtggttgctaaggctggagcga

SEQ ID NO: 68512 - DNA, 25 bp, Artificial
  probe
  misc_feature (1)..(25): SEQ ID NO: 2995; WAN024AWK_at; Start 449; Stop 473
tcatattccctcattttggatttaa

SEQ ID NO: 68513 - DNA, 25 bp, Artificial
  probe
  misc_feature (1)..(25): SEQ ID NO: 2995; WAN024AWK_at; Start 141; Stop 165
tagcatgctagatatcggtggagaa

SEQ ID NO: 68514 - DNA, 25 bp, Artificial
  probe
  misc_feature (1)..(25): SEQ ID NO: 2995; WAN024AWK_at; Start 175; Stop 199
ccgggaagtagctattatgttgaga

SEQ ID NO: 68515 - DNA, 25 bp, Artificial
  probe
  misc_feature (1)..(25): SEQ ID NO: 2995; WAN024AWK_at; Start 169; Stop 193
actcggccgggaagtagctattatg

SEQ ID NO: 68516 - DNA, 25 bp, Artificial
  probe
  misc_feature (1)..(25): SEQ ID NO: 2995; WAN024AWK_at; Start 370; Stop 394
catgtgatagctaaagatggagcga

SEQ ID NO: 68517 - DNA, 25 bp, Artificial
  probe
  misc_feature (1)..(25): SEQ ID NO: 2995; WAN024AWK_at; Start 372; Stop 396
tgtgatagctaaagatggagcgaaa

SEQ ID NO: 68518 - DNA, 25 bp, Artificial
  probe
  misc_feature (1)..(25): SEQ ID NO: 2995; WAN024AWK_at; Start 366; Stop 390
ggcccatgtgatagctaaagatgga

SEQ ID NO: 68519 - DNA, 25 bp, Artificial
  probe
  misc_feature (1)..(25): SEQ ID NO: 2995; WAN024AWK_at; Start 365; Stop 389
tggcccatgtgatagctaaagatgg

SEQ ID NO: 68520 - DNA, 25 bp, Artificial
  probe
  misc_feature (1)..(25): SEQ ID NO: 2995; WAN024AWK_at; Start 138; Stop 162
ggctagcatgctagatatcggtgga

SEQ ID NO: 68521 - DNA, 25 bp, Artificial
  probe
  misc_feature (1)..(25): SEQ ID NO: 2995; WAN024AWK_at; Start 404; Stop 428
ttatgtttaatcctgttatggctcg

SEQ ID NO: 68522 - DNA, 25 bp, Artificial
  probe
  misc_feature (1)..(25): SEQ ID NO: 2995; WAN024AWK_at; Start 144; Stop 168
catgctagatatcggtggagaatca

SEQ ID NO: 68523 - DNA, 25 bp, Artificial
  probe
  misc_feature (1)..(25): SEQ ID NO: 2995; WAN024AWK_at; Start 139; Stop 163
gctagcatgctagatatcggtggag

SEQ ID NO: 68524 - DNA, 25 bp, Artificial
  probe
  misc_feature (1)..(25): SEQ ID NO: 2995; WAN024AWK_at; Start 368; Stop 392
cccatgtgatagctaaagatggagc

SEQ ID NO: 68525 - DNA, 25 bp, Artificial
  probe
  misc_feature (1)..(25): SEQ ID NO: 2995; WAN024AWK_at; Start 140; Stop 164
ctagcatgctagatatcggtggaga

SEQ ID NO: 68526 - DNA, 25 bp, Artificial
  probe
  misc_feature (1)..(25): SEQ ID NO: 2995; WAN024AWK_at; Start 171; Stop 195
tcggccgggaagtagctattatgtt

SEQ ID NO: 68527 - DNA, 25 bp, Artificial
  probe
  misc_feature (1)..(25): SEQ ID NO: 2995; WAN024AWK_at; Start 173; Stop 197
ggccgggaagtagctattatgttga

SEQ ID NO: 68528 - DNA, 25 bp, Artificial
  probe
  misc_feature (1)..(25): SEQ ID NO: 2995; WAN024AWK_at; Start 362; Stop 386
aaatggcccatgtgatagctaaaga

SEQ ID NO: 68529 - DNA, 25 bp, Artificial
  probe
  misc_feature (1)..(25): SEQ ID NO: 2995; WAN024AWK_at; Start 167; Stop 191
caactcggccgggaagtagctatta

SEQ ID NO: 68530 - DNA, 25 bp, Artificial
  probe
  misc_feature (1)..(25): SEQ ID NO: 2995; WAN024AWK_at; Start 168; Stop 192
aactcggccgggaagtagctattat

SEQ ID NO: 68531 - DNA, 25 bp, Artificial
  probe
  misc_feature (1)..(25): SEQ ID NO: 2995; WAN024AWK_at; Start 143; Stop 167
gcatgctagatatcggtggagaatc

SEQ ID NO: 68532 - DNA, 25 bp, Artificial
  probe
  misc_feature (1)..(25): SEQ ID NO: 2995; WAN024AWK_at; Start 176; Stop 200
cgggaagtagctattatgttgagat

SEQ ID NO: 68533 - DNA, 25 bp, Artificial
  probe
  misc_feature (1)..(25): SEQ ID NO: 2995; WAN024AWK_at; Start 150; Stop 174
agatatcggtggagaatcaactcgg

SEQ ID NO: 68534 - DNA, 25 bp, Artificial
  probe
  misc_feature (1)..(25): SEQ ID NO: 2995; WAN024AWK_at; Start 374; Stop 398
tgatagctaaagatggagcgaaagt

SEQ ID NO: 68535 - DNA, 25 bp, Artificial
  probe
  misc_feature (1)..(25): SEQ ID NO: 2995; WAN024AWK_at; Start 178; Stop 202
ggaagtagctattatgttgagatag

SEQ ID NO: 68536 - DNA, 25 bp, Artificial
  probe
  misc_feature (1)..(25): SEQ ID NO: 2995; WAN024AWK_at; Start 148; Stop 172
ctagatatcggtggagaatcaactc

SEQ ID NO: 68537 - DNA, 25 bp, Artificial
  probe
  misc_feature (1)..(25): SEQ ID NO: 2995; WAN024AWK_at; Start 149; Stop 173
tagatatcggtggagaatcaactcg

SEQ ID NO: 68538 - DNA, 25 bp, Artificial
  probe
  misc_feature (1)..(25): SEQ ID NO: 2995; WAN024AWK_at; Start 377; Stop 401
tagctaaagatggagcgaaagtggt

SEQ ID NO: 68539 - DNA, 25 bp, Artificial
  probe
  misc_feature (1)..(25): SEQ ID NO: 2995; WAN024AWK_at; Start 465; Stop 489
tggatttaatcaagcttttacagag

SEQ ID NO: 68540 - DNA, 25 bp, Artificial
  probe
  misc_feature (1)..(25): SEQ ID NO: 2995; WAN024AWK_at; Start 363; Stop 387
aatggcccatgtgatagctaaagat

SEQ ID NO: 68541 - DNA, 25 bp, Artificial
  probe
  misc_feature (1)..(25): SEQ ID NO: 2995; WAN024AWK_at; Start 170; Stop 194
ctcggccgggaagtagctattatgt

SEQ ID NO: 68542 - DNA, 25 bp, Artificial
  probe
  misc_feature (1)..(25): SEQ ID NO: 2995; WAN024AWK_at; Start 146; Stop 170
tgctagatatcggtggagaatcaac

SEQ ID NO: 68543 - DNA, 25 bp, Artificial
  probe
  misc_feature (1)..(25): SEQ ID NO: 2995; WAN024AWK_at; Start 455; Stop 479
tccctcattttggatttaatcaagc

SEQ ID NO: 68544 - DNA, 25 bp, Artificial
  probe
  misc_feature (1)..(25): SEQ ID NO: 2995; WAN024AWK_at; Start 361; Stop 385
aaaatggcccatgtgatagctaaag

SEQ ID NO: 68545 - DNA, 25 bp, Artificial
  probe
  misc_feature (1)..(25): SEQ ID NO: 2995; WAN024AWK_at; Start 369; Stop 393
ccatgtgatagctaaagatggagcg

SEQ ID NO: 68546 - DNA, 25 bp, Artificial
  probe
  misc_feature (1)..(25): SEQ ID NO: 2836; WAN024AWM_at; Start 447; Stop 471
ttcgcttatcttccctcattttggc

SEQ ID NO: 68547 - DNA, 25 bp, Artificial
  probe
  misc_feature (1)..(25): SEQ ID NO: 2836; WAN024AWM_at; Start 436; Stop 460
cagcatcctagttcgcttatcttcc

SEQ ID NO: 68548 - DNA, 25 bp, Artificial
  probe
  misc_feature (1)..(25): SEQ ID NO: 2836; WAN024AWM_at; Start 437; Stop 461
agcatcctagttcgcttatcttccc

SEQ ID NO: 68549 - DNA, 25 bp, Artificial
  probe
  misc_feature (1)..(25): SEQ ID NO: 2836; WAN024AWM_at; Start 453; Stop 477
tatcttccctcattttggctttggt

SEQ ID NO: 68550 - DNA, 25 bp, Artificial
  probe
  misc_feature (1)..(25): SEQ ID NO: 2836; WAN024AWM_at; Start 440; Stop 464
atcctagttcgcttatcttccctca

SEQ ID NO: 68551 - DNA, 25 bp, Artificial
  probe
  misc_feature (1)..(25): SEQ ID NO: 2836; WAN024AWM_at; Start 448; Stop 472
tcgcttatcttccctcattttggct

SEQ ID NO: 68552 - DNA, 25 bp, Artificial
  probe
  misc_feature (1)..(25): SEQ ID NO: 2836; WAN024AWM_at; Start 449; Stop 473
cgcttatcttccctcattttggctt

SEQ ID NO: 68553 - DNA, 25 bp, Artificial
  probe
  misc_feature (1)..(25): SEQ ID NO: 2836; WAN024AWM_at; Start 455; Stop 479
tcttccctcattttggctttggtca

SEQ ID NO: 68554 - DNA, 25 bp, Artificial
  probe
  misc_feature (1)..(25): SEQ ID NO: 2836; WAN024AWM_at; Start 460; Stop 484
cctcattttggctttggtcaaacct

SEQ ID NO: 68555 - DNA, 25 bp, Artificial
  probe
  misc_feature (1)..(25): SEQ ID NO: 2836; WAN024AWM_at; Start 461; Stop 485
ctcattttggctttggtcaaacctt

SEQ ID NO: 68556 - DNA, 25 bp, Artificial
  probe
  misc_feature (1)..(25): SEQ ID NO: 2836; WAN024AWM_at; Start 438; Stop 462
gcatcctagttcgcttatcttccct

SEQ ID NO: 68557 - DNA, 25 bp, Artificial
  probe
  misc_feature (1)..(25): SEQ ID NO: 2836; WAN024AWM_at; Start 468; Stop 492
tggctttggtcaaacctttacagaa

SEQ ID NO: 68558 - DNA, 25 bp, Artificial
  probe
  misc_feature (1)..(25): SEQ ID NO: 2836; WAN024AWM_at; Start 433; Stop 457
cctcagcatcctagttcgcttatct

SEQ ID NO: 68559 - DNA, 25 bp, Artificial
  probe
  misc_feature (1)..(25): SEQ ID NO: 2836; WAN024AWM_at; Start 434; Stop 458
ctcagcatcctagttcgcttatctt

SEQ ID NO: 68560 - DNA, 25 bp, Artificial
  probe
  misc_feature (1)..(25): SEQ ID NO: 2836; WAN024AWM_at; Start 454; Stop 478
atcttccctcattttggctttggtc

SEQ ID NO: 68561 - DNA, 25 bp, Artificial
  probe
  misc_feature (1)..(25): SEQ ID NO: 2836; WAN024AWM_at; Start 435; Stop 459
tcagcatcctagttcgcttatcttc

SEQ ID NO: 68562 - DNA, 25 bp, Artificial
  probe
  misc_feature (1)..(25): SEQ ID NO: 2836; WAN024AWM_at; Start 445; Stop 469
agttcgcttatcttccctcattttg

SEQ ID NO: 68563 - DNA, 25 bp, Artificial
  probe
  misc_feature (1)..(25): SEQ ID NO: 2836; WAN024AWM_at; Start 432; Stop 456
acctcagcatcctagttcgcttatc

SEQ ID NO: 68564 - DNA, 25 bp, Artificial
  probe
  misc_feature (1)..(25): SEQ ID NO: 2836; WAN024AWM_at; Start 457; Stop 481
ttccctcattttggctttggtcaaa

SEQ ID NO: 68565 - DNA, 25 bp, Artificial
  probe
  misc_feature (1)..(25): SEQ ID NO: 2836; WAN024AWM_at; Start 439; Stop 463
catcctagttcgcttatcttccctc

SEQ ID NO: 68566 - DNA, 25 bp, Artificial
  probe
  misc_feature (1)..(25): SEQ ID NO: 2836; WAN024AWM_at; Start 441; Stop 465
tcctagttcgcttatcttccctcat

SEQ ID NO: 68567 - DNA, 25 bp, Artificial
  probe
  misc_feature (1)..(25): SEQ ID NO: 2836; WAN024AWM_at; Start 452; Stop 476
ttatcttccctcattttggctttgg

SEQ ID NO: 68568 - DNA, 25 bp, Artificial
  probe
  misc_feature (1)..(25): SEQ ID NO: 2836; WAN024AWM_at; Start 450; Stop 474
gcttatcttccctcattttggcttt

SEQ ID NO: 68569 - DNA, 25 bp, Artificial
  probe
  misc_feature (1)..(25): SEQ ID NO: 2836; WAN024AWM_at; Start 451; Stop 475
cttatcttccctcattttggctttg

SEQ ID NO: 68570 - DNA, 25 bp, Artificial
  probe
  misc_feature (1)..(25): SEQ ID NO: 2836; WAN024AWM_at; Start 456; Stop 480
cttccctcattttggctttggtcaa

SEQ ID NO: 68571 - DNA, 25 bp, Artificial
  probe
  misc_feature (1)..(25): SEQ ID NO: 2836; WAN024AWM_at; Start 458; Stop 482
tccctcattttggctttggtcaaac

SEQ ID NO: 68572 - DNA, 25 bp, Artificial
  probe
  misc_feature (1)..(25): SEQ ID NO: 2836; WAN024AWM_at; Start 467; Stop 491
ttggctttggtcaaacctttacaga

SEQ ID NO: 68573 - DNA, 25 bp, Artificial
  probe
  misc_feature (1)..(25): SEQ ID NO: 2836; WAN024AWM_at; Start 446; Stop 470
gttcgcttatcttccctcattttgg

SEQ ID NO: 68574 - DNA, 25 bp, Artificial
  probe
  misc_feature (1)..(25): SEQ ID NO: 2617; WAN024AWN_s_at; Start 142; Stop 166
caggctcgtaaattgatagcagaag

SEQ ID NO: 68575 - DNA, 25 bp, Artificial
  probe
  misc_feature (1)..(25): SEQ ID NO: 2617; WAN024AWN_s_at; Start 139; Stop 163
cagcaggctcgtaaattgatagcag

SEQ ID NO: 68576 - DNA, 25 bp, Artificial
  probe
  misc_feature (1)..(25): SEQ ID NO: 2617; WAN024AWN_s_at; Start 143; Stop 167
aggctcgtaaattgatagcagaagg

SEQ ID NO: 68577 - DNA, 25 bp, Artificial
  probe
  misc_feature (1)..(25): SEQ ID NO: 2617; WAN024AWN_s_at; Start 140; Stop 164
agcaggctcgtaaattgatagcaga

SEQ ID NO: 68578 - DNA, 25 bp, Artificial
  probe
  misc_feature (1)..(25): SEQ ID NO: 2617; WAN024AWN_s_at; Start 141; Stop 165
gcaggctcgtaaattgatagcagaa

SEQ ID NO: 68579 - DNA, 25 bp, Artificial
  probe
  misc_feature (1)..(25): SEQ ID NO: 1732; WAN024AWO_s_at; Start 215; Stop 239
gctatgttgagatagaagaggaaat

SEQ ID NO: 68580 - DNA, 25 bp, Artificial
  probe
  misc_feature (1)..(25): SEQ ID NO: 1732; WAN024AWO_s_at; Start 216; Stop 240
ctatgttgagatagaagaggaaatc

SEQ ID NO: 68581 - DNA, 25 bp, Artificial
  probe
  misc_feature (1)..(25): SEQ ID NO: 1732; WAN024AWO_s_at; Start 214; Stop 238
agctatgttgagatagaagaggaaa

SEQ ID NO: 68582 - DNA, 25 bp, Artificial
  probe
  misc_feature (1)..(25): SEQ ID NO: 6961; WAN024AWP_at; Start 161; Stop 185
aaaataggaagttgcttcaagtgtt

SEQ ID NO: 68583 - DNA, 25 bp, Artificial
  probe
  misc_feature (1)..(25): SEQ ID NO: 6961; WAN024AWP_at; Start 163; Stop 187
aataggaagttgcttcaagtgttaa

SEQ ID NO: 68584 - DNA, 25 bp, Artificial
  probe
  misc_feature (1)..(25): SEQ ID NO: 6961; WAN024AWP_at; Start 160; Stop 184
gaaaataggaagttgcttcaagtgt

SEQ ID NO: 68585 - DNA, 25 bp, Artificial
  probe
  misc_feature (1)..(25): SEQ ID NO: 6961; WAN024AWP_at; Start 159; Stop 183
cgaaaataggaagttgcttcaagtg

SEQ ID NO: 68586 - DNA, 25 bp, Artificial
  probe
  misc_feature (1)..(25): SEQ ID NO: 6961; WAN024AWP_at; Start 165; Stop 189
taggaagttgcttcaagtgttaacg

SEQ ID NO: 68587 - DNA, 25 bp, Artificial
  probe
  misc_feature (1)..(25): SEQ ID NO: 6961; WAN024AWP_at; Start 166; Stop 190
aggaagttgcttcaagtgttaacgg

SEQ ID NO: 68588 - DNA, 25 bp, Artificial
  probe
  misc_feature (1)..(25): SEQ ID NO: 6961; WAN024AWP_at; Start 162; Stop 186
aaataggaagttgcttcaagtgtta

SEQ ID NO: 68589 - DNA, 25 bp, Artificial
  probe
  misc_feature (1)..(25): SEQ ID NO: 6961; WAN024AWP_at; Start 164; Stop 188
ataggaagttgcttcaagtgttaac

SEQ ID NO: 68590 - DNA, 25 bp, Artificial
  probe
  misc_feature (1)..(25): SEQ ID NO: 6961; WAN024AWP_at; Start 158; Stop 182
acgaaaataggaagttgcttcaagt

SEQ ID NO: 68591 - DNA, 25 bp, Artificial
  probe
  misc_feature (1)..(25): SEQ ID NO: 2824; WAN024AWQ_at; Start 244; Stop 268
atggaggacttacgtgcttaactaa

SEQ ID NO: 68592 - DNA, 25 bp, Artificial
  probe
  misc_feature (1)..(25): SEQ ID NO: 2824; WAN024AWQ_at; Start 243; Stop 267
gatggaggacttacgtgcttaacta

SEQ ID NO: 68593 - DNA, 25 bp, Artificial
  probe
  misc_feature (1)..(25): SEQ ID NO: 2824; WAN024AWQ_at; Start 238; Stop 262
gatttgatggaggacttacgtgctt

SEQ ID NO: 68594 - DNA, 25 bp, Artificial
  probe
  misc_feature (1)..(25): SEQ ID NO: 2824; WAN024AWQ_at; Start 241; Stop 265
ttgatggaggacttacgtgcttaac

SEQ ID NO: 68595 - DNA, 25 bp, Artificial
  probe
  misc_feature (1)..(25): SEQ ID NO: 2824; WAN024AWQ_at; Start 239; Stop 263
atttgatggaggacttacgtgctta

SEQ ID NO: 68596 - DNA, 25 bp, Artificial
  probe
  misc_feature (1)..(25): SEQ ID NO: 2824; WAN024AWQ_at; Start 240; Stop 264
tttgatggaggacttacgtgcttaa

SEQ ID NO: 68597 - DNA, 25 bp, Artificial
  probe
  misc_feature (1)..(25): SEQ ID NO: 2824; WAN024AWQ_at; Start 242; Stop 266
tgatggaggacttacgtgcttaact

SEQ ID NO: 68598 - DNA, 25 bp, Artificial
  probe
  misc_feature (1)..(25): SEQ ID NO: 2824; WAN024AWQ_at; Start 245; Stop 269
tggaggacttacgtgcttaactaat

SEQ ID NO: 68599 - DNA, 25 bp, Artificial
  probe
  misc_feature (1)..(25): SEQ ID NO: 6666; WAN024AWR_at; Start 277; Stop 301
aaagattacaaagatgcttatcaag

SEQ ID NO: 68600 - DNA, 25 bp, Artificial
  probe
  misc_feature (1)..(25): SEQ ID NO: 6666; WAN024AWR_at; Start 250; Stop 274
ggtagtgccctaatgaaagaggcct

SEQ ID NO: 68601 - DNA, 25 bp, Artificial
  probe
  misc_feature (1)..(25): SEQ ID NO: 6666; WAN024AWR_at; Start 241; Stop 265
caagggattggtagtgccctaatga

SEQ ID NO: 68602 - DNA, 25 bp, Artificial
  probe
  misc_feature (1)..(25): SEQ ID NO: 6666; WAN024AWR_at; Start 258; Stop 282
cctaatgaaagaggccttaaaagat

SEQ ID NO: 68603 - DNA, 25 bp, Artificial
  probe
  misc_feature (1)..(25): SEQ ID NO: 6666; WAN024AWR_at; Start 390; Stop 414
gatgacttgggcgaatcgagaaaaa

SEQ ID NO: 68604 - DNA, 25 bp, Artificial
  probe
  misc_feature (1)..(25): SEQ ID NO: 6666; WAN024AWR_at; Start 244; Stop 268
gggattggtagtgccctaatgaaag

SEQ ID NO: 68605 - DNA, 25 bp, Artificial
  probe
  misc_feature (1)..(25): SEQ ID NO: 6666; WAN024AWR_at; Start 270; Stop 294
ggccttaaaagattacaaagatgct

SEQ ID NO: 68606 - DNA, 25 bp, Artificial
  probe
  misc_feature (1)..(25): SEQ ID NO: 6666; WAN024AWR_at; Start 267; Stop 291
agaggccttaaaagattacaaagat

SEQ ID NO: 68607 - DNA, 25 bp, Artificial
  probe
  misc_feature (1)..(25): SEQ ID NO: 6666; WAN024AWR_at; Start 255; Stop 279
tgccctaatgaaagaggccttaaaa

SEQ ID NO: 68608 - DNA, 25 bp, Artificial
  probe
  misc_feature (1)..(25): SEQ ID NO: 6666; WAN024AWR_at; Start 271; Stop 295
gccttaaaagattacaaagatgctt

SEQ ID NO: 68609 - DNA, 25 bp, Artificial
  probe
  misc_feature (1)..(25): SEQ ID NO: 6666; WAN024AWR_at; Start 387; Stop 411
agggatgacttgggcgaatcgagaa

SEQ ID NO: 68610 - DNA, 25 bp, Artificial
  probe
  misc_feature (1)..(25): SEQ ID NO: 6666; WAN024AWR_at; Start 253; Stop 277
agtgccctaatgaaagaggccttaa

SEQ ID NO: 68611 - DNA, 25 bp, Artificial
  probe
  misc_feature (1)..(25): SEQ ID NO: 6666; WAN024AWR_at; Start 274; Stop 298
ttaaaagattacaaagatgcttatc

SEQ ID NO: 68612 - DNA, 25 bp, Artificial
  probe
  misc_feature (1)..(25): SEQ ID NO: 6666; WAN024AWR_at; Start 263; Stop 287
tgaaagaggccttaaaagattacaa

SEQ ID NO: 68613 - DNA, 25 bp, Artificial
  probe
  misc_feature (1)..(25): SEQ ID NO: 6666; WAN024AWR_at; Start 242; Stop 266
aagggattggtagtgccctaatgaa

SEQ ID NO: 68614 - DNA, 25 bp, Artificial
  probe
  misc_feature (1)..(25): SEQ ID NO: 6666; WAN024AWR_at; Start 239; Stop 263
gtcaagggattggtagtgccctaat

SEQ ID NO: 68615 - DNA, 25 bp, Artificial
  probe
  misc_feature (1)..(25): SEQ ID NO: 6666; WAN024AWR_at; Start 386; Stop 410
tagggatgacttgggcgaatcgaga

SEQ ID NO: 68616 - DNA, 25 bp, Artificial
  probe
  misc_feature (1)..(25): SEQ ID NO: 6666; WAN024AWR_at; Start 254; Stop 278
gtgccctaatgaaagaggccttaaa

SEQ ID NO: 68617 - DNA, 25 bp, Artificial
  probe
  misc_feature (1)..(25): SEQ ID NO: 6666; WAN024AWR_at; Start 240; Stop 264
tcaagggattggtagtgccctaatg

SEQ ID NO: 68618 - DNA, 25 bp, Artificial
  probe
  misc_feature (1)..(25): SEQ ID NO: 6666; WAN024AWR_at; Start 251; Stop 275
gtagtgccctaatgaaagaggcctt

SEQ ID NO: 68619 - DNA, 25 bp, Artificial
  probe
  misc_feature (1)..(25): SEQ ID NO: 6666; WAN024AWR_at; Start 273; Stop 297
cttaaaagattacaaagatgcttat

SEQ ID NO: 68620 - DNA, 25 bp, Artificial
  probe
  misc_feature (1)..(25): SEQ ID NO: 6666; WAN024AWR_at; Start 385; Stop 409
atagggatgacttgggcgaatcgag

SEQ ID NO: 68621 - DNA, 25 bp, Artificial
  probe
  misc_feature (1)..(25): SEQ ID NO: 6666; WAN024AWR_at; Start 269; Stop 293
aggccttaaaagattacaaagatgc

SEQ ID NO: 68622 - DNA, 25 bp, Artificial
  probe
  misc_feature (1)..(25): SEQ ID NO: 6666; WAN024AWR_at; Start 260; Stop 284
taatgaaagaggccttaaaagatta

SEQ ID NO: 68623 - DNA, 25 bp, Artificial
  probe
  misc_feature (1)..(25): SEQ ID NO: 6666; WAN024AWR_at; Start 249; Stop 273
tggtagtgccctaatgaaagaggcc

SEQ ID NO: 68624 - DNA, 25 bp, Artificial
  probe
  misc_feature (1)..(25): SEQ ID NO: 6666; WAN024AWR_at; Start 262; Stop 286
atgaaagaggccttaaaagattaca

SEQ ID NO: 68625 - DNA, 25 bp, Artificial
  probe
  misc_feature (1)..(25): SEQ ID NO: 6666; WAN024AWR_at; Start 268; Stop 292
gaggccttaaaagattacaaagatg

SEQ ID NO: 68626 - DNA, 25 bp, Artificial
  probe
  misc_feature (1)..(25): SEQ ID NO: 6666; WAN024AWR_at; Start 276; Stop 300
aaaagattacaaagatgcttatcaa

SEQ ID NO: 68627 - DNA, 25 bp, Artificial
  probe
  misc_feature (1)..(25): SEQ ID NO: 6666; WAN024AWR_at; Start 272; Stop 296
ccttaaaagattacaaagatgctta

SEQ ID NO: 68628 - DNA, 25 bp, Artificial
  probe
  misc_feature (1)..(25): SEQ ID NO: 6666; WAN024AWR_at; Start 252; Stop 276
tagtgccctaatgaaagaggcctta

SEQ ID NO: 68629 - DNA, 25 bp, Artificial
  probe
  misc_feature (1)..(25): SEQ ID NO: 6666; WAN024AWR_at; Start 259; Stop 283
ctaatgaaagaggccttaaaagatt

SEQ ID NO: 68630 - DNA, 25 bp, Artificial
  probe
  misc_feature (1)..(25): SEQ ID NO: 6666; WAN024AWR_at; Start 388; Stop 412
gggatgacttgggcgaatcgagaaa

SEQ ID NO: 68631 - DNA, 25 bp, Artificial
  probe
  misc_feature (1)..(25): SEQ ID NO: 6666; WAN024AWR_at; Start 275; Stop 299
taaaagattacaaagatgcttatca

SEQ ID NO: 68632 - DNA, 25 bp, Artificial
  probe
  misc_feature (1)..(25): SEQ ID NO: 6666; WAN024AWR_at; Start 243; Stop 267
agggattggtagtgccctaatgaaa

SEQ ID NO: 68633 - DNA, 25 bp, Artificial
  probe
  misc_feature (1)..(25): SEQ ID NO: 1798; WAN024AWS_at; Start 257; Stop 281
ccttgatgaaagaggctttagagga

SEQ ID NO: 68634 - DNA, 25 bp, Artificial
  probe
  misc_feature (1)..(25): SEQ ID NO: 1798; WAN024AWS_at; Start 332; Stop 356
ccttgggcttctatcgttctatggg

SEQ ID NO: 68635 - DNA, 25 bp, Artificial
  probe
  misc_feature (1)..(25): SEQ ID NO: 1798; WAN024AWS_at; Start 255; Stop 279
tgccttgatgaaagaggctttagag

SEQ ID NO: 68636 - DNA, 25 bp, Artificial
  probe
  misc_feature (1)..(25): SEQ ID NO: 1798; WAN024AWS_at; Start 191; Stop 215
tctcatcagtattggttcaggattt

SEQ ID NO: 68637 - DNA, 25 bp, Artificial
  probe
  misc_feature (1)..(25): SEQ ID NO: 1798; WAN024AWS_at; Start 316; Stop 340
gaagagacagaaagaaccttgggct

SEQ ID NO: 68638 - DNA, 25 bp, Artificial
  probe
  misc_feature (1)..(25): SEQ ID NO: 1798; WAN024AWS_at; Start 241; Stop 265
caaggaattggtagtgccttgatga

SEQ ID NO: 68639 - DNA, 25 bp, Artificial
  probe
  misc_feature (1)..(25): SEQ ID NO: 1798; WAN024AWS_at; Start 390; Stop 414
gatgacttggatgaatcgtaaaaaa

SEQ ID NO: 68640 - DNA, 25 bp, Artificial
  probe
  misc_feature (1)..(25): SEQ ID NO: 1798; WAN024AWS_at; Start 266; Stop 290
aagaggctttagaggattacaaaga

SEQ ID NO: 68641 - DNA, 25 bp, Artificial
  probe
  misc_feature (1)..(25): SEQ ID NO: 1798; WAN024AWS_at; Start 318; Stop 342
agagacagaaagaaccttgggcttc

SEQ ID NO: 68642 - DNA, 25 bp, Artificial
  probe
  misc_feature (1)..(25): SEQ ID NO: 1798; WAN024AWS_at; Start 270; Stop 294
ggctttagaggattacaaagatgcc

SEQ ID NO: 68643 - DNA, 25 bp, Artificial
  probe
  misc_feature (1)..(25): SEQ ID NO: 1798; WAN024AWS_at; Start 324; Stop 348
agaaagaaccttgggcttctatcgt

SEQ ID NO: 68644 - DNA, 25 bp, Artificial
  probe
  misc_feature (1)..(25): SEQ ID NO: 1798; WAN024AWS_at; Start 274; Stop 298
ttagaggattacaaagatgcctatc

SEQ ID NO: 68645 - DNA, 25 bp, Artificial
  probe
  misc_feature (1)..(25): SEQ ID NO: 1798; WAN024AWS_at; Start 321; Stop 345
gacagaaagaaccttgggcttctat

SEQ ID NO: 68646 - DNA, 25 bp, Artificial
  probe
  misc_feature (1)..(25): SEQ ID NO: 1798; WAN024AWS_at; Start 386; Stop 410
tagggatgacttggatgaatcgtaa

SEQ ID NO: 68647 - DNA, 25 bp, Artificial
  probe
  misc_feature (1)..(25): SEQ ID NO: 1798; WAN024AWS_at; Start 314; Stop 338
cagaagagacagaaagaaccttggg

SEQ ID NO: 68648 - DNA, 25 bp, Artificial
  probe
  misc_feature (1)..(25): SEQ ID NO: 1798; WAN024AWS_at; Start 272; Stop 296
ctttagaggattacaaagatgccta

SEQ ID NO: 68649 - DNA, 25 bp, Artificial
  probe
  misc_feature (1)..(25): SEQ ID NO: 1798; WAN024AWS_at; Start 330; Stop 354
aaccttgggcttctatcgttctatg

SEQ ID NO: 68650 - DNA, 25 bp, Artificial
  probe
  misc_feature (1)..(25): SEQ ID NO: 1798; WAN024AWS_at; Start 193; Stop 217
tcatcagtattggttcaggatttaa

SEQ ID NO: 68651 - DNA, 25 bp, Artificial
  probe
  misc_feature (1)..(25): SEQ ID NO: 1798; WAN024AWS_at; Start 188; Stop 212
gattctcatcagtattggttcagga

SEQ ID NO: 68652 - DNA, 25 bp, Artificial
  probe
  misc_feature (1)..(25): SEQ ID NO: 1798; WAN024AWS_at; Start 275; Stop 299
tagaggattacaaagatgcctatca

SEQ ID NO: 68653 - DNA, 25 bp, Artificial
  probe
  misc_feature (1)..(25): SEQ ID NO: 1798; WAN024AWS_at; Start 277; Stop 301
gaggattacaaagatgcctatcaag

SEQ ID NO: 68654 - DNA, 25 bp, Artificial
  probe
  misc_feature (1)..(25): SEQ ID NO: 1798; WAN024AWS_at; Start 264; Stop 288
gaaagaggctttagaggattacaaa

SEQ ID NO: 68655 - DNA, 25 bp, Artificial
  probe
  misc_feature (1)..(25): SEQ ID NO: 1798; WAN024AWS_at; Start 249; Stop 273
tggtagtgccttgatgaaagaggct

SEQ ID NO: 68656 - DNA, 25 bp, Artificial
  probe
  misc_feature (1)..(25): SEQ ID NO: 1798; WAN024AWS_at; Start 252; Stop 276
tagtgccttgatgaaagaggcttta

SEQ ID NO: 68657 - DNA, 25 bp, Artificial
  probe
  misc_feature (1)..(25): SEQ ID NO: 1798; WAN024AWS_at; Start 198; Stop 222
agtattggttcaggatttaatcgtt

SEQ ID NO: 68658 - DNA, 25 bp, Artificial
  probe
  misc_feature (1)..(25): SEQ ID NO: 1798; WAN024AWS_at; Start 261; Stop 285
gatgaaagaggctttagaggattac

SEQ ID NO: 68659 - DNA, 25 bp, Artificial
  probe
  misc_feature (1)..(25): SEQ ID NO: 1798; WAN024AWS_at; Start 196; Stop 220
tcagtattggttcaggatttaatcg

SEQ ID NO: 68660 - DNA, 25 bp, Artificial
  probe
  misc_feature (1)..(25): SEQ ID NO: 1798; WAN024AWS_at; Start 333; Stop 357
cttgggcttctatcgttctatgggc

SEQ ID NO: 68661 - DNA, 25 bp, Artificial
  probe
  misc_feature (1)..(25): SEQ ID NO: 1798; WAN024AWS_at; Start 319; Stop 343
gagacagaaagaaccttgggcttct

SEQ ID NO: 68662 - DNA, 25 bp, Artificial
  probe
  misc_feature (1)..(25): SEQ ID NO: 1798; WAN024AWS_at; Start 186; Stop 210
tggattctcatcagtattggttcag

SEQ ID NO: 68663 - DNA, 25 bp, Artificial
  probe
  misc_feature (1)..(25): SEQ ID NO: 1798; WAN024AWS_at; Start 393; Stop 417
gacttggatgaatcgtaaaaaataa

SEQ ID NO: 68664 - DNA, 25 bp, Artificial
  probe
  misc_feature (1)..(25): SEQ ID NO: 1798; WAN024AWS_at; Start 388; Stop 412
gggatgacttggatgaatcgtaaaa

SEQ ID NO: 68665 - DNA, 25 bp, Artificial
  probe
  misc_feature (1)..(25): SEQ ID NO: 1798; WAN024AWS_at; Start 244; Stop 268
ggaattggtagtgccttgatgaaag

SEQ ID NO: 68666 - DNA, 25 bp, Artificial
  probe
  misc_feature (1)..(25): SEQ ID NO: 1798; WAN024AWS_at; Start 323; Stop 347
cagaaagaaccttgggcttctatcg

SEQ ID NO: 68667 - DNA, 25 bp, Artificial
  probe
  misc_feature (1)..(25): SEQ ID NO: 1799; WAN024AWT_at; Start 241; Stop 265
caagggattggtagctccttgatga

SEQ ID NO: 68668 - DNA, 25 bp, Artificial
  probe
  misc_feature (1)..(25): SEQ ID NO: 1799; WAN024AWT_at; Start 243; Stop 267
agggattggtagctccttgatgaaa

SEQ ID NO: 68669 - DNA, 25 bp, Artificial
  probe
  misc_feature (1)..(25): SEQ ID NO: 1799; WAN024AWT_at; Start 242; Stop 266
aagggattggtagctccttgatgaa

SEQ ID NO: 68670 - DNA, 25 bp, Artificial
  probe
  misc_feature (1)..(25): SEQ ID NO: 1799; WAN024AWT_at; Start 282; Stop 306
ttttaaagaggcctatcaagtccag

SEQ ID NO: 68671 - DNA, 25 bp, Artificial
  probe
  misc_feature (1)..(25): SEQ ID NO: 1799; WAN024AWT_at; Start 281; Stop 305
attttaaagaggcctatcaagtcca

SEQ ID NO: 68672 - DNA, 25 bp, Artificial
  probe
  misc_feature (1)..(25): SEQ ID NO: 1799; WAN024AWT_at; Start 275; Stop 299
taggaaattttaaagaggcctatca

SEQ ID NO: 68673 - DNA, 25 bp, Artificial
  probe
  misc_feature (1)..(25): SEQ ID NO: 1989; WAN024AWU_at; Start 663; Stop 687
tggacgacagcacaagagcttgaga

SEQ ID NO: 68674 - DNA, 25 bp, Artificial
  probe
  misc_feature (1)..(25): SEQ ID NO: 1989; WAN024AWU_at; Start 545; Stop 569
cagtggtttataaggggcgtacaag

SEQ ID NO: 68675 - DNA, 25 bp, Artificial
  probe
  misc_feature (1)..(25): SEQ ID NO: 1989; WAN024AWU_at; Start 386; Stop 410
ggacacggataggaacagaagccca

SEQ ID NO: 68676 - DNA, 25 bp, Artificial
  probe
  misc_feature (1)..(25): SEQ ID NO: 1989; WAN024AWU_at; Start 184; Stop 208
tacctctttcaggagtcagtagcag

SEQ ID NO: 68677 - DNA, 25 bp, Artificial
  probe
  misc_feature (1)..(25): SEQ ID NO: 1989; WAN024AWU_at; Start 416; Stop 440
tcttggcttgctatgtctttgagga

SEQ ID NO: 68678 - DNA, 25 bp, Artificial
  probe
  misc_feature (1)..(25): SEQ ID NO: 1989; WAN024AWU_at; Start 408; Stop 432
ccagtatctcttggcttgctatgtc

SEQ ID NO: 68679 - DNA, 25 bp, Artificial
  probe
  misc_feature (1)..(25): SEQ ID NO: 1989; WAN024AWU_at; Start 315; Stop 339
cctcatgcgaattgatcagaataac

SEQ ID NO: 68680 - DNA, 25 bp, Artificial
  probe
  misc_feature (1)..(25): SEQ ID NO: 1989; WAN024AWU_at; Start 49; Stop 73
tatactccaggtgaattgccttctt

SEQ ID NO: 68681 - DNA, 25 bp, Artificial
  probe
  misc_feature (1)..(25): SEQ ID NO: 1989; WAN024AWU_at; Start 168; Stop 192
tcgggagatgtggacctacctcttt

SEQ ID NO: 68682 - DNA, 25 bp, Artificial
  probe
  misc_feature (1)..(25): SEQ ID NO: 1989; WAN024AWU_at; Start 176; Stop 200
tgtggacctacctctttcaggagtc

SEQ ID NO: 68683 - DNA, 25 bp, Artificial
  probe
  misc_feature (1)..(25): SEQ ID NO: 1989; WAN024AWU_at; Start 497; Stop 521
gagcagcggaacgtttgggatttat

SEQ ID NO: 68684 - DNA, 25 bp, Artificial
  probe
  misc_feature (1)..(25): SEQ ID NO: 1989; WAN024AWU_at; Start 397; Stop 421
ggaacagaagcccagtatctcttgg

SEQ ID NO: 68685 - DNA, 25 bp, Artificial
  probe
  misc_feature (1)..(25): SEQ ID NO: 1989; WAN024AWU_at; Start 632; Stop 656
tatggttgcgtcctgaaaactttga

SEQ ID NO: 68686 - DNA, 25 bp, Artificial
  probe
  misc_feature (1)..(25): SEQ ID NO: 1989; WAN024AWU_at; Start 463; Stop 487
tggaaatgcgatgctcttaacctgc

SEQ ID NO: 68687 - DNA, 25 bp, Artificial
  probe
  misc_feature (1)..(25): SEQ ID NO: 1989; WAN024AWU_at; Start 122; Stop 146
aaaagcatgcggaggatttattagc

SEQ ID NO: 68688 - DNA, 25 bp, Artificial
  probe
  misc_feature (1)..(25): SEQ ID NO: 1989; WAN024AWU_at; Start 116; Stop 140
cagtggaaaagcatgcggaggattt

SEQ ID NO: 68689 - DNA, 25 bp, Artificial
  probe
  misc_feature (1)..(25): SEQ ID NO: 1989; WAN024AWU_at; Start 430; Stop 454
gtctttgaggagcttaactatcgtc

SEQ ID NO: 68690 - DNA, 25 bp, Artificial
  probe
  misc_feature (1)..(25): SEQ ID NO: 1989; WAN024AWU_at; Start 43; Stop 67
gaagcttatactccaggtgaattgc

SEQ ID NO: 68691 - DNA, 25 bp, Artificial
  probe
  misc_feature (1)..(25): SEQ ID NO: 1989; WAN024AWU_at; Start 654; Stop 678
tgataaaaatggacgacagcacaag

SEQ ID NO: 68692 - DNA, 25 bp, Artificial
  probe
  misc_feature (1)..(25): SEQ ID NO: 1989; WAN024AWU_at; Start 619; Stop 643
gctcgattggaaatatggttgcgtc

SEQ ID NO: 68693 - DNA, 25 bp, Artificial
  probe
  misc_feature (1)..(25): SEQ ID NO: 1989; WAN024AWU_at; Start 111; Stop 135
tctttcagtggaaaagcatgcggag

SEQ ID NO: 68694 - DNA, 25 bp, Artificial
  probe
  misc_feature (1)..(25): SEQ ID NO: 1989; WAN024AWU_at; Start 192; Stop 216
tcaggagtcagtagcagacatggag

SEQ ID NO: 68695 - DNA, 25 bp, Artificial
  probe
  misc_feature (1)..(25): SEQ ID NO: 1989; WAN024AWU_at; Start 206; Stop 230
cagacatggaggaactggtcagcct

SEQ ID NO: 68696 - DNA, 25 bp, Artificial
  probe
  misc_feature (1)..(25): SEQ ID NO: 1989; WAN024AWU_at; Start 162; Stop 186
tacgcctcgggagatgtggacctac

SEQ ID NO: 68697 - DNA, 25 bp, Artificial
  probe
  misc_feature (1)..(25): SEQ ID NO: 1989; WAN024AWU_at; Start 608; Stop 632
ctcaagtcaaagctcgattggaaat

SEQ ID NO: 68698 - DNA, 25 bp, Artificial
  probe
  misc_feature (1)..(25): SEQ ID NO: 1989; WAN024AWU_at; Start 34; Stop 58
gagtcaatggaagcttatactccag

SEQ ID NO: 68699 - DNA, 25 bp, Artificial
  probe
  misc_feature (1)..(25): SEQ ID NO: 1989; WAN024AWU_at; Start 304; Stop 328
ggaactttttccctcatgcgaattg

SEQ ID NO: 68700 - DNA, 25 bp, Artificial
  probe
  misc_feature (1)..(25): SEQ ID NO: 1989; WAN024AWU_at; Start 472; Stop 496
gatgctcttaacctgccatccagac

SEQ ID NO: 68701 - DNA, 25 bp, Artificial
  probe
  misc_feature (1)..(25): SEQ ID NO: 1989; WAN024AWU_at; Start 58; Stop 82
ggtgaattgccttcttttgatttct

SEQ ID NO: 68702 - DNA, 25 bp, Artificial
  probe
  misc_feature (1)..(25): SEQ ID NO: 1989; WAN024AWU_at; Start 101; Stop 125
ggatagaggctctttcagtggaaaa

SEQ ID NO: 68703 - DNA, 25 bp, Artificial
  probe
  misc_feature (1)..(25): SEQ ID NO: 1989; WAN024AWU_at; Start 217; Stop 241
gaactggtcagccttttaaatcaga

SEQ ID NO: 68704 - DNA, 25 bp, Artificial
  probe
  misc_feature (1)..(25): SEQ ID NO: 1989; WAN024AWU_at; Start 488; Stop 512
catccagacgagcagcggaacgttt

SEQ ID NO: 68705 - DNA, 25 bp, Artificial
  probe
  misc_feature (1)..(25): SEQ ID NO: 1989; WAN024AWU_at; Start 136; Stop 160
gatttattagctgtttatggccctg

SEQ ID NO: 68706 - DNA, 25 bp, Artificial
  probe
  misc_feature (1)..(25): SEQ ID NO: 1989; WAN024AWU_at; Start 149; Stop 173
tttatggccctgatacgcctcggga

SEQ ID NO: 68707 - DNA, 25 bp, Artificial
  probe
  misc_feature (1)..(25): SEQ ID NO: 1990; WAN024AWV_at; Start 466; Stop 490
aaatgcgatgccttaaatctgccat

SEQ ID NO: 68708 - DNA, 25 bp, Artificial
  probe
  misc_feature (1)..(25): SEQ ID NO: 1990; WAN024AWV_at; Start 663; Stop 687
tggacagcagtacaagagcttgaga

SEQ ID NO: 68709 - DNA, 25 bp, Artificial
  probe
  misc_feature (1)..(25): SEQ ID NO: 1990; WAN024AWV_at; Start 467; Stop 491
aatgcgatgccttaaatctgccatc

SEQ ID NO: 68710 - DNA, 25 bp, Artificial
  probe
  misc_feature (1)..(25): SEQ ID NO: 1990; WAN024AWV_at; Start 661; Stop 685
aatggacagcagtacaagagcttga

SEQ ID NO: 68711 - DNA, 25 bp, Artificial
  probe
  misc_feature (1)..(25): SEQ ID NO: 1990; WAN024AWV_at; Start 474; Stop 498
tgccttaaatctgccatccagacga

SEQ ID NO: 68712 - DNA, 25 bp, Artificial
  probe
  misc_feature (1)..(25): SEQ ID NO: 1990; WAN024AWV_at; Start 664; Stop 688
ggacagcagtacaagagcttgagag

SEQ ID NO: 68713 - DNA, 25 bp, Artificial
  probe
  misc_feature (1)..(25): SEQ ID NO: 1990; WAN024AWV_at; Start 314; Stop 338
ctctcatgcgcattgaccagaataa

SEQ ID NO: 68714 - DNA, 25 bp, Artificial
  probe
  misc_feature (1)..(25): SEQ ID NO: 1990; WAN024AWV_at; Start 470; Stop 494
gcgatgccttaaatctgccatccag

SEQ ID NO: 68715 - DNA, 25 bp, Artificial
  probe
  misc_feature (1)..(25): SEQ ID NO: 1990; WAN024AWV_at; Start 463; Stop 487
tggaaatgcgatgccttaaatctgc

SEQ ID NO: 68716 - DNA, 25 bp, Artificial
  probe
  misc_feature (1)..(25): SEQ ID NO: 1990; WAN024AWV_at; Start 612; Stop 636
agtcaaagatcgtttggaaacatgg

SEQ ID NO: 68717 - DNA, 25 bp, Artificial
  probe
  misc_feature (1)..(25): SEQ ID NO: 1990; WAN024AWV_at; Start 315; Stop 339
tctcatgcgcattgaccagaataac

SEQ ID NO: 68718 - DNA, 25 bp, Artificial
  probe
  misc_feature (1)..(25): SEQ ID NO: 1990; WAN024AWV_at; Start 655; Stop 679
gataaaaatggacagcagtacaaga

SEQ ID NO: 68719 - DNA, 25 bp, Artificial
  probe
  misc_feature (1)..(25): SEQ ID NO: 1990; WAN024AWV_at; Start 654; Stop 678
tgataaaaatggacagcagtacaag

SEQ ID NO: 68720 - DNA, 25 bp, Artificial
  probe
  misc_feature (1)..(25): SEQ ID NO: 1990; WAN024AWV_at; Start 610; Stop 634
caagtcaaagatcgtttggaaacat

SEQ ID NO: 68721 - DNA, 25 bp, Artificial
  probe
  misc_feature (1)..(25): SEQ ID NO: 1990; WAN024AWV_at; Start 380; Stop 404
taaggggtacacggataggaactga

SEQ ID NO: 68722 - DNA, 25 bp, Artificial
  probe
  misc_feature (1)..(25): SEQ ID NO: 1990; WAN024AWV_at; Start 210; Stop 234
tatgggggagctggttagcctttta

SEQ ID NO: 68723 - DNA, 25 bp, Artificial
  probe
  misc_feature (1)..(25): SEQ ID NO: 1990; WAN024AWV_at; Start 308; Stop 332
ctttttctctcatgcgcattgacca

SEQ ID NO: 68724 - DNA, 25 bp, Artificial
  probe
  misc_feature (1)..(25): SEQ ID NO: 1990; WAN024AWV_at; Start 657; Stop 681
taaaaatggacagcagtacaagagc

SEQ ID NO: 68725 - DNA, 25 bp, Artificial
  probe
  misc_feature (1)..(25): SEQ ID NO: 1990; WAN024AWV_at; Start 309; Stop 333
tttttctctcatgcgcattgaccag

SEQ ID NO: 68726 - DNA, 25 bp, Artificial
  probe
  misc_feature (1)..(25): SEQ ID NO: 1990; WAN024AWV_at; Start 473; Stop 497
atgccttaaatctgccatccagacg

SEQ ID NO: 68727 - DNA, 25 bp, Artificial
  probe
  misc_feature (1)..(25): SEQ ID NO: 1990; WAN024AWV_at; Start 462; Stop 486
gtggaaatgcgatgccttaaatctg

SEQ ID NO: 68728 - DNA, 25 bp, Artificial
  probe
  misc_feature (1)..(25): SEQ ID NO: 1990; WAN024AWV_at; Start 660; Stop 684
aaatggacagcagtacaagagcttg

SEQ ID NO: 68729 - DNA, 25 bp, Artificial
  probe
  misc_feature (1)..(25): SEQ ID NO: 1990; WAN024AWV_at; Start 189; Stop 213
ttttcaggagccagtagcagatatg

SEQ ID NO: 68730 - DNA, 25 bp, Artificial
  probe
  misc_feature (1)..(25): SEQ ID NO: 1990; WAN024AWV_at; Start 313; Stop 337
tctctcatgcgcattgaccagaata

SEQ ID NO: 68731 - DNA, 25 bp, Artificial
  probe
  misc_feature (1)..(25): SEQ ID NO: 1990; WAN024AWV_at; Start 659; Stop 683
aaaatggacagcagtacaagagctt

SEQ ID NO: 68732 - DNA, 25 bp, Artificial
  probe
  misc_feature (1)..(25): SEQ ID NO: 1990; WAN024AWV_at; Start 662; Stop 686
atggacagcagtacaagagcttgag

SEQ ID NO: 68733 - DNA, 25 bp, Artificial
  probe
  misc_feature (1)..(25): SEQ ID NO: 1990; WAN024AWV_at; Start 658; Stop 682
aaaaatggacagcagtacaagagct

SEQ ID NO: 68734 - DNA, 25 bp, Artificial
  probe
  misc_feature (1)..(25): SEQ ID NO: 1990; WAN024AWV_at; Start 608; Stop 632
ctcaagtcaaagatcgtttggaaac

SEQ ID NO: 68735 - DNA, 25 bp, Artificial
  probe
  misc_feature (1)..(25): SEQ ID NO: 1990; WAN024AWV_at; Start 469; Stop 493
tgcgatgccttaaatctgccatcca

SEQ ID NO: 68736 - DNA, 25 bp, Artificial
  probe
  misc_feature (1)..(25): SEQ ID NO: 1990; WAN024AWV_at; Start 188; Stop 212
tttttcaggagccagtagcagatat

SEQ ID NO: 68737 - DNA, 25 bp, Artificial
  probe
  misc_feature (1)..(25): SEQ ID NO: 1990; WAN024AWV_at; Start 312; Stop 336
ttctctcatgcgcattgaccagaat

SEQ ID NO: 68738 - DNA, 25 bp, Artificial
  probe
  misc_feature (1)..(25): SEQ ID NO: 1990; WAN024AWV_at; Start 191; Stop 215
ttcaggagccagtagcagatatggg

SEQ ID NO: 68739 - DNA, 25 bp, Artificial
  probe
  misc_feature (1)..(25): SEQ ID NO: 1990; WAN024AWV_at; Start 465; Stop 489
gaaatgcgatgccttaaatctgcca

SEQ ID NO: 68740 - DNA, 25 bp, Artificial
  probe
  misc_feature (1)..(25): SEQ ID NO: 1990; WAN024AWV_at; Start 472; Stop 496
gatgccttaaatctgccatccagac

SEQ ID NO: 68741 - DNA, 25 bp, Artificial
  probe
  misc_feature (1)..(25): SEQ ID NO: 6632; WAN024AWW_at; Start 349; Stop 373
aagatggcagttatcgctgagcgaa

SEQ ID NO: 68742 - DNA, 25 bp, Artificial
  probe
  misc_feature (1)..(25): SEQ ID NO: 6632; WAN024AWW_at; Start 176; Stop 200
taactgttcaggagactctctttga

SEQ ID NO: 68743 - DNA, 25 bp, Artificial
  probe
  misc_feature (1)..(25): SEQ ID NO: 6632; WAN024AWW_at; Start 174; Stop 198
tctaactgttcaggagactctcttt

SEQ ID NO: 68744 - DNA, 25 bp, Artificial
  probe
  misc_feature (1)..(25): SEQ ID NO: 6632; WAN024AWW_at; Start 182; Stop 206
ttcaggagactctctttgaagcaga

SEQ ID NO: 68745 - DNA, 25 bp, Artificial
  probe
  misc_feature (1)..(25): SEQ ID NO: 6632; WAN024AWW_at; Start 348; Stop 372
aaagatggcagttatcgctgagcga

SEQ ID NO: 68746 - DNA, 25 bp, Artificial
  probe
  misc_feature (1)..(25): SEQ ID NO: 6632; WAN024AWW_at; Start 77; Stop 101
cagtcagtccttggacactagaaca

SEQ ID NO: 68747 - DNA, 25 bp, Artificial
  probe
  misc_feature (1)..(25): SEQ ID NO: 6632; WAN024AWW_at; Start 46; Stop 70
gatatctacgctgtcatggcagctg

SEQ ID NO: 68748 - DNA, 25 bp, Artificial
  probe
  misc_feature (1)..(25): SEQ ID NO: 6632; WAN024AWW_at; Start 350; Stop 374
agatggcagttatcgctgagcgaaa

SEQ ID NO: 68749 - DNA, 25 bp, Artificial
  probe
  misc_feature (1)..(25): SEQ ID NO: 6632; WAN024AWW_at; Start 40; Stop 64
gctcaagatatctacgctgtcatgg

SEQ ID NO: 68750 - DNA, 25 bp, Artificial
  probe
  misc_feature (1)..(25): SEQ ID NO: 6632; WAN024AWW_at; Start 44; Stop 68
aagatatctacgctgtcatggcagc

SEQ ID NO: 68751 - DNA, 25 bp, Artificial
  probe
  misc_feature (1)..(25): SEQ ID NO: 6632; WAN024AWW_at; Start 36; Stop 60
cttggctcaagatatctacgctgtc

SEQ ID NO: 68752 - DNA, 25 bp, Artificial
  probe
  misc_feature (1)..(25): SEQ ID NO: 6632; WAN024AWW_at; Start 81; Stop 105
cagtccttggacactagaacaaatc

SEQ ID NO: 68753 - DNA, 25 bp, Artificial
  probe
  misc_feature (1)..(25): SEQ ID NO: 6632; WAN024AWW_at; Start 346; Stop 370
gaaaagatggcagttatcgctgagc

SEQ ID NO: 68754 - DNA, 25 bp, Artificial
  probe
  misc_feature (1)..(25): SEQ ID NO: 6632; WAN024AWW_at; Start 194; Stop 218
tctttgaagcagaagtcctgcaaat

SEQ ID NO: 68755 - DNA, 25 bp, Artificial
  probe
  misc_feature (1)..(25): SEQ ID NO: 6632; WAN024AWW_at; Start 41; Stop 65
ctcaagatatctacgctgtcatggc

SEQ ID NO: 68756 - DNA, 25 bp, Artificial
  probe
  misc_feature (1)..(25): SEQ ID NO: 6632; WAN024AWW_at; Start 73; Stop 97
tacccagtcagtccttggacactag

SEQ ID NO: 68757 - DNA, 25 bp, Artificial
  probe
  misc_feature (1)..(25): SEQ ID NO: 6632; WAN024AWW_at; Start 80; Stop 104
tcagtccttggacactagaacaaat

SEQ ID NO: 68758 - DNA, 25 bp, Artificial
  probe
  misc_feature (1)..(25): SEQ ID NO: 6632; WAN024AWW_at; Start 87; Stop 111
ttggacactagaacaaatccaagca

SEQ ID NO: 68759 - DNA, 25 bp, Artificial
  probe
  misc_feature (1)..(25): SEQ ID NO: 6632; WAN024AWW_at; Start 342; Stop 366
gaaagaaaagatggcagttatcgct

SEQ ID NO: 68760 - DNA, 25 bp, Artificial
  probe
  misc_feature (1)..(25): SEQ ID NO: 6632; WAN024AWW_at; Start 37; Stop 61
ttggctcaagatatctacgctgtca

SEQ ID NO: 68761 - DNA, 25 bp, Artificial
  probe
  misc_feature (1)..(25): SEQ ID NO: 6632; WAN024AWW_at; Start 339; Stop 363
caagaaagaaaagatggcagttatc

SEQ ID NO: 68762 - DNA, 25 bp, Artificial
  probe
  misc_feature (1)..(25): SEQ ID NO: 6632; WAN024AWW_at; Start 180; Stop 204
tgttcaggagactctctttgaagca

SEQ ID NO: 68763 - DNA, 25 bp, Artificial
  probe
  misc_feature (1)..(25): SEQ ID NO: 6632; WAN024AWW_at; Start 195; Stop 219
ctttgaagcagaagtcctgcaaatc

SEQ ID NO: 68764 - DNA, 25 bp, Artificial
  probe
  misc_feature (1)..(25): SEQ ID NO: 6632; WAN024AWW_at; Start 337; Stop 361
tacaagaaagaaaagatggcagtta

SEQ ID NO: 68765 - DNA, 25 bp, Artificial
  probe
  misc_feature (1)..(25): SEQ ID NO: 6632; WAN024AWW_at; Start 336; Stop 360
ttacaagaaagaaaagatggcagtt

SEQ ID NO: 68766 - DNA, 25 bp, Artificial
  probe
  misc_feature (1)..(25): SEQ ID NO: 6632; WAN024AWW_at; Start 172; Stop 196
tttctaactgttcaggagactctct

SEQ ID NO: 68767 - DNA, 25 bp, Artificial
  probe
  misc_feature (1)..(25): SEQ ID NO: 6632; WAN024AWW_at; Start 75; Stop 99
cccagtcagtccttggacactagaa

SEQ ID NO: 68768 - DNA, 25 bp, Artificial
  probe
  misc_feature (1)..(25): SEQ ID NO: 6632; WAN024AWW_at; Start 171; Stop 195
ctttctaactgttcaggagactctc

SEQ ID NO: 68769 - DNA, 25 bp, Artificial
  probe
  misc_feature (1)..(25): SEQ ID NO: 6632; WAN024AWW_at; Start 83; Stop 107
gtccttggacactagaacaaatcca

SEQ ID NO: 68770 - DNA, 25 bp, Artificial
  probe
  misc_feature (1)..(25): SEQ ID NO: 6632; WAN024AWW_at; Start 47; Stop 71
atatctacgctgtcatggcagctgt

SEQ ID NO: 68771 - DNA, 25 bp, Artificial
  probe
  misc_feature (1)..(25): SEQ ID NO: 6632; WAN024AWW_at; Start 42; Stop 66
tcaagatatctacgctgtcatggca

SEQ ID NO: 68772 - DNA, 25 bp, Artificial
  probe
  misc_feature (1)..(25): SEQ ID NO: 6632; WAN024AWW_at; Start 39; Stop 63
ggctcaagatatctacgctgtcatg

SEQ ID NO: 68773 - DNA, 25 bp, Artificial
  probe
  misc_feature (1)..(25): SEQ ID NO: 6632; WAN024AWW_at; Start 178; Stop 202
actgttcaggagactctctttgaag

SEQ ID NO: 68774 - DNA, 25 bp, Artificial
  probe
  misc_feature (1)..(25): SEQ ID NO: 6632; WAN024AWW_at; Start 347; Stop 371
aaaagatggcagttatcgctgagcg

SEQ ID NO: 68775 - DNA, 25 bp, Artificial
  probe
  misc_feature (1)..(25): SEQ ID NO: 6633; WAN024AWX_at; Start 80; Stop 104
ttagtccgtggacgctggaacaaat

SEQ ID NO: 68776 - DNA, 25 bp, Artificial
  probe
  misc_feature (1)..(25): SEQ ID NO: 6633; WAN024AWX_at; Start 195; Stop 219
ttttgaggcagaagtcttgcaaatc

SEQ ID NO: 68777 - DNA, 25 bp, Artificial
  probe
  misc_feature (1)..(25): SEQ ID NO: 6633; WAN024AWX_at; Start 350; Stop 374
aaatggcggtcatcgctgatcgaaa

SEQ ID NO: 68778 - DNA, 25 bp, Artificial
  probe
  misc_feature (1)..(25): SEQ ID NO: 6633; WAN024AWX_at; Start 351; Stop 375
aatggcggtcatcgctgatcgaaag

SEQ ID NO: 68779 - DNA, 25 bp, Artificial
  probe
  misc_feature (1)..(25): SEQ ID NO: 6633; WAN024AWX_at; Start 348; Stop 372
aaaaatggcggtcatcgctgatcga

SEQ ID NO: 68780 - DNA, 25 bp, Artificial
  probe
  misc_feature (1)..(25): SEQ ID NO: 6633; WAN024AWX_at; Start 86; Stop 110
cgtggacgctggaacaaatccaagc

SEQ ID NO: 68781 - DNA, 25 bp, Artificial
  probe
  misc_feature (1)..(25): SEQ ID NO: 6633; WAN024AWX_at; Start 186; Stop 210
ggagaatctttttgaggcagaagtc

SEQ ID NO: 68782 - DNA, 25 bp, Artificial
  probe
  misc_feature (1)..(25): SEQ ID NO: 6633; WAN024AWX_at; Start 347; Stop 371
aaaaaatggcggtcatcgctgatcg

SEQ ID NO: 68783 - DNA, 25 bp, Artificial
  probe
  misc_feature (1)..(25): SEQ ID NO: 6633; WAN024AWX_at; Start 57; Stop 81
tgttatggtagctgtttacccagtt

SEQ ID NO: 68784 - DNA, 25 bp, Artificial
  probe
  misc_feature (1)..(25): SEQ ID NO: 6633; WAN024AWX_at; Start 75; Stop 99
cccagttagtccgtggacgctggaa

SEQ ID NO: 68785 - DNA, 25 bp, Artificial
  probe
  misc_feature (1)..(25): SEQ ID NO: 6633; WAN024AWX_at; Start 192; Stop 216
tctttttgaggcagaagtcttgcaa

SEQ ID NO: 68786 - DNA, 25 bp, Artificial
  probe
  misc_feature (1)..(25): SEQ ID NO: 6633; WAN024AWX_at; Start 82; Stop 106
agtccgtggacgctggaacaaatcc

SEQ ID NO: 68787 - DNA, 25 bp, Artificial
  probe
  misc_feature (1)..(25): SEQ ID NO: 6633; WAN024AWX_at; Start 342; Stop 366
gaaagaaaaaatggcggtcatcgct

SEQ ID NO: 68788 - DNA, 25 bp, Artificial
  probe
  misc_feature (1)..(25): SEQ ID NO: 6633; WAN024AWX_at; Start 176; Stop 200
tagctgttcaggagaatctttttga

SEQ ID NO: 68789 - DNA, 25 bp, Artificial
  probe
  misc_feature (1)..(25): SEQ ID NO: 6633; WAN024AWX_at; Start 337; Stop 361
tacaagaaagaaaaaatggcggtca

SEQ ID NO: 68790 - DNA, 25 bp, Artificial
  probe
  misc_feature (1)..(25): SEQ ID NO: 6633; WAN024AWX_at; Start 179; Stop 203
ctgttcaggagaatctttttgaggc

SEQ ID NO: 68791 - DNA, 25 bp, Artificial
  probe
  misc_feature (1)..(25): SEQ ID NO: 6633; WAN024AWX_at; Start 72; Stop 96
ttacccagttagtccgtggacgctg

SEQ ID NO: 68792 - DNA, 25 bp, Artificial
  probe
  misc_feature (1)..(25): SEQ ID NO: 6633; WAN024AWX_at; Start 184; Stop 208
caggagaatctttttgaggcagaag

SEQ ID NO: 68793 - DNA, 25 bp, Artificial
  probe
  misc_feature (1)..(25): SEQ ID NO: 6633; WAN024AWX_at; Start 73; Stop 97
tacccagttagtccgtggacgctgg

SEQ ID NO: 68794 - DNA, 25 bp, Artificial
  probe
  misc_feature (1)..(25): SEQ ID NO: 6633; WAN024AWX_at; Start 65; Stop 89
tagctgtttacccagttagtccgtg

SEQ ID NO: 68795 - DNA, 25 bp, Artificial
  probe
  misc_feature (1)..(25): SEQ ID NO: 6633; WAN024AWX_at; Start 349; Stop 373
aaaatggcggtcatcgctgatcgaa

SEQ ID NO: 68796 - DNA, 25 bp, Artificial
  probe
  misc_feature (1)..(25): SEQ ID NO: 6633; WAN024AWX_at; Start 60; Stop 84
tatggtagctgtttacccagttagt

SEQ ID NO: 68797 - DNA, 25 bp, Artificial
  probe
  misc_feature (1)..(25): SEQ ID NO: 6633; WAN024AWX_at; Start 189; Stop 213
gaatctttttgaggcagaagtcttg

SEQ ID NO: 68798 - DNA, 25 bp, Artificial
  probe
  misc_feature (1)..(25): SEQ ID NO: 6633; WAN024AWX_at; Start 339; Stop 363
caagaaagaaaaaatggcggtcatc

SEQ ID NO: 68799 - DNA, 25 bp, Artificial
  probe
  misc_feature (1)..(25): SEQ ID NO: 6633; WAN024AWX_at; Start 84; Stop 108
tccgtggacgctggaacaaatccaa

SEQ ID NO: 68800 - DNA, 25 bp, Artificial
  probe
  misc_feature (1)..(25): SEQ ID NO: 6633; WAN024AWX_at; Start 355; Stop 379
gcggtcatcgctgatcgaaaggcct

SEQ ID NO: 68801 - DNA, 25 bp, Artificial
  probe
  misc_feature (1)..(25): SEQ ID NO: 6633; WAN024AWX_at; Start 171; Stop 195
ctttctagctgttcaggagaatctt

SEQ ID NO: 68802 - DNA, 25 bp, Artificial
  probe
  misc_feature (1)..(25): SEQ ID NO: 6633; WAN024AWX_at; Start 174; Stop 198
tctagctgttcaggagaatcttttt

SEQ ID NO: 68803 - DNA, 25 bp, Artificial
  probe
  misc_feature (1)..(25): SEQ ID NO: 6633; WAN024AWX_at; Start 77; Stop 101
cagttagtccgtggacgctggaaca

SEQ ID NO: 68804 - DNA, 25 bp, Artificial
  probe
  misc_feature (1)..(25): SEQ ID NO: 6633; WAN024AWX_at; Start 356; Stop 380
cggtcatcgctgatcgaaaggccta

SEQ ID NO: 68805 - DNA, 25 bp, Artificial
  probe
  misc_feature (1)..(25): SEQ ID NO: 6633; WAN024AWX_at; Start 346; Stop 370
gaaaaaatggcggtcatcgctgatc

SEQ ID NO: 68806 - DNA, 25 bp, Artificial
  probe
  misc_feature (1)..(25): SEQ ID NO: 6633; WAN024AWX_at; Start 183; Stop 207
tcaggagaatctttttgaggcagaa

SEQ ID NO: 68807 - DNA, 25 bp, Artificial
  probe
  misc_feature (1)..(25): SEQ ID NO: 6633; WAN024AWX_at; Start 87; Stop 111
gtggacgctggaacaaatccaagca

SEQ ID NO: 68808 - DNA, 25 bp, Artificial
  probe
  misc_feature (1)..(25): SEQ ID NO: 6633; WAN024AWX_at; Start 354; Stop 378
ggcggtcatcgctgatcgaaaggcc

SEQ ID NO: 68809 - DNA, 25 bp, Artificial
  probe
  misc_feature (1)..(25): SEQ ID NO: 1698; WAN024AWY_at; Start 18; Stop 42
aattcaacaacagcctgacctagct

SEQ ID NO: 68810 - DNA, 25 bp, Artificial
  probe
  misc_feature (1)..(25): SEQ ID NO: 1698; WAN024AWY_at; Start 12; Stop 36
caagcgaattcaacaacagcctgac

SEQ ID NO: 68811 - DNA, 25 bp, Artificial
  probe
  misc_feature (1)..(25): SEQ ID NO: 1698; WAN024AWY_at; Start 85; Stop 109
ccttggactctggagcaaatccaag

SEQ ID NO: 68812 - DNA, 25 bp, Artificial
  probe
  misc_feature (1)..(25): SEQ ID NO: 1698; WAN024AWY_at; Start 72; Stop 96
ttacctagtcagtccttggactctg

SEQ ID NO: 68813 - DNA, 25 bp, Artificial
  probe
  misc_feature (1)..(25): SEQ ID NO: 1698; WAN024AWY_at; Start 20; Stop 44
ttcaacaacagcctgacctagctca

SEQ ID NO: 68814 - DNA, 25 bp, Artificial
  probe
  misc_feature (1)..(25): SEQ ID NO: 1698; WAN024AWY_at; Start 76; Stop 100
ctagtcagtccttggactctggagc

SEQ ID NO: 68815 - DNA, 25 bp, Artificial
  probe
  misc_feature (1)..(25): SEQ ID NO: 1698; WAN024AWY_at; Start 23; Stop 47
aacaacagcctgacctagctcaagc

SEQ ID NO: 68816 - DNA, 25 bp, Artificial
  probe
  misc_feature (1)..(25): SEQ ID NO: 1698; WAN024AWY_at; Start 16; Stop 40
cgaattcaacaacagcctgacctag

SEQ ID NO: 68817 - DNA, 25 bp, Artificial
  probe
  misc_feature (1)..(25): SEQ ID NO: 1698; WAN024AWY_at; Start 77; Stop 101
tagtcagtccttggactctggagca

SEQ ID NO: 68818 - DNA, 25 bp, Artificial
  probe
  misc_feature (1)..(25): SEQ ID NO: 1698; WAN024AWY_at; Start 73; Stop 97
tacctagtcagtccttggactctgg

SEQ ID NO: 68819 - DNA, 25 bp, Artificial
  probe
  misc_feature (1)..(25): SEQ ID NO: 1698; WAN024AWY_at; Start 21; Stop 45
tcaacaacagcctgacctagctcaa

SEQ ID NO: 68820 - DNA, 25 bp, Artificial
  probe
  misc_feature (1)..(25): SEQ ID NO: 1698; WAN024AWY_at; Start 81; Stop 105
cagtccttggactctggagcaaatc

SEQ ID NO: 68821 - DNA, 25 bp, Artificial
  probe
  misc_feature (1)..(25): SEQ ID NO: 1698; WAN024AWY_at; Start 82; Stop 106
agtccttggactctggagcaaatcc

SEQ ID NO: 68822 - DNA, 25 bp, Artificial
  probe
  misc_feature (1)..(25): SEQ ID NO: 1698; WAN024AWY_at; Start 74; Stop 98
acctagtcagtccttggactctgga

SEQ ID NO: 68823 - DNA, 25 bp, Artificial
  probe
  misc_feature (1)..(25): SEQ ID NO: 1698; WAN024AWY_at; Start 14; Stop 38
agcgaattcaacaacagcctgacct

SEQ ID NO: 68824 - DNA, 25 bp, Artificial
  probe
  misc_feature (1)..(25): SEQ ID NO: 1698; WAN024AWY_at; Start 79; Stop 103
gtcagtccttggactctggagcaaa

SEQ ID NO: 68825 - DNA, 25 bp, Artificial
  probe
  misc_feature (1)..(25): SEQ ID NO: 1698; WAN024AWY_at; Start 5; Stop 29
tagaaatcaagcgaattcaacaaca

SEQ ID NO: 68826 - DNA, 25 bp, Artificial
  probe
  misc_feature (1)..(25): SEQ ID NO: 1698; WAN024AWY_at; Start 15; Stop 39
gcgaattcaacaacagcctgaccta

SEQ ID NO: 68827 - DNA, 25 bp, Artificial
  probe
  misc_feature (1)..(25): SEQ ID NO: 1698; WAN024AWY_at; Start 26; Stop 50
aacagcctgacctagctcaagccat

SEQ ID NO: 68828 - DNA, 25 bp, Artificial
  probe
  misc_feature (1)..(25): SEQ ID NO: 1698; WAN024AWY_at; Start 7; Stop 31
gaaatcaagcgaattcaacaacagc

SEQ ID NO: 68829 - DNA, 25 bp, Artificial
  probe
  misc_feature (1)..(25): SEQ ID NO: 1698; WAN024AWY_at; Start 78; Stop 102
agtcagtccttggactctggagcaa

SEQ ID NO: 68830 - DNA, 25 bp, Artificial
  probe
  misc_feature (1)..(25): SEQ ID NO: 1698; WAN024AWY_at; Start 87; Stop 111
ttggactctggagcaaatccaagca

SEQ ID NO: 68831 - DNA, 25 bp, Artificial
  probe
  misc_feature (1)..(25): SEQ ID NO: 1698; WAN024AWY_at; Start 10; Stop 34
atcaagcgaattcaacaacagcctg

SEQ ID NO: 68832 - DNA, 25 bp, Artificial
  probe
  misc_feature (1)..(25): SEQ ID NO: 1698; WAN024AWY_at; Start 29; Stop 53
agcctgacctagctcaagccatcta

SEQ ID NO: 68833 - DNA, 25 bp, Artificial
  probe
  misc_feature (1)..(25): SEQ ID NO: 1698; WAN024AWY_at; Start 11; Stop 35
tcaagcgaattcaacaacagcctga

SEQ ID NO: 68834 - DNA, 25 bp, Artificial
  probe
  misc_feature (1)..(25): SEQ ID NO: 1698; WAN024AWY_at; Start 84; Stop 108
tccttggactctggagcaaatccaa

SEQ ID NO: 68835 - DNA, 25 bp, Artificial
  probe
  misc_feature (1)..(25): SEQ ID NO: 1698; WAN024AWY_at; Start 17; Stop 41
gaattcaacaacagcctgacctagc

SEQ ID NO: 68836 - DNA, 25 bp, Artificial
  probe
  misc_feature (1)..(25): SEQ ID NO: 1698; WAN024AWY_at; Start 8; Stop 32
aaatcaagcgaattcaacaacagcc

SEQ ID NO: 68837 - DNA, 25 bp, Artificial
  probe
  misc_feature (1)..(25): SEQ ID NO: 1698; WAN024AWY_at; Start 75; Stop 99
cctagtcagtccttggactctggag

SEQ ID NO: 68838 - DNA, 25 bp, Artificial
  probe
  misc_feature (1)..(25): SEQ ID NO: 1698; WAN024AWY_at; Start 83; Stop 107
gtccttggactctggagcaaatcca

SEQ ID NO: 68839 - DNA, 25 bp, Artificial
  probe
  misc_feature (1)..(25): SEQ ID NO: 1698; WAN024AWY_at; Start 13; Stop 37
aagcgaattcaacaacagcctgacc

SEQ ID NO: 68840 - DNA, 25 bp, Artificial
  probe
  misc_feature (1)..(25): SEQ ID NO: 1698; WAN024AWY_at; Start 80; Stop 104
tcagtccttggactctggagcaaat

SEQ ID NO: 68841 - DNA, 25 bp, Artificial
  probe
  misc_feature (1)..(25): SEQ ID NO: 1698; WAN024AWY_at; Start 9; Stop 33
aatcaagcgaattcaacaacagcct

SEQ ID NO: 68842 - DNA, 25 bp, Artificial
  probe
  misc_feature (1)..(25): SEQ ID NO: 1698; WAN024AWY_at; Start 3; Stop 27
gatagaaatcaagcgaattcaacaa

SEQ ID NO: 68843 - DNA, 25 bp, Artificial
  probe
  misc_feature (1)..(25): SEQ ID NO: 7117; WAN024AWZ_s_at; Start 18; Stop 42
tgcgcatgcaataattatactactt

SEQ ID NO: 68844 - DNA, 25 bp, Artificial
  probe
  misc_feature (1)..(25): SEQ ID NO: 7117; WAN024AWZ_s_at; Start 24; Stop 48
tgcaataattatactacttttcaag

SEQ ID NO: 68845 - DNA, 25 bp, Artificial
  probe
  misc_feature (1)..(25): SEQ ID NO: 7117; WAN024AWZ_s_at; Start 17; Stop 41
ttgcgcatgcaataattatactact

SEQ ID NO: 68846 - DNA, 25 bp, Artificial
  probe
  misc_feature (1)..(25): SEQ ID NO: 7117; WAN024AWZ_s_at; Start 15; Stop 39
gattgcgcatgcaataattatacta

SEQ ID NO: 68847 - DNA, 25 bp, Artificial
  probe
  misc_feature (1)..(25): SEQ ID NO: 7117; WAN024AWZ_s_at; Start 27; Stop 51
aataattatactacttttcaagaat

SEQ ID NO: 68848 - DNA, 25 bp, Artificial
  probe
  misc_feature (1)..(25): SEQ ID NO: 7117; WAN024AWZ_s_at; Start 14; Stop 38
tgattgcgcatgcaataattatact

SEQ ID NO: 68849 - DNA, 25 bp, Artificial
  probe
  misc_feature (1)..(25): SEQ ID NO: 7117; WAN024AWZ_s_at; Start 19; Stop 43
gcgcatgcaataattatactacttt

SEQ ID NO: 68850 - DNA, 25 bp, Artificial
  probe
  misc_feature (1)..(25): SEQ ID NO: 7117; WAN024AWZ_s_at; Start 10; Stop 34
aagatgattgcgcatgcaataatta

SEQ ID NO: 68851 - DNA, 25 bp, Artificial
  probe
  misc_feature (1)..(25): SEQ ID NO: 7117; WAN024AWZ_s_at; Start 23; Stop 47
atgcaataattatactacttttcaa

SEQ ID NO: 68852 - DNA, 25 bp, Artificial
  probe
  misc_feature (1)..(25): SEQ ID NO: 7117; WAN024AWZ_s_at; Start 53; Stop 77
ctggcaagctctgttttttagtggt

SEQ ID NO: 68853 - DNA, 25 bp, Artificial
  probe
  misc_feature (1)..(25): SEQ ID NO: 7117; WAN024AWZ_s_at; Start 21; Stop 45
gcatgcaataattatactacttttc

SEQ ID NO: 68854 - DNA, 25 bp, Artificial
  probe
  misc_feature (1)..(25): SEQ ID NO: 7117; WAN024AWZ_s_at; Start 25; Stop 49
gcaataattatactacttttcaaga

SEQ ID NO: 68855 - DNA, 25 bp, Artificial
  probe
  misc_feature (1)..(25): SEQ ID NO: 7117; WAN024AWZ_s_at; Start 54; Stop 78
tggcaagctctgttttttagtggtt

SEQ ID NO: 68856 - DNA, 25 bp, Artificial
  probe
  misc_feature (1)..(25): SEQ ID NO: 7117; WAN024AWZ_s_at; Start 26; Stop 50
caataattatactacttttcaagaa

SEQ ID NO: 68857 - DNA, 25 bp, Artificial
  probe
  misc_feature (1)..(25): SEQ ID NO: 7117; WAN024AWZ_s_at; Start 16; Stop 40
attgcgcatgcaataattatactac

SEQ ID NO: 68858 - DNA, 25 bp, Artificial
  probe
  misc_feature (1)..(25): SEQ ID NO: 7117; WAN024AWZ_s_at; Start 12; Stop 36
gatgattgcgcatgcaataattata

SEQ ID NO: 68859 - DNA, 25 bp, Artificial
  probe
  misc_feature (1)..(25): SEQ ID NO: 7117; WAN024AWZ_s_at; Start 11; Stop 35
agatgattgcgcatgcaataattat

SEQ ID NO: 68860 - DNA, 25 bp, Artificial
  probe
  misc_feature (1)..(25): SEQ ID NO: 7117; WAN024AWZ_s_at; Start 20; Stop 44
cgcatgcaataattatactactttt

SEQ ID NO: 68861 - DNA, 25 bp, Artificial
  probe
  misc_feature (1)..(25): SEQ ID NO: 7117; WAN024AWZ_s_at; Start 22; Stop 46
catgcaataattatactacttttca

SEQ ID NO: 68862 - DNA, 25 bp, Artificial
  probe
  misc_feature (1)..(25): SEQ ID NO: 7117; WAN024AWZ_s_at; Start 13; Stop 37
atgattgcgcatgcaataattatac

SEQ ID NO: 68863 - DNA, 25 bp, Artificial
  probe
  misc_feature (1)..(25): SEQ ID NO: 8; WAN024AX6_x_at; Start 19; Stop 43
aaaatgttgtctgaaactattagcc

SEQ ID NO: 68864 - DNA, 25 bp, Artificial
  probe
  misc_feature (1)..(25): SEQ ID NO: 8; WAN024AX6_x_at; Start 9; Stop 33
gtttcttataaaaatgttgtctgaa

SEQ ID NO: 68865 - DNA, 25 bp, Artificial
  probe
  misc_feature (1)..(25): SEQ ID NO: 8; WAN024AX6_x_at; Start 1; Stop 25
atgaacttgtttcttataaaaatgt

SEQ ID NO: 68866 - DNA, 25 bp, Artificial
  probe
  misc_feature (1)..(25): SEQ ID NO: 8; WAN024AX6_x_at; Start 17; Stop 41
taaaaatgttgtctgaaactattag

SEQ ID NO: 68867 - DNA, 25 bp, Artificial
  probe
  misc_feature (1)..(25): SEQ ID NO: 8; WAN024AX6_x_at; Start 10; Stop 34
tttcttataaaaatgttgtctgaaa

SEQ ID NO: 68868 - DNA, 25 bp, Artificial
  probe
  misc_feature (1)..(25): SEQ ID NO: 8; WAN024AX6_x_at; Start 11; Stop 35
ttcttataaaaatgttgtctgaaac

SEQ ID NO: 68869 - DNA, 25 bp, Artificial
  probe
  misc_feature (1)..(25): SEQ ID NO: 8; WAN024AX6_x_at; Start 14; Stop 38
ttataaaaatgttgtctgaaactat

SEQ ID NO: 68870 - DNA, 25 bp, Artificial
  probe
  misc_feature (1)..(25): SEQ ID NO: 8; WAN024AX6_x_at; Start 8; Stop 32
tgtttcttataaaaatgttgtctga

SEQ ID NO: 68871 - DNA, 25 bp, Artificial
  probe
  misc_feature (1)..(25): SEQ ID NO: 8; WAN024AX6_x_at; Start 28; Stop 52
tctgaaactattagcctttttccag

SEQ ID NO: 68872 - DNA, 25 bp, Artificial
  probe
  misc_feature (1)..(25): SEQ ID NO: 8; WAN024AX6_x_at; Start 27; Stop 51
gtctgaaactattagcctttttcca

SEQ ID NO: 68873 - DNA, 25 bp, Artificial
  probe
  misc_feature (1)..(25): SEQ ID NO: 8; WAN024AX6_x_at; Start 7; Stop 31
ttgtttcttataaaaatgttgtctg

SEQ ID NO: 68874 - DNA, 25 bp, Artificial
  probe
  misc_feature (1)..(25): SEQ ID NO: 8; WAN024AX6_x_at; Start 12; Stop 36
tcttataaaaatgttgtctgaaact

SEQ ID NO: 68875 - DNA, 25 bp, Artificial
  probe
  misc_feature (1)..(25): SEQ ID NO: 8; WAN024AX6_x_at; Start 22; Stop 46
atgttgtctgaaactattagccttt

SEQ ID NO: 68876 - DNA, 25 bp, Artificial
  probe
  misc_feature (1)..(25): SEQ ID NO: 8; WAN024AX6_x_at; Start 13; Stop 37
cttataaaaatgttgtctgaaacta

SEQ ID NO: 68877 - DNA, 25 bp, Artificial
  probe
  misc_feature (1)..(25): SEQ ID NO: 8; WAN024AX6_x_at; Start 29; Stop 53
ctgaaactattagcctttttccaga

SEQ ID NO: 68878 - DNA, 25 bp, Artificial
  probe
  misc_feature (1)..(25): SEQ ID NO: 8; WAN024AX6_x_at; Start 15; Stop 39
tataaaaatgttgtctgaaactatt

SEQ ID NO: 68879 - DNA, 25 bp, Artificial
  probe
  misc_feature (1)..(25): SEQ ID NO: 8; WAN024AX6_x_at; Start 21; Stop 45
aatgttgtctgaaactattagcctt

SEQ ID NO: 68880 - DNA, 25 bp, Artificial
  probe
  misc_feature (1)..(25): SEQ ID NO: 8; WAN024AX6_x_at; Start 23; Stop 47
tgttgtctgaaactattagcctttt

SEQ ID NO: 68881 - DNA, 25 bp, Artificial
  probe
  misc_feature (1)..(25): SEQ ID NO: 8; WAN024AX6_x_at; Start 30; Stop 54
tgaaactattagcctttttccagaa

SEQ ID NO: 68882 - DNA, 25 bp, Artificial
  probe
  misc_feature (1)..(25): SEQ ID NO: 8; WAN024AX6_x_at; Start 6; Stop 30
cttgtttcttataaaaatgttgtct

SEQ ID NO: 68883 - DNA, 25 bp, Artificial
  probe
  misc_feature (1)..(25): SEQ ID NO: 8; WAN024AX6_x_at; Start 16; Stop 40
ataaaaatgttgtctgaaactatta

SEQ ID NO: 68884 - DNA, 25 bp, Artificial
  probe
  misc_feature (1)..(25): SEQ ID NO: 8; WAN024AX6_x_at; Start 18; Stop 42
aaaaatgttgtctgaaactattagc

SEQ ID NO: 68885 - DNA, 25 bp, Artificial
  probe
  misc_feature (1)..(25): SEQ ID NO: 8; WAN024AX6_x_at; Start 20; Stop 44
aaatgttgtctgaaactattagcct

SEQ ID NO: 68886 - DNA, 25 bp, Artificial
  probe
  misc_feature (1)..(25): SEQ ID NO: 8; WAN024AX6_x_at; Start 25; Stop 49
ttgtctgaaactattagcctttttc

SEQ ID NO: 68887 - DNA, 25 bp, Artificial
  probe
  misc_feature (1)..(25): SEQ ID NO: 8; WAN024AX6_x_at; Start 26; Stop 50
tgtctgaaactattagcctttttcc

SEQ ID NO: 68888 - DNA, 25 bp, Artificial
  probe
  misc_feature (1)..(25): SEQ ID NO: 6433; WAN024AX8_x_at; Start 20; Stop 44
aaatgttgtctgaaactattcgctt

SEQ ID NO: 68889 - DNA, 25 bp, Artificial
  probe
  misc_feature (1)..(25): SEQ ID NO: 6433; WAN024AX8_x_at; Start 25; Stop 49
ttgtctgaaactattcgcttttttc

SEQ ID NO: 68890 - DNA, 25 bp, Artificial
  probe
  misc_feature (1)..(25): SEQ ID NO: 6433; WAN024AX8_x_at; Start 19; Stop 43
aaaatgttgtctgaaactattcgct

SEQ ID NO: 68891 - DNA, 25 bp, Artificial
  probe
  misc_feature (1)..(25): SEQ ID NO: 6433; WAN024AX8_x_at; Start 9; Stop 33
gtttcttataaaaatgttgtctgaa

SEQ ID NO: 68892 - DNA, 25 bp, Artificial
  probe
  misc_feature (1)..(25): SEQ ID NO: 6433; WAN024AX8_x_at; Start 1; Stop 25
atgaacttgtttcttataaaaatgt

SEQ ID NO: 68893 - DNA, 25 bp, Artificial
  probe
  misc_feature (1)..(25): SEQ ID NO: 6433; WAN024AX8_x_at; Start 17; Stop 41
taaaaatgttgtctgaaactattcg

SEQ ID NO: 68894 - DNA, 25 bp, Artificial
  probe
  misc_feature (1)..(25): SEQ ID NO: 6433; WAN024AX8_x_at; Start 12; Stop 36
tcttataaaaatgttgtctgaaact

SEQ ID NO: 68895 - DNA, 25 bp, Artificial
  probe
  misc_feature (1)..(25): SEQ ID NO: 6433; WAN024AX8_x_at; Start 10; Stop 34
tttcttataaaaatgttgtctgaaa

SEQ ID NO: 68896 - DNA, 25 bp, Artificial
  probe
  misc_feature (1)..(25): SEQ ID NO: 6433; WAN024AX8_x_at; Start 75; Stop 99
tatgaggaaaaaggagttactcaaa

SEQ ID NO: 68897 - DNA, 25 bp, Artificial
  probe
  misc_feature (1)..(25): SEQ ID NO: 6433; WAN024AX8_x_at; Start 11; Stop 35
ttcttataaaaatgttgtctgaaac

SEQ ID NO: 68898 - DNA, 25 bp, Artificial
  probe
  misc_feature (1)..(25): SEQ ID NO: 6433; WAN024AX8_x_at; Start 14; Stop 38
ttataaaaatgttgtctgaaactat

SEQ ID NO: 68899 - DNA, 25 bp, Artificial
  probe
  misc_feature (1)..(25): SEQ ID NO: 6433; WAN024AX8_x_at; Start 8; Stop 32
tgtttcttataaaaatgttgtctga

SEQ ID NO: 68900 - DNA, 25 bp, Artificial
  probe
  misc_feature (1)..(25): SEQ ID NO: 6433; WAN024AX8_x_at; Start 28; Stop 52
tctgaaactattcgcttttttccag

SEQ ID NO: 68901 - DNA, 25 bp, Artificial
  probe
  misc_feature (1)..(25): SEQ ID NO: 6433; WAN024AX8_x_at; Start 74; Stop 98
ttatgaggaaaaaggagttactcaa

SEQ ID NO: 68902 - DNA, 25 bp, Artificial
  probe
  misc_feature (1)..(25): SEQ ID NO: 6433; WAN024AX8_x_at; Start 58; Stop 82
ttagaggaagaaaactttatgagga

SEQ ID NO: 68903 - DNA, 25 bp, Artificial
  probe
  misc_feature (1)..(25): SEQ ID NO: 6433; WAN024AX8_x_at; Start 27; Stop 51
gtctgaaactattcgcttttttcca

SEQ ID NO: 68904 - DNA, 25 bp, Artificial
  probe
  misc_feature (1)..(25): SEQ ID NO: 6433; WAN024AX8_x_at; Start 7; Stop 31
ttgtttcttataaaaatgttgtctg

SEQ ID NO: 68905 - DNA, 25 bp, Artificial
  probe
  misc_feature (1)..(25): SEQ ID NO: 6433; WAN024AX8_x_at; Start 22; Stop 46
atgttgtctgaaactattcgctttt

SEQ ID NO: 68906 - DNA, 25 bp, Artificial
  probe
  misc_feature (1)..(25): SEQ ID NO: 6433; WAN024AX8_x_at; Start 13; Stop 37
cttataaaaatgttgtctgaaacta

SEQ ID NO: 68907 - DNA, 25 bp, Artificial
  probe
  misc_feature (1)..(25): SEQ ID NO: 6433; WAN024AX8_x_at; Start 29; Stop 53
ctgaaactattcgcttttttccaga

SEQ ID NO: 68908 - DNA, 25 bp, Artificial
  probe
  misc_feature (1)..(25): SEQ ID NO: 6433; WAN024AX8_x_at; Start 15; Stop 39
tataaaaatgttgtctgaaactatt

SEQ ID NO: 68909 - DNA, 25 bp, Artificial
  probe
  misc_feature (1)..(25): SEQ ID NO: 6433; WAN024AX8_x_at; Start 21; Stop 45
aatgttgtctgaaactattcgcttt

SEQ ID NO: 68910 - DNA, 25 bp, Artificial
  probe
  misc_feature (1)..(25): SEQ ID NO: 6433; WAN024AX8_x_at; Start 23; Stop 47
tgttgtctgaaactattcgcttttt

SEQ ID NO: 68911 - DNA, 25 bp, Artificial
  probe
  misc_feature (1)..(25): SEQ ID NO: 6433; WAN024AX8_x_at; Start 59; Stop 83
tagaggaagaaaactttatgaggaa

SEQ ID NO: 68912 - DNA, 25 bp, Artificial
  probe
  misc_feature (1)..(25): SEQ ID NO: 6433; WAN024AX8_x_at; Start 30; Stop 54
tgaaactattcgcttttttccagaa

SEQ ID NO: 68913 - DNA, 25 bp, Artificial
  probe
  misc_feature (1)..(25): SEQ ID NO: 6433; WAN024AX8_x_at; Start 73; Stop 97
tttatgaggaaaaaggagttactca

SEQ ID NO: 68914 - DNA, 25 bp, Artificial
  probe
  misc_feature (1)..(25): SEQ ID NO: 6433; WAN024AX8_x_at; Start 6; Stop 30
cttgtttcttataaaaatgttgtct

SEQ ID NO: 68915 - DNA, 25 bp, Artificial
  probe
  misc_feature (1)..(25): SEQ ID NO: 6433; WAN024AX8_x_at; Start 18; Stop 42
aaaaatgttgtctgaaactattcgc

SEQ ID NO: 68916 - DNA, 25 bp, Artificial
  probe
  misc_feature (1)..(25): SEQ ID NO: 6433; WAN024AX8_x_at; Start 16; Stop 40
ataaaaatgttgtctgaaactattc

SEQ ID NO: 68917 - DNA, 25 bp, Artificial
  probe
  misc_feature (1)..(25): SEQ ID NO: 6433; WAN024AX8_x_at; Start 26; Stop 50
tgtctgaaactattcgcttttttcc

SEQ ID NO: 68918 - DNA, 25 bp, Artificial
  probe
  misc_feature (1)..(25): SEQ ID NO: 6432; WAN024AX9_x_at; Start 19; Stop 43
aaaatgttgtctgaaactattcgcc

SEQ ID NO: 68919 - DNA, 25 bp, Artificial
  probe
  misc_feature (1)..(25): SEQ ID NO: 6432; WAN024AX9_x_at; Start 9; Stop 33
gtttcttataaaaatgttgtctgaa

SEQ ID NO: 68920 - DNA, 25 bp, Artificial
  probe
  misc_feature (1)..(25): SEQ ID NO: 6432; WAN024AX9_x_at; Start 1; Stop 25
atgaacttgtttcttataaaaatgt

SEQ ID NO: 68921 - DNA, 25 bp, Artificial
  probe
  misc_feature (1)..(25): SEQ ID NO: 6432; WAN024AX9_x_at; Start 17; Stop 41
taaaaatgttgtctgaaactattcg

SEQ ID NO: 68922 - DNA, 25 bp, Artificial
  probe
  misc_feature (1)..(25): SEQ ID NO: 6432; WAN024AX9_x_at; Start 12; Stop 36
tcttataaaaatgttgtctgaaact

SEQ ID NO: 68923 - DNA, 25 bp, Artificial
  probe
  misc_feature (1)..(25): SEQ ID NO: 6432; WAN024AX9_x_at; Start 10; Stop 34
tttcttataaaaatgttgtctgaaa

SEQ ID NO: 68924 - DNA, 25 bp, Artificial
  probe
  misc_feature (1)..(25): SEQ ID NO: 6432; WAN024AX9_x_at; Start 11; Stop 35
ttcttataaaaatgttgtctgaaac

SEQ ID NO: 68925 - DNA, 25 bp, Artificial
  probe
  misc_feature (1)..(25): SEQ ID NO: 6432; WAN024AX9_x_at; Start 75; Stop 99
tatgaggaaaaaggagttactcaaa

SEQ ID NO: 68926 - DNA, 25 bp, Artificial
  probe
  misc_feature (1)..(25): SEQ ID NO: 6432; WAN024AX9_x_at; Start 14; Stop 38
ttataaaaatgttgtctgaaactat

SEQ ID NO: 68927 - DNA, 25 bp, Artificial
  probe
  misc_feature (1)..(25): SEQ ID NO: 6432; WAN024AX9_x_at; Start 8; Stop 32
tgtttcttataaaaatgttgtctga

SEQ ID NO: 68928 - DNA, 25 bp, Artificial
  probe
  misc_feature (1)..(25): SEQ ID NO: 6432; WAN024AX9_x_at; Start 28; Stop 52
tctgaaactattcgcctttttccag

SEQ ID NO: 68929 - DNA, 25 bp, Artificial
  probe
  misc_feature (1)..(25): SEQ ID NO: 6432; WAN024AX9_x_at; Start 74; Stop 98
ttatgaggaaaaaggagttactcaa

SEQ ID NO: 68930 - DNA, 25 bp, Artificial
  probe
  misc_feature (1)..(25): SEQ ID NO: 6432; WAN024AX9_x_at; Start 58; Stop 82
ttagaggaagaaaactttatgagga

SEQ ID NO: 68931 - DNA, 25 bp, Artificial
  probe
  misc_feature (1)..(25): SEQ ID NO: 6432; WAN024AX9_x_at; Start 27; Stop 51
gtctgaaactattcgcctttttcca

SEQ ID NO: 68932 - DNA, 25 bp, Artificial
  probe
  misc_feature (1)..(25): SEQ ID NO: 6432; WAN024AX9_x_at; Start 7; Stop 31
ttgtttcttataaaaatgttgtctg

SEQ ID NO: 68933 - DNA, 25 bp, Artificial
  probe
  misc_feature (1)..(25): SEQ ID NO: 6432; WAN024AX9_x_at; Start 22; Stop 46
atgttgtctgaaactattcgccttt

SEQ ID NO: 68934 - DNA, 25 bp, Artificial
  probe
  misc_feature (1)..(25): SEQ ID NO: 6432; WAN024AX9_x_at; Start 13; Stop 37
cttataaaaatgttgtctgaaacta

SEQ ID NO: 68935 - DNA, 25 bp, Artificial
  probe
  misc_feature (1)..(25): SEQ ID NO: 6432; WAN024AX9_x_at; Start 29; Stop 53
ctgaaactattcgcctttttccaga

SEQ ID NO: 68936 - DNA, 25 bp, Artificial
  probe
  misc_feature (1)..(25): SEQ ID NO: 6432; WAN024AX9_x_at; Start 15; Stop 39
tataaaaatgttgtctgaaactatt

SEQ ID NO: 68937 - DNA, 25 bp, Artificial
  probe
  misc_feature (1)..(25): SEQ ID NO: 6432; WAN024AX9_x_at; Start 21; Stop 45
aatgttgtctgaaactattcgcctt

SEQ ID NO: 68938 - DNA, 25 bp, Artificial
  probe
  misc_feature (1)..(25): SEQ ID NO: 6432; WAN024AX9_x_at; Start 23; Stop 47
tgttgtctgaaactattcgcctttt

SEQ ID NO: 68939 - DNA, 25 bp, Artificial
  probe
  misc_feature (1)..(25): SEQ ID NO: 6432; WAN024AX9_x_at; Start 59; Stop 83
tagaggaagaaaactttatgaggaa

SEQ ID NO: 68940 - DNA, 25 bp, Artificial
  probe
  misc_feature (1)..(25): SEQ ID NO: 6432; WAN024AX9_x_at; Start 30; Stop 54
tgaaactattcgcctttttccagaa

SEQ ID NO: 68941 - DNA, 25 bp, Artificial
  probe
  misc_feature (1)..(25): SEQ ID NO: 6432; WAN024AX9_x_at; Start 73; Stop 97
tttatgaggaaaaaggagttactca

SEQ ID NO: 68942 - DNA, 25 bp, Artificial
  probe
  misc_feature (1)..(25): SEQ ID NO: 6432; WAN024AX9_x_at; Start 6; Stop 30
cttgtttcttataaaaatgttgtct

SEQ ID NO: 68943 - DNA, 25 bp, Artificial
  probe
  misc_feature (1)..(25): SEQ ID NO: 6432; WAN024AX9_x_at; Start 18; Stop 42
aaaaatgttgtctgaaactattcgc

SEQ ID NO: 68944 - DNA, 25 bp, Artificial
  probe
  misc_feature (1)..(25): SEQ ID NO: 6432; WAN024AX9_x_at; Start 16; Stop 40
ataaaaatgttgtctgaaactattc

SEQ ID NO: 68945 - DNA, 25 bp, Artificial
  probe
  misc_feature (1)..(25): SEQ ID NO: 6432; WAN024AX9_x_at; Start 26; Stop 50
tgtctgaaactattcgcctttttcc

SEQ ID NO: 68946 - DNA, 25 bp, Artificial
  probe
  misc_feature (1)..(25): SEQ ID NO: 6432; WAN024AX9_x_at; Start 20; Stop 44
aaatgttgtctgaaactattcgcct

SEQ ID NO: 68947 - DNA, 25 bp, Artificial
  probe
  misc_feature (1)..(25): SEQ ID NO: 6432; WAN024AX9_x_at; Start 25; Stop 49
ttgtctgaaactattcgcctttttc

SEQ ID NO: 68948 - DNA, 25 bp, Artificial
  probe
  misc_feature (1)..(25): SEQ ID NO: 2538; WAN024AXB_at; Start 38; Stop 62
attgccagaaaatgggggatcggtt

SEQ ID NO: 68949 - DNA, 25 bp, Artificial
  probe
  misc_feature (1)..(25): SEQ ID NO: 2538; WAN024AXB_at; Start 43; Stop 67
cagaaaatgggggatcggttcgctt

SEQ ID NO: 68950 - DNA, 25 bp, Artificial
  probe
  misc_feature (1)..(25): SEQ ID NO: 2538; WAN024AXB_at; Start 39; Stop 63
ttgccagaaaatgggggatcggttc

SEQ ID NO: 68951 - DNA, 25 bp, Artificial
  probe
  misc_feature (1)..(25): SEQ ID NO: 2538; WAN024AXB_at; Start 37; Stop 61
gattgccagaaaatgggggatcggt

SEQ ID NO: 68952 - DNA, 25 bp, Artificial
  probe
  misc_feature (1)..(25): SEQ ID NO: 2538; WAN024AXB_at; Start 49; Stop 73
atgggggatcggttcgcttttggtg

SEQ ID NO: 68953 - DNA, 25 bp, Artificial
  probe
  misc_feature (1)..(25): SEQ ID NO: 2538; WAN024AXB_at; Start 34; Stop 58
aaggattgccagaaaatgggggatc

SEQ ID NO: 68954 - DNA, 25 bp, Artificial
  probe
  misc_feature (1)..(25): SEQ ID NO: 2538; WAN024AXB_at; Start 35; Stop 59
aggattgccagaaaatgggggatcg

SEQ ID NO: 68955 - DNA, 25 bp, Artificial
  probe
  misc_feature (1)..(25): SEQ ID NO: 2538; WAN024AXB_at; Start 40; Stop 64
tgccagaaaatgggggatcggttcg

SEQ ID NO: 68956 - DNA, 25 bp, Artificial
  probe
  misc_feature (1)..(25): SEQ ID NO: 2538; WAN024AXB_at; Start 33; Stop 57
taaggattgccagaaaatgggggat

SEQ ID NO: 68957 - DNA, 25 bp, Artificial
  probe
  misc_feature (1)..(25): SEQ ID NO: 2538; WAN024AXB_at; Start 36; Stop 60
ggattgccagaaaatgggggatcgg

SEQ ID NO: 68958 - DNA, 25 bp, Artificial
  probe
  misc_feature (1)..(25): SEQ ID NO: 2538; WAN024AXB_at; Start 32; Stop 56
ataaggattgccagaaaatggggga

SEQ ID NO: 68959 - DNA, 25 bp, Artificial
  probe
  misc_feature (1)..(25): SEQ ID NO: 2538; WAN024AXB_at; Start 41; Stop 65
gccagaaaatgggggatcggttcgc

SEQ ID NO: 68960 - DNA, 25 bp, Artificial
  probe
  misc_feature (1)..(25): SEQ ID NO: 2538; WAN024AXB_at; Start 42; Stop 66
ccagaaaatgggggatcggttcgct

SEQ ID NO: 68961 - DNA, 25 bp, Artificial
  probe
  misc_feature (1)..(25): SEQ ID NO: 2362; WAN024AXC_at; Start 1; Stop 25
atggattctatagagttttttcatg

SEQ ID NO: 68962 - DNA, 25 bp, Artificial
  probe
  misc_feature (1)..(25): SEQ ID NO: 2362; WAN024AXC_at; Start 10; Stop 34
atagagttttttcatgacaagacct

SEQ ID NO: 68963 - DNA, 25 bp, Artificial
  probe
  misc_feature (1)..(25): SEQ ID NO: 2362; WAN024AXC_at; Start 78; Stop 102
tacaactaaaatgataaaaatagca

SEQ ID NO: 68964 - DNA, 25 bp, Artificial
  probe
  misc_feature (1)..(25): SEQ ID NO: 2362; WAN024AXC_at; Start 36; Stop 60
cctcttttatctaacttcattctac

SEQ ID NO: 68965 - DNA, 25 bp, Artificial
  probe
  misc_feature (1)..(25): SEQ ID NO: 2362; WAN024AXC_at; Start 38; Stop 62
tcttttatctaacttcattctactc

SEQ ID NO: 68966 - DNA, 25 bp, Artificial
  probe
  misc_feature (1)..(25): SEQ ID NO: 2362; WAN024AXC_at; Start 2; Stop 26
tggattctatagagttttttcatga

SEQ ID NO: 68967 - DNA, 25 bp, Artificial
  probe
  misc_feature (1)..(25): SEQ ID NO: 2362; WAN024AXC_at; Start 69; Stop 93
aatgggagttacaactaaaatgata

SEQ ID NO: 68968 - DNA, 25 bp, Artificial
  probe
  misc_feature (1)..(25): SEQ ID NO: 2362; WAN024AXC_at; Start 9; Stop 33
tatagagttttttcatgacaagacc

SEQ ID NO: 68969 - DNA, 25 bp, Artificial
  probe
  misc_feature (1)..(25): SEQ ID NO: 2362; WAN024AXC_at; Start 79; Stop 103
acaactaaaatgataaaaatagcag

SEQ ID NO: 68970 - DNA, 25 bp, Artificial
  probe
  misc_feature (1)..(25): SEQ ID NO: 2362; WAN024AXC_at; Start 4; Stop 28
gattctatagagttttttcatgaca

SEQ ID NO: 68971 - DNA, 25 bp, Artificial
  probe
  misc_feature (1)..(25): SEQ ID NO: 2362; WAN024AXC_at; Start 3; Stop 27
ggattctatagagttttttcatgac

SEQ ID NO: 68972 - DNA, 25 bp, Artificial
  probe
  misc_feature (1)..(25): SEQ ID NO: 2362; WAN024AXC_at; Start 80; Stop 104
caactaaaatgataaaaatagcaga

SEQ ID NO: 68973 - DNA, 25 bp, Artificial
  probe
  misc_feature (1)..(25): SEQ ID NO: 2362; WAN024AXC_at; Start 77; Stop 101
ttacaactaaaatgataaaaatagc

SEQ ID NO: 68974 - DNA, 25 bp, Artificial
  probe
  misc_feature (1)..(25): SEQ ID NO: 2362; WAN024AXC_at; Start 6; Stop 30
ttctatagagttttttcatgacaag

SEQ ID NO: 68975 - DNA, 25 bp, Artificial
  probe
  misc_feature (1)..(25): SEQ ID NO: 2362; WAN024AXC_at; Start 70; Stop 94
atgggagttacaactaaaatgataa

SEQ ID NO: 68976 - DNA, 25 bp, Artificial
  probe
  misc_feature (1)..(25): SEQ ID NO: 2362; WAN024AXC_at; Start 66; Stop 90
aagaatgggagttacaactaaaatg

SEQ ID NO: 68977 - DNA, 25 bp, Artificial
  probe
  misc_feature (1)..(25): SEQ ID NO: 2362; WAN024AXC_at; Start 5; Stop 29
attctatagagttttttcatgacaa

SEQ ID NO: 68978 - DNA, 25 bp, Artificial
  probe
  misc_feature (1)..(25): SEQ ID NO: 2362; WAN024AXC_at; Start 37; Stop 61
ctcttttatctaacttcattctact

SEQ ID NO: 68979 - DNA, 25 bp, Artificial
  probe
  misc_feature (1)..(25): SEQ ID NO: 2362; WAN024AXC_at; Start 67; Stop 91
agaatgggagttacaactaaaatga

SEQ ID NO: 68980 - DNA, 25 bp, Artificial
  probe
  misc_feature (1)..(25): SEQ ID NO: 2362; WAN024AXC_at; Start 7; Stop 31
tctatagagttttttcatgacaaga

SEQ ID NO: 68981 - DNA, 25 bp, Artificial
  probe
  misc_feature (1)..(25): SEQ ID NO: 2362; WAN024AXC_at; Start 68; Stop 92
gaatgggagttacaactaaaatgat

SEQ ID NO: 68982 - DNA, 25 bp, Artificial
  probe
  misc_feature (1)..(25): SEQ ID NO: 2362; WAN024AXC_at; Start 71; Stop 95
tgggagttacaactaaaatgataaa

SEQ ID NO: 68983 - DNA, 25 bp, Artificial
  probe
  misc_feature (1)..(25): SEQ ID NO: 2362; WAN024AXC_at; Start 8; Stop 32
ctatagagttttttcatgacaagac

SEQ ID NO: 68984 - DNA, 25 bp, Artificial
  probe
  misc_feature (1)..(25): SEQ ID NO: 16; WAN024AXE_s_at; Start 21; Stop 45
tggtgcagtctttgcccatgaagca

SEQ ID NO: 68985 - DNA, 25 bp, Artificial
  probe
  misc_feature (1)..(25): SEQ ID NO: 16; WAN024AXE_s_at; Start 14; Stop 38
ttgttgttggtgcagtctttgccca

SEQ ID NO: 68986 - DNA, 25 bp, Artificial
  probe
  misc_feature (1)..(25): SEQ ID NO: 16; WAN024AXE_s_at; Start 15; Stop 39
tgttgttggtgcagtctttgcccat

SEQ ID NO: 68987 - DNA, 25 bp, Artificial
  probe
  misc_feature (1)..(25): SEQ ID NO: 16; WAN024AXE_s_at; Start 19; Stop 43
gttggtgcagtctttgcccatgaag

SEQ ID NO: 68988 - DNA, 25 bp, Artificial
  probe
  misc_feature (1)..(25): SEQ ID NO: 16; WAN024AXE_s_at; Start 16; Stop 40
gttgttggtgcagtctttgcccatg

SEQ ID NO: 68989 - DNA, 25 bp, Artificial
  probe
  misc_feature (1)..(25): SEQ ID NO: 16; WAN024AXE_s_at; Start 6; Stop 30
cgattatcttgttgttggtgcagtc

SEQ ID NO: 68990 - DNA, 25 bp, Artificial
  probe
  misc_feature (1)..(25): SEQ ID NO: 16; WAN024AXE_s_at; Start 1; Stop 25
atgtacgattatcttgttgttggtg

SEQ ID NO: 68991 - DNA, 25 bp, Artificial
  probe
  misc_feature (1)..(25): SEQ ID NO: 16; WAN024AXE_s_at; Start 10; Stop 34
tatcttgttgttggtgcagtctttg

SEQ ID NO: 68992 - DNA, 25 bp, Artificial
  probe
  misc_feature (1)..(25): SEQ ID NO: 16; WAN024AXE_s_at; Start 20; Stop 44
ttggtgcagtctttgcccatgaagc

SEQ ID NO: 68993 - DNA, 25 bp, Artificial
  probe
  misc_feature (1)..(25): SEQ ID NO: 16; WAN024AXE_s_at; Start 22; Stop 46
ggtgcagtctttgcccatgaagcag

SEQ ID NO: 68994 - DNA, 25 bp, Artificial
  probe
  misc_feature (1)..(25): SEQ ID NO: 16; WAN024AXE_s_at; Start 8; Stop 32
attatcttgttgttggtgcagtctt

SEQ ID NO: 68995 - DNA, 25 bp, Artificial
  probe
  misc_feature (1)..(25): SEQ ID NO: 16; WAN024AXE_s_at; Start 7; Stop 31
gattatcttgttgttggtgcagtct

SEQ ID NO: 68996 - DNA, 25 bp, Artificial
  probe
  misc_feature (1)..(25): SEQ ID NO: 16; WAN024AXE_s_at; Start 18; Stop 42
tgttggtgcagtctttgcccatgaa

SEQ ID NO: 68997 - DNA, 25 bp, Artificial
  probe
  misc_feature (1)..(25): SEQ ID NO: 16; WAN024AXE_s_at; Start 13; Stop 37
cttgttgttggtgcagtctttgccc

SEQ ID NO: 68998 - DNA, 25 bp, Artificial
  probe
  misc_feature (1)..(25): SEQ ID NO: 16; WAN024AXE_s_at; Start 12; Stop 36
tcttgttgttggtgcagtctttgcc

SEQ ID NO: 68999 - DNA, 25 bp, Artificial
  probe
  misc_feature (1)..(25): SEQ ID NO: 16; WAN024AXE_s_at; Start 17; Stop 41
ttgttggtgcagtctttgcccatga

SEQ ID NO: 69000 - DNA, 25 bp, Artificial
  probe
  misc_feature (1)..(25): SEQ ID NO: 16; WAN024AXE_s_at; Start 11; Stop 35
atcttgttgttggtgcagtctttgc

SEQ ID NO: 69001 - DNA, 25 bp, Artificial
  probe
  misc_feature (1)..(25): SEQ ID NO: 16; WAN024AXE_s_at; Start 9; Stop 33
ttatcttgttgttggtgcagtcttt

SEQ ID NO: 69002 - DNA, 25 bp, Artificial
  probe
  misc_feature (1)..(25): SEQ ID NO: 16; WAN024AXE_s_at; Start 5; Stop 29
acgattatcttgttgttggtgcagt

SEQ ID NO: 69003 - DNA, 25 bp, Artificial
  probe
  misc_feature (1)..(25): SEQ ID NO: 6945; WAN024AXK_at; Start 89; Stop 113
ttgataaacgcgatcacattggagg

SEQ ID NO: 69004 - DNA, 25 bp, Artificial
  probe
  misc_feature (1)..(25): SEQ ID NO: 6945; WAN024AXK_at; Start 33; Stop 57
gtctggagctatttttgctcacgaa

SEQ ID NO: 69005 - DNA, 25 bp, Artificial
  probe
  misc_feature (1)..(25): SEQ ID NO: 6945; WAN024AXK_at; Start 32; Stop 56
tgtctggagctatttttgctcacga

SEQ ID NO: 69006 - DNA, 25 bp, Artificial
  probe
  misc_feature (1)..(25): SEQ ID NO: 6945; WAN024AXK_at; Start 36; Stop 60
tggagctatttttgctcacgaagct

SEQ ID NO: 69007 - DNA, 25 bp, Artificial
  probe
  misc_feature (1)..(25): SEQ ID NO: 6945; WAN024AXK_at; Start 26; Stop 50
cgggtttgtctggagctatttttgc

SEQ ID NO: 69008 - DNA, 25 bp, Artificial
  probe
  misc_feature (1)..(25): SEQ ID NO: 6945; WAN024AXK_at; Start 94; Stop 118
aaacgcgatcacattggagggaaca

SEQ ID NO: 69009 - DNA, 25 bp, Artificial
  probe
  misc_feature (1)..(25): SEQ ID NO: 6945; WAN024AXK_at; Start 90; Stop 114
tgataaacgcgatcacattggaggg

SEQ ID NO: 69010 - DNA, 25 bp, Artificial
  probe
  misc_feature (1)..(25): SEQ ID NO: 6945; WAN024AXK_at; Start 6; Stop 30
cgactatctaatcgtcggtgcgggt

SEQ ID NO: 69011 - DNA, 25 bp, Artificial
  probe
  misc_feature (1)..(25): SEQ ID NO: 6945; WAN024AXK_at; Start 91; Stop 115
gataaacgcgatcacattggaggga

SEQ ID NO: 69012 - DNA, 25 bp, Artificial
  probe
  misc_feature (1)..(25): SEQ ID NO: 6945; WAN024AXK_at; Start 92; Stop 116
ataaacgcgatcacattggagggaa

SEQ ID NO: 69013 - DNA, 25 bp, Artificial
  probe
  misc_feature (1)..(25): SEQ ID NO: 6945; WAN024AXK_at; Start 39; Stop 63
agctatttttgctcacgaagctaca

SEQ ID NO: 69014 - DNA, 25 bp, Artificial
  probe
  misc_feature (1)..(25): SEQ ID NO: 6945; WAN024AXK_at; Start 27; Stop 51
gggtttgtctggagctatttttgct

SEQ ID NO: 69015 - DNA, 25 bp, Artificial
  probe
  misc_feature (1)..(25): SEQ ID NO: 6945; WAN024AXK_at; Start 40; Stop 64
gctatttttgctcacgaagctacaa

SEQ ID NO: 69016 - DNA, 25 bp, Artificial
  probe
  misc_feature (1)..(25): SEQ ID NO: 6945; WAN024AXK_at; Start 98; Stop 122
gcgatcacattggagggaacatcta

SEQ ID NO: 69017 - DNA, 25 bp, Artificial
  probe
  misc_feature (1)..(25): SEQ ID NO: 6945; WAN024AXK_at; Start 93; Stop 117
taaacgcgatcacattggagggaac

SEQ ID NO: 69018 - DNA, 25 bp, Artificial
  probe
  misc_feature (1)..(25): SEQ ID NO: 6945; WAN024AXK_at; Start 360; Stop 384
ggctgatacgaaggatgttgagcca

SEQ ID NO: 69019 - DNA, 25 bp, Artificial
  probe
  misc_feature (1)..(25): SEQ ID NO: 6945; WAN024AXK_at; Start 41; Stop 65
ctatttttgctcacgaagctacaaa

SEQ ID NO: 69020 - DNA, 25 bp, Artificial
  probe
  misc_feature (1)..(25): SEQ ID NO: 6945; WAN024AXK_at; Start 24; Stop 48
tgcgggtttgtctggagctattttt

SEQ ID NO: 69021 - DNA, 25 bp, Artificial
  probe
  misc_feature (1)..(25): SEQ ID NO: 6945; WAN024AXK_at; Start 29; Stop 53
gtttgtctggagctatttttgctca

SEQ ID NO: 69022 - DNA, 25 bp, Artificial
  probe
  misc_feature (1)..(25): SEQ ID NO: 6945; WAN024AXK_at; Start 42; Stop 66
tatttttgctcacgaagctacaaaa

SEQ ID NO: 69023 - DNA, 25 bp, Artificial
  probe
  misc_feature (1)..(25): SEQ ID NO: 6945; WAN024AXK_at; Start 30; Stop 54
tttgtctggagctatttttgctcac

SEQ ID NO: 69024 - DNA, 25 bp, Artificial
  probe
  misc_feature (1)..(25): SEQ ID NO: 6945; WAN024AXK_at; Start 7; Stop 31
gactatctaatcgtcggtgcgggtt

SEQ ID NO: 69025 - DNA, 25 bp, Artificial
  probe
  misc_feature (1)..(25): SEQ ID NO: 6945; WAN024AXK_at; Start 9; Stop 33
ctatctaatcgtcggtgcgggtttg

SEQ ID NO: 69026 - DNA, 25 bp, Artificial
  probe
  misc_feature (1)..(25): SEQ ID NO: 6945; WAN024AXK_at; Start 28; Stop 52
ggtttgtctggagctatttttgctc

SEQ ID NO: 69027 - DNA, 25 bp, Artificial
  probe
  misc_feature (1)..(25): SEQ ID NO: 6945; WAN024AXK_at; Start 88; Stop 112
attgataaacgcgatcacattggag

SEQ ID NO: 69028 - DNA, 25 bp, Artificial
  probe
  misc_feature (1)..(25): SEQ ID NO: 6945; WAN024AXK_at; Start 37; Stop 61
ggagctatttttgctcacgaagcta

SEQ ID NO: 69029 - DNA, 25 bp, Artificial
  probe
  misc_feature (1)..(25): SEQ ID NO: 6945; WAN024AXK_at; Start 96; Stop 120
acgcgatcacattggagggaacatc

SEQ ID NO: 69030 - DNA, 25 bp, Artificial
  probe
  misc_feature (1)..(25): SEQ ID NO: 6945; WAN024AXK_at; Start 25; Stop 49
gcgggtttgtctggagctatttttg

SEQ ID NO: 69031 - DNA, 25 bp, Artificial
  probe
  misc_feature (1)..(25): SEQ ID NO: 6945; WAN024AXK_at; Start 34; Stop 58
tctggagctatttttgctcacgaag

SEQ ID NO: 69032 - DNA, 25 bp, Artificial
  probe
  misc_feature (1)..(25): SEQ ID NO: 6945; WAN024AXK_at; Start 35; Stop 59
ctggagctatttttgctcacgaagc

SEQ ID NO: 69033 - DNA, 25 bp, Artificial
  probe
  misc_feature (1)..(25): SEQ ID NO: 6945; WAN024AXK_at; Start 8; Stop 32
actatctaatcgtcggtgcgggttt

SEQ ID NO: 69034 - DNA, 25 bp, Artificial
  probe
  misc_feature (1)..(25): SEQ ID NO: 6945; WAN024AXK_at; Start 97; Stop 121
cgcgatcacattggagggaacatct

SEQ ID NO: 69035 - DNA, 25 bp, Artificial
  probe
  misc_feature (1)..(25): SEQ ID NO: 6945; WAN024AXK_at; Start 38; Stop 62
gagctatttttgctcacgaagctac

SEQ ID NO: 69036 - DNA, 25 bp, Artificial
  probe
  misc_feature (1)..(25): SEQ ID NO: 6945; WAN024AXK_at; Start 95; Stop 119
aacgcgatcacattggagggaacat

SEQ ID NO: 69037 - DNA, 25 bp, Artificial
  probe
  misc_feature (1)..(25): SEQ ID NO: 6951; WAN024AXL_s_at; Start 860; Stop 884
atggaatgcagccaaagacagttat

SEQ ID NO: 69038 - DNA, 25 bp, Artificial
  probe
  misc_feature (1)..(25): SEQ ID NO: 6951; WAN024AXL_s_at; Start 857; Stop 881
aatatggaatgcagccaaagacagt

SEQ ID NO: 69039 - DNA, 25 bp, Artificial
  probe
  misc_feature (1)..(25): SEQ ID NO: 6951; WAN024AXL_s_at; Start 750; Stop 774
ttttgagcatgagattttagacgag

SEQ ID NO: 69040 - DNA, 25 bp, Artificial
  probe
  misc_feature (1)..(25): SEQ ID NO: 6951; WAN024AXL_s_at; Start 749; Stop 773
gttttgagcatgagattttagacga

SEQ ID NO: 69041 - DNA, 25 bp, Artificial
  probe
  misc_feature (1)..(25): SEQ ID NO: 6951; WAN024AXL_s_at; Start 852; Stop 876
ttttgaatatggaatgcagccaaag

SEQ ID NO: 69042 - DNA, 25 bp, Artificial
  probe
  misc_feature (1)..(25): SEQ ID NO: 6951; WAN024AXL_s_at; Start 851; Stop 875
attttgaatatggaatgcagccaaa

SEQ ID NO: 69043 - DNA, 25 bp, Artificial
  probe
  misc_feature (1)..(25): SEQ ID NO: 6951; WAN024AXL_s_at; Start 855; Stop 879
tgaatatggaatgcagccaaagaca

SEQ ID NO: 69044 - DNA, 25 bp, Artificial
  probe
  misc_feature (1)..(25): SEQ ID NO: 6951; WAN024AXL_s_at; Start 748; Stop 772
cgttttgagcatgagattttagacg

SEQ ID NO: 69045 - DNA, 25 bp, Artificial
  probe
  misc_feature (1)..(25): SEQ ID NO: 6951; WAN024AXL_s_at; Start 858; Stop 882
atatggaatgcagccaaagacagtt

SEQ ID NO: 69046 - DNA, 25 bp, Artificial
  probe
  misc_feature (1)..(25): SEQ ID NO: 6951; WAN024AXL_s_at; Start 854; Stop 878
ttgaatatggaatgcagccaaagac

SEQ ID NO: 69047 - DNA, 25 bp, Artificial
  probe
  misc_feature (1)..(25): SEQ ID NO: 6951; WAN024AXL_s_at; Start 861; Stop 885
tggaatgcagccaaagacagttatc

SEQ ID NO: 69048 - DNA, 25 bp, Artificial
  probe
  misc_feature (1)..(25): SEQ ID NO: 6951; WAN024AXL_s_at; Start 859; Stop 883
tatggaatgcagccaaagacagtta

SEQ ID NO: 69049 - DNA, 25 bp, Artificial
  probe
  misc_feature (1)..(25): SEQ ID NO: 6951; WAN024AXL_s_at; Start 853; Stop 877
tttgaatatggaatgcagccaaaga

SEQ ID NO: 69050 - DNA, 25 bp, Artificial
  probe
  misc_feature (1)..(25): SEQ ID NO: 6951; WAN024AXL_s_at; Start 856; Stop 880
gaatatggaatgcagccaaagacag

SEQ ID NO: 69051 - DNA, 25 bp, Artificial
  probe
  misc_feature (1)..(25): SEQ ID NO: 6951; WAN024AXL_s_at; Start 747; Stop 771
tcgttttgagcatgagattttagac

SEQ ID NO: 69052 - DNA, 25 bp, Artificial
  probe
  misc_feature (1)..(25): SEQ ID NO: 6951; WAN024AXL_s_at; Start 862; Stop 886
ggaatgcagccaaagacagttatca

SEQ ID NO: 69053 - DNA, 25 bp, Artificial
  probe
  misc_feature (1)..(25): SEQ ID NO: 2776; WAN024AXM_at; Start 718; Stop 742
cagtttggtgaactagagtatcgca

SEQ ID NO: 69054 - DNA, 25 bp, Artificial
  probe
  misc_feature (1)..(25): SEQ ID NO: 2776; WAN024AXM_at; Start 513; Stop 537
gccagttcgattgacctatgataac

SEQ ID NO: 69055 - DNA, 25 bp, Artificial
  probe
  misc_feature (1)..(25): SEQ ID NO: 2776; WAN024AXM_at; Start 375; Stop 399
tgttgagccaaaaaacctagaggaa

SEQ ID NO: 69056 - DNA, 25 bp, Artificial
  probe
  misc_feature (1)..(25): SEQ ID NO: 2776; WAN024AXM_at; Start 420; Stop 444
tacggatgtctatgaaaagctgatt

SEQ ID NO: 69057 - DNA, 25 bp, Artificial
  probe
  misc_feature (1)..(25): SEQ ID NO: 2776; WAN024AXM_at; Start 483; Stop 507
tgagctgccaccctttatcatcaag

SEQ ID NO: 69058 - DNA, 25 bp, Artificial
  probe
  misc_feature (1)..(25): SEQ ID NO: 2776; WAN024AXM_at; Start 1015; Stop 1039
ggtcgcttggcagattataaatact

SEQ ID NO: 69059 - DNA, 25 bp, Artificial
  probe
  misc_feature (1)..(25): SEQ ID NO: 2776; WAN024AXM_at; Start 532; Stop 556
gataacaattatttcaacgaccgct

SEQ ID NO: 69060 - DNA, 25 bp, Artificial
  probe
  misc_feature (1)..(25): SEQ ID NO: 2776; WAN024AXM_at; Start 390; Stop 414
cctagaggaacaagccattaagttg

SEQ ID NO: 69061 - DNA, 25 bp, Artificial
  probe
  misc_feature (1)..(25): SEQ ID NO: 2776; WAN024AXM_at; Start 854; Stop 878
ttgagtttgggacccaggacaagac

SEQ ID NO: 69062 - DNA, 25 bp, Artificial
  probe
  misc_feature (1)..(25): SEQ ID NO: 2776; WAN024AXM_at; Start 943; Stop 967
gatgctaaaaacaatgcaatctatg

SEQ ID NO: 69063 - DNA, 25 bp, Artificial
  probe
  misc_feature (1)..(25): SEQ ID NO: 2776; WAN024AXM_at; Start 870; Stop 894
ggacaagaccgttattactcgtgaa

SEQ ID NO: 69064 - DNA, 25 bp, Artificial
  probe
  misc_feature (1)..(25): SEQ ID NO: 2776; WAN024AXM_at; Start 540; Stop 564
ttatttcaacgaccgctaccaagga

SEQ ID NO: 69065 - DNA, 25 bp, Artificial
  probe
  misc_feature (1)..(25): SEQ ID NO: 2776; WAN024AXM_at; Start 598; Stop 622
aatatgcttggcgatgtggaagttg

SEQ ID NO: 69066 - DNA, 25 bp, Artificial
  probe
  misc_feature (1)..(25): SEQ ID NO: 2776; WAN024AXM_at; Start 468; Stop 492
gggacgttctgctactgagctgcca

SEQ ID NO: 69067 - DNA, 25 bp, Artificial
  probe
  misc_feature (1)..(25): SEQ ID NO: 2776; WAN024AXM_at; Start 1033; Stop 1057
aaatactatgatatgcatgtgacgg

SEQ ID NO: 69068 - DNA, 25 bp, Artificial
  probe
  misc_feature (1)..(25): SEQ ID NO: 2776; WAN024AXM_at; Start 1067; Stop 1091
cattggatgtggtagaagaagaact

SEQ ID NO: 69069 - DNA, 25 bp, Artificial
  probe
  misc_feature (1)..(25): SEQ ID NO: 2776; WAN024AXM_at; Start 1002; Stop 1026
cgtgatcttttgtggtcgcttggca

SEQ ID NO: 69070 - DNA, 25 bp, Artificial
  probe
  misc_feature (1)..(25): SEQ ID NO: 2776; WAN024AXM_at; Start 765; Stop 789
tctggaccaagaaaactatcaagga

SEQ ID NO: 69071 - DNA, 25 bp, Artificial
  probe
  misc_feature (1)..(25): SEQ ID NO: 2776; WAN024AXM_at; Start 703; Stop 727
cagttctttgactatcagtttggtg

SEQ ID NO: 69072 - DNA, 25 bp, Artificial
  probe
  misc_feature (1)..(25): SEQ ID NO: 2776; WAN024AXM_at; Start 229; Stop 253
aactatatcaattcccctatcgcca

SEQ ID NO: 69073 - DNA, 25 bp, Artificial
  probe
  misc_feature (1)..(25): SEQ ID NO: 2776; WAN024AXM_at; Start 892; Stop 916
gaatatccagcagattggaaaagag

SEQ ID NO: 69074 - DNA, 25 bp, Artificial
  probe
  misc_feature (1)..(25): SEQ ID NO: 2776; WAN024AXM_at; Start 917; Stop 941
gggatgaaccctactatccaatcaa

SEQ ID NO: 69075 - DNA, 25 bp, Artificial
  probe
  misc_feature (1)..(25): SEQ ID NO: 2776; WAN024AXM_at; Start 795; Stop 819
tgtagtcaactatactgaacgtgat

SEQ ID NO: 69076 - DNA, 25 bp, Artificial
  probe
  misc_feature (1)..(25): SEQ ID NO: 2776; WAN024AXM_at; Start 748; Stop 772
cgttttgaacatgagattctggacc

SEQ ID NO: 69077 - DNA, 25 bp, Artificial
  probe
  misc_feature (1)..(25): SEQ ID NO: 2776; WAN024AXM_at; Start 246; Stop 270
tatcgccaactatcaagggcacctt

SEQ ID NO: 69078 - DNA, 25 bp, Artificial
  probe
  misc_feature (1)..(25): SEQ ID NO: 2776; WAN024AXM_at; Start 439; Stop 463
ctgattaagggctatactgagaaac

SEQ ID NO: 69079 - DNA, 25 bp, Artificial
  probe
  misc_feature (1)..(25): SEQ ID NO: 2776; WAN024AXM_at; Start 1048; Stop 1072
catgtgacggttgaacgtgcattgg

SEQ ID NO: 69080 - DNA, 25 bp, Artificial
  probe
  misc_feature (1)..(25): SEQ ID NO: 2776; WAN024AXM_at; Start 256; Stop 280
tatcaagggcacctttacaatctgc

SEQ ID NO: 69081 - DNA, 25 bp, Artificial
  probe
  misc_feature (1)..(25): SEQ ID NO: 2776; WAN024AXM_at; Start 985; Stop 1009
gccaagaaaaatgggcgcgtgatct

SEQ ID NO: 69082 - DNA, 25 bp, Artificial
  probe
  misc_feature (1)..(25): SEQ ID NO: 2776; WAN024AXM_at; Start 733; Stop 757
gagtatcgcagtcttcgttttgaac

SEQ ID NO: 69083 - DNA, 25 bp, Artificial
  probe
  misc_feature (1)..(25): SEQ ID NO: 2776; WAN024AXM_at; Start 288; Stop 312
tatgaacactttctacgccttgtgg

SEQ ID NO: 69084 - DNA, 25 bp, Artificial
  probe
  misc_feature (1)..(25): SEQ ID NO: 2776; WAN024AXM_at; Start 405; Stop 429
cattaagttgattggtacggatgtc

SEQ ID NO: 69085 - DNA, 25 bp, Artificial
  probe
  misc_feature (1)..(25): SEQ ID NO: 2776; WAN024AXM_at; Start 498; Stop 522
tatcatcaagcgtttgccagttcga

SEQ ID NO: 69086 - DNA, 25 bp, Artificial
  probe
  misc_feature (1)..(25): SEQ ID NO: 2776; WAN024AXM_at; Start 967; Stop 991
gaacagtatctagcagaagccaaga

SEQ ID NO: 69087 - DNA, 25 bp, Artificial
  probe
  misc_feature (1)..(25): SEQ ID NO: 2301; WAN024AXN_at; Start 430; Stop 454
ggtccagatgtctatgaaaaattaa

SEQ ID NO: 69088 - DNA, 25 bp, Artificial
  probe
  misc_feature (1)..(25): SEQ ID NO: 2301; WAN024AXN_at; Start 1014; Stop 1038
ggtgattttctgcggacgtttggcc

SEQ ID NO: 69089 - DNA, 25 bp, Artificial
  probe
  misc_feature (1)..(25): SEQ ID NO: 2301; WAN024AXN_at; Start 435; Stop 459
agatgtctatgaaaaattaatcaag

SEQ ID NO: 69090 - DNA, 25 bp, Artificial
  probe
  misc_feature (1)..(25): SEQ ID NO: 2301; WAN024AXN_at; Start 431; Stop 455
gtccagatgtctatgaaaaattaat

SEQ ID NO: 69091 - DNA, 25 bp, Artificial
  probe
  misc_feature (1)..(25): SEQ ID NO: 2301; WAN024AXN_at; Start 436; Stop 460
gatgtctatgaaaaattaatcaagg

SEQ ID NO: 69092 - DNA, 25 bp, Artificial
  probe
  misc_feature (1)..(25): SEQ ID NO: 2301; WAN024AXN_at; Start 434; Stop 458
cagatgtctatgaaaaattaatcaa

SEQ ID NO: 69093 - DNA, 25 bp, Artificial
  probe
  misc_feature (1)..(25): SEQ ID NO: 2301; WAN024AXN_at; Start 438; Stop 462
tgtctatgaaaaattaatcaagggt

SEQ ID NO: 69094 - DNA, 25 bp, Artificial
  probe
  misc_feature (1)..(25): SEQ ID NO: 2301; WAN024AXN_at; Start 433; Stop 457
ccagatgtctatgaaaaattaatca

SEQ ID NO: 69095 - DNA, 25 bp, Artificial
  probe
  misc_feature (1)..(25): SEQ ID NO: 2301; WAN024AXN_at; Start 1016; Stop 1040
tgattttctgcggacgtttggccga

SEQ ID NO: 69096 - DNA, 25 bp, Artificial
  probe
  misc_feature (1)..(25): SEQ ID NO: 2301; WAN024AXN_at; Start 437; Stop 461
atgtctatgaaaaattaatcaaggg

SEQ ID NO: 69097 - DNA, 25 bp, Artificial
  probe
  misc_feature (1)..(25): SEQ ID NO: 2301; WAN024AXN_at; Start 429; Stop 453
cggtccagatgtctatgaaaaatta

SEQ ID NO: 69098 - DNA, 25 bp, Artificial
  probe
  misc_feature (1)..(25): SEQ ID NO: 2301; WAN024AXN_at; Start 432; Stop 456
tccagatgtctatgaaaaattaatc

SEQ ID NO: 69099 - DNA, 25 bp, Artificial
  probe
  misc_feature (1)..(25): SEQ ID NO: 2301; WAN024AXN_at; Start 1017; Stop 1041
gattttctgcggacgtttggccgat

SEQ ID NO: 69100 - DNA, 25 bp, Artificial
  probe
  misc_feature (1)..(25): SEQ ID NO: 2301; WAN024AXN_at; Start 1015; Stop 1039
gtgattttctgcggacgtttggccg

SEQ ID NO: 69101 - DNA, 25 bp, Artificial
  probe
  misc_feature (1)..(25): SEQ ID NO: 2300; WAN024AXO_at; Start 477; Stop 501
atggggacgcttcgcgacagaactt

SEQ ID NO: 69102 - DNA, 25 bp, Artificial
  probe
  misc_feature (1)..(25): SEQ ID NO: 2300; WAN024AXO_at; Start 18; Stop 42
cgactatttaatcgttggagctggt

SEQ ID NO: 69103 - DNA, 25 bp, Artificial
  probe
  misc_feature (1)..(25): SEQ ID NO: 2300; WAN024AXO_at; Start 131; Stop 155
tctactgtgagaacgtagaagggat

SEQ ID NO: 69104 - DNA, 25 bp, Artificial
  probe
  misc_feature (1)..(25): SEQ ID NO: 2300; WAN024AXO_at; Start 130; Stop 154
atctactgtgagaacgtagaaggga

SEQ ID NO: 69105 - DNA, 25 bp, Artificial
  probe
  misc_feature (1)..(25): SEQ ID NO: 2300; WAN024AXO_at; Start 475; Stop 499
caatggggacgcttcgcgacagaac

SEQ ID NO: 69106 - DNA, 25 bp, Artificial
  probe
  misc_feature (1)..(25): SEQ ID NO: 2300; WAN024AXO_at; Start 476; Stop 500
aatggggacgcttcgcgacagaact

SEQ ID NO: 69107 - DNA, 25 bp, Artificial
  probe
  misc_feature (1)..(25): SEQ ID NO: 2300; WAN024AXO_at; Start 51; Stop 75
agcaatcttcgcgcacgaagccaca

SEQ ID NO: 69108 - DNA, 25 bp, Artificial
  probe
  misc_feature (1)..(25): SEQ ID NO: 2300; WAN024AXO_at; Start 6; Stop 30
gtgtaatatgtacgactatttaatc

SEQ ID NO: 69109 - DNA, 25 bp, Artificial
  probe
  misc_feature (1)..(25): SEQ ID NO: 2300; WAN024AXO_at; Start 132; Stop 156
ctactgtgagaacgtagaagggatc

SEQ ID NO: 69110 - DNA, 25 bp, Artificial
  probe
  misc_feature (1)..(25): SEQ ID NO: 2300; WAN024AXO_at; Start 60; Stop 84
cgcgcacgaagccacaaaacgtggt

SEQ ID NO: 69111 - DNA, 25 bp, Artificial
  probe
  misc_feature (1)..(25): SEQ ID NO: 2300; WAN024AXO_at; Start 474; Stop 498
gcaatggggacgcttcgcgacagaa

SEQ ID NO: 69112 - DNA, 25 bp, Artificial
  probe
  misc_feature (1)..(25): SEQ ID NO: 2300; WAN024AXO_at; Start 134; Stop 158
actgtgagaacgtagaagggatcaa

SEQ ID NO: 69113 - DNA, 25 bp, Artificial
  probe
  misc_feature (1)..(25): SEQ ID NO: 2300; WAN024AXO_at; Start 479; Stop 503
ggggacgcttcgcgacagaacttcc

SEQ ID NO: 69114 - DNA, 25 bp, Artificial
  probe
  misc_feature (1)..(25): SEQ ID NO: 2300; WAN024AXO_at; Start 473; Stop 497
agcaatggggacgcttcgcgacaga

SEQ ID NO: 69115 - DNA, 25 bp, Artificial
  probe
  misc_feature (1)..(25): SEQ ID NO: 2300; WAN024AXO_at; Start 8; Stop 32
gtaatatgtacgactatttaatcgt

SEQ ID NO: 69116 - DNA, 25 bp, Artificial
  probe
  misc_feature (1)..(25): SEQ ID NO: 2300; WAN024AXO_at; Start 7; Stop 31
tgtaatatgtacgactatttaatcg

SEQ ID NO: 69117 - DNA, 25 bp, Artificial
  probe
  misc_feature (1)..(25): SEQ ID NO: 2300; WAN024AXO_at; Start 50; Stop 74
gagcaatcttcgcgcacgaagccac

SEQ ID NO: 69118 - DNA, 25 bp, Artificial
  probe
  misc_feature (1)..(25): SEQ ID NO: 2300; WAN024AXO_at; Start 4; Stop 28
gagtgtaatatgtacgactatttaa

SEQ ID NO: 69119 - DNA, 25 bp, Artificial
  probe
  misc_feature (1)..(25): SEQ ID NO: 2300; WAN024AXO_at; Start 1; Stop 25
atggagtgtaatatgtacgactatt

SEQ ID NO: 69120 - DNA, 25 bp, Artificial
  probe
  misc_feature (1)..(25): SEQ ID NO: 2300; WAN024AXO_at; Start 133; Stop 157
tactgtgagaacgtagaagggatca

SEQ ID NO: 69121 - DNA, 25 bp, Artificial
  probe
  misc_feature (1)..(25): SEQ ID NO: 2300; WAN024AXO_at; Start 135; Stop 159
ctgtgagaacgtagaagggatcaat

SEQ ID NO: 69122 - DNA, 25 bp, Artificial
  probe
  misc_feature (1)..(25): SEQ ID NO: 2300; WAN024AXO_at; Start 5; Stop 29
agtgtaatatgtacgactatttaat

SEQ ID NO: 69123 - DNA, 25 bp, Artificial
  probe
  misc_feature (1)..(25): SEQ ID NO: 2300; WAN024AXO_at; Start 2; Stop 26
tggagtgtaatatgtacgactattt

SEQ ID NO: 69124 - DNA, 25 bp, Artificial
  probe
  misc_feature (1)..(25): SEQ ID NO: 2300; WAN024AXO_at; Start 49; Stop 73
ggagcaatcttcgcgcacgaagcca

SEQ ID NO: 69125 - DNA, 25 bp, Artificial
  probe
  misc_feature (1)..(25): SEQ ID NO: 2300; WAN024AXO_at; Start 3; Stop 27
ggagtgtaatatgtacgactattta

SEQ ID NO: 69126 - DNA, 25 bp, Artificial
  probe
  misc_feature (1)..(25): SEQ ID NO: 2300; WAN024AXO_at; Start 480; Stop 504
gggacgcttcgcgacagaacttcct

SEQ ID NO: 69127 - DNA, 25 bp, Artificial
  probe
  misc_feature (1)..(25): SEQ ID NO: 2300; WAN024AXO_at; Start 478; Stop 502
tggggacgcttcgcgacagaacttc

SEQ ID NO: 69128 - DNA, 25 bp, Artificial
  probe
  misc_feature (1)..(25): SEQ ID NO: 2773; WAN024AXP_at; Start 782; Stop 806
atcaaggaaatgccgttgttaatta

SEQ ID NO: 69129 - DNA, 25 bp, Artificial
  probe
  misc_feature (1)..(25): SEQ ID NO: 2773; WAN024AXP_at; Start 784; Stop 808
caaggaaatgccgttgttaattata

SEQ ID NO: 69130 - DNA, 25 bp, Artificial
  probe
  misc_feature (1)..(25): SEQ ID NO: 2773; WAN024AXP_at; Start 793; Stop 817
gccgttgttaattatacagaacgag

SEQ ID NO: 69131 - DNA, 25 bp, Artificial
  probe
  misc_feature (1)..(25): SEQ ID NO: 2773; WAN024AXP_at; Start 756; Stop 780
gcatgaagttctagataaggaaaat

SEQ ID NO: 69132 - DNA, 25 bp, Artificial
  probe
  misc_feature (1)..(25): SEQ ID NO: 2773; WAN024AXP_at; Start 781; Stop 805
tatcaaggaaatgccgttgttaatt

SEQ ID NO: 69133 - DNA, 25 bp, Artificial
  probe
  misc_feature (1)..(25): SEQ ID NO: 2773; WAN024AXP_at; Start 790; Stop 814
aatgccgttgttaattatacagaac

SEQ ID NO: 69134 - DNA, 25 bp, Artificial
  probe
  misc_feature (1)..(25): SEQ ID NO: 2773; WAN024AXP_at; Start 794; Stop 818
ccgttgttaattatacagaacgaga

SEQ ID NO: 69135 - DNA, 25 bp, Artificial
  probe
  misc_feature (1)..(25): SEQ ID NO: 2773; WAN024AXP_at; Start 780; Stop 804
ttatcaaggaaatgccgttgttaat

SEQ ID NO: 69136 - DNA, 25 bp, Artificial
  probe
  misc_feature (1)..(25): SEQ ID NO: 2773; WAN024AXP_at; Start 786; Stop 810
aggaaatgccgttgttaattataca

SEQ ID NO: 69137 - DNA, 25 bp, Artificial
  probe
  misc_feature (1)..(25): SEQ ID NO: 2773; WAN024AXP_at; Start 787; Stop 811
ggaaatgccgttgttaattatacag

SEQ ID NO: 69138 - DNA, 25 bp, Artificial
  probe
  misc_feature (1)..(25): SEQ ID NO: 2773; WAN024AXP_at; Start 789; Stop 813
aaatgccgttgttaattatacagaa

SEQ ID NO: 69139 - DNA, 25 bp, Artificial
  probe
  misc_feature (1)..(25): SEQ ID NO: 2773; WAN024AXP_at; Start 791; Stop 815
atgccgttgttaattatacagaacg

SEQ ID NO: 69140 - DNA, 25 bp, Artificial
  probe
  misc_feature (1)..(25): SEQ ID NO: 2773; WAN024AXP_at; Start 788; Stop 812
gaaatgccgttgttaattatacaga

SEQ ID NO: 69141 - DNA, 25 bp, Artificial
  probe
  misc_feature (1)..(25): SEQ ID NO: 2773; WAN024AXP_at; Start 792; Stop 816
tgccgttgttaattatacagaacga

SEQ ID NO: 69142 - DNA, 25 bp, Artificial
  probe
  misc_feature (1)..(25): SEQ ID NO: 2773; WAN024AXP_at; Start 783; Stop 807
tcaaggaaatgccgttgttaattat

SEQ ID NO: 69143 - DNA, 25 bp, Artificial
  probe
  misc_feature (1)..(25): SEQ ID NO: 2773; WAN024AXP_at; Start 795; Stop 819
cgttgttaattatacagaacgagaa

SEQ ID NO: 69144 - DNA, 25 bp, Artificial
  probe
  misc_feature (1)..(25): SEQ ID NO: 2813; WAN024AXQ_at; Start 624; Stop 648
acttggagtagacttttttgctcat

SEQ ID NO: 69145 - DNA, 25 bp, Artificial
  probe
  misc_feature (1)..(25): SEQ ID NO: 2813; WAN024AXQ_at; Start 639; Stop 663
ttttgctcatcgtgaagagttggaa

SEQ ID NO: 69146 - DNA, 25 bp, Artificial
  probe
  misc_feature (1)..(25): SEQ ID NO: 2813; WAN024AXQ_at; Start 627; Stop 651
tggagtagacttttttgctcatcgt

SEQ ID NO: 69147 - DNA, 25 bp, Artificial
  probe
  misc_feature (1)..(25): SEQ ID NO: 2813; WAN024AXQ_at; Start 628; Stop 652
ggagtagacttttttgctcatcgtg

SEQ ID NO: 69148 - DNA, 25 bp, Artificial
  probe
  misc_feature (1)..(25): SEQ ID NO: 2813; WAN024AXQ_at; Start 638; Stop 662
tttttgctcatcgtgaagagttgga

SEQ ID NO: 69149 - DNA, 25 bp, Artificial
  probe
  misc_feature (1)..(25): SEQ ID NO: 2813; WAN024AXQ_at; Start 632; Stop 656
tagacttttttgctcatcgtgaaga

SEQ ID NO: 69150 - DNA, 25 bp, Artificial
  probe
  misc_feature (1)..(25): SEQ ID NO: 2813; WAN024AXQ_at; Start 613; Stop 637
gtagaagttgaacttggagtagact

SEQ ID NO: 69151 - DNA, 25 bp, Artificial
  probe
  misc_feature (1)..(25): SEQ ID NO: 2813; WAN024AXQ_at; Start 623; Stop 647
aacttggagtagacttttttgctca

SEQ ID NO: 69152 - DNA, 25 bp, Artificial
  probe
  misc_feature (1)..(25): SEQ ID NO: 2813; WAN024AXQ_at; Start 630; Stop 654
agtagacttttttgctcatcgtgaa

SEQ ID NO: 69153 - DNA, 25 bp, Artificial
  probe
  misc_feature (1)..(25): SEQ ID NO: 2813; WAN024AXQ_at; Start 621; Stop 645
tgaacttggagtagacttttttgct

SEQ ID NO: 69154 - DNA, 25 bp, Artificial
  probe
  misc_feature (1)..(25): SEQ ID NO: 2813; WAN024AXQ_at; Start 626; Stop 650
ttggagtagacttttttgctcatcg

SEQ ID NO: 69155 - DNA, 25 bp, Artificial
  probe
  misc_feature (1)..(25): SEQ ID NO: 2813; WAN024AXQ_at; Start 625; Stop 649
cttggagtagacttttttgctcatc

SEQ ID NO: 69156 - DNA, 25 bp, Artificial
  probe
  misc_feature (1)..(25): SEQ ID NO: 2813; WAN024AXQ_at; Start 636; Stop 660
cttttttgctcatcgtgaagagttg

SEQ ID NO: 69157 - DNA, 25 bp, Artificial
  probe
  misc_feature (1)..(25): SEQ ID NO: 2813; WAN024AXQ_at; Start 612; Stop 636
tgtagaagttgaacttggagtagac

SEQ ID NO: 69158 - DNA, 25 bp, Artificial
  probe
  misc_feature (1)..(25): SEQ ID NO: 2813; WAN024AXQ_at; Start 634; Stop 658
gacttttttgctcatcgtgaagagt

SEQ ID NO: 69159 - DNA, 25 bp, Artificial
  probe
  misc_feature (1)..(25): SEQ ID NO: 2813; WAN024AXQ_at; Start 629; Stop 653
gagtagacttttttgctcatcgtga

SEQ ID NO: 69160 - DNA, 25 bp, Artificial
  probe
  misc_feature (1)..(25): SEQ ID NO: 2813; WAN024AXQ_at; Start 611; Stop 635
atgtagaagttgaacttggagtaga

SEQ ID NO: 69161 - DNA, 25 bp, Artificial
  probe
  misc_feature (1)..(25): SEQ ID NO: 2813; WAN024AXQ_at; Start 615; Stop 639
agaagttgaacttggagtagacttt

SEQ ID NO: 69162 - DNA, 25 bp, Artificial
  probe
  misc_feature (1)..(25): SEQ ID NO: 2813; WAN024AXQ_at; Start 637; Stop 661
ttttttgctcatcgtgaagagttgg

SEQ ID NO: 69163 - DNA, 25 bp, Artificial
  probe
  misc_feature (1)..(25): SEQ ID NO: 2813; WAN024AXQ_at; Start 635; Stop 659
acttttttgctcatcgtgaagagtt

SEQ ID NO: 69164 - DNA, 25 bp, Artificial
  probe
  misc_feature (1)..(25): SEQ ID NO: 2813; WAN024AXQ_at; Start 633; Stop 657
agacttttttgctcatcgtgaagag

SEQ ID NO: 69165 - DNA, 25 bp, Artificial
  probe
  misc_feature (1)..(25): SEQ ID NO: 2813; WAN024AXQ_at; Start 622; Stop 646
gaacttggagtagacttttttgctc

SEQ ID NO: 69166 - DNA, 25 bp, Artificial
  probe
  misc_feature (1)..(25): SEQ ID NO: 2813; WAN024AXQ_at; Start 631; Stop 655
gtagacttttttgctcatcgtgaag

SEQ ID NO: 69167 - DNA, 25 bp, Artificial
  probe
  misc_feature (1)..(25): SEQ ID NO: 2813; WAN024AXQ_at; Start 614; Stop 638
tagaagttgaacttggagtagactt

SEQ ID NO: 69168 - DNA, 25 bp, Artificial
  probe
  misc_feature (1)..(25): SEQ ID NO: 2778; WAN024AXR_at; Start 1085; Stop 1109
aagagtttggatatgacaaaaagta

SEQ ID NO: 69169 - DNA, 25 bp, Artificial
  probe
  misc_feature (1)..(25): SEQ ID NO: 2778; WAN024AXR_at; Start 1077; Stop 1101
tgtggagaaagagtttggatatgac

SEQ ID NO: 69170 - DNA, 25 bp, Artificial
  probe
  misc_feature (1)..(25): SEQ ID NO: 2778; WAN024AXR_at; Start 1082; Stop 1106
agaaagagtttggatatgacaaaaa

SEQ ID NO: 69171 - DNA, 25 bp, Artificial
  probe
  misc_feature (1)..(25): SEQ ID NO: 2778; WAN024AXR_at; Start 1084; Stop 1108
aaagagtttggatatgacaaaaagt

SEQ ID NO: 69172 - DNA, 25 bp, Artificial
  probe
  misc_feature (1)..(25): SEQ ID NO: 2778; WAN024AXR_at; Start 1081; Stop 1105
gagaaagagtttggatatgacaaaa

SEQ ID NO: 69173 - DNA, 25 bp, Artificial
  probe
  misc_feature (1)..(25): SEQ ID NO: 2778; WAN024AXR_at; Start 1078; Stop 1102
gtggagaaagagtttggatatgaca

SEQ ID NO: 69174 - DNA, 25 bp, Artificial
  probe
  misc_feature (1)..(25): SEQ ID NO: 2778; WAN024AXR_at; Start 1086; Stop 1110
agagtttggatatgacaaaaagtag

SEQ ID NO: 69175 - DNA, 25 bp, Artificial
  probe
  misc_feature (1)..(25): SEQ ID NO: 2778; WAN024AXR_at; Start 1083; Stop 1107
gaaagagtttggatatgacaaaaag

SEQ ID NO: 69176 - DNA, 25 bp, Artificial
  probe
  misc_feature (1)..(25): SEQ ID NO: 2778; WAN024AXR_at; Start 1079; Stop 1103
tggagaaagagtttggatatgacaa

SEQ ID NO: 69177 - DNA, 25 bp, Artificial
  probe
  misc_feature (1)..(25): SEQ ID NO: 2778; WAN024AXR_at; Start 1080; Stop 1104
ggagaaagagtttggatatgacaaa

SEQ ID NO: 69178 - DNA, 25 bp, Artificial
  probe
  misc_feature (1)..(25): SEQ ID NO: 2777; WAN024AXS_at; Start 364; Stop 388
actcctgaaaatttggaagaacagg

SEQ ID NO: 69179 - DNA, 25 bp, Artificial
  probe
  misc_feature (1)..(25): SEQ ID NO: 2777; WAN024AXS_at; Start 199; Stop 223
tttgcagagtttaaccgttatacca

SEQ ID NO: 69180 - DNA, 25 bp, Artificial
  probe
  misc_feature (1)..(25): SEQ ID NO: 2777; WAN024AXS_at; Start 363; Stop 387
aactcctgaaaatttggaagaacag

SEQ ID NO: 69181 - DNA, 25 bp, Artificial
  probe
  misc_feature (1)..(25): SEQ ID NO: 2777; WAN024AXS_at; Start 855; Stop 879
agcaaagactatcattactaataga

SEQ ID NO: 69182 - DNA, 25 bp, Artificial
  probe
  misc_feature (1)..(25): SEQ ID NO: 2777; WAN024AXS_at; Start 201; Stop 225
tgcagagtttaaccgttataccaat

SEQ ID NO: 69183 - DNA, 25 bp, Artificial
  probe
  misc_feature (1)..(25): SEQ ID NO: 2777; WAN024AXS_at; Start 169; Stop 193
gataaggagatctgggattatgtaa

SEQ ID NO: 69184 - DNA, 25 bp, Artificial
  probe
  misc_feature (1)..(25): SEQ ID NO: 2777; WAN024AXS_at; Start 183; Stop 207
ggattatgtaaatcagtttgcagag

SEQ ID NO: 69185 - DNA, 25 bp, Artificial
  probe
  misc_feature (1)..(25): SEQ ID NO: 2777; WAN024AXS_at; Start 189; Stop 213
tgtaaatcagtttgcagagtttaac

SEQ ID NO: 69186 - DNA, 25 bp, Artificial
  probe
  misc_feature (1)..(25): SEQ ID NO: 2777; WAN024AXS_at; Start 187; Stop 211
tatgtaaatcagtttgcagagttta

SEQ ID NO: 69187 - DNA, 25 bp, Artificial
  probe
  misc_feature (1)..(25): SEQ ID NO: 2777; WAN024AXS_at; Start 858; Stop 882
aaagactatcattactaatagaaca

SEQ ID NO: 69188 - DNA, 25 bp, Artificial
  probe
  misc_feature (1)..(25): SEQ ID NO: 2777; WAN024AXS_at; Start 200; Stop 224
ttgcagagtttaaccgttataccaa

SEQ ID NO: 69189 - DNA, 25 bp, Artificial
  probe
  misc_feature (1)..(25): SEQ ID NO: 2777; WAN024AXS_at; Start 191; Stop 215
taaatcagtttgcagagtttaaccg

SEQ ID NO: 69190 - DNA, 25 bp, Artificial
  probe
  misc_feature (1)..(25): SEQ ID NO: 2777; WAN024AXS_at; Start 184; Stop 208
gattatgtaaatcagtttgcagagt

SEQ ID NO: 69191 - DNA, 25 bp, Artificial
  probe
  misc_feature (1)..(25): SEQ ID NO: 2777; WAN024AXS_at; Start 185; Stop 209
attatgtaaatcagtttgcagagtt

SEQ ID NO: 69192 - DNA, 25 bp, Artificial
  probe
  misc_feature (1)..(25): SEQ ID NO: 2777; WAN024AXS_at; Start 859; Stop 883
aagactatcattactaatagaacat

SEQ ID NO: 69193 - DNA, 25 bp, Artificial
  probe
  misc_feature (1)..(25): SEQ ID NO: 2777; WAN024AXS_at; Start 853; Stop 877
caagcaaagactatcattactaata

SEQ ID NO: 69194 - DNA, 25 bp, Artificial
  probe
  misc_feature (1)..(25): SEQ ID NO: 2777; WAN024AXS_at; Start 188; Stop 212
atgtaaatcagtttgcagagtttaa

SEQ ID NO: 69195 - DNA, 25 bp, Artificial
  probe
  misc_feature (1)..(25): SEQ ID NO: 2777; WAN024AXS_at; Start 192; Stop 216
aaatcagtttgcagagtttaaccgt

SEQ ID NO: 69196 - DNA, 25 bp, Artificial
  probe
  misc_feature (1)..(25): SEQ ID NO: 2777; WAN024AXS_at; Start 860; Stop 884
agactatcattactaatagaacatt

SEQ ID NO: 69197 - DNA, 25 bp, Artificial
  probe
  misc_feature (1)..(25): SEQ ID NO: 2777; WAN024AXS_at; Start 168; Stop 192
tgataaggagatctgggattatgta

SEQ ID NO: 69198 - DNA, 25 bp, Artificial
  probe
  misc_feature (1)..(25): SEQ ID NO: 2777; WAN024AXS_at; Start 861; Stop 885
gactatcattactaatagaacattc

SEQ ID NO: 69199 - DNA, 25 bp, Artificial
  probe
  misc_feature (1)..(25): SEQ ID NO: 2777; WAN024AXS_at; Start 856; Stop 880
gcaaagactatcattactaatagaa

SEQ ID NO: 69200 - DNA, 25 bp, Artificial
  probe
  misc_feature (1)..(25): SEQ ID NO: 2777; WAN024AXS_at; Start 857; Stop 881
caaagactatcattactaatagaac

SEQ ID NO: 69201 - DNA, 25 bp, Artificial
  probe
  misc_feature (1)..(25): SEQ ID NO: 2777; WAN024AXS_at; Start 190; Stop 214
gtaaatcagtttgcagagtttaacc

SEQ ID NO: 69202 - DNA, 25 bp, Artificial
  probe
  misc_feature (1)..(25): SEQ ID NO: 2777; WAN024AXS_at; Start 186; Stop 210
ttatgtaaatcagtttgcagagttt

SEQ ID NO: 69203 - DNA, 25 bp, Artificial
  probe
  misc_feature (1)..(25): SEQ ID NO: 2777; WAN024AXS_at; Start 854; Stop 878
aagcaaagactatcattactaatag

SEQ ID NO: 69204 - DNA, 25 bp, Artificial
  probe
  misc_feature (1)..(25): SEQ ID NO: 2777; WAN024AXS_at; Start 741; Stop 765
tcatgaagttctagatgaggaaaac

SEQ ID NO: 69205 - DNA, 25 bp, Artificial
  probe
  misc_feature (1)..(25): SEQ ID NO: 7595; WAN024AXT_s_at; Start 10; Stop 34
tattatcaaaatatttctaccaaga

SEQ ID NO: 69206 - DNA, 25 bp, Artificial
  probe
  misc_feature (1)..(25): SEQ ID NO: 7595; WAN024AXT_s_at; Start 11; Stop 35
attatcaaaatatttctaccaagaa

SEQ ID NO: 69207 - DNA, 25 bp, Artificial
  probe
  misc_feature (1)..(25): SEQ ID NO: 7595; WAN024AXT_s_at; Start 9; Stop 33
ttattatcaaaatatttctaccaag

SEQ ID NO: 69208 - DNA, 25 bp, Artificial
  probe
  misc_feature (1)..(25): SEQ ID NO: 7595; WAN024AXT_s_at; Start 12; Stop 36
ttatcaaaatatttctaccaagaaa

SEQ ID NO: 69209 - DNA, 25 bp, Artificial
  probe
  misc_feature (1)..(25): SEQ ID NO: 7595; WAN024AXT_s_at; Start 13; Stop 37
tatcaaaatatttctaccaagaaaa

SEQ ID NO: 69210 - DNA, 25 bp, Artificial
  probe
  misc_feature (1)..(25): SEQ ID NO: 2837; WAN024AXU_at; Start 1; Stop 25
atgtcaatagtcttgcttaattatt

SEQ ID NO: 69211 - DNA, 25 bp, Artificial
  probe
  misc_feature (1)..(25): SEQ ID NO: 2837; WAN024AXU_at; Start 66; Stop 90
tgaaaagaaaaatcttctttgtcaa

SEQ ID NO: 69212 - DNA, 25 bp, Artificial
  probe
  misc_feature (1)..(25): SEQ ID NO: 2837; WAN024AXU_at; Start 3; Stop 27
gtcaatagtcttgcttaattattat

SEQ ID NO: 69213 - DNA, 25 bp, Artificial
  probe
  misc_feature (1)..(25): SEQ ID NO: 2837; WAN024AXU_at; Start 2; Stop 26
tgtcaatagtcttgcttaattatta

SEQ ID NO: 69214 - DNA, 25 bp, Artificial
  probe
  misc_feature (1)..(25): SEQ ID NO: 2837; WAN024AXU_at; Start 96; Stop 120
ttactttcttgttttaaacatgcta

SEQ ID NO: 69215 - DNA, 25 bp, Artificial
  probe
  misc_feature (1)..(25): SEQ ID NO: 2837; WAN024AXU_at; Start 65; Stop 89
gtgaaaagaaaaatcttctttgtca

SEQ ID NO: 69216 - DNA, 25 bp, Artificial
  probe
  misc_feature (1)..(25): SEQ ID NO: 7210; WAN024AXV_s_at; Start 47; Stop 71
gaggagctactgcaggggctttttc

SEQ ID NO: 69217 - DNA, 25 bp, Artificial
  probe
  misc_feature (1)..(25): SEQ ID NO: 7210; WAN024AXV_s_at; Start 51; Stop 75
agctactgcaggggctttttcaggt

SEQ ID NO: 69218 - DNA, 25 bp, Artificial
  probe
  misc_feature (1)..(25): SEQ ID NO: 7210; WAN024AXV_s_at; Start 49; Stop 73
ggagctactgcaggggctttttcag

SEQ ID NO: 69219 - DNA, 25 bp, Artificial
  probe
  misc_feature (1)..(25): SEQ ID NO: 7210; WAN024AXV_s_at; Start 52; Stop 76
gctactgcaggggctttttcaggtg

SEQ ID NO: 69220 - DNA, 25 bp, Artificial
  probe
  misc_feature (1)..(25): SEQ ID NO: 7210; WAN024AXV_s_at; Start 39; Stop 63
tcttaatggaggagctactgcaggg

SEQ ID NO: 69221 - DNA, 25 bp, Artificial
  probe
  misc_feature (1)..(25): SEQ ID NO: 7210; WAN024AXV_s_at; Start 44; Stop 68
atggaggagctactgcaggggcttt

SEQ ID NO: 69222 - DNA, 25 bp, Artificial
  probe
  misc_feature (1)..(25): SEQ ID NO: 7210; WAN024AXV_s_at; Start 30; Stop 54
tgctacaactcttaatggaggagct

SEQ ID NO: 69223 - DNA, 25 bp, Artificial
  probe
  misc_feature (1)..(25): SEQ ID NO: 7210; WAN024AXV_s_at; Start 53; Stop 77
ctactgcaggggctttttcaggtgt

SEQ ID NO: 69224 - DNA, 25 bp, Artificial
  probe
  misc_feature (1)..(25): SEQ ID NO: 7210; WAN024AXV_s_at; Start 46; Stop 70
ggaggagctactgcaggggcttttt

SEQ ID NO: 69225 - DNA, 25 bp, Artificial
  probe
  misc_feature (1)..(25): SEQ ID NO: 7210; WAN024AXV_s_at; Start 36; Stop 60
aactcttaatggaggagctactgca

SEQ ID NO: 69226 - DNA, 25 bp, Artificial
  probe
  misc_feature (1)..(25): SEQ ID NO: 7210; WAN024AXV_s_at; Start 33; Stop 57
tacaactcttaatggaggagctact

SEQ ID NO: 69227 - DNA, 25 bp, Artificial
  probe
  misc_feature (1)..(25): SEQ ID NO: 7210; WAN024AXV_s_at; Start 34; Stop 58
acaactcttaatggaggagctactg

SEQ ID NO: 69228 - DNA, 25 bp, Artificial
  probe
  misc_feature (1)..(25): SEQ ID NO: 7210; WAN024AXV_s_at; Start 45; Stop 69
tggaggagctactgcaggggctttt

SEQ ID NO: 69229 - DNA, 25 bp, Artificial
  probe
  misc_feature (1)..(25): SEQ ID NO: 7210; WAN024AXV_s_at; Start 40; Stop 64
cttaatggaggagctactgcagggg

SEQ ID NO: 69230 - DNA, 25 bp, Artificial
  probe
  misc_feature (1)..(25): SEQ ID NO: 7210; WAN024AXV_s_at; Start 50; Stop 74
gagctactgcaggggctttttcagg

SEQ ID NO: 69231 - DNA, 25 bp, Artificial
  probe
  misc_feature (1)..(25): SEQ ID NO: 7210; WAN024AXV_s_at; Start 31; Stop 55
gctacaactcttaatggaggagcta

SEQ ID NO: 69232 - DNA, 25 bp, Artificial
  probe
  misc_feature (1)..(25): SEQ ID NO: 7210; WAN024AXV_s_at; Start 35; Stop 59
caactcttaatggaggagctactgc

SEQ ID NO: 69233 - DNA, 25 bp, Artificial
  probe
  misc_feature (1)..(25): SEQ ID NO: 7210; WAN024AXV_s_at; Start 32; Stop 56
ctacaactcttaatggaggagctac

SEQ ID NO: 69234 - DNA, 25 bp, Artificial
  probe
  misc_feature (1)..(25): SEQ ID NO: 7210; WAN024AXV_s_at; Start 37; Stop 61
actcttaatggaggagctactgcag

SEQ ID NO: 69235 - DNA, 25 bp, Artificial
  probe
  misc_feature (1)..(25): SEQ ID NO: 7210; WAN024AXV_s_at; Start 41; Stop 65
ttaatggaggagctactgcaggggc

SEQ ID NO: 69236 - DNA, 25 bp, Artificial
  probe
  misc_feature (1)..(25): SEQ ID NO: 7210; WAN024AXV_s_at; Start 43; Stop 67
aatggaggagctactgcaggggctt

SEQ ID NO: 69237 - DNA, 25 bp, Artificial
  probe
  misc_feature (1)..(25): SEQ ID NO: 7210; WAN024AXV_s_at; Start 42; Stop 66
taatggaggagctactgcaggggct

SEQ ID NO: 69238 - DNA, 25 bp, Artificial
  probe
  misc_feature (1)..(25): SEQ ID NO: 7210; WAN024AXV_s_at; Start 48; Stop 72
aggagctactgcaggggctttttca

SEQ ID NO: 69239 - DNA, 25 bp, Artificial
  probe
  misc_feature (1)..(25): SEQ ID NO: 7210; WAN024AXV_s_at; Start 38; Stop 62
ctcttaatggaggagctactgcagg

SEQ ID NO: 69240 - DNA, 25 bp, Artificial
  probe
  misc_feature (1)..(25): SEQ ID NO: 313; WAN024AXW_at; Start 182; Stop 206
ttagtctcattccattcttaggatg

SEQ ID NO: 69241 - DNA, 25 bp, Artificial
  probe
  misc_feature (1)..(25): SEQ ID NO: 313; WAN024AXW_at; Start 186; Stop 210
tctcattccattcttaggatgggtt

SEQ ID NO: 69242 - DNA, 25 bp, Artificial
  probe
  misc_feature (1)..(25): SEQ ID NO: 313; WAN024AXW_at; Start 188; Stop 212
tcattccattcttaggatgggttgg

SEQ ID NO: 69243 - DNA, 25 bp, Artificial
  probe
  misc_feature (1)..(25): SEQ ID NO: 313; WAN024AXW_at; Start 187; Stop 211
ctcattccattcttaggatgggttg

SEQ ID NO: 69244 - DNA, 25 bp, Artificial
  probe
  misc_feature (1)..(25): SEQ ID NO: 313; WAN024AXW_at; Start 185; Stop 209
gtctcattccattcttaggatgggt

SEQ ID NO: 69245 - DNA, 25 bp, Artificial
  probe
  misc_feature (1)..(25): SEQ ID NO: 313; WAN024AXW_at; Start 189; Stop 213
cattccattcttaggatgggttggg

SEQ ID NO: 69246 - DNA, 25 bp, Artificial
  probe
  misc_feature (1)..(25): SEQ ID NO: 313; WAN024AXW_at; Start 183; Stop 207
tagtctcattccattcttaggatgg

SEQ ID NO: 69247 - DNA, 25 bp, Artificial
  probe
  misc_feature (1)..(25): SEQ ID NO: 313; WAN024AXW_at; Start 190; Stop 214
attccattcttaggatgggttgggg

SEQ ID NO: 69248 - DNA, 25 bp, Artificial
  probe
  misc_feature (1)..(25): SEQ ID NO: 313; WAN024AXW_at; Start 184; Stop 208
agtctcattccattcttaggatggg

SEQ ID NO: 69249 - DNA, 25 bp, Artificial
  probe
  misc_feature (1)..(25): SEQ ID NO: 5833; WAN024AXX_at; Start 200; Stop 224
ttagtctcattctattccgttctta

SEQ ID NO: 69250 - DNA, 25 bp, Artificial
  probe
  misc_feature (1)..(25): SEQ ID NO: 5833; WAN024AXX_at; Start 187; Stop 211
gtttctggtggagttagtctcattc

SEQ ID NO: 69251 - DNA, 25 bp, Artificial
  probe
  misc_feature (1)..(25): SEQ ID NO: 5833; WAN024AXX_at; Start 191; Stop 215
ctggtggagttagtctcattctatt

SEQ ID NO: 69252 - DNA, 25 bp, Artificial
  probe
  misc_feature (1)..(25): SEQ ID NO: 5833; WAN024AXX_at; Start 186; Stop 210
tgtttctggtggagttagtctcatt

SEQ ID NO: 69253 - DNA, 25 bp, Artificial
  probe
  misc_feature (1)..(25): SEQ ID NO: 5833; WAN024AXX_at; Start 194; Stop 218
gtggagttagtctcattctattccg

SEQ ID NO: 69254 - DNA, 25 bp, Artificial
  probe
  misc_feature (1)..(25): SEQ ID NO: 5833; WAN024AXX_at; Start 188; Stop 212
tttctggtggagttagtctcattct

SEQ ID NO: 69255 - DNA, 25 bp, Artificial
  probe
  misc_feature (1)..(25): SEQ ID NO: 5833; WAN024AXX_at; Start 184; Stop 208
attgtttctggtggagttagtctca

SEQ ID NO: 69256 - DNA, 25 bp, Artificial
  probe
  misc_feature (1)..(25): SEQ ID NO: 5833; WAN024AXX_at; Start 183; Stop 207
gattgtttctggtggagttagtctc

SEQ ID NO: 69257 - DNA, 25 bp, Artificial
  probe
  misc_feature (1)..(25): SEQ ID NO: 5833; WAN024AXX_at; Start 179; Stop 203
taatgattgtttctggtggagttag

SEQ ID NO: 69258 - DNA, 25 bp, Artificial
  probe
  misc_feature (1)..(25): SEQ ID NO: 5833; WAN024AXX_at; Start 178; Stop 202
ctaatgattgtttctggtggagtta

SEQ ID NO: 69259 - DNA, 25 bp, Artificial
  probe
  misc_feature (1)..(25): SEQ ID NO: 5833; WAN024AXX_at; Start 192; Stop 216
tggtggagttagtctcattctattc

SEQ ID NO: 69260 - DNA, 25 bp, Artificial
  probe
  misc_feature (1)..(25): SEQ ID NO: 5833; WAN024AXX_at; Start 190; Stop 214
tctggtggagttagtctcattctat

SEQ ID NO: 69261 - DNA, 25 bp, Artificial
  probe
  misc_feature (1)..(25): SEQ ID NO: 5833; WAN024AXX_at; Start 182; Stop 206
tgattgtttctggtggagttagtct

SEQ ID NO: 69262 - DNA, 25 bp, Artificial
  probe
  misc_feature (1)..(25): SEQ ID NO: 5833; WAN024AXX_at; Start 177; Stop 201
actaatgattgtttctggtggagtt

SEQ ID NO: 69263 - DNA, 25 bp, Artificial
  probe
  misc_feature (1)..(25): SEQ ID NO: 5833; WAN024AXX_at; Start 180; Stop 204
aatgattgtttctggtggagttagt

SEQ ID NO: 69264 - DNA, 25 bp, Artificial
  probe
  misc_feature (1)..(25): SEQ ID NO: 5833; WAN024AXX_at; Start 176; Stop 200
tactaatgattgtttctggtggagt

SEQ ID NO: 69265 - DNA, 25 bp, Artificial
  probe
  misc_feature (1)..(25): SEQ ID NO: 5833; WAN024AXX_at; Start 197; Stop 221
gagttagtctcattctattccgttc

SEQ ID NO: 69266 - DNA, 25 bp, Artificial
  probe
  misc_feature (1)..(25): SEQ ID NO: 5833; WAN024AXX_at; Start 193; Stop 217
ggtggagttagtctcattctattcc

SEQ ID NO: 69267 - DNA, 25 bp, Artificial
  probe
  misc_feature (1)..(25): SEQ ID NO: 5833; WAN024AXX_at; Start 196; Stop 220
ggagttagtctcattctattccgtt

SEQ ID NO: 69268 - DNA, 25 bp, Artificial
  probe
  misc_feature (1)..(25): SEQ ID NO: 5833; WAN024AXX_at; Start 195; Stop 219
tggagttagtctcattctattccgt

SEQ ID NO: 69269 - DNA, 25 bp, Artificial
  probe
  misc_feature (1)..(25): SEQ ID NO: 5833; WAN024AXX_at; Start 189; Stop 213
ttctggtggagttagtctcattcta

SEQ ID NO: 69270 - DNA, 25 bp, Artificial
  probe
  misc_feature (1)..(25): SEQ ID NO: 5833; WAN024AXX_at; Start 199; Stop 223
gttagtctcattctattccgttctt

SEQ ID NO: 69271 - DNA, 25 bp, Artificial
  probe
  misc_feature (1)..(25): SEQ ID NO: 5833; WAN024AXX_at; Start 198; Stop 222
agttagtctcattctattccgttct

SEQ ID NO: 69272 - DNA, 25 bp, Artificial
  probe
  misc_feature (1)..(25): SEQ ID NO: 5833; WAN024AXX_at; Start 185; Stop 209
ttgtttctggtggagttagtctcat

SEQ ID NO: 69273 - DNA, 25 bp, Artificial
  probe
  misc_feature (1)..(25): SEQ ID NO: 5833; WAN024AXX_at; Start 181; Stop 205
atgattgtttctggtggagttagtc

SEQ ID NO: 69274 - DNA, 25 bp, Artificial
  probe
  misc_feature (1)..(25): SEQ ID NO: 909; WAN024AXY_at; Start 244; Stop 268
agtacagatggtttggcaattgggg

SEQ ID NO: 69275 - DNA, 25 bp, Artificial
  probe
  misc_feature (1)..(25): SEQ ID NO: 909; WAN024AXY_at; Start 318; Stop 342
ctaccatggtcctggtctgagcaca

SEQ ID NO: 69276 - DNA, 25 bp, Artificial
  probe
  misc_feature (1)..(25): SEQ ID NO: 909; WAN024AXY_at; Start 247; Stop 271
acagatggtttggcaattggggaag

SEQ ID NO: 69277 - DNA, 25 bp, Artificial
  probe
  misc_feature (1)..(25): SEQ ID NO: 909; WAN024AXY_at; Start 317; Stop 341
tctaccatggtcctggtctgagcac

SEQ ID NO: 69278 - DNA, 25 bp, Artificial
  probe
  misc_feature (1)..(25): SEQ ID NO: 909; WAN024AXY_at; Start 277; Stop 301
atttctgacgatagcgttgccttga

SEQ ID NO: 69279 - DNA, 25 bp, Artificial
  probe
  misc_feature (1)..(25): SEQ ID NO: 909; WAN024AXY_at; Start 246; Stop 270
tacagatggtttggcaattggggaa

SEQ ID NO: 69280 - DNA, 25 bp, Artificial
  probe
  misc_feature (1)..(25): SEQ ID NO: 909; WAN024AXY_at; Start 321; Stop 345
ccatggtcctggtctgagcacaatg

SEQ ID NO: 69281 - DNA, 25 bp, Artificial
  probe
  misc_feature (1)..(25): SEQ ID NO: 909; WAN024AXY_at; Start 325; Stop 349
ggtcctggtctgagcacaatgcttc

SEQ ID NO: 69282 - DNA, 25 bp, Artificial
  probe
  misc_feature (1)..(25): SEQ ID NO: 909; WAN024AXY_at; Start 319; Stop 343
taccatggtcctggtctgagcacaa

SEQ ID NO: 69283 - DNA, 25 bp, Artificial
  probe
  misc_feature (1)..(25): SEQ ID NO: 909; WAN024AXY_at; Start 276; Stop 300
tatttctgacgatagcgttgccttg

SEQ ID NO: 69284 - DNA, 25 bp, Artificial
  probe
  misc_feature (1)..(25): SEQ ID NO: 909; WAN024AXY_at; Start 324; Stop 348
tggtcctggtctgagcacaatgctt

SEQ ID NO: 69285 - DNA, 25 bp, Artificial
  probe
  misc_feature (1)..(25): SEQ ID NO: 909; WAN024AXY_at; Start 326; Stop 350
gtcctggtctgagcacaatgcttca

SEQ ID NO: 69286 - DNA, 25 bp, Artificial
  probe
  misc_feature (1)..(25): SEQ ID NO: 909; WAN024AXY_at; Start 274; Stop 298
tttatttctgacgatagcgttgcct

SEQ ID NO: 69287 - DNA, 25 bp, Artificial
  probe
  misc_feature (1)..(25): SEQ ID NO: 909; WAN024AXY_at; Start 278; Stop 302
tttctgacgatagcgttgccttgat

SEQ ID NO: 69288 - DNA, 25 bp, Artificial
  probe
  misc_feature (1)..(25): SEQ ID NO: 909; WAN024AXY_at; Start 242; Stop 266
caagtacagatggtttggcaattgg

SEQ ID NO: 69289 - DNA, 25 bp, Artificial
  probe
  misc_feature (1)..(25): SEQ ID NO: 909; WAN024AXY_at; Start 323; Stop 347
atggtcctggtctgagcacaatgct

SEQ ID NO: 69290 - DNA, 25 bp, Artificial
  probe
  misc_feature (1)..(25): SEQ ID NO: 909; WAN024AXY_at; Start 248; Stop 272
cagatggtttggcaattggggaaga

SEQ ID NO: 69291 - DNA, 25 bp, Artificial
  probe
  misc_feature (1)..(25): SEQ ID NO: 909; WAN024AXY_at; Start 240; Stop 264
accaagtacagatggtttggcaatt

SEQ ID NO: 69292 - DNA, 25 bp, Artificial
  probe
  misc_feature (1)..(25): SEQ ID NO: 909; WAN024AXY_at; Start 322; Stop 346
catggtcctggtctgagcacaatgc

SEQ ID NO: 69293 - DNA, 25 bp, Artificial
  probe
  misc_feature (1)..(25): SEQ ID NO: 909; WAN024AXY_at; Start 316; Stop 340
atctaccatggtcctggtctgagca

SEQ ID NO: 69294 - DNA, 25 bp, Artificial
  probe
  misc_feature (1)..(25): SEQ ID NO: 909; WAN024AXY_at; Start 243; Stop 267
aagtacagatggtttggcaattggg

SEQ ID NO: 69295 - DNA, 25 bp, Artificial
  probe
  misc_feature (1)..(25): SEQ ID NO: 909; WAN024AXY_at; Start 275; Stop 299
ttatttctgacgatagcgttgcctt

SEQ ID NO: 69296 - DNA, 25 bp, Artificial
  probe
  misc_feature (1)..(25): SEQ ID NO: 909; WAN024AXY_at; Start 327; Stop 351
tcctggtctgagcacaatgcttcaa

SEQ ID NO: 69297 - DNA, 25 bp, Artificial
  probe
  misc_feature (1)..(25): SEQ ID NO: 909; WAN024AXY_at; Start 241; Stop 265
ccaagtacagatggtttggcaattg

SEQ ID NO: 69298 - DNA, 25 bp, Artificial
  probe
  misc_feature (1)..(25): SEQ ID NO: 909; WAN024AXY_at; Start 320; Stop 344
accatggtcctggtctgagcacaat

SEQ ID NO: 69299 - DNA, 25 bp, Artificial
  probe
  misc_feature (1)..(25): SEQ ID NO: 909; WAN024AXY_at; Start 250; Stop 274
gatggtttggcaattggggaagagt

SEQ ID NO: 69300 - DNA, 25 bp, Artificial
  probe
  misc_feature (1)..(25): SEQ ID NO: 909; WAN024AXY_at; Start 245; Stop 269
gtacagatggtttggcaattgggga

SEQ ID NO: 69301 - DNA, 25 bp, Artificial
  probe
  misc_feature (1)..(25): SEQ ID NO: 909; WAN024AXY_at; Start 251; Stop 275
atggtttggcaattggggaagagtt

SEQ ID NO: 69302 - DNA, 25 bp, Artificial
  probe
  misc_feature (1)..(25): SEQ ID NO: 909; WAN024AXY_at; Start 249; Stop 273
agatggtttggcaattggggaagag

SEQ ID NO: 69303 - DNA, 25 bp, Artificial
  probe
  misc_feature (1)..(25): SEQ ID NO: 907; WAN024AXZ_at; Start 329; Stop 353
tctaccatgggcctggtctttctaa

SEQ ID NO: 69304 - DNA, 25 bp, Artificial
  probe
  misc_feature (1)..(25): SEQ ID NO: 907; WAN024AXZ_at; Start 343; Stop 367
ggtctttctaagatgctacaaaagg

SEQ ID NO: 69305 - DNA, 25 bp, Artificial
  probe
  misc_feature (1)..(25): SEQ ID NO: 907; WAN024AXZ_at; Start 27; Stop 51
ttcgggaactcgcttgtatcctttg

SEQ ID NO: 69306 - DNA, 25 bp, Artificial
  probe
  misc_feature (1)..(25): SEQ ID NO: 907; WAN024AXZ_at; Start 32; Stop 56
gaactcgcttgtatcctttgactcg

SEQ ID NO: 69307 - DNA, 25 bp, Artificial
  probe
  misc_feature (1)..(25): SEQ ID NO: 907; WAN024AXZ_at; Start 24; Stop 48
tggttcgggaactcgcttgtatcct

SEQ ID NO: 69308 - DNA, 25 bp, Artificial
  probe
  misc_feature (1)..(25): SEQ ID NO: 907; WAN024AXZ_at; Start 339; Stop 363
gcctggtctttctaagatgctacaa

SEQ ID NO: 69309 - DNA, 25 bp, Artificial
  probe
  misc_feature (1)..(25): SEQ ID NO: 907; WAN024AXZ_at; Start 430; Stop 454
ggtgtagttgagtttgacaaggata

SEQ ID NO: 69310 - DNA, 25 bp, Artificial
  probe
  misc_feature (1)..(25): SEQ ID NO: 907; WAN024AXZ_at; Start 303; Stop 327
tgttgcgctaatcttaggcgacaat

SEQ ID NO: 69311 - DNA, 25 bp, Artificial
  probe
  misc_feature (1)..(25): SEQ ID NO: 907; WAN024AXZ_at; Start 437; Stop 461
ttgagtttgacaaggatatgaacgc

SEQ ID NO: 69312 - DNA, 25 bp, Artificial
  probe
  misc_feature (1)..(25): SEQ ID NO: 907; WAN024AXZ_at; Start 359; Stop 383
tacaaaaggtatcaagtaaggagtc

SEQ ID NO: 69313 - DNA, 25 bp, Artificial
  probe
  misc_feature (1)..(25): SEQ ID NO: 907; WAN024AXZ_at; Start 439; Stop 463
gagtttgacaaggatatgaacgcta

SEQ ID NO: 69314 - DNA, 25 bp, Artificial
  probe
  misc_feature (1)..(25): SEQ ID NO: 907; WAN024AXZ_at; Start 610; Stop 634
tacctagatcgtggagatttatccg

SEQ ID NO: 69315 - DNA, 25 bp, Artificial
  probe
  misc_feature (1)..(25): SEQ ID NO: 907; WAN024AXZ_at; Start 298; Stop 322
gatagtgttgcgctaatcttaggcg

SEQ ID NO: 69316 - DNA, 25 bp, Artificial
  probe
  misc_feature (1)..(25): SEQ ID NO: 907; WAN024AXZ_at; Start 354; Stop 378
gatgctacaaaaggtatcaagtaag

SEQ ID NO: 69317 - DNA, 25 bp, Artificial
  probe
  misc_feature (1)..(25): SEQ ID NO: 907; WAN024AXZ_at; Start 361; Stop 385
caaaaggtatcaagtaaggagtcgg

SEQ ID NO: 69318 - DNA, 25 bp, Artificial
  probe
  misc_feature (1)..(25): SEQ ID NO: 907; WAN024AXZ_at; Start 357; Stop 381
gctacaaaaggtatcaagtaaggag

SEQ ID NO: 69319 - DNA, 25 bp, Artificial
  probe
  misc_feature (1)..(25): SEQ ID NO: 907; WAN024AXZ_at; Start 29; Stop 53
cgggaactcgcttgtatcctttgac

SEQ ID NO: 69320 - DNA, 25 bp, Artificial
  probe
  misc_feature (1)..(25): SEQ ID NO: 907; WAN024AXZ_at; Start 193; Stop 217
cttcaagatggttatgagtttggta

SEQ ID NO: 69321 - DNA, 25 bp, Artificial
  probe
  misc_feature (1)..(25): SEQ ID NO: 907; WAN024AXZ_at; Start 613; Stop 637
ctagatcgtggagatttatccgttg

SEQ ID NO: 69322 - DNA, 25 bp, Artificial
  probe
  misc_feature (1)..(25): SEQ ID NO: 907; WAN024AXZ_at; Start 199; Stop 223
gatggttatgagtttggtattaaac

SEQ ID NO: 69323 - DNA, 25 bp, Artificial
  probe
  misc_feature (1)..(25): SEQ ID NO: 907; WAN024AXZ_at; Start 331; Stop 355
taccatgggcctggtctttctaaga

SEQ ID NO: 69324 - DNA, 25 bp, Artificial
  probe
  misc_feature (1)..(25): SEQ ID NO: 907; WAN024AXZ_at; Start 306; Stop 330
tgcgctaatcttaggcgacaatatc

SEQ ID NO: 69325 - DNA, 25 bp, Artificial
  probe
  misc_feature (1)..(25): SEQ ID NO: 907; WAN024AXZ_at; Start 300; Stop 324
tagtgttgcgctaatcttaggcgac

SEQ ID NO: 69326 - DNA, 25 bp, Artificial
  probe
  misc_feature (1)..(25): SEQ ID NO: 907; WAN024AXZ_at; Start 424; Stop 448
cgctttggtgtagttgagtttgaca

SEQ ID NO: 69327 - DNA, 25 bp, Artificial
  probe
  misc_feature (1)..(25): SEQ ID NO: 907; WAN024AXZ_at; Start 33; Stop 57
aactcgcttgtatcctttgactcgc

SEQ ID NO: 69328 - DNA, 25 bp, Artificial
  probe
  misc_feature (1)..(25): SEQ ID NO: 907; WAN024AXZ_at; Start 334; Stop 358
catgggcctggtctttctaagatgc

SEQ ID NO: 69329 - DNA, 25 bp, Artificial
  probe
  misc_feature (1)..(25): SEQ ID NO: 907; WAN024AXZ_at; Start 443; Stop 467
ttgacaaggatatgaacgctatttc

SEQ ID NO: 69330 - DNA, 25 bp, Artificial
  probe
  misc_feature (1)..(25): SEQ ID NO: 907; WAN024AXZ_at; Start 20; Stop 44
caggtggttcgggaactcgcttgta

SEQ ID NO: 69331 - DNA, 25 bp, Artificial
  probe
  misc_feature (1)..(25): SEQ ID NO: 907; WAN024AXZ_at; Start 186; Stop 210
agagcttcttcaagatggttatgag

SEQ ID NO: 69332 - DNA, 25 bp, Artificial
  probe
  misc_feature (1)..(25): SEQ ID NO: 907; WAN024AXZ_at; Start 337; Stop 361
gggcctggtctttctaagatgctac

SEQ ID NO: 69333 - DNA, 25 bp, Artificial
  probe
  misc_feature (1)..(25): SEQ ID NO: 907; WAN024AXZ_at; Start 447; Stop 471
caaggatatgaacgctatttctatc

SEQ ID NO: 69334 - DNA, 25 bp, Artificial
  probe
  misc_feature (1)..(25): SEQ ID NO: 907; WAN024AXZ_at; Start 351; Stop 375
taagatgctacaaaaggtatcaagt

SEQ ID NO: 69335 - DNA, 25 bp, Artificial
  probe
  misc_feature (1)..(25): SEQ ID NO: 907; WAN024AXZ_at; Start 348; Stop 372
ttctaagatgctacaaaaggtatca

SEQ ID NO: 69336 - DNA, 25 bp, Artificial
  probe
  misc_feature (1)..(25): SEQ ID NO: 907; WAN024AXZ_at; Start 189; Stop 213
gcttcttcaagatggttatgagttt

SEQ ID NO: 69337 - DNA, 25 bp, Artificial
  probe
  misc_feature (1)..(25): SEQ ID NO: 908; WAN024AY2_at; Start 489; Stop 513
gccgtgctctaactatgcagtgaca

SEQ ID NO: 69338 - DNA, 25 bp, Artificial
  probe
  misc_feature (1)..(25): SEQ ID NO: 908; WAN024AY2_at; Start 35; Stop 59
cacgtttatatcctttgactcgagc

SEQ ID NO: 69339 - DNA, 25 bp, Artificial
  probe
  misc_feature (1)..(25): SEQ ID NO: 908; WAN024AY2_at; Start 476; Stop 500
aaaaaccagaacagccgtgctctaa

SEQ ID NO: 69340 - DNA, 25 bp, Artificial
  probe
  misc_feature (1)..(25): SEQ ID NO: 908; WAN024AY2_at; Start 472; Stop 496
gaagaaaaaccagaacagccgtgct

SEQ ID NO: 69341 - DNA, 25 bp, Artificial
  probe
  misc_feature (1)..(25): SEQ ID NO: 908; WAN024AY2_at; Start 475; Stop 499
gaaaaaccagaacagccgtgctcta

SEQ ID NO: 69342 - DNA, 25 bp, Artificial
  probe
  misc_feature (1)..(25): SEQ ID NO: 908; WAN024AY2_at; Start 474; Stop 498
agaaaaaccagaacagccgtgctct

SEQ ID NO: 69343 - DNA, 25 bp, Artificial
  probe
  misc_feature (1)..(25): SEQ ID NO: 908; WAN024AY2_at; Start 465; Stop 489
ctccatcgaagaaaaaccagaacag

SEQ ID NO: 69344 - DNA, 25 bp, Artificial
  probe
  misc_feature (1)..(25): SEQ ID NO: 908; WAN024AY2_at; Start 483; Stop 507
agaacagccgtgctctaactatgca

SEQ ID NO: 69345 - DNA, 25 bp, Artificial
  probe
  misc_feature (1)..(25): SEQ ID NO: 908; WAN024AY2_at; Start 487; Stop 511
cagccgtgctctaactatgcagtga

SEQ ID NO: 69346 - DNA, 25 bp, Artificial
  probe
  misc_feature (1)..(25): SEQ ID NO: 908; WAN024AY2_at; Start 485; Stop 509
aacagccgtgctctaactatgcagt

SEQ ID NO: 69347 - DNA, 25 bp, Artificial
  probe
  misc_feature (1)..(25): SEQ ID NO: 908; WAN024AY2_at; Start 471; Stop 495
cgaagaaaaaccagaacagccgtgc

SEQ ID NO: 69348 - DNA, 25 bp, Artificial
  probe
  misc_feature (1)..(25): SEQ ID NO: 908; WAN024AY2_at; Start 480; Stop 504
accagaacagccgtgctctaactat

SEQ ID NO: 69349 - DNA, 25 bp, Artificial
  probe
  misc_feature (1)..(25): SEQ ID NO: 908; WAN024AY2_at; Start 31; Stop 55
gggacacgtttatatcctttgactc

SEQ ID NO: 69350 - DNA, 25 bp, Artificial
  probe
  misc_feature (1)..(25): SEQ ID NO: 908; WAN024AY2_at; Start 478; Stop 502
aaaccagaacagccgtgctctaact

SEQ ID NO: 69351 - DNA, 25 bp, Artificial
  probe
  misc_feature (1)..(25): SEQ ID NO: 908; WAN024AY2_at; Start 470; Stop 494
tcgaagaaaaaccagaacagccgtg

SEQ ID NO: 69352 - DNA, 25 bp, Artificial
  probe
  misc_feature (1)..(25): SEQ ID NO: 908; WAN024AY2_at; Start 469; Stop 493
atcgaagaaaaaccagaacagccgt

SEQ ID NO: 69353 - DNA, 25 bp, Artificial
  probe
  misc_feature (1)..(25): SEQ ID NO: 908; WAN024AY2_at; Start 36; Stop 60
acgtttatatcctttgactcgagct

SEQ ID NO: 69354 - DNA, 25 bp, Artificial
  probe
  misc_feature (1)..(25): SEQ ID NO: 908; WAN024AY2_at; Start 486; Stop 510
acagccgtgctctaactatgcagtg

SEQ ID NO: 69355 - DNA, 25 bp, Artificial
  probe
  misc_feature (1)..(25): SEQ ID NO: 908; WAN024AY2_at; Start 466; Stop 490
tccatcgaagaaaaaccagaacagc

SEQ ID NO: 69356 - DNA, 25 bp, Artificial
  probe
  misc_feature (1)..(25): SEQ ID NO: 908; WAN024AY2_at; Start 33; Stop 57
gacacgtttatatcctttgactcga

SEQ ID NO: 69357 - DNA, 25 bp, Artificial
  probe
  misc_feature (1)..(25): SEQ ID NO: 908; WAN024AY2_at; Start 37; Stop 61
cgtttatatcctttgactcgagctg

SEQ ID NO: 69358 - DNA, 25 bp, Artificial
  probe
  misc_feature (1)..(25): SEQ ID NO: 908; WAN024AY2_at; Start 481; Stop 505
ccagaacagccgtgctctaactatg

SEQ ID NO: 69359 - DNA, 25 bp, Artificial
  probe
  misc_feature (1)..(25): SEQ ID NO: 908; WAN024AY2_at; Start 38; Stop 62
gtttatatcctttgactcgagctgc

SEQ ID NO: 69360 - DNA, 25 bp, Artificial
  probe
  misc_feature (1)..(25): SEQ ID NO: 908; WAN024AY2_at; Start 488; Stop 512
agccgtgctctaactatgcagtgac

SEQ ID NO: 69361 - DNA, 25 bp, Artificial
  probe
  misc_feature (1)..(25): SEQ ID NO: 908; WAN024AY2_at; Start 467; Stop 491
ccatcgaagaaaaaccagaacagcc

SEQ ID NO: 69362 - DNA, 25 bp, Artificial
  probe
  misc_feature (1)..(25): SEQ ID NO: 908; WAN024AY2_at; Start 484; Stop 508
gaacagccgtgctctaactatgcag

SEQ ID NO: 69363 - DNA, 25 bp, Artificial
  probe
  misc_feature (1)..(25): SEQ ID NO: 908; WAN024AY2_at; Start 32; Stop 56
ggacacgtttatatcctttgactcg

SEQ ID NO: 69364 - DNA, 25 bp, Artificial
  probe
  misc_feature (1)..(25): SEQ ID NO: 908; WAN024AY2_at; Start 39; Stop 63
tttatatcctttgactcgagctgca

SEQ ID NO: 69365 - DNA, 25 bp, Artificial
  probe
  misc_feature (1)..(25): SEQ ID NO: 908; WAN024AY2_at; Start 473; Stop 497
aagaaaaaccagaacagccgtgctc

SEQ ID NO: 69366 - DNA, 25 bp, Artificial
  probe
  misc_feature (1)..(25): SEQ ID NO: 908; WAN024AY2_at; Start 477; Stop 501
aaaaccagaacagccgtgctctaac

SEQ ID NO: 69367 - DNA, 25 bp, Artificial
  probe
  misc_feature (1)..(25): SEQ ID NO: 908; WAN024AY2_at; Start 468; Stop 492
catcgaagaaaaaccagaacagccg

SEQ ID NO: 69368 - DNA, 25 bp, Artificial
  probe
  misc_feature (1)..(25): SEQ ID NO: 908; WAN024AY2_at; Start 34; Stop 58
acacgtttatatcctttgactcgag

SEQ ID NO: 69369 - DNA, 25 bp, Artificial
  probe
  misc_feature (1)..(25): SEQ ID NO: 908; WAN024AY2_at; Start 482; Stop 506
cagaacagccgtgctctaactatgc

SEQ ID NO: 69370 - DNA, 25 bp, Artificial
  probe
  misc_feature (1)..(25): SEQ ID NO: 908; WAN024AY2_at; Start 479; Stop 503
aaccagaacagccgtgctctaacta

SEQ ID NO: 69371 - DNA, 25 bp, Artificial
  probe
  misc_feature (1)..(25): SEQ ID NO: 913; WAN024AY3_at; Start 610; Stop 634
tacttggatcgtggagacttatccg

SEQ ID NO: 69372 - DNA, 25 bp, Artificial
  probe
  misc_feature (1)..(25): SEQ ID NO: 913; WAN024AY3_at; Start 567; Stop 591
aagtcctcgcggagaattagaaatc

SEQ ID NO: 69373 - DNA, 25 bp, Artificial
  probe
  misc_feature (1)..(25): SEQ ID NO: 913; WAN024AY3_at; Start 562; Stop 586
aaaccaagtcctcgcggagaattag

SEQ ID NO: 69374 - DNA, 25 bp, Artificial
  probe
  misc_feature (1)..(25): SEQ ID NO: 913; WAN024AY3_at; Start 560; Stop 584
tcaaaccaagtcctcgcggagaatt

SEQ ID NO: 69375 - DNA, 25 bp, Artificial
  probe
  misc_feature (1)..(25): SEQ ID NO: 913; WAN024AY3_at; Start 572; Stop 596
ctcgcggagaattagaaatcacaga

SEQ ID NO: 69376 - DNA, 25 bp, Artificial
  probe
  misc_feature (1)..(25): SEQ ID NO: 913; WAN024AY3_at; Start 611; Stop 635
acttggatcgtggagacttatccgt

SEQ ID NO: 69377 - DNA, 25 bp, Artificial
  probe
  misc_feature (1)..(25): SEQ ID NO: 913; WAN024AY3_at; Start 557; Stop 581
gtatcaaaccaagtcctcgcggaga

SEQ ID NO: 69378 - DNA, 25 bp, Artificial
  probe
  misc_feature (1)..(25): SEQ ID NO: 913; WAN024AY3_at; Start 570; Stop 594
tcctcgcggagaattagaaatcaca

SEQ ID NO: 69379 - DNA, 25 bp, Artificial
  probe
  misc_feature (1)..(25): SEQ ID NO: 913; WAN024AY3_at; Start 556; Stop 580
agtatcaaaccaagtcctcgcggag

SEQ ID NO: 69380 - DNA, 25 bp, Artificial
  probe
  misc_feature (1)..(25): SEQ ID NO: 913; WAN024AY3_at; Start 561; Stop 585
caaaccaagtcctcgcggagaatta

SEQ ID NO: 69381 - DNA, 25 bp, Artificial
  probe
  misc_feature (1)..(25): SEQ ID NO: 913; WAN024AY3_at; Start 612; Stop 636
cttggatcgtggagacttatccgtt

SEQ ID NO: 69382 - DNA, 25 bp, Artificial
  probe
  misc_feature (1)..(25): SEQ ID NO: 913; WAN024AY3_at; Start 609; Stop 633
ttacttggatcgtggagacttatcc

SEQ ID NO: 69383 - DNA, 25 bp, Artificial
  probe
  misc_feature (1)..(25): SEQ ID NO: 913; WAN024AY3_at; Start 565; Stop 589
ccaagtcctcgcggagaattagaaa

SEQ ID NO: 69384 - DNA, 25 bp, Artificial
  probe
  misc_feature (1)..(25): SEQ ID NO: 913; WAN024AY3_at; Start 564; Stop 588
accaagtcctcgcggagaattagaa

SEQ ID NO: 69385 - DNA, 25 bp, Artificial
  probe
  misc_feature (1)..(25): SEQ ID NO: 913; WAN024AY3_at; Start 571; Stop 595
cctcgcggagaattagaaatcacag

SEQ ID NO: 69386 - DNA, 25 bp, Artificial
  probe
  misc_feature (1)..(25): SEQ ID NO: 913; WAN024AY3_at; Start 569; Stop 593
gtcctcgcggagaattagaaatcac

SEQ ID NO: 69387 - DNA, 25 bp, Artificial
  probe
  misc_feature (1)..(25): SEQ ID NO: 913; WAN024AY3_at; Start 558; Stop 582
tatcaaaccaagtcctcgcggagaa

SEQ ID NO: 69388 - DNA, 25 bp, Artificial
  probe
  misc_feature (1)..(25): SEQ ID NO: 913; WAN024AY3_at; Start 573; Stop 597
tcgcggagaattagaaatcacagat

SEQ ID NO: 69389 - DNA, 25 bp, Artificial
  probe
  misc_feature (1)..(25): SEQ ID NO: 913; WAN024AY3_at; Start 613; Stop 637
ttggatcgtggagacttatccgttg

SEQ ID NO: 69390 - DNA, 25 bp, Artificial
  probe
  misc_feature (1)..(25): SEQ ID NO: 913; WAN024AY3_at; Start 559; Stop 583
atcaaaccaagtcctcgcggagaat
